(19) United States
(12) Patent Application Publication
(10) Pub. No.: US 2013/0017253 A1
(43) Pub. Date: Jan. 17, 2013

(54) Inducing Cellular Immune Responses to Human Papillomavirus Using Peptide and Nucleic Acid Compositions

(71) Applicants: Alessandro SETTE, La Jolla, CA (US); John Sidney, San Diego, CA (US); Scott Southwood, Santee, CA (US); Robert Chestnut, Cardiff-by-the-Sea, CA (US); Esteban Celis, Rochester, MN (US); Howard M. Grey, La Jolla, CA (US)

(72) Inventors: Alessandro SETTE, La Jolla, CA (US); John Sidney, San Diego, CA (US); Scott Southwood, Santee, CA (US); Robert Chestnut, Cardiff-by-the-Sea, CA (US); Esteban Celis, Rochester, MN (US); Howard M. Grey, La Jolla, CA (US)

(21) Appl. No.: 13/618,996

(22) Filed: Sep. 14, 2012

Related U.S. Application Data
(63) Continuation of application No. 12/292,281, filed on Nov. 14, 2008.
Application No. 12/292,281 is a division of application No. 10/149,136, filed on Oct. 29, 2002, now Pat. No. 7,572,882.
Application No. 10/149,136 is a continuation-in-part of application No. 09/641,528, filed on Aug. 15, 2000, now Pat. No. 7,026,443.
(60) Provisional application No. 60/172,705, filed on Dec. 10, 1999.

(51) Int. Cl. C07K 7/06; C07K 14/79; C07K 14/025; C12N 5/0783; C12N 15/37; A61P 37/04; C12N 5/078; A61K 9/127; A61K 39/12

(52) U.S. Cl. 424/450; 530/328; 530/327; 530/394; 530/324; 424/186.1; 536/23.72; 435/325

(57) ABSTRACT

This invention uses our knowledge of the mechanisms by which antigen is recognized by T cells to identify and prepare human papillomavirus (HPV) epitopes, and to develop epitope-based vaccines directed towards HPV. More specifically, this application communicates our discovery of pharmaceutical compositions and methods of use in the prevention and treatment of HPV infection.

### CROSS REFERENCE TO RELATED APPLICATIONS

[0001] This application is a divisional of U.S. application Ser. No. 10/149,136, which is the national stage application of Intl. Appl. No. PCT/US00/33549, filed on Dec. 11, 2000, which published under PCT Article 21(2) in English; said Intl. Appl. No. PCT/US00/33549 claims the benefit of U.S. Prov. Appl. No. 60/172,705, filed on Dec. 10, 1999 and is a continuation-in-part of U.S. application Ser. No. 09/641,528, filed on Aug. 15, 2000, now U.S. Pat. No. 7,026,443; all of the above applications are incorporated herein by reference in their entireties.

### REFERENCE TO A SEQUENCE LISTING ON COMPACT DISC

[0002] The Sequence Listing written in file “sequence listing ascii.txt,” 184 kilobytes, created on Nov. 14, 2008, on two identical copies of compact discs for the application filed herewith, is herein incorporated by reference.

### BACKGROUND OF THE INVENTION

[0003] Human papillomavirus (HPV) is a member of the papillomaviridae, a group of small DNA viruses that infect a variety of higher vertebrates. More than 80 types of HPVs have been identified. Of these, more than 30 can infect the genital tract. Some types, generally types 6 and 11, may cause genital warts, which are typically benign and rarely develop into cancer. Other strains of HPV, “cancer-associated”, or “high-risk” types, can more frequently lead to the development of cancer. The primary mode of transmission of these strains of HPV is through sexual contact.

[0004] The main manifestations of the genital warts are cauliflower-like condylomata acuminate that usually involve moist surfaces; keratotic and smooth papular warts, usually on dry surfaces; and subclinical “flat” warts, which are found on any mucosal or cutaneous surface (Handsfield, H., Am. J. Med. 102(5A):16-20, 1997). These warts are typically benign but are a source of inter-individual spread of the virus (Ponten, J. & Guo, Z., Cancer Surv. 32:201-29, 1998). At least three HPV strains associated with genital warts have been identified: type 6a (see, e.g., Hofmann, K. J., et al., Virology 209(2):506-518, 1995), type 6b (see, e.g., Hofmann et al., supra) and type 11 (see, e.g., Dartmann, K. et al., Virology 151(1):124-130, 1986).

[0005] Cancer-associated HPVs have been linked with cancer in both men and women; they include, but are not limited to, HPV-16, HPV-18, HPV-31, HPV-45, HPV-33 and HPV-56. Other HPV strains, including types 6 and 11 as well as others, e.g., HPV-5 and HPV-8, are less frequently associated with cancer. The high risk types are typically associated with the development of cervical carcinoma and premalignant lesions of the cervix in women, but are also associated with similar malignant and premalignant lesions at other anatomic sites within the lower genital or anogenital tract. These lesions include neoplasia of the vagina, vulva, perineum, the penis, and the anus. HPV infection has also been associated with respiratory tract papillomas, and rarely, cancer, as well as abnormal growth or neoplasia in other epithelial tissues. See, e.g. VIROLOGY, 2^{ND} ED, Fields et al., Eds. Raven Press, New York, 1990, Chapters 58 and 59, for a review of HPV association with cancer.

[0006] The HPV genome consists of three functional regions, the early region, the late region, and the “long control region”. The early region gene products control viral replication, transcription and cellular transformation. They include the HPV E1 and E2 proteins, which play a role in HPV DNA replication, and the E6 and E7 oncoproteins, which are involved in the control of cellular proliferation. The late region include the genes that encode the structural proteins L1 and L2, which are the major and minor capsid proteins, respectively. The “long control region” contains such sequences as enhancer and promoter regulatory regions.

[0007] HPV expresses different proteins at different stages of the infection, for example early, as well as late, proteins. Even in latent infections, however, early proteins are often expressed and are therefore useful targets for vaccine-based therapies. For example, high-grade dysplasia and cervical squamous cell carcinoma continue to express E6 and E7, which therefore can be targeted to treat disease at both early and late stages of infection.

[0008] Treatment for HPV infection is often unsatisfactory because of persistence of virus after treatment and recurrence of clinically apparent disease is common. The treatment may require frequent visits to clinics and is not directed at elimination of the virus but at clearing warts. Because of persistence of virus after treatment, recurrence of clinically apparent disease is common.

[0009] Thus, a need exists for an efficacious vaccine to both prevent and treat HPV infection and to treat cancer that is associated with HPV infection. Effective HPV vaccines would be a significant advance in the control of sexually transmissable infections and could also protect against clinical disease, particularly cancers such as cervical cancer. (see, e.g., Rowen, P. & Lacey, C., Dermatologic Clinics 16(4):835-838, 1998).

[0010] Virus-specific, human leukocyte antigen (HLA) class I-restricted cytotoxic T lymphocytes (CTL) are known to play a major role in the prevention and clearance of virus infections in vivo (Oldstone et al., Nature 321:239, 1989; Jamieson et al., J. Virol. 61:3930, 1987; Yap et al, Nature 273:238, 1978; Lukacher et al., J. Exp. Med. 160:814, 1994; McMichael et al., N. Engl. J. Med. 309:13, 1983; Sethi et al., J. Gen. Virol. 64:443, 1983; Watari et al., J. Exp. Med. 165:459, 1987; Yasukawa et al., J. Immunol. 143:2051, 1989; Tigges et al., J. Virol. 66:1622, 1993; Reddenhase et al., J. Virol. 55:263, 1985; Quinnan et al., N Engl. J. Med. 307:6, 1982). HLA class I molecules are expressed on the surface of almost all nucleated cells. Following intracellular processing of antigens, epitopes from the antigens are presented as a complex with the HLA class I molecules on the surface of such cells. CTL recognize the peptide-HLA class I complex, which then results in the destruction of the cell bearing the HLA-peptide complex directly by the CTL and/or via the activation of non-destructive mechanisms e.g., the production of interferon, that inhibit viral replication.

[0011] Virus-specific T helper lymphocytes are also known to be critical for maintaining effective immunity in chronic viral infections. Historically, HTL responses were viewed as primarily supporting the expansion of specific CTL and B cell populations; however, more recent data indicate that HTL may directly contribute to the control of virus replication. For example, a decline in CD4⁺ T cells and a corresponding loss in HTL function characterize infection with HIV (Lane et al., New Engl. J. Med. 313:79, 1985). Furthermore, studies in HIV infected patients have also shown that there is an inverse relationship between virus-specific HTL responses and viral load, suggesting that HTL plays a role in viremia (see, e.g., Rosenberg et al., Science 278:1447, 1997).

[0012] The development of vaccines with prophylactic and therapeutic efficacy against HPV is ongoing. Early vaccine development was hampered by the inability to culture HPV. With the introduction of cloning techniques and protein expression, however, some attempts have been made to stimulate humoral and CTL response to HPV (See, e.g., Rowen, P. & Lacey, C., Dermatologic Clinics 16(4):835-838 (1998)). Studies to date, however, have been inconclusive.

[0013] Activation of T helper cells and cytotoxic lymphocytes (CTLs) in the development of vaccines has also been analyzed. Lehtinen, M., et al. for instance, has shown that some peptides from the E2 protein of HPV type 16 activate T helper cells and CTLs (Biochem. Biophys. Res. Commun. 209(2):541-6 (1995). Similarly, Tarpey et al, has shown that some peptides from HPV type 11 E7 protein can stimulate human HPV-specific CTLs in vitro (Immunology 81:222-227 (1994)) and Borysiewicz et al. have reported a recombinant vaccinia virus expressing HPV 16 and HPV 17 E6 and E7 that stimulated CTL responses in at least one patient (Lancet 347:1347-1357, 1996).

[0014] The epitope approach, as we have described, allows the incorporation of various antibody, CTL and HTL epitopes, from various proteins, in a single vaccine composition. Such a composition may simultaneously target multiple dominant and subdominant epitopes and thereby be used to achieve effective immunization in a diverse population.

[0015] The information provided in this section is intended to disclose the presently understood state of the art as of the filing date of the present application. Information is included in this section which was generated subsequent to the priority date of this application. Accordingly, information in this section is not intended, in any way, to delineate the priority date for the invention.

### SUMMARY OF THE INVENTION

[0016] This invention applies our knowledge of the mechanisms by which antigen is recognized by T cells, for example, to develop epitope-based vaccines directed towards HPV. More specifically, this application communicates our discovery of specific epitope pharmaceutical compositions and methods of use in the prevention and treatment of HPV infection.

[0017] Upon development of appropriate technology, the use of epitope-based vaccines has several advantages over current vaccines, particularly when compared to the use of whole antigens in vaccine compositions. There is evidence that the immune response to whole antigens is directed largely toward variable regions of the antigen, allowing for immune escape due to mutations. The epitopes for inclusion in an epitope-based vaccine may be selected from conserved regions of viral or tumor-associated antigens, which thereby reduces the likelihood of escape mutants. Furthermore, immunosuppressive epitopes that may be present in whole antigens can be avoided with the use of epitope-based vaccines.

[0018] An additional advantage of an epitope-based vaccine approach is the ability to combine selected epitopes (CTL and HTL), and further, to modify the composition of the epitopes, achieving, for example, enhanced immunogenicity. Accordingly, the immune response can be modulated, as appropriate, for the target disease. Similar engineering of the response is not possible with traditional approaches.

[0019] Another major benefit of epitope-based immune-stimulating vaccines is their safety. The possible pathological side effects caused by infectious agents or whole protein antigens, which might have their own intrinsic biological activity, is eliminated.

[0020] An epitope-based vaccine also provides the ability to direct and focus an immune response to multiple selected antigens from the same pathogen. Thus, patient-by-patient variability in the immune response to a particular pathogen may be alleviated by inclusion of epitopes from multiple antigens from the pathogen in a vaccine composition. In the case of HPV, epitopes derived from multiple strains may also be included. A “pathogen” may be an infectious agent or a tumor associated molecule.

[0021] One of the most formidable obstacles to the development of broadly efficacious epitope-based immunotherapeutics, however, has been the extreme polymorphism of HLA molecules. To date, effective non-genetically biased coverage of a population has been a task of considerable complexity; such coverage has required that epitopes be used that are specific for HLA molecules corresponding to each individual HLA allele. Impractically large numbers of epitopes would therefore have to be used in order to cover ethnically diverse populations. Thus, there has existed a need for peptide epitopes that are bound by multiple HLA antigen molecules for use in epitope-based vaccines. The greater the number of HLA antigen molecules hound, the greater the breadth of population coverage by the vaccine.

[0022] Furthermore, as described herein in greater detail, a need has existed to modulate peptide binding properties, e.g., so that peptides that are able to bind to multiple HLA antigens do so with an affinity that will stimulate an immune response. Identification of epitopes restricted by more than one HLA allele at an affinity that correlates with immunogenicity is important to provide thorough population coverage, and to allow the elicitation of responses of sufficient vigor to prevent or clear an infection in a diverse segment of the population. Such a response can also target a broad array of epitopes. The technology disclosed herein provides for such favored immune responses.

[0023] In a preferred embodiment, epitopes for inclusion in vaccine compositions of the invention are selected by a process whereby protein sequences of known antigens are evaluated for the presence of motif or supermotif-bearing epitopes. Peptides corresponding to a motif- or supermotif-bearing epitope are then synthesized and tested for the ability to bind to the HLA molecule that recognizes the selected motif. Those peptides that bind at an intermediate or high affinity i.e., an IC₅₀ (or a K_{D} value) of 500 nM or less for HLA class I molecules or an IC₅₀ of 1000 nM or less for HLA class II molecules, are further evaluated for their ability to induce a CTL or HTL response. Immunogenic peptide epitopes are selected for inclusion in vaccine compositions.

[0024] Supermotif-bearing peptides may additionally be tested for the ability to bind to multiple alleles within the HLA supertype family. Moreover, peptide epitopes may be analogued to modify binding affinity and/or the ability to bind to multiple alleles within an HLA supertype.

[0025] The invention also includes embodiments comprising methods for monitoring or evaluating an immune response to HPV in a patient having a known HLA-type. Such methods comprise incubating a T lymphocyte sample from the patient with a peptide composition comprising an HPV epitope that has an amino acid sequence described in Tables VII to Table XX which binds the product of at least one HLA allele present in the patient, and detecting for the presence of a T lymphocyte that binds to the peptide. A CTL peptide epitope may, for example, be used as a component of a tetrameric complex for this type of analysis.

[0026] An alternative modality for defining the peptide epitopes in accordance with the invention is to recite the physical properties, such as length; primary structure; or charge, which are correlated with binding to a particular allele-specific HLA molecule or group of allele-specific HLA molecules. A further modality for defining peptide epitopes is to recite the physical properties of an HLA binding pocket, or properties shared by several allele-specific HLA binding pockets (e.g. pocket configuration and charge distribution) and reciting that the peptide epitope fits and binds to the pocket or pockets.

[0027] As will be apparent from the discussion below, other methods and embodiments are also contemplated. Further, novel synthetic peptides produced by any of the methods described herein are also part of the invention.

### DETAILED DESCRIPTION OF THE INVENTION

[0028] The peptides and corresponding nucleic acid compositions of the present invention are useful for stimulating an immune response to HPV by stimulating the production of CTL or HTL responses. The peptide epitopes, which are derived directly or indirectly from native HPV protein amino acid sequences, are able to bind to HLA molecules and stimulate an immune response to HPV. The complete sequence of the HPV proteins to be analyzed can be obtained from Genbank. Epitopes and analogs thereof can also be readily determined from sequence information that may subsequently be discovered for heretofore unknown variants of HPV, as will be clear from the disclosure provided below.

[0029] The epitopes of the invention have been identified in a number of ways, as will be discussed below. Also discussed in greater detail is that analog peptides have been derived and the binding activity for HLA molecules modulated by modifying specific amino acid residues to create peptide analogs exhibiting altered immunogenicity. Further, the present invention provides compositions and combinations of compositions that enable epitope-based vaccines that are capable of interacting with HLA molecules encoded by various genetic alleles to provide broader population coverage than prior vaccines.

### DEFINITIONS

[0030] The invention can be better understood with reference to the following definitions, which are listed alphabetically:

[0031] A “computer” or “computer system” generally includes: a processor; at least one information storage/retrieval apparatus such as, for example, a hard drive, a disk drive or a tape drive; at least one input apparatus such as, for example, a keyboard, a mouse, a touch screen, or a microphone; and display structure. Additionally, the computer may include a communication channel in communication with a network. Such a computer may include more or less than what is listed above.

[0032] A “construct” as used herein generally denotes a composition that does not occur in nature. A construct can be produced by synthetic technologies, e.g., recombinant DNA preparation and expression or chemical synthetic techniques for nucleic or amino acids. A construct can also be produced by the addition or affiliation of one material with another such that the result is not found in nature in that form.

[0033] “Cross-reactive binding” indicates that a peptide is bound by more than one HLA molecule; a synonym is degenerate binding. A “cryptic epitope” elicits a response by immunization with an isolated peptide, but the response is not cross-reactive in vitro when intact whole protein which comprises the epitope is used as an antigen.

[0034] A “dominant epitope” is an epitope that induces an immune response upon immunization with a whole native antigen (see, e.g., Sercarz, et al., Annu. Rev. Immunol. 11:729-766, 1993). Such a response is cross-reactive in vitro with an isolated peptide epitope.

[0035] With regard to a particular amino acid sequence, an “epitope” is a set of amino acid residues which is involved in recognition by a particular immunoglobulin, or in the context of T cells, those residues necessary for recognition by T cell receptor proteins and/or Major Histocompatibility Complex (MHC) receptors. In an immune system setting, in vivo or in vitro, an epitope is the collective features of a molecule, such as primary, secondary and tertiary peptide structure, and charge, that together form a site recognized by an immunoglobulin, T cell receptor or HLA molecule. Throughout this disclosure epitope and peptide are often used interchangeably. It is to be appreciated, however, that isolated or purified protein or peptide molecules larger than and comprising an epitope of the invention are still within the bounds of the invention.

[0036] “Human Leukocyte Antigen” or “HLA” is a human class I or class II Major Histocompatibility Complex (MI-IC) protein (see, e.g., Stites, et al., IMMUNOLOGY, 8^{TH} ED., Lange Publishing, Los Altos, Calif. (1994).

[0037] An “HLA supertype or family”, as used herein, describes sets of HLA molecules grouped on the basis of shared peptide-binding specificities. HLA class I molecules that share somewhat similar binding affinity for peptides bearing certain amino acid motifs are grouped into HLA supertypes. The terms HLA superfamily, HLA supertype family, HLA family, and HLA xx-like molecules (where xx denotes a particular HLA type), are synonyms.

[0038] Throughout this disclosure, results are expressed in terms of “IC₅₀'s.” IC₅₀ is the concentration of peptide in a binding assay at which 50% inhibition of binding of a reference peptide is observed. Given the conditions in which the assays are run (i.e., limiting HLA proteins and labeled peptide concentrations), these values approximate K_{D} values. Assays for determining binding are described in detail, e.g., in PCT publications WO 94/20127 and WO 94/03205. It should be noted that IC₅₀ values can change, often dramatically, if the assay conditions are varied, and depending on the particular reagents used (e.g., HLA preparation, etc.). For example, excessive concentrations of HLA molecules will increase the apparent measured IC₅₀ of a given ligand.

[0039] Alternatively, binding is expressed relative to a reference peptide. Although as a particular assay becomes more, or less, sensitive, the IC₅₀'s of the peptides tested may change somewhat, the binding relative to the reference peptide will not significantly change. For example, in an assay run under conditions such that the IC₅₀ of the reference peptide increases 10-fold, the IC₅₀ values of the test peptides will also shift approximately 10-fold. Therefore, to avoid ambiguities, the assessment of whether a peptide is a good, intermediate, weak, or negative binder is generally based on its IC₅₀, relative to the IC₅₀ of a standard peptide.

[0040] Binding may also be determined using other assay systems including those using: live cells (e.g., Ceppellini et al., Nature 339:392, 1989; Christnick et al., Nature 352:67, 1991; Busch et al., Int. Immunol. 2:443, 19990; Hill et al., J. Immunol. 147:189, 1991; del Guercio et al., J. Immunol. 154:685, 1995), cell free systems using detergent lysates (e.g., Cerundolo et al., J. Immunol. 21:2069, 1991), immobilized purified MHC (e.g., Hill et al., J. Immunol. 152, 2890, 1994; Marshall et al., J. Immunol. 152:4946, 1994), ELISA systems (e.g., Reay et al., EMBO J. 11:2829, 1992), surface plasmoin resonance (e.g., Khilko et al., J. Biol. Chem. 268:15425, 1993); high flux soluble phase assays Hammer et al., J. Exp. Med. 180:2353, 1994), and measurement of class I MHC stabilization or assembly (e.g., Ljunggren et al., Nature 346:476, 1990; Schumacher et al., Cell 62:563, 1990; Townsend et al., Cell 62:285, 1990; Parker et al., J. Immunol. 149:1896, 1992).

[0041] As used herein, “high affinity” with respect to HLA class I molecules is defined as binding with an IC₅₀, or K_{D} value, of 50 nM or less; “intermediate affinity” is binding with an IC₅₀, or K_{D} value of between about 50 and about 500 nM. “High affinity” with respect to binding to HLA class II molecules is defined as binding with an IC₅₀ or K_{D} value of 100 nM or less; “intermediate affinity” is binding with an IC₅₀ or K_{D} value of between about 100 and about 1000 nM.

[0042] The terms “identical” or percent “identity,” in the context of two or more peptide sequences, refer to two or more sequences or subsequences that are the same or have a specified percentage of amino acid residues that are the same, when compared and aligned for maximum correspondence over a comparison window, as measured using a sequence comparison algorithm or by manual alignment and visual inspection.

[0043] An “immunogenic peptide” or “peptide epitope” is a peptide that comprises an allele-specific motif or supermotif such that the peptide will bind an HLA molecule and induce a CTL and/or HTL response. Thus, immunogenic peptides of the invention are capable of binding to an appropriate HLA molecule and thereafter inducing a cytotoxic T cell response, or a helper T cell response, to the antigen from which the immunogenic peptide is derived.

[0044] The phrases “isolated” or “biologically pure” refer to material which is substantially or essentially free from components which normally accompany the material as it is found in its native state. Thus, isolated peptides in accordance with the invention preferably do not contain materials normally associated with the peptides in their in situ environment.

[0045] “Link” or “join” refers to any method known in the art for functionally connecting peptides, including, without limitation, recombinant fusion, covalent bonding, disulfide bonding, ionic bonding, hydrogen bonding, and electrostatic bonding.

[0046] “Major Histocompatibility Complex” or “MHC” is a cluster of genes that plays a role in control of the cellular interactions responsible for physiologic immune responses. In humans, the MHC complex is also known as the HLA complex. For a detailed description of the MHC and HLA complexes, see, Paul, FUNDAMENTAL IMMUNOLOGY, 3^{RD} ED., Raven Press, New York, 1993.

[0047] The term “motif” refers to the pattern of residues in a peptide of defined length, usually a peptide of from about 8 to about 13 amino acids for a class I HLA motif and from about 6 to about 25 amino acids for a class II HLA motif, which is recognized by a particular HLA molecule. Peptide motifs are typically different for each protein encoded by each human HLA allele and differ in the pattern of the primary and secondary anchor residues.

[0048] A “negative binding residue” or “deleterious residue” is an amino acid which, if present at certain positions (typically not primary anchor positions) in a peptide epitope, results in decreased binding affinity of the peptide for the peptide's corresponding HLA molecule.

[0049] A “non-native” sequence or “construct” refers to a sequence that is not found in nature, i.e., is “non-naturally occurring”. Such sequences include, e.g., peptides that are lipidated or otherwise modified, and polyepitopic compositions that contain epitopes that are not contiguous in a native protein sequence.

[0050] The term “peptide” is used interchangeably with “oligopeptide” in the present specification to designate a series of residues, typically L-amino acids, connected one to the other, typically by peptide bonds between the α-amino and carboxyl groups of adjacent amino acids. The preferred CTL-inducing peptides of the invention are 13 residues or less in length and usually consist of between about 8 and about 11 residues, preferably 9 or 10 residues. The preferred HTL-inducing oligopeptides are less than about 50 residues in length and usually consist of between about 6 and about 30 residues, more usually between about 12 and 25, and often between about 15 and 20 residues.

[0051] It is to be appreciated that protein or peptide molecules that comprise an epitope of the invention as well as additional amino acid(s) are within the bounds of the invention. In certain embodiments, there is a limitation on the length of a peptide of the invention which is not otherwise a construct as defined herein. An embodiment that is length-limited occurs when the protein/peptide comprising an epitope of the invention comprises a region (i.e., a contiguous series of amino acids) having 100% identity with a native sequence. In order to avoid a recited definition of epitope from reading, e.g., on whole natural molecules, the length of any region that has 100% identity with a native peptide sequence is limited. Thus, for a peptide comprising an epitope of the invention and a region with 100% identity with a native peptide sequence (and which is not otherwise a construct), the region with 100% identity to a native sequence generally has a length of: less than or equal to 600 amino acids, often less than or equal to 500 amino acids, often less than or equal to 400 amino acids, often less than or equal to 250 amino acids, often less than or equal to 100 amino acids, often less than or equal to 85 amino acids, often less than or equal to 75 amino acids, often less than or equal to 65 amino acids, and often less than or equal to 50 amino acids. In certain embodiments, an “epitope” of the invention which is not a construct is comprised by a peptide having a region with less than 51 amino acids that has 100% identity to a native peptide sequence, in any increment of (50, 49, 48, 47, 46, 45, 44, 43, 42, 41, 40, 39, 38, 37, 36, 35, 34, 33, 32, 31, 30, 29, 28, 27, 26, 25, 24, 23, 22, 21, 20, 19, 18, 17, 16, 15, 14, 13, 12, 11, 10, 9, 8, 7, 6, 5) down to 5 amino acids.

[0052] Certain peptide or protein sequences longer than 600 amino acids are within the scope of the invention. Such longer sequences are within the scope of the invention so long as they do not comprise any contiguous sequence of more than 600 amino acids that have 100% identity with a native peptide sequence, or if longer than 600 amino acids, they are a construct. For any peptide that has five contiguous residues or less that correspond to a native sequence, there is no limitation on the maximal length of that peptide in order to fall within the scope of the invention. It is presently preferred that a CTL epitope of the invention be less than 600 residues long in any increment down to eight amino acid residues.

[0053] “Pharmaceutically acceptable” refers to a non-toxic, inert, and/or physiologically compatible composition.

[0054] A “pharmaceutical excipient” comprises a material such as an adjuvant, a carrier, pH-adjusting and buffering agents, tonicity adjusting agents, wetting agents, preservative, and the like.

[0055] A “primary anchor residue” is an amino acid at a specific position along a peptide sequence which is understood to provide a contact point between the immunogenic peptide and the HLA molecule. One to three, usually two, primary anchor residues within a peptide of defined length generally defines a “motif” for an immunogenic peptide. These residues are understood to fit in close contact with peptide binding grooves of an HLA molecule, with their side chains buried in specific pockets of the binding grooves themselves. In one embodiment, for example, the primary anchor residues are located at position 2 (from the amino terminal position) and at the carboxyl terminal position of a 9-residue peptide epitope in accordance with the invention. The primary anchor positions for each motif and supermotif are set forth in Table 1. For example, analog peptides can be created by altering the presence or absence of particular residues in these primary anchor positions. Such analogs are used to modulate the binding affinity of a peptide comprising a particular motif or supermotif.

[0056] “Promiscuous recognition” is where a distinct peptide is recognized by the same T cell clone in the context of various HLA molecules. Promiscuous recognition or binding is synonymous with cross-reactive binding.

[0057] A “protective immune response” or “therapeutic immune response” refers to a CTL and/or an HTL response to an antigen derived from an infectious agent or a tumor antigen, which prevents or at least partially arrests disease symptoms or progression. The immune response may also include an antibody response which has been facilitated by the stimulation of helper T cells.

[0058] The term “residue” refers to an amino acid or amino acid mimetic incorporated into an oligopeptide by an amide bond or amide bond mimetic.

[0059] A “secondary anchor residue” is an amino acid at a position other than a primary anchor position in a peptide which may influence peptide binding. A secondary anchor residue occurs at a significantly higher frequency amongst bound peptides than would be expected by random distribution of amino acids at one position. The secondary anchor residues are said to occur at “secondary anchor positions.” A secondary anchor residue can be identified as a residue which is present at a higher frequency among high or intermediate affinity binding peptides, or a residue otherwise associated with high or intermediate affinity binding. For example, analog peptides can be created by altering the presence or absence of particular residues in these secondary anchor positions. Such analogs are used to finely modulate the binding affinity of a peptide comprising a particular motif or supermotif.

[0060] A “subdominant epitope” is an epitope which evokes little or no response upon immunization with whole antigens which comprise the epitope, but for which a response can be obtained by immunization with an isolated peptide, and this response (unlike the case of cryptic epitopes) is detected when whole protein is used to recall the response in vitro or in vivo.

[0061] A “supermotif” is a peptide binding specificity shared by HLA molecules encoded by two or more HLA alleles. Preferably, a supermotif-bearing peptide is recognized with high or intermediate affinity (as defined herein) by two or more HL A antigens.

[0062] “Synthetic peptide” refers to a peptide that is man-made using such methods as chemical synthesis or recombinant DNA technology.

[0063] As used herein, a “vaccine” is a composition that contains-one or more peptides of the invention. There are numerous embodiments of vaccines in accordance with the invention, such as by a cocktail of one or more peptides; one or more epitopes of the invention comprised by a polyepitopic peptide; or nucleic acids that encode such peptides or polypeptides, e.g., a minigene that encodes a polyepitopic peptide. The “one or more peptides” can include any whole unit integer from 1-150, e.g., at least 2, 3, 4, 5, 6, 7, 8, 9, 10, 11, 12, 13, 14, 15, 16, 17, 18, 19, 20, 21, 22, 23, 24, 25, 26, 27, 28, 29, 30, 31, 32, 33, 34, 35, 36, 37, 38, 39, 40, 45, 50, 55, 60, 65, 70, 75, 80, 85, 90, 95, 100, 105, 110, 115, 120, 125, 130, 135, 140, 145, or 150 or more peptides of the invention. The peptides or polypeptides can optionally be modified, such as by lipidation, addition of targeting or other sequences. HLA class I-binding peptides of the invention can be admixed with, or linked to, HLA class II-binding peptides, to facilitate activation of both cytotoxic T lymphocytes and helper T lymphocytes. Vaccines can also comprise peptide-pulsed antigen presenting cells, e.g., dendritic cells.

[0064] The nomenclature used to describe peptide compounds follows the conventional practice wherein the amino group is presented to the left (the N-terminus) and the carboxyl group to the right (the C-terminus) of each amino acid residue. When amino acid residue positions are referred to in a peptide epitope they are numbered in an amino to carboxyl direction with position one being the position closest to the amino terminal end of the epitope, or the peptide or protein of which it may be a part. In the formulae representing selected specific embodiments of the present invention, the amino- and carboxyl-terminal groups, although not specifically shown, are in the form they would assume at physiologic pH values, unless otherwise specified. In the amino acid structure formulae, each residue is generally represented by standard three letter or single letter designations. The L-form of an amino acid residue is represented by a capital single letter or a capital first letter of a three-letter symbol, and the D-form for those amino acids having D-forms is represented by a lower case single letter or a lower case three letter symbol. Glycine has no asymmetric carbon atom and is simply referred to as “Gly” or G. The amino acid sequences of peptides set forth herein are generally designated using the standard single letter symbol. (A, Alanine; C, Cysteine; D, Aspartic Acid; E, Glutamic Acid; F, Phenylalanine; G, Glycine; H, Histidine; I, Isoleucine; K, Lysine; L, Leucine; M, Methionine; N, Asparagine; P, Proline; Q, Glutamine; R, Arginine; S, Serine; T, Threonine; V, Valine; W, Tryptophan; and Y, Tyrosine.) In addition to these symbols, “B” in the single letter abbreviations used herein designates α-amino butyric acid.

### Stimulation of CTL and HTL Responses

[0065] The mechanism by which T cells recognize antigens has been delineated during the past ten years. Based on our understanding of the immune system we have developed efficacious peptide epitope vaccine compositions that can induce a therapeutic or prophylactic immune response to HPV in a broad population. For an understanding of the value and efficacy of the claimed compositions, a brief review of immunology-related technology is provided.

[0066] A complex of an HLA molecule and a peptidic antigen acts as the ligand recognized by HLA-restricted T cells (Buus, S. et al., Cell 47:1071, 1986; Babbitt, B. P. et al., Nature 317:359, 1985; Townsend, A. and Bodmer, H., Annu. Rev. Immunol. 7:601, 1989; Germain, R. N., Annu. Rev. Immunol. 11:403, 1993). Through the study of single amino acid substituted antigen analogs and the sequencing of endogenously bound, naturally processed peptides, critical residues that correspond to motifs required for specific binding to HLA antigen molecules have been identified and are described herein and are set forth in Tables I, II, and III (see also, e.g., Southwood, et al., J. Immunol. 160:3363, 1998; Ranmmensee, et al., Immunogenetics 41:178, 1995; Rammensee et al., SYFPEITHI, access via web at: http://134.2.96.221/scripts.hlaserver.dll/home.htm; Sette, A. and Sidney, J. Curr. Opin. Immunol. 10:478, 1998; Engelhard, V. H., Curr. Opin. Immunol. 6:13, 1994; Sette, A. and Grey, H. M., Curr. Opin. Immunol. 4:79, 1992; Sinigaglia, F. and Hammer, J. Curr. Biol. 6:52, 1994; Ruppert et al., Cell 74:929-937, 1993; Kondo et al., J. Immunol. 155:4307-4312, 1995; Sidney et al., J. Immunol. 157:3480-3490, 1996; Sidney et al., Human Immunol. 45:79-93, 1996; Sette, A. and Sidney, J. Immunogenetics 1999 November; 50(3-4):201-12. Review).

[0067] Furthermore, x-ray crystallographic analysis of HLA-peptide complexes has revealed pockets within the peptide binding cleft of HLA molecules which accommodate, in an allele specific mode, residues borne by peptide ligands; these residues in turn determine the HLA binding capacity of the peptides in which they are present. (See, e.g., Madden, D. R. Annu. Rev. Immunol. 13:587, 1995; Smith, et al., Immunity 4:203, 1996; Fremont et al., Immunity 8:305, 1998; Stern et al., Structure 2:245, 1994; Jones, E. Y. Curr. Opin. Immunol. 9:75, 1997; Brown, J. H. et al., Nature 364:33, 1993; Guo, H. C. et al., Proc. Natl. Acad. Sci. USA 90:8053, 1993; Guo, H. C. et al., Nature 360:364, 1992; Silver, M. L. et al., Nature 360:367, 1992; Matsumura, M. et al., Science 257:927, 1992; Madden et al., Cell 70:1035, 1992; Fremont, D. R. et al., Science 257:919, 1992; Saper, M. A., Bjorkman, P. J. and Wiley, D. C., J. Mol. Biol. 219:277, 1991.)

[0068] Accordingly, the definition of class I and class II allele-specific HLA binding motifs, or class I or class II supermotifs allows identification of regions within a protein that have the potential of binding particular HLA antigen(s).

[0069] The present inventors have found that the correlation of binding affinity with immunogenicity, which is disclosed herein, is an important factor to be considered when evaluating candidate peptides. Thus, by a combination of motif searches and HLA-peptide binding assays, candidates for epitope-based vaccines have been identified. After determining their binding affinity, additional confirmatory work can be performed to select, amongst these vaccine candidates, epitopes with preferred characteristics in terms of population coverage, antigenicity, and immunogenicity.

[0070] Various strategies can be utilized to evaluate immunogenicity, including:

[0071] 1) Evaluation of primary T cell cultures from normal individuals (see, e.g., Wentworth, P. A. et al., Mol. Immunol. 32:603, 1995; Celis, E. et al., Proc. Natl. Acad. Sci. USA 91:2105, 1994; Tsai, V. et al., J. Immunol. 158:1796, 1997; Kawashima, I. et al., Human Immunol. 59:1, 1998); This procedure involves the stimulation of peripheral blood lymphocytes (PBL) from normal subjects with a test peptide in the presence of antigen presenting cells in vitro over a period of several weeks. T cells specific for the peptide become activated during this time and are detected using, e.g., a lymphokine- or ⁵¹Cr-release assay involving peptide sensitized target cells.

[0072] 2) Immunization of HLA transgenic mice (see, e.g., Wentworth, P. A. et al., J. Immunol. 26:97, 1996; Wentworth, P. A. et al., Int. Immunol. 8:651, 1996; Alexander, J. et al., J. Immunol. 159:4753, 1997); In this method, peptides in incomplete Freund's adjuvant are administered subcutaneously to HLA transgenic mice. Several weeks following immunization, splenocytes are removed and cultured in vitro in the presence of test peptide for approximately one week. Peptide-specific T cells are detected using, e.g., a ⁵¹Cr-release assay involving peptide sensitized target cells and target cells expressing endogenously generated antigen.

[0073] 3) Demonstration of recall T cell responses from immune individuals who have effectively been vaccinated, recovered from infection, and/or from chronically infected patients (see, e.g., Rehermann, B. et al., J. Exp. Med. 181:1047, 1995; Doolan, D. L. et al., Immunity 7:97, 1997; Bertoni, R. et al., J. Clin. Invest. 100:503, 1997; Threlkeld, S. C. et al., J. Immunol. 159:1648, 1997; Diepolder, H. M. et al., J. Virol. 71:6011, 1997); In applying this strategy, recall responses are detected by culturing PBL from subjects that have been naturally exposed to the antigen, for instance through infection, and thus have generated an immune response “naturally”, or from patients who were vaccinated against the infection. PBL from subjects are cultured in vitro for 1-2 weeks in the presence of test peptide plus antigen presenting cells (APC) to allow activation of “memory” T cells, as compared to “naive” T cells. At the end of the culture period, T cell activity is detected using assays for T cell activity including ⁵¹Cr release involving peptide-sensitized targets, T cell proliferation, or lymphokine release.

[0074] The following describes the peptide epitopes and corresponding nucleic acids of the invention.

### Binding Affinity of Peptide Epitopes for HLA Molecules

[0075] As indicated herein, the large degree of HLA polymorphism is an important factor to be taken into account with the epitope-based approach to vaccine development. To address this factor, epitope selection encompassing identification of peptides capable of binding at high or intermediate affinity to multiple HLA molecules is preferably utilized, most preferably these epitopes bind at high or intermediate affinity to two or more allele-specific HLA molecules.

[0076] CTL-inducing peptides of interest for vaccine compositions preferably include those that have an IC₅₀ or binding affinity value for class I HLA molecules of 500 nM or better (i.e., the value is ≦500 nM). HTL-inducing peptides preferably include those that have an IC₅₀ or binding affinity value for class II HLA molecules of 1000 nM or better, (i.e., the value is ≦1,000 nM). For example, peptide binding is assessed by testing the capacity of a candidate peptide to bind to a purified HLA molecule in vitro. Peptides exhibiting high or intermediate affinity are then considered for further analysis. Selected peptides are tested on other members of the supertype family. In preferred embodiments, peptides that exhibit cross-reactive binding are then used in cellular screening analyses or vaccines.

[0077] As disclosed herein, higher HLA binding affinity is correlated with greater immunogenicity. Greater immunogenicity can be manifested in several different ways. Immunogenicity corresponds to whether an immune response is elicited at all, and to the vigor of any particular response, as well as to the extent of a population in which a response is elicited. For example, a peptide might elicit an immune response in a diverse array of the population, yet in no instance produce a vigorous response. Is accordance with these principles, close to 90% of high binding peptides have been found to be immunogenic, as contrasted with about 50% of the peptides which bind with intermediate affinity. Moreover, higher binding affinity peptides lead to more vigorous immunogenic responses. As a result, less peptide is required to elicit a similar biological effect if a high affinity binding peptide is used. Thus, in preferred embodiments of the invention, high affinity binding epitopes are particularly useful.

[0078] The relationship between binding affinity for HLA class I molecules and immunogenicity of discrete peptide epitopes on bound antigens has been determined for the first time in the art by the present inventors. The correlation between binding affinity and immunogenicity was analyzed in two different experimental approaches (see, e.g., Sette, et al., J. Immunol. 153:5586-5592, 1994). In the first approach, the immunogenicity of potential epitopes ranging in HLA binding affinity over a 10,000-fold range was analyzed in HLA-A*0201 transgenic mice. In the second approach, the antigenicity of approximately 100 different hepatitis B virus (HBV)-derived potential epitopes, all carrying A*0201 binding motifs, was assessed by using PBL from acute hepatitis patients. Pursuant to these approaches, it was determined that an affinity threshold value of approximately 500 nM (preferably 50 nM or less) determines the capacity of a peptide epitope to elicit a CTL response. These data are true for class I binding affinity measurements for naturally processed peptides and for synthesized T cell epitopes. These data also indicate the important role of determinant selection in the shaping of T cell responses (see, e.g., Schaeffer et al. Proc. Natl. Acad. Sci. USA 86:4649-4653, 1989).

[0079] An affinity threshold associated with immunogenicity in the context of HLA class II DR molecules has also been delineated (see, e.g., Southwood et al. J. Immunology 160:3363-3373, 1998, and co-pending U.S. Ser. No. 09/009,953 filed Jan. 21, 1998). In order to define a biologically significant threshold of DR binding affinity, a database of the binding affinities of 32 DR-restricted epitopes for their restricting element (i.e., the HLA molecule that binds the motif) was compiled. In approximately half of the cases (15 of 32 epitopes), DR restriction was associated with high binding affinities, i.e. binding affinity values of 100 nM or less. In the other half of the cases (16 of 32), DR restriction was associated with intermediate affinity (binding affinity values in the 100-1000 nM range). In only one of 32 cases was DR restriction associated with an IC₅₀ of 1000 nM or greater. Thus, 1000 nM can be defined as an affinity threshold associated with immunogenicity in the context of DR molecules.

[0080] In the case of tumor-associated antigens (TAAs), many CTL peptide epitopes that have been shown to induce CTL that lyse peptide-pulsed target cells and tumor cell targets endogenously expressing the epitope exhibit binding affinity or IC₅₀ values of 200 nM or less. In a study that evaluated the association of binding affinity and immunogenicity of a small set of such TAA epitopes, 100% ( 10/10) of the high binders, i.e., peptide epitopes binding at an affinity of 50 nM or less, were immunogenic and 80% ( 8/10) of them elicited CTLs that specifically recognized tumor cells. In the 51 to 200 nM range, very similar figures were obtained. With respect to analog peptides, CTL inductions positive for wildtype peptide and tumor cells were noted for 86% ( 6/7) and 71% ( 5/7) of the peptides, respectively. In the 201-500 nM range, most peptides (⅘ wildtype) were positive for induction of CTL recognizing wildtype peptide, but tumor recognition was not detected.

[0081] The binding affinity of peptides for HLA molecules can be determined as described in Example 1, below.

### Peptide Epitope Binding Motifs and Supermotifs

[0082] Through the study of single amino acid substituted antigen analogs and the sequencing of endogenously bound, naturally processed peptides, critical residues required for allele-specific binding to HLA molecules have been identified. The presence of these residues correlates with binding affinity for HLA molecules. The identification of motifs and/or supermotifs that correlate with high and intermediate affinity binding is an important issue with respect to the identification of immunogenic peptide epitopes for the inclusion in a vaccine. Kast et al. (J. Immunol. 152:3904-3912, 1994) have shown that motif-bearing peptides account for 90% of the epitopes that bind to allele-specific HLA class I molecules. In this study all possible peptides of 9 amino acids in length and overlapping by eight amino acids (240 peptides), which cover the entire sequence of the E6 and E7 proteins of human papillomavirus type 16, were evaluated for binding to five allele-specific HLA molecules that are expressed at high frequency among different ethnic groups. This unbiased set of peptides allowed an evaluation of the predictive value of HLA class I motifs. From the set of 240 peptides, 22 peptides were identified that bound to an allele-specific HLA molecule with high or intermediate affinity. Of these 22 peptides, 20 (i.e. 91%) were motif-bearing. Thus, this study demonstrates the value of motifs for the identification of peptide epitopes for inclusion in a vaccine: application of motif-based identification techniques will identify about 90% of the potential epitopes in a target antigen protein sequence.

[0083] Such peptide epitopes are identified in the Tables described below.

[0084] Peptides of the present invention may also comprise epitopes that bind to MHC class II DR molecules. A greater degree of heterogeneity in both size and binding frame position of the motif, relative to the N and C termini of the peptide, exists for class II peptide ligands. This increased heterogeneity of HLA class II peptide ligands is due to the structure of the binding groove of the HLA class II molecule which, unlike its class I counterpart, is open at both ends. Crystallographic analysis of HLA class II DRB*0101-peptide complexes showed that the major energy of binding is contributed by peptide residues complexed with complementary pockets on the DRB*0101 molecules. An important anchor residue engages the deepest hydrophobic pocket (see, e.g., Madden, D. R. Ann. Rev. Immunol. 13:587, 1995) and is referred to as position 1 (P1). P1 may represent the N-terminal residue of a class II binding peptide epitope, but more typically is flanked towards the N-terminus by one or more residues. Other studies have also pointed to an important role for the peptide residue in the 6 position towards the C-terminus, relative to P1, for binding to various DR molecules.

[0085] In the past few years evidence has accumulated to demonstrate that a large fraction of HLA class I and class II molecules can be classified into a relatively few supertypes, each characterized by largely overlapping peptide binding repertoires, and consensus structures of the main peptide binding pockets. Thus, peptides of the present invention are identified by any one of several HLA-specific amino acid motifs (see, e.g., Tables I-III), or if the presence of the motif corresponds to the ability to bind several allele-specific HLA antigens, a supermotif The HLA molecules that bind to peptides that possess a particular amino acid supermotif are collectively referred to as an HLA “supertype.”

[0086] The peptide motifs and supermotifs described below, and summarized in Tables I-III, provide guidance for the identification and use of peptide epitopes in accordance with the invention.

[0087] Examples of peptide epitopes bearing a respective supermotif or motif are included in Tables as designated in the description of each motif or supermotif below. The Tables include a binding affinity ratio listing for some of the peptide epitopes. The ratio may be converted to IC₅₀ by using the following formula: IC₅₀ of the standard peptide/ratio=IC₅₀ of the test peptide (i.e., the peptide epitope). The IC₅₀ values of standard peptides used to determine binding affinities for Class I peptides are shown in Table IV. The IC₅₀ values of standard peptides used to determine binding affinities for Class II peptides are shown in Table V. For example, where an HLA-A2.1 motif-bearing peptide shows a relative binding ratio of 0.01 for HLA-A*0201, the IC₅₀ value is 500 nM, and where an HLA-A2.1 motif-bearing peptide shows a relative binding ratio of 0.1 for HLA-A*0201, the IC₅₀ value is 50 nM.

[0088] The peptides used as standards for the binding assays described herein are examples of standards; alternative standard peptides can also be used when performing binding studies.

[0089] To obtain the peptide epitope sequences listed in Tables VII-XX, protein sequence data for HPV types 6a, 6b, 11a, 16, 18, 31, 33, 45, and 56 were evaluated for the presence of the designated supermotif or motif. Seven HPV structural and regulatory proteins, E1, E2, E5. E6, E6, E7, L1 and L2 were included in the analysis. E4 was also included in the evaluation of some of the strains. Peptide epitopes can additionally be evaluated on the basis of their conservancy (i.e., the amount of variance) among the available protein sequences for each HPV antigen.

[0090] In the Tables, motif- and/or supermotif-bearing amino acids sequences identified in the indicated HPV strains are designated by position number and length of the epitope with reference to the HPV sequences and numbering provided below. For each sequence, the four columns provide the following information: column 1 indicates the HPV strain; column 2 indicates the HPV protein in which the motif-bearing sequence is found, e.g., E1, E2, E4, E5, E6, E7, L1, or L2; column 3 indicates the length of the epitope, or in the case of HLA Class II epitopes, the length of the core sequence; and column 4 designates the amino acid position in the HPV protein sequence that corresponds to the first amino acid residue of the epitope. For those sections of the Tables that include only three columns, corresponding to columns 2, 3, and 4, the HPV strain is indicated in the heading at the top of the page. For example, the first peptide epitope listed in Table VII, i.e., the HLA-A1 supermotif, for HPV 16, protein E1 is a sequence of 10 residues in length starting at position 206. Accordingly, the amino acid sequence of the epitope is AMLAKFKELY.

[0091] For HPV strain 11, the number and position listed for protein E5 refers to either the HPV11 E5a or HPV11 E5b sequence set out below. Because the epitope must include the designated motif or supermotif, e.g., HLA-A2, it can readily be determined whether the sequence refers to HPV11 E5a or E5b by checking the amino acid sequences of both E5a and E5b and selecting the sequence that conforms to the motif listed in Table I.

### HPV Strains and Amino Acid Sequences of HPV Proteins

| HPV6A E1 | | |
|---|---|---|
| 1 | MADDSGTENEGSGCTGWFMVEAIVQHPTGTQISDDEDEEVEDSGYDMVDFIDDSNITHNS | 60 |
| | LEAQALFNRQEADTHYATVQDLKRKYLGSPYVSPINTIAEAVESEISPRLDAIKLTRQPK | 120 |
| | KVKRRLFQTRELTDSGYGYSEVEAGTGTQVEKHGVPENGGDGQEKDTGRDIEGEEHTEAE | 180 |
| | APTNSVREHAGTAGILELLKCKDLRAALLGKFKECFGLSFIDLIRPFKSDKTTCADWVVA | 240 |
| | GFGIHHSISEAFQKLIEPLSLYAHIQWLTNAWGMVLLVLVRFKVNKSRSTVARTLATLLN | 300 |
| | IPDNQMLIEPPKIQSGVAALYWFRTGISNASTVIGEAPEWITRQTVIEHGLADSQFKLTE | 360 |
| | MVQWAYDNDICEESEIAFEYAQRGDFDSNARAFLNSNMQAKYVKDCATMCRHYKHAEMRK | 420 |
| | MSIKQWIKHRGSKIEGTGNWKPIVQFLRHQNIEFIPFLSKFKLWLHGTPKKNCIAIVGPP | 480 |
| | DTGKSYFCMSLISFLGGTVISHVNSSSHFWLQPLVDAKVALLDDATQPCWIYMDTYMRNL | 540 |
| | LDGNPMSIDRKHKALTLIKCPPLLVTSNIDITKEEKYKYLHTRVTTFTFPNPFPFDRNGN | 600 |
| | AVYELSNANWKCFFERLSSSLDIQDSEDEEDGSNSQAFRCVPGTVVRTL | 649 |
| HPV6A E2 | | |
| 1 | MEAIAKRLDACQEQLLELYEENSTDLNKHVLHWKCMRHESVLLYKAKQMGLSHIGMQVVP | 60 |
| | PLKVSEAKGHNAIEMQMHLESLLKTEYSMEPWTLQETSYEMWQTPPKRCFKKRGKTVEVK | 120 |
| | FDGCANNTMDYVVWTDVYVQDTDSWVKVHSMVDAKGIYYTCGQFKTYYVNFVKEAEKYGS | 180 |
| | TKQWEVCYGSTVICSPASVSSTTQEVSIPESTTYTPAQTSTPVSSSTQEDAVQTPPRKRA | 240 |
| | RGVQQSPCNALCVAHIGPVDSGNHNLITNNHDQHQRRNNSNSSATPIVQFQGESNCLKCF | 300 |
| | RYRLNDKHRELFDLISSTWHWASPKAPHKHAIVTVTYHSEEQRQQFLNVVKIPPTIRHKL | 360 |
| | GFMSLHLL | 368 |
| HPV6A E4 | | |
| 1 | MAAQLYVLLHLYLALHKKYPFLNLLHTPPHRPPPLCPQAPRKTQCKRRLENEHEESNSHL | 60 |
| | ATPCVWPTLDPWTVETTTSSLTITTSTKEGTTVTVQLRL | 99 |
| HPV6A E5 | | |
| 1 | MEVVPVQIAAGTTSTLILPVIIAFVVCFVSIILIVWISDFIVYTSVLVLTLLLYLLLWLL | 60 |
| | LTTPLQFFLLTLLVCYCPALYIHHYIVNTQQ | 91 |
| HPV6A E6 | | |
| 1 | MESANASTSATTIDQLCKTFNLSMHTLQINCVFCKNALTTAEIYSYAYKQLKVLFRGGYP | 60 |
| | YAACACCLEFHGKINQYRHFDYAGYATTVEEETKQDILDVLIRCYLCHKPLCEVEKVKHI | 120 |
| | LTKARFIKLNCTWKGRCLHCWTTCMEDMLP | 150 |
| HPV6A E7 | | |
| 1 | MHGRHVTLKDIVLDLQPPDPVGLHCYEQLVDSSEDEVDEVDGQDSQPLKQHFQIVTCCCG | 60 |
| | CDSNVRLVVQCTETDIREVQQLLLGTLDIVCPICAPKT | 98 |
| HPV-6A L1 | | |
| 1 | MWRPSDSTVYVPPPNPVSKVVATDAYVTRTNIFYHASSSRLLAVGHPYFSIKRANKTVVP | 60 |
| | KVSGYQYRVFKVVLPDPNKFALPDSSLFDPTTQRLVWACTGLEVGRGQPLGVGVSGHPFL | 120 |
| | NKYDDVENSGSGCNPOQDNRVNVGMDYKQTQLCMVSCAPPLGEHWGKGKQCTNTPVQAGD | 180 |
| | CPPLELITSVIQDGDMVDTGFGAMNFADLQTNKSDVPIDICGTTCKYPDYLQMAADPYGD | 240 |
| | RLFFFLRKEQMFARHFFNRAGEVGEPVPDTLIIKGSGNRTSVGSSIYVNTPSGSLVSSEA | 380 |
| | QLFNKPYWLQKAQGHNNGICWGNQLFVTVVDTTRSTNMTLCASVTTSSTYTNSDYKEYMR | 360 |
| | HVEEYDLQFIFQLCSITLSAEVMAYIHTMNPSVLEDWNFGLSPPPNGTLEDTYRYVQSQA | 420 |
| | ITCQKPTPEKEKPDPYKNLSFWEVNLKEKFSSELDQYPLGRKFLLQSGYRGRSSIRTGVK | 480 |
| | RPAVSKASAAPKRKRAKTKR | 500 |
| HPV6A L2 | | |
| 1 | MAHSRARRRKRASATQLYQTCKLTGTCPPDVIPKVEHNTIADQILKWGSLGVFFGGLGTG | 60 |
| | TGSGTGGRTGYVPLGTSAKPSITSGPMARPPVVVEPVAPSDPSIVSLIEESAIINAGAPE | 120 |
| | IVPPAHGGFTITSSETTTPAILDVSVTSHTTTSIFRNPVFTEPSVTQPQPPVEANGHILI | 180 |
| | SAPTITSHPIEEIPLDTFVISSSDSGPTSSTPVPGTAPRPRVGLYSRALHQVQVTDPAFL | 240 |
| | STPQRLITYDNPVYEGEDVSVQFSHDSIHNAPDEAFMDIIRLHRPAIASRRGLVRYSRIG | 300 |
| | QRGSMHTRSGKHIGARIHYFYDISPIAQAAEEIEMHPLVAAQDDTFDIYAESPEPDINPT | 360 |
| | QHPVTNISDTYLTSTPNTVTQPWGNTTVPLSSIPNDLFLQSGPDITFPTAPMGTPFSPVT | 420 |
| | ALPTGPVFITGSGFYLHPAWYFARKRRKRIPLFFSDVAA | 459 |
| HPV6B E1 | | |
| 1 | MADDSGTENEGSGCTGWFMVEAIVQHPTGTQISDDEDEEVEDSGYDMVDFIDDSNITHNS | 60 |
| | LEAQALFNRQEADTHYATVQDLKRKYLGSPYVSPINTIAEAVESEISPRLDAIKLTRQPK | 120 |
| | KVKRRLFQTRELTDSGYGYSEVEAGTGTQVEKHGVPENGGDGQEKDTGRDIEGEEHTEAE | 180 |
| | APTNSVREHAGTAGILELLKCKDLRAALLGKFKECFGLSFIDLIRPFKSDKTTCLDWVVA | 240 |
| | GFGIHHSISEAFQKLIEPLSLYAHIQWLTNAWGMVLLVLLRFKVNKSRSTVARTLATLLN | 300 |
| | IPENQMLIEPPKIQSGVAALYWFRTGISNASTVIGEAPEWITRQTVIEHGLADSQFKLTE | 360 |
| | MVQWAYDNDICEESEIAPEYAQRDGFDSNARAFLNSNMQAKYVKDCATMCRHYKHAEMRK | 420 |
| | MSIKQWIKHRGSKIEGTGNWKPIVQFLRHQNIEPIPFLTKFKLWLHGTPKKNCIAIVGPP | 480 |
| | DTGKSYFDMSLISFLGGTVISHVNSSSHFWLQPLVDAKVALLDDATQPCWIYMDTYMRNL | 540 |
| | LDGNPMSIDRKHKALTLIKCPPLLVTSNIDITKEDKYKYLHTRVTTFTFPNPFPFDRNGN | 600 |
| | AVYELSNTNWKCFFERLSSSLDIQDSEDEEDGSNSQAFRCVPGTVVRTL | 649 |
| HPV6B E2 | | |
| 1 | MEAIAKRLDACQEQLLELYEENSTDLHKHVLHWKCMRHESVLLYKAKQMGLSHIGMQVVP | 60 |
| | PLDVSEAKGHNAIEMQMHLESLLRTEYSMEPWTLQETSYEMWQTPPKRCFKKRGKTVEVK | 120 |
| | FDGCANNTMDYVVWTDVYVQDNDTWVKVHSMVDAKGIYYTCGQFKTYYVNFVKEAEKYGS | 180 |
| | TKHWEVCYGSTVICSPASVSSTTQEVSIPESTTYTPAQTSTLVSSSTKEDAVQTPPRKRA | 240 |
| | RGVQQSPCNALCVAHIGPVDSGNHNLITNNHDQHQRRNNSNSSATPIVQFQGESNCLKCF | 300 |
| | RYRLNDRHRHLFDLISSTWHWASSKAPHKHAIVTVTYDSEEQRQQFLDVVKIPPTISHKL | 360 |
| | GFMSLHLL | 368 |
| HPV6B E4 | | |
| 1 | MGAPNIGKYVMAAQLYVLLHLYLALHKKYPFLNLLHTPPHRPPPLCPQAPRKTQCKRRLG | 60 |
| | NEHEESNSPLATPCVWPTLDPWTVETTTSSLTITTSTKDGTTVTVQLRL | 109 |
| HPV6B E5A | | |
| 1 | MEVVPVQIAAGTTSTFILPVIIAFVVCFVSIILIVWISEFIVYTSVLVLTLLLYLLLWLL | 60 |
| | LTTPLQFFLLTLLVCYCPALYIHYYIVTTQQ | 91 |
| HPV6B E5B | | |
| 1 | MMLTCQFNDGDTWLGLWLLCAFIVGMLGLLLMHYRAVQGDKHTKCKKCNKHNCNDDYVTM | 60 |
| | HYTTDGDYIYMN | 72 |
| HPV6B E6 | | |
| 1 | MESANASTSATTIDQLCKTFNLSMHTLQINCVECKNALTTAEIYSYAYKHLKVLERGGYP | 60 |
| | YAACACCLEFHGKINQYRHFDYAGYATTVEEETKQDILDVLIRCYLCHKPLCEVEKVKHI | 120 |
| | LTKARFIKLNCTWKGRCLHCWTTCMEDMLP | 150 |
| HPV6B E7 | | |
| 1 | MHGRHVTLKDIVLDLQPPDPVGLHCYEQLVDSSEDEVDEVDGQDSQPLKQHFQIVTCCCG | 60 |
| | CDSNVRLVVQCTETDIREVQQLLLGTLNIVCPICAPKT | 98 |
| HPV6A L1 | | |
| 1 | MWRPSDSTVYVPPPNPVSKVVATDAYVTRTNIFYHASSSRLLAVGHPYFSIKRANKTVVP | 60 |
| | KVSGYQYRVFKVVLPDPNKFALPDSSLFDPTTQRLVWACTGLEVGRGQPLGVGVSGHPFL | 120 |
| | NKYDDVENSGSGGNPGQDNRVNVGMDYKQTQLCMVGCAPPLGEHWGKGKQCTNTPVQAGD | 180 |
| | CPPLELITSVIQDGDMVDTGFGAMNFADLQTNKSDVPIDICGTTCKYPDYLQMAADPYGD | 240 |
| | RLFFFLRKEQMFARHFFNRAGEVGEPVPDTLIIKGSGNRTSVGSSIYVNTPSGSLVSSEA | 300 |
| | QLFNKPYWLQKAQGHNNGICWGNQLFVTVVDTTRSTNMTLCASVTTSSTYTNSDYKEYMR | 360 |
| | HVEEYDLQFIFQLCSITLSAEVMAYIHTMNPSVLEDWNFGLSPPPNGTLEDTYRYVQSQA | 420 |
| | ITCQKPTPEKEKPDPYKNLSFWEVNLKEKFSSELDQYPLGRKFLLQSGYRGRSSIRTGVK | 480 |
| | RPAVSKASAAPKRKRAKTKR | 500 |
| HPV6B L2 | | |
| 1 | MAHSRARRRKRASATQLYQTCKLTGTCPPDVIPKVEHNTIADQILKWGSLGVFFGGLGIG | 60 |
| | TGSGTGGRTGYVPLQTSAKPSITSGPMARPPVVVEPVAPSDPSIVSLIEESAIINAGAPE | 120 |
| | IVPPAHGGFTITSSETTTPAILDVSVTSHTTTSIFRNPVFTEPSVTQPQPPVEANGHILI | 180 |
| | SAPTVTSRPIEEIPLDTFVVSSSDSGPTSSTPVPGTAPRPRVGLYSRALHQVQVTDPAFL | 240 |
| | STPQRLITYDNPVYEGEDVSVQFSHDSIHNAPDEAFMDIIRLHRPAIASRRGLVRYSRIG | 300 |
| | QRGSMHTRSGKHIGARIHYFYDISPIAQAAEEIEMHPLVAAQDDTFDIYAESFEPGINPT | 360 |
| | QHFVTNISDTYLTSTPNTVTQPWGNTTVPLSLPNDLFLQSGPDITFPTAPMGTPFSPVTP | 420 |
| | ALPTGPVFITGSGFYLHPAWYFARKRRKRIPLEPSDVAA | 453 |
| HPV11 E1 | | |
| 1 | MADDSGTENEGSGCTGWFMVEAIVEHTTGTQISEDEEEEVEDSGYDMVDFIDDRHITQNS | 60 |
| | VEAQALFNRQEADAHYATVQDLKRKYLGSPYVSPISNVANAVESEISPRLDAIKLTTQPK | 120 |
| | KVKRRLPETRELTDSGYGYSEVEAATQVEKHGDPENGGDGQERDTGRDIEGEGVEHREAE | 180 |
| | AVDDSTREHADTSGILELLKCKDIRSTLHGKFKDCFGLSFVDLIRPFKSDRTTCADWVVA | 240 |
| | GPGIHHSIADAFQKLIEPLSLYAHIQWLTNANGMVLLVLIRFKVNKSRCTVARTLGTLLN | 300 |
| | IPENHMLIEPPKIQSGVRALYWFRTGISNASTVIGEAPEWITRQTVISHSLADSQFKLTE | 360 |
| | MVQWAYDNDICEESEIAPEYAQRGDFDSNARAFLNSNMQAKYVKDCAIMCRHYKHAEMKK | 420 |
| | MSIKQWIKYRGTKVDSVGNWKPIVQFLRHQNIEFIPFLSKLKLWLHGTPKKNCTAIVGPP | 480 |
| | DTGKSCFCMSLIKFLGGTVISYVNSCSHFWLQPLTDAKVALLDDATQPCWTYMDTYMRNL | 540 |
| | LDGNPMSIDRKHRALTLIKCPPLLVTSNIDISKEEKYKYLHSRVTTFTFPNPFPFDRNGN | 600 |
| | AVYELSDANWKCFFERLSSSLDIEDSEDEEDGSNSQAFRCVPGSVVRGL | 649 |
| HPV11 E2 | | |
| 1 | MEAIAKRLDACQDQLLELYEENSIDIHKHIMHWKCIRLEWVLLHKAKQMGLSHIGLQVVP | 60 |
| | PLTVSETKGHNAIEMQMHLESLAKTQYGVEPWTLQDTSYEMWLTPPKRCFKKQGNTVEVK | 120 |
| | FDGCEDNVMEYVVWTHIYLQDNDSWYKVTSSVDAKGIYYTCGQFKTYYVNFNKEAQKYGS | 180 |
| | TNHWEVCYGSTVICSPASVSSTVREVSIAEPTTYTPAQTTAPTVSACTTEDGVSAPPRKR | 240 |
| | ARGPSTNNTLCVANIRSVDSTINNIVTDNYNKHQRRNNCHSAATPIVQLQGDSNCLKCFR | 300 |
| | YRLNDKYKHLPELASSTWHWASPEAPHKNAIVTLTYSSEEQRQQFLNSVKIPPTIRHKVG | 360 |
| | FMSLHLL | 367 |
| HPV11 E4 | | |
| 1 | MVVPIIGKYVMAAQLYVLLHLYLALYEKYPLLNLLHTPPHRPPPLQCPPAPRKTACRRRL | 60 |
| | GSEHVDRPLTTPCVWPTSDPWTVQSTTSSLTITTSTKEGTTVTVQLRL | 108 |
| HPV11 E5A | | |
| 1 | MEVVPVQIAAATTTTLILPVVIAFAVCILSIVLIILISDFVVYTSVLVLTLLLYLLLWLL | 60 |
| | LTTPLQPFLLTLCVCYFPAFYIHIYIVQTQQ | 91 |
| HPV11 E5B | | |
| 1 | MVMLTCHLNDGDTWLFLWLFTAPVVAVLGLLLLHYRAVHGTEKTKCAKCKSNRNTTVDYV | 60 |
| | YMSHGDNGDYVYMN | 74 |
| HPV11 E6 | | |
| 1 | MESKDASTSATSIDQLCKTFNLSLHTLQIQCVFCRNALTTAEIYAYAYKNLKVVWRDNFP | 60 |
| | FAACACCLELQGKINQYRHFNYAAYAPTVEEETNEDILKVLIRCYLCHKPLCEIEKLKHI | 120 |
| | LGKARFIKLNNQWKGRCLHCWTTCMEDLLP | 150 |
| HPV11 E7 | | |
| 1 | MHGRLVTLKDIVLDLQPPDPVGLHCYEQLEDSSEDEVDKVDKQDAQPLTQHYQILTCCCG | 60 |
| | CDSNVRLVVECTDGDIRQLQDLLLGTLNIVCPICAPKP | 98 |
| HPV11 L1 | | |
| 1 | MWRPSDSTVYVPPPNPVSKVVATDAYVKRTNIFYHASSSRLLAVGHPYYSIKKVNKTVVP | 60 |
| | KVSGYQYRVFKVVLPDPNKFALPDSSLFDPTTQRLVWACTGLEVGRGQPLGVGVSGHPLL | 120 |
| | NKYDDVENSGGYGGNPGQDNRVNVGMDYKQTQLCMVGCAPPLGEHWGKGTQCSNTSVQNG | 180 |
| | DCPPLELITSVIQDGDMVDTGFGAMNFADLQTNKSDVPLDICGTVCKYPDYLQMAADPYG | 240 |
| | DRLFFYLRKEQMFARHFFNRAGTVGEPVPDDLLVKGGNNRSSVASSIYVHTPSGSLVSSE | 300 |
| | AQLFNKPYWLQKAQGHNNGICWGNHLFVTVVDTTRSTNMTLCASVSKSATYTNSDYKEYM | 360 |
| | RHVEEFDLQFIFQLCSITLSAEVMAYIHTMNPSVLEDWNFGLSPPPNGTLEDTYRYVQSQ | 420 |
| | AITCQKPTPEKEKQDPYKDMSFWEVNLKEKFSSELDQFPLGRKFLLQSGYRGRTSARTGI | 480 |
| | KRPAVSKPSTAPKRKRTKTKK | 501 |
| HPV11 L2 | | |
| 1 | MKPRARRRKRASATQLYQTCKATGTCPPDVIPKVEHTTIADQILKWGSLGVFFGGLGIGT | 60 |
| | GAGSGGRAGYIPLGSSPKPAITGGPAARPPVLVEPVAPSDPSIVSLIEESAIINAGAPEV | 120 |
| | VPPTQGGFTITSSESTTPAILDVSVTNHTTTSVFQNPLFTEPSVIQPQPPVEASGHILIS | 180 |
| | APTITSQHVEDIPLDTFVVSSSDSGPTSSTPLPRAFPRPRVGLYSRALQQVQVTDPAFLS | 240 |
| | TPQRLVTYDNPVYEGEDVSLQFTHESIHNAPDEAFMDIIRLHRPAITSRRGLVRFSRIGQ | 300 |
| | RGSMYTRSGQHIGARIHYFQDISPVTQAAEEIELHPLVAAENDTFDIYAEPFDPIPDPVQ | 360 |
| | HSVTQSYLTSTPNTLSQSWGNTTVPLSIPSDWFVQSGPDITFPTASMGTPFSPVTPALPT | 420 |
| | GPVFITGSDFYLHPTWYFARRRRKRIPLFFTDVAA | 455 |
| HPV16 E1 | | |
| 1 | MADPAGTNGEEGTGCNGWFYVEAVVEKKTGDAISDDENENDSDTGEDLVDFIVNDNDYLT | 60 |
| | QAETETAHALFTAQEAKQHRDAVQVLKRKYLVSPLSDISGCVDNNISPRLKAICIEKQSR | 120 |
| | AAKRRLFESEDSGYGNTEVETQQMLQVEGRHETETPCSQYSGGSGGGCSQYSSGSGGEGV | 180 |
| | SERHTICQTPLTNILNVLKTSNAKAAMLAKFKELYGVSFSELVRPFKSNKSTCCDWCIAA | 240 |
| | FGLTPSIADSIKTLLQQYCLYLHIQSLACSWGMVVLLLVRYKCGKNRETIEKLLSKLLCV | 300 |
| | SPMCMMIEPPKLRSTAAALYWYKTGISNISEVYGDTPEWIQRQTVLQHSFNDCTFELSQM | 360 |
| | VQWAYDNDIVDDSEIAYKYAQLADTNSNASAFLKSNSQAKIVKDCATMCRHYKRAEKKQM | 420 |
| | SMSQWIKYRCDRVDDGGDWKQIVMFLRYQGVEFMSFLTALKRFLQGIPKKNCILLYGAAN | 480 |
| | TGKSLFGMSLMKFLQGSVICFVNSKSHFWLQPLADAKIGMLDDATVPCWNYIDDNLRNAL | 540 |
| | DGNLVSMDVKHRPLVQLKCPPLLITSNINAGTDSRWPYLHNRLVVFTFPNEFPFDENGNP | 600 |
| | VYELNDKNWKSFFSRTWSRLSLHEDEDKENDGDSLPTFKCVSGQNTNTL | 649 |
| HPV16 E2 Accession number W2WLHS | | |
| 1 | METLCQRLNVCQDKILTHYENDSTDLRDHIDYWKHMRLECAIYYKAREMGFKHINHQVVP | 60 |
| | TLAVSKNKALQAIELQLTLETIYNSQYSNEKWTLQDVSLEVYLTAPTGCIKKHGYTVEVQ | 120 |
| | FDGDICNTMHYTNWTHIYICEEASVTVVEGQVDYYGLYYVHEGIRTYFVQFKDDAEKYSK | 180 |
| | NKVWEVHAGGQVILCPTSVFSSNEVSSPEIIRQHLANHPAATHTKAVALGTEETQTTIQR | 240 |
| | PRSEPDTGNPCHTTKLLHRDSVDSAPILTAFNSSHKGRINCNSNTTPIVHLKGDANTLKC | 300 |
| | LRYRFKKHCTLYTAVSSTWHWTGHNVKHKSAIVTLTYDSEWQRDQFLSQVKIPKTITVST | 360 |
| | GFMSI | 365 |
| HPV16 E5 Accession number W5WLHS | | |
| 1 | MTNLDTASTTLLACFLLCFCVLLCVCLLIRPLLLSVSTYTSLIILVLLLWITAASAFRCP | 60 |
| | IVYIIFVYIPLFLIHTBARFLIT | 83 |
| HPV16 E6 | | |
| 1 | MHQKRTAMFQDPQERPRKLPQLCTELQTTIHDIILECVYCKQQLLRREVYDFAFRDLCIV | 60 |
| | YRDGNPYAVCDKCLKFYSKISEYRHYCYSLYGTTLEQQYNKPLCDLLIRCINCQKPLCPE | 120 |
| | EKQRHLDKKQRFHNIRGRWTGRCMSCCRSSRTRRETQL | 158 |
| HPV16 E7 | | |
| 1 | MHGDTPTLHEYMLDLQPETTDLYCYEQLNDSSEEEDEIDGPAGQAEPDRAHYNIVTFCCK | 60 |
| | CDSTLRLCVQSTHVDIRTLEDLLMGTLGIVCPICSQKP | 98 |
| HPV16 L1 Accession number AAD33259 | | |
| 1 | MQVTFIYILVITCYENDVNVYHIFFQMSLWLPSEATVYLPPVPVSKVVSTDEYVARTNIY | 60 |
| | YHAGTSRLLAVGHPYFPIKKPNNNKILVPKVSGLQYRVFRIHLPDPNKFGFPDTSFYNPD | 120 |
| | TQRLVWACVGVEVGRGQPLGVGISGHPLLNKLDDTENASAYAANAGVDNRECISMDYKQT | 180 |
| | QLCLIGCKPPIGEHWGKGSPCTNVAVNPGDCPPLELINTVIQDGDMVDTGFGAMDFTTLQ | 240 |
| | ANKSEVPLDICTSICKYPDYIKMVSEPYGDSLFFYLRREQMFVRHLFNRAGAVGENVPDD | 300 |
| | LYIKGSGSTANLASSNYPPTPSGSMVTSDAQIFNKPYWLQRAQGHNNGICWGNQLFVTVV | 360 |
| | DTTRSTNMSLCAAISTSETTYKNTNFKEYLRHGEEYDLQFIFQLCKITLTADVMTYIHSM | 420 |
| | NSTILEDWNFGLQPPPGGTLEDTYRFVTSQAIACQKHTPPAPKEDPLKKYTFWEVNLKEK | 480 |
| | FSADLDQFPLGRKFLLQAGLKAKPKFTLGKRKATPTTSSTSTTAKRKKRKL | 531 |
| HPV16 L2 Accession number AAD33258 | | |
| 1 | MRHKRSAKRTKRASATQLYKTCKQAGTCPPDIIPKVEGKTIADQILQYGSMGVFFGGLGI | 60 |
| | GTGSGTGGRTGYIPLGTRPPTATDTLAPVRPPLTVDPVGPSDPSIVSLVEETSFIDAGAP | 120 |
| | TSVPSIPPDVSGFSITTSTDTTPAILDINNTVTTVTTHNNPTFTDPSVLQPPTPAETGGH | 180 |
| | FTLSSSTISTHNYEEIPMDTFIVSTNPNTVTSSTPIPGSRPVARLGLYSRTTQQVKVVDP | 240 |
| | AFITTPTKLITYDNPAYEGIDVDNTLYFSSNDNSINIAPDPDFLDIVALHRPALTSRRTG | 300 |
| | IRYSRIGNKQTLRTRSGKSIGAKVHYYYDFSTIDSAEEIELQTITPSTYTTTSHAALPTS | 360 |
| | INNGLYDIYADDFITDTSTTPVPSVPSTSLSGYIPANTTIPFGGAYNIPLVSGPDIPINI | 420 |
| | TDQAPSLIPIVPGSPQYTIIADAGDFYLHPSYYMLRKRRKRLPYFFSDVSLAA | 473 |
| HPV18 E1 | | |
| 1 | MADPEGTDGEGTGCNGWFYVQAIVDKKTGDVISDDEDENATDTGSDMVDFIDTQGTFCEQ | 60 |
| | AELETAQALFHAQEVHNDAQVLHVLKRKFAGGSTENSPLGERLEVDTELSPRLQEISLNS | 120 |
| | GQKKAKRRLFTISDSGYGCSEVEATQIQVTTNGEHGGNVCSGGSTEAIDNGGTEGNNSSV | 180 |
| | DGTSDNSNIENVNPQCTIAQLKDLLKVNNKQGAMLAVFKDTYGLSFTDLVRNFKSDKTTC | 240 |
| | TDWVTAIFGVNPTIAEGFKTLIQPFILYAHIQCLDCKWGVLILALLRYKCGKSRLTVAKG | 300 |
| | LSTLLHVPETCMLIQPPKLRSSVAALYWYRTGISNISEVMGDTPEWIQRLTIIQHGIDDS | 360 |
| | NFDLSEMVQWAFDNELTDESDMAFEYALLADSNSNAAAFLKSNCQAKYLKDCATMCKHYR | 420 |
| | RAQKRQMNMSQWIRFRCSKIDEGGDWRPIVQFLRYQQIEFITFLGALKSFLKGTPKKNCL | 480 |
| | VFCGPANTGKSYFGMSFIHFIQGAVISFVNSTSHFWLEPLTDTKVAMLDDATTTCWTYFD | 540 |
| | TYMRNALDGNPISIDRKHKPLIQLKCPPILLTTNIHPAKDNRWPYLESRITVFEFPNAFP | 600 |
| | FDKNGNPVYEINDKNWKCFFERTWSRLDLHEEEEDADTEGNPFGTFKLRAGQNHRPL | 657 |
| HPV18 E2 Accession number W2WL18 | | |
| 1 | MQTPKETLSERLSCVQDKIIDHYENDSKDIDSQIQYWQLIRWENAIFFAAREHGIQTLNH | 60 |
| | QVVPAYNISKSKAHKAIELQMALQGLAQSRYKTEDWTLQDTCEELWNTEPTHCFKKGGQT | 120 |
| | VQVYFDGNKDNCMTYVAWDSVYYMTDAGTWDKTATCVSHRGLYYVKEGYNTFYIEFKSEC | 180 |
| | EKYGNTGTWEVHFGNNVIDCNDSMCSTSDDTVSATQLVKQLQHTPSPYSSTVSVGTAKTY | 240 |
| | GQTSAATRPGHCGLAEKQHCGPVNPLLGAATPTGNNKRRKLCSGNTTPIIHLKGDRNSLK | 300 |
| | CLRYRLRKHSDHYRDISSTWHWTGAGNEKTGILTVTYHSETQRTKFLNTVATPDSVQILV | 360 |
| | GYMTM | 365 |
| HPV18 E5 Accession number W5WL18 | | |
| 1 | MLSLIFLFCFCVCMYVCCHVPLLPSVCMCAYAWVLVFVYIVVITSPATAFTVYVFCFLLP | 60 |
| | MLLLHIHAILSLQ | 73 |
| HPV18 E6 | | |
| 1 | MARFEDPTRRPYKLPDLCTELNTSLQDIEITCVYCKTVLELTEVFEFAFKDLFVVYRDSI | 60 |
| | PHAACHKCIDFYSRIRELRHYSDSVYGDTLEKLTNTGLYNLLIRCLRCQKPLNPAEKLRH | 120 |
| | LNEKRRPHNIAGHYRGQCHSCCNRARQERLQRRRETQV | 158 |
| HPV18 E7 | | |
| 1 | MHGPKATLQDIVLHLEPQNEIPVDLLCHEQLSDSEEENDEIDGVNHQHLPARRAEPQRHT | 60 |
| | MLCMCCKCEARIKLVVESSADDLRAFQQLFLNTLSFVCPWCASQQ | 105 |
| HPV18 L1 Accession number CAA28671 | | |
| 1 | MCLYTRVLILHYHLLPLYGPLYHPRPLPLHSILVYMVHIIICGHYIILFLRNVNVFPIFL | 60 |
| | QMALWRPSDNTVYLPPPSVARVVNTDDYVTPTSIPYHAGSSRLLTVGNPYFRVPAGGGNK | 120 |
| | QDIPKVSAYQYRVFRVQLPDPNKFGLPDTSIYNPETQRLVWACAGVEIGRGQPLGVGLSG | 180 |
| | HPFYNKLDDTESSHAATSNVSEDVRDNVSVDYKQTQLCILGCAPAIGEHWAKGTACKSRP | 240 |
| | LSQGDCPPLELKNTVLEDGDMVDTGYGAMDFSTLQDTKCEVPLDICQSICKYPDYLQMSA | 300 |
| | DPYGDSMFFCLRREQLFARHFWNRAGTMGDTVPQSLYIKGTGMPASPGSCVYSPSPSGSI | 360 |
| | VTSDSQLFNKPYWLHKAQGHNNGVCWHNQLFVTVVDTTPSTNLTICASTQSPVPGQYDAT | 420 |
| | KFKQYSRHVEEYDLQFIFQLCTITLTADVMSYIHSMNSSILEDWNFGVPPPPTTSLVDTY | 480 |
| | RFVQSVAITCQKDAAPAENKDPYDKLKFWNVDLKEKFSLDLDQYPLGRKFLVQAGLRRKP | 540 |
| | TIGPRKRSAPSATTSSKPAKRVRVRARK | 568 |
| HPV18 L2 Accession number P2WL18 | | |
| 1 | MVSHRAARRKRASVTDLYKTCKQSGTCPPDVVPKVEGTTLADKILQWSSLGIFLGGLGIG | 60 |
| | TGSGTGGRTGYIPLGGRSNTVVDVGPTRPPVVIEPVGPTDPSIVTLIEDSSVVTSGAPRP | 120 |
| | TFTGTSGFDITSAGTTTPAVLDITPSSTSVSISTTNFTNPAFSDPSIIEVPQTGEVAGNV | 180 |
| | FVGTPTSGTHGYEEIPLQTFASSGTGEEPISSTPLPTVRRVAGPRLYSRAYQQVSVANPE | 240 |
| | FLTRPSSLITYDNPAFEPVDTTLTFDPRSDVPDSDFMDIIRLHRPALTSRRGTVRFSRLG | 300 |
| | QRATMFTRSGTQIGARVHFYHDISPIAPSPEYIELQPLVSATEDNDLFDIYADDMDPAVP | 360 |
| | VPSRSTTSFAFFKYSPTISSASSYSNVTVPLTSSWDVPVYTGPDITLPSTTSVWPIVSPT | 420 |
| | APASTQYIGIHGTHYYLWPLYYFIPKKRKRVPYFFADGFVAA | 462 |
| HPV31 E1 Accession number W1WL31 | | |
| 1 | MADPAGTDGEGTGCNGWFYVEAVIDRQTGDNISEDENEDSSDTGEDMVDFIDNCNVYNNQ | 60 |
| | AEAETAQALFHAQEAEEHAEAVQVLKRKYVGSPLSDISSCVDYNISPRLKAICIENNSKT | 120 |
| | AKRRLFELPDSGYGNTEVETQQMVQVEEQQTTLSCNGSDGTHSERENETPTRNILQVLKT | 180 |
| | SNGKAAMLGKFKELYGVSFMELIRPFQSNKSTCTDWCVAAFGVTGTVAEGFKTLLQPYCL | 240 |
| | YCHLQSLACSWGMVMLMLVRFKCAKNRITIEKLLEKLLCISTNCMLIQPPKLRSTAAALY | 300 |
| | WYRTGMSNISDVYGETPEWIERQTVLQHSFNDTTFDLSQMVQWAYDNDVMDDSEIAYKYA | 360 |
| | QLADSDSNACAFLKSNSQAKIVKDCGTMCRHYKRAEKRQMSMGQWIKSRCDKVSDEGDWR | 420 |
| | DIVKFLRYQQIEFVSFLSALKLFLKGVPKKNCILIHGAPNTGKSYFGMSLISFLQGCIIS | 480 |
| | YANSKSHFWLQPLADAKIGMLDDATTPCWHYIDNYLRNALDGNPVSIDVKHKALMQLKCP | 540 |
| | PLLITSNINAGKDDRWPYLHSRLVVFTFPNPFPFDKNGNPVYELSDKNWKSFFSRTWCRL | 600 |
| | NLHEEEDKENDGDSFTFKCVSGQNIRTL | 629 |
| HPV31 E2 Accession number W2WL31 | | |
| 1 | METLSQRLNVCQDKILEHYENDSKRLCDHIDYWKHIRLECVLMYKAREMGIHSINHQVVP | 60 |
| | ALSVSKAKALQAIELQMMLETLNNTEYKNEDWTMQQTSLELYLTAPTGCLKKHGYTVEVQ | 120 |
| | FDGDVHNTMHYTNWKFIYLCIDGQCTVVEGQVNCKGIYYVHEGHITYFVNFTEEAKKYGT | 180 |
| | GKKWEVHAGGQVIVFPESVFSSDEISFAGIVTKLPTANNTTTSNSKTCALGTSEGVRRAT | 240 |
| | TSTKRPRTEPEHRNTHHPNKLLRGDSVDSVNCGVISAAACTNQTRAVSCPATTPIIHLKG | 300 |
| | DANILKCLRYRLSKYKQLYEQVSSTWHWTCTDGKHKNAIVTLTYISTSQRDDFLNTVKIP | 360 |
| | NTVSVSTGYMTI | 372 |
| HPV31 E5 Accession number W5WL31 | | |
| 1 | MIELNISTVSIVLCFLLCFCVLLFVCLVIRPLVLSVSVYATLLLLIVILWVIATSPLRCF | 60 |
| | CIYVVFIYIPLFVIHTHASFLSQQ | 84 |
| HPV31 E6 Accession number W6WL31 | | |
| 1 | MFKNPAERPRKLHELSSALEIPYDELRLNCVYCKGQLTETEVLDFAFTDLTIVYRDDTPH | 60 |
| | GVCTKCLRFYSKVSEFRWYRYSVYGTTLEKLTNKGICDLLIRCITCQRPLCPEEKQRHLD | 120 |
| | KKKRFHNIGGRWTGRCIACWRRPRTETQV | 149 |
| HPV31 E7 Accession number W7WL31 | | |
| 1 | MRGETPTLQDYVLDLQPEATDLHCYEQLPDSSDEEDVIDSPAGQAEPDTSNYNIVTFCCQ | 60 |
| | CKSTLRLCVQSTQVDIRILQELLMGSFGIVCPNCSTRL | 98 |
| HPV31 L1 Accession number P1WL31 | | |
| 1 | MSLWRPSEATVYLPPVPVSKVVSTDEYVTRTNIYYHAGSARLLTVGHPYYSIPKSDNPKK | 60 |
| | IVVPKVSGLQYRVFRVRLPDPNKFGFPDTSFYNPETQRLVWACVGLEVGRGQPLGVGISG | 120 |
| | HPLLNKFDDTENSNRYAGGPGTDNRECISMDYKQTQLCLLGCKPPIGEHWGKGSPCSNNA | 180 |
| | ITPGDCPPLELKNSVIQDGDMVDTGFGAMDFTALQDTKSNVPLDICNSICKYPDYLKMVA | 240 |
| | EPYGDTLFFYLRREQMFVRHFFNRSGTVGESVPTDLYIKGSGSTATLANSTYFPTPSGSM | 300 |
| | VTSDAQIFNKPYWMQRAQGHNNGICWGNQLFVTVVDTTRSTNMSVCAAIANSDTTFKSSN | 360 |
| | FKEYLRHGEEFDLQFIFQLCKITLSADIMTYIHSMNPAILEDWNFGLTTPPSGSLEDTYR | 420 |
| | FVTSQAITCQKTAPQKPKEDPFKDYVFWEVNLKEKFSADLDQFPLGRKFLLQAGYRARPK | 480 |
| | FKAGKRSAPSASTTTPAKRKKTKK | 504 |
| HPV31 L2 Accession number P2WL31 | | |
| 1 | MRSKRSTKRTKRASATQLYQTCKAAGTCPSDVIPKIEHTTIADQILRYGSMGVFFGGLGI | 60 |
| | GSGSGTGGRTGYVPLSTRPSTVSEASIPIRPPVSIDPVGPLDPSIVSLVEESGIVDVGAP | 120 |
| | APIPHPPTTSGFDIATTADTTPAILDVTSVSTHENPTFTDPSVLQPPTPAETSGHLLLSS | 180 |
| | SSISTHNYEEIPMDTFIVSTNNENITSSTPIPGVRRPARLGLYSKATQQVKVIDPTFLSA | 240 |
| | PKQLITYENPAYETVNAEESLYFSNTSHNIAPDPDFLDIIALHRPALTSRRNTVRYSRLG | 300 |
| | NKQTLRTRSGATIGARVHYYYDISSINPAGESIEMQPLGASATTTSTLNDGLYDIYADTD | 360 |
| | FTVDTPATHNVSPSTAVQSTSAVSAYVPTNTTVPLSTGFDIPIFSGPDVPIEHAPTQVFP | 420 |
| | FPLAPTTPQVSIFVDGGDFYLHPSYYMLKRRRKRVSYFFTDVSVAA | 466 |
| HPV45 E1 Accession number S36563 | | |
| 1 | MADPEGTDGEGTGCNGWFFVETIVEKKTGDVISDDEDETATDTGSDMVDFIDTQLSICEQ | 60 |
| | AEQETAQALFHAQEVQNDAQVLHLLKRKPAGGSKENSPLGEQLSVDTDLSPRLQEISLNS | 120 |
| | GHKKAKRRLFTISDSGYGCSEVEAAETQVTVNTNAENGGSVHSTQSSGGDSSDNAENVDP | 180 |
| | HCSITELKELLQASNKKAAMLAVFKDIYGLSFTDLVRNFKSDKTTCTDWVMAIPGVNPTV | 240 |
| | AEGFKTLIKPATLYAHIQCLDCKWGVLILALLRYKCGKNRLTVAKGLSTLLHVPETCMLI | 300 |
| | EPPKLRSSVAALYWYRTGISNISEVSGDTPEWIQRLTIIQHGIDDSNFDLSDMVQWAPDN | 360 |
| | DLTDESDMAFQYAQLADCNSNAAAFLKSNCQAKYLKDCAVMCRHYKRAQKRQMNMSQWIK | 420 |
| | YRCSKIDEGGDWRPIVQFLRYQGVEFISFLRALKEFLKGTPKKNCILLYGPANTGKSYFG | 480 |
| | MSFIHFLQGAIISPVNSNSHPWLEPLADTKVAMLDDATHTCWTYPDNYWRNALDGNPISI | 540 |
| | DRKHKPLLQLKCPPILLTSNIDPAKDNKWPYLESRVTVFTFPHAFPFDKNGNPVYEINDK | 600 |
| | NWKCFFERTWSRLDLHEDDEDADTEGIPFGTFKCVTGQNTRPL | 643 |
| HPV45 E2 Accession number S36564 | | |
| | MKMQTPKESLSERLSALQDKILDHYENDSKDINSQISYWQLIRLENAILFTAREHGITKL | 60 |
| | NHQVVPPINISKSKAHKAIELQMALKGLAQSKYNNEEWTLQDTCEELWNTEPSQCFKKGG | 120 |
| | KTVHVYFDGNYDNCMNYVVWDSIYYITETGIWDKTAACVSYWGVYYIKDGDTTYYVQFKS | 180 |
| | ECEKYGNSNTWEVQYGGNVIDCNDSMCSTSDDTVSATQIVRQLQHASTSTPKTASVGTPK | 240 |
| | PHIQTPATKRPRQCGLTEQHHGRVNTHVHNPLLCSSTSNNKRRKVCSGNTTPIIHLKGDK | 300 |
| | NSLKCLRYRLRKYADHYSEISSTWHWTGCNKNTGILTVTYNSEVQRNTFLDVVTIPNSVQ | 360 |
| | ISVGYMTI | 368 |
| HPV45 E6 Accession number CAB44706 | | |
| 1 | MARFDDPTQRPYKLPDLCTELNTSLQDVSIACVYCKATLERTEVYQFAFKDLFIVYRDCI | 60 |
| | AYAACHKCIDFYSRIRELRYYSNSVYGETLEKITNTELYNLLIRCLRCQKPLNPAEKRRH | 120 |
| | LKDKRRFHSIAGQYRGQCNTCCDQARQERLRRRRETQV | 158 |
| HPV45 E7 Accession number CAB44707 | | |
| 1 | MGGPRATLQEIVLHLEPQNELDPVDLLCYEQLSESEEENDEADGVSHAQLPARRAEPQRH | 60 |
| | KILCVCCKCDGRIELTVESSADDLRTLQQLFLSTLSFVCPWCATNQ | 106 |
| HP45 L1 Accession number CAB44705 | | |
| 1 | MAHNIIYGHGIIIFLKNVNVFPIFLQMALWRPSDSTVYLPPPSVARVVNTDDYVSRTSIF | 60 |
| | YHAGSSRLLTVGNPYFRVVPSGAGNKQAVPKVSAYQYRVFRVALPDPNKFGLPDSTIYNP | 120 |
| | ETQRLVWACVGMEIGRGQPLGIGLSGHPFYNKLDDTESAHAATAVITQDVRDNVSVDYKQ | 180 |
| | TQLCILGCVPAIGEHWAKGTLCKPAQLQPGDCPPLELKNTIIEDGDMVDTGYGAMDFSTL | 240 |
| | QDTKCEVPLDICQSICKYPDYLQMSADPYGDSMFFCLRREQLFARHFWNRAGVMGDTVPT | 300 |
| | DLYIKGTSANMRETPGSCVYSPSPSGSITTSDSQLFNKPYWLHKAQGHNNGICWHNQLFV | 360 |
| | TVVDTTRSTNLTLCASTQNPVPNTYDPTKFKHYSRHVEEYDLQFIFQLCTITLTAEVMSY | 420 |
| | IHSMNSSILEINWFGVPPPPTTSLVDTYRFVQSVAVTCQKDTTPPEKQDPYDKLKFWTVD | 480 |
| | LKEKFSSDLDQYPLGRKFLVQAGLRRRPTIGPRKRPAASTSTASRPAKRVRIRSKK | 536 |
| HPV45 L2 Accession number S36565 | | |
| 1 | MVSHRAARRKRASATDLYRTCKQSGTCPPDVINKVEGTTLADKILQWSSLGIFLGGLGIG | 60 |
| | TGSGSGGRTGYVPLGGRSNTVVDVGPTRPPVVIEPVGPTDPSIVTLVEDSSVVASGAPVP | 120 |
| | TFTGTSGFEITSSGTTTPAVLDITPTVDSVSISSTSFTNPAFSDPSIIEVPQTGEVSGNI | 180 |
| | FVGTPTSGSHGYEEIPLQTFASSGSGTEPISSTPLPTVRRVRGPRLYSRANQQVRVSTSQ | 240 |
| | FLTHPSSLVTFDNPAYEPLDTTLSFEPTSNVPDSDFMDIIRLHRPALSSRRGTVRFSRLG | 300 |
| | QRATMFTRSGKQIGGRVHFYHDISPIAATEEIELQPLISATNDSDLFDVYADFPPPASTT | 360 |
| | PSTIHKSFTYPKYSLTMPSTAASSYSNVTVPLTSAWDVPIYTGPDIILPSHTPMWPSTSP | 420 |
| | TNASTTTYIGIHGTQYYLWPWYYYFPKKRKRIPYFFADGFVAA | 463 |
| HPV33 EQ Accession number W1WL33 | | |
| 1 | MADPEGTNGAGMGCTGWFEVEAVIERRTGDNISEDEDETADDSGTDLLEFIDDSMENSIQ | 60 |
| | ADTEAARALFNIQEGEDDLNAVCALKRKFAACSQSAAEDVVDRAANPCRTSINKNKECTY | 120 |
| | RKRKIDELED$GYGNTEVETQQMVQQVESQNGDTNLNDLESSGVGDDSEVSCETNVDSCE | 180 |
| | NVTLQEISNVLHSSNTKANILYKFKEAYGISFMELVRPFKSDKTSCTDWCITGYGISPSV | 240 |
| | AESLKVLIKQHSLYTHLQCLTCDRGIIILLLIRFRCSKNRLTVAKLMSNLLSIPETCMVI | 300 |
| | EPPKLRSQTCALYWFRTAMSNISDVQGTTPEWIDRLTVLQHSFNDNIFDLSEMVQWAYDN | 360 |
| | ELTDDSDIAYYYAQLADSNSNAAAFLKSNSQAKIVKDCGIMCRHYKKAEKRKMSIGQWIQ | 420 |
| | SRCEKTNDGGNWRPIVQLLRYQNIEFTAFLGAFKKFLKGIPKKSCMLICGPANTGKSYFG | 480 |
| | MSLIQFLKGCVISCVNSKSHFWLQPLSDAKIGMIDDVTPISWTYIDDYMRNALDGNEISI | 540 |
| | DVKHRALVQLKCPPLLLTSNTNAGTDSRWPYLHSRLTVFEFKNPFPFDENGNPVYAINDE | 600 |
| | NWKSFFSRTWCKLDLIEEEDKENHGGNISTFKCSAGENTRSLRS | 644 |
| HPV33 E2 Accession number W2WL33 | | |
| 1 | MEEISARLNAVQEKILDLYEADKTDLPSQIEHWKLIRMECALLYTAKQMGFSHLCHQVVP | 60 |
| | SLLASKTKAFQVIELQMALETLSKSQYSTSQWTLQQTSLEVWLCEPPKCFKKQGETVTVQ | 120 |
| | YDNDKKNTMDYTNWGEIYIIEEDTCTMVTGKVDYIGMYYIHNCEKVYFKYFKEDAAKYSK | 180 |
| | TQMWEVHVGGQVIVCPTSISSNQISTTETADIQTDNDNRPPQAAAKRRRPADTTDTAQPL | 240 |
| | TKLFCADPALDNRTARTATNCTNKQRTVCSSNVAPIVHLKGESNSLKCLRYRLKPYKELY | 300 |
| | SSMSSTWHWTSDNKNSKNGIVTVTFVTEQQQQMFLGTVKIPPTVQISTGFMTL | 353 |
| HPV33 E5 Accession number W5WL33 | | |
| 1 | MIFVFVLCFILFLCLSLLLRPLILSISTYAWLLVLVLLLWVFVGSPLKIFFCYLLFLYLP | 60 |
| | MMCINFHAQHMTQQE | 75 |
| HPV33 E6 Accession number W6WL33 | | |
| 1 | MFQDTEEKPRTLHDLCQALETTIHNIELQCVECKKPLQRSEVYDFAFADLTVVYREGNPF | 60 |
| | GICKLCLRFLSKISEYRHYNYSVYGNTLEQTVKKPLNEILIRCIICQRPLCPQEKKRHVD | 120 |
| | LNKRFHNISGRWAGRCAACWRSRRRETAL | 149 |
| HPV33 E7 Accession number W7WL33 | | |
| 1 | MRGKKPTLKEYVLDLYPEPTDLYCYEQLSDSSDEDEGLDRPDGQAQPATADYYIVTCCHT | 60 |
| | CNTTVRLCVNSTASDLRTIQQLLMGTVNIVCPTCAQQ | 97 |
| HPV33 L1 Acession number P1WL33 | | |
| 1 | MSVWRPSEATVYLPPVPVSKVVSTDEYVSRTSIYYYAGSSRLLAVGHPYFSIKNPTNAKK | 60 |
| | LLVPKVSGLQYRVFRVRLPDPNKFGFPDTSFYNPDTQRLVWACVGLEIGRGQPLGVGISG | 120 |
| | HPLLNKFDDTETGNKYPGQPGADNRECLSMDYKQTQLCLLGCKPPTGEHWGKGVACTNAA | 180 |
| | PANDCPPLELINTIIEDGDMVDTGFGCMDFKTLQANKSDVPIDICGSTCKYPDVLKMTSE | 240 |
| | PYGDSLFFFLRREQMFVRHFFNRAGTLGEAVPDDLYIKGSGTTASIQSSAFFPTPSGSMV | 300 |
| | TSESQLFNKPYWLQRAQGHNNGICWGNQVFVTVVDTTRSTNMTLCTQVTSDSTYKNENFK | 360 |
| | EYIRHVEEYDLQFVFQLCKVTLTAEVMTYIHAMNPDILEDWQFGLTPPPSASLQDTYRFV | 420 |
| | TSQAITCQKTVPPKEKEDPLGKYTFWEVDLKEKFSADLDQFPLGRKFLLQAGLKAKPKLK | 480 |
| | RAAPTSTRTSSAKRKKVKK | 499 |
| HPV33 L2 Accession number P2WL33 | | |
| 1 | MRHKRSTRRKRASATQLYQTCKATGTCPPDVIPKVEGSTIADQILKYGSLGVFFGGLGIG | 60 |
| | TGSGSGGRTGYVPIGTDPPTAAIPLQPIRPPVTVDTVGPLDSSIVSLIEETSFIEAGAPA | 120 |
| | PSIPTPSGFDVTTSADTTPAIINVSSVGESSIQTISTHLNPTFTEPSVLHPPAPAEASGH | 180 |
| | FIPSSPTVSTQSYENIPMDTFVVSTDSSNVTSSTPIPGSRPVARLGLYSRNTQQVKVVDP | 240 |
| | AFLTSPHKLITYDNPAFESFDPEDTLQFQHSDISPAPDPDFLDIIALHRPAITSRRHTVR | 300 |
| | FSRVGQKATLKTRSGKQIGARIGYYQDLSPIVPLDHTVPNEQYELQPLHDTSTSSYSIND | 360 |
| | GLYDVYADDVDNVHTPMQHSYSTFATTRTSNVSIPLNTGFDTPVMSGPDIPSPLFPTSSP | 420 |
| | FVPISPFFPFDTIVVDGADFVLHPSYFILRRRRKRFPYFFTDVRVAA | 467 |
| HPV56 E2 Accession number S36581 | | |
| 1 | MVPCLQVCKAKACSAIEVQIALESLSTTIYNNEEWTLRDTCEELWLTEPKKCFKKEGQHI | 60 |
| | EVWFDGSKNNCMQYVAWKYIYYNGDCGWQKVCSGVDYRGIYYVHDGHKTYYTDFEQEAKK | 120 |
| | FGCKNIWEVHMENESIYCPDSVSSTCRYNVSPVETVNEYNTHKTTTTTSTSVGNQDAAVS | 180 |
| | HRPGKRPRLRESEFDSSRESHAKCVTTHTHISDTDNTDSRSRSINNNNHPGDKTTPVVHL | 240 |
| | KGEPNRLKCCRYRFQKYKTLFVDVTSTYHWTSTDNKNYSIITIIYKDETQRNSFLSHVKI | 300 |
| | PVVYRLVWDK | 310 |
| HPV56 E6 Accession numbeR W6WL56 | | |
| 1 | MEPQFNNPQERPRSLHHLSEVLEIPLIDLRLSCVYCKKELTRAEVYNFACTELKLVYRDD | 60 |
| | FPYAVCRVCLLFYSKVRKYRYYDYSVYGATLESITKKQLCDLLIRCYRCQSPLTPEEKQL | 120 |
| | HCDRKRRFHLIAHGWTGSCLGCWRQTSREPRESTV | 155 |
| HPV56 E7 Accession number S36580 | | |
| 1 | MHGKVPTLQDVVLELTPQTEIDLQCNEQLDSSEDEDEDEVDHLQERPQQARQAKQHTCYL | 60 |
| | IHVPCCECKFVVQLDIQSTKEDLRVVQQLLMGALTVTCPLCASSN | 105 |
| HPV56 L1 Accession number S38563 | | |
| 1 | MMLPMMYIYRDPPLHYGLCIFLDVGAVNVFPIFLQMATWRPSENKVYLPPTPVSKVVATD | 60 |
| | SYVKRTSIFYHAGSSRLLAVGHPYYSVTKDNTKTNIPKVSAYQYRVFRVRLPDPNKFGLP | 120 |
| | DTNIYNPDQERLVWACVGLEVGRGQPLGAGLSGHPLFNRLDDTESSNLANNNVIEDSRDN | 180 |
| | ISVDGKQTQLCIVGCTPAMGEHWTKGAVCKSTQVTTGDCPPLALINTPIEDGDMIDTGFG | 240 |
| | AMDFKVLQESKAEVPLDIVQSTCKYPDYLKMSADAYGDSMWFYLRREQLFARHYFNRAGK | 300 |
| | VGETIPAELYLKGSNGREPPPSSVYVATPSGSMITSEAQLFNKPYWLQRAQGHNNGICWG | 360 |
| | NQLFVTVVDTTRSTNMTISTATEQLSKYDARKINQYLRHVEEYELQFVFQLCKITLSAEV | 420 |
| | MAYLHNMNANLLEDWNIGLSPPVATSLEDKYRYVRSTAITCQREQPPTEKQDPLAKYKFW | 480 |
| | DVNLQDSFSTDLDQFPLGRKFLMQLGTRSKPAVATSKKRSAPTSTSTPAKRKRR | 534 |
| HPV56 L2 Accession number S36582 | | |
| 1 | MVAHRATRRKRASATQLYKTCKLSGTCPEDVVNKIEQKTWADKILQWGSLFTYFGGLGIG | 60 |
| | TGTGSGGRAGYVPLGSRPSTIVDVTPARPPIVVESVGPTDPSIVTLVEESSVIESGAGIP | 120 |
| | NFTGSGGFEITSSSTTTPAVLDITPTSSTVHVSSTHITNPLFIDPPVIEAPQTGEVSGNI | 180 |
| | LISTPTSGIHSYEEIPMQTFAVHGSGTEPISSTPIPGFRRIAAPRLYRKAFQQVKVTDPA | 240 |
| | FLDRPATLVSADNPLFEGTDTSLAFSPSGVAPDPDFMNIVALHRPAFTTRRGGVRFSRLG | 300 |
| | RKATIQTRRGTQIGARVHYYYDISPIAQAEEIEMQPLLSANNSFDGLYDIYANIDDEAPG | 360 |
| | LSSQSVATPSAHLPIKPSTLSFASNTTNVTAPLGNVWETPFYSGPDIVLPTGPSTWPFVP | 420 |
| | QSPYDVTHDVYIQGSSFALWPVYFFRRRRRKRIPYFFADGDVAA | 464 |

### HLA Class I Motifs Indicative of CTL Inducing Peptide Epitopes

[0093] The primary anchor residues of the HLA class I peptide epitope supermotifs and motifs delineated below are summarized in Table I. The HLA class I motifs set out in Table I(a) are those most particularly relevant to the invention claimed here. Primary and secondary anchor positions are summarized in Table II. Allele-specific HLA molecules that comprise HLA class I supertype families are listed in Table VI. In some cases, peptide epitopes may be listed in both a motif and a supermotif Table. The relationship of a particular motif and respective supermotif is indicated in the description of the individual motifs.

### HLA-A1 Supermotif

[0094] The HLA-A1 supermotif is characterized by the presence in peptide ligands of a small (T or S) or hydrophobic (L, I, V, or M) primary anchor residue in position 2, and an aromatic (Y, F, or W) primary anchor residue at the C-terminal position of the epitope. The corresponding family of HLA molecules that bind to the A1 supermotif (i.e., the HLA-A1 supertype) is comprised of at least A*1101, A*2601, A*2602, A*2501, and A*3201 (see, e.g., DiBrino, M. et al., J. Immunol 151:5930, 1993; DiBrino, M. et al., J. Immunol. 152:620, 1994; Kondo, A. et al., Immunogenetics 45:249, 1997). Other allele-specific HLA molecules predicted to be members of the A1 superfamily are shown in Table VI. Peptides binding to each of the individual HLA proteins can be modulated by substitutions at primary and/or secondary anchor positions, preferably choosing respective residues specified for the supermotif.

[0095] Representative peptide epitopes that comprise the A1 supermotif are set forth in Table VII.

### HLA-A2 Supermotif

[0096] Primary anchor specificities for allele-specific HLA-A2.1 molecules (see, e.g., Falk et al., Nature 351:290-296, 1991; Hunt et al., Science 255:1261-1263, 1992; Parker et al., J. Immunol. 149:3580-3587, 1992; Ruppert et al., Cell 74:929-937, 1993) and cross-reactive binding among HLA-A2 and -A28 molecules have been described. (See, e.g., Fruci et al., Human Immunol. 38:187-192, 1993; Tanigaki et al., Human Immunol. 39:155-162, 1994; Del Guercio et al., J. Immunol. 154:685-693, 1995; Kast et al., J. Immunol. 152:3904-3912, 1994 for reviews of relevant data.) These primary anchor residues define the HLA-A2 supermotif which presence in peptide ligands corresponds to the ability to bind several different HLA-A2 and -A28 molecules. The HLA-A2 supermotif comprises peptide ligands with L, I, V, M, A, T, or Q as a primary anchor residue at position 2 and L, I, V, M, A, or T as a primary anchor residue at the C-terminal position of the epitope.

[0097] The corresponding family of HLA molecules (i.e., the HLA-A2 supertype that binds these peptides) is comprised of at least: A*0201, A*0202, A*0203, A*0204, A*0205, A*0206, A*0207, A*0209, A*0214, A*6802, and A*6901, Other allele-specific HLA molecules predicted to be members of the A2 superfamily are shown in Table VI. As explained in detail below, binding to each of the individual allele-specific HLA molecules can be modulated by substitutions at the primary anchor and/or secondary anchor positions, preferably choosing respective residues specified for the supermotif.

[0098] Representative peptide epitopes that comprise an A2 supermotif are set forth in Table VIII. The motifs comprising the primary anchor residues V, A, T, or Q at position 2 and L, I, V, A, or T at the C-terminal position are those most particularly relevant to the invention claimed herein.

### HLA-A3 Supermotif

[0099] The HLA-A3 supermotif is characterized by the presence in peptide ligands of A, L, I, V, M, S, or, T as a primary anchor at position 2, and a positively charged residue, R or K, at the C-terminal position of the epitope, e.g., in position 9 of 9-mers (see, e.g., Sidney et al., Hum. Immunol. 45:79, 1996). Exemplary members of the corresponding family of HLA molecules (the HLA-A3 supertype) that bind the A3 supermotif include at least A*0301, A*1101, A*3101, A*3301, and A*6801. Other allele-specific HLA molecules predicted to be members of the A3 supertype are shown in Table VI. As explained in detail below, peptide binding to each of the individual allele-specific HLA proteins can be modulated by substitutions of amino acids at the primary and/or secondary anchor positions of the peptide, preferably choosing respective residues specified for the supermotif.

[0100] Representative peptide epitopes that comprise the A3 supermotif are set forth in Table IX.

### HLA-A24 Supermotif

[0101] The HLA-A24 supermotif is characterized by the presence in peptide ligands of an aromatic (F, W, or Y) or hydrophobic aliphatic (L, I, V, M, or T) residue as a primary anchor in position 2, and Y, F, W, L, I, or M as primary anchor at the C-terminal position of the epitope (see, e.g., Sette and Sidney, Immunogenetics 1999 November; 50(3-4):201-12, Review). The corresponding family of HLA molecules that bind to the A24 supermotif (i.e., the A24 supertype) includes at least A*2402, A*3001, and A*2301. Other allele-specific HLA molecules predicted to be members of the A24 supertype are shown in Table VI. Peptide binding to each of the allele-specific HLA molecules can be modulated by substitutions at primary and/or secondary anchor positions, preferably choosing respective residues specified for the supermotif.

[0102] Representative peptide epitopes that comprise the A24 supermotif are set forth in Table X.

### HLA-B37 Supermotif

[0103] The HLA-B7 supermotif is characterized by peptides bearing proline in position 2 as a primary anchor, and a hydrophobic or aliphatic amino acid (L, I, V, M, A, F, W, or Y) as the primary anchor at the C-terminal position of the epitope. The corresponding family of HLA molecules that bind the B7 supermotif (i.e., the HLA-B7 supertype) is comprised of at least twenty six HLA-B proteins including: B*0702, B*0703, B*0704, B*0705, B*1508, B*3501, B*3502, B*3503, B*3504, B*3505, B*3506, B*3507, B*3508, B*5101, B*5102, B*5103, B*5104, B*5105, B*1058, B*5301, B*5401, B*5501, B*5502, B*5601, B*5602, B*6701, and B*7801 (see, e.g., Sidney, et al., J. Immunol. 154:247, 1995; Barber, et al., Curr. Biol. 5:179, 1995; Hill, et al., Nature 360:434, 1992; Rammensee, et al., Immunogenetics 41:178, 1995 for reviews of relevant data). Other allele-specific HLA molecules predicted to be members of the B7 supertype are shown in Table VI. As explained in detail below, peptide binding to each of the individual allele-specific HLA proteins can be modulated by substitutions at the primary and/or secondary anchor positions of the peptide, preferably choosing respective residues specified for the supermotif.

[0104] Representative peptide epitopes that comprise the B7 supermotif are set forth in Table XI.

### HLA-B27 Supermotif

[0105] The HLA-B27 supermotif is characterized by the presence in peptide ligands of a positively charged (R, H, or K) residue as a primary anchor at position 2, and a hydrophobic (F, Y, L, W, M, I, A, or V) residue as a primary anchor at the C-terminal position of the epitope (see, e.g., Sidney and Sette, Immunogenetics 1999 November; 50(3-4):201-12, Review). Exemplary members of the corresponding family of HLA molecules that bind to the B27 supermotif (i.e., the B27 supertype) include at least B*1401, B*1402, B*1509, B*2702, B*2703, B*2704, B*2705, B*2706, B*3801, B*3901, B*3902, and B*7301. Other allele-specific HLA molecules predicted to be members of the B27 supertype are shown in Table VI. Peptide binding to each of the allele-specific HLA molecules can be modulated by substitutions at primary and/or secondary anchor positions, preferably choosing respective residues specified for the supermotif.

[0106] Representative peptide epitopes that comprise the B27 supermotif are set forth in Table XII.

### HLA-B44 Supermotif

[0107] The HLA-B44 supermotif is characterized by the presence in peptide ligands of negatively charged (D or E) residues as a primary anchor in position 2, and hydrophobic residues (F, W, Y, L, I, M, V, or A) as a primary anchor at the C-terminal position of the epitope (see, e.g., Sidney et al., Immunol. Today 17:261, 1996). Exemplary members of the corresponding family of HLA molecules that bind to the B44 supermotif (i.e., the B44 supertype) include at least: B*1801, B*1802, B*3701, B*4001, B*4002, B*4006, B*4402, B*4403, and B*4006. Peptide binding to each of the allele-specific HLA molecules can be modulated by substitutions at primary and/or secondary anchor positions; preferably choosing respective residues specified for the supermotif.

### HLA-B58 Supermotif

[0108] The HLA-B58 supermotif is characterized by the presence in peptide ligands of a small aliphatic residue (A, S, or T) as a primary anchor residue at position 2, and an aromatic or hydrophobic residue (F, W, Y, L, I, V, M, or A) as a primary anchor residue at the C-terminal position of the epitope (see, e.g., Sidney and Sette, Immunogenetics 1999 November; 50(3-4):201-12, Review). Exemplary members of the corresponding family of HLA molecules that bind to the B58 supermotif (i.e., the B58 supertype) include at least: B*1516, B*1517, B*5701, B*5702, and B*5801. Other allele-specific HLA molecules predicted to be members of the B58 supertype are shown in Table VI. Peptide binding to each of the allele-specific HLA molecules can be modulated by substitutions at primary and/or secondary anchor positions, preferably choosing respective residues specified for the supermotif.

[0109] Representative peptide epitopes that comprise the B58 supermotif are set forth in Table XIII.

### HLA-B62 Supermotif

[0110] The HLA-B62 supermotif is characterized by the presence in peptide ligands of the polar aliphatic residue Q or a hydrophobic aliphatic residue (L, V, M, I, or P) as a primary anchor in position 2, and a hydrophobic residue (F, W, Y, M, I, V, L, or A) as a primary anchor at the C-terminal position of the epitope (see, e.g., Sidney and Sette, Immunogenetics 1999 November; 50(3-4):201-12, Review). Exemplary members of the corresponding family of HLA molecules that bind to the B62 supermotif (i.e., the B62 supertype) include at least: B*1501, B*1502, B*1513, and B5201. Other allele-specific HLA molecules predicted to be members of the B62 supertype are shown in Table VI. Peptide binding to each of the allele-specific HLA molecules can be modulated by substitutions at primary and/or secondary anchor positions, preferably choosing respective residues specified for the supermotif.

[0111] Representative peptide epitopes that comprise hie B62 supermotif are set forth in Table XIV.

### HLA-A1 Motif

[0112] The HLA-A1 motif is characterized by the presence in peptide ligands of T, S, or M as a primary anchor residue at position 2 and the presence of Y as a primary anchor residue at the C-terminal position of the epitope. An alternative allele-specific A1 motif is characterized by a primary anchor residue at position 3 rather than position 2. This motif is characterized by the presence of D, E, A, or S as a primary anchor residue in position 3, and a Y as a primary anchor residue at the C-terminal position of the epitope (see, e.g., DiBrino et al., J. Immunol., 152:620, 1994; Kondo et al., Immunogenetics 45:249, 1997; and Kubo et al., J. Immunol. 152:3913, 1994 for reviews of relevant data). Peptide binding to HLA A1 can be modulated by substitutions at primary and/or secondary anchor positions, preferably choosing respective residues specified for the motif.

[0113] Representative peptide epitopes that comprise either A1 motif are set forth in Table XV. Those epitopes comprising T, S, or M at position 2 and Y at the C-terminal position are also included in the listing of HLA-A1 supermotif-bearing peptides listed in Table VII, as these residues are a subset of the A1 supermotif primary anchors.

### HLA-A*0201 Motif

[0114] An HLA-A*0201 motif was determined to be characterized by the presence in peptide ligands of L or M as a primary anchor residue in position 2, and L or V as a primary anchor residue at the C-terminal position of a 9-residue peptide (see, e.g., Falk et al., Nature 351:290-296, 1991) and was further found to comprise an I at position 2 and I or A at the C-terminal position of a nine amino acid peptide (see, e.g., Hunt et al., Science 255:1261-1263, Mar. 6, 1992; Parker et al., J. Immunol. 149:3580-3587, 1992). The A*0201 allele-specific motif has also been defined by the present inventors to additionally comprise V, A, T, or Q as a primary anchor residue at position 2, and M or T as a primary anchor residue at the C-terminal position of the epitope (see, e.g., Kast et al., J. Immunol. 152:3904-3912, 1994). Thus, the HLA-A*0201 motif comprises peptide ligands with L, I, V, M, A, T, or Q as primary anchor residues at position 2 and L, I, V, M, A, or T as a primary anchor residue at the C-terminal position of the epitope. The preferred and tolerated residues that characterize the primary anchor positions of the HLA-A*0201 motif are identical to the residues describing the A2 supermotif. (For reviews of relevant data, see, e.g., Del Guercio et al., J. Immunol. 154:685-693, 1995; Ruppert et al., Cell 74:929-937, 1993; Sidney et al., Immunol. Today 17:261-266, 1996; Sette and Sidney, Curr. Opin. in Immunol. 10:478-482, 1998). Secondary anchor residues that characterize the A*0201 motif have additionally been defined (see, e.g., Ruppert et al., Cell 74:929-937, 1993). These are shown in Table II. Peptide binding to HLA-A*0201 molecules can be modulated by substitutions at primary and/or secondary anchor positions, preferably choosing respective residues specified for the motif.

[0115] Representative peptide epitopes that comprise an A*0201 motif are set forth in Table VIII. The A*0201 motifs comprising the primary anchor residues V, A, T, or Q at position 2 and L, I, V, A, or T at the C-terminal position are those most particularly relevant to the invention claimed herein.

### HLA-A3 Motif

[0116] The HLA-A3 motif is characterized by the presence in peptide ligands of L, M, V, I, S, A, T, F, C, G, or D as a primary anchor residue at position 2, and the presence of K, Y, R, H, F, or A as a primary anchor residue at the C-terminal position of the epitope (see, e.g., DiBrino et al., Proc. Natl. Acad. Sci. USA 90:1508, 1993; and Kubo et al., J. Immunol. 152:3913-3924, 1994). Peptide binding to HLA-A3 can be modulated by substitutions at primary and/or secondary anchor positions, preferably choosing respective residues specified for the motif.

[0117] Representative peptide epitopes that comprise the A3 motif are set forth in Table XVI. Those epitopes that also comprise the A3 supermotif are also listed in Table DC. The A3 supermotif primary anchor residues comprise a subset of the A3- and A11-allele specific motif primary anchor residues.

### HLA-A11 Motif

[0118] The HLA-A11 motif is characterized by the presence in peptide ligands of V, T, M, L, I, S, A, G, N, C, D, or F as a primary anchor residue in position 2, and K, R, Y, or H as a primary anchor residue at the C-terminal position of the epitope (see, e.g., Zhang et al., Proc. Natl. Acad. Sci USA 90:2217-2221, 1993; and Kubo et al., J. Immunol. 152:3913-3924, 1994). Peptide binding to HLA-A11 can be modulated by substitutions at primary and/or secondary anchor positions, preferably choosing respective residues specified for the motif.

[0119] Representative peptide epitopes that comprise the A1 motif are set forth in Table XVII; peptide epitopes comprising the A3 allele-specific motif are also present in this Table because of the extensive overlap between the A3 and A11 motif primary anchor specificities. Further, those peptide epitopes that comprise the A3 supermotif are also listed in Table IX.

### HLA-A24 Motif

[0120] The HLA-A24 motif is characterized by the presence in peptide ligands of Y, F, W, or M as a primary anchor residue in position 2, and F, L, I, or W as a primary anchor residue at the C-terminal position of the epitope (see, e., Kondo et al., J. Immunol. 155:4307-4312, 1995; and Kubo et al., J. Immunol. 152:3913-3924, 1994). Peptide binding to HLA-A24 molecules can be modulated by substitutions at primary and/or secondary anchor positions; preferably choosing respective residues specified for the motif.

[0121] Representative peptide epitopes that comprise the A24 motif are set forth in Table XVIII. These epitopes are also listed in Table X, which sets forth HLA-A24-supermotif-bearing peptides, as the primary anchor residues characterizing the A24 allele-specific motif comprise a subset of the A24 supermotif primary anchor residues.

### Motifs Indicative of Class II HTL Inducing Peptide Epitopes

[0122] The primary and secondary anchor residues of the HLA class II peptide epitope supermotifs and motifs delineated below are summarized in Table III.

### HLA DR-1-4-7 Supermotif

[0123] Motifs have also been identified for peptides that bind to three common HLA class II allele-specific HLA molecules: HLA DRB1*0401, DRB1*0101, and DRB1*0701 (see, e.g., the review by Southwood et al. J. Immunology 160:3363-3373, 1998). Collectively, the common residues from these motifs delineate the HLA DR-1-4-7 supermotif. Peptides that bind to these DR molecules carry a supermotif characterized by a large aromatic or hydrophobic residue (Y, F, W, L, I, V, or M) as a primary anchor residue in position 1, and a small, non-charged residue (S, T, C, A, P, V, I, L, or M) as a primary anchor residue in position 6 of a 9-mer core region. Allele-specific secondary effects and secondary anchors for each of these HLA types have also been identified (Southwood et al., supra). These are set forth in Table III. Peptide binding to HLA-DRB1*0401, DRB1*0101, and/or DRB1*0701 can be modulated by substitutions at primary and/or secondary anchor positions, preferably choosing respective residues specified for the supermotif.

[0124] Representative 9-mer epitopes comprising the DR-1-4-7 supermotif, wherein position 1 of the supermotif is at position 1 of the nine-residue core, are set forth in Table XIX. Exemplary-epitopes of 15 amino acids in length that comprises the nine residue core include the three residues on either side that flank the nine residue core. HTL epitopes that comprise the core sequences can also be of lengths other than 15 amino acids, supra. Accordingly, epitopes of the invention include sequences that typically comprise the nine residue core plus 1, 2, 3 (as in the exemplary 15-mer), 4, or 5 flanking residues on either side of the nine residue core.

### HLA DR3 Motifs

[0125] Two alternative motifs (i.e., submotifs) characterize peptide epitopes that bind to HLA-DR3 molecules (see, e.g., Geluk et al., J. Immunol. 152:5742, 1994). In the first motif (submotif DR3A) a large, hydrophobic residue (L, I, V, M, F, or Y) is present in anchor position I of a 9-mer core, and D is present as an anchor at position 4, towards the carboxyl terminus of the epitope. As in other class II motifs, core position I may or may not occupy the peptide N-terminal position.

[0126] The alternative DR3 submotif provides for lack of the large, hydrophobic residue at anchor position 1, and/or lack of the negatively charged or amide-like anchor residue at position 4, by the presence of a positive charge at position 6 towards the carboxyl terminus of the epitope. Thus, for the alternative allele-specific DR3 motif (submotif DR3B): L, I, V, M, F, Y, A, or Y is present at anchor position 1; D, N, Q, E, S, or T is present at anchor position 4; and K, R, or H is present at anchor position 6. Peptide binding to HLA-DR3 can be modulated by substitutions at primary and/or secondary anchor positions, preferably choosing respective residues specified for the motif.

[0127] Representative 9-mer epitopes corresponding to a nine residue sequence comprising the DR3a and DR3b submotifs (wherein position 1 of the motif is at position 1 of the nine residue core) are set forth in Table XXa and b. Exemplary epitopes of 15 amino acids in length that comprises the nine residue core include the three residues on either side that flank the nine residue core. HTL epitopes that comprises the cores sequences can also be of lengths other than 15 amino acids, supra. Accordingly, epitopes of the invention include sequences that typically comprise the nine residue core plus 1, 2, 3 (as in the exemplary 15-mer), 4, or 5 flanking residues on either side of the nine residue core.

[0128] Each of the HLA class I or class II epitopes set out in the Tables herein are deemed singly to be an inventive aspect of this application. Further, it is also an inventive aspect of this application that each epitope may be used in combination with any other epitope.

### Enhancing Population Coverage of the Vaccine

[0129] Vaccines that have broad population coverage are preferred because they are more commercially viable and generally applicable to the most people. Broad population coverage can be obtained using the peptides of the invention (and nucleic acid compositions that encode such peptides) through selecting peptide epitopes that bind to HLA alleles which, when considered in total, are present in most of the population. The Table below lists the overall frequencies of the HLA class I supertypes in various ethnicities (section a) and the combined population coverage achieved by the A2-, A3-, and B7-supertypes (section b). The A2-, A3-, and B7 supertypes are each present on the average of over 40% in each of these five major ethnic groups. Coverage in excess of 80% is achieved with a combination of these supermotifs. These results suggest that effective and non-ethnically biased population coverage is achieved upon use of a limited number of cross-reactive peptides. Although the population coverage reached with these three main peptide specificities is high, coverage can be expanded to reach 95% population coverage and above, and more easily achieve truly multispecific responses upon use of additional supermotif or allele-specific motif bearing peptides.

[0130] The B44-, A1-, and A24-supertypes are each present, on average, in a range from 25% to 40% in these major ethnic populations (section a). While less prevalent overall, the B27-, B58-, and B62 supertypes are each present with a frequency>25% in at least one major ethnic group (section a). In section b, the Table summarizes the estimated prevalence of combinations of HLA supertypes that have been identified in five major ethnic groups. The incremental coverage obtained by the inclusion of A1-, A24-, and B44-supertypes to the A2, A3, and B7 coverage and coverage obtained with all of the supertypes described herein, is shown.

[0131] The data presented herein, together with the previous definition of the A2-, A3-, and B7-supertypes, indicates that all antigens, with the possible exception of A29, B8, and B46, can be classified into a total of nine HLA supertypes. By including epitopes from the six most frequent supertypes, an average population coverage of 99% is obtained for five major ethnic groups.

Population Coverage with Combined HLA Supertypes

| | PHENOTYPIC FREQUENCY | | | | | |
|---|---|---|---|---|---|---|
| HLA- | | North | | | | |
| SUPER- | Cau- | American | Japa- | | | |
| TYPES | casian | Black | nese | Chinese | Hispanic | Average |
| a. Individual | | | | | | |
| Supertypes | | | | | | |
| A2 | 45.8 | 39.0 | 42.4 | 45.9 | 43.0 | 43.2 |
| A3 | 37.5 | 42.1 | 45.8 | 52.7 | 43.1 | 44.2 |
| B7 | 43.2 | 55.1 | 57.1 | 43.0 | 49.3 | 49.5 |
| A1 | 47.1 | 16.1 | 21.8 | 14.7 | 26.3 | 25.2 |
| A24 | 23.9 | 38.9 | 58.6 | 40.1 | 38.3 | 40.0 |
| B44 | 43.0 | 21.2 | 42.9 | 39.1 | 39.0 | 37.0 |
| B27 | 28.4 | 26.1 | 13.3 | 13.9 | 35.3 | 23.4 |
| B62 | 12.6 | 4.8 | 36.5 | 25.4 | 11.1 | 18.1 |
| B58 | 10.0 | 25.1 | 1.6 | 9.0 | 5.9 | 10.3 |
| b. Combined | | | | | | |
| Supertypes | | | | | | |
| A2, A3, B7 | 84.3 | 86.8 | 89.5 | 89.8 | 86.8 | 87.4 |
| A2, A3, B7, | 99.5 | 98.1 | 100.0 | 99.5 | 99.4 | 99.3 |
| A24, B44, | | | | | | |
| A1 | | | | | | |
| A2, A3, B7, | 99.9 | 99.6 | 100.0 | 99.8 | 99.9 | 99.8 |
| A24, B44, | | | | | | |
| A1, B27, | | | | | | |
| B62, B58 | | | | | | |

### Immune Response-Stimulating Peptide Analogs

[0132] In general, CTL and HTL responses to whole antigens are not directed against all possible epitopes. Rather, they axe restricted to a few “immunodominant” determinants (Zinkernagel, et al., Adv. Immunol. 27:5159, 1979; Beanink, et al., J. Exp. Med. 168:19351939, 1988; Rawle, et al., J. Immuno. 146:3977-3984, 1991). It has been recognized that immunodominance (Benacerraf, et al., Science 175:273-279, 1972) could be explained by either the ability of a given epitope to selectively bind a particular HLA protein (determinant selection theory) (Vitiello, et al., J. Immunol. 131:1635, 1983); Rosenthal, et al., Nature 267:156-158, 1977), or to be selectively recognized by the existing TCR (T cell receptor) specificities (repertoire theory) (Klein, J., IMMUNOLOGY, THE SCIENCE OF SELFNONSELF DISCRIMINATION, John Wiley & Sons, New York, pp. 270-310, 1982). It has been demonstrated that additional factors, mostly linked to processing events, can also play a key role in dictating, beyond strict immunogenicity, which of the many potential determinants will be presented as immunodominant (Sercarz, et al., Annu. Rev. Immunol. 11:729-766, 1993).

[0133] The concept of dominance and subdominance is relevant to immunotherapy of both infectious diseases and cancer. For example, in the course of chronic viral disease, recruitment of subdominant epitopes can be important for successful clearance of the infection, especially if dominant CTL or HTL specificities have been inactivated by functional tolerance, suppression, mutation of viruses and other mechanisms (Franco, et al., Curr. Opin. Immunol. 7:524-531, 1995). In the case of cancer and tumor antigens, CTLs recognizing at least some of the highest binding affinity peptides might be functionally inactivated. Lower binding affinity peptides are preferentially recognized at these times, and may therefore be preferred in therapeutic or prophylactic anti-cancer vaccines.

[0134] In particular, it has been noted that a significant number of epitopes derived from known non-viral tumor associated antigens (TAA) bind HLA class I with intermediate affinity (IC₅₀ in the 50-500 nM range). For example, it has been found that 8 of 15 known TAA peptides recognized by tumor infiltrating lymphocytes (TIL) or CTL bound in the 50-500 nM range. (These data are in contrast with estimates that 90% of known viral antigens were bound by HLA class I molecules with IC₅₀ of 50 nM or less, while only approximately 10% bound in the 50-500 nM range (Sette, et al., J. Immunol., 153:558-5592, 1994). In the cancer setting this phenomenon is probably due to elimination or functional inhibition of the CTL recognizing several of the highest binding peptides, presumably because of T cell tolerization events.

[0135] Without intending to be bound by theory, it is believed that because T cells to dominant epitopes may have been clonally deleted, selecting subdominant epitopes may allow existing T cells to be recruited, which will then lead to a therapeutic or prophylactic response. However, the binding of HLA molecules to subdominant epitopes is often less vigorous than to dominant ones. Accordingly, there is a need to be able to modulate the binding affinity of particular immunogenic epitopes for one or more HLA molecules, and thereby to modulate the immune response elicited by the peptide, for example to prepare analog peptides which elicit a more vigorous response. This ability would greatly enhance the usefulness of peptide epitope-based vaccines and therapeutic agents.

[0136] Although peptides with suitable cross-reactivity among all alleles of a superfamily are identified by the screening procedures described above, cross-reactivity is not always as complete as possible, and in certain cases procedures to increase cross-reactivity of peptides can be useful; moreover, such procedures can also be used to modify other properties of the peptides such as binding affinity or peptide stability. Having established the general rules that govern cross-reactivity of peptides for HLA alleles within a given motif or supermotif, modification (i.e., analoging) of the structure of peptides of particular interest in order to achieve broader (or otherwise modified) HLA binding capacity can be performed. More specifically, peptides which exhibit the broadest cross-reactivity patterns, can be produced in accordance with the teachings herein. The present concepts related to analog generation are set forth in greater detail in co-pending U.S. Ser. No. 09/226,775 filed Jan. 6, 1999.

[0137] In brief, the strategy employed utilizes the motifs or supermotifs which correlate with binding to certain HLA molecules. The motifs or supermotifs are defined by having primary anchors, and in many cases secondary anchors. Analog peptides can be created by substituting amino acid residues at primary anchor, secondary anchor, or at primary and secondary anchor positions. Generally, analogs are made for peptides that already bear a motif or supermotif. Preferred secondary anchor residues of supermotifs and motifs that have been defined for HLA class I and class II binding peptides are shown in Tables II and III, respectively.

[0138] For a number of the motifs or supermotifs in accordance with the invention, residues are defined which are deleterious to binding to allele-specific HLA molecules or members of HLA supertypes that bind the respective motif or supermotif (Tables II and III). Accordingly, removal of such residues that are detrimental to binding can be performed in accordance with the present invention. For example, in the case of the A3 supertype, when all peptides that have such deleterious residues are removed from the population of peptides used in the analysis, the incidence of cross-reactivity increased from 22% to 37% (see, e.g., Sidney, J. et al., Hu. Immunol. 45:79, 1996). Thus, one strategy to improve the cross-reactivity of peptides within a given supermotif is simply to delete one or more of the deleterious residues present within a peptide and substitute a small “neutral” residue such as Ala (that may not influence T cell recognition of the peptide). An enhanced likelihood of cross-reactivity is expected if, together with elimination of detrimental residues within a peptide, “preferred” residues associated with high affinity binding to an allele-specific HLA molecule or to multiple HLA molecules within a superfamily are inserted.

[0139] To ensure that an analog peptide, when used as a vaccine, actually elicits a CTL response to the native epitope in vivo (or, in the case of class II epitopes, elicits helper T cells that cross-react with the wild type peptides), the analog peptide may be used to immunize T cells in vitro from individuals of the appropriate HLA allele. Thereafter, the immunized cells' capacity to induce lysis of wild type peptide sensitized target cells is evaluated. It will be desirable to use as antigen presenting cells, cells that have been either infected, or transfected with the appropriate genes, or, in the case of class II epitopes only, cells that have been pulsed with whole protein antigens, to establish whether endogenously produced antigen is also recognized by the relevant T cells.

[0140] Another embodiment of the invention is to create analogs of weak binding peptides, to thereby ensure adequate numbers of cross-reactive cellular binders. Class I binding peptides exhibiting binding affinities of 500-5000 nM, and carrying an acceptable but suboptimal primary anchor residue at one or both positions can be “fixed” by substituting preferred anchor residues in accordance with the respective supertype. The analog peptides can then be tested for crossbinding activity.

[0141] Another embodiment for generating effective peptide analogs involves the substitution of residues that have an adverse impact on peptide stability or solubility in, e.g., a liquid environment. This substitution may occur at any position of the peptide epitope. For example, a cysteine (C) can be substituted out in favor of α-amino butyric acid. Due to its chemical nature, cysteine has the propensity to form disulfide bridges and sufficiently alter the peptide structurally so as to reduce binding capacity. Substituting α-amino butyric acid for C not only alleviates this problem, but actually improves binding and crossbinding capability in certain instances (see, e.g., the review by Sette et al., In: Persistent Viral Infections, Eds. R. Ahmed and I. Chen, John Wiley & Sons, England, 1999). Substitution of cysteine with α-amino butyric acid may occur at any residue of a peptide epitope, i.e. at either anchor or non-anchor positions.

Computer Screening of Protein Sequences from Disease-Related Antigens for Supermotif- or Motif-Bearing Peptides

[0142] In order to identify supermotif- or motif-bearing epitopes in a target antigen, a native protein sequence, e.g., a tumor-associated antigen, or sequences from an infectious organism, or a donor tissue for transplantation, is screened using a means for computing, such as an intellectual calculation or a computer, to determine the presence of a supermotif or motif within the sequence. The information obtained from the analysis of native peptide can be used directly to evaluate the status of the native peptide or may be utilized subsequently to generate the peptide epitope.

[0143] Computer programs that allow the rapid screening of protein sequences for the occurrence of the subject supermotifs or motifs are encompassed by the present invention; as are programs that permit the generation of analog peptides. These programs are implemented to analyze any identified amino acid sequence or operate on an unknown sequence and simultaneously determine the sequence and identify motif-bearing epitopes thereof; analogs can be simultaneously determined as well. Generally, the identified sequences will be from a pathogenic organism or a tumor-associated peptide. For example, the target molecules considered herein include, without limitation, the E1, E2, E4, E5a, E5b, E6, E7, L1 and L2 proteins of HPV.

[0144] In cases where the sequences of multiple variants of the same target protein are available, potential peptide epitopes can also be selected on the basis of their conservancy. For example, a criterion for conservancy may define that the entire sequence of an HLA class I binding peptide or the entire 9-mer core of a class II binding peptide, be conserved in a designated percentage, of the sequences evaluated for a specific protein antigen.

[0145] To target a broad population that may be infected with a number of different strains, it is preferable to include in vaccine compositions epitopes that are representative of HPV antigen sequences from different HPV strains. As appreciated by those in the art, regions with greater or lessor degrees of conservancy among HPv strains can be employed as appropriate for a given antigenic target.

[0146] It is important that the selection criteria utilized for prediction of peptide binding are as accurate as possible, to correlate most efficiently with actual binding. Prediction of peptides that bind, for example, to HLA-A*0201, on the basis of the presence of the appropriate primary anchors, is positive at about a 30% rate (see, e.g., Ruppert, J. et al. Cell 74:929, 1993). However, by extensively analyzing peptide-HLA binding data disclosed herein, data in related patent applications, and data in the art, the present inventors have developed a number of allele-specific polynomial algorithms that dramatically increase the predictive value over identification on the basis of the presence of primary anchor residues alone. These algorithms take into account not only the presence or absence of primary anchors, but also consider the positive or deleterious presence of secondary anchor residues (to account for the impact of different amino acids at different positions). The algorithms are essentially based on the premise that the overall affinity (or ΔG) of peptide-HLA interactions can be approximated as a linear polynomial function of the type:

ΔG=: a₁ᵢ×a₂ᵢ×a₃ᵢ . . . ×aₙᵢ

[0147] where aⱼᵢ is a coefficient that represents the effect of the presence of a given amino acid (j) at a given position (i) along the sequence of a peptide of n amino acids. An important assumption of this method is that the effects at each position are essentially independent of each other. This assumption is justified by studies that demonstrated that peptides are bound to HLA molecules and recognized by T cells in essentially an extended conformation. Derivation of specific algorithm coefficients has been described, for example, in Gulukota, K. et al., J. Mol. Biol. 267:1258, 1997.

[0148] Additional methods to identify preferred peptide sequences, which also make use of specific motifs, include the use of neural networks and molecular modeling programs (see, e.g., Milik et al., Nature Biotechnology 16:753, 1998; Altuvia et al., Hum. Immunol. 58:1, 1997; Altuvia et al., J. Mol. Biol. 249:244, 1995; Buus, S. Curr. Opin. Immunol. 11:209-213, 1999; Brusic, V. et al., Bioinformatics 14:121-130, 1998; Parker et al., J. Immunol. 152:163, 1993; Meister et al., Vaccine 13:581, 1995; Hammer et al., J. Exp. Med. 180:2353, 1994; Sturniolo et al., Nature Biotechnol. 17:555 1999).

[0149] For example, it has been shown that in sets of A*0201 motif-bearing peptides containing at least one preferred secondary anchor residue while avoiding the presence of any deleterious secondary anchor residues, 69% of the peptides will bind A*0201 with an IC₅₀ less than 500 nM (Ruppert, J. et al. Cell 74:929, 1993). These algorithms are also flexible in that cut-off scores may be adjusted to select sets of peptides with greater or lower predicted binding properties, as desired.

[0150] In utilizing computer screening to identify peptide epitopes, a protein sequence or translated sequence may be analyzed using software developed to search for motifs, for example the “FINDPATTERNS” program (Devereux, et al. Nucl. Acids Res. 12:387-395, 1984) or MotifSearch 1.4 software program (D. Brown, San Diego, Calif.) to identify potential peptide sequences containing appropriate HLA binding motifs. The identified peptides can be scored using customized polynomial algorithms to predict their capacity to bind specific HLA class I or class II alleles. As appreciated by one of ordinary skill in the art, a large array of computer programming software and hardware options are available in the relevant art which can be employed to implement the motifs of the invention in order to evaluate (e.g., without limitation, to identify epitopes, identify epitope concentration per peptide length, or to generate analogs) known or unknown peptide sequences.

[0151] In accordance with the procedures described above, HPV peptide epitopes that are able to bind HLA supertype groups or allele-specific HLA molecules have been identified (Tables VII-XX).

### Preparation of Peptide Epitopes

[0152] Peptides in accordance with the invention can be prepared synthetically, by recombinant DNA technology or chemical synthesis, or from natural sources such as native tumors or pathogenic organisms. Peptide epitopes may be synthesized individually or as polyepitopic peptides. Although the peptide will preferably be substantially free of other naturally occurring host cell proteins and fragments thereof, in some embodiments the peptides may be synthetically conjugated to native fragments or particles.

[0153] The peptides in accordance with the invention can be a variety of lengths, and either in their neutral (uncharged) forms or in forms which are salts. The peptides in accordance with the invention are either free of modifications such as glycosylation, side chain oxidation, or phosphorylation; or they contain these modifications, subject to the condition that modifications do not destroy the biological activity of the peptides as described herein.

[0154] When possible, it may be desirable to optimize HLA class I binding epitopes of the invention, such as can be used in a polyepitopic construct, to a length of about 8 to about 13 amino acid residues, often 8 to 11, preferably 9 to 10. HLA class II binding peptide epitopes of the invention may be optimized to a length of about 6 to about 30 amino acids in length, preferably to between about 13 and about 20 residues. Preferably, the peptide epitopes are commensurate in size with endogenously processed pathogen-derived peptides or tumor cell peptides that are bound to the relevant HLA molecules, however, the identification and preparation of peptides that comprise epitopes of the invention can also be carried out using the techniques described herein.

[0155] In alternative embodiments, epitopes of the invention can be linked as a polyepitopic peptide, or as a minigene that encodes a polyepitopic peptide.

[0156] In another embodiment, it is preferred to identify native peptide regions that contain a high concentration of class I and/or class II epitopes. Such a sequence is generally selected on the basis that it contains the greatest number of epitopes per amino acid length. It is to be appreciated that epitopes can be present in a nested or overlapping manner, e.g. a 10 amino acid long peptide could contain two 9 amino acid long epitopes and one 10 amino acid long epitope; upon intracellular processing, each epitope can be exposed and bound by an HLA molecule upon administration of such a peptide. This larger, preferably multi-epitopic, peptide can be generated synthetically, recombinantly, or via cleavage from the native source.

[0157] The peptides of the invention can be prepared in a wide variety of ways. For the preferred relatively short size, the peptides can be synthesized in solution or on a solid support in accordance with conventional techniques. Various automatic synthesizers are commercially available and can be used in accordance with known protocols. (See, for example, Stewart & Young, SOLID PHASE PEPTIDE SYNTHESIS, 2D. ED., Pierce Chemical Co., 1984). Further, individual peptide epitopes can be joined using chemical ligation to produce larger peptides that are still within the bounds of the invention.

[0158] Alternatively, recombinant DNA technology can be employed wherein a nucleotide sequence which encodes an immunogenic peptide of interest is inserted into an expression vector, transformed or transfected into an appropriate host cell and cultivated under conditions suitable for expression. These procedures are generally known in the art, as described generally in Sambrook et al., MOLECULAR CLONING, A LABORATORY MANUAL, Cold Spring Harbor Press, Cold Spring Harbor, N.Y. (1989). Thus, recombinant polypeptides which comprise one or more peptide sequences of the invention can be used to present the appropriate T cell epitope.

[0159] The nucleotide coding sequence for peptide epitopes of the preferred lengths contemplated herein can be synthesized by chemical techniques, for example, the phosphotriester method of Matteucci, et al., J. Am. Chem. Soc. 103:3185 (1981). Peptide analogs can be made simply by substituting the appropriate and desired nucleic acid base(s) for those that encode the native peptide sequence; exemplary nucleic acid substitutions are those that encode an amino acid defined by the motifs/supermotifs herein. The coding sequence can then be provided with appropriate linkers and ligated into expression vectors commonly available in the art, and the vectors used to transform suitable hosts to produce the desired fusion protein. A number of such vectors and suitable host systems are now available. For expression of the fusion proteins, the coding sequence will be provided with operably linked start and stop codons, promoter and terminator regions and usually a replication system to provide an expression vector for expression in the desired cellular host. For example, promoter sequences compatible with bacterial hosts are provided in plasmids containing convenient restriction sites for insertion of the desired coding sequence. The resulting expression vectors are transformed into suitable bacterial hosts. Of course, yeast, insect or mammalian cell hosts may also be used, employing suitable vectors and control sequences.

### Assays to Detect T-Cell Responses

[0160] Once HLA binding peptides are identified, they can be tested for the ability to elicit a T-cell response. The preparation and evaluation of motif-bearing peptides are described in PCT publications WO 94/20127 and WO 94/03205. Briefly, peptides comprising epitopes from a particular antigen are synthesized and tested for their ability to bind to the appropriate HLA proteins. These assays may involve evaluating the binding of a peptide of the invention to purified HLA class I molecules in relation to the binding of a radioiodinated reference peptide. Alternatively, cells expressing empty class I molecules (i.e. lacking peptide therein) may be evaluated for peptide binding by immunofluorescent staining and flow microfluorimetry. Other assays that may be used to evaluate peptide binding include peptide-dependent class I assembly assays and/or the inhibition of CTL recognition by peptide competition. Those peptides that bind to the class I molecule, typically with an affinity of 500 nM or less, are further evaluated for their ability to serve as targets for CTLs derived from infected or immunized individuals, as well as for their capacity to induce primary in vitro or in vivo CTL responses that can give rise to CTL populations capable of reacting with selected target cells associated with a disease.

[0161] Analogous assays are used for evaluation of HLA class II binding peptides. HLA class II motif-bearing peptides that are shown to bind, typically at an affinity of 1000 nM or less, are further evaluated for the ability to stimulate HTL responses.

[0162] Conventional assays utilized to detect T cell responses include proliferation assays, lymphokine secretion assays, direct cytotoxicity assays, and limiting dilution assays. For example, antigen-presenting cells that have been incubated with a peptide can be assayed for the ability to induce CTL responses in responder cell populations. Antigen-presenting cells can be normal cells such as peripheral blood mononuclear cells or dendritic cells. Alternatively, mutant non-human mammalian cell lines that are deficient in their ability to load class I molecules with internally processed peptides and that have been transfected with the appropriate human class I gene, may be used to test for the capacity of the peptide to induce in vitro primary CTL responses.

[0163] Peripheral blood mononuclear cells (PBMCs) may be used as the responder cell source of CTL precursors. The appropriate antigen-presenting cells are incubated with peptide, after which the peptide-loaded antigen-presenting cells are then incubated with the responder cell population under optimized culture conditions. Positive CTL activation can be determined by assaying the culture for the presence of CTLs that kill radio-labeled target cells, both specific peptide-pulsed targets as well as target cells expressing endogenously processed forms of the antigen from which the peptide sequence was derived.

[0164] Additionally, a method has been devised which allows direct quantification of antigen-specific T cells by staining with Fluorescein-labelled HLA tetrameric complexes (Altman, J. D. et al., Proc. Natl. Acad. Sci. USA 90:10330, 1993; Altman, J. D. et al., Science 274:94, 1996). Other relatively recent technical developments include staining for intracellular lymphokines, and interferon release assays or ELISPOT assays. Tetramer staining, intracellular lymphokine staining and ELISPOT assays all appear to be at least 10-fold more sensitive than more conventional assays (Lalvani, A. et al., J. Exp. Med. 186:859, 1997; Dunbar, P. R. et al., Curr. Biol. 8:413, 1998; Murali-Krishna, K. et al., Immunity 8:177, 1998).

[0165] HTL activation may also be assessed using such techniques known to those in the art such as T cell proliferation and secretion of lymphokines, e.g. IL-2 (see, e.g. Alexander et al., Immunity 1:751-761, 1994).

[0166] Alternatively, immunization of HLA transgenic mice can be used to determine immunogenicity of peptide epitopes. Several transgenic mouse models including mice with human A2.1, A11 (which can additionally be used to analyze HLA-A3 epitopes), and B7 alleles have been characterized and others (e.g., transgenic mice for HLA-A1 and A24) are being developed. HLA-DR1 and HLA-DR3 mouse models have also been developed. Additional transgenic mouse models with other HLA alleles may be generated as necessary. Mice may be immunized with peptides emulsified in Incomplete Freund's Adjuvant and the resulting T cells tested for their capacity to recognize peptide-pulsed target cells and target cells transfected with appropriate genes. CTL responses may be analyzed using cytotoxicity assays described above. Similarly, HTL responses may be analyzed using such assays as T cell proliferation or secretion of lymphokines.

### Use of Peptide Epitopes as Diagnostic Agents and for Evaluating Immune Responses

[0167] In one aspect of the invention, HLA class I and class II binding peptides as described herein can be used as reagents to evaluate an immune response. The immune response to be evaluated is induced by using as an immunogen any agent that may result in the production of antigen-specific CTLs or HTLs that recognize and bind to the peptide epitope(s) to be employed as the reagent. The peptide reagent need not be used as the immunogen. Assay systems that are used for such an analysis include relatively recent technical developments such as tetramers, staining for intracellular lymphokines and interferon release assays, or ELISPOT assays.

[0168] For example, a peptide of the invention is used in a tetramer staining assay to assess peripheral blood mononuclear cells for the presence of antigen-specific CTLs following exposure to a pathogen or immunogen. The HLA-tetrameric complex is used to directly visualize antigen-specific CTLs (see; e.g., Ogg et al., Science 279:2103-2106, 1998; and Altman et al., Science 174:94-96, 1996) and determine the frequency of the antigen-specific CTL population in a sample of peripheral blood mononuclear cells.

[0169] A tetramer reagent using a peptide of the invention is generated as follows: A peptide that binds to an HLA molecule is refolded in the presence of the corresponding HLA heavy chain and β₂-microglobulin to generate a trimolecular complex. The complex is biotinylated at the carboxyl terminal end of the heavy chain at a site that was previously engineered into the protein. Tetramer formation is then induced by the addition of streptavidin. By means of fluorescently labeled streptavidin, the tetramer can be used to stain antigen-specific cells. The cells can then be readily identified, for example, by flow cytometry. Such procedures are used for diagnostic or prognostic purposes. Cells identified by the procedure can also be used for therapeutic purposes.

[0170] Peptides of the invention are also used as reagents to evaluate immune recall responses. (see, e.g., Bertoni et al., J. Clin. Invest. 100:503-513, 1997 and Penna et al., J. Exp. Med. 174:1565-1570, 1991.) For example, patient PBMC samples from individuals infected with HPV are analyzed for the presence of antigen-specific CTLs or HTLs using specific peptides. A blood sample containing mononuclear cells may be evaluated by cultivating the PBMCs and stimulating the cells with a peptide of the invention. After an appropriate cultivation period, the expanded cell population may be analyzed, for example, for CTL or for HTL activity.

[0171] The peptides are also used as reagents to evaluate the efficacy of a vaccine. PBMCs obtained from a patient vaccinated with an immunogen are analyzed using, for example, either of the methods described above. The patient is HLA typed, and peptide epitope reagents that recognize the allele-specific molecules present in that patient are selected for the analysis. The immunogenicity of the vaccine is indicated by the presence of HPV epitope-specific CTLs and/or HTLs in the PBMC sample.

[0172] The peptides of the invention are also be used to make antibodies, using techniques well known in the art (see, e.g. CURRENT PROTOCOLS IN IMMUNOLOGY, Wiley/Greene, N Y; and Antibodies A Laboratory Manual Harlow, Harlow and Lane, Cold Spring Harbor Laboratory Press, 1989), which may be useful as reagents to diagnose HPV infection. Such antibodies include those that recognize a peptide in the context of an HLA molecule, i.e., antibodies that bind to a peptide-MHC complex.

### Vaccine Compositions

[0173] Vaccines and methods of preparing vaccines that contain an immunogenically effective amount of one or more peptides as described herein are further embodiments of the invention. Once appropriately immunogenic epitopes have been defined, they can be sorted and delivered by various means, herein referred to as “vaccine” compositions. Such vaccine compositions can include, for example, lipopeptides (e.g., Vitiello, A. et al., J. Clin. Invest. 95:341, 1995), peptide compositions encapsulated in poly(DL-lactide-co-glycolide) (“PLG”) microspheres (see, e.g., Eldridge, et al., Molec. Immunol. 28:287-294, 1991: Alonso et al., Vaccine 12:299-306, 1994; Jones et al., Vaccine 13:675-681, 1995), peptide compositions contained in immune stimulating complexes (ISCOMS) (see, e.g., Takahashi et al., Nature 344:873-875, 1990; Hu et al., Clin Exp Immunol. 113:235-243, 1998), multiple antigen peptide systems (MAPs) (see e.g., Tam, J. P., Proc. Natl. Acad. Sci. U.S.A. 85:5409-5413, 1988; Tam, J. P., J. Immunol. Methods 196:17-32, 1996), peptides formulated as multivalent peptides; peptides for use in ballistic delivery systems, typically crystallized peptides, viral delivery vectors (Perkus, M. E. et al., In: Concepts in vaccine development, Kaufmann, S. H. E., ed., p. 379, 1996; Chakrabarti, S. et al., Nature 320:535, 1986; Hu, S. L. et al., Nature 320:537, 1986; Kieny, M.-P. et al., AIDS Bio/Technology 4:790, 1986; Top, F. H. et al., J. Infect. Dis. 124:148, 1971; Chanda, P. K. et al., Virology 175:535, 1990), particles of viral or synthetic origin (e.g., Kofler, N. et al., J. Immunol. Methods. 192:25, 1996; Eldridge, J. H. et al., Sem. Hematol. 3016, 1993; Falo, L. D., Jr. et al., Nature Med. 7:649, 1995), adjuvants (Warren, H. S., Vogel, F. R., and Chedid, L. A. Annu. Rev. Immunol. 4:369, 1986; Gupta, K. K. et al., Vaccine 11:293, 1993), liposomes (Reddy, R. et al., J. Immunol. 148:1585, 1992; Rock, K. L., Immunol. Today 17:131, 1996), or, naked or particle absorbed cDNA (Ulmer, J. B. et al., Science 259:1745, 1993; Robinson, H. L., Hunt, L. A., and Webster, R. G., Vaccine 11:957, 1993; Shiver, J. W. et al., In: Concepts in vaccine development, Kaufmann, S. H. E., ed., p. 423, 1996; Cease, K. B., and Berzofsky, J. A., Annu. Rev. Immunol. 12:923, 1994 and Eldridge, J. H. et al., Sem. Hematol 30:16, 1993). Toxin-targeted delivery technologies, also known as receptor mediated targeting, such as those of Avant Immunotherapeutics, Inc. (Needham, Mass.) may also be used.

[0174] Vaccine compositions of the invention include nucleic acid-mediated modalities. DNA or RNA encoding one or more of the peptides of the invention can also be administered to a patient. This approach is described, for instance, in Wolff et. al., Science 247:1465 (1990) as well as U.S. Pat. Nos. 5,580,859; 5,589,466; 5,804,566; 5,739,118; 5,736,524; 5,679,647; WO 98/04720; and in more detail below. Examples of DNA-based delivery technologies include “naked DNA”, facilitated (bupivicaine, polymers, peptide-mediated) delivery, cationic lipid complexes, and particle-mediated (“gene gun”) or pressure-mediated delivery (see, e.g., U.S. Pat. No. 5,922,687).

[0175] For therapeutic or prophylactic immunization purposes, the peptides of the invention can be expressed by viral or bacterial vectors. Examples of expression vectors include attenuated viral hosts, such as vaccinia or fowlpox. This approach involves the use of vaccinia virus, for example, as a vector to express nucleotide sequences that encode the peptides of the invention. Upon introduction into an acutely or chronically infected host or into a non-infected host, the recombinant vaccinia virus expresses the immunogenic peptide, and thereby elicits a host CTL and/or HTL response. Vaccinia vectors and methods useful in immunization protocols are described in, e.g., U.S. Pat. No. 4,722,848. Another vector is BCG (Bacille Calmette Guerin). BCG vectors are described in Stover et al., Nature 351:456-460 (1991). A wide variety of other vectors useful for therapeutic administration or immunization of the peptides of the invention, e.g. adeno and adeno-associated virus vectors, retroviral vectors, Salmonella typhi vectors, detoxified anthrax toxin vectors, and the like, will be apparent to those skilled in the art from the description herein.

[0176] Furthermore, vaccines in accordance with the invention encompass compositions of one or more of the claimed peptides. A peptide can be present in a vaccine individually. Alternatively, the peptide can exist as a homopolymer comprising multiple copies of the same peptide, or as a heteropolymer of various peptides. Polymers have the advantage of increased immunological reaction and, where different peptide epitopes are used to make up the polymer, the additional ability to induce antibodies and/or CTLs that react with different antigenic determinants of the pathogenic organism or tumor-related peptide targeted for an immune response. The composition can be a naturally occurring region of an antigen or can be prepared, e.g., recombinantly or by chemical synthesis.

[0177] Carriers that can be used with vaccines of the invention are well known in the art, and include, e.g., thyroglobulin, albumins such as human serum albumin, tetanus toxoid, polyamino acids such as poly L-lysine, poly L-glutamic acid, influenza, hepatitis B virus core protein, and the like. The vaccines can contain a physiologically tolerable (i.e., acceptable) diluent such as water, or saline, preferably phosphate buffered saline. The vaccines also typically include an adjuvant. Adjuvants such as incomplete Freund's adjuvant, aluminum phosphate, aluminum hydroxide, or alum are examples of materials well known in the art. Additionally, as disclosed herein, CTL responses can be primed by conjugating peptides of the invention to lipids, such as tripalmitoyl-S-glycerylcysteinlyseryl-serine (P₃ CSS).

[0178] Upon immunization with a peptide composition in accordance with the invention, via injection, aerosol, oral, transdermal, transmucosal, intrapleural, intrathecal, or other suitable routes, the immune system of the host responds to the vaccine by producing large amounts of CTLs and/or HTLs specific for the desired antigen. Consequently, the host becomes at least partially immune to later infection, or at least partially resistant to developing an ongoing chronic infection, or derives at least some therapeutic benefit when the antigen was tumor-associated.

[0179] In some embodiments, it may be desirable to combine the class I peptide components with components that induce or facilitate neutralizing antibody and or helper T cell responses to the target antigen of interest. A preferred embodiment of such a composition comprises class I and class II epitopes in accordance with the invention. An alternative embodiment of such a composition comprises a class I and/or class II epitope in accordance with the invention, along with a cross reactive HTL epitope such as PADRE™ (Epimmune, San Diego, Calif.) molecule (described e.g., in U.S. Pat. No. 5,736,142).

[0180] A vaccine of the invention can also include antigen-presenting cells (APC), such as dendritic cells (DC), as a vehicle to present peptides of the invention. Vaccine compositions can be created in vitro, following dendritic cell mobilization and harvesting, whereby loading of dendritic cells occurs in vitro. For example, dendritic cells are transfected, e.g., with a minigene in accordance with the invention, or are pulsed with peptides. The dendritic cell can then be administered to a patient to elicit immune responses in vivo.

[0181] Vaccine compositions, either DNA- or peptide-based, can also be administered in vivo in combination with dendritic cell mobilization whereby loading of dendritic cells occurs in vivo.

[0182] Antigenic peptides are used to elicit a CTL and/or HTL response ex vivo, as well. The resulting CTL or HTL cells, can be used to treat chronic infections, or tumors in patients that do not respond to other conventional forms of therapy, or will not respond to a therapeutic vaccine peptide or nucleic acid in accordance with the invention. Ex vivo CTL or HTL responses to a particular antigen (infectious or tumor-associated antigen) are induced by incubating in tissue culture the patients, or genetically compatible, CTL or HTL precursor cells together with a source of antigen-presenting cells (APC), such as dendritic cells, and the appropriate immunogenic peptide. After an appropriate incubation time (typically about 7-28 days), in which the precursor cells are activated and expanded into effector cells, the cells are infused back into the patient, where they will destroy (CTL) or facilitate destruction (HTL) of their specific target cell (an infected cell or a tumor cell). Transfected dendritic cells may also be used as antigen presenting cells.

[0183] The vaccine compositions of the invention may also be used in combination with other procedures to remove warts or treat HPV infections. Such procedures include cryosurgery, application of caustic agents, electrodessication, surgical excision and laser ablation (Fauci et al. HARRISON'S PRINCIPLES OF INTERNAL MEDICINE, 14th ED., McGraw-Hill Co., Inc, 1998), as well as treatment with antiviral drugs such as interferon-α (see, e.g., Stellato, G., et al., Clin. Diagn. Virol. 7(3):167-72 (1997)) or interferon-inducing drugs such as imiquimod. Topical antimetabolites such a 5-fluorouracil may also be applied.

[0184] In patients with HPV-associated cancer, the vaccine compositions of the invention can also be used in conjunction with other treatments used for cancer, e.g., surgery, chemotherapy, drug therapies, radiation therapies, etc. including use in combination with immune adjuvants such as IL-2, IL-12, GM-CSF, and the like.

[0185] Preferably, the following principles are utilized when selecting an array of epitopes for inclusion in a polyepitopic composition for use in a vaccine, or for selecting discrete epitopes to be included in a vaccine and/or to be encoded by nucleic acids such as a minigene. It is preferred that each of the following principles are balanced in order to make the selection. The multiple epitopes to be incorporated in a given vaccine composition may be, but need not be, contiguous in sequence in the native antigen from which the epitopes are derived.

[0186] 1.) Epitopes are selected which, upon administration, mimic immune responses that have been observed to be correlated with clearance of HPV infection or tumor clearance. For HLA Class I this includes 3-4 epitopes that come from at least one TAA. For HLA Class II a similar rationale is employed; again 3-4 epitopes are selected from at least one TAA (see, e.g., Rosenberg et al., Science 278:1447-1450). Epitopes from one TAA may be used in combination with epitopes from one or more additional TAAs to produce a vaccine that targets tumors with varying expression patterns of frequently-expressed TAAs as described, e.g., in Example 15.

[0187] 2.) Epitopes are selected that have the requisite binding affinity established to be correlated with immunogenicity: for HLA Class I an IC₅₀ of 500 nM or less, often 200 nM or less; and for Class II an IC₅₀ of 1000 nM or less.

[0188] 3.) Sufficient supermotif bearing-peptides, or a sufficient array of allele-specific motif-bearing peptides, are selected to give broad population coverage. For example, it is preferable to have at least 80% population coverage. A Monte Carlo analysis, a statistical evaluation known in the art, can be employed to assess the breadth, or redundancy of, population coverage.

[0189] 4.) When selecting epitopes from cancer-related antigens it is often useful to select analogs because the patient may have developed tolerance to the native epitope. When selecting epitopes for infectious disease-related antigens it is preferable to select either native or analoged epitopes.

[0190] 5.) Of particular relevance are epitopes referred to as “nested epitopes.” Nested epitopes occur where at least two epitopes overlap in a given peptide sequence. A nested peptide sequence can comprise both HLA class I and HLA class II epitopes. When providing nested epitopes, a general objective is to provide the greatest number of epitopes per sequence. Thus, an aspect is to avoid providing a peptide that is any longer than the amino terminus of the amino terminal epitope and the carboxyl terminus of the carboxyl terminal epitope in the peptide. When providing a multi-epitopic sequence, such as a sequence comprising nested epitopes, it is generally important to screen the sequence in order to insure that it does not have pathological or other deleterious biological properties.

[0191] 6.) If a polyepitopic protein is created, or when creating a minigene, an objective is to generate the smallest peptide that encompasses the epitopes of interest. This principle is similar, if not the same as that employed when selecting a peptide comprising nested epitopes. However, with an artificial polyepitopic peptide, the size minimization objective is balanced against the need to integrate any spacer sequences between epitopes in the polyepitopic protein. Spacer amino acid residues can, for example, be introduced to avoid junctional epitopes (an epitope recognized by the immune system, not present in the target antigen, and only created by the man-made juxtaposition of epitopes), or to facilitate cleavage between epitopes and thereby enhance epitope presentation. Junctional epitopes are generally to be avoided because the recipient may generate an immune response to that non-native epitope. Of particular concern is a junctional epitope that is a “dominant epitope.” A dominant epitope may lead to such a zealous response that immune responses to other epitopes are diminished or suppressed.

[0192] 7.) In cases where the sequences of multiple variants of the same target protein are available, potential peptide epitopes can also be selected on the basis of their conservancy. For example, a criterion for conservancy may define that the entire sequence of an HLA class I binding peptide or the entire 9-mer core of a class II binding peptide be conserved in a designated percentage of the sequences evaluated for a specific protein antigen.

[0193] 8.) When selecting an array of epitopes of an infectious agent, it is preferred that at least some of the epitopes are derived from early and late proteins. The early proteins of HPV are expressed when the virus is replicating, either following acute or dormant infection. Therefore, it is particularly preferred to use epitopes from early stage proteins to alleviate disease manifestations at the earliest stage possible.

### Minigene Vaccines

[0194] A number of different approaches are available which allow simultaneous delivery of multiple epitopes. Nucleic acids encoding the peptides of the invention are a particularly useful embodiment of the invention. Epitopes for inclusion in a minigene are preferably selected according to the guidelines set forth in the previous section. A preferred means of administering nucleic acids encoding the peptides of the invention uses minigene constructs encoding a peptide comprising one or multiple epitopes of the invention.

[0195] The use of multi-epitope minigenes is described below and in, e.g., co-pending application U.S. Ser. No. 09/311,784; Ishioka et al., J. Immunol. 162:3915-3925, 1999; An, L. and Whitton, J. L., J. Virol. 71:2292, 1997; Thomson, S. A. et al., J. Immunol. 157:822, 1996; Whitton, J. L. et al., J. Virol. 67:348, 1993; Hanke, R. et al., Vaccine 16:426, 1998. For example, a multi-epitope DNA plasmid encoding supermotif- and/or motif-bearing epitopes derived from multiple regions of one or more HPV antigens, the PADRE□ universal helper T cell epitope (or multiple HTL epitopes from HPV antigens), and an endoplasmic reticulum-translocating signal sequence can be engineered. A vaccine may also comprise epitopes that are derived from other TAAs.

[0196] The immunogenicity of a multi-epitopic minigene can be tested in transgenic mice to evaluate the magnitude of CTL induction responses against the epitopes tested. Further, the immunogenicity of DNA-encoded epitopes in vivo can be correlated with the in vitro responses of specific CTL lines against target cells transfected with the DNA plasmid. Thus, these experiments can show that the minigene serves to both: 1.) generate a CTL response and 2.) that the induced CTLs recognized cells expressing the encoded epitopes.

[0197] For example, to create a DNA sequence encoding the selected epitopes (minigene) for expression in human cells, the amino acid sequences of the epitopes may be reverse translated. A human codon usage table can be used to guide the codon choice for each amino acid. These epitope-encoding DNA sequences may be directly adjoined, so that when translated, a continuous polypeptide sequence is created. To optimize expression and/or immunogenicity, additional elements can be incorporated into the minigene design. Examples of amino acid sequences that can be reverse translated and included in the minigene sequence include: HLA class I epitopes, HLA class II epitopes, a ubiquitination signal sequence, and/or an endoplasmic reticulum targeting signal. In addition, HLA presentation of CTL and HTL epitopes may be improved by including synthetic (e.g. poly-alanine) or naturally-occurring flanking sequences adjacent to the CTL or HTL epitopes; these larger peptides comprising the epitope(s) are within the scope of the invention.

[0198] The minigene sequence may be converted to DNA by assembling oligonucleotides that encode the plus and minus stands of the minigene. Overlapping oligonucleotides (30-100 bases long) may be synthesized, phosphorylated, purified and annealed under appropriate conditions using well known techniques. The ends of the oligonucleotides can be joined, for example, using T4 DNA ligase. This synthetic minigene, encoding the epitope polypeptide, can then be cloned into a desired expression vector.

[0199] Standard regulatory sequences well known to those of skill in the art are preferably included in the vector to ensure expression in the target cells. Several vector elements are desirable: a promoter with a down-stream cloning site for minigene insertion; a polyadenylation signal for efficient transcription termination; an E. coli origin of replication; and an E. coli selectable marker (e.g. ampicillin or kanamycin resistance). Numerous promoters can be used for this purpose, e.g. the human cytomegalovirus (hCMV) promoter. See, e.g., U.S. Pat. Nos. 5,580,859 and 5,589,466 for other suitable promoter sequences.

[0200] Additional vector modifications may be desired to optimize minigene expression and immunogenicity. In some cases, introns are required for efficient gene expression, and one or more synthetic or naturally-occurring introns could be incorporated into the transcribed region of the minigene. The inclusion of mRNA stabilization sequences and sequences for replication in mammalian cells may also be considered for increasing minigene expression.

[0201] Once an expression vector is selected, the minigene is cloned into the polylinker region downstream of the promoter. This plasmid is transformed into an appropriate E. coli strain, and DNA is prepared using standard techniques. The orientation and DNA sequence of the minigene, as well as all other elements included in the vector, are confirmed using restriction mapping and DNA sequence analysis. Bacterial cells harboring the correct plasmid can be stored as a master cell bank and a working cell bank.

[0202] In addition, immunostimulatory sequences (ISSs or CpGs) appear to play a role in the immunogenicity of DNA vaccines. These sequences may be included in the vector, outside the minigene coding sequence, if desired to enhance immunogenicity.

[0203] In some embodiments, a bi-cistronic expression vector which allows production of both the minigene-encoded epitopes and a second protein (included to enhance or decrease immunogenicity) can be used. Examples of proteins or polypeptides that could beneficially enhance the immune response if co-expressed include cytokines (e.g., IL-2, IL-12, GM-CSF), cytokine-inducing molecules (e.g., LeIF), costimulatory molecules, or for HTL responses, pan-DR binding proteins (PADRE™, Epimmune, San Diego, Calif.). Helper (HTL) epitopes can be joined to intracellular targeting signals and expressed separately from expressed CTL epitopes; this allows direction of the HTL epitopes to a cell compartment different than that of the CTL epitopes. If required, this could facilitate more efficient entry of HTL epitopes into the HLA class II pathway, thereby improving HTL induction. In contrast to HTL or CTL induction, specifically decreasing the immune response by co-expression of immunosuppressive molecules (e.g. TGF-β) may be beneficial in certain diseases.

[0204] Therapeutic quantities of plasmid DNA can be produced for example, by fermentation in E. coli, followed by purification. Aliquots from the working cell bank are used to inoculate growth medium, and grown to saturation in shaker flasks or a bioreactor according to well known techniques. Plasmid DNA can be purified using standard bioseparation technologies such as solid phase anion-exchange resins supplied by QIAGEN, Inc. (Valencia, Calif.). If required, supercoiled DNA can be isolated from the open circular and linear forms using gel electrophoresis or other methods.

[0205] Purified plasmid DNA can be prepared for injection using a variety of formulations. The simplest of these is reconstitution of lyophilized DNA in sterile phosphate-buffer saline (PBS). This approach, known as “naked DNA,” is currently being used for intramuscular (IM) administration in clinical trials. To maximize the immunotherapeutic effects of minigene DNA vaccines, an alternative method for formulating purified plasmid DNA may be desirable. A variety of methods have been described, and new techniques may become available. Cationic lipids, glycolipids, and fusogenic liposomes can also be used in the formulation (see, e.g., as described by WO 93/24640; Mannino & Gould-Fogerite, BioTechniques 6(7): 682 (1988); U.S. Pat. No. 5,279,833; WO 91/06309; and Felgner, et al., Proc. Nat'l Acad. Sci. USA 84:7413 (1987). In addition, peptides and compounds referred to collectively as protective, interactive, non-condensing compounds (PINC) could also be complexed to purified plasmid DNA to influence variables such as stability, intramuscular dispersion, or trafficking to specific organs or cell types.

[0206] Target cell sensitization can be used as a functional assay for expression and HLA class I presentation of minigene-encoded CTL epitopes. For example, the plasmid DNA is introduced into a mammalian cell line that is suitable as a target for standard CTL chromium release assays. The transfection method used will be dependent on the final formulation. Electroporation can be used for “naked” DNA, whereas cationic lipids allow direct in vitro transfection. A plasmid expressing green fluorescent protein (GFP) can be co-transfected to allow enrichment of transfected cells using fluorescence activated cell sorting (FACS). These cells are then chromium-51 (⁵¹Cr) labeled and used as target cells for epitope-specific CTL lines; cytolysis, detected by ⁵¹Cr release, indicates both production of and HLA presentation of, minigene-ee-encoded CTL epitopes. Expression of HTL epitopes may be evaluated in an analogous manner using assays to assess HTL activity.

[0207] In viva immunogenicity is a second approach for functional testing of minigene DNA formulations. Transgenic mice expressing appropriate human HLA proteins are immunized with the DNA product. The dose and route of administration are formulation dependent (e.g., IM for DNA in PBS, intraperitoneal (i.p.) for lipid-complexed DNA). Twenty-one days after immunization, splenocytes are harvested and restimulated for one week in the presence of peptides encoding each epitope being tested. Thereafter, for CTL effector cells, assays are conducted for cytolysis of peptide-loaded, ⁵¹Cr-labeled target cells using standard techniques. Lysis of target cells that were sensitized by HLA loaded with peptide epitopes, corresponding to minigene-encoded epitopes, demonstrates DNA vaccine function for in vivo induction of CTLs. Immunogenicity of HTL epitopes is evaluated in transgenic mice in an analogous manner.

[0208] Alternatively, the nucleic acids can be administered using ballistic delivery as described, for instance, in U.S. Pat. No. 5,204,253. Using this technique, particles comprised solely of DNA are administered. In a further alternative embodiment, DNA can be adhered to particles, such as gold particles.

[0209] Minigenes can also be delivered using other bacterial or viral delivery systems well known in the art, e.g., an expression construct encoding epitopes of the invention can be incorporated into a viral vector such as vaccinia.

Combinations of CTL Peptides with Helper Peptides

[0210] Vaccine compositions comprising CTL peptides of the invention can be modified to provide desired attributes, such as improved serum half life, broadened population coverage or enhanced immunogenicity.

[0211] For instance, the ability of a peptide to induce CTL activity can be enhanced by linking the peptide to a sequence which contains at least one epitope that is capable of inducing a T helper cell response. The use of T helper epitopes in conjunction with CTL epitopes to enhance immunogenicity is illustrated, for example, in the co-pending applications U.S. Ser. No. 08/820,360, U.S. Ser. No. 08/197,484, and U.S. Ser. No. 08/464,234.

[0212] Although a CTL peptide can be directly linked to a T helper peptide, often CTL epitope/HTL epitope conjugates are linked by a spacer molecule. The spacer is typically comprised of relatively small, neutral molecules, such as amino acids or amino acid mimetics, which are substantially uncharged under physiological conditions. The spacers are typically selected from, e.g., Ala, Gly, or other neutral spacers of nonpolar amino acids or neutral polar amino acids. It will be understood that the optionally present spacer need not be comprised of the same residues and thus may be a hetero- or homo-oligomer. When present, the spacer will usually be at least one or two residues, more usually three to six residues and sometimes 10 or more residues. The CTL peptide epitope can be linked to the T helper peptide epitope either directly or via a spacer either at the amino or carboxy terminus of the CTL peptide. The amino terminus of either the immunogenic peptide or the T helper peptide may be acylated.

[0213] In certain embodiments, the T helper peptide is one that is recognized by T helper cells present in the majority of the population. This can be accomplished by selecting peptides that bind to many, most, or all of the HLA class II molecules. These are known as “loosely HLA-restricted” or “promiscuous” T helper sequences. Examples of amino acid sequences that are promiscuous include sequences from antigens such as tetanus toxoid at positions 830-843 (QYIKANSKFIGITE; SEQ ID NO: 51484), Plasmodium falciparum circumsporozoite (CS) protein at positions 378-398 (DIEKKIAKMEKASSVFNVVNS; SEQ ID NO: 51485), and Streptococcus 18 kD protein at positions 116 (GAVDSILGGVATYGAA; SEQ ID NO: 51486). Other examples include peptides bearing a DR 1-4-7 supermotif, or either of the DR3 motifs.

[0214] Alternatively, it is possible to prepare synthetic peptides capable of stimulating T helper lymphocytes, in a loosely HLA-restricted fashion, using amino acid sequences not found in nature (see, e.g., PCT publication WO 95/07707). These synthetic compounds called Pan-DR-binding epitopes (e.g., PADRE™, Epimmune, Inc., San Diego, Calif.) are designed to most preferrably bind most HLA-DR (human HLA class II) molecules. For instance, a pan-DR-binding epitope peptide having the formula: aKXVAAWTLKAAa, where “X” is either cyclohexylalanine, phenylalanine, or tyrosine, and a is either D-alanine or L-alamine, has been found to bind to most HLA-DR alleles, and to stimulate the response of T helper lymphocytes from most individuals, regardless of their HLA type. An alternative of a pan-DR binding epitope comprises all “L” natural amino acids and can be provided in the form of nucleic acids that encode the epitope.

[0215] HTL peptide epitopes can also be modified to alter their biological properties. For example, they can be modified to include D-amino acids to increase their resistance to proteases and thus extend their serum half life, or they can be conjugated to other molecules such as lipids, proteins, carbohydrates, and the like to increase their biological activity. For example, a T helper peptide can be conjugated to one or more palmitic acid chains at either the amino or carboxyl termini.

Combinations of CTL Peptides with T Cell Priming Agents

[0216] In some embodiments it may be desirable to include in the pharmaceutical compositions of the invention at least one component which primes cytotoxic T lymphocytes. Lipids have been identified as agents capable of priming CTL in vivo against viral antigens. For example, palmitic acid residues can be attached to the δ- and α-amino groups of a lysine residue and then linked, e.g., via one or more linking residues such as Gly, Gly-Gly-, Ser, Ser-Ser, or the like, to an immunogenic peptide. The lipidated peptide can then be administered either directly in a micelle or particle, incorporated into a liposome, or emulsified in an adjuvant, e.g., incomplete Freund's adjuvant. In a preferred embodiment, a particularly effective immunogenic composition comprises palmitic acid attached to ε- and α-amino groups of Lys, which is attached via linkage, e.g., Ser-Ser, to the amino terminus of the immunogenic peptide.

[0217] As another example of lipid priming of CTL responses, E. coli lipoproteins, such as tripalmitoyl-5-glycerylcysteinlyseryl-serine (P₃ CSS) can be used to prime virus specific CTL when covalently attached to an appropriate peptide (see, e.g., Deres, et al., Nature 342:561, 1989). Peptides of the invention can be coupled to P₃CSS, for example, and the lipopeptide administered to an individual to specifically prime a CTL response to the target antigen. Moreover, because the induction of neutralizing antibodies can also be primed with P₃CSS-conjugated epitopes, two such compositions can be combined to more effectively elicit both humoral and cell-mediated responses.

[0218] CTL and/or HTL peptides can also be modified by the addition of amino acids to the termini of a peptide to provide for ease of linking peptides one to another, for coupling to a carrier support or larger peptide, for modifying the physical or chemical properties of the peptide or oligopeptide, or the like. Amino acids such as tyrosine, cysteine, lysine, glutamic or aspartic acid, or the like, can be introduced at the C- or N-terminus of the peptide or oligopeptide, particularly class I peptides. However, it is to be noted that modification at the carboxyl terminus of a CTL epitope may, in some cases, alter binding characteristics of the peptide. In addition, the peptide or oligopeptide sequences can differ from the natural sequence by being modified by terminal-NH₂ acylation, e.g., by alkanoyl (C1-C20) or thioglycolyl acetylation, terminal-carboxyl amidation, e.g., ammonia, methylamine, etc. In some instances these modifications may provide sites for linking to a support or other molecule.

Vaccine Compositions Comprising DC Pulsed with CTL and/or HTL Peptides

[0219] An embodiment of a vaccine composition in accordance with the invention comprises ex vivo administration of a cocktail of epitope-bearing peptides to PBMC, or isolated DC therefrom, from the patient's blood. A pharmaceutical to facilitate harvesting of DC can be used, such as Progenipoietin□ (Monsanto, St. Louis, Mo.) or GM-CSF/IL-4. After pulsing the DC with peptides and prior to reinfusion into patients, the DC are washed to remove unbound peptides. In this embodiment, a vaccine comprises peptide-pulsed DCs which present the pulsed peptide epitopes complexed with HLA molecules on their surfaces.

[0220] The DC can be pulsed ex vivo with a cocktail of peptides, some of which stimulate CTL responses to one or more HPV antigens of interest. Optionally, a helper T cell (HTL) peptide such as a PADRE family molecule, can be included to facilitate the CTL response. Thus, a vaccine in accordance with the invention, preferably comprising epitopes from multiple HPV antigens, is used to treat HPV infection or cancer resulting from HPV infection.

### Administration of Vaccines for Therapeutic or Prophylactic Purposes

[0221] The peptides of the present invention and pharmaceutical and vaccine compositions of the invention are typically used to treat and/or prevent cancer associated with HPV infection. Vaccine compositions containing the peptides of the invention are administered to a patient infected with HPV or to an individual susceptible to, or otherwise at risk for, HPV infection to elicit an immune response against HPV antigens and thus enhance the patient's own immune response capabilities.

[0222] As noted above, peptides comprising CTL and/or HTL epitopes of the invention induce immune responses when presented by HLA molecules and contacted with a CTL or HTL specific for an epitope comprised by the peptide. The peptides (or DNA encoding them) can be administered individually or as fusions of one or more peptide sequences. The manner in which the peptide is contacted with the CTL or HTL is not critical to the invention. For instance, the peptide can be contacted with the CTL or HTL either in vivo or in vitro. If the contacting occurs in vivo, the peptide itself can be administered to the patient, or other vehicles, e.g., DNA vectors encoding one or more peptides, viral vectors encoding the peptide(s), liposomes and the like, can be used, as described herein.

[0223] When the peptide is contacted in vitro, the vaccinating agent can comprise a population of cells, e.g., peptide-pulsed dendritic cells, or HPV-specific CTLs, which have been induced by pulsing antigen-presenting cells in vitro with the peptide or by transfecting antigen-presenting cells with a minigene of the invention. Such a cell population is subsequently administered to a patient in a therapeutically effective dose.

[0224] In therapeutic applications, peptide and/or nucleic acid compositions are administered to a patient in an amount sufficient to elicit an effective CTL and/or HTL response to the virus antigen and to cure or at least partially arrest or slow symptoms and/or complications. An amount adequate to accomplish this is defined as “therapeutically effective dose.” Amounts effective for this use will depend on, e.g., the particular composition administered, the manner of administration, the stage and severity of the disease being treated, the weight and general state of health of the patient, and the judgment of the prescribing physician.

[0225] For pharmaceutical compositions, the immunogenic peptides of the invention, or DNA encoding them, are generally administered to an individual already infected with HPV. The peptides or DNA encoding them can be administered individually or as fusions of one or more peptide sequences. HPV-infected patients, with or without neoplasia, can be treated with the immunogenic peptides separately or in conjunction with other treatments, such as surgery, as appropriate.

[0226] For therapeutic use, administration should generally begin at the first diagnosis of HPV infection or HPV-associated cancer. This is followed by boosting doses until at least symptoms are substantially abated and for a period thereafter. The embodiment of the vaccine composition (i.e., including, but not limited to embodiments such as peptide cocktails, polyepitopic polypeptides, minigenes, or TAA-specific CTLs or pulsed dendritic cells) delivered to the patient may vary according to the stage of the disease or the patient's health status. For example, in a patient with a tumor that expresses HPV antigens, a vaccine comprising HPV-specific CTL may be more efficacious in killing tumor cells in patient with advanced disease than alternative embodiments.

[0227] Where susceptible individuals are identified prior to or during infection, the composition can be targeted to them, thus minimizing the need for administration to a larger population. Susceptible populations include those individuals who are sexually active.

[0228] The peptide or other compositions used for the treatment or prophylaxis of HPV infection can be used, e.g., in persons who have not manifested symptoms, e.g., genital warts or neoplastic growth. In this context, it is generally important to provide an amount of the peptide epitope delivered by a mode of administration sufficient to effectively stimulate a cytotoxic T cell response; compositions which stimulate helper T cell responses can also be given in accordance with this embodiment of the invention.

[0229] The dosage for an initial therapeutic immunization generally occurs in a unit dosage range where the lower value is about 1, 5, 50, 500, or 1,000 μg and the higher value is about 10,000; 20,000; 30,000; or 50,000 μg. Dosage values for a human typically range from about 500 μg to about 50,000 μg per 70 kilogram patient. Boosting dosages of between about 1.0 μg to about 50,000 μg of peptide pursuant to a boosting regimen over weeks to months may be administered depending upon the patient's response and condition as determined by measuring the specific activity of CTL and HTL obtained from the patient's blood. Administration should continue until at least clinical symptoms or laboratory tests indicate that the viral infection, or neoplasia, has been eliminated or reduced and for a period thereafter. The dosages, routes of administration, and dose schedules are adjusted in accordance with methodologies known in the art.

[0230] In certain embodiments, the peptides and compositions of the present invention are employed in serious disease states, that is, life-threatening or potentially life threatening situations. In such cases, as a result of the minimal amounts of extraneous substances and the relative nontoxic nature of the peptides in preferred compositions of the invention, it is possible and may be felt desirable by the treating physician to administer substantial excesses of these peptide compositions relative to these stated dosage amounts.

[0231] The vaccine compositions of the invention can also be used purely as prophylactic agents. Generally the dosage for an initial prophylactic immunization generally occurs in a unit dosage range where the lower value is about 1, 5, 50, 500, or 1000 μg and the higher value is about 10,000; 20,000; 30,000; or 50,000 μg. Dosage values for a human typically range from about 500 μg to about 50,000 μg per 70 kilogram patient. This is followed by boosting dosages of between about 1.0 μg to about 50,000 μg of peptide administered at defined intervals from about four weeks to six months after the initial administration of vaccine. The immunogenicity of the vaccine can be assessed by measuring the specific activity of CTL and HTL obtained from a sample of the patient's blood.

[0232] The pharmaceutical compositions for therapeutic treatment are intended for parenteral, topical, oral, intrathecal, or local (e.g. as a cream or topical ointment) administration. Preferably, the pharmaceutical compositions are administered parentally, e.g., intravenously, subcutaneously, intradermally, or intramuscularly. Thus, the invention provides compositions for parenteral administration which comprise a solution of the immunogenic peptides dissolved or suspended in an acceptable carrier, preferably an aqueous carrier. A variety of aqueous carriers may be used, e.g., water, buffered water, 0.8% saline, 0.3% glycine, hyaluronic acid and the like. These compositions may be sterilized by conventional, well known sterilization techniques, or may be sterile filtered. The resulting aqueous solutions may be packaged for use as is, or lyophilized, the lyophilized preparation being combined with a sterile solution prior to administration. The compositions may contain pharmaceutically acceptable auxiliary substances as required to approximate physiological conditions, such as pH-adjusting and buffering agents, tonicity adjusting agents, wetting agents, preservatives, and the like, for example, sodium acetate, sodium lactate, sodium chloride, potassium chloride, calcium chloride, sorbitan monolaurate, triethanolamine oleate, etc.

[0233] The concentration of peptides of the invention in the pharmaceutical formulations can vary widely, i.e., from less than about 0.1%, usually at or at least about 2% to as much as 20% to 50% or more by weight, and will be selected primarily by fluid volumes, viscosities, etc., in accordance with the particular mode of administration selected.

[0234] A human unit dose form of the peptide composition is typically included in a pharmaceutical composition that comprises a human unit dose of an acceptable carrier, preferably an aqueous carrier, and is administered in a volume of fluid that is known by those of skill in the art to be used for administration of such compositions to humans (see, e.g., Remington's Pharmaceutical Sciences, 17th Edition, A. Gennaro, Editor, Mack Publishing Co., Easton, Pa., 1985).

[0235] The peptides of the invention, and/or nucleic acids encoding the peptides, can also be administered via liposomes, which may also serve to target the peptides to a particular tissue, such as lymphoid tissue, or to target selectively to infected cells, as well as to increase the half-life of the peptide composition. Liposomes include emulsions, foams, micelles, insoluble monolayers, liquid crystals, phospholipid dispersions, lamellar layers and the like. In these preparations, the peptide to be delivered is incorporated as part of a liposome, alone or in conjunction with a molecule which binds to a receptor prevalent among lymphoid cells, such as monoclonal antibodies which bind to the CD45 antigen, or with other therapeutic or immunogenic compositions. Thus, liposomes either filled or decorated with a desired peptide of the invention can be directed to the site of lymphoid cells, where the liposomes then deliver the peptide compositions. Liposomes for use in accordance with the invention are formed from standard vesicle-forming lipids, which generally include neutral and negatively charged phospholipids and a sterol, such as cholesterol. The selection of lipids is generally guided by consideration of, e.g., liposome size, acid lability and stability of the liposomes in the blood stream. A variety of methods are available for preparing liposomes, as described in, e.g., Szoka, et al., Ann. Rev. Biophys. Bioeng. 9:467 (1980), and U.S. Pat. Nos. 4,235,871, 4,501,728, 4,837,028, and 5,019,369.

[0236] For targeting cells of the immune system, a ligand to be incorporated into the liposome can include, e.g., antibodies or fragments thereof specific for cell surface determinants of the desired immune system cells. A liposome suspension containing a peptide may be administered intravenously, locally, topically, etc. in a dose which varies according to, inter alia, the manner of administration, the peptide being delivered, and the stage of the disease being treated.

[0237] For solid compositions, conventional nontoxic solid carriers may be used which include, for example, pharmaceutical grades of mannitol, lactose, starch, magnesium stearate, sodium saccharin, talcum, cellulose, glucose, sucrose, magnesium carbonate, and the like. For oral administration, a pharmaceutically acceptable nontoxic composition is formed by incorporating any of the normally employed excipients, such as those carriers previously listed, and generally 10-95% of active ingredient, that is, one or more peptides of the invention, and more preferably at a concentration of 25%-75%.

[0238] For aerosol administration, the immunogenic peptides are preferably supplied in finely divided form along with a surfactant and propellant. Typical percentages of peptides are 0.01%-20% by weight, preferably 1%-10%. The surfactant must, of course, be nontoxic, and preferably soluble in the propellant. Representative of such agents are the esters or partial esters of fatty acids containing from 6 to 22 carbon atoms, such as caproic, octanoic, lauric, palmitic, stearic, linoleic, linolenic, olesteric and oleic acids with an aliphatic polyhydric alcohol or its cyclic anhydride. Mixed esters, such as mixed or natural glycerides may be employed. The surfactant may constitute 0.1%-20% by weight of the composition, preferably 0.25-5%. The balance of the composition is ordinarily propellant. A carrier can also be included, as desired, as with, e.g., lecithin for intranasal delivery.

### HLA Expression: Implications for T Cell-Based Immunotherapy

[0239] Disease progression in cancer and infectious disease

[0240] It is well recognized that a dynamic interaction between exists between host and disease, both in the cancer and infectious disease settings. In the infectious disease setting, it is well established that pathogens evolve during disease. The strains that predominate early in HIV infection are different from the ones that are associated with AIDS and later disease stages (NS versus S strains). It has long been hypothesized that pathogen forms that are effective in establishing infection may differ from the ones most effective in terms of replication and chronicity.

[0241] Similarly, it is widely recognized that the pathological process by which an individual succumbs to a neoplastic disease is complex. During the course of disease, many changes occur in cancer cells. The tumor accumulates alterations which are in part related to dysfunctional regulation of growth and differentiation, but also related to maximizing its growth potential, escape from drug treatment and/or the body's immunosurveillance. Neoplastic disease results in the accumulation of several different biochemical alterations of cancer cells, as a function of disease progression. It also results in significant levels of intra- and inter-cancer heterogeneity, particularly in the late, metastatic stage.

[0242] Familiar examples of cellular alterations affecting treatment outcomes include the outgrowth of radiation or chemotherapy resistant tumors during the course of therapy. These examples parallel the emergence of drug resistant viral strains as a result of aggressive chemotherapy, e.g., of chronic HBV and HIV infection, and the current resurgence of drug resistant organisms that cause Tuberculosis and Malaria. It appears that significant heterogeneity of responses is also associated with other approaches to cancer therapy, including anti-angiogenesis drugs, passive antibody immunotherapy, and active T cell-based immunotherapy. Thus, in view of such phenomena, epitopes from multiple disease-related antigens can be used in vaccines and therapeutics thereby counteracting the ability of diseased cells to mutate and escape treatment.

### The Interplay Between Disease and the Immune System

[0243] One of the main factors contributing to the dynamic interplay between host and disease is the immune response mounted against the pathogen, infected cell, or malignant cell. In many conditions such immune responses control the disease. Several animal model systems and prospective studies of natural infection in humans suggest that immune responses against a pathogen can control the pathogen, prevent progression to severe disease and/or eliminate the pathogen. A common theme is the requirement for a multispecific T cell response, and that narrowly focused responses appear to be less effective. These observations guide skilled artisan as to embodiments of methods and compositions of the present invention that provide for a broad immune response.

[0244] In the cancer setting there are several findings that indicate that immune responses can impact neoplastic growth:

[0245] First, the demonstration in many different animal models, that anti-tumor T cells, restricted by MHC class I, can prevent or treat tumors.

[0246] Second, encouraging results have come from immunotherapy trials.

[0247] Third, observations made in the course of natural disease correlated the type and composition of T cell infiltrate within tumors with positive clinical outcomes (Coulie P G, et al. Antitumor immunity at work in a melanoma patient In Advances in Cancer Research, 213-242, 1999).

[0248] Finally, tumors commonly have the ability to mutate, thereby changing their immunological recognition. For example, the presence of monospecific CTL was also correlated with control of tumor growth, until antigen loss emerged (Riker A, et al., Immune selection after antigen-specific immunotherapy of melanoma Surgery, August: 26(2):112-20, 1999; Marchand M, et al., Tumor regressions observed in patients with metastatic melanoma treated with an antigenic peptide encoded by gene MAGE-3 and presented by HLA-A1 Int. J. Cancer 80(2):219-30, Jan. 18, 1999). Similarly, loss of beta 2 microglobulin was detected in 5/13 lines established from melanoma patients after receiving immunotherapy at the NCI (Reslifo N P, et al., Loss of functional Beta2-microglobulin in metastatic melanomas from five patients receiving immunotherapy Journal of the National Cancer Institute, Vol. 88 (2), 100-108, January 1996). It has long been recognized that HLA class I is frequently altered in various tumor types. This has led to a hypothesis that this phenomenon might reflect immune pressure exerted on the tumor by means of class I restricted CTL. The extent and degree of alteration in HLA class I expression appears to be reflective of past immune pressures, and may also have prognostic value (van Duinen S G, et al., Level of HLA antigens in locoregional metastases and clinical course of the disease in patients with melanoma Cancer Research 48, 1019-1025, February 1988; Möller P, et al., Influence of major histocompatibility complex class I and II antigens on survival in colorectal carcinoma Cancer Research 51, 729-736, January 1991). Taken together, these observations provide a rationale for immunotherapy of cancer and infectious disease, and suggest that effective strategies need to account for the complex series of pathological changes associated with disease.

The Three Main Types of Alterations in HLA Expression in Tumors and their Functional Significance

[0249] The level and pattern of expression of HLA class I antigens in tumors has been studied in many different tumor types and alterations have been reported in all types of tumors studied. The molecular mechanisms underlining HLA class I alterations have been demonstrated to be quite heterogeneous. They include alterations in the TAP/processing pathways, mutations of β2-microglobulin and specific HLA heavy chains, alterations in the regulatory elements controlling over class I expression and loss of entire chromosome sections. There are several reviews on this topic, see, e.g., Gamido F, et al., Natural history of HLA expression during tumour development Immunol Today 14(10):491-499, 1993; Kaklamanis L, et al., Loss of HLA class-I alleles, heavy chains and β2-microglobulin in colorectal cancer Int. J. Cancer, 51(3):379-85, May 28, 1992. There are three main types of HLA Class I alteration (complete loss, allele-specific loss and decreased expression). The functional significance of each alteration is discussed separately:

### Complete Loss of HLA Expression

[0250] Complete loss of HLA expression can result from a variety of different molecular mechanisms, reviewed in (Algarra I, et al., The HLA crossroad in tumor immunology Human Immunology 61, 65-73, 2000; Browning M, et al., Mechanisms of loss of HLA class I expression on colorectal tumor cells Tissue Antigens 47:364-371, 1996; Ferrone S, et al., Loss of HLA class I antigens by melanoma cells: molecular mechanisms, functional significance and clinical relevance Immunology Today, 16(10): 487-494, 1995; Gamido F, et al., Natural history of HLA expression during tumour development Immunology Today 14(10):491-499, 1993; Tait, B D, HLA Class I expression on human cancer cells: Implications for effective immunotherapy Hum Immunol 61, 158-165, 2000). In functional terms, this type of alteration has several important implications.

[0251] While the complete absence of class I expression will eliminate CTL recognition of those tumor cells, the loss of HLA class I will also render the tumor cells extraordinary sensitive to lysis from NK cells (Ohmnachi, G A, et al., Heterogeneity in expression of human leukocyte antigens and melanoma-associated antigens in advanced melanoma J Cellular Phys 182:332-338, 2000; Liunggren H G, et al., Host resistance directed selectively against H-2 deficient lymphoma variants: Analysis of the mechanism J. Exp. Med., December 1; 162(6):1745-59, 1985; Maio M, et al., Reduction in susceptibility to natural killer cell-mediated lysis of human FO-1 melanoma cells after induction of HLA class I antigen expression by transfection with B2m gene J. Clin. Invest. 88(1):282-9, July 1991; Schrier P I, et al., Relationship between myc oncogene activation and MHC class I expression Adv. Cancer Res., 60:181-246, 1993).

[0252] The complementary interplay between loss of HLA expression and gain in NK sensitivity is exemplified by the classic studies of Coulie and coworkers (Coulie, P G, et al., Antitumor immunity at work in a melanoma patient In Advances in Cancer Research, 213-242, 1999) which described the evolution of a patient's immune response over the course of several years. Because of increased sensitivity to NK lysis, it is predicted that approaches leading to stimulation of innate immunity in general and NK activity in particular would be of special significance. An example of such approach is the induction of large amounts of dendritic cells (DC) by various hematopoietic growth factors, such as Flt3 ligand or ProGP. The rationale for this approach resides in the well known fact that dendritic cells produce large amounts of IL-12, one of the most potent stimulators for inmate immunity and NK activity in particular. Alternatively, IL-12 is administered directly, or as nucleic acids that encode it. In this light, it is interesting to note that Flt3 ligand treatment results in transient tumor regression of a class I negative prostate murine cancer model (Ciavarra R P, et al., Flt3-Ligand induces transient tumor regression in an ectopic treatment model of major histocompatibility complex-negative prostate cancer Cancer Res 60:2081-84, 2000). In this context, specific anti-tumor vaccines in accordance with the invention synergize with these types of hematopoietic growth factors to facilitate both CTL and NK cell responses, thereby appreciably impairing a cell's ability to mutate and thereby escape efficacious treatment. Thus, an embodiment of the present invention comprises a composition of the invention together with a method or composition that augments functional activity or numbers of NK cells. Such an embodiment can comprise a protocol that provides a composition of the invention sequentially with an NK-inducing modality, or contemporaneous with an NK-inducing modality.

[0253] Secondly, complete loss of HLA frequently occurs only in a fraction of the tumor cells, while the remainder of tumor cells continue to exhibit normal expression. In functional terms, the tumor would still be subject, in part, to direct attack from a CTL response; the portion of cells lacking HLA subject to an NK response. Even if only a CTL response were used, destruction of the HLA expressing fraction of the tumor has dramatic effects on survival times and quality of life.

[0254] It should also be noted that in the case of heterogeneous HLA expression, both normal HLA-expressing as well as defective cells are predicted to be susceptible to immune destruction based on “bystander effects.” Such effects were demonstrated, e.g., in the studies of Rosendahl and colleagues that investigated in vivo mechanisms of action of antibody targeted superantigens (Rosendahl A, et al., Perforin and IFN-gamma are involved in the antitumor effects of antibody-targeted superantigens J. Immunol. 160(11):5309-13, Jun. 1, 1998). The bystander effect is understood to be mediated by cytokines elicited from, e.g., CTLs acting on an HLA-bearing target cell, whereby the cytokines are in the environment of other diseased cells that are concomitantly killed.

### Allele-Specific Loss

[0255] One of the most common types of alterations in class I molecules is the selective loss of certain alleles in individuals heterozygous for HLA. Allele-specific alterations might reflect the tumor adaptation to immune pressure, exerted by an immunodominant response restricted by a single HLA restriction element. This type of alteration allows the tumor to retain class I expression and thus escape NK cell recognition, yet still be susceptible to a CTL-based vaccine in accordance with the invention which comprises epitopes corresponding to the remaining HLA type. Thus, a practical solution to overcome the potential hurdle of allele-specific loss relies on the induction of multispecific responses. Just as the inclusion of multiple disease-associated antigens in a vaccine of the invention guards against mutations that yield loss of a specific disease antigens, simultaneously targeting multiple HLA specificities and multiple disease-related antigens prevents disease escape by allele-specific losses.

### Decrease in Expression (Allele-Specific or Not)

[0256] The sensitivity of effector CTL has long been demonstrated (Brower, R C, et al., Minimal requirements for peptide mediated activation of CD8+ CTL Mol. Immunol., 31; 1285-93, 1994; Chriustnick, E T, et al. Low numbers of MHC class I-peptide complexes required to trigger a T cell response Nature 352:67-70, 1991; Sykulev, Y, et al., Evidence that a single peptide-MHC complex on a target cell can elicit a cytolytic T cell response Immunity, 4(6):565-71, June 1996). Even a single peptide/MHC complex can result in tumor cells lysis and release of anti-tumor lymphokines. The biological significance of decreased HLA expression and possible tumor escape from immune recognition is not fully known. Nevertheless, it has been demonstrated that CTL recognition of as few as one MHC/peptide complex is sufficient to lead to tumor cell lysis.

[0257] Further, it is commonly observed that expression of HLA can be upregulated by gamma IFN, commonly secreted by effector CTL. Additionally, HLA class I expression can be induced in vivo by both alpha and beta IFN (Halloran, et al. Local T cell responses induce widespread MHC expression. J. Immunol 148:3837, 1992; Pestka, S, et al., Interferons and their actions Annu. Rev. Biochem. 56:727-77, 1987). Conversely, decreased levels of HLA class I expression also render cells more susceptible to NK lysis.

[0258] With regard to gamma IFN, Torres et al (Torres, M J, et al., Loss of an HLA haplotype in pancreas cancer tissue and its corresponding tumor derived cell line. Tissue Antigens 47:372-81, 1996) note that HLA expression is upregulated by gamma IFN in pancreatic cancer, unless a total loss of haplotype has occurred. Similarly, Rees and Mian note that allelic deletion and loss can be restored, at least partially, by cytokines such as IFN-gamma (Rees, R., et al. Selective MHC expression in tumors modulates adaptive and innate antitumour responses Cancer Immunol Immunother 48:374-81, 1999). It has also been noted that IFN-gamma treatment results in upregulation of class I molecules in the majority of the cases studied (Browning M, et al., Mechanisms of loss of HLA class I expression on colorectal tumor cells. Tissue Antigens 47:364-71, 1996). Kaklamnakis, et al. also suggested that adjuvant immunotherapy with IFN-gamma may b beneficial in the case of HLA class I negative tumors (Kaklamanis L, Loss of transporter in antigen processing 1 transport protein and major histocompatibility complex class I molecules in metastatic versus primary breast cancer. Cancer Research 55:5191-94, November 1995). It is important to underline that IFN-gamma production is induced and self-amplified by local inflammation/immunization (Halloran, et al. Local T cell responses induce widespread MHC expression J. Immunol. 148:3837, 1992), resulting in large increases in MHC expressions even in sites distant from the inflammatory site.

[0259] Finally, studies have demonstrated that decreased HLA expression can render tumor cells more susceptible to NK lysis (Ohnmacht, G A, et al., Heterogeneity in expression of human leukocyte antigens and melanoma-associated antigens in advanced melanoma J Cellular Phys 182:332-38, 2000; Liunggren H G, et al., Host resistance directed selectively against H-2 deficient lymphoma variants: Analysis of the mechanism J. Exp. Med., 162(6):1745-59, Dec. 1, 1985; Maio M, et al., Reduction in susceptibility to natural killer cell-mediated lysis of human FO-1 melanoma cells after induction of HLA class I antigen expression by transfection with β2m gene J. Clin. Invest. 88(1):282-9, July 1991; Schrier P I, et al., Relationship between myc oncogene activation and MHC class I expression Adv. Cancer Res., 60:181-246, 1993). If decreases in HLA expression benefit a tumor because it facilitates CTL escape, but render the tumor susceptible to NK lysis, then a minimal level of HLA expression that allows for resistance to NK activity would be selected for (Gamido F, et al., Implications for immunosurveillance of altered HLA class I phenotypes in human tumours Immunol Today 18(2):89-96, February 1997). Therefore, a therapeutic compositions or methods in accordance with the invention together with a treatment to upregulate HLA expression and/or treatment with high affinity T-cells renders the tumor sensitive to CTL destruction.

### Frequency of Alterations in HLA Expression

[0260] The frequency of alterations in class I expression is the subject of numerous studies (Algarra I, et al., The HLA crossroad in tumor immunology Human Immunology 61, 65-73, 2000). Rees and Mian estimate allelic loss to occur overall in 3-20% of tumors, and allelic deletion to occur in 15-50% of tumors. It should be noted that each cell carries two separate sets of class I genes, each gene carrying one HLA-A and one HLA-B locus. Thus, fully heterozygous individuals carry two different HLA-A molecules and two different HLA-B molecules. Accordingly, the actual frequency of losses for any specific allele could be as little as one quarter of the overall frequency. They also note that, in general, a gradient of expression exists between normal cells, primary tumors and tumor metastasis. In a study from Natali and coworkers (Natali P G, et al., Selective changes in expression of HLA class I polymorphic determinants in human solid tumors PNAS USA 86:6719-6723, September 1989), solid tumors were investigated for total HLA expression, using W6/32 antibody, and for allele-specific expression of the A2 antigen, as evaluated by use of the BB7.2 antibody. Tumor samples were derived from primary cancers or metastasis, for 13 different tumor types, and scored as negative if less than 20%, reduced if in the 30-80% range, and normal above 80%. All tumors, both primary and metastatic, were HLA positive with W6/32. In terms of A2 expression, a reduction was noted in 16.1% of the cases, and A2 was scored as undetectable in 39.4% of the cases. Gamido and coworkers (Gamido F, et al., Natural history of HLA expression during tumour development Immunol Today 14(10):491-99, 1993) emphasize that HLA changes appear to occur at a particular step in the progression from benign to most aggressive. Jiminez et al. (Jiminez P, et al., Microsatellite instability analysis in tumors with different mechanisms for total loss of HLA expression. Cancer Immunol Immunother 48:684-90, 2000) have analyzed 118 different tumors (68 colorectal, 34 laryngeal and 16 melanomas). The frequencies reported for total loss of HLA expression were 11% for colon, 18% for melanoma and 13% for larynx. Thus, HLA class I expression is altered in a significant fraction of the tumor types, possibly as a reflection of immune pressure, or simply a reflection of the accumulation of pathological changes and alterations in diseased cells.

Immunotherapy in the context of HLA Loss

[0261] A majority of the tumors express HLA class I, with a general tendency for the more severe alterations to be found in later stage and less differentiated tumors. This pattern is encouraging in the context of immunotherapy, especially considering that: 1) the relatively low sensitivity of immunohistochemical techniques might underestimate HLA expression in tumors; 2) class I expression can be induced in tumor cells as a result of local inflammation and lymphokine release; and, 3) class I negative cells are sensitive to lysis by NK cells.

[0262] Accordingly, various embodiments of the present invention can be selected in view of the fact that there can be a degree of loss of HLA molecules, particularly in the context of neoplastic disease. For example, the treating physician can assay a patient's tumor to ascertain whether HLA is being expressed. If a percentage of tumor cells express no class I HLA, then embodiments of the present invention that comprise methods or compositions that elicit NK cell responses can be employed. As noted herein, such NK-inducing methods or composition can comprise a Flt3 ligand or ProGP which facilitate mobilization of dendritic cells, the rationale being that dendritic cells produce large amounts of IL-12. IL-12 can also be administered directly in either amino acid or nucleic acid form. It should be noted that compositions in accordance with the invention can be administered concurrently with NK cell-inducing compositions, or these compositions can be administered sequentially.

[0263] In the context of allele-specific HLA loss, a tumor retains class I expression and may thus escape NK cell recognition, yet still be susceptible to a CTL-based vaccine in accordance with the invention which comprises epitopes corresponding to the remaining HLA type. The concept here is analogous to embodiments of the invention that include multiple disease antigens to guard against mutations that yield loss of a specific antigen. Thus, one can simultaneously target multiple HLA specificities and epitopes from multiple disease-related antigens to prevent tumor escape by allele-specific loss as well as disease-related antigen loss. In addition, embodiments of the present invention can be combined with alternative therapeutic compositions and methods. Such alternative compositions and methods comprise, without limitation, radiation, cytotoxic pharmaceuticals, and/or compositions/methods that induce humoral antibody responses.

[0264] Moreover, it has been observed that expression of HLA can be upregulated by gamma IFN, which is commonly secreted by effector CTL, and that HLA class I expression can be induced in vivo by both alpha and beta IFN. Thus, embodiments of the invention can also comprise alpha, beta and/or gamma IFN to facilitate upregulation of HLA.

Reprieve Periods from Therapies that Induce Side Effects: “Scheduled Treatment Interruptions or Drug Holidays”

[0265] Recent evidence has shown that certain patients infected with a pathogen, whom are initially treated with a therapeutic regimen to reduce pathogen load, have been able to maintain decreased pathogen load when removed from the therapeutic regimen, i.e., during a “drug holiday” (Rosenberg, E., et al., Immune control of HIV-1 after early treatment of acute infection Nature 407:523-26, Sep. 28, 2000) As appreciated by those skilled in the art, many therapeutic regimens for both pathogens and cancer have numerous, often severe, side effects. During the drug holiday, the patient's immune system is keeping the disease in check. Methods for using compositions of the invention are used in the context of drug holidays for cancer and pathogenic infection.

[0266] For treatment of an infection, where therapies are not particularly immunosuppressive, compositions of the invention are administered concurrently with the standard therapy. During this period, the patient's immune system is directed to induce responses against the epitopes comprised by the present inventive compositions. Upon removal from the treatment having side effects, the patient is primed to respond to the infectious pathogen should the pathogen load begin to increase. Composition of the invention can be provided during the drug holiday as well.

[0267] For patients with cancer, many therapies are immunosuppressive. Thus, upon achievement of a remission or identification that the patient is refractory to standard treatment, then upon removal from the immunosuppressive therapy, a composition in accordance with the invention is administered. Accordingly, as the patient's immune system reconstitutes, precious immune resources are simultaneously directed against the cancer. Composition of the invention can also be administered concurrently with an immunosuppressive regimen if desired.

### Kits

[0268] The peptide and nucleic acid compositions of this invention can be provided in kit form together with instructions for vaccine administration. Typically the kit would include desired peptide compositions in a container, preferably in unit dosage form and instructions for administration. An alternative kit would include a minigene construct with desired nucleic acids of the invention in a container, preferably in unit dosage form together with instructions for administration. Lymphokines such as IL-2 or IL-12 may also be included in the kit. Other kit components that may also be desirable include, for example, a sterile syringe, booster dosages, and other desired excipients.

### Overview

[0269] Epitopes in accordance with the present invention were successfully used to induce an immune response. Immune responses with these epitopes have been induced by administering the epitopes in various forms. The epitopes have been administered as peptides, as nucleic acids, and as viral vectors comprising nucleic acids that encode the epitope(s) of the invention. Upon administration of peptide-based epitope forms, immune responses have been induced by direct loading of an epitope onto an empty HLA molecule that is expressed on a cell, and via internalization of the epitope and processing via the HLA class I pathway; in either event, the HLA molecule expressing the epitope was then able to interact with and induce a CTL response. Peptides can be delivered directly or using such agents as liposomes. They can additionally be delivered using ballistic delivery, in which the peptides are typically in a crystalline form. When DNA is used to induce an immune response, it is administered either as naked DNA, generally in a dose range of approximately 1-5 mg, or via the ballistic “gene gun” delivery, typically in a dose range of approximately 10-100 μg. The DNA can be delivered in a variety of conformations, e.g., linear, circular etc. Various viral vectors have also successfully been used that comprise nucleic acids which encode epitopes in accordance with the invention.

[0270] Accordingly compositions in accordance with the invention exist in several forms. Embodiments of each of these composition forms in accordance with the invention have been successfully used to induce an immune response.

[0271] One composition in accordance with the invention comprises a plurality of peptides. This plurality or cocktail of peptides is generally admixed with one or more pharmaceutically acceptable excipients. The peptide cocktail can comprise multiple copies of the same peptide or can comprise a mixture of peptides. The peptides can be analogs of naturally occurring epitopes. The peptides can comprise artificial amino acids and/or chemical modifications such as addition of a surface active molecule, e.g., lipidation; acetylation, glycosylation, biotinylation, phosphorylation etc. The peptides can be CTL or HTL epitopes. In a preferred embodiment the peptide cocktail comprises a plurality of different CTL epitopes and at least one HTL epitope. The HTL epitope can be naturally or non-naturally (e.g., PADRE®, Epimmune Inc., San Diego, Calif.). The number of distinct epitopes in an embodiment of the invention is generally a whole unit integer from one through one hundred fifty (e.g., 1, 2, 3, 4, 5, 6, 7, 8, 9, 10, 11, 12, 13, 14, 15, 16, 17, 18, 19, 20, 21, 22, 23, 24, 25, 26, 27, 28, 29, 30, 31, 32, 33, 34, 35, 36, 37, 38, 39, 40, 41, 42, 43, 44, 45, 46, 47, 48, 49, 50, 51, 52, 53, 54, 55, 56, 57, 58, 59, 60, 61, 62, 63, 64, 65, 66, 67, 68, 69, 70, 71, 72, 73, 74, 75, 76, 77, 78, 79, 80, 81, 82, 83, 84, 85, 86, 87, 88, 89, 90, 91, 92, 93, 94, 95, 96, 97, 98, 99, 100, or 150).

[0272] An additional embodiment of a composition in accordance with the invention comprises a polypeptide multi-epitope construct, i.e., a polyepitopic peptide. Polyepitopic peptides in accordance with the invention are prepared by use of technologies well-known in the art. By use of these known technologies, epitopes in accordance with the invention are connected one to another. The polyepitopic peptides can be linear or non-linear e.g., multivalent. These polyepitopic constructs can comprise artificial amino acids, spacing or spacer amino acids, flanking amino acids, or chemical modifications between adjacent epitope units. The polyepitopic constructs can be a heteropolymer or a homopolymer. The polyepitopic constructs generally comprise epitopes in a quantity of any whole unit integer between 2-50 (e.g., 2, 3, 4, 5, 6, 7, 8, 9, 10, 11, 12, 13, 14, 15, 16, 17, 18, 19, 20, 21, 22, 23, 24, 25, 26, 27, 28, 29, 30, 31, 32, 33, 34, 35, 36, 37, 38, 39, 40, 41, 42, 43, 44, 45, 46, 47, 48, 49, 50, 51, 52, 53, 54, 55, 56, 57, 58, 59, 60, 61, 62, 63, 64, 65, 66, 67, 68, 69, 70, 71, 72, 73, 74, 75, 76, 77, 78, 79, 80, 81, 82, 83, 84, 85, 86, 87, 88, 89, 90, 91, 92, 93, 94, 95, 96, 97, 98, 99, 100, or 150). The polyepitopic construct can comprise CTL and/or HTL epitopes. One or more of the epitopes in the construct can be modified, e.g., by addition of a surface active material, e.g. a lipid, or chemically modified, e.g., acetylation, etc. Moreover, bonds in the multiepitopic construct can be other than peptide bonds, e.g., covalent bonds, este or ether bonds, disulfide bonds, hydrogen bonds, ionic bonds etc.

[0273] Alternatively, a composition in accordance with the invention comprises construct which comprises a series, sequence, stretch, etc., of amino acids that have homology to (i.e., corresponds to or is contiguous with) to a native sequence. This stretch of amino acids comprises at least one subsequence of amino acids that, if cleaved or isolated from the longer series of amino acids, functions as an HLA class I or HLA class II epitope in accordance with the invention. In this embodiment, the peptide sequence is modified, so as to become a construct as defined herein, by use of any number of techniques known or to be provided in the art. The polyepitopic constructs can contain homology to a native sequence in any whole unit integer increment from 70-100%, e.g., 70, 71, 72, 73, 74, 75, 76, 77, 78, 79, 80, 81, 82, 83, 84, 85, 86, 87, 88, 89, 90, 91, 92, 93, 94, 95, 96, 97, 98, 99, or, 100 percent.

[0274] A further embodiment of a composition in accordance with the invention is an antigen presenting cell that comprises one or more epitopes in accordance with the invention. The antigen presenting cell can be a “professional” antigen presenting cell, such as a dendritic cell. The antigen presenting cell can comprise the epitope of the invention by any means known or to be determined in the art. Such means include pulsing of dendritic cells with one or more individual epitopes or with one or more peptides that comprise multiple epitopes, by nucleic acid administration such as ballistic nucleic acid delivery or by other techniques in the art for administration of nucleic acids, including vector-based, e.g. viral vector, delivery of nucleic acids.

[0275] Further embodiments of compositions in accordance with the invention comprise nucleic acids that encode one or more peptides of the invention, or nucleic acids which encode a polyepitopic peptide in accordance with the invention. As appreciated by one of ordinary skill in the art, various nucleic acids compositions will encode the same peptide due to the redundancy of the genetic code. Each of these nucleic acid compositions falls within the scope of the present invention. This embodiment of the invention comprises DNA or RNA, and in certain embodiments a combination of DNA and RNA. It is to be appreciated that any composition comprising nucleic acids that will encode a peptide in accordance with the invention or any other peptide based composition in accordance with the invention, falls within the scope of this invention.

[0276] It is to be appreciated that peptide-based forms of the invention (as well as the nucleic acids that encode them) can comprise analogs of epitopes of the invention generated using principles already known, or to be known, in the art. Principles related to analoging are now known in the art, and are disclosed herein; moreover, analoging principles (heteroclitic analoging) are disclosed in co-pending application serial number U.S. Ser. No. 09/226,775 filed 6 Jan. 1999. Generally the compositions of the invention are isolated or purified.

[0277] The invention will be described in greater detail by way of specific examples. The following examples are offered for illustrative purposes, and are not intended to limit the invention in any manner. Those of skill in the art will readily recognize a variety of non-critical parameters that can be changed or modified to yield alternative embodiments in accordance with the invention.

### EXAMPLES

[0278] The following example of peptide binding to HLA molecules demonstrates quantification of binding affinities of HLA class I and class II peptides. Binding assays can be performed with peptides that are either motif-bearing or not motif-bearing.

### Example 1

### HLA Class I and Class II Binding Assays

[0279] The following example of peptide binding to HLA molecules demonstrates quantification of binding affinities of HLA class I and class II peptides. Binding assays can be performed with peptides that are either motif-bearing or not motif-bearing.

[0280] HLA class I and class II binding assays using purified HLA molecules were performed in accordance with disclosed protocols (e.g., PCT publications WO 94/20127 and WO 94/03205; Sidney et al., Current Protocols in Immunology 183.1 (1998); Sidney, et al., J. Immunol. 154:247 (1995); Sette, et al., Mol. Immunol. 31:813 (1994)). Briefly, purified MHC molecules (5 to 500 nM) were incubated with various unlabeled peptide inhibitors and 1-10 nM ¹²⁵I-radiolabeled probe peptides as described. Following incubation, MHC-peptide complexes were separated from free peptide by gel filtration and the fraction of peptide bound was determined. Typically, in preliminary experiments, each MHC preparation was titered in the presence of fixed amounts of radiolabeled peptides to determine the concentration of HLA molecules necessary to bind 10-20% of the total radioactivity. All subsequent inhibition and direct binding assays were performed using these HLA concentrations.

[0281] Since under these conditions [label]<[HLA] and IC₅₀≧[HLA], the measured IC₅₀ values are reasonable approximations of the true K_{D} values. Peptide inhibitors are typically tested at concentrations ranging from 120 μg/ml to 1.2 ng/ml, and are tested in two to four completely independent experiments. To allow comparison of the data obtained in different experiments, a relative binding figure is calculated for each peptide by dividing the IC₅₀ of a positive control for inhibition by the IC₅₀ for each tested peptide (typically unlabeled versions of the radiolabeled probe peptide). For database purposes, and inter-experiment comparisons, relative binding values are compiled. These values can subsequently be converted back into IC₅₀ nM values by dividing the IC₅₀ nM of the positive controls for inhibition by the relative binding of the peptide of interest. This method of data compilation has proven to be the most accurate and consistent for comparing peptides that have been tested on different days, or with different lots of purified MHC.

[0282] Binding assays as outlined above may be used to analyze supermotif and/or motif-bearing epitopes as, for example, described in Example 2.

### Example 2

### Identification of HLA Supermotif- and Motif-Bearing CTL Candidate Epitopes

[0283] Vaccine compositions of the invention can include multiple epitopes that comprise multiple HLA supermotifs or motifs to achieve broad population coverage. This example illustrates the identification of supermotif- and motif-bearing epitopes for the inclusion in such a vaccine composition. Calculation of population coverage was performed using the strategy described below.

Computer Searches and Algorithms for Identification of Supermotif and/or Motif-Bearing Epitopes

[0284] The searches performed to identify the motif-bearing peptide sequences in Examples 2 and 5 employed the protein sequence data from seven proteins (E1, E2, E5, E6, E7, L1 and L2) from HPV types 16, 18, 31, 33, 45, and 56.

Accession numbers for HPV types

| Protein | 6a | 6b | 11 |
|---|---|---|---|
| E1 | Q84293 | P03113 | W1WL11 |
| | AAA74213 | CAA25020 | P04014 |
| | | W1WL6 | AAA46929 |
| E2 | Q84294 | P03119 | AAA46930 |
| | AAA74214 | CAA25021 | W2WLI1 |
| | | W2WL6 | P04015 |
| E4 | Q84295 | CAA25022 | P04016 |
| | AAA74215 | W4WL6 | W4WL11 |
| | | | AAA46931 |
| E5a | Q84296 | P06460 | W5WL11 |
| | AAA74216 | CAA25023 | P04017 |
| | | W5WL6A | AAA46932 |
| E5b | N.A. | P06461 | W5WL1B |
| | | CAA25024 | P04018 |
| | | W5WLB | AAA46933 |
| E6 | Q84291 | P06462 | W6WL11 |
| | AAA74211 | CAA250I8 | P04019 |
| | | W6WL6 | AAA21703 |
| | | | AAA46927 |
| E7 | Q84929 | P06464 | AAA46928 |
| | AAA74212 | CAA25019 | AAA21704 |
| | | W7WL6 | W7WL11 |
| | | | P04020 |
| L1 | P03100 | P03100 | P04012 |
| | AAA74218 | CAA25026 | P1WL11 |
| | | P1WL6 | AAA4635 |
| L2 | Q84297 | P03106 | P2WL11 |
| | | CAA25025 | AAA46934 |
| | | P2WL6 | P040I3 |

| Strain | Protein Antigen | Accession number |
|---|---|---|
| HPV16 | E1 | W1SLHS |
| HPV16 | E2 | W2WLHS |
| HPV16 | E5 | W5WLHS |
| HPV16 | E6 | W6WLHS |
| HPV16 | E7 | W7WLHS |
| HPV16 | L1 | AAD33259 |
| HPV16 | L2 | AAD33258 |
| HPV18 | E1 | W1WL18 |
| HPV18 | E2 | WL18 |
| HPV18 | E5 | W5WL18 |
| HPV18 | E6 | W6WL18 |
| HPV18 | E7 | PO6788 |
| HPV18 | L1 | CAA28671 |
| HPV18 | L2 | P2WL18 |
| HPV31 | E1 | W1WL31 |
| HPV31 | E2 | W2WL3 |
| HPV31 | E5 | W5WL31 |
| HPV31 | E6 | W6WL31 |
| HPV31 | E7 | W7WL31 |
| HPV31 | L1 | P1WL31 |
| HPV31 | L2 | P2WL31 |
| HPV45 | E1 | S36563 |
| HPV45 | E2 | S36564 |
| HPV45 | E6 | CAB44706 |
| HPV45 | E7 | CAB44707 |
| HPV45 | L1 | CAB44705 |
| HPV45 | L2 | S36565 |
| HPV33 | E1 | W1WL33 |
| HPV33 | E2 | W2WL33 |
| HPV33 | E5 | W5WL33 |
| HPV33 | E6 | W6WL33 |
| HPV33 | E7 | W7WL33 |
| HPV33 | L1 | P1WL33 |
| HPV33 | L2 | P2WL33 |
| HPV56 | E2 | S36581 |
| HPV56 | E6 | W6WL56 |
| HPV56 | E7 | S36580 |
| HPV56 | L1 | S38563 |
| HPV56 | L2 | S36582 |

[0285] Computer searches for epitopes bearing HLA Class I or Class II supermotifs or motifs were performed as follows. All translated HPV protein sequences were analyzed using a text string search software program, e.g., MotifSearch 1.4 (D. Brown, San Diego) to identify potential peptide sequences containing appropriate HLA binding motifs; alternative programs are readily produced in accordance with information in the art in view of the motif/supermotif disclosure herein. Furthermore, such calculations can be made mentally.

[0286] Identified A2-, A3-, and DR-supermotif sequences were scored using polynomial algorithms to predict their capacity to bind to specific HLA-Class I or Class II molecules. These polynomial algorithms take into account both extended and refined motifs (that is, to account for the impact of different amino acids at different positions), and are essentially based on the premise that the overall affinity (or ΔG) of peptide-HLA molecule interactions can be approximated as a linear polynomial function of the type:

“ΔG”=a₁ᵢ×a₂ᵢ×a₃ᵢ . . . ×aₙᵢ

[0287] where aⱼᵢ is a coefficient which represents the effect of the presence of a given amino acid (i) at a given position (i) along the sequence of a peptide of n amino acids. The crucial assumption of this method is that the effects at each position are essentially independent of each other (i.e., independent binding of individual side-chains). When residue j occurs at position i in the peptide, it is assumed to contribute a constant amount jᵢ to the free energy of binding of the peptide irrespective of the sequence of the rest of the peptide. This assumption is justified by studies from our laboratories that demonstrated that peptides are bound to MHC and recognized by T cells in essentially an extended conformation (data omitted herein).

[0288] The method of derivation of specific algorithm coefficients has been described in Gulukota et al., J. Mol. Biol. 267:1258-126, 1997; (see also Sidney et al., Human Immunol. 45:79-93, 1996; and Southwood et al., J. Immunol. 160:3363-3373, 1998). Briefly, for all i positions, anchor and non-anchor alike, the geometric mean of the average relative binding (ARB) of all peptides carrying j is calculated relative to the remainder of the group, and used as the estimate of jᵢ. For Class II peptides, if multiple alignments are possible, only the highest scoring alignment is utilized, following an iterative procedure. To calculate an algorithm score of a given peptide in a test set, the ARB values corresponding to the sequence of the peptide are multiplied. If this product exceeds a chosen threshold, the peptide is predicted to bind, Appropriate thresholds are chosen as a function of the degree of stringency of prediction desired.

### Selection of HLA-A2 Supertype Cross-Reactive Peptides

[0289] Complete protein sequences from the seven HPV structural and regulatory proteins of the HPV strains listed above were aligned, then scanned, utilizing motif identification software, to identify 9- and 10-mer sequences containing the HLA-A2-supermotif main anchor specificity.

[0290] HLA-A2 supermotif-bearing sequences are shown in Table VIII. Typically, these sequences are then scored using the A2 algorithm and the peptides corresponding to the positive-scoring sequences are synthesized and tested for their capacity to bind purified HLA-A*0201 molecules in vitro (HLA-A*0201 is considered a prototype A2 supertype molecule).

[0291] Examples of peptides that bind to HLA-A*0201 with IC₅₀ values≦500 nM are shown in Table VIII. These peptides are then tested for the capacity to bind to additional A2-supertype molecules (A*0202, A*0203, A*0206, and A*6802). Peptides that bind to at least three of the five A2-supertype alleles tested are typically deemed A2-supertype cross-reactive binders. Preferred peptides bind at an affinity equal to or less than 500 nM to three or more HLA-A2 supertype molecules.

### Selection of HLA-A3 Supermotif-Bearing Epitopes

[0292] The HPV protein sequences scanned above were also examined for the presence of peptides with the HLA-A3-supermotif primary anchors (Table IX).

[0293] Peptides corresponding to the supermotif-bearing sequences are then synthesized and tested for binding to HLA-A*0301 and HLA-A*1101 molecules, the two most prevalent A3-supertype alleles. The peptides that are found to bind one of the two alleles with binding affinities of ≦500 nM, often ≦200 nM, are then tested for binding cross-reactivity to the other common A3-supertype alleles (A*3101, A*3301, and A*6801) to identify those that can bind at least three of the five HLA-A3-supertype molecules tested.

### Selection of HLA-B7 Supermotif Bearing Epitopes

[0294] The same HPV target antigen protein sequences were also analyzed for the presence of 9- or 10-mer peptides with the HLA-B7-supermotif (Table XI).

[0295] Corresponding peptides are synthesized and tested for binding to HLA-B*0702, the most common B7-supertype allele (i.e., the prototype B7 supertype allele). Peptides binding B*0702 with IC₅₀ of <500 nM are identified using standard methods. These peptides are then tested for binding to other common B7-supertype molecules (B*3501, B*5101, B*5301, and B*5401). Peptides capable of binding to three or more of the five B7-supertype alleles tested are thereby identified.

### Selection of A1 and A24 Motif-Bearing Epitopes

[0296] To further increase population coverage, HLA-A1 and -A24 epitopes can, for example, also be incorporated into potential vaccine constructs. An analysis of the protein sequence data from the HPV target antigens utilized above can also be performed to identify HLA-A1- and A24-motif-containing sequences.

[0297] High affinity and/or cross-reactive binding epitopes that bear other motif and/or supermotifs are identified using analogous methodology.

### Example 3

### Confirmation of Immunogenicity

[0298] Cross-reactive candidate CTL A2-supermotif-bearing peptides that are identified as described in Example 2 were selected for in vitro immunogenicity testing. Testing was performed using the following methodology:

### Target Cell Lines for Cellular Screening:

[0299] The 221A2.1 cell line, produced by transferring the HLA-A2.1 gene into the HLA-A, -B, -C null mutant human B-lymphoblastoid cell line 721.221, is used as the peptide-loaded target to measure activity of HLA-A2.1-restricted CTL. This cell line is grown in RPMI-1640 medium supplemented with antibiotics, sodium pyruvate, nonessential amino acids and 10% (v/v) heat inactivated FCS. Cells that express an antigen of interest, or transfectants comprising the gene encoding the antigen of interest, can be used as target cells to test the ability of peptide-specific CTLs to recognize endogenous antigen.

### Primary CTL Induction Cultures:

[0300] Generation of Dendritic Cells (DC):

[0301] PBMCs are thawed in RPMI with 30 μg/ml DNAse, washed twice and resuspended in complete medium (RPMI-1640 plus 5% AB human serum, non-essential amino acids, sodium pyruvate, L-glutamine and penicillin/streptomycin). The monocytes are purified by plating 10×10⁶ PBMC/well in a 6-well plate. After 2 hours at 37° C., the non-adherent cells are removed by gently shaking the plates and aspirating the supernatants. The wells are washed a total of three times with 3 ml RPMI to remove most of the non-adherent and loosely adherent cells. Three ml of complete medium containing 50 ng/ml of GM-CSF and 1,000 U/ml of IL-4 are then added to each well. TNF□ is added to the DCs on day 6 at 75 ng/ml and the cells are used for CTL induction cultures on day 7.

[0302] Induction of CTL with DC and Peptide:

[0303] CD8+ T-cells are isolated by positive selection with Dynal immunomagnetic beads (Dynabeads® M-450) and the Detacha-Bead® reagent. Typically about 200-250×10⁶ PBMC are processed to obtain 24×10⁶ CD8⁺ T-cells (enough for a 48-well plate culture). Briefly, the PBMCs are thawed in RPMI with 30 μg/ml DNAse, washed once with PBS containing 1% human AB serum and resuspended in PBS/1% AB serum at a concentration of 20×10⁶ cells/mL. The magnetic beads are washed 3 times with PBS/AB serum, added to the cells (1401 beads/20×10⁶ cells) and incubated for 1 hour at 4° C. with continuous mixing. The beads and cells are washed 4× with PBS/AB serum to remove the nonadherent cells and resuspended at 100×10⁶ cells/ml (based on the original cell number) in PBS/AB serum containing 100 μl/ml Detacha-Bead® reagent and 3 μg/1 ml DNAse. The mixture is incubated for 1 hour at room temperature with continuous mixing. The beads are washed again with PBS/AB/DNAse to collect the CD8+ T-cells. The DC are collected and centrifuged at 1300 rpm for 5-7 minutes, washed once with PBS with 1% BSA, counted and pulsed with 40 μg/ml of peptide at a cell concentration of 1−2×10⁶/ml in the presence of 3 μl/ml β₂-microglobulin for 4 hours at 20° C. The DC are then irradiated (4,200 rads), washed 1 time with medium and counted again.

[0304] Setting Up Induction Cultures:

[0305] 0.25 ml cytokine-generated DC (1×10⁵ cells/ml) are co-cultured with 0.25 ml of CD8+ T-cells (@2×10⁶ cell/ml) in each well of a 48-well plate in the presence of 10 ng/ml of IL-7. Recombinant human IL10 is added the next day at a final concentration of 10 ng/ml and rhuman IL2 is added 48 hours later at 10 IU/ml.

[0306] Restimulation of the Induction Cultures with Peptide-Pulsed Adherent Cells:

[0307] Seven and fourteen days after the primary induction the cells are restimulated with peptide-pulsed adherent cells. The PBMCS are thawed and washed twice with RPMI and DNAse. The cells are resuspended at 5×10⁶ cells/ml and irradiated at ˜4200 rads. The PBMCs are plated at 2×10⁶ in 0.5 ml complete medium per well and incubated for 2 hours at 37° C. The plates are washed twice with RPMI by tapping the plate gently to remove the nonadherent cells and the adherent cells pulsed with 10 μg/ml of peptide in the presence of 3 μg/ml β₂ microglobulin in 0.25 ml RPMI/5% AB per well for 2 hours at 37° C. Peptide solution from each well is aspirated and the wells are washed once with RPMI. Most of the media is aspirated from the induction cultures (CD8+ cells) and brought to 0.5 ml with fresh media. The cells are then transferred to the wells containing the peptide-pulsed adherent cells. Twenty four hours later rhuman IL10 is added at a final concentration of 10 ng/ml and rhuman IL2 is added the next day and again 2-3 days later at 50 IU/ml (Tsai et al., Critical Reviews in Immunology 18(1-2):65-75, 1998). Seven days later the cultures are assayed for CTL activity in a ⁵¹Cr release assay. In some experiments the cultures are assayed for peptide-specific recognition in the in situ IFNγ ELISA at the time of the second restimulation followed by assay of endogenous recognition 7 days later. After expansion, activity is measured in both assays for a side by side comparison.

### Measurement of CTL Lytic Activity by ⁵¹Cr Release.

[0308] Seven days after the second restimulation, cytotoxicity is determined in a standard (5 hr) ⁵¹Cr release assay by assaying individual wells at a single E:T. Peptide-pulsed targets are prepared by incubating the cells with 10 μg/ml peptide overnight at 37° C.

[0309] Adherent target cells are removed from culture flasks with trypsin-EDTA. Target cells are labelled with 200 μCi of ⁵¹Cr sodium chromate (Dupont, Wilmington, Del.) for 1 hour at 37° C. Labelled target cells are resuspended at 10⁶ per ml and diluted 1:10 with K562 cells at a concentration of 3.3×10⁶/ml (an NK-sensitive erythroblastoma cell line used to reduce non-specific lysis). Target cells (100 μl) and 100 μl of effectors are plated in 96 well round-bottom plates and incubated for 5 hours at 37° C. At that time, 100 μl of supernatant are collected from each well and percent lysis is determined according to the formula: [(cpm of the test sample−cpm of the spontaneous ⁵¹Cr release sample)/(cpm of the maximal ⁵¹Cr release sample−cpm of the spontaneous ⁵¹Cr release sample)]×100. Maximum and spontaneous release are determined by incubating the labelled targets with 1% Trition X-100 and media alone, respectively. A positive culture is defined as one in which the specific lysis (sample-background) is 10% or higher in the case of individual wells and is 15% or more at the 2 highest E:T ratios when expanded cultures are assayed.

### In Situ Measurement of Human γIFN Production as an Indicator of Peptide-Specific and Endogenous Recognition

[0310] Immulon 2 plates are coated with mouse anti-human IFNγmonoclonal antibody (4 μg/ml 0.1M NaHCO₃, pH8.2) overnight at 4° C. The plates are washed with Ca²⁺, Mg²⁺-free PBS/0.05% Tween 20 and blocked with PBS/10% FCS for 2 hours, after which the CTLs (100 μl/well) and targets (100 μl/well) are added to each well, leaving empty wells for the standards and blanks (which received media only). The target cells, either peptide-pulsed or endogenous targets, are used at a concentration of 1×10⁶ cells/ml. The plates are incubated for 48 hours at 37° C. with 5% CO₂.

[0311] Recombinant human IFNγ is added to the standard wells starting at 400 pg or 1200 pg/100 μl/well and the plate incubated for 2 hours at 37° C. The plates are washed and 100 μl of biotinylated mouse anti-human IFNγ monoclonal antibody (2 μg/ml in PBS/3% FCS/0.05% Tween 20) are added and incubated for 2 hours at room temperature. After washing again, 100 μl HRP-streptavidin (1:4000) are added and the plates incubated for 1 hour at room temperature. The plates are then washed 6× with wash buffer, 100 μl/well developing solution (TMB 1:1) are added, and the plates allowed to develop fbr 5-15 minutes. The reaction is stopped with 50 μl/well 1M H₃PO₄ and read at OD450. A culture is considered positive if it measured at least 50 pg of IFNγ/well above background and is twice the background level of expression.

[0312] CTL Expansion.

[0313] Those cultures that demonstrate specific lytic activity against peptide-pulsed targets and/or tumor targets are expanded over a two week period with anti-CD3. Briefly, 5×10⁴ CD8+ cells are added to a T25 flask containing the following: 1×10⁶ irradiated (4,200 rad) PBMC (autologous or allogeneic) per ml, 2×10⁵ irradiated (8,000 rad) EBV-transformed cells per ml, and OKT3 (anti-CD3) at 30 ng per ml in RPMI-1640 containing 10% (v/v) human AB serum, non-essential amino acids, sodium pyruvate, 25 μM 2-mercaptoethanol, L-glutamine and penicillin/streptomycin. Rhuman IL2 is added 24 hours later at a final concentration of 2001 U/ml and every 3 days thereafter with fresh media at 501 U/ml. The cells are split if the cell concentration exceeded 1×10⁶/ml and the cultures are assayed between days 13 and 15 at E:T ratios of 30, 10, 3 and 1:1 in the ⁵¹Cr release assay or at 1×10⁶/ml in the in situ IFN□ assay using the same targets as before the expansion.

[0314] Cultures are expanded in the absence of anti-CD3⁺ as follows. Those cultures that demonstrate specific lytic activity against peptide and endogenous targets are selected and 5×10⁴ CD8⁺ cells are added to a T25 flask containing the following: 1×10⁶ autologous PBMC per ml which have been peptide-pulsed with 10 μg/ml peptide for 2 hours at 37° C. and irradiated (4,200 rad); 2×10⁵ irradiated (8,000 rad) EBV-transformed cells per ml RPMI-1640 containing 10% (v/v) human AB serum, non-essential AA, sodium pyruvate, 25 mM 2-ME, L-glutamine and gentamicin.

### Immunogenicity of A2 Supermotif-Bearing Peptides

[0315] A2-supermotif cross-reactive binding peptides are tested in the cellular assay for the ability to induce peptide-specific CTL in normal individuals. In this analysis, a peptide is typically considered to be an epitope if it induces peptide-specific CTLs in at least 2 donors (unless otherwise noted) and preferably, also recognizes the endogenously expressed peptide.

[0316] Immunogenicity is additionally confirmed using PBMCs isolated from HPV-infected patients. Briefly, PBMCs are isolated from patients, re-stimulated with peptide-pulsed monocytes and assayed for the ability to recognize peptide-pulsed target cells as well as transfected cells endogenously expressing the antigen.

### Evaluation of A*03/A11 Immunogenicity

[0317] HLA-A3 supermotif-bearing cross-reactive binding peptides are also evaluated for immunogenicity using methodology analogous for that used to evaluate the immunogenicity of the HLA-A2 supermotif peptides.

### Evaluation of B7 Immunogenicity

[0318] Immunogenicity screening of the B7-supertype cross-reactive binding peptides identified in Example 2 are evaluated in a manner analogous to the evaluation of A2- and A3-supermotif-bearing peptides.

[0319] Peptides bearing other supermotifs/motifs, e.g., HLA-A1, HLA-A24 etc. are also evaluated using similar methodology

### Example 4

### Implementation of the Extended Supermotif to Improve the Binding Capacity of Native Epitopes by Creating Analogs

[0320] HLA motifs and supermotifs (comprising primary and/or secondary residues) are useful in the identification and preparation of highly cross-reactive native peptides, as demonstrated herein. Moreover, the definition of HLA motifs and supermotifs also allows one to engineer highly cross-reactive epitopes by identifying residues within a native peptide sequence which can be analoged, or “fixed” to confer upon the peptide certain characteristics, e.g. greater cross-reactivity within the group of HLA molecules that comprise a supertype, and/or greater binding affinity for some or all of those HLA molecules. Examples of analoging peptides to exhibit modulated binding affinity are set forth in this example.

### Analoging at Primary Anchor Residues

[0321] Peptide engineering strategies are implemented to further increase the cross-reactivity of the epitopes. For example, on the basis of the data disclosed, e.g., in related and co-pending U.S. Ser. No. 09/226,775, the main anchors of A2-supermotif-bearing peptides are altered, for example, to introduce a preferred L, I, V, or M at position 2, and I or V at the C-terminus.

[0322] To analyze the cross-reactivity of the analog peptides, each engineered analog is initially tested for binding to the prototype A2 supertype allele A*0201, then, if A*0201 binding capacity is maintained, for A2-supertype cross-reactivity.

[0323] Alternatively, a peptide is tested for binding to one or all supertype members and then analogued to modulate binding affinity to any one (or more) of the supertype members to add population coverage.

[0324] The selection of analogs for immunogenicity in a cellular screening analysis is typically further restricted by the capacity of the parent peptide to bind at least weakly, i.e., bind at an IC₅₀ of 5000 nM or less, to three of more A2 supertype alleles. The rationale for this requirement is that the WT peptides must be present endogenously in sufficient quantity to be biologically relevant. Analoged peptides have been shown to have increased immunogenicity and cross-reactivity by T cells specific for the parent epitope (see, e.g., Parkhurst et al., J. Immunol. 157:2539, 1996; and Pogue et al., Proc. Natl. Acad. Sci. USA 92:8166, 1995).

[0325] In the cellular screening of these peptide analogs, it is important to demonstrate that analog-specific CTLs are also able to recognize the wild-type peptide and, when possible, target cells that endogenously express the epitope.

### Analoging of HLA-A3 and B7-Supermotif-Bearing Peptides

[0326] Analogs of HLA-A3 supermotif-bearing epitopes are generated using strategies similar to those employed in analoging HLA-A2 supermotif-bearing peptides. For example, peptides binding to 3/5 of the A3-supertype molecules are engineered at primary anchor residues to possess a preferred residue (V, S, M, or A) at position 2.

[0327] The analog peptides are then tested for the ability to bind A*03 and A*11 (prototype A3 supertype alleles). Those peptides that demonstrate ≦500 nM binding capacity are then tested for A3-supertype cross-reactivity.

[0328] Similarly to the A2- and A3-motif bearing peptides, peptides binding 3 or more B7-supertype alleles can be improved, where possible, to achieve increased cross-reactive binding. B7 supermotif-bearing peptides are, for example, engineered to possess a preferred residue (V, I, L, or F) at the C-terminal primary anchor position, as demonstrated by Sidney et al. (J. Immunol. 157:3480-3490, 1996).

[0329] Analoguing at primary anchor residues of other motif and/or supermotif-bearing epitopes is performed in a like manner.

[0330] The analog peptides are then be tested for immunogenicity, typically in a cellular screening assay. Again, it is generally important to demonstrate that analog-specific CTLs are also able to recognize the wild-type peptide and, when possible, targets that endogenously express the epitope.

### Analoging at Secondary Anchor Residues

[0331] Moreover, HLA supermotifs are of value in engineering highly cross-reactive peptides and/or peptides that bind HLA molecules with increased affinity by identifying particular residues at secondary anchor positions that are associated with such properties. For example, the binding capacity of a B7 supermotif-bearing peptide with an F residue at position 1 is analyzed. The peptide is then analoged to, for example, substitute L for F at position 1. The analoged peptide is evaluated for increased binding affinity/ and or increased cross-reactivity. Such a procedure identifies analoged peptides with modulated binding affinity.

[0332] Engineered analogs with sufficiently improved binding capacity or cross-reactivity can also be tested for immunogenicity in HLA-B7-transgenic mice, following for example, IFA immunization or lipopeptide immunization. Analogued peptides are additionally tested for the ability to stimulate a recall response using PBMC from HPV-infected patients.

### Other Analoguing Strategies

[0333] Another form of peptide analoguing, unrelated to the anchor positions, involves the substitution of a cysteine with α-amino butyric acid. Due to its chemical nature, cysteine has the propensity to form disulfide bridges and sufficiently alter the peptide structurally so as to reduce binding capacity. Substitution of α-amino butyric acid for cysteine not only alleviates this problem, but has been shown to improve binding and crossbinding capabilities in some instances (see, e.g., the review by Sette et al., In: Persistent Viral Infections, Eds. R. Ahmed and L Chen, John Wiley & Sons, England, 1999).

[0334] Thus, by the use of even single amino acid substitutions, the binding affinity and/or cross-reactivity of peptide ligands for HLA supertype molecules can be modulated.

### Example 5

### Identification of HPV-Derived Sequences with HLA-DR Binding Motifs

[0335] Peptide epitopes bearing an HLA class II supermotif or motif are identified as outlined below using methodology similar to that described in Examples 1-3.

Selection of HLA-DR-supermotif-bearing epitopes.

[0336] To identify HPV-derived, HLA class II HTL epitopes, the protein sequences from the same HPV antigens used for the identification of HLA Class I supermotif/motif sequences were analyzed for the presence of sequences bearing an HLA-DR-motif or supermotif. Specifically, 15-mer sequences were selected comprising a DR-supermotif, further comprising a 9-mer core, and three-residue N- and C-terminal flanking regions (15 amino acids total).

[0337] Protocols for predicting peptide binding to DR molecules have been developed (Southwood et al., J. Immunol. 160:3363-3373, 1998). These protocols, specific for individual DR molecules, allow the scoring, and ranking, of 9-mer core regions. Each protocol not only scores peptide sequences for the presence of DR-supermotif primary anchors (i.e., at position 1 and position 6) within a 9-mer core, but additionally evaluates sequences for the presence of secondary anchors. Using allele specific selection tables (see, e.g., Southwood et al., ibid.), it has been found that these protocols efficiently select peptide sequences with a high probability of binding a particular DR molecule. Additionally, it has been found that performing these protocols in tandem, specifically those for DR1, DR4w4, and DR7, can efficiently select DR cross-reactive peptides.

[0338] The HPV-derived peptides identified above are tested for their binding capacity for various common HLA-DR molecules. All peptides are initially tested for binding to the DR molecules in the primary panel: DR1, DR4w4, and DR7. Peptides binding at least 2 of these 3 DR molecules are then tested for binding to DR2w2 β1, DR2w2 β2, DR6w19, and DR9 molecules in secondary assays. Finally, peptides binding at least 2 of the 4 secondary panel DR molecules, and thus cumulatively at least 4 of 7 different DR molecules, are screened for binding to DR4w15, DR5w11, and DR8w2 molecules in tertiary assays. Peptides binding at least 7 of the 10 DR molecules comprising the primary, secondary, and tertiary screening assays are considered cross-reactive DR binders. HPV-derived peptides found to bind common HLA-DR alleles are of particular interest.

### Selection of DR3 Motif Peptides

[0339] Because HLA-DR3 is an allele that is prevalent in Caucasian, Black, and Hispanic populations, DR3 binding capacity is an important criterion in the selection of HTL epitopes. However, data generated previously indicated that DR3 only rarely cross-reacts with other DR alleles (Sidney et al., J. Immunol. 149:2634-2640, 1992; Geluk et al., J. Immunol. 152:5742-5748, 1994; Southwood et al., J. Immunol. 160:3363-3373, 1998). This is not entirely surprising in that the DR3 peptide-binding motif appears to be distinct from the specificity of most other DR alleles. For maximum efficiency in developing vaccine candidates it would be desirable for DR3 motifs to be clustered in proximity with DR supermotif regions. Thus, peptides shown to be candidates may also be assayed for their DR3 binding capacity. However, in view of the distinct binding specificity of the DR3 motif, peptides binding only to DR3 can also be considered as candidates for inclusion in a vaccine formulation.

[0340] To efficiently identify peptides that bind DR3, target HPV antigens are analyzed for sequences carrying one of the two DR3 specific binding motifs reported by Geluk et al. (J. Immunol. 152:5742-5748, 1994). The corresponding peptides are then synthesized and tested for the ability to bind DR3 with an affinity of 1 μM or better, i.e., less than 1 μM. Peptides are found that meet this binding criterion and qualify as HLA class II high affinity binders.

[0341] DR3 binding epitopes identified in this manner are included in vaccine compositions with DR supermotif-bearing peptide epitopes.

[0342] Similarly to the case of HLA class I motif-bearing peptides, the class II motif-bearing peptides are analoged to improve affinity or cross-reactivity. For example, aspartic acid at position 4 of the 9-mer core sequence is an optimal residue for DR3 binding, and substitution for that residue often improves DR 3 binding.

### Example 6

### Immunogenicity of HPV-Derived HTL Epitopes

[0343] This example determines immunogenic DR supermotif- and DR3 motif-bearing epitopes among those identified using the methodology in Example 5.

[0344] Immunogenicity of HTL epitopes are evaluated in a manner analogous to the determination of immunogenicity of CTL epitopes by assessing the ability to stimulate HTL responses and/or by using appropriate transgenic mouse models. Immunogenicity is determined by screening for: 1.) in vitro primary induction using normal PBMC or 2.) recall responses from cancer patient PBMCs.

### Example 7

### Calculation of Phenotypic Frequencies of HLA-Supertypes in Various Ethnic Backgrounds to Determine Breadth of Population Coverage

[0345] This example illustrates the assessment of the breadth of population coverage of a vaccine composition comprised of multiple epitopes comprising multiple supermotifs and/or motifs.

[0346] In order to analyze population coverage, gene frequencies of HLA alleles were determined. Gene frequencies for each HLA allele were calculated from antigen or allele frequencies utilizing the binomial distribution formulae gf=1−(SQRT(1−af)) (see, e.g., Sidney et al., Human Immunol. 45:79-93, 1996). To obtain overall phenotypic frequencies, cumulative gene frequencies were calculated, and the cumulative antigen frequencies derived by the use of the inverse formula [af=1−(1−Cgf)²].

[0347] Where frequency data was not available at the level of DNA typing, correspondence to the serologically defined antigen frequencies was assumed. To obtain total potential supertype population coverage no linkage disequilibrium was assumed, and only alleles confirmed to belong to each of the supertypes were included (minimal estimates). Estimates of total potential coverage achieved by inter-loci combinations were made by adding to the A coverage the proportion of the non-A covered population that could be expected to be covered by the B alleles considered (e.g., total=A+B*(1−A)). Confirmed members of the A3-like supertype are A3, A11, A31, A*3301, and A*6801. Although the A3-like supertype may also include A34, A66, and A*7401, these alleles were not included in overall frequency calculations. Likewise, confirmed members of the A2-like supertype family are A*0201, A*0202, A*0203, A*0204, A*0205, A*0206, A*0207, A*6802, and A*6901. Finally, the 17-like supertype-confirmed alleles are: B7, B*3501-03, B51, B*5301, B*5401, B*5501-2, B*5601, B*6701, and B*7801 (potentially also B*1401, B*350406, B*4201, and B*5602).

[0348] Population coverage achieved by combining the A2-, A3- and B7-supertypes is approximately 86% in five major ethnic groups, supra. Coverage may be extended by including peptides bearing the A1 and A24 motifs. On average, A1 is present in 12% and A24 in 29% of the population across five different major ethnic groups (Caucasian, North American Black, Chinese, Japanese, and Hispanic). Together, these alleles are represented with an average frequency of 39% in these same ethnic populations. The total coverage across the major ethnicities when A1 and A24 are combined with the coverage of the A2-, A3- and B7-supertype alleles is >95%. An analagous approach can be used to estimate population coverage achieved with combinations of class II motif-bearing epitopes.

[0349] Immunogenicity studies in humans (e.g., Bertoni et al., J. Clin. Invest. 100:503, 1997; Doolan et al., Immunity 7:97, 1997; and Threlkeld et al., J. Immunol. 159:1648, 1997) have shown that highly cross-reactive binding peptides are almost always recognized as epitopes. The use of highly cross-reactive binding peptides is an important selection criterion in identifying candidate epitopes for inclusion in a vaccine that is immunogenic in a diverse population.

[0350] With a sufficient number of epitopes (as disclosed herein and from the art), an average population coverage is predicted to be greater than 95% in each of five major ethnic populations. The game theory Monte Carlo simulation analysis, which is known in the art (see e.g., Osborne, M. J. and Rubinstein, A. “A course in game theory” MIT Press, 1994), can be used to estimate what percentage of the individuals in a population comprised of the Caucasian, North American Black, Japanese, Chinese, and Hispanic ethnic groups would recognize the vaccine epitopes described herein. A preferred percentage is 90%. A more preferred percentage is 95%.

### Example 8

### CTL Recognition of Endogenous Processed Antigens after Priming

[0351] This example determines that CTL induced by native or analogued peptide epitopes identified and selected as described in Examples 1-6 recognize endogenously synthesized, i.e., native antigens.

[0352] Effector cells isolated from transgenic mice that are immunized with peptide epitopes as in Example 3, for example HLA-A2 supermotif-bearing epitopes, are re-stimulated in vitro using peptide-coated stimulator cells. Six days later, effector cells are assayed for cytotoxicity and the cell lines that contain peptide-specific cytotoxic activity are further re-stimulated. An additional six days later, these cell lines are tested for cytotoxic activity on ⁵¹Cr labeled Jurkat-A2.1/K^{b} target cells in the absence or presence of peptide, and also tested on ⁵¹Cr labeled target cells bearing the endogenously synthesized antigen, i.e. cells that are stably transfected with HPV expression vectors.

[0353] The result will demonstrate that CTL lines obtained from animals primed with peptide epitope recognize endogenously synthesized HPV antigen. The choice of transgenic mouse model to be used for such an analysis depends upon the epitope(s) that is being evaluated. In addition to HLA-A*0201/K^{b} transgenic mice, several other transgenic mouse models including mice with human A11, which may also be used to evaluate A3 epitopes, and B7 alleles have been characterized and others (e.g., transgenic mice for HLA-A1 and A24) are being developed. HLA-DR1 and HLA-DR3 mouse models have also been developed, which may be used to evaluate HTL epitopes.

### Example 9

### Activity of CTL-HTL Conjugated Epitopes in Transgenic Mice

[0354] This example illustrates the induction of CTLs and HTLs in transgenic mice by use of a tumor associated antigen CTL/HTL peptide conjugate whereby the vaccine composition comprises peptides to be administered to an HPV-infected patient. The peptide composition can comprise multiple CTL and/or HTL epitopes and further, can comprise epitopes selected from multiple HPV target antigens. The epitopes are identified using methodology as described in Examples 1-6 This analysis demonstrates the enhanced immunogenicity that can be achieved by inclusion of one or more HTL epitopes in a vaccine composition. Such a peptide composition can comprise an HTL epitope conjugated to a preferred CTL epitope containing, for example, at least one CTL epitope that binds to multiple HLA family members at an affinity of 500 μM or less, or analogs of that epitope. The peptides may be lipidated, if desired.

[0355] Immunization procedures: Immunization of transgenic mice is performed as described (Alexander et al., J. Immunol. 159:4753-4761, 1997). For example, A2/Kb mice, which are transgenic for the human HLA A2.1 allele and are useful for the assessment of the immunogenicity of HLA-A*0201 motif- or HLA-A2 supermotif bearing epitopes, are primed subcutaneously (base of the tail) with a 0.1 ml of peptide in Incomplete Freund's Adjuvant, or if the peptide composition is a lipidated CTL/HTL conjugate, in DMSO/saline or if the peptide composition is a polypeptide, in PBS or Incomplete Freund's Adjuvant. Seven days after priming, splenocytes obtained from these animals are restimulated with syngenic irradiated LPS-activated lymphoblasts coated with peptide.

[0356] Cell lines: Target cells for peptide-specific cytotoxicity assays are Jurkat cells transfected with the HLA-A2.1/K^{b} chimeric gene (e.g., Vitiello et al., J. Exp. Med. 173:1007, 1991)

[0357] In vitro CTL activation: One week after priming, spleen cells (30×10⁶ cells/flask) are co-cultured at 37° C. with syngeneic, irradiated (3000 rads), peptide coated lymphoblasts (10×10⁶ cells/flask) in 10 ml of culture medium/T25 flask. After six days, effector cells are harvested and assayed for cytotoxic activity.

[0358] Assay for cytotoxic activity: Target cells (1.0 to 1.5×10⁶) are incubated at 37° C. in, the presence of 200 μl of ⁵¹Cr. After 60 minutes, cells are washed three times and resuspended in R10 medium. Peptide is added where required at a concentration of 1 μg/ml. For the assay, 10^{4 51}Cr-labeled target cells are added to different concentrations of effector cells (final volume of 200 μl) in U-bottom 96-well plates. After a 6 hour incubation period at 37° C., a 0.1 ml aliquot of supernatant is removed from each well and radioactivity is determined in a Micromedic automatic gamma counter. The percent specific lysis is determined by the formula: percent specific release=100×(experimental release−spontaneous release)/(maximum release−spontaneous release). To facilitate comparison between separate CTL assays run under the same conditions, % ⁵¹Cr release data is expressed as lytic units/10⁶ cells. One lytic unit is arbitrarily defined as the number of effector cells required to achieve 30% lysis of 10,000 target cells in a 6 hour ⁵¹Cr release assay. To obtain specific lytic units/10⁶, the lytic units/10⁶ obtained in the absence of peptide is subtracted from the lytic units/10⁶ obtained in the presence of peptide. For example, if 30% ⁵¹Cr release is obtained at the effector (E): target (T) ratio of 50:1 (i.e., 5×10⁵ effector cells for 10,000 targets) in the absence of peptide and 5:1 (i.e., 5×10⁴ effector cells for 10,000 targets) in the presence of peptide, the specific lytic units would be: [(1/50,000)−(1/500,000)]×10⁶=18 LU.

[0359] The results are analyzed to assess the magnitude of the CTL responses of animals injected with the immunogenic CTL/HTL conjugate vaccine preparation and are compared to the magnitude of the CTL response achieved using the CTL epitope as outlined in Example 3. Analyses similar to this may be performed to evaluate the immunogenicity of peptide conjugates containing multiple CTL epitopes and/or multiple HTL epitopes. In accordance with these procedures it is found that a CTL response is induced, and concomitantly that an HTL response is induced upon administration of such compositions.

### Example 10

### Selection of CTL and HTL Epitopes for Inclusion in an HPV-Specific Vaccine

[0360] This example illustrates the procedure for the selection of peptide epitopes for vaccine compositions of the invention. The peptides in the composition can be in the form of a nucleic acid sequence, either single or one or more sequences (i.e., minigene) that encodes peptide(s), or can be single and/or polyepitopic peptides.

[0361] The following principles are utilized when selecting an array of epitopes for inclusion in a vaccine composition. Each of the following principles is balanced in order to make the selection.

[0362] Epitopes are selected which, upon administration, mimic immune responses that have been observed to be correlated with HPV clearance. The number of epitopes used depends on observations of patients who spontaneously clear HPV. For example, if it has been observed that patients who spontaneously clear HPV generate an immune response to at least 3 epitopes on at least one HPV antigen, then 3-4 epitopes should be included for HLA class I. A similar rationale is used to determine HLA class II epitopes.

[0363] When selecting an array of HPV epitopes, it is preferred that at least some of the epitopes are derived from early and late proteins. The early proteins of HPV are expressed when the virus is replicating, either following acute or dormant infection. Therefore, it is particularly preferred to use epitopes from early stage proteins to alleviate disease manifestations at the earliest stage possible.

[0364] Epitopes are often selected that have a binding affinity of an IC₅₀ of 500 M or less for an HLA class I molecule, or for class II, an IC₅₀ of 1000 nM or less.

[0365] Sufficient supermotif bearing peptides, or a sufficient array of allele-specific motif bearing peptides, are selected to give broad population coverage. For example, epitopes are selected to provide at least 80% population coverage. A Monte Carlo analysis, a statistical evaluation known in the art, can be employed to assess breadth, or redundancy, of population coverage.

[0366] When creating a polyepitopic compositions, e.g. a minigene, it is typically desirable to generate the smallest peptide possible that encompasses the epitopes of interest. The principles employed are similar, if not the same, as those employed when selecting a peptide comprising nested epitopes.

[0367] In cases where the sequences of multiple variants of the same target protein are available, potential peptide epitopes can also be selected on the basis of their conservancy. For example, a criterion for conservancy may define that the entire sequence of an HLA class I binding peptide or the entire 9-mer core of a class II binding peptide be conserved in a designated percentage of the sequences evaluated for a specific protein antigen.

[0368] A vaccine composition comprised of selected peptides, when administered, is safe, efficacious, and elicits an immune response similar in magnitude to an immune response that controls or clears an acute HPV infection.

### Example 11

### Construction of Minigene Multi-Epitope DNA Plasmids

[0369] This example provides general guidance for the construction of a minigene expression plasmid. Minigene plasmids may, of course, contain various configurations of CTL and/or HTL epitopes or epitope analogs as described herein. Examples of the construction and evaluation of expression plasmids are described, for example, in co-pending U.S. Ser. No. 09/311,784 filed May 13, 1999.

[0370] A minigene expression plasmid typically includes multiple CTL and HTL peptide epitopes. In the present example, HLA-A2, -A3, -B7 supermotif-bearing peptide epitopes and HLA-A1 and -A24 motif-bearing peptide epitopes are used in conjunction with DR supermotif-bearing epitopes and/or DR3 epitopes. HLA class I supermotif or motif-bearing peptide epitopes derived from multiple HPV antigens, preferably including both early and late phase antigens, are selected such that multiple supermotifs/motifs are represented to ensure broad population coverage. Similarly, HLA class II epitopes are selected from multiple HPV antigens to provide broad population coverage, i.e. both HLA DR-1-4-7 supermotif-bearing epitopes and HLA DR-3 motif-bearing epitopes are selected for inclusion in the minigene construct. The selected CTL and HTL epitopes are then incorporated into a minigene for expression in an expression vector.

[0371] Such a construct may additionally include sequences that direct the HTL epitopes to the endoplasmic reticulum. For example, the Ii protein may be fused to one or more HTL epitopes as described in co-pending application U.S. Ser. No. 09/311,784 filed May 13, 1999, wherein the CLIP sequence of the Ii protein is removed and replaced with an HLA class II epitope sequence so that HLA class II epitope is directed to the endoplasmic reticulum, where the epitope binds to an HLA class II molecules.

[0372] This example illustrates the methods to be used for construction of a minigene-bearing expression plasmid. Other expression vectors that may be used for minigene compositions are available and known to those of skill in the art.

[0373] The minigene DNA plasmid of this example contains a consensus Kozak sequence and a consensus murine kappa Ig-light chain signal sequence followed by CTL and/or HTL epitopes selected in accordance with principles disclosed herein. The sequence encodes an open reading frame fused to the Myc and His antibody epitope tag coded for by the pcDNA 3.1 Myc-His vector.

[0374] Overlapping oligonucleotides that can, for example, average about 70 nucleotides in length with 15 nucleotide overlaps, are synthesized and HPLC-purified. The oligonucleotides encode the selected peptide epitopes as well as appropriate linker nucleotides, Kozak sequence, and signal sequence. The final multiepitope minigene is assembled by extending the overlapping oligonucleotides in three sets of reactions using PCR. A Perkin/Elmer 9600 PCR machine is used and a total of 30 cycles are performed using the following conditions: 95° C. for 15 see, annealing temperature (5° below the lowest calculated Tm of each primer pair) for 30 sec, and 72° C. for min.

[0375] For example, a minigene can be prepared as follows. For a first PCR reaction, 5 μg of each of two oligonucleotides are annealed and extended: In an example using eight oligonucleotides, i.e., four pairs of primers, oligonucleotides 1+2, 3+4, 5+6, and 7+8 are combined in 100 μl reactions containing Pfu polymerase buffer (1×=−10 mM KCL, 10 mM (NH₄)₂SO₄, 20 mM Tris-chloride, pH 8.75, 2 mM MgSO₄, 0.1% Triton X-100, 100 μg/ml BSA), 0.25 mM each dNTP, and 2.5 U of Pfu polymerase. The full-length dimer products are gel-purified, and two reactions containing the product of 1+2 and 3+4, and the product of 5+6 and 7+8 are mixed, annealed, and extended for 10 cycles. Half of the two reactions are then mixed, and 5 cycles of annealing and extension carried out before flanking primers are added to amplify the full length product. The full-length product is gel-purified and cloned into pCR-blunt (Invitrogen) and individual clones are screened by sequencing.

### Example 12

### The Plasmid Construct and the Degree to which it Induces Immunogenicity

[0376] The degree to which a plasmid construct, for example a plasmid constructed in accordance with Example 11, is able to induce immunogenicity can be evaluated in vitro by testing for epitope presentation by APC following transduction or transfection of the APC with an epitope-expressing nucleic acid construct. Such a study determines “antigenicity” and allows the use of human APC. The assay determines the ability of the epitope to be presented by the APC in a context that is recognized by a T cell by quantifying the density of epitope-HLA class I complexes on the cell surface. Quantitation can be performed by directly measuring the amount of peptide eluted from the APC (see, e.g., Sijts et al., J. Immunol. 156:683-692, 1996; Demotz et al., Nature 342:682-684, 1989); or the number of peptide-HLA class I complexes can be estimated by measuring the amount of lysis or lymphokine release induced by infected or transfected target cells, and then determining the concentration of peptide necessary to obtained equivalent levels of lysis or lymphokine release (see, e.g., Kageyama et al., J. Immunol. 154:567-576, 1995).

[0377] Alternatively, immunogenicity can be evaluated through in vivo injections into mice and subsequent in vitro assessment of CTL and HTL activity, which are analysed using cytotoxicity and proliferation assays, respectively, as detailed e.g., in copending U.S. Ser. No. 09/311,784 filed May 13, 1999 and Alexander et al., Immunity 1:751-761, 1994.

[0378] For example, to assess the capacity of a DNA minigene construct (e.g., a pMin minigene construct generated as described in U.S. Ser. No. 09/311,784) containing at least one HLA-A2 supermotif peptide to induce CTLs in vivo, HLA-A2.1/K^{b} transgenic mice, for example, are immunized intramuscularly with 100 μg of naked cDNA. As a means of comparing the level of CTLs induced by cDNA immunization, a control group of animals is also immunized with an actual peptide composition that comprises multiple epitopes synthesized as a single polypeptide as they would be encoded by the minigene.

[0379] Splenocytes from immunized animals are stimulated twice with each of the respective compositions (peptide epitopes encoded in the minigene or the polyepitopic peptide), then assayed for peptide-specific cytotoxic activity in a ⁵¹Cr release assay. The results indicate the magnitude of the CTL response directed against the A2-restricted epitope, thus indicating the in vivo immunogenicity of the minigene vaccine and polyepitopic vaccine. It is, therefore, found that the minigene elicits immune responses directed toward the HLA-A2 supermotif peptide epitopes as does the polyepitopic peptide vaccine. A similar analysis is also performed using other HLA-A3 and HLA-B7 transgenic mouse models to assess CTL induction by HLA-A3 and HLA-B7 motif or supermotif epitopes.

[0380] To assess the capacity of a class II epitope encoding minigene to induce HTLs in vivo, DR transgenic mice, or for those epitope that cross react with the appropriate mouse MHC molecule, I-A^{b}-restricted mice, for example, are immunized intramuscularly with 100 μg of plasmid DNA. As a means of comparing the level of HTLs induced by DNA immunization, a group of control animals is also immunized with an actual peptide composition emulsified in complete Freund's adjuvant. CD4+ T cells, i.e. HTLs, are purified from splenocytes of immunized animals and stimulated with each of the respective compositions (peptides encoded in the minigene). The HTL response is measured using a ³H-thymidine incorporation proliferation assay, (see, e.g., Alexander et al. Immunity 1:751-761, 1994). The results indicate the magnitude of the HTL response, thus demonstrating the in vivo immunogenicity of the minigene.

[0381] DNA minigenes, constructed as described in Example 11, may also be evaluated as a vaccine in combination with a boosting agent using a prime boost protocol. The boosting agent can consist of recombinant protein (e.g., Barnett et al., Aids Res. and Human Retroviruses 14, Supplement 3:S299-S309, 1998) or recombinant vaccinia, for example, expressing a minigene or DNA encoding the complete protein of interest (see, e.g., Hanke et al., Vaccine 16:439-445, 1998; Sedegah et al., Proc. Natl. Acad. Sci. USA 95:7648-53, 1998; Hanke and McMichael, Immunol. Letters 66:177-181, 1999; and Robinson et al., Nature. Med. 5:526-34, 1999).

[0382] For example, the efficacy of the DNA minigene used in a prime boost protocol is initially evaluated in transgenic mice. In this example, A2.1/K^{b} transgenic mice are immunized IM with 100 μg of a DNA minigene encoding the immunogenic peptides including at least one HLA-A2 supermotif-bearing peptide. After an incubation period (ranging from 3-9 weeks), the mice are boosted IP with 10⁷ pfu/mouse of a recombinant vaccinia virus expressing the same sequence encoded by the DNA minigene. Control mice are immunized with 100 μg of DNA or recombinant vaccinia without the minigene sequence, or with DNA encoding the minigene, but without the vaccinia boost. After an additional incubation period of two weeks, splenocytes from the mice are immediately assayed for peptide-specific activity in an ELISPOT assay. Additionally, splenocytes are stimulated in vitro with the A2-restricted peptide epitopes encoded in the minigene and recombinant vaccinia, then assayed for peptide-specific activity in an IFN-□ ELISA.

[0383] It is found that the minigene utilized in a prime-boost protocol elicits greater immune responses toward the HLA-A2 supermotif peptides than with DNA alone. Such an analysis can also be performed using HLA-A11 or HLA-B7 transgenic mouse models to assess CTL induction by HLA-A3 or HLA-B7 motif or supermotif epitopes.

[0384] The use of prime boost protocols in humans is described in Example 20.

### Example 13

### Peptide Composition for Prophylactic Uses

[0385] Vaccine compositions of the present invention can be used to prevent HPV infection in persons who are at risk for such infection. For example, a polyepitopic peptide epitope composition (or a nucleic acid comprising the same) containing multiple CTL and HTL epitopes such as those selected in Examples 9 and/or 10, which are also selected to target greater than 80% of the population, is administered to individuals at risk for HPV infection.

[0386] For example, a peptide-based composition can be provided as a single polypeptide that encompasses multiple epitopes. The vaccine is typically administered in a physiological solution that comprises an adjuvant, such as Incomplete Freunds Adjuvant. The dose of peptide for the initial immunization is from about 1 to about 50,000 μg, generally 100-5,000 μg, for a 70 kg patient. The initial administration of vaccine is followed by booster dosages at 4 weeks followed by evaluation of the magnitude of the immune response in the patient, by techniques that determine the presence of epitope-specific CTL populations in a PBMC sample. Additional booster doses are administered as required. The composition is found to be both safe and efficacious as a prophylaxis against HPV infection.

[0387] Alternatively, a composition typically comprising transfecting agents can be used for the administration of a nucleic acid-based vaccine in accordance with methodologies known in the art and disclosed herein.

### Example 14

### Polyepitopic Vaccine Compositions Derived from Native HPV Sequences

[0388] A native HPV polyprotein sequence is screened, preferably using computer algorithms defined for each class I and/or class II supermotif or motif, to identify “relatively short” regions of the polyprotein that comprise multiple epitopes and is preferably less in length than an entire native antigen. This relatively short sequence that contains multiple distinct, even overlapping, epitopes is selected and used to generate a minigene construct. The construct is engineered to express the peptide, which corresponds to the native protein sequence. The “relatively short” peptide is generally less than 250 amino acids in length, often less than 100 amino acids in length, preferably less than 75 amino acids in length, and more preferably less than 50 amino acids in length. The protein sequence of the vaccine composition is selected because it has maximal number of epitopes contained within the sequence, i.e., it has a high concentration of epitopes. As noted herein, epitope motifs may be nested or overlapping (i.e., frame shifted relative to one another). For example, with f overlapping epitopes, two 9-mer epitopes and one 10-mer epitope can be present in a 10 amino acid peptide. Such a vaccine composition is administered for therapeutic or prophylactic purposes.

[0389] The vaccine composition will include, for example, three CTL epitopes from at least one HPV target antigen and at least one HTL epitope. This polyepitopic native sequence is administered either as a peptide or as a nucleic acid sequence which encodes the peptide. Alternatively, an analog can be made of this native sequence, whereby one or more of the epitopes comprise substitutions that alter the cross-reactivity and/or binding affinity properties of the polyepitopic peptide.

[0390] The embodiment of this example provides for the possibility that an as yet undiscovered aspect of immune system processing will apply to the native nested sequence and thereby facilitate the production of therapeutic or prophylactic immune response-inducing vaccine compositions. Additionally such an embodiment provides for the possibility of motif-bearing epitopes for an HLA makeup that is presently unknown. Furthermore, this embodiment (absent analogs) directs the immune response to multiple peptide sequences that are actually present in native HPV antigens thus avoiding the need to evaluate any junctional epitopes. Lastly, the embodiment provides an economy of scale when producing nucleic acid vaccine compositions.

[0391] Related to this embodiment, computer programs can be derived in accordance with principles in the art, which identify in a target sequence, the greatest number of epitopes per sequence length.

### Example 15

### Polyepitopic Vaccine Compositions From Multiple Antigens

[0392] The HPV peptide epitopes of the present invention are used in conjunction with peptide epitopes from other target tumor-associated antigens to create a vaccine composition that is useful for the prevention or treatment of cancer resulting from HPV infection in multiple patients.

[0393] For example, a vaccine composition can be provided as a single polypeptide that incorporates multiple epitopes from HPV antigens as well as tumor-associated antigens that are often expressed with a target cancer, e.g., cervical cancer, associated with HPV infection, or can be administered as a composition comprising one or more discrete epitopes. Alternatively, the vaccine can be administered as a minigene construct or as dendritic cells which have been loaded with the peptide epitopes in vitro.

### Example 16

### Use of Peptides to Evaluate an Immune Response

[0394] Peptides of the invention may be used to analyze an immune response for the presence of specific CTL or HTL populations directed to HPV. Such an analysis may be performed in a manner as that described by Ogg et al., Science 279:2103-2106, 1998. In the following example, peptides in accordance with the invention are used as a reagent for diagnostic or prognostic purposes, not as an immunogen.

[0395] In this example highly sensitive human leukocyte antigen tetrameric complexes (“tetramers”) are used for a cross-sectional analysis of, for example, HPV HLA-A*0201-specific CTL frequencies from HLA A*0201-positive individuals at different stages of infection or following immunization using an HPV peptide containing an A*0201 motif. Tetrameric complexes are synthesized as described (Musey et al., N. Engl. J. Med. 337:1267, 1997). Briefly, purified HLA heavy chain (A*0201 in this example) and β2-microglobulin are synthesized by means of a prokaryotic expression system. The heavy chain is modified by deletion of the transmembrane-cytosolic tail and COOH-terminal addition of a sequence containing a BirA enzymatic biotinylation site. The heavy chain, β2-microglobulin, and peptide are refolded by dilution. The 45-kD refolded product is isolated by fast protein liquid chromatography and then biotinylated by BirA in the presence of biotin (Sigma, St. Louis, Mo.), adenosine 5′triphosphate and magnesium. Streptavidin-phycoerythrin conjugate is added in a 1:4 molar ratio, and the tetrameric product is concentrated to 1 mg/ml. The resulting product is referred to as tetramer-phycoerythrin.

[0396] For the analysis of patient blood samples, approximately one million PBMCs are centrifuged at 300 g for 5 minutes and resuspended in 50 μl of cold phosphate-buffered saline. Tri-color analysis is performed with the tetramer-phycoerythrin, along with anti-CD8-Tricolor, and anti-CD38. The PBMCs are incubated with tetramer and antibodies on ice for 30 to 60 min and then washed twice before formaldehyde fixation. Gates are applied to contain >99.98% of control samples. Controls for the tetramers include both A*0201-negative individuals and A*0201-positive uninfected donors. The percentage of cells stained with the tetramer is then determined by flow cytometry. The results indicate the number of cells in the PBMC sample that contain epitope-restricted CTLs, thereby readily indicating the extent of immune response to the HPV epitope, and thus the stage of infection with HPV, the status of exposure to HPV, or exposure to a vaccine that elicits a protective or therapeutic response.

### Example 17

### Use of Peptide Epitopes to Evaluate Recall Responses

[0397] The peptide epitopes of the invention are used as reagents to evaluate T cell responses, such as acute or recall responses, in patients. Such an analysis may be performed on patients who have recovered from infection, who are chronically infected with HPV, or who have been vaccinated with an HPV vaccine.

[0398] For example, the class I restricted CTL response of persons who have been vaccinated may be analyzed. The vaccine may be any HPV vaccine. PBMC are collected from vaccinated individuals and HLA typed. Appropriate peptide epitopes of the invention that, optimally, bear supermotifs to provide cross-reactivity with multiple HLA supertype family members, are then used for analysis of samples derived from individuals who bear that HLA type.

[0399] PBMC from vaccinated individuals are separated on Ficoll-Histopaque density gradients (Sigma Chemical Co., St. Louis, Mo.), washed three times in HBSS (GIBCO Laboratories), resuspended in RPMI-1640 (GIBCO Laboratories) supplemented with L-glutamine (2 mM), penicillin (50 U/ml), streptomycin (50 μg/ml), and Hepes (10 mM) containing 10% heat-inactivated human AB serum (complete RPMI) and plated using microculture formats. A synthetic peptide comprising an epitope of the invention is added at 10 μg/ml to each well and HBV core 128-140 epitope is added at 1 μg/ml to each well as a source of T cell help during the first week of stimulation.

[0400] In the microculture format, 4×10⁵ PBMC are stimulated with peptide in 8 replicate cultures in 96-well round bottom plate in 100 μl/well of complete RPMI. On days 3 and 10, 100 ul of complete RPMI and 20 U/ml final concentration of rIL-2 are added to each well. On day 7 the cultures are transferred into a 96-well flat-bottom plate and restimulated with peptide, rIL-2 and 10⁵ irradiated (3,000 rad) autologous feeder cells. The cultures are tested for cytotoxic activity on day 14. A positive CTL response requires two or more of the eight replicate cultures to display greater than 10% specific ⁵¹Cr release, based on comparison with uninfected control subjects as previously described (Rehermann, et al., Nature Med. 2:1104,1108, 1996; Rehermann et al., J. Clin. Invest. 97:1655-1665, 1996; and Rehermann et al. J. Clin. Invest. 98:1432-1440, 1996).

[0401] Target cell lines are autologous and allogeneic EBV-transformed B-LCL that are either purchased from the American Society for Histocompatibility and Immunogenetics (ASHI, Boston, Mass.) or established from the pool of patients as described (Guilhot, et al. J. Virol. 66:2670-2678, 1992).

[0402] Cytotoxicity assays are performed in the following manner. Target cells consist of either allogeneic HLA-matched or autologous EBV-transformed B lymphoblastoid cell line that are incubated overnight with the synthetic peptide epitope of the invention at 10 μM, and labeled with 100 μCi of ⁵¹Cr (Amersham Corp., Arlington Heights, Ill.) for 1 hour after which they are washed four times with HBSS.

[0403] Cytolytic activity is determined in a standard 4-h, split well ⁵¹Cr release assay using U-bottomed 96 well plates containing 3,000 targets/well. Stimulated PBMC are tested at effector/target (E/T) ratios of 20-50:1 on day 14. Percent cytotoxicity is determined from the formula: 100×[(experimental release−spontaneous release)/maximum release−spontaneous release)]. Maximum release is determined by lysis of targets by detergent (2% Triton X-100; Sigma Chemical Co., St. Louis, Mo.). Spontaneous release is <25% of maximum release for all experiments.

[0404] The results of such an analysis indicate the extent to which HLA-restricted CTL populations have been stimulated by previous exposure to HPV or an HPV vaccine.

[0405] The class II restricted HTL responses may also be analyzed. Purified PBMC are cultured in a 96-well flat bottom plate at a density of 1.5×10⁵ cells/well and are stimulated with 10 μg/ml synthetic peptide, whole antigen, or PHA. Cells are routinely plated in replicates of 4-6 wells for each condition. After seven days of culture, the medium is removed and replaced with fresh medium containing 10 U/ml IL22. Two days later, 1 μCi ³H-thymidine is added to each well and incubation is continued for an additional 18 hours, Cellular DNA is then harvested on) glass fiber mats and analyzed for ³H-thymidine incorporation. Antigen-specific T cell proliferation is calculated as the ratio of H³-thymidine incorporation in the presence of antigen divided by the ³H-thymidine incorporation in the absence of antigen.

### Example 18

### Induction of Specific CTL Response in Humans

[0406] A human clinical trial for an immunogenic composition comprising CTL and HT epitopes of the invention is set up as an IND Phase I, dose escalation study and carried cut as a randomized, double-blind, placebo-controlled trial. Such a trial is designed, for example, as follows:

[0407] A total of about 27 individuals are c rolled and divided into 3 groups:

[0408] Group I: 3 subjects are injected with placebo and 6 subjects are injected with 5 μg of peptide composition;

[0409] Group II: 3 subjects are injected with placebo and 6 subjects are injected with 50 μg peptide composition;

[0410] Group III: 3 subjects are injected with placebo and 6 subjects are injected with 500 μg of peptide composition,

[0411] After 4 weeks following the first injection, all subjects receive a booster inoculation at the same dosage.

[0412] The endpoints measured in this study relate to the safety and tolerability of the peptide composition as well as its immunogenicity. Cellular immune responses to the peptide composition are an index of the intrinsic activity of this the peptide composition, and can therefore be viewed as a measure of biological efficacy. The following summarize the clinical and laboratory data that relate to safety and efficacy endpoints.

[0413] Safety: The incidence of adverse events is monitored in the placebo and drug treatment group and assessed in terms of degree and reversibility.

### Evaluation of Vaccine Efficacy: For evaluation of vaccine efficacy, subjects are bled before and after injection. Peripheral blood mononuclear cells are isolated from fresh heparinized blood by Ficoll-Hypaque density gradient centrifugation, aliquoted in freezing media and stored frozen. Samples are assayed for CTL and HTL activity.

[0414] The vaccine is found to be both safe and efficacious.

### Example 19

### Phase II Trials in Patients Infected with HPV

[0415] Phase II trials are performed to study the effect of administering the CTL-HTL peptide compositions to patients having cancer associated with HPV infection. The main objectives of the trials are to determine an effective dose and regimen for inducing CTLs in HPV-infected patients with cancer, to establish the safety of inducing a CTL and HTL response in these patients, and to see to what extent activation of CTLs improves the clinical picture of chronically infected HPV patients, as manifested by a reduction in viral load, e.g., the reduction and/or shrinking of lesions. Such a study is designed, for example, as follows:

[0416] The studies are performed in multiple centers. The trial design is an open-label, uncontrolled, dose escalation protocol wherein the peptide composition is administered as a single dose followed six weeks later by a single booster shot of the same dose. The dosages are 50, 500 and 5,000 micrograms per injection. Drug-associated adverse effects (severity and reversibility) are recorded.

[0417] There are three patient groupings. The first group is injected with 50 micrograms of the peptide composition and the second and third groups with 500 and 5,000 micrograms of peptide composition, respectively. The patients within each group range in age from 21-65 and represent diverse ethnic backgrounds. All of them are infected with HPV and are HIV, HCV, HBV and delta hepatitis virus (HDV) negative, but are positive for HPV DNA as monitored by PCR.

[0418] Clinical manifestations or antigen-specific T-cell responses are monitored to assess the effects of administering the peptide compositions. The vaccine composition is found to be both safe and efficacious in the treatment of HPV infection.

### Example 20

### Induction of CTL Responses Using a Prime Boost Protocol

[0419] A prime boost protocol similar in its underlying principle to that used to evaluate the efficacy of a DNA vaccine in transgenic mice, such as described in Example 12, can also be used for the administration of the vaccine to humans. Such a vaccine regimen can include an initial administration of, for example, naked DNA followed by a boost using recombinant virus encoding the vaccine, or recombinant protein/polypeptide or a peptide mixture administered in an adjuvant.

[0420] For example, the initial immunization may be performed using an expression vector, such as that constructed in Example 11, in the form of naked nucleic acid administered IM (or SC or ID) in the amounts of 0.5-5 mg at multiple sites. The nucleic acid (0.1 to 1000 μg) can also be administered using a gene gun. Following an incubation period of 3-4 weeks, a booster dose is then administered. The booster can be recombinant fowlpox virus administered at a dose of 5-10⁷ to 5×10⁹ pfu. An alternative recombinat virus, such as an MVA, canarypox, adenovirus, or adeno-associated virus, can also be used for the booster, or the polyepitopic protein or a mixture of the peptides can be administered. For evaluation of vaccine efficacy, patient blood samples will be obtained before immunization as well as at intervals following administration of the initial vaccine and booster doses of the vaccine. Peripheral blood mononuclear cells are isolated from fresh heparinized blood by Ficoll-Hypaque density gradient centrifugation, aliquoted in freezing media and stored frozen. Samples are assayed for CTL and HTL activity.

[0421] Analysis of the results indicates that a magnitude of response sufficient to achieve protective immunity against HPV is generated.

### Example 21

### Administration of Vaccine Compositions Using Dendritic Cells (DC)

[0422] Vaccines comprising peptide epitopes of the invention can be administered using APCs, or “professional” APCs such as DC. In this example, the peptide-pulsed DC are administered to a patient to stimulate a CTL response in vivo. In this method, dendritic cells are isolated, expanded, and pulsed with a vaccine comprising peptide CTL and HTL epitopes of the invention. The dendritic cells are infused back into the patient to elicit CTL and HTL responses in viva. The induced CTL and HTL then destroy or facilitate destruction of the specific target cells that bear the proteins from which the epitopes in the vaccine are derived.

[0423] For example, a cocktail of epitope-bearing peptides is administered ex vivo to PBMC, or isolated DC therefrom. A pharmaceutical to facilitate harvesting of DC can be used, such as Progenipoietin□ (Monsanto, St. Louis, Mo.) or GM-CSF/IL-4. After pulsing the DC with peptides and prior to reinfusion into patients, the DC are washed to remove unbound peptides.

[0424] As appreciated clinically, and readily determined by one of skill based on clinical outcomes, the number of DC reinfused into the patient can vary (see, e.g., Nature Med. 4:328, 1998; Nature Med. 2:52, 1996 and Prostate 32:272, 1997), Although 2-50×10⁶ DC per patient are typically administered, larger number of DC, such as 10 or 10 can also be provided. Such cell populations typically contain between 50-90% DC.

[0425] In some embodiments, peptide-loaded PBMC are injected into patients without purification of the DC. For example, PBMC containing DC generated after treatment with an agent such as Progenipcietin□ are injected into patients without purification of the DC. The total number of PBMC that are administered often ranges from 10⁸ to 10¹⁰. Generally, the cell doses injected into patients is based on the percentage of DC in the blood of each patient, as determined, for example, by immunofluorescence analysis with specific anti-DC antibodies. Thus, for example, if Progenipoietin™ mobilizes 2% DC in the peripheral blood of a given patient, and that patient is to receive 5×10⁶ DC, then the patient will be injected with a total of 2.5×10⁸ peptide-loaded PBMC. The percent DC mobilized by an agent such as Progenipoietin™ is typically estimated to be between 2-10%, but can vary as appreciated by one of skill in the art.

### Ex Vivo Activation of CTL/HTL Responses

[0426] Alternatively, ex vivo CTL or HTL responses to HPV antigens can be induced by incubating in tissue culture the patient's, or genetically compatible, CTL or HTL precursor cells together with a source of APC, such as DC, and the appropriate immunogenic peptides. After an appropriate incubation time (typically about 7-28 days), in which the precursor cells are activated and expanded into effector cells, the cells are infused back into the patient, where they will destroy (CTL) or facilitate destruction (HTL) of their specific target cells, i.e., tumor cells.

### Example 22

### Alternative Method of Identifying Motif-Bearing Peptides

[0427] Another method of identifying motif-bearing peptides is to elute them from cells bearing defined MHC molecules. For example, EBV transformed B cell lines used for tissue typing have been extensively characterized to determine which HLA molecules they express. In certain cases these cells express only a single type of HLA molecule. These cells can be infected with a pathogenic organism or transfected with nucleic acids that express the antigen of interest, e.g. HPV regulatory or structural proteins. Peptides produced by endogenous antigen processing of peptides produced consequent to infection (or as a result of transfection) will then bind to HLA molecules within the cell and be transported and displayed on the cell surface. Peptides are then eluted from the HLA molecules by exposure to mild acid conditions and their amino acid sequence determined, e.g., by mass spectral analysis (e.g., Kubo et al., J. Immunol. 152:3913, 1994). Because the majority of peptides that bind a particular HLA molecule are motif-bearing, this is an alternative modality for obtaining the motif-bearing peptides correlated with the particular HLA molecule expressed on the cell.

[0428] Alternatively, cell lines that do not express endogenous HLA molecules can be transfected with an expression construct encoding a single HLA allele. These cells can then be used as described, i.e., they can be infected with a pathogen or transfected with nucleic acid encoding an antigen of interest to isolate peptides corresponding to the pathogen or antigen of interest that have been presented on the cell surface. Peptides obtained from such an analysis will bear motif(s) that correspond to binding to the single HLA allele that is expressed in the cell.

[0429] As appreciated by one in the art, one can perform a similar analysis on a cell bearing more than one HLA allele and subsequently determine peptides specific for each HLA allele expressed. Moreover, one of skill would also recognize that means other than infection or transfection, such as loading with a protein antigen, can be used to provide a source of antigen to the cell.

[0430] The above examples are provided to illustrate the invention but not to limit its scope. For example, the human terminology for the Major Histocompatibility Complex, namely HLA, is used throughout this document. It is to be appreciated that these principles can be extended to other species as well. Thus, other variants of the invention will be readily apparent to one of ordinary skill in the art and are encompassed by the appended claims. All publications, patents, and patent application cited herein are hereby incorporated by reference for all purposes.

Lengthy table referenced here
US20130017253A1-20130117-T00001
Please refer to the end of the specification for access instructions.

Lengthy table referenced here
US20130017253A1-20130117-T00002
Please refer to the end of the specification for access instructions.

Lengthy table referenced here
US20130017253A1-20130117-T00003
Please refer to the end of the specification for access instructions.

Lengthy table referenced here
US20130017253A1-20130117-T00004
Please refer to the end of the specification for access instructions.

Lengthy table referenced here
US20130017253A1-20130117-T00005
Please refer to the end of the specification for access instructions.

Lengthy table referenced here
US20130017253A1-20130117-T00006
Please refer to the end of the specification for access instructions.

Lengthy table referenced here
US20130017253A1-20130117-T00007
Please refer to the end of the specification for access instructions.

Lengthy table referenced here
US20130017253A1-20130117-T00008
Please refer to the end of the specification for access instructions.

Lengthy table referenced here
US20130017253A1-20130117-T00009
Please refer to the end of the specification for access instructions.

Lengthy table referenced here
US20130017253A1-20130117-T00010
Please refer to the end of the specification for access instructions.

Lengthy table referenced here
US20130017253A1-20130117-T00011
Please refer to the end of the specification for access instructions.

Lengthy table referenced here
US20130017253A1-20130117-T00012
Please refer to the end of the specification for access instructions.

Lengthy table referenced here
US20130017253A1-20130117-T00013
Please refer to the end of the specification for access instructions.

Lengthy table referenced here
US20130017253A1-20130117-T00014
Please refer to the end of the specification for access instructions.

Lengthy table referenced here
US20130017253A1-20130117-T00015
Please refer to the end of the specification for access instructions.

Lengthy table referenced here
US20130017253A1-20130117-T00016
Please refer to the end of the specification for access instructions.

Lengthy table referenced here
US20130017253A1-20130117-T00017
Please refer to the end of the specification for access instructions.

Lengthy table referenced here
US20130017253A1-20130117-T00018
Please refer to the end of the specification for access instructions.

Lengthy table referenced here
US20130017253A1-20130117-T00019
Please refer to the end of the specification for access instructions.

Lengthy table referenced here
US20130017253A1-20130117-T00020
Please refer to the end of the specification for access instructions.

Lengthy table referenced here
US20130017253A1-20130117-T00021
Please refer to the end of the specification for access instructions.

Lengthy table referenced here
US20130017253A1-20130117-T00022
Please refer to the end of the specification for access instructions.

Lengthy table referenced here
US20130017253A1-20130117-T00023
Please refer to the end of the specification for access instructions.

Lengthy table referenced here
US20130017253A1-20130117-T00024
Please refer to the end of the specification for access instructions.

Lengthy table referenced here
US20130017253A1-20130117-T00025
Please refer to the end of the specification for access instructions.

Lengthy table referenced here
US20130017253A1-20130117-T00026
Please refer to the end of the specification for access instructions.

Lengthy table referenced here
US20130017253A1-20130117-T00027
Please refer to the end of the specification for access instructions.

Lengthy table referenced here
US20130017253A1-20130117-T00028
Please refer to the end of the specification for access instructions.

Lengthy table referenced here
US20130017253A1-20130117-T00029
Please refer to the end of the specification for access instructions.

Lengthy table referenced here
US20130017253A1-20130117-T00030
Please refer to the end of the specification for access instructions.

Lengthy table referenced here
US20130017253A1-20130117-T00031
Please refer to the end of the specification for access instructions.

Lengthy table referenced here
US20130017253A1-20130117-T00032
Please refer to the end of the specification for access instructions.

Lengthy table referenced here
US20130017253A1-20130117-T00033
Please refer to the end of the specification for access instructions.

Lengthy table referenced here
US20130017253A1-20130117-T00034
Please refer to the end of the specification for access instructions.

Lengthy table referenced here
US20130017253A1-20130117-T00035
Please refer to the end of the specification for access instructions.

Lengthy table referenced here
US20130017253A1-20130117-T00036
Please refer to the end of the specification for access instructions.

Lengthy table referenced here
US20130017253A1-20130117-T00037
Please refer to the end of the specification for access instructions.

Lengthy table referenced here
US20130017253A1-20130117-T00038
Please refer to the end of the specification for access instructions.

Lengthy table referenced here
US20130017253A1-20130117-T00039
Please refer to the end of the specification for access instructions.

Lengthy table referenced here
US20130017253A1-20130117-T00040
Please refer to the end of the specification for access instructions.

Lengthy table referenced here
US20130017253A1-20130117-T00041
Please refer to the end of the specification for access instructions.

Lengthy table referenced here
US20130017253A1-20130117-T00042
Please refer to the end of the specification for access instructions.

Lengthy table referenced here
US20130017253A1-20130117-T00043
Please refer to the end of the specification for access instructions.

Lengthy table referenced here
US20130017253A1-20130117-T00044
Please refer to the end of the specification for access instructions.

Lengthy table referenced here
US20130017253A1-20130117-T00045
Please refer to the end of the specification for access instructions.

Lengthy table referenced here
US20130017253A1-20130117-T00046
Please refer to the end of the specification for access instructions.

Lengthy table referenced here
US20130017253A1-20130117-T00047
Please refer to the end of the specification for access instructions.

Lengthy table referenced here
US20130017253A1-20130117-T00048
Please refer to the end of the specification for access instructions.

Lengthy table referenced here
US20130017253A1-20130117-T00049
Please refer to the end of the specification for access instructions.

Lengthy table referenced here
US20130017253A1-20130117-T00050
Please refer to the end of the specification for access instructions.

Lengthy table referenced here
US20130017253A1-20130117-T00051
Please refer to the end of the specification for access instructions.

Lengthy table referenced here
US20130017253A1-20130117-T00052
Please refer to the end of the specification for access instructions.

Lengthy table referenced here
US20130017253A1-20130117-T00053
Please refer to the end of the specification for access instructions.

Lengthy table referenced here
US20130017253A1-20130117-T00054
Please refer to the end of the specification for access instructions.

Lengthy table referenced here
US20130017253A1-20130117-T00055
Please refer to the end of the specification for access instructions.

Lengthy table referenced here
US20130017253A1-20130117-T00056
Please refer to the end of the specification for access instructions.

Lengthy table referenced here
US20130017253A1-20130117-T00057
Please refer to the end of the specification for access instructions.

Lengthy table referenced here
US20130017253A1-20130117-T00058
Please refer to the end of the specification for access instructions.

Lengthy table referenced here
US20130017253A1-20130117-T00059
Please refer to the end of the specification for access instructions.

Lengthy table referenced here
US20130017253A1-20130117-T00060
Please refer to the end of the specification for access instructions.

Lengthy table referenced here
US20130017253A1-20130117-T00061
Please refer to the end of the specification for access instructions.

LENGTHY TABLES
The patent application contains a lengthy table section. A copy of the table is available in electronic form from the USPTO web site (http://seqdata.uspto.gov/?pageRequest=docDetail&DocID=US20130017253A1). An electronic copy of the table will also be available from the USPTO upon request and payment of the fee set forth in 37 CFR 1.19(b)(3).

The application's sequence listing, which the Patent Office published only in electronic form, follows.

SEQUENCE LISTING (51504 sequences)

SEQ ID NO: 1 - protein, 10 aa, Artificial Sequence
  Peptide Derived from Human Papillomavirus
AMLAKFKELY

SEQ ID NO: 2 - protein, 8 aa, Artificial Sequence
  Peptide Derived from Human Papillomavirus
ATVPCWNY

SEQ ID NO: 3 - protein, 9 aa, Artificial Sequence
  Peptide Derived from Human Papillomavirus
AVQVLKRKY

SEQ ID NO: 4 - protein, 11 aa, Artificial Sequence
  Peptide Derived from Human Papillomavirus
CTFELSQMVQW

SEQ ID NO: 5 - protein, 10 aa, Artificial Sequence
  Peptide Derived from Human Papillomavirus
DIVDDSEIAY

SEQ ID NO: 6 - protein, 11 aa, Artificial Sequence
  Peptide Derived from Human Papillomavirus
DSDTGEDLVDF

SEQ ID NO: 7 - protein, 8 aa, Artificial Sequence
  Peptide Derived from Human Papillomavirus
DSEIAYKY

SEQ ID NO: 8 - protein, 10 aa, Artificial Sequence
  Peptide Derived from Human Papillomavirus
DSIKTLLQQY

SEQ ID NO: 9 - protein, 9 aa, Artificial Sequence
  Peptide Derived from Human Papillomavirus
DTGEDLVDF

SEQ ID NO: 10 - protein, 9 aa, Artificial Sequence
  Peptide Derived from Human Papillomavirus
DTNSNASAF

SEQ ID NO: 11 - protein, 10 aa, Artificial Sequence
  Peptide Derived from Human Papillomavirus
ELNDKNWKSF

SEQ ID NO: 12 - protein, 11 aa, Artificial Sequence
  Peptide Derived from Human Papillomavirus
ELNDKNWKSFF

SEQ ID NO: 13 - protein, 8 aa, Artificial Sequence
  Peptide Derived from Human Papillomavirus
ELSQMVQW

SEQ ID NO: 14 - protein, 10 aa, Artificial Sequence
  Peptide Derived from Human Papillomavirus
ELSQMVQWAY

SEQ ID NO: 15 - protein, 9 aa, Artificial Sequence
  Peptide Derived from Human Papillomavirus
ETETAHALF

SEQ ID NO: 16 - protein, 9 aa, Artificial Sequence
  Peptide Derived from Human Papillomavirus
ETETPCSQY

SEQ ID NO: 17 - protein, 9 aa, Artificial Sequence
  Peptide Derived from Human Papillomavirus
EVYGDTPEW

SEQ ID NO: 18 - protein, 8 aa, Artificial Sequence
  Peptide Derived from Human Papillomavirus
FIVNDNDY

SEQ ID NO: 19 - protein, 9 aa, Artificial Sequence
  Peptide Derived from Human Papillomavirus
FLQGSVICF

SEQ ID NO: 20 - protein, 9 aa, Artificial Sequence
  Peptide Derived from Human Papillomavirus
FLRYQGVEF

SEQ ID NO: 21 - protein, 8 aa, Artificial Sequence
  Peptide Derived from Human Papillomavirus
FLTALKRF

SEQ ID NO: 22 - protein, 11 aa, Artificial Sequence
  Peptide Derived from Human Papillomavirus
FMSFLTALKRF

SEQ ID NO: 23 - protein, 8 aa, Artificial Sequence
  Peptide Derived from Human Papillomavirus
FSELVRPF

SEQ ID NO: 24 - protein, 9 aa, Artificial Sequence
  Peptide Derived from Human Papillomavirus
FTFPNEFPF

SEQ ID NO: 25 - protein, 8 aa, Artificial Sequence
  Peptide Derived from Human Papillomavirus
FVNSKSHF

SEQ ID NO: 26 - protein, 9 aa, Artificial Sequence
  Peptide Derived from Human Papillomavirus
FVNSKSHFW

SEQ ID NO: 27 - protein, 11 aa, Artificial Sequence
  Peptide Derived from Human Papillomavirus
GIPKKNCILLY

SEQ ID NO: 28 - protein, 9 aa, Artificial Sequence
  Peptide Derived from Human Papillomavirus
GISNISEVY

SEQ ID NO: 29 - protein, 11 aa, Artificial Sequence
  Peptide Derived from Human Papillomavirus
GMLDDATVPCW

SEQ ID NO: 30 - protein, 10 aa, Artificial Sequence
  Peptide Derived from Human Papillomavirus
GMVVLLLVRY

SEQ ID NO: 31 - protein, 9 aa, Artificial Sequence
  Peptide Derived from Human Papillomavirus
GSGGGCSQY

SEQ ID NO: 32 - protein, 8 aa, Artificial Sequence
  Peptide Derived from Human Papillomavirus
GTDSRWPY

SEQ ID NO: 33 - protein, 8 aa, Artificial Sequence
  Peptide Derived from Human Papillomavirus
GTGCNGWF

SEQ ID NO: 34 - protein, 9 aa, Artificial Sequence
  Peptide Derived from Human Papillomavirus
GTGCNGWFY

SEQ ID NO: 35 - protein, 11 aa, Artificial Sequence
  Peptide Derived from Human Papillomavirus
GVSFSELVRPF

SEQ ID NO: 36 - protein, 9 aa, Artificial Sequence
  Peptide Derived from Human Papillomavirus
HIQSLACSW

SEQ ID NO: 37 - protein, 8 aa, Artificial Sequence
  Peptide Derived from Human Papillomavirus
HSFNDCTF

SEQ ID NO: 38 - protein, 11 aa, Artificial Sequence
  Peptide Derived from Human Papillomavirus
ISEVYGDTPEW

SEQ ID NO: 39 - protein, 8 aa, Artificial Sequence
  Peptide Derived from Human Papillomavirus
ISNISEVY

SEQ ID NO: 40 - protein, 9 aa, Artificial Sequence
  Peptide Derived from Human Papillomavirus
IVDDSEIAY

SEQ ID NO: 41 - protein, 11 aa, Artificial Sequence
  Peptide Derived from Human Papillomavirus
IVDDSEIAYKY

SEQ ID NO: 42 - protein, 10 aa, Artificial Sequence
  Peptide Derived from Human Papillomavirus
KLRSTAAALY

SEQ ID NO: 43 - protein, 11 aa, Artificial Sequence
  Peptide Derived from Human Papillomavirus
KLRSTAAALYW

SEQ ID NO: 44 - protein, 8 aa, Artificial Sequence
  Peptide Derived from Human Papillomavirus
KSFFSRTW

SEQ ID NO: 45 - protein, 11 aa, Artificial Sequence
  Peptide Derived from Human Papillomavirus
KSLFGMSLMKF

SEQ ID NO: 46 - protein, 10 aa, Artificial Sequence
  Peptide Derived from Human Papillomavirus
KSNKSTCCDW

SEQ ID NO: 47 - protein, 11 aa, Artificial Sequence
  Peptide Derived from Human Papillomavirus
KTGISNISEVY

SEQ ID NO: 48 - protein, 10 aa, Artificial Sequence
  Peptide Derived from Human Papillomavirus
KTLLQQYCLY

SEQ ID NO: 49 - protein, 8 aa, Artificial Sequence
  Peptide Derived from Human Papillomavirus
LLQQYCLY

SEQ ID NO: 50 - protein, 9 aa, Artificial Sequence
  Peptide Derived from Human Papillomavirus
LSQMVQWAY

SEQ ID NO: 51 - protein, 11 aa, Artificial Sequence
  Peptide Derived from Human Papillomavirus
LVDFIVNDNDY

SEQ ID NO: 52 - protein, 10 aa, Artificial Sequence
  Peptide Derived from Human Papillomavirus
LVVFTFPNEF

SEQ ID NO: 53 - protein, 9 aa, Artificial Sequence
  Peptide Derived from Human Papillomavirus
MLAKFKELY

SEQ ID NO: 54 - protein, 10 aa, Artificial Sequence
  Peptide Derived from Human Papillomavirus
MLDDATVPCW

SEQ ID NO: 55 - protein, 10 aa, Artificial Sequence
  Peptide Derived from Human Papillomavirus
MSFLTALKRF

SEQ ID NO: 56 - protein, 9 aa, Artificial Sequence
  Peptide Derived from Human Papillomavirus
MSMSQWIKY

SEQ ID NO: 57 - protein, 9 aa, Artificial Sequence
  Peptide Derived from Human Papillomavirus
MVVLLLVRY

SEQ ID NO: 58 - protein, 10 aa, Artificial Sequence
  Peptide Derived from Human Papillomavirus
NINAGTDSRW

SEQ ID NO: 59 - protein, 10 aa, Artificial Sequence
  Peptide Derived from Human Papillomavirus
PVYELNDKNW

SEQ ID NO: 60 - protein, 8 aa, Artificial Sequence
  Peptide Derived from Human Papillomavirus
QIVMFLRY

SEQ ID NO: 61 - protein, 10 aa, Artificial Sequence
  Peptide Derived from Human Papillomavirus
QMSMSQWIKY

SEQ ID NO: 62 - protein, 10 aa, Artificial Sequence
  Peptide Derived from Human Papillomavirus
QSRAAKRRLF

SEQ ID NO: 63 - protein, 8 aa, Artificial Sequence
  Peptide Derived from Human Papillomavirus
QTVLQHSF

SEQ ID NO: 64 - protein, 10 aa, Artificial Sequence
  Peptide Derived from Human Papillomavirus
RLFESEDSGY

SEQ ID NO: 65 - protein, 11 aa, Artificial Sequence
  Peptide Derived from Human Papillomavirus
RLVVFTFPNEF

SEQ ID NO: 66 - protein, 8 aa, Artificial Sequence
  Peptide Derived from Human Papillomavirus
RSTAAALY

SEQ ID NO: 67 - protein, 9 aa, Artificial Sequence
  Peptide Derived from Human Papillomavirus
RSTAAALYW

SEQ ID NO: 68 - protein, 10 aa, Artificial Sequence
  Peptide Derived from Human Papillomavirus
RSTAAALYWY

SEQ ID NO: 69 - protein, 8 aa, Artificial Sequence
  Peptide Derived from Human Papillomavirus
RVDDGGDW

SEQ ID NO: 70 - protein, 9 aa, Artificial Sequence
  Peptide Derived from Human Papillomavirus
SIKTLLQQY

SEQ ID NO: 71 - protein, 10 aa, Artificial Sequence
  Peptide Derived from Human Papillomavirus
SLFGMSLMKF

SEQ ID NO: 72 - protein, 8 aa, Artificial Sequence
  Peptide Derived from Human Papillomavirus
SMSQWIKY

SEQ ID NO: 73 - protein, 8 aa, Artificial Sequence
  Peptide Derived from Human Papillomavirus
STAAALYW

SEQ ID NO: 74 - protein, 9 aa, Artificial Sequence
  Peptide Derived from Human Papillomavirus
STAAALYWY

SEQ ID NO: 75 - protein, 11 aa, Artificial Sequence
  Peptide Derived from Human Papillomavirus
STCCDWCIAAF

SEQ ID NO: 76 - protein, 9 aa, Artificial Sequence
  Peptide Derived from Human Papillomavirus
TLLQQYCLY

SEQ ID NO: 77 - protein, 11 aa, Artificial Sequence
  Peptide Derived from Human Papillomavirus
VICFVNSKSHF

SEQ ID NO: 78 - protein, 11 aa, Artificial Sequence
  Peptide Derived from Human Papillomavirus
VLQHSFNDCTF

SEQ ID NO: 79 - protein, 11 aa, Artificial Sequence
  Peptide Derived from Human Papillomavirus
VMFLRYQGVEF

SEQ ID NO: 80 - protein, 10 aa, Artificial Sequence
  Peptide Derived from Human Papillomavirus
VSFSELVRPF

SEQ ID NO: 81 - protein, 9 aa, Artificial Sequence
  Peptide Derived from Human Papillomavirus
VVFTFPNEF

SEQ ID NO: 82 - protein, 11 aa, Artificial Sequence
  Peptide Derived from Human Papillomavirus
VVFTFPNEFPF

SEQ ID NO: 83 - protein, 8 aa, Artificial Sequence
  Peptide Derived from Human Papillomavirus
VVLLLVRY

SEQ ID NO: 84 - protein, 11 aa, Artificial Sequence
  Peptide Derived from Human Papillomavirus
YLHIQSLACSW

SEQ ID NO: 85 - protein, 9 aa, Artificial Sequence
  Peptide Derived from Human Papillomavirus
YLHNRLVVF

SEQ ID NO: 86 - protein, 11 aa, Artificial Sequence
  Peptide Derived from Human Papillomavirus
YLHNRLVVFTF

SEQ ID NO: 87 - protein, 11 aa, Artificial Sequence
  Peptide Derived from Human Papillomavirus
AIVTLTYDSEW

SEQ ID NO: 88 - protein, 11 aa, Artificial Sequence
  Peptide Derived from Human Papillomavirus
AIYYKAREMGF

SEQ ID NO: 89 - protein, 8 aa, Artificial Sequence
  Peptide Derived from Human Papillomavirus
AVSSTWHW

SEQ ID NO: 90 - protein, 11 aa, Artificial Sequence
  Peptide Derived from Human Papillomavirus
CTLYTAVSSTW

SEQ ID NO: 91 - protein, 8 aa, Artificial Sequence
  Peptide Derived from Human Papillomavirus
DICNTMHY

SEQ ID NO: 92 - protein, 11 aa, Artificial Sequence
  Peptide Derived from Human Papillomavirus
DICNTMHYTNW

SEQ ID NO: 93 - protein, 8 aa, Artificial Sequence
  Peptide Derived from Human Papillomavirus
DLRDHIDY

SEQ ID NO: 94 - protein, 9 aa, Artificial Sequence
  Peptide Derived from Human Papillomavirus
DLRDHIDYW

SEQ ID NO: 95 - protein, 9 aa, Artificial Sequence
  Peptide Derived from Human Papillomavirus
DSAPILTAF

SEQ ID NO: 96 - protein, 9 aa, Artificial Sequence
  Peptide Derived from Human Papillomavirus
DSEWQRDQF

SEQ ID NO: 97 - protein, 11 aa, Artificial Sequence
  Peptide Derived from Human Papillomavirus
DSTDLRDHIDY

SEQ ID NO: 98 - protein, 10 aa, Artificial Sequence
  Peptide Derived from Human Papillomavirus
ELQLTLETIY

SEQ ID NO: 99 - protein, 8 aa, Artificial Sequence
  Peptide Derived from Human Papillomavirus
ETIYNSQY

SEQ ID NO: 100 - protein, 11 aa, Artificial Sequence
  Peptide Derived from Human Papillomavirus
FVQFKDDAEKY

SEQ ID NO: 101 - protein, 9 aa, Artificial Sequence
  Peptide Derived from Human Papillomavirus
GIRTYFVQF

SEQ ID NO: 102 - protein, 9 aa, Artificial Sequence
  Peptide Derived from Human Papillomavirus
HMRLECAIY

SEQ ID NO: 103 - protein, 10 aa, Artificial Sequence
  Peptide Derived from Human Papillomavirus
HMRLECAIYY

SEQ ID NO: 104 - protein, 8 aa, Artificial Sequence
  Peptide Derived from Human Papillomavirus
ILCPTSVF

SEQ ID NO: 105 - protein, 10 aa, Artificial Sequence
  Peptide Derived from Human Papillomavirus
IVTLTYDSEW

SEQ ID NO: 106 - protein, 9 aa, Artificial Sequence
  Peptide Derived from Human Papillomavirus
KSAIVTLTY

SEQ ID NO: 107 - protein, 9 aa, Artificial Sequence
  Peptide Derived from Human Papillomavirus
KTITVSTGF

SEQ ID NO: 108 - protein, 11 aa, Artificial Sequence
  Peptide Derived from Human Papillomavirus
LTLETIYNSQY

SEQ ID NO: 109 - protein, 9 aa, Artificial Sequence
  Peptide Derived from Human Papillomavirus
NSQYSNEKW

SEQ ID NO: 110 - protein, 8 aa, Artificial Sequence
  Peptide Derived from Human Papillomavirus
NTLKCLRY

SEQ ID NO: 111 - protein, 10 aa, Artificial Sequence
  Peptide Derived from Human Papillomavirus
NTLKCLRYRF

SEQ ID NO: 112 - protein, 8 aa, Artificial Sequence
  Peptide Derived from Human Papillomavirus
NTMHYTNW

SEQ ID NO: 113 - protein, 11 aa, Artificial Sequence
  Peptide Derived from Human Papillomavirus
NVCQDKILTHY

SEQ ID NO: 114 - protein, 10 aa, Artificial Sequence
  Peptide Derived from Human Papillomavirus
PTGCIKKHGY

SEQ ID NO: 115 - protein, 8 aa, Artificial Sequence
  Peptide Derived from Human Papillomavirus
QLTLETIY

SEQ ID NO: 116 - protein, 8 aa, Artificial Sequence
  Peptide Derived from Human Papillomavirus
QVDYYGLY

SEQ ID NO: 117 - protein, 9 aa, Artificial Sequence
  Peptide Derived from Human Papillomavirus
QVDYYGLYY

SEQ ID NO: 118 - protein, 10 aa, Artificial Sequence
  Peptide Derived from Human Papillomavirus
QVILCPTSVF

SEQ ID NO: 119 - protein, 8 aa, Artificial Sequence
  Peptide Derived from Human Papillomavirus
RLECAIYY

SEQ ID NO: 120 - protein, 10 aa, Artificial Sequence
  Peptide Derived from Human Papillomavirus
STDLRDHIDY

SEQ ID NO: 121 - protein, 11 aa, Artificial Sequence
  Peptide Derived from Human Papillomavirus
STDLRDHIDYW

SEQ ID NO: 122 - protein, 11 aa, Artificial Sequence
  Peptide Derived from Human Papillomavirus
SVDSAPILTAF

SEQ ID NO: 123 - protein, 11 aa, Artificial Sequence
  Peptide Derived from Human Papillomavirus
SVTVVEGQVDY

SEQ ID NO: 124 - protein, 8 aa, Artificial Sequence
  Peptide Derived from Human Papillomavirus
TITVSTGF

SEQ ID NO: 125 - protein, 10 aa, Artificial Sequence
  Peptide Derived from Human Papillomavirus
TLETIYNSQY

SEQ ID NO: 126 - protein, 9 aa, Artificial Sequence
  Peptide Derived from Human Papillomavirus
TLKCLRYRF

SEQ ID NO: 127 - protein, 10 aa, Artificial Sequence
  Peptide Derived from Human Papillomavirus
TLQDVSLEVY

SEQ ID NO: 128 - protein, 8 aa, Artificial Sequence
  Peptide Derived from Human Papillomavirus
TLTYDSEW

SEQ ID NO: 129 - protein, 10 aa, Artificial Sequence
  Peptide Derived from Human Papillomavirus
TLYTAVSSTW

SEQ ID NO: 130 - protein, 11 aa, Artificial Sequence
  Peptide Derived from Human Papillomavirus
TMHYTNWTHIY

SEQ ID NO: 131 - protein, 9 aa, Artificial Sequence
  Peptide Derived from Human Papillomavirus
TVVEGQVDY

SEQ ID NO: 132 - protein, 10 aa, Artificial Sequence
  Peptide Derived from Human Papillomavirus
TVVEGQVDYY

SEQ ID NO: 133 - protein, 9 aa, Artificial Sequence
  Peptide Derived from Human Papillomavirus
VILCPTSVF

SEQ ID NO: 134 - protein, 9 aa, Artificial Sequence
  Peptide Derived from Human Papillomavirus
VTLTYDSEW

SEQ ID NO: 135 - protein, 10 aa, Artificial Sequence
  Peptide Derived from Human Papillomavirus
VTVVEGQVDY

SEQ ID NO: 136 - protein, 11 aa, Artificial Sequence
  Peptide Derived from Human Papillomavirus
VTVVEGQVDYY

SEQ ID NO: 137 - protein, 8 aa, Artificial Sequence
  Peptide Derived from Human Papillomavirus
VVEGQVDY

SEQ ID NO: 138 - protein, 9 aa, Artificial Sequence
  Peptide Derived from Human Papillomavirus
VVEGQVDYY

SEQ ID NO: 139 - protein, 11 aa, Artificial Sequence
  Peptide Derived from Human Papillomavirus
WTLQDVSLEVY

SEQ ID NO: 140 - protein, 8 aa, Artificial Sequence
  Peptide Derived from Human Papillomavirus
YTAVSSTW

SEQ ID NO: 141 - protein, 10 aa, Artificial Sequence
  Peptide Derived from Human Papillomavirus
YTAVSSTWHW

SEQ ID NO: 142 - protein, 8 aa, Artificial Sequence
  Peptide Derived from Human Papillomavirus
YTNWTHIY

SEQ ID NO: 143 - protein, 9 aa, Artificial Sequence
  Peptide Derived from Human Papillomavirus
YVHEGIRTY

SEQ ID NO: 144 - protein, 10 aa, Artificial Sequence
  Peptide Derived from Human Papillomavirus
YVHEGIRTYF

SEQ ID NO: 145 - protein, 10 aa, Artificial Sequence
  Peptide Derived from Human Papillomavirus
ASAFRCFIVY

SEQ ID NO: 146 - protein, 9 aa, Artificial Sequence
  Peptide Derived from Human Papillomavirus
ASTTLLACF

SEQ ID NO: 147 - protein, 11 aa, Artificial Sequence
  Peptide Derived from Human Papillomavirus
DTASTTLLACF

SEQ ID NO: 148 - protein, 9 aa, Artificial Sequence
  Peptide Derived from Human Papillomavirus
FIVYIIFVY

SEQ ID NO: 149 - protein, 9 aa, Artificial Sequence
  Peptide Derived from Human Papillomavirus
FLIHTHARF

SEQ ID NO: 150 - protein, 9 aa, Artificial Sequence
  Peptide Derived from Human Papillomavirus
IIFVYIPLF

SEQ ID NO: 151 - protein, 8 aa, Artificial Sequence
  Peptide Derived from Human Papillomavirus
IILVLLLW

SEQ ID NO: 152 - protein, 10 aa, Artificial Sequence
  Peptide Derived from Human Papillomavirus
ITAASAFRCF

SEQ ID NO: 153 - protein, 8 aa, Artificial Sequence
  Peptide Derived from Human Papillomavirus
IVYIIFVY

SEQ ID NO: 154 - protein, 8 aa, Artificial Sequence
  Peptide Derived from Human Papillomavirus
LIHTHARF

SEQ ID NO: 155 - protein, 9 aa, Artificial Sequence
  Peptide Derived from Human Papillomavirus
LIILVLLLW

SEQ ID NO: 156 - protein, 9 aa, Artificial Sequence
  Peptide Derived from Human Papillomavirus
LLACFLLCF

SEQ ID NO: 157 - protein, 8 aa, Artificial Sequence
  Peptide Derived from Human Papillomavirus
LLLSVSTY

SEQ ID NO: 158 - protein, 11 aa, Artificial Sequence
  Peptide Derived from Human Papillomavirus
LLLWITAASAF

SEQ ID NO: 159 - protein, 10 aa, Artificial Sequence
  Peptide Derived from Human Papillomavirus
LLWITAASAF

SEQ ID NO: 160 - protein, 11 aa, Artificial Sequence
  Peptide Derived from Human Papillomavirus
PLFLIHTHARF

SEQ ID NO: 161 - protein, 9 aa, Artificial Sequence
  Peptide Derived from Human Papillomavirus
PLLLSVSTY

SEQ ID NO: 162 - protein, 10 aa, Artificial Sequence
  Peptide Derived from Human Papillomavirus
SLIILVLLLW

SEQ ID NO: 163 - protein, 8 aa, Artificial Sequence
  Peptide Derived from Human Papillomavirus
STTLLACF

SEQ ID NO: 164 - protein, 10 aa, Artificial Sequence
  Peptide Derived from Human Papillomavirus
TLLACFLLCF

SEQ ID NO: 165 - protein, 11 aa, Artificial Sequence
  Peptide Derived from Human Papillomavirus
TSLIILVLLLW

SEQ ID NO: 166 - protein, 11 aa, Artificial Sequence
  Peptide Derived from Human Papillomavirus
TTLLACFLLCF

SEQ ID NO: 167 - protein, 8 aa, Artificial Sequence
  Peptide Derived from Human Papillomavirus
WITAASAF

SEQ ID NO: 168 - protein, 11 aa, Artificial Sequence
  Peptide Derived from Human Papillomavirus
WITAASAFRCF

SEQ ID NO: 169 - protein, 10 aa, Artificial Sequence
  Peptide Derived from Human Papillomavirus
YIIFVYIPLF

SEQ ID NO: 170 - protein, 9 aa, Artificial Sequence
  Peptide Derived from Human Papillomavirus
AVCDKCLKF

SEQ ID NO: 171 - protein, 10 aa, Artificial Sequence
  Peptide Derived from Human Papillomavirus
AVCDKCLKFY

SEQ ID NO: 172 - protein, 10 aa, Artificial Sequence
  Peptide Derived from Human Papillomavirus
CIVYRDGNPY

SEQ ID NO: 173 - protein, 11 aa, Artificial Sequence
  Peptide Derived from Human Papillomavirus
CLKFYSKISEY

SEQ ID NO: 174 - protein, 8 aa, Artificial Sequence
  Peptide Derived from Human Papillomavirus
DIILECVY

SEQ ID NO: 175 - protein, 8 aa, Artificial Sequence
  Peptide Derived from Human Papillomavirus
GTTLEQQY

SEQ ID NO: 176 - protein, 8 aa, Artificial Sequence
  Peptide Derived from Human Papillomavirus
HLDKKQRF

SEQ ID NO: 177 - protein, 9 aa, Artificial Sequence
  Peptide Derived from Human Papillomavirus
ISEYRHYCY

SEQ ID NO: 178 - protein, 9 aa, Artificial Sequence
  Peptide Derived from Human Papillomavirus
IVYRDGNPY

SEQ ID NO: 179 - protein, 8 aa, Artificial Sequence
  Peptide Derived from Human Papillomavirus
KISEYRHY

SEQ ID NO: 180 - protein, 10 aa, Artificial Sequence
  Peptide Derived from Human Papillomavirus
KISEYRHYCY

SEQ ID NO: 181 - protein, 9 aa, Artificial Sequence
  Peptide Derived from Human Papillomavirus
LLRREVYDF

SEQ ID NO: 182 - protein, 11 aa, Artificial Sequence
  Peptide Derived from Human Papillomavirus
LLRREVYDFAF

SEQ ID NO: 183 - protein, 8 aa, Artificial Sequence
  Peptide Derived from Human Papillomavirus
QLLRREVY

SEQ ID NO: 184 - protein, 10 aa, Artificial Sequence
  Peptide Derived from Human Papillomavirus
QLLRREVYDF

SEQ ID NO: 185 - protein, 11 aa, Artificial Sequence
  Peptide Derived from Human Papillomavirus
SLYGTTLEQQY

SEQ ID NO: 186 - protein, 11 aa, Artificial Sequence
  Peptide Derived from Human Papillomavirus
TIHDIILECVY

SEQ ID NO: 187 - protein, 10 aa, Artificial Sequence
  Peptide Derived from Human Papillomavirus
YSKISEYRHY

SEQ ID NO: 188 - protein, 10 aa, Artificial Sequence
  Peptide Derived from Human Papillomavirus
DLQPETTDLY

SEQ ID NO: 189 - protein, 8 aa, Artificial Sequence
  Peptide Derived from Human Papillomavirus
DTPTLHEY

SEQ ID NO: 190 - protein, 8 aa, Artificial Sequence
  Peptide Derived from Human Papillomavirus
ETTDLYCY

SEQ ID NO: 191 - protein, 9 aa, Artificial Sequence
  Peptide Derived from Human Papillomavirus
AISTSETTY

SEQ ID NO: 192 - protein, 11 aa, Artificial Sequence
  Peptide Derived from Human Papillomavirus
AVGENVPDDLY

SEQ ID NO: 193 - protein, 10 aa, Artificial Sequence
  Peptide Derived from Human Papillomavirus
CTSICKYPDY

SEQ ID NO: 194 - protein, 9 aa, Artificial Sequence
  Peptide Derived from Human Papillomavirus
DICTSICKY

SEQ ID NO: 195 - protein, 11 aa, Artificial Sequence
  Peptide Derived from Human Papillomavirus
DLDQFPLGRKF

SEQ ID NO: 196 - protein, 8 aa, Artificial Sequence
  Peptide Derived from Human Papillomavirus
DTENASAY

SEQ ID NO: 197 - protein, 9 aa, Artificial Sequence
  Peptide Derived from Human Papillomavirus
DTGFGAMDF

SEQ ID NO: 198 - protein, 8 aa, Artificial Sequence
  Peptide Derived from Human Papillomavirus
DVNVYHIF

SEQ ID NO: 199 - protein, 9 aa, Artificial Sequence
  Peptide Derived from Human Papillomavirus
DVNVYHIFF

SEQ ID NO: 200 - protein, 9 aa, Artificial Sequence
  Peptide Derived from Human Papillomavirus
ETTYKNTNF

SEQ ID NO: 201 - protein, 8 aa, Artificial Sequence
  Peptide Derived from Human Papillomavirus
EVNLKEKF

SEQ ID NO: 202 - protein, 10 aa, Artificial Sequence
  Peptide Derived from Human Papillomavirus
FIYILVITCY

SEQ ID NO: 203 - protein, 8 aa, Artificial Sequence
  Peptide Derived from Human Papillomavirus
FSADLDQF

SEQ ID NO: 204 - protein, 9 aa, Artificial Sequence
  Peptide Derived from Human Papillomavirus
GICWGNQLF

SEQ ID NO: 205 - protein, 8 aa, Artificial Sequence
  Peptide Derived from Human Papillomavirus
GLKAKPKF

SEQ ID NO: 206 - protein, 11 aa, Artificial Sequence
  Peptide Derived from Human Papillomavirus
GSMVTSDAQIF

SEQ ID NO: 207 - protein, 11 aa, Artificial Sequence
  Peptide Derived from Human Papillomavirus
GSTANLASSNY

SEQ ID NO: 208 - protein, 9 aa, Artificial Sequence
  Peptide Derived from Human Papillomavirus
GTLEDTYRF

SEQ ID NO: 209 - protein, 9 aa, Artificial Sequence
  Peptide Derived from Human Papillomavirus
HIFFQMSLW

SEQ ID NO: 210 - protein, 8 aa, Artificial Sequence
  Peptide Derived from Human Papillomavirus
HLPDPNKF

SEQ ID NO: 211 - protein, 10 aa, Artificial Sequence
  Peptide Derived from Human Papillomavirus
HLPDPNKFGF

SEQ ID NO: 212 - protein, 11 aa, Artificial Sequence
  Peptide Derived from Human Papillomavirus
HSMNSTILEDW

SEQ ID NO: 213 - protein, 11 aa, Artificial Sequence
  Peptide Derived from Human Papillomavirus
ILVPKVSGLQY

SEQ ID NO: 214 - protein, 8 aa, Artificial Sequence
  Peptide Derived from Human Papillomavirus
ISTSETTY

SEQ ID NO: 215 - protein, 11 aa, Artificial Sequence
  Peptide Derived from Human Papillomavirus
ITCYENDVNVY

SEQ ID NO: 216 - protein, 10 aa, Artificial Sequence
  Peptide Derived from Human Papillomavirus
ITLTADVMTY

SEQ ID NO: 217 - protein, 11 aa, Artificial Sequence
  Peptide Derived from Human Papillomavirus
KITLTADVMTY

SEQ ID NO: 218 - protein, 11 aa, Artificial Sequence
  Peptide Derived from Human Papillomavirus
KLDDTENASAY

SEQ ID NO: 219 - protein, 10 aa, Artificial Sequence
  Peptide Derived from Human Papillomavirus
KVSGLQYRVF

SEQ ID NO: 220 - protein, 8 aa, Artificial Sequence
  Peptide Derived from Human Papillomavirus
KVVSTDEY

SEQ ID NO: 221 - protein, 8 aa, Artificial Sequence
  Peptide Derived from Human Papillomavirus
LLAVGHPY

SEQ ID NO: 222 - protein, 9 aa, Artificial Sequence
  Peptide Derived from Human Papillomavirus
LLAVGHPYF

SEQ ID NO: 223 - protein, 8 aa, Artificial Sequence
  Peptide Derived from Human Papillomavirus
LTADVMTY

SEQ ID NO: 224 - protein, 10 aa, Artificial Sequence
  Peptide Derived from Human Papillomavirus
LVPKVSGLQY

SEQ ID NO: 225 - protein, 11 aa, Artificial Sequence
  Peptide Derived from Human Papillomavirus
MVDTGFGAMDF

SEQ ID NO: 226 - protein, 11 aa, Artificial Sequence
  Peptide Derived from Human Papillomavirus
MVSEPYGDSLF

SEQ ID NO: 227 - protein, 9 aa, Artificial Sequence
  Peptide Derived from Human Papillomavirus
MVTSDAQIF

SEQ ID NO: 228 - protein, 8 aa, Artificial Sequence
  Peptide Derived from Human Papillomavirus
NLASSNYF

SEQ ID NO: 229 - protein, 8 aa, Artificial Sequence
  Peptide Derived from Human Papillomavirus
NSTILEDW

SEQ ID NO: 230 - protein, 10 aa, Artificial Sequence
  Peptide Derived from Human Papillomavirus
NSTILEDWNF

SEQ ID NO: 231 - protein, 11 aa, Artificial Sequence
  Peptide Derived from Human Papillomavirus
PLDICTSICKY

SEQ ID NO: 232 - protein, 8 aa, Artificial Sequence
  Peptide Derived from Human Papillomavirus
PLKKYTFW

SEQ ID NO: 233 - protein, 11 aa, Artificial Sequence
  Peptide Derived from Human Papillomavirus
PVSKVVSTDEY

SEQ ID NO: 234 - protein, 8 aa, Artificial Sequence
  Peptide Derived from Human Papillomavirus
QIFNKPYW

SEQ ID NO: 235 - protein, 8 aa, Artificial Sequence
  Peptide Derived from Human Papillomavirus
QMFVRHLF

SEQ ID NO: 236 - protein, 10 aa, Artificial Sequence
  Peptide Derived from Human Papillomavirus
RIHLPDPNKF

SEQ ID NO: 237 - protein, 9 aa, Artificial Sequence
  Peptide Derived from Human Papillomavirus
RLLAVGHPY

SEQ ID NO: 238 - protein, 10 aa, Artificial Sequence
  Peptide Derived from Human Papillomavirus
RLLAVGHPYF

SEQ ID NO: 239 - protein, 8 aa, Artificial Sequence
  Peptide Derived from Human Papillomavirus
SICKYPDY

SEQ ID NO: 240 - protein, 11 aa, Artificial Sequence
  Peptide Derived from Human Papillomavirus
SLWLPSEATVY

SEQ ID NO: 241 - protein, 10 aa, Artificial Sequence
  Peptide Derived from Human Papillomavirus
SMNSTILEDW

SEQ ID NO: 242 - protein, 10 aa, Artificial Sequence
  Peptide Derived from Human Papillomavirus
SMVTSDAQIF

SEQ ID NO: 243 - protein, 10 aa, Artificial Sequence
  Peptide Derived from Human Papillomavirus
STANLASSNY

SEQ ID NO: 244 - protein, 11 aa, Artificial Sequence
  Peptide Derived from Human Papillomavirus
STANLASSNYF

SEQ ID NO: 245 - protein, 9 aa, Artificial Sequence
  Peptide Derived from Human Papillomavirus
STILEDWNF

SEQ ID NO: 246 - protein, 8 aa, Artificial Sequence
  Peptide Derived from Human Papillomavirus
TILEDWNF

SEQ ID NO: 247 - protein, 8 aa, Artificial Sequence
  Peptide Derived from Human Papillomavirus
TLEDTYRF

SEQ ID NO: 248 - protein, 9 aa, Artificial Sequence
  Peptide Derived from Human Papillomavirus
TLTADVMTY

SEQ ID NO: 249 - protein, 11 aa, Artificial Sequence
  Peptide Derived from Human Papillomavirus
TSDAQIFNKPY

SEQ ID NO: 250 - protein, 11 aa, Artificial Sequence
  Peptide Derived from Human Papillomavirus
TSETTYKNTNF

SEQ ID NO: 251 - protein, 9 aa, Artificial Sequence
  Peptide Derived from Human Papillomavirus
TSICKYPDY

SEQ ID NO: 252 - protein, 11 aa, Artificial Sequence
  Peptide Derived from Human Papillomavirus
TSRLLAVGHPY

SEQ ID NO: 253 - protein, 8 aa, Artificial Sequence
  Peptide Derived from Human Papillomavirus
TTYKNTNF

SEQ ID NO: 254 - protein, 11 aa, Artificial Sequence
  Peptide Derived from Human Papillomavirus
TTYKNTNFKEY

SEQ ID NO: 255 - protein, 10 aa, Artificial Sequence
  Peptide Derived from Human Papillomavirus
VSEPYGDSLF

SEQ ID NO: 256 - protein, 11 aa, Artificial Sequence
  Peptide Derived from Human Papillomavirus
VSEPYGDSLFF

SEQ ID NO: 257 - protein, 9 aa, Artificial Sequence
  Peptide Derived from Human Papillomavirus
VSGLQYRVF

SEQ ID NO: 258 - protein, 10 aa, Artificial Sequence
  Peptide Derived from Human Papillomavirus
VSKVVSTDEY

SEQ ID NO: 259 - protein, 8 aa, Artificial Sequence
  Peptide Derived from Human Papillomavirus
VTSDAQIF

SEQ ID NO: 260 - protein, 9 aa, Artificial Sequence
  Peptide Derived from Human Papillomavirus
WLPSEATVY

SEQ ID NO: 261 - protein, 9 aa, Artificial Sequence
  Peptide Derived from Human Papillomavirus
YIKMVSEPY

SEQ ID NO: 262 - protein, 8 aa, Artificial Sequence
  Peptide Derived from Human Papillomavirus
YILVITCY

SEQ ID NO: 263 - protein, 8 aa, Artificial Sequence
  Peptide Derived from Human Papillomavirus
YLRHGEEY

SEQ ID NO: 264 - protein, 8 aa, Artificial Sequence
  Peptide Derived from Human Papillomavirus
YLRREQMF

SEQ ID NO: 265 - protein, 8 aa, Artificial Sequence
  Peptide Derived from Human Papillomavirus
YVARTNIY

SEQ ID NO: 266 - protein, 9 aa, Artificial Sequence
  Peptide Derived from Human Papillomavirus
YVARTNIYY

SEQ ID NO: 267 - protein, 11 aa, Artificial Sequence
  Peptide Derived from Human Papillomavirus
ALPTSINNGLY

SEQ ID NO: 268 - protein, 11 aa, Artificial Sequence
  Peptide Derived from Human Papillomavirus
ALTSRRTGIRY

SEQ ID NO: 269 - protein, 8 aa, Artificial Sequence
  Peptide Derived from Human Papillomavirus
DVDNTLYF

SEQ ID NO: 270 - protein, 10 aa, Artificial Sequence
  Peptide Derived from Human Papillomavirus
ELQTITPSTY

SEQ ID NO: 271 - protein, 11 aa, Artificial Sequence
  Peptide Derived from Human Papillomavirus
FITTPTKLITY

SEQ ID NO: 272 - protein, 9 aa, Artificial Sequence
  Peptide Derived from Human Papillomavirus
GIDVDNTLY

SEQ ID NO: 273 - protein, 10 aa, Artificial Sequence
  Peptide Derived from Human Papillomavirus
GIDVDNTLYF

SEQ ID NO: 274 - protein, 10 aa, Artificial Sequence
  Peptide Derived from Human Papillomavirus
GLYDIYADDF

SEQ ID NO: 275 - protein, 10 aa, Artificial Sequence
  Peptide Derived from Human Papillomavirus
GSGTGGRTGY

SEQ ID NO: 276 - protein, 11 aa, Artificial Sequence
  Peptide Derived from Human Papillomavirus
GSRPVARLGLY

SEQ ID NO: 277 - protein, 8 aa, Artificial Sequence
  Peptide Derived from Human Papillomavirus
GTGGRTGY

SEQ ID NO: 278 - protein, 8 aa, Artificial Sequence
  Peptide Derived from Human Papillomavirus
IIADAGDF

SEQ ID NO: 279 - protein, 9 aa, Artificial Sequence
  Peptide Derived from Human Papillomavirus
IIADAGDFY

SEQ ID NO: 280 - protein, 10 aa, Artificial Sequence
  Peptide Derived from Human Papillomavirus
ILQYGSMGVF

SEQ ID NO: 281 - protein, 11 aa, Artificial Sequence
  Peptide Derived from Human Papillomavirus
ILQYGSMGVFF

SEQ ID NO: 282 - protein, 10 aa, Artificial Sequence
  Peptide Derived from Human Papillomavirus
ITTPTKLITY

SEQ ID NO: 283 - protein, 8 aa, Artificial Sequence
  Peptide Derived from Human Papillomavirus
ITYDNPAY

SEQ ID NO: 284 - protein, 8 aa, Artificial Sequence
  Peptide Derived from Human Papillomavirus
IVPGSPQY

SEQ ID NO: 285 - protein, 10 aa, Artificial Sequence
  Peptide Derived from Human Papillomavirus
IVSLVEETSF

SEQ ID NO: 286 - protein, 10 aa, Artificial Sequence
  Peptide Derived from Human Papillomavirus
KLITYDNPAY

SEQ ID NO: 287 - protein, 9 aa, Artificial Sequence
  Peptide Derived from Human Papillomavirus
KSIGAKVHY

SEQ ID NO: 288 - protein, 10 aa, Artificial Sequence
  Peptide Derived from Human Papillomavirus
KSIGAKVHYY

SEQ ID NO: 289 - protein, 11 aa, Artificial Sequence
  Peptide Derived from Human Papillomavirus
KSIGAKVHYYY

SEQ ID NO: 290 - protein, 10 aa, Artificial Sequence
  Peptide Derived from Human Papillomavirus
KTIADQILQY

SEQ ID NO: 291 - protein, 8 aa, Artificial Sequence
  Peptide Derived from Human Papillomavirus
KVHYYYDF

SEQ ID NO: 292 - protein, 11 aa, Artificial Sequence
  Peptide Derived from Human Papillomavirus
LIPIVPGSPQY

SEQ ID NO: 293 - protein, 9 aa, Artificial Sequence
  Peptide Derived from Human Papillomavirus
LITYDNPAY

SEQ ID NO: 294 - protein, 11 aa, Artificial Sequence
  Peptide Derived from Human Papillomavirus
LSSSTISTHNY

SEQ ID NO: 295 - protein, 10 aa, Artificial Sequence
  Peptide Derived from Human Papillomavirus
LTSRRTGIRY

SEQ ID NO: 296 - protein, 11 aa, Artificial Sequence
  Peptide Derived from Human Papillomavirus
MLRKRRKRLPY

SEQ ID NO: 297 - protein, 8 aa, Artificial Sequence
  Peptide Derived from Human Papillomavirus
NIAPDPDF

SEQ ID NO: 298 - protein, 11 aa, Artificial Sequence
  Peptide Derived from Human Papillomavirus
NSINIAPDPDF

SEQ ID NO: 299 - protein, 10 aa, Artificial Sequence
  Peptide Derived from Human Papillomavirus
NTTIPFGGAY

SEQ ID NO: 300 - protein, 9 aa, Artificial Sequence
  Peptide Derived from Human Papillomavirus
PIVPGSPQY

SEQ ID NO: 301 - protein, 10 aa, Artificial Sequence
  Peptide Derived from Human Papillomavirus
PSIPPDVSGF

SEQ ID NO: 302 - protein, 8 aa, Artificial Sequence
  Peptide Derived from Human Papillomavirus
PSTSLSGY

SEQ ID NO: 303 - protein, 11 aa, Artificial Sequence
  Peptide Derived from Human Papillomavirus
PSVPSTSLSGY

SEQ ID NO: 304 - protein, 10 aa, Artificial Sequence
  Peptide Derived from Human Papillomavirus
PTPAETGGHF

SEQ ID NO: 305 - protein, 9 aa, Artificial Sequence
  Peptide Derived from Human Papillomavirus
PTSINNGLY

SEQ ID NO: 306 - protein, 8 aa, Artificial Sequence
  Peptide Derived from Human Papillomavirus
PVARLGLY

SEQ ID NO: 307 - protein, 11 aa, Artificial Sequence
  Peptide Derived from Human Papillomavirus
QILQYGSMGVF

SEQ ID NO: 308 - protein, 8 aa, Artificial Sequence
  Peptide Derived from Human Papillomavirus
QTITPSTY

SEQ ID NO: 309 - protein, 9 aa, Artificial Sequence
  Peptide Derived from Human Papillomavirus
QVKVVDPAF

SEQ ID NO: 310 - protein, 11 aa, Artificial Sequence
  Peptide Derived from Human Papillomavirus
RTKRASATQLY

SEQ ID NO: 311 - protein, 8 aa, Artificial Sequence
  Peptide Derived from Human Papillomavirus
SIGAKVHY

SEQ ID NO: 312 - protein, 9 aa, Artificial Sequence
  Peptide Derived from Human Papillomavirus
SIGAKVHYY

SEQ ID NO: 313 - protein, 10 aa, Artificial Sequence
  Peptide Derived from Human Papillomavirus
SIGAKVHYYY

SEQ ID NO: 314 - protein, 10 aa, Artificial Sequence
  Peptide Derived from Human Papillomavirus
SINIAPDPDF

SEQ ID NO: 315 - protein, 10 aa, Artificial Sequence
  Peptide Derived from Human Papillomavirus
SINNGLYDIY

SEQ ID NO: 316 - protein, 9 aa, Artificial Sequence
  Peptide Derived from Human Papillomavirus
SIPPDVSGF

SEQ ID NO: 317 - protein, 11 aa, Artificial Sequence
  Peptide Derived from Human Papillomavirus
SIVSLVEETSF

SEQ ID NO: 318 - protein, 8 aa, Artificial Sequence
  Peptide Derived from Human Papillomavirus
SLVEETSF

SEQ ID NO: 319 - protein, 10 aa, Artificial Sequence
  Peptide Derived from Human Papillomavirus
SSSTISTHNY

SEQ ID NO: 320 - protein, 9 aa, Artificial Sequence
  Peptide Derived from Human Papillomavirus
SSTISTHNY

SEQ ID NO: 321 - protein, 8 aa, Artificial Sequence
  Peptide Derived from Human Papillomavirus
STISTHNY

SEQ ID NO: 322 - protein, 10 aa, Artificial Sequence
  Peptide Derived from Human Papillomavirus
SVPSTSLSGY

SEQ ID NO: 323 - protein, 9 aa, Artificial Sequence
  Peptide Derived from Human Papillomavirus
TIADQILQY

SEQ ID NO: 324 - protein, 9 aa, Artificial Sequence
  Peptide Derived from Human Papillomavirus
TIIADAGDF

SEQ ID NO: 325 - protein, 10 aa, Artificial Sequence
  Peptide Derived from Human Papillomavirus
TIIADAGDFY

SEQ ID NO: 326 - protein, 8 aa, Artificial Sequence
  Peptide Derived from Human Papillomavirus
TIPFGGAY

SEQ ID NO: 327 - protein, 8 aa, Artificial Sequence
  Peptide Derived from Human Papillomavirus
TSINNGLY

SEQ ID NO: 328 - protein, 11 aa, Artificial Sequence
  Peptide Derived from Human Papillomavirus
TSINNGLYDIY

SEQ ID NO: 329 - protein, 9 aa, Artificial Sequence
  Peptide Derived from Human Papillomavirus
TSRRTGIRY

SEQ ID NO: 330 - protein, 8 aa, Artificial Sequence
  Peptide Derived from Human Papillomavirus
TTHNNPTF

SEQ ID NO: 331 - protein, 9 aa, Artificial Sequence
  Peptide Derived from Human Papillomavirus
TTIPFGGAY

SEQ ID NO: 332 - protein, 9 aa, Artificial Sequence
  Peptide Derived from Human Papillomavirus
TTPTKLITY

SEQ ID NO: 333 - protein, 11 aa, Artificial Sequence
  Peptide Derived from Human Papillomavirus
TTVTTHNNPTF

SEQ ID NO: 334 - protein, 10 aa, Artificial Sequence
  Peptide Derived from Human Papillomavirus
TVTTHNNPTF

SEQ ID NO: 335 - protein, 9 aa, Artificial Sequence
  Peptide Derived from Human Papillomavirus
VSLVEETSF

SEQ ID NO: 336 - protein, 9 aa, Artificial Sequence
  Peptide Derived from Human Papillomavirus
VTTHNNPTF

SEQ ID NO: 337 - protein, 10 aa, Artificial Sequence
  Peptide Derived from Human Papillomavirus
YIPANTTIPF

SEQ ID NO: 338 - protein, 10 aa, Artificial Sequence
  Peptide Derived from Human Papillomavirus
YTIIADAGDF

SEQ ID NO: 339 - protein, 11 aa, Artificial Sequence
  Peptide Derived from Human Papillomavirus
YTIIADAGDFY

SEQ ID NO: 340 - protein, 10 aa, Artificial Sequence
  Peptide Derived from Human Papillomavirus
AMLAVFKDTY

SEQ ID NO: 341 - protein, 11 aa, Artificial Sequence
  Peptide Derived from Human Papillomavirus
AMLDDATTTCW

SEQ ID NO: 342 - protein, 11 aa, Artificial Sequence
  Peptide Derived from Human Papillomavirus
ATDTGSDMVDF

SEQ ID NO: 343 - protein, 8 aa, Artificial Sequence
  Peptide Derived from Human Papillomavirus
ATTTCWTY

SEQ ID NO: 344 - protein, 9 aa, Artificial Sequence
  Peptide Derived from Human Papillomavirus
ATTTCWTYF

SEQ ID NO: 345 - protein, 11 aa, Artificial Sequence
  Peptide Derived from Human Papillomavirus
AVFKDTYGLSF

SEQ ID NO: 346 - protein, 10 aa, Artificial Sequence
  Peptide Derived from Human Papillomavirus
CSKIDEGGDW

SEQ ID NO: 347 - protein, 9 aa, Artificial Sequence
  Peptide Derived from Human Papillomavirus
CTDWVTAIF

SEQ ID NO: 348 - protein, 8 aa, Artificial Sequence
  Peptide Derived from Human Papillomavirus
DLSEMVQW

SEQ ID NO: 349 - protein, 10 aa, Artificial Sequence
  Peptide Derived from Human Papillomavirus
DLSEMVQWAF

SEQ ID NO: 350 - protein, 9 aa, Artificial Sequence
  Peptide Derived from Human Papillomavirus
DSNSNAAAF

SEQ ID NO: 351 - protein, 10 aa, Artificial Sequence
  Peptide Derived from Human Papillomavirus
DTEGNPFGTF

SEQ ID NO: 352 - protein, 9 aa, Artificial Sequence
  Peptide Derived from Human Papillomavirus
DTGSDMVDF

SEQ ID NO: 353 - protein, 10 aa, Artificial Sequence
  Peptide Derived from Human Papillomavirus
EINDKNWKCF

SEQ ID NO: 354 - protein, 11 aa, Artificial Sequence
  Peptide Derived from Human Papillomavirus
EINDKNWKCFF

SEQ ID NO: 355 - protein, 9 aa, Artificial Sequence
  Peptide Derived from Human Papillomavirus
ELETAQALF

SEQ ID NO: 356 - protein, 10 aa, Artificial Sequence
  Peptide Derived from Human Papillomavirus
ELTDESDMAF

SEQ ID NO: 357 - protein, 8 aa, Artificial Sequence
  Peptide Derived from Human Papillomavirus
ESDMAFEY

SEQ ID NO: 358 - protein, 9 aa, Artificial Sequence
  Peptide Derived from Human Papillomavirus
ESRITVFEF

SEQ ID NO: 359 - protein, 9 aa, Artificial Sequence
  Peptide Derived from Human Papillomavirus
EVMGDTPEW

SEQ ID NO: 360 - protein, 8 aa, Artificial Sequence
  Peptide Derived from Human Papillomavirus
FIDTQGTF

SEQ ID NO: 361 - protein, 9 aa, Artificial Sequence
  Peptide Derived from Human Papillomavirus
FIQGAVISF

SEQ ID NO: 362 - protein, 11 aa, Artificial Sequence
  Peptide Derived from Human Papillomavirus
FITFLGALKSF

SEQ ID NO: 363 - protein, 8 aa, Artificial Sequence
  Peptide Derived from Human Papillomavirus
FLGALKSF

SEQ ID NO: 364 - protein, 10 aa, Artificial Sequence
  Peptide Derived from Human Papillomavirus
FLKSNCQAKY

SEQ ID NO: 365 - protein, 9 aa, Artificial Sequence
  Peptide Derived from Human Papillomavirus
FLRYQQIEF

SEQ ID NO: 366 - protein, 8 aa, Artificial Sequence
  Peptide Derived from Human Papillomavirus
FTDLVRNF

SEQ ID NO: 367 - protein, 8 aa, Artificial Sequence
  Peptide Derived from Human Papillomavirus
FTISDSGY

SEQ ID NO: 368 - protein, 8 aa, Artificial Sequence
  Peptide Derived from Human Papillomavirus
FVNSTSHF

SEQ ID NO: 369 - protein, 9 aa, Artificial Sequence
  Peptide Derived from Human Papillomavirus
FVNSTSHFW

SEQ ID NO: 370 - protein, 11 aa, Artificial Sequence
  Peptide Derived from Human Papillomavirus
GLSFTDLVRNF

SEQ ID NO: 371 - protein, 8 aa, Artificial Sequence
  Peptide Derived from Human Papillomavirus
GTGCNGWF

SEQ ID NO: 372 - protein, 9 aa, Artificial Sequence
  Peptide Derived from Human Papillomavirus
GTGCNGWFY

SEQ ID NO: 373 - protein, 10 aa, Artificial Sequence
  Peptide Derived from Human Papillomavirus
GTPKKNCLVF

SEQ ID NO: 374 - protein, 10 aa, Artificial Sequence
  Peptide Derived from Human Papillomavirus
GVLILALLRY

SEQ ID NO: 375 - protein, 10 aa, Artificial Sequence
  Peptide Derived from Human Papillomavirus
GVNPTIAEGF

SEQ ID NO: 376 - protein, 9 aa, Artificial Sequence
  Peptide Derived from Human Papillomavirus
HIQCLDCKW

SEQ ID NO: 377 - protein, 11 aa, Artificial Sequence
  Peptide Derived from Human Papillomavirus
IIQHGIDDSNF

SEQ ID NO: 378 - protein, 11 aa, Artificial Sequence
  Peptide Derived from Human Papillomavirus
ISEVMGDTPEW

SEQ ID NO: 379 - protein, 10 aa, Artificial Sequence
  Peptide Derived from Human Papillomavirus
ISFVNSTSHF

SEQ ID NO: 380 - protein, 11 aa, Artificial Sequence
  Peptide Derived from Human Papillomavirus
ISFVNSTSHFW

SEQ ID NO: 381 - protein, 10 aa, Artificial Sequence
  Peptide Derived from Human Papillomavirus
ITFLGALKSF

SEQ ID NO: 382 - protein, 10 aa, Artificial Sequence
  Peptide Derived from Human Papillomavirus
ITVFEFPNAF

SEQ ID NO: 383 - protein, 8 aa, Artificial Sequence
  Peptide Derived from Human Papillomavirus
KIDEGGDW

SEQ ID NO: 384 - protein, 10 aa, Artificial Sequence
  Peptide Derived from Human Papillomavirus
KLRSSVAALY

SEQ ID NO: 385 - protein, 11 aa, Artificial Sequence
  Peptide Derived from Human Papillomavirus
KLRSSVAALYW

SEQ ID NO: 386 - protein, 10 aa, Artificial Sequence
  Peptide Derived from Human Papillomavirus
KSDKTTCTDW

SEQ ID NO: 387 - protein, 8 aa, Artificial Sequence
  Peptide Derived from Human Papillomavirus
KSNCQAKY

SEQ ID NO: 388 - protein, 8 aa, Artificial Sequence
  Peptide Derived from Human Papillomavirus
KSYFGMSF

SEQ ID NO: 389 - protein, 11 aa, Artificial Sequence
  Peptide Derived from Human Papillomavirus
KSYFGMSFIHF

SEQ ID NO: 390 - protein, 10 aa, Artificial Sequence
  Peptide Derived from Human Papillomavirus
KTLIQPFILY

SEQ ID NO: 391 - protein, 8 aa, Artificial Sequence
  Peptide Derived from Human Papillomavirus
LILALLRY

SEQ ID NO: 392 - protein, 8 aa, Artificial Sequence
  Peptide Derived from Human Papillomavirus
LIQPFILY

SEQ ID NO: 393 - protein, 9 aa, Artificial Sequence
  Peptide Derived from Human Papillomavirus
LSEMVQWAF

SEQ ID NO: 394 - protein, 10 aa, Artificial Sequence
  Peptide Derived from Human Papillomavirus
LSFTDLVRNF

SEQ ID NO: 395 - protein, 9 aa, Artificial Sequence
  Peptide Derived from Human Papillomavirus
LTDESDMAF

SEQ ID NO: 396 - protein, 11 aa, Artificial Sequence
  Peptide Derived from Human Papillomavirus
LTDESDMAFEY

SEQ ID NO: 397 - protein, 9 aa, Artificial Sequence
  Peptide Derived from Human Papillomavirus
MLAVFKDTY

SEQ ID NO: 398 - protein, 10 aa, Artificial Sequence
  Peptide Derived from Human Papillomavirus
MLDDATTTCW

SEQ ID NO: 399 - protein, 11 aa, Artificial Sequence
  Peptide Derived from Human Papillomavirus
MVDFIDTQGTF

SEQ ID NO: 400 - protein, 10 aa, Artificial Sequence
  Peptide Derived from Human Papillomavirus
NIHPAKDNRW

SEQ ID NO: 401 - protein, 8 aa, Artificial Sequence
  Peptide Derived from Human Papillomavirus
NMSQWIRF

SEQ ID NO: 402 - protein, 11 aa, Artificial Sequence
  Peptide Derived from Human Papillomavirus
NTGKSYFGMSF

SEQ ID NO: 403 - protein, 8 aa, Artificial Sequence
  Peptide Derived from Human Papillomavirus
PIVQFLRY

SEQ ID NO: 404 - protein, 10 aa, Artificial Sequence
  Peptide Derived from Human Papillomavirus
PVYEINDKNW

SEQ ID NO: 405 - protein, 10 aa, Artificial Sequence
  Peptide Derived from Human Papillomavirus
QMNMSQWIRF

SEQ ID NO: 406 - protein, 10 aa, Artificial Sequence
  Peptide Derived from Human Papillomavirus
QVLHVLKRKF

SEQ ID NO: 407 - protein, 11 aa, Artificial Sequence
  Peptide Derived from Human Papillomavirus
RITVFEFPNAF

SEQ ID NO: 408 - protein, 10 aa, Artificial Sequence
  Peptide Derived from Human Papillomavirus
RLFTISDSGY

SEQ ID NO: 409 - protein, 8 aa, Artificial Sequence
  Peptide Derived from Human Papillomavirus
RSSVAALY

SEQ ID NO: 410 - protein, 9 aa, Artificial Sequence
  Peptide Derived from Human Papillomavirus
RSSVAALYW

SEQ ID NO: 411 - protein, 10 aa, Artificial Sequence
  Peptide Derived from Human Papillomavirus
RSSVAALYWY

SEQ ID NO: 412 - protein, 8 aa, Artificial Sequence
  Peptide Derived from Human Papillomavirus
SSVAALYW

SEQ ID NO: 413 - protein, 9 aa, Artificial Sequence
  Peptide Derived from Human Papillomavirus
SSVAALYWY

SEQ ID NO: 414 - protein, 8 aa, Artificial Sequence
  Peptide Derived from Human Papillomavirus
SVAALYWY

SEQ ID NO: 415 - protein, 9 aa, Artificial Sequence
  Peptide Derived from Human Papillomavirus
TLIQPFILY

SEQ ID NO: 416 - protein, 11 aa, Artificial Sequence
  Peptide Derived from Human Papillomavirus
TTCTDWVTAIF

SEQ ID NO: 417 - protein, 10 aa, Artificial Sequence
  Peptide Derived from Human Papillomavirus
TTCWTYFDTY

SEQ ID NO: 418 - protein, 8 aa, Artificial Sequence
  Peptide Derived from Human Papillomavirus
TTTCWTYF

SEQ ID NO: 419 - protein, 11 aa, Artificial Sequence
  Peptide Derived from Human Papillomavirus
TTTCWTYFDTY

SEQ ID NO: 420 - protein, 9 aa, Artificial Sequence
  Peptide Derived from Human Papillomavirus
TVFEFPNAF

SEQ ID NO: 421 - protein, 11 aa, Artificial Sequence
  Peptide Derived from Human Papillomavirus
TVFEFPNAFPF

SEQ ID NO: 422 - protein, 11 aa, Artificial Sequence
  Peptide Derived from Human Papillomavirus
VISFVNSTSHF

SEQ ID NO: 423 - protein, 9 aa, Artificial Sequence
  Peptide Derived from Human Papillomavirus
VLHVLKRKF

SEQ ID NO: 424 - protein, 9 aa, Artificial Sequence
  Peptide Derived from Human Papillomavirus
VLILALLRY

SEQ ID NO: 425 - protein, 8 aa, Artificial Sequence
  Peptide Derived from Human Papillomavirus
VMGDTPEW

SEQ ID NO: 426 - protein, 9 aa, Artificial Sequence
  Peptide Derived from Human Papillomavirus
YLESRITVF

SEQ ID NO: 427 - protein, 11 aa, Artificial Sequence
  Peptide Derived from Human Papillomavirus
YLESRITVFEF

SEQ ID NO: 428 - protein, 10 aa, Artificial Sequence
  Peptide Derived from Human Papillomavirus
ALQGLAQSRY

SEQ ID NO: 429 - protein, 10 aa, Artificial Sequence
  Peptide Derived from Human Papillomavirus
ATCVSHRGLY

SEQ ID NO: 430 - protein, 11 aa, Artificial Sequence
  Peptide Derived from Human Papillomavirus
ATCVSHRGLYY

SEQ ID NO: 431 - protein, 11 aa, Artificial Sequence
  Peptide Derived from Human Papillomavirus
CMTYVAWDSVY

SEQ ID NO: 432 - protein, 10 aa, Artificial Sequence
  Peptide Derived from Human Papillomavirus
CVQDKIIDHY

SEQ ID NO: 433 - protein, 8 aa, Artificial Sequence
  Peptide Derived from Human Papillomavirus
CVSHRGLY

SEQ ID NO: 434 - protein, 9 aa, Artificial Sequence
  Peptide Derived from Human Papillomavirus
CVSHRGLYY

SEQ ID NO: 435 - protein, 8 aa, Artificial Sequence
  Peptide Derived from Human Papillomavirus
DIDSQIQY

SEQ ID NO: 436 - protein, 9 aa, Artificial Sequence
  Peptide Derived from Human Papillomavirus
DIDSQIQYW

SEQ ID NO: 437 - protein, 8 aa, Artificial Sequence
  Peptide Derived from Human Papillomavirus
DISSTWHW

SEQ ID NO: 438 - protein, 11 aa, Artificial Sequence
  Peptide Derived from Human Papillomavirus
DSKDIDSQIQY

SEQ ID NO: 439 - protein, 9 aa, Artificial Sequence
  Peptide Derived from Human Papillomavirus
DSVQILVGY

SEQ ID NO: 440 - protein, 11 aa, Artificial Sequence
  Peptide Derived from Human Papillomavirus
ELWNTEPTHCF

SEQ ID NO: 441 - protein, 9 aa, Artificial Sequence
  Peptide Derived from Human Papillomavirus
GLYYVKEGY

SEQ ID NO: 442 - protein, 9 aa, Artificial Sequence
  Peptide Derived from Human Papillomavirus
HSETQRTKF

SEQ ID NO: 443 - protein, 9 aa, Artificial Sequence
  Peptide Derived from Human Papillomavirus
KTGILTVTY

SEQ ID NO: 444 - protein, 9 aa, Artificial Sequence
  Peptide Derived from Human Papillomavirus
LIRWENAIF

SEQ ID NO: 445 - protein, 10 aa, Artificial Sequence
  Peptide Derived from Human Papillomavirus
LIRWENAIFF

SEQ ID NO: 446 - protein, 10 aa, Artificial Sequence
  Peptide Derived from Human Papillomavirus
MTYVAWDSVY

SEQ ID NO: 447 - protein, 11 aa, Artificial Sequence
  Peptide Derived from Human Papillomavirus
MTYVAWDSVYY

SEQ ID NO: 448 - protein, 8 aa, Artificial Sequence
  Peptide Derived from Human Papillomavirus
NSLKCLRY

SEQ ID NO: 449 - protein, 8 aa, Artificial Sequence
  Peptide Derived from Human Papillomavirus
NTEPTHCF

SEQ ID NO: 450 - protein, 9 aa, Artificial Sequence
  Peptide Derived from Human Papillomavirus
NTGTWEVHF

SEQ ID NO: 451 - protein, 10 aa, Artificial Sequence
  Peptide Derived from Human Papillomavirus
QIQYWQLIRW

SEQ ID NO: 452 - protein, 10 aa, Artificial Sequence
  Peptide Derived from Human Papillomavirus
QLIRWENAIF

SEQ ID NO: 453 - protein, 11 aa, Artificial Sequence
  Peptide Derived from Human Papillomavirus
QLIRWENAIFF

SEQ ID NO: 454 - protein, 9 aa, Artificial Sequence
  Peptide Derived from Human Papillomavirus
QLQHTPSPY

SEQ ID NO: 455 - protein, 9 aa, Artificial Sequence
  Peptide Derived from Human Papillomavirus
QSRYKTEDW

SEQ ID NO: 456 - protein, 11 aa, Artificial Sequence
  Peptide Derived from Human Papillomavirus
QTLNHQVVPAY

SEQ ID NO: 457 - protein, 9 aa, Artificial Sequence
  Peptide Derived from Human Papillomavirus
RLRKHSDHY

SEQ ID NO: 458 - protein, 11 aa, Artificial Sequence
  Peptide Derived from Human Papillomavirus
STVSVGTAKTY

SEQ ID NO: 459 - protein, 8 aa, Artificial Sequence
  Peptide Derived from Human Papillomavirus
SVGTAKTY

SEQ ID NO: 460 - protein, 8 aa, Artificial Sequence
  Peptide Derived from Human Papillomavirus
SVQILVGY

SEQ ID NO: 461 - protein, 11 aa, Artificial Sequence
  Peptide Derived from Human Papillomavirus
SVYYMTDAGTW

SEQ ID NO: 462 - protein, 10 aa, Artificial Sequence
  Peptide Derived from Human Papillomavirus
TLNHQVVPAY

SEQ ID NO: 463 - protein, 10 aa, Artificial Sequence
  Peptide Derived from Human Papillomavirus
TLQDTCEELW

SEQ ID NO: 464 - protein, 10 aa, Artificial Sequence
  Peptide Derived from Human Papillomavirus
TVSVGTAKTY

SEQ ID NO: 465 - protein, 8 aa, Artificial Sequence
  Peptide Derived from Human Papillomavirus
VSHRGLYY

SEQ ID NO: 466 - protein, 9 aa, Artificial Sequence
  Peptide Derived from Human Papillomavirus
VSVGTAKTY

SEQ ID NO: 467 - protein, 11 aa, Artificial Sequence
  Peptide Derived from Human Papillomavirus
WTLQDTCEELW

SEQ ID NO: 468 - protein, 11 aa, Artificial Sequence
  Peptide Derived from Human Papillomavirus
YIEFKSECEKY

SEQ ID NO: 469 - protein, 8 aa, Artificial Sequence
  Peptide Derived from Human Papillomavirus
YMTDAGTW

SEQ ID NO: 470 - protein, 8 aa, Artificial Sequence
  Peptide Derived from Human Papillomavirus
YVAWDSVY

SEQ ID NO: 471 - protein, 9 aa, Artificial Sequence
  Peptide Derived from Human Papillomavirus
YVAWDSVYY

SEQ ID NO: 472 - protein, 9 aa, Artificial Sequence
  Peptide Derived from Human Papillomavirus
YVKEGYNTF

SEQ ID NO: 473 - protein, 10 aa, Artificial Sequence
  Peptide Derived from Human Papillomavirus
YVKEGYNTFY

SEQ ID NO: 474 - protein, 9 aa, Artificial Sequence
  Peptide Derived from Human Papillomavirus
ATAFTVYVF

SEQ ID NO: 475 - protein, 11 aa, Artificial Sequence
  Peptide Derived from Human Papillomavirus
ATAFTVYVFCF

SEQ ID NO: 476 - protein, 11 aa, Artificial Sequence
  Peptide Derived from Human Papillomavirus
CMCAYAWVLVF

SEQ ID NO: 477 - protein, 10 aa, Artificial Sequence
  Peptide Derived from Human Papillomavirus
FLFCFCVCMY

SEQ ID NO: 478 - protein, 8 aa, Artificial Sequence
  Peptide Derived from Human Papillomavirus
FTVYVFCF

SEQ ID NO: 479 - protein, 8 aa, Artificial Sequence
  Peptide Derived from Human Papillomavirus
ITSPATAF

SEQ ID NO: 480 - protein, 11 aa, Artificial Sequence
  Peptide Derived from Human Papillomavirus
ITSPATAFTVY

SEQ ID NO: 481 - protein, 11 aa, Artificial Sequence
  Peptide Derived from Human Papillomavirus
IVVITSPATAF

SEQ ID NO: 482 - protein, 10 aa, Artificial Sequence
  Peptide Derived from Human Papillomavirus
LLPSVCMCAY

SEQ ID NO: 483 - protein, 9 aa, Artificial Sequence
  Peptide Derived from Human Papillomavirus
LSLIFLFCF

SEQ ID NO: 484 - protein, 8 aa, Artificial Sequence
  Peptide Derived from Human Papillomavirus
MLSLIFLF

SEQ ID NO: 485 - protein, 10 aa, Artificial Sequence
  Peptide Derived from Human Papillomavirus
MLSLIFLFCF

SEQ ID NO: 486 - protein, 11 aa, Artificial Sequence
  Peptide Derived from Human Papillomavirus
PLLPSVCMCAY

SEQ ID NO: 487 - protein, 8 aa, Artificial Sequence
  Peptide Derived from Human Papillomavirus
PSVCMCAY

SEQ ID NO: 488 - protein, 10 aa, Artificial Sequence
  Peptide Derived from Human Papillomavirus
PSVCMCAYAW

SEQ ID NO: 489 - protein, 8 aa, Artificial Sequence
  Peptide Derived from Human Papillomavirus
SLIFLFCF

SEQ ID NO: 490 - protein, 9 aa, Artificial Sequence
  Peptide Derived from Human Papillomavirus
SVCMCAYAW

SEQ ID NO: 491 - protein, 10 aa, Artificial Sequence
  Peptide Derived from Human Papillomavirus
TSPATAFTVY

SEQ ID NO: 492 - protein, 9 aa, Artificial Sequence
  Peptide Derived from Human Papillomavirus
VITSPATAF

SEQ ID NO: 493 - protein, 10 aa, Artificial Sequence
  Peptide Derived from Human Papillomavirus
VVITSPATAF

SEQ ID NO: 494 - protein, 8 aa, Artificial Sequence
  Peptide Derived from Human Papillomavirus
DIEITCVY

SEQ ID NO: 495 - protein, 10 aa, Artificial Sequence
  Peptide Derived from Human Papillomavirus
ELRHYSDSVY

SEQ ID NO: 496 - protein, 8 aa, Artificial Sequence
  Peptide Derived from Human Papillomavirus
ELTEVFEF

SEQ ID NO: 497 - protein, 10 aa, Artificial Sequence
  Peptide Derived from Human Papillomavirus
ELTEVFEFAF

SEQ ID NO: 498 - protein, 11 aa, Artificial Sequence
  Peptide Derived from Human Papillomavirus
EVFEFAFKDLF

SEQ ID NO: 499 - protein, 8 aa, Artificial Sequence
  Peptide Derived from Human Papillomavirus
HLNEKRRF

SEQ ID NO: 500 - protein, 11 aa, Artificial Sequence
  Peptide Derived from Human Papillomavirus
KLRHLNEKRRF

SEQ ID NO: 501 - protein, 8 aa, Artificial Sequence
  Peptide Derived from Human Papillomavirus
KLTNTGLY

SEQ ID NO: 502 - protein, 10 aa, Artificial Sequence
  Peptide Derived from Human Papillomavirus
KTVLELTEVF

SEQ ID NO: 503 - protein, 9 aa, Artificial Sequence
  Peptide Derived from Human Papillomavirus
LTEVFEFAF

SEQ ID NO: 504 - protein, 8 aa, Artificial Sequence
  Peptide Derived from Human Papillomavirus
RIRELRHY

SEQ ID NO: 505 - protein, 11 aa, Artificial Sequence
  Peptide Derived from Human Papillomavirus
SLQDIEITCVY

SEQ ID NO: 506 - protein, 11 aa, Artificial Sequence
  Peptide Derived from Human Papillomavirus
TLEKLTNTGLY

SEQ ID NO: 507 - protein, 9 aa, Artificial Sequence
  Peptide Derived from Human Papillomavirus
TVLELTEVF

SEQ ID NO: 508 - protein, 11 aa, Artificial Sequence
  Peptide Derived from Human Papillomavirus
TVLELTEVFEF

SEQ ID NO: 509 - protein, 8 aa, Artificial Sequence
  Peptide Derived from Human Papillomavirus
VLELTEVF

SEQ ID NO: 510 - protein, 10 aa, Artificial Sequence
  Peptide Derived from Human Papillomavirus
VLELTEVFEF

SEQ ID NO: 511 - protein, 10 aa, Artificial Sequence
  Peptide Derived from Human Papillomavirus
YSRIRELRHY

SEQ ID NO: 512 - protein, 9 aa, Artificial Sequence
  Peptide Derived from Human Papillomavirus
DLRAFQQLF

SEQ ID NO: 513 - protein, 10 aa, Artificial Sequence
  Peptide Derived from Human Papillomavirus
ESSADDLRAF

SEQ ID NO: 514 - protein, 11 aa, Artificial Sequence
  Peptide Derived from Human Papillomavirus
FLNTLSFVCPW

SEQ ID NO: 515 - protein, 9 aa, Artificial Sequence
  Peptide Derived from Human Papillomavirus
NTLSFVCPW

SEQ ID NO: 516 - protein, 9 aa, Artificial Sequence
  Peptide Derived from Human Papillomavirus
QLFLNTLSF

SEQ ID NO: 517 - protein, 9 aa, Artificial Sequence
  Peptide Derived from Human Papillomavirus
SSADDLRAF

SEQ ID NO: 518 - protein, 8 aa, Artificial Sequence
  Peptide Derived from Human Papillomavirus
TLSFVCPW

SEQ ID NO: 519 - protein, 11 aa, Artificial Sequence
  Peptide Derived from Human Papillomavirus
ALWRPSDNTVY

SEQ ID NO: 520 - protein, 8 aa, Artificial Sequence
  Peptide Derived from Human Papillomavirus
ASPGSCVY

SEQ ID NO: 521 - protein, 11 aa, Artificial Sequence
  Peptide Derived from Human Papillomavirus
ASTQSPVPGQY

SEQ ID NO: 522 - protein, 8 aa, Artificial Sequence
  Peptide Derived from Human Papillomavirus
CLRREQLF

SEQ ID NO: 523 - protein, 11 aa, Artificial Sequence
  Peptide Derived from Human Papillomavirus
CLYTRVLILHY

SEQ ID NO: 524 - protein, 9 aa, Artificial Sequence
  Peptide Derived from Human Papillomavirus
DICQSICKY

SEQ ID NO: 525 - protein, 8 aa, Artificial Sequence
  Peptide Derived from Human Papillomavirus
DIPKVSAY

SEQ ID NO: 526 - protein, 10 aa, Artificial Sequence
  Peptide Derived from Human Papillomavirus
DIPKVSAYQY

SEQ ID NO: 527 - protein, 11 aa, Artificial Sequence
  Peptide Derived from Human Papillomavirus
DLDQYPLGRKF

SEQ ID NO: 528 - protein, 9 aa, Artificial Sequence
  Peptide Derived from Human Papillomavirus
DSQLFNKPY

SEQ ID NO: 529 - protein, 10 aa, Artificial Sequence
  Peptide Derived from Human Papillomavirus
DSQLFNKPYW

SEQ ID NO: 530 - protein, 9 aa, Artificial Sequence
  Peptide Derived from Human Papillomavirus
DTGYGAMDF

SEQ ID NO: 531 - protein, 8 aa, Artificial Sequence
  Peptide Derived from Human Papillomavirus
DTVPQSLY

SEQ ID NO: 532 - protein, 10 aa, Artificial Sequence
  Peptide Derived from Human Papillomavirus
DVRDNVSVDY

SEQ ID NO: 533 - protein, 8 aa, Artificial Sequence
  Peptide Derived from Human Papillomavirus
FLRNVNVF

SEQ ID NO: 534 - protein, 11 aa, Artificial Sequence
  Peptide Derived from Human Papillomavirus
FLRNVNVFPIF

SEQ ID NO: 535 - protein, 8 aa, Artificial Sequence
  Peptide Derived from Human Papillomavirus
FSLDLDQY

SEQ ID NO: 536 - protein, 8 aa, Artificial Sequence
  Peptide Derived from Human Papillomavirus
GLPDTSIY

SEQ ID NO: 537 - protein, 8 aa, Artificial Sequence
  Peptide Derived from Human Papillomavirus
GLSGHPFY

SEQ ID NO: 538 - protein, 11 aa, Artificial Sequence
  Peptide Derived from Human Papillomavirus
GMPASPGSCVY

SEQ ID NO: 539 - protein, 11 aa, Artificial Sequence
  Peptide Derived from Human Papillomavirus
GSIVTSDSQLF

SEQ ID NO: 540 - protein, 9 aa, Artificial Sequence
  Peptide Derived from Human Papillomavirus
GVCWHNQLF

SEQ ID NO: 541 - protein, 9 aa, Artificial Sequence
  Peptide Derived from Human Papillomavirus
GVGLSGHPF

SEQ ID NO: 542 - protein, 10 aa, Artificial Sequence
  Peptide Derived from Human Papillomavirus
GVGLSGHPFY

SEQ ID NO: 543 - protein, 8 aa, Artificial Sequence
  Peptide Derived from Human Papillomavirus
HIIICGHY

SEQ ID NO: 544 - protein, 10 aa, Artificial Sequence
  Peptide Derived from Human Papillomavirus
HLLPLYGPLY

SEQ ID NO: 545 - protein, 11 aa, Artificial Sequence
  Peptide Derived from Human Papillomavirus
HSMNSSILEDW

SEQ ID NO: 546 - protein, 9 aa, Artificial Sequence
  Peptide Derived from Human Papillomavirus
HVEEYDLQF

SEQ ID NO: 547 - protein, 11 aa, Artificial Sequence
  Peptide Derived from Human Papillomavirus
HVEEYDLQFIF

SEQ ID NO: 548 - protein, 10 aa, Artificial Sequence
  Peptide Derived from Human Papillomavirus
IICGHYIILF

SEQ ID NO: 549 - protein, 11 aa, Artificial Sequence
  Peptide Derived from Human Papillomavirus
IIICGHYIILF

SEQ ID NO: 550 - protein, 11 aa, Artificial Sequence
  Peptide Derived from Human Papillomavirus
IILFLRNVNVF

SEQ ID NO: 551 - protein, 10 aa, Artificial Sequence
  Peptide Derived from Human Papillomavirus
ILFLRNVNVF

SEQ ID NO: 552 - protein, 10 aa, Artificial Sequence
  Peptide Derived from Human Papillomavirus
ILHYHLLPLY

SEQ ID NO: 553 - protein, 10 aa, Artificial Sequence
  Peptide Derived from Human Papillomavirus
ITLTADVMSY

SEQ ID NO: 554 - protein, 9 aa, Artificial Sequence
  Peptide Derived from Human Papillomavirus
IVTSDSQLF

SEQ ID NO: 555 - protein, 10 aa, Artificial Sequence
  Peptide Derived from Human Papillomavirus
KVSAYQYRVF

SEQ ID NO: 556 - protein, 11 aa, Artificial Sequence
  Peptide Derived from Human Papillomavirus
LILHYHLLPLY

SEQ ID NO: 557 - protein, 9 aa, Artificial Sequence
  Peptide Derived from Human Papillomavirus
LLPLYGPLY

SEQ ID NO: 558 - protein, 8 aa, Artificial Sequence
  Peptide Derived from Human Papillomavirus
LLTVGNPY

SEQ ID NO: 559 - protein, 9 aa, Artificial Sequence
  Peptide Derived from Human Papillomavirus
LLTVGNPYF

SEQ ID NO: 560 - protein, 8 aa, Artificial Sequence
  Peptide Derived from Human Papillomavirus
LTADVMSY

SEQ ID NO: 561 - protein, 8 aa, Artificial Sequence
  Peptide Derived from Human Papillomavirus
LTVGNPYF

SEQ ID NO: 562 - protein, 11 aa, Artificial Sequence
  Peptide Derived from Human Papillomavirus
MSADPYGDSMF

SEQ ID NO: 563 - protein, 11 aa, Artificial Sequence
  Peptide Derived from Human Papillomavirus
MVDTGYGAMDF

SEQ ID NO: 564 - protein, 10 aa, Artificial Sequence
  Peptide Derived from Human Papillomavirus
MVHIIICGHY

SEQ ID NO: 565 - protein, 8 aa, Artificial Sequence
  Peptide Derived from Human Papillomavirus
NSSILEDW

SEQ ID NO: 566 - protein, 10 aa, Artificial Sequence
  Peptide Derived from Human Papillomavirus
NSSILEDWNF

SEQ ID NO: 567 - protein, 8 aa, Artificial Sequence
  Peptide Derived from Human Papillomavirus
NVDLKEKF

SEQ ID NO: 568 - protein, 8 aa, Artificial Sequence
  Peptide Derived from Human Papillomavirus
NVNVFPIF

SEQ ID NO: 569 - protein, 9 aa, Artificial Sequence
  Peptide Derived from Human Papillomavirus
PIFLQMALW

SEQ ID NO: 570 - protein, 11 aa, Artificial Sequence
  Peptide Derived from Human Papillomavirus
PLDICQSICKY

SEQ ID NO: 571 - protein, 11 aa, Artificial Sequence
  Peptide Derived from Human Papillomavirus
PLGVGLSGHPF

SEQ ID NO: 572 - protein, 8 aa, Artificial Sequence
  Peptide Derived from Human Papillomavirus
PLHSILVY

SEQ ID NO: 573 - protein, 10 aa, Artificial Sequence
  Peptide Derived from Human Papillomavirus
PLPLHSILVY

SEQ ID NO: 574 - protein, 9 aa, Artificial Sequence
  Peptide Derived from Human Papillomavirus
PTTSLVDTY

SEQ ID NO: 575 - protein, 11 aa, Artificial Sequence
  Peptide Derived from Human Papillomavirus
PTTSLVDTYRF

SEQ ID NO: 576 - protein, 11 aa, Artificial Sequence
  Peptide Derived from Human Papillomavirus
PVPGQYDATKF

SEQ ID NO: 577 - protein, 8 aa, Artificial Sequence
  Peptide Derived from Human Papillomavirus
QLFARHFW

SEQ ID NO: 578 - protein, 8 aa, Artificial Sequence
  Peptide Derived from Human Papillomavirus
QLFNKPYW

SEQ ID NO: 579 - protein, 8 aa, Artificial Sequence
  Peptide Derived from Human Papillomavirus
QLPDPNKF

SEQ ID NO: 580 - protein, 9 aa, Artificial Sequence
  Peptide Derived from Human Papillomavirus
QSICKYPDY

SEQ ID NO: 581 - protein, 8 aa, Artificial Sequence
  Peptide Derived from Human Papillomavirus
QSPVPGQY

SEQ ID NO: 582 - protein, 9 aa, Artificial Sequence
  Peptide Derived from Human Papillomavirus
RLLTVGNPY

SEQ ID NO: 583 - protein, 10 aa, Artificial Sequence
  Peptide Derived from Human Papillomavirus
RLLTVGNPYF

SEQ ID NO: 584 - protein, 10 aa, Artificial Sequence
  Peptide Derived from Human Papillomavirus
RVQLPDPNKF

SEQ ID NO: 585 - protein, 8 aa, Artificial Sequence
  Peptide Derived from Human Papillomavirus
RVVNTDDY

SEQ ID NO: 586 - protein, 8 aa, Artificial Sequence
  Peptide Derived from Human Papillomavirus
SICKYPDY

SEQ ID NO: 587 - protein, 8 aa, Artificial Sequence
  Peptide Derived from Human Papillomavirus
SILEDWNF

SEQ ID NO: 588 - protein, 10 aa, Artificial Sequence
  Peptide Derived from Human Papillomavirus
SIVTSDSQLF

SEQ ID NO: 589 - protein, 8 aa, Artificial Sequence
  Peptide Derived from Human Papillomavirus
SLVDTYRF

SEQ ID NO: 590 - protein, 10 aa, Artificial Sequence
  Peptide Derived from Human Papillomavirus
SMNSSILEDW

SEQ ID NO: 591 - protein, 9 aa, Artificial Sequence
  Peptide Derived from Human Papillomavirus
SSILEDWNF

SEQ ID NO: 592 - protein, 11 aa, Artificial Sequence
  Peptide Derived from Human Papillomavirus
SSRLLTVGNPY

SEQ ID NO: 593 - protein, 10 aa, Artificial Sequence
  Peptide Derived from Human Papillomavirus
STQSPVPGQY

SEQ ID NO: 594 - protein, 11 aa, Artificial Sequence
  Peptide Derived from Human Papillomavirus
SVARVVNTDDY

SEQ ID NO: 595 - protein, 11 aa, Artificial Sequence
  Peptide Derived from Human Papillomavirus
TITLTADVMSY

SEQ ID NO: 596 - protein, 9 aa, Artificial Sequence
  Peptide Derived from Human Papillomavirus
TLTADVMSY

SEQ ID NO: 597 - protein, 11 aa, Artificial Sequence
  Peptide Derived from Human Papillomavirus
TMGDTVPQSLY

SEQ ID NO: 598 - protein, 11 aa, Artificial Sequence
  Peptide Derived from Human Papillomavirus
TSDSQLFNKPY

SEQ ID NO: 599 - protein, 9 aa, Artificial Sequence
  Peptide Derived from Human Papillomavirus
TSLVDTYRF

SEQ ID NO: 600 - protein, 8 aa, Artificial Sequence
  Peptide Derived from Human Papillomavirus
TTSLVDTY

SEQ ID NO: 601 - protein, 10 aa, Artificial Sequence
  Peptide Derived from Human Papillomavirus
TTSLVDTYRF

SEQ ID NO: 602 - protein, 9 aa, Artificial Sequence
  Peptide Derived from Human Papillomavirus
VSAYQYRVF

SEQ ID NO: 603 - protein, 8 aa, Artificial Sequence
  Peptide Derived from Human Papillomavirus
VTPTSIFY

SEQ ID NO: 604 - protein, 8 aa, Artificial Sequence
  Peptide Derived from Human Papillomavirus
VTSDSQLF

SEQ ID NO: 605 - protein, 9 aa, Artificial Sequence
  Peptide Derived from Human Papillomavirus
YLQMSADPY

SEQ ID NO: 606 - protein, 11 aa, Artificial Sequence
  Peptide Derived from Human Papillomavirus
YMVHIIICGHY

SEQ ID NO: 607 - protein, 8 aa, Artificial Sequence
  Peptide Derived from Human Papillomavirus
YSRHVEEY

SEQ ID NO: 608 - protein, 9 aa, Artificial Sequence
  Peptide Derived from Human Papillomavirus
YTRVLILHY

SEQ ID NO: 609 - protein, 8 aa, Artificial Sequence
  Peptide Derived from Human Papillomavirus
YVTPTSIF

SEQ ID NO: 610 - protein, 9 aa, Artificial Sequence
  Peptide Derived from Human Papillomavirus
YVTPTSIFY

SEQ ID NO: 611 - protein, 11 aa, Artificial Sequence
  Peptide Derived from Human Papillomavirus
ALTSRRGTVRF

SEQ ID NO: 612 - protein, 8 aa, Artificial Sequence
  Peptide Derived from Human Papillomavirus
ATEDNDLF

SEQ ID NO: 613 - protein, 11 aa, Artificial Sequence
  Peptide Derived from Human Papillomavirus
ATEDNDLFDIY

SEQ ID NO: 614 - protein, 11 aa, Artificial Sequence
  Peptide Derived from Human Papillomavirus
DISPIAPSPEY

SEQ ID NO: 615 - protein, 11 aa, Artificial Sequence
  Peptide Derived from Human Papillomavirus
DITLPSTTSVW

SEQ ID NO: 616 - protein, 11 aa, Artificial Sequence
  Peptide Derived from Human Papillomavirus
FIPKKRKRVPY

SEQ ID NO: 617 - protein, 11 aa, Artificial Sequence
  Peptide Derived from Human Papillomavirus
FLTRPSSLITY

SEQ ID NO: 618 - protein, 11 aa, Artificial Sequence
  Peptide Derived from Human Papillomavirus
FSRLGQRATMF

SEQ ID NO: 619 - protein, 8 aa, Artificial Sequence
  Peptide Derived from Human Papillomavirus
GIHGTHYY

SEQ ID NO: 620 - protein, 10 aa, Artificial Sequence
  Peptide Derived from Human Papillomavirus
GIHGTHYYLW

SEQ ID NO: 621 - protein, 10 aa, Artificial Sequence
  Peptide Derived from Human Papillomavirus
GSGTGGRTGY

SEQ ID NO: 622 - protein, 8 aa, Artificial Sequence
  Peptide Derived from Human Papillomavirus
GTGGRTGY

SEQ ID NO: 623 - protein, 10 aa, Artificial Sequence
  Peptide Derived from Human Papillomavirus
GTHYYLWPLY

SEQ ID NO: 624 - protein, 11 aa, Artificial Sequence
  Peptide Derived from Human Papillomavirus
GTHYYLWPLYY

SEQ ID NO: 625 - protein, 10 aa, Artificial Sequence
  Peptide Derived from Human Papillomavirus
GTPTSGTHGY

SEQ ID NO: 626 - protein, 10 aa, Artificial Sequence
  Peptide Derived from Human Papillomavirus
GTQIGARVHF

SEQ ID NO: 627 - protein, 11 aa, Artificial Sequence
  Peptide Derived from Human Papillomavirus
GTQIGARVHFY

SEQ ID NO: 628 - protein, 11 aa, Artificial Sequence
  Peptide Derived from Human Papillomavirus
GTTLADKILQW

SEQ ID NO: 629 - protein, 10 aa, Artificial Sequence
  Peptide Derived from Human Papillomavirus
ILQWSSLGIF

SEQ ID NO: 630 - protein, 10 aa, Artificial Sequence
  Peptide Derived from Human Papillomavirus
ISPIAPSPEY

SEQ ID NO: 631 - protein, 11 aa, Artificial Sequence
  Peptide Derived from Human Papillomavirus
ISTTNFTNPAF

SEQ ID NO: 632 - protein, 10 aa, Artificial Sequence
  Peptide Derived from Human Papillomavirus
ITLPSTTSVW

SEQ ID NO: 633 - protein, 8 aa, Artificial Sequence
  Peptide Derived from Human Papillomavirus
ITYDNPAF

SEQ ID NO: 634 - protein, 11 aa, Artificial Sequence
  Peptide Derived from Human Papillomavirus
KILQWSSLGIF

SEQ ID NO: 635 - protein, 9 aa, Artificial Sequence
  Peptide Derived from Human Papillomavirus
LITYDNPAF

SEQ ID NO: 636 - protein, 10 aa, Artificial Sequence
  Peptide Derived from Human Papillomavirus
LTRPSSLITY

SEQ ID NO: 637 - protein, 10 aa, Artificial Sequence
  Peptide Derived from Human Papillomavirus
LTSRRGTVRF

SEQ ID NO: 638 - protein, 10 aa, Artificial Sequence
  Peptide Derived from Human Papillomavirus
LTSSWDVPVY

SEQ ID NO: 639 - protein, 11 aa, Artificial Sequence
  Peptide Derived from Human Papillomavirus
LVSATEDNDLF

SEQ ID NO: 640 - protein, 10 aa, Artificial Sequence
  Peptide Derived from Human Papillomavirus
NVTVPLTSSW

SEQ ID NO: 641 - protein, 8 aa, Artificial Sequence
  Peptide Derived from Human Papillomavirus
PIAPSPEY

SEQ ID NO: 642 - protein, 11 aa, Artificial Sequence
  Peptide Derived from Human Papillomavirus
PLTSSWDVPVY

SEQ ID NO: 643 - protein, 8 aa, Artificial Sequence
  Peptide Derived from Human Papillomavirus
PSRSTTSF

SEQ ID NO: 644 - protein, 10 aa, Artificial Sequence
  Peptide Derived from Human Papillomavirus
PSRSTTSFAF

SEQ ID NO: 645 - protein, 11 aa, Artificial Sequence
  Peptide Derived from Human Papillomavirus
PSRSTTSFAFF

SEQ ID NO: 646 - protein, 9 aa, Artificial Sequence
  Peptide Derived from Human Papillomavirus
PTAPASTQY

SEQ ID NO: 647 - protein, 9 aa, Artificial Sequence
  Peptide Derived from Human Papillomavirus
PTFTGTSGF

SEQ ID NO: 648 - protein, 9 aa, Artificial Sequence
  Peptide Derived from Human Papillomavirus
PTISSASSY

SEQ ID NO: 649 - protein, 8 aa, Artificial Sequence
  Peptide Derived from Human Papillomavirus
PTSGTHGY

SEQ ID NO: 650 - protein, 8 aa, Artificial Sequence
  Peptide Derived from Human Papillomavirus
PVDTTLTF

SEQ ID NO: 651 - protein, 10 aa, Artificial Sequence
  Peptide Derived from Human Papillomavirus
PVPSRSTTSF

SEQ ID NO: 652 - protein, 8 aa, Artificial Sequence
  Peptide Derived from Human Papillomavirus
QIGARVHF

SEQ ID NO: 653 - protein, 9 aa, Artificial Sequence
  Peptide Derived from Human Papillomavirus
QIGARVHFY

SEQ ID NO: 654 - protein, 10 aa, Artificial Sequence
  Peptide Derived from Human Papillomavirus
QTGEVAGNVF

SEQ ID NO: 655 - protein, 9 aa, Artificial Sequence
  Peptide Derived from Human Papillomavirus
QVSVANPEF

SEQ ID NO: 656 - protein, 9 aa, Artificial Sequence
  Peptide Derived from Human Papillomavirus
RLGQRATMF

SEQ ID NO: 657 - protein, 9 aa, Artificial Sequence
  Peptide Derived from Human Papillomavirus
RSDVPDSDF

SEQ ID NO: 658 - protein, 8 aa, Artificial Sequence
  Peptide Derived from Human Papillomavirus
RSTTSFAF

SEQ ID NO: 659 - protein, 9 aa, Artificial Sequence
  Peptide Derived from Human Papillomavirus
RSTTSFAFF

SEQ ID NO: 660 - protein, 11 aa, Artificial Sequence
  Peptide Derived from Human Papillomavirus
RSTTSFAFFKY

SEQ ID NO: 661 - protein, 8 aa, Artificial Sequence
  Peptide Derived from Human Papillomavirus
RVAGPRLY

SEQ ID NO: 662 - protein, 10 aa, Artificial Sequence
  Peptide Derived from Human Papillomavirus
RVPYFFADGF

SEQ ID NO: 663 - protein, 10 aa, Artificial Sequence
  Peptide Derived from Human Papillomavirus
SLITYDNPAF

SEQ ID NO: 664 - protein, 11 aa, Artificial Sequence
  Peptide Derived from Human Papillomavirus
SSLITYDNPAF

SEQ ID NO: 665 - protein, 8 aa, Artificial Sequence
  Peptide Derived from Human Papillomavirus
SSWDVPVY

SEQ ID NO: 666 - protein, 11 aa, Artificial Sequence
  Peptide Derived from Human Papillomavirus
STSVSISTTNF

SEQ ID NO: 667 - protein, 10 aa, Artificial Sequence
  Peptide Derived from Human Papillomavirus
STTNFTNPAF

SEQ ID NO: 668 - protein, 8 aa, Artificial Sequence
  Peptide Derived from Human Papillomavirus
STTSFAFF

SEQ ID NO: 669 - protein, 10 aa, Artificial Sequence
  Peptide Derived from Human Papillomavirus
STTSFAFFKY

SEQ ID NO: 670 - protein, 9 aa, Artificial Sequence
  Peptide Derived from Human Papillomavirus
SVSISTTNF

SEQ ID NO: 671 - protein, 8 aa, Artificial Sequence
  Peptide Derived from Human Papillomavirus
TISSASSY

SEQ ID NO: 672 - protein, 9 aa, Artificial Sequence
  Peptide Derived from Human Papillomavirus
TLADKILQW

SEQ ID NO: 673 - protein, 9 aa, Artificial Sequence
  Peptide Derived from Human Papillomavirus
TLPSTTSVW

SEQ ID NO: 674 - protein, 8 aa, Artificial Sequence
  Peptide Derived from Human Papillomavirus
TSFAFFKY

SEQ ID NO: 675 - protein, 9 aa, Artificial Sequence
  Peptide Derived from Human Papillomavirus
TSGAPRPTF

SEQ ID NO: 676 - protein, 9 aa, Artificial Sequence
  Peptide Derived from Human Papillomavirus
TSRRGTVRF

SEQ ID NO: 677 - protein, 9 aa, Artificial Sequence
  Peptide Derived from Human Papillomavirus
TSSWDVPVY

SEQ ID NO: 678 - protein, 10 aa, Artificial Sequence
  Peptide Derived from Human Papillomavirus
TSVSISTTNF

SEQ ID NO: 679 - protein, 10 aa, Artificial Sequence
  Peptide Derived from Human Papillomavirus
TTLADKILQW

SEQ ID NO: 680 - protein, 9 aa, Artificial Sequence
  Peptide Derived from Human Papillomavirus
TTNFTNPAF

SEQ ID NO: 681 - protein, 9 aa, Artificial Sequence
  Peptide Derived from Human Papillomavirus
TTSFAFFKY

SEQ ID NO: 682 - protein, 8 aa, Artificial Sequence
  Peptide Derived from Human Papillomavirus
TVPLTSSW

SEQ ID NO: 683 - protein, 11 aa, Artificial Sequence
  Peptide Derived from Human Papillomavirus
TVRRVAGPRLY

SEQ ID NO: 684 - protein, 10 aa, Artificial Sequence
  Peptide Derived from Human Papillomavirus
VSATEDNDLF

SEQ ID NO: 685 - protein, 8 aa, Artificial Sequence
  Peptide Derived from Human Papillomavirus
VSISTTNF

SEQ ID NO: 686 - protein, 11 aa, Artificial Sequence
  Peptide Derived from Human Papillomavirus
VSPTAPASTQY

SEQ ID NO: 687 - protein, 8 aa, Artificial Sequence
  Peptide Derived from Human Papillomavirus
VSVANPEF

SEQ ID NO: 688 - protein, 10 aa, Artificial Sequence
  Peptide Derived from Human Papillomavirus
VTSGAPRPTF

SEQ ID NO: 689 - protein, 9 aa, Artificial Sequence
  Peptide Derived from Human Papillomavirus
VTVPLTSSW

SEQ ID NO: 690 - protein, 11 aa, Artificial Sequence
  Peptide Derived from Human Papillomavirus
VVTSGAPRPTF

SEQ ID NO: 691 - protein, 9 aa, Artificial Sequence
  Peptide Derived from Human Papillomavirus
YIGIHGTHY

SEQ ID NO: 692 - protein, 10 aa, Artificial Sequence
  Peptide Derived from Human Papillomavirus
YIGIHGTHYY

SEQ ID NO: 693 - protein, 8 aa, Artificial Sequence
  Peptide Derived from Human Papillomavirus
YLWPLYYF

SEQ ID NO: 694 - protein, 11 aa, Artificial Sequence
  Peptide Derived from Human Papillomavirus
YSPTISSASSY

SEQ ID NO: 695 - protein, 10 aa, Artificial Sequence
  Peptide Derived from Human Papillomavirus
AMLGKFKELY

SEQ ID NO: 696 - protein, 8 aa, Artificial Sequence
  Peptide Derived from Human Papillomavirus
ATTPCWHY

SEQ ID NO: 697 - protein, 9 aa, Artificial Sequence
  Peptide Derived from Human Papillomavirus
AVQVLKRKY

SEQ ID NO: 698 - protein, 9 aa, Artificial Sequence
  Peptide Derived from Human Papillomavirus
CTDWCVAAF

SEQ ID NO: 699 - protein, 8 aa, Artificial Sequence
  Peptide Derived from Human Papillomavirus
DISSCVDY

SEQ ID NO: 700 - protein, 8 aa, Artificial Sequence
  Peptide Derived from Human Papillomavirus
DIVKFLRY

SEQ ID NO: 701 - protein, 8 aa, Artificial Sequence
  Peptide Derived from Human Papillomavirus
DLSQMVQW

SEQ ID NO: 702 - protein, 10 aa, Artificial Sequence
  Peptide Derived from Human Papillomavirus
DLSQMVQWAY

SEQ ID NO: 703 - protein, 9 aa, Artificial Sequence
  Peptide Derived from Human Papillomavirus
DSDSNACAF

SEQ ID NO: 704 - protein, 8 aa, Artificial Sequence
  Peptide Derived from Human Papillomavirus
DSEIAYKY

SEQ ID NO: 705 - protein, 9 aa, Artificial Sequence
  Peptide Derived from Human Papillomavirus
DTGEDMVDF

SEQ ID NO: 706 - protein, 10 aa, Artificial Sequence
  Peptide Derived from Human Papillomavirus
DVMDDSEIAY

SEQ ID NO: 707 - protein, 9 aa, Artificial Sequence
  Peptide Derived from Human Papillomavirus
DVYGETPEW

SEQ ID NO: 708 - protein, 10 aa, Artificial Sequence
  Peptide Derived from Human Papillomavirus
ELSDKNWKSF

SEQ ID NO: 709 - protein, 11 aa, Artificial Sequence
  Peptide Derived from Human Papillomavirus
ELSDKNWKSFF

SEQ ID NO: 710 - protein, 8 aa, Artificial Sequence
  Peptide Derived from Human Papillomavirus
FIDNCNVY

SEQ ID NO: 711 - protein, 9 aa, Artificial Sequence
  Peptide Derived from Human Papillomavirus
FLQGCIISY

SEQ ID NO: 712 - protein, 9 aa, Artificial Sequence
  Peptide Derived from Human Papillomavirus
FLRYQQIEF

SEQ ID NO: 713 - protein, 8 aa, Artificial Sequence
  Peptide Derived from Human Papillomavirus
FLSALKLF

SEQ ID NO: 714 - protein, 8 aa, Artificial Sequence
  Peptide Derived from Human Papillomavirus
FMELIRPF

SEQ ID NO: 715 - protein, 9 aa, Artificial Sequence
  Peptide Derived from Human Papillomavirus
FTFPNPFPF

SEQ ID NO: 716 - protein, 11 aa, Artificial Sequence
  Peptide Derived from Human Papillomavirus
FVSFLSALKLF

SEQ ID NO: 717 - protein, 11 aa, Artificial Sequence
  Peptide Derived from Human Papillomavirus
GMLDDATTPCW

SEQ ID NO: 718 - protein, 9 aa, Artificial Sequence
  Peptide Derived from Human Papillomavirus
GMSNISDVY

SEQ ID NO: 719 - protein, 10 aa, Artificial Sequence
  Peptide Derived from Human Papillomavirus
GMVMLMLVRF

SEQ ID NO: 720 - protein, 8 aa, Artificial Sequence
  Peptide Derived from Human Papillomavirus
GTGCNGWF

SEQ ID NO: 721 - protein, 9 aa, Artificial Sequence
  Peptide Derived from Human Papillomavirus
GTGCNGWFY

SEQ ID NO: 722 - protein, 11 aa, Artificial Sequence
  Peptide Derived from Human Papillomavirus
GVSFMELIRPF

SEQ ID NO: 723 - protein, 10 aa, Artificial Sequence
  Peptide Derived from Human Papillomavirus
GVTGTVAEGF

SEQ ID NO: 724 - protein, 9 aa, Artificial Sequence
  Peptide Derived from Human Papillomavirus
HLQSLACSW

SEQ ID NO: 725 - protein, 8 aa, Artificial Sequence
  Peptide Derived from Human Papillomavirus
HSFNDTTF

SEQ ID NO: 726 - protein, 9 aa, Artificial Sequence
  Peptide Derived from Human Papillomavirus
HSRLVVFTF

SEQ ID NO: 727 - protein, 11 aa, Artificial Sequence
  Peptide Derived from Human Papillomavirus
IISYANSKSHF

SEQ ID NO: 728 - protein, 11 aa, Artificial Sequence
  Peptide Derived from Human Papillomavirus
ISDVYGETPEW

SEQ ID NO: 729 - protein, 11 aa, Artificial Sequence
  Peptide Derived from Human Papillomavirus
ISFLQGCIISY

SEQ ID NO: 730 - protein, 10 aa, Artificial Sequence
  Peptide Derived from Human Papillomavirus
ISYANSKSHF

SEQ ID NO: 731 - protein, 11 aa, Artificial Sequence
  Peptide Derived from Human Papillomavirus
ISYANSKSHFW

SEQ ID NO: 732 - protein, 10 aa, Artificial Sequence
  Peptide Derived from Human Papillomavirus
KLRSTAAALY

SEQ ID NO: 733 - protein, 11 aa, Artificial Sequence
  Peptide Derived from Human Papillomavirus
KLRSTAAALYW

SEQ ID NO: 734 - protein, 8 aa, Artificial Sequence
  Peptide Derived from Human Papillomavirus
KSFFSRTW

SEQ ID NO: 735 - protein, 11 aa, Artificial Sequence
  Peptide Derived from Human Papillomavirus
KSYFGMSLISF

SEQ ID NO: 736 - protein, 8 aa, Artificial Sequence
  Peptide Derived from Human Papillomavirus
KTAKRRLF

SEQ ID NO: 737 - protein, 10 aa, Artificial Sequence
  Peptide Derived from Human Papillomavirus
KTLLQPYCLY

SEQ ID NO: 738 - protein, 8 aa, Artificial Sequence
  Peptide Derived from Human Papillomavirus
KVSDEGDW

SEQ ID NO: 739 - protein, 8 aa, Artificial Sequence
  Peptide Derived from Human Papillomavirus
LLQPYCLY

SEQ ID NO: 740 - protein, 10 aa, Artificial Sequence
  Peptide Derived from Human Papillomavirus
LSDISSCVDY

SEQ ID NO: 741 - protein, 9 aa, Artificial Sequence
  Peptide Derived from Human Papillomavirus
LSDKNWKSF

SEQ ID NO: 742 - protein, 10 aa, Artificial Sequence
  Peptide Derived from Human Papillomavirus
LSDKNWKSFF

SEQ ID NO: 743 - protein, 9 aa, Artificial Sequence
  Peptide Derived from Human Papillomavirus
LSQMVQWAY

SEQ ID NO: 744 - protein, 10 aa, Artificial Sequence
  Peptide Derived from Human Papillomavirus
LVVFTFPNPF

SEQ ID NO: 745 - protein, 10 aa, Artificial Sequence
  Peptide Derived from Human Papillomavirus
MLDDATTPCW

SEQ ID NO: 746 - protein, 9 aa, Artificial Sequence
  Peptide Derived from Human Papillomavirus
MLGKFKELY

SEQ ID NO: 747 - protein, 8 aa, Artificial Sequence
  Peptide Derived from Human Papillomavirus
MSNISDVY

SEQ ID NO: 748 - protein, 11 aa, Artificial Sequence
  Peptide Derived from Human Papillomavirus
MVDFIDNCNVY

SEQ ID NO: 749 - protein, 9 aa, Artificial Sequence
  Peptide Derived from Human Papillomavirus
MVMLMLVRF

SEQ ID NO: 750 - protein, 10 aa, Artificial Sequence
  Peptide Derived from Human Papillomavirus
NINAGKDDRW

SEQ ID NO: 751 - protein, 10 aa, Artificial Sequence
  Peptide Derived from Human Papillomavirus
NSKTAKRRLF

SEQ ID NO: 752 - protein, 11 aa, Artificial Sequence
  Peptide Derived from Human Papillomavirus
PLSDISSCVDY

SEQ ID NO: 753 - protein, 10 aa, Artificial Sequence
  Peptide Derived from Human Papillomavirus
PVYELSDKNW

SEQ ID NO: 754 - protein, 10 aa, Artificial Sequence
  Peptide Derived from Human Papillomavirus
QSNKSTCTDW

SEQ ID NO: 755 - protein, 8 aa, Artificial Sequence
  Peptide Derived from Human Papillomavirus
QTVLQHSF

SEQ ID NO: 756 - protein, 10 aa, Artificial Sequence
  Peptide Derived from Human Papillomavirus
RLFELPDSGY

SEQ ID NO: 757 - protein, 11 aa, Artificial Sequence
  Peptide Derived from Human Papillomavirus
RLVVFTFPNPF

SEQ ID NO: 758 - protein, 8 aa, Artificial Sequence
  Peptide Derived from Human Papillomavirus
RSTAAALY

SEQ ID NO: 759 - protein, 9 aa, Artificial Sequence
  Peptide Derived from Human Papillomavirus
RSTAAALYW

SEQ ID NO: 760 - protein, 10 aa, Artificial Sequence
  Peptide Derived from Human Papillomavirus
RSTAAALYWY

SEQ ID NO: 761 - protein, 11 aa, Artificial Sequence
  Peptide Derived from Human Papillomavirus
RTGMSNISDVY

SEQ ID NO: 762 - protein, 11 aa, Artificial Sequence
  Peptide Derived from Human Papillomavirus
SSDTGEDMVDF

SEQ ID NO: 763 - protein, 8 aa, Artificial Sequence
  Peptide Derived from Human Papillomavirus
STAAALYW

SEQ ID NO: 764 - protein, 9 aa, Artificial Sequence
  Peptide Derived from Human Papillomavirus
STAAALYWY

SEQ ID NO: 765 - protein, 11 aa, Artificial Sequence
  Peptide Derived from Human Papillomavirus
STCTDWCVAAF

SEQ ID NO: 766 - protein, 9 aa, Artificial Sequence
  Peptide Derived from Human Papillomavirus
TLLQPYCLY

SEQ ID NO: 767 - protein, 11 aa, Artificial Sequence
  Peptide Derived from Human Papillomavirus
TTFDLSQMVQW

SEQ ID NO: 768 - protein, 11 aa, Artificial Sequence
  Peptide Derived from Human Papillomavirus
TTPCWHYIDNY

SEQ ID NO: 769 - protein, 11 aa, Artificial Sequence
  Peptide Derived from Human Papillomavirus
VLQHSFNDTTF

SEQ ID NO: 770 - protein, 9 aa, Artificial Sequence
  Peptide Derived from Human Papillomavirus
VMDDSEIAY

SEQ ID NO: 771 - protein, 11 aa, Artificial Sequence
  Peptide Derived from Human Papillomavirus
VMDDSEIAYKY

SEQ ID NO: 772 - protein, 8 aa, Artificial Sequence
  Peptide Derived from Human Papillomavirus
VMLMLVRF

SEQ ID NO: 773 - protein, 10 aa, Artificial Sequence
  Peptide Derived from Human Papillomavirus
VSFLSALKLF

SEQ ID NO: 774 - protein, 10 aa, Artificial Sequence
  Peptide Derived from Human Papillomavirus
VSFMELIRPF

SEQ ID NO: 775 - protein, 9 aa, Artificial Sequence
  Peptide Derived from Human Papillomavirus
VTGTVAEGF

SEQ ID NO: 776 - protein, 9 aa, Artificial Sequence
  Peptide Derived from Human Papillomavirus
VVFTFPNPF

SEQ ID NO: 777 - protein, 11 aa, Artificial Sequence
  Peptide Derived from Human Papillomavirus
VVFTFPNPFPF

SEQ ID NO: 778 - protein, 9 aa, Artificial Sequence
  Peptide Derived from Human Papillomavirus
YLHSRLVVF

SEQ ID NO: 779 - protein, 11 aa, Artificial Sequence
  Peptide Derived from Human Papillomavirus
YLHSRLVVFTF

SEQ ID NO: 780 - protein, 9 aa, Artificial Sequence
  Peptide Derived from Human Papillomavirus
CLRYRLSKY

SEQ ID NO: 781 - protein, 11 aa, Artificial Sequence
  Peptide Derived from Human Papillomavirus
DSKRLCDHIDY

SEQ ID NO: 782 - protein, 8 aa, Artificial Sequence
  Peptide Derived from Human Papillomavirus
DVHNTMHY

SEQ ID NO: 783 - protein, 11 aa, Artificial Sequence
  Peptide Derived from Human Papillomavirus
DVHNTMHYTNW

SEQ ID NO: 784 - protein, 11 aa, Artificial Sequence
  Peptide Derived from Human Papillomavirus
ESVFSSDEISF

SEQ ID NO: 785 - protein, 8 aa, Artificial Sequence
  Peptide Derived from Human Papillomavirus
ETLNNTEY

SEQ ID NO: 786 - protein, 11 aa, Artificial Sequence
  Peptide Derived from Human Papillomavirus
EVHAGGQVIVF

SEQ ID NO: 787 - protein, 8 aa, Artificial Sequence
  Peptide Derived from Human Papillomavirus
FSSDEISF

SEQ ID NO: 788 - protein, 8 aa, Artificial Sequence
  Peptide Derived from Human Papillomavirus
FTEEAKKY

SEQ ID NO: 789 - protein, 11 aa, Artificial Sequence
  Peptide Derived from Human Papillomavirus
FVNFTEEAKKY

SEQ ID NO: 790 - protein, 10 aa, Artificial Sequence
  Peptide Derived from Human Papillomavirus
HIRLECVLMY

SEQ ID NO: 791 - protein, 8 aa, Artificial Sequence
  Peptide Derived from Human Papillomavirus
HITYFVNF

SEQ ID NO: 792 - protein, 9 aa, Artificial Sequence
  Peptide Derived from Human Papillomavirus
ISTSQRDDF

SEQ ID NO: 793 - protein, 8 aa, Artificial Sequence
  Peptide Derived from Human Papillomavirus
IVFPESVF

SEQ ID NO: 794 - protein, 8 aa, Artificial Sequence
  Peptide Derived from Human Papillomavirus
LSKYKQLY

SEQ ID NO: 795 - protein, 10 aa, Artificial Sequence
  Peptide Derived from Human Papillomavirus
MLETLNNTEY

SEQ ID NO: 796 - protein, 11 aa, Artificial Sequence
  Peptide Derived from Human Papillomavirus
MMLETLNNTEY

SEQ ID NO: 797 - protein, 8 aa, Artificial Sequence
  Peptide Derived from Human Papillomavirus
NILKCLRY

SEQ ID NO: 798 - protein, 9 aa, Artificial Sequence
  Peptide Derived from Human Papillomavirus
NTEYKNEDW

SEQ ID NO: 799 - protein, 8 aa, Artificial Sequence
  Peptide Derived from Human Papillomavirus
NTMHYTNW

SEQ ID NO: 800 - protein, 10 aa, Artificial Sequence
  Peptide Derived from Human Papillomavirus
NTMHYTNWKF

SEQ ID NO: 801 - protein, 9 aa, Artificial Sequence
  Peptide Derived from Human Papillomavirus
NTVSVSTGY

SEQ ID NO: 802 - protein, 11 aa, Artificial Sequence
  Peptide Derived from Human Papillomavirus
NVCQDKILEHY

SEQ ID NO: 803 - protein, 10 aa, Artificial Sequence
  Peptide Derived from Human Papillomavirus
PTGCLKKHGY

SEQ ID NO: 804 - protein, 10 aa, Artificial Sequence
  Peptide Derived from Human Papillomavirus
QLYEQVSSTW

SEQ ID NO: 805 - protein, 10 aa, Artificial Sequence
  Peptide Derived from Human Papillomavirus
QVIVFPESVF

SEQ ID NO: 806 - protein, 8 aa, Artificial Sequence
  Peptide Derived from Human Papillomavirus
QVNCKGIY

SEQ ID NO: 807 - protein, 9 aa, Artificial Sequence
  Peptide Derived from Human Papillomavirus
QVNCKGIYY

SEQ ID NO: 808 - protein, 8 aa, Artificial Sequence
  Peptide Derived from Human Papillomavirus
QVSSTWHW

SEQ ID NO: 809 - protein, 8 aa, Artificial Sequence
  Peptide Derived from Human Papillomavirus
RLCDHIDY

SEQ ID NO: 810 - protein, 9 aa, Artificial Sequence
  Peptide Derived from Human Papillomavirus
RLCDHIDYW

SEQ ID NO: 811 - protein, 8 aa, Artificial Sequence
  Peptide Derived from Human Papillomavirus
RLECVLMY

SEQ ID NO: 812 - protein, 9 aa, Artificial Sequence
  Peptide Derived from Human Papillomavirus
RLSKYKQLY

SEQ ID NO: 813 - protein, 8 aa, Artificial Sequence
  Peptide Derived from Human Papillomavirus
STSQRDDF

SEQ ID NO: 814 - protein, 10 aa, Artificial Sequence
  Peptide Derived from Human Papillomavirus
SVFSSDEISF

SEQ ID NO: 815 - protein, 9 aa, Artificial Sequence
  Peptide Derived from Human Papillomavirus
TMHYTNWKF

SEQ ID NO: 816 - protein, 11 aa, Artificial Sequence
  Peptide Derived from Human Papillomavirus
TMHYTNWKFIY

SEQ ID NO: 817 - protein, 10 aa, Artificial Sequence
  Peptide Derived from Human Papillomavirus
TMQQTSLELY

SEQ ID NO: 818 - protein, 8 aa, Artificial Sequence
  Peptide Derived from Human Papillomavirus
TVSVSTGY

SEQ ID NO: 819 - protein, 9 aa, Artificial Sequence
  Peptide Derived from Human Papillomavirus
VIVFPESVF

SEQ ID NO: 820 - protein, 11 aa, Artificial Sequence
  Peptide Derived from Human Papillomavirus
WTMQQTSLELY

SEQ ID NO: 821 - protein, 10 aa, Artificial Sequence
  Peptide Derived from Human Papillomavirus
YISTSQRDDF

SEQ ID NO: 822 - protein, 8 aa, Artificial Sequence
  Peptide Derived from Human Papillomavirus
YTNWKFIY

SEQ ID NO: 823 - protein, 9 aa, Artificial Sequence
  Peptide Derived from Human Papillomavirus
YVHEGHITY

SEQ ID NO: 824 - protein, 10 aa, Artificial Sequence
  Peptide Derived from Human Papillomavirus
YVHEGHITYF

SEQ ID NO: 825 - protein, 11 aa, Artificial Sequence
  Peptide Derived from Human Papillomavirus
ATLLLLIVILW

SEQ ID NO: 826 - protein, 8 aa, Artificial Sequence
  Peptide Derived from Human Papillomavirus
ATSPLRCF

SEQ ID NO: 827 - protein, 11 aa, Artificial Sequence
  Peptide Derived from Human Papillomavirus
ATSPLRCFCIY

SEQ ID NO: 828 - protein, 8 aa, Artificial Sequence
  Peptide Derived from Human Papillomavirus
CIYVVFIY

SEQ ID NO: 829 - protein, 10 aa, Artificial Sequence
  Peptide Derived from Human Papillomavirus
FLLCFCVLLF

SEQ ID NO: 830 - protein, 9 aa, Artificial Sequence
  Peptide Derived from Human Papillomavirus
FVIHTHASF

SEQ ID NO: 831 - protein, 10 aa, Artificial Sequence
  Peptide Derived from Human Papillomavirus
ISTVSIVLCF

SEQ ID NO: 832 - protein, 9 aa, Artificial Sequence
  Peptide Derived from Human Papillomavirus
IVLCFLLCF

SEQ ID NO: 833 - protein, 9 aa, Artificial Sequence
  Peptide Derived from Human Papillomavirus
LLCFCVLLF

SEQ ID NO: 834 - protein, 8 aa, Artificial Sequence
  Peptide Derived from Human Papillomavirus
LLLIVILW

SEQ ID NO: 835 - protein, 9 aa, Artificial Sequence
  Peptide Derived from Human Papillomavirus
LLLLIVILW

SEQ ID NO: 836 - protein, 8 aa, Artificial Sequence
  Peptide Derived from Human Papillomavirus
LVLSVSVY

SEQ ID NO: 837 - protein, 11 aa, Artificial Sequence
  Peptide Derived from Human Papillomavirus
NISTVSIVLCF

SEQ ID NO: 838 - protein, 11 aa, Artificial Sequence
  Peptide Derived from Human Papillomavirus
PLFVIHTHASF

SEQ ID NO: 839 - protein, 8 aa, Artificial Sequence
  Peptide Derived from Human Papillomavirus
PLRCFCIY

SEQ ID NO: 840 - protein, 11 aa, Artificial Sequence
  Peptide Derived from Human Papillomavirus
PLRCFCIYVVF

SEQ ID NO: 841 - protein, 9 aa, Artificial Sequence
  Peptide Derived from Human Papillomavirus
PLVLSVSVY

SEQ ID NO: 842 - protein, 10 aa, Artificial Sequence
  Peptide Derived from Human Papillomavirus
SIVLCFLLCF

SEQ ID NO: 843 - protein, 9 aa, Artificial Sequence
  Peptide Derived from Human Papillomavirus
STVSIVLCF

SEQ ID NO: 844 - protein, 10 aa, Artificial Sequence
  Peptide Derived from Human Papillomavirus
TLLLLIVILW

SEQ ID NO: 845 - protein, 10 aa, Artificial Sequence
  Peptide Derived from Human Papillomavirus
TSPLRCFCIY

SEQ ID NO: 846 - protein, 8 aa, Artificial Sequence
  Peptide Derived from Human Papillomavirus
TVSIVLCF

SEQ ID NO: 847 - protein, 10 aa, Artificial Sequence
  Peptide Derived from Human Papillomavirus
VIATSPLRCF

SEQ ID NO: 848 - protein, 8 aa, Artificial Sequence
  Peptide Derived from Human Papillomavirus
VIHTHASF

SEQ ID NO: 849 - protein, 8 aa, Artificial Sequence
  Peptide Derived from Human Papillomavirus
VLCFLLCF

SEQ ID NO: 850 - protein, 11 aa, Artificial Sequence
  Peptide Derived from Human Papillomavirus
VSIVLCFLLCF

SEQ ID NO: 851 - protein, 9 aa, Artificial Sequence
  Peptide Derived from Human Papillomavirus
VVFIYIPLF

SEQ ID NO: 852 - protein, 11 aa, Artificial Sequence
  Peptide Derived from Human Papillomavirus
WVIATSPLRCF

SEQ ID NO: 853 - protein, 10 aa, Artificial Sequence
  Peptide Derived from Human Papillomavirus
YVVFIYIPLF

SEQ ID NO: 854 - protein, 11 aa, Artificial Sequence
  Peptide Derived from Human Papillomavirus
CLRFYSKVSEF

SEQ ID NO: 855 - protein, 8 aa, Artificial Sequence
  Peptide Derived from Human Papillomavirus
CTKCLRFY

SEQ ID NO: 856 - protein, 8 aa, Artificial Sequence
  Peptide Derived from Human Papillomavirus
ELRLNCVY

SEQ ID NO: 857 - protein, 10 aa, Artificial Sequence
  Peptide Derived from Human Papillomavirus
ELSSALEIPY

SEQ ID NO: 858 - protein, 9 aa, Artificial Sequence
  Peptide Derived from Human Papillomavirus
ETEVLDFAF

SEQ ID NO: 859 - protein, 8 aa, Artificial Sequence
  Peptide Derived from Human Papillomavirus
FTDLTIVY

SEQ ID NO: 860 - protein, 9 aa, Artificial Sequence
  Peptide Derived from Human Papillomavirus
GVCTKCLRF

SEQ ID NO: 861 - protein, 10 aa, Artificial Sequence
  Peptide Derived from Human Papillomavirus
GVCTKCLRFY

SEQ ID NO: 862 - protein, 8 aa, Artificial Sequence
  Peptide Derived from Human Papillomavirus
HLDKKKRF

SEQ ID NO: 863 - protein, 8 aa, Artificial Sequence
  Peptide Derived from Human Papillomavirus
KVSEFRWY

SEQ ID NO: 864 - protein, 10 aa, Artificial Sequence
  Peptide Derived from Human Papillomavirus
KVSEFRWYRY

SEQ ID NO: 865 - protein, 9 aa, Artificial Sequence
  Peptide Derived from Human Papillomavirus
LSSALEIPY

SEQ ID NO: 866 - protein, 9 aa, Artificial Sequence
  Peptide Derived from Human Papillomavirus
LTETEVLDF

SEQ ID NO: 867 - protein, 11 aa, Artificial Sequence
  Peptide Derived from Human Papillomavirus
LTETEVLDFAF

SEQ ID NO: 868 - protein, 10 aa, Artificial Sequence
  Peptide Derived from Human Papillomavirus
QLTETEVLDF

SEQ ID NO: 869 - protein, 8 aa, Artificial Sequence
  Peptide Derived from Human Papillomavirus
SSALEIPY

SEQ ID NO: 870 - protein, 9 aa, Artificial Sequence
  Peptide Derived from Human Papillomavirus
VSEFRWYRY

SEQ ID NO: 871 - protein, 9 aa, Artificial Sequence
  Peptide Derived from Human Papillomavirus
WTGRCIACW

SEQ ID NO: 872 - protein, 9 aa, Artificial Sequence
  Peptide Derived from Human Papillomavirus
YSKVSEFRW

SEQ ID NO: 873 - protein, 10 aa, Artificial Sequence
  Peptide Derived from Human Papillomavirus
YSKVSEFRWY

SEQ ID NO: 874 - protein, 10 aa, Artificial Sequence
  Peptide Derived from Human Papillomavirus
DTSNYNIVTF

SEQ ID NO: 875 - protein, 8 aa, Artificial Sequence
  Peptide Derived from Human Papillomavirus
ETPTLQDY

SEQ ID NO: 876 - protein, 10 aa, Artificial Sequence
  Peptide Derived from Human Papillomavirus
ILQELLMGSF

SEQ ID NO: 877 - protein, 11 aa, Artificial Sequence
  Peptide Derived from Human Papillomavirus
RILQELLMGSF

SEQ ID NO: 878 - protein, 9 aa, Artificial Sequence
  Peptide Derived from Human Papillomavirus
TSNYNIVTF

SEQ ID NO: 879 - protein, 9 aa, Artificial Sequence
  Peptide Derived from Human Papillomavirus
AIANSDTTF

SEQ ID NO: 880 - protein, 8 aa, Artificial Sequence
  Peptide Derived from Human Papillomavirus
AILEDWNF

SEQ ID NO: 881 - protein, 8 aa, Artificial Sequence
  Peptide Derived from Human Papillomavirus
ATLANSTY

SEQ ID NO: 882 - protein, 9 aa, Artificial Sequence
  Peptide Derived from Human Papillomavirus
ATLANSTYF

SEQ ID NO: 883 - protein, 9 aa, Artificial Sequence
  Peptide Derived from Human Papillomavirus
DICNSICKY

SEQ ID NO: 884 - protein, 11 aa, Artificial Sequence
  Peptide Derived from Human Papillomavirus
DLDQFPLGRKF

SEQ ID NO: 885 - protein, 8 aa, Artificial Sequence
  Peptide Derived from Human Papillomavirus
DTENSNRY

SEQ ID NO: 886 - protein, 9 aa, Artificial Sequence
  Peptide Derived from Human Papillomavirus
DTGFGAMDF

SEQ ID NO: 887 - protein, 9 aa, Artificial Sequence
  Peptide Derived from Human Papillomavirus
DTTFKSSNF

SEQ ID NO: 888 - protein, 8 aa, Artificial Sequence
  Peptide Derived from Human Papillomavirus
ESVPTDLY

SEQ ID NO: 889 - protein, 8 aa, Artificial Sequence
  Peptide Derived from Human Papillomavirus
EVNLKEKF

SEQ ID NO: 890 - protein, 8 aa, Artificial Sequence
  Peptide Derived from Human Papillomavirus
FSADLDQF

SEQ ID NO: 891 - protein, 9 aa, Artificial Sequence
  Peptide Derived from Human Papillomavirus
GICWGNQLF

SEQ ID NO: 892 - protein, 11 aa, Artificial Sequence
  Peptide Derived from Human Papillomavirus
GISGHPLLNKF

SEQ ID NO: 893 - protein, 9 aa, Artificial Sequence
  Peptide Derived from Human Papillomavirus
GSLEDTYRF

SEQ ID NO: 894 - protein, 11 aa, Artificial Sequence
  Peptide Derived from Human Papillomavirus
GSMVTSDAQIF

SEQ ID NO: 895 - protein, 11 aa, Artificial Sequence
  Peptide Derived from Human Papillomavirus
GSTATLANSTY

SEQ ID NO: 896 - protein, 11 aa, Artificial Sequence
  Peptide Derived from Human Papillomavirus
HSMNPAILEDW

SEQ ID NO: 897 - protein, 10 aa, Artificial Sequence
  Peptide Derived from Human Papillomavirus
ISGHPLLNKF

SEQ ID NO: 898 - protein, 10 aa, Artificial Sequence
  Peptide Derived from Human Papillomavirus
ITLSADIMTY

SEQ ID NO: 899 - protein, 11 aa, Artificial Sequence
  Peptide Derived from Human Papillomavirus
IVVPKVSGLQY

SEQ ID NO: 900 - protein, 11 aa, Artificial Sequence
  Peptide Derived from Human Papillomavirus
KITLSADIMTY

SEQ ID NO: 901 - protein, 8 aa, Artificial Sequence
  Peptide Derived from Human Papillomavirus
KSSNFKEY

SEQ ID NO: 902 - protein, 10 aa, Artificial Sequence
  Peptide Derived from Human Papillomavirus
KVSGLQYRVF

SEQ ID NO: 903 - protein, 8 aa, Artificial Sequence
  Peptide Derived from Human Papillomavirus
KVVSTDEY

SEQ ID NO: 904 - protein, 8 aa, Artificial Sequence
  Peptide Derived from Human Papillomavirus
LLTVGHPY

SEQ ID NO: 905 - protein, 9 aa, Artificial Sequence
  Peptide Derived from Human Papillomavirus
LLTVGHPYY

SEQ ID NO: 906 - protein, 8 aa, Artificial Sequence
  Peptide Derived from Human Papillomavirus
LSADIMTY

SEQ ID NO: 907 - protein, 8 aa, Artificial Sequence
  Peptide Derived from Human Papillomavirus
LTVGHPYY

SEQ ID NO: 908 - protein, 11 aa, Artificial Sequence
  Peptide Derived from Human Papillomavirus
MVAEPYGDTLF

SEQ ID NO: 909 - protein, 11 aa, Artificial Sequence
  Peptide Derived from Human Papillomavirus
MVDTGFGAMDF

SEQ ID NO: 910 - protein, 9 aa, Artificial Sequence
  Peptide Derived from Human Papillomavirus
MVTSDAQIF

SEQ ID NO: 911 - protein, 11 aa, Artificial Sequence
  Peptide Derived from Human Papillomavirus
NSDTTFKSSNF

SEQ ID NO: 912 - protein, 9 aa, Artificial Sequence
  Peptide Derived from Human Papillomavirus
NSICKYPDY

SEQ ID NO: 913 - protein, 11 aa, Artificial Sequence
  Peptide Derived from Human Papillomavirus
PLDICNSICKY

SEQ ID NO: 914 - protein, 9 aa, Artificial Sequence
  Peptide Derived from Human Papillomavirus
PSGSLEDTY

SEQ ID NO: 915 - protein, 11 aa, Artificial Sequence
  Peptide Derived from Human Papillomavirus
PSGSLEDTYRF

SEQ ID NO: 916 - protein, 11 aa, Artificial Sequence
  Peptide Derived from Human Papillomavirus
PVSKVVSTDEY

SEQ ID NO: 917 - protein, 8 aa, Artificial Sequence
  Peptide Derived from Human Papillomavirus
QIFNKPYW

SEQ ID NO: 918 - protein, 8 aa, Artificial Sequence
  Peptide Derived from Human Papillomavirus
QMFVRHFF

SEQ ID NO: 919 - protein, 9 aa, Artificial Sequence
  Peptide Derived from Human Papillomavirus
RLLTVGHPY

SEQ ID NO: 920 - protein, 10 aa, Artificial Sequence
  Peptide Derived from Human Papillomavirus
RLLTVGHPYY

SEQ ID NO: 921 - protein, 8 aa, Artificial Sequence
  Peptide Derived from Human Papillomavirus
RLPDPNKF

SEQ ID NO: 922 - protein, 10 aa, Artificial Sequence
  Peptide Derived from Human Papillomavirus
RLPDPNKFGF

SEQ ID NO: 923 - protein, 10 aa, Artificial Sequence
  Peptide Derived from Human Papillomavirus
RVRLPDPNKF

SEQ ID NO: 924 - protein, 8 aa, Artificial Sequence
  Peptide Derived from Human Papillomavirus
SICKYPDY

SEQ ID NO: 925 - protein, 8 aa, Artificial Sequence
  Peptide Derived from Human Papillomavirus
SLEDTYRF

SEQ ID NO: 926 - protein, 11 aa, Artificial Sequence
  Peptide Derived from Human Papillomavirus
SLWRPSEATVY

SEQ ID NO: 927 - protein, 10 aa, Artificial Sequence
  Peptide Derived from Human Papillomavirus
SMNPAILEDW

SEQ ID NO: 928 - protein, 10 aa, Artificial Sequence
  Peptide Derived from Human Papillomavirus
SMVTSDAQIF

SEQ ID NO: 929 - protein, 10 aa, Artificial Sequence
  Peptide Derived from Human Papillomavirus
STATLANSTY

SEQ ID NO: 930 - protein, 11 aa, Artificial Sequence
  Peptide Derived from Human Papillomavirus
STATLANSTYF

SEQ ID NO: 931 - protein, 8 aa, Artificial Sequence
  Peptide Derived from Human Papillomavirus
TLANSTYF

SEQ ID NO: 932 - protein, 9 aa, Artificial Sequence
  Peptide Derived from Human Papillomavirus
TLSADIMTY

SEQ ID NO: 933 - protein, 11 aa, Artificial Sequence
  Peptide Derived from Human Papillomavirus
TSDAQIFNKPY

SEQ ID NO: 934 - protein, 8 aa, Artificial Sequence
  Peptide Derived from Human Papillomavirus
TTFKSSNF

SEQ ID NO: 935 - protein, 11 aa, Artificial Sequence
  Peptide Derived from Human Papillomavirus
TTFKSSNFKEY

SEQ ID NO: 936 - protein, 11 aa, Artificial Sequence
  Peptide Derived from Human Papillomavirus
TVGESVPTDLY

SEQ ID NO: 937 - protein, 9 aa, Artificial Sequence
  Peptide Derived from Human Papillomavirus
VSGLQYRVF

SEQ ID NO: 938 - protein, 10 aa, Artificial Sequence
  Peptide Derived from Human Papillomavirus
VSKVVSTDEY

SEQ ID NO: 939 - protein, 8 aa, Artificial Sequence
  Peptide Derived from Human Papillomavirus
VTRTNIYY

SEQ ID NO: 940 - protein, 8 aa, Artificial Sequence
  Peptide Derived from Human Papillomavirus
VTSDAQIF

SEQ ID NO: 941 - protein, 10 aa, Artificial Sequence
  Peptide Derived from Human Papillomavirus
VVPKVSGLQY

SEQ ID NO: 942 - protein, 9 aa, Artificial Sequence
  Peptide Derived from Human Papillomavirus
YLKMVAEPY

SEQ ID NO: 943 - protein, 8 aa, Artificial Sequence
  Peptide Derived from Human Papillomavirus
YLRHGEEF

SEQ ID NO: 944 - protein, 8 aa, Artificial Sequence
  Peptide Derived from Human Papillomavirus
YLRREQMF

SEQ ID NO: 945 - protein, 8 aa, Artificial Sequence
  Peptide Derived from Human Papillomavirus
YVTRTNIY

SEQ ID NO: 946 - protein, 9 aa, Artificial Sequence
  Peptide Derived from Human Papillomavirus
YVTRTNIYY

SEQ ID NO: 947 - protein, 11 aa, Artificial Sequence
  Peptide Derived from Human Papillomavirus
ALTSRRNTVRY

SEQ ID NO: 948 - protein, 9 aa, Artificial Sequence
  Peptide Derived from Human Papillomavirus
ATIGARVHY

SEQ ID NO: 949 - protein, 10 aa, Artificial Sequence
  Peptide Derived from Human Papillomavirus
ATIGARVHYY

SEQ ID NO: 950 - protein, 11 aa, Artificial Sequence
  Peptide Derived from Human Papillomavirus
ATIGARVHYYY

SEQ ID NO: 951 - protein, 11 aa, Artificial Sequence
  Peptide Derived from Human Papillomavirus
AVQSTSAVSAY

SEQ ID NO: 952 - protein, 8 aa, Artificial Sequence
  Peptide Derived from Human Papillomavirus
DIYADTDF

SEQ ID NO: 953 - protein, 10 aa, Artificial Sequence
  Peptide Derived from Human Papillomavirus
ETVNAEESLY

SEQ ID NO: 954 - protein, 11 aa, Artificial Sequence
  Peptide Derived from Human Papillomavirus
ETVNAEESLYF

SEQ ID NO: 955 - protein, 11 aa, Artificial Sequence
  Peptide Derived from Human Papillomavirus
FLSAPKQLITY

SEQ ID NO: 956 - protein, 8 aa, Artificial Sequence
  Peptide Derived from Human Papillomavirus
FVDGGDFY

SEQ ID NO: 957 - protein, 11 aa, Artificial Sequence
  Peptide Derived from Human Papillomavirus
GLYDIYADTDF

SEQ ID NO: 958 - protein, 10 aa, Artificial Sequence
  Peptide Derived from Human Papillomavirus
GSGTGGRTGY

SEQ ID NO: 959 - protein, 8 aa, Artificial Sequence
  Peptide Derived from Human Papillomavirus
GTGGRTGY

SEQ ID NO: 960 - protein, 11 aa, Artificial Sequence
  Peptide Derived from Human Papillomavirus
GVRRPARLGLY

SEQ ID NO: 961 - protein, 11 aa, Artificial Sequence
  Peptide Derived from Human Papillomavirus
HTTIADQILRY

SEQ ID NO: 962 - protein, 10 aa, Artificial Sequence
  Peptide Derived from Human Papillomavirus
ILRYGSMGVF

SEQ ID NO: 963 - protein, 11 aa, Artificial Sequence
  Peptide Derived from Human Papillomavirus
ILRYGSMGVFF

SEQ ID NO: 964 - protein, 8 aa, Artificial Sequence
  Peptide Derived from Human Papillomavirus
ITYENPAY

SEQ ID NO: 965 - protein, 9 aa, Artificial Sequence
  Peptide Derived from Human Papillomavirus
LITYENPAY

SEQ ID NO: 966 - protein, 10 aa, Artificial Sequence
  Peptide Derived from Human Papillomavirus
LSAPKQLITY

SEQ ID NO: 967 - protein, 11 aa, Artificial Sequence
  Peptide Derived from Human Papillomavirus
LSSSSISTHNY

SEQ ID NO: 968 - protein, 10 aa, Artificial Sequence
  Peptide Derived from Human Papillomavirus
LSTGFDIPIF

SEQ ID NO: 969 - protein, 10 aa, Artificial Sequence
  Peptide Derived from Human Papillomavirus
LTSRRNTVRY

SEQ ID NO: 970 - protein, 11 aa, Artificial Sequence
  Peptide Derived from Human Papillomavirus
MLKRRRKRVSY

SEQ ID NO: 971 - protein, 8 aa, Artificial Sequence
  Peptide Derived from Human Papillomavirus
NIAPDPDF

SEQ ID NO: 972 - protein, 10 aa, Artificial Sequence
  Peptide Derived from Human Papillomavirus
NTTVPLSTGF

SEQ ID NO: 973 - protein, 10 aa, Artificial Sequence
  Peptide Derived from Human Papillomavirus
PIEHAPTQVF

SEQ ID NO: 974 - protein, 11 aa, Artificial Sequence
  Peptide Derived from Human Papillomavirus
PIPHPPTTSGF

SEQ ID NO: 975 - protein, 11 aa, Artificial Sequence
  Peptide Derived from Human Papillomavirus
PLSTGFDIPIF

SEQ ID NO: 976 - protein, 9 aa, Artificial Sequence
  Peptide Derived from Human Papillomavirus
PTTPQVSIF

SEQ ID NO: 977 - protein, 11 aa, Artificial Sequence
  Peptide Derived from Human Papillomavirus
QILRYGSMGVF

SEQ ID NO: 978 - protein, 10 aa, Artificial Sequence
  Peptide Derived from Human Papillomavirus
QLITYENPAY

SEQ ID NO: 979 - protein, 9 aa, Artificial Sequence
  Peptide Derived from Human Papillomavirus
QSTSAVSAY

SEQ ID NO: 980 - protein, 9 aa, Artificial Sequence
  Peptide Derived from Human Papillomavirus
QVKVIDPTF

SEQ ID NO: 981 - protein, 11 aa, Artificial Sequence
  Peptide Derived from Human Papillomavirus
QVSIFVDGGDF

SEQ ID NO: 982 - protein, 11 aa, Artificial Sequence
  Peptide Derived from Human Papillomavirus
RTKRASATQLY

SEQ ID NO: 983 - protein, 9 aa, Artificial Sequence
  Peptide Derived from Human Papillomavirus
SIFVDGGDF

SEQ ID NO: 984 - protein, 10 aa, Artificial Sequence
  Peptide Derived from Human Papillomavirus
SIFVDGGDFY

SEQ ID NO: 985 - protein, 8 aa, Artificial Sequence
  Peptide Derived from Human Papillomavirus
SSISTHNY

SEQ ID NO: 986 - protein, 9 aa, Artificial Sequence
  Peptide Derived from Human Papillomavirus
SSSISTHNY

SEQ ID NO: 987 - protein, 10 aa, Artificial Sequence
  Peptide Derived from Human Papillomavirus
SSSSISTHNY

SEQ ID NO: 988 - protein, 9 aa, Artificial Sequence
  Peptide Derived from Human Papillomavirus
STGFDIPIF

SEQ ID NO: 989 - protein, 8 aa, Artificial Sequence
  Peptide Derived from Human Papillomavirus
STHENPTF

SEQ ID NO: 990 - protein, 8 aa, Artificial Sequence
  Peptide Derived from Human Papillomavirus
STLNDGLY

SEQ ID NO: 991 - protein, 11 aa, Artificial Sequence
  Peptide Derived from Human Papillomavirus
STLNDGLYDIY

SEQ ID NO: 992 - protein, 8 aa, Artificial Sequence
  Peptide Derived from Human Papillomavirus
STSAVSAY

SEQ ID NO: 993 - protein, 10 aa, Artificial Sequence
  Peptide Derived from Human Papillomavirus
SVSTHENPTF

SEQ ID NO: 994 - protein, 9 aa, Artificial Sequence
  Peptide Derived from Human Papillomavirus
TIADQILRY

SEQ ID NO: 995 - protein, 8 aa, Artificial Sequence
  Peptide Derived from Human Papillomavirus
TIGARVHY

SEQ ID NO: 996 - protein, 9 aa, Artificial Sequence
  Peptide Derived from Human Papillomavirus
TIGARVHYY

SEQ ID NO: 997 - protein, 10 aa, Artificial Sequence
  Peptide Derived from Human Papillomavirus
TIGARVHYYY

SEQ ID NO: 998 - protein, 10 aa, Artificial Sequence
  Peptide Derived from Human Papillomavirus
TLNDGLYDIY

SEQ ID NO: 999 - protein, 11 aa, Artificial Sequence
  Peptide Derived from Human Papillomavirus
TSHNIAPDPDF

SEQ ID NO: 1000 - protein, 9 aa, Artificial Sequence
  Peptide Derived from Human Papillomavirus
TSRRNTVRY

SEQ ID NO: 1001 - protein, 9 aa, Artificial Sequence
  Peptide Derived from Human Papillomavirus
TSTLNDGLY

SEQ ID NO: 1002 - protein, 11 aa, Artificial Sequence
  Peptide Derived from Human Papillomavirus
TSVSTHENPTF

SEQ ID NO: 1003 - protein, 10 aa, Artificial Sequence
  Peptide Derived from Human Papillomavirus
TTIADQILRY

SEQ ID NO: 1004 - protein, 8 aa, Artificial Sequence
  Peptide Derived from Human Papillomavirus
TTPQVSIF

SEQ ID NO: 1005 - protein, 10 aa, Artificial Sequence
  Peptide Derived from Human Papillomavirus
TTSTLNDGLY

SEQ ID NO: 1006 - protein, 11 aa, Artificial Sequence
  Peptide Derived from Human Papillomavirus
TTTSTLNDGLY

SEQ ID NO: 1007 - protein, 9 aa, Artificial Sequence
  Peptide Derived from Human Papillomavirus
TTVPLSTGF

SEQ ID NO: 1008 - protein, 9 aa, Artificial Sequence
  Peptide Derived from Human Papillomavirus
TVNAEESLY

SEQ ID NO: 1009 - protein, 10 aa, Artificial Sequence
  Peptide Derived from Human Papillomavirus
TVNAEESLYF

SEQ ID NO: 1010 - protein, 8 aa, Artificial Sequence
  Peptide Derived from Human Papillomavirus
TVPLSTGF

SEQ ID NO: 1011 - protein, 10 aa, Artificial Sequence
  Peptide Derived from Human Papillomavirus
VSIFVDGGDF

SEQ ID NO: 1012 - protein, 11 aa, Artificial Sequence
  Peptide Derived from Human Papillomavirus
VSIFVDGGDFY

SEQ ID NO: 1013 - protein, 9 aa, Artificial Sequence
  Peptide Derived from Human Papillomavirus
VSTHENPTF

SEQ ID NO: 1014 - protein, 10 aa, Artificial Sequence
  Peptide Derived from Human Papillomavirus
AINDENWKSF

SEQ ID NO: 1015 - protein, 11 aa, Artificial Sequence
  Peptide Derived from Human Papillomavirus
AINDENWKSFF

SEQ ID NO: 1016 - protein, 9 aa, Artificial Sequence
  Peptide Derived from Human Papillomavirus
AVCALKRKF

SEQ ID NO: 1017 - protein, 9 aa, Artificial Sequence
  Peptide Derived from Human Papillomavirus
CTDWCITGY

SEQ ID NO: 1018 - protein, 8 aa, Artificial Sequence
  Peptide Derived from Human Papillomavirus
CVNSKSHF

SEQ ID NO: 1019 - protein, 9 aa, Artificial Sequence
  Peptide Derived from Human Papillomavirus
CVNSKSHFW

SEQ ID NO: 1020 - protein, 8 aa, Artificial Sequence
  Peptide Derived from Human Papillomavirus
DLSEMVQW

SEQ ID NO: 1021 - protein, 10 aa, Artificial Sequence
  Peptide Derived from Human Papillomavirus
DLSEMVQWAY

SEQ ID NO: 1022 - protein, 8 aa, Artificial Sequence
  Peptide Derived from Human Papillomavirus
DSDIAYYY

SEQ ID NO: 1023 - protein, 9 aa, Artificial Sequence
  Peptide Derived from Human Papillomavirus
DSGTDLLEF

SEQ ID NO: 1024 - protein, 9 aa, Artificial Sequence
  Peptide Derived from Human Papillomavirus
DSNSNAAAF

SEQ ID NO: 1025 - protein, 9 aa, Artificial Sequence
  Peptide Derived from Human Papillomavirus
DTEAARALF

SEQ ID NO: 1026 - protein, 9 aa, Artificial Sequence
  Peptide Derived from Human Papillomavirus
DVQGTTPEW

SEQ ID NO: 1027 - protein, 9 aa, Artificial Sequence
  Peptide Derived from Human Papillomavirus
DVTPISWTY

SEQ ID NO: 1028 - protein, 10 aa, Artificial Sequence
  Peptide Derived from Human Papillomavirus
ELTDDSDIAY

SEQ ID NO: 1029 - protein, 11 aa, Artificial Sequence
  Peptide Derived from Human Papillomavirus
ELTDDSDIAYY

SEQ ID NO: 1030 - protein, 8 aa, Artificial Sequence
  Peptide Derived from Human Papillomavirus
FLGAFKKF

SEQ ID NO: 1031 - protein, 8 aa, Artificial Sequence
  Peptide Derived from Human Papillomavirus
FMELVRPF

SEQ ID NO: 1032 - protein, 8 aa, Artificial Sequence
  Peptide Derived from Human Papillomavirus
FTAFLGAF

SEQ ID NO: 1033 - protein, 11 aa, Artificial Sequence
  Peptide Derived from Human Papillomavirus
FTAFLGAFKKF

SEQ ID NO: 1034 - protein, 10 aa, Artificial Sequence
  Peptide Derived from Human Papillomavirus
GIIILLLIRF

SEQ ID NO: 1035 - protein, 11 aa, Artificial Sequence
  Peptide Derived from Human Papillomavirus
GISFMELVRPF

SEQ ID NO: 1036 - protein, 8 aa, Artificial Sequence
  Peptide Derived from Human Papillomavirus
GMGCTGWF

SEQ ID NO: 1037 - protein, 11 aa, Artificial Sequence
  Peptide Derived from Human Papillomavirus
GMIDDVTPISW

SEQ ID NO: 1038 - protein, 8 aa, Artificial Sequence
  Peptide Derived from Human Papillomavirus
GTDSRWPY

SEQ ID NO: 1039 - protein, 8 aa, Artificial Sequence
  Peptide Derived from Human Papillomavirus
HSFNDNIF

SEQ ID NO: 1040 - protein, 9 aa, Artificial Sequence
  Peptide Derived from Human Papillomavirus
HSRLTVFEF

SEQ ID NO: 1041 - protein, 11 aa, Artificial Sequence
  Peptide Derived from Human Papillomavirus
HSSNTKANILY

SEQ ID NO: 1042 - protein, 9 aa, Artificial Sequence
  Peptide Derived from Human Papillomavirus
IIILLLIRF

SEQ ID NO: 1043 - protein, 8 aa, Artificial Sequence
  Peptide Derived from Human Papillomavirus
IILLLIRF

SEQ ID NO: 1044 - protein, 9 aa, Artificial Sequence
  Peptide Derived from Human Papillomavirus
ILYKFKEAY

SEQ ID NO: 1045 - protein, 10 aa, Artificial Sequence
  Peptide Derived from Human Papillomavirus
ISCVNSKSHF

SEQ ID NO: 1046 - protein, 11 aa, Artificial Sequence
  Peptide Derived from Human Papillomavirus
ISCVNSKSHFW

SEQ ID NO: 1047 - protein, 11 aa, Artificial Sequence
  Peptide Derived from Human Papillomavirus
ISDVQGTTPEW

SEQ ID NO: 1048 - protein, 10 aa, Artificial Sequence
  Peptide Derived from Human Papillomavirus
ISFMELVRPF

SEQ ID NO: 1049 - protein, 9 aa, Artificial Sequence
  Peptide Derived from Human Papillomavirus
ISWTYIDDY

SEQ ID NO: 1050 - protein, 10 aa, Artificial Sequence
  Peptide Derived from Human Papillomavirus
KIDELEDSGY

SEQ ID NO: 1051 - protein, 10 aa, Artificial Sequence
  Peptide Derived from Human Papillomavirus
KLRSQTCALY

SEQ ID NO: 1052 - protein, 11 aa, Artificial Sequence
  Peptide Derived from Human Papillomavirus
KLRSQTCALYW

SEQ ID NO: 1053 - protein, 10 aa, Artificial Sequence
  Peptide Derived from Human Papillomavirus
KSDKTSCTDW

SEQ ID NO: 1054 - protein, 8 aa, Artificial Sequence
  Peptide Derived from Human Papillomavirus
KSFFSRTW

SEQ ID NO: 1055 - protein, 11 aa, Artificial Sequence
  Peptide Derived from Human Papillomavirus
KSYFGMSLIQF

SEQ ID NO: 1056 - protein, 8 aa, Artificial Sequence
  Peptide Derived from Human Papillomavirus
KTNDGGNW

SEQ ID NO: 1057 - protein, 10 aa, Artificial Sequence
  Peptide Derived from Human Papillomavirus
KVLIKQHSLY

SEQ ID NO: 1058 - protein, 8 aa, Artificial Sequence
  Peptide Derived from Human Papillomavirus
LIKQHSLY

SEQ ID NO: 1059 - protein, 9 aa, Artificial Sequence
  Peptide Derived from Human Papillomavirus
LLRYQNIEF

SEQ ID NO: 1060 - protein, 9 aa, Artificial Sequence
  Peptide Derived from Human Papillomavirus
LSEMVQWAY

SEQ ID NO: 1061 - protein, 9 aa, Artificial Sequence
  Peptide Derived from Human Papillomavirus
LTDDSDIAY

SEQ ID NO: 1062 - protein, 10 aa, Artificial Sequence
  Peptide Derived from Human Papillomavirus
LTDDSDIAYY

SEQ ID NO: 1063 - protein, 11 aa, Artificial Sequence
  Peptide Derived from Human Papillomavirus
LTDDSDIAYYY

SEQ ID NO: 1064 - protein, 10 aa, Artificial Sequence
  Peptide Derived from Human Papillomavirus
LTVFEFKNPF

SEQ ID NO: 1065 - protein, 8 aa, Artificial Sequence
  Peptide Derived from Human Papillomavirus
LTVLQHSF

SEQ ID NO: 1066 - protein, 10 aa, Artificial Sequence
  Peptide Derived from Human Papillomavirus
MIDDVTPISW

SEQ ID NO: 1067 - protein, 11 aa, Artificial Sequence
  Peptide Derived from Human Papillomavirus
NIEFTAFLGAF

SEQ ID NO: 1068 - protein, 11 aa, Artificial Sequence
  Peptide Derived from Human Papillomavirus
NIFDLSEMVQW

SEQ ID NO: 1069 - protein, 10 aa, Artificial Sequence
  Peptide Derived from Human Papillomavirus
NILYKFKEAY

SEQ ID NO: 1070 - protein, 8 aa, Artificial Sequence
  Peptide Derived from Human Papillomavirus
NTKANILY

SEQ ID NO: 1071 - protein, 10 aa, Artificial Sequence
  Peptide Derived from Human Papillomavirus
NTKANILYKF

SEQ ID NO: 1072 - protein, 10 aa, Artificial Sequence
  Peptide Derived from Human Papillomavirus
NTNAGTDSRW

SEQ ID NO: 1073 - protein, 10 aa, Artificial Sequence
  Peptide Derived from Human Papillomavirus
PISWTYIDDY

SEQ ID NO: 1074 - protein, 8 aa, Artificial Sequence
  Peptide Derived from Human Papillomavirus
PIVQLLRY

SEQ ID NO: 1075 - protein, 10 aa, Artificial Sequence
  Peptide Derived from Human Papillomavirus
PVYAINDENW

SEQ ID NO: 1076 - protein, 10 aa, Artificial Sequence
  Peptide Derived from Human Papillomavirus
QLLRYQNIEF

SEQ ID NO: 1077 - protein, 8 aa, Artificial Sequence
  Peptide Derived from Human Papillomavirus
QTCALYWF

SEQ ID NO: 1078 - protein, 11 aa, Artificial Sequence
  Peptide Derived from Human Papillomavirus
RLTVFEFKNPF

SEQ ID NO: 1079 - protein, 9 aa, Artificial Sequence
  Peptide Derived from Human Papillomavirus
RLTVLQHSF

SEQ ID NO: 1080 - protein, 8 aa, Artificial Sequence
  Peptide Derived from Human Papillomavirus
RSQTCALY

SEQ ID NO: 1081 - protein, 9 aa, Artificial Sequence
  Peptide Derived from Human Papillomavirus
RSQTCALYW

SEQ ID NO: 1082 - protein, 10 aa, Artificial Sequence
  Peptide Derived from Human Papillomavirus
RSQTCALYWF

SEQ ID NO: 1083 - protein, 10 aa, Artificial Sequence
  Peptide Derived from Human Papillomavirus
SINKNKECTY

SEQ ID NO: 1084 - protein, 10 aa, Artificial Sequence
  Peptide Derived from Human Papillomavirus
SSNTKANILY

SEQ ID NO: 1085 - protein, 11 aa, Artificial Sequence
  Peptide Derived from Human Papillomavirus
TSCTDWCITGY

SEQ ID NO: 1086 - protein, 11 aa, Artificial Sequence
  Peptide Derived from Human Papillomavirus
TSINKNKECTY

SEQ ID NO: 1087 - protein, 9 aa, Artificial Sequence
  Peptide Derived from Human Papillomavirus
TVFEFKNPF

SEQ ID NO: 1088 - protein, 11 aa, Artificial Sequence
  Peptide Derived from Human Papillomavirus
TVFEFKNPFPF

SEQ ID NO: 1089 - protein, 11 aa, Artificial Sequence
  Peptide Derived from Human Papillomavirus
VISCVNSKSHF

SEQ ID NO: 1090 - protein, 9 aa, Artificial Sequence
  Peptide Derived from Human Papillomavirus
VLIKQHSLY

SEQ ID NO: 1091 - protein, 11 aa, Artificial Sequence
  Peptide Derived from Human Papillomavirus
VLQHSFNDNIF

SEQ ID NO: 1092 - protein, 8 aa, Artificial Sequence
  Peptide Derived from Human Papillomavirus
VTPISWTY

SEQ ID NO: 1093 - protein, 9 aa, Artificial Sequence
  Peptide Derived from Human Papillomavirus
YLHSRLTVF

SEQ ID NO: 1094 - protein, 11 aa, Artificial Sequence
  Peptide Derived from Human Papillomavirus
YLHSRLTVFEF

SEQ ID NO: 1095 - protein, 10 aa, Artificial Sequence
  Peptide Derived from Human Papillomavirus
ALETLSKSQY

SEQ ID NO: 1096 - protein, 11 aa, Artificial Sequence
  Peptide Derived from Human Papillomavirus
ALLYTAKQMGF

SEQ ID NO: 1097 - protein, 10 aa, Artificial Sequence
  Peptide Derived from Human Papillomavirus
AVQEKILDLY

SEQ ID NO: 1098 - protein, 9 aa, Artificial Sequence
  Peptide Derived from Human Papillomavirus
CLRYRLKPY

SEQ ID NO: 1099 - protein, 10 aa, Artificial Sequence
  Peptide Derived from Human Papillomavirus
CTMVTGKVDY

SEQ ID NO: 1100 - protein, 9 aa, Artificial Sequence
  Peptide Derived from Human Papillomavirus
DLPSQIEHW

SEQ ID NO: 1101 - protein, 10 aa, Artificial Sequence
  Peptide Derived from Human Papillomavirus
DTAQPLTKLF

SEQ ID NO: 1102 - protein, 10 aa, Artificial Sequence
  Peptide Derived from Human Papillomavirus
ELYSSMSSTW

SEQ ID NO: 1103 - protein, 10 aa, Artificial Sequence
  Peptide Derived from Human Papillomavirus
ESNSLKCLRY

SEQ ID NO: 1104 - protein, 8 aa, Artificial Sequence
  Peptide Derived from Human Papillomavirus
ETLSKSQY

SEQ ID NO: 1105 - protein, 11 aa, Artificial Sequence
  Peptide Derived from Human Papillomavirus
EVWLCEPPKCF

SEQ ID NO: 1106 - protein, 10 aa, Artificial Sequence
  Peptide Derived from Human Papillomavirus
FVTEQQQQMF

SEQ ID NO: 1107 - protein, 11 aa, Artificial Sequence
  Peptide Derived from Human Papillomavirus
KLIRMECALLY

SEQ ID NO: 1108 - protein, 9 aa, Artificial Sequence
  Peptide Derived from Human Papillomavirus
KSQYSTSQW

SEQ ID NO: 1109 - protein, 11 aa, Artificial Sequence
  Peptide Derived from Human Papillomavirus
KTDLPSQIEHW

SEQ ID NO: 1110 - protein, 8 aa, Artificial Sequence
  Peptide Derived from Human Papillomavirus
KVDYIGMY

SEQ ID NO: 1111 - protein, 9 aa, Artificial Sequence
  Peptide Derived from Human Papillomavirus
KVDYIGMYY

SEQ ID NO: 1112 - protein, 10 aa, Artificial Sequence
  Peptide Derived from Human Papillomavirus
LIRMECALLY

SEQ ID NO: 1113 - protein, 9 aa, Artificial Sequence
  Peptide Derived from Human Papillomavirus
LLASKTKAF

SEQ ID NO: 1114 - protein, 10 aa, Artificial Sequence
  Peptide Derived from Human Papillomavirus
LLYTAKQMGF

SEQ ID NO: 1115 - protein, 11 aa, Artificial Sequence
  Peptide Derived from Human Papillomavirus
LSKSQYSTSQW

SEQ ID NO: 1116 - protein, 8 aa, Artificial Sequence
  Peptide Derived from Human Papillomavirus
MVTGKVDY

SEQ ID NO: 1117 - protein, 11 aa, Artificial Sequence
  Peptide Derived from Human Papillomavirus
NSKNGIVTVTF

SEQ ID NO: 1118 - protein, 8 aa, Artificial Sequence
  Peptide Derived from Human Papillomavirus
NSLKCLRY

SEQ ID NO: 1119 - protein, 8 aa, Artificial Sequence
  Peptide Derived from Human Papillomavirus
NTMDYTNW

SEQ ID NO: 1120 - protein, 11 aa, Artificial Sequence
  Peptide Derived from Human Papillomavirus
PSLLASKTKAF

SEQ ID NO: 1121 - protein, 9 aa, Artificial Sequence
  Peptide Derived from Human Papillomavirus
PTVQISTGF

SEQ ID NO: 1122 - protein, 9 aa, Artificial Sequence
  Peptide Derived from Human Papillomavirus
RLKPYKELY

SEQ ID NO: 1123 - protein, 8 aa, Artificial Sequence
  Peptide Derived from Human Papillomavirus
RMECALLY

SEQ ID NO: 1124 - protein, 10 aa, Artificial Sequence
  Peptide Derived from Human Papillomavirus
SLLASKTKAF

SEQ ID NO: 1125 - protein, 8 aa, Artificial Sequence
  Peptide Derived from Human Papillomavirus
SMSSTWHW

SEQ ID NO: 1126 - protein, 9 aa, Artificial Sequence
  Peptide Derived from Human Papillomavirus
SSMSSTWHW

SEQ ID NO: 1127 - protein, 10 aa, Artificial Sequence
  Peptide Derived from Human Papillomavirus
TLQQTSLEVW

SEQ ID NO: 1128 - protein, 11 aa, Artificial Sequence
  Peptide Derived from Human Papillomavirus
TMDYTNWGEIY

SEQ ID NO: 1129 - protein, 9 aa, Artificial Sequence
  Peptide Derived from Human Papillomavirus
TMVTGKVDY

SEQ ID NO: 1130 - protein, 8 aa, Artificial Sequence
  Peptide Derived from Human Papillomavirus
TVQISTGF

SEQ ID NO: 1131 - protein, 9 aa, Artificial Sequence
  Peptide Derived from Human Papillomavirus
VTEQQQQMF

SEQ ID NO: 1132 - protein, 11 aa, Artificial Sequence
  Peptide Derived from Human Papillomavirus
VTGKVDYIGMY

SEQ ID NO: 1133 - protein, 9 aa, Artificial Sequence
  Peptide Derived from Human Papillomavirus
WLCEPPKCF

SEQ ID NO: 1134 - protein, 11 aa, Artificial Sequence
  Peptide Derived from Human Papillomavirus
WTLQQTSLEVW

SEQ ID NO: 1135 - protein, 9 aa, Artificial Sequence
  Peptide Derived from Human Papillomavirus
YIHNCEKVY

SEQ ID NO: 1136 - protein, 10 aa, Artificial Sequence
  Peptide Derived from Human Papillomavirus
YIHNCEKVYF

SEQ ID NO: 1137 - protein, 8 aa, Artificial Sequence
  Peptide Derived from Human Papillomavirus
YSSMSSTW

SEQ ID NO: 1138 - protein, 10 aa, Artificial Sequence
  Peptide Derived from Human Papillomavirus
YSSMSSTWHW

SEQ ID NO: 1139 - protein, 8 aa, Artificial Sequence
  Peptide Derived from Human Papillomavirus
YTAKQMGF

SEQ ID NO: 1140 - protein, 8 aa, Artificial Sequence
  Peptide Derived from Human Papillomavirus
YTNWGEIY

SEQ ID NO: 1141 - protein, 11 aa, Artificial Sequence
  Peptide Derived from Human Papillomavirus
FLYLPMMCINF

SEQ ID NO: 1142 - protein, 10 aa, Artificial Sequence
  Peptide Derived from Human Papillomavirus
FVFVLCFILF

SEQ ID NO: 1143 - protein, 9 aa, Artificial Sequence
  Peptide Derived from Human Papillomavirus
FVGSPLKIF

SEQ ID NO: 1144 - protein, 10 aa, Artificial Sequence
  Peptide Derived from Human Papillomavirus
FVGSPLKIFF

SEQ ID NO: 1145 - protein, 8 aa, Artificial Sequence
  Peptide Derived from Human Papillomavirus
FVLCFILF

SEQ ID NO: 1146 - protein, 8 aa, Artificial Sequence
  Peptide Derived from Human Papillomavirus
GSPLKIFF

SEQ ID NO: 1147 - protein, 10 aa, Artificial Sequence
  Peptide Derived from Human Papillomavirus
GSPLKIFFCY

SEQ ID NO: 1148 - protein, 9 aa, Artificial Sequence
  Peptide Derived from Human Papillomavirus
ILSISTYAW

SEQ ID NO: 1149 - protein, 9 aa, Artificial Sequence
  Peptide Derived from Human Papillomavirus
KIFFCYLLF

SEQ ID NO: 1150 - protein, 11 aa, Artificial Sequence
  Peptide Derived from Human Papillomavirus
KIFFCYLLFLY

SEQ ID NO: 1151 - protein, 8 aa, Artificial Sequence
  Peptide Derived from Human Papillomavirus
LILSISTY

SEQ ID NO: 1152 - protein, 10 aa, Artificial Sequence
  Peptide Derived from Human Papillomavirus
LILSISTYAW

SEQ ID NO: 1153 - protein, 9 aa, Artificial Sequence
  Peptide Derived from Human Papillomavirus
LLVLVLLLW

SEQ ID NO: 1154 - protein, 11 aa, Artificial Sequence
  Peptide Derived from Human Papillomavirus
LLVLVLLLWVF

SEQ ID NO: 1155 - protein, 8 aa, Artificial Sequence
  Peptide Derived from Human Papillomavirus
LSISTYAW

SEQ ID NO: 1156 - protein, 8 aa, Artificial Sequence
  Peptide Derived from Human Papillomavirus
LVLLLWVF

SEQ ID NO: 1157 - protein, 8 aa, Artificial Sequence
  Peptide Derived from Human Papillomavirus
LVLVLLLW

SEQ ID NO: 1158 - protein, 10 aa, Artificial Sequence
  Peptide Derived from Human Papillomavirus
LVLVLLLWVF

SEQ ID NO: 1159 - protein, 9 aa, Artificial Sequence
  Peptide Derived from Human Papillomavirus
MIFVFVLCF

SEQ ID NO: 1160 - protein, 9 aa, Artificial Sequence
  Peptide Derived from Human Papillomavirus
PLILSISTY

SEQ ID NO: 1161 - protein, 11 aa, Artificial Sequence
  Peptide Derived from Human Papillomavirus
PLILSISTYAW

SEQ ID NO: 1162 - protein, 8 aa, Artificial Sequence
  Peptide Derived from Human Papillomavirus
PLKIFFCY

SEQ ID NO: 1163 - protein, 11 aa, Artificial Sequence
  Peptide Derived from Human Papillomavirus
PLKIFFCYLLF

SEQ ID NO: 1164 - protein, 9 aa, Artificial Sequence
  Peptide Derived from Human Papillomavirus
VLVLLLWVF

SEQ ID NO: 1165 - protein, 10 aa, Artificial Sequence
  Peptide Derived from Human Papillomavirus
WLLVLVLLLW

SEQ ID NO: 1166 - protein, 11 aa, Artificial Sequence
  Peptide Derived from Human Papillomavirus
WVFVGSPLKIF

SEQ ID NO: 1167 - protein, 9 aa, Artificial Sequence
  Peptide Derived from Human Papillomavirus
YLPMMCINF

SEQ ID NO: 1168 - protein, 11 aa, Artificial Sequence
  Peptide Derived from Human Papillomavirus
CLRFLSKISEY

SEQ ID NO: 1169 - protein, 8 aa, Artificial Sequence
  Peptide Derived from Human Papillomavirus
FLSKISEY

SEQ ID NO: 1170 - protein, 11 aa, Artificial Sequence
  Peptide Derived from Human Papillomavirus
FLSKISEYRHY

SEQ ID NO: 1171 - protein, 9 aa, Artificial Sequence
  Peptide Derived from Human Papillomavirus
GICKLCLRF

SEQ ID NO: 1172 - protein, 8 aa, Artificial Sequence
  Peptide Derived from Human Papillomavirus
HVDLNKRF

SEQ ID NO: 1173 - protein, 9 aa, Artificial Sequence
  Peptide Derived from Human Papillomavirus
ISEYRHYNY

SEQ ID NO: 1174 - protein, 8 aa, Artificial Sequence
  Peptide Derived from Human Papillomavirus
KISEYRHY

SEQ ID NO: 1175 - protein, 10 aa, Artificial Sequence
  Peptide Derived from Human Papillomavirus
KISEYRHYNY

SEQ ID NO: 1176 - protein, 10 aa, Artificial Sequence
  Peptide Derived from Human Papillomavirus
LSKISEYRHY

SEQ ID NO: 1177 - protein, 11 aa, Artificial Sequence
  Peptide Derived from Human Papillomavirus
LTVVYREGNPF

SEQ ID NO: 1178 - protein, 8 aa, Artificial Sequence
  Peptide Derived from Human Papillomavirus
PLQRSEVY

SEQ ID NO: 1179 - protein, 10 aa, Artificial Sequence
  Peptide Derived from Human Papillomavirus
PLQRSEVYDF

SEQ ID NO: 1180 - protein, 9 aa, Artificial Sequence
  Peptide Derived from Human Papillomavirus
RSEVYDFAF

SEQ ID NO: 1181 - protein, 10 aa, Artificial Sequence
  Peptide Derived from Human Papillomavirus
TVVYREGNPF

SEQ ID NO: 1182 - protein, 9 aa, Artificial Sequence
  Peptide Derived from Human Papillomavirus
VVYREGNPF

SEQ ID NO: 1183 - protein, 10 aa, Artificial Sequence
  Peptide Derived from Human Papillomavirus
DLYPEPTDLY

SEQ ID NO: 1184 - protein, 11 aa, Artificial Sequence
  Peptide Derived from Human Papillomavirus
PTLKEYVLDLY

SEQ ID NO: 1185 - protein, 10 aa, Artificial Sequence
  Peptide Derived from Human Papillomavirus
TLKEYVLDLY

SEQ ID NO: 1186 - protein, 10 aa, Artificial Sequence
  Peptide Derived from Human Papillomavirus
AMNPDILEDW

SEQ ID NO: 1187 - protein, 8 aa, Artificial Sequence
  Peptide Derived from Human Papillomavirus
ASIQSSAF

SEQ ID NO: 1188 - protein, 9 aa, Artificial Sequence
  Peptide Derived from Human Papillomavirus
ASIQSSAFF

SEQ ID NO: 1189 - protein, 9 aa, Artificial Sequence
  Peptide Derived from Human Papillomavirus
ASLQDTYRF

SEQ ID NO: 1190 - protein, 10 aa, Artificial Sequence
  Peptide Derived from Human Papillomavirus
CTQVTSDSTY

SEQ ID NO: 1191 - protein, 9 aa, Artificial Sequence
  Peptide Derived from Human Papillomavirus
DICGSTCKY

SEQ ID NO: 1192 - protein, 8 aa, Artificial Sequence
  Peptide Derived from Human Papillomavirus
DILEDWQF

SEQ ID NO: 1193 - protein, 11 aa, Artificial Sequence
  Peptide Derived from Human Papillomavirus
DLDQFPLGRKF

SEQ ID NO: 1194 - protein, 9 aa, Artificial Sequence
  Peptide Derived from Human Papillomavirus
DSTYKNENF

SEQ ID NO: 1195 - protein, 8 aa, Artificial Sequence
  Peptide Derived from Human Papillomavirus
DTETGNKY

SEQ ID NO: 1196 - protein, 9 aa, Artificial Sequence
  Peptide Derived from Human Papillomavirus
DTGFGCMDF

SEQ ID NO: 1197 - protein, 9 aa, Artificial Sequence
  Peptide Derived from Human Papillomavirus
ESQLFNKPY

SEQ ID NO: 1198 - protein, 10 aa, Artificial Sequence
  Peptide Derived from Human Papillomavirus
ESQLFNKPYW

SEQ ID NO: 1199 - protein, 8 aa, Artificial Sequence
  Peptide Derived from Human Papillomavirus
EVDLKEKF

SEQ ID NO: 1200 - protein, 8 aa, Artificial Sequence
  Peptide Derived from Human Papillomavirus
FLRREQMF

SEQ ID NO: 1201 - protein, 8 aa, Artificial Sequence
  Peptide Derived from Human Papillomavirus
FSADLDQF

SEQ ID NO: 1202 - protein, 9 aa, Artificial Sequence
  Peptide Derived from Human Papillomavirus
GICWGNQVF

SEQ ID NO: 1203 - protein, 11 aa, Artificial Sequence
  Peptide Derived from Human Papillomavirus
GISGHPLLNKF

SEQ ID NO: 1204 - protein, 11 aa, Artificial Sequence
  Peptide Derived from Human Papillomavirus
GSMVTSESQLF

SEQ ID NO: 1205 - protein, 9 aa, Artificial Sequence
  Peptide Derived from Human Papillomavirus
GSTCKYPDY

SEQ ID NO: 1206 - protein, 11 aa, Artificial Sequence
  Peptide Derived from Human Papillomavirus
GTTASIQSSAF

SEQ ID NO: 1207 - protein, 9 aa, Artificial Sequence
  Peptide Derived from Human Papillomavirus
HVEEYDLQF

SEQ ID NO: 1208 - protein, 11 aa, Artificial Sequence
  Peptide Derived from Human Papillomavirus
HVEEYDLQFVF

SEQ ID NO: 1209 - protein, 10 aa, Artificial Sequence
  Peptide Derived from Human Papillomavirus
ISGHPLLNKF

SEQ ID NO: 1210 - protein, 10 aa, Artificial Sequence
  Peptide Derived from Human Papillomavirus
KVSGLQYRVF

SEQ ID NO: 1211 - protein, 11 aa, Artificial Sequence
  Peptide Derived from Human Papillomavirus
KVTLTAEVMTY

SEQ ID NO: 1212 - protein, 8 aa, Artificial Sequence
  Peptide Derived from Human Papillomavirus
KVVSTDEY

SEQ ID NO: 1213 - protein, 8 aa, Artificial Sequence
  Peptide Derived from Human Papillomavirus
LLAVGHPY

SEQ ID NO: 1214 - protein, 9 aa, Artificial Sequence
  Peptide Derived from Human Papillomavirus
LLAVGHPYF

SEQ ID NO: 1215 - protein, 11 aa, Artificial Sequence
  Peptide Derived from Human Papillomavirus
LLVPKVSGLQY

SEQ ID NO: 1216 - protein, 8 aa, Artificial Sequence
  Peptide Derived from Human Papillomavirus
LTAEVMTY

SEQ ID NO: 1217 - protein, 10 aa, Artificial Sequence
  Peptide Derived from Human Papillomavirus
LVPKVSGLQY

SEQ ID NO: 1218 - protein, 11 aa, Artificial Sequence
  Peptide Derived from Human Papillomavirus
MTSEPYGDSLF

SEQ ID NO: 1219 - protein, 11 aa, Artificial Sequence
  Peptide Derived from Human Papillomavirus
MVDTGFGCMDF

SEQ ID NO: 1220 - protein, 9 aa, Artificial Sequence
  Peptide Derived from Human Papillomavirus
MVTSESQLF

SEQ ID NO: 1221 - protein, 11 aa, Artificial Sequence
  Peptide Derived from Human Papillomavirus
PIDICGSTCKY

SEQ ID NO: 1222 - protein, 8 aa, Artificial Sequence
  Peptide Derived from Human Papillomavirus
PLGKYTFW

SEQ ID NO: 1223 - protein, 9 aa, Artificial Sequence
  Peptide Derived from Human Papillomavirus
PSASLQDTY

SEQ ID NO: 1224 - protein, 11 aa, Artificial Sequence
  Peptide Derived from Human Papillomavirus
PSASLQDTYRF

SEQ ID NO: 1225 - protein, 11 aa, Artificial Sequence
  Peptide Derived from Human Papillomavirus
PVSKVVSTDEY

SEQ ID NO: 1226 - protein, 8 aa, Artificial Sequence
  Peptide Derived from Human Papillomavirus
QLFNKPYW

SEQ ID NO: 1227 - protein, 8 aa, Artificial Sequence
  Peptide Derived from Human Papillomavirus
QMFVRHFF

SEQ ID NO: 1228 - protein, 8 aa, Artificial Sequence
  Peptide Derived from Human Papillomavirus
QVTSDSTY

SEQ ID NO: 1229 - protein, 9 aa, Artificial Sequence
  Peptide Derived from Human Papillomavirus
RLLAVGHPY

SEQ ID NO: 1230 - protein, 10 aa, Artificial Sequence
  Peptide Derived from Human Papillomavirus
RLLAVGHPYF

SEQ ID NO: 1231 - protein, 8 aa, Artificial Sequence
  Peptide Derived from Human Papillomavirus
RLPDPNKF

SEQ ID NO: 1232 - protein, 10 aa, Artificial Sequence
  Peptide Derived from Human Papillomavirus
RLPDPNKFGF

SEQ ID NO: 1233 - protein, 10 aa, Artificial Sequence
  Peptide Derived from Human Papillomavirus
RVRLPDPNKF

SEQ ID NO: 1234 - protein, 8 aa, Artificial Sequence
  Peptide Derived from Human Papillomavirus
SIQSSAFF

SEQ ID NO: 1235 - protein, 8 aa, Artificial Sequence
  Peptide Derived from Human Papillomavirus
SLQDTYRF

SEQ ID NO: 1236 - protein, 10 aa, Artificial Sequence
  Peptide Derived from Human Papillomavirus
SMVTSESQLF

SEQ ID NO: 1237 - protein, 11 aa, Artificial Sequence
  Peptide Derived from Human Papillomavirus
SSRLLAVGHPY

SEQ ID NO: 1238 - protein, 8 aa, Artificial Sequence
  Peptide Derived from Human Papillomavirus
STCKYPDY

SEQ ID NO: 1239 - protein, 8 aa, Artificial Sequence
  Peptide Derived from Human Papillomavirus
STYKNENF

SEQ ID NO: 1240 - protein, 11 aa, Artificial Sequence
  Peptide Derived from Human Papillomavirus
STYKNENFKEY

SEQ ID NO: 1241 - protein, 11 aa, Artificial Sequence
  Peptide Derived from Human Papillomavirus
SVWRPSEATVY

SEQ ID NO: 1242 - protein, 11 aa, Artificial Sequence
  Peptide Derived from Human Papillomavirus
TLGEAVPDDLY

SEQ ID NO: 1243 - protein, 9 aa, Artificial Sequence
  Peptide Derived from Human Papillomavirus
TLTAEVMTY

SEQ ID NO: 1244 - protein, 11 aa, Artificial Sequence
  Peptide Derived from Human Papillomavirus
TSDSTYKNENF

SEQ ID NO: 1245 - protein, 10 aa, Artificial Sequence
  Peptide Derived from Human Papillomavirus
TSEPYGDSLF

SEQ ID NO: 1246 - protein, 11 aa, Artificial Sequence
  Peptide Derived from Human Papillomavirus
TSEPYGDSLFF

SEQ ID NO: 1247 - protein, 11 aa, Artificial Sequence
  Peptide Derived from Human Papillomavirus
TSESQLFNKPY

SEQ ID NO: 1248 - protein, 10 aa, Artificial Sequence
  Peptide Derived from Human Papillomavirus
TTASIQSSAF

SEQ ID NO: 1249 - protein, 11 aa, Artificial Sequence
  Peptide Derived from Human Papillomavirus
TTASIQSSAFF

SEQ ID NO: 1250 - protein, 9 aa, Artificial Sequence
  Peptide Derived from Human Papillomavirus
VSGLQYRVF

SEQ ID NO: 1251 - protein, 10 aa, Artificial Sequence
  Peptide Derived from Human Papillomavirus
VSKVVSTDEY

SEQ ID NO: 1252 - protein, 8 aa, Artificial Sequence
  Peptide Derived from Human Papillomavirus
VSRTSIYY

SEQ ID NO: 1253 - protein, 9 aa, Artificial Sequence
  Peptide Derived from Human Papillomavirus
VSRTSIYYY

SEQ ID NO: 1254 - protein, 10 aa, Artificial Sequence
  Peptide Derived from Human Papillomavirus
VTLTAEVMTY

SEQ ID NO: 1255 - protein, 8 aa, Artificial Sequence
  Peptide Derived from Human Papillomavirus
VTSESQLF

SEQ ID NO: 1256 - protein, 8 aa, Artificial Sequence
  Peptide Derived from Human Papillomavirus
YIRHVEEY

SEQ ID NO: 1257 - protein, 9 aa, Artificial Sequence
  Peptide Derived from Human Papillomavirus
YLKMTSEPY

SEQ ID NO: 1258 - protein, 8 aa, Artificial Sequence
  Peptide Derived from Human Papillomavirus
YVSRTSIY

SEQ ID NO: 1259 - protein, 9 aa, Artificial Sequence
  Peptide Derived from Human Papillomavirus
YVSRTSIYY

SEQ ID NO: 1260 - protein, 10 aa, Artificial Sequence
  Peptide Derived from Human Papillomavirus
YVSRTSIYYY

SEQ ID NO: 1261 - protein, 11 aa, Artificial Sequence
  Peptide Derived from Human Papillomavirus
AITSRRHTVRF

SEQ ID NO: 1262 - protein, 10 aa, Artificial Sequence
  Peptide Derived from Human Papillomavirus
DISPAPDPDF

SEQ ID NO: 1263 - protein, 10 aa, Artificial Sequence
  Peptide Derived from Human Papillomavirus
DTIVVDGADF

SEQ ID NO: 1264 - protein, 11 aa, Artificial Sequence
  Peptide Derived from Human Papillomavirus
ESFDPEDTLQF

SEQ ID NO: 1265 - protein, 10 aa, Artificial Sequence
  Peptide Derived from Human Papillomavirus
FILRRRRKRF

SEQ ID NO: 1266 - protein, 11 aa, Artificial Sequence
  Peptide Derived from Human Papillomavirus
FLTSPHKLITY

SEQ ID NO: 1267 - protein, 11 aa, Artificial Sequence
  Peptide Derived from Human Papillomavirus
FSSPTVSTQSY

SEQ ID NO: 1268 - protein, 8 aa, Artificial Sequence
  Peptide Derived from Human Papillomavirus
FVLHPSYF

SEQ ID NO: 1269 - protein, 8 aa, Artificial Sequence
  Peptide Derived from Human Papillomavirus
FVPISPFF

SEQ ID NO: 1270 - protein, 10 aa, Artificial Sequence
  Peptide Derived from Human Papillomavirus
FVPISPFFPF

SEQ ID NO: 1271 - protein, 8 aa, Artificial Sequence
  Peptide Derived from Human Papillomavirus
GSGGRTGY

SEQ ID NO: 1272 - protein, 10 aa, Artificial Sequence
  Peptide Derived from Human Papillomavirus
GSGSGGRTGY

SEQ ID NO: 1273 - protein, 11 aa, Artificial Sequence
  Peptide Derived from Human Papillomavirus
GSRPVARLGLY

SEQ ID NO: 1274 - protein, 11 aa, Artificial Sequence
  Peptide Derived from Human Papillomavirus
GSTIADQILKY

SEQ ID NO: 1275 - protein, 8 aa, Artificial Sequence
  Peptide Derived from Human Papillomavirus
HTPMQHSY

SEQ ID NO: 1276 - protein, 11 aa, Artificial Sequence
  Peptide Derived from Human Papillomavirus
HTPMQHSYSTF

SEQ ID NO: 1277 - protein, 8 aa, Artificial Sequence
  Peptide Derived from Human Papillomavirus
HTVPNEQY

SEQ ID NO: 1278 - protein, 10 aa, Artificial Sequence
  Peptide Derived from Human Papillomavirus
ILKYGSLGVF

SEQ ID NO: 1279 - protein, 11 aa, Artificial Sequence
  Peptide Derived from Human Papillomavirus
ILKYGSLGVFF

SEQ ID NO: 1280 - protein, 9 aa, Artificial Sequence
  Peptide Derived from Human Papillomavirus
ILRRRRKRF

SEQ ID NO: 1281 - protein, 11 aa, Artificial Sequence
  Peptide Derived from Human Papillomavirus
ILRRRRKRFPY

SEQ ID NO: 1282 - protein, 9 aa, Artificial Sequence
  Peptide Derived from Human Papillomavirus
ISPAPDPDF

SEQ ID NO: 1283 - protein, 9 aa, Artificial Sequence
  Peptide Derived from Human Papillomavirus
ISTHLNPTF

SEQ ID NO: 1284 - protein, 10 aa, Artificial Sequence
  Peptide Derived from Human Papillomavirus
ITSRRHTVRF

SEQ ID NO: 1285 - protein, 8 aa, Artificial Sequence
  Peptide Derived from Human Papillomavirus
ITYDNPAF

SEQ ID NO: 1286 - protein, 11 aa, Artificial Sequence
  Peptide Derived from Human Papillomavirus
ITYDNPAFESF

SEQ ID NO: 1287 - protein, 10 aa, Artificial Sequence
  Peptide Derived from Human Papillomavirus
IVSLIEETSF

SEQ ID NO: 1288 - protein, 8 aa, Artificial Sequence
  Peptide Derived from Human Papillomavirus
IVVDGADF

SEQ ID NO: 1289 - protein, 10 aa, Artificial Sequence
  Peptide Derived from Human Papillomavirus
KLITYDNPAF

SEQ ID NO: 1290 - protein, 9 aa, Artificial Sequence
  Peptide Derived from Human Papillomavirus
LITYDNPAF

SEQ ID NO: 1291 - protein, 10 aa, Artificial Sequence
  Peptide Derived from Human Papillomavirus
LTSPHKLITY

SEQ ID NO: 1292 - protein, 11 aa, Artificial Sequence
  Peptide Derived from Human Papillomavirus
MSGPDIPSPLF

SEQ ID NO: 1293 - protein, 10 aa, Artificial Sequence
  Peptide Derived from Human Papillomavirus
NVHTPMQHSY

SEQ ID NO: 1294 - protein, 10 aa, Artificial Sequence
  Peptide Derived from Human Papillomavirus
NVSIPLNTGF

SEQ ID NO: 1295 - protein, 8 aa, Artificial Sequence
  Peptide Derived from Human Papillomavirus
PISPFFPF

SEQ ID NO: 1296 - protein, 11 aa, Artificial Sequence
  Peptide Derived from Human Papillomavirus
PLDHTVPNEQY

SEQ ID NO: 1297 - protein, 9 aa, Artificial Sequence
  Peptide Derived from Human Papillomavirus
PLFPTSSPF

SEQ ID NO: 1298 - protein, 10 aa, Artificial Sequence
  Peptide Derived from Human Papillomavirus
PLHDTSTSSY

SEQ ID NO: 1299 - protein, 9 aa, Artificial Sequence
  Peptide Derived from Human Papillomavirus
PMQHSYSTF

SEQ ID NO: 1300 - protein, 9 aa, Artificial Sequence
  Peptide Derived from Human Papillomavirus
PSIPTPSGF

SEQ ID NO: 1301 - protein, 11 aa, Artificial Sequence
  Peptide Derived from Human Papillomavirus
PSPLFPTSSPF

SEQ ID NO: 1302 - protein, 8 aa, Artificial Sequence
  Peptide Derived from Human Papillomavirus
PTVSTQSY

SEQ ID NO: 1303 - protein, 8 aa, Artificial Sequence
  Peptide Derived from Human Papillomavirus
PVARLGLY

SEQ ID NO: 1304 - protein, 8 aa, Artificial Sequence
  Peptide Derived from Human Papillomavirus
QIGARIHY

SEQ ID NO: 1305 - protein, 9 aa, Artificial Sequence
  Peptide Derived from Human Papillomavirus
QIGARIHYY

SEQ ID NO: 1306 - protein, 11 aa, Artificial Sequence
  Peptide Derived from Human Papillomavirus
QILKYGSLGVF

SEQ ID NO: 1307 - protein, 11 aa, Artificial Sequence
  Peptide Derived from Human Papillomavirus
QSYENIPMDTF

SEQ ID NO: 1308 - protein, 11 aa, Artificial Sequence
  Peptide Derived from Human Papillomavirus
QTISTHLNPTF

SEQ ID NO: 1309 - protein, 9 aa, Artificial Sequence
  Peptide Derived from Human Papillomavirus
QVKVVDPAF

SEQ ID NO: 1310 - protein, 10 aa, Artificial Sequence
  Peptide Derived from Human Papillomavirus
SINDGLYDVY

SEQ ID NO: 1311 - protein, 8 aa, Artificial Sequence
  Peptide Derived from Human Papillomavirus
SIPLNTGF

SEQ ID NO: 1312 - protein, 8 aa, Artificial Sequence
  Peptide Derived from Human Papillomavirus
SIPTPSGF

SEQ ID NO: 1313 - protein, 11 aa, Artificial Sequence
  Peptide Derived from Human Papillomavirus
SIVSLIEETSF

SEQ ID NO: 1314 - protein, 8 aa, Artificial Sequence
  Peptide Derived from Human Papillomavirus
SLIEETSF

SEQ ID NO: 1315 - protein, 10 aa, Artificial Sequence
  Peptide Derived from Human Papillomavirus
SSPFVPISPF

SEQ ID NO: 1316 - protein, 11 aa, Artificial Sequence
  Peptide Derived from Human Papillomavirus
SSPFVPISPFF

SEQ ID NO: 1317 - protein, 10 aa, Artificial Sequence
  Peptide Derived from Human Papillomavirus
SSPTVSTQSY

SEQ ID NO: 1318 - protein, 10 aa, Artificial Sequence
  Peptide Derived from Human Papillomavirus
SSYSINDGLY

SEQ ID NO: 1319 - protein, 8 aa, Artificial Sequence
  Peptide Derived from Human Papillomavirus
STHLNPTF

SEQ ID NO: 1320 - protein, 10 aa, Artificial Sequence
  Peptide Derived from Human Papillomavirus
STIADQILKY

SEQ ID NO: 1321 - protein, 9 aa, Artificial Sequence
  Peptide Derived from Human Papillomavirus
TIADQILKY

SEQ ID NO: 1322 - protein, 10 aa, Artificial Sequence
  Peptide Derived from Human Papillomavirus
TISTHLNPTF

SEQ ID NO: 1323 - protein, 9 aa, Artificial Sequence
  Peptide Derived from Human Papillomavirus
TIVVDGADF

SEQ ID NO: 1324 - protein, 9 aa, Artificial Sequence
  Peptide Derived from Human Papillomavirus
TSPHKLITY

SEQ ID NO: 1325 - protein, 9 aa, Artificial Sequence
  Peptide Derived from Human Papillomavirus
TSRRHTVRF

SEQ ID NO: 1326 - protein, 11 aa, Artificial Sequence
  Peptide Derived from Human Papillomavirus
TSSPFVPISPF

SEQ ID NO: 1327 - protein, 11 aa, Artificial Sequence
  Peptide Derived from Human Papillomavirus
TSSYSINDGLY

SEQ ID NO: 1328 - protein, 9 aa, Artificial Sequence
  Peptide Derived from Human Papillomavirus
VSIPLNTGF

SEQ ID NO: 1329 - protein, 9 aa, Artificial Sequence
  Peptide Derived from Human Papillomavirus
VSLIEETSF

SEQ ID NO: 1330 - protein, 8 aa, Artificial Sequence
  Peptide Derived from Human Papillomavirus
YSINDGLY

SEQ ID NO: 1331 - protein, 11 aa, Artificial Sequence
  Peptide Derived from Human Papillomavirus
YSINDGLYDVY

SEQ ID NO: 1332 - protein, 10 aa, Artificial Sequence
  Peptide Derived from Human Papillomavirus
AMLAVFKDIY

SEQ ID NO: 1333 - protein, 11 aa, Artificial Sequence
  Peptide Derived from Human Papillomavirus
AMLDDATHTCW

SEQ ID NO: 1334 - protein, 11 aa, Artificial Sequence
  Peptide Derived from Human Papillomavirus
ATDTGSDMVDF

SEQ ID NO: 1335 - protein, 8 aa, Artificial Sequence
  Peptide Derived from Human Papillomavirus
ATHTCWTY

SEQ ID NO: 1336 - protein, 9 aa, Artificial Sequence
  Peptide Derived from Human Papillomavirus
ATHTCWTYF

SEQ ID NO: 1337 - protein, 11 aa, Artificial Sequence
  Peptide Derived from Human Papillomavirus
AVFKDIYGLSF

SEQ ID NO: 1338 - protein, 10 aa, Artificial Sequence
  Peptide Derived from Human Papillomavirus
CSKIDEGGDW

SEQ ID NO: 1339 - protein, 9 aa, Artificial Sequence
  Peptide Derived from Human Papillomavirus
CTDWVMAIF

SEQ ID NO: 1340 - protein, 8 aa, Artificial Sequence
  Peptide Derived from Human Papillomavirus
DLSDMVQW

SEQ ID NO: 1341 - protein, 10 aa, Artificial Sequence
  Peptide Derived from Human Papillomavirus
DLSDMVQWAF

SEQ ID NO: 1342 - protein, 10 aa, Artificial Sequence
  Peptide Derived from Human Papillomavirus
DLTDESDMAF

SEQ ID NO: 1343 - protein, 10 aa, Artificial Sequence
  Peptide Derived from Human Papillomavirus
DTEGIPFGTF

SEQ ID NO: 1344 - protein, 9 aa, Artificial Sequence
  Peptide Derived from Human Papillomavirus
DTGSDMVDF

SEQ ID NO: 1345 - protein, 10 aa, Artificial Sequence
  Peptide Derived from Human Papillomavirus
EINDKNWKCF

SEQ ID NO: 1346 - protein, 11 aa, Artificial Sequence
  Peptide Derived from Human Papillomavirus
EINDKNWKCFF

SEQ ID NO: 1347 - protein, 8 aa, Artificial Sequence
  Peptide Derived from Human Papillomavirus
ESDMAFQY

SEQ ID NO: 1348 - protein, 9 aa, Artificial Sequence
  Peptide Derived from Human Papillomavirus
ESRVTVFTF

SEQ ID NO: 1349 - protein, 9 aa, Artificial Sequence
  Peptide Derived from Human Papillomavirus
EVSGDTPEW

SEQ ID NO: 1350 - protein, 11 aa, Artificial Sequence
  Peptide Derived from Human Papillomavirus
FISFLRALKEF

SEQ ID NO: 1351 - protein, 10 aa, Artificial Sequence
  Peptide Derived from Human Papillomavirus
FLKSNCQAKY

SEQ ID NO: 1352 - protein, 9 aa, Artificial Sequence
  Peptide Derived from Human Papillomavirus
FLQGAIISF

SEQ ID NO: 1353 - protein, 8 aa, Artificial Sequence
  Peptide Derived from Human Papillomavirus
FLRALKEF

SEQ ID NO: 1354 - protein, 9 aa, Artificial Sequence
  Peptide Derived from Human Papillomavirus
FLRYQGVEF

SEQ ID NO: 1355 - protein, 8 aa, Artificial Sequence
  Peptide Derived from Human Papillomavirus
FTDLVRNF

SEQ ID NO: 1356 - protein, 9 aa, Artificial Sequence
  Peptide Derived from Human Papillomavirus
FTFPHAFPF

SEQ ID NO: 1357 - protein, 8 aa, Artificial Sequence
  Peptide Derived from Human Papillomavirus
FTISDSGY

SEQ ID NO: 1358 - protein, 8 aa, Artificial Sequence
  Peptide Derived from Human Papillomavirus
FVNSNSHF

SEQ ID NO: 1359 - protein, 9 aa, Artificial Sequence
  Peptide Derived from Human Papillomavirus
FVNSNSHFW

SEQ ID NO: 1360 - protein, 11 aa, Artificial Sequence
  Peptide Derived from Human Papillomavirus
GLSFTDLVRNF

SEQ ID NO: 1361 - protein, 8 aa, Artificial Sequence
  Peptide Derived from Human Papillomavirus
GTGCNGWF

SEQ ID NO: 1362 - protein, 9 aa, Artificial Sequence
  Peptide Derived from Human Papillomavirus
GTGCNGWFF

SEQ ID NO: 1363 - protein, 11 aa, Artificial Sequence
  Peptide Derived from Human Papillomavirus
GTPKKNCILLY

SEQ ID NO: 1364 - protein, 10 aa, Artificial Sequence
  Peptide Derived from Human Papillomavirus
GVLILALLRY

SEQ ID NO: 1365 - protein, 10 aa, Artificial Sequence
  Peptide Derived from Human Papillomavirus
GVNPTVAEGF

SEQ ID NO: 1366 - protein, 9 aa, Artificial Sequence
  Peptide Derived from Human Papillomavirus
HIQCLDCKW

SEQ ID NO: 1367 - protein, 10 aa, Artificial Sequence
  Peptide Derived from Human Papillomavirus
HTCWTYFDNY

SEQ ID NO: 1368 - protein, 11 aa, Artificial Sequence
  Peptide Derived from Human Papillomavirus
IIQHGIDDSNF

SEQ ID NO: 1369 - protein, 11 aa, Artificial Sequence
  Peptide Derived from Human Papillomavirus
IISFVNSNSHF

SEQ ID NO: 1370 - protein, 11 aa, Artificial Sequence
  Peptide Derived from Human Papillomavirus
ISEVSGDTPEW

SEQ ID NO: 1371 - protein, 10 aa, Artificial Sequence
  Peptide Derived from Human Papillomavirus
ISFLRALKEF

SEQ ID NO: 1372 - protein, 10 aa, Artificial Sequence
  Peptide Derived from Human Papillomavirus
ISFVNSNSHF

SEQ ID NO: 1373 - protein, 11 aa, Artificial Sequence
  Peptide Derived from Human Papillomavirus
ISFVNSNSHFW

SEQ ID NO: 1374 - protein, 8 aa, Artificial Sequence
  Peptide Derived from Human Papillomavirus
KIDEGGDW

SEQ ID NO: 1375 - protein, 10 aa, Artificial Sequence
  Peptide Derived from Human Papillomavirus
KLRSSVAALY

SEQ ID NO: 1376 - protein, 11 aa, Artificial Sequence
  Peptide Derived from Human Papillomavirus
KLRSSVAALYW

SEQ ID NO: 1377 - protein, 10 aa, Artificial Sequence
  Peptide Derived from Human Papillomavirus
KSDKTTCTDW

SEQ ID NO: 1378 - protein, 8 aa, Artificial Sequence
  Peptide Derived from Human Papillomavirus
KSNCQAKY

SEQ ID NO: 1379 - protein, 8 aa, Artificial Sequence
  Peptide Derived from Human Papillomavirus
KSYFGMSF

SEQ ID NO: 1380 - protein, 11 aa, Artificial Sequence
  Peptide Derived from Human Papillomavirus
KSYFGMSFIHF

SEQ ID NO: 1381 - protein, 10 aa, Artificial Sequence
  Peptide Derived from Human Papillomavirus
KTLIKPATLY

SEQ ID NO: 1382 - protein, 8 aa, Artificial Sequence
  Peptide Derived from Human Papillomavirus
LIKPATLY

SEQ ID NO: 1383 - protein, 8 aa, Artificial Sequence
  Peptide Derived from Human Papillomavirus
LILALLRY

SEQ ID NO: 1384 - protein, 9 aa, Artificial Sequence
  Peptide Derived from Human Papillomavirus
LSDMVQWAF

SEQ ID NO: 1385 - protein, 10 aa, Artificial Sequence
  Peptide Derived from Human Papillomavirus
LSFTDLVRNF

SEQ ID NO: 1386 - protein, 9 aa, Artificial Sequence
  Peptide Derived from Human Papillomavirus
LTDESDMAF

SEQ ID NO: 1387 - protein, 11 aa, Artificial Sequence
  Peptide Derived from Human Papillomavirus
LTDESDMAFQY

SEQ ID NO: 1388 - protein, 9 aa, Artificial Sequence
  Peptide Derived from Human Papillomavirus
MLAVFKDIY

SEQ ID NO: 1389 - protein, 10 aa, Artificial Sequence
  Peptide Derived from Human Papillomavirus
MLDDATHTCW

SEQ ID NO: 1390 - protein, 10 aa, Artificial Sequence
  Peptide Derived from Human Papillomavirus
NIDPAKDNKW

SEQ ID NO: 1391 - protein, 8 aa, Artificial Sequence
  Peptide Derived from Human Papillomavirus
NMSQWIKY

SEQ ID NO: 1392 - protein, 11 aa, Artificial Sequence
  Peptide Derived from Human Papillomavirus
NTGKSYFGMSF

SEQ ID NO: 1393 - protein, 8 aa, Artificial Sequence
  Peptide Derived from Human Papillomavirus
PIVQFLRY

SEQ ID NO: 1394 - protein, 10 aa, Artificial Sequence
  Peptide Derived from Human Papillomavirus
PVYEINDKNW

SEQ ID NO: 1395 - protein, 10 aa, Artificial Sequence
  Peptide Derived from Human Papillomavirus
QMNMSQWIKY

SEQ ID NO: 1396 - protein, 10 aa, Artificial Sequence
  Peptide Derived from Human Papillomavirus
QVLHLLKRKF

SEQ ID NO: 1397 - protein, 10 aa, Artificial Sequence
  Peptide Derived from Human Papillomavirus
RLFTISDSGY

SEQ ID NO: 1398 - protein, 8 aa, Artificial Sequence
  Peptide Derived from Human Papillomavirus
RSSVAALY

SEQ ID NO: 1399 - protein, 9 aa, Artificial Sequence
  Peptide Derived from Human Papillomavirus
RSSVAALYW

SEQ ID NO: 1400 - protein, 10 aa, Artificial Sequence
  Peptide Derived from Human Papillomavirus
RSSVAALYWY

SEQ ID NO: 1401 - protein, 11 aa, Artificial Sequence
  Peptide Derived from Human Papillomavirus
RVTVFTFPHAF

SEQ ID NO: 1402 - protein, 8 aa, Artificial Sequence
  Peptide Derived from Human Papillomavirus
SSVAALYW

SEQ ID NO: 1403 - protein, 9 aa, Artificial Sequence
  Peptide Derived from Human Papillomavirus
SSVAALYWY

SEQ ID NO: 1404 - protein, 8 aa, Artificial Sequence
  Peptide Derived from Human Papillomavirus
SVAALYWY

SEQ ID NO: 1405 - protein, 9 aa, Artificial Sequence
  Peptide Derived from Human Papillomavirus
TLIKPATLY

SEQ ID NO: 1406 - protein, 11 aa, Artificial Sequence
  Peptide Derived from Human Papillomavirus
TTCTDWVMAIF

SEQ ID NO: 1407 - protein, 9 aa, Artificial Sequence
  Peptide Derived from Human Papillomavirus
TVFTFPHAF

SEQ ID NO: 1408 - protein, 11 aa, Artificial Sequence
  Peptide Derived from Human Papillomavirus
TVFTFPHAFPF

SEQ ID NO: 1409 - protein, 9 aa, Artificial Sequence
  Peptide Derived from Human Papillomavirus
VLHLLKRKF

SEQ ID NO: 1410 - protein, 9 aa, Artificial Sequence
  Peptide Derived from Human Papillomavirus
VLILALLRY

SEQ ID NO: 1411 - protein, 8 aa, Artificial Sequence
  Peptide Derived from Human Papillomavirus
VSGDTPEW

SEQ ID NO: 1412 - protein, 10 aa, Artificial Sequence
  Peptide Derived from Human Papillomavirus
VTVFTFPHAF

SEQ ID NO: 1413 - protein, 9 aa, Artificial Sequence
  Peptide Derived from Human Papillomavirus
YLESRVTVF

SEQ ID NO: 1414 - protein, 11 aa, Artificial Sequence
  Peptide Derived from Human Papillomavirus
YLESRVTVFTF

SEQ ID NO: 1415 - protein, 10 aa, Artificial Sequence
  Peptide Derived from Human Papillomavirus
ALKGLAQSKY

SEQ ID NO: 1416 - protein, 10 aa, Artificial Sequence
  Peptide Derived from Human Papillomavirus
ALQDKILDHY

SEQ ID NO: 1417 - protein, 9 aa, Artificial Sequence
  Peptide Derived from Human Papillomavirus
CLRYRLRKY

SEQ ID NO: 1418 - protein, 11 aa, Artificial Sequence
  Peptide Derived from Human Papillomavirus
CMNYVVWDSIY

SEQ ID NO: 1419 - protein, 8 aa, Artificial Sequence
  Peptide Derived from Human Papillomavirus
CVSYWGVY

SEQ ID NO: 1420 - protein, 9 aa, Artificial Sequence
  Peptide Derived from Human Papillomavirus
CVSYWGVYY

SEQ ID NO: 1421 - protein, 8 aa, Artificial Sequence
  Peptide Derived from Human Papillomavirus
DINSQISY

SEQ ID NO: 1422 - protein, 9 aa, Artificial Sequence
  Peptide Derived from Human Papillomavirus
DINSQISYW

SEQ ID NO: 1423 - protein, 11 aa, Artificial Sequence
  Peptide Derived from Human Papillomavirus
DSKDINSQISY

SEQ ID NO: 1424 - protein, 8 aa, Artificial Sequence
  Peptide Derived from Human Papillomavirus
DTTYYVQF

SEQ ID NO: 1425 - protein, 8 aa, Artificial Sequence
  Peptide Derived from Human Papillomavirus
EISSTWHW

SEQ ID NO: 1426 - protein, 11 aa, Artificial Sequence
  Peptide Derived from Human Papillomavirus
ELWNTEPSQCF

SEQ ID NO: 1427 - protein, 8 aa, Artificial Sequence
  Peptide Derived from Human Papillomavirus
KTAACVSY

SEQ ID NO: 1428 - protein, 9 aa, Artificial Sequence
  Peptide Derived from Human Papillomavirus
KTAACVSYW

SEQ ID NO: 1429 - protein, 10 aa, Artificial Sequence
  Peptide Derived from Human Papillomavirus
LIRLENAILF

SEQ ID NO: 1430 - protein, 9 aa, Artificial Sequence
  Peptide Derived from Human Papillomavirus
NSEVQRNTF

SEQ ID NO: 1431 - protein, 8 aa, Artificial Sequence
  Peptide Derived from Human Papillomavirus
NSLKCLRY

SEQ ID NO: 1432 - protein, 9 aa, Artificial Sequence
  Peptide Derived from Human Papillomavirus
NSNTWEVQY

SEQ ID NO: 1433 - protein, 9 aa, Artificial Sequence
  Peptide Derived from Human Papillomavirus
NSVQISVGY

SEQ ID NO: 1434 - protein, 8 aa, Artificial Sequence
  Peptide Derived from Human Papillomavirus
NTEPSQCF

SEQ ID NO: 1435 - protein, 9 aa, Artificial Sequence
  Peptide Derived from Human Papillomavirus
NTGILTVTY

SEQ ID NO: 1436 - protein, 11 aa, Artificial Sequence
  Peptide Derived from Human Papillomavirus
QLIRLENAILF

SEQ ID NO: 1437 - protein, 9 aa, Artificial Sequence
  Peptide Derived from Human Papillomavirus
QSKYNNEEW

SEQ ID NO: 1438 - protein, 8 aa, Artificial Sequence
  Peptide Derived from Human Papillomavirus
RLENAILF

SEQ ID NO: 1439 - protein, 9 aa, Artificial Sequence
  Peptide Derived from Human Papillomavirus
RLRKYADHY

SEQ ID NO: 1440 - protein, 11 aa, Artificial Sequence
  Peptide Derived from Human Papillomavirus
SIYYITETGIW

SEQ ID NO: 1441 - protein, 8 aa, Artificial Sequence
  Peptide Derived from Human Papillomavirus
SVQISVGY

SEQ ID NO: 1442 - protein, 10 aa, Artificial Sequence
  Peptide Derived from Human Papillomavirus
TLQDTCEELW

SEQ ID NO: 1443 - protein, 8 aa, Artificial Sequence
  Peptide Derived from Human Papillomavirus
VSYWGVYY

SEQ ID NO: 1444 - protein, 8 aa, Artificial Sequence
  Peptide Derived from Human Papillomavirus
VVWDSIYY

SEQ ID NO: 1445 - protein, 11 aa, Artificial Sequence
  Peptide Derived from Human Papillomavirus
WTLQDTCEELW

SEQ ID NO: 1446 - protein, 9 aa, Artificial Sequence
  Peptide Derived from Human Papillomavirus
YIKDGDTTY

SEQ ID NO: 1447 - protein, 10 aa, Artificial Sequence
  Peptide Derived from Human Papillomavirus
YIKDGDTTYY

SEQ ID NO: 1448 - protein, 8 aa, Artificial Sequence
  Peptide Derived from Human Papillomavirus
YITETGIW

SEQ ID NO: 1449 - protein, 8 aa, Artificial Sequence
  Peptide Derived from Human Papillomavirus
YSEISSTW

SEQ ID NO: 1450 - protein, 10 aa, Artificial Sequence
  Peptide Derived from Human Papillomavirus
YSEISSTWHW

SEQ ID NO: 1451 - protein, 11 aa, Artificial Sequence
  Peptide Derived from Human Papillomavirus
YVQFKSECEKY

SEQ ID NO: 1452 - protein, 8 aa, Artificial Sequence
  Peptide Derived from Human Papillomavirus
YVVWDSIY

SEQ ID NO: 1453 - protein, 9 aa, Artificial Sequence
  Peptide Derived from Human Papillomavirus
YVVWDSIYY

SEQ ID NO: 1454 - protein, 9 aa, Artificial Sequence
  Peptide Derived from Human Papillomavirus
ATLERTEVY

SEQ ID NO: 1455 - protein, 11 aa, Artificial Sequence
  Peptide Derived from Human Papillomavirus
ATLERTEVYQF

SEQ ID NO: 1456 - protein, 8 aa, Artificial Sequence
  Peptide Derived from Human Papillomavirus
DVSIACVY

SEQ ID NO: 1457 - protein, 10 aa, Artificial Sequence
  Peptide Derived from Human Papillomavirus
ELRYYSNSVY

SEQ ID NO: 1458 - protein, 11 aa, Artificial Sequence
  Peptide Derived from Human Papillomavirus
EVYQFAFKDLF

SEQ ID NO: 1459 - protein, 10 aa, Artificial Sequence
  Peptide Derived from Human Papillomavirus
FIVYRDCIAY

SEQ ID NO: 1460 - protein, 8 aa, Artificial Sequence
  Peptide Derived from Human Papillomavirus
HLKDKRRF

SEQ ID NO: 1461 - protein, 9 aa, Artificial Sequence
  Peptide Derived from Human Papillomavirus
IVYRDCIAY

SEQ ID NO: 1462 - protein, 8 aa, Artificial Sequence
  Peptide Derived from Human Papillomavirus
KITNTELY

SEQ ID NO: 1463 - protein, 8 aa, Artificial Sequence
  Peptide Derived from Human Papillomavirus
RIRELRYY

SEQ ID NO: 1464 - protein, 9 aa, Artificial Sequence
  Peptide Derived from Human Papillomavirus
RTEVYQFAF

SEQ ID NO: 1465 - protein, 11 aa, Artificial Sequence
  Peptide Derived from Human Papillomavirus
SLQDVSIACVY

SEQ ID NO: 1466 - protein, 11 aa, Artificial Sequence
  Peptide Derived from Human Papillomavirus
TLEKITNTELY

SEQ ID NO: 1467 - protein, 8 aa, Artificial Sequence
  Peptide Derived from Human Papillomavirus
TLERTEVY

SEQ ID NO: 1468 - protein, 10 aa, Artificial Sequence
  Peptide Derived from Human Papillomavirus
TLERTEVYQF

SEQ ID NO: 1469 - protein, 9 aa, Artificial Sequence
  Peptide Derived from Human Papillomavirus
YSRIRELRY

SEQ ID NO: 1470 - protein, 10 aa, Artificial Sequence
  Peptide Derived from Human Papillomavirus
YSRIRELRYY

SEQ ID NO: 1471 - protein, 9 aa, Artificial Sequence
  Peptide Derived from Human Papillomavirus
DLRTLQQLF

SEQ ID NO: 1472 - protein, 10 aa, Artificial Sequence
  Peptide Derived from Human Papillomavirus
ELDPVDLLCY

SEQ ID NO: 1473 - protein, 11 aa, Artificial Sequence
  Peptide Derived from Human Papillomavirus
FLSTLSFVCPW

SEQ ID NO: 1474 - protein, 10 aa, Artificial Sequence
  Peptide Derived from Human Papillomavirus
LSTLSFVCPW

SEQ ID NO: 1475 - protein, 9 aa, Artificial Sequence
  Peptide Derived from Human Papillomavirus
QLFLSTLSF

SEQ ID NO: 1476 - protein, 9 aa, Artificial Sequence
  Peptide Derived from Human Papillomavirus
STLSFVCPW

SEQ ID NO: 1477 - protein, 8 aa, Artificial Sequence
  Peptide Derived from Human Papillomavirus
TLSFVCPW

SEQ ID NO: 1478 - protein, 8 aa, Artificial Sequence
  Peptide Derived from Human Papillomavirus
ALPDPNKF

SEQ ID NO: 1479 - protein, 11 aa, Artificial Sequence
  Peptide Derived from Human Papillomavirus
ALWRPSDSTVY

SEQ ID NO: 1480 - protein, 11 aa, Artificial Sequence
  Peptide Derived from Human Papillomavirus
ASTQNPVPNTY

SEQ ID NO: 1481 - protein, 8 aa, Artificial Sequence
  Peptide Derived from Human Papillomavirus
AVPKVSAY

SEQ ID NO: 1482 - protein, 10 aa, Artificial Sequence
  Peptide Derived from Human Papillomavirus
AVPKVSAYQY

SEQ ID NO: 1483 - protein, 8 aa, Artificial Sequence
  Peptide Derived from Human Papillomavirus
CLRREQLF

SEQ ID NO: 1484 - protein, 9 aa, Artificial Sequence
  Peptide Derived from Human Papillomavirus
CVPAIGEHW

SEQ ID NO: 1485 - protein, 9 aa, Artificial Sequence
  Peptide Derived from Human Papillomavirus
DICQSICKY

SEQ ID NO: 1486 - protein, 11 aa, Artificial Sequence
  Peptide Derived from Human Papillomavirus
DLDQYPLGRKF

SEQ ID NO: 1487 - protein, 9 aa, Artificial Sequence
  Peptide Derived from Human Papillomavirus
DSQLFNKPY

SEQ ID NO: 1488 - protein, 10 aa, Artificial Sequence
  Peptide Derived from Human Papillomavirus
DSQLFNKPYW

SEQ ID NO: 1489 - protein, 9 aa, Artificial Sequence
  Peptide Derived from Human Papillomavirus
DTGYGAMDF

SEQ ID NO: 1490 - protein, 11 aa, Artificial Sequence
  Peptide Derived from Human Papillomavirus
DTTPPEKQDPY

SEQ ID NO: 1491 - protein, 8 aa, Artificial Sequence
  Peptide Derived from Human Papillomavirus
DTVPTDLY

SEQ ID NO: 1492 - protein, 10 aa, Artificial Sequence
  Peptide Derived from Human Papillomavirus
DVRDNVSVDY

SEQ ID NO: 1493 - protein, 8 aa, Artificial Sequence
  Peptide Derived from Human Papillomavirus
ETPGSCVY

SEQ ID NO: 1494 - protein, 8 aa, Artificial Sequence
  Peptide Derived from Human Papillomavirus
FLKNVNVF

SEQ ID NO: 1495 - protein, 11 aa, Artificial Sequence
  Peptide Derived from Human Papillomavirus
FLKNVNVFPIF

SEQ ID NO: 1496 - protein, 8 aa, Artificial Sequence
  Peptide Derived from Human Papillomavirus
FSSDLDQY

SEQ ID NO: 1497 - protein, 9 aa, Artificial Sequence
  Peptide Derived from Human Papillomavirus
GICWHNQLF

SEQ ID NO: 1498 - protein, 9 aa, Artificial Sequence
  Peptide Derived from Human Papillomavirus
GIGLSGHPF

SEQ ID NO: 1499 - protein, 10 aa, Artificial Sequence
  Peptide Derived from Human Papillomavirus
GIGLSGHPFY

SEQ ID NO: 1500 - protein, 8 aa, Artificial Sequence
  Peptide Derived from Human Papillomavirus
GLPDSTIY

SEQ ID NO: 1501 - protein, 8 aa, Artificial Sequence
  Peptide Derived from Human Papillomavirus
GLSGHPFY

SEQ ID NO: 1502 - protein, 11 aa, Artificial Sequence
  Peptide Derived from Human Papillomavirus
GSITTSDSQLF

SEQ ID NO: 1503 - protein, 11 aa, Artificial Sequence
  Peptide Derived from Human Papillomavirus
HSMNSSILENW

SEQ ID NO: 1504 - protein, 9 aa, Artificial Sequence
  Peptide Derived from Human Papillomavirus
HVEEYDLQF

SEQ ID NO: 1505 - protein, 11 aa, Artificial Sequence
  Peptide Derived from Human Papillomavirus
HVEEYDLQFIF

SEQ ID NO: 1506 - protein, 10 aa, Artificial Sequence
  Peptide Derived from Human Papillomavirus
IIFLKNVNVF

SEQ ID NO: 1507 - protein, 11 aa, Artificial Sequence
  Peptide Derived from Human Papillomavirus
IIIFLKNVNVF

SEQ ID NO: 1508 - protein, 10 aa, Artificial Sequence
  Peptide Derived from Human Papillomavirus
IIYGHGIIIF

SEQ ID NO: 1509 - protein, 10 aa, Artificial Sequence
  Peptide Derived from Human Papillomavirus
ITLTAEVMSY

SEQ ID NO: 1510 - protein, 9 aa, Artificial Sequence
  Peptide Derived from Human Papillomavirus
ITTSDSQLF

SEQ ID NO: 1511 - protein, 10 aa, Artificial Sequence
  Peptide Derived from Human Papillomavirus
KVSAYQYRVF

SEQ ID NO: 1512 - protein, 8 aa, Artificial Sequence
  Peptide Derived from Human Papillomavirus
LLTVGNPY

SEQ ID NO: 1513 - protein, 9 aa, Artificial Sequence
  Peptide Derived from Human Papillomavirus
LLTVGNPYF

SEQ ID NO: 1514 - protein, 8 aa, Artificial Sequence
  Peptide Derived from Human Papillomavirus
LTAEVMSY

SEQ ID NO: 1515 - protein, 8 aa, Artificial Sequence
  Peptide Derived from Human Papillomavirus
LTVGNPYF

SEQ ID NO: 1516 - protein, 11 aa, Artificial Sequence
  Peptide Derived from Human Papillomavirus
MSADPYGDSMF

SEQ ID NO: 1517 - protein, 11 aa, Artificial Sequence
  Peptide Derived from Human Papillomavirus
MVDTGYGAMDF

SEQ ID NO: 1518 - protein, 11 aa, Artificial Sequence
  Peptide Derived from Human Papillomavirus
NIIYGHGIIIF

SEQ ID NO: 1519 - protein, 11 aa, Artificial Sequence
  Peptide Derived from Human Papillomavirus
NMRETPGSCVY

SEQ ID NO: 1520 - protein, 8 aa, Artificial Sequence
  Peptide Derived from Human Papillomavirus
NSSILENW

SEQ ID NO: 1521 - protein, 10 aa, Artificial Sequence
  Peptide Derived from Human Papillomavirus
NSSILENWNF

SEQ ID NO: 1522 - protein, 8 aa, Artificial Sequence
  Peptide Derived from Human Papillomavirus
NTYDPTKF

SEQ ID NO: 1523 - protein, 11 aa, Artificial Sequence
  Peptide Derived from Human Papillomavirus
NTYDPTKFKHY

SEQ ID NO: 1524 - protein, 8 aa, Artificial Sequence
  Peptide Derived from Human Papillomavirus
NVNVFPIF

SEQ ID NO: 1525 - protein, 9 aa, Artificial Sequence
  Peptide Derived from Human Papillomavirus
PIFLQMALW

SEQ ID NO: 1526 - protein, 11 aa, Artificial Sequence
  Peptide Derived from Human Papillomavirus
PLDICQSICKY

SEQ ID NO: 1527 - protein, 11 aa, Artificial Sequence
  Peptide Derived from Human Papillomavirus
PLGIGLSGHPF

SEQ ID NO: 1528 - protein, 9 aa, Artificial Sequence
  Peptide Derived from Human Papillomavirus
PTTSLVDTY

SEQ ID NO: 1529 - protein, 11 aa, Artificial Sequence
  Peptide Derived from Human Papillomavirus
PTTSLVDTYRF

SEQ ID NO: 1530 - protein, 11 aa, Artificial Sequence
  Peptide Derived from Human Papillomavirus
PVPNTYDPTKF

SEQ ID NO: 1531 - protein, 8 aa, Artificial Sequence
  Peptide Derived from Human Papillomavirus
QLFARHFW

SEQ ID NO: 1532 - protein, 8 aa, Artificial Sequence
  Peptide Derived from Human Papillomavirus
QLFNKPYW

SEQ ID NO: 1533 - protein, 9 aa, Artificial Sequence
  Peptide Derived from Human Papillomavirus
QSICKYPDY

SEQ ID NO: 1534 - protein, 9 aa, Artificial Sequence
  Peptide Derived from Human Papillomavirus
RLLTVGNPY

SEQ ID NO: 1535 - protein, 10 aa, Artificial Sequence
  Peptide Derived from Human Papillomavirus
RLLTVGNPYF

SEQ ID NO: 1536 - protein, 10 aa, Artificial Sequence
  Peptide Derived from Human Papillomavirus
RVALPDPNKF

SEQ ID NO: 1537 - protein, 8 aa, Artificial Sequence
  Peptide Derived from Human Papillomavirus
RVVNTDDY

SEQ ID NO: 1538 - protein, 8 aa, Artificial Sequence
  Peptide Derived from Human Papillomavirus
SICKYPDY

SEQ ID NO: 1539 - protein, 8 aa, Artificial Sequence
  Peptide Derived from Human Papillomavirus
SILENWNF

SEQ ID NO: 1540 - protein, 10 aa, Artificial Sequence
  Peptide Derived from Human Papillomavirus
SITTSDSQLF

SEQ ID NO: 1541 - protein, 8 aa, Artificial Sequence
  Peptide Derived from Human Papillomavirus
SLVDTYRF

SEQ ID NO: 1542 - protein, 10 aa, Artificial Sequence
  Peptide Derived from Human Papillomavirus
SMNSSILENW

SEQ ID NO: 1543 - protein, 9 aa, Artificial Sequence
  Peptide Derived from Human Papillomavirus
SSILENWNF

SEQ ID NO: 1544 - protein, 11 aa, Artificial Sequence
  Peptide Derived from Human Papillomavirus
SSRLLTVGNPY

SEQ ID NO: 1545 - protein, 10 aa, Artificial Sequence
  Peptide Derived from Human Papillomavirus
STQNPVPNTY

SEQ ID NO: 1546 - protein, 11 aa, Artificial Sequence
  Peptide Derived from Human Papillomavirus
SVARVVNTDDY

SEQ ID NO: 1547 - protein, 11 aa, Artificial Sequence
  Peptide Derived from Human Papillomavirus
TITLTAEVMSY

SEQ ID NO: 1548 - protein, 9 aa, Artificial Sequence
  Peptide Derived from Human Papillomavirus
TLTAEVMSY

SEQ ID NO: 1549 - protein, 11 aa, Artificial Sequence
  Peptide Derived from Human Papillomavirus
TSDSQLFNKPY

SEQ ID NO: 1550 - protein, 9 aa, Artificial Sequence
  Peptide Derived from Human Papillomavirus
TSLVDTYRF

SEQ ID NO: 1551 - protein, 10 aa, Artificial Sequence
  Peptide Derived from Human Papillomavirus
TTPPEKQDPY

SEQ ID NO: 1552 - protein, 8 aa, Artificial Sequence
  Peptide Derived from Human Papillomavirus
TTSDSQLF

SEQ ID NO: 1553 - protein, 8 aa, Artificial Sequence
  Peptide Derived from Human Papillomavirus
TTSLVDTY

SEQ ID NO: 1554 - protein, 10 aa, Artificial Sequence
  Peptide Derived from Human Papillomavirus
TTSLVDTYRF

SEQ ID NO: 1555 - protein, 8 aa, Artificial Sequence
  Peptide Derived from Human Papillomavirus
TVDLKEKF

SEQ ID NO: 1556 - protein, 11 aa, Artificial Sequence
  Peptide Derived from Human Papillomavirus
VMGDTVPTDLY

SEQ ID NO: 1557 - protein, 9 aa, Artificial Sequence
  Peptide Derived from Human Papillomavirus
VSAYQYRVF

SEQ ID NO: 1558 - protein, 8 aa, Artificial Sequence
  Peptide Derived from Human Papillomavirus
VSRTSIFY

SEQ ID NO: 1559 - protein, 9 aa, Artificial Sequence
  Peptide Derived from Human Papillomavirus
WTVDLKEKF

SEQ ID NO: 1560 - protein, 9 aa, Artificial Sequence
  Peptide Derived from Human Papillomavirus
YLQMSADPY

SEQ ID NO: 1561 - protein, 8 aa, Artificial Sequence
  Peptide Derived from Human Papillomavirus
YSRHVEEY

SEQ ID NO: 1562 - protein, 8 aa, Artificial Sequence
  Peptide Derived from Human Papillomavirus
YVSRTSIF

SEQ ID NO: 1563 - protein, 9 aa, Artificial Sequence
  Peptide Derived from Human Papillomavirus
YVSRTSIFY

SEQ ID NO: 1564 - protein, 11 aa, Artificial Sequence
  Peptide Derived from Human Papillomavirus
ALSSRRGTVRF

SEQ ID NO: 1565 - protein, 9 aa, Artificial Sequence
  Peptide Derived from Human Papillomavirus
ASGAPVPTF

SEQ ID NO: 1566 - protein, 8 aa, Artificial Sequence
  Peptide Derived from Human Papillomavirus
ATNDSDLF

SEQ ID NO: 1567 - protein, 11 aa, Artificial Sequence
  Peptide Derived from Human Papillomavirus
ATNDSDLFDVY

SEQ ID NO: 1568 - protein, 11 aa, Artificial Sequence
  Peptide Derived from Human Papillomavirus
DIILPSHTPMW

SEQ ID NO: 1569 - protein, 9 aa, Artificial Sequence
  Peptide Derived from Human Papillomavirus
DLFDVYADF

SEQ ID NO: 1570 - protein, 8 aa, Artificial Sequence
  Peptide Derived from Human Papillomavirus
DSDLFDVY

SEQ ID NO: 1571 - protein, 11 aa, Artificial Sequence
  Peptide Derived from Human Papillomavirus
DSDLFDVYADF

SEQ ID NO: 1572 - protein, 10 aa, Artificial Sequence
  Peptide Derived from Human Papillomavirus
DSVSISSTSF

SEQ ID NO: 1573 - protein, 11 aa, Artificial Sequence
  Peptide Derived from Human Papillomavirus
FLTHPSSLVTF

SEQ ID NO: 1574 - protein, 11 aa, Artificial Sequence
  Peptide Derived from Human Papillomavirus
FSRLGQRATMF

SEQ ID NO: 1575 - protein, 8 aa, Artificial Sequence
  Peptide Derived from Human Papillomavirus
GIHGTQYY

SEQ ID NO: 1576 - protein, 10 aa, Artificial Sequence
  Peptide Derived from Human Papillomavirus
GIHGTQYYLW

SEQ ID NO: 1577 - protein, 8 aa, Artificial Sequence
  Peptide Derived from Human Papillomavirus
GSGGRTGY

SEQ ID NO: 1578 - protein, 10 aa, Artificial Sequence
  Peptide Derived from Human Papillomavirus
GSGSGGRTGY

SEQ ID NO: 1579 - protein, 10 aa, Artificial Sequence
  Peptide Derived from Human Papillomavirus
GTPTSGSHGY

SEQ ID NO: 1580 - protein, 9 aa, Artificial Sequence
  Peptide Derived from Human Papillomavirus
GTQYYLWPW

SEQ ID NO: 1581 - protein, 10 aa, Artificial Sequence
  Peptide Derived from Human Papillomavirus
GTQYYLWPWY

SEQ ID NO: 1582 - protein, 11 aa, Artificial Sequence
  Peptide Derived from Human Papillomavirus
GTQYYLWPWYY

SEQ ID NO: 1583 - protein, 11 aa, Artificial Sequence
  Peptide Derived from Human Papillomavirus
GTTLADKILQW

SEQ ID NO: 1584 - protein, 10 aa, Artificial Sequence
  Peptide Derived from Human Papillomavirus
IILPSHTPMW

SEQ ID NO: 1585 - protein, 9 aa, Artificial Sequence
  Peptide Derived from Human Papillomavirus
ILPSHTPMW

SEQ ID NO: 1586 - protein, 10 aa, Artificial Sequence
  Peptide Derived from Human Papillomavirus
ILQWSSLGIF

SEQ ID NO: 1587 - protein, 10 aa, Artificial Sequence
  Peptide Derived from Human Papillomavirus
ISATNDSDLF

SEQ ID NO: 1588 - protein, 11 aa, Artificial Sequence
  Peptide Derived from Human Papillomavirus
ISSTSFTNPAF

SEQ ID NO: 1589 - protein, 11 aa, Artificial Sequence
  Peptide Derived from Human Papillomavirus
KILQWSSLGIF

SEQ ID NO: 1590 - protein, 8 aa, Artificial Sequence
  Peptide Derived from Human Papillomavirus
KSFTYPKY

SEQ ID NO: 1591 - protein, 11 aa, Artificial Sequence
  Peptide Derived from Human Papillomavirus
LISATNDSDLF

SEQ ID NO: 1592 - protein, 10 aa, Artificial Sequence
  Peptide Derived from Human Papillomavirus
LSSRRGTVRF

SEQ ID NO: 1593 - protein, 10 aa, Artificial Sequence
  Peptide Derived from Human Papillomavirus
LTHPSSLVTF

SEQ ID NO: 1594 - protein, 11 aa, Artificial Sequence
  Peptide Derived from Human Papillomavirus
LTMPSTAASSY

SEQ ID NO: 1595 - protein, 10 aa, Artificial Sequence
  Peptide Derived from Human Papillomavirus
LTSAWDVPIY

SEQ ID NO: 1596 - protein, 9 aa, Artificial Sequence
  Peptide Derived from Human Papillomavirus
LVTFDNPAY

SEQ ID NO: 1597 - protein, 10 aa, Artificial Sequence
  Peptide Derived from Human Papillomavirus
NVTVPLTSAW

SEQ ID NO: 1598 - protein, 8 aa, Artificial Sequence
  Peptide Derived from Human Papillomavirus
PLDTTLSF

SEQ ID NO: 1599 - protein, 11 aa, Artificial Sequence
  Peptide Derived from Human Papillomavirus
PLTSAWDVPIY

SEQ ID NO: 1600 - protein, 8 aa, Artificial Sequence
  Peptide Derived from Human Papillomavirus
PSTAASSY

SEQ ID NO: 1601 - protein, 8 aa, Artificial Sequence
  Peptide Derived from Human Papillomavirus
PSTIHKSF

SEQ ID NO: 1602 - protein, 10 aa, Artificial Sequence
  Peptide Derived from Human Papillomavirus
PSTIHKSFTY

SEQ ID NO: 1603 - protein, 9 aa, Artificial Sequence
  Peptide Derived from Human Papillomavirus
PTFTGTSGF

SEQ ID NO: 1604 - protein, 9 aa, Artificial Sequence
  Peptide Derived from Human Papillomavirus
PTNASTTTY

SEQ ID NO: 1605 - protein, 8 aa, Artificial Sequence
  Peptide Derived from Human Papillomavirus
PTSGSHGY

SEQ ID NO: 1606 - protein, 10 aa, Artificial Sequence
  Peptide Derived from Human Papillomavirus
PTSNVPDSDF

SEQ ID NO: 1607 - protein, 11 aa, Artificial Sequence
  Peptide Derived from Human Papillomavirus
PVPTFTGTSGF

SEQ ID NO: 1608 - protein, 8 aa, Artificial Sequence
  Peptide Derived from Human Papillomavirus
QIGGRVHF

SEQ ID NO: 1609 - protein, 9 aa, Artificial Sequence
  Peptide Derived from Human Papillomavirus
QIGGRVHFY

SEQ ID NO: 1610 - protein, 10 aa, Artificial Sequence
  Peptide Derived from Human Papillomavirus
QTGEVSGNIF

SEQ ID NO: 1611 - protein, 9 aa, Artificial Sequence
  Peptide Derived from Human Papillomavirus
QVRVSTSQF

SEQ ID NO: 1612 - protein, 10 aa, Artificial Sequence
  Peptide Derived from Human Papillomavirus
RIPYFFADGF

SEQ ID NO: 1613 - protein, 9 aa, Artificial Sequence
  Peptide Derived from Human Papillomavirus
RLGQRATMF

SEQ ID NO: 1614 - protein, 8 aa, Artificial Sequence
  Peptide Derived from Human Papillomavirus
RVRGPRLY

SEQ ID NO: 1615 - protein, 10 aa, Artificial Sequence
  Peptide Derived from Human Papillomavirus
SLVTFDNPAY

SEQ ID NO: 1616 - protein, 11 aa, Artificial Sequence
  Peptide Derived from Human Papillomavirus
SSLVTFDNPAY

SEQ ID NO: 1617 - protein, 9 aa, Artificial Sequence
  Peptide Derived from Human Papillomavirus
SSRRGTVRF

SEQ ID NO: 1618 - protein, 10 aa, Artificial Sequence
  Peptide Derived from Human Papillomavirus
SSTSFTNPAF

SEQ ID NO: 1619 - protein, 9 aa, Artificial Sequence
  Peptide Derived from Human Papillomavirus
STIHKSFTY

SEQ ID NO: 1620 - protein, 9 aa, Artificial Sequence
  Peptide Derived from Human Papillomavirus
STSFTNPAF

SEQ ID NO: 1621 - protein, 11 aa, Artificial Sequence
  Peptide Derived from Human Papillomavirus
STTPSTIHKSF

SEQ ID NO: 1622 - protein, 9 aa, Artificial Sequence
  Peptide Derived from Human Papillomavirus
SVSISSTSF

SEQ ID NO: 1623 - protein, 8 aa, Artificial Sequence
  Peptide Derived from Human Papillomavirus
TIHKSFTY

SEQ ID NO: 1624 - protein, 11 aa, Artificial Sequence
  Peptide Derived from Human Papillomavirus
TIHKSFTYPKY

SEQ ID NO: 1625 - protein, 9 aa, Artificial Sequence
  Peptide Derived from Human Papillomavirus
TLADKILQW

SEQ ID NO: 1626 - protein, 10 aa, Artificial Sequence
  Peptide Derived from Human Papillomavirus
TMPSTAASSY

SEQ ID NO: 1627 - protein, 9 aa, Artificial Sequence
  Peptide Derived from Human Papillomavirus
TSAWDVPIY

SEQ ID NO: 1628 - protein, 8 aa, Artificial Sequence
  Peptide Derived from Human Papillomavirus
TSFTNPAF

SEQ ID NO: 1629 - protein, 9 aa, Artificial Sequence
  Peptide Derived from Human Papillomavirus
TSNVPDSDF

SEQ ID NO: 1630 - protein, 11 aa, Artificial Sequence
  Peptide Derived from Human Papillomavirus
TSPTNASTTTY

SEQ ID NO: 1631 - protein, 10 aa, Artificial Sequence
  Peptide Derived from Human Papillomavirus
TTLADKILQW

SEQ ID NO: 1632 - protein, 10 aa, Artificial Sequence
  Peptide Derived from Human Papillomavirus
TTPSTIHKSF

SEQ ID NO: 1633 - protein, 11 aa, Artificial Sequence
  Peptide Derived from Human Papillomavirus
TTYIGIHGTQY

SEQ ID NO: 1634 - protein, 8 aa, Artificial Sequence
  Peptide Derived from Human Papillomavirus
TVPLTSAW

SEQ ID NO: 1635 - protein, 11 aa, Artificial Sequence
  Peptide Derived from Human Papillomavirus
TVRRVRGPRLY

SEQ ID NO: 1636 - protein, 8 aa, Artificial Sequence
  Peptide Derived from Human Papillomavirus
VSISSTSF

SEQ ID NO: 1637 - protein, 8 aa, Artificial Sequence
  Peptide Derived from Human Papillomavirus
VTFDNPAY

SEQ ID NO: 1638 - protein, 9 aa, Artificial Sequence
  Peptide Derived from Human Papillomavirus
VTVPLTSAW

SEQ ID NO: 1639 - protein, 11 aa, Artificial Sequence
  Peptide Derived from Human Papillomavirus
VVASGAPVPTF

SEQ ID NO: 1640 - protein, 9 aa, Artificial Sequence
  Peptide Derived from Human Papillomavirus
YIGIHGTQY

SEQ ID NO: 1641 - protein, 10 aa, Artificial Sequence
  Peptide Derived from Human Papillomavirus
YIGIHGTQYY

SEQ ID NO: 1642 - protein, 8 aa, Artificial Sequence
  Peptide Derived from Human Papillomavirus
YLWPWYYY

SEQ ID NO: 1643 - protein, 9 aa, Artificial Sequence
  Peptide Derived from Human Papillomavirus
YLWPWYYYF

SEQ ID NO: 1644 - protein, 10 aa, Artificial Sequence
  Peptide Derived from Human Papillomavirus
ALESLSTTIY

SEQ ID NO: 1645 - protein, 9 aa, Artificial Sequence
  Peptide Derived from Human Papillomavirus
CMQYVAWKY

SEQ ID NO: 1646 - protein, 11 aa, Artificial Sequence
  Peptide Derived from Human Papillomavirus
CMQYVAWKYIY

SEQ ID NO: 1647 - protein, 10 aa, Artificial Sequence
  Peptide Derived from Human Papillomavirus
CSGVDYRGIY

SEQ ID NO: 1648 - protein, 11 aa, Artificial Sequence
  Peptide Derived from Human Papillomavirus
CSGVDYRGIYY

SEQ ID NO: 1649 - protein, 9 aa, Artificial Sequence
  Peptide Derived from Human Papillomavirus
DSVSSTCRY

SEQ ID NO: 1650 - protein, 8 aa, Artificial Sequence
  Peptide Derived from Human Papillomavirus
DVTSTYHW

SEQ ID NO: 1651 - protein, 11 aa, Artificial Sequence
  Peptide Derived from Human Papillomavirus
ELWLTEPKKCF

SEQ ID NO: 1652 - protein, 8 aa, Artificial Sequence
  Peptide Derived from Human Papillomavirus
ESLSTTIY

SEQ ID NO: 1653 - protein, 10 aa, Artificial Sequence
  Peptide Derived from Human Papillomavirus
EVHMENESIY

SEQ ID NO: 1654 - protein, 11 aa, Artificial Sequence
  Peptide Derived from Human Papillomavirus
FLSHVKIPVVY

SEQ ID NO: 1655 - protein, 8 aa, Artificial Sequence
  Peptide Derived from Human Papillomavirus
FVDVTSTY

SEQ ID NO: 1656 - protein, 10 aa, Artificial Sequence
  Peptide Derived from Human Papillomavirus
FVDVTSTYHW

SEQ ID NO: 1657 - protein, 9 aa, Artificial Sequence
  Peptide Derived from Human Papillomavirus
GSKNNCMQY

SEQ ID NO: 1658 - protein, 8 aa, Artificial Sequence
  Peptide Derived from Human Papillomavirus
GVDYRGIY

SEQ ID NO: 1659 - protein, 9 aa, Artificial Sequence
  Peptide Derived from Human Papillomavirus
GVDYRGIYY

SEQ ID NO: 1660 - protein, 8 aa, Artificial Sequence
  Peptide Derived from Human Papillomavirus
HMENESIY

SEQ ID NO: 1661 - protein, 8 aa, Artificial Sequence
  Peptide Derived from Human Papillomavirus
HVKIPVVY

SEQ ID NO: 1662 - protein, 10 aa, Artificial Sequence
  Peptide Derived from Human Papillomavirus
KIPVVYRLVW

SEQ ID NO: 1663 - protein, 11 aa, Artificial Sequence
  Peptide Derived from Human Papillomavirus
KTLFVDVTSTY

SEQ ID NO: 1664 - protein, 8 aa, Artificial Sequence
  Peptide Derived from Human Papillomavirus
KVCSGVDY

SEQ ID NO: 1665 - protein, 10 aa, Artificial Sequence
  Peptide Derived from Human Papillomavirus
LSHVKIPVVY

SEQ ID NO: 1666 - protein, 11 aa, Artificial Sequence
  Peptide Derived from Human Papillomavirus
LSTTIYNNEEW

SEQ ID NO: 1667 - protein, 8 aa, Artificial Sequence
  Peptide Derived from Human Papillomavirus
LTEPKKCF

SEQ ID NO: 1668 - protein, 11 aa, Artificial Sequence
  Peptide Derived from Human Papillomavirus
NVSPVETVNEY

SEQ ID NO: 1669 - protein, 8 aa, Artificial Sequence
  Peptide Derived from Human Papillomavirus
PVETVNEY

SEQ ID NO: 1670 - protein, 8 aa, Artificial Sequence
  Peptide Derived from Human Papillomavirus
PVVYRLVW

SEQ ID NO: 1671 - protein, 9 aa, Artificial Sequence
  Peptide Derived from Human Papillomavirus
RLKCCRYRF

SEQ ID NO: 1672 - protein, 10 aa, Artificial Sequence
  Peptide Derived from Human Papillomavirus
STTIYNNEEW

SEQ ID NO: 1673 - protein, 8 aa, Artificial Sequence
  Peptide Derived from Human Papillomavirus
SVSSTCRY

SEQ ID NO: 1674 - protein, 8 aa, Artificial Sequence
  Peptide Derived from Human Papillomavirus
TIYNNEEW

SEQ ID NO: 1675 - protein, 10 aa, Artificial Sequence
  Peptide Derived from Human Papillomavirus
TLFVDVTSTY

SEQ ID NO: 1676 - protein, 10 aa, Artificial Sequence
  Peptide Derived from Human Papillomavirus
TLRDTCEELW

SEQ ID NO: 1677 - protein, 8 aa, Artificial Sequence
  Peptide Derived from Human Papillomavirus
TSTDNKNY

SEQ ID NO: 1678 - protein, 9 aa, Artificial Sequence
  Peptide Derived from Human Papillomavirus
TTIYNNEEW

SEQ ID NO: 1679 - protein, 10 aa, Artificial Sequence
  Peptide Derived from Human Papillomavirus
VSPVETVNEY

SEQ ID NO: 1680 - protein, 9 aa, Artificial Sequence
  Peptide Derived from Human Papillomavirus
WLTEPKKCF

SEQ ID NO: 1681 - protein, 11 aa, Artificial Sequence
  Peptide Derived from Human Papillomavirus
WTLRDTCEELW

SEQ ID NO: 1682 - protein, 9 aa, Artificial Sequence
  Peptide Derived from Human Papillomavirus
WTSTDNKNY

SEQ ID NO: 1683 - protein, 10 aa, Artificial Sequence
  Peptide Derived from Human Papillomavirus
YIYYNGDCGW

SEQ ID NO: 1684 - protein, 8 aa, Artificial Sequence
  Peptide Derived from Human Papillomavirus
YSIITIIY

SEQ ID NO: 1685 - protein, 11 aa, Artificial Sequence
  Peptide Derived from Human Papillomavirus
YTDFEQEAKKF

SEQ ID NO: 1686 - protein, 8 aa, Artificial Sequence
  Peptide Derived from Human Papillomavirus
YVAWKYIY

SEQ ID NO: 1687 - protein, 9 aa, Artificial Sequence
  Peptide Derived from Human Papillomavirus
YVAWKYIYY

SEQ ID NO: 1688 - protein, 9 aa, Artificial Sequence
  Peptide Derived from Human Papillomavirus
YVHDGHKTY

SEQ ID NO: 1689 - protein, 10 aa, Artificial Sequence
  Peptide Derived from Human Papillomavirus
YVHDGHKTYY

SEQ ID NO: 1690 - protein, 9 aa, Artificial Sequence
  Peptide Derived from Human Papillomavirus
AVCRVCLLF

SEQ ID NO: 1691 - protein, 10 aa, Artificial Sequence
  Peptide Derived from Human Papillomavirus
AVCRVCLLFY

SEQ ID NO: 1692 - protein, 11 aa, Artificial Sequence
  Peptide Derived from Human Papillomavirus
CLLFYSKVRKY

SEQ ID NO: 1693 - protein, 8 aa, Artificial Sequence
  Peptide Derived from Human Papillomavirus
CTELKLVY

SEQ ID NO: 1694 - protein, 8 aa, Artificial Sequence
  Peptide Derived from Human Papillomavirus
DLRLSCVY

SEQ ID NO: 1695 - protein, 10 aa, Artificial Sequence
  Peptide Derived from Human Papillomavirus
ELKLVYRDDF

SEQ ID NO: 1696 - protein, 8 aa, Artificial Sequence
  Peptide Derived from Human Papillomavirus
ELTRAEVY

SEQ ID NO: 1697 - protein, 10 aa, Artificial Sequence
  Peptide Derived from Human Papillomavirus
ELTRAEVYNF

SEQ ID NO: 1698 - protein, 8 aa, Artificial Sequence
  Peptide Derived from Human Papillomavirus
KLVYRDDF

SEQ ID NO: 1699 - protein, 10 aa, Artificial Sequence
  Peptide Derived from Human Papillomavirus
KLVYRDDFPY

SEQ ID NO: 1700 - protein, 8 aa, Artificial Sequence
  Peptide Derived from Human Papillomavirus
KVRKYRYY

SEQ ID NO: 1701 - protein, 10 aa, Artificial Sequence
  Peptide Derived from Human Papillomavirus
KVRKYRYYDY

SEQ ID NO: 1702 - protein, 10 aa, Artificial Sequence
  Peptide Derived from Human Papillomavirus
LIDLRLSCVY

SEQ ID NO: 1703 - protein, 10 aa, Artificial Sequence
  Peptide Derived from Human Papillomavirus
LLFYSKVRKY

SEQ ID NO: 1704 - protein, 9 aa, Artificial Sequence
  Peptide Derived from Human Papillomavirus
LTRAEVYNF

SEQ ID NO: 1705 - protein, 9 aa, Artificial Sequence
  Peptide Derived from Human Papillomavirus
LVYRDDFPY

SEQ ID NO: 1706 - protein, 11 aa, Artificial Sequence
  Peptide Derived from Human Papillomavirus
PLIDLRLSCVY

SEQ ID NO: 1707 - protein, 10 aa, Artificial Sequence
  Peptide Derived from Human Papillomavirus
QLCDLLIRCY

SEQ ID NO: 1708 - protein, 10 aa, Artificial Sequence
  Peptide Derived from Human Papillomavirus
QLHCDRKRRF

SEQ ID NO: 1709 - protein, 9 aa, Artificial Sequence
  Peptide Derived from Human Papillomavirus
WTGSCLGCW

SEQ ID NO: 1710 - protein, 9 aa, Artificial Sequence
  Peptide Derived from Human Papillomavirus
YSKVRKYRY

SEQ ID NO: 1711 - protein, 10 aa, Artificial Sequence
  Peptide Derived from Human Papillomavirus
YSKVRKYRYY

SEQ ID NO: 1712 - protein, 9 aa, Artificial Sequence
  Peptide Derived from Human Papillomavirus
HVPCCECKF

SEQ ID NO: 1713 - protein, 11 aa, Artificial Sequence
  Peptide Derived from Human Papillomavirus
LIHVPCCECKF

SEQ ID NO: 1714 - protein, 8 aa, Artificial Sequence
  Peptide Derived from Human Papillomavirus
ATEQLSKY

SEQ ID NO: 1715 - protein, 8 aa, Artificial Sequence
  Peptide Derived from Human Papillomavirus
ATSLEDKY

SEQ ID NO: 1716 - protein, 10 aa, Artificial Sequence
  Peptide Derived from Human Papillomavirus
ATSLEDKYRY

SEQ ID NO: 1717 - protein, 11 aa, Artificial Sequence
  Peptide Derived from Human Papillomavirus
ATWRPSENKVY

SEQ ID NO: 1718 - protein, 8 aa, Artificial Sequence
  Peptide Derived from Human Papillomavirus
AVNVFPIF

SEQ ID NO: 1719 - protein, 9 aa, Artificial Sequence
  Peptide Derived from Human Papillomavirus
CTPAMGEHW

SEQ ID NO: 1720 - protein, 9 aa, Artificial Sequence
  Peptide Derived from Human Papillomavirus
DIVQSTCKY

SEQ ID NO: 1721 - protein, 11 aa, Artificial Sequence
  Peptide Derived from Human Papillomavirus
DLDQFPLGRKF

SEQ ID NO: 1722 - protein, 10 aa, Artificial Sequence
  Peptide Derived from Human Papillomavirus
DSFSTDLDQF

SEQ ID NO: 1723 - protein, 10 aa, Artificial Sequence
  Peptide Derived from Human Papillomavirus
DSYVKRTSIF

SEQ ID NO: 1724 - protein, 11 aa, Artificial Sequence
  Peptide Derived from Human Papillomavirus
DSYVKRTSIFY

SEQ ID NO: 1725 - protein, 9 aa, Artificial Sequence
  Peptide Derived from Human Papillomavirus
DTGFGAMDF

SEQ ID NO: 1726 - protein, 8 aa, Artificial Sequence
  Peptide Derived from Human Papillomavirus
DVGAVNVF

SEQ ID NO: 1727 - protein, 11 aa, Artificial Sequence
  Peptide Derived from Human Papillomavirus
DVGAVNVFPIF

SEQ ID NO: 1728 - protein, 8 aa, Artificial Sequence
  Peptide Derived from Human Papillomavirus
DVNLQDSF

SEQ ID NO: 1729 - protein, 8 aa, Artificial Sequence
  Peptide Derived from Human Papillomavirus
ETIPAELY

SEQ ID NO: 1730 - protein, 10 aa, Artificial Sequence
  Peptide Derived from Human Papillomavirus
FLDVGAVNVF

SEQ ID NO: 1731 - protein, 8 aa, Artificial Sequence
  Peptide Derived from Human Papillomavirus
FSTDLDQF

SEQ ID NO: 1732 - protein, 9 aa, Artificial Sequence
  Peptide Derived from Human Papillomavirus
GICWGNQLF

SEQ ID NO: 1733 - protein, 8 aa, Artificial Sequence
  Peptide Derived from Human Papillomavirus
GLPDTNIY

SEQ ID NO: 1734 - protein, 8 aa, Artificial Sequence
  Peptide Derived from Human Papillomavirus
GLSGHPLF

SEQ ID NO: 1735 - protein, 11 aa, Artificial Sequence
  Peptide Derived from Human Papillomavirus
GSMITSEAQLF

SEQ ID NO: 1736 - protein, 9 aa, Artificial Sequence
  Peptide Derived from Human Papillomavirus
HVEEYELQF

SEQ ID NO: 1737 - protein, 11 aa, Artificial Sequence
  Peptide Derived from Human Papillomavirus
HVEEYELQFVF

SEQ ID NO: 1738 - protein, 11 aa, Artificial Sequence
  Peptide Derived from Human Papillomavirus
ISTATEQLSKY

SEQ ID NO: 1739 - protein, 10 aa, Artificial Sequence
  Peptide Derived from Human Papillomavirus
ITLSAEVMAY

SEQ ID NO: 1740 - protein, 8 aa, Artificial Sequence
  Peptide Derived from Human Papillomavirus
ITSEAQLF

SEQ ID NO: 1741 - protein, 8 aa, Artificial Sequence
  Peptide Derived from Human Papillomavirus
IVQSTCKY

SEQ ID NO: 1742 - protein, 11 aa, Artificial Sequence
  Peptide Derived from Human Papillomavirus
IVQSTCKYPDY

SEQ ID NO: 1743 - protein, 11 aa, Artificial Sequence
  Peptide Derived from Human Papillomavirus
KITLSAEVMAY

SEQ ID NO: 1744 - protein, 10 aa, Artificial Sequence
  Peptide Derived from Human Papillomavirus
KTNIPKVSAY

SEQ ID NO: 1745 - protein, 11 aa, Artificial Sequence
  Peptide Derived from Human Papillomavirus
KVGETIPAELY

SEQ ID NO: 1746 - protein, 10 aa, Artificial Sequence
  Peptide Derived from Human Papillomavirus
KVSAYQYRVF

SEQ ID NO: 1747 - protein, 8 aa, Artificial Sequence
  Peptide Derived from Human Papillomavirus
KVVATDSY

SEQ ID NO: 1748 - protein, 8 aa, Artificial Sequence
  Peptide Derived from Human Papillomavirus
LLAVGHPY

SEQ ID NO: 1749 - protein, 9 aa, Artificial Sequence
  Peptide Derived from Human Papillomavirus
LLAVGHPYY

SEQ ID NO: 1750 - protein, 8 aa, Artificial Sequence
  Peptide Derived from Human Papillomavirus
LSAEVMAY

SEQ ID NO: 1751 - protein, 11 aa, Artificial Sequence
  Peptide Derived from Human Papillomavirus
MIDTGFGAMDF

SEQ ID NO: 1752 - protein, 9 aa, Artificial Sequence
  Peptide Derived from Human Papillomavirus
MITSEAQLF

SEQ ID NO: 1753 - protein, 8 aa, Artificial Sequence
  Peptide Derived from Human Papillomavirus
MLPMMYIY

SEQ ID NO: 1754 - protein, 9 aa, Artificial Sequence
  Peptide Derived from Human Papillomavirus
MMLPMMYIY

SEQ ID NO: 1755 - protein, 11 aa, Artificial Sequence
  Peptide Derived from Human Papillomavirus
MSADAYGDSMW

SEQ ID NO: 1756 - protein, 8 aa, Artificial Sequence
  Peptide Derived from Human Papillomavirus
NIPKVSAY

SEQ ID NO: 1757 - protein, 10 aa, Artificial Sequence
  Peptide Derived from Human Papillomavirus
NIPKVSAYQY

SEQ ID NO: 1758 - protein, 10 aa, Artificial Sequence
  Peptide Derived from Human Papillomavirus
NMNANLLEDW

SEQ ID NO: 1759 - protein, 9 aa, Artificial Sequence
  Peptide Derived from Human Papillomavirus
PIFLQMATW

SEQ ID NO: 1760 - protein, 8 aa, Artificial Sequence
  Peptide Derived from Human Papillomavirus
PLAKYKFW

SEQ ID NO: 1761 - protein, 11 aa, Artificial Sequence
  Peptide Derived from Human Papillomavirus
PLDIVQSTCKY

SEQ ID NO: 1762 - protein, 9 aa, Artificial Sequence
  Peptide Derived from Human Papillomavirus
PLHYGLCIF

SEQ ID NO: 1763 - protein, 11 aa, Artificial Sequence
  Peptide Derived from Human Papillomavirus
PTEKQDPLAKY

SEQ ID NO: 1764 - protein, 10 aa, Artificial Sequence
  Peptide Derived from Human Papillomavirus
PVATSLEDKY

SEQ ID NO: 1765 - protein, 11 aa, Artificial Sequence
  Peptide Derived from Human Papillomavirus
PVSKVVATDSY

SEQ ID NO: 1766 - protein, 8 aa, Artificial Sequence
  Peptide Derived from Human Papillomavirus
QLFARHYF

SEQ ID NO: 1767 - protein, 8 aa, Artificial Sequence
  Peptide Derived from Human Papillomavirus
QLFNKPYW

SEQ ID NO: 1768 - protein, 9 aa, Artificial Sequence
  Peptide Derived from Human Papillomavirus
QSTCKYPDY

SEQ ID NO: 1769 - protein, 9 aa, Artificial Sequence
  Peptide Derived from Human Papillomavirus
RLLAVGHPY

SEQ ID NO: 1770 - protein, 10 aa, Artificial Sequence
  Peptide Derived from Human Papillomavirus
RLLAVGHPYY

SEQ ID NO: 1771 - protein, 8 aa, Artificial Sequence
  Peptide Derived from Human Papillomavirus
RLPDPNKF

SEQ ID NO: 1772 - protein, 10 aa, Artificial Sequence
  Peptide Derived from Human Papillomavirus
RVRLPDPNKF

SEQ ID NO: 1773 - protein, 8 aa, Artificial Sequence
  Peptide Derived from Human Papillomavirus
SLEDKYRY

SEQ ID NO: 1774 - protein, 10 aa, Artificial Sequence
  Peptide Derived from Human Papillomavirus
SMITSEAQLF

SEQ ID NO: 1775 - protein, 11 aa, Artificial Sequence
  Peptide Derived from Human Papillomavirus
SSRLLAVGHPY

SEQ ID NO: 1776 - protein, 10 aa, Artificial Sequence
  Peptide Derived from Human Papillomavirus
STATEQLSKY

SEQ ID NO: 1777 - protein, 8 aa, Artificial Sequence
  Peptide Derived from Human Papillomavirus
STCKYPDY

SEQ ID NO: 1778 - protein, 9 aa, Artificial Sequence
  Peptide Derived from Human Papillomavirus
TLSAEVMAY

SEQ ID NO: 1779 - protein, 11 aa, Artificial Sequence
  Peptide Derived from Human Papillomavirus
TSEAQLFNKPY

SEQ ID NO: 1780 - protein, 9 aa, Artificial Sequence
  Peptide Derived from Human Papillomavirus
TSLEDKYRY

SEQ ID NO: 1781 - protein, 9 aa, Artificial Sequence
  Peptide Derived from Human Papillomavirus
VSAYQYRVF

SEQ ID NO: 1782 - protein, 10 aa, Artificial Sequence
  Peptide Derived from Human Papillomavirus
VSKVVATDSY

SEQ ID NO: 1783 - protein, 10 aa, Artificial Sequence
  Peptide Derived from Human Papillomavirus
YIYRDPPLHY

SEQ ID NO: 1784 - protein, 9 aa, Artificial Sequence
  Peptide Derived from Human Papillomavirus
YLKMSADAY

SEQ ID NO: 1785 - protein, 8 aa, Artificial Sequence
  Peptide Derived from Human Papillomavirus
YLRHVEEY

SEQ ID NO: 1786 - protein, 8 aa, Artificial Sequence
  Peptide Derived from Human Papillomavirus
YLRREQLF

SEQ ID NO: 1787 - protein, 8 aa, Artificial Sequence
  Peptide Derived from Human Papillomavirus
YVKRTSIF

SEQ ID NO: 1788 - protein, 9 aa, Artificial Sequence
  Peptide Derived from Human Papillomavirus
YVKRTSIFY

SEQ ID NO: 1789 - protein, 8 aa, Artificial Sequence
  Peptide Derived from Human Papillomavirus
ALWPVYFF

SEQ ID NO: 1790 - protein, 11 aa, Artificial Sequence
  Peptide Derived from Human Papillomavirus
ATLVSADNPLF

SEQ ID NO: 1791 - protein, 11 aa, Artificial Sequence
  Peptide Derived from Human Papillomavirus
DIVLPTGPSTW

SEQ ID NO: 1792 - protein, 11 aa, Artificial Sequence
  Peptide Derived from Human Papillomavirus
DVVNKIEQKTW

SEQ ID NO: 1793 - protein, 9 aa, Artificial Sequence
  Peptide Derived from Human Papillomavirus
DVYIQGSSF

SEQ ID NO: 1794 - protein, 9 aa, Artificial Sequence
  Peptide Derived from Human Papillomavirus
ESGAGIPNF

SEQ ID NO: 1795 - protein, 10 aa, Artificial Sequence
  Peptide Derived from Human Papillomavirus
FTTRRGGVRF

SEQ ID NO: 1796 - protein, 11 aa, Artificial Sequence
  Peptide Derived from Human Papillomavirus
GIPNFTGSGGF

SEQ ID NO: 1797 - protein, 8 aa, Artificial Sequence
  Peptide Derived from Human Papillomavirus
GSGGRAGY

SEQ ID NO: 1798 - protein, 10 aa, Artificial Sequence
  Peptide Derived from Human Papillomavirus
GSSFALWPVY

SEQ ID NO: 1799 - protein, 11 aa, Artificial Sequence
  Peptide Derived from Human Papillomavirus
GSSFALWPVYF

SEQ ID NO: 1800 - protein, 8 aa, Artificial Sequence
  Peptide Derived from Human Papillomavirus
GTDTSLAF

SEQ ID NO: 1801 - protein, 10 aa, Artificial Sequence
  Peptide Derived from Human Papillomavirus
GTGSGGRAGY

SEQ ID NO: 1802 - protein, 10 aa, Artificial Sequence
  Peptide Derived from Human Papillomavirus
GTQIGARVHY

SEQ ID NO: 1803 - protein, 11 aa, Artificial Sequence
  Peptide Derived from Human Papillomavirus
GTQIGARVHYY

SEQ ID NO: 1804 - protein, 8 aa, Artificial Sequence
  Peptide Derived from Human Papillomavirus
GVAPDPDF

SEQ ID NO: 1805 - protein, 11 aa, Artificial Sequence
  Peptide Derived from Human Papillomavirus
HLPIKPSTLSF

SEQ ID NO: 1806 - protein, 11 aa, Artificial Sequence
  Peptide Derived from Human Papillomavirus
HSYEEIPMQTF

SEQ ID NO: 1807 - protein, 8 aa, Artificial Sequence
  Peptide Derived from Human Papillomavirus
ILQWGSLF

SEQ ID NO: 1808 - protein, 10 aa, Artificial Sequence
  Peptide Derived from Human Papillomavirus
ILQWGSLFTY

SEQ ID NO: 1809 - protein, 11 aa, Artificial Sequence
  Peptide Derived from Human Papillomavirus
ILQWGSLFTYF

SEQ ID NO: 1810 - protein, 9 aa, Artificial Sequence
  Peptide Derived from Human Papillomavirus
ISSTPIPGF

SEQ ID NO: 1811 - protein, 11 aa, Artificial Sequence
  Peptide Derived from Human Papillomavirus
ISTPTSGIHSY

SEQ ID NO: 1812 - protein, 9 aa, Artificial Sequence
  Peptide Derived from Human Papillomavirus
IVALHRPAF

SEQ ID NO: 1813 - protein, 10 aa, Artificial Sequence
  Peptide Derived from Human Papillomavirus
IVLPTGPSTW

SEQ ID NO: 1814 - protein, 9 aa, Artificial Sequence
  Peptide Derived from Human Papillomavirus
KILQWGSLF

SEQ ID NO: 1815 - protein, 11 aa, Artificial Sequence
  Peptide Derived from Human Papillomavirus
KILQWGSLFTY

SEQ ID NO: 1816 - protein, 10 aa, Artificial Sequence
  Peptide Derived from Human Papillomavirus
KTWADKILQW

SEQ ID NO: 1817 - protein, 8 aa, Artificial Sequence
  Peptide Derived from Human Papillomavirus
LLSANNSF

SEQ ID NO: 1818 - protein, 11 aa, Artificial Sequence
  Peptide Derived from Human Papillomavirus
LSANNSFDGLY

SEQ ID NO: 1819 - protein, 9 aa, Artificial Sequence
  Peptide Derived from Human Papillomavirus
LVSADNPLF

SEQ ID NO: 1820 - protein, 10 aa, Artificial Sequence
  Peptide Derived from Human Papillomavirus
NIVALHRPAF

SEQ ID NO: 1821 - protein, 10 aa, Artificial Sequence
  Peptide Derived from Human Papillomavirus
NSFDGLYDIY

SEQ ID NO: 1822 - protein, 10 aa, Artificial Sequence
  Peptide Derived from Human Papillomavirus
NVTAPLGNVW

SEQ ID NO: 1823 - protein, 8 aa, Artificial Sequence
  Peptide Derived from Human Papillomavirus
NVWETPFY

SEQ ID NO: 1824 - protein, 9 aa, Artificial Sequence
  Peptide Derived from Human Papillomavirus
PIKPSTLSF

SEQ ID NO: 1825 - protein, 10 aa, Artificial Sequence
  Peptide Derived from Human Papillomavirus
PISSTPIPGF

SEQ ID NO: 1826 - protein, 10 aa, Artificial Sequence
  Peptide Derived from Human Papillomavirus
PLGNVWETPF

SEQ ID NO: 1827 - protein, 11 aa, Artificial Sequence
  Peptide Derived from Human Papillomavirus
PLGNVWETPFY

SEQ ID NO: 1828 - protein, 9 aa, Artificial Sequence
  Peptide Derived from Human Papillomavirus
PLLSANNSF

SEQ ID NO: 1829 - protein, 10 aa, Artificial Sequence
  Peptide Derived from Human Papillomavirus
PSGVAPDPDF

SEQ ID NO: 1830 - protein, 9 aa, Artificial Sequence
  Peptide Derived from Human Papillomavirus
PTGPSTWPF

SEQ ID NO: 1831 - protein, 8 aa, Artificial Sequence
  Peptide Derived from Human Papillomavirus
PTSGIHSY

SEQ ID NO: 1832 - protein, 8 aa, Artificial Sequence
  Peptide Derived from Human Papillomavirus
QIGARVHY

SEQ ID NO: 1833 - protein, 9 aa, Artificial Sequence
  Peptide Derived from Human Papillomavirus
QIGARVHYY

SEQ ID NO: 1834 - protein, 10 aa, Artificial Sequence
  Peptide Derived from Human Papillomavirus
QIGARVHYYY

SEQ ID NO: 1835 - protein, 11 aa, Artificial Sequence
  Peptide Derived from Human Papillomavirus
QSPYDVTHDVY

SEQ ID NO: 1836 - protein, 9 aa, Artificial Sequence
  Peptide Derived from Human Papillomavirus
QVKVTDPAF

SEQ ID NO: 1837 - protein, 8 aa, Artificial Sequence
  Peptide Derived from Human Papillomavirus
RIAAPRLY

SEQ ID NO: 1838 - protein, 9 aa, Artificial Sequence
  Peptide Derived from Human Papillomavirus
SSFALWPVY

SEQ ID NO: 1839 - protein, 10 aa, Artificial Sequence
  Peptide Derived from Human Papillomavirus
SSFALWPVYF

SEQ ID NO: 1840 - protein, 11 aa, Artificial Sequence
  Peptide Derived from Human Papillomavirus
SSFALWPVYFF

SEQ ID NO: 1841 - protein, 10 aa, Artificial Sequence
  Peptide Derived from Human Papillomavirus
SSTHITNPLF

SEQ ID NO: 1842 - protein, 8 aa, Artificial Sequence
  Peptide Derived from Human Papillomavirus
SSTPIPGF

SEQ ID NO: 1843 - protein, 9 aa, Artificial Sequence
  Peptide Derived from Human Papillomavirus
STHITNPLF

SEQ ID NO: 1844 - protein, 10 aa, Artificial Sequence
  Peptide Derived from Human Papillomavirus
STPTSGIHSY

SEQ ID NO: 1845 - protein, 11 aa, Artificial Sequence
  Peptide Derived from Human Papillomavirus
STWPFVPQSPY

SEQ ID NO: 1846 - protein, 10 aa, Artificial Sequence
  Peptide Derived from Human Papillomavirus
TLVSADNPLF

SEQ ID NO: 1847 - protein, 9 aa, Artificial Sequence
  Peptide Derived from Human Papillomavirus
TTRRGGVRF

SEQ ID NO: 1848 - protein, 11 aa, Artificial Sequence
  Peptide Derived from Human Papillomavirus
VIESGAGIPNF

SEQ ID NO: 1849 - protein, 9 aa, Artificial Sequence
  Peptide Derived from Human Papillomavirus
VLPTGPSTW

SEQ ID NO: 1850 - protein, 11 aa, Artificial Sequence
  Peptide Derived from Human Papillomavirus
VLPTGPSTWPF

SEQ ID NO: 1851 - protein, 8 aa, Artificial Sequence
  Peptide Derived from Human Papillomavirus
VSADNPLF

SEQ ID NO: 1852 - protein, 11 aa, Artificial Sequence
  Peptide Derived from Human Papillomavirus
VSSTHITNPLF

SEQ ID NO: 1853 - protein, 9 aa, Artificial Sequence
  Peptide Derived from Human Papillomavirus
VTAPLGNVW

SEQ ID NO: 1854 - protein, 10 aa, Artificial Sequence
  Peptide Derived from Human Papillomavirus
VVNKIEQKTW

SEQ ID NO: 1855 - protein, 10 aa, Artificial Sequence
  Peptide Derived from Human Papillomavirus
YIQGSSFALW

SEQ ID NO: 1856 - protein, 9 aa, Artificial Sequence
  Peptide Derived from Human Papillomavirus
AAALYWYKT

SEQ ID NO: 1857 - protein, 11 aa, Artificial Sequence
  Peptide Derived from Human Papillomavirus
AAALYWYKTGI

SEQ ID NO: 1858 - protein, 9 aa, Artificial Sequence
  Peptide Derived from Human Papillomavirus
AAFGLTPSI

SEQ ID NO: 1859 - protein, 10 aa, Artificial Sequence
  Peptide Derived from Human Papillomavirus
AAFGLTPSIA

SEQ ID NO: 1860 - protein, 8 aa, Artificial Sequence
  Peptide Derived from Human Papillomavirus
AALYWYKT

SEQ ID NO: 1861 - protein, 10 aa, Artificial Sequence
  Peptide Derived from Human Papillomavirus
AALYWYKTGI

SEQ ID NO: 1862 - protein, 10 aa, Artificial Sequence
  Peptide Derived from Human Papillomavirus
AAMLAKFKEL

SEQ ID NO: 1863 - protein, 8 aa, Artificial Sequence
  Peptide Derived from Human Papillomavirus
AANTGKSL

SEQ ID NO: 1864 - protein, 11 aa, Artificial Sequence
  Peptide Derived from Human Papillomavirus
AANTGKSLFGM

SEQ ID NO: 1865 - protein, 10 aa, Artificial Sequence
  Peptide Derived from Human Papillomavirus
AICIEKQSRA

SEQ ID NO: 1866 - protein, 11 aa, Artificial Sequence
  Peptide Derived from Human Papillomavirus
AICIEKQSRAA

SEQ ID NO: 1867 - protein, 9 aa, Artificial Sequence
  Peptide Derived from Human Papillomavirus
ALDGNLVSM

SEQ ID NO: 1868 - protein, 11 aa, Artificial Sequence
  Peptide Derived from Human Papillomavirus
ALDGNLVSMDV

SEQ ID NO: 1869 - protein, 8 aa, Artificial Sequence
  Peptide Derived from Human Papillomavirus
ALFTAQEA

SEQ ID NO: 1870 - protein, 9 aa, Artificial Sequence
  Peptide Derived from Human Papillomavirus
ALKRFLQGI

SEQ ID NO: 1871 - protein, 9 aa, Artificial Sequence
  Peptide Derived from Human Papillomavirus
ALYWYKTGI

SEQ ID NO: 1872 - protein, 9 aa, Artificial Sequence
  Peptide Derived from Human Papillomavirus
AMLAKFKEL

SEQ ID NO: 1873 - protein, 10 aa, Artificial Sequence
  Peptide Derived from Human Papillomavirus
AQEAKQHRDA

SEQ ID NO: 1874 - protein, 11 aa, Artificial Sequence
  Peptide Derived from Human Papillomavirus
AQEAKQHRDAV

SEQ ID NO: 1875 - protein, 10 aa, Artificial Sequence
  Peptide Derived from Human Papillomavirus
AQLADTNSNA

SEQ ID NO: 1876 - protein, 10 aa, Artificial Sequence
  Peptide Derived from Human Papillomavirus
ATMCRHYKRA

SEQ ID NO: 1877 - protein, 9 aa, Artificial Sequence
  Peptide Derived from Human Papillomavirus
ATVPCWNYI

SEQ ID NO: 1878 - protein, 10 aa, Artificial Sequence
  Peptide Derived from Human Papillomavirus
AVQVLKRKYL

SEQ ID NO: 1879 - protein, 11 aa, Artificial Sequence
  Peptide Derived from Human Papillomavirus
AVQVLKRKYLV

SEQ ID NO: 1880 - protein, 10 aa, Artificial Sequence
  Peptide Derived from Human Papillomavirus
AVVEKKTGDA

SEQ ID NO: 1881 - protein, 11 aa, Artificial Sequence
  Peptide Derived from Human Papillomavirus
AVVEKKTGDAI

SEQ ID NO: 1882 - protein, 11 aa, Artificial Sequence
  Peptide Derived from Human Papillomavirus
CATMCRHYKRA

SEQ ID NO: 1883 - protein, 8 aa, Artificial Sequence
  Peptide Derived from Human Papillomavirus
CIAAFGLT

SEQ ID NO: 1884 - protein, 11 aa, Artificial Sequence
  Peptide Derived from Human Papillomavirus
CIAAFGLTPSI

SEQ ID NO: 1885 - protein, 8 aa, Artificial Sequence
  Peptide Derived from Human Papillomavirus
CIEKQSRA

SEQ ID NO: 1886 - protein, 9 aa, Artificial Sequence
  Peptide Derived from Human Papillomavirus
CIEKQSRAA

SEQ ID NO: 1887 - protein, 8 aa, Artificial Sequence
  Peptide Derived from Human Papillomavirus
CILLYGAA

SEQ ID NO: 1888 - protein, 10 aa, Artificial Sequence
  Peptide Derived from Human Papillomavirus
CILLYGAANT

SEQ ID NO: 1889 - protein, 9 aa, Artificial Sequence
  Peptide Derived from Human Papillomavirus
CLYLHIQSL

SEQ ID NO: 1890 - protein, 10 aa, Artificial Sequence
  Peptide Derived from Human Papillomavirus
CLYLHIQSLA

SEQ ID NO: 1891 - protein, 9 aa, Artificial Sequence
  Peptide Derived from Human Papillomavirus
CMMIEPPKL

SEQ ID NO: 1892 - protein, 8 aa, Artificial Sequence
  Peptide Derived from Human Papillomavirus
CQTPLTNI

SEQ ID NO: 1893 - protein, 9 aa, Artificial Sequence
  Peptide Derived from Human Papillomavirus
CQTPLTNIL

SEQ ID NO: 1894 - protein, 11 aa, Artificial Sequence
  Peptide Derived from Human Papillomavirus
CQTPLTNILNV

SEQ ID NO: 1895 - protein, 8 aa, Artificial Sequence
  Peptide Derived from Human Papillomavirus
CTFELSQM

SEQ ID NO: 1896 - protein, 9 aa, Artificial Sequence
  Peptide Derived from Human Papillomavirus
CTFELSQMV

SEQ ID NO: 1897 - protein, 10 aa, Artificial Sequence
  Peptide Derived from Human Papillomavirus
CVDNNISPRL

SEQ ID NO: 1898 - protein, 9 aa, Artificial Sequence
  Peptide Derived from Human Papillomavirus
CVSGQNTNT

SEQ ID NO: 1899 - protein, 10 aa, Artificial Sequence
  Peptide Derived from Human Papillomavirus
CVSGQNTNTL

SEQ ID NO: 1900 - protein, 8 aa, Artificial Sequence
  Peptide Derived from Human Papillomavirus
CVSPMCMM

SEQ ID NO: 1901 - protein, 9 aa, Artificial Sequence
  Peptide Derived from Human Papillomavirus
CVSPMCMMI

SEQ ID NO: 1902 - protein, 10 aa, Artificial Sequence
  Peptide Derived from Human Papillomavirus
DAKIGMLDDA

SEQ ID NO: 1903 - protein, 11 aa, Artificial Sequence
  Peptide Derived from Human Papillomavirus
DAKIGMLDDAT

SEQ ID NO: 1904 - protein, 10 aa, Artificial Sequence
  Peptide Derived from Human Papillomavirus
DATVPCWNYI

SEQ ID NO: 1905 - protein, 11 aa, Artificial Sequence
  Peptide Derived from Human Papillomavirus
DAVQVLKRKYL

SEQ ID NO: 1906 - protein, 10 aa, Artificial Sequence
  Peptide Derived from Human Papillomavirus
DISGCVDNNI

SEQ ID NO: 1907 - protein, 8 aa, Artificial Sequence
  Peptide Derived from Human Papillomavirus
DIVDDSEI

SEQ ID NO: 1908 - protein, 9 aa, Artificial Sequence
  Peptide Derived from Human Papillomavirus
DIVDDSEIA

SEQ ID NO: 1909 - protein, 10 aa, Artificial Sequence
  Peptide Derived from Human Papillomavirus
DTGEDLVDFI

SEQ ID NO: 1910 - protein, 11 aa, Artificial Sequence
  Peptide Derived from Human Papillomavirus
DTGEDLVDFIV

SEQ ID NO: 1911 - protein, 8 aa, Artificial Sequence
  Peptide Derived from Human Papillomavirus
DTNSNASA

SEQ ID NO: 1912 - protein, 10 aa, Artificial Sequence
  Peptide Derived from Human Papillomavirus
DTNSNASAFL

SEQ ID NO: 1913 - protein, 10 aa, Artificial Sequence
  Peptide Derived from Human Papillomavirus
DTPEWIQRQT

SEQ ID NO: 1914 - protein, 11 aa, Artificial Sequence
  Peptide Derived from Human Papillomavirus
DTPEWIQRQTV

SEQ ID NO: 1915 - protein, 8 aa, Artificial Sequence
  Peptide Derived from Human Papillomavirus
DVKHRPLV

SEQ ID NO: 1916 - protein, 10 aa, Artificial Sequence
  Peptide Derived from Human Papillomavirus
DVKHRPLVQL

SEQ ID NO: 1917 - protein, 8 aa, Artificial Sequence
  Peptide Derived from Human Papillomavirus
EAKQHRDA

SEQ ID NO: 1918 - protein, 9 aa, Artificial Sequence
  Peptide Derived from Human Papillomavirus
EAKQHRDAV

SEQ ID NO: 1919 - protein, 11 aa, Artificial Sequence
  Peptide Derived from Human Papillomavirus
EAKQHRDAVQV

SEQ ID NO: 1920 - protein, 8 aa, Artificial Sequence
  Peptide Derived from Human Papillomavirus
EAVVEKKT

SEQ ID NO: 1921 - protein, 11 aa, Artificial Sequence
  Peptide Derived from Human Papillomavirus
EAVVEKKTGDA

SEQ ID NO: 1922 - protein, 9 aa, Artificial Sequence
  Peptide Derived from Human Papillomavirus
EIAYKYAQL

SEQ ID NO: 1923 - protein, 10 aa, Artificial Sequence
  Peptide Derived from Human Papillomavirus
EIAYKYAQLA

SEQ ID NO: 1924 - protein, 9 aa, Artificial Sequence
  Peptide Derived from Human Papillomavirus
ELSQMVQWA

SEQ ID NO: 1925 - protein, 10 aa, Artificial Sequence
  Peptide Derived from Human Papillomavirus
ELYGVSFSEL

SEQ ID NO: 1926 - protein, 11 aa, Artificial Sequence
  Peptide Derived from Human Papillomavirus
ELYGVSFSELV

SEQ ID NO: 1927 - protein, 8 aa, Artificial Sequence
  Peptide Derived from Human Papillomavirus
ETAHALFT

SEQ ID NO: 1928 - protein, 9 aa, Artificial Sequence
  Peptide Derived from Human Papillomavirus
ETAHALFTA

SEQ ID NO: 1929 - protein, 8 aa, Artificial Sequence
  Peptide Derived from Human Papillomavirus
ETETAHAL

SEQ ID NO: 1930 - protein, 10 aa, Artificial Sequence
  Peptide Derived from Human Papillomavirus
ETETAHALFT

SEQ ID NO: 1931 - protein, 11 aa, Artificial Sequence
  Peptide Derived from Human Papillomavirus
ETETAHALFTA

SEQ ID NO: 1932 - protein, 10 aa, Artificial Sequence
  Peptide Derived from Human Papillomavirus
ETIEKLLSKL

SEQ ID NO: 1933 - protein, 11 aa, Artificial Sequence
  Peptide Derived from Human Papillomavirus
ETIEKLLSKLL

SEQ ID NO: 1934 - protein, 8 aa, Artificial Sequence
  Peptide Derived from Human Papillomavirus
ETQQMLQV

SEQ ID NO: 1935 - protein, 8 aa, Artificial Sequence
  Peptide Derived from Human Papillomavirus
EVETQQML

SEQ ID NO: 1936 - protein, 10 aa, Artificial Sequence
  Peptide Derived from Human Papillomavirus
EVETQQMLQV

SEQ ID NO: 1937 - protein, 10 aa, Artificial Sequence
  Peptide Derived from Human Papillomavirus
EVYGDTPEWI

SEQ ID NO: 1938 - protein, 9 aa, Artificial Sequence
  Peptide Derived from Human Papillomavirus
FIVNDNDYL

SEQ ID NO: 1939 - protein, 10 aa, Artificial Sequence
  Peptide Derived from Human Papillomavirus
FIVNDNDYLT

SEQ ID NO: 1940 - protein, 8 aa, Artificial Sequence
  Peptide Derived from Human Papillomavirus
FLKSNSQA

SEQ ID NO: 1941 - protein, 10 aa, Artificial Sequence
  Peptide Derived from Human Papillomavirus
FLKSNSQAKI

SEQ ID NO: 1942 - protein, 11 aa, Artificial Sequence
  Peptide Derived from Human Papillomavirus
FLKSNSQAKIV

SEQ ID NO: 1943 - protein, 11 aa, Artificial Sequence
  Peptide Derived from Human Papillomavirus
FLQGIPKKNCI

SEQ ID NO: 1944 - protein, 10 aa, Artificial Sequence
  Peptide Derived from Human Papillomavirus
FLQGSVICFV

SEQ ID NO: 1945 - protein, 10 aa, Artificial Sequence
  Peptide Derived from Human Papillomavirus
FLRYQGVEFM

SEQ ID NO: 1946 - protein, 9 aa, Artificial Sequence
  Peptide Derived from Human Papillomavirus
FLTALKRFL

SEQ ID NO: 1947 - protein, 8 aa, Artificial Sequence
  Peptide Derived from Human Papillomavirus
FMSFLTAL

SEQ ID NO: 1948 - protein, 10 aa, Artificial Sequence
  Peptide Derived from Human Papillomavirus
FVNSKSHFWL

SEQ ID NO: 1949 - protein, 9 aa, Artificial Sequence
  Peptide Derived from Human Papillomavirus
GAANTGKSL

SEQ ID NO: 1950 - protein, 8 aa, Artificial Sequence
  Peptide Derived from Human Papillomavirus
GIPKKNCI

SEQ ID NO: 1951 - protein, 9 aa, Artificial Sequence
  Peptide Derived from Human Papillomavirus
GIPKKNCIL

SEQ ID NO: 1952 - protein, 10 aa, Artificial Sequence
  Peptide Derived from Human Papillomavirus
GIPKKNCILL

SEQ ID NO: 1953 - protein, 8 aa, Artificial Sequence
  Peptide Derived from Human Papillomavirus
GISNISEV

SEQ ID NO: 1954 - protein, 10 aa, Artificial Sequence
  Peptide Derived from Human Papillomavirus
GLTPSIADSI

SEQ ID NO: 1955 - protein, 8 aa, Artificial Sequence
  Peptide Derived from Human Papillomavirus
GMLDDATV

SEQ ID NO: 1956 - protein, 8 aa, Artificial Sequence
  Peptide Derived from Human Papillomavirus
GMSLMKFL

SEQ ID NO: 1957 - protein, 8 aa, Artificial Sequence
  Peptide Derived from Human Papillomavirus
GMVVLLLV

SEQ ID NO: 1958 - protein, 9 aa, Artificial Sequence
  Peptide Derived from Human Papillomavirus
GTDSRWPYL

SEQ ID NO: 1959 - protein, 10 aa, Artificial Sequence
  Peptide Derived from Human Papillomavirus
GTGCNGWFYV

SEQ ID NO: 1960 - protein, 8 aa, Artificial Sequence
  Peptide Derived from Human Papillomavirus
GTNGEEGT

SEQ ID NO: 1961 - protein, 8 aa, Artificial Sequence
  Peptide Derived from Human Papillomavirus
GVEFMSFL

SEQ ID NO: 1962 - protein, 9 aa, Artificial Sequence
  Peptide Derived from Human Papillomavirus
GVEFMSFLT

SEQ ID NO: 1963 - protein, 10 aa, Artificial Sequence
  Peptide Derived from Human Papillomavirus
GVEFMSFLTA

SEQ ID NO: 1964 - protein, 11 aa, Artificial Sequence
  Peptide Derived from Human Papillomavirus
GVEFMSFLTAL

SEQ ID NO: 1965 - protein, 8 aa, Artificial Sequence
  Peptide Derived from Human Papillomavirus
GVSERHTI

SEQ ID NO: 1966 - protein, 11 aa, Artificial Sequence
  Peptide Derived from Human Papillomavirus
GVSERHTICQT

SEQ ID NO: 1967 - protein, 8 aa, Artificial Sequence
  Peptide Derived from Human Papillomavirus
GVSFSELV

SEQ ID NO: 1968 - protein, 9 aa, Artificial Sequence
  Peptide Derived from Human Papillomavirus
HALFTAQEA

SEQ ID NO: 1969 - protein, 11 aa, Artificial Sequence
  Peptide Derived from Human Papillomavirus
HIQSLACSWGM

SEQ ID NO: 1970 - protein, 8 aa, Artificial Sequence
  Peptide Derived from Human Papillomavirus
HTICQTPL

SEQ ID NO: 1971 - protein, 9 aa, Artificial Sequence
  Peptide Derived from Human Papillomavirus
HTICQTPLT

SEQ ID NO: 1972 - protein, 11 aa, Artificial Sequence
  Peptide Derived from Human Papillomavirus
HTICQTPLTNI

SEQ ID NO: 1973 - protein, 10 aa, Artificial Sequence
  Peptide Derived from Human Papillomavirus
IAAFGLTPSI

SEQ ID NO: 1974 - protein, 11 aa, Artificial Sequence
  Peptide Derived from Human Papillomavirus
IAAFGLTPSIA

SEQ ID NO: 1975 - protein, 8 aa, Artificial Sequence
  Peptide Derived from Human Papillomavirus
IADSIKTL

SEQ ID NO: 1976 - protein, 9 aa, Artificial Sequence
  Peptide Derived from Human Papillomavirus
IADSIKTLL

SEQ ID NO: 1977 - protein, 8 aa, Artificial Sequence
  Peptide Derived from Human Papillomavirus
IAYKYAQL

SEQ ID NO: 1978 - protein, 9 aa, Artificial Sequence
  Peptide Derived from Human Papillomavirus
IAYKYAQLA

SEQ ID NO: 1979 - protein, 11 aa, Artificial Sequence
  Peptide Derived from Human Papillomavirus
IAYKYAQLADT

SEQ ID NO: 1980 - protein, 9 aa, Artificial Sequence
  Peptide Derived from Human Papillomavirus
ILLYGAANT

SEQ ID NO: 1981 - protein, 10 aa, Artificial Sequence
  Peptide Derived from Human Papillomavirus
ILNVLKTSNA

SEQ ID NO: 1982 - protein, 10 aa, Artificial Sequence
  Peptide Derived from Human Papillomavirus
IQSLACSWGM

SEQ ID NO: 1983 - protein, 11 aa, Artificial Sequence
  Peptide Derived from Human Papillomavirus
IQSLACSWGMV

SEQ ID NO: 1984 - protein, 9 aa, Artificial Sequence
  Peptide Derived from Human Papillomavirus
ITSNINAGT

SEQ ID NO: 1985 - protein, 8 aa, Artificial Sequence
  Peptide Derived from Human Papillomavirus
IVDDSEIA

SEQ ID NO: 1986 - protein, 8 aa, Artificial Sequence
  Peptide Derived from Human Papillomavirus
IVKDCATM

SEQ ID NO: 1987 - protein, 10 aa, Artificial Sequence
  Peptide Derived from Human Papillomavirus
IVMFLRYQGV

SEQ ID NO: 1988 - protein, 8 aa, Artificial Sequence
  Peptide Derived from Human Papillomavirus
IVNDNDYL

SEQ ID NO: 1989 - protein, 9 aa, Artificial Sequence
  Peptide Derived from Human Papillomavirus
IVNDNDYLT

SEQ ID NO: 1990 - protein, 11 aa, Artificial Sequence
  Peptide Derived from Human Papillomavirus
IVNDNDYLTQA

SEQ ID NO: 1991 - protein, 11 aa, Artificial Sequence
  Peptide Derived from Human Papillomavirus
KAAMLAKFKEL

SEQ ID NO: 1992 - protein, 11 aa, Artificial Sequence
  Peptide Derived from Human Papillomavirus
KAICIEKQSRA

SEQ ID NO: 1993 - protein, 8 aa, Artificial Sequence
  Peptide Derived from Human Papillomavirus
KIGMLDDA

SEQ ID NO: 1994 - protein, 9 aa, Artificial Sequence
  Peptide Derived from Human Papillomavirus
KIGMLDDAT

SEQ ID NO: 1995 - protein, 10 aa, Artificial Sequence
  Peptide Derived from Human Papillomavirus
KIGMLDDATV

SEQ ID NO: 1996 - protein, 8 aa, Artificial Sequence
  Peptide Derived from Human Papillomavirus
KIVKDCAT

SEQ ID NO: 1997 - protein, 9 aa, Artificial Sequence
  Peptide Derived from Human Papillomavirus
KIVKDCATM

SEQ ID NO: 1998 - protein, 8 aa, Artificial Sequence
  Peptide Derived from Human Papillomavirus
KLLCVSPM

SEQ ID NO: 1999 - protein, 10 aa, Artificial Sequence
  Peptide Derived from Human Papillomavirus
KLLCVSPMCM

SEQ ID NO: 2000 - protein, 11 aa, Artificial Sequence
  Peptide Derived from Human Papillomavirus
KLLCVSPMCMM

SEQ ID NO: 2001 - protein, 9 aa, Artificial Sequence
  Peptide Derived from Human Papillomavirus
KLLSKLLCV

SEQ ID NO: 2002 - protein, 8 aa, Artificial Sequence
  Peptide Derived from Human Papillomavirus
KLRSTAAA

SEQ ID NO: 2003 - protein, 9 aa, Artificial Sequence
  Peptide Derived from Human Papillomavirus
KLRSTAAAL

SEQ ID NO: 2004 - protein, 9 aa, Artificial Sequence
  Peptide Derived from Human Papillomavirus
KQHRDAVQV

SEQ ID NO: 2005 - protein, 10 aa, Artificial Sequence
  Peptide Derived from Human Papillomavirus
KQHRDAVQVL

SEQ ID NO: 2006 - protein, 9 aa, Artificial Sequence
  Peptide Derived from Human Papillomavirus
KQMSMSQWI

SEQ ID NO: 2007 - protein, 10 aa, Artificial Sequence
  Peptide Derived from Human Papillomavirus
KQSRAAKRRL

SEQ ID NO: 2008 - protein, 10 aa, Artificial Sequence
  Peptide Derived from Human Papillomavirus
KTGISNISEV

SEQ ID NO: 2009 - protein, 9 aa, Artificial Sequence
  Peptide Derived from Human Papillomavirus
KTLLQQYCL

SEQ ID NO: 2010 - protein, 11 aa, Artificial Sequence
  Peptide Derived from Human Papillomavirus
KTLLQQYCLYL

SEQ ID NO: 2011 - protein, 8 aa, Artificial Sequence
  Peptide Derived from Human Papillomavirus
KTSNAKAA

SEQ ID NO: 2012 - protein, 9 aa, Artificial Sequence
  Peptide Derived from Human Papillomavirus
KTSNAKAAM

SEQ ID NO: 2013 - protein, 10 aa, Artificial Sequence
  Peptide Derived from Human Papillomavirus
KTSNAKAAML

SEQ ID NO: 2014 - protein, 11 aa, Artificial Sequence
  Peptide Derived from Human Papillomavirus
KTSNAKAAMLA

SEQ ID NO: 2015 - protein, 8 aa, Artificial Sequence
  Peptide Derived from Human Papillomavirus
LACSWGMV

SEQ ID NO: 2016 - protein, 9 aa, Artificial Sequence
  Peptide Derived from Human Papillomavirus
LACSWGMVV

SEQ ID NO: 2017 - protein, 10 aa, Artificial Sequence
  Peptide Derived from Human Papillomavirus
LACSWGMVVL

SEQ ID NO: 2018 - protein, 11 aa, Artificial Sequence
  Peptide Derived from Human Papillomavirus
LACSWGMVVLL

SEQ ID NO: 2019 - protein, 8 aa, Artificial Sequence
  Peptide Derived from Human Papillomavirus
LADAKIGM

SEQ ID NO: 2020 - protein, 9 aa, Artificial Sequence
  Peptide Derived from Human Papillomavirus
LADAKIGML

SEQ ID NO: 2021 - protein, 8 aa, Artificial Sequence
  Peptide Derived from Human Papillomavirus
LADTNSNA

SEQ ID NO: 2022 - protein, 10 aa, Artificial Sequence
  Peptide Derived from Human Papillomavirus
LADTNSNASA

SEQ ID NO: 2023 - protein, 10 aa, Artificial Sequence
  Peptide Derived from Human Papillomavirus
LAKFKELYGV

SEQ ID NO: 2024 - protein, 8 aa, Artificial Sequence
  Peptide Derived from Human Papillomavirus
LITSNINA

SEQ ID NO: 2025 - protein, 10 aa, Artificial Sequence
  Peptide Derived from Human Papillomavirus
LITSNINAGT

SEQ ID NO: 2026 - protein, 9 aa, Artificial Sequence
  Peptide Derived from Human Papillomavirus
LLCVSPMCM

SEQ ID NO: 2027 - protein, 10 aa, Artificial Sequence
  Peptide Derived from Human Papillomavirus
LLCVSPMCMM

SEQ ID NO: 2028 - protein, 11 aa, Artificial Sequence
  Peptide Derived from Human Papillomavirus
LLCVSPMCMMI

SEQ ID NO: 2029 - protein, 9 aa, Artificial Sequence
  Peptide Derived from Human Papillomavirus
LLITSNINA

SEQ ID NO: 2030 - protein, 11 aa, Artificial Sequence
  Peptide Derived from Human Papillomavirus
LLITSNINAGT

SEQ ID NO: 2031 - protein, 9 aa, Artificial Sequence
  Peptide Derived from Human Papillomavirus
LLQQYCLYL

SEQ ID NO: 2032 - protein, 11 aa, Artificial Sequence
  Peptide Derived from Human Papillomavirus
LLQQYCLYLHI

SEQ ID NO: 2033 - protein, 8 aa, Artificial Sequence
  Peptide Derived from Human Papillomavirus
LLSKLLCV

SEQ ID NO: 2034 - protein, 11 aa, Artificial Sequence
  Peptide Derived from Human Papillomavirus
LLSKLLCVSPM

SEQ ID NO: 2035 - protein, 8 aa, Artificial Sequence
  Peptide Derived from Human Papillomavirus
LLYGAANT

SEQ ID NO: 2036 - protein, 9 aa, Artificial Sequence
  Peptide Derived from Human Papillomavirus
LMKFLQGSV

SEQ ID NO: 2037 - protein, 10 aa, Artificial Sequence
  Peptide Derived from Human Papillomavirus
LMKFLQGSVI

SEQ ID NO: 2038 - protein, 10 aa, Artificial Sequence
  Peptide Derived from Human Papillomavirus
LQGIPKKNCI

SEQ ID NO: 2039 - protein, 11 aa, Artificial Sequence
  Peptide Derived from Human Papillomavirus
LQGIPKKNCIL

SEQ ID NO: 2040 - protein, 9 aa, Artificial Sequence
  Peptide Derived from Human Papillomavirus
LQGSVICFV

SEQ ID NO: 2041 - protein, 9 aa, Artificial Sequence
  Peptide Derived from Human Papillomavirus
LQHSFNDCT

SEQ ID NO: 2042 - protein, 9 aa, Artificial Sequence
  Peptide Derived from Human Papillomavirus
LQPLADAKI

SEQ ID NO: 2043 - protein, 11 aa, Artificial Sequence
  Peptide Derived from Human Papillomavirus
LQPLADAKIGM

SEQ ID NO: 2044 - protein, 8 aa, Artificial Sequence
  Peptide Derived from Human Papillomavirus
LQQYCLYL

SEQ ID NO: 2045 - protein, 10 aa, Artificial Sequence
  Peptide Derived from Human Papillomavirus
LQQYCLYLHI

SEQ ID NO: 2046 - protein, 9 aa, Artificial Sequence
  Peptide Derived from Human Papillomavirus
LQVEGRHET

SEQ ID NO: 2047 - protein, 11 aa, Artificial Sequence
  Peptide Derived from Human Papillomavirus
LQVEGRHETET

SEQ ID NO: 2048 - protein, 8 aa, Artificial Sequence
  Peptide Derived from Human Papillomavirus
LTALKRFL

SEQ ID NO: 2049 - protein, 11 aa, Artificial Sequence
  Peptide Derived from Human Papillomavirus
LTALKRFLQGI

SEQ ID NO: 2050 - protein, 8 aa, Artificial Sequence
  Peptide Derived from Human Papillomavirus
LTNILNVL

SEQ ID NO: 2051 - protein, 10 aa, Artificial Sequence
  Peptide Derived from Human Papillomavirus
LTNILNVLKT

SEQ ID NO: 2052 - protein, 9 aa, Artificial Sequence
  Peptide Derived from Human Papillomavirus
LTPSIADSI

SEQ ID NO: 2053 - protein, 11 aa, Artificial Sequence
  Peptide Derived from Human Papillomavirus
LTPSIADSIKT

SEQ ID NO: 2054 - protein, 8 aa, Artificial Sequence
  Peptide Derived from Human Papillomavirus
LTQAETET

SEQ ID NO: 2055 - protein, 9 aa, Artificial Sequence
  Peptide Derived from Human Papillomavirus
LTQAETETA

SEQ ID NO: 2056 - protein, 11 aa, Artificial Sequence
  Peptide Derived from Human Papillomavirus
LTQAETETAHA

SEQ ID NO: 2057 - protein, 9 aa, Artificial Sequence
  Peptide Derived from Human Papillomavirus
LVQLKCPPL

SEQ ID NO: 2058 - protein, 10 aa, Artificial Sequence
  Peptide Derived from Human Papillomavirus
LVQLKCPPLL

SEQ ID NO: 2059 - protein, 11 aa, Artificial Sequence
  Peptide Derived from Human Papillomavirus
LVQLKCPPLLI

SEQ ID NO: 2060 - protein, 11 aa, Artificial Sequence
  Peptide Derived from Human Papillomavirus
LVRPFKSNKST

SEQ ID NO: 2061 - protein, 11 aa, Artificial Sequence
  Peptide Derived from Human Papillomavirus
LVSMDVKHRPL

SEQ ID NO: 2062 - protein, 8 aa, Artificial Sequence
  Peptide Derived from Human Papillomavirus
LVSPLSDI

SEQ ID NO: 2063 - protein, 10 aa, Artificial Sequence
  Peptide Derived from Human Papillomavirus
MIEPPKLRST

SEQ ID NO: 2064 - protein, 11 aa, Artificial Sequence
  Peptide Derived from Human Papillomavirus
MIEPPKLRSTA

SEQ ID NO: 2065 - protein, 8 aa, Artificial Sequence
  Peptide Derived from Human Papillomavirus
MLAKFKEL

SEQ ID NO: 2066 - protein, 11 aa, Artificial Sequence
  Peptide Derived from Human Papillomavirus
MLAKFKELYGV

SEQ ID NO: 2067 - protein, 10 aa, Artificial Sequence
  Peptide Derived from Human Papillomavirus
MLQVEGRHET

SEQ ID NO: 2068 - protein, 8 aa, Artificial Sequence
  Peptide Derived from Human Papillomavirus
MMIEPPKL

SEQ ID NO: 2069 - protein, 11 aa, Artificial Sequence
  Peptide Derived from Human Papillomavirus
MMIEPPKLRST

SEQ ID NO: 2070 - protein, 10 aa, Artificial Sequence
  Peptide Derived from Human Papillomavirus
MVQWAYDNDI

SEQ ID NO: 2071 - protein, 11 aa, Artificial Sequence
  Peptide Derived from Human Papillomavirus
MVQWAYDNDIV

SEQ ID NO: 2072 - protein, 11 aa, Artificial Sequence
  Peptide Derived from Human Papillomavirus
NAGTDSRWPYL

SEQ ID NO: 2073 - protein, 8 aa, Artificial Sequence
  Peptide Derived from Human Papillomavirus
NAKAAMLA

SEQ ID NO: 2074 - protein, 8 aa, Artificial Sequence
  Peptide Derived from Human Papillomavirus
NALDGNLV

SEQ ID NO: 2075 - protein, 10 aa, Artificial Sequence
  Peptide Derived from Human Papillomavirus
NALDGNLVSM

SEQ ID NO: 2076 - protein, 8 aa, Artificial Sequence
  Peptide Derived from Human Papillomavirus
NILNVLKT

SEQ ID NO: 2077 - protein, 11 aa, Artificial Sequence
  Peptide Derived from Human Papillomavirus
NILNVLKTSNA

SEQ ID NO: 2078 - protein, 9 aa, Artificial Sequence
  Peptide Derived from Human Papillomavirus
NISEVYGDT

SEQ ID NO: 2079 - protein, 8 aa, Artificial Sequence
  Peptide Derived from Human Papillomavirus
NISPRLKA

SEQ ID NO: 2080 - protein, 9 aa, Artificial Sequence
  Peptide Derived from Human Papillomavirus
NISPRLKAI

SEQ ID NO: 2081 - protein, 11 aa, Artificial Sequence
  Peptide Derived from Human Papillomavirus
NISPRLKAICI

SEQ ID NO: 2082 - protein, 10 aa, Artificial Sequence
  Peptide Derived from Human Papillomavirus
NLRNALDGNL

SEQ ID NO: 2083 - protein, 11 aa, Artificial Sequence
  Peptide Derived from Human Papillomavirus
NLRNALDGNLV

SEQ ID NO: 2084 - protein, 9 aa, Artificial Sequence
  Peptide Derived from Human Papillomavirus
NTEVETQQM

SEQ ID NO: 2085 - protein, 10 aa, Artificial Sequence
  Peptide Derived from Human Papillomavirus
NTEVETQQML

SEQ ID NO: 2086 - protein, 9 aa, Artificial Sequence
  Peptide Derived from Human Papillomavirus
NTGKSLFGM

SEQ ID NO: 2087 - protein, 11 aa, Artificial Sequence
  Peptide Derived from Human Papillomavirus
NTGKSLFGMSL

SEQ ID NO: 2088 - protein, 8 aa, Artificial Sequence
  Peptide Derived from Human Papillomavirus
NVLKTSNA

SEQ ID NO: 2089 - protein, 10 aa, Artificial Sequence
  Peptide Derived from Human Papillomavirus
NVLKTSNAKA

SEQ ID NO: 2090 - protein, 11 aa, Artificial Sequence
  Peptide Derived from Human Papillomavirus
NVLKTSNAKAA

SEQ ID NO: 2091 - protein, 10 aa, Artificial Sequence
  Peptide Derived from Human Papillomavirus
PAGTNGEEGT

SEQ ID NO: 2092 - protein, 9 aa, Artificial Sequence
  Peptide Derived from Human Papillomavirus
PLADAKIGM

SEQ ID NO: 2093 - protein, 10 aa, Artificial Sequence
  Peptide Derived from Human Papillomavirus
PLADAKIGML

SEQ ID NO: 2094 - protein, 8 aa, Artificial Sequence
  Peptide Derived from Human Papillomavirus
PLLITSNI

SEQ ID NO: 2095 - protein, 10 aa, Artificial Sequence
  Peptide Derived from Human Papillomavirus
PLLITSNINA

SEQ ID NO: 2096 - protein, 9 aa, Artificial Sequence
  Peptide Derived from Human Papillomavirus
PLSDISGCV

SEQ ID NO: 2097 - protein, 8 aa, Artificial Sequence
  Peptide Derived from Human Papillomavirus
PLTNILNV

SEQ ID NO: 2098 - protein, 9 aa, Artificial Sequence
  Peptide Derived from Human Papillomavirus
PLTNILNVL

SEQ ID NO: 2099 - protein, 11 aa, Artificial Sequence
  Peptide Derived from Human Papillomavirus
PLTNILNVLKT

SEQ ID NO: 2100 - protein, 10 aa, Artificial Sequence
  Peptide Derived from Human Papillomavirus
PLVQLKCPPL

SEQ ID NO: 2101 - protein, 11 aa, Artificial Sequence
  Peptide Derived from Human Papillomavirus
PLVQLKCPPLL

SEQ ID NO: 2102 - protein, 11 aa, Artificial Sequence
  Peptide Derived from Human Papillomavirus
PMCMMIEPPKL

SEQ ID NO: 2103 - protein, 11 aa, Artificial Sequence
  Peptide Derived from Human Papillomavirus
PTFKCVSGQNT

SEQ ID NO: 2104 - protein, 9 aa, Artificial Sequence
  Peptide Derived from Human Papillomavirus
QAETETAHA

SEQ ID NO: 2105 - protein, 10 aa, Artificial Sequence
  Peptide Derived from Human Papillomavirus
QAETETAHAL

SEQ ID NO: 2106 - protein, 9 aa, Artificial Sequence
  Peptide Derived from Human Papillomavirus
QAKIVKDCA

SEQ ID NO: 2107 - protein, 10 aa, Artificial Sequence
  Peptide Derived from Human Papillomavirus
QAKIVKDCAT

SEQ ID NO: 2108 - protein, 11 aa, Artificial Sequence
  Peptide Derived from Human Papillomavirus
QAKIVKDCATM

SEQ ID NO: 2109 - protein, 11 aa, Artificial Sequence
  Peptide Derived from Human Papillomavirus
QIVMFLRYQGV

SEQ ID NO: 2110 - protein, 9 aa, Artificial Sequence
  Peptide Derived from Human Papillomavirus
QLADTNSNA

SEQ ID NO: 2111 - protein, 11 aa, Artificial Sequence
  Peptide Derived from Human Papillomavirus
QLADTNSNASA

SEQ ID NO: 2112 - protein, 8 aa, Artificial Sequence
  Peptide Derived from Human Papillomavirus
QLKCPPLL

SEQ ID NO: 2113 - protein, 9 aa, Artificial Sequence
  Peptide Derived from Human Papillomavirus
QLKCPPLLI

SEQ ID NO: 2114 - protein, 10 aa, Artificial Sequence
  Peptide Derived from Human Papillomavirus
QLKCPPLLIT

SEQ ID NO: 2115 - protein, 11 aa, Artificial Sequence
  Peptide Derived from Human Papillomavirus
QMLQVEGRHET

SEQ ID NO: 2116 - protein, 8 aa, Artificial Sequence
  Peptide Derived from Human Papillomavirus
QMSMSQWI

SEQ ID NO: 2117 - protein, 11 aa, Artificial Sequence
  Peptide Derived from Human Papillomavirus
QMVQWAYDNDI

SEQ ID NO: 2118 - protein, 9 aa, Artificial Sequence
  Peptide Derived from Human Papillomavirus
QQYCLYLHI

SEQ ID NO: 2119 - protein, 8 aa, Artificial Sequence
  Peptide Derived from Human Papillomavirus
QTPLTNIL

SEQ ID NO: 2120 - protein, 10 aa, Artificial Sequence
  Peptide Derived from Human Papillomavirus
QTPLTNILNV

SEQ ID NO: 2121 - protein, 11 aa, Artificial Sequence
  Peptide Derived from Human Papillomavirus
QTPLTNILNVL

SEQ ID NO: 2122 - protein, 8 aa, Artificial Sequence
  Peptide Derived from Human Papillomavirus
QVEGRHET

SEQ ID NO: 2123 - protein, 10 aa, Artificial Sequence
  Peptide Derived from Human Papillomavirus
QVEGRHETET

SEQ ID NO: 2124 - protein, 8 aa, Artificial Sequence
  Peptide Derived from Human Papillomavirus
QVLKRKYL

SEQ ID NO: 2125 - protein, 9 aa, Artificial Sequence
  Peptide Derived from Human Papillomavirus
QVLKRKYLV

SEQ ID NO: 2126 - protein, 9 aa, Artificial Sequence
  Peptide Derived from Human Papillomavirus
RAEKKQMSM

SEQ ID NO: 2127 - protein, 8 aa, Artificial Sequence
  Peptide Derived from Human Papillomavirus
RTWSRLSL

SEQ ID NO: 2128 - protein, 11 aa, Artificial Sequence
  Peptide Derived from Human Papillomavirus
RVDDGGDWKQI

SEQ ID NO: 2129 - protein, 10 aa, Artificial Sequence
  Peptide Derived from Human Papillomavirus
SAFLKSNSQA

SEQ ID NO: 2130 - protein, 8 aa, Artificial Sequence
  Peptide Derived from Human Papillomavirus
SIADSIKT

SEQ ID NO: 2131 - protein, 9 aa, Artificial Sequence
  Peptide Derived from Human Papillomavirus
SIADSIKTL

SEQ ID NO: 2132 - protein, 10 aa, Artificial Sequence
  Peptide Derived from Human Papillomavirus
SIADSIKTLL

SEQ ID NO: 2133 - protein, 11 aa, Artificial Sequence
  Peptide Derived from Human Papillomavirus
SIKTLLQQYCL

SEQ ID NO: 2134 - protein, 8 aa, Artificial Sequence
  Peptide Derived from Human Papillomavirus
SLACSWGM

SEQ ID NO: 2135 - protein, 9 aa, Artificial Sequence
  Peptide Derived from Human Papillomavirus
SLACSWGMV

SEQ ID NO: 2136 - protein, 10 aa, Artificial Sequence
  Peptide Derived from Human Papillomavirus
SLACSWGMVV

SEQ ID NO: 2137 - protein, 11 aa, Artificial Sequence
  Peptide Derived from Human Papillomavirus
SLACSWGMVVL

SEQ ID NO: 2138 - protein, 8 aa, Artificial Sequence
  Peptide Derived from Human Papillomavirus
SLFGMSLM

SEQ ID NO: 2139 - protein, 11 aa, Artificial Sequence
  Peptide Derived from Human Papillomavirus
SLFGMSLMKFL

SEQ ID NO: 2140 - protein, 10 aa, Artificial Sequence
  Peptide Derived from Human Papillomavirus
SLMKFLQGSV

SEQ ID NO: 2141 - protein, 11 aa, Artificial Sequence
  Peptide Derived from Human Papillomavirus
SLMKFLQGSVI

SEQ ID NO: 2142 - protein, 8 aa, Artificial Sequence
  Peptide Derived from Human Papillomavirus
SLPTFKCV

SEQ ID NO: 2143 - protein, 9 aa, Artificial Sequence
  Peptide Derived from Human Papillomavirus
SMDVKHRPL

SEQ ID NO: 2144 - protein, 10 aa, Artificial Sequence
  Peptide Derived from Human Papillomavirus
SMDVKHRPLV

SEQ ID NO: 2145 - protein, 10 aa, Artificial Sequence
  Peptide Derived from Human Papillomavirus
SQAKIVKDCA

SEQ ID NO: 2146 - protein, 11 aa, Artificial Sequence
  Peptide Derived from Human Papillomavirus
SQAKIVKDCAT

SEQ ID NO: 2147 - protein, 11 aa, Artificial Sequence
  Peptide Derived from Human Papillomavirus
SQWIKYRCDRV

SEQ ID NO: 2148 - protein, 11 aa, Artificial Sequence
  Peptide Derived from Human Papillomavirus
STAAALYWYKT

SEQ ID NO: 2149 - protein, 8 aa, Artificial Sequence
  Peptide Derived from Human Papillomavirus
STCCDWCI

SEQ ID NO: 2150 - protein, 9 aa, Artificial Sequence
  Peptide Derived from Human Papillomavirus
STCCDWCIA

SEQ ID NO: 2151 - protein, 10 aa, Artificial Sequence
  Peptide Derived from Human Papillomavirus
STCCDWCIAA

SEQ ID NO: 2152 - protein, 10 aa, Artificial Sequence
  Peptide Derived from Human Papillomavirus
TAAALYWYKT

SEQ ID NO: 2153 - protein, 8 aa, Artificial Sequence
  Peptide Derived from Human Papillomavirus
TAHALFTA

SEQ ID NO: 2154 - protein, 11 aa, Artificial Sequence
  Peptide Derived from Human Papillomavirus
TAHALFTAQEA

SEQ ID NO: 2155 - protein, 10 aa, Artificial Sequence
  Peptide Derived from Human Papillomavirus
TALKRFLQGI

SEQ ID NO: 2156 - protein, 11 aa, Artificial Sequence
  Peptide Derived from Human Papillomavirus
TAQEAKQHRDA

SEQ ID NO: 2157 - protein, 8 aa, Artificial Sequence
  Peptide Derived from Human Papillomavirus
TICQTPLT

SEQ ID NO: 2158 - protein, 10 aa, Artificial Sequence
  Peptide Derived from Human Papillomavirus
TICQTPLTNI

SEQ ID NO: 2159 - protein, 11 aa, Artificial Sequence
  Peptide Derived from Human Papillomavirus
TICQTPLTNIL

SEQ ID NO: 2160 - protein, 9 aa, Artificial Sequence
  Peptide Derived from Human Papillomavirus
TIEKLLSKL

SEQ ID NO: 2161 - protein, 10 aa, Artificial Sequence
  Peptide Derived from Human Papillomavirus
TIEKLLSKLL

SEQ ID NO: 2162 - protein, 8 aa, Artificial Sequence
  Peptide Derived from Human Papillomavirus
TLLQQYCL

SEQ ID NO: 2163 - protein, 10 aa, Artificial Sequence
  Peptide Derived from Human Papillomavirus
TLLQQYCLYL

SEQ ID NO: 2164 - protein, 9 aa, Artificial Sequence
  Peptide Derived from Human Papillomavirus
TMCRHYKRA

SEQ ID NO: 2165 - protein, 8 aa, Artificial Sequence
  Peptide Derived from Human Papillomavirus
TQAETETA

SEQ ID NO: 2166 - protein, 10 aa, Artificial Sequence
  Peptide Derived from Human Papillomavirus
TQAETETAHA

SEQ ID NO: 2167 - protein, 11 aa, Artificial Sequence
  Peptide Derived from Human Papillomavirus
TQAETETAHAL

SEQ ID NO: 2168 - protein, 11 aa, Artificial Sequence
  Peptide Derived from Human Papillomavirus
TVLQHSFNDCT

SEQ ID NO: 2169 - protein, 8 aa, Artificial Sequence
  Peptide Derived from Human Papillomavirus
TVPCWNYI

SEQ ID NO: 2170 - protein, 8 aa, Artificial Sequence
  Peptide Derived from Human Papillomavirus
VLKRKYLV

SEQ ID NO: 2171 - protein, 11 aa, Artificial Sequence
  Peptide Derived from Human Papillomavirus
VLKRKYLVSPL

SEQ ID NO: 2172 - protein, 9 aa, Artificial Sequence
  Peptide Derived from Human Papillomavirus
VLKTSNAKA

SEQ ID NO: 2173 - protein, 10 aa, Artificial Sequence
  Peptide Derived from Human Papillomavirus
VLKTSNAKAA

SEQ ID NO: 2174 - protein, 11 aa, Artificial Sequence
  Peptide Derived from Human Papillomavirus
VLKTSNAKAAM

SEQ ID NO: 2175 - protein, 10 aa, Artificial Sequence
  Peptide Derived from Human Papillomavirus
VLQHSFNDCT

SEQ ID NO: 2176 - protein, 9 aa, Artificial Sequence
  Peptide Derived from Human Papillomavirus
VMFLRYQGV

SEQ ID NO: 2177 - protein, 8 aa, Artificial Sequence
  Peptide Derived from Human Papillomavirus
VQLKCPPL

SEQ ID NO: 2178 - protein, 9 aa, Artificial Sequence
  Peptide Derived from Human Papillomavirus
VQLKCPPLL

SEQ ID NO: 2179 - protein, 10 aa, Artificial Sequence
  Peptide Derived from Human Papillomavirus
VQLKCPPLLI

SEQ ID NO: 2180 - protein, 11 aa, Artificial Sequence
  Peptide Derived from Human Papillomavirus
VQLKCPPLLIT

SEQ ID NO: 2181 - protein, 9 aa, Artificial Sequence
  Peptide Derived from Human Papillomavirus
VQVLKRKYL

SEQ ID NO: 2182 - protein, 10 aa, Artificial Sequence
  Peptide Derived from Human Papillomavirus
VQVLKRKYLV

SEQ ID NO: 2183 - protein, 9 aa, Artificial Sequence
  Peptide Derived from Human Papillomavirus
VQWAYDNDI

SEQ ID NO: 2184 - protein, 10 aa, Artificial Sequence
  Peptide Derived from Human Papillomavirus
VQWAYDNDIV

SEQ ID NO: 2185 - protein, 9 aa, Artificial Sequence
  Peptide Derived from Human Papillomavirus
VVEKKTGDA

SEQ ID NO: 2186 - protein, 10 aa, Artificial Sequence
  Peptide Derived from Human Papillomavirus
VVEKKTGDAI

SEQ ID NO: 2187 - protein, 8 aa, Artificial Sequence
  Peptide Derived from Human Papillomavirus
WAYDNDIV

SEQ ID NO: 2188 - protein, 9 aa, Artificial Sequence
  Peptide Derived from Human Papillomavirus
WIKYRCDRV

SEQ ID NO: 2189 - protein, 8 aa, Artificial Sequence
  Peptide Derived from Human Papillomavirus
WIQRQTVL

SEQ ID NO: 2190 - protein, 8 aa, Artificial Sequence
  Peptide Derived from Human Papillomavirus
WLQPLADA

SEQ ID NO: 2191 - protein, 10 aa, Artificial Sequence
  Peptide Derived from Human Papillomavirus
WLQPLADAKI

SEQ ID NO: 2192 - protein, 11 aa, Artificial Sequence
  Peptide Derived from Human Papillomavirus
YAQLADTNSNA

SEQ ID NO: 2193 - protein, 9 aa, Artificial Sequence
  Peptide Derived from Human Papillomavirus
YIDDNLRNA

SEQ ID NO: 2194 - protein, 10 aa, Artificial Sequence
  Peptide Derived from Human Papillomavirus
YIDDNLRNAL

SEQ ID NO: 2195 - protein, 8 aa, Artificial Sequence
  Peptide Derived from Human Papillomavirus
YLHIQSLA

SEQ ID NO: 2196 - protein, 8 aa, Artificial Sequence
  Peptide Derived from Human Papillomavirus
YLHNRLVV

SEQ ID NO: 2197 - protein, 10 aa, Artificial Sequence
  Peptide Derived from Human Papillomavirus
YLHNRLVVFT

SEQ ID NO: 2198 - protein, 9 aa, Artificial Sequence
  Peptide Derived from Human Papillomavirus
YLTQAETET

SEQ ID NO: 2199 - protein, 10 aa, Artificial Sequence
  Peptide Derived from Human Papillomavirus
YLTQAETETA

SEQ ID NO: 2200 - protein, 9 aa, Artificial Sequence
  Peptide Derived from Human Papillomavirus
YLVSPLSDI

SEQ ID NO: 2201 - protein, 10 aa, Artificial Sequence
  Peptide Derived from Human Papillomavirus
YQGVEFMSFL

SEQ ID NO: 2202 - protein, 11 aa, Artificial Sequence
  Peptide Derived from Human Papillomavirus
YQGVEFMSFLT

SEQ ID NO: 2203 - protein, 10 aa, Artificial Sequence
  Peptide Derived from Human Papillomavirus
YVEAVVEKKT

SEQ ID NO: 2204 - protein, 8 aa, Artificial Sequence
  Peptide Derived from Human Papillomavirus
AATHTKAV

SEQ ID NO: 2205 - protein, 9 aa, Artificial Sequence
  Peptide Derived from Human Papillomavirus
AATHTKAVA

SEQ ID NO: 2206 - protein, 10 aa, Artificial Sequence
  Peptide Derived from Human Papillomavirus
AATHTKAVAL

SEQ ID NO: 2207 - protein, 8 aa, Artificial Sequence
  Peptide Derived from Human Papillomavirus
AIELQLTL

SEQ ID NO: 2208 - protein, 10 aa, Artificial Sequence
  Peptide Derived from Human Papillomavirus
AIELQLTLET

SEQ ID NO: 2209 - protein, 11 aa, Artificial Sequence
  Peptide Derived from Human Papillomavirus
AIELQLTLETI

SEQ ID NO: 2210 - protein, 9 aa, Artificial Sequence
  Peptide Derived from Human Papillomavirus
AIYYKAREM

SEQ ID NO: 2211 - protein, 9 aa, Artificial Sequence
  Peptide Derived from Human Papillomavirus
ALGTEETQT

SEQ ID NO: 2212 - protein, 10 aa, Artificial Sequence
  Peptide Derived from Human Papillomavirus
ALGTEETQTT

SEQ ID NO: 2213 - protein, 11 aa, Artificial Sequence
  Peptide Derived from Human Papillomavirus
ALGTEETQTTI

SEQ ID NO: 2214 - protein, 9 aa, Artificial Sequence
  Peptide Derived from Human Papillomavirus
ALQAIELQL

SEQ ID NO: 2215 - protein, 10 aa, Artificial Sequence
  Peptide Derived from Human Papillomavirus
ALQAIELQLT

SEQ ID NO: 2216 - protein, 11 aa, Artificial Sequence
  Peptide Derived from Human Papillomavirus
ALQAIELQLTL

SEQ ID NO: 2217 - protein, 8 aa, Artificial Sequence
  Peptide Derived from Human Papillomavirus
ATHTKAVA

SEQ ID NO: 2218 - protein, 9 aa, Artificial Sequence
  Peptide Derived from Human Papillomavirus
ATHTKAVAL

SEQ ID NO: 2219 - protein, 11 aa, Artificial Sequence
  Peptide Derived from Human Papillomavirus
ATHTKAVALGT

SEQ ID NO: 2220 - protein, 9 aa, Artificial Sequence
  Peptide Derived from Human Papillomavirus
AVALGTEET

SEQ ID NO: 2221 - protein, 11 aa, Artificial Sequence
  Peptide Derived from Human Papillomavirus
AVALGTEETQT

SEQ ID NO: 2222 - protein, 8 aa, Artificial Sequence
  Peptide Derived from Human Papillomavirus
AVSKNKAL

SEQ ID NO: 2223 - protein, 10 aa, Artificial Sequence
  Peptide Derived from Human Papillomavirus
AVSKNKALQA

SEQ ID NO: 2224 - protein, 11 aa, Artificial Sequence
  Peptide Derived from Human Papillomavirus
AVSKNKALQAI

SEQ ID NO: 2225 - protein, 9 aa, Artificial Sequence
  Peptide Derived from Human Papillomavirus
AVSSTWHWT

SEQ ID NO: 2226 - protein, 10 aa, Artificial Sequence
  Peptide Derived from Human Papillomavirus
CAIYYKAREM

SEQ ID NO: 2227 - protein, 8 aa, Artificial Sequence
  Peptide Derived from Human Papillomavirus
CIKKHGYT

SEQ ID NO: 2228 - protein, 9 aa, Artificial Sequence
  Peptide Derived from Human Papillomavirus
CIKKHGYTV

SEQ ID NO: 2229 - protein, 11 aa, Artificial Sequence
  Peptide Derived from Human Papillomavirus
CIKKHGYTVEV

SEQ ID NO: 2230 - protein, 11 aa, Artificial Sequence
  Peptide Derived from Human Papillomavirus
CLRYRFKKHCT

SEQ ID NO: 2231 - protein, 11 aa, Artificial Sequence
  Peptide Derived from Human Papillomavirus
CQRLNVCQDKI

SEQ ID NO: 2232 - protein, 10 aa, Artificial Sequence
  Peptide Derived from Human Papillomavirus
CTLYTAVSST

SEQ ID NO: 2233 - protein, 10 aa, Artificial Sequence
  Peptide Derived from Human Papillomavirus
DAEKYSKNKV

SEQ ID NO: 2234 - protein, 8 aa, Artificial Sequence
  Peptide Derived from Human Papillomavirus
DANTLKCL

SEQ ID NO: 2235 - protein, 9 aa, Artificial Sequence
  Peptide Derived from Human Papillomavirus
DICNTMHYT

SEQ ID NO: 2236 - protein, 9 aa, Artificial Sequence
  Peptide Derived from Human Papillomavirus
DQFLSQVKI

SEQ ID NO: 2237 - protein, 8 aa, Artificial Sequence
  Peptide Derived from Human Papillomavirus
DTGNPCHT

SEQ ID NO: 2238 - protein, 9 aa, Artificial Sequence
  Peptide Derived from Human Papillomavirus
DTGNPCHTT

SEQ ID NO: 2239 - protein, 11 aa, Artificial Sequence
  Peptide Derived from Human Papillomavirus
DTGNPCHTTKL

SEQ ID NO: 2240 - protein, 8 aa, Artificial Sequence
  Peptide Derived from Human Papillomavirus
DVSLEVYL

SEQ ID NO: 2241 - protein, 9 aa, Artificial Sequence
  Peptide Derived from Human Papillomavirus
DVSLEVYLT

SEQ ID NO: 2242 - protein, 10 aa, Artificial Sequence
  Peptide Derived from Human Papillomavirus
DVSLEVYLTA

SEQ ID NO: 2243 - protein, 11 aa, Artificial Sequence
  Peptide Derived from Human Papillomavirus
EASVTVVEGQV

SEQ ID NO: 2244 - protein, 8 aa, Artificial Sequence
  Peptide Derived from Human Papillomavirus
EIIRQHLA

SEQ ID NO: 2245 - protein, 8 aa, Artificial Sequence
  Peptide Derived from Human Papillomavirus
ELQLTLET

SEQ ID NO: 2246 - protein, 9 aa, Artificial Sequence
  Peptide Derived from Human Papillomavirus
ELQLTLETI

SEQ ID NO: 2247 - protein, 11 aa, Artificial Sequence
  Peptide Derived from Human Papillomavirus
EMGFKHINHQV

SEQ ID NO: 2248 - protein, 9 aa, Artificial Sequence
  Peptide Derived from Human Papillomavirus
ETLCQRLNV

SEQ ID NO: 2249 - protein, 8 aa, Artificial Sequence
  Peptide Derived from Human Papillomavirus
EVHAGGQV

SEQ ID NO: 2250 - protein, 9 aa, Artificial Sequence
  Peptide Derived from Human Papillomavirus
EVHAGGQVI

SEQ ID NO: 2251 - protein, 10 aa, Artificial Sequence
  Peptide Derived from Human Papillomavirus
EVHAGGQVIL

SEQ ID NO: 2252 - protein, 8 aa, Artificial Sequence
  Peptide Derived from Human Papillomavirus
EVQFDGDI

SEQ ID NO: 2253 - protein, 11 aa, Artificial Sequence
  Peptide Derived from Human Papillomavirus
EVQFDGDICNT

SEQ ID NO: 2254 - protein, 8 aa, Artificial Sequence
  Peptide Derived from Human Papillomavirus
EVSSPEII

SEQ ID NO: 2255 - protein, 8 aa, Artificial Sequence
  Peptide Derived from Human Papillomavirus
EVYLTAPT

SEQ ID NO: 2256 - protein, 11 aa, Artificial Sequence
  Peptide Derived from Human Papillomavirus
EVYLTAPTGCI

SEQ ID NO: 2257 - protein, 10 aa, Artificial Sequence
  Peptide Derived from Human Papillomavirus
FLSQVKIPKT

SEQ ID NO: 2258 - protein, 11 aa, Artificial Sequence
  Peptide Derived from Human Papillomavirus
FLSQVKIPKTI

SEQ ID NO: 2259 - protein, 8 aa, Artificial Sequence
  Peptide Derived from Human Papillomavirus
FVQFKDDA

SEQ ID NO: 2260 - protein, 9 aa, Artificial Sequence
  Peptide Derived from Human Papillomavirus
GLYYVHEGI

SEQ ID NO: 2261 - protein, 11 aa, Artificial Sequence
  Peptide Derived from Human Papillomavirus
GLYYVHEGIRT

SEQ ID NO: 2262 - protein, 8 aa, Artificial Sequence
  Peptide Derived from Human Papillomavirus
GQVDYYGL

SEQ ID NO: 2263 - protein, 11 aa, Artificial Sequence
  Peptide Derived from Human Papillomavirus
GQVDYYGLYYV

SEQ ID NO: 2264 - protein, 8 aa, Artificial Sequence
  Peptide Derived from Human Papillomavirus
GQVILCPT

SEQ ID NO: 2265 - protein, 10 aa, Artificial Sequence
  Peptide Derived from Human Papillomavirus
GQVILCPTSV

SEQ ID NO: 2266 - protein, 8 aa, Artificial Sequence
  Peptide Derived from Human Papillomavirus
GTEETQTT

SEQ ID NO: 2267 - protein, 9 aa, Artificial Sequence
  Peptide Derived from Human Papillomavirus
GTEETQTTI

SEQ ID NO: 2268 - protein, 8 aa, Artificial Sequence
  Peptide Derived from Human Papillomavirus
HAGGQVIL

SEQ ID NO: 2269 - protein, 11 aa, Artificial Sequence
  Peptide Derived from Human Papillomavirus
HAGGQVILCPT

SEQ ID NO: 2270 - protein, 8 aa, Artificial Sequence
  Peptide Derived from Human Papillomavirus
HIDYWKHM

SEQ ID NO: 2271 - protein, 10 aa, Artificial Sequence
  Peptide Derived from Human Papillomavirus
HIDYWKHMRL

SEQ ID NO: 2272 - protein, 9 aa, Artificial Sequence
  Peptide Derived from Human Papillomavirus
HINHQVVPT

SEQ ID NO: 2273 - protein, 10 aa, Artificial Sequence
  Peptide Derived from Human Papillomavirus
HINHQVVPTL

SEQ ID NO: 2274 - protein, 11 aa, Artificial Sequence
  Peptide Derived from Human Papillomavirus
HINHQVVPTLA

SEQ ID NO: 2275 - protein, 8 aa, Artificial Sequence
  Peptide Derived from Human Papillomavirus
HIYICEEA

SEQ ID NO: 2276 - protein, 10 aa, Artificial Sequence
  Peptide Derived from Human Papillomavirus
HIYICEEASV

SEQ ID NO: 2277 - protein, 11 aa, Artificial Sequence
  Peptide Derived from Human Papillomavirus
HIYICEEASVT

SEQ ID NO: 2278 - protein, 8 aa, Artificial Sequence
  Peptide Derived from Human Papillomavirus
HLANHPAA

SEQ ID NO: 2279 - protein, 9 aa, Artificial Sequence
  Peptide Derived from Human Papillomavirus
HLANHPAAT

SEQ ID NO: 2280 - protein, 11 aa, Artificial Sequence
  Peptide Derived from Human Papillomavirus
HLANHPAATHT

SEQ ID NO: 2281 - protein, 8 aa, Artificial Sequence
  Peptide Derived from Human Papillomavirus
HLKGDANT

SEQ ID NO: 2282 - protein, 9 aa, Artificial Sequence
  Peptide Derived from Human Papillomavirus
HLKGDANTL

SEQ ID NO: 2283 - protein, 8 aa, Artificial Sequence
  Peptide Derived from Human Papillomavirus
HMRLECAI

SEQ ID NO: 2284 - protein, 8 aa, Artificial Sequence
  Peptide Derived from Human Papillomavirus
HQVVPTLA

SEQ ID NO: 2285 - protein, 9 aa, Artificial Sequence
  Peptide Derived from Human Papillomavirus
HQVVPTLAV

SEQ ID NO: 2286 - protein, 9 aa, Artificial Sequence
  Peptide Derived from Human Papillomavirus
HTKAVALGT

SEQ ID NO: 2287 - protein, 11 aa, Artificial Sequence
  Peptide Derived from Human Papillomavirus
HTTKLLHRDSV

SEQ ID NO: 2288 - protein, 11 aa, Artificial Sequence
  Peptide Derived from Human Papillomavirus
IIRQHLANHPA

SEQ ID NO: 2289 - protein, 10 aa, Artificial Sequence
  Peptide Derived from Human Papillomavirus
ILTHYENDST

SEQ ID NO: 2290 - protein, 10 aa, Artificial Sequence
  Peptide Derived from Human Papillomavirus
IQRPRSEPDT

SEQ ID NO: 2291 - protein, 8 aa, Artificial Sequence
  Peptide Derived from Human Papillomavirus
ITVSTGFM

SEQ ID NO: 2292 - protein, 10 aa, Artificial Sequence
  Peptide Derived from Human Papillomavirus
ITVSTGFMSI

SEQ ID NO: 2293 - protein, 8 aa, Artificial Sequence
  Peptide Derived from Human Papillomavirus
IVHLKGDA

SEQ ID NO: 2294 - protein, 10 aa, Artificial Sequence
  Peptide Derived from Human Papillomavirus
IVHLKGDANT

SEQ ID NO: 2295 - protein, 11 aa, Artificial Sequence
  Peptide Derived from Human Papillomavirus
IVHLKGDANTL

SEQ ID NO: 2296 - protein, 8 aa, Artificial Sequence
  Peptide Derived from Human Papillomavirus
KALQAIEL

SEQ ID NO: 2297 - protein, 10 aa, Artificial Sequence
  Peptide Derived from Human Papillomavirus
KALQAIELQL

SEQ ID NO: 2298 - protein, 11 aa, Artificial Sequence
  Peptide Derived from Human Papillomavirus
KALQAIELQLT

SEQ ID NO: 2299 - protein, 10 aa, Artificial Sequence
  Peptide Derived from Human Papillomavirus
KAREMGFKHI

SEQ ID NO: 2300 - protein, 10 aa, Artificial Sequence
  Peptide Derived from Human Papillomavirus
KAVALGTEET

SEQ ID NO: 2301 - protein, 11 aa, Artificial Sequence
  Peptide Derived from Human Papillomavirus
KILTHYENDST

SEQ ID NO: 2302 - protein, 8 aa, Artificial Sequence
  Peptide Derived from Human Papillomavirus
KIPKTITV

SEQ ID NO: 2303 - protein, 10 aa, Artificial Sequence
  Peptide Derived from Human Papillomavirus
KIPKTITVST

SEQ ID NO: 2304 - protein, 8 aa, Artificial Sequence
  Peptide Derived from Human Papillomavirus
KLLHRDSV

SEQ ID NO: 2305 - protein, 11 aa, Artificial Sequence
  Peptide Derived from Human Papillomavirus
KLLHRDSVDSA

SEQ ID NO: 2306 - protein, 10 aa, Artificial Sequence
  Peptide Derived from Human Papillomavirus
KTITVSTGFM

SEQ ID NO: 2307 - protein, 11 aa, Artificial Sequence
  Peptide Derived from Human Papillomavirus
KVWEVHAGGQV

SEQ ID NO: 2308 - protein, 8 aa, Artificial Sequence
  Peptide Derived from Human Papillomavirus
LANHPAAT

SEQ ID NO: 2309 - protein, 10 aa, Artificial Sequence
  Peptide Derived from Human Papillomavirus
LANHPAATHT

SEQ ID NO: 2310 - protein, 8 aa, Artificial Sequence
  Peptide Derived from Human Papillomavirus
LAVSKNKA

SEQ ID NO: 2311 - protein, 9 aa, Artificial Sequence
  Peptide Derived from Human Papillomavirus
LAVSKNKAL

SEQ ID NO: 2312 - protein, 11 aa, Artificial Sequence
  Peptide Derived from Human Papillomavirus
LAVSKNKALQA

SEQ ID NO: 2313 - protein, 10 aa, Artificial Sequence
  Peptide Derived from Human Papillomavirus
LLHRDSVDSA

SEQ ID NO: 2314 - protein, 8 aa, Artificial Sequence
  Peptide Derived from Human Papillomavirus
LQAIELQL

SEQ ID NO: 2315 - protein, 9 aa, Artificial Sequence
  Peptide Derived from Human Papillomavirus
LQAIELQLT

SEQ ID NO: 2316 - protein, 10 aa, Artificial Sequence
  Peptide Derived from Human Papillomavirus
LQAIELQLTL

SEQ ID NO: 2317 - protein, 8 aa, Artificial Sequence
  Peptide Derived from Human Papillomavirus
LQDVSLEV

SEQ ID NO: 2318 - protein, 10 aa, Artificial Sequence
  Peptide Derived from Human Papillomavirus
LQDVSLEVYL

SEQ ID NO: 2319 - protein, 11 aa, Artificial Sequence
  Peptide Derived from Human Papillomavirus
LQDVSLEVYLT

SEQ ID NO: 2320 - protein, 8 aa, Artificial Sequence
  Peptide Derived from Human Papillomavirus
LQLTLETI

SEQ ID NO: 2321 - protein, 8 aa, Artificial Sequence
  Peptide Derived from Human Papillomavirus
LTAPTGCI

SEQ ID NO: 2322 - protein, 9 aa, Artificial Sequence
  Peptide Derived from Human Papillomavirus
LTHYENDST

SEQ ID NO: 2323 - protein, 11 aa, Artificial Sequence
  Peptide Derived from Human Papillomavirus
LTHYENDSTDL

SEQ ID NO: 2324 - protein, 9 aa, Artificial Sequence
  Peptide Derived from Human Papillomavirus
NTMHYTNWT

SEQ ID NO: 2325 - protein, 11 aa, Artificial Sequence
  Peptide Derived from Human Papillomavirus
NTMHYTNWTHI

SEQ ID NO: 2326 - protein, 8 aa, Artificial Sequence
  Peptide Derived from Human Papillomavirus
NTTPIVHL

SEQ ID NO: 2327 - protein, 8 aa, Artificial Sequence
  Peptide Derived from Human Papillomavirus
NVCQDKIL

SEQ ID NO: 2328 - protein, 9 aa, Artificial Sequence
  Peptide Derived from Human Papillomavirus
NVCQDKILT

SEQ ID NO: 2329 - protein, 8 aa, Artificial Sequence
  Peptide Derived from Human Papillomavirus
NVKHKSAI

SEQ ID NO: 2330 - protein, 9 aa, Artificial Sequence
  Peptide Derived from Human Papillomavirus
NVKHKSAIV

SEQ ID NO: 2331 - protein, 10 aa, Artificial Sequence
  Peptide Derived from Human Papillomavirus
NVKHKSAIVT

SEQ ID NO: 2332 - protein, 11 aa, Artificial Sequence
  Peptide Derived from Human Papillomavirus
NVKHKSAIVTL

SEQ ID NO: 2333 - protein, 8 aa, Artificial Sequence
  Peptide Derived from Human Papillomavirus
PAATHTKA

SEQ ID NO: 2334 - protein, 9 aa, Artificial Sequence
  Peptide Derived from Human Papillomavirus
PAATHTKAV

SEQ ID NO: 2335 - protein, 10 aa, Artificial Sequence
  Peptide Derived from Human Papillomavirus
PAATHTKAVA

SEQ ID NO: 2336 - protein, 11 aa, Artificial Sequence
  Peptide Derived from Human Papillomavirus
PAATHTKAVAL

SEQ ID NO: 2337 - protein, 9 aa, Artificial Sequence
  Peptide Derived from Human Papillomavirus
PIVHLKGDA

SEQ ID NO: 2338 - protein, 11 aa, Artificial Sequence
  Peptide Derived from Human Papillomavirus
PIVHLKGDANT

SEQ ID NO: 2339 - protein, 11 aa, Artificial Sequence
  Peptide Derived from Human Papillomavirus
PTGCIKKHGYT

SEQ ID NO: 2340 - protein, 10 aa, Artificial Sequence
  Peptide Derived from Human Papillomavirus
PTLAVSKNKA

SEQ ID NO: 2341 - protein, 11 aa, Artificial Sequence
  Peptide Derived from Human Papillomavirus
PTLAVSKNKAL

SEQ ID NO: 2342 - protein, 10 aa, Artificial Sequence
  Peptide Derived from Human Papillomavirus
PTSVFSSNEV

SEQ ID NO: 2343 - protein, 8 aa, Artificial Sequence
  Peptide Derived from Human Papillomavirus
QAIELQLT

SEQ ID NO: 2344 - protein, 9 aa, Artificial Sequence
  Peptide Derived from Human Papillomavirus
QAIELQLTL

SEQ ID NO: 2345 - protein, 11 aa, Artificial Sequence
  Peptide Derived from Human Papillomavirus
QAIELQLTLET

SEQ ID NO: 2346 - protein, 10 aa, Artificial Sequence
  Peptide Derived from Human Papillomavirus
QVDYYGLYYV

SEQ ID NO: 2347 - protein, 9 aa, Artificial Sequence
  Peptide Derived from Human Papillomavirus
QVILCPTSV

SEQ ID NO: 2348 - protein, 8 aa, Artificial Sequence
  Peptide Derived from Human Papillomavirus
QVKIPKTI

SEQ ID NO: 2349 - protein, 9 aa, Artificial Sequence
  Peptide Derived from Human Papillomavirus
QVKIPKTIT

SEQ ID NO: 2350 - protein, 10 aa, Artificial Sequence
  Peptide Derived from Human Papillomavirus
QVKIPKTITV

SEQ ID NO: 2351 - protein, 8 aa, Artificial Sequence
  Peptide Derived from Human Papillomavirus
QVVPTLAV

SEQ ID NO: 2352 - protein, 8 aa, Artificial Sequence
  Peptide Derived from Human Papillomavirus
RINCNSNT

SEQ ID NO: 2353 - protein, 9 aa, Artificial Sequence
  Peptide Derived from Human Papillomavirus
RINCNSNTT

SEQ ID NO: 2354 - protein, 11 aa, Artificial Sequence
  Peptide Derived from Human Papillomavirus
RINCNSNTTPI

SEQ ID NO: 2355 - protein, 10 aa, Artificial Sequence
  Peptide Derived from Human Papillomavirus
RLECAIYYKA

SEQ ID NO: 2356 - protein, 9 aa, Artificial Sequence
  Peptide Derived from Human Papillomavirus
RLNVCQDKI

SEQ ID NO: 2357 - protein, 10 aa, Artificial Sequence
  Peptide Derived from Human Papillomavirus
RLNVCQDKIL

SEQ ID NO: 2358 - protein, 11 aa, Artificial Sequence
  Peptide Derived from Human Papillomavirus
RLNVCQDKILT

SEQ ID NO: 2359 - protein, 9 aa, Artificial Sequence
  Peptide Derived from Human Papillomavirus
RQHLANHPA

SEQ ID NO: 2360 - protein, 10 aa, Artificial Sequence
  Peptide Derived from Human Papillomavirus
RQHLANHPAA

SEQ ID NO: 2361 - protein, 11 aa, Artificial Sequence
  Peptide Derived from Human Papillomavirus
RQHLANHPAAT

SEQ ID NO: 2362 - protein, 11 aa, Artificial Sequence
  Peptide Derived from Human Papillomavirus
RTYFVQFKDDA

SEQ ID NO: 2363 - protein, 8 aa, Artificial Sequence
  Peptide Derived from Human Papillomavirus
SLEVYLTA

SEQ ID NO: 2364 - protein, 10 aa, Artificial Sequence
  Peptide Derived from Human Papillomavirus
SLEVYLTAPT

SEQ ID NO: 2365 - protein, 8 aa, Artificial Sequence
  Peptide Derived from Human Papillomavirus
SQVKIPKT

SEQ ID NO: 2366 - protein, 9 aa, Artificial Sequence
  Peptide Derived from Human Papillomavirus
SQVKIPKTI

SEQ ID NO: 2367 - protein, 10 aa, Artificial Sequence
  Peptide Derived from Human Papillomavirus
SQVKIPKTIT

SEQ ID NO: 2368 - protein, 11 aa, Artificial Sequence
  Peptide Derived from Human Papillomavirus
SQVKIPKTITV

SEQ ID NO: 2369 - protein, 9 aa, Artificial Sequence
  Peptide Derived from Human Papillomavirus
SQYSNEKWT

SEQ ID NO: 2370 - protein, 10 aa, Artificial Sequence
  Peptide Derived from Human Papillomavirus
SQYSNEKWTL

SEQ ID NO: 2371 - protein, 8 aa, Artificial Sequence
  Peptide Derived from Human Papillomavirus
STDLRDHI

SEQ ID NO: 2372 - protein, 10 aa, Artificial Sequence
  Peptide Derived from Human Papillomavirus
STWHWTGHNV

SEQ ID NO: 2373 - protein, 8 aa, Artificial Sequence
  Peptide Derived from Human Papillomavirus
SVDSAPIL

SEQ ID NO: 2374 - protein, 9 aa, Artificial Sequence
  Peptide Derived from Human Papillomavirus
SVDSAPILT

SEQ ID NO: 2375 - protein, 10 aa, Artificial Sequence
  Peptide Derived from Human Papillomavirus
SVDSAPILTA

SEQ ID NO: 2376 - protein, 8 aa, Artificial Sequence
  Peptide Derived from Human Papillomavirus
SVFSSNEV

SEQ ID NO: 2377 - protein, 9 aa, Artificial Sequence
  Peptide Derived from Human Papillomavirus
SVTVVEGQV

SEQ ID NO: 2378 - protein, 11 aa, Artificial Sequence
  Peptide Derived from Human Papillomavirus
TAFNSSHKGRI

SEQ ID NO: 2379 - protein, 10 aa, Artificial Sequence
  Peptide Derived from Human Papillomavirus
TAVSSTWHWT

SEQ ID NO: 2380 - protein, 11 aa, Artificial Sequence
  Peptide Derived from Human Papillomavirus
TIQRPRSEPDT

SEQ ID NO: 2381 - protein, 9 aa, Artificial Sequence
  Peptide Derived from Human Papillomavirus
TITVSTGFM

SEQ ID NO: 2382 - protein, 11 aa, Artificial Sequence
  Peptide Derived from Human Papillomavirus
TITVSTGFMSI

SEQ ID NO: 2383 - protein, 9 aa, Artificial Sequence
  Peptide Derived from Human Papillomavirus
TLAVSKNKA

SEQ ID NO: 2384 - protein, 10 aa, Artificial Sequence
  Peptide Derived from Human Papillomavirus
TLAVSKNKAL

SEQ ID NO: 2385 - protein, 8 aa, Artificial Sequence
  Peptide Derived from Human Papillomavirus
TLCQRLNV

SEQ ID NO: 2386 - protein, 9 aa, Artificial Sequence
  Peptide Derived from Human Papillomavirus
TLQDVSLEV

SEQ ID NO: 2387 - protein, 11 aa, Artificial Sequence
  Peptide Derived from Human Papillomavirus
TLQDVSLEVYL

SEQ ID NO: 2388 - protein, 9 aa, Artificial Sequence
  Peptide Derived from Human Papillomavirus
TLYTAVSST

SEQ ID NO: 2389 - protein, 8 aa, Artificial Sequence
  Peptide Derived from Human Papillomavirus
TMHYTNWT

SEQ ID NO: 2390 - protein, 10 aa, Artificial Sequence
  Peptide Derived from Human Papillomavirus
TMHYTNWTHI

SEQ ID NO: 2391 - protein, 10 aa, Artificial Sequence
  Peptide Derived from Human Papillomavirus
TTKLLHRDSV

SEQ ID NO: 2392 - protein, 11 aa, Artificial Sequence
  Peptide Derived from Human Papillomavirus
TTPIVHLKGDA

SEQ ID NO: 2393 - protein, 10 aa, Artificial Sequence
  Peptide Derived from Human Papillomavirus
TVEVQFDGDI

SEQ ID NO: 2394 - protein, 9 aa, Artificial Sequence
  Peptide Derived from Human Papillomavirus
TVSTGFMSI

SEQ ID NO: 2395 - protein, 8 aa, Artificial Sequence
  Peptide Derived from Human Papillomavirus
VALGTEET

SEQ ID NO: 2396 - protein, 10 aa, Artificial Sequence
  Peptide Derived from Human Papillomavirus
VALGTEETQT

SEQ ID NO: 2397 - protein, 11 aa, Artificial Sequence
  Peptide Derived from Human Papillomavirus
VALGTEETQTT

SEQ ID NO: 2398 - protein, 8 aa, Artificial Sequence
  Peptide Derived from Human Papillomavirus
VILCPTSV

SEQ ID NO: 2399 - protein, 10 aa, Artificial Sequence
  Peptide Derived from Human Papillomavirus
VQFDGDICNT

SEQ ID NO: 2400 - protein, 11 aa, Artificial Sequence
  Peptide Derived from Human Papillomavirus
VQFDGDICNTM

SEQ ID NO: 2401 - protein, 8 aa, Artificial Sequence
  Peptide Derived from Human Papillomavirus
VTVVEGQV

SEQ ID NO: 2402 - protein, 11 aa, Artificial Sequence
  Peptide Derived from Human Papillomavirus
VVEGQVDYYGL

SEQ ID NO: 2403 - protein, 10 aa, Artificial Sequence
  Peptide Derived from Human Papillomavirus
WQRDQFLSQV

SEQ ID NO: 2404 - protein, 11 aa, Artificial Sequence
  Peptide Derived from Human Papillomavirus
WTGHNVKHKSA

SEQ ID NO: 2405 - protein, 10 aa, Artificial Sequence
  Peptide Derived from Human Papillomavirus
WTHIYICEEA

SEQ ID NO: 2406 - protein, 8 aa, Artificial Sequence
  Peptide Derived from Human Papillomavirus
WTLQDVSL

SEQ ID NO: 2407 - protein, 10 aa, Artificial Sequence
  Peptide Derived from Human Papillomavirus
WTLQDVSLEV

SEQ ID NO: 2408 - protein, 8 aa, Artificial Sequence
  Peptide Derived from Human Papillomavirus
YICEEASV

SEQ ID NO: 2409 - protein, 9 aa, Artificial Sequence
  Peptide Derived from Human Papillomavirus
YICEEASVT

SEQ ID NO: 2410 - protein, 10 aa, Artificial Sequence
  Peptide Derived from Human Papillomavirus
YICEEASVTV

SEQ ID NO: 2411 - protein, 11 aa, Artificial Sequence
  Peptide Derived from Human Papillomavirus
YICEEASVTVV

SEQ ID NO: 2412 - protein, 9 aa, Artificial Sequence
  Peptide Derived from Human Papillomavirus
YLTAPTGCI

SEQ ID NO: 2413 - protein, 11 aa, Artificial Sequence
  Peptide Derived from Human Papillomavirus
YTAVSSTWHWT

SEQ ID NO: 2414 - protein, 9 aa, Artificial Sequence
  Peptide Derived from Human Papillomavirus
YTNWTHIYI

SEQ ID NO: 2415 - protein, 11 aa, Artificial Sequence
  Peptide Derived from Human Papillomavirus
YTVEVQFDGDI

SEQ ID NO: 2416 - protein, 8 aa, Artificial Sequence
  Peptide Derived from Human Papillomavirus
YVHEGIRT

SEQ ID NO: 2417 - protein, 11 aa, Artificial Sequence
  Peptide Derived from Human Papillomavirus
YVHEGIRTYFV

SEQ ID NO: 2418 - protein, 9 aa, Artificial Sequence
  Peptide Derived from Human Papillomavirus
AASAFRCFI

SEQ ID NO: 2419 - protein, 10 aa, Artificial Sequence
  Peptide Derived from Human Papillomavirus
AASAFRCFIV

SEQ ID NO: 2420 - protein, 8 aa, Artificial Sequence
  Peptide Derived from Human Papillomavirus
CLLIRPLL

SEQ ID NO: 2421 - protein, 9 aa, Artificial Sequence
  Peptide Derived from Human Papillomavirus
CLLIRPLLL

SEQ ID NO: 2422 - protein, 11 aa, Artificial Sequence
  Peptide Derived from Human Papillomavirus
CLLIRPLLLSV

SEQ ID NO: 2423 - protein, 9 aa, Artificial Sequence
  Peptide Derived from Human Papillomavirus
CVCLLIRPL

SEQ ID NO: 2424 - protein, 10 aa, Artificial Sequence
  Peptide Derived from Human Papillomavirus
CVCLLIRPLL

SEQ ID NO: 2425 - protein, 11 aa, Artificial Sequence
  Peptide Derived from Human Papillomavirus
CVCLLIRPLLL

SEQ ID NO: 2426 - protein, 8 aa, Artificial Sequence
  Peptide Derived from Human Papillomavirus
CVLLCVCL

SEQ ID NO: 2427 - protein, 9 aa, Artificial Sequence
  Peptide Derived from Human Papillomavirus
CVLLCVCLL

SEQ ID NO: 2428 - protein, 10 aa, Artificial Sequence
  Peptide Derived from Human Papillomavirus
CVLLCVCLLI

SEQ ID NO: 2429 - protein, 8 aa, Artificial Sequence
  Peptide Derived from Human Papillomavirus
DTASTTLL

SEQ ID NO: 2430 - protein, 9 aa, Artificial Sequence
  Peptide Derived from Human Papillomavirus
DTASTTLLA

SEQ ID NO: 2431 - protein, 8 aa, Artificial Sequence
  Peptide Derived from Human Papillomavirus
FIVYIIFV

SEQ ID NO: 2432 - protein, 10 aa, Artificial Sequence
  Peptide Derived from Human Papillomavirus
FIVYIIFVYI

SEQ ID NO: 2433 - protein, 10 aa, Artificial Sequence
  Peptide Derived from Human Papillomavirus
FLIHTHARFL

SEQ ID NO: 2434 - protein, 11 aa, Artificial Sequence
  Peptide Derived from Human Papillomavirus
FLIHTHARFLI

SEQ ID NO: 2435 - protein, 8 aa, Artificial Sequence
  Peptide Derived from Human Papillomavirus
FLLCFCVL

SEQ ID NO: 2436 - protein, 9 aa, Artificial Sequence
  Peptide Derived from Human Papillomavirus
FLLCFCVLL

SEQ ID NO: 2437 - protein, 11 aa, Artificial Sequence
  Peptide Derived from Human Papillomavirus
FLLCFCVLLCV

SEQ ID NO: 2438 - protein, 8 aa, Artificial Sequence
  Peptide Derived from Human Papillomavirus
FVYIPLFL

SEQ ID NO: 2439 - protein, 9 aa, Artificial Sequence
  Peptide Derived from Human Papillomavirus
FVYIPLFLI

SEQ ID NO: 2440 - protein, 11 aa, Artificial Sequence
  Peptide Derived from Human Papillomavirus
FVYIPLFLIHT

SEQ ID NO: 2441 - protein, 8 aa, Artificial Sequence
  Peptide Derived from Human Papillomavirus
HTHARFLI

SEQ ID NO: 2442 - protein, 9 aa, Artificial Sequence
  Peptide Derived from Human Papillomavirus
HTHARFLIT

SEQ ID NO: 2443 - protein, 8 aa, Artificial Sequence
  Peptide Derived from Human Papillomavirus
IIFVYIPL

SEQ ID NO: 2444 - protein, 10 aa, Artificial Sequence
  Peptide Derived from Human Papillomavirus
IIFVYIPLFL

SEQ ID NO: 2445 - protein, 11 aa, Artificial Sequence
  Peptide Derived from Human Papillomavirus
IIFVYIPLFLI

SEQ ID NO: 2446 - protein, 9 aa, Artificial Sequence
  Peptide Derived from Human Papillomavirus
IILVLLLWI

SEQ ID NO: 2447 - protein, 10 aa, Artificial Sequence
  Peptide Derived from Human Papillomavirus
IILVLLLWIT

SEQ ID NO: 2448 - protein, 11 aa, Artificial Sequence
  Peptide Derived from Human Papillomavirus
IILVLLLWITA

SEQ ID NO: 2449 - protein, 8 aa, Artificial Sequence
  Peptide Derived from Human Papillomavirus
ILVLLLWI

SEQ ID NO: 2450 - protein, 9 aa, Artificial Sequence
  Peptide Derived from Human Papillomavirus
ILVLLLWIT

SEQ ID NO: 2451 - protein, 10 aa, Artificial Sequence
  Peptide Derived from Human Papillomavirus
ILVLLLWITA

SEQ ID NO: 2452 - protein, 11 aa, Artificial Sequence
  Peptide Derived from Human Papillomavirus
ILVLLLWITAA

SEQ ID NO: 2453 - protein, 11 aa, Artificial Sequence
  Peptide Derived from Human Papillomavirus
ITAASAFRCFI

SEQ ID NO: 2454 - protein, 9 aa, Artificial Sequence
  Peptide Derived from Human Papillomavirus
IVYIIFVYI

SEQ ID NO: 2455 - protein, 11 aa, Artificial Sequence
  Peptide Derived from Human Papillomavirus
IVYIIFVYIPL

SEQ ID NO: 2456 - protein, 10 aa, Artificial Sequence
  Peptide Derived from Human Papillomavirus
LACFLLCFCV

SEQ ID NO: 2457 - protein, 11 aa, Artificial Sequence
  Peptide Derived from Human Papillomavirus
LACFLLCFCVL

SEQ ID NO: 2458 - protein, 9 aa, Artificial Sequence
  Peptide Derived from Human Papillomavirus
LIHTHARFL

SEQ ID NO: 2459 - protein, 10 aa, Artificial Sequence
  Peptide Derived from Human Papillomavirus
LIHTHARFLI

SEQ ID NO: 2460 - protein, 11 aa, Artificial Sequence
  Peptide Derived from Human Papillomavirus
LIHTHARFLIT

SEQ ID NO: 2461 - protein, 8 aa, Artificial Sequence
  Peptide Derived from Human Papillomavirus
LIILVLLL

SEQ ID NO: 2462 - protein, 10 aa, Artificial Sequence
  Peptide Derived from Human Papillomavirus
LIILVLLLWI

SEQ ID NO: 2463 - protein, 11 aa, Artificial Sequence
  Peptide Derived from Human Papillomavirus
LIILVLLLWIT

SEQ ID NO: 2464 - protein, 9 aa, Artificial Sequence
  Peptide Derived from Human Papillomavirus
LIRPLLLSV

SEQ ID NO: 2465 - protein, 11 aa, Artificial Sequence
  Peptide Derived from Human Papillomavirus
LIRPLLLSVST

SEQ ID NO: 2466 - protein, 11 aa, Artificial Sequence
  Peptide Derived from Human Papillomavirus
LLACFLLCFCV

SEQ ID NO: 2467 - protein, 8 aa, Artificial Sequence
  Peptide Derived from Human Papillomavirus
LLCFCVLL

SEQ ID NO: 2468 - protein, 10 aa, Artificial Sequence
  Peptide Derived from Human Papillomavirus
LLCFCVLLCV

SEQ ID NO: 2469 - protein, 8 aa, Artificial Sequence
  Peptide Derived from Human Papillomavirus
LLCVCLLI

SEQ ID NO: 2470 - protein, 11 aa, Artificial Sequence
  Peptide Derived from Human Papillomavirus
LLCVCLLIRPL

SEQ ID NO: 2471 - protein, 8 aa, Artificial Sequence
  Peptide Derived from Human Papillomavirus
LLIRPLLL

SEQ ID NO: 2472 - protein, 10 aa, Artificial Sequence
  Peptide Derived from Human Papillomavirus
LLIRPLLLSV

SEQ ID NO: 2473 - protein, 9 aa, Artificial Sequence
  Peptide Derived from Human Papillomavirus
LLLSVSTYT

SEQ ID NO: 2474 - protein, 11 aa, Artificial Sequence
  Peptide Derived from Human Papillomavirus
LLLSVSTYTSL

SEQ ID NO: 2475 - protein, 8 aa, Artificial Sequence
  Peptide Derived from Human Papillomavirus
LLLWITAA

SEQ ID NO: 2476 - protein, 10 aa, Artificial Sequence
  Peptide Derived from Human Papillomavirus
LLLWITAASA

SEQ ID NO: 2477 - protein, 8 aa, Artificial Sequence
  Peptide Derived from Human Papillomavirus
LLSVSTYT

SEQ ID NO: 2478 - protein, 10 aa, Artificial Sequence
  Peptide Derived from Human Papillomavirus
LLSVSTYTSL

SEQ ID NO: 2479 - protein, 11 aa, Artificial Sequence
  Peptide Derived from Human Papillomavirus
LLSVSTYTSLI

SEQ ID NO: 2480 - protein, 9 aa, Artificial Sequence
  Peptide Derived from Human Papillomavirus
LLWITAASA

SEQ ID NO: 2481 - protein, 8 aa, Artificial Sequence
  Peptide Derived from Human Papillomavirus
LVLLLWIT

SEQ ID NO: 2482 - protein, 9 aa, Artificial Sequence
  Peptide Derived from Human Papillomavirus
LVLLLWITA

SEQ ID NO: 2483 - protein, 10 aa, Artificial Sequence
  Peptide Derived from Human Papillomavirus
LVLLLWITAA

SEQ ID NO: 2484 - protein, 9 aa, Artificial Sequence
  Peptide Derived from Human Papillomavirus
MTNLDTAST

SEQ ID NO: 2485 - protein, 10 aa, Artificial Sequence
  Peptide Derived from Human Papillomavirus
MTNLDTASTT

SEQ ID NO: 2486 - protein, 11 aa, Artificial Sequence
  Peptide Derived from Human Papillomavirus
MTNLDTASTTL

SEQ ID NO: 2487 - protein, 8 aa, Artificial Sequence
  Peptide Derived from Human Papillomavirus
NLDTASTT

SEQ ID NO: 2488 - protein, 9 aa, Artificial Sequence
  Peptide Derived from Human Papillomavirus
NLDTASTTL

SEQ ID NO: 2489 - protein, 10 aa, Artificial Sequence
  Peptide Derived from Human Papillomavirus
NLDTASTTLL

SEQ ID NO: 2490 - protein, 11 aa, Artificial Sequence
  Peptide Derived from Human Papillomavirus
NLDTASTTLLA

SEQ ID NO: 2491 - protein, 9 aa, Artificial Sequence
  Peptide Derived from Human Papillomavirus
PLFLIHTHA

SEQ ID NO: 2492 - protein, 8 aa, Artificial Sequence
  Peptide Derived from Human Papillomavirus
PLLLSVST

SEQ ID NO: 2493 - protein, 10 aa, Artificial Sequence
  Peptide Derived from Human Papillomavirus
PLLLSVSTYT

SEQ ID NO: 2494 - protein, 8 aa, Artificial Sequence
  Peptide Derived from Human Papillomavirus
SAFRCFIV

SEQ ID NO: 2495 - protein, 10 aa, Artificial Sequence
  Peptide Derived from Human Papillomavirus
SAFRCFIVYI

SEQ ID NO: 2496 - protein, 11 aa, Artificial Sequence
  Peptide Derived from Human Papillomavirus
SAFRCFIVYII

SEQ ID NO: 2497 - protein, 8 aa, Artificial Sequence
  Peptide Derived from Human Papillomavirus
SLIILVLL

SEQ ID NO: 2498 - protein, 9 aa, Artificial Sequence
  Peptide Derived from Human Papillomavirus
SLIILVLLL

SEQ ID NO: 2499 - protein, 11 aa, Artificial Sequence
  Peptide Derived from Human Papillomavirus
SLIILVLLLWI

SEQ ID NO: 2500 - protein, 9 aa, Artificial Sequence
  Peptide Derived from Human Papillomavirus
STTLLACFL

SEQ ID NO: 2501 - protein, 10 aa, Artificial Sequence
  Peptide Derived from Human Papillomavirus
STTLLACFLL

SEQ ID NO: 2502 - protein, 8 aa, Artificial Sequence
  Peptide Derived from Human Papillomavirus
STYTSLII

SEQ ID NO: 2503 - protein, 9 aa, Artificial Sequence
  Peptide Derived from Human Papillomavirus
STYTSLIIL

SEQ ID NO: 2504 - protein, 10 aa, Artificial Sequence
  Peptide Derived from Human Papillomavirus
STYTSLIILV

SEQ ID NO: 2505 - protein, 11 aa, Artificial Sequence
  Peptide Derived from Human Papillomavirus
STYTSLIILVL

SEQ ID NO: 2506 - protein, 8 aa, Artificial Sequence
  Peptide Derived from Human Papillomavirus
SVSTYTSL

SEQ ID NO: 2507 - protein, 9 aa, Artificial Sequence
  Peptide Derived from Human Papillomavirus
SVSTYTSLI

SEQ ID NO: 2508 - protein, 10 aa, Artificial Sequence
  Peptide Derived from Human Papillomavirus
SVSTYTSLII

SEQ ID NO: 2509 - protein, 11 aa, Artificial Sequence
  Peptide Derived from Human Papillomavirus
SVSTYTSLIIL

SEQ ID NO: 2510 - protein, 10 aa, Artificial Sequence
  Peptide Derived from Human Papillomavirus
TAASAFRCFI

SEQ ID NO: 2511 - protein, 11 aa, Artificial Sequence
  Peptide Derived from Human Papillomavirus
TAASAFRCFIV

SEQ ID NO: 2512 - protein, 8 aa, Artificial Sequence
  Peptide Derived from Human Papillomavirus
TASTTLLA

SEQ ID NO: 2513 - protein, 11 aa, Artificial Sequence
  Peptide Derived from Human Papillomavirus
TASTTLLACFL

SEQ ID NO: 2514 - protein, 8 aa, Artificial Sequence
  Peptide Derived from Human Papillomavirus
TLLACFLL

SEQ ID NO: 2515 - protein, 8 aa, Artificial Sequence
  Peptide Derived from Human Papillomavirus
TTLLACFL

SEQ ID NO: 2516 - protein, 9 aa, Artificial Sequence
  Peptide Derived from Human Papillomavirus
TTLLACFLL

SEQ ID NO: 2517 - protein, 8 aa, Artificial Sequence
  Peptide Derived from Human Papillomavirus
VLLCVCLL

SEQ ID NO: 2518 - protein, 9 aa, Artificial Sequence
  Peptide Derived from Human Papillomavirus
VLLCVCLLI

SEQ ID NO: 2519 - protein, 8 aa, Artificial Sequence
  Peptide Derived from Human Papillomavirus
VLLLWITA

SEQ ID NO: 2520 - protein, 9 aa, Artificial Sequence
  Peptide Derived from Human Papillomavirus
VLLLWITAA

SEQ ID NO: 2521 - protein, 11 aa, Artificial Sequence
  Peptide Derived from Human Papillomavirus
VLLLWITAASA

SEQ ID NO: 2522 - protein, 9 aa, Artificial Sequence
  Peptide Derived from Human Papillomavirus
YIIFVYIPL

SEQ ID NO: 2523 - protein, 11 aa, Artificial Sequence
  Peptide Derived from Human Papillomavirus
YIIFVYIPLFL

SEQ ID NO: 2524 - protein, 9 aa, Artificial Sequence
  Peptide Derived from Human Papillomavirus
YIPLFLIHT

SEQ ID NO: 2525 - protein, 11 aa, Artificial Sequence
  Peptide Derived from Human Papillomavirus
YIPLFLIHTHA

SEQ ID NO: 2526 - protein, 8 aa, Artificial Sequence
  Peptide Derived from Human Papillomavirus
YTSLIILV

SEQ ID NO: 2527 - protein, 9 aa, Artificial Sequence
  Peptide Derived from Human Papillomavirus
YTSLIILVL

SEQ ID NO: 2528 - protein, 10 aa, Artificial Sequence
  Peptide Derived from Human Papillomavirus
YTSLIILVLL

SEQ ID NO: 2529 - protein, 11 aa, Artificial Sequence
  Peptide Derived from Human Papillomavirus
YTSLIILVLLL

SEQ ID NO: 2530 - protein, 8 aa, Artificial Sequence
  Peptide Derived from Human Papillomavirus
CINCQKPL

SEQ ID NO: 2531 - protein, 11 aa, Artificial Sequence
  Peptide Derived from Human Papillomavirus
CIVYRDGNPYA

SEQ ID NO: 2532 - protein, 8 aa, Artificial Sequence
  Peptide Derived from Human Papillomavirus
CLKFYSKI

SEQ ID NO: 2533 - protein, 10 aa, Artificial Sequence
  Peptide Derived from Human Papillomavirus
CMSCCRSSRT

SEQ ID NO: 2534 - protein, 8 aa, Artificial Sequence
  Peptide Derived from Human Papillomavirus
CTELQTTI

SEQ ID NO: 2535 - protein, 11 aa, Artificial Sequence
  Peptide Derived from Human Papillomavirus
CTELQTTIHDI

SEQ ID NO: 2536 - protein, 8 aa, Artificial Sequence
  Peptide Derived from Human Papillomavirus
CVYCKQQL

SEQ ID NO: 2537 - protein, 9 aa, Artificial Sequence
  Peptide Derived from Human Papillomavirus
CVYCKQQLL

SEQ ID NO: 2538 - protein, 9 aa, Artificial Sequence
  Peptide Derived from Human Papillomavirus
ELQTTIHDI

SEQ ID NO: 2539 - protein, 10 aa, Artificial Sequence
  Peptide Derived from Human Papillomavirus
ELQTTIHDII

SEQ ID NO: 2540 - protein, 11 aa, Artificial Sequence
  Peptide Derived from Human Papillomavirus
ELQTTIHDIIL

SEQ ID NO: 2541 - protein, 8 aa, Artificial Sequence
  Peptide Derived from Human Papillomavirus
EQQYNKPL

SEQ ID NO: 2542 - protein, 11 aa, Artificial Sequence
  Peptide Derived from Human Papillomavirus
EQQYNKPLCDL

SEQ ID NO: 2543 - protein, 10 aa, Artificial Sequence
  Peptide Derived from Human Papillomavirus
EVYDFAFRDL

SEQ ID NO: 2544 - protein, 8 aa, Artificial Sequence
  Peptide Derived from Human Papillomavirus
FAFRDLCI

SEQ ID NO: 2545 - protein, 9 aa, Artificial Sequence
  Peptide Derived from Human Papillomavirus
FAFRDLCIV

SEQ ID NO: 2546 - protein, 11 aa, Artificial Sequence
  Peptide Derived from Human Papillomavirus
FQDPQERPRKL

SEQ ID NO: 2547 - protein, 11 aa, Artificial Sequence
  Peptide Derived from Human Papillomavirus
HLDKKQRFHNI

SEQ ID NO: 2548 - protein, 11 aa, Artificial Sequence
  Peptide Derived from Human Papillomavirus
ILECVYCKQQL

SEQ ID NO: 2549 - protein, 10 aa, Artificial Sequence
  Peptide Derived from Human Papillomavirus
IVYRDGNPYA

SEQ ID NO: 2550 - protein, 11 aa, Artificial Sequence
  Peptide Derived from Human Papillomavirus
IVYRDGNPYAV

SEQ ID NO: 2551 - protein, 9 aa, Artificial Sequence
  Peptide Derived from Human Papillomavirus
KLPQLCTEL

SEQ ID NO: 2552 - protein, 11 aa, Artificial Sequence
  Peptide Derived from Human Papillomavirus
KLPQLCTELQT

SEQ ID NO: 2553 - protein, 9 aa, Artificial Sequence
  Peptide Derived from Human Papillomavirus
KQQLLRREV

SEQ ID NO: 2554 - protein, 11 aa, Artificial Sequence
  Peptide Derived from Human Papillomavirus
LIRCINCQKPL

SEQ ID NO: 2555 - protein, 10 aa, Artificial Sequence
  Peptide Derived from Human Papillomavirus
LLRREVYDFA

SEQ ID NO: 2556 - protein, 8 aa, Artificial Sequence
  Peptide Derived from Human Papillomavirus
LQTTIHDI

SEQ ID NO: 2557 - protein, 9 aa, Artificial Sequence
  Peptide Derived from Human Papillomavirus
LQTTIHDII

SEQ ID NO: 2558 - protein, 10 aa, Artificial Sequence
  Peptide Derived from Human Papillomavirus
LQTTIHDIIL

SEQ ID NO: 2559 - protein, 11 aa, Artificial Sequence
  Peptide Derived from Human Papillomavirus
NIRGRWTGRCM

SEQ ID NO: 2560 - protein, 10 aa, Artificial Sequence
  Peptide Derived from Human Papillomavirus
PLCDLLIRCI

SEQ ID NO: 2561 - protein, 11 aa, Artificial Sequence
  Peptide Derived from Human Papillomavirus
PLCPEEKQRHL

SEQ ID NO: 2562 - protein, 8 aa, Artificial Sequence
  Peptide Derived from Human Papillomavirus
PQERPRKL

SEQ ID NO: 2563 - protein, 11 aa, Artificial Sequence
  Peptide Derived from Human Papillomavirus
PQERPRKLPQL

SEQ ID NO: 2564 - protein, 9 aa, Artificial Sequence
  Peptide Derived from Human Papillomavirus
PQLCTELQT

SEQ ID NO: 2565 - protein, 10 aa, Artificial Sequence
  Peptide Derived from Human Papillomavirus
PQLCTELQTT

SEQ ID NO: 2566 - protein, 11 aa, Artificial Sequence
  Peptide Derived from Human Papillomavirus
PQLCTELQTTI

SEQ ID NO: 2567 - protein, 8 aa, Artificial Sequence
  Peptide Derived from Human Papillomavirus
QLCTELQT

SEQ ID NO: 2568 - protein, 9 aa, Artificial Sequence
  Peptide Derived from Human Papillomavirus
QLCTELQTT

SEQ ID NO: 2569 - protein, 10 aa, Artificial Sequence
  Peptide Derived from Human Papillomavirus
QLCTELQTTI

SEQ ID NO: 2570 - protein, 11 aa, Artificial Sequence
  Peptide Derived from Human Papillomavirus
QLLRREVYDFA

SEQ ID NO: 2571 - protein, 8 aa, Artificial Sequence
  Peptide Derived from Human Papillomavirus
QQLLRREV

SEQ ID NO: 2572 - protein, 10 aa, Artificial Sequence
  Peptide Derived from Human Papillomavirus
QQYNKPLCDL

SEQ ID NO: 2573 - protein, 11 aa, Artificial Sequence
  Peptide Derived from Human Papillomavirus
QQYNKPLCDLL

SEQ ID NO: 2574 - protein, 8 aa, Artificial Sequence
  Peptide Derived from Human Papillomavirus
QTTIHDII

SEQ ID NO: 2575 - protein, 9 aa, Artificial Sequence
  Peptide Derived from Human Papillomavirus
QTTIHDIIL

SEQ ID NO: 2576 - protein, 8 aa, Artificial Sequence
  Peptide Derived from Human Papillomavirus
RTRRETQL

SEQ ID NO: 2577 - protein, 10 aa, Artificial Sequence
  Peptide Derived from Human Papillomavirus
TIHDIILECV

SEQ ID NO: 2578 - protein, 10 aa, Artificial Sequence
  Peptide Derived from Human Papillomavirus
TLEQQYNKPL

SEQ ID NO: 2579 - protein, 8 aa, Artificial Sequence
  Peptide Derived from Human Papillomavirus
TTIHDIIL

SEQ ID NO: 2580 - protein, 11 aa, Artificial Sequence
  Peptide Derived from Human Papillomavirus
TTIHDIILECV

SEQ ID NO: 2581 - protein, 11 aa, Artificial Sequence
  Peptide Derived from Human Papillomavirus
TTLEQQYNKPL

SEQ ID NO: 2582 - protein, 8 aa, Artificial Sequence
  Peptide Derived from Human Papillomavirus
YAVCDKCL

SEQ ID NO: 2583 - protein, 9 aa, Artificial Sequence
  Peptide Derived from Human Papillomavirus
CVQSTHVDI

SEQ ID NO: 2584 - protein, 11 aa, Artificial Sequence
  Peptide Derived from Human Papillomavirus
CVQSTHVDIRT

SEQ ID NO: 2585 - protein, 8 aa, Artificial Sequence
  Peptide Derived from Human Papillomavirus
DIRTLEDL

SEQ ID NO: 2586 - protein, 9 aa, Artificial Sequence
  Peptide Derived from Human Papillomavirus
DIRTLEDLL

SEQ ID NO: 2587 - protein, 10 aa, Artificial Sequence
  Peptide Derived from Human Papillomavirus
DIRTLEDLLM

SEQ ID NO: 2588 - protein, 9 aa, Artificial Sequence
  Peptide Derived from Human Papillomavirus
DLLMGTLGI

SEQ ID NO: 2589 - protein, 10 aa, Artificial Sequence
  Peptide Derived from Human Papillomavirus
DLLMGTLGIV

SEQ ID NO: 2590 - protein, 9 aa, Artificial Sequence
  Peptide Derived from Human Papillomavirus
DLQPETTDL

SEQ ID NO: 2591 - protein, 8 aa, Artificial Sequence
  Peptide Derived from Human Papillomavirus
DLYCYEQL

SEQ ID NO: 2592 - protein, 9 aa, Artificial Sequence
  Peptide Derived from Human Papillomavirus
DTPTLHEYM

SEQ ID NO: 2593 - protein, 10 aa, Artificial Sequence
  Peptide Derived from Human Papillomavirus
DTPTLHEYML

SEQ ID NO: 2594 - protein, 9 aa, Artificial Sequence
  Peptide Derived from Human Papillomavirus
EIDGPAGQA

SEQ ID NO: 2595 - protein, 11 aa, Artificial Sequence
  Peptide Derived from Human Papillomavirus
ETTDLYCYEQL

SEQ ID NO: 2596 - protein, 8 aa, Artificial Sequence
  Peptide Derived from Human Papillomavirus
GQAEPDRA

SEQ ID NO: 2597 - protein, 9 aa, Artificial Sequence
  Peptide Derived from Human Papillomavirus
GTLGIVCPI

SEQ ID NO: 2598 - protein, 10 aa, Artificial Sequence
  Peptide Derived from Human Papillomavirus
HVDIRTLEDL

SEQ ID NO: 2599 - protein, 11 aa, Artificial Sequence
  Peptide Derived from Human Papillomavirus
HVDIRTLEDLL

SEQ ID NO: 2600 - protein, 11 aa, Artificial Sequence
  Peptide Derived from Human Papillomavirus
IVTFCCKCDST

SEQ ID NO: 2601 - protein, 8 aa, Artificial Sequence
  Peptide Derived from Human Papillomavirus
LLMGTLGI

SEQ ID NO: 2602 - protein, 9 aa, Artificial Sequence
  Peptide Derived from Human Papillomavirus
LLMGTLGIV

SEQ ID NO: 2603 - protein, 8 aa, Artificial Sequence
  Peptide Derived from Human Papillomavirus
LMGTLGIV

SEQ ID NO: 2604 - protein, 11 aa, Artificial Sequence
  Peptide Derived from Human Papillomavirus
LMGTLGIVCPI

SEQ ID NO: 2605 - protein, 8 aa, Artificial Sequence
  Peptide Derived from Human Papillomavirus
LQPETTDL

SEQ ID NO: 2606 - protein, 8 aa, Artificial Sequence
  Peptide Derived from Human Papillomavirus
MLDLQPET

SEQ ID NO: 2607 - protein, 9 aa, Artificial Sequence
  Peptide Derived from Human Papillomavirus
MLDLQPETT

SEQ ID NO: 2608 - protein, 11 aa, Artificial Sequence
  Peptide Derived from Human Papillomavirus
MLDLQPETTDL

SEQ ID NO: 2609 - protein, 10 aa, Artificial Sequence
  Peptide Derived from Human Papillomavirus
PAGQAEPDRA

SEQ ID NO: 2610 - protein, 8 aa, Artificial Sequence
  Peptide Derived from Human Papillomavirus
PTLHEYML

SEQ ID NO: 2611 - protein, 10 aa, Artificial Sequence
  Peptide Derived from Human Papillomavirus
PTLHEYMLDL

SEQ ID NO: 2612 - protein, 11 aa, Artificial Sequence
  Peptide Derived from Human Papillomavirus
QAEPDRAHYNI

SEQ ID NO: 2613 - protein, 8 aa, Artificial Sequence
  Peptide Derived from Human Papillomavirus
RAHYNIVT

SEQ ID NO: 2614 - protein, 9 aa, Artificial Sequence
  Peptide Derived from Human Papillomavirus
RLCVQSTHV

SEQ ID NO: 2615 - protein, 11 aa, Artificial Sequence
  Peptide Derived from Human Papillomavirus
RLCVQSTHVDI

SEQ ID NO: 2616 - protein, 8 aa, Artificial Sequence
  Peptide Derived from Human Papillomavirus
RTLEDLLM

SEQ ID NO: 2617 - protein, 10 aa, Artificial Sequence
  Peptide Derived from Human Papillomavirus
RTLEDLLMGT

SEQ ID NO: 2618 - protein, 11 aa, Artificial Sequence
  Peptide Derived from Human Papillomavirus
RTLEDLLMGTL

SEQ ID NO: 2619 - protein, 8 aa, Artificial Sequence
  Peptide Derived from Human Papillomavirus
STHVDIRT

SEQ ID NO: 2620 - protein, 9 aa, Artificial Sequence
  Peptide Derived from Human Papillomavirus
STHVDIRTL

SEQ ID NO: 2621 - protein, 10 aa, Artificial Sequence
  Peptide Derived from Human Papillomavirus
STLRLCVQST

SEQ ID NO: 2622 - protein, 9 aa, Artificial Sequence
  Peptide Derived from Human Papillomavirus
TLEDLLMGT

SEQ ID NO: 2623 - protein, 10 aa, Artificial Sequence
  Peptide Derived from Human Papillomavirus
TLEDLLMGTL

SEQ ID NO: 2624 - protein, 8 aa, Artificial Sequence
  Peptide Derived from Human Papillomavirus
TLGIVCPI

SEQ ID NO: 2625 - protein, 9 aa, Artificial Sequence
  Peptide Derived from Human Papillomavirus
TLHEYMLDL

SEQ ID NO: 2626 - protein, 9 aa, Artificial Sequence
  Peptide Derived from Human Papillomavirus
TLRLCVQST

SEQ ID NO: 2627 - protein, 11 aa, Artificial Sequence
  Peptide Derived from Human Papillomavirus
TLRLCVQSTHV

SEQ ID NO: 2628 - protein, 10 aa, Artificial Sequence
  Peptide Derived from Human Papillomavirus
TTDLYCYEQL

SEQ ID NO: 2629 - protein, 8 aa, Artificial Sequence
  Peptide Derived from Human Papillomavirus
VQSTHVDI

SEQ ID NO: 2630 - protein, 10 aa, Artificial Sequence
  Peptide Derived from Human Papillomavirus
VQSTHVDIRT

SEQ ID NO: 2631 - protein, 11 aa, Artificial Sequence
  Peptide Derived from Human Papillomavirus
VQSTHVDIRTL

SEQ ID NO: 2632 - protein, 10 aa, Artificial Sequence
  Peptide Derived from Human Papillomavirus
VTFCCKCDST

SEQ ID NO: 2633 - protein, 11 aa, Artificial Sequence
  Peptide Derived from Human Papillomavirus
VTFCCKCDSTL

SEQ ID NO: 2634 - protein, 9 aa, Artificial Sequence
  Peptide Derived from Human Papillomavirus
YMLDLQPET

SEQ ID NO: 2635 - protein, 10 aa, Artificial Sequence
  Peptide Derived from Human Papillomavirus
YMLDLQPETT

SEQ ID NO: 2636 - protein, 8 aa, Artificial Sequence
  Peptide Derived from Human Papillomavirus
AAISTSET

SEQ ID NO: 2637 - protein, 9 aa, Artificial Sequence
  Peptide Derived from Human Papillomavirus
AAISTSETT

SEQ ID NO: 2638 - protein, 8 aa, Artificial Sequence
  Peptide Derived from Human Papillomavirus
AIACQKHT

SEQ ID NO: 2639 - protein, 11 aa, Artificial Sequence
  Peptide Derived from Human Papillomavirus
AIACQKHTPPA

SEQ ID NO: 2640 - protein, 8 aa, Artificial Sequence
  Peptide Derived from Human Papillomavirus
AISTSETT

SEQ ID NO: 2641 - protein, 9 aa, Artificial Sequence
  Peptide Derived from Human Papillomavirus
AMDFTTLQA

SEQ ID NO: 2642 - protein, 8 aa, Artificial Sequence
  Peptide Derived from Human Papillomavirus
AQGHNNGI

SEQ ID NO: 2643 - protein, 10 aa, Artificial Sequence
  Peptide Derived from Human Papillomavirus
AQIFNKPYWL

SEQ ID NO: 2644 - protein, 8 aa, Artificial Sequence
  Peptide Derived from Human Papillomavirus
ATPTTSST

SEQ ID NO: 2645 - protein, 10 aa, Artificial Sequence
  Peptide Derived from Human Papillomavirus
ATPTTSSTST

SEQ ID NO: 2646 - protein, 11 aa, Artificial Sequence
  Peptide Derived from Human Papillomavirus
ATPTTSSTSTT

SEQ ID NO: 2647 - protein, 8 aa, Artificial Sequence
  Peptide Derived from Human Papillomavirus
ATVYLPPV

SEQ ID NO: 2648 - protein, 10 aa, Artificial Sequence
  Peptide Derived from Human Papillomavirus
ATVYLPPVPV

SEQ ID NO: 2649 - protein, 10 aa, Artificial Sequence
  Peptide Derived from Human Papillomavirus
AVGENVPDDL

SEQ ID NO: 2650 - protein, 9 aa, Artificial Sequence
  Peptide Derived from Human Papillomavirus
AVGHPYFPI

SEQ ID NO: 2651 - protein, 10 aa, Artificial Sequence
  Peptide Derived from Human Papillomavirus
AVNPGDCPPL

SEQ ID NO: 2652 - protein, 9 aa, Artificial Sequence
  Peptide Derived from Human Papillomavirus
CAAISTSET

SEQ ID NO: 2653 - protein, 10 aa, Artificial Sequence
  Peptide Derived from Human Papillomavirus
CAAISTSETT

SEQ ID NO: 2654 - protein, 9 aa, Artificial Sequence
  Peptide Derived from Human Papillomavirus
CISMDYKQT

SEQ ID NO: 2655 - protein, 11 aa, Artificial Sequence
  Peptide Derived from Human Papillomavirus
CISMDYKQTQL

SEQ ID NO: 2656 - protein, 9 aa, Artificial Sequence
  Peptide Derived from Human Papillomavirus
CLIGCKPPI

SEQ ID NO: 2657 - protein, 8 aa, Artificial Sequence
  Peptide Derived from Human Papillomavirus
CQKHTPPA

SEQ ID NO: 2658 - protein, 11 aa, Artificial Sequence
  Peptide Derived from Human Papillomavirus
CTSICKYPDYI

SEQ ID NO: 2659 - protein, 11 aa, Artificial Sequence
  Peptide Derived from Human Papillomavirus
DAQIFNKPYWL

SEQ ID NO: 2660 - protein, 8 aa, Artificial Sequence
  Peptide Derived from Human Papillomavirus
DLQFIFQL

SEQ ID NO: 2661 - protein, 11 aa, Artificial Sequence
  Peptide Derived from Human Papillomavirus
DLQFIFQLCKI

SEQ ID NO: 2662 - protein, 10 aa, Artificial Sequence
  Peptide Derived from Human Papillomavirus
DLYIKGSGST

SEQ ID NO: 2663 - protein, 11 aa, Artificial Sequence
  Peptide Derived from Human Papillomavirus
DLYIKGSGSTA

SEQ ID NO: 2664 - protein, 9 aa, Artificial Sequence
  Peptide Derived from Human Papillomavirus
DMVDTGFGA

SEQ ID NO: 2665 - protein, 10 aa, Artificial Sequence
  Peptide Derived from Human Papillomavirus
DMVDTGFGAM

SEQ ID NO: 2666 - protein, 10 aa, Artificial Sequence
  Peptide Derived from Human Papillomavirus
DQFPLGRKFL

SEQ ID NO: 2667 - protein, 11 aa, Artificial Sequence
  Peptide Derived from Human Papillomavirus
DQFPLGRKFLL

SEQ ID NO: 2668 - protein, 9 aa, Artificial Sequence
  Peptide Derived from Human Papillomavirus
DTENASAYA

SEQ ID NO: 2669 - protein, 10 aa, Artificial Sequence
  Peptide Derived from Human Papillomavirus
DTENASAYAA

SEQ ID NO: 2670 - protein, 10 aa, Artificial Sequence
  Peptide Derived from Human Papillomavirus
DTGFGAMDFT

SEQ ID NO: 2671 - protein, 11 aa, Artificial Sequence
  Peptide Derived from Human Papillomavirus
DTGFGAMDFTT

SEQ ID NO: 2672 - protein, 8 aa, Artificial Sequence
  Peptide Derived from Human Papillomavirus
DTQRLVWA

SEQ ID NO: 2673 - protein, 10 aa, Artificial Sequence
  Peptide Derived from Human Papillomavirus
DTQRLVWACV

SEQ ID NO: 2674 - protein, 9 aa, Artificial Sequence
  Peptide Derived from Human Papillomavirus
DTSFYNPDT

SEQ ID NO: 2675 - protein, 8 aa, Artificial Sequence
  Peptide Derived from Human Papillomavirus
DTTRSTNM

SEQ ID NO: 2676 - protein, 10 aa, Artificial Sequence
  Peptide Derived from Human Papillomavirus
DTTRSTNMSL

SEQ ID NO: 2677 - protein, 10 aa, Artificial Sequence
  Peptide Derived from Human Papillomavirus
DTYRFVTSQA

SEQ ID NO: 2678 - protein, 11 aa, Artificial Sequence
  Peptide Derived from Human Papillomavirus
DTYRFVTSQAI

SEQ ID NO: 2679 - protein, 9 aa, Artificial Sequence
  Peptide Derived from Human Papillomavirus
DVMTYIHSM

SEQ ID NO: 2680 - protein, 11 aa, Artificial Sequence
  Peptide Derived from Human Papillomavirus
DVNVYHIFFQM

SEQ ID NO: 2681 - protein, 9 aa, Artificial Sequence
  Peptide Derived from Human Papillomavirus
EATVYLPPV

SEQ ID NO: 2682 - protein, 11 aa, Artificial Sequence
  Peptide Derived from Human Papillomavirus
EATVYLPPVPV

SEQ ID NO: 2683 - protein, 8 aa, Artificial Sequence
  Peptide Derived from Human Papillomavirus
EQMFVRHL

SEQ ID NO: 2684 - protein, 8 aa, Artificial Sequence
  Peptide Derived from Human Papillomavirus
EVGRGQPL

SEQ ID NO: 2685 - protein, 10 aa, Artificial Sequence
  Peptide Derived from Human Papillomavirus
EVGRGQPLGV

SEQ ID NO: 2686 - protein, 10 aa, Artificial Sequence
  Peptide Derived from Human Papillomavirus
EVNLKEKFSA

SEQ ID NO: 2687 - protein, 8 aa, Artificial Sequence
  Peptide Derived from Human Papillomavirus
EVPLDICT

SEQ ID NO: 2688 - protein, 10 aa, Artificial Sequence
  Peptide Derived from Human Papillomavirus
EVPLDICTSI

SEQ ID NO: 2689 - protein, 8 aa, Artificial Sequence
  Peptide Derived from Human Papillomavirus
FIFQLCKI

SEQ ID NO: 2690 - protein, 9 aa, Artificial Sequence
  Peptide Derived from Human Papillomavirus
FIFQLCKIT

SEQ ID NO: 2691 - protein, 10 aa, Artificial Sequence
  Peptide Derived from Human Papillomavirus
FIFQLCKITL

SEQ ID NO: 2692 - protein, 11 aa, Artificial Sequence
  Peptide Derived from Human Papillomavirus
FIFQLCKITLT

SEQ ID NO: 2693 - protein, 8 aa, Artificial Sequence
  Peptide Derived from Human Papillomavirus
FIYILVIT

SEQ ID NO: 2694 - protein, 9 aa, Artificial Sequence
  Peptide Derived from Human Papillomavirus
FLLQAGLKA

SEQ ID NO: 2695 - protein, 8 aa, Artificial Sequence
  Peptide Derived from Human Papillomavirus
FQLCKITL

SEQ ID NO: 2696 - protein, 9 aa, Artificial Sequence
  Peptide Derived from Human Papillomavirus
FQLCKITLT

SEQ ID NO: 2697 - protein, 10 aa, Artificial Sequence
  Peptide Derived from Human Papillomavirus
FQLCKITLTA

SEQ ID NO: 2698 - protein, 11 aa, Artificial Sequence
  Peptide Derived from Human Papillomavirus
FQMSLWLPSEA

SEQ ID NO: 2699 - protein, 8 aa, Artificial Sequence
  Peptide Derived from Human Papillomavirus
FTLGKRKA

SEQ ID NO: 2700 - protein, 9 aa, Artificial Sequence
  Peptide Derived from Human Papillomavirus
FTLGKRKAT

SEQ ID NO: 2701 - protein, 11 aa, Artificial Sequence
  Peptide Derived from Human Papillomavirus
FTLGKRKATPT

SEQ ID NO: 2702 - protein, 11 aa, Artificial Sequence
  Peptide Derived from Human Papillomavirus
FTTLQANKSEV

SEQ ID NO: 2703 - protein, 9 aa, Artificial Sequence
  Peptide Derived from Human Papillomavirus
FVRHLFNRA

SEQ ID NO: 2704 - protein, 11 aa, Artificial Sequence
  Peptide Derived from Human Papillomavirus
FVRHLFNRAGA

SEQ ID NO: 2705 - protein, 8 aa, Artificial Sequence
  Peptide Derived from Human Papillomavirus
FVTSQAIA

SEQ ID NO: 2706 - protein, 8 aa, Artificial Sequence
  Peptide Derived from Human Papillomavirus
FVTVVDTT

SEQ ID NO: 2707 - protein, 11 aa, Artificial Sequence
  Peptide Derived from Human Papillomavirus
FVTVVDTTRST

SEQ ID NO: 2708 - protein, 8 aa, Artificial Sequence
  Peptide Derived from Human Papillomavirus
GAMDFTTL

SEQ ID NO: 2709 - protein, 10 aa, Artificial Sequence
  Peptide Derived from Human Papillomavirus
GAMDFTTLQA

SEQ ID NO: 2710 - protein, 11 aa, Artificial Sequence
  Peptide Derived from Human Papillomavirus
GAVGENVPDDL

SEQ ID NO: 2711 - protein, 8 aa, Artificial Sequence
  Peptide Derived from Human Papillomavirus
GICWGNQL

SEQ ID NO: 2712 - protein, 10 aa, Artificial Sequence
  Peptide Derived from Human Papillomavirus
GICWGNQLFV

SEQ ID NO: 2713 - protein, 11 aa, Artificial Sequence
  Peptide Derived from Human Papillomavirus
GICWGNQLFVT

SEQ ID NO: 2714 - protein, 8 aa, Artificial Sequence
  Peptide Derived from Human Papillomavirus
GISGHPLL

SEQ ID NO: 2715 - protein, 11 aa, Artificial Sequence
  Peptide Derived from Human Papillomavirus
GISGHPLLNKL

SEQ ID NO: 2716 - protein, 9 aa, Artificial Sequence
  Peptide Derived from Human Papillomavirus
GLKAKPKFT

SEQ ID NO: 2717 - protein, 10 aa, Artificial Sequence
  Peptide Derived from Human Papillomavirus
GLKAKPKFTL

SEQ ID NO: 2718 - protein, 9 aa, Artificial Sequence
  Peptide Derived from Human Papillomavirus
GLQPPPGGT

SEQ ID NO: 2719 - protein, 10 aa, Artificial Sequence
  Peptide Derived from Human Papillomavirus
GLQPPPGGTL

SEQ ID NO: 2720 - protein, 9 aa, Artificial Sequence
  Peptide Derived from Human Papillomavirus
GLQYRVFRI

SEQ ID NO: 2721 - protein, 11 aa, Artificial Sequence
  Peptide Derived from Human Papillomavirus
GLQYRVFRIHL

SEQ ID NO: 2722 - protein, 8 aa, Artificial Sequence
  Peptide Derived from Human Papillomavirus
GQPLGVGI

SEQ ID NO: 2723 - protein, 10 aa, Artificial Sequence
  Peptide Derived from Human Papillomavirus
GTLEDTYRFV

SEQ ID NO: 2724 - protein, 11 aa, Artificial Sequence
  Peptide Derived from Human Papillomavirus
GTLEDTYRFVT

SEQ ID NO: 2725 - protein, 8 aa, Artificial Sequence
  Peptide Derived from Human Papillomavirus
GTSRLLAV

SEQ ID NO: 2726 - protein, 8 aa, Artificial Sequence
  Peptide Derived from Human Papillomavirus
GVDNRECI

SEQ ID NO: 2727 - protein, 10 aa, Artificial Sequence
  Peptide Derived from Human Papillomavirus
GVDNRECISM

SEQ ID NO: 2728 - protein, 10 aa, Artificial Sequence
  Peptide Derived from Human Papillomavirus
GVEVGRGQPL

SEQ ID NO: 2729 - protein, 9 aa, Artificial Sequence
  Peptide Derived from Human Papillomavirus
GVGISGHPL

SEQ ID NO: 2730 - protein, 10 aa, Artificial Sequence
  Peptide Derived from Human Papillomavirus
GVGISGHPLL

SEQ ID NO: 2731 - protein, 8 aa, Artificial Sequence
  Peptide Derived from Human Papillomavirus
HAGTSRLL

SEQ ID NO: 2732 - protein, 9 aa, Artificial Sequence
  Peptide Derived from Human Papillomavirus
HAGTSRLLA

SEQ ID NO: 2733 - protein, 10 aa, Artificial Sequence
  Peptide Derived from Human Papillomavirus
HAGTSRLLAV

SEQ ID NO: 2734 - protein, 8 aa, Artificial Sequence
  Peptide Derived from Human Papillomavirus
HIFFQMSL

SEQ ID NO: 2735 - protein, 10 aa, Artificial Sequence
  Peptide Derived from Human Papillomavirus
HIFFQMSLWL

SEQ ID NO: 2736 - protein, 8 aa, Artificial Sequence
  Peptide Derived from Human Papillomavirus
HLFNRAGA

SEQ ID NO: 2737 - protein, 9 aa, Artificial Sequence
  Peptide Derived from Human Papillomavirus
HLFNRAGAV

SEQ ID NO: 2738 - protein, 11 aa, Artificial Sequence
  Peptide Derived from Human Papillomavirus
HTPPAPKEDPL

SEQ ID NO: 2739 - protein, 10 aa, Artificial Sequence
  Peptide Derived from Human Papillomavirus
IACQKHTPPA

SEQ ID NO: 2740 - protein, 9 aa, Artificial Sequence
  Peptide Derived from Human Papillomavirus
ILEDWNFGL

SEQ ID NO: 2741 - protein, 11 aa, Artificial Sequence
  Peptide Derived from Human Papillomavirus
ILVITCYENDV

SEQ ID NO: 2742 - protein, 9 aa, Artificial Sequence
  Peptide Derived from Human Papillomavirus
ILVPKVSGL

SEQ ID NO: 2743 - protein, 9 aa, Artificial Sequence
  Peptide Derived from Human Papillomavirus
IQDGDMVDT

SEQ ID NO: 2744 - protein, 8 aa, Artificial Sequence
  Peptide Derived from Human Papillomavirus
ITCYENDV

SEQ ID NO: 2745 - protein, 10 aa, Artificial Sequence
  Peptide Derived from Human Papillomavirus
ITCYENDVNV

SEQ ID NO: 2746 - protein, 8 aa, Artificial Sequence
  Peptide Derived from Human Papillomavirus
ITLTADVM

SEQ ID NO: 2747 - protein, 9 aa, Artificial Sequence
  Peptide Derived from Human Papillomavirus
ITLTADVMT

SEQ ID NO: 2748 - protein, 11 aa, Artificial Sequence
  Peptide Derived from Human Papillomavirus
ITLTADVMTYI

SEQ ID NO: 2749 - protein, 8 aa, Artificial Sequence
  Peptide Derived from Human Papillomavirus
KAKPKFTL

SEQ ID NO: 2750 - protein, 9 aa, Artificial Sequence
  Peptide Derived from Human Papillomavirus
KATPTTSST

SEQ ID NO: 2751 - protein, 11 aa, Artificial Sequence
  Peptide Derived from Human Papillomavirus
KATPTTSSTST

SEQ ID NO: 2752 - protein, 10 aa, Artificial Sequence
  Peptide Derived from Human Papillomavirus
KILVPKVSGL

SEQ ID NO: 2753 - protein, 8 aa, Artificial Sequence
  Peptide Derived from Human Papillomavirus
KITLTADV

SEQ ID NO: 2754 - protein, 9 aa, Artificial Sequence
  Peptide Derived from Human Papillomavirus
KITLTADVM

SEQ ID NO: 2755 - protein, 10 aa, Artificial Sequence
  Peptide Derived from Human Papillomavirus
KITLTADVMT

SEQ ID NO: 2756 - protein, 8 aa, Artificial Sequence
  Peptide Derived from Human Papillomavirus
KLDDTENA

SEQ ID NO: 2757 - protein, 10 aa, Artificial Sequence
  Peptide Derived from Human Papillomavirus
KLDDTENASA

SEQ ID NO: 2758 - protein, 11 aa, Artificial Sequence
  Peptide Derived from Human Papillomavirus
KMVSEPYGDSL

SEQ ID NO: 2759 - protein, 8 aa, Artificial Sequence
  Peptide Derived from Human Papillomavirus
KQTQLCLI

SEQ ID NO: 2760 - protein, 9 aa, Artificial Sequence
  Peptide Derived from Human Papillomavirus
KVSGLQYRV

SEQ ID NO: 2761 - protein, 9 aa, Artificial Sequence
  Peptide Derived from Human Papillomavirus
KVVSTDEYV

SEQ ID NO: 2762 - protein, 10 aa, Artificial Sequence
  Peptide Derived from Human Papillomavirus
KVVSTDEYVA

SEQ ID NO: 2763 - protein, 9 aa, Artificial Sequence
  Peptide Derived from Human Papillomavirus
LASSNYFPT

SEQ ID NO: 2764 - protein, 10 aa, Artificial Sequence
  Peptide Derived from Human Papillomavirus
LAVGHPYFPI

SEQ ID NO: 2765 - protein, 8 aa, Artificial Sequence
  Peptide Derived from Human Papillomavirus
LIGCKPPI

SEQ ID NO: 2766 - protein, 11 aa, Artificial Sequence
  Peptide Derived from Human Papillomavirus
LINTVIQDGDM

SEQ ID NO: 2767 - protein, 11 aa, Artificial Sequence
  Peptide Derived from Human Papillomavirus
LLAVGHPYFPI

SEQ ID NO: 2768 - protein, 8 aa, Artificial Sequence
  Peptide Derived from Human Papillomavirus
LLNKLDDT

SEQ ID NO: 2769 - protein, 11 aa, Artificial Sequence
  Peptide Derived from Human Papillomavirus
LLNKLDDTENA

SEQ ID NO: 2770 - protein, 8 aa, Artificial Sequence
  Peptide Derived from Human Papillomavirus
LLQAGLKA

SEQ ID NO: 2771 - protein, 8 aa, Artificial Sequence
  Peptide Derived from Human Papillomavirus
LQANKSEV

SEQ ID NO: 2772 - protein, 10 aa, Artificial Sequence
  Peptide Derived from Human Papillomavirus
LQANKSEVPL

SEQ ID NO: 2773 - protein, 10 aa, Artificial Sequence
  Peptide Derived from Human Papillomavirus
LQFIFQLCKI

SEQ ID NO: 2774 - protein, 11 aa, Artificial Sequence
  Peptide Derived from Human Papillomavirus
LQFIFQLCKIT

SEQ ID NO: 2775 - protein, 8 aa, Artificial Sequence
  Peptide Derived from Human Papillomavirus
LQPPPGGT

SEQ ID NO: 2776 - protein, 9 aa, Artificial Sequence
  Peptide Derived from Human Papillomavirus
LQPPPGGTL

SEQ ID NO: 2777 - protein, 11 aa, Artificial Sequence
  Peptide Derived from Human Papillomavirus
LQRAQGHNNGI

SEQ ID NO: 2778 - protein, 8 aa, Artificial Sequence
  Peptide Derived from Human Papillomavirus
LQYRVFRI

SEQ ID NO: 2779 - protein, 10 aa, Artificial Sequence
  Peptide Derived from Human Papillomavirus
LQYRVFRIHL

SEQ ID NO: 2780 - protein, 9 aa, Artificial Sequence
  Peptide Derived from Human Papillomavirus
LTADVMTYI

SEQ ID NO: 2781 - protein, 10 aa, Artificial Sequence
  Peptide Derived from Human Papillomavirus
LVITCYENDV

SEQ ID NO: 2782 - protein, 8 aa, Artificial Sequence
  Peptide Derived from Human Papillomavirus
LVPKVSGL

SEQ ID NO: 2783 - protein, 8 aa, Artificial Sequence
  Peptide Derived from Human Papillomavirus
LVWACVGV

SEQ ID NO: 2784 - protein, 10 aa, Artificial Sequence
  Peptide Derived from Human Papillomavirus
LVWACVGVEV

SEQ ID NO: 2785 - protein, 8 aa, Artificial Sequence
  Peptide Derived from Human Papillomavirus
MQVTFIYI

SEQ ID NO: 2786 - protein, 9 aa, Artificial Sequence
  Peptide Derived from Human Papillomavirus
MQVTFIYIL

SEQ ID NO: 2787 - protein, 10 aa, Artificial Sequence
  Peptide Derived from Human Papillomavirus
MQVTFIYILV

SEQ ID NO: 2788 - protein, 11 aa, Artificial Sequence
  Peptide Derived from Human Papillomavirus
MQVTFIYILVI

SEQ ID NO: 2789 - protein, 10 aa, Artificial Sequence
  Peptide Derived from Human Papillomavirus
MTYIHSMNST

SEQ ID NO: 2790 - protein, 11 aa, Artificial Sequence
  Peptide Derived from Human Papillomavirus
MTYIHSMNSTI

SEQ ID NO: 2791 - protein, 8 aa, Artificial Sequence
  Peptide Derived from Human Papillomavirus
MVDTGFGA

SEQ ID NO: 2792 - protein, 9 aa, Artificial Sequence
  Peptide Derived from Human Papillomavirus
MVDTGFGAM

SEQ ID NO: 2793 - protein, 10 aa, Artificial Sequence
  Peptide Derived from Human Papillomavirus
MVSEPYGDSL

SEQ ID NO: 2794 - protein, 8 aa, Artificial Sequence
  Peptide Derived from Human Papillomavirus
MVTSDAQI

SEQ ID NO: 2795 - protein, 10 aa, Artificial Sequence
  Peptide Derived from Human Papillomavirus
NAGVDNRECI

SEQ ID NO: 2796 - protein, 9 aa, Artificial Sequence
  Peptide Derived from Human Papillomavirus
NASAYAANA

SEQ ID NO: 2797 - protein, 11 aa, Artificial Sequence
  Peptide Derived from Human Papillomavirus
NASAYAANAGV

SEQ ID NO: 2798 - protein, 8 aa, Artificial Sequence
  Peptide Derived from Human Papillomavirus
NIYYHAGT

SEQ ID NO: 2799 - protein, 11 aa, Artificial Sequence
  Peptide Derived from Human Papillomavirus
NIYYHAGTSRL

SEQ ID NO: 2800 - protein, 10 aa, Artificial Sequence
  Peptide Derived from Human Papillomavirus
NLASSNYFPT

SEQ ID NO: 2801 - protein, 8 aa, Artificial Sequence
  Peptide Derived from Human Papillomavirus
NLKEKFSA

SEQ ID NO: 2802 - protein, 10 aa, Artificial Sequence
  Peptide Derived from Human Papillomavirus
NLKEKFSADL

SEQ ID NO: 2803 - protein, 8 aa, Artificial Sequence
  Peptide Derived from Human Papillomavirus
NMSLCAAI

SEQ ID NO: 2804 - protein, 10 aa, Artificial Sequence
  Peptide Derived from Human Papillomavirus
NMSLCAAIST

SEQ ID NO: 2805 - protein, 8 aa, Artificial Sequence
  Peptide Derived from Human Papillomavirus
NQLFVTVV

SEQ ID NO: 2806 - protein, 10 aa, Artificial Sequence
  Peptide Derived from Human Papillomavirus
NQLFVTVVDT

SEQ ID NO: 2807 - protein, 11 aa, Artificial Sequence
  Peptide Derived from Human Papillomavirus
NQLFVTVVDTT

SEQ ID NO: 2808 - protein, 8 aa, Artificial Sequence
  Peptide Derived from Human Papillomavirus
NTNFKEYL

SEQ ID NO: 2809 - protein, 9 aa, Artificial Sequence
  Peptide Derived from Human Papillomavirus
NTVIQDGDM

SEQ ID NO: 2810 - protein, 10 aa, Artificial Sequence
  Peptide Derived from Human Papillomavirus
NTVIQDGDMV

SEQ ID NO: 2811 - protein, 8 aa, Artificial Sequence
  Peptide Derived from Human Papillomavirus
NVPDDLYI

SEQ ID NO: 2812 - protein, 9 aa, Artificial Sequence
  Peptide Derived from Human Papillomavirus
NVYHIFFQM

SEQ ID NO: 2813 - protein, 11 aa, Artificial Sequence
  Peptide Derived from Human Papillomavirus
NVYHIFFQMSL

SEQ ID NO: 2814 - protein, 8 aa, Artificial Sequence
  Peptide Derived from Human Papillomavirus
PAPKEDPL

SEQ ID NO: 2815 - protein, 10 aa, Artificial Sequence
  Peptide Derived from Human Papillomavirus
PIKKPNNNKI

SEQ ID NO: 2816 - protein, 11 aa, Artificial Sequence
  Peptide Derived from Human Papillomavirus
PIKKPNNNKIL

SEQ ID NO: 2817 - protein, 8 aa, Artificial Sequence
  Peptide Derived from Human Papillomavirus
PLDICTSI

SEQ ID NO: 2818 - protein, 8 aa, Artificial Sequence
  Peptide Derived from Human Papillomavirus
PLELINTV

SEQ ID NO: 2819 - protein, 9 aa, Artificial Sequence
  Peptide Derived from Human Papillomavirus
PLELINTVI

SEQ ID NO: 2820 - protein, 8 aa, Artificial Sequence
  Peptide Derived from Human Papillomavirus
PLGRKFLL

SEQ ID NO: 2821 - protein, 10 aa, Artificial Sequence
  Peptide Derived from Human Papillomavirus
PLGRKFLLQA

SEQ ID NO: 2822 - protein, 11 aa, Artificial Sequence
  Peptide Derived from Human Papillomavirus
PLGVGISGHPL

SEQ ID NO: 2823 - protein, 10 aa, Artificial Sequence
  Peptide Derived from Human Papillomavirus
PLKKYTFWEV

SEQ ID NO: 2824 - protein, 9 aa, Artificial Sequence
  Peptide Derived from Human Papillomavirus
PLLNKLDDT

SEQ ID NO: 2825 - protein, 8 aa, Artificial Sequence
  Peptide Derived from Human Papillomavirus
PTPSGSMV

SEQ ID NO: 2826 - protein, 9 aa, Artificial Sequence
  Peptide Derived from Human Papillomavirus
PTPSGSMVT

SEQ ID NO: 2827 - protein, 8 aa, Artificial Sequence
  Peptide Derived from Human Papillomavirus
PTTSSTST

SEQ ID NO: 2828 - protein, 9 aa, Artificial Sequence
  Peptide Derived from Human Papillomavirus
PTTSSTSTT

SEQ ID NO: 2829 - protein, 10 aa, Artificial Sequence
  Peptide Derived from Human Papillomavirus
PTTSSTSTTA

SEQ ID NO: 2830 - protein, 8 aa, Artificial Sequence
  Peptide Derived from Human Papillomavirus
PVPVSKVV

SEQ ID NO: 2831 - protein, 10 aa, Artificial Sequence
  Peptide Derived from Human Papillomavirus
PVPVSKVVST

SEQ ID NO: 2832 - protein, 8 aa, Artificial Sequence
  Peptide Derived from Human Papillomavirus
PVSKVVST

SEQ ID NO: 2833 - protein, 11 aa, Artificial Sequence
  Peptide Derived from Human Papillomavirus
QAGLKAKPKFT

SEQ ID NO: 2834 - protein, 9 aa, Artificial Sequence
  Peptide Derived from Human Papillomavirus
QAIACQKHT

SEQ ID NO: 2835 - protein, 9 aa, Artificial Sequence
  Peptide Derived from Human Papillomavirus
QANKSEVPL

SEQ ID NO: 2836 - protein, 11 aa, Artificial Sequence
  Peptide Derived from Human Papillomavirus
QANKSEVPLDI

SEQ ID NO: 2837 - protein, 9 aa, Artificial Sequence
  Peptide Derived from Human Papillomavirus
QIFNKPYWL

SEQ ID NO: 2838 - protein, 8 aa, Artificial Sequence
  Peptide Derived from Human Papillomavirus
QLCKITLT

SEQ ID NO: 2839 - protein, 9 aa, Artificial Sequence
  Peptide Derived from Human Papillomavirus
QLCKITLTA

SEQ ID NO: 2840 - protein, 11 aa, Artificial Sequence
  Peptide Derived from Human Papillomavirus
QLCKITLTADV

SEQ ID NO: 2841 - protein, 11 aa, Artificial Sequence
  Peptide Derived from Human Papillomavirus
QLCLIGCKPPI

SEQ ID NO: 2842 - protein, 9 aa, Artificial Sequence
  Peptide Derived from Human Papillomavirus
QLFVTVVDT

SEQ ID NO: 2843 - protein, 10 aa, Artificial Sequence
  Peptide Derived from Human Papillomavirus
QLFVTVVDTT

SEQ ID NO: 2844 - protein, 11 aa, Artificial Sequence
  Peptide Derived from Human Papillomavirus
QMFVRHLFNRA

SEQ ID NO: 2845 - protein, 10 aa, Artificial Sequence
  Peptide Derived from Human Papillomavirus
QMSLWLPSEA

SEQ ID NO: 2846 - protein, 11 aa, Artificial Sequence
  Peptide Derived from Human Papillomavirus
QMSLWLPSEAT

SEQ ID NO: 2847 - protein, 8 aa, Artificial Sequence
  Peptide Derived from Human Papillomavirus
QVTFIYIL

SEQ ID NO: 2848 - protein, 9 aa, Artificial Sequence
  Peptide Derived from Human Papillomavirus
QVTFIYILV

SEQ ID NO: 2849 - protein, 10 aa, Artificial Sequence
  Peptide Derived from Human Papillomavirus
QVTFIYILVI

SEQ ID NO: 2850 - protein, 11 aa, Artificial Sequence
  Peptide Derived from Human Papillomavirus
QVTFIYILVIT

SEQ ID NO: 2851 - protein, 9 aa, Artificial Sequence
  Peptide Derived from Human Papillomavirus
RAGAVGENV

SEQ ID NO: 2852 - protein, 9 aa, Artificial Sequence
  Peptide Derived from Human Papillomavirus
RAQGHNNGI

SEQ ID NO: 2853 - protein, 9 aa, Artificial Sequence
  Peptide Derived from Human Papillomavirus
RLVWACVGV

SEQ ID NO: 2854 - protein, 11 aa, Artificial Sequence
  Peptide Derived from Human Papillomavirus
RLVWACVGVEV

SEQ ID NO: 2855 - protein, 8 aa, Artificial Sequence
  Peptide Derived from Human Papillomavirus
RTNIYYHA

SEQ ID NO: 2856 - protein, 10 aa, Artificial Sequence
  Peptide Derived from Human Papillomavirus
RTNIYYHAGT

SEQ ID NO: 2857 - protein, 9 aa, Artificial Sequence
  Peptide Derived from Human Papillomavirus
SADLDQFPL

SEQ ID NO: 2858 - protein, 9 aa, Artificial Sequence
  Peptide Derived from Human Papillomavirus
SAYAANAGV

SEQ ID NO: 2859 - protein, 9 aa, Artificial Sequence
  Peptide Derived from Human Papillomavirus
SICKYPDYI

SEQ ID NO: 2860 - protein, 11 aa, Artificial Sequence
  Peptide Derived from Human Papillomavirus
SICKYPDYIKM

SEQ ID NO: 2861 - protein, 8 aa, Artificial Sequence
  Peptide Derived from Human Papillomavirus
SLCAAIST

SEQ ID NO: 2862 - protein, 11 aa, Artificial Sequence
  Peptide Derived from Human Papillomavirus
SLCAAISTSET

SEQ ID NO: 2863 - protein, 11 aa, Artificial Sequence
  Peptide Derived from Human Papillomavirus
SLFFYLRREQM

SEQ ID NO: 2864 - protein, 8 aa, Artificial Sequence
  Peptide Derived from Human Papillomavirus
SLWLPSEA

SEQ ID NO: 2865 - protein, 9 aa, Artificial Sequence
  Peptide Derived from Human Papillomavirus
SLWLPSEAT

SEQ ID NO: 2866 - protein, 10 aa, Artificial Sequence
  Peptide Derived from Human Papillomavirus
SLWLPSEATV

SEQ ID NO: 2867 - protein, 9 aa, Artificial Sequence
  Peptide Derived from Human Papillomavirus
SMDYKQTQL

SEQ ID NO: 2868 - protein, 11 aa, Artificial Sequence
  Peptide Derived from Human Papillomavirus
SMDYKQTQLCL

SEQ ID NO: 2869 - protein, 9 aa, Artificial Sequence
  Peptide Derived from Human Papillomavirus
SMVTSDAQI

SEQ ID NO: 2870 - protein, 10 aa, Artificial Sequence
  Peptide Derived from Human Papillomavirus
SQAIACQKHT

SEQ ID NO: 2871 - protein, 9 aa, Artificial Sequence
  Peptide Derived from Human Papillomavirus
STDEYVART

SEQ ID NO: 2872 - protein, 11 aa, Artificial Sequence
  Peptide Derived from Human Papillomavirus
STDEYVARTNI

SEQ ID NO: 2873 - protein, 11 aa, Artificial Sequence
  Peptide Derived from Human Papillomavirus
STILEDWNFGL

SEQ ID NO: 2874 - protein, 8 aa, Artificial Sequence
  Peptide Derived from Human Papillomavirus
STNMSLCA

SEQ ID NO: 2875 - protein, 9 aa, Artificial Sequence
  Peptide Derived from Human Papillomavirus
STNMSLCAA

SEQ ID NO: 2876 - protein, 10 aa, Artificial Sequence
  Peptide Derived from Human Papillomavirus
STNMSLCAAI

SEQ ID NO: 2877 - protein, 10 aa, Artificial Sequence
  Peptide Derived from Human Papillomavirus
STSETTYKNT

SEQ ID NO: 2878 - protein, 11 aa, Artificial Sequence
  Peptide Derived from Human Papillomavirus
STTAKRKKRKL

SEQ ID NO: 2879 - protein, 8 aa, Artificial Sequence
  Peptide Derived from Human Papillomavirus
TADVMTYI

SEQ ID NO: 2880 - protein, 11 aa, Artificial Sequence
  Peptide Derived from Human Papillomavirus
TADVMTYIHSM

SEQ ID NO: 2881 - protein, 9 aa, Artificial Sequence
  Peptide Derived from Human Papillomavirus
TAKRKKRKL

SEQ ID NO: 2882 - protein, 10 aa, Artificial Sequence
  Peptide Derived from Human Papillomavirus
TILEDWNFGL

SEQ ID NO: 2883 - protein, 9 aa, Artificial Sequence
  Peptide Derived from Human Papillomavirus
TLEDTYRFV

SEQ ID NO: 2884 - protein, 10 aa, Artificial Sequence
  Peptide Derived from Human Papillomavirus
TLEDTYRFVT

SEQ ID NO: 2885 - protein, 8 aa, Artificial Sequence
  Peptide Derived from Human Papillomavirus
TLGKRKAT

SEQ ID NO: 2886 - protein, 10 aa, Artificial Sequence
  Peptide Derived from Human Papillomavirus
TLGKRKATPT

SEQ ID NO: 2887 - protein, 11 aa, Artificial Sequence
  Peptide Derived from Human Papillomavirus
TLGKRKATPTT

SEQ ID NO: 2888 - protein, 9 aa, Artificial Sequence
  Peptide Derived from Human Papillomavirus
TLQANKSEV

SEQ ID NO: 2889 - protein, 11 aa, Artificial Sequence
  Peptide Derived from Human Papillomavirus
TLQANKSEVPL

SEQ ID NO: 2890 - protein, 8 aa, Artificial Sequence
  Peptide Derived from Human Papillomavirus
TLTADVMT

SEQ ID NO: 2891 - protein, 10 aa, Artificial Sequence
  Peptide Derived from Human Papillomavirus
TLTADVMTYI

SEQ ID NO: 2892 - protein, 9 aa, Artificial Sequence
  Peptide Derived from Human Papillomavirus
TQRLVWACV

SEQ ID NO: 2893 - protein, 11 aa, Artificial Sequence
  Peptide Derived from Human Papillomavirus
TQRLVWACVGV

SEQ ID NO: 2894 - protein, 10 aa, Artificial Sequence
  Peptide Derived from Human Papillomavirus
TTAKRKKRKL

SEQ ID NO: 2895 - protein, 10 aa, Artificial Sequence
  Peptide Derived from Human Papillomavirus
TTLQANKSEV

SEQ ID NO: 2896 - protein, 9 aa, Artificial Sequence
  Peptide Derived from Human Papillomavirus
TTRSTNMSL

SEQ ID NO: 2897 - protein, 11 aa, Artificial Sequence
  Peptide Derived from Human Papillomavirus
TTRSTNMSLCA

SEQ ID NO: 2898 - protein, 8 aa, Artificial Sequence
  Peptide Derived from Human Papillomavirus
TTSSTSTT

SEQ ID NO: 2899 - protein, 9 aa, Artificial Sequence
  Peptide Derived from Human Papillomavirus
TTSSTSTTA

SEQ ID NO: 2900 - protein, 8 aa, Artificial Sequence
  Peptide Derived from Human Papillomavirus
TVIQDGDM

SEQ ID NO: 2901 - protein, 9 aa, Artificial Sequence
  Peptide Derived from Human Papillomavirus
TVIQDGDMV

SEQ ID NO: 2902 - protein, 11 aa, Artificial Sequence
  Peptide Derived from Human Papillomavirus
TVIQDGDMVDT

SEQ ID NO: 2903 - protein, 9 aa, Artificial Sequence
  Peptide Derived from Human Papillomavirus
TVVDTTRST

SEQ ID NO: 2904 - protein, 11 aa, Artificial Sequence
  Peptide Derived from Human Papillomavirus
TVVDTTRSTNM

SEQ ID NO: 2905 - protein, 9 aa, Artificial Sequence
  Peptide Derived from Human Papillomavirus
TVYLPPVPV

SEQ ID NO: 2906 - protein, 10 aa, Artificial Sequence
  Peptide Derived from Human Papillomavirus
VARTNIYYHA

SEQ ID NO: 2907 - protein, 11 aa, Artificial Sequence
  Peptide Derived from Human Papillomavirus
VAVNPGDCPPL

SEQ ID NO: 2908 - protein, 8 aa, Artificial Sequence
  Peptide Derived from Human Papillomavirus
VIQDGDMV

SEQ ID NO: 2909 - protein, 10 aa, Artificial Sequence
  Peptide Derived from Human Papillomavirus
VIQDGDMVDT

SEQ ID NO: 2910 - protein, 9 aa, Artificial Sequence
  Peptide Derived from Human Papillomavirus
VITCYENDV

SEQ ID NO: 2911 - protein, 11 aa, Artificial Sequence
  Peptide Derived from Human Papillomavirus
VITCYENDVNV

SEQ ID NO: 2912 - protein, 8 aa, Artificial Sequence
  Peptide Derived from Human Papillomavirus
VMTYIHSM

SEQ ID NO: 2913 - protein, 11 aa, Artificial Sequence
  Peptide Derived from Human Papillomavirus
VMTYIHSMNST

SEQ ID NO: 2914 - protein, 8 aa, Artificial Sequence
  Peptide Derived from Human Papillomavirus
VTFIYILV

SEQ ID NO: 2915 - protein, 9 aa, Artificial Sequence
  Peptide Derived from Human Papillomavirus
VTFIYILVI

SEQ ID NO: 2916 - protein, 10 aa, Artificial Sequence
  Peptide Derived from Human Papillomavirus
VTFIYILVIT

SEQ ID NO: 2917 - protein, 10 aa, Artificial Sequence
  Peptide Derived from Human Papillomavirus
VTVVDTTRST

SEQ ID NO: 2918 - protein, 8 aa, Artificial Sequence
  Peptide Derived from Human Papillomavirus
VVDTTRST

SEQ ID NO: 2919 - protein, 10 aa, Artificial Sequence
  Peptide Derived from Human Papillomavirus
VVDTTRSTNM

SEQ ID NO: 2920 - protein, 8 aa, Artificial Sequence
  Peptide Derived from Human Papillomavirus
VVSTDEYV

SEQ ID NO: 2921 - protein, 9 aa, Artificial Sequence
  Peptide Derived from Human Papillomavirus
VVSTDEYVA

SEQ ID NO: 2922 - protein, 11 aa, Artificial Sequence
  Peptide Derived from Human Papillomavirus
VVSTDEYVART

SEQ ID NO: 2923 - protein, 8 aa, Artificial Sequence
  Peptide Derived from Human Papillomavirus
WACVGVEV

SEQ ID NO: 2924 - protein, 8 aa, Artificial Sequence
  Peptide Derived from Human Papillomavirus
WLPSEATV

SEQ ID NO: 2925 - protein, 10 aa, Artificial Sequence
  Peptide Derived from Human Papillomavirus
WLPSEATVYL

SEQ ID NO: 2926 - protein, 8 aa, Artificial Sequence
  Peptide Derived from Human Papillomavirus
YIHSMNST

SEQ ID NO: 2927 - protein, 9 aa, Artificial Sequence
  Peptide Derived from Human Papillomavirus
YIHSMNSTI

SEQ ID NO: 2928 - protein, 10 aa, Artificial Sequence
  Peptide Derived from Human Papillomavirus
YIHSMNSTIL

SEQ ID NO: 2929 - protein, 8 aa, Artificial Sequence
  Peptide Derived from Human Papillomavirus
YIKGSGST

SEQ ID NO: 2930 - protein, 9 aa, Artificial Sequence
  Peptide Derived from Human Papillomavirus
YIKGSGSTA

SEQ ID NO: 2931 - protein, 11 aa, Artificial Sequence
  Peptide Derived from Human Papillomavirus
YIKGSGSTANL

SEQ ID NO: 2932 - protein, 10 aa, Artificial Sequence
  Peptide Derived from Human Papillomavirus
YLPPVPVSKV

SEQ ID NO: 2933 - protein, 11 aa, Artificial Sequence
  Peptide Derived from Human Papillomavirus
YLPPVPVSKVV

SEQ ID NO: 2934 - protein, 10 aa, Artificial Sequence
  Peptide Derived from Human Papillomavirus
YLRHGEEYDL

SEQ ID NO: 2935 - protein, 9 aa, Artificial Sequence
  Peptide Derived from Human Papillomavirus
YLRREQMFV

SEQ ID NO: 2936 - protein, 8 aa, Artificial Sequence
  Peptide Derived from Human Papillomavirus
YTFWEVNL

SEQ ID NO: 2937 - protein, 11 aa, Artificial Sequence
  Peptide Derived from Human Papillomavirus
YVARTNIYYHA

SEQ ID NO: 2938 - protein, 11 aa, Artificial Sequence
  Peptide Derived from Human Papillomavirus
AALPTSINNGL

SEQ ID NO: 2939 - protein, 8 aa, Artificial Sequence
  Peptide Derived from Human Papillomavirus
AILDINNT

SEQ ID NO: 2940 - protein, 9 aa, Artificial Sequence
  Peptide Derived from Human Papillomavirus
AILDINNTV

SEQ ID NO: 2941 - protein, 10 aa, Artificial Sequence
  Peptide Derived from Human Papillomavirus
AILDINNTVT

SEQ ID NO: 2942 - protein, 11 aa, Artificial Sequence
  Peptide Derived from Human Papillomavirus
AILDINNTVTT

SEQ ID NO: 2943 - protein, 8 aa, Artificial Sequence
  Peptide Derived from Human Papillomavirus
ALHRPALT

SEQ ID NO: 2944 - protein, 10 aa, Artificial Sequence
  Peptide Derived from Human Papillomavirus
ALPTSINNGL

SEQ ID NO: 2945 - protein, 9 aa, Artificial Sequence
  Peptide Derived from Human Papillomavirus
ALTSRRTGI

SEQ ID NO: 2946 - protein, 8 aa, Artificial Sequence
  Peptide Derived from Human Papillomavirus
ATDTLAPV

SEQ ID NO: 2947 - protein, 11 aa, Artificial Sequence
  Peptide Derived from Human Papillomavirus
ATQLYKTCKQA

SEQ ID NO: 2948 - protein, 8 aa, Artificial Sequence
  Peptide Derived from Human Papillomavirus
DAGAPTSV

SEQ ID NO: 2949 - protein, 11 aa, Artificial Sequence
  Peptide Derived from Human Papillomavirus
DAGAPTSVPSI

SEQ ID NO: 2950 - protein, 10 aa, Artificial Sequence
  Peptide Derived from Human Papillomavirus
DIIPKVEGKT

SEQ ID NO: 2951 - protein, 11 aa, Artificial Sequence
  Peptide Derived from Human Papillomavirus
DIIPKVEGKTI

SEQ ID NO: 2952 - protein, 8 aa, Artificial Sequence
  Peptide Derived from Human Papillomavirus
DINNTVTT

SEQ ID NO: 2953 - protein, 9 aa, Artificial Sequence
  Peptide Derived from Human Papillomavirus
DINNTVTTV

SEQ ID NO: 2954 - protein, 10 aa, Artificial Sequence
  Peptide Derived from Human Papillomavirus
DINNTVTTVT

SEQ ID NO: 2955 - protein, 11 aa, Artificial Sequence
  Peptide Derived from Human Papillomavirus
DINNTVTTVTT

SEQ ID NO: 2956 - protein, 10 aa, Artificial Sequence
  Peptide Derived from Human Papillomavirus
DIPINITDQA

SEQ ID NO: 2957 - protein, 9 aa, Artificial Sequence
  Peptide Derived from Human Papillomavirus
DIVALHRPA

SEQ ID NO: 2958 - protein, 10 aa, Artificial Sequence
  Peptide Derived from Human Papillomavirus
DIVALHRPAL

SEQ ID NO: 2959 - protein, 11 aa, Artificial Sequence
  Peptide Derived from Human Papillomavirus
DIVALHRPALT

SEQ ID NO: 2960 - protein, 8 aa, Artificial Sequence
  Peptide Derived from Human Papillomavirus
DIYADDFI

SEQ ID NO: 2961 - protein, 9 aa, Artificial Sequence
  Peptide Derived from Human Papillomavirus
DIYADDFIT

SEQ ID NO: 2962 - protein, 11 aa, Artificial Sequence
  Peptide Derived from Human Papillomavirus
DIYADDFITDT

SEQ ID NO: 2963 - protein, 9 aa, Artificial Sequence
  Peptide Derived from Human Papillomavirus
DQAPSLIPI

SEQ ID NO: 2964 - protein, 10 aa, Artificial Sequence
  Peptide Derived from Human Papillomavirus
DQAPSLIPIV

SEQ ID NO: 2965 - protein, 9 aa, Artificial Sequence
  Peptide Derived from Human Papillomavirus
DQILQYGSM

SEQ ID NO: 2966 - protein, 11 aa, Artificial Sequence
  Peptide Derived from Human Papillomavirus
DQILQYGSMGV

SEQ ID NO: 2967 - protein, 11 aa, Artificial Sequence
  Peptide Derived from Human Papillomavirus
DTFIVSTNPNT

SEQ ID NO: 2968 - protein, 10 aa, Artificial Sequence
  Peptide Derived from Human Papillomavirus
DTLAPVRPPL

SEQ ID NO: 2969 - protein, 11 aa, Artificial Sequence
  Peptide Derived from Human Papillomavirus
DTLAPVRPPLT

SEQ ID NO: 2970 - protein, 10 aa, Artificial Sequence
  Peptide Derived from Human Papillomavirus
DTSTTPVPSV

SEQ ID NO: 2971 - protein, 9 aa, Artificial Sequence
  Peptide Derived from Human Papillomavirus
DTTPAILDI

SEQ ID NO: 2972 - protein, 8 aa, Artificial Sequence
  Peptide Derived from Human Papillomavirus
DVSGFSIT

SEQ ID NO: 2973 - protein, 9 aa, Artificial Sequence
  Peptide Derived from Human Papillomavirus
DVSGFSITT

SEQ ID NO: 2974 - protein, 11 aa, Artificial Sequence
  Peptide Derived from Human Papillomavirus
DVSGFSITTST

SEQ ID NO: 2975 - protein, 8 aa, Artificial Sequence
  Peptide Derived from Human Papillomavirus
EIELQTIT

SEQ ID NO: 2976 - protein, 11 aa, Artificial Sequence
  Peptide Derived from Human Papillomavirus
EIELQTITPST

SEQ ID NO: 2977 - protein, 8 aa, Artificial Sequence
  Peptide Derived from Human Papillomavirus
EIPMDTFI

SEQ ID NO: 2978 - protein, 9 aa, Artificial Sequence
  Peptide Derived from Human Papillomavirus
EIPMDTFIV

SEQ ID NO: 2979 - protein, 11 aa, Artificial Sequence
  Peptide Derived from Human Papillomavirus
EIPMDTFIVST

SEQ ID NO: 2980 - protein, 9 aa, Artificial Sequence
  Peptide Derived from Human Papillomavirus
ELQTITPST

SEQ ID NO: 2981 - protein, 11 aa, Artificial Sequence
  Peptide Derived from Human Papillomavirus
ELQTITPSTYT

SEQ ID NO: 2982 - protein, 8 aa, Artificial Sequence
  Peptide Derived from Human Papillomavirus
ETGGHFTL

SEQ ID NO: 2983 - protein, 9 aa, Artificial Sequence
  Peptide Derived from Human Papillomavirus
ETSFIDAGA

SEQ ID NO: 2984 - protein, 11 aa, Artificial Sequence
  Peptide Derived from Human Papillomavirus
ETSFIDAGAPT

SEQ ID NO: 2985 - protein, 8 aa, Artificial Sequence
  Peptide Derived from Human Papillomavirus
FIDAGAPT

SEQ ID NO: 2986 - protein, 10 aa, Artificial Sequence
  Peptide Derived from Human Papillomavirus
FIDAGAPTSV

SEQ ID NO: 2987 - protein, 8 aa, Artificial Sequence
  Peptide Derived from Human Papillomavirus
FITDTSTT

SEQ ID NO: 2988 - protein, 10 aa, Artificial Sequence
  Peptide Derived from Human Papillomavirus
FITDTSTTPV

SEQ ID NO: 2989 - protein, 8 aa, Artificial Sequence
  Peptide Derived from Human Papillomavirus
FITTPTKL

SEQ ID NO: 2990 - protein, 9 aa, Artificial Sequence
  Peptide Derived from Human Papillomavirus
FITTPTKLI

SEQ ID NO: 2991 - protein, 10 aa, Artificial Sequence
  Peptide Derived from Human Papillomavirus
FITTPTKLIT

SEQ ID NO: 2992 - protein, 9 aa, Artificial Sequence
  Peptide Derived from Human Papillomavirus
FIVSTNPNT

SEQ ID NO: 2993 - protein, 10 aa, Artificial Sequence
  Peptide Derived from Human Papillomavirus
FIVSTNPNTV

SEQ ID NO: 2994 - protein, 11 aa, Artificial Sequence
  Peptide Derived from Human Papillomavirus
FIVSTNPNTVT

SEQ ID NO: 2995 - protein, 11 aa, Artificial Sequence
  Peptide Derived from Human Papillomavirus
FLDIVALHRPA

SEQ ID NO: 2996 - protein, 11 aa, Artificial Sequence
  Peptide Derived from Human Papillomavirus
FTDPSVLQPPT

SEQ ID NO: 2997 - protein, 8 aa, Artificial Sequence
  Peptide Derived from Human Papillomavirus
FTLSSSTI

SEQ ID NO: 2998 - protein, 10 aa, Artificial Sequence
  Peptide Derived from Human Papillomavirus
FTLSSSTIST

SEQ ID NO: 2999 - protein, 9 aa, Artificial Sequence
  Peptide Derived from Human Papillomavirus
GAPTSVPSI

SEQ ID NO: 3000 - protein, 8 aa, Artificial Sequence
  Peptide Derived from Human Papillomavirus
GAYNIPLV

SEQ ID NO: 3001 - protein, 8 aa, Artificial Sequence
  Peptide Derived from Human Papillomavirus
GIDVDNTL

SEQ ID NO: 3002 - protein, 8 aa, Artificial Sequence
  Peptide Derived from Human Papillomavirus
GIGTGSGT

SEQ ID NO: 3003 - protein, 10 aa, Artificial Sequence
  Peptide Derived from Human Papillomavirus
GLGIGTGSGT

SEQ ID NO: 3004 - protein, 11 aa, Artificial Sequence
  Peptide Derived from Human Papillomavirus
GLYDIYADDFI

SEQ ID NO: 3005 - protein, 10 aa, Artificial Sequence
  Peptide Derived from Human Papillomavirus
GLYSRTTQQV

SEQ ID NO: 3006 - protein, 8 aa, Artificial Sequence
  Peptide Derived from Human Papillomavirus
GTCPPDII

SEQ ID NO: 3007 - protein, 11 aa, Artificial Sequence
  Peptide Derived from Human Papillomavirus
GTCPPDIIPKV

SEQ ID NO: 3008 - protein, 9 aa, Artificial Sequence
  Peptide Derived from Human Papillomavirus
GTGGRTGYI

SEQ ID NO: 3009 - protein, 11 aa, Artificial Sequence
  Peptide Derived from Human Papillomavirus
GTGGRTGYIPL

SEQ ID NO: 3010 - protein, 10 aa, Artificial Sequence
  Peptide Derived from Human Papillomavirus
GTGSGTGGRT

SEQ ID NO: 3011 - protein, 8 aa, Artificial Sequence
  Peptide Derived from Human Papillomavirus
GTRPPTAT

SEQ ID NO: 3012 - protein, 10 aa, Artificial Sequence
  Peptide Derived from Human Papillomavirus
GTRPPTATDT

SEQ ID NO: 3013 - protein, 11 aa, Artificial Sequence
  Peptide Derived from Human Papillomavirus
GTRPPTATDTL

SEQ ID NO: 3014 - protein, 9 aa, Artificial Sequence
  Peptide Derived from Human Papillomavirus
GVFFGGLGI

SEQ ID NO: 3015 - protein, 11 aa, Artificial Sequence
  Peptide Derived from Human Papillomavirus
GVFFGGLGIGT

SEQ ID NO: 3016 - protein, 8 aa, Artificial Sequence
  Peptide Derived from Human Papillomavirus
HAALPTSI

SEQ ID NO: 3017 - protein, 9 aa, Artificial Sequence
  Peptide Derived from Human Papillomavirus
IADAGDFYL

SEQ ID NO: 3018 - protein, 11 aa, Artificial Sequence
  Peptide Derived from Human Papillomavirus
IADQILQYGSM

SEQ ID NO: 3019 - protein, 8 aa, Artificial Sequence
  Peptide Derived from Human Papillomavirus
IAPDPDFL

SEQ ID NO: 3020 - protein, 10 aa, Artificial Sequence
  Peptide Derived from Human Papillomavirus
IAPDPDFLDI

SEQ ID NO: 3021 - protein, 11 aa, Artificial Sequence
  Peptide Derived from Human Papillomavirus
IAPDPDFLDIV

SEQ ID NO: 3022 - protein, 10 aa, Artificial Sequence
  Peptide Derived from Human Papillomavirus
IIADAGDFYL

SEQ ID NO: 3023 - protein, 9 aa, Artificial Sequence
  Peptide Derived from Human Papillomavirus
IIPKVEGKT

SEQ ID NO: 3024 - protein, 10 aa, Artificial Sequence
  Peptide Derived from Human Papillomavirus
IIPKVEGKTI

SEQ ID NO: 3025 - protein, 11 aa, Artificial Sequence
  Peptide Derived from Human Papillomavirus
IIPKVEGKTIA

SEQ ID NO: 3026 - protein, 8 aa, Artificial Sequence
  Peptide Derived from Human Papillomavirus
ILDINNTV

SEQ ID NO: 3027 - protein, 9 aa, Artificial Sequence
  Peptide Derived from Human Papillomavirus
ILDINNTVT

SEQ ID NO: 3028 - protein, 10 aa, Artificial Sequence
  Peptide Derived from Human Papillomavirus
ILDINNTVTT

SEQ ID NO: 3029 - protein, 11 aa, Artificial Sequence
  Peptide Derived from Human Papillomavirus
ILDINNTVTTV

SEQ ID NO: 3030 - protein, 9 aa, Artificial Sequence
  Peptide Derived from Human Papillomavirus
ILQYGSMGV

SEQ ID NO: 3031 - protein, 8 aa, Artificial Sequence
  Peptide Derived from Human Papillomavirus
ITDQAPSL

SEQ ID NO: 3032 - protein, 9 aa, Artificial Sequence
  Peptide Derived from Human Papillomavirus
ITDQAPSLI

SEQ ID NO: 3033 - protein, 11 aa, Artificial Sequence
  Peptide Derived from Human Papillomavirus
ITDQAPSLIPI

SEQ ID NO: 3034 - protein, 9 aa, Artificial Sequence
  Peptide Derived from Human Papillomavirus
ITDTSTTPV

SEQ ID NO: 3035 - protein, 8 aa, Artificial Sequence
  Peptide Derived from Human Papillomavirus
ITPSTYTT

SEQ ID NO: 3036 - protein, 9 aa, Artificial Sequence
  Peptide Derived from Human Papillomavirus
ITPSTYTTT

SEQ ID NO: 3037 - protein, 8 aa, Artificial Sequence
  Peptide Derived from Human Papillomavirus
ITTPTKLI

SEQ ID NO: 3038 - protein, 9 aa, Artificial Sequence
  Peptide Derived from Human Papillomavirus
ITTPTKLIT

SEQ ID NO: 3039 - protein, 8 aa, Artificial Sequence
  Peptide Derived from Human Papillomavirus
ITTSTDTT

SEQ ID NO: 3040 - protein, 10 aa, Artificial Sequence
  Peptide Derived from Human Papillomavirus
ITTSTDTTPA

SEQ ID NO: 3041 - protein, 11 aa, Artificial Sequence
  Peptide Derived from Human Papillomavirus
ITTSTDTTPAI

SEQ ID NO: 3042 - protein, 11 aa, Artificial Sequence
  Peptide Derived from Human Papillomavirus
ITYDNPAYEGI

SEQ ID NO: 3043 - protein, 8 aa, Artificial Sequence
  Peptide Derived from Human Papillomavirus
IVALHRPA

SEQ ID NO: 3044 - protein, 9 aa, Artificial Sequence
  Peptide Derived from Human Papillomavirus
IVALHRPAL

SEQ ID NO: 3045 - protein, 10 aa, Artificial Sequence
  Peptide Derived from Human Papillomavirus
IVALHRPALT

SEQ ID NO: 3046 - protein, 9 aa, Artificial Sequence
  Peptide Derived from Human Papillomavirus
IVPGSPQYT

SEQ ID NO: 3047 - protein, 10 aa, Artificial Sequence
  Peptide Derived from Human Papillomavirus
IVPGSPQYTI

SEQ ID NO: 3048 - protein, 11 aa, Artificial Sequence
  Peptide Derived from Human Papillomavirus
IVPGSPQYTII

SEQ ID NO: 3049 - protein, 8 aa, Artificial Sequence
  Peptide Derived from Human Papillomavirus
IVSLVEET

SEQ ID NO: 3050 - protein, 11 aa, Artificial Sequence
  Peptide Derived from Human Papillomavirus
IVSLVEETSFI

SEQ ID NO: 3051 - protein, 8 aa, Artificial Sequence
  Peptide Derived from Human Papillomavirus
IVSTNPNT

SEQ ID NO: 3052 - protein, 9 aa, Artificial Sequence
  Peptide Derived from Human Papillomavirus
IVSTNPNTV

SEQ ID NO: 3053 - protein, 10 aa, Artificial Sequence
  Peptide Derived from Human Papillomavirus
IVSTNPNTVT

SEQ ID NO: 3054 - protein, 9 aa, Artificial Sequence
  Peptide Derived from Human Papillomavirus
KLITYDNPA

SEQ ID NO: 3055 - protein, 10 aa, Artificial Sequence
  Peptide Derived from Human Papillomavirus
KQAGTCPPDI

SEQ ID NO: 3056 - protein, 11 aa, Artificial Sequence
  Peptide Derived from Human Papillomavirus
KQAGTCPPDII

SEQ ID NO: 3057 - protein, 8 aa, Artificial Sequence
  Peptide Derived from Human Papillomavirus
KTCKQAGT

SEQ ID NO: 3058 - protein, 8 aa, Artificial Sequence
  Peptide Derived from Human Papillomavirus
KTIADQIL

SEQ ID NO: 3059 - protein, 8 aa, Artificial Sequence
  Peptide Derived from Human Papillomavirus
KVEGKTIA

SEQ ID NO: 3060 - protein, 11 aa, Artificial Sequence
  Peptide Derived from Human Papillomavirus
KVEGKTIADQI

SEQ ID NO: 3061 - protein, 10 aa, Artificial Sequence
  Peptide Derived from Human Papillomavirus
KVHYYYDFST

SEQ ID NO: 3062 - protein, 11 aa, Artificial Sequence
  Peptide Derived from Human Papillomavirus
KVHYYYDFSTI

SEQ ID NO: 3063 - protein, 8 aa, Artificial Sequence
  Peptide Derived from Human Papillomavirus
KVVDPAFI

SEQ ID NO: 3064 - protein, 9 aa, Artificial Sequence
  Peptide Derived from Human Papillomavirus
KVVDPAFIT

SEQ ID NO: 3065 - protein, 10 aa, Artificial Sequence
  Peptide Derived from Human Papillomavirus
KVVDPAFITT

SEQ ID NO: 3066 - protein, 8 aa, Artificial Sequence
  Peptide Derived from Human Papillomavirus
LAPVRPPL

SEQ ID NO: 3067 - protein, 9 aa, Artificial Sequence
  Peptide Derived from Human Papillomavirus
LAPVRPPLT

SEQ ID NO: 3068 - protein, 10 aa, Artificial Sequence
  Peptide Derived from Human Papillomavirus
LAPVRPPLTV

SEQ ID NO: 3069 - protein, 8 aa, Artificial Sequence
  Peptide Derived from Human Papillomavirus
LITYDNPA

SEQ ID NO: 3070 - protein, 9 aa, Artificial Sequence
  Peptide Derived from Human Papillomavirus
LQPPTPAET

SEQ ID NO: 3071 - protein, 8 aa, Artificial Sequence
  Peptide Derived from Human Papillomavirus
LQTITPST

SEQ ID NO: 3072 - protein, 10 aa, Artificial Sequence
  Peptide Derived from Human Papillomavirus
LQTITPSTYT

SEQ ID NO: 3073 - protein, 11 aa, Artificial Sequence
  Peptide Derived from Human Papillomavirus
LQTITPSTYTT

SEQ ID NO: 3074 - protein, 8 aa, Artificial Sequence
  Peptide Derived from Human Papillomavirus
LQYGSMGV

SEQ ID NO: 3075 - protein, 8 aa, Artificial Sequence
  Peptide Derived from Human Papillomavirus
LTSRRTGI

SEQ ID NO: 3076 - protein, 8 aa, Artificial Sequence
  Peptide Derived from Human Papillomavirus
LVEETSFI

SEQ ID NO: 3077 - protein, 10 aa, Artificial Sequence
  Peptide Derived from Human Papillomavirus
LVEETSFIDA

SEQ ID NO: 3078 - protein, 9 aa, Artificial Sequence
  Peptide Derived from Human Papillomavirus
LVSGPDIPI

SEQ ID NO: 3079 - protein, 11 aa, Artificial Sequence
  Peptide Derived from Human Papillomavirus
LVSGPDIPINI

SEQ ID NO: 3080 - protein, 9 aa, Artificial Sequence
  Peptide Derived from Human Papillomavirus
MLRKRRKRL

SEQ ID NO: 3081 - protein, 9 aa, Artificial Sequence
  Peptide Derived from Human Papillomavirus
NIAPDPDFL

SEQ ID NO: 3082 - protein, 11 aa, Artificial Sequence
  Peptide Derived from Human Papillomavirus
NIAPDPDFLDI

SEQ ID NO: 3083 - protein, 10 aa, Artificial Sequence
  Peptide Derived from Human Papillomavirus
NIPLVSGPDI

SEQ ID NO: 3084 - protein, 9 aa, Artificial Sequence
  Peptide Derived from Human Papillomavirus
NITDQAPSL

SEQ ID NO: 3085 - protein, 10 aa, Artificial Sequence
  Peptide Derived from Human Papillomavirus
NITDQAPSLI

SEQ ID NO: 3086 - protein, 9 aa, Artificial Sequence
  Peptide Derived from Human Papillomavirus
NTTIPFGGA

SEQ ID NO: 3087 - protein, 9 aa, Artificial Sequence
  Peptide Derived from Human Papillomavirus
NTVTSSTPI

SEQ ID NO: 3088 - protein, 8 aa, Artificial Sequence
  Peptide Derived from Human Papillomavirus
NTVTTVTT

SEQ ID NO: 3089 - protein, 9 aa, Artificial Sequence
  Peptide Derived from Human Papillomavirus
PAETGGHFT

SEQ ID NO: 3090 - protein, 10 aa, Artificial Sequence
  Peptide Derived from Human Papillomavirus
PAETGGHFTL

SEQ ID NO: 3091 - protein, 8 aa, Artificial Sequence
  Peptide Derived from Human Papillomavirus
PAFITTPT

SEQ ID NO: 3092 - protein, 10 aa, Artificial Sequence
  Peptide Derived from Human Papillomavirus
PAFITTPTKL

SEQ ID NO: 3093 - protein, 11 aa, Artificial Sequence
  Peptide Derived from Human Papillomavirus
PAFITTPTKLI

SEQ ID NO: 3094 - protein, 9 aa, Artificial Sequence
  Peptide Derived from Human Papillomavirus
PAILDINNT

SEQ ID NO: 3095 - protein, 10 aa, Artificial Sequence
  Peptide Derived from Human Papillomavirus
PAILDINNTV

SEQ ID NO: 3096 - protein, 11 aa, Artificial Sequence
  Peptide Derived from Human Papillomavirus
PAILDINNTVT

SEQ ID NO: 3097 - protein, 8 aa, Artificial Sequence
  Peptide Derived from Human Papillomavirus
PALTSRRT

SEQ ID NO: 3098 - protein, 10 aa, Artificial Sequence
  Peptide Derived from Human Papillomavirus
PALTSRRTGI

SEQ ID NO: 3099 - protein, 11 aa, Artificial Sequence
  Peptide Derived from Human Papillomavirus
PANTTIPFGGA

SEQ ID NO: 3100 - protein, 8 aa, Artificial Sequence
  Peptide Derived from Human Papillomavirus
PAYEGIDV

SEQ ID NO: 3101 - protein, 11 aa, Artificial Sequence
  Peptide Derived from Human Papillomavirus
PAYEGIDVDNT

SEQ ID NO: 3102 - protein, 8 aa, Artificial Sequence
  Peptide Derived from Human Papillomavirus
PINITDQA

SEQ ID NO: 3103 - protein, 11 aa, Artificial Sequence
  Peptide Derived from Human Papillomavirus
PINITDQAPSL

SEQ ID NO: 3104 - protein, 8 aa, Artificial Sequence
  Peptide Derived from Human Papillomavirus
PIPGSRPV

SEQ ID NO: 3105 - protein, 9 aa, Artificial Sequence
  Peptide Derived from Human Papillomavirus
PIPGSRPVA

SEQ ID NO: 3106 - protein, 11 aa, Artificial Sequence
  Peptide Derived from Human Papillomavirus
PIPGSRPVARL

SEQ ID NO: 3107 - protein, 10 aa, Artificial Sequence
  Peptide Derived from Human Papillomavirus
PIVPGSPQYT

SEQ ID NO: 3108 - protein, 11 aa, Artificial Sequence
  Peptide Derived from Human Papillomavirus
PIVPGSPQYTI

SEQ ID NO: 3109 - protein, 8 aa, Artificial Sequence
  Peptide Derived from Human Papillomavirus
PLGTRPPT

SEQ ID NO: 3110 - protein, 9 aa, Artificial Sequence
  Peptide Derived from Human Papillomavirus
PLGTRPPTA

SEQ ID NO: 3111 - protein, 10 aa, Artificial Sequence
  Peptide Derived from Human Papillomavirus
PLGTRPPTAT

SEQ ID NO: 3112 - protein, 8 aa, Artificial Sequence
  Peptide Derived from Human Papillomavirus
PLVSGPDI

SEQ ID NO: 3113 - protein, 10 aa, Artificial Sequence
  Peptide Derived from Human Papillomavirus
PLVSGPDIPI

SEQ ID NO: 3114 - protein, 9 aa, Artificial Sequence
  Peptide Derived from Human Papillomavirus
PMDTFIVST

SEQ ID NO: 3115 - protein, 9 aa, Artificial Sequence
  Peptide Derived from Human Papillomavirus
PQYTIIADA

SEQ ID NO: 3116 - protein, 8 aa, Artificial Sequence
  Peptide Derived from Human Papillomavirus
PTATDTLA

SEQ ID NO: 3117 - protein, 10 aa, Artificial Sequence
  Peptide Derived from Human Papillomavirus
PTATDTLAPV

SEQ ID NO: 3118 - protein, 8 aa, Artificial Sequence
  Peptide Derived from Human Papillomavirus
PTFTDPSV

SEQ ID NO: 3119 - protein, 9 aa, Artificial Sequence
  Peptide Derived from Human Papillomavirus
PTFTDPSVL

SEQ ID NO: 3120 - protein, 11 aa, Artificial Sequence
  Peptide Derived from Human Papillomavirus
PTKLITYDNPA

SEQ ID NO: 3121 - protein, 11 aa, Artificial Sequence
  Peptide Derived from Human Papillomavirus
PTPAETGGHFT

SEQ ID NO: 3122 - protein, 8 aa, Artificial Sequence
  Peptide Derived from Human Papillomavirus
PTSINNGL

SEQ ID NO: 3123 - protein, 11 aa, Artificial Sequence
  Peptide Derived from Human Papillomavirus
PTSINNGLYDI

SEQ ID NO: 3124 - protein, 11 aa, Artificial Sequence
  Peptide Derived from Human Papillomavirus
PTSVPSIPPDV

SEQ ID NO: 3125 - protein, 11 aa, Artificial Sequence
  Peptide Derived from Human Papillomavirus
PVARLGLYSRT

SEQ ID NO: 3126 - protein, 9 aa, Artificial Sequence
  Peptide Derived from Human Papillomavirus
PVGPSDPSI

SEQ ID NO: 3127 - protein, 10 aa, Artificial Sequence
  Peptide Derived from Human Papillomavirus
PVGPSDPSIV

SEQ ID NO: 3128 - protein, 8 aa, Artificial Sequence
  Peptide Derived from Human Papillomavirus
PVPSVPST

SEQ ID NO: 3129 - protein, 10 aa, Artificial Sequence
  Peptide Derived from Human Papillomavirus
PVPSVPSTSL

SEQ ID NO: 3130 - protein, 8 aa, Artificial Sequence
  Peptide Derived from Human Papillomavirus
PVRPPLTV

SEQ ID NO: 3131 - protein, 11 aa, Artificial Sequence
  Peptide Derived from Human Papillomavirus
PVRPPLTVDPV

SEQ ID NO: 3132 - protein, 9 aa, Artificial Sequence
  Peptide Derived from Human Papillomavirus
QAGTCPPDI

SEQ ID NO: 3133 - protein, 10 aa, Artificial Sequence
  Peptide Derived from Human Papillomavirus
QAGTCPPDII

SEQ ID NO: 3134 - protein, 8 aa, Artificial Sequence
  Peptide Derived from Human Papillomavirus
QAPSLIPI

SEQ ID NO: 3135 - protein, 9 aa, Artificial Sequence
  Peptide Derived from Human Papillomavirus
QAPSLIPIV

SEQ ID NO: 3136 - protein, 8 aa, Artificial Sequence
  Peptide Derived from Human Papillomavirus
QILQYGSM

SEQ ID NO: 3137 - protein, 10 aa, Artificial Sequence
  Peptide Derived from Human Papillomavirus
QILQYGSMGV

SEQ ID NO: 3138 - protein, 9 aa, Artificial Sequence
  Peptide Derived from Human Papillomavirus
QLYKTCKQA

SEQ ID NO: 3139 - protein, 11 aa, Artificial Sequence
  Peptide Derived from Human Papillomavirus
QLYKTCKQAGT

SEQ ID NO: 3140 - protein, 9 aa, Artificial Sequence
  Peptide Derived from Human Papillomavirus
QQVKVVDPA

SEQ ID NO: 3141 - protein, 11 aa, Artificial Sequence
  Peptide Derived from Human Papillomavirus
QQVKVVDPAFI

SEQ ID NO: 3142 - protein, 9 aa, Artificial Sequence
  Peptide Derived from Human Papillomavirus
QTITPSTYT

SEQ ID NO: 3143 - protein, 10 aa, Artificial Sequence
  Peptide Derived from Human Papillomavirus
QTITPSTYTT

SEQ ID NO: 3144 - protein, 11 aa, Artificial Sequence
  Peptide Derived from Human Papillomavirus
QTITPSTYTTT

SEQ ID NO: 3145 - protein, 11 aa, Artificial Sequence
  Peptide Derived from Human Papillomavirus
QTLRTRSGKSI

SEQ ID NO: 3146 - protein, 8 aa, Artificial Sequence
  Peptide Derived from Human Papillomavirus
QVKVVDPA

SEQ ID NO: 3147 - protein, 10 aa, Artificial Sequence
  Peptide Derived from Human Papillomavirus
QVKVVDPAFI

SEQ ID NO: 3148 - protein, 11 aa, Artificial Sequence
  Peptide Derived from Human Papillomavirus
QVKVVDPAFIT

SEQ ID NO: 3149 - protein, 10 aa, Artificial Sequence
  Peptide Derived from Human Papillomavirus
RASATQLYKT

SEQ ID NO: 3150 - protein, 8 aa, Artificial Sequence
  Peptide Derived from Human Papillomavirus
RIGNKQTL

SEQ ID NO: 3151 - protein, 10 aa, Artificial Sequence
  Peptide Derived from Human Papillomavirus
RIGNKQTLRT

SEQ ID NO: 3152 - protein, 8 aa, Artificial Sequence
  Peptide Derived from Human Papillomavirus
RLGLYSRT

SEQ ID NO: 3153 - protein, 9 aa, Artificial Sequence
  Peptide Derived from Human Papillomavirus
RLGLYSRTT

SEQ ID NO: 3154 - protein, 9 aa, Artificial Sequence
  Peptide Derived from Human Papillomavirus
RLPYFFSDV

SEQ ID NO: 3155 - protein, 11 aa, Artificial Sequence
  Peptide Derived from Human Papillomavirus
RLPYFFSDVSL

SEQ ID NO: 3156 - protein, 9 aa, Artificial Sequence
  Peptide Derived from Human Papillomavirus
RTGIRYSRI

SEQ ID NO: 3157 - protein, 9 aa, Artificial Sequence
  Peptide Derived from Human Papillomavirus
RTGYIPLGT

SEQ ID NO: 3158 - protein, 8 aa, Artificial Sequence
  Peptide Derived from Human Papillomavirus
RTKRASAT

SEQ ID NO: 3159 - protein, 10 aa, Artificial Sequence
  Peptide Derived from Human Papillomavirus
RTKRASATQL

SEQ ID NO: 3160 - protein, 8 aa, Artificial Sequence
  Peptide Derived from Human Papillomavirus
RTRSGKSI

SEQ ID NO: 3161 - protein, 10 aa, Artificial Sequence
  Peptide Derived from Human Papillomavirus
RTRSGKSIGA

SEQ ID NO: 3162 - protein, 8 aa, Artificial Sequence
  Peptide Derived from Human Papillomavirus
RTTQQVKV

SEQ ID NO: 3163 - protein, 9 aa, Artificial Sequence
  Peptide Derived from Human Papillomavirus
RTTQQVKVV

SEQ ID NO: 3164 - protein, 9 aa, Artificial Sequence
  Peptide Derived from Human Papillomavirus
SAEEIELQT

SEQ ID NO: 3165 - protein, 10 aa, Artificial Sequence
  Peptide Derived from Human Papillomavirus
SAEEIELQTI

SEQ ID NO: 3166 - protein, 11 aa, Artificial Sequence
  Peptide Derived from Human Papillomavirus
SAEEIELQTIT

SEQ ID NO: 3167 - protein, 8 aa, Artificial Sequence
  Peptide Derived from Human Papillomavirus
SAKRTKRA

SEQ ID NO: 3168 - protein, 10 aa, Artificial Sequence
  Peptide Derived from Human Papillomavirus
SAKRTKRASA

SEQ ID NO: 3169 - protein, 11 aa, Artificial Sequence
  Peptide Derived from Human Papillomavirus
SAKRTKRASAT

SEQ ID NO: 3170 - protein, 8 aa, Artificial Sequence
  Peptide Derived from Human Papillomavirus
SATQLYKT

SEQ ID NO: 3171 - protein, 11 aa, Artificial Sequence
  Peptide Derived from Human Papillomavirus
SINIAPDPDFL

SEQ ID NO: 3172 - protein, 9 aa, Artificial Sequence
  Peptide Derived from Human Papillomavirus
SINNGLYDI

SEQ ID NO: 3173 - protein, 11 aa, Artificial Sequence
  Peptide Derived from Human Papillomavirus
SINNGLYDIYA

SEQ ID NO: 3174 - protein, 11 aa, Artificial Sequence
  Peptide Derived from Human Papillomavirus
SIPPDVSGFSI

SEQ ID NO: 3175 - protein, 8 aa, Artificial Sequence
  Peptide Derived from Human Papillomavirus
SITTSTDT

SEQ ID NO: 3176 - protein, 9 aa, Artificial Sequence
  Peptide Derived from Human Papillomavirus
SITTSTDTT

SEQ ID NO: 3177 - protein, 11 aa, Artificial Sequence
  Peptide Derived from Human Papillomavirus
SITTSTDTTPA

SEQ ID NO: 3178 - protein, 9 aa, Artificial Sequence
  Peptide Derived from Human Papillomavirus
SIVSLVEET

SEQ ID NO: 3179 - protein, 8 aa, Artificial Sequence
  Peptide Derived from Human Papillomavirus
SLSGYIPA

SEQ ID NO: 3180 - protein, 10 aa, Artificial Sequence
  Peptide Derived from Human Papillomavirus
SLSGYIPANT

SEQ ID NO: 3181 - protein, 11 aa, Artificial Sequence
  Peptide Derived from Human Papillomavirus
SLSGYIPANTT

SEQ ID NO: 3182 - protein, 9 aa, Artificial Sequence
  Peptide Derived from Human Papillomavirus
SLVEETSFI

SEQ ID NO: 3183 - protein, 11 aa, Artificial Sequence
  Peptide Derived from Human Papillomavirus
SLVEETSFIDA

SEQ ID NO: 3184 - protein, 9 aa, Artificial Sequence
  Peptide Derived from Human Papillomavirus
SMGVFFGGL

SEQ ID NO: 3185 - protein, 11 aa, Artificial Sequence
  Peptide Derived from Human Papillomavirus
SMGVFFGGLGI

SEQ ID NO: 3186 - protein, 8 aa, Artificial Sequence
  Peptide Derived from Human Papillomavirus
STDTTPAI

SEQ ID NO: 3187 - protein, 9 aa, Artificial Sequence
  Peptide Derived from Human Papillomavirus
STDTTPAIL

SEQ ID NO: 3188 - protein, 11 aa, Artificial Sequence
  Peptide Derived from Human Papillomavirus
STDTTPAILDI

SEQ ID NO: 3189 - protein, 8 aa, Artificial Sequence
  Peptide Derived from Human Papillomavirus
STHNYEEI

SEQ ID NO: 3190 - protein, 10 aa, Artificial Sequence
  Peptide Derived from Human Papillomavirus
STHNYEEIPM

SEQ ID NO: 3191 - protein, 9 aa, Artificial Sequence
  Peptide Derived from Human Papillomavirus
STIDSAEEI

SEQ ID NO: 3192 - protein, 11 aa, Artificial Sequence
  Peptide Derived from Human Papillomavirus
STIDSAEEIEL

SEQ ID NO: 3193 - protein, 11 aa, Artificial Sequence
  Peptide Derived from Human Papillomavirus
STISTHNYEEI

SEQ ID NO: 3194 - protein, 8 aa, Artificial Sequence
  Peptide Derived from Human Papillomavirus
STNPNTVT

SEQ ID NO: 3195 - protein, 11 aa, Artificial Sequence
  Peptide Derived from Human Papillomavirus
STNPNTVTSST

SEQ ID NO: 3196 - protein, 10 aa, Artificial Sequence
  Peptide Derived from Human Papillomavirus
STPIPGSRPV

SEQ ID NO: 3197 - protein, 11 aa, Artificial Sequence
  Peptide Derived from Human Papillomavirus
STPIPGSRPVA

SEQ ID NO: 3198 - protein, 8 aa, Artificial Sequence
  Peptide Derived from Human Papillomavirus
STSLSGYI

SEQ ID NO: 3199 - protein, 10 aa, Artificial Sequence
  Peptide Derived from Human Papillomavirus
STSLSGYIPA

SEQ ID NO: 3200 - protein, 8 aa, Artificial Sequence
  Peptide Derived from Human Papillomavirus
STTPVPSV

SEQ ID NO: 3201 - protein, 11 aa, Artificial Sequence
  Peptide Derived from Human Papillomavirus
STTPVPSVPST

SEQ ID NO: 3202 - protein, 9 aa, Artificial Sequence
  Peptide Derived from Human Papillomavirus
STYTTTSHA

SEQ ID NO: 3203 - protein, 10 aa, Artificial Sequence
  Peptide Derived from Human Papillomavirus
STYTTTSHAA

SEQ ID NO: 3204 - protein, 11 aa, Artificial Sequence
  Peptide Derived from Human Papillomavirus
STYTTTSHAAL

SEQ ID NO: 3205 - protein, 9 aa, Artificial Sequence
  Peptide Derived from Human Papillomavirus
SVLQPPTPA

SEQ ID NO: 3206 - protein, 11 aa, Artificial Sequence
  Peptide Derived from Human Papillomavirus
SVLQPPTPAET

SEQ ID NO: 3207 - protein, 9 aa, Artificial Sequence
  Peptide Derived from Human Papillomavirus
SVPSIPPDV

SEQ ID NO: 3208 - protein, 11 aa, Artificial Sequence
  Peptide Derived from Human Papillomavirus
SVPSTSLSGYI

SEQ ID NO: 3209 - protein, 9 aa, Artificial Sequence
  Peptide Derived from Human Papillomavirus
TATDTLAPV

SEQ ID NO: 3210 - protein, 8 aa, Artificial Sequence
  Peptide Derived from Human Papillomavirus
TIDSAEEI

SEQ ID NO: 3211 - protein, 10 aa, Artificial Sequence
  Peptide Derived from Human Papillomavirus
TIDSAEEIEL

SEQ ID NO: 3212 - protein, 11 aa, Artificial Sequence
  Peptide Derived from Human Papillomavirus
TIIADAGDFYL

SEQ ID NO: 3213 - protein, 10 aa, Artificial Sequence
  Peptide Derived from Human Papillomavirus
TIPFGGAYNI

SEQ ID NO: 3214 - protein, 10 aa, Artificial Sequence
  Peptide Derived from Human Papillomavirus
TISTHNYEEI

SEQ ID NO: 3215 - protein, 8 aa, Artificial Sequence
  Peptide Derived from Human Papillomavirus
TITPSTYT

SEQ ID NO: 3216 - protein, 9 aa, Artificial Sequence
  Peptide Derived from Human Papillomavirus
TITPSTYTT

SEQ ID NO: 3217 - protein, 10 aa, Artificial Sequence
  Peptide Derived from Human Papillomavirus
TITPSTYTTT

SEQ ID NO: 3218 - protein, 9 aa, Artificial Sequence
  Peptide Derived from Human Papillomavirus
TLAPVRPPL

SEQ ID NO: 3219 - protein, 10 aa, Artificial Sequence
  Peptide Derived from Human Papillomavirus
TLAPVRPPLT

SEQ ID NO: 3220 - protein, 11 aa, Artificial Sequence
  Peptide Derived from Human Papillomavirus
TLAPVRPPLTV

SEQ ID NO: 3221 - protein, 10 aa, Artificial Sequence
  Peptide Derived from Human Papillomavirus
TLRTRSGKSI

SEQ ID NO: 3222 - protein, 9 aa, Artificial Sequence
  Peptide Derived from Human Papillomavirus
TLSSSTIST

SEQ ID NO: 3223 - protein, 11 aa, Artificial Sequence
  Peptide Derived from Human Papillomavirus
TLYFSSNDNSI

SEQ ID NO: 3224 - protein, 10 aa, Artificial Sequence
  Peptide Derived from Human Papillomavirus
TQLYKTCKQA

SEQ ID NO: 3225 - protein, 10 aa, Artificial Sequence
  Peptide Derived from Human Papillomavirus
TQQVKVVDPA

SEQ ID NO: 3226 - protein, 9 aa, Artificial Sequence
  Peptide Derived from Human Papillomavirus
TTHNNPTFT

SEQ ID NO: 3227 - protein, 8 aa, Artificial Sequence
  Peptide Derived from Human Papillomavirus
TTIPFGGA

SEQ ID NO: 3228 - protein, 11 aa, Artificial Sequence
  Peptide Derived from Human Papillomavirus
TTIPFGGAYNI

SEQ ID NO: 3229 - protein, 8 aa, Artificial Sequence
  Peptide Derived from Human Papillomavirus
TTPAILDI

SEQ ID NO: 3230 - protein, 11 aa, Artificial Sequence
  Peptide Derived from Human Papillomavirus
TTPAILDINNT

SEQ ID NO: 3231 - protein, 8 aa, Artificial Sequence
  Peptide Derived from Human Papillomavirus
TTPTKLIT

SEQ ID NO: 3232 - protein, 10 aa, Artificial Sequence
  Peptide Derived from Human Papillomavirus
TTPVPSVPST

SEQ ID NO: 3233 - protein, 8 aa, Artificial Sequence
  Peptide Derived from Human Papillomavirus
TTQQVKVV

SEQ ID NO: 3234 - protein, 11 aa, Artificial Sequence
  Peptide Derived from Human Papillomavirus
TTQQVKVVDPA

SEQ ID NO: 3235 - protein, 9 aa, Artificial Sequence
  Peptide Derived from Human Papillomavirus
TTSHAALPT

SEQ ID NO: 3236 - protein, 11 aa, Artificial Sequence
  Peptide Derived from Human Papillomavirus
TTSHAALPTSI

SEQ ID NO: 3237 - protein, 9 aa, Artificial Sequence
  Peptide Derived from Human Papillomavirus
TTSTDTTPA

SEQ ID NO: 3238 - protein, 10 aa, Artificial Sequence
  Peptide Derived from Human Papillomavirus
TTSTDTTPAI

SEQ ID NO: 3239 - protein, 11 aa, Artificial Sequence
  Peptide Derived from Human Papillomavirus
TTSTDTTPAIL

SEQ ID NO: 3240 - protein, 8 aa, Artificial Sequence
  Peptide Derived from Human Papillomavirus
TTTSHAAL

SEQ ID NO: 3241 - protein, 10 aa, Artificial Sequence
  Peptide Derived from Human Papillomavirus
TTTSHAALPT

SEQ ID NO: 3242 - protein, 10 aa, Artificial Sequence
  Peptide Derived from Human Papillomavirus
TTVTTHNNPT

SEQ ID NO: 3243 - protein, 8 aa, Artificial Sequence
  Peptide Derived from Human Papillomavirus
TVTSSTPI

SEQ ID NO: 3244 - protein, 9 aa, Artificial Sequence
  Peptide Derived from Human Papillomavirus
TVTTHNNPT

SEQ ID NO: 3245 - protein, 11 aa, Artificial Sequence
  Peptide Derived from Human Papillomavirus
TVTTHNNPTFT

SEQ ID NO: 3246 - protein, 8 aa, Artificial Sequence
  Peptide Derived from Human Papillomavirus
VALHRPAL

SEQ ID NO: 3247 - protein, 9 aa, Artificial Sequence
  Peptide Derived from Human Papillomavirus
VALHRPALT

SEQ ID NO: 3248 - protein, 10 aa, Artificial Sequence
  Peptide Derived from Human Papillomavirus
VARLGLYSRT

SEQ ID NO: 3249 - protein, 11 aa, Artificial Sequence
  Peptide Derived from Human Papillomavirus
VARLGLYSRTT

SEQ ID NO: 3250 - protein, 8 aa, Artificial Sequence
  Peptide Derived from Human Papillomavirus
VLQPPTPA

SEQ ID NO: 3251 - protein, 10 aa, Artificial Sequence
  Peptide Derived from Human Papillomavirus
VLQPPTPAET

SEQ ID NO: 3252 - protein, 8 aa, Artificial Sequence
  Peptide Derived from Human Papillomavirus
VTTHNNPT

SEQ ID NO: 3253 - protein, 10 aa, Artificial Sequence
  Peptide Derived from Human Papillomavirus
VTTHNNPTFT

SEQ ID NO: 3254 - protein, 11 aa, Artificial Sequence
  Peptide Derived from Human Papillomavirus
VTTVTTHNNPT

SEQ ID NO: 3255 - protein, 8 aa, Artificial Sequence
  Peptide Derived from Human Papillomavirus
VVDPAFIT

SEQ ID NO: 3256 - protein, 9 aa, Artificial Sequence
  Peptide Derived from Human Papillomavirus
VVDPAFITT

SEQ ID NO: 3257 - protein, 11 aa, Artificial Sequence
  Peptide Derived from Human Papillomavirus
VVDPAFITTPT

SEQ ID NO: 3258 - protein, 9 aa, Artificial Sequence
  Peptide Derived from Human Papillomavirus
YADDFITDT

SEQ ID NO: 3259 - protein, 11 aa, Artificial Sequence
  Peptide Derived from Human Papillomavirus
YADDFITDTST

SEQ ID NO: 3260 - protein, 8 aa, Artificial Sequence
  Peptide Derived from Human Papillomavirus
YIPANTTI

SEQ ID NO: 3261 - protein, 10 aa, Artificial Sequence
  Peptide Derived from Human Papillomavirus
YIPLGTRPPT

SEQ ID NO: 3262 - protein, 11 aa, Artificial Sequence
  Peptide Derived from Human Papillomavirus
YIPLGTRPPTA

SEQ ID NO: 3263 - protein, 8 aa, Artificial Sequence
  Peptide Derived from Human Papillomavirus
YLHPSYYM

SEQ ID NO: 3264 - protein, 9 aa, Artificial Sequence
  Peptide Derived from Human Papillomavirus
YLHPSYYML

SEQ ID NO: 3265 - protein, 10 aa, Artificial Sequence
  Peptide Derived from Human Papillomavirus
YMLRKRRKRL

SEQ ID NO: 3266 - protein, 8 aa, Artificial Sequence
  Peptide Derived from Human Papillomavirus
YTTTSHAA

SEQ ID NO: 3267 - protein, 9 aa, Artificial Sequence
  Peptide Derived from Human Papillomavirus
YTTTSHAAL

SEQ ID NO: 3268 - protein, 11 aa, Artificial Sequence
  Peptide Derived from Human Papillomavirus
YTTTSHAALPT

SEQ ID NO: 3269 - protein, 11 aa, Artificial Sequence
  Peptide Derived from Human Papillomavirus
AAAFLKSNCQA

SEQ ID NO: 3270 - protein, 10 aa, Artificial Sequence
  Peptide Derived from Human Papillomavirus
AAFLKSNCQA

SEQ ID NO: 3271 - protein, 8 aa, Artificial Sequence
  Peptide Derived from Human Papillomavirus
AALYWYRT

SEQ ID NO: 3272 - protein, 10 aa, Artificial Sequence
  Peptide Derived from Human Papillomavirus
AALYWYRTGI

SEQ ID NO: 3273 - protein, 8 aa, Artificial Sequence
  Peptide Derived from Human Papillomavirus
AIFGVNPT

SEQ ID NO: 3274 - protein, 9 aa, Artificial Sequence
  Peptide Derived from Human Papillomavirus
AIFGVNPTI

SEQ ID NO: 3275 - protein, 10 aa, Artificial Sequence
  Peptide Derived from Human Papillomavirus
AIFGVNPTIA

SEQ ID NO: 3276 - protein, 10 aa, Artificial Sequence
  Peptide Derived from Human Papillomavirus
AIVDKKTGDV

SEQ ID NO: 3277 - protein, 11 aa, Artificial Sequence
  Peptide Derived from Human Papillomavirus
AIVDKKTGDVI

SEQ ID NO: 3278 - protein, 9 aa, Artificial Sequence
  Peptide Derived from Human Papillomavirus
ALDGNPISI

SEQ ID NO: 3279 - protein, 8 aa, Artificial Sequence
  Peptide Derived from Human Papillomavirus
ALFHAQEV

SEQ ID NO: 3280 - protein, 9 aa, Artificial Sequence
  Peptide Derived from Human Papillomavirus
ALKSFLKGT

SEQ ID NO: 3281 - protein, 10 aa, Artificial Sequence
  Peptide Derived from Human Papillomavirus
ALLADSNSNA

SEQ ID NO: 3282 - protein, 11 aa, Artificial Sequence
  Peptide Derived from Human Papillomavirus
ALLADSNSNAA

SEQ ID NO: 3283 - protein, 9 aa, Artificial Sequence
  Peptide Derived from Human Papillomavirus
ALYWYRTGI

SEQ ID NO: 3284 - protein, 9 aa, Artificial Sequence
  Peptide Derived from Human Papillomavirus
AMLAVFKDT

SEQ ID NO: 3285 - protein, 8 aa, Artificial Sequence
  Peptide Derived from Human Papillomavirus
AMLDDATT

SEQ ID NO: 3286 - protein, 9 aa, Artificial Sequence
  Peptide Derived from Human Papillomavirus
AMLDDATTT

SEQ ID NO: 3287 - protein, 10 aa, Artificial Sequence
  Peptide Derived from Human Papillomavirus
AQALFHAQEV

SEQ ID NO: 3288 - protein, 8 aa, Artificial Sequence
  Peptide Derived from Human Papillomavirus
AQEVHNDA

SEQ ID NO: 3289 - protein, 10 aa, Artificial Sequence
  Peptide Derived from Human Papillomavirus
AQEVHNDAQV

SEQ ID NO: 3290 - protein, 11 aa, Artificial Sequence
  Peptide Derived from Human Papillomavirus
AQEVHNDAQVL

SEQ ID NO: 3291 - protein, 8 aa, Artificial Sequence
  Peptide Derived from Human Papillomavirus
AQKRQMNM

SEQ ID NO: 3292 - protein, 9 aa, Artificial Sequence
  Peptide Derived from Human Papillomavirus
AQLKDLLKV

SEQ ID NO: 3293 - protein, 8 aa, Artificial Sequence
  Peptide Derived from Human Papillomavirus
ATDTGSDM

SEQ ID NO: 3294 - protein, 9 aa, Artificial Sequence
  Peptide Derived from Human Papillomavirus
ATDTGSDMV

SEQ ID NO: 3295 - protein, 10 aa, Artificial Sequence
  Peptide Derived from Human Papillomavirus
ATMCKHYRRA

SEQ ID NO: 3296 - protein, 8 aa, Artificial Sequence
  Peptide Derived from Human Papillomavirus
ATQIQVTT

SEQ ID NO: 3297 - protein, 11 aa, Artificial Sequence
  Peptide Derived from Human Papillomavirus
ATTTCWTYFDT

SEQ ID NO: 3298 - protein, 9 aa, Artificial Sequence
  Peptide Derived from Human Papillomavirus
AVFKDTYGL

SEQ ID NO: 3299 - protein, 9 aa, Artificial Sequence
  Peptide Derived from Human Papillomavirus
AVISFVNST

SEQ ID NO: 3300 - protein, 11 aa, Artificial Sequence
  Peptide Derived from Human Papillomavirus
CATMCKHYRRA

SEQ ID NO: 3301 - protein, 8 aa, Artificial Sequence
  Peptide Derived from Human Papillomavirus
CLDCKWGV

SEQ ID NO: 3302 - protein, 9 aa, Artificial Sequence
  Peptide Derived from Human Papillomavirus
CLDCKWGVL

SEQ ID NO: 3303 - protein, 10 aa, Artificial Sequence
  Peptide Derived from Human Papillomavirus
CLDCKWGVLI

SEQ ID NO: 3304 - protein, 11 aa, Artificial Sequence
  Peptide Derived from Human Papillomavirus
CLDCKWGVLIL

SEQ ID NO: 3305 - protein, 8 aa, Artificial Sequence
  Peptide Derived from Human Papillomavirus
CLVFCGPA

SEQ ID NO: 3306 - protein, 10 aa, Artificial Sequence
  Peptide Derived from Human Papillomavirus
CLVFCGPANT

SEQ ID NO: 3307 - protein, 9 aa, Artificial Sequence
  Peptide Derived from Human Papillomavirus
CMLIQPPKL

SEQ ID NO: 3308 - protein, 10 aa, Artificial Sequence
  Peptide Derived from Human Papillomavirus
CQAKYLKDCA

SEQ ID NO: 3309 - protein, 11 aa, Artificial Sequence
  Peptide Derived from Human Papillomavirus
CQAKYLKDCAT

SEQ ID NO: 3310 - protein, 8 aa, Artificial Sequence
  Peptide Derived from Human Papillomavirus
CTDWVTAI

SEQ ID NO: 3311 - protein, 11 aa, Artificial Sequence
  Peptide Derived from Human Papillomavirus
CTDWVTAIFGV

SEQ ID NO: 3312 - protein, 9 aa, Artificial Sequence
  Peptide Derived from Human Papillomavirus
CTIAQLKDL

SEQ ID NO: 3313 - protein, 10 aa, Artificial Sequence
  Peptide Derived from Human Papillomavirus
CTIAQLKDLL

SEQ ID NO: 3314 - protein, 11 aa, Artificial Sequence
  Peptide Derived from Human Papillomavirus
DADTEGNPFGT

SEQ ID NO: 3315 - protein, 8 aa, Artificial Sequence
  Peptide Derived from Human Papillomavirus
DAQVLHVL

SEQ ID NO: 3316 - protein, 8 aa, Artificial Sequence
  Peptide Derived from Human Papillomavirus
DATTTCWT

SEQ ID NO: 3317 - protein, 9 aa, Artificial Sequence
  Peptide Derived from Human Papillomavirus
DLHEEEEDA

SEQ ID NO: 3318 - protein, 11 aa, Artificial Sequence
  Peptide Derived from Human Papillomavirus
DLHEEEEDADT

SEQ ID NO: 3319 - protein, 11 aa, Artificial Sequence
  Peptide Derived from Human Papillomavirus
DLLKVNNKQGA

SEQ ID NO: 3320 - protein, 9 aa, Artificial Sequence
  Peptide Derived from Human Papillomavirus
DLSEMVQWA

SEQ ID NO: 3321 - protein, 11 aa, Artificial Sequence
  Peptide Derived from Human Papillomavirus
DLVRNFKSDKT

SEQ ID NO: 3322 - protein, 8 aa, Artificial Sequence
  Peptide Derived from Human Papillomavirus
DMAFEYAL

SEQ ID NO: 3323 - protein, 9 aa, Artificial Sequence
  Peptide Derived from Human Papillomavirus
DMAFEYALL

SEQ ID NO: 3324 - protein, 10 aa, Artificial Sequence
  Peptide Derived from Human Papillomavirus
DMAFEYALLA

SEQ ID NO: 3325 - protein, 8 aa, Artificial Sequence
  Peptide Derived from Human Papillomavirus
DMVDFIDT

SEQ ID NO: 3326 - protein, 11 aa, Artificial Sequence
  Peptide Derived from Human Papillomavirus
DMVDFIDTQGT

SEQ ID NO: 3327 - protein, 9 aa, Artificial Sequence
  Peptide Derived from Human Papillomavirus
DTEGNPFGT

SEQ ID NO: 3328 - protein, 8 aa, Artificial Sequence
  Peptide Derived from Human Papillomavirus
DTELSPRL

SEQ ID NO: 3329 - protein, 11 aa, Artificial Sequence
  Peptide Derived from Human Papillomavirus
DTELSPRLQEI

SEQ ID NO: 3330 - protein, 10 aa, Artificial Sequence
  Peptide Derived from Human Papillomavirus
DTGSDMVDFI

SEQ ID NO: 3331 - protein, 10 aa, Artificial Sequence
  Peptide Derived from Human Papillomavirus
DTKVAMLDDA

SEQ ID NO: 3332 - protein, 11 aa, Artificial Sequence
  Peptide Derived from Human Papillomavirus
DTKVAMLDDAT

SEQ ID NO: 3333 - protein, 9 aa, Artificial Sequence
  Peptide Derived from Human Papillomavirus
DTPEWIQRL

SEQ ID NO: 3334 - protein, 10 aa, Artificial Sequence
  Peptide Derived from Human Papillomavirus
DTPEWIQRLT

SEQ ID NO: 3335 - protein, 11 aa, Artificial Sequence
  Peptide Derived from Human Papillomavirus
DTPEWIQRLTI

SEQ ID NO: 3336 - protein, 10 aa, Artificial Sequence
  Peptide Derived from Human Papillomavirus
DTQGTFCEQA

SEQ ID NO: 3337 - protein, 8 aa, Artificial Sequence
  Peptide Derived from Human Papillomavirus
DTYGLSFT

SEQ ID NO: 3338 - protein, 10 aa, Artificial Sequence
  Peptide Derived from Human Papillomavirus
DTYGLSFTDL

SEQ ID NO: 3339 - protein, 11 aa, Artificial Sequence
  Peptide Derived from Human Papillomavirus
DTYGLSFTDLV

SEQ ID NO: 3340 - protein, 8 aa, Artificial Sequence
  Peptide Derived from Human Papillomavirus
DTYMRNAL

SEQ ID NO: 3341 - protein, 11 aa, Artificial Sequence
  Peptide Derived from Human Papillomavirus
DVISDDEDENA

SEQ ID NO: 3342 - protein, 8 aa, Artificial Sequence
  Peptide Derived from Human Papillomavirus
EAIDNGGT

SEQ ID NO: 3343 - protein, 8 aa, Artificial Sequence
  Peptide Derived from Human Papillomavirus
EATQIQVT

SEQ ID NO: 3344 - protein, 9 aa, Artificial Sequence
  Peptide Derived from Human Papillomavirus
EATQIQVTT

SEQ ID NO: 3345 - protein, 11 aa, Artificial Sequence
  Peptide Derived from Human Papillomavirus
EISLNSGQKKA

SEQ ID NO: 3346 - protein, 8 aa, Artificial Sequence
  Peptide Derived from Human Papillomavirus
ELETAQAL

SEQ ID NO: 3347 - protein, 11 aa, Artificial Sequence
  Peptide Derived from Human Papillomavirus
ELETAQALFHA

SEQ ID NO: 3348 - protein, 9 aa, Artificial Sequence
  Peptide Derived from Human Papillomavirus
ELSPRLQEI

SEQ ID NO: 3349 - protein, 11 aa, Artificial Sequence
  Peptide Derived from Human Papillomavirus
ELSPRLQEISL

SEQ ID NO: 3350 - protein, 8 aa, Artificial Sequence
  Peptide Derived from Human Papillomavirus
ELTDESDM

SEQ ID NO: 3351 - protein, 9 aa, Artificial Sequence
  Peptide Derived from Human Papillomavirus
ELTDESDMA

SEQ ID NO: 3352 - protein, 11 aa, Artificial Sequence
  Peptide Derived from Human Papillomavirus
EMVQWAFDNEL

SEQ ID NO: 3353 - protein, 8 aa, Artificial Sequence
  Peptide Derived from Human Papillomavirus
EQAELETA

SEQ ID NO: 3354 - protein, 10 aa, Artificial Sequence
  Peptide Derived from Human Papillomavirus
EQAELETAQA

SEQ ID NO: 3355 - protein, 11 aa, Artificial Sequence
  Peptide Derived from Human Papillomavirus
EQAELETAQAL

SEQ ID NO: 3356 - protein, 9 aa, Artificial Sequence
  Peptide Derived from Human Papillomavirus
ETAQALFHA

SEQ ID NO: 3357 - protein, 11 aa, Artificial Sequence
  Peptide Derived from Human Papillomavirus
ETCMLIQPPKL

SEQ ID NO: 3358 - protein, 10 aa, Artificial Sequence
  Peptide Derived from Human Papillomavirus
EVDTELSPRL

SEQ ID NO: 3359 - protein, 9 aa, Artificial Sequence
  Peptide Derived from Human Papillomavirus
EVEATQIQV

SEQ ID NO: 3360 - protein, 10 aa, Artificial Sequence
  Peptide Derived from Human Papillomavirus
EVEATQIQVT

SEQ ID NO: 3361 - protein, 11 aa, Artificial Sequence
  Peptide Derived from Human Papillomavirus
EVEATQIQVTT

SEQ ID NO: 3362 - protein, 8 aa, Artificial Sequence
  Peptide Derived from Human Papillomavirus
EVHNDAQV

SEQ ID NO: 3363 - protein, 9 aa, Artificial Sequence
  Peptide Derived from Human Papillomavirus
EVHNDAQVL

SEQ ID NO: 3364 - protein, 11 aa, Artificial Sequence
  Peptide Derived from Human Papillomavirus
EVHNDAQVLHV

SEQ ID NO: 3365 - protein, 10 aa, Artificial Sequence
  Peptide Derived from Human Papillomavirus
EVMGDTPEWI

SEQ ID NO: 3366 - protein, 11 aa, Artificial Sequence
  Peptide Derived from Human Papillomavirus
FAGGSTENSPL

SEQ ID NO: 3367 - protein, 8 aa, Artificial Sequence
  Peptide Derived from Human Papillomavirus
FIHFIQGA

SEQ ID NO: 3368 - protein, 9 aa, Artificial Sequence
  Peptide Derived from Human Papillomavirus
FIHFIQGAV

SEQ ID NO: 3369 - protein, 10 aa, Artificial Sequence
  Peptide Derived from Human Papillomavirus
FIHFIQGAVI

SEQ ID NO: 3370 - protein, 10 aa, Artificial Sequence
  Peptide Derived from Human Papillomavirus
FILYAHIQCL

SEQ ID NO: 3371 - protein, 10 aa, Artificial Sequence
  Peptide Derived from Human Papillomavirus
FIQGAVISFV

SEQ ID NO: 3372 - protein, 8 aa, Artificial Sequence
  Peptide Derived from Human Papillomavirus
FITFLGAL

SEQ ID NO: 3373 - protein, 9 aa, Artificial Sequence
  Peptide Derived from Human Papillomavirus
FLGALKSFL

SEQ ID NO: 3374 - protein, 11 aa, Artificial Sequence
  Peptide Derived from Human Papillomavirus
FLKGTPKKNCL

SEQ ID NO: 3375 - protein, 8 aa, Artificial Sequence
  Peptide Derived from Human Papillomavirus
FLKSNCQA

SEQ ID NO: 3376 - protein, 11 aa, Artificial Sequence
  Peptide Derived from Human Papillomavirus
FLKSNCQAKYL

SEQ ID NO: 3377 - protein, 10 aa, Artificial Sequence
  Peptide Derived from Human Papillomavirus
FLRYQQIEFI

SEQ ID NO: 3378 - protein, 11 aa, Artificial Sequence
  Peptide Derived from Human Papillomavirus
FLRYQQIEFIT

SEQ ID NO: 3379 - protein, 10 aa, Artificial Sequence
  Peptide Derived from Human Papillomavirus
FVNSTSHFWL

SEQ ID NO: 3380 - protein, 10 aa, Artificial Sequence
  Peptide Derived from Human Papillomavirus
GALKSFLKGT

SEQ ID NO: 3381 - protein, 10 aa, Artificial Sequence
  Peptide Derived from Human Papillomavirus
GAMLAVFKDT

SEQ ID NO: 3382 - protein, 10 aa, Artificial Sequence
  Peptide Derived from Human Papillomavirus
GAVISFVNST

SEQ ID NO: 3383 - protein, 9 aa, Artificial Sequence
  Peptide Derived from Human Papillomavirus
GIDDSNFDL

SEQ ID NO: 3384 - protein, 8 aa, Artificial Sequence
  Peptide Derived from Human Papillomavirus
GISNISEV

SEQ ID NO: 3385 - protein, 9 aa, Artificial Sequence
  Peptide Derived from Human Papillomavirus
GISNISEVM

SEQ ID NO: 3386 - protein, 8 aa, Artificial Sequence
  Peptide Derived from Human Papillomavirus
GLSFTDLV

SEQ ID NO: 3387 - protein, 8 aa, Artificial Sequence
  Peptide Derived from Human Papillomavirus
GLSTLLHV

SEQ ID NO: 3388 - protein, 11 aa, Artificial Sequence
  Peptide Derived from Human Papillomavirus
GLSTLLHVPET

SEQ ID NO: 3389 - protein, 8 aa, Artificial Sequence
  Peptide Derived from Human Papillomavirus
GMSFIHFI

SEQ ID NO: 3390 - protein, 11 aa, Artificial Sequence
  Peptide Derived from Human Papillomavirus
GMSFIHFIQGA

SEQ ID NO: 3391 - protein, 9 aa, Artificial Sequence
  Peptide Derived from Human Papillomavirus
GQKKAKRRL

SEQ ID NO: 3392 - protein, 11 aa, Artificial Sequence
  Peptide Derived from Human Papillomavirus
GQKKAKRRLFT

SEQ ID NO: 3393 - protein, 9 aa, Artificial Sequence
  Peptide Derived from Human Papillomavirus
GTEGNNSSV

SEQ ID NO: 3394 - protein, 9 aa, Artificial Sequence
  Peptide Derived from Human Papillomavirus
GTFCEQAEL

SEQ ID NO: 3395 - protein, 11 aa, Artificial Sequence
  Peptide Derived from Human Papillomavirus
GTFCEQAELET

SEQ ID NO: 3396 - protein, 10 aa, Artificial Sequence
  Peptide Derived from Human Papillomavirus
GTGCNGWFYV

SEQ ID NO: 3397 - protein, 8 aa, Artificial Sequence
  Peptide Derived from Human Papillomavirus
GTPKKNCL

SEQ ID NO: 3398 - protein, 9 aa, Artificial Sequence
  Peptide Derived from Human Papillomavirus
GTPKKNCLV

SEQ ID NO: 3399 - protein, 8 aa, Artificial Sequence
  Peptide Derived from Human Papillomavirus
GTSDNSNI

SEQ ID NO: 3400 - protein, 11 aa, Artificial Sequence
  Peptide Derived from Human Papillomavirus
GTSDNSNIENV

SEQ ID NO: 3401 - protein, 8 aa, Artificial Sequence
  Peptide Derived from Human Papillomavirus
GVLILALL

SEQ ID NO: 3402 - protein, 9 aa, Artificial Sequence
  Peptide Derived from Human Papillomavirus
HAQEVHNDA

SEQ ID NO: 3403 - protein, 11 aa, Artificial Sequence
  Peptide Derived from Human Papillomavirus
HAQEVHNDAQV

SEQ ID NO: 3404 - protein, 11 aa, Artificial Sequence
  Peptide Derived from Human Papillomavirus
HIQCLDCKWGV

SEQ ID NO: 3405 - protein, 8 aa, Artificial Sequence
  Peptide Derived from Human Papillomavirus
HVLKRKFA

SEQ ID NO: 3406 - protein, 8 aa, Artificial Sequence
  Peptide Derived from Human Papillomavirus
HVPETCML

SEQ ID NO: 3407 - protein, 9 aa, Artificial Sequence
  Peptide Derived from Human Papillomavirus
HVPETCMLI

SEQ ID NO: 3408 - protein, 8 aa, Artificial Sequence
  Peptide Derived from Human Papillomavirus
IAEGFKTL

SEQ ID NO: 3409 - protein, 9 aa, Artificial Sequence
  Peptide Derived from Human Papillomavirus
IAEGFKTLI

SEQ ID NO: 3410 - protein, 8 aa, Artificial Sequence
  Peptide Derived from Human Papillomavirus
IAQLKDLL

SEQ ID NO: 3411 - protein, 10 aa, Artificial Sequence
  Peptide Derived from Human Papillomavirus
IAQLKDLLKV

SEQ ID NO: 3412 - protein, 10 aa, Artificial Sequence
  Peptide Derived from Human Papillomavirus
ILLTTNIHPA

SEQ ID NO: 3413 - protein, 9 aa, Artificial Sequence
  Peptide Derived from Human Papillomavirus
ILYAHIQCL

SEQ ID NO: 3414 - protein, 10 aa, Artificial Sequence
  Peptide Derived from Human Papillomavirus
IQCLDCKWGV

SEQ ID NO: 3415 - protein, 11 aa, Artificial Sequence
  Peptide Derived from Human Papillomavirus
IQCLDCKWGVL

SEQ ID NO: 3416 - protein, 9 aa, Artificial Sequence
  Peptide Derived from Human Papillomavirus
IQGAVISFV

SEQ ID NO: 3417 - protein, 8 aa, Artificial Sequence
  Peptide Derived from Human Papillomavirus
IQLKCPPI

SEQ ID NO: 3418 - protein, 9 aa, Artificial Sequence
  Peptide Derived from Human Papillomavirus
IQLKCPPIL

SEQ ID NO: 3419 - protein, 10 aa, Artificial Sequence
  Peptide Derived from Human Papillomavirus
IQLKCPPILL

SEQ ID NO: 3420 - protein, 11 aa, Artificial Sequence
  Peptide Derived from Human Papillomavirus
IQLKCPPILLT

SEQ ID NO: 3421 - protein, 8 aa, Artificial Sequence
  Peptide Derived from Human Papillomavirus
IQPFILYA

SEQ ID NO: 3422 - protein, 10 aa, Artificial Sequence
  Peptide Derived from Human Papillomavirus
IQPFILYAHI

SEQ ID NO: 3423 - protein, 10 aa, Artificial Sequence
  Peptide Derived from Human Papillomavirus
IQPPKLRSSV

SEQ ID NO: 3424 - protein, 11 aa, Artificial Sequence
  Peptide Derived from Human Papillomavirus
IQPPKLRSSVA

SEQ ID NO: 3425 - protein, 11 aa, Artificial Sequence
  Peptide Derived from Human Papillomavirus
IQRLTIIQHGI

SEQ ID NO: 3426 - protein, 11 aa, Artificial Sequence
  Peptide Derived from Human Papillomavirus
ITFLGALKSFL

SEQ ID NO: 3427 - protein, 9 aa, Artificial Sequence
  Peptide Derived from Human Papillomavirus
ITVFEFPNA

SEQ ID NO: 3428 - protein, 9 aa, Artificial Sequence
  Peptide Derived from Human Papillomavirus
IVDKKTGDV

SEQ ID NO: 3429 - protein, 10 aa, Artificial Sequence
  Peptide Derived from Human Papillomavirus
IVDKKTGDVI

SEQ ID NO: 3430 - protein, 10 aa, Artificial Sequence
  Peptide Derived from Human Papillomavirus
IVQFLRYQQI

SEQ ID NO: 3431 - protein, 8 aa, Artificial Sequence
  Peptide Derived from Human Papillomavirus
KAKRRLFT

SEQ ID NO: 3432 - protein, 9 aa, Artificial Sequence
  Peptide Derived from Human Papillomavirus
KAKRRLFTI

SEQ ID NO: 3433 - protein, 11 aa, Artificial Sequence
  Peptide Derived from Human Papillomavirus
KIDEGGDWRPI

SEQ ID NO: 3434 - protein, 11 aa, Artificial Sequence
  Peptide Derived from Human Papillomavirus
KLRAGQNHRPL

SEQ ID NO: 3435 - protein, 8 aa, Artificial Sequence
  Peptide Derived from Human Papillomavirus
KLRSSVAA

SEQ ID NO: 3436 - protein, 9 aa, Artificial Sequence
  Peptide Derived from Human Papillomavirus
KLRSSVAAL

SEQ ID NO: 3437 - protein, 8 aa, Artificial Sequence
  Peptide Derived from Human Papillomavirus
KQGAMLAV

SEQ ID NO: 3438 - protein, 8 aa, Artificial Sequence
  Peptide Derived from Human Papillomavirus
KTLIQPFI

SEQ ID NO: 3439 - protein, 9 aa, Artificial Sequence
  Peptide Derived from Human Papillomavirus
KTLIQPFIL

SEQ ID NO: 3440 - protein, 11 aa, Artificial Sequence
  Peptide Derived from Human Papillomavirus
KTLIQPFILYA

SEQ ID NO: 3441 - protein, 8 aa, Artificial Sequence
  Peptide Derived from Human Papillomavirus
KTTCTDWV

SEQ ID NO: 3442 - protein, 9 aa, Artificial Sequence
  Peptide Derived from Human Papillomavirus
KTTCTDWVT

SEQ ID NO: 3443 - protein, 10 aa, Artificial Sequence
  Peptide Derived from Human Papillomavirus
KTTCTDWVTA

SEQ ID NO: 3444 - protein, 11 aa, Artificial Sequence
  Peptide Derived from Human Papillomavirus
KTTCTDWVTAI

SEQ ID NO: 3445 - protein, 8 aa, Artificial Sequence
  Peptide Derived from Human Papillomavirus
KVAMLDDA

SEQ ID NO: 3446 - protein, 9 aa, Artificial Sequence
  Peptide Derived from Human Papillomavirus
KVAMLDDAT

SEQ ID NO: 3447 - protein, 10 aa, Artificial Sequence
  Peptide Derived from Human Papillomavirus
KVAMLDDATT

SEQ ID NO: 3448 - protein, 11 aa, Artificial Sequence
  Peptide Derived from Human Papillomavirus
KVAMLDDATTT

SEQ ID NO: 3449 - protein, 8 aa, Artificial Sequence
  Peptide Derived from Human Papillomavirus
KVNNKQGA

SEQ ID NO: 3450 - protein, 9 aa, Artificial Sequence
  Peptide Derived from Human Papillomavirus
KVNNKQGAM

SEQ ID NO: 3451 - protein, 10 aa, Artificial Sequence
  Peptide Derived from Human Papillomavirus
KVNNKQGAML

SEQ ID NO: 3452 - protein, 11 aa, Artificial Sequence
  Peptide Derived from Human Papillomavirus
KVNNKQGAMLA

SEQ ID NO: 3453 - protein, 8 aa, Artificial Sequence
  Peptide Derived from Human Papillomavirus
LADSNSNA

SEQ ID NO: 3454 - protein, 9 aa, Artificial Sequence
  Peptide Derived from Human Papillomavirus
LADSNSNAA

SEQ ID NO: 3455 - protein, 10 aa, Artificial Sequence
  Peptide Derived from Human Papillomavirus
LADSNSNAAA

SEQ ID NO: 3456 - protein, 10 aa, Artificial Sequence
  Peptide Derived from Human Papillomavirus
LAVFKDTYGL

SEQ ID NO: 3457 - protein, 9 aa, Artificial Sequence
  Peptide Derived from Human Papillomavirus
LIQLKCPPI

SEQ ID NO: 3458 - protein, 10 aa, Artificial Sequence
  Peptide Derived from Human Papillomavirus
LIQLKCPPIL

SEQ ID NO: 3459 - protein, 11 aa, Artificial Sequence
  Peptide Derived from Human Papillomavirus
LIQLKCPPILL

SEQ ID NO: 3460 - protein, 9 aa, Artificial Sequence
  Peptide Derived from Human Papillomavirus
LIQPFILYA

SEQ ID NO: 3461 - protein, 11 aa, Artificial Sequence
  Peptide Derived from Human Papillomavirus
LIQPFILYAHI

SEQ ID NO: 3462 - protein, 11 aa, Artificial Sequence
  Peptide Derived from Human Papillomavirus
LIQPPKLRSSV

SEQ ID NO: 3463 - protein, 9 aa, Artificial Sequence
  Peptide Derived from Human Papillomavirus
LLADSNSNA

SEQ ID NO: 3464 - protein, 10 aa, Artificial Sequence
  Peptide Derived from Human Papillomavirus
LLADSNSNAA

SEQ ID NO: 3465 - protein, 11 aa, Artificial Sequence
  Peptide Derived from Human Papillomavirus
LLADSNSNAAA

SEQ ID NO: 3466 - protein, 9 aa, Artificial Sequence
  Peptide Derived from Human Papillomavirus
LLHVPETCM

SEQ ID NO: 3467 - protein, 10 aa, Artificial Sequence
  Peptide Derived from Human Papillomavirus
LLHVPETCML

SEQ ID NO: 3468 - protein, 11 aa, Artificial Sequence
  Peptide Derived from Human Papillomavirus
LLHVPETCMLI

SEQ ID NO: 3469 - protein, 10 aa, Artificial Sequence
  Peptide Derived from Human Papillomavirus
LLKVNNKQGA

SEQ ID NO: 3470 - protein, 11 aa, Artificial Sequence
  Peptide Derived from Human Papillomavirus
LLKVNNKQGAM

SEQ ID NO: 3471 - protein, 11 aa, Artificial Sequence
  Peptide Derived from Human Papillomavirus
LLRYKCGKSRL

SEQ ID NO: 3472 - protein, 9 aa, Artificial Sequence
  Peptide Derived from Human Papillomavirus
LLTTNIHPA

SEQ ID NO: 3473 - protein, 8 aa, Artificial Sequence
  Peptide Derived from Human Papillomavirus
LTDESDMA

SEQ ID NO: 3474 - protein, 8 aa, Artificial Sequence
  Peptide Derived from Human Papillomavirus
LTDTKVAM

SEQ ID NO: 3475 - protein, 9 aa, Artificial Sequence
  Peptide Derived from Human Papillomavirus
LTDTKVAML

SEQ ID NO: 3476 - protein, 8 aa, Artificial Sequence
  Peptide Derived from Human Papillomavirus
LTIIQHGI

SEQ ID NO: 3477 - protein, 8 aa, Artificial Sequence
  Peptide Derived from Human Papillomavirus
LTTNIHPA

SEQ ID NO: 3478 - protein, 9 aa, Artificial Sequence
  Peptide Derived from Human Papillomavirus
LTVAKGLST

SEQ ID NO: 3479 - protein, 10 aa, Artificial Sequence
  Peptide Derived from Human Papillomavirus
LTVAKGLSTL

SEQ ID NO: 3480 - protein, 11 aa, Artificial Sequence
  Peptide Derived from Human Papillomavirus
LTVAKGLSTLL

SEQ ID NO: 3481 - protein, 9 aa, Artificial Sequence
  Peptide Derived from Human Papillomavirus
LVFCGPANT

SEQ ID NO: 3482 - protein, 10 aa, Artificial Sequence
  Peptide Derived from Human Papillomavirus
LVRNFKSDKT

SEQ ID NO: 3483 - protein, 11 aa, Artificial Sequence
  Peptide Derived from Human Papillomavirus
LVRNFKSDKTT

SEQ ID NO: 3484 - protein, 8 aa, Artificial Sequence
  Peptide Derived from Human Papillomavirus
MAFEYALL

SEQ ID NO: 3485 - protein, 9 aa, Artificial Sequence
  Peptide Derived from Human Papillomavirus
MAFEYALLA

SEQ ID NO: 3486 - protein, 8 aa, Artificial Sequence
  Peptide Derived from Human Papillomavirus
MLAVFKDT

SEQ ID NO: 3487 - protein, 11 aa, Artificial Sequence
  Peptide Derived from Human Papillomavirus
MLAVFKDTYGL

SEQ ID NO: 3488 - protein, 8 aa, Artificial Sequence
  Peptide Derived from Human Papillomavirus
MLDDATTT

SEQ ID NO: 3489 - protein, 11 aa, Artificial Sequence
  Peptide Derived from Human Papillomavirus
MLDDATTTCWT

SEQ ID NO: 3490 - protein, 8 aa, Artificial Sequence
  Peptide Derived from Human Papillomavirus
MLIQPPKL

SEQ ID NO: 3491 - protein, 10 aa, Artificial Sequence
  Peptide Derived from Human Papillomavirus
MVDFIDTQGT

SEQ ID NO: 3492 - protein, 10 aa, Artificial Sequence
  Peptide Derived from Human Papillomavirus
MVQWAFDNEL

SEQ ID NO: 3493 - protein, 11 aa, Artificial Sequence
  Peptide Derived from Human Papillomavirus
MVQWAFDNELT

SEQ ID NO: 3494 - protein, 8 aa, Artificial Sequence
  Peptide Derived from Human Papillomavirus
NALDGNPI

SEQ ID NO: 3495 - protein, 10 aa, Artificial Sequence
  Peptide Derived from Human Papillomavirus
NALDGNPISI

SEQ ID NO: 3496 - protein, 9 aa, Artificial Sequence
  Peptide Derived from Human Papillomavirus
NATDTGSDM

SEQ ID NO: 3497 - protein, 10 aa, Artificial Sequence
  Peptide Derived from Human Papillomavirus
NATDTGSDMV

SEQ ID NO: 3498 - protein, 10 aa, Artificial Sequence
  Peptide Derived from Human Papillomavirus
NIENVNPQCT

SEQ ID NO: 3499 - protein, 11 aa, Artificial Sequence
  Peptide Derived from Human Papillomavirus
NIENVNPQCTI

SEQ ID NO: 3500 - protein, 9 aa, Artificial Sequence
  Peptide Derived from Human Papillomavirus
NISEVMGDT

SEQ ID NO: 3501 - protein, 9 aa, Artificial Sequence
  Peptide Derived from Human Papillomavirus
NTGKSYFGM

SEQ ID NO: 3502 - protein, 8 aa, Artificial Sequence
  Peptide Derived from Human Papillomavirus
NVCSGGST

SEQ ID NO: 3503 - protein, 10 aa, Artificial Sequence
  Peptide Derived from Human Papillomavirus
NVCSGGSTEA

SEQ ID NO: 3504 - protein, 11 aa, Artificial Sequence
  Peptide Derived from Human Papillomavirus
NVCSGGSTEAI

SEQ ID NO: 3505 - protein, 8 aa, Artificial Sequence
  Peptide Derived from Human Papillomavirus
NVNPQCTI

SEQ ID NO: 3506 - protein, 9 aa, Artificial Sequence
  Peptide Derived from Human Papillomavirus
NVNPQCTIA

SEQ ID NO: 3507 - protein, 11 aa, Artificial Sequence
  Peptide Derived from Human Papillomavirus
NVNPQCTIAQL

SEQ ID NO: 3508 - protein, 10 aa, Artificial Sequence
  Peptide Derived from Human Papillomavirus
PAKDNRWPYL

SEQ ID NO: 3509 - protein, 11 aa, Artificial Sequence
  Peptide Derived from Human Papillomavirus
PANTGKSYFGM

SEQ ID NO: 3510 - protein, 8 aa, Artificial Sequence
  Peptide Derived from Human Papillomavirus
PILLTTNI

SEQ ID NO: 3511 - protein, 11 aa, Artificial Sequence
  Peptide Derived from Human Papillomavirus
PILLTTNIHPA

SEQ ID NO: 3512 - protein, 11 aa, Artificial Sequence
  Peptide Derived from Human Papillomavirus
PISIDRKHKPL

SEQ ID NO: 3513 - protein, 11 aa, Artificial Sequence
  Peptide Derived from Human Papillomavirus
PIVQFLRYQQI

SEQ ID NO: 3514 - protein, 8 aa, Artificial Sequence
  Peptide Derived from Human Papillomavirus
PLGERLEV

SEQ ID NO: 3515 - protein, 10 aa, Artificial Sequence
  Peptide Derived from Human Papillomavirus
PLGERLEVDT

SEQ ID NO: 3516 - protein, 10 aa, Artificial Sequence
  Peptide Derived from Human Papillomavirus
PLIQLKCPPI

SEQ ID NO: 3517 - protein, 11 aa, Artificial Sequence
  Peptide Derived from Human Papillomavirus
PLIQLKCPPIL

SEQ ID NO: 3518 - protein, 8 aa, Artificial Sequence
  Peptide Derived from Human Papillomavirus
PLTDTKVA

SEQ ID NO: 3519 - protein, 9 aa, Artificial Sequence
  Peptide Derived from Human Papillomavirus
PLTDTKVAM

SEQ ID NO: 3520 - protein, 10 aa, Artificial Sequence
  Peptide Derived from Human Papillomavirus
PLTDTKVAML

SEQ ID NO: 3521 - protein, 8 aa, Artificial Sequence
  Peptide Derived from Human Papillomavirus
PQCTIAQL

SEQ ID NO: 3522 - protein, 11 aa, Artificial Sequence
  Peptide Derived from Human Papillomavirus
PQCTIAQLKDL

SEQ ID NO: 3523 - protein, 9 aa, Artificial Sequence
  Peptide Derived from Human Papillomavirus
PTIAEGFKT

SEQ ID NO: 3524 - protein, 10 aa, Artificial Sequence
  Peptide Derived from Human Papillomavirus
PTIAEGFKTL

SEQ ID NO: 3525 - protein, 11 aa, Artificial Sequence
  Peptide Derived from Human Papillomavirus
PTIAEGFKTLI

SEQ ID NO: 3526 - protein, 9 aa, Artificial Sequence
  Peptide Derived from Human Papillomavirus
QAELETAQA

SEQ ID NO: 3527 - protein, 10 aa, Artificial Sequence
  Peptide Derived from Human Papillomavirus
QAELETAQAL

SEQ ID NO: 3528 - protein, 8 aa, Artificial Sequence
  Peptide Derived from Human Papillomavirus
QAIVDKKT

SEQ ID NO: 3529 - protein, 11 aa, Artificial Sequence
  Peptide Derived from Human Papillomavirus
QAIVDKKTGDV

SEQ ID NO: 3530 - protein, 9 aa, Artificial Sequence
  Peptide Derived from Human Papillomavirus
QAKYLKDCA

SEQ ID NO: 3531 - protein, 10 aa, Artificial Sequence
  Peptide Derived from Human Papillomavirus
QAKYLKDCAT

SEQ ID NO: 3532 - protein, 11 aa, Artificial Sequence
  Peptide Derived from Human Papillomavirus
QAKYLKDCATM

SEQ ID NO: 3533 - protein, 9 aa, Artificial Sequence
  Peptide Derived from Human Papillomavirus
QALFHAQEV

SEQ ID NO: 3534 - protein, 8 aa, Artificial Sequence
  Peptide Derived from Human Papillomavirus
QIEFITFL

SEQ ID NO: 3535 - protein, 10 aa, Artificial Sequence
  Peptide Derived from Human Papillomavirus
QIEFITFLGA

SEQ ID NO: 3536 - protein, 11 aa, Artificial Sequence
  Peptide Derived from Human Papillomavirus
QIEFITFLGAL

SEQ ID NO: 3537 - protein, 8 aa, Artificial Sequence
  Peptide Derived from Human Papillomavirus
QLKCPPIL

SEQ ID NO: 3538 - protein, 9 aa, Artificial Sequence
  Peptide Derived from Human Papillomavirus
QLKCPPILL

SEQ ID NO: 3539 - protein, 10 aa, Artificial Sequence
  Peptide Derived from Human Papillomavirus
QLKCPPILLT

SEQ ID NO: 3540 - protein, 11 aa, Artificial Sequence
  Peptide Derived from Human Papillomavirus
QLKCPPILLTT

SEQ ID NO: 3541 - protein, 8 aa, Artificial Sequence
  Peptide Derived from Human Papillomavirus
QLKDLLKV

SEQ ID NO: 3542 - protein, 8 aa, Artificial Sequence
  Peptide Derived from Human Papillomavirus
QMNMSQWI

SEQ ID NO: 3543 - protein, 9 aa, Artificial Sequence
  Peptide Derived from Human Papillomavirus
QQIEFITFL

SEQ ID NO: 3544 - protein, 11 aa, Artificial Sequence
  Peptide Derived from Human Papillomavirus
QQIEFITFLGA

SEQ ID NO: 3545 - protein, 11 aa, Artificial Sequence
  Peptide Derived from Human Papillomavirus
QVLHVLKRKFA

SEQ ID NO: 3546 - protein, 9 aa, Artificial Sequence
  Peptide Derived from Human Papillomavirus
RAGQNHRPL

SEQ ID NO: 3547 - protein, 9 aa, Artificial Sequence
  Peptide Derived from Human Papillomavirus
RAQKRQMNM

SEQ ID NO: 3548 - protein, 10 aa, Artificial Sequence
  Peptide Derived from Human Papillomavirus
RITVFEFPNA

SEQ ID NO: 3549 - protein, 11 aa, Artificial Sequence
  Peptide Derived from Human Papillomavirus
RLDLHEEEEDA

SEQ ID NO: 3550 - protein, 8 aa, Artificial Sequence
  Peptide Derived from Human Papillomavirus
RLEVDTEL

SEQ ID NO: 3551 - protein, 9 aa, Artificial Sequence
  Peptide Derived from Human Papillomavirus
RLTIIQHGI

SEQ ID NO: 3552 - protein, 8 aa, Artificial Sequence
  Peptide Derived from Human Papillomavirus
RLTVAKGL

SEQ ID NO: 3553 - protein, 10 aa, Artificial Sequence
  Peptide Derived from Human Papillomavirus
RLTVAKGLST

SEQ ID NO: 3554 - protein, 11 aa, Artificial Sequence
  Peptide Derived from Human Papillomavirus
RLTVAKGLSTL

SEQ ID NO: 3555 - protein, 9 aa, Artificial Sequence
  Peptide Derived from Human Papillomavirus
RQMNMSQWI

SEQ ID NO: 3556 - protein, 10 aa, Artificial Sequence
  Peptide Derived from Human Papillomavirus
RTGISNISEV

SEQ ID NO: 3557 - protein, 11 aa, Artificial Sequence
  Peptide Derived from Human Papillomavirus
RTGISNISEVM

SEQ ID NO: 3558 - protein, 8 aa, Artificial Sequence
  Peptide Derived from Human Papillomavirus
RTWSRLDL

SEQ ID NO: 3559 - protein, 9 aa, Artificial Sequence
  Peptide Derived from Human Papillomavirus
SIDRKHKPL

SEQ ID NO: 3560 - protein, 10 aa, Artificial Sequence
  Peptide Derived from Human Papillomavirus
SIDRKHKPLI

SEQ ID NO: 3561 - protein, 9 aa, Artificial Sequence
  Peptide Derived from Human Papillomavirus
SLNSGQKKA

SEQ ID NO: 3562 - protein, 11 aa, Artificial Sequence
  Peptide Derived from Human Papillomavirus
SQWIRFRCSKI

SEQ ID NO: 3563 - protein, 10 aa, Artificial Sequence
  Peptide Derived from Human Papillomavirus
STEAIDNGGT

SEQ ID NO: 3564 - protein, 11 aa, Artificial Sequence
  Peptide Derived from Human Papillomavirus
STENSPLGERL

SEQ ID NO: 3565 - protein, 9 aa, Artificial Sequence
  Peptide Derived from Human Papillomavirus
STLLHVPET

SEQ ID NO: 3566 - protein, 11 aa, Artificial Sequence
  Peptide Derived from Human Papillomavirus
STLLHVPETCM

SEQ ID NO: 3567 - protein, 10 aa, Artificial Sequence
  Peptide Derived from Human Papillomavirus
STSHFWLEPL

SEQ ID NO: 3568 - protein, 11 aa, Artificial Sequence
  Peptide Derived from Human Papillomavirus
STSHFWLEPLT

SEQ ID NO: 3569 - protein, 10 aa, Artificial Sequence
  Peptide Derived from Human Papillomavirus
SVAALYWYRT

SEQ ID NO: 3570 - protein, 11 aa, Artificial Sequence
  Peptide Derived from Human Papillomavirus
SVDGTSDNSNI

SEQ ID NO: 3571 - protein, 9 aa, Artificial Sequence
  Peptide Derived from Human Papillomavirus
TAIFGVNPT

SEQ ID NO: 3572 - protein, 10 aa, Artificial Sequence
  Peptide Derived from Human Papillomavirus
TAIFGVNPTI

SEQ ID NO: 3573 - protein, 11 aa, Artificial Sequence
  Peptide Derived from Human Papillomavirus
TAIFGVNPTIA

SEQ ID NO: 3574 - protein, 8 aa, Artificial Sequence
  Peptide Derived from Human Papillomavirus
TAQALFHA

SEQ ID NO: 3575 - protein, 11 aa, Artificial Sequence
  Peptide Derived from Human Papillomavirus
TAQALFHAQEV

SEQ ID NO: 3576 - protein, 8 aa, Artificial Sequence
  Peptide Derived from Human Papillomavirus
TIAEGFKT

SEQ ID NO: 3577 - protein, 9 aa, Artificial Sequence
  Peptide Derived from Human Papillomavirus
TIAEGFKTL

SEQ ID NO: 3578 - protein, 10 aa, Artificial Sequence
  Peptide Derived from Human Papillomavirus
TIAEGFKTLI

SEQ ID NO: 3579 - protein, 8 aa, Artificial Sequence
  Peptide Derived from Human Papillomavirus
TIAQLKDL

SEQ ID NO: 3580 - protein, 9 aa, Artificial Sequence
  Peptide Derived from Human Papillomavirus
TIAQLKDLL

SEQ ID NO: 3581 - protein, 11 aa, Artificial Sequence
  Peptide Derived from Human Papillomavirus
TIAQLKDLLKV

SEQ ID NO: 3582 - protein, 8 aa, Artificial Sequence
  Peptide Derived from Human Papillomavirus
TLIQPFIL

SEQ ID NO: 3583 - protein, 10 aa, Artificial Sequence
  Peptide Derived from Human Papillomavirus
TLIQPFILYA

SEQ ID NO: 3584 - protein, 8 aa, Artificial Sequence
  Peptide Derived from Human Papillomavirus
TLLHVPET

SEQ ID NO: 3585 - protein, 10 aa, Artificial Sequence
  Peptide Derived from Human Papillomavirus
TLLHVPETCM

SEQ ID NO: 3586 - protein, 11 aa, Artificial Sequence
  Peptide Derived from Human Papillomavirus
TLLHVPETCML

SEQ ID NO: 3587 - protein, 9 aa, Artificial Sequence
  Peptide Derived from Human Papillomavirus
TMCKHYRRA

SEQ ID NO: 3588 - protein, 9 aa, Artificial Sequence
  Peptide Derived from Human Papillomavirus
TQGTFCEQA

SEQ ID NO: 3589 - protein, 11 aa, Artificial Sequence
  Peptide Derived from Human Papillomavirus
TQGTFCEQAEL

SEQ ID NO: 3590 - protein, 8 aa, Artificial Sequence
  Peptide Derived from Human Papillomavirus
TTCTDWVT

SEQ ID NO: 3591 - protein, 9 aa, Artificial Sequence
  Peptide Derived from Human Papillomavirus
TTCTDWVTA

SEQ ID NO: 3592 - protein, 10 aa, Artificial Sequence
  Peptide Derived from Human Papillomavirus
TTCTDWVTAI

SEQ ID NO: 3593 - protein, 9 aa, Artificial Sequence
  Peptide Derived from Human Papillomavirus
TTCWTYFDT

SEQ ID NO: 3594 - protein, 11 aa, Artificial Sequence
  Peptide Derived from Human Papillomavirus
TTCWTYFDTYM

SEQ ID NO: 3595 - protein, 10 aa, Artificial Sequence
  Peptide Derived from Human Papillomavirus
TTNGEHGGNV

SEQ ID NO: 3596 - protein, 10 aa, Artificial Sequence
  Peptide Derived from Human Papillomavirus
TTTCWTYFDT

SEQ ID NO: 3597 - protein, 8 aa, Artificial Sequence
  Peptide Derived from Human Papillomavirus
TVAKGLST

SEQ ID NO: 3598 - protein, 9 aa, Artificial Sequence
  Peptide Derived from Human Papillomavirus
TVAKGLSTL

SEQ ID NO: 3599 - protein, 10 aa, Artificial Sequence
  Peptide Derived from Human Papillomavirus
TVAKGLSTLL

SEQ ID NO: 3600 - protein, 8 aa, Artificial Sequence
  Peptide Derived from Human Papillomavirus
TVFEFPNA

SEQ ID NO: 3601 - protein, 9 aa, Artificial Sequence
  Peptide Derived from Human Papillomavirus
VAALYWYRT

SEQ ID NO: 3602 - protein, 11 aa, Artificial Sequence
  Peptide Derived from Human Papillomavirus
VAALYWYRTGI

SEQ ID NO: 3603 - protein, 8 aa, Artificial Sequence
  Peptide Derived from Human Papillomavirus
VAKGLSTL

SEQ ID NO: 3604 - protein, 9 aa, Artificial Sequence
  Peptide Derived from Human Papillomavirus
VAKGLSTLL

SEQ ID NO: 3605 - protein, 11 aa, Artificial Sequence
  Peptide Derived from Human Papillomavirus
VAKGLSTLLHV

SEQ ID NO: 3606 - protein, 8 aa, Artificial Sequence
  Peptide Derived from Human Papillomavirus
VAMLDDAT

SEQ ID NO: 3607 - protein, 9 aa, Artificial Sequence
  Peptide Derived from Human Papillomavirus
VAMLDDATT

SEQ ID NO: 3608 - protein, 10 aa, Artificial Sequence
  Peptide Derived from Human Papillomavirus
VAMLDDATTT

SEQ ID NO: 3609 - protein, 10 aa, Artificial Sequence
  Peptide Derived from Human Papillomavirus
VISDDEDENA

SEQ ID NO: 3610 - protein, 11 aa, Artificial Sequence
  Peptide Derived from Human Papillomavirus
VISDDEDENAT

SEQ ID NO: 3611 - protein, 8 aa, Artificial Sequence
  Peptide Derived from Human Papillomavirus
VISFVNST

SEQ ID NO: 3612 - protein, 10 aa, Artificial Sequence
  Peptide Derived from Human Papillomavirus
VLHVLKRKFA

SEQ ID NO: 3613 - protein, 11 aa, Artificial Sequence
  Peptide Derived from Human Papillomavirus
VLKRKFAGGST

SEQ ID NO: 3614 - protein, 9 aa, Artificial Sequence
  Peptide Derived from Human Papillomavirus
VMGDTPEWI

SEQ ID NO: 3615 - protein, 9 aa, Artificial Sequence
  Peptide Derived from Human Papillomavirus
VQAIVDKKT

SEQ ID NO: 3616 - protein, 9 aa, Artificial Sequence
  Peptide Derived from Human Papillomavirus
VQFLRYQQI

SEQ ID NO: 3617 - protein, 9 aa, Artificial Sequence
  Peptide Derived from Human Papillomavirus
VQWAFDNEL

SEQ ID NO: 3618 - protein, 10 aa, Artificial Sequence
  Peptide Derived from Human Papillomavirus
VQWAFDNELT

SEQ ID NO: 3619 - protein, 10 aa, Artificial Sequence
  Peptide Derived from Human Papillomavirus
VTAIFGVNPT

SEQ ID NO: 3620 - protein, 11 aa, Artificial Sequence
  Peptide Derived from Human Papillomavirus
VTAIFGVNPTI

SEQ ID NO: 3621 - protein, 11 aa, Artificial Sequence
  Peptide Derived from Human Papillomavirus
VTTNGEHGGNV

SEQ ID NO: 3622 - protein, 8 aa, Artificial Sequence
  Peptide Derived from Human Papillomavirus
WAFDNELT

SEQ ID NO: 3623 - protein, 8 aa, Artificial Sequence
  Peptide Derived from Human Papillomavirus
WIQRLTII

SEQ ID NO: 3624 - protein, 9 aa, Artificial Sequence
  Peptide Derived from Human Papillomavirus
WIRFRCSKI

SEQ ID NO: 3625 - protein, 8 aa, Artificial Sequence
  Peptide Derived from Human Papillomavirus
WLEPLTDT

SEQ ID NO: 3626 - protein, 10 aa, Artificial Sequence
  Peptide Derived from Human Papillomavirus
WLEPLTDTKV

SEQ ID NO: 3627 - protein, 11 aa, Artificial Sequence
  Peptide Derived from Human Papillomavirus
WLEPLTDTKVA

SEQ ID NO: 3628 - protein, 8 aa, Artificial Sequence
  Peptide Derived from Human Papillomavirus
WTYFDTYM

SEQ ID NO: 3629 - protein, 11 aa, Artificial Sequence
  Peptide Derived from Human Papillomavirus
WTYFDTYMRNA

SEQ ID NO: 3630 - protein, 8 aa, Artificial Sequence
  Peptide Derived from Human Papillomavirus
WVTAIFGV

SEQ ID NO: 3631 - protein, 11 aa, Artificial Sequence
  Peptide Derived from Human Papillomavirus
WVTAIFGVNPT

SEQ ID NO: 3632 - protein, 11 aa, Artificial Sequence
  Peptide Derived from Human Papillomavirus
YALLADSNSNA

SEQ ID NO: 3633 - protein, 8 aa, Artificial Sequence
  Peptide Derived from Human Papillomavirus
YLESRITV

SEQ ID NO: 3634 - protein, 8 aa, Artificial Sequence
  Peptide Derived from Human Papillomavirus
YLKDCATM

SEQ ID NO: 3635 - protein, 11 aa, Artificial Sequence
  Peptide Derived from Human Papillomavirus
YMRNALDGNPI

SEQ ID NO: 3636 - protein, 8 aa, Artificial Sequence
  Peptide Derived from Human Papillomavirus
YQQIEFIT

SEQ ID NO: 3637 - protein, 10 aa, Artificial Sequence
  Peptide Derived from Human Papillomavirus
YQQIEFITFL

SEQ ID NO: 3638 - protein, 10 aa, Artificial Sequence
  Peptide Derived from Human Papillomavirus
YVQAIVDKKT

SEQ ID NO: 3639 - protein, 9 aa, Artificial Sequence
  Peptide Derived from Human Papillomavirus
AAREHGIQT

SEQ ID NO: 3640 - protein, 10 aa, Artificial Sequence
  Peptide Derived from Human Papillomavirus
AAREHGIQTL

SEQ ID NO: 3641 - protein, 10 aa, Artificial Sequence
  Peptide Derived from Human Papillomavirus
AATRPGHCGL

SEQ ID NO: 3642 - protein, 11 aa, Artificial Sequence
  Peptide Derived from Human Papillomavirus
AATRPGHCGLA

SEQ ID NO: 3643 - protein, 8 aa, Artificial Sequence
  Peptide Derived from Human Papillomavirus
AIELQMAL

SEQ ID NO: 3644 - protein, 11 aa, Artificial Sequence
  Peptide Derived from Human Papillomavirus
AIELQMALQGL

SEQ ID NO: 3645 - protein, 11 aa, Artificial Sequence
  Peptide Derived from Human Papillomavirus
AIFFAAREHGI

SEQ ID NO: 3646 - protein, 8 aa, Artificial Sequence
  Peptide Derived from Human Papillomavirus
AIPDSVQI

SEQ ID NO: 3647 - protein, 9 aa, Artificial Sequence
  Peptide Derived from Human Papillomavirus
AIPDSVQIL

SEQ ID NO: 3648 - protein, 10 aa, Artificial Sequence
  Peptide Derived from Human Papillomavirus
AIPDSVQILV

SEQ ID NO: 3649 - protein, 11 aa, Artificial Sequence
  Peptide Derived from Human Papillomavirus
AQSRYKTEDWT

SEQ ID NO: 3650 - protein, 9 aa, Artificial Sequence
  Peptide Derived from Human Papillomavirus
ATCVSHRGL

SEQ ID NO: 3651 - protein, 8 aa, Artificial Sequence
  Peptide Derived from Human Papillomavirus
ATQLVKQL

SEQ ID NO: 3652 - protein, 11 aa, Artificial Sequence
  Peptide Derived from Human Papillomavirus
ATQLVKQLQHT

SEQ ID NO: 3653 - protein, 9 aa, Artificial Sequence
  Peptide Derived from Human Papillomavirus
ATRPGHCGL

SEQ ID NO: 3654 - protein, 10 aa, Artificial Sequence
  Peptide Derived from Human Papillomavirus
ATRPGHCGLA

SEQ ID NO: 3655 - protein, 10 aa, Artificial Sequence
  Peptide Derived from Human Papillomavirus
CMTYVAWDSV

SEQ ID NO: 3656 - protein, 10 aa, Artificial Sequence
  Peptide Derived from Human Papillomavirus
CVSHRGLYYV

SEQ ID NO: 3657 - protein, 8 aa, Artificial Sequence
  Peptide Derived from Human Papillomavirus
DAGTWDKT

SEQ ID NO: 3658 - protein, 9 aa, Artificial Sequence
  Peptide Derived from Human Papillomavirus
DAGTWDKTA

SEQ ID NO: 3659 - protein, 10 aa, Artificial Sequence
  Peptide Derived from Human Papillomavirus
DAGTWDKTAT

SEQ ID NO: 3660 - protein, 11 aa, Artificial Sequence
  Peptide Derived from Human Papillomavirus
DIDSQIQYWQL

SEQ ID NO: 3661 - protein, 9 aa, Artificial Sequence
  Peptide Derived from Human Papillomavirus
DISSTWHWT

SEQ ID NO: 3662 - protein, 11 aa, Artificial Sequence
  Peptide Derived from Human Papillomavirus
DISSTWHWTGA

SEQ ID NO: 3663 - protein, 9 aa, Artificial Sequence
  Peptide Derived from Human Papillomavirus
DTCEELWNT

SEQ ID NO: 3664 - protein, 8 aa, Artificial Sequence
  Peptide Derived from Human Papillomavirus
DTVSATQL

SEQ ID NO: 3665 - protein, 9 aa, Artificial Sequence
  Peptide Derived from Human Papillomavirus
DTVSATQLV

SEQ ID NO: 3666 - protein, 9 aa, Artificial Sequence
  Peptide Derived from Human Papillomavirus
ELQMALQGL

SEQ ID NO: 3667 - protein, 10 aa, Artificial Sequence
  Peptide Derived from Human Papillomavirus
ELQMALQGLA

SEQ ID NO: 3668 - protein, 8 aa, Artificial Sequence
  Peptide Derived from Human Papillomavirus
ELWNTEPT

SEQ ID NO: 3669 - protein, 10 aa, Artificial Sequence
  Peptide Derived from Human Papillomavirus
ETLSERLSCV

SEQ ID NO: 3670 - protein, 8 aa, Artificial Sequence
  Peptide Derived from Human Papillomavirus
ETQRTKFL

SEQ ID NO: 3671 - protein, 10 aa, Artificial Sequence
  Peptide Derived from Human Papillomavirus
ETQRTKFLNT

SEQ ID NO: 3672 - protein, 11 aa, Artificial Sequence
  Peptide Derived from Human Papillomavirus
ETQRTKFLNTV

SEQ ID NO: 3673 - protein, 8 aa, Artificial Sequence
  Peptide Derived from Human Papillomavirus
EVHFGNNV

SEQ ID NO: 3674 - protein, 9 aa, Artificial Sequence
  Peptide Derived from Human Papillomavirus
EVHFGNNVI

SEQ ID NO: 3675 - protein, 8 aa, Artificial Sequence
  Peptide Derived from Human Papillomavirus
FAAREHGI

SEQ ID NO: 3676 - protein, 10 aa, Artificial Sequence
  Peptide Derived from Human Papillomavirus
FAAREHGIQT

SEQ ID NO: 3677 - protein, 11 aa, Artificial Sequence
  Peptide Derived from Human Papillomavirus
FAAREHGIQTL

SEQ ID NO: 3678 - protein, 11 aa, Artificial Sequence
  Peptide Derived from Human Papillomavirus
FLNTVAIPDSV

SEQ ID NO: 3679 - protein, 9 aa, Artificial Sequence
  Peptide Derived from Human Papillomavirus
GAGNEKTGI

SEQ ID NO: 3680 - protein, 10 aa, Artificial Sequence
  Peptide Derived from Human Papillomavirus
GAGNEKTGIL

SEQ ID NO: 3681 - protein, 11 aa, Artificial Sequence
  Peptide Derived from Human Papillomavirus
GAGNEKTGILT

SEQ ID NO: 3682 - protein, 11 aa, Artificial Sequence
  Peptide Derived from Human Papillomavirus
GILTVTYHSET

SEQ ID NO: 3683 - protein, 9 aa, Artificial Sequence
  Peptide Derived from Human Papillomavirus
GIQTLNHQV

SEQ ID NO: 3684 - protein, 10 aa, Artificial Sequence
  Peptide Derived from Human Papillomavirus
GIQTLNHQVV

SEQ ID NO: 3685 - protein, 11 aa, Artificial Sequence
  Peptide Derived from Human Papillomavirus
GLAEKQHCGPV

SEQ ID NO: 3686 - protein, 9 aa, Artificial Sequence
  Peptide Derived from Human Papillomavirus
GLAQSRYKT

SEQ ID NO: 3687 - protein, 11 aa, Artificial Sequence
  Peptide Derived from Human Papillomavirus
GLYYVKEGYNT

SEQ ID NO: 3688 - protein, 9 aa, Artificial Sequence
  Peptide Derived from Human Papillomavirus
GTAKTYGQT

SEQ ID NO: 3689 - protein, 11 aa, Artificial Sequence
  Peptide Derived from Human Papillomavirus
GTAKTYGQTSA

SEQ ID NO: 3690 - protein, 8 aa, Artificial Sequence
  Peptide Derived from Human Papillomavirus
GTWDKTAT

SEQ ID NO: 3691 - protein, 10 aa, Artificial Sequence
  Peptide Derived from Human Papillomavirus
GTWDKTATCV

SEQ ID NO: 3692 - protein, 11 aa, Artificial Sequence
  Peptide Derived from Human Papillomavirus
GTWEVHFGNNV

SEQ ID NO: 3693 - protein, 9 aa, Artificial Sequence
  Peptide Derived from Human Papillomavirus
HLKGDRNSL

SEQ ID NO: 3694 - protein, 9 aa, Artificial Sequence
  Peptide Derived from Human Papillomavirus
HQVVPAYNI

SEQ ID NO: 3695 - protein, 9 aa, Artificial Sequence
  Peptide Derived from Human Papillomavirus
HTPSPYSST

SEQ ID NO: 3696 - protein, 10 aa, Artificial Sequence
  Peptide Derived from Human Papillomavirus
HTPSPYSSTV

SEQ ID NO: 3697 - protein, 11 aa, Artificial Sequence
  Peptide Derived from Human Papillomavirus
IIHLKGDRNSL

SEQ ID NO: 3698 - protein, 10 aa, Artificial Sequence
  Peptide Derived from Human Papillomavirus
ILTVTYHSET

SEQ ID NO: 3699 - protein, 8 aa, Artificial Sequence
  Peptide Derived from Human Papillomavirus
ILVGYMTM

SEQ ID NO: 3700 - protein, 8 aa, Artificial Sequence
  Peptide Derived from Human Papillomavirus
IQTLNHQV

SEQ ID NO: 3701 - protein, 9 aa, Artificial Sequence
  Peptide Derived from Human Papillomavirus
IQTLNHQVV

SEQ ID NO: 3702 - protein, 11 aa, Artificial Sequence
  Peptide Derived from Human Papillomavirus
IQTLNHQVVPA

SEQ ID NO: 3703 - protein, 8 aa, Artificial Sequence
  Peptide Derived from Human Papillomavirus
KAHKAIEL

SEQ ID NO: 3704 - protein, 10 aa, Artificial Sequence
  Peptide Derived from Human Papillomavirus
KAHKAIELQM

SEQ ID NO: 3705 - protein, 11 aa, Artificial Sequence
  Peptide Derived from Human Papillomavirus
KAHKAIELQMA

SEQ ID NO: 3706 - protein, 8 aa, Artificial Sequence
  Peptide Derived from Human Papillomavirus
KAIELQMA

SEQ ID NO: 3707 - protein, 9 aa, Artificial Sequence
  Peptide Derived from Human Papillomavirus
KAIELQMAL

SEQ ID NO: 3708 - protein, 8 aa, Artificial Sequence
  Peptide Derived from Human Papillomavirus
KLCSGNTT

SEQ ID NO: 3709 - protein, 10 aa, Artificial Sequence
  Peptide Derived from Human Papillomavirus
KLCSGNTTPI

SEQ ID NO: 3710 - protein, 11 aa, Artificial Sequence
  Peptide Derived from Human Papillomavirus
KLCSGNTTPII

SEQ ID NO: 3711 - protein, 10 aa, Artificial Sequence
  Peptide Derived from Human Papillomavirus
KQHCGPVNPL

SEQ ID NO: 3712 - protein, 11 aa, Artificial Sequence
  Peptide Derived from Human Papillomavirus
KQHCGPVNPLL

SEQ ID NO: 3713 - protein, 11 aa, Artificial Sequence
  Peptide Derived from Human Papillomavirus
KTATCVSHRGL

SEQ ID NO: 3714 - protein, 10 aa, Artificial Sequence
  Peptide Derived from Human Papillomavirus
KTEDWTLQDT

SEQ ID NO: 3715 - protein, 8 aa, Artificial Sequence
  Peptide Derived from Human Papillomavirus
KTGILTVT

SEQ ID NO: 3716 - protein, 8 aa, Artificial Sequence
  Peptide Derived from Human Papillomavirus
KTYGQTSA

SEQ ID NO: 3717 - protein, 9 aa, Artificial Sequence
  Peptide Derived from Human Papillomavirus
KTYGQTSAA

SEQ ID NO: 3718 - protein, 10 aa, Artificial Sequence
  Peptide Derived from Human Papillomavirus
KTYGQTSAAT

SEQ ID NO: 3719 - protein, 10 aa, Artificial Sequence
  Peptide Derived from Human Papillomavirus
LAEKQHCGPV

SEQ ID NO: 3720 - protein, 8 aa, Artificial Sequence
  Peptide Derived from Human Papillomavirus
LAQSRYKT

SEQ ID NO: 3721 - protein, 8 aa, Artificial Sequence
  Peptide Derived from Human Papillomavirus
LIRWENAI

SEQ ID NO: 3722 - protein, 11 aa, Artificial Sequence
  Peptide Derived from Human Papillomavirus
LIRWENAIFFA

SEQ ID NO: 3723 - protein, 8 aa, Artificial Sequence
  Peptide Derived from Human Papillomavirus
LLGAATPT

SEQ ID NO: 3724 - protein, 8 aa, Artificial Sequence
  Peptide Derived from Human Papillomavirus
LQDTCEEL

SEQ ID NO: 3725 - protein, 11 aa, Artificial Sequence
  Peptide Derived from Human Papillomavirus
LQDTCEELWNT

SEQ ID NO: 3726 - protein, 11 aa, Artificial Sequence
  Peptide Derived from Human Papillomavirus
LQGLAQSRYKT

SEQ ID NO: 3727 - protein, 11 aa, Artificial Sequence
  Peptide Derived from Human Papillomavirus
LQHTPSPYSST

SEQ ID NO: 3728 - protein, 8 aa, Artificial Sequence
  Peptide Derived from Human Papillomavirus
LQMALQGL

SEQ ID NO: 3729 - protein, 9 aa, Artificial Sequence
  Peptide Derived from Human Papillomavirus
LQMALQGLA

SEQ ID NO: 3730 - protein, 9 aa, Artificial Sequence
  Peptide Derived from Human Papillomavirus
LTVTYHSET

SEQ ID NO: 3731 - protein, 8 aa, Artificial Sequence
  Peptide Derived from Human Papillomavirus
LVKQLQHT

SEQ ID NO: 3732 - protein, 8 aa, Artificial Sequence
  Peptide Derived from Human Papillomavirus
MQTPKETL

SEQ ID NO: 3733 - protein, 10 aa, Artificial Sequence
  Peptide Derived from Human Papillomavirus
MTDAGTWDKT

SEQ ID NO: 3734 - protein, 11 aa, Artificial Sequence
  Peptide Derived from Human Papillomavirus
MTDAGTWDKTA

SEQ ID NO: 3735 - protein, 9 aa, Artificial Sequence
  Peptide Derived from Human Papillomavirus
MTYVAWDSV

SEQ ID NO: 3736 - protein, 10 aa, Artificial Sequence
  Peptide Derived from Human Papillomavirus
NISKSKAHKA

SEQ ID NO: 3737 - protein, 11 aa, Artificial Sequence
  Peptide Derived from Human Papillomavirus
NISKSKAHKAI

SEQ ID NO: 3738 - protein, 8 aa, Artificial Sequence
  Peptide Derived from Human Papillomavirus
NTTPIIHL

SEQ ID NO: 3739 - protein, 9 aa, Artificial Sequence
  Peptide Derived from Human Papillomavirus
NTVAIPDSV

SEQ ID NO: 3740 - protein, 11 aa, Artificial Sequence
  Peptide Derived from Human Papillomavirus
NTVAIPDSVQI

SEQ ID NO: 3741 - protein, 9 aa, Artificial Sequence
  Peptide Derived from Human Papillomavirus
NVIDCNDSM

SEQ ID NO: 3742 - protein, 10 aa, Artificial Sequence
  Peptide Derived from Human Papillomavirus
PAYNISKSKA

SEQ ID NO: 3743 - protein, 9 aa, Artificial Sequence
  Peptide Derived from Human Papillomavirus
PLLGAATPT

SEQ ID NO: 3744 - protein, 10 aa, Artificial Sequence
  Peptide Derived from Human Papillomavirus
PTGNNKRRKL

SEQ ID NO: 3745 - protein, 11 aa, Artificial Sequence
  Peptide Derived from Human Papillomavirus
PTHCFKKGGQT

SEQ ID NO: 3746 - protein, 8 aa, Artificial Sequence
  Peptide Derived from Human Papillomavirus
PVNPLLGA

SEQ ID NO: 3747 - protein, 9 aa, Artificial Sequence
  Peptide Derived from Human Papillomavirus
PVNPLLGAA

SEQ ID NO: 3748 - protein, 10 aa, Artificial Sequence
  Peptide Derived from Human Papillomavirus
PVNPLLGAAT

SEQ ID NO: 3749 - protein, 8 aa, Artificial Sequence
  Peptide Derived from Human Papillomavirus
QILVGYMT

SEQ ID NO: 3750 - protein, 9 aa, Artificial Sequence
  Peptide Derived from Human Papillomavirus
QILVGYMTM

SEQ ID NO: 3751 - protein, 8 aa, Artificial Sequence
  Peptide Derived from Human Papillomavirus
QIQYWQLI

SEQ ID NO: 3752 - protein, 8 aa, Artificial Sequence
  Peptide Derived from Human Papillomavirus
QLIRWENA

SEQ ID NO: 3753 - protein, 9 aa, Artificial Sequence
  Peptide Derived from Human Papillomavirus
QLIRWENAI

SEQ ID NO: 3754 - protein, 9 aa, Artificial Sequence
  Peptide Derived from Human Papillomavirus
QLVKQLQHT

SEQ ID NO: 3755 - protein, 8 aa, Artificial Sequence
  Peptide Derived from Human Papillomavirus
QMALQGLA

SEQ ID NO: 3756 - protein, 8 aa, Artificial Sequence
  Peptide Derived from Human Papillomavirus
QTLNHQVV

SEQ ID NO: 3757 - protein, 10 aa, Artificial Sequence
  Peptide Derived from Human Papillomavirus
QTLNHQVVPA

SEQ ID NO: 3758 - protein, 11 aa, Artificial Sequence
  Peptide Derived from Human Papillomavirus
QTPKETLSERL

SEQ ID NO: 3759 - protein, 8 aa, Artificial Sequence
  Peptide Derived from Human Papillomavirus
QVVPAYNI

SEQ ID NO: 3760 - protein, 9 aa, Artificial Sequence
  Peptide Derived from Human Papillomavirus
RLSCVQDKI

SEQ ID NO: 3761 - protein, 10 aa, Artificial Sequence
  Peptide Derived from Human Papillomavirus
RLSCVQDKII

SEQ ID NO: 3762 - protein, 8 aa, Artificial Sequence
  Peptide Derived from Human Papillomavirus
RTKFLNTV

SEQ ID NO: 3763 - protein, 9 aa, Artificial Sequence
  Peptide Derived from Human Papillomavirus
RTKFLNTVA

SEQ ID NO: 3764 - protein, 10 aa, Artificial Sequence
  Peptide Derived from Human Papillomavirus
RTKFLNTVAI

SEQ ID NO: 3765 - protein, 11 aa, Artificial Sequence
  Peptide Derived from Human Papillomavirus
SAATRPGHCGL

SEQ ID NO: 3766 - protein, 9 aa, Artificial Sequence
  Peptide Derived from Human Papillomavirus
SATQLVKQL

SEQ ID NO: 3767 - protein, 9 aa, Artificial Sequence
  Peptide Derived from Human Papillomavirus
SLKCLRYRL

SEQ ID NO: 3768 - protein, 9 aa, Artificial Sequence
  Peptide Derived from Human Papillomavirus
SMCSTSDDT

SEQ ID NO: 3769 - protein, 10 aa, Artificial Sequence
  Peptide Derived from Human Papillomavirus
SMCSTSDDTV

SEQ ID NO: 3770 - protein, 8 aa, Artificial Sequence
  Peptide Derived from Human Papillomavirus
SQIQYWQL

SEQ ID NO: 3771 - protein, 9 aa, Artificial Sequence
  Peptide Derived from Human Papillomavirus
SQIQYWQLI

SEQ ID NO: 3772 - protein, 9 aa, Artificial Sequence
  Peptide Derived from Human Papillomavirus
STSDDTVSA

SEQ ID NO: 3773 - protein, 10 aa, Artificial Sequence
  Peptide Derived from Human Papillomavirus
STSDDTVSAT

SEQ ID NO: 3774 - protein, 8 aa, Artificial Sequence
  Peptide Derived from Human Papillomavirus
STVSVGTA

SEQ ID NO: 3775 - protein, 10 aa, Artificial Sequence
  Peptide Derived from Human Papillomavirus
STVSVGTAKT

SEQ ID NO: 3776 - protein, 8 aa, Artificial Sequence
  Peptide Derived from Human Papillomavirus
STWHWTGA

SEQ ID NO: 3777 - protein, 11 aa, Artificial Sequence
  Peptide Derived from Human Papillomavirus
SVGTAKTYGQT

SEQ ID NO: 3778 - protein, 9 aa, Artificial Sequence
  Peptide Derived from Human Papillomavirus
SVQILVGYM

SEQ ID NO: 3779 - protein, 10 aa, Artificial Sequence
  Peptide Derived from Human Papillomavirus
SVQILVGYMT

SEQ ID NO: 3780 - protein, 11 aa, Artificial Sequence
  Peptide Derived from Human Papillomavirus
SVQILVGYMTM

SEQ ID NO: 3781 - protein, 8 aa, Artificial Sequence
  Peptide Derived from Human Papillomavirus
SVYYMTDA

SEQ ID NO: 3782 - protein, 10 aa, Artificial Sequence
  Peptide Derived from Human Papillomavirus
SVYYMTDAGT

SEQ ID NO: 3783 - protein, 8 aa, Artificial Sequence
  Peptide Derived from Human Papillomavirus
TAKTYGQT

SEQ ID NO: 3784 - protein, 10 aa, Artificial Sequence
  Peptide Derived from Human Papillomavirus
TAKTYGQTSA

SEQ ID NO: 3785 - protein, 11 aa, Artificial Sequence
  Peptide Derived from Human Papillomavirus
TAKTYGQTSAA

SEQ ID NO: 3786 - protein, 10 aa, Artificial Sequence
  Peptide Derived from Human Papillomavirus
TATCVSHRGL

SEQ ID NO: 3787 - protein, 9 aa, Artificial Sequence
  Peptide Derived from Human Papillomavirus
TLNHQVVPA

SEQ ID NO: 3788 - protein, 9 aa, Artificial Sequence
  Peptide Derived from Human Papillomavirus
TLQDTCEEL

SEQ ID NO: 3789 - protein, 9 aa, Artificial Sequence
  Peptide Derived from Human Papillomavirus
TLSERLSCV

SEQ ID NO: 3790 - protein, 10 aa, Artificial Sequence
  Peptide Derived from Human Papillomavirus
TQLVKQLQHT

SEQ ID NO: 3791 - protein, 9 aa, Artificial Sequence
  Peptide Derived from Human Papillomavirus
TQRTKFLNT

SEQ ID NO: 3792 - protein, 10 aa, Artificial Sequence
  Peptide Derived from Human Papillomavirus
TQRTKFLNTV

SEQ ID NO: 3793 - protein, 11 aa, Artificial Sequence
  Peptide Derived from Human Papillomavirus
TQRTKFLNTVA

SEQ ID NO: 3794 - protein, 8 aa, Artificial Sequence
  Peptide Derived from Human Papillomavirus
TVAIPDSV

SEQ ID NO: 3795 - protein, 10 aa, Artificial Sequence
  Peptide Derived from Human Papillomavirus
TVAIPDSVQI

SEQ ID NO: 3796 - protein, 11 aa, Artificial Sequence
  Peptide Derived from Human Papillomavirus
TVAIPDSVQIL

SEQ ID NO: 3797 - protein, 8 aa, Artificial Sequence
  Peptide Derived from Human Papillomavirus
TVSATQLV

SEQ ID NO: 3798 - protein, 11 aa, Artificial Sequence
  Peptide Derived from Human Papillomavirus
TVSATQLVKQL

SEQ ID NO: 3799 - protein, 9 aa, Artificial Sequence
  Peptide Derived from Human Papillomavirus
TVSVGTAKT

SEQ ID NO: 3800 - protein, 8 aa, Artificial Sequence
  Peptide Derived from Human Papillomavirus
TVTYHSET

SEQ ID NO: 3801 - protein, 11 aa, Artificial Sequence
  Peptide Derived from Human Papillomavirus
TVTYHSETQRT

SEQ ID NO: 3802 - protein, 9 aa, Artificial Sequence
  Peptide Derived from Human Papillomavirus
VAIPDSVQI

SEQ ID NO: 3803 - protein, 10 aa, Artificial Sequence
  Peptide Derived from Human Papillomavirus
VAIPDSVQIL

SEQ ID NO: 3804 - protein, 11 aa, Artificial Sequence
  Peptide Derived from Human Papillomavirus
VAIPDSVQILV

SEQ ID NO: 3805 - protein, 9 aa, Artificial Sequence
  Peptide Derived from Human Papillomavirus
VAWDSVYYM

SEQ ID NO: 3806 - protein, 10 aa, Artificial Sequence
  Peptide Derived from Human Papillomavirus
VAWDSVYYMT

SEQ ID NO: 3807 - protein, 8 aa, Artificial Sequence
  Peptide Derived from Human Papillomavirus
VIDCNDSM

SEQ ID NO: 3808 - protein, 11 aa, Artificial Sequence
  Peptide Derived from Human Papillomavirus
VIDCNDSMCST

SEQ ID NO: 3809 - protein, 8 aa, Artificial Sequence
  Peptide Derived from Human Papillomavirus
VQILVGYM

SEQ ID NO: 3810 - protein, 9 aa, Artificial Sequence
  Peptide Derived from Human Papillomavirus
VQILVGYMT

SEQ ID NO: 3811 - protein, 10 aa, Artificial Sequence
  Peptide Derived from Human Papillomavirus
VQILVGYMTM

SEQ ID NO: 3812 - protein, 10 aa, Artificial Sequence
  Peptide Derived from Human Papillomavirus
VTYHSETQRT

SEQ ID NO: 3813 - protein, 9 aa, Artificial Sequence
  Peptide Derived from Human Papillomavirus
WQLIRWENA

SEQ ID NO: 3814 - protein, 10 aa, Artificial Sequence
  Peptide Derived from Human Papillomavirus
WQLIRWENAI

SEQ ID NO: 3815 - protein, 9 aa, Artificial Sequence
  Peptide Derived from Human Papillomavirus
WTGAGNEKT

SEQ ID NO: 3816 - protein, 11 aa, Artificial Sequence
  Peptide Derived from Human Papillomavirus
WTGAGNEKTGI

SEQ ID NO: 3817 - protein, 10 aa, Artificial Sequence
  Peptide Derived from Human Papillomavirus
WTLQDTCEEL

SEQ ID NO: 3818 - protein, 11 aa, Artificial Sequence
  Peptide Derived from Human Papillomavirus
YMTDAGTWDKT

SEQ ID NO: 3819 - protein, 10 aa, Artificial Sequence
  Peptide Derived from Human Papillomavirus
YVAWDSVYYM

SEQ ID NO: 3820 - protein, 11 aa, Artificial Sequence
  Peptide Derived from Human Papillomavirus
YVAWDSVYYMT

SEQ ID NO: 3821 - protein, 8 aa, Artificial Sequence
  Peptide Derived from Human Papillomavirus
YVKEGYNT

SEQ ID NO: 3822 - protein, 11 aa, Artificial Sequence
  Peptide Derived from Human Papillomavirus
YVKEGYNTFYI

SEQ ID NO: 3823 - protein, 8 aa, Artificial Sequence
  Peptide Derived from Human Papillomavirus
ATAFTVYV

SEQ ID NO: 3824 - protein, 8 aa, Artificial Sequence
  Peptide Derived from Human Papillomavirus
CAYAWVLV

SEQ ID NO: 3825 - protein, 10 aa, Artificial Sequence
  Peptide Derived from Human Papillomavirus
CAYAWVLVFV

SEQ ID NO: 3826 - protein, 8 aa, Artificial Sequence
  Peptide Derived from Human Papillomavirus
CMCAYAWV

SEQ ID NO: 3827 - protein, 9 aa, Artificial Sequence
  Peptide Derived from Human Papillomavirus
CMCAYAWVL

SEQ ID NO: 3828 - protein, 10 aa, Artificial Sequence
  Peptide Derived from Human Papillomavirus
CMCAYAWVLV

SEQ ID NO: 3829 - protein, 8 aa, Artificial Sequence
  Peptide Derived from Human Papillomavirus
CMYVCCHV

SEQ ID NO: 3830 - protein, 10 aa, Artificial Sequence
  Peptide Derived from Human Papillomavirus
CMYVCCHVPL

SEQ ID NO: 3831 - protein, 11 aa, Artificial Sequence
  Peptide Derived from Human Papillomavirus
CMYVCCHVPLL

SEQ ID NO: 3832 - protein, 10 aa, Artificial Sequence
  Peptide Derived from Human Papillomavirus
CVCMYVCCHV

SEQ ID NO: 3833 - protein, 9 aa, Artificial Sequence
  Peptide Derived from Human Papillomavirus
FLFCFCVCM

SEQ ID NO: 3834 - protein, 11 aa, Artificial Sequence
  Peptide Derived from Human Papillomavirus
FLFCFCVCMYV

SEQ ID NO: 3835 - protein, 8 aa, Artificial Sequence
  Peptide Derived from Human Papillomavirus
FLLPMLLL

SEQ ID NO: 3836 - protein, 10 aa, Artificial Sequence
  Peptide Derived from Human Papillomavirus
FLLPMLLLHI

SEQ ID NO: 3837 - protein, 9 aa, Artificial Sequence
  Peptide Derived from Human Papillomavirus
FTVYVFCFL

SEQ ID NO: 3838 - protein, 10 aa, Artificial Sequence
  Peptide Derived from Human Papillomavirus
FTVYVFCFLL

SEQ ID NO: 3839 - protein, 8 aa, Artificial Sequence
  Peptide Derived from Human Papillomavirus
FVYIVVIT

SEQ ID NO: 3840 - protein, 11 aa, Artificial Sequence
  Peptide Derived from Human Papillomavirus
FVYIVVITSPA

SEQ ID NO: 3841 - protein, 8 aa, Artificial Sequence
  Peptide Derived from Human Papillomavirus
HIHAILSL

SEQ ID NO: 3842 - protein, 8 aa, Artificial Sequence
  Peptide Derived from Human Papillomavirus
HVPLLPSV

SEQ ID NO: 3843 - protein, 10 aa, Artificial Sequence
  Peptide Derived from Human Papillomavirus
HVPLLPSVCM

SEQ ID NO: 3844 - protein, 9 aa, Artificial Sequence
  Peptide Derived from Human Papillomavirus
ITSPATAFT

SEQ ID NO: 3845 - protein, 10 aa, Artificial Sequence
  Peptide Derived from Human Papillomavirus
ITSPATAFTV

SEQ ID NO: 3846 - protein, 8 aa, Artificial Sequence
  Peptide Derived from Human Papillomavirus
IVVITSPA

SEQ ID NO: 3847 - protein, 9 aa, Artificial Sequence
  Peptide Derived from Human Papillomavirus
IVVITSPAT

SEQ ID NO: 3848 - protein, 10 aa, Artificial Sequence
  Peptide Derived from Human Papillomavirus
IVVITSPATA

SEQ ID NO: 3849 - protein, 9 aa, Artificial Sequence
  Peptide Derived from Human Papillomavirus
LIFLFCFCV

SEQ ID NO: 3850 - protein, 11 aa, Artificial Sequence
  Peptide Derived from Human Papillomavirus
LIFLFCFCVCM

SEQ ID NO: 3851 - protein, 8 aa, Artificial Sequence
  Peptide Derived from Human Papillomavirus
LLHIHAIL

SEQ ID NO: 3852 - protein, 10 aa, Artificial Sequence
  Peptide Derived from Human Papillomavirus
LLHIHAILSL

SEQ ID NO: 3853 - protein, 8 aa, Artificial Sequence
  Peptide Derived from Human Papillomavirus
LLLHIHAI

SEQ ID NO: 3854 - protein, 9 aa, Artificial Sequence
  Peptide Derived from Human Papillomavirus
LLLHIHAIL

SEQ ID NO: 3855 - protein, 11 aa, Artificial Sequence
  Peptide Derived from Human Papillomavirus
LLLHIHAILSL

SEQ ID NO: 3856 - protein, 9 aa, Artificial Sequence
  Peptide Derived from Human Papillomavirus
LLPMLLLHI

SEQ ID NO: 3857 - protein, 11 aa, Artificial Sequence
  Peptide Derived from Human Papillomavirus
LLPMLLLHIHA

SEQ ID NO: 3858 - protein, 9 aa, Artificial Sequence
  Peptide Derived from Human Papillomavirus
LLPSVCMCA

SEQ ID NO: 3859 - protein, 11 aa, Artificial Sequence
  Peptide Derived from Human Papillomavirus
LLPSVCMCAYA

SEQ ID NO: 3860 - protein, 8 aa, Artificial Sequence
  Peptide Derived from Human Papillomavirus
LVFVYIVV

SEQ ID NO: 3861 - protein, 9 aa, Artificial Sequence
  Peptide Derived from Human Papillomavirus
LVFVYIVVI

SEQ ID NO: 3862 - protein, 10 aa, Artificial Sequence
  Peptide Derived from Human Papillomavirus
LVFVYIVVIT

SEQ ID NO: 3863 - protein, 8 aa, Artificial Sequence
  Peptide Derived from Human Papillomavirus
MLLLHIHA

SEQ ID NO: 3864 - protein, 9 aa, Artificial Sequence
  Peptide Derived from Human Papillomavirus
MLLLHIHAI

SEQ ID NO: 3865 - protein, 10 aa, Artificial Sequence
  Peptide Derived from Human Papillomavirus
MLLLHIHAIL

SEQ ID NO: 3866 - protein, 9 aa, Artificial Sequence
  Peptide Derived from Human Papillomavirus
PATAFTVYV

SEQ ID NO: 3867 - protein, 8 aa, Artificial Sequence
  Peptide Derived from Human Papillomavirus
PLLPSVCM

SEQ ID NO: 3868 - protein, 10 aa, Artificial Sequence
  Peptide Derived from Human Papillomavirus
PLLPSVCMCA

SEQ ID NO: 3869 - protein, 9 aa, Artificial Sequence
  Peptide Derived from Human Papillomavirus
PMLLLHIHA

SEQ ID NO: 3870 - protein, 10 aa, Artificial Sequence
  Peptide Derived from Human Papillomavirus
PMLLLHIHAI

SEQ ID NO: 3871 - protein, 11 aa, Artificial Sequence
  Peptide Derived from Human Papillomavirus
PMLLLHIHAIL

SEQ ID NO: 3872 - protein, 10 aa, Artificial Sequence
  Peptide Derived from Human Papillomavirus
SLIFLFCFCV

SEQ ID NO: 3873 - protein, 8 aa, Artificial Sequence
  Peptide Derived from Human Papillomavirus
SVCMCAYA

SEQ ID NO: 3874 - protein, 10 aa, Artificial Sequence
  Peptide Derived from Human Papillomavirus
SVCMCAYAWV

SEQ ID NO: 3875 - protein, 11 aa, Artificial Sequence
  Peptide Derived from Human Papillomavirus
SVCMCAYAWVL

SEQ ID NO: 3876 - protein, 11 aa, Artificial Sequence
  Peptide Derived from Human Papillomavirus
TAFTVYVFCFL

SEQ ID NO: 3877 - protein, 8 aa, Artificial Sequence
  Peptide Derived from Human Papillomavirus
TVYVFCFL

SEQ ID NO: 3878 - protein, 9 aa, Artificial Sequence
  Peptide Derived from Human Papillomavirus
TVYVFCFLL

SEQ ID NO: 3879 - protein, 11 aa, Artificial Sequence
  Peptide Derived from Human Papillomavirus
TVYVFCFLLPM

SEQ ID NO: 3880 - protein, 8 aa, Artificial Sequence
  Peptide Derived from Human Papillomavirus
VITSPATA

SEQ ID NO: 3881 - protein, 10 aa, Artificial Sequence
  Peptide Derived from Human Papillomavirus
VITSPATAFT

SEQ ID NO: 3882 - protein, 11 aa, Artificial Sequence
  Peptide Derived from Human Papillomavirus
VITSPATAFTV

SEQ ID NO: 3883 - protein, 8 aa, Artificial Sequence
  Peptide Derived from Human Papillomavirus
VLVFVYIV

SEQ ID NO: 3884 - protein, 9 aa, Artificial Sequence
  Peptide Derived from Human Papillomavirus
VLVFVYIVV

SEQ ID NO: 3885 - protein, 10 aa, Artificial Sequence
  Peptide Derived from Human Papillomavirus
VLVFVYIVVI

SEQ ID NO: 3886 - protein, 11 aa, Artificial Sequence
  Peptide Derived from Human Papillomavirus
VLVFVYIVVIT

SEQ ID NO: 3887 - protein, 8 aa, Artificial Sequence
  Peptide Derived from Human Papillomavirus
VVITSPAT

SEQ ID NO: 3888 - protein, 9 aa, Artificial Sequence
  Peptide Derived from Human Papillomavirus
VVITSPATA

SEQ ID NO: 3889 - protein, 11 aa, Artificial Sequence
  Peptide Derived from Human Papillomavirus
VVITSPATAFT

SEQ ID NO: 3890 - protein, 8 aa, Artificial Sequence
  Peptide Derived from Human Papillomavirus
WVLVFVYI

SEQ ID NO: 3891 - protein, 9 aa, Artificial Sequence
  Peptide Derived from Human Papillomavirus
WVLVFVYIV

SEQ ID NO: 3892 - protein, 10 aa, Artificial Sequence
  Peptide Derived from Human Papillomavirus
WVLVFVYIVV

SEQ ID NO: 3893 - protein, 11 aa, Artificial Sequence
  Peptide Derived from Human Papillomavirus
WVLVFVYIVVI

SEQ ID NO: 3894 - protein, 8 aa, Artificial Sequence
  Peptide Derived from Human Papillomavirus
YAWVLVFV

SEQ ID NO: 3895 - protein, 10 aa, Artificial Sequence
  Peptide Derived from Human Papillomavirus
YAWVLVFVYI

SEQ ID NO: 3896 - protein, 11 aa, Artificial Sequence
  Peptide Derived from Human Papillomavirus
YAWVLVFVYIV

SEQ ID NO: 3897 - protein, 9 aa, Artificial Sequence
  Peptide Derived from Human Papillomavirus
YIVVITSPA

SEQ ID NO: 3898 - protein, 10 aa, Artificial Sequence
  Peptide Derived from Human Papillomavirus
YIVVITSPAT

SEQ ID NO: 3899 - protein, 11 aa, Artificial Sequence
  Peptide Derived from Human Papillomavirus
YIVVITSPATA

SEQ ID NO: 3900 - protein, 8 aa, Artificial Sequence
  Peptide Derived from Human Papillomavirus
YVCCHVPL

SEQ ID NO: 3901 - protein, 9 aa, Artificial Sequence
  Peptide Derived from Human Papillomavirus
YVCCHVPLL

SEQ ID NO: 3902 - protein, 9 aa, Artificial Sequence
  Peptide Derived from Human Papillomavirus
YVFCFLLPM

SEQ ID NO: 3903 - protein, 10 aa, Artificial Sequence
  Peptide Derived from Human Papillomavirus
YVFCFLLPML

SEQ ID NO: 3904 - protein, 11 aa, Artificial Sequence
  Peptide Derived from Human Papillomavirus
YVFCFLLPMLL

SEQ ID NO: 3905 - protein, 8 aa, Artificial Sequence
  Peptide Derived from Human Papillomavirus
CIDFYSRI

SEQ ID NO: 3906 - protein, 11 aa, Artificial Sequence
  Peptide Derived from Human Papillomavirus
CIDFYSRIREL

SEQ ID NO: 3907 - protein, 8 aa, Artificial Sequence
  Peptide Derived from Human Papillomavirus
CLRCQKPL

SEQ ID NO: 3908 - protein, 11 aa, Artificial Sequence
  Peptide Derived from Human Papillomavirus
CLRCQKPLNPA

SEQ ID NO: 3909 - protein, 8 aa, Artificial Sequence
  Peptide Derived from Human Papillomavirus
CQKPLNPA

SEQ ID NO: 3910 - protein, 11 aa, Artificial Sequence
  Peptide Derived from Human Papillomavirus
CQKPLNPAEKL

SEQ ID NO: 3911 - protein, 8 aa, Artificial Sequence
  Peptide Derived from Human Papillomavirus
CTELNTSL

SEQ ID NO: 3912 - protein, 11 aa, Artificial Sequence
  Peptide Derived from Human Papillomavirus
CTELNTSLQDI

SEQ ID NO: 3913 - protein, 8 aa, Artificial Sequence
  Peptide Derived from Human Papillomavirus
CVYCKTVL

SEQ ID NO: 3914 - protein, 10 aa, Artificial Sequence
  Peptide Derived from Human Papillomavirus
CVYCKTVLEL

SEQ ID NO: 3915 - protein, 11 aa, Artificial Sequence
  Peptide Derived from Human Papillomavirus
CVYCKTVLELT

SEQ ID NO: 3916 - protein, 11 aa, Artificial Sequence
  Peptide Derived from Human Papillomavirus
DIEITCVYCKT

SEQ ID NO: 3917 - protein, 8 aa, Artificial Sequence
  Peptide Derived from Human Papillomavirus
DLCTELNT

SEQ ID NO: 3918 - protein, 10 aa, Artificial Sequence
  Peptide Derived from Human Papillomavirus
DLCTELNTSL

SEQ ID NO: 3919 - protein, 10 aa, Artificial Sequence
  Peptide Derived from Human Papillomavirus
DLFVVYRDSI

SEQ ID NO: 3920 - protein, 9 aa, Artificial Sequence
  Peptide Derived from Human Papillomavirus
DTLEKLTNT

SEQ ID NO: 3921 - protein, 11 aa, Artificial Sequence
  Peptide Derived from Human Papillomavirus
DTLEKLTNTGL

SEQ ID NO: 3922 - protein, 9 aa, Artificial Sequence
  Peptide Derived from Human Papillomavirus
EITCVYCKT

SEQ ID NO: 3923 - protein, 10 aa, Artificial Sequence
  Peptide Derived from Human Papillomavirus
EITCVYCKTV

SEQ ID NO: 3924 - protein, 11 aa, Artificial Sequence
  Peptide Derived from Human Papillomavirus
EITCVYCKTVL

SEQ ID NO: 3925 - protein, 9 aa, Artificial Sequence
  Peptide Derived from Human Papillomavirus
ELNTSLQDI

SEQ ID NO: 3926 - protein, 11 aa, Artificial Sequence
  Peptide Derived from Human Papillomavirus
ELNTSLQDIEI

SEQ ID NO: 3927 - protein, 9 aa, Artificial Sequence
  Peptide Derived from Human Papillomavirus
ELRHYSDSV

SEQ ID NO: 3928 - protein, 9 aa, Artificial Sequence
  Peptide Derived from Human Papillomavirus
ELTEVFEFA

SEQ ID NO: 3929 - protein, 10 aa, Artificial Sequence
  Peptide Derived from Human Papillomavirus
EVFEFAFKDL

SEQ ID NO: 3930 - protein, 8 aa, Artificial Sequence
  Peptide Derived from Human Papillomavirus
FAFKDLFV

SEQ ID NO: 3931 - protein, 9 aa, Artificial Sequence
  Peptide Derived from Human Papillomavirus
FAFKDLFVV

SEQ ID NO: 3932 - protein, 8 aa, Artificial Sequence
  Peptide Derived from Human Papillomavirus
FVVYRDSI

SEQ ID NO: 3933 - protein, 11 aa, Artificial Sequence
  Peptide Derived from Human Papillomavirus
FVVYRDSIPHA

SEQ ID NO: 3934 - protein, 10 aa, Artificial Sequence
  Peptide Derived from Human Papillomavirus
GLYNLLIRCL

SEQ ID NO: 3935 - protein, 10 aa, Artificial Sequence
  Peptide Derived from Human Papillomavirus
GQCHSCCNRA

SEQ ID NO: 3936 - protein, 8 aa, Artificial Sequence
  Peptide Derived from Human Papillomavirus
HAACHKCI

SEQ ID NO: 3937 - protein, 11 aa, Artificial Sequence
  Peptide Derived from Human Papillomavirus
HLNEKRRFHNI

SEQ ID NO: 3938 - protein, 8 aa, Artificial Sequence
  Peptide Derived from Human Papillomavirus
ITCVYCKT

SEQ ID NO: 3939 - protein, 9 aa, Artificial Sequence
  Peptide Derived from Human Papillomavirus
ITCVYCKTV

SEQ ID NO: 3940 - protein, 10 aa, Artificial Sequence
  Peptide Derived from Human Papillomavirus
ITCVYCKTVL

SEQ ID NO: 3941 - protein, 9 aa, Artificial Sequence
  Peptide Derived from Human Papillomavirus
KLPDLCTEL

SEQ ID NO: 3942 - protein, 11 aa, Artificial Sequence
  Peptide Derived from Human Papillomavirus
KLPDLCTELNT

SEQ ID NO: 3943 - protein, 10 aa, Artificial Sequence
  Peptide Derived from Human Papillomavirus
KLTNTGLYNL

SEQ ID NO: 3944 - protein, 11 aa, Artificial Sequence
  Peptide Derived from Human Papillomavirus
KLTNTGLYNLL

SEQ ID NO: 3945 - protein, 9 aa, Artificial Sequence
  Peptide Derived from Human Papillomavirus
KTVLELTEV

SEQ ID NO: 3946 - protein, 11 aa, Artificial Sequence
  Peptide Derived from Human Papillomavirus
LIRCLRCQKPL

SEQ ID NO: 3947 - protein, 9 aa, Artificial Sequence
  Peptide Derived from Human Papillomavirus
LQDIEITCV

SEQ ID NO: 3948 - protein, 9 aa, Artificial Sequence
  Peptide Derived from Human Papillomavirus
LQRRRETQV

SEQ ID NO: 3949 - protein, 8 aa, Artificial Sequence
  Peptide Derived from Human Papillomavirus
LTEVFEFA

SEQ ID NO: 3950 - protein, 9 aa, Artificial Sequence
  Peptide Derived from Human Papillomavirus
LTNTGLYNL

SEQ ID NO: 3951 - protein, 10 aa, Artificial Sequence
  Peptide Derived from Human Papillomavirus
LTNTGLYNLL

SEQ ID NO: 3952 - protein, 11 aa, Artificial Sequence
  Peptide Derived from Human Papillomavirus
LTNTGLYNLLI

SEQ ID NO: 3953 - protein, 8 aa, Artificial Sequence
  Peptide Derived from Human Papillomavirus
MARFEDPT

SEQ ID NO: 3954 - protein, 8 aa, Artificial Sequence
  Peptide Derived from Human Papillomavirus
NTGLYNLL

SEQ ID NO: 3955 - protein, 9 aa, Artificial Sequence
  Peptide Derived from Human Papillomavirus
NTGLYNLLI

SEQ ID NO: 3956 - protein, 9 aa, Artificial Sequence
  Peptide Derived from Human Papillomavirus
NTSLQDIEI

SEQ ID NO: 3957 - protein, 10 aa, Artificial Sequence
  Peptide Derived from Human Papillomavirus
NTSLQDIEIT

SEQ ID NO: 3958 - protein, 8 aa, Artificial Sequence
  Peptide Derived from Human Papillomavirus
PAEKLRHL

SEQ ID NO: 3959 - protein, 8 aa, Artificial Sequence
  Peptide Derived from Human Papillomavirus
PLNPAEKL

SEQ ID NO: 3960 - protein, 11 aa, Artificial Sequence
  Peptide Derived from Human Papillomavirus
PLNPAEKLRHL

SEQ ID NO: 3961 - protein, 8 aa, Artificial Sequence
  Peptide Derived from Human Papillomavirus
PTRRPYKL

SEQ ID NO: 3962 - protein, 11 aa, Artificial Sequence
  Peptide Derived from Human Papillomavirus
PTRRPYKLPDL

SEQ ID NO: 3963 - protein, 8 aa, Artificial Sequence
  Peptide Derived from Human Papillomavirus
RLQRRRET

SEQ ID NO: 3964 - protein, 10 aa, Artificial Sequence
  Peptide Derived from Human Papillomavirus
RLQRRRETQV

SEQ ID NO: 3965 - protein, 11 aa, Artificial Sequence
  Peptide Derived from Human Papillomavirus
RQERLQRRRET

SEQ ID NO: 3966 - protein, 11 aa, Artificial Sequence
  Peptide Derived from Human Papillomavirus
SIPHAACHKCI

SEQ ID NO: 3967 - protein, 8 aa, Artificial Sequence
  Peptide Derived from Human Papillomavirus
SLQDIEIT

SEQ ID NO: 3968 - protein, 10 aa, Artificial Sequence
  Peptide Derived from Human Papillomavirus
SLQDIEITCV

SEQ ID NO: 3969 - protein, 10 aa, Artificial Sequence
  Peptide Derived from Human Papillomavirus
SVYGDTLEKL

SEQ ID NO: 3970 - protein, 11 aa, Artificial Sequence
  Peptide Derived from Human Papillomavirus
SVYGDTLEKLT

SEQ ID NO: 3971 - protein, 8 aa, Artificial Sequence
  Peptide Derived from Human Papillomavirus
TLEKLTNT

SEQ ID NO: 3972 - protein, 10 aa, Artificial Sequence
  Peptide Derived from Human Papillomavirus
TLEKLTNTGL

SEQ ID NO: 3973 - protein, 8 aa, Artificial Sequence
  Peptide Derived from Human Papillomavirus
TVLELTEV

SEQ ID NO: 3974 - protein, 11 aa, Artificial Sequence
  Peptide Derived from Human Papillomavirus
VLELTEVFEFA

SEQ ID NO: 3975 - protein, 10 aa, Artificial Sequence
  Peptide Derived from Human Papillomavirus
VVYRDSIPHA

SEQ ID NO: 3976 - protein, 11 aa, Artificial Sequence
  Peptide Derived from Human Papillomavirus
VVYRDSIPHAA

SEQ ID NO: 3977 - protein, 8 aa, Artificial Sequence
  Peptide Derived from Human Papillomavirus
ATLQDIVL

SEQ ID NO: 3978 - protein, 10 aa, Artificial Sequence
  Peptide Derived from Human Papillomavirus
ATLQDIVLHL

SEQ ID NO: 3979 - protein, 8 aa, Artificial Sequence
  Peptide Derived from Human Papillomavirus
CMCCKCEA

SEQ ID NO: 3980 - protein, 10 aa, Artificial Sequence
  Peptide Derived from Human Papillomavirus
CMCCKCEARI

SEQ ID NO: 3981 - protein, 8 aa, Artificial Sequence
  Peptide Derived from Human Papillomavirus
DLLCHEQL

SEQ ID NO: 3982 - protein, 8 aa, Artificial Sequence
  Peptide Derived from Human Papillomavirus
DLRAFQQL

SEQ ID NO: 3983 - protein, 10 aa, Artificial Sequence
  Peptide Derived from Human Papillomavirus
DLRAFQQLFL

SEQ ID NO: 3984 - protein, 8 aa, Artificial Sequence
  Peptide Derived from Human Papillomavirus
EARIKLVV

SEQ ID NO: 3985 - protein, 10 aa, Artificial Sequence
  Peptide Derived from Human Papillomavirus
EIDGVNHQHL

SEQ ID NO: 3986 - protein, 8 aa, Artificial Sequence
  Peptide Derived from Human Papillomavirus
FLNTLSFV

SEQ ID NO: 3987 - protein, 8 aa, Artificial Sequence
  Peptide Derived from Human Papillomavirus
FQQLFLNT

SEQ ID NO: 3988 - protein, 9 aa, Artificial Sequence
  Peptide Derived from Human Papillomavirus
FQQLFLNTL

SEQ ID NO: 3989 - protein, 9 aa, Artificial Sequence
  Peptide Derived from Human Papillomavirus
GVNHQHLPA

SEQ ID NO: 3990 - protein, 8 aa, Artificial Sequence
  Peptide Derived from Human Papillomavirus
HLEPQNEI

SEQ ID NO: 3991 - protein, 10 aa, Artificial Sequence
  Peptide Derived from Human Papillomavirus
HLEPQNEIPV

SEQ ID NO: 3992 - protein, 9 aa, Artificial Sequence
  Peptide Derived from Human Papillomavirus
HQHLPARRA

SEQ ID NO: 3993 - protein, 11 aa, Artificial Sequence
  Peptide Derived from Human Papillomavirus
IVLHLEPQNEI

SEQ ID NO: 3994 - protein, 8 aa, Artificial Sequence
  Peptide Derived from Human Papillomavirus
KATLQDIV

SEQ ID NO: 3995 - protein, 9 aa, Artificial Sequence
  Peptide Derived from Human Papillomavirus
KATLQDIVL

SEQ ID NO: 3996 - protein, 11 aa, Artificial Sequence
  Peptide Derived from Human Papillomavirus
KATLQDIVLHL

SEQ ID NO: 3997 - protein, 8 aa, Artificial Sequence
  Peptide Derived from Human Papillomavirus
KLVVESSA

SEQ ID NO: 3998 - protein, 11 aa, Artificial Sequence
  Peptide Derived from Human Papillomavirus
KLVVESSADDL

SEQ ID NO: 3999 - protein, 8 aa, Artificial Sequence
  Peptide Derived from Human Papillomavirus
LQDIVLHL

SEQ ID NO: 4000 - protein, 10 aa, Artificial Sequence
  Peptide Derived from Human Papillomavirus
LVVESSADDL

SEQ ID NO: 4001 - protein, 10 aa, Artificial Sequence
  Peptide Derived from Human Papillomavirus
MLCMCCKCEA

SEQ ID NO: 4002 - protein, 11 aa, Artificial Sequence
  Peptide Derived from Human Papillomavirus
NTLSFVCPWCA

SEQ ID NO: 4003 - protein, 11 aa, Artificial Sequence
  Peptide Derived from Human Papillomavirus
PARRAEPQRHT

SEQ ID NO: 4004 - protein, 9 aa, Artificial Sequence
  Peptide Derived from Human Papillomavirus
PQNEIPVDL

SEQ ID NO: 4005 - protein, 10 aa, Artificial Sequence
  Peptide Derived from Human Papillomavirus
PQNEIPVDLL

SEQ ID NO: 4006 - protein, 9 aa, Artificial Sequence
  Peptide Derived from Human Papillomavirus
PQRHTMLCM

SEQ ID NO: 4007 - protein, 10 aa, Artificial Sequence
  Peptide Derived from Human Papillomavirus
PVDLLCHEQL

SEQ ID NO: 4008 - protein, 10 aa, Artificial Sequence
  Peptide Derived from Human Papillomavirus
QLFLNTLSFV

SEQ ID NO: 4009 - protein, 8 aa, Artificial Sequence
  Peptide Derived from Human Papillomavirus
QQLFLNTL

SEQ ID NO: 4010 - protein, 11 aa, Artificial Sequence
  Peptide Derived from Human Papillomavirus
QQLFLNTLSFV

SEQ ID NO: 4011 - protein, 8 aa, Artificial Sequence
  Peptide Derived from Human Papillomavirus
RAEPQRHT

SEQ ID NO: 4012 - protein, 9 aa, Artificial Sequence
  Peptide Derived from Human Papillomavirus
RAEPQRHTM

SEQ ID NO: 4013 - protein, 10 aa, Artificial Sequence
  Peptide Derived from Human Papillomavirus
RAEPQRHTML

SEQ ID NO: 4014 - protein, 8 aa, Artificial Sequence
  Peptide Derived from Human Papillomavirus
RAFQQLFL

SEQ ID NO: 4015 - protein, 10 aa, Artificial Sequence
  Peptide Derived from Human Papillomavirus
RAFQQLFLNT

SEQ ID NO: 4016 - protein, 11 aa, Artificial Sequence
  Peptide Derived from Human Papillomavirus
RAFQQLFLNTL

SEQ ID NO: 4017 - protein, 10 aa, Artificial Sequence
  Peptide Derived from Human Papillomavirus
RIKLVVESSA

SEQ ID NO: 4018 - protein, 11 aa, Artificial Sequence
  Peptide Derived from Human Papillomavirus
SADDLRAFQQL

SEQ ID NO: 4019 - protein, 9 aa, Artificial Sequence
  Peptide Derived from Human Papillomavirus
TLQDIVLHL

SEQ ID NO: 4020 - protein, 10 aa, Artificial Sequence
  Peptide Derived from Human Papillomavirus
TLSFVCPWCA

SEQ ID NO: 4021 - protein, 11 aa, Artificial Sequence
  Peptide Derived from Human Papillomavirus
TMLCMCCKCEA

SEQ ID NO: 4022 - protein, 10 aa, Artificial Sequence
  Peptide Derived from Human Papillomavirus
VLHLEPQNEI

SEQ ID NO: 4023 - protein, 9 aa, Artificial Sequence
  Peptide Derived from Human Papillomavirus
VVESSADDL

SEQ ID NO: 4024 - protein, 11 aa, Artificial Sequence
  Peptide Derived from Human Papillomavirus
VVESSADDLRA

SEQ ID NO: 4025 - protein, 10 aa, Artificial Sequence
  Peptide Derived from Human Papillomavirus
AATSNVSEDV

SEQ ID NO: 4026 - protein, 10 aa, Artificial Sequence
  Peptide Derived from Human Papillomavirus
AIGEHWAKGT

SEQ ID NO: 4027 - protein, 11 aa, Artificial Sequence
  Peptide Derived from Human Papillomavirus
AIGEHWAKGTA

SEQ ID NO: 4028 - protein, 8 aa, Artificial Sequence
  Peptide Derived from Human Papillomavirus
AITCQKDA

SEQ ID NO: 4029 - protein, 9 aa, Artificial Sequence
  Peptide Derived from Human Papillomavirus
AITCQKDAA

SEQ ID NO: 4030 - protein, 11 aa, Artificial Sequence
  Peptide Derived from Human Papillomavirus
AITCQKDAAPA

SEQ ID NO: 4031 - protein, 9 aa, Artificial Sequence
  Peptide Derived from Human Papillomavirus
ALWRPSDNT

SEQ ID NO: 4032 - protein, 10 aa, Artificial Sequence
  Peptide Derived from Human Papillomavirus
ALWRPSDNTV

SEQ ID NO: 4033 - protein, 10 aa, Artificial Sequence
  Peptide Derived from Human Papillomavirus
AMDFSTLQDT

SEQ ID NO: 4034 - protein, 8 aa, Artificial Sequence
  Peptide Derived from Human Papillomavirus
AQGHNNGV

SEQ ID NO: 4035 - protein, 11 aa, Artificial Sequence
  Peptide Derived from Human Papillomavirus
ATKFKQYSRHV

SEQ ID NO: 4036 - protein, 9 aa, Artificial Sequence
  Peptide Derived from Human Papillomavirus
ATSNVSEDV

SEQ ID NO: 4037 - protein, 8 aa, Artificial Sequence
  Peptide Derived from Human Papillomavirus
ATTSSKPA

SEQ ID NO: 4038 - protein, 11 aa, Artificial Sequence
  Peptide Derived from Human Papillomavirus
ATTSSKPAKRV

SEQ ID NO: 4039 - protein, 10 aa, Artificial Sequence
  Peptide Derived from Human Papillomavirus
CAPAIGEHWA

SEQ ID NO: 4040 - protein, 8 aa, Artificial Sequence
  Peptide Derived from Human Papillomavirus
CASTQSPV

SEQ ID NO: 4041 - protein, 8 aa, Artificial Sequence
  Peptide Derived from Human Papillomavirus
CILGCAPA

SEQ ID NO: 4042 - protein, 9 aa, Artificial Sequence
  Peptide Derived from Human Papillomavirus
CILGCAPAI

SEQ ID NO: 4043 - protein, 9 aa, Artificial Sequence
  Peptide Derived from Human Papillomavirus
CLRREQLFA

SEQ ID NO: 4044 - protein, 8 aa, Artificial Sequence
  Peptide Derived from Human Papillomavirus
CLYTRVLI

SEQ ID NO: 4045 - protein, 9 aa, Artificial Sequence
  Peptide Derived from Human Papillomavirus
CLYTRVLIL

SEQ ID NO: 4046 - protein, 8 aa, Artificial Sequence
  Peptide Derived from Human Papillomavirus
CQKDAAPA

SEQ ID NO: 4047 - protein, 11 aa, Artificial Sequence
  Peptide Derived from Human Papillomavirus
CQSICKYPDYL

SEQ ID NO: 4048 - protein, 9 aa, Artificial Sequence
  Peptide Derived from Human Papillomavirus
CTITLTADV

SEQ ID NO: 4049 - protein, 10 aa, Artificial Sequence
  Peptide Derived from Human Papillomavirus
CTITLTADVM

SEQ ID NO: 4050 - protein, 11 aa, Artificial Sequence
  Peptide Derived from Human Papillomavirus
CVYSPSPSGSI

SEQ ID NO: 4051 - protein, 8 aa, Artificial Sequence
  Peptide Derived from Human Papillomavirus
DLKEKFSL

SEQ ID NO: 4052 - protein, 10 aa, Artificial Sequence
  Peptide Derived from Human Papillomavirus
DLKEKFSLDL

SEQ ID NO: 4053 - protein, 8 aa, Artificial Sequence
  Peptide Derived from Human Papillomavirus
DLQFIFQL

SEQ ID NO: 4054 - protein, 10 aa, Artificial Sequence
  Peptide Derived from Human Papillomavirus
DLQFIFQLCT

SEQ ID NO: 4055 - protein, 11 aa, Artificial Sequence
  Peptide Derived from Human Papillomavirus
DLQFIFQLCTI

SEQ ID NO: 4056 - protein, 9 aa, Artificial Sequence
  Peptide Derived from Human Papillomavirus
DMVDTGYGA

SEQ ID NO: 4057 - protein, 10 aa, Artificial Sequence
  Peptide Derived from Human Papillomavirus
DMVDTGYGAM

SEQ ID NO: 4058 - protein, 10 aa, Artificial Sequence
  Peptide Derived from Human Papillomavirus
DQYPLGRKFL

SEQ ID NO: 4059 - protein, 11 aa, Artificial Sequence
  Peptide Derived from Human Papillomavirus
DQYPLGRKFLV

SEQ ID NO: 4060 - protein, 8 aa, Artificial Sequence
  Peptide Derived from Human Papillomavirus
DTESSHAA

SEQ ID NO: 4061 - protein, 9 aa, Artificial Sequence
  Peptide Derived from Human Papillomavirus
DTESSHAAT

SEQ ID NO: 4062 - protein, 11 aa, Artificial Sequence
  Peptide Derived from Human Papillomavirus
DTGYGAMDFST

SEQ ID NO: 4063 - protein, 8 aa, Artificial Sequence
  Peptide Derived from Human Papillomavirus
DTKCEVPL

SEQ ID NO: 4064 - protein, 10 aa, Artificial Sequence
  Peptide Derived from Human Papillomavirus
DTKCEVPLDI

SEQ ID NO: 4065 - protein, 9 aa, Artificial Sequence
  Peptide Derived from Human Papillomavirus
DTSIYNPET

SEQ ID NO: 4066 - protein, 8 aa, Artificial Sequence
  Peptide Derived from Human Papillomavirus
DTTPSTNL

SEQ ID NO: 4067 - protein, 9 aa, Artificial Sequence
  Peptide Derived from Human Papillomavirus
DTTPSTNLT

SEQ ID NO: 4068 - protein, 10 aa, Artificial Sequence
  Peptide Derived from Human Papillomavirus
DTTPSTNLTI

SEQ ID NO: 4069 - protein, 9 aa, Artificial Sequence
  Peptide Derived from Human Papillomavirus
DTVPQSLYI

SEQ ID NO: 4070 - protein, 9 aa, Artificial Sequence
  Peptide Derived from Human Papillomavirus
DTYRFVQSV

SEQ ID NO: 4071 - protein, 10 aa, Artificial Sequence
  Peptide Derived from Human Papillomavirus
DTYRFVQSVA

SEQ ID NO: 4072 - protein, 11 aa, Artificial Sequence
  Peptide Derived from Human Papillomavirus
DTYRFVQSVAI

SEQ ID NO: 4073 - protein, 9 aa, Artificial Sequence
  Peptide Derived from Human Papillomavirus
DVMSYIHSM

SEQ ID NO: 4074 - protein, 8 aa, Artificial Sequence
  Peptide Derived from Human Papillomavirus
DVRDNVSV

SEQ ID NO: 4075 - protein, 8 aa, Artificial Sequence
  Peptide Derived from Human Papillomavirus
EIGRGQPL

SEQ ID NO: 4076 - protein, 10 aa, Artificial Sequence
  Peptide Derived from Human Papillomavirus
EIGRGQPLGV

SEQ ID NO: 4077 - protein, 8 aa, Artificial Sequence
  Peptide Derived from Human Papillomavirus
ETQRLVWA

SEQ ID NO: 4078 - protein, 10 aa, Artificial Sequence
  Peptide Derived from Human Papillomavirus
ETQRLVWACA

SEQ ID NO: 4079 - protein, 10 aa, Artificial Sequence
  Peptide Derived from Human Papillomavirus
EVPLDICQSI

SEQ ID NO: 4080 - protein, 9 aa, Artificial Sequence
  Peptide Derived from Human Papillomavirus
FARHFWNRA

SEQ ID NO: 4081 - protein, 11 aa, Artificial Sequence
  Peptide Derived from Human Papillomavirus
FARHFWNRAGT

SEQ ID NO: 4082 - protein, 8 aa, Artificial Sequence
  Peptide Derived from Human Papillomavirus
FIFQLCTI

SEQ ID NO: 4083 - protein, 9 aa, Artificial Sequence
  Peptide Derived from Human Papillomavirus
FIFQLCTIT

SEQ ID NO: 4084 - protein, 10 aa, Artificial Sequence
  Peptide Derived from Human Papillomavirus
FIFQLCTITL

SEQ ID NO: 4085 - protein, 11 aa, Artificial Sequence
  Peptide Derived from Human Papillomavirus
FIFQLCTITLT

SEQ ID NO: 4086 - protein, 10 aa, Artificial Sequence
  Peptide Derived from Human Papillomavirus
FLRNVNVFPI

SEQ ID NO: 4087 - protein, 8 aa, Artificial Sequence
  Peptide Derived from Human Papillomavirus
FQLCTITL

SEQ ID NO: 4088 - protein, 9 aa, Artificial Sequence
  Peptide Derived from Human Papillomavirus
FQLCTITLT

SEQ ID NO: 4089 - protein, 10 aa, Artificial Sequence
  Peptide Derived from Human Papillomavirus
FQLCTITLTA

SEQ ID NO: 4090 - protein, 8 aa, Artificial Sequence
  Peptide Derived from Human Papillomavirus
FVQSVAIT

SEQ ID NO: 4091 - protein, 8 aa, Artificial Sequence
  Peptide Derived from Human Papillomavirus
FVTVVDTT

SEQ ID NO: 4092 - protein, 11 aa, Artificial Sequence
  Peptide Derived from Human Papillomavirus
FVTVVDTTPST

SEQ ID NO: 4093 - protein, 8 aa, Artificial Sequence
  Peptide Derived from Human Papillomavirus
GAMDFSTL

SEQ ID NO: 4094 - protein, 11 aa, Artificial Sequence
  Peptide Derived from Human Papillomavirus
GAMDFSTLQDT

SEQ ID NO: 4095 - protein, 8 aa, Artificial Sequence
  Peptide Derived from Human Papillomavirus
GLRRKPTI

SEQ ID NO: 4096 - protein, 11 aa, Artificial Sequence
  Peptide Derived from Human Papillomavirus
GLSGHPFYNKL

SEQ ID NO: 4097 - protein, 10 aa, Artificial Sequence
  Peptide Derived from Human Papillomavirus
GMPASPGSCV

SEQ ID NO: 4098 - protein, 8 aa, Artificial Sequence
  Peptide Derived from Human Papillomavirus
GQPLGVGL

SEQ ID NO: 4099 - protein, 9 aa, Artificial Sequence
  Peptide Derived from Human Papillomavirus
GTACKSRPL

SEQ ID NO: 4100 - protein, 11 aa, Artificial Sequence
  Peptide Derived from Human Papillomavirus
GTMGDTVPQSL

SEQ ID NO: 4101 - protein, 8 aa, Artificial Sequence
  Peptide Derived from Human Papillomavirus
GVCWHNQL

SEQ ID NO: 4102 - protein, 10 aa, Artificial Sequence
  Peptide Derived from Human Papillomavirus
GVCWHNQLFV

SEQ ID NO: 4103 - protein, 11 aa, Artificial Sequence
  Peptide Derived from Human Papillomavirus
GVCWHNQLFVT

SEQ ID NO: 4104 - protein, 10 aa, Artificial Sequence
  Peptide Derived from Human Papillomavirus
GVEIGRGQPL

SEQ ID NO: 4105 - protein, 8 aa, Artificial Sequence
  Peptide Derived from Human Papillomavirus
GVPPPPTT

SEQ ID NO: 4106 - protein, 10 aa, Artificial Sequence
  Peptide Derived from Human Papillomavirus
GVPPPPTTSL

SEQ ID NO: 4107 - protein, 11 aa, Artificial Sequence
  Peptide Derived from Human Papillomavirus
GVPPPPTTSLV

SEQ ID NO: 4108 - protein, 11 aa, Artificial Sequence
  Peptide Derived from Human Papillomavirus
HAATSNVSEDV

SEQ ID NO: 4109 - protein, 8 aa, Artificial Sequence
  Peptide Derived from Human Papillomavirus
HAGSSRLL

SEQ ID NO: 4110 - protein, 9 aa, Artificial Sequence
  Peptide Derived from Human Papillomavirus
HAGSSRLLT

SEQ ID NO: 4111 - protein, 10 aa, Artificial Sequence
  Peptide Derived from Human Papillomavirus
HAGSSRLLTV

SEQ ID NO: 4112 - protein, 9 aa, Artificial Sequence
  Peptide Derived from Human Papillomavirus
HIIICGHYI

SEQ ID NO: 4113 - protein, 10 aa, Artificial Sequence
  Peptide Derived from Human Papillomavirus
HIIICGHYII

SEQ ID NO: 4114 - protein, 11 aa, Artificial Sequence
  Peptide Derived from Human Papillomavirus
HIIICGHYIIL

SEQ ID NO: 4115 - protein, 9 aa, Artificial Sequence
  Peptide Derived from Human Papillomavirus
HLLPLYGPL

SEQ ID NO: 4116 - protein, 10 aa, Artificial Sequence
  Peptide Derived from Human Papillomavirus
HVEEYDLQFI

SEQ ID NO: 4117 - protein, 8 aa, Artificial Sequence
  Peptide Derived from Human Papillomavirus
IICGHYII

SEQ ID NO: 4118 - protein, 9 aa, Artificial Sequence
  Peptide Derived from Human Papillomavirus
IICGHYIIL

SEQ ID NO: 4119 - protein, 11 aa, Artificial Sequence
  Peptide Derived from Human Papillomavirus
IICGHYIILFL

SEQ ID NO: 4120 - protein, 8 aa, Artificial Sequence
  Peptide Derived from Human Papillomavirus
IIICGHYI

SEQ ID NO: 4121 - protein, 9 aa, Artificial Sequence
  Peptide Derived from Human Papillomavirus
IIICGHYII

SEQ ID NO: 4122 - protein, 10 aa, Artificial Sequence
  Peptide Derived from Human Papillomavirus
IIICGHYIIL

SEQ ID NO: 4123 - protein, 8 aa, Artificial Sequence
  Peptide Derived from Human Papillomavirus
IILFLRNV

SEQ ID NO: 4124 - protein, 10 aa, Artificial Sequence
  Peptide Derived from Human Papillomavirus
IILFLRNVNV

SEQ ID NO: 4125 - protein, 9 aa, Artificial Sequence
  Peptide Derived from Human Papillomavirus
ILEDWNFGV

SEQ ID NO: 4126 - protein, 9 aa, Artificial Sequence
  Peptide Derived from Human Papillomavirus
ILFLRNVNV

SEQ ID NO: 4127 - protein, 8 aa, Artificial Sequence
  Peptide Derived from Human Papillomavirus
ILGCAPAI

SEQ ID NO: 4128 - protein, 9 aa, Artificial Sequence
  Peptide Derived from Human Papillomavirus
ILHYHLLPL

SEQ ID NO: 4129 - protein, 8 aa, Artificial Sequence
  Peptide Derived from Human Papillomavirus
ILVYMVHI

SEQ ID NO: 4130 - protein, 9 aa, Artificial Sequence
  Peptide Derived from Human Papillomavirus
ILVYMVHII

SEQ ID NO: 4131 - protein, 10 aa, Artificial Sequence
  Peptide Derived from Human Papillomavirus
ILVYMVHIII

SEQ ID NO: 4132 - protein, 8 aa, Artificial Sequence
  Peptide Derived from Human Papillomavirus
ITCQKDAA

SEQ ID NO: 4133 - protein, 10 aa, Artificial Sequence
  Peptide Derived from Human Papillomavirus
ITCQKDAAPA

SEQ ID NO: 4134 - protein, 8 aa, Artificial Sequence
  Peptide Derived from Human Papillomavirus
ITLTADVM

SEQ ID NO: 4135 - protein, 11 aa, Artificial Sequence
  Peptide Derived from Human Papillomavirus
ITLTADVMSYI

SEQ ID NO: 4136 - protein, 8 aa, Artificial Sequence
  Peptide Derived from Human Papillomavirus
IVTSDSQL

SEQ ID NO: 4137 - protein, 9 aa, Artificial Sequence
  Peptide Derived from Human Papillomavirus
KAQGHNNGV

SEQ ID NO: 4138 - protein, 10 aa, Artificial Sequence
  Peptide Derived from Human Papillomavirus
KLDDTESSHA

SEQ ID NO: 4139 - protein, 11 aa, Artificial Sequence
  Peptide Derived from Human Papillomavirus
KLDDTESSHAA

SEQ ID NO: 4140 - protein, 9 aa, Artificial Sequence
  Peptide Derived from Human Papillomavirus
KLKFWNVDL

SEQ ID NO: 4141 - protein, 9 aa, Artificial Sequence
  Peptide Derived from Human Papillomavirus
KQDIPKVSA

SEQ ID NO: 4142 - protein, 8 aa, Artificial Sequence
  Peptide Derived from Human Papillomavirus
KQTQLCIL

SEQ ID NO: 4143 - protein, 11 aa, Artificial Sequence
  Peptide Derived from Human Papillomavirus
KQTQLCILGCA

SEQ ID NO: 4144 - protein, 9 aa, Artificial Sequence
  Peptide Derived from Human Papillomavirus
KVSAYQYRV

SEQ ID NO: 4145 - protein, 8 aa, Artificial Sequence
  Peptide Derived from Human Papillomavirus
LILHYHLL

SEQ ID NO: 4146 - protein, 10 aa, Artificial Sequence
  Peptide Derived from Human Papillomavirus
LILHYHLLPL

SEQ ID NO: 4147 - protein, 8 aa, Artificial Sequence
  Peptide Derived from Human Papillomavirus
LLPLYGPL

SEQ ID NO: 4148 - protein, 11 aa, Artificial Sequence
  Peptide Derived from Human Papillomavirus
LLTVGNPYFRV

SEQ ID NO: 4149 - protein, 8 aa, Artificial Sequence
  Peptide Derived from Human Papillomavirus
LQDTKCEV

SEQ ID NO: 4150 - protein, 10 aa, Artificial Sequence
  Peptide Derived from Human Papillomavirus
LQDTKCEVPL

SEQ ID NO: 4151 - protein, 9 aa, Artificial Sequence
  Peptide Derived from Human Papillomavirus
LQFIFQLCT

SEQ ID NO: 4152 - protein, 10 aa, Artificial Sequence
  Peptide Derived from Human Papillomavirus
LQFIFQLCTI

SEQ ID NO: 4153 - protein, 11 aa, Artificial Sequence
  Peptide Derived from Human Papillomavirus
LQFIFQLCTIT

SEQ ID NO: 4154 - protein, 9 aa, Artificial Sequence
  Peptide Derived from Human Papillomavirus
LTADVMSYI

SEQ ID NO: 4155 - protein, 11 aa, Artificial Sequence
  Peptide Derived from Human Papillomavirus
LTICASTQSPV

SEQ ID NO: 4156 - protein, 10 aa, Artificial Sequence
  Peptide Derived from Human Papillomavirus
LTVGNPYFRV

SEQ ID NO: 4157 - protein, 8 aa, Artificial Sequence
  Peptide Derived from Human Papillomavirus
LVDTYRFV

SEQ ID NO: 4158 - protein, 11 aa, Artificial Sequence
  Peptide Derived from Human Papillomavirus
LVDTYRFVQSV

SEQ ID NO: 4159 - protein, 11 aa, Artificial Sequence
  Peptide Derived from Human Papillomavirus
LVQAGLRRKPT

SEQ ID NO: 4160 - protein, 8 aa, Artificial Sequence
  Peptide Derived from Human Papillomavirus
LVWACAGV

SEQ ID NO: 4161 - protein, 10 aa, Artificial Sequence
  Peptide Derived from Human Papillomavirus
LVWACAGVEI

SEQ ID NO: 4162 - protein, 8 aa, Artificial Sequence
  Peptide Derived from Human Papillomavirus
LVYMVHII

SEQ ID NO: 4163 - protein, 9 aa, Artificial Sequence
  Peptide Derived from Human Papillomavirus
LVYMVHIII

SEQ ID NO: 4164 - protein, 10 aa, Artificial Sequence
  Peptide Derived from Human Papillomavirus
MALWRPSDNT

SEQ ID NO: 4165 - protein, 11 aa, Artificial Sequence
  Peptide Derived from Human Papillomavirus
MALWRPSDNTV

SEQ ID NO: 4166 - protein, 8 aa, Artificial Sequence
  Peptide Derived from Human Papillomavirus
MVDTGYGA

SEQ ID NO: 4167 - protein, 9 aa, Artificial Sequence
  Peptide Derived from Human Papillomavirus
MVDTGYGAM

SEQ ID NO: 4168 - protein, 11 aa, Artificial Sequence
  Peptide Derived from Human Papillomavirus
MVHIIICGHYI

SEQ ID NO: 4169 - protein, 8 aa, Artificial Sequence
  Peptide Derived from Human Papillomavirus
NLTICAST

SEQ ID NO: 4170 - protein, 8 aa, Artificial Sequence
  Peptide Derived from Human Papillomavirus
NQLFVTVV

SEQ ID NO: 4171 - protein, 10 aa, Artificial Sequence
  Peptide Derived from Human Papillomavirus
NQLFVTVVDT

SEQ ID NO: 4172 - protein, 11 aa, Artificial Sequence
  Peptide Derived from Human Papillomavirus
NQLFVTVVDTT

SEQ ID NO: 4173 - protein, 9 aa, Artificial Sequence
  Peptide Derived from Human Papillomavirus
NTDDYVTPT

SEQ ID NO: 4174 - protein, 11 aa, Artificial Sequence
  Peptide Derived from Human Papillomavirus
NTDDYVTPTSI

SEQ ID NO: 4175 - protein, 9 aa, Artificial Sequence
  Peptide Derived from Human Papillomavirus
NTVLEDGDM

SEQ ID NO: 4176 - protein, 10 aa, Artificial Sequence
  Peptide Derived from Human Papillomavirus
NTVLEDGDMV

SEQ ID NO: 4177 - protein, 10 aa, Artificial Sequence
  Peptide Derived from Human Papillomavirus
NTVYLPPPSV

SEQ ID NO: 4178 - protein, 11 aa, Artificial Sequence
  Peptide Derived from Human Papillomavirus
NTVYLPPPSVA

SEQ ID NO: 4179 - protein, 10 aa, Artificial Sequence
  Peptide Derived from Human Papillomavirus
NVDLKEKFSL

SEQ ID NO: 4180 - protein, 9 aa, Artificial Sequence
  Peptide Derived from Human Papillomavirus
NVFPIFLQM

SEQ ID NO: 4181 - protein, 10 aa, Artificial Sequence
  Peptide Derived from Human Papillomavirus
NVFPIFLQMA

SEQ ID NO: 4182 - protein, 11 aa, Artificial Sequence
  Peptide Derived from Human Papillomavirus
NVFPIFLQMAL

SEQ ID NO: 4183 - protein, 9 aa, Artificial Sequence
  Peptide Derived from Human Papillomavirus
NVNVFPIFL

SEQ ID NO: 4184 - protein, 11 aa, Artificial Sequence
  Peptide Derived from Human Papillomavirus
NVNVFPIFLQM

SEQ ID NO: 4185 - protein, 10 aa, Artificial Sequence
  Peptide Derived from Human Papillomavirus
NVSEDVRDNV

SEQ ID NO: 4186 - protein, 9 aa, Artificial Sequence
  Peptide Derived from Human Papillomavirus
NVSVDYKQT

SEQ ID NO: 4187 - protein, 11 aa, Artificial Sequence
  Peptide Derived from Human Papillomavirus
NVSVDYKQTQL

SEQ ID NO: 4188 - protein, 11 aa, Artificial Sequence
  Peptide Derived from Human Papillomavirus
PAENKDPYDKL

SEQ ID NO: 4189 - protein, 10 aa, Artificial Sequence
  Peptide Derived from Human Papillomavirus
PAGGGNKQDI

SEQ ID NO: 4190 - protein, 8 aa, Artificial Sequence
  Peptide Derived from Human Papillomavirus
PAIGEHWA

SEQ ID NO: 4191 - protein, 11 aa, Artificial Sequence
  Peptide Derived from Human Papillomavirus
PAIGEHWAKGT

SEQ ID NO: 4192 - protein, 9 aa, Artificial Sequence
  Peptide Derived from Human Papillomavirus
PAKRVRVRA

SEQ ID NO: 4193 - protein, 8 aa, Artificial Sequence
  Peptide Derived from Human Papillomavirus
PASPGSCV

SEQ ID NO: 4194 - protein, 8 aa, Artificial Sequence
  Peptide Derived from Human Papillomavirus
PIFLQMAL

SEQ ID NO: 4195 - protein, 8 aa, Artificial Sequence
  Peptide Derived from Human Papillomavirus
PLDICQSI

SEQ ID NO: 4196 - protein, 8 aa, Artificial Sequence
  Peptide Derived from Human Papillomavirus
PLELKNTV

SEQ ID NO: 4197 - protein, 9 aa, Artificial Sequence
  Peptide Derived from Human Papillomavirus
PLELKNTVL

SEQ ID NO: 4198 - protein, 8 aa, Artificial Sequence
  Peptide Derived from Human Papillomavirus
PLGRKFLV

SEQ ID NO: 4199 - protein, 10 aa, Artificial Sequence
  Peptide Derived from Human Papillomavirus
PLGRKFLVQA

SEQ ID NO: 4200 - protein, 9 aa, Artificial Sequence
  Peptide Derived from Human Papillomavirus
PLHSILVYM

SEQ ID NO: 4201 - protein, 10 aa, Artificial Sequence
  Peptide Derived from Human Papillomavirus
PLHSILVYMV

SEQ ID NO: 4202 - protein, 8 aa, Artificial Sequence
  Peptide Derived from Human Papillomavirus
PLPLHSIL

SEQ ID NO: 4203 - protein, 9 aa, Artificial Sequence
  Peptide Derived from Human Papillomavirus
PLPLHSILV

SEQ ID NO: 4204 - protein, 11 aa, Artificial Sequence
  Peptide Derived from Human Papillomavirus
PLPLHSILVYM

SEQ ID NO: 4205 - protein, 10 aa, Artificial Sequence
  Peptide Derived from Human Papillomavirus
PLSQGDCPPL

SEQ ID NO: 4206 - protein, 8 aa, Artificial Sequence
  Peptide Derived from Human Papillomavirus
PLYHPRPL

SEQ ID NO: 4207 - protein, 10 aa, Artificial Sequence
  Peptide Derived from Human Papillomavirus
PLYHPRPLPL

SEQ ID NO: 4208 - protein, 9 aa, Artificial Sequence
  Peptide Derived from Human Papillomavirus
PQSLYIKGT

SEQ ID NO: 4209 - protein, 11 aa, Artificial Sequence
  Peptide Derived from Human Papillomavirus
PQSLYIKGTGM

SEQ ID NO: 4210 - protein, 10 aa, Artificial Sequence
  Peptide Derived from Human Papillomavirus
PTIGPRKRSA

SEQ ID NO: 4211 - protein, 8 aa, Artificial Sequence
  Peptide Derived from Human Papillomavirus
PTSIFYHA

SEQ ID NO: 4212 - protein, 8 aa, Artificial Sequence
  Peptide Derived from Human Papillomavirus
PTTSLVDT

SEQ ID NO: 4213 - protein, 8 aa, Artificial Sequence
  Peptide Derived from Human Papillomavirus
PVPGQYDA

SEQ ID NO: 4214 - protein, 9 aa, Artificial Sequence
  Peptide Derived from Human Papillomavirus
PVPGQYDAT

SEQ ID NO: 4215 - protein, 9 aa, Artificial Sequence
  Peptide Derived from Human Papillomavirus
QAGLRRKPT

SEQ ID NO: 4216 - protein, 10 aa, Artificial Sequence
  Peptide Derived from Human Papillomavirus
QAGLRRKPTI

SEQ ID NO: 4217 - protein, 8 aa, Artificial Sequence
  Peptide Derived from Human Papillomavirus
QLCILGCA

SEQ ID NO: 4218 - protein, 10 aa, Artificial Sequence
  Peptide Derived from Human Papillomavirus
QLCILGCAPA

SEQ ID NO: 4219 - protein, 11 aa, Artificial Sequence
  Peptide Derived from Human Papillomavirus
QLCILGCAPAI

SEQ ID NO: 4220 - protein, 8 aa, Artificial Sequence
  Peptide Derived from Human Papillomavirus
QLCTITLT

SEQ ID NO: 4221 - protein, 9 aa, Artificial Sequence
  Peptide Derived from Human Papillomavirus
QLCTITLTA

SEQ ID NO: 4222 - protein, 11 aa, Artificial Sequence
  Peptide Derived from Human Papillomavirus
QLCTITLTADV

SEQ ID NO: 4223 - protein, 11 aa, Artificial Sequence
  Peptide Derived from Human Papillomavirus
QLFARHFWNRA

SEQ ID NO: 4224 - protein, 9 aa, Artificial Sequence
  Peptide Derived from Human Papillomavirus
QLFNKPYWL

SEQ ID NO: 4225 - protein, 9 aa, Artificial Sequence
  Peptide Derived from Human Papillomavirus
QLFVTVVDT

SEQ ID NO: 4226 - protein, 10 aa, Artificial Sequence
  Peptide Derived from Human Papillomavirus
QLFVTVVDTT

SEQ ID NO: 4227 - protein, 10 aa, Artificial Sequence
  Peptide Derived from Human Papillomavirus
QLPDPNKFGL

SEQ ID NO: 4228 - protein, 11 aa, Artificial Sequence
  Peptide Derived from Human Papillomavirus
QMALWRPSDNT

SEQ ID NO: 4229 - protein, 11 aa, Artificial Sequence
  Peptide Derived from Human Papillomavirus
QMSADPYGDSM

SEQ ID NO: 4230 - protein, 10 aa, Artificial Sequence
  Peptide Derived from Human Papillomavirus
QTQLCILGCA

SEQ ID NO: 4231 - protein, 8 aa, Artificial Sequence
  Peptide Derived from Human Papillomavirus
RAGTMGDT

SEQ ID NO: 4232 - protein, 9 aa, Artificial Sequence
  Peptide Derived from Human Papillomavirus
RAGTMGDTV

SEQ ID NO: 4233 - protein, 9 aa, Artificial Sequence
  Peptide Derived from Human Papillomavirus
RLVWACAGV

SEQ ID NO: 4234 - protein, 11 aa, Artificial Sequence
  Peptide Derived from Human Papillomavirus
RLVWACAGVEI

SEQ ID NO: 4235 - protein, 9 aa, Artificial Sequence
  Peptide Derived from Human Papillomavirus
RVLILHYHL

SEQ ID NO: 4236 - protein, 10 aa, Artificial Sequence
  Peptide Derived from Human Papillomavirus
RVLILHYHLL

SEQ ID NO: 4237 - protein, 9 aa, Artificial Sequence
  Peptide Derived from Human Papillomavirus
RVVNTDDYV

SEQ ID NO: 4238 - protein, 10 aa, Artificial Sequence
  Peptide Derived from Human Papillomavirus
RVVNTDDYVT

SEQ ID NO: 4239 - protein, 9 aa, Artificial Sequence
  Peptide Derived from Human Papillomavirus
SADPYGDSM

SEQ ID NO: 4240 - protein, 9 aa, Artificial Sequence
  Peptide Derived from Human Papillomavirus
SATTSSKPA

SEQ ID NO: 4241 - protein, 10 aa, Artificial Sequence
  Peptide Derived from Human Papillomavirus
SAYQYRVFRV

SEQ ID NO: 4242 - protein, 9 aa, Artificial Sequence
  Peptide Derived from Human Papillomavirus
SICKYPDYL

SEQ ID NO: 4243 - protein, 11 aa, Artificial Sequence
  Peptide Derived from Human Papillomavirus
SICKYPDYLQM

SEQ ID NO: 4244 - protein, 11 aa, Artificial Sequence
  Peptide Derived from Human Papillomavirus
SIFYHAGSSRL

SEQ ID NO: 4245 - protein, 10 aa, Artificial Sequence
  Peptide Derived from Human Papillomavirus
SILEDWNFGV

SEQ ID NO: 4246 - protein, 9 aa, Artificial Sequence
  Peptide Derived from Human Papillomavirus
SILVYMVHI

SEQ ID NO: 4247 - protein, 10 aa, Artificial Sequence
  Peptide Derived from Human Papillomavirus
SILVYMVHII

SEQ ID NO: 4248 - protein, 11 aa, Artificial Sequence
  Peptide Derived from Human Papillomavirus
SILVYMVHIII

SEQ ID NO: 4249 - protein, 9 aa, Artificial Sequence
  Peptide Derived from Human Papillomavirus
SIVTSDSQL

SEQ ID NO: 4250 - protein, 10 aa, Artificial Sequence
  Peptide Derived from Human Papillomavirus
SIYNPETQRL

SEQ ID NO: 4251 - protein, 11 aa, Artificial Sequence
  Peptide Derived from Human Papillomavirus
SIYNPETQRLV

SEQ ID NO: 4252 - protein, 9 aa, Artificial Sequence
  Peptide Derived from Human Papillomavirus
SLDLDQYPL

SEQ ID NO: 4253 - protein, 9 aa, Artificial Sequence
  Peptide Derived from Human Papillomavirus
SLVDTYRFV

SEQ ID NO: 4254 - protein, 9 aa, Artificial Sequence
  Peptide Derived from Human Papillomavirus
SLYIKGTGM

SEQ ID NO: 4255 - protein, 11 aa, Artificial Sequence
  Peptide Derived from Human Papillomavirus
SLYIKGTGMPA

SEQ ID NO: 4256 - protein, 11 aa, Artificial Sequence
  Peptide Derived from Human Papillomavirus
SMFFCLRREQL

SEQ ID NO: 4257 - protein, 8 aa, Artificial Sequence
  Peptide Derived from Human Papillomavirus
SQGDCPPL

SEQ ID NO: 4258 - protein, 10 aa, Artificial Sequence
  Peptide Derived from Human Papillomavirus
SQGDCPPLEL

SEQ ID NO: 4259 - protein, 10 aa, Artificial Sequence
  Peptide Derived from Human Papillomavirus
SQLFNKPYWL

SEQ ID NO: 4260 - protein, 10 aa, Artificial Sequence
  Peptide Derived from Human Papillomavirus
STLQDTKCEV

SEQ ID NO: 4261 - protein, 8 aa, Artificial Sequence
  Peptide Derived from Human Papillomavirus
STNLTICA

SEQ ID NO: 4262 - protein, 10 aa, Artificial Sequence
  Peptide Derived from Human Papillomavirus
STNLTICAST

SEQ ID NO: 4263 - protein, 10 aa, Artificial Sequence
  Peptide Derived from Human Papillomavirus
SVAITCQKDA

SEQ ID NO: 4264 - protein, 11 aa, Artificial Sequence
  Peptide Derived from Human Papillomavirus
SVAITCQKDAA

SEQ ID NO: 4265 - protein, 8 aa, Artificial Sequence
  Peptide Derived from Human Papillomavirus
SVARVVNT

SEQ ID NO: 4266 - protein, 9 aa, Artificial Sequence
  Peptide Derived from Human Papillomavirus
SVDYKQTQL

SEQ ID NO: 4267 - protein, 11 aa, Artificial Sequence
  Peptide Derived from Human Papillomavirus
SVDYKQTQLCI

SEQ ID NO: 4268 - protein, 8 aa, Artificial Sequence
  Peptide Derived from Human Papillomavirus
TACKSRPL

SEQ ID NO: 4269 - protein, 8 aa, Artificial Sequence
  Peptide Derived from Human Papillomavirus
TADVMSYI

SEQ ID NO: 4270 - protein, 11 aa, Artificial Sequence
  Peptide Derived from Human Papillomavirus
TADVMSYIHSM

SEQ ID NO: 4271 - protein, 10 aa, Artificial Sequence
  Peptide Derived from Human Papillomavirus
TICASTQSPV

SEQ ID NO: 4272 - protein, 9 aa, Artificial Sequence
  Peptide Derived from Human Papillomavirus
TIGPRKRSA

SEQ ID NO: 4273 - protein, 8 aa, Artificial Sequence
  Peptide Derived from Human Papillomavirus
TITLTADV

SEQ ID NO: 4274 - protein, 9 aa, Artificial Sequence
  Peptide Derived from Human Papillomavirus
TITLTADVM

SEQ ID NO: 4275 - protein, 9 aa, Artificial Sequence
  Peptide Derived from Human Papillomavirus
TLQDTKCEV

SEQ ID NO: 4276 - protein, 11 aa, Artificial Sequence
  Peptide Derived from Human Papillomavirus
TLQDTKCEVPL

SEQ ID NO: 4277 - protein, 10 aa, Artificial Sequence
  Peptide Derived from Human Papillomavirus
TLTADVMSYI

SEQ ID NO: 4278 - protein, 10 aa, Artificial Sequence
  Peptide Derived from Human Papillomavirus
TMGDTVPQSL

SEQ ID NO: 4279 - protein, 9 aa, Artificial Sequence
  Peptide Derived from Human Papillomavirus
TQLCILGCA

SEQ ID NO: 4280 - protein, 11 aa, Artificial Sequence
  Peptide Derived from Human Papillomavirus
TQLCILGCAPA

SEQ ID NO: 4281 - protein, 9 aa, Artificial Sequence
  Peptide Derived from Human Papillomavirus
TQRLVWACA

SEQ ID NO: 4282 - protein, 11 aa, Artificial Sequence
  Peptide Derived from Human Papillomavirus
TQRLVWACAGV

SEQ ID NO: 4283 - protein, 11 aa, Artificial Sequence
  Peptide Derived from Human Papillomavirus
TQSPVPGQYDA

SEQ ID NO: 4284 - protein, 8 aa, Artificial Sequence
  Peptide Derived from Human Papillomavirus
TTPSTNLT

SEQ ID NO: 4285 - protein, 9 aa, Artificial Sequence
  Peptide Derived from Human Papillomavirus
TTPSTNLTI

SEQ ID NO: 4286 - protein, 11 aa, Artificial Sequence
  Peptide Derived from Human Papillomavirus
TTPSTNLTICA

SEQ ID NO: 4287 - protein, 11 aa, Artificial Sequence
  Peptide Derived from Human Papillomavirus
TTSLVDTYRFV

SEQ ID NO: 4288 - protein, 10 aa, Artificial Sequence
  Peptide Derived from Human Papillomavirus
TTSSKPAKRV

SEQ ID NO: 4289 - protein, 9 aa, Artificial Sequence
  Peptide Derived from Human Papillomavirus
TVGNPYFRV

SEQ ID NO: 4290 - protein, 11 aa, Artificial Sequence
  Peptide Derived from Human Papillomavirus
TVGNPYFRVPA

SEQ ID NO: 4291 - protein, 8 aa, Artificial Sequence
  Peptide Derived from Human Papillomavirus
TVLEDGDM

SEQ ID NO: 4292 - protein, 9 aa, Artificial Sequence
  Peptide Derived from Human Papillomavirus
TVLEDGDMV

SEQ ID NO: 4293 - protein, 11 aa, Artificial Sequence
  Peptide Derived from Human Papillomavirus
TVLEDGDMVDT

SEQ ID NO: 4294 - protein, 8 aa, Artificial Sequence
  Peptide Derived from Human Papillomavirus
TVPQSLYI

SEQ ID NO: 4295 - protein, 11 aa, Artificial Sequence
  Peptide Derived from Human Papillomavirus
TVPQSLYIKGT

SEQ ID NO: 4296 - protein, 9 aa, Artificial Sequence
  Peptide Derived from Human Papillomavirus
TVVDTTPST

SEQ ID NO: 4297 - protein, 11 aa, Artificial Sequence
  Peptide Derived from Human Papillomavirus
TVVDTTPSTNL

SEQ ID NO: 4298 - protein, 9 aa, Artificial Sequence
  Peptide Derived from Human Papillomavirus
TVYLPPPSV

SEQ ID NO: 4299 - protein, 10 aa, Artificial Sequence
  Peptide Derived from Human Papillomavirus
TVYLPPPSVA

SEQ ID NO: 4300 - protein, 9 aa, Artificial Sequence
  Peptide Derived from Human Papillomavirus
VAITCQKDA

SEQ ID NO: 4301 - protein, 10 aa, Artificial Sequence
  Peptide Derived from Human Papillomavirus
VAITCQKDAA

SEQ ID NO: 4302 - protein, 11 aa, Artificial Sequence
  Peptide Derived from Human Papillomavirus
VARVVNTDDYV

SEQ ID NO: 4303 - protein, 8 aa, Artificial Sequence
  Peptide Derived from Human Papillomavirus
VLEDGDMV

SEQ ID NO: 4304 - protein, 10 aa, Artificial Sequence
  Peptide Derived from Human Papillomavirus
VLEDGDMVDT

SEQ ID NO: 4305 - protein, 8 aa, Artificial Sequence
  Peptide Derived from Human Papillomavirus
VLILHYHL

SEQ ID NO: 4306 - protein, 9 aa, Artificial Sequence
  Peptide Derived from Human Papillomavirus
VLILHYHLL

SEQ ID NO: 4307 - protein, 11 aa, Artificial Sequence
  Peptide Derived from Human Papillomavirus
VLILHYHLLPL

SEQ ID NO: 4308 - protein, 8 aa, Artificial Sequence
  Peptide Derived from Human Papillomavirus
VMSYIHSM

SEQ ID NO: 4309 - protein, 10 aa, Artificial Sequence
  Peptide Derived from Human Papillomavirus
VQAGLRRKPT

SEQ ID NO: 4310 - protein, 11 aa, Artificial Sequence
  Peptide Derived from Human Papillomavirus
VQAGLRRKPTI

SEQ ID NO: 4311 - protein, 11 aa, Artificial Sequence
  Peptide Derived from Human Papillomavirus
VQLPDPNKFGL

SEQ ID NO: 4312 - protein, 10 aa, Artificial Sequence
  Peptide Derived from Human Papillomavirus
VTPTSIFYHA

SEQ ID NO: 4313 - protein, 10 aa, Artificial Sequence
  Peptide Derived from Human Papillomavirus
VTVVDTTPST

SEQ ID NO: 4314 - protein, 8 aa, Artificial Sequence
  Peptide Derived from Human Papillomavirus
VVDTTPST

SEQ ID NO: 4315 - protein, 10 aa, Artificial Sequence
  Peptide Derived from Human Papillomavirus
VVDTTPSTNL

SEQ ID NO: 4316 - protein, 11 aa, Artificial Sequence
  Peptide Derived from Human Papillomavirus
VVDTTPSTNLT

SEQ ID NO: 4317 - protein, 8 aa, Artificial Sequence
  Peptide Derived from Human Papillomavirus
VVNTDDYV

SEQ ID NO: 4318 - protein, 9 aa, Artificial Sequence
  Peptide Derived from Human Papillomavirus
VVNTDDYVT

SEQ ID NO: 4319 - protein, 11 aa, Artificial Sequence
  Peptide Derived from Human Papillomavirus
VVNTDDYVTPT

SEQ ID NO: 4320 - protein, 8 aa, Artificial Sequence
  Peptide Derived from Human Papillomavirus
WACAGVEI

SEQ ID NO: 4321 - protein, 9 aa, Artificial Sequence
  Peptide Derived from Human Papillomavirus
YIHSMNSSI

SEQ ID NO: 4322 - protein, 10 aa, Artificial Sequence
  Peptide Derived from Human Papillomavirus
YIHSMNSSIL

SEQ ID NO: 4323 - protein, 9 aa, Artificial Sequence
  Peptide Derived from Human Papillomavirus
YIILFLRNV

SEQ ID NO: 4324 - protein, 11 aa, Artificial Sequence
  Peptide Derived from Human Papillomavirus
YIILFLRNVNV

SEQ ID NO: 4325 - protein, 9 aa, Artificial Sequence
  Peptide Derived from Human Papillomavirus
YIKGTGMPA

SEQ ID NO: 4326 - protein, 8 aa, Artificial Sequence
  Peptide Derived from Human Papillomavirus
YLPPPSVA

SEQ ID NO: 4327 - protein, 10 aa, Artificial Sequence
  Peptide Derived from Human Papillomavirus
YLPPPSVARV

SEQ ID NO: 4328 - protein, 11 aa, Artificial Sequence
  Peptide Derived from Human Papillomavirus
YLPPPSVARVV

SEQ ID NO: 4329 - protein, 8 aa, Artificial Sequence
  Peptide Derived from Human Papillomavirus
YQYRVFRV

SEQ ID NO: 4330 - protein, 10 aa, Artificial Sequence
  Peptide Derived from Human Papillomavirus
YQYRVFRVQL

SEQ ID NO: 4331 - protein, 11 aa, Artificial Sequence
  Peptide Derived from Human Papillomavirus
YTRVLILHYHL

SEQ ID NO: 4332 - protein, 11 aa, Artificial Sequence
  Peptide Derived from Human Papillomavirus
YVTPTSIFYHA

SEQ ID NO: 4333 - protein, 9 aa, Artificial Sequence
  Peptide Derived from Human Papillomavirus
AARRKRASV

SEQ ID NO: 4334 - protein, 10 aa, Artificial Sequence
  Peptide Derived from Human Papillomavirus
AARRKRASVT

SEQ ID NO: 4335 - protein, 8 aa, Artificial Sequence
  Peptide Derived from Human Papillomavirus
ALTSRRGT

SEQ ID NO: 4336 - protein, 9 aa, Artificial Sequence
  Peptide Derived from Human Papillomavirus
ALTSRRGTV

SEQ ID NO: 4337 - protein, 10 aa, Artificial Sequence
  Peptide Derived from Human Papillomavirus
ATEDNDLFDI

SEQ ID NO: 4338 - protein, 9 aa, Artificial Sequence
  Peptide Derived from Human Papillomavirus
ATMFTRSGT

SEQ ID NO: 4339 - protein, 11 aa, Artificial Sequence
  Peptide Derived from Human Papillomavirus
ATMFTRSGTQI

SEQ ID NO: 4340 - protein, 10 aa, Artificial Sequence
  Peptide Derived from Human Papillomavirus
AVLDITPSST

SEQ ID NO: 4341 - protein, 9 aa, Artificial Sequence
  Peptide Derived from Human Papillomavirus
AVPVPSRST

SEQ ID NO: 4342 - protein, 10 aa, Artificial Sequence
  Peptide Derived from Human Papillomavirus
AVPVPSRSTT

SEQ ID NO: 4343 - protein, 9 aa, Artificial Sequence
  Peptide Derived from Human Papillomavirus
DIIRLHRPA

SEQ ID NO: 4344 - protein, 10 aa, Artificial Sequence
  Peptide Derived from Human Papillomavirus
DIIRLHRPAL

SEQ ID NO: 4345 - protein, 11 aa, Artificial Sequence
  Peptide Derived from Human Papillomavirus
DIIRLHRPALT

SEQ ID NO: 4346 - protein, 8 aa, Artificial Sequence
  Peptide Derived from Human Papillomavirus
DITLPSTT

SEQ ID NO: 4347 - protein, 10 aa, Artificial Sequence
  Peptide Derived from Human Papillomavirus
DITLPSTTSV

SEQ ID NO: 4348 - protein, 9 aa, Artificial Sequence
  Peptide Derived from Human Papillomavirus
DITPSSTSV

SEQ ID NO: 4349 - protein, 11 aa, Artificial Sequence
  Peptide Derived from Human Papillomavirus
DITPSSTSVSI

SEQ ID NO: 4350 - protein, 8 aa, Artificial Sequence
  Peptide Derived from Human Papillomavirus
DITSAGTT

SEQ ID NO: 4351 - protein, 9 aa, Artificial Sequence
  Peptide Derived from Human Papillomavirus
DITSAGTTT

SEQ ID NO: 4352 - protein, 11 aa, Artificial Sequence
  Peptide Derived from Human Papillomavirus
DITSAGTTTPA

SEQ ID NO: 4353 - protein, 10 aa, Artificial Sequence
  Peptide Derived from Human Papillomavirus
DIYADDMDPA

SEQ ID NO: 4354 - protein, 11 aa, Artificial Sequence
  Peptide Derived from Human Papillomavirus
DIYADDMDPAV

SEQ ID NO: 4355 - protein, 10 aa, Artificial Sequence
  Peptide Derived from Human Papillomavirus
DLFDIYADDM

SEQ ID NO: 4356 - protein, 11 aa, Artificial Sequence
  Peptide Derived from Human Papillomavirus
DLYKTCKQSGT

SEQ ID NO: 4357 - protein, 8 aa, Artificial Sequence
  Peptide Derived from Human Papillomavirus
DMDPAVPV

SEQ ID NO: 4358 - protein, 9 aa, Artificial Sequence
  Peptide Derived from Human Papillomavirus
DVGPTRPPV

SEQ ID NO: 4359 - protein, 10 aa, Artificial Sequence
  Peptide Derived from Human Papillomavirus
DVGPTRPPVV

SEQ ID NO: 4360 - protein, 11 aa, Artificial Sequence
  Peptide Derived from Human Papillomavirus
DVGPTRPPVVI

SEQ ID NO: 4361 - protein, 8 aa, Artificial Sequence
  Peptide Derived from Human Papillomavirus
DVPDSDFM

SEQ ID NO: 4362 - protein, 10 aa, Artificial Sequence
  Peptide Derived from Human Papillomavirus
DVPDSDFMDI

SEQ ID NO: 4363 - protein, 11 aa, Artificial Sequence
  Peptide Derived from Human Papillomavirus
DVPDSDFMDII

SEQ ID NO: 4364 - protein, 10 aa, Artificial Sequence
  Peptide Derived from Human Papillomavirus
DVPVYTGPDI

SEQ ID NO: 4365 - protein, 11 aa, Artificial Sequence
  Peptide Derived from Human Papillomavirus
DVPVYTGPDIT

SEQ ID NO: 4366 - protein, 9 aa, Artificial Sequence
  Peptide Derived from Human Papillomavirus
DVVPKVEGT

SEQ ID NO: 4367 - protein, 10 aa, Artificial Sequence
  Peptide Derived from Human Papillomavirus
DVVPKVEGTT

SEQ ID NO: 4368 - protein, 11 aa, Artificial Sequence
  Peptide Derived from Human Papillomavirus
DVVPKVEGTTL

SEQ ID NO: 4369 - protein, 8 aa, Artificial Sequence
  Peptide Derived from Human Papillomavirus
EIPLQTFA

SEQ ID NO: 4370 - protein, 8 aa, Artificial Sequence
  Peptide Derived from Human Papillomavirus
ELQPLVSA

SEQ ID NO: 4371 - protein, 9 aa, Artificial Sequence
  Peptide Derived from Human Papillomavirus
ELQPLVSAT

SEQ ID NO: 4372 - protein, 8 aa, Artificial Sequence
  Peptide Derived from Human Papillomavirus
EVAGNVFV

SEQ ID NO: 4373 - protein, 10 aa, Artificial Sequence
  Peptide Derived from Human Papillomavirus
EVAGNVFVGT

SEQ ID NO: 4374 - protein, 8 aa, Artificial Sequence
  Peptide Derived from Human Papillomavirus
EVPQTGEV

SEQ ID NO: 4375 - protein, 9 aa, Artificial Sequence
  Peptide Derived from Human Papillomavirus
EVPQTGEVA

SEQ ID NO: 4376 - protein, 8 aa, Artificial Sequence
  Peptide Derived from Human Papillomavirus
FADGFVAA

SEQ ID NO: 4377 - protein, 9 aa, Artificial Sequence
  Peptide Derived from Human Papillomavirus
FAFFKYSPT

SEQ ID NO: 4378 - protein, 10 aa, Artificial Sequence
  Peptide Derived from Human Papillomavirus
FAFFKYSPTI

SEQ ID NO: 4379 - protein, 11 aa, Artificial Sequence
  Peptide Derived from Human Papillomavirus
FASSGTGEEPI

SEQ ID NO: 4380 - protein, 9 aa, Artificial Sequence
  Peptide Derived from Human Papillomavirus
FIPKKRKRV

SEQ ID NO: 4381 - protein, 9 aa, Artificial Sequence
  Peptide Derived from Human Papillomavirus
FLGGLGIGT

SEQ ID NO: 4382 - protein, 8 aa, Artificial Sequence
  Peptide Derived from Human Papillomavirus
FLTRPSSL

SEQ ID NO: 4383 - protein, 9 aa, Artificial Sequence
  Peptide Derived from Human Papillomavirus
FLTRPSSLI

SEQ ID NO: 4384 - protein, 10 aa, Artificial Sequence
  Peptide Derived from Human Papillomavirus
FLTRPSSLIT

SEQ ID NO: 4385 - protein, 11 aa, Artificial Sequence
  Peptide Derived from Human Papillomavirus
FMDIIRLHRPA

SEQ ID NO: 4386 - protein, 9 aa, Artificial Sequence
  Peptide Derived from Human Papillomavirus
FTGTSGFDI

SEQ ID NO: 4387 - protein, 10 aa, Artificial Sequence
  Peptide Derived from Human Papillomavirus
FTGTSGFDIT

SEQ ID NO: 4388 - protein, 11 aa, Artificial Sequence
  Peptide Derived from Human Papillomavirus
FTNPAFSDPSI

SEQ ID NO: 4389 - protein, 8 aa, Artificial Sequence
  Peptide Derived from Human Papillomavirus
FTRSGTQI

SEQ ID NO: 4390 - protein, 10 aa, Artificial Sequence
  Peptide Derived from Human Papillomavirus
FTRSGTQIGA

SEQ ID NO: 4391 - protein, 9 aa, Artificial Sequence
  Peptide Derived from Human Papillomavirus
FVGTPTSGT

SEQ ID NO: 4392 - protein, 8 aa, Artificial Sequence
  Peptide Derived from Human Papillomavirus
GAPRPTFT

SEQ ID NO: 4393 - protein, 10 aa, Artificial Sequence
  Peptide Derived from Human Papillomavirus
GAPRPTFTGT

SEQ ID NO: 4394 - protein, 10 aa, Artificial Sequence
  Peptide Derived from Human Papillomavirus
GARVHFYHDI

SEQ ID NO: 4395 - protein, 9 aa, Artificial Sequence
  Peptide Derived from Human Papillomavirus
GIFLGGLGI

SEQ ID NO: 4396 - protein, 11 aa, Artificial Sequence
  Peptide Derived from Human Papillomavirus
GIFLGGLGIGT

SEQ ID NO: 4397 - protein, 8 aa, Artificial Sequence
  Peptide Derived from Human Papillomavirus
GIGTGSGT

SEQ ID NO: 4398 - protein, 9 aa, Artificial Sequence
  Peptide Derived from Human Papillomavirus
GIHGTHYYL

SEQ ID NO: 4399 - protein, 10 aa, Artificial Sequence
  Peptide Derived from Human Papillomavirus
GLGIGTGSGT

SEQ ID NO: 4400 - protein, 8 aa, Artificial Sequence
  Peptide Derived from Human Papillomavirus
GQRATMFT

SEQ ID NO: 4401 - protein, 8 aa, Artificial Sequence
  Peptide Derived from Human Papillomavirus
GTCPPDVV

SEQ ID NO: 4402 - protein, 11 aa, Artificial Sequence
  Peptide Derived from Human Papillomavirus
GTCPPDVVPKV

SEQ ID NO: 4403 - protein, 10 aa, Artificial Sequence
  Peptide Derived from Human Papillomavirus
GTGEEPISST

SEQ ID NO: 4404 - protein, 9 aa, Artificial Sequence
  Peptide Derived from Human Papillomavirus
GTGGRTGYI

SEQ ID NO: 4405 - protein, 11 aa, Artificial Sequence
  Peptide Derived from Human Papillomavirus
GTGGRTGYIPL

SEQ ID NO: 4406 - protein, 10 aa, Artificial Sequence
  Peptide Derived from Human Papillomavirus
GTGSGTGGRT

SEQ ID NO: 4407 - protein, 8 aa, Artificial Sequence
  Peptide Derived from Human Papillomavirus
GTHGYEEI

SEQ ID NO: 4408 - protein, 10 aa, Artificial Sequence
  Peptide Derived from Human Papillomavirus
GTHGYEEIPL

SEQ ID NO: 4409 - protein, 9 aa, Artificial Sequence
  Peptide Derived from Human Papillomavirus
GTHYYLWPL

SEQ ID NO: 4410 - protein, 8 aa, Artificial Sequence
  Peptide Derived from Human Papillomavirus
GTQIGARV

SEQ ID NO: 4411 - protein, 8 aa, Artificial Sequence
  Peptide Derived from Human Papillomavirus
GTSGFDIT

SEQ ID NO: 4412 - protein, 10 aa, Artificial Sequence
  Peptide Derived from Human Papillomavirus
GTSGFDITSA

SEQ ID NO: 4413 - protein, 8 aa, Artificial Sequence
  Peptide Derived from Human Papillomavirus
GTTLADKI

SEQ ID NO: 4414 - protein, 9 aa, Artificial Sequence
  Peptide Derived from Human Papillomavirus
GTTLADKIL

SEQ ID NO: 4415 - protein, 8 aa, Artificial Sequence
  Peptide Derived from Human Papillomavirus
GTTTPAVL

SEQ ID NO: 4416 - protein, 10 aa, Artificial Sequence
  Peptide Derived from Human Papillomavirus
GTTTPAVLDI

SEQ ID NO: 4417 - protein, 11 aa, Artificial Sequence
  Peptide Derived from Human Papillomavirus
GTTTPAVLDIT

SEQ ID NO: 4418 - protein, 8 aa, Artificial Sequence
  Peptide Derived from Human Papillomavirus
GTVRFSRL

SEQ ID NO: 4419 - protein, 8 aa, Artificial Sequence
  Peptide Derived from Human Papillomavirus
IAPSPEYI

SEQ ID NO: 4420 - protein, 10 aa, Artificial Sequence
  Peptide Derived from Human Papillomavirus
IAPSPEYIEL

SEQ ID NO: 4421 - protein, 10 aa, Artificial Sequence
  Peptide Derived from Human Papillomavirus
IIEVPQTGEV

SEQ ID NO: 4422 - protein, 11 aa, Artificial Sequence
  Peptide Derived from Human Papillomavirus
IIEVPQTGEVA

SEQ ID NO: 4423 - protein, 8 aa, Artificial Sequence
  Peptide Derived from Human Papillomavirus
IIRLHRPA

SEQ ID NO: 4424 - protein, 9 aa, Artificial Sequence
  Peptide Derived from Human Papillomavirus
IIRLHRPAL

SEQ ID NO: 4425 - protein, 10 aa, Artificial Sequence
  Peptide Derived from Human Papillomavirus
IIRLHRPALT

SEQ ID NO: 4426 - protein, 9 aa, Artificial Sequence
  Peptide Derived from Human Papillomavirus
ILQWSSLGI

SEQ ID NO: 4427 - protein, 11 aa, Artificial Sequence
  Peptide Derived from Human Papillomavirus
ILQWSSLGIFL

SEQ ID NO: 4428 - protein, 9 aa, Artificial Sequence
  Peptide Derived from Human Papillomavirus
ITLPSTTSV

SEQ ID NO: 4429 - protein, 8 aa, Artificial Sequence
  Peptide Derived from Human Papillomavirus
ITPSSTSV

SEQ ID NO: 4430 - protein, 10 aa, Artificial Sequence
  Peptide Derived from Human Papillomavirus
ITPSSTSVSI

SEQ ID NO: 4431 - protein, 8 aa, Artificial Sequence
  Peptide Derived from Human Papillomavirus
ITSAGTTT

SEQ ID NO: 4432 - protein, 10 aa, Artificial Sequence
  Peptide Derived from Human Papillomavirus
ITSAGTTTPA

SEQ ID NO: 4433 - protein, 11 aa, Artificial Sequence
  Peptide Derived from Human Papillomavirus
ITSAGTTTPAV

SEQ ID NO: 4434 - protein, 11 aa, Artificial Sequence
  Peptide Derived from Human Papillomavirus
ITYDNPAFEPV

SEQ ID NO: 4435 - protein, 8 aa, Artificial Sequence
  Peptide Derived from Human Papillomavirus
IVSPTAPA

SEQ ID NO: 4436 - protein, 10 aa, Artificial Sequence
  Peptide Derived from Human Papillomavirus
IVSPTAPAST

SEQ ID NO: 4437 - protein, 10 aa, Artificial Sequence
  Peptide Derived from Human Papillomavirus
IVTLIEDSSV

SEQ ID NO: 4438 - protein, 11 aa, Artificial Sequence
  Peptide Derived from Human Papillomavirus
IVTLIEDSSVV

SEQ ID NO: 4439 - protein, 8 aa, Artificial Sequence
  Peptide Derived from Human Papillomavirus
KILQWSSL

SEQ ID NO: 4440 - protein, 10 aa, Artificial Sequence
  Peptide Derived from Human Papillomavirus
KILQWSSLGI

SEQ ID NO: 4441 - protein, 10 aa, Artificial Sequence
  Peptide Derived from Human Papillomavirus
KQSGTCPPDV

SEQ ID NO: 4442 - protein, 11 aa, Artificial Sequence
  Peptide Derived from Human Papillomavirus
KQSGTCPPDVV

SEQ ID NO: 4443 - protein, 8 aa, Artificial Sequence
  Peptide Derived from Human Papillomavirus
KTCKQSGT

SEQ ID NO: 4444 - protein, 8 aa, Artificial Sequence
  Peptide Derived from Human Papillomavirus
KVEGTTLA

SEQ ID NO: 4445 - protein, 11 aa, Artificial Sequence
  Peptide Derived from Human Papillomavirus
KVEGTTLADKI

SEQ ID NO: 4446 - protein, 11 aa, Artificial Sequence
  Peptide Derived from Human Papillomavirus
LADKILQWSSL

SEQ ID NO: 4447 - protein, 8 aa, Artificial Sequence
  Peptide Derived from Human Papillomavirus
LIEDSSVV

SEQ ID NO: 4448 - protein, 9 aa, Artificial Sequence
  Peptide Derived from Human Papillomavirus
LIEDSSVVT

SEQ ID NO: 4449 - protein, 8 aa, Artificial Sequence
  Peptide Derived from Human Papillomavirus
LITYDNPA

SEQ ID NO: 4450 - protein, 8 aa, Artificial Sequence
  Peptide Derived from Human Papillomavirus
LQPLVSAT

SEQ ID NO: 4451 - protein, 9 aa, Artificial Sequence
  Peptide Derived from Human Papillomavirus
LQTFASSGT

SEQ ID NO: 4452 - protein, 8 aa, Artificial Sequence
  Peptide Derived from Human Papillomavirus
LQWSSLGI

SEQ ID NO: 4453 - protein, 10 aa, Artificial Sequence
  Peptide Derived from Human Papillomavirus
LQWSSLGIFL

SEQ ID NO: 4454 - protein, 9 aa, Artificial Sequence
  Peptide Derived from Human Papillomavirus
LTFDPRSDV

SEQ ID NO: 4455 - protein, 8 aa, Artificial Sequence
  Peptide Derived from Human Papillomavirus
LTRPSSLI

SEQ ID NO: 4456 - protein, 9 aa, Artificial Sequence
  Peptide Derived from Human Papillomavirus
LTRPSSLIT

SEQ ID NO: 4457 - protein, 8 aa, Artificial Sequence
  Peptide Derived from Human Papillomavirus
LTSRRGTV

SEQ ID NO: 4458 - protein, 9 aa, Artificial Sequence
  Peptide Derived from Human Papillomavirus
LTSSWDVPV

SEQ ID NO: 4459 - protein, 11 aa, Artificial Sequence
  Peptide Derived from Human Papillomavirus
LTSSWDVPVYT

SEQ ID NO: 4460 - protein, 10 aa, Artificial Sequence
  Peptide Derived from Human Papillomavirus
LVSATEDNDL

SEQ ID NO: 4461 - protein, 9 aa, Artificial Sequence
  Peptide Derived from Human Papillomavirus
NTVVDVGPT

SEQ ID NO: 4462 - protein, 8 aa, Artificial Sequence
  Peptide Derived from Human Papillomavirus
NVFVGTPT

SEQ ID NO: 4463 - protein, 11 aa, Artificial Sequence
  Peptide Derived from Human Papillomavirus
NVFVGTPTSGT

SEQ ID NO: 4464 - protein, 8 aa, Artificial Sequence
  Peptide Derived from Human Papillomavirus
PAFEPVDT

SEQ ID NO: 4465 - protein, 9 aa, Artificial Sequence
  Peptide Derived from Human Papillomavirus
PAFEPVDTT

SEQ ID NO: 4466 - protein, 10 aa, Artificial Sequence
  Peptide Derived from Human Papillomavirus
PAFEPVDTTL

SEQ ID NO: 4467 - protein, 11 aa, Artificial Sequence
  Peptide Derived from Human Papillomavirus
PAFEPVDTTLT

SEQ ID NO: 4468 - protein, 8 aa, Artificial Sequence
  Peptide Derived from Human Papillomavirus
PAFSDPSI

SEQ ID NO: 4469 - protein, 9 aa, Artificial Sequence
  Peptide Derived from Human Papillomavirus
PAFSDPSII

SEQ ID NO: 4470 - protein, 11 aa, Artificial Sequence
  Peptide Derived from Human Papillomavirus
PAFSDPSIIEV

SEQ ID NO: 4471 - protein, 9 aa, Artificial Sequence
  Peptide Derived from Human Papillomavirus
PALTSRRGT

SEQ ID NO: 4472 - protein, 10 aa, Artificial Sequence
  Peptide Derived from Human Papillomavirus
PALTSRRGTV

SEQ ID NO: 4473 - protein, 9 aa, Artificial Sequence
  Peptide Derived from Human Papillomavirus
PASTQYIGI

SEQ ID NO: 4474 - protein, 11 aa, Artificial Sequence
  Peptide Derived from Human Papillomavirus
PAVLDITPSST

SEQ ID NO: 4475 - protein, 10 aa, Artificial Sequence
  Peptide Derived from Human Papillomavirus
PAVPVPSRST

SEQ ID NO: 4476 - protein, 11 aa, Artificial Sequence
  Peptide Derived from Human Papillomavirus
PAVPVPSRSTT

SEQ ID NO: 4477 - protein, 9 aa, Artificial Sequence
  Peptide Derived from Human Papillomavirus
PIAPSPEYI

SEQ ID NO: 4478 - protein, 11 aa, Artificial Sequence
  Peptide Derived from Human Papillomavirus
PIAPSPEYIEL

SEQ ID NO: 4479 - protein, 9 aa, Artificial Sequence
  Peptide Derived from Human Papillomavirus
PISSTPLPT

SEQ ID NO: 4480 - protein, 10 aa, Artificial Sequence
  Peptide Derived from Human Papillomavirus
PISSTPLPTV

SEQ ID NO: 4481 - protein, 9 aa, Artificial Sequence
  Peptide Derived from Human Papillomavirus
PIVSPTAPA

SEQ ID NO: 4482 - protein, 11 aa, Artificial Sequence
  Peptide Derived from Human Papillomavirus
PIVSPTAPAST

SEQ ID NO: 4483 - protein, 8 aa, Artificial Sequence
  Peptide Derived from Human Papillomavirus
PLGGRSNT

SEQ ID NO: 4484 - protein, 9 aa, Artificial Sequence
  Peptide Derived from Human Papillomavirus
PLGGRSNTV

SEQ ID NO: 4485 - protein, 10 aa, Artificial Sequence
  Peptide Derived from Human Papillomavirus
PLGGRSNTVV

SEQ ID NO: 4486 - protein, 8 aa, Artificial Sequence
  Peptide Derived from Human Papillomavirus
PLPTVRRV

SEQ ID NO: 4487 - protein, 9 aa, Artificial Sequence
  Peptide Derived from Human Papillomavirus
PLPTVRRVA

SEQ ID NO: 4488 - protein, 10 aa, Artificial Sequence
  Peptide Derived from Human Papillomavirus
PLQTFASSGT

SEQ ID NO: 4489 - protein, 8 aa, Artificial Sequence
  Peptide Derived from Human Papillomavirus
PLTSSWDV

SEQ ID NO: 4490 - protein, 10 aa, Artificial Sequence
  Peptide Derived from Human Papillomavirus
PLTSSWDVPV

SEQ ID NO: 4491 - protein, 11 aa, Artificial Sequence
  Peptide Derived from Human Papillomavirus
PLVSATEDNDL

SEQ ID NO: 4492 - protein, 10 aa, Artificial Sequence
  Peptide Derived from Human Papillomavirus
PQTGEVAGNV

SEQ ID NO: 4493 - protein, 10 aa, Artificial Sequence
  Peptide Derived from Human Papillomavirus
PTAPASTQYI

SEQ ID NO: 4494 - protein, 8 aa, Artificial Sequence
  Peptide Derived from Human Papillomavirus
PTDPSIVT

SEQ ID NO: 4495 - protein, 9 aa, Artificial Sequence
  Peptide Derived from Human Papillomavirus
PTDPSIVTL

SEQ ID NO: 4496 - protein, 10 aa, Artificial Sequence
  Peptide Derived from Human Papillomavirus
PTDPSIVTLI

SEQ ID NO: 4497 - protein, 11 aa, Artificial Sequence
  Peptide Derived from Human Papillomavirus
PTFTGTSGFDI

SEQ ID NO: 4498 - protein, 8 aa, Artificial Sequence
  Peptide Derived from Human Papillomavirus
PTRPPVVI

SEQ ID NO: 4499 - protein, 11 aa, Artificial Sequence
  Peptide Derived from Human Papillomavirus
PTRPPVVIEPV

SEQ ID NO: 4500 - protein, 11 aa, Artificial Sequence
  Peptide Derived from Human Papillomavirus
PTSGTHGYEEI

SEQ ID NO: 4501 - protein, 11 aa, Artificial Sequence
  Peptide Derived from Human Papillomavirus
PTVRRVAGPRL

SEQ ID NO: 4502 - protein, 9 aa, Artificial Sequence
  Peptide Derived from Human Papillomavirus
PVGPTDPSI

SEQ ID NO: 4503 - protein, 10 aa, Artificial Sequence
  Peptide Derived from Human Papillomavirus
PVGPTDPSIV

SEQ ID NO: 4504 - protein, 11 aa, Artificial Sequence
  Peptide Derived from Human Papillomavirus
PVGPTDPSIVT

SEQ ID NO: 4505 - protein, 8 aa, Artificial Sequence
  Peptide Derived from Human Papillomavirus
PVPSRSTT

SEQ ID NO: 4506 - protein, 11 aa, Artificial Sequence
  Peptide Derived from Human Papillomavirus
PVPSRSTTSFA

SEQ ID NO: 4507 - protein, 10 aa, Artificial Sequence
  Peptide Derived from Human Papillomavirus
PVVIEPVGPT

SEQ ID NO: 4508 - protein, 8 aa, Artificial Sequence
  Peptide Derived from Human Papillomavirus
PVYTGPDI

SEQ ID NO: 4509 - protein, 9 aa, Artificial Sequence
  Peptide Derived from Human Papillomavirus
PVYTGPDIT

SEQ ID NO: 4510 - protein, 10 aa, Artificial Sequence
  Peptide Derived from Human Papillomavirus
PVYTGPDITL

SEQ ID NO: 4511 - protein, 11 aa, Artificial Sequence
  Peptide Derived from Human Papillomavirus
QQVSVANPEFL

SEQ ID NO: 4512 - protein, 8 aa, Artificial Sequence
  Peptide Derived from Human Papillomavirus
QTFASSGT

SEQ ID NO: 4513 - protein, 9 aa, Artificial Sequence
  Peptide Derived from Human Papillomavirus
QTGEVAGNV

SEQ ID NO: 4514 - protein, 11 aa, Artificial Sequence
  Peptide Derived from Human Papillomavirus
QTGEVAGNVFV

SEQ ID NO: 4515 - protein, 10 aa, Artificial Sequence
  Peptide Derived from Human Papillomavirus
QVSVANPEFL

SEQ ID NO: 4516 - protein, 11 aa, Artificial Sequence
  Peptide Derived from Human Papillomavirus
QVSVANPEFLT

SEQ ID NO: 4517 - protein, 8 aa, Artificial Sequence
  Peptide Derived from Human Papillomavirus
RAARRKRA

SEQ ID NO: 4518 - protein, 10 aa, Artificial Sequence
  Peptide Derived from Human Papillomavirus
RAARRKRASV

SEQ ID NO: 4519 - protein, 11 aa, Artificial Sequence
  Peptide Derived from Human Papillomavirus
RAARRKRASVT

SEQ ID NO: 4520 - protein, 10 aa, Artificial Sequence
  Peptide Derived from Human Papillomavirus
RASVTDLYKT

SEQ ID NO: 4521 - protein, 10 aa, Artificial Sequence
  Peptide Derived from Human Papillomavirus
RATMFTRSGT

SEQ ID NO: 4522 - protein, 8 aa, Artificial Sequence
  Peptide Derived from Human Papillomavirus
RAYQQVSV

SEQ ID NO: 4523 - protein, 9 aa, Artificial Sequence
  Peptide Derived from Human Papillomavirus
RAYQQVSVA

SEQ ID NO: 4524 - protein, 8 aa, Artificial Sequence
  Peptide Derived from Human Papillomavirus
RLGQRATM

SEQ ID NO: 4525 - protein, 10 aa, Artificial Sequence
  Peptide Derived from Human Papillomavirus
RLGQRATMFT

SEQ ID NO: 4526 - protein, 8 aa, Artificial Sequence
  Peptide Derived from Human Papillomavirus
RLHRPALT

SEQ ID NO: 4527 - protein, 10 aa, Artificial Sequence
  Peptide Derived from Human Papillomavirus
RLYSRAYQQV

SEQ ID NO: 4528 - protein, 11 aa, Artificial Sequence
  Peptide Derived from Human Papillomavirus
RVAGPRLYSRA

SEQ ID NO: 4529 - protein, 8 aa, Artificial Sequence
  Peptide Derived from Human Papillomavirus
RVHFYHDI

SEQ ID NO: 4530 - protein, 11 aa, Artificial Sequence
  Peptide Derived from Human Papillomavirus
RVHFYHDISPI

SEQ ID NO: 4531 - protein, 11 aa, Artificial Sequence
  Peptide Derived from Human Papillomavirus
RVPYFFADGFV

SEQ ID NO: 4532 - protein, 8 aa, Artificial Sequence
  Peptide Derived from Human Papillomavirus
SAGTTTPA

SEQ ID NO: 4533 - protein, 9 aa, Artificial Sequence
  Peptide Derived from Human Papillomavirus
SAGTTTPAV

SEQ ID NO: 4534 - protein, 10 aa, Artificial Sequence
  Peptide Derived from Human Papillomavirus
SAGTTTPAVL

SEQ ID NO: 4535 - protein, 8 aa, Artificial Sequence
  Peptide Derived from Human Papillomavirus
SASSYSNV

SEQ ID NO: 4536 - protein, 9 aa, Artificial Sequence
  Peptide Derived from Human Papillomavirus
SASSYSNVT

SEQ ID NO: 4537 - protein, 10 aa, Artificial Sequence
  Peptide Derived from Human Papillomavirus
SASSYSNVTV

SEQ ID NO: 4538 - protein, 8 aa, Artificial Sequence
  Peptide Derived from Human Papillomavirus
SATEDNDL

SEQ ID NO: 4539 - protein, 11 aa, Artificial Sequence
  Peptide Derived from Human Papillomavirus
SATEDNDLFDI

SEQ ID NO: 4540 - protein, 8 aa, Artificial Sequence
  Peptide Derived from Human Papillomavirus
SIIEVPQT

SEQ ID NO: 4541 - protein, 11 aa, Artificial Sequence
  Peptide Derived from Human Papillomavirus
SIIEVPQTGEV

SEQ ID NO: 4542 - protein, 8 aa, Artificial Sequence
  Peptide Derived from Human Papillomavirus
SISTTNFT

SEQ ID NO: 4543 - protein, 11 aa, Artificial Sequence
  Peptide Derived from Human Papillomavirus
SISTTNFTNPA

SEQ ID NO: 4544 - protein, 11 aa, Artificial Sequence
  Peptide Derived from Human Papillomavirus
SIVTLIEDSSV

SEQ ID NO: 4545 - protein, 9 aa, Artificial Sequence
  Peptide Derived from Human Papillomavirus
SLGIFLGGL

SEQ ID NO: 4546 - protein, 11 aa, Artificial Sequence
  Peptide Derived from Human Papillomavirus
SLGIFLGGLGI

SEQ ID NO: 4547 - protein, 9 aa, Artificial Sequence
  Peptide Derived from Human Papillomavirus
SLITYDNPA

SEQ ID NO: 4548 - protein, 10 aa, Artificial Sequence
  Peptide Derived from Human Papillomavirus
STPLPTVRRV

SEQ ID NO: 4549 - protein, 11 aa, Artificial Sequence
  Peptide Derived from Human Papillomavirus
STPLPTVRRVA

SEQ ID NO: 4550 - protein, 10 aa, Artificial Sequence
  Peptide Derived from Human Papillomavirus
STQYIGIHGT

SEQ ID NO: 4551 - protein, 8 aa, Artificial Sequence
  Peptide Derived from Human Papillomavirus
STSVSIST

SEQ ID NO: 4552 - protein, 9 aa, Artificial Sequence
  Peptide Derived from Human Papillomavirus
STSVSISTT

SEQ ID NO: 4553 - protein, 9 aa, Artificial Sequence
  Peptide Derived from Human Papillomavirus
STTNFTNPA

SEQ ID NO: 4554 - protein, 8 aa, Artificial Sequence
  Peptide Derived from Human Papillomavirus
STTSVWPI

SEQ ID NO: 4555 - protein, 9 aa, Artificial Sequence
  Peptide Derived from Human Papillomavirus
STTSVWPIV

SEQ ID NO: 4556 - protein, 8 aa, Artificial Sequence
  Peptide Derived from Human Papillomavirus
SVANPEFL

SEQ ID NO: 4557 - protein, 9 aa, Artificial Sequence
  Peptide Derived from Human Papillomavirus
SVANPEFLT

SEQ ID NO: 4558 - protein, 10 aa, Artificial Sequence
  Peptide Derived from Human Papillomavirus
SVSISTTNFT

SEQ ID NO: 4559 - protein, 8 aa, Artificial Sequence
  Peptide Derived from Human Papillomavirus
SVTDLYKT

SEQ ID NO: 4560 - protein, 11 aa, Artificial Sequence
  Peptide Derived from Human Papillomavirus
SVVTSGAPRPT

SEQ ID NO: 4561 - protein, 9 aa, Artificial Sequence
  Peptide Derived from Human Papillomavirus
SVWPIVSPT

SEQ ID NO: 4562 - protein, 10 aa, Artificial Sequence
  Peptide Derived from Human Papillomavirus
SVWPIVSPTA

SEQ ID NO: 4563 - protein, 9 aa, Artificial Sequence
  Peptide Derived from Human Papillomavirus
TAPASTQYI

SEQ ID NO: 4564 - protein, 11 aa, Artificial Sequence
  Peptide Derived from Human Papillomavirus
TAPASTQYIGI

SEQ ID NO: 4565 - protein, 11 aa, Artificial Sequence
  Peptide Derived from Human Papillomavirus
TISSASSYSNV

SEQ ID NO: 4566 - protein, 8 aa, Artificial Sequence
  Peptide Derived from Human Papillomavirus
TLIEDSSV

SEQ ID NO: 4567 - protein, 9 aa, Artificial Sequence
  Peptide Derived from Human Papillomavirus
TLIEDSSVV

SEQ ID NO: 4568 - protein, 10 aa, Artificial Sequence
  Peptide Derived from Human Papillomavirus
TLIEDSSVVT

SEQ ID NO: 4569 - protein, 8 aa, Artificial Sequence
  Peptide Derived from Human Papillomavirus
TLPSTTSV

SEQ ID NO: 4570 - protein, 11 aa, Artificial Sequence
  Peptide Derived from Human Papillomavirus
TLPSTTSVWPI

SEQ ID NO: 4571 - protein, 10 aa, Artificial Sequence
  Peptide Derived from Human Papillomavirus
TLTFDPRSDV

SEQ ID NO: 4572 - protein, 8 aa, Artificial Sequence
  Peptide Derived from Human Papillomavirus
TMFTRSGT

SEQ ID NO: 4573 - protein, 10 aa, Artificial Sequence
  Peptide Derived from Human Papillomavirus
TMFTRSGTQI

SEQ ID NO: 4574 - protein, 9 aa, Artificial Sequence
  Peptide Derived from Human Papillomavirus
TQYIGIHGT

SEQ ID NO: 4575 - protein, 8 aa, Artificial Sequence
  Peptide Derived from Human Papillomavirus
TTLADKIL

SEQ ID NO: 4576 - protein, 11 aa, Artificial Sequence
  Peptide Derived from Human Papillomavirus
TTLTFDPRSDV

SEQ ID NO: 4577 - protein, 8 aa, Artificial Sequence
  Peptide Derived from Human Papillomavirus
TTNFTNPA

SEQ ID NO: 4578 - protein, 8 aa, Artificial Sequence
  Peptide Derived from Human Papillomavirus
TTPAVLDI

SEQ ID NO: 4579 - protein, 9 aa, Artificial Sequence
  Peptide Derived from Human Papillomavirus
TTPAVLDIT

SEQ ID NO: 4580 - protein, 8 aa, Artificial Sequence
  Peptide Derived from Human Papillomavirus
TTSVWPIV

SEQ ID NO: 4581 - protein, 11 aa, Artificial Sequence
  Peptide Derived from Human Papillomavirus
TTSVWPIVSPT

SEQ ID NO: 4582 - protein, 9 aa, Artificial Sequence
  Peptide Derived from Human Papillomavirus
TTTPAVLDI

SEQ ID NO: 4583 - protein, 10 aa, Artificial Sequence
  Peptide Derived from Human Papillomavirus
TTTPAVLDIT

SEQ ID NO: 4584 - protein, 10 aa, Artificial Sequence
  Peptide Derived from Human Papillomavirus
TVPLTSSWDV

SEQ ID NO: 4585 - protein, 11 aa, Artificial Sequence
  Peptide Derived from Human Papillomavirus
TVRFSRLGQRA

SEQ ID NO: 4586 - protein, 10 aa, Artificial Sequence
  Peptide Derived from Human Papillomavirus
TVRRVAGPRL

SEQ ID NO: 4587 - protein, 8 aa, Artificial Sequence
  Peptide Derived from Human Papillomavirus
TVVDVGPT

SEQ ID NO: 4588 - protein, 9 aa, Artificial Sequence
  Peptide Derived from Human Papillomavirus
VAGNVFVGT

SEQ ID NO: 4589 - protein, 11 aa, Artificial Sequence
  Peptide Derived from Human Papillomavirus
VAGNVFVGTPT

SEQ ID NO: 4590 - protein, 10 aa, Artificial Sequence
  Peptide Derived from Human Papillomavirus
VAGPRLYSRA

SEQ ID NO: 4591 - protein, 8 aa, Artificial Sequence
  Peptide Derived from Human Papillomavirus
VANPEFLT

SEQ ID NO: 4592 - protein, 8 aa, Artificial Sequence
  Peptide Derived from Human Papillomavirus
VIEPVGPT

SEQ ID NO: 4593 - protein, 9 aa, Artificial Sequence
  Peptide Derived from Human Papillomavirus
VLDITPSST

SEQ ID NO: 4594 - protein, 11 aa, Artificial Sequence
  Peptide Derived from Human Papillomavirus
VLDITPSSTSV

SEQ ID NO: 4595 - protein, 9 aa, Artificial Sequence
  Peptide Derived from Human Papillomavirus
VTLIEDSSV

SEQ ID NO: 4596 - protein, 10 aa, Artificial Sequence
  Peptide Derived from Human Papillomavirus
VTLIEDSSVV

SEQ ID NO: 4597 - protein, 11 aa, Artificial Sequence
  Peptide Derived from Human Papillomavirus
VTLIEDSSVVT

SEQ ID NO: 4598 - protein, 9 aa, Artificial Sequence
  Peptide Derived from Human Papillomavirus
VTSGAPRPT

SEQ ID NO: 4599 - protein, 11 aa, Artificial Sequence
  Peptide Derived from Human Papillomavirus
VTSGAPRPTFT

SEQ ID NO: 4600 - protein, 11 aa, Artificial Sequence
  Peptide Derived from Human Papillomavirus
VTVPLTSSWDV

SEQ ID NO: 4601 - protein, 11 aa, Artificial Sequence
  Peptide Derived from Human Papillomavirus
VVDVGPTRPPV

SEQ ID NO: 4602 - protein, 9 aa, Artificial Sequence
  Peptide Derived from Human Papillomavirus
VVIEPVGPT

SEQ ID NO: 4603 - protein, 8 aa, Artificial Sequence
  Peptide Derived from Human Papillomavirus
VVPKVEGT

SEQ ID NO: 4604 - protein, 9 aa, Artificial Sequence
  Peptide Derived from Human Papillomavirus
VVPKVEGTT

SEQ ID NO: 4605 - protein, 10 aa, Artificial Sequence
  Peptide Derived from Human Papillomavirus
VVPKVEGTTL

SEQ ID NO: 4606 - protein, 11 aa, Artificial Sequence
  Peptide Derived from Human Papillomavirus
VVPKVEGTTLA

SEQ ID NO: 4607 - protein, 10 aa, Artificial Sequence
  Peptide Derived from Human Papillomavirus
VVTSGAPRPT

SEQ ID NO: 4608 - protein, 8 aa, Artificial Sequence
  Peptide Derived from Human Papillomavirus
YADDMDPA

SEQ ID NO: 4609 - protein, 9 aa, Artificial Sequence
  Peptide Derived from Human Papillomavirus
YADDMDPAV

SEQ ID NO: 4610 - protein, 11 aa, Artificial Sequence
  Peptide Derived from Human Papillomavirus
YADDMDPAVPV

SEQ ID NO: 4611 - protein, 8 aa, Artificial Sequence
  Peptide Derived from Human Papillomavirus
YIELQPLV

SEQ ID NO: 4612 - protein, 10 aa, Artificial Sequence
  Peptide Derived from Human Papillomavirus
YIELQPLVSA

SEQ ID NO: 4613 - protein, 11 aa, Artificial Sequence
  Peptide Derived from Human Papillomavirus
YIELQPLVSAT

SEQ ID NO: 4614 - protein, 11 aa, Artificial Sequence
  Peptide Derived from Human Papillomavirus
YIGIHGTHYYL

SEQ ID NO: 4615 - protein, 10 aa, Artificial Sequence
  Peptide Derived from Human Papillomavirus
YIPLGGRSNT

SEQ ID NO: 4616 - protein, 11 aa, Artificial Sequence
  Peptide Derived from Human Papillomavirus
YIPLGGRSNTV

SEQ ID NO: 4617 - protein, 9 aa, Artificial Sequence
  Peptide Derived from Human Papillomavirus
YLWPLYYFI

SEQ ID NO: 4618 - protein, 8 aa, Artificial Sequence
  Peptide Derived from Human Papillomavirus
YTGPDITL

SEQ ID NO: 4619 - protein, 11 aa, Artificial Sequence
  Peptide Derived from Human Papillomavirus
YTGPDITLPST

SEQ ID NO: 4620 - protein, 9 aa, Artificial Sequence
  Peptide Derived from Human Papillomavirus
AAALYWYRT

SEQ ID NO: 4621 - protein, 11 aa, Artificial Sequence
  Peptide Derived from Human Papillomavirus
AAALYWYRTGM

SEQ ID NO: 4622 - protein, 8 aa, Artificial Sequence
  Peptide Derived from Human Papillomavirus
AAFGVTGT

SEQ ID NO: 4623 - protein, 9 aa, Artificial Sequence
  Peptide Derived from Human Papillomavirus
AAFGVTGTV

SEQ ID NO: 4624 - protein, 10 aa, Artificial Sequence
  Peptide Derived from Human Papillomavirus
AAFGVTGTVA

SEQ ID NO: 4625 - protein, 8 aa, Artificial Sequence
  Peptide Derived from Human Papillomavirus
AALYWYRT

SEQ ID NO: 4626 - protein, 10 aa, Artificial Sequence
  Peptide Derived from Human Papillomavirus
AALYWYRTGM

SEQ ID NO: 4627 - protein, 10 aa, Artificial Sequence
  Peptide Derived from Human Papillomavirus
AAMLGKFKEL

SEQ ID NO: 4628 - protein, 10 aa, Artificial Sequence
  Peptide Derived from Human Papillomavirus
AICIENNSKT

SEQ ID NO: 4629 - protein, 11 aa, Artificial Sequence
  Peptide Derived from Human Papillomavirus
AICIENNSKTA

SEQ ID NO: 4630 - protein, 9 aa, Artificial Sequence
  Peptide Derived from Human Papillomavirus
ALDGNPVSI

SEQ ID NO: 4631 - protein, 11 aa, Artificial Sequence
  Peptide Derived from Human Papillomavirus
ALDGNPVSIDV

SEQ ID NO: 4632 - protein, 8 aa, Artificial Sequence
  Peptide Derived from Human Papillomavirus
ALFHAQEA

SEQ ID NO: 4633 - protein, 9 aa, Artificial Sequence
  Peptide Derived from Human Papillomavirus
ALKLFLKGV

SEQ ID NO: 4634 - protein, 10 aa, Artificial Sequence
  Peptide Derived from Human Papillomavirus
ALMQLKCPPL

SEQ ID NO: 4635 - protein, 11 aa, Artificial Sequence
  Peptide Derived from Human Papillomavirus
ALMQLKCPPLL

SEQ ID NO: 4636 - protein, 9 aa, Artificial Sequence
  Peptide Derived from Human Papillomavirus
ALYWYRTGM

SEQ ID NO: 4637 - protein, 9 aa, Artificial Sequence
  Peptide Derived from Human Papillomavirus
AMLGKFKEL

SEQ ID NO: 4638 - protein, 10 aa, Artificial Sequence
  Peptide Derived from Human Papillomavirus
AQALFHAQEA

SEQ ID NO: 4639 - protein, 8 aa, Artificial Sequence
  Peptide Derived from Human Papillomavirus
AQEAEEHA

SEQ ID NO: 4640 - protein, 10 aa, Artificial Sequence
  Peptide Derived from Human Papillomavirus
AQEAEEHAEA

SEQ ID NO: 4641 - protein, 11 aa, Artificial Sequence
  Peptide Derived from Human Papillomavirus
AQEAEEHAEAV

SEQ ID NO: 4642 - protein, 10 aa, Artificial Sequence
  Peptide Derived from Human Papillomavirus
AQLADSDSNA

SEQ ID NO: 4643 - protein, 9 aa, Artificial Sequence
  Peptide Derived from Human Papillomavirus
ATTPCWHYI

SEQ ID NO: 4644 - protein, 11 aa, Artificial Sequence
  Peptide Derived from Human Papillomavirus
AVIDRQTGDNI

SEQ ID NO: 4645 - protein, 10 aa, Artificial Sequence
  Peptide Derived from Human Papillomavirus
AVQVLKRKYV

SEQ ID NO: 4646 - protein, 10 aa, Artificial Sequence
  Peptide Derived from Human Papillomavirus
CAFLKSNSQA

SEQ ID NO: 4647 - protein, 8 aa, Artificial Sequence
  Peptide Derived from Human Papillomavirus
CAKNRITI

SEQ ID NO: 4648 - protein, 11 aa, Artificial Sequence
  Peptide Derived from Human Papillomavirus
CAKNRITIEKL

SEQ ID NO: 4649 - protein, 8 aa, Artificial Sequence
  Peptide Derived from Human Papillomavirus
CIENNSKT

SEQ ID NO: 4650 - protein, 9 aa, Artificial Sequence
  Peptide Derived from Human Papillomavirus
CIENNSKTA

SEQ ID NO: 4651 - protein, 10 aa, Artificial Sequence
  Peptide Derived from Human Papillomavirus
CILIHGAPNT

SEQ ID NO: 4652 - protein, 8 aa, Artificial Sequence
  Peptide Derived from Human Papillomavirus
CISTNCML

SEQ ID NO: 4653 - protein, 9 aa, Artificial Sequence
  Peptide Derived from Human Papillomavirus
CISTNCMLI

SEQ ID NO: 4654 - protein, 9 aa, Artificial Sequence
  Peptide Derived from Human Papillomavirus
CLYCHLQSL

SEQ ID NO: 4655 - protein, 10 aa, Artificial Sequence
  Peptide Derived from Human Papillomavirus
CLYCHLQSLA

SEQ ID NO: 4656 - protein, 9 aa, Artificial Sequence
  Peptide Derived from Human Papillomavirus
CMLIQPPKL

SEQ ID NO: 4657 - protein, 8 aa, Artificial Sequence
  Peptide Derived from Human Papillomavirus
CTDWCVAA

SEQ ID NO: 4658 - protein, 11 aa, Artificial Sequence
  Peptide Derived from Human Papillomavirus
CTDWCVAAFGV

SEQ ID NO: 4659 - protein, 8 aa, Artificial Sequence
  Peptide Derived from Human Papillomavirus
CVAAFGVT

SEQ ID NO: 4660 - protein, 10 aa, Artificial Sequence
  Peptide Derived from Human Papillomavirus
CVAAFGVTGT

SEQ ID NO: 4661 - protein, 11 aa, Artificial Sequence
  Peptide Derived from Human Papillomavirus
CVAAFGVTGTV

SEQ ID NO: 4662 - protein, 10 aa, Artificial Sequence
  Peptide Derived from Human Papillomavirus
CVDYNISPRL

SEQ ID NO: 4663 - protein, 9 aa, Artificial Sequence
  Peptide Derived from Human Papillomavirus
CVSGQNIRT

SEQ ID NO: 4664 - protein, 10 aa, Artificial Sequence
  Peptide Derived from Human Papillomavirus
CVSGQNIRTL

SEQ ID NO: 4665 - protein, 10 aa, Artificial Sequence
  Peptide Derived from Human Papillomavirus
DAKIGMLDDA

SEQ ID NO: 4666 - protein, 11 aa, Artificial Sequence
  Peptide Derived from Human Papillomavirus
DAKIGMLDDAT

SEQ ID NO: 4667 - protein, 10 aa, Artificial Sequence
  Peptide Derived from Human Papillomavirus
DATTPCWHYI

SEQ ID NO: 4668 - protein, 10 aa, Artificial Sequence
  Peptide Derived from Human Papillomavirus
DISSCVDYNI

SEQ ID NO: 4669 - protein, 11 aa, Artificial Sequence
  Peptide Derived from Human Papillomavirus
DIVKFLRYQQI

SEQ ID NO: 4670 - protein, 9 aa, Artificial Sequence
  Peptide Derived from Human Papillomavirus
DLSQMVQWA

SEQ ID NO: 4671 - protein, 11 aa, Artificial Sequence
  Peptide Derived from Human Papillomavirus
DMVDFIDNCNV

SEQ ID NO: 4672 - protein, 10 aa, Artificial Sequence
  Peptide Derived from Human Papillomavirus
DTGEDMVDFI

SEQ ID NO: 4673 - protein, 9 aa, Artificial Sequence
  Peptide Derived from Human Papillomavirus
DTTFDLSQM

SEQ ID NO: 4674 - protein, 10 aa, Artificial Sequence
  Peptide Derived from Human Papillomavirus
DTTFDLSQMV

SEQ ID NO: 4675 - protein, 8 aa, Artificial Sequence
  Peptide Derived from Human Papillomavirus
DVKHKALM

SEQ ID NO: 4676 - protein, 10 aa, Artificial Sequence
  Peptide Derived from Human Papillomavirus
DVKHKALMQL

SEQ ID NO: 4677 - protein, 8 aa, Artificial Sequence
  Peptide Derived from Human Papillomavirus
DVMDDSEI

SEQ ID NO: 4678 - protein, 9 aa, Artificial Sequence
  Peptide Derived from Human Papillomavirus
DVMDDSEIA

SEQ ID NO: 4679 - protein, 10 aa, Artificial Sequence
  Peptide Derived from Human Papillomavirus
DVYGETPEWI

SEQ ID NO: 4680 - protein, 8 aa, Artificial Sequence
  Peptide Derived from Human Papillomavirus
EAEEHAEA

SEQ ID NO: 4681 - protein, 9 aa, Artificial Sequence
  Peptide Derived from Human Papillomavirus
EAEEHAEAV

SEQ ID NO: 4682 - protein, 11 aa, Artificial Sequence
  Peptide Derived from Human Papillomavirus
EAEEHAEAVQV

SEQ ID NO: 4683 - protein, 8 aa, Artificial Sequence
  Peptide Derived from Human Papillomavirus
EAETAQAL

SEQ ID NO: 4684 - protein, 11 aa, Artificial Sequence
  Peptide Derived from Human Papillomavirus
EAETAQALFHA

SEQ ID NO: 4685 - protein, 8 aa, Artificial Sequence
  Peptide Derived from Human Papillomavirus
EAVIDRQT

SEQ ID NO: 4686 - protein, 11 aa, Artificial Sequence
  Peptide Derived from Human Papillomavirus
EAVQVLKRKYV

SEQ ID NO: 4687 - protein, 9 aa, Artificial Sequence
  Peptide Derived from Human Papillomavirus
EIAYKYAQL

SEQ ID NO: 4688 - protein, 10 aa, Artificial Sequence
  Peptide Derived from Human Papillomavirus
EIAYKYAQLA

SEQ ID NO: 4689 - protein, 10 aa, Artificial Sequence
  Peptide Derived from Human Papillomavirus
ELPDSGYGNT

SEQ ID NO: 4690 - protein, 8 aa, Artificial Sequence
  Peptide Derived from Human Papillomavirus
ELYGVSFM

SEQ ID NO: 4691 - protein, 10 aa, Artificial Sequence
  Peptide Derived from Human Papillomavirus
ELYGVSFMEL

SEQ ID NO: 4692 - protein, 11 aa, Artificial Sequence
  Peptide Derived from Human Papillomavirus
ELYGVSFMELI

SEQ ID NO: 4693 - protein, 9 aa, Artificial Sequence
  Peptide Derived from Human Papillomavirus
ETAQALFHA

SEQ ID NO: 4694 - protein, 10 aa, Artificial Sequence
  Peptide Derived from Human Papillomavirus
ETPEWIERQT

SEQ ID NO: 4695 - protein, 11 aa, Artificial Sequence
  Peptide Derived from Human Papillomavirus
ETPEWIERQTV

SEQ ID NO: 4696 - protein, 8 aa, Artificial Sequence
  Peptide Derived from Human Papillomavirus
ETPTRNIL

SEQ ID NO: 4697 - protein, 10 aa, Artificial Sequence
  Peptide Derived from Human Papillomavirus
ETPTRNILQV

SEQ ID NO: 4698 - protein, 11 aa, Artificial Sequence
  Peptide Derived from Human Papillomavirus
ETPTRNILQVL

SEQ ID NO: 4699 - protein, 8 aa, Artificial Sequence
  Peptide Derived from Human Papillomavirus
ETQQMVQV

SEQ ID NO: 4700 - protein, 8 aa, Artificial Sequence
  Peptide Derived from Human Papillomavirus
EVETQQMV

SEQ ID NO: 4701 - protein, 10 aa, Artificial Sequence
  Peptide Derived from Human Papillomavirus
EVETQQMVQV

SEQ ID NO: 4702 - protein, 11 aa, Artificial Sequence
  Peptide Derived from Human Papillomavirus
FLKGVPKKNCI

SEQ ID NO: 4703 - protein, 8 aa, Artificial Sequence
  Peptide Derived from Human Papillomavirus
FLKSNSQA

SEQ ID NO: 4704 - protein, 10 aa, Artificial Sequence
  Peptide Derived from Human Papillomavirus
FLKSNSQAKI

SEQ ID NO: 4705 - protein, 11 aa, Artificial Sequence
  Peptide Derived from Human Papillomavirus
FLKSNSQAKIV

SEQ ID NO: 4706 - protein, 10 aa, Artificial Sequence
  Peptide Derived from Human Papillomavirus
FLQGCIISYA

SEQ ID NO: 4707 - protein, 10 aa, Artificial Sequence
  Peptide Derived from Human Papillomavirus
FLRYQQIEFV

SEQ ID NO: 4708 - protein, 9 aa, Artificial Sequence
  Peptide Derived from Human Papillomavirus
FLSALKLFL

SEQ ID NO: 4709 - protein, 9 aa, Artificial Sequence
  Peptide Derived from Human Papillomavirus
FQSNKSTCT

SEQ ID NO: 4710 - protein, 8 aa, Artificial Sequence
  Peptide Derived from Human Papillomavirus
FVSFLSAL

SEQ ID NO: 4711 - protein, 10 aa, Artificial Sequence
  Peptide Derived from Human Papillomavirus
FVSFLSALKL

SEQ ID NO: 4712 - protein, 8 aa, Artificial Sequence
  Peptide Derived from Human Papillomavirus
GMLDDATT

SEQ ID NO: 4713 - protein, 8 aa, Artificial Sequence
  Peptide Derived from Human Papillomavirus
GMSLISFL

SEQ ID NO: 4714 - protein, 8 aa, Artificial Sequence
  Peptide Derived from Human Papillomavirus
GMSNISDV

SEQ ID NO: 4715 - protein, 8 aa, Artificial Sequence
  Peptide Derived from Human Papillomavirus
GMVMLMLV

SEQ ID NO: 4716 - protein, 11 aa, Artificial Sequence
  Peptide Derived from Human Papillomavirus
GQWIKSRCDKV

SEQ ID NO: 4717 - protein, 10 aa, Artificial Sequence
  Peptide Derived from Human Papillomavirus
GTGCNGWFYV

SEQ ID NO: 4718 - protein, 10 aa, Artificial Sequence
  Peptide Derived from Human Papillomavirus
GTHSERENET

SEQ ID NO: 4719 - protein, 10 aa, Artificial Sequence
  Peptide Derived from Human Papillomavirus
GTMCRHYKRA

SEQ ID NO: 4720 - protein, 9 aa, Artificial Sequence
  Peptide Derived from Human Papillomavirus
GTVAEGFKT

SEQ ID NO: 4721 - protein, 10 aa, Artificial Sequence
  Peptide Derived from Human Papillomavirus
GTVAEGFKTL

SEQ ID NO: 4722 - protein, 11 aa, Artificial Sequence
  Peptide Derived from Human Papillomavirus
GTVAEGFKTLL

SEQ ID NO: 4723 - protein, 8 aa, Artificial Sequence
  Peptide Derived from Human Papillomavirus
GVPKKNCI

SEQ ID NO: 4724 - protein, 9 aa, Artificial Sequence
  Peptide Derived from Human Papillomavirus
GVPKKNCIL

SEQ ID NO: 4725 - protein, 10 aa, Artificial Sequence
  Peptide Derived from Human Papillomavirus
GVPKKNCILI

SEQ ID NO: 4726 - protein, 8 aa, Artificial Sequence
  Peptide Derived from Human Papillomavirus
GVSFMELI

SEQ ID NO: 4727 - protein, 8 aa, Artificial Sequence
  Peptide Derived from Human Papillomavirus
HAEAVQVL

SEQ ID NO: 4728 - protein, 9 aa, Artificial Sequence
  Peptide Derived from Human Papillomavirus
HAQEAEEHA

SEQ ID NO: 4729 - protein, 11 aa, Artificial Sequence
  Peptide Derived from Human Papillomavirus
HAQEAEEHAEA

SEQ ID NO: 4730 - protein, 11 aa, Artificial Sequence
  Peptide Derived from Human Papillomavirus
HLQSLACSWGM

SEQ ID NO: 4731 - protein, 8 aa, Artificial Sequence
  Peptide Derived from Human Papillomavirus
IAYKYAQL

SEQ ID NO: 4732 - protein, 9 aa, Artificial Sequence
  Peptide Derived from Human Papillomavirus
IAYKYAQLA

SEQ ID NO: 4733 - protein, 9 aa, Artificial Sequence
  Peptide Derived from Human Papillomavirus
ILIHGAPNT

SEQ ID NO: 4734 - protein, 9 aa, Artificial Sequence
  Peptide Derived from Human Papillomavirus
IQPPKLRST

SEQ ID NO: 4735 - protein, 10 aa, Artificial Sequence
  Peptide Derived from Human Papillomavirus
IQPPKLRSTA

SEQ ID NO: 4736 - protein, 11 aa, Artificial Sequence
  Peptide Derived from Human Papillomavirus
IQPPKLRSTAA

SEQ ID NO: 4737 - protein, 10 aa, Artificial Sequence
  Peptide Derived from Human Papillomavirus
ITIEKLLEKL

SEQ ID NO: 4738 - protein, 11 aa, Artificial Sequence
  Peptide Derived from Human Papillomavirus
ITIEKLLEKLL

SEQ ID NO: 4739 - protein, 8 aa, Artificial Sequence
  Peptide Derived from Human Papillomavirus
IVKDCGTM

SEQ ID NO: 4740 - protein, 10 aa, Artificial Sequence
  Peptide Derived from Human Papillomavirus
IVKFLRYQQI

SEQ ID NO: 4741 - protein, 11 aa, Artificial Sequence
  Peptide Derived from Human Papillomavirus
KAAMLGKFKEL

SEQ ID NO: 4742 - protein, 11 aa, Artificial Sequence
  Peptide Derived from Human Papillomavirus
KAICIENNSKT

SEQ ID NO: 4743 - protein, 11 aa, Artificial Sequence
  Peptide Derived from Human Papillomavirus
KALMQLKCPPL

SEQ ID NO: 4744 - protein, 8 aa, Artificial Sequence
  Peptide Derived from Human Papillomavirus
KIGMLDDA

SEQ ID NO: 4745 - protein, 9 aa, Artificial Sequence
  Peptide Derived from Human Papillomavirus
KIGMLDDAT

SEQ ID NO: 4746 - protein, 10 aa, Artificial Sequence
  Peptide Derived from Human Papillomavirus
KIGMLDDATT

SEQ ID NO: 4747 - protein, 8 aa, Artificial Sequence
  Peptide Derived from Human Papillomavirus
KIVKDCGT

SEQ ID NO: 4748 - protein, 9 aa, Artificial Sequence
  Peptide Derived from Human Papillomavirus
KIVKDCGTM

SEQ ID NO: 4749 - protein, 10 aa, Artificial Sequence
  Peptide Derived from Human Papillomavirus
KLLCISTNCM

SEQ ID NO: 4750 - protein, 11 aa, Artificial Sequence
  Peptide Derived from Human Papillomavirus
KLLCISTNCML

SEQ ID NO: 4751 - protein, 9 aa, Artificial Sequence
  Peptide Derived from Human Papillomavirus
KLLEKLLCI

SEQ ID NO: 4752 - protein, 11 aa, Artificial Sequence
  Peptide Derived from Human Papillomavirus
KLLEKLLCIST

SEQ ID NO: 4753 - protein, 8 aa, Artificial Sequence
  Peptide Derived from Human Papillomavirus
KLRSTAAA

SEQ ID NO: 4754 - protein, 9 aa, Artificial Sequence
  Peptide Derived from Human Papillomavirus
KLRSTAAAL

SEQ ID NO: 4755 - protein, 10 aa, Artificial Sequence
  Peptide Derived from Human Papillomavirus
KTAKRRLFEL

SEQ ID NO: 4756 - protein, 9 aa, Artificial Sequence
  Peptide Derived from Human Papillomavirus
KTLLQPYCL

SEQ ID NO: 4757 - protein, 8 aa, Artificial Sequence
  Peptide Derived from Human Papillomavirus
KTSNGKAA

SEQ ID NO: 4758 - protein, 9 aa, Artificial Sequence
  Peptide Derived from Human Papillomavirus
KTSNGKAAM

SEQ ID NO: 4759 - protein, 10 aa, Artificial Sequence
  Peptide Derived from Human Papillomavirus
KTSNGKAAML

SEQ ID NO: 4760 - protein, 11 aa, Artificial Sequence
  Peptide Derived from Human Papillomavirus
KVSDEGDWRDI

SEQ ID NO: 4761 - protein, 8 aa, Artificial Sequence
  Peptide Derived from Human Papillomavirus
LACSWGMV

SEQ ID NO: 4762 - protein, 9 aa, Artificial Sequence
  Peptide Derived from Human Papillomavirus
LACSWGMVM

SEQ ID NO: 4763 - protein, 10 aa, Artificial Sequence
  Peptide Derived from Human Papillomavirus
LACSWGMVML

SEQ ID NO: 4764 - protein, 11 aa, Artificial Sequence
  Peptide Derived from Human Papillomavirus
LACSWGMVMLM

SEQ ID NO: 4765 - protein, 8 aa, Artificial Sequence
  Peptide Derived from Human Papillomavirus
LADAKIGM

SEQ ID NO: 4766 - protein, 9 aa, Artificial Sequence
  Peptide Derived from Human Papillomavirus
LADAKIGML

SEQ ID NO: 4767 - protein, 8 aa, Artificial Sequence
  Peptide Derived from Human Papillomavirus
LADSDSNA

SEQ ID NO: 4768 - protein, 10 aa, Artificial Sequence
  Peptide Derived from Human Papillomavirus
LADSDSNACA

SEQ ID NO: 4769 - protein, 8 aa, Artificial Sequence
  Peptide Derived from Human Papillomavirus
LIHGAPNT

SEQ ID NO: 4770 - protein, 10 aa, Artificial Sequence
  Peptide Derived from Human Papillomavirus
LIQPPKLRST

SEQ ID NO: 4771 - protein, 11 aa, Artificial Sequence
  Peptide Derived from Human Papillomavirus
LIQPPKLRSTA

SEQ ID NO: 4772 - protein, 11 aa, Artificial Sequence
  Peptide Derived from Human Papillomavirus
LIRPFQSNKST

SEQ ID NO: 4773 - protein, 9 aa, Artificial Sequence
  Peptide Derived from Human Papillomavirus
LISFLQGCI

SEQ ID NO: 4774 - protein, 10 aa, Artificial Sequence
  Peptide Derived from Human Papillomavirus
LISFLQGCII

SEQ ID NO: 4775 - protein, 8 aa, Artificial Sequence
  Peptide Derived from Human Papillomavirus
LITSNINA

SEQ ID NO: 4776 - protein, 9 aa, Artificial Sequence
  Peptide Derived from Human Papillomavirus
LLCISTNCM

SEQ ID NO: 4777 - protein, 10 aa, Artificial Sequence
  Peptide Derived from Human Papillomavirus
LLCISTNCML

SEQ ID NO: 4778 - protein, 11 aa, Artificial Sequence
  Peptide Derived from Human Papillomavirus
LLCISTNCMLI

SEQ ID NO: 4779 - protein, 8 aa, Artificial Sequence
  Peptide Derived from Human Papillomavirus
LLEKLLCI

SEQ ID NO: 4780 - protein, 10 aa, Artificial Sequence
  Peptide Derived from Human Papillomavirus
LLEKLLCIST

SEQ ID NO: 4781 - protein, 9 aa, Artificial Sequence
  Peptide Derived from Human Papillomavirus
LLITSNINA

SEQ ID NO: 4782 - protein, 11 aa, Artificial Sequence
  Peptide Derived from Human Papillomavirus
LLQPYCLYCHL

SEQ ID NO: 4783 - protein, 9 aa, Artificial Sequence
  Peptide Derived from Human Papillomavirus
LMLVRFKCA

SEQ ID NO: 4784 - protein, 9 aa, Artificial Sequence
  Peptide Derived from Human Papillomavirus
LMQLKCPPL

SEQ ID NO: 4785 - protein, 10 aa, Artificial Sequence
  Peptide Derived from Human Papillomavirus
LMQLKCPPLL

SEQ ID NO: 4786 - protein, 11 aa, Artificial Sequence
  Peptide Derived from Human Papillomavirus
LMQLKCPPLLI

SEQ ID NO: 4787 - protein, 9 aa, Artificial Sequence
  Peptide Derived from Human Papillomavirus
LQGCIISYA

SEQ ID NO: 4788 - protein, 8 aa, Artificial Sequence
  Peptide Derived from Human Papillomavirus
LQHSFNDT

SEQ ID NO: 4789 - protein, 9 aa, Artificial Sequence
  Peptide Derived from Human Papillomavirus
LQHSFNDTT

SEQ ID NO: 4790 - protein, 9 aa, Artificial Sequence
  Peptide Derived from Human Papillomavirus
LQPLADAKI

SEQ ID NO: 4791 - protein, 11 aa, Artificial Sequence
  Peptide Derived from Human Papillomavirus
LQPLADAKIGM

SEQ ID NO: 4792 - protein, 10 aa, Artificial Sequence
  Peptide Derived from Human Papillomavirus
LQPYCLYCHL

SEQ ID NO: 4793 - protein, 10 aa, Artificial Sequence
  Peptide Derived from Human Papillomavirus
LQSLACSWGM

SEQ ID NO: 4794 - protein, 11 aa, Artificial Sequence
  Peptide Derived from Human Papillomavirus
LQSLACSWGMV

SEQ ID NO: 4795 - protein, 11 aa, Artificial Sequence
  Peptide Derived from Human Papillomavirus
LQVLKTSNGKA

SEQ ID NO: 4796 - protein, 11 aa, Artificial Sequence
  Peptide Derived from Human Papillomavirus
LVRFKCAKNRI

SEQ ID NO: 4797 - protein, 8 aa, Artificial Sequence
  Peptide Derived from Human Papillomavirus
MLGKFKEL

SEQ ID NO: 4798 - protein, 11 aa, Artificial Sequence
  Peptide Derived from Human Papillomavirus
MLGKFKELYGV

SEQ ID NO: 4799 - protein, 8 aa, Artificial Sequence
  Peptide Derived from Human Papillomavirus
MLIQPPKL

SEQ ID NO: 4800 - protein, 11 aa, Artificial Sequence
  Peptide Derived from Human Papillomavirus
MLIQPPKLRST

SEQ ID NO: 4801 - protein, 10 aa, Artificial Sequence
  Peptide Derived from Human Papillomavirus
MLMLVRFKCA

SEQ ID NO: 4802 - protein, 8 aa, Artificial Sequence
  Peptide Derived from Human Papillomavirus
MLVRFKCA

SEQ ID NO: 4803 - protein, 8 aa, Artificial Sequence
  Peptide Derived from Human Papillomavirus
MQLKCPPL

SEQ ID NO: 4804 - protein, 9 aa, Artificial Sequence
  Peptide Derived from Human Papillomavirus
MQLKCPPLL

SEQ ID NO: 4805 - protein, 10 aa, Artificial Sequence
  Peptide Derived from Human Papillomavirus
MQLKCPPLLI

SEQ ID NO: 4806 - protein, 11 aa, Artificial Sequence
  Peptide Derived from Human Papillomavirus
MQLKCPPLLIT

SEQ ID NO: 4807 - protein, 10 aa, Artificial Sequence
  Peptide Derived from Human Papillomavirus
MVDFIDNCNV

SEQ ID NO: 4808 - protein, 9 aa, Artificial Sequence
  Peptide Derived from Human Papillomavirus
MVQVEEQQT

SEQ ID NO: 4809 - protein, 10 aa, Artificial Sequence
  Peptide Derived from Human Papillomavirus
MVQVEEQQTT

SEQ ID NO: 4810 - protein, 11 aa, Artificial Sequence
  Peptide Derived from Human Papillomavirus
MVQVEEQQTTL

SEQ ID NO: 4811 - protein, 10 aa, Artificial Sequence
  Peptide Derived from Human Papillomavirus
MVQWAYDNDV

SEQ ID NO: 4812 - protein, 11 aa, Artificial Sequence
  Peptide Derived from Human Papillomavirus
MVQWAYDNDVM

SEQ ID NO: 4813 - protein, 11 aa, Artificial Sequence
  Peptide Derived from Human Papillomavirus
NAGKDDRWPYL

SEQ ID NO: 4814 - protein, 8 aa, Artificial Sequence
  Peptide Derived from Human Papillomavirus
NALDGNPV

SEQ ID NO: 4815 - protein, 10 aa, Artificial Sequence
  Peptide Derived from Human Papillomavirus
NALDGNPVSI

SEQ ID NO: 4816 - protein, 8 aa, Artificial Sequence
  Peptide Derived from Human Papillomavirus
NILQVLKT

SEQ ID NO: 4817 - protein, 9 aa, Artificial Sequence
  Peptide Derived from Human Papillomavirus
NISDVYGET

SEQ ID NO: 4818 - protein, 8 aa, Artificial Sequence
  Peptide Derived from Human Papillomavirus
NISPRLKA

SEQ ID NO: 4819 - protein, 9 aa, Artificial Sequence
  Peptide Derived from Human Papillomavirus
NISPRLKAI

SEQ ID NO: 4820 - protein, 11 aa, Artificial Sequence
  Peptide Derived from Human Papillomavirus
NISPRLKAICI

SEQ ID NO: 4821 - protein, 8 aa, Artificial Sequence
  Peptide Derived from Human Papillomavirus
NQAEAETA

SEQ ID NO: 4822 - protein, 10 aa, Artificial Sequence
  Peptide Derived from Human Papillomavirus
NQAEAETAQA

SEQ ID NO: 4823 - protein, 11 aa, Artificial Sequence
  Peptide Derived from Human Papillomavirus
NQAEAETAQAL

SEQ ID NO: 4824 - protein, 9 aa, Artificial Sequence
  Peptide Derived from Human Papillomavirus
NTEVETQQM

SEQ ID NO: 4825 - protein, 10 aa, Artificial Sequence
  Peptide Derived from Human Papillomavirus
NTEVETQQMV

SEQ ID NO: 4826 - protein, 9 aa, Artificial Sequence
  Peptide Derived from Human Papillomavirus
NTGKSYFGM

SEQ ID NO: 4827 - protein, 11 aa, Artificial Sequence
  Peptide Derived from Human Papillomavirus
NTGKSYFGMSL

SEQ ID NO: 4828 - protein, 9 aa, Artificial Sequence
  Peptide Derived from Human Papillomavirus
NVYNNQAEA

SEQ ID NO: 4829 - protein, 11 aa, Artificial Sequence
  Peptide Derived from Human Papillomavirus
NVYNNQAEAET

SEQ ID NO: 4830 - protein, 9 aa, Artificial Sequence
  Peptide Derived from Human Papillomavirus
PAGTDGEGT

SEQ ID NO: 4831 - protein, 9 aa, Artificial Sequence
  Peptide Derived from Human Papillomavirus
PLADAKIGM

SEQ ID NO: 4832 - protein, 10 aa, Artificial Sequence
  Peptide Derived from Human Papillomavirus
PLADAKIGML

SEQ ID NO: 4833 - protein, 8 aa, Artificial Sequence
  Peptide Derived from Human Papillomavirus
PLLITSNI

SEQ ID NO: 4834 - protein, 10 aa, Artificial Sequence
  Peptide Derived from Human Papillomavirus
PLLITSNINA

SEQ ID NO: 4835 - protein, 9 aa, Artificial Sequence
  Peptide Derived from Human Papillomavirus
PLSDISSCV

SEQ ID NO: 4836 - protein, 8 aa, Artificial Sequence
  Peptide Derived from Human Papillomavirus
PTRNILQV

SEQ ID NO: 4837 - protein, 9 aa, Artificial Sequence
  Peptide Derived from Human Papillomavirus
PTRNILQVL

SEQ ID NO: 4838 - protein, 11 aa, Artificial Sequence
  Peptide Derived from Human Papillomavirus
PTRNILQVLKT

SEQ ID NO: 4839 - protein, 10 aa, Artificial Sequence
  Peptide Derived from Human Papillomavirus
PVSIDVKHKA

SEQ ID NO: 4840 - protein, 11 aa, Artificial Sequence
  Peptide Derived from Human Papillomavirus
PVSIDVKHKAL

SEQ ID NO: 4841 - protein, 9 aa, Artificial Sequence
  Peptide Derived from Human Papillomavirus
QAEAETAQA

SEQ ID NO: 4842 - protein, 10 aa, Artificial Sequence
  Peptide Derived from Human Papillomavirus
QAEAETAQAL

SEQ ID NO: 4843 - protein, 10 aa, Artificial Sequence
  Peptide Derived from Human Papillomavirus
QAKIVKDCGT

SEQ ID NO: 4844 - protein, 11 aa, Artificial Sequence
  Peptide Derived from Human Papillomavirus
QAKIVKDCGTM

SEQ ID NO: 4845 - protein, 9 aa, Artificial Sequence
  Peptide Derived from Human Papillomavirus
QALFHAQEA

SEQ ID NO: 4846 - protein, 8 aa, Artificial Sequence
  Peptide Derived from Human Papillomavirus
QIEFVSFL

SEQ ID NO: 4847 - protein, 10 aa, Artificial Sequence
  Peptide Derived from Human Papillomavirus
QIEFVSFLSA

SEQ ID NO: 4848 - protein, 11 aa, Artificial Sequence
  Peptide Derived from Human Papillomavirus
QIEFVSFLSAL

SEQ ID NO: 4849 - protein, 9 aa, Artificial Sequence
  Peptide Derived from Human Papillomavirus
QLADSDSNA

SEQ ID NO: 4850 - protein, 11 aa, Artificial Sequence
  Peptide Derived from Human Papillomavirus
QLADSDSNACA

SEQ ID NO: 4851 - protein, 8 aa, Artificial Sequence
  Peptide Derived from Human Papillomavirus
QLKCPPLL

SEQ ID NO: 4852 - protein, 9 aa, Artificial Sequence
  Peptide Derived from Human Papillomavirus
QLKCPPLLI

SEQ ID NO: 4853 - protein, 10 aa, Artificial Sequence
  Peptide Derived from Human Papillomavirus
QLKCPPLLIT

SEQ ID NO: 4854 - protein, 8 aa, Artificial Sequence
  Peptide Derived from Human Papillomavirus
QMSMGQWI

SEQ ID NO: 4855 - protein, 10 aa, Artificial Sequence
  Peptide Derived from Human Papillomavirus
QMVQVEEQQT

SEQ ID NO: 4856 - protein, 11 aa, Artificial Sequence
  Peptide Derived from Human Papillomavirus
QMVQVEEQQTT

SEQ ID NO: 4857 - protein, 11 aa, Artificial Sequence
  Peptide Derived from Human Papillomavirus
QMVQWAYDNDV

SEQ ID NO: 4858 - protein, 9 aa, Artificial Sequence
  Peptide Derived from Human Papillomavirus
QQIEFVSFL

SEQ ID NO: 4859 - protein, 11 aa, Artificial Sequence
  Peptide Derived from Human Papillomavirus
QQIEFVSFLSA

SEQ ID NO: 4860 - protein, 11 aa, Artificial Sequence
  Peptide Derived from Human Papillomavirus
QQMVQVEEQQT

SEQ ID NO: 4861 - protein, 11 aa, Artificial Sequence
  Peptide Derived from Human Papillomavirus
QTVLQHSFNDT

SEQ ID NO: 4862 - protein, 8 aa, Artificial Sequence
  Peptide Derived from Human Papillomavirus
QVEEQQTT

SEQ ID NO: 4863 - protein, 9 aa, Artificial Sequence
  Peptide Derived from Human Papillomavirus
QVEEQQTTL

SEQ ID NO: 4864 - protein, 8 aa, Artificial Sequence
  Peptide Derived from Human Papillomavirus
QVLKRKYV

SEQ ID NO: 4865 - protein, 10 aa, Artificial Sequence
  Peptide Derived from Human Papillomavirus
QVLKTSNGKA

SEQ ID NO: 4866 - protein, 11 aa, Artificial Sequence
  Peptide Derived from Human Papillomavirus
QVLKTSNGKAA

SEQ ID NO: 4867 - protein, 9 aa, Artificial Sequence
  Peptide Derived from Human Papillomavirus
RAEKRQMSM

SEQ ID NO: 4868 - protein, 8 aa, Artificial Sequence
  Peptide Derived from Human Papillomavirus
RITIEKLL

SEQ ID NO: 4869 - protein, 11 aa, Artificial Sequence
  Peptide Derived from Human Papillomavirus
RITIEKLLEKL

SEQ ID NO: 4870 - protein, 9 aa, Artificial Sequence
  Peptide Derived from Human Papillomavirus
RQMSMGQWI

SEQ ID NO: 4871 - protein, 10 aa, Artificial Sequence
  Peptide Derived from Human Papillomavirus
RTGMSNISDV

SEQ ID NO: 4872 - protein, 8 aa, Artificial Sequence
  Peptide Derived from Human Papillomavirus
RTWCRLNL

SEQ ID NO: 4873 - protein, 10 aa, Artificial Sequence
  Peptide Derived from Human Papillomavirus
SALKLFLKGV

SEQ ID NO: 4874 - protein, 8 aa, Artificial Sequence
  Peptide Derived from Human Papillomavirus
SIDVKHKA

SEQ ID NO: 4875 - protein, 9 aa, Artificial Sequence
  Peptide Derived from Human Papillomavirus
SIDVKHKAL

SEQ ID NO: 4876 - protein, 10 aa, Artificial Sequence
  Peptide Derived from Human Papillomavirus
SIDVKHKALM

SEQ ID NO: 4877 - protein, 8 aa, Artificial Sequence
  Peptide Derived from Human Papillomavirus
SLACSWGM

SEQ ID NO: 4878 - protein, 9 aa, Artificial Sequence
  Peptide Derived from Human Papillomavirus
SLACSWGMV

SEQ ID NO: 4879 - protein, 10 aa, Artificial Sequence
  Peptide Derived from Human Papillomavirus
SLACSWGMVM

SEQ ID NO: 4880 - protein, 11 aa, Artificial Sequence
  Peptide Derived from Human Papillomavirus
SLACSWGMVML

SEQ ID NO: 4881 - protein, 10 aa, Artificial Sequence
  Peptide Derived from Human Papillomavirus
SLISFLQGCI

SEQ ID NO: 4882 - protein, 11 aa, Artificial Sequence
  Peptide Derived from Human Papillomavirus
SLISFLQGCII

SEQ ID NO: 4883 - protein, 11 aa, Artificial Sequence
  Peptide Derived from Human Papillomavirus
SQAKIVKDCGT

SEQ ID NO: 4884 - protein, 11 aa, Artificial Sequence
  Peptide Derived from Human Papillomavirus
STAAALYWYRT

SEQ ID NO: 4885 - protein, 8 aa, Artificial Sequence
  Peptide Derived from Human Papillomavirus
STCTDWCV

SEQ ID NO: 4886 - protein, 9 aa, Artificial Sequence
  Peptide Derived from Human Papillomavirus
STCTDWCVA

SEQ ID NO: 4887 - protein, 10 aa, Artificial Sequence
  Peptide Derived from Human Papillomavirus
STCTDWCVAA

SEQ ID NO: 4888 - protein, 11 aa, Artificial Sequence
  Peptide Derived from Human Papillomavirus
STFKCVSGQNI

SEQ ID NO: 4889 - protein, 10 aa, Artificial Sequence
  Peptide Derived from Human Papillomavirus
TAAALYWYRT

SEQ ID NO: 4890 - protein, 9 aa, Artificial Sequence
  Peptide Derived from Human Papillomavirus
TAKRRLFEL

SEQ ID NO: 4891 - protein, 8 aa, Artificial Sequence
  Peptide Derived from Human Papillomavirus
TAQALFHA

SEQ ID NO: 4892 - protein, 11 aa, Artificial Sequence
  Peptide Derived from Human Papillomavirus
TAQALFHAQEA

SEQ ID NO: 4893 - protein, 9 aa, Artificial Sequence
  Peptide Derived from Human Papillomavirus
TIEKLLEKL

SEQ ID NO: 4894 - protein, 10 aa, Artificial Sequence
  Peptide Derived from Human Papillomavirus
TIEKLLEKLL

SEQ ID NO: 4895 - protein, 8 aa, Artificial Sequence
  Peptide Derived from Human Papillomavirus
TLLQPYCL

SEQ ID NO: 4896 - protein, 10 aa, Artificial Sequence
  Peptide Derived from Human Papillomavirus
TLSCNGSDGT

SEQ ID NO: 4897 - protein, 9 aa, Artificial Sequence
  Peptide Derived from Human Papillomavirus
TMCRHYKRA

SEQ ID NO: 4898 - protein, 8 aa, Artificial Sequence
  Peptide Derived from Human Papillomavirus
TTFDLSQM

SEQ ID NO: 4899 - protein, 9 aa, Artificial Sequence
  Peptide Derived from Human Papillomavirus
TTFDLSQMV

SEQ ID NO: 4900 - protein, 11 aa, Artificial Sequence
  Peptide Derived from Human Papillomavirus
TTLSCNGSDGT

SEQ ID NO: 4901 - protein, 8 aa, Artificial Sequence
  Peptide Derived from Human Papillomavirus
TTPCWHYI

SEQ ID NO: 4902 - protein, 8 aa, Artificial Sequence
  Peptide Derived from Human Papillomavirus
TVAEGFKT

SEQ ID NO: 4903 - protein, 9 aa, Artificial Sequence
  Peptide Derived from Human Papillomavirus
TVAEGFKTL

SEQ ID NO: 4904 - protein, 10 aa, Artificial Sequence
  Peptide Derived from Human Papillomavirus
TVAEGFKTLL

SEQ ID NO: 4905 - protein, 10 aa, Artificial Sequence
  Peptide Derived from Human Papillomavirus
TVLQHSFNDT

SEQ ID NO: 4906 - protein, 11 aa, Artificial Sequence
  Peptide Derived from Human Papillomavirus
TVLQHSFNDTT

SEQ ID NO: 4907 - protein, 9 aa, Artificial Sequence
  Peptide Derived from Human Papillomavirus
VAAFGVTGT

SEQ ID NO: 4908 - protein, 10 aa, Artificial Sequence
  Peptide Derived from Human Papillomavirus
VAAFGVTGTV

SEQ ID NO: 4909 - protein, 11 aa, Artificial Sequence
  Peptide Derived from Human Papillomavirus
VAAFGVTGTVA

SEQ ID NO: 4910 - protein, 8 aa, Artificial Sequence
  Peptide Derived from Human Papillomavirus
VAEGFKTL

SEQ ID NO: 4911 - protein, 9 aa, Artificial Sequence
  Peptide Derived from Human Papillomavirus
VAEGFKTLL

SEQ ID NO: 4912 - protein, 10 aa, Artificial Sequence
  Peptide Derived from Human Papillomavirus
VIDRQTGDNI

SEQ ID NO: 4913 - protein, 11 aa, Artificial Sequence
  Peptide Derived from Human Papillomavirus
VLKRKYVGSPL

SEQ ID NO: 4914 - protein, 9 aa, Artificial Sequence
  Peptide Derived from Human Papillomavirus
VLKTSNGKA

SEQ ID NO: 4915 - protein, 10 aa, Artificial Sequence
  Peptide Derived from Human Papillomavirus
VLKTSNGKAA

SEQ ID NO: 4916 - protein, 11 aa, Artificial Sequence
  Peptide Derived from Human Papillomavirus
VLKTSNGKAAM

SEQ ID NO: 4917 - protein, 9 aa, Artificial Sequence
  Peptide Derived from Human Papillomavirus
VLQHSFNDT

SEQ ID NO: 4918 - protein, 10 aa, Artificial Sequence
  Peptide Derived from Human Papillomavirus
VLQHSFNDTT

SEQ ID NO: 4919 - protein, 8 aa, Artificial Sequence
  Peptide Derived from Human Papillomavirus
VMDDSEIA

SEQ ID NO: 4920 - protein, 11 aa, Artificial Sequence
  Peptide Derived from Human Papillomavirus
VMLMLVRFKCA

SEQ ID NO: 4921 - protein, 8 aa, Artificial Sequence
  Peptide Derived from Human Papillomavirus
VQVEEQQT

SEQ ID NO: 4922 - protein, 9 aa, Artificial Sequence
  Peptide Derived from Human Papillomavirus
VQVEEQQTT

SEQ ID NO: 4923 - protein, 10 aa, Artificial Sequence
  Peptide Derived from Human Papillomavirus
VQVEEQQTTL

SEQ ID NO: 4924 - protein, 9 aa, Artificial Sequence
  Peptide Derived from Human Papillomavirus
VQVLKRKYV

SEQ ID NO: 4925 - protein, 9 aa, Artificial Sequence
  Peptide Derived from Human Papillomavirus
VQWAYDNDV

SEQ ID NO: 4926 - protein, 10 aa, Artificial Sequence
  Peptide Derived from Human Papillomavirus
VQWAYDNDVM

SEQ ID NO: 4927 - protein, 11 aa, Artificial Sequence
  Peptide Derived from Human Papillomavirus
VTGTVAEGFKT

SEQ ID NO: 4928 - protein, 8 aa, Artificial Sequence
  Peptide Derived from Human Papillomavirus
WAYDNDVM

SEQ ID NO: 4929 - protein, 8 aa, Artificial Sequence
  Peptide Derived from Human Papillomavirus
WIERQTVL

SEQ ID NO: 4930 - protein, 9 aa, Artificial Sequence
  Peptide Derived from Human Papillomavirus
WIKSRCDKV

SEQ ID NO: 4931 - protein, 8 aa, Artificial Sequence
  Peptide Derived from Human Papillomavirus
WLQPLADA

SEQ ID NO: 4932 - protein, 10 aa, Artificial Sequence
  Peptide Derived from Human Papillomavirus
WLQPLADAKI

SEQ ID NO: 4933 - protein, 10 aa, Artificial Sequence
  Peptide Derived from Human Papillomavirus
YANSKSHFWL

SEQ ID NO: 4934 - protein, 11 aa, Artificial Sequence
  Peptide Derived from Human Papillomavirus
YAQLADSDSNA

SEQ ID NO: 4935 - protein, 9 aa, Artificial Sequence
  Peptide Derived from Human Papillomavirus
YIDNYLRNA

SEQ ID NO: 4936 - protein, 10 aa, Artificial Sequence
  Peptide Derived from Human Papillomavirus
YIDNYLRNAL

SEQ ID NO: 4937 - protein, 8 aa, Artificial Sequence
  Peptide Derived from Human Papillomavirus
YLHSRLVV

SEQ ID NO: 4938 - protein, 10 aa, Artificial Sequence
  Peptide Derived from Human Papillomavirus
YLHSRLVVFT

SEQ ID NO: 4939 - protein, 11 aa, Artificial Sequence
  Peptide Derived from Human Papillomavirus
YLRNALDGNPV

SEQ ID NO: 4940 - protein, 10 aa, Artificial Sequence
  Peptide Derived from Human Papillomavirus
YQQIEFVSFL

SEQ ID NO: 4941 - protein, 10 aa, Artificial Sequence
  Peptide Derived from Human Papillomavirus
YVEAVIDRQT

SEQ ID NO: 4942 - protein, 9 aa, Artificial Sequence
  Peptide Derived from Human Papillomavirus
YVGSPLSDI

SEQ ID NO: 4943 - protein, 8 aa, Artificial Sequence
  Peptide Derived from Human Papillomavirus
AAACTNQT

SEQ ID NO: 4944 - protein, 10 aa, Artificial Sequence
  Peptide Derived from Human Papillomavirus
AAACTNQTRA

SEQ ID NO: 4945 - protein, 11 aa, Artificial Sequence
  Peptide Derived from Human Papillomavirus
AAACTNQTRAV

SEQ ID NO: 4946 - protein, 9 aa, Artificial Sequence
  Peptide Derived from Human Papillomavirus
AACTNQTRA

SEQ ID NO: 4947 - protein, 10 aa, Artificial Sequence
  Peptide Derived from Human Papillomavirus
AACTNQTRAV

SEQ ID NO: 4948 - protein, 8 aa, Artificial Sequence
  Peptide Derived from Human Papillomavirus
AIELQMML

SEQ ID NO: 4949 - protein, 10 aa, Artificial Sequence
  Peptide Derived from Human Papillomavirus
AIELQMMLET

SEQ ID NO: 4950 - protein, 11 aa, Artificial Sequence
  Peptide Derived from Human Papillomavirus
AIELQMMLETL

SEQ ID NO: 4951 - protein, 8 aa, Artificial Sequence
  Peptide Derived from Human Papillomavirus
AIVTLTYI

SEQ ID NO: 4952 - protein, 10 aa, Artificial Sequence
  Peptide Derived from Human Papillomavirus
AIVTLTYIST

SEQ ID NO: 4953 - protein, 8 aa, Artificial Sequence
  Peptide Derived from Human Papillomavirus
ALGTSEGV

SEQ ID NO: 4954 - protein, 11 aa, Artificial Sequence
  Peptide Derived from Human Papillomavirus
ALGTSEGVRRA

SEQ ID NO: 4955 - protein, 9 aa, Artificial Sequence
  Peptide Derived from Human Papillomavirus
ALQAIELQM

SEQ ID NO: 4956 - protein, 10 aa, Artificial Sequence
  Peptide Derived from Human Papillomavirus
ALQAIELQMM

SEQ ID NO: 4957 - protein, 11 aa, Artificial Sequence
  Peptide Derived from Human Papillomavirus
ALQAIELQMML

SEQ ID NO: 4958 - protein, 9 aa, Artificial Sequence
  Peptide Derived from Human Papillomavirus
ALSVSKAKA

SEQ ID NO: 4959 - protein, 10 aa, Artificial Sequence
  Peptide Derived from Human Papillomavirus
ALSVSKAKAL

SEQ ID NO: 4960 - protein, 8 aa, Artificial Sequence
  Peptide Derived from Human Papillomavirus
ATTPIIHL

SEQ ID NO: 4961 - protein, 10 aa, Artificial Sequence
  Peptide Derived from Human Papillomavirus
ATTSTKRPRT

SEQ ID NO: 4962 - protein, 8 aa, Artificial Sequence
  Peptide Derived from Human Papillomavirus
AVSCPATT

SEQ ID NO: 4963 - protein, 10 aa, Artificial Sequence
  Peptide Derived from Human Papillomavirus
AVSCPATTPI

SEQ ID NO: 4964 - protein, 11 aa, Artificial Sequence
  Peptide Derived from Human Papillomavirus
AVSCPATTPII

SEQ ID NO: 4965 - protein, 9 aa, Artificial Sequence
  Peptide Derived from Human Papillomavirus
CALGTSEGV

SEQ ID NO: 4966 - protein, 8 aa, Artificial Sequence
  Peptide Derived from Human Papillomavirus
CIDGQCTV

SEQ ID NO: 4967 - protein, 9 aa, Artificial Sequence
  Peptide Derived from Human Papillomavirus
CIDGQCTVV

SEQ ID NO: 4968 - protein, 8 aa, Artificial Sequence
  Peptide Derived from Human Papillomavirus
CLKKHGYT

SEQ ID NO: 4969 - protein, 9 aa, Artificial Sequence
  Peptide Derived from Human Papillomavirus
CLKKHGYTV

SEQ ID NO: 4970 - protein, 11 aa, Artificial Sequence
  Peptide Derived from Human Papillomavirus
CLKKHGYTVEV

SEQ ID NO: 4971 - protein, 9 aa, Artificial Sequence
  Peptide Derived from Human Papillomavirus
CTDGKHKNA

SEQ ID NO: 4972 - protein, 10 aa, Artificial Sequence
  Peptide Derived from Human Papillomavirus
CTDGKHKNAI

SEQ ID NO: 4973 - protein, 11 aa, Artificial Sequence
  Peptide Derived from Human Papillomavirus
CTDGKHKNAIV

SEQ ID NO: 4974 - protein, 8 aa, Artificial Sequence
  Peptide Derived from Human Papillomavirus
CTNQTRAV

SEQ ID NO: 4975 - protein, 8 aa, Artificial Sequence
  Peptide Derived from Human Papillomavirus
CTVVEGQV

SEQ ID NO: 4976 - protein, 10 aa, Artificial Sequence
  Peptide Derived from Human Papillomavirus
CVLMYKAREM

SEQ ID NO: 4977 - protein, 8 aa, Artificial Sequence
  Peptide Derived from Human Papillomavirus
DANILKCL

SEQ ID NO: 4978 - protein, 9 aa, Artificial Sequence
  Peptide Derived from Human Papillomavirus
DVHNTMHYT

SEQ ID NO: 4979 - protein, 8 aa, Artificial Sequence
  Peptide Derived from Human Papillomavirus
EISFAGIV

SEQ ID NO: 4980 - protein, 9 aa, Artificial Sequence
  Peptide Derived from Human Papillomavirus
EISFAGIVT

SEQ ID NO: 4981 - protein, 11 aa, Artificial Sequence
  Peptide Derived from Human Papillomavirus
EISFAGIVTKL

SEQ ID NO: 4982 - protein, 8 aa, Artificial Sequence
  Peptide Derived from Human Papillomavirus
ELQMMLET

SEQ ID NO: 4983 - protein, 9 aa, Artificial Sequence
  Peptide Derived from Human Papillomavirus
ELQMMLETL

SEQ ID NO: 4984 - protein, 8 aa, Artificial Sequence
  Peptide Derived from Human Papillomavirus
ELYLTAPT

SEQ ID NO: 4985 - protein, 11 aa, Artificial Sequence
  Peptide Derived from Human Papillomavirus
ELYLTAPTGCL

SEQ ID NO: 4986 - protein, 11 aa, Artificial Sequence
  Peptide Derived from Human Papillomavirus
EMGIHSINHQV

SEQ ID NO: 4987 - protein, 10 aa, Artificial Sequence
  Peptide Derived from Human Papillomavirus
EQVSSTWHWT

SEQ ID NO: 4988 - protein, 9 aa, Artificial Sequence
  Peptide Derived from Human Papillomavirus
ETLSQRLNV

SEQ ID NO: 4989 - protein, 8 aa, Artificial Sequence
  Peptide Derived from Human Papillomavirus
EVHAGGQV

SEQ ID NO: 4990 - protein, 9 aa, Artificial Sequence
  Peptide Derived from Human Papillomavirus
EVHAGGQVI

SEQ ID NO: 4991 - protein, 10 aa, Artificial Sequence
  Peptide Derived from Human Papillomavirus
EVHAGGQVIV

SEQ ID NO: 4992 - protein, 8 aa, Artificial Sequence
  Peptide Derived from Human Papillomavirus
EVQFDGDV

SEQ ID NO: 4993 - protein, 11 aa, Artificial Sequence
  Peptide Derived from Human Papillomavirus
EVQFDGDVHNT

SEQ ID NO: 4994 - protein, 8 aa, Artificial Sequence
  Peptide Derived from Human Papillomavirus
FAGIVTKL

SEQ ID NO: 4995 - protein, 10 aa, Artificial Sequence
  Peptide Derived from Human Papillomavirus
FAGIVTKLPT

SEQ ID NO: 4996 - protein, 11 aa, Artificial Sequence
  Peptide Derived from Human Papillomavirus
FAGIVTKLPTA

SEQ ID NO: 4997 - protein, 11 aa, Artificial Sequence
  Peptide Derived from Human Papillomavirus
FIYLCIDGQCT

SEQ ID NO: 4998 - protein, 10 aa, Artificial Sequence
  Peptide Derived from Human Papillomavirus
FLNTVKIPNT

SEQ ID NO: 4999 - protein, 11 aa, Artificial Sequence
  Peptide Derived from Human Papillomavirus
FLNTVKIPNTV

SEQ ID NO: 5000 - protein, 10 aa, Artificial Sequence
  Peptide Derived from Human Papillomavirus
FTEEAKKYGT

SEQ ID NO: 5001 - protein, 8 aa, Artificial Sequence
  Peptide Derived from Human Papillomavirus
FVNFTEEA

SEQ ID NO: 5002 - protein, 9 aa, Artificial Sequence
  Peptide Derived from Human Papillomavirus
GIHSINHQV

SEQ ID NO: 5003 - protein, 10 aa, Artificial Sequence
  Peptide Derived from Human Papillomavirus
GIHSINHQVV

SEQ ID NO: 5004 - protein, 8 aa, Artificial Sequence
  Peptide Derived from Human Papillomavirus
GIVTKLPT

SEQ ID NO: 5005 - protein, 9 aa, Artificial Sequence
  Peptide Derived from Human Papillomavirus
GIVTKLPTA

SEQ ID NO: 5006 - protein, 10 aa, Artificial Sequence
  Peptide Derived from Human Papillomavirus
GIYYVHEGHI

SEQ ID NO: 5007 - protein, 11 aa, Artificial Sequence
  Peptide Derived from Human Papillomavirus
GIYYVHEGHIT

SEQ ID NO: 5008 - protein, 10 aa, Artificial Sequence
  Peptide Derived from Human Papillomavirus
GQCTVVEGQV

SEQ ID NO: 5009 - protein, 10 aa, Artificial Sequence
  Peptide Derived from Human Papillomavirus
GQVIVFPESV

SEQ ID NO: 5010 - protein, 8 aa, Artificial Sequence
  Peptide Derived from Human Papillomavirus
GQVNCKGI

SEQ ID NO: 5011 - protein, 11 aa, Artificial Sequence
  Peptide Derived from Human Papillomavirus
GQVNCKGIYYV

SEQ ID NO: 5012 - protein, 8 aa, Artificial Sequence
  Peptide Derived from Human Papillomavirus
GTGKKWEV

SEQ ID NO: 5013 - protein, 10 aa, Artificial Sequence
  Peptide Derived from Human Papillomavirus
GTGKKWEVHA

SEQ ID NO: 5014 - protein, 9 aa, Artificial Sequence
  Peptide Derived from Human Papillomavirus
GTSEGVRRA

SEQ ID NO: 5015 - protein, 10 aa, Artificial Sequence
  Peptide Derived from Human Papillomavirus
GTSEGVRRAT

SEQ ID NO: 5016 - protein, 11 aa, Artificial Sequence
  Peptide Derived from Human Papillomavirus
GTSEGVRRATT

SEQ ID NO: 5017 - protein, 9 aa, Artificial Sequence
  Peptide Derived from Human Papillomavirus
GVISAAACT

SEQ ID NO: 5018 - protein, 9 aa, Artificial Sequence
  Peptide Derived from Human Papillomavirus
GVRRATTST

SEQ ID NO: 5019 - protein, 8 aa, Artificial Sequence
  Peptide Derived from Human Papillomavirus
HAGGQVIV

SEQ ID NO: 5020 - protein, 8 aa, Artificial Sequence
  Peptide Derived from Human Papillomavirus
HIDYWKHI

SEQ ID NO: 5021 - protein, 10 aa, Artificial Sequence
  Peptide Derived from Human Papillomavirus
HIDYWKHIRL

SEQ ID NO: 5022 - protein, 8 aa, Artificial Sequence
  Peptide Derived from Human Papillomavirus
HIRLECVL

SEQ ID NO: 5023 - protein, 9 aa, Artificial Sequence
  Peptide Derived from Human Papillomavirus
HIRLECVLM

SEQ ID NO: 5024 - protein, 9 aa, Artificial Sequence
  Peptide Derived from Human Papillomavirus
HITYFVNFT

SEQ ID NO: 5025 - protein, 8 aa, Artificial Sequence
  Peptide Derived from Human Papillomavirus
HLKGDANI

SEQ ID NO: 5026 - protein, 9 aa, Artificial Sequence
  Peptide Derived from Human Papillomavirus
HLKGDANIL

SEQ ID NO: 5027 - protein, 9 aa, Artificial Sequence
  Peptide Derived from Human Papillomavirus
HQVVPALSV

SEQ ID NO: 5028 - protein, 8 aa, Artificial Sequence
  Peptide Derived from Human Papillomavirus
IIHLKGDA

SEQ ID NO: 5029 - protein, 10 aa, Artificial Sequence
  Peptide Derived from Human Papillomavirus
IIHLKGDANI

SEQ ID NO: 5030 - protein, 11 aa, Artificial Sequence
  Peptide Derived from Human Papillomavirus
IIHLKGDANIL

SEQ ID NO: 5031 - protein, 9 aa, Artificial Sequence
  Peptide Derived from Human Papillomavirus
ILKCLRYRL

SEQ ID NO: 5032 - protein, 8 aa, Artificial Sequence
  Peptide Derived from Human Papillomavirus
ITYFVNFT

SEQ ID NO: 5033 - protein, 11 aa, Artificial Sequence
  Peptide Derived from Human Papillomavirus
ITYFVNFTEEA

SEQ ID NO: 5034 - protein, 8 aa, Artificial Sequence
  Peptide Derived from Human Papillomavirus
IVTKLPTA

SEQ ID NO: 5035 - protein, 11 aa, Artificial Sequence
  Peptide Derived from Human Papillomavirus
IVTKLPTANNT

SEQ ID NO: 5036 - protein, 9 aa, Artificial Sequence
  Peptide Derived from Human Papillomavirus
IVTLTYIST

SEQ ID NO: 5037 - protein, 8 aa, Artificial Sequence
  Peptide Derived from Human Papillomavirus
KAKALQAI

SEQ ID NO: 5038 - protein, 10 aa, Artificial Sequence
  Peptide Derived from Human Papillomavirus
KAKALQAIEL

SEQ ID NO: 5039 - protein, 8 aa, Artificial Sequence
  Peptide Derived from Human Papillomavirus
KALQAIEL

SEQ ID NO: 5040 - protein, 10 aa, Artificial Sequence
  Peptide Derived from Human Papillomavirus
KALQAIELQM

SEQ ID NO: 5041 - protein, 11 aa, Artificial Sequence
  Peptide Derived from Human Papillomavirus
KALQAIELQMM

SEQ ID NO: 5042 - protein, 10 aa, Artificial Sequence
  Peptide Derived from Human Papillomavirus
KAREMGIHSI

SEQ ID NO: 5043 - protein, 8 aa, Artificial Sequence
  Peptide Derived from Human Papillomavirus
KIPNTVSV

SEQ ID NO: 5044 - protein, 10 aa, Artificial Sequence
  Peptide Derived from Human Papillomavirus
KIPNTVSVST

SEQ ID NO: 5045 - protein, 8 aa, Artificial Sequence
  Peptide Derived from Human Papillomavirus
KLLRGDSV

SEQ ID NO: 5046 - protein, 11 aa, Artificial Sequence
  Peptide Derived from Human Papillomavirus
KLLRGDSVDSV

SEQ ID NO: 5047 - protein, 8 aa, Artificial Sequence
  Peptide Derived from Human Papillomavirus
KLPTANNT

SEQ ID NO: 5048 - protein, 9 aa, Artificial Sequence
  Peptide Derived from Human Papillomavirus
KLPTANNTT

SEQ ID NO: 5049 - protein, 10 aa, Artificial Sequence
  Peptide Derived from Human Papillomavirus
KLPTANNTTT

SEQ ID NO: 5050 - protein, 10 aa, Artificial Sequence
  Peptide Derived from Human Papillomavirus
KQLYEQVSST

SEQ ID NO: 5051 - protein, 11 aa, Artificial Sequence
  Peptide Derived from Human Papillomavirus
KTCALGTSEGV

SEQ ID NO: 5052 - protein, 10 aa, Artificial Sequence
  Peptide Derived from Human Papillomavirus
LLRGDSVDSV

SEQ ID NO: 5053 - protein, 8 aa, Artificial Sequence
  Peptide Derived from Human Papillomavirus
LMYKAREM

SEQ ID NO: 5054 - protein, 10 aa, Artificial Sequence
  Peptide Derived from Human Papillomavirus
LMYKAREMGI

SEQ ID NO: 5055 - protein, 8 aa, Artificial Sequence
  Peptide Derived from Human Papillomavirus
LQAIELQM

SEQ ID NO: 5056 - protein, 9 aa, Artificial Sequence
  Peptide Derived from Human Papillomavirus
LQAIELQMM

SEQ ID NO: 5057 - protein, 10 aa, Artificial Sequence
  Peptide Derived from Human Papillomavirus
LQAIELQMML

SEQ ID NO: 5058 - protein, 8 aa, Artificial Sequence
  Peptide Derived from Human Papillomavirus
LQMMLETL

SEQ ID NO: 5059 - protein, 11 aa, Artificial Sequence
  Peptide Derived from Human Papillomavirus
LQMMLETLNNT

SEQ ID NO: 5060 - protein, 8 aa, Artificial Sequence
  Peptide Derived from Human Papillomavirus
LTAPTGCL

SEQ ID NO: 5061 - protein, 8 aa, Artificial Sequence
  Peptide Derived from Human Papillomavirus
MLETLNNT

SEQ ID NO: 5062 - protein, 9 aa, Artificial Sequence
  Peptide Derived from Human Papillomavirus
MMLETLNNT

SEQ ID NO: 5063 - protein, 8 aa, Artificial Sequence
  Peptide Derived from Human Papillomavirus
MQQTSLEL

SEQ ID NO: 5064 - protein, 10 aa, Artificial Sequence
  Peptide Derived from Human Papillomavirus
MQQTSLELYL

SEQ ID NO: 5065 - protein, 11 aa, Artificial Sequence
  Peptide Derived from Human Papillomavirus
MQQTSLELYLT

SEQ ID NO: 5066 - protein, 9 aa, Artificial Sequence
  Peptide Derived from Human Papillomavirus
NAIVTLTYI

SEQ ID NO: 5067 - protein, 11 aa, Artificial Sequence
  Peptide Derived from Human Papillomavirus
NAIVTLTYIST

SEQ ID NO: 5068 - protein, 10 aa, Artificial Sequence
  Peptide Derived from Human Papillomavirus
NILKCLRYRL

SEQ ID NO: 5069 - protein, 10 aa, Artificial Sequence
  Peptide Derived from Human Papillomavirus
NQTRAVSCPA

SEQ ID NO: 5070 - protein, 11 aa, Artificial Sequence
  Peptide Derived from Human Papillomavirus
NQTRAVSCPAT

SEQ ID NO: 5071 - protein, 10 aa, Artificial Sequence
  Peptide Derived from Human Papillomavirus
NTEYKNEDWT

SEQ ID NO: 5072 - protein, 11 aa, Artificial Sequence
  Peptide Derived from Human Papillomavirus
NTEYKNEDWTM

SEQ ID NO: 5073 - protein, 8 aa, Artificial Sequence
  Peptide Derived from Human Papillomavirus
NTHHPNKL

SEQ ID NO: 5074 - protein, 9 aa, Artificial Sequence
  Peptide Derived from Human Papillomavirus
NTHHPNKLL

SEQ ID NO: 5075 - protein, 11 aa, Artificial Sequence
  Peptide Derived from Human Papillomavirus
NTMHYTNWKFI

SEQ ID NO: 5076 - protein, 9 aa, Artificial Sequence
  Peptide Derived from Human Papillomavirus
NTTTSNSKT

SEQ ID NO: 5077 - protein, 11 aa, Artificial Sequence
  Peptide Derived from Human Papillomavirus
NTTTSNSKTCA

SEQ ID NO: 5078 - protein, 8 aa, Artificial Sequence
  Peptide Derived from Human Papillomavirus
NTVKIPNT

SEQ ID NO: 5079 - protein, 9 aa, Artificial Sequence
  Peptide Derived from Human Papillomavirus
NTVKIPNTV

SEQ ID NO: 5080 - protein, 11 aa, Artificial Sequence
  Peptide Derived from Human Papillomavirus
NTVKIPNTVSV

SEQ ID NO: 5081 - protein, 10 aa, Artificial Sequence
  Peptide Derived from Human Papillomavirus
NTVSVSTGYM

SEQ ID NO: 5082 - protein, 11 aa, Artificial Sequence
  Peptide Derived from Human Papillomavirus
NTVSVSTGYMT

SEQ ID NO: 5083 - protein, 8 aa, Artificial Sequence
  Peptide Derived from Human Papillomavirus
NVCQDKIL

SEQ ID NO: 5084 - protein, 8 aa, Artificial Sequence
  Peptide Derived from Human Papillomavirus
PALSVSKA

SEQ ID NO: 5085 - protein, 10 aa, Artificial Sequence
  Peptide Derived from Human Papillomavirus
PALSVSKAKA

SEQ ID NO: 5086 - protein, 11 aa, Artificial Sequence
  Peptide Derived from Human Papillomavirus
PALSVSKAKAL

SEQ ID NO: 5087 - protein, 9 aa, Artificial Sequence
  Peptide Derived from Human Papillomavirus
PATTPIIHL

SEQ ID NO: 5088 - protein, 9 aa, Artificial Sequence
  Peptide Derived from Human Papillomavirus
PIIHLKGDA

SEQ ID NO: 5089 - protein, 11 aa, Artificial Sequence
  Peptide Derived from Human Papillomavirus
PIIHLKGDANI

SEQ ID NO: 5090 - protein, 8 aa, Artificial Sequence
  Peptide Derived from Human Papillomavirus
PTANNTTT

SEQ ID NO: 5091 - protein, 11 aa, Artificial Sequence
  Peptide Derived from Human Papillomavirus
PTGCLKKHGYT

SEQ ID NO: 5092 - protein, 8 aa, Artificial Sequence
  Peptide Derived from Human Papillomavirus
QAIELQMM

SEQ ID NO: 5093 - protein, 9 aa, Artificial Sequence
  Peptide Derived from Human Papillomavirus
QAIELQMML

SEQ ID NO: 5094 - protein, 11 aa, Artificial Sequence
  Peptide Derived from Human Papillomavirus
QAIELQMMLET

SEQ ID NO: 5095 - protein, 9 aa, Artificial Sequence
  Peptide Derived from Human Papillomavirus
QLYEQVSST

SEQ ID NO: 5096 - protein, 10 aa, Artificial Sequence
  Peptide Derived from Human Papillomavirus
QMMLETLNNT

SEQ ID NO: 5097 - protein, 9 aa, Artificial Sequence
  Peptide Derived from Human Papillomavirus
QQTSLELYL

SEQ ID NO: 5098 - protein, 10 aa, Artificial Sequence
  Peptide Derived from Human Papillomavirus
QQTSLELYLT

SEQ ID NO: 5099 - protein, 11 aa, Artificial Sequence
  Peptide Derived from Human Papillomavirus
QQTSLELYLTA

SEQ ID NO: 5100 - protein, 9 aa, Artificial Sequence
  Peptide Derived from Human Papillomavirus
QTRAVSCPA

SEQ ID NO: 5101 - protein, 10 aa, Artificial Sequence
  Peptide Derived from Human Papillomavirus
QTRAVSCPAT

SEQ ID NO: 5102 - protein, 11 aa, Artificial Sequence
  Peptide Derived from Human Papillomavirus
QTRAVSCPATT

SEQ ID NO: 5103 - protein, 8 aa, Artificial Sequence
  Peptide Derived from Human Papillomavirus
QTSLELYL

SEQ ID NO: 5104 - protein, 9 aa, Artificial Sequence
  Peptide Derived from Human Papillomavirus
QTSLELYLT

SEQ ID NO: 5105 - protein, 10 aa, Artificial Sequence
  Peptide Derived from Human Papillomavirus
QTSLELYLTA

SEQ ID NO: 5106 - protein, 9 aa, Artificial Sequence
  Peptide Derived from Human Papillomavirus
QVIVFPESV

SEQ ID NO: 5107 - protein, 10 aa, Artificial Sequence
  Peptide Derived from Human Papillomavirus
QVNCKGIYYV

SEQ ID NO: 5108 - protein, 9 aa, Artificial Sequence
  Peptide Derived from Human Papillomavirus
QVSSTWHWT

SEQ ID NO: 5109 - protein, 11 aa, Artificial Sequence
  Peptide Derived from Human Papillomavirus
QVSSTWHWTCT

SEQ ID NO: 5110 - protein, 8 aa, Artificial Sequence
  Peptide Derived from Human Papillomavirus
QVVPALSV

SEQ ID NO: 5111 - protein, 11 aa, Artificial Sequence
  Peptide Derived from Human Papillomavirus
QVVPALSVSKA

SEQ ID NO: 5112 - protein, 11 aa, Artificial Sequence
  Peptide Derived from Human Papillomavirus
RATTSTKRPRT

SEQ ID NO: 5113 - protein, 8 aa, Artificial Sequence
  Peptide Derived from Human Papillomavirus
RAVSCPAT

SEQ ID NO: 5114 - protein, 9 aa, Artificial Sequence
  Peptide Derived from Human Papillomavirus
RAVSCPATT

SEQ ID NO: 5115 - protein, 11 aa, Artificial Sequence
  Peptide Derived from Human Papillomavirus
RAVSCPATTPI

SEQ ID NO: 5116 - protein, 10 aa, Artificial Sequence
  Peptide Derived from Human Papillomavirus
RLECVLMYKA

SEQ ID NO: 5117 - protein, 9 aa, Artificial Sequence
  Peptide Derived from Human Papillomavirus
RLNVCQDKI

SEQ ID NO: 5118 - protein, 10 aa, Artificial Sequence
  Peptide Derived from Human Papillomavirus
RLNVCQDKIL

SEQ ID NO: 5119 - protein, 8 aa, Artificial Sequence
  Peptide Derived from Human Papillomavirus
RLSKYKQL

SEQ ID NO: 5120 - protein, 9 aa, Artificial Sequence
  Peptide Derived from Human Papillomavirus
RTEPEHRNT

SEQ ID NO: 5121 - protein, 9 aa, Artificial Sequence
  Peptide Derived from Human Papillomavirus
SAAACTNQT

SEQ ID NO: 5122 - protein, 11 aa, Artificial Sequence
  Peptide Derived from Human Papillomavirus
SAAACTNQTRA

SEQ ID NO: 5123 - protein, 9 aa, Artificial Sequence
  Peptide Derived from Human Papillomavirus
SINHQVVPA

SEQ ID NO: 5124 - protein, 10 aa, Artificial Sequence
  Peptide Derived from Human Papillomavirus
SINHQVVPAL

SEQ ID NO: 5125 - protein, 8 aa, Artificial Sequence
  Peptide Derived from Human Papillomavirus
SLELYLTA

SEQ ID NO: 5126 - protein, 10 aa, Artificial Sequence
  Peptide Derived from Human Papillomavirus
SLELYLTAPT

SEQ ID NO: 5127 - protein, 9 aa, Artificial Sequence
  Peptide Derived from Human Papillomavirus
SQRDDFLNT

SEQ ID NO: 5128 - protein, 10 aa, Artificial Sequence
  Peptide Derived from Human Papillomavirus
SQRDDFLNTV

SEQ ID NO: 5129 - protein, 11 aa, Artificial Sequence
  Peptide Derived from Human Papillomavirus
SQRLNVCQDKI

SEQ ID NO: 5130 - protein, 9 aa, Artificial Sequence
  Peptide Derived from Human Papillomavirus
STSQRDDFL

SEQ ID NO: 5131 - protein, 11 aa, Artificial Sequence
  Peptide Derived from Human Papillomavirus
STSQRDDFLNT

SEQ ID NO: 5132 - protein, 8 aa, Artificial Sequence
  Peptide Derived from Human Papillomavirus
STWHWTCT

SEQ ID NO: 5133 - protein, 9 aa, Artificial Sequence
  Peptide Derived from Human Papillomavirus
SVDSVNCGV

SEQ ID NO: 5134 - protein, 10 aa, Artificial Sequence
  Peptide Derived from Human Papillomavirus
SVDSVNCGVI

SEQ ID NO: 5135 - protein, 8 aa, Artificial Sequence
  Peptide Derived from Human Papillomavirus
SVFSSDEI

SEQ ID NO: 5136 - protein, 11 aa, Artificial Sequence
  Peptide Derived from Human Papillomavirus
SVFSSDEISFA

SEQ ID NO: 5137 - protein, 9 aa, Artificial Sequence
  Peptide Derived from Human Papillomavirus
SVNCGVISA

SEQ ID NO: 5138 - protein, 10 aa, Artificial Sequence
  Peptide Derived from Human Papillomavirus
SVNCGVISAA

SEQ ID NO: 5139 - protein, 11 aa, Artificial Sequence
  Peptide Derived from Human Papillomavirus
SVNCGVISAAA

SEQ ID NO: 5140 - protein, 8 aa, Artificial Sequence
  Peptide Derived from Human Papillomavirus
SVSKAKAL

SEQ ID NO: 5141 - protein, 10 aa, Artificial Sequence
  Peptide Derived from Human Papillomavirus
SVSKAKALQA

SEQ ID NO: 5142 - protein, 11 aa, Artificial Sequence
  Peptide Derived from Human Papillomavirus
SVSKAKALQAI

SEQ ID NO: 5143 - protein, 8 aa, Artificial Sequence
  Peptide Derived from Human Papillomavirus
SVSTGYMT

SEQ ID NO: 5144 - protein, 9 aa, Artificial Sequence
  Peptide Derived from Human Papillomavirus
SVSTGYMTI

SEQ ID NO: 5145 - protein, 8 aa, Artificial Sequence
  Peptide Derived from Human Papillomavirus
TLSQRLNV

SEQ ID NO: 5146 - protein, 10 aa, Artificial Sequence
  Peptide Derived from Human Papillomavirus
TMHYTNWKFI

SEQ ID NO: 5147 - protein, 9 aa, Artificial Sequence
  Peptide Derived from Human Papillomavirus
TMQQTSLEL

SEQ ID NO: 5148 - protein, 11 aa, Artificial Sequence
  Peptide Derived from Human Papillomavirus
TMQQTSLELYL

SEQ ID NO: 5149 - protein, 11 aa, Artificial Sequence
  Peptide Derived from Human Papillomavirus
TTPIIHLKGDA

SEQ ID NO: 5150 - protein, 9 aa, Artificial Sequence
  Peptide Derived from Human Papillomavirus
TTSNSKTCA

SEQ ID NO: 5151 - protein, 10 aa, Artificial Sequence
  Peptide Derived from Human Papillomavirus
TTSNSKTCAL

SEQ ID NO: 5152 - protein, 9 aa, Artificial Sequence
  Peptide Derived from Human Papillomavirus
TTSTKRPRT

SEQ ID NO: 5153 - protein, 8 aa, Artificial Sequence
  Peptide Derived from Human Papillomavirus
TTTSNSKT

SEQ ID NO: 5154 - protein, 10 aa, Artificial Sequence
  Peptide Derived from Human Papillomavirus
TTTSNSKTCA

SEQ ID NO: 5155 - protein, 11 aa, Artificial Sequence
  Peptide Derived from Human Papillomavirus
TTTSNSKTCAL

SEQ ID NO: 5156 - protein, 10 aa, Artificial Sequence
  Peptide Derived from Human Papillomavirus
TVEVQFDGDV

SEQ ID NO: 5157 - protein, 8 aa, Artificial Sequence
  Peptide Derived from Human Papillomavirus
TVKIPNTV

SEQ ID NO: 5158 - protein, 10 aa, Artificial Sequence
  Peptide Derived from Human Papillomavirus
TVKIPNTVSV

SEQ ID NO: 5159 - protein, 9 aa, Artificial Sequence
  Peptide Derived from Human Papillomavirus
TVSVSTGYM

SEQ ID NO: 5160 - protein, 10 aa, Artificial Sequence
  Peptide Derived from Human Papillomavirus
TVSVSTGYMT

SEQ ID NO: 5161 - protein, 11 aa, Artificial Sequence
  Peptide Derived from Human Papillomavirus
TVSVSTGYMTI

SEQ ID NO: 5162 - protein, 8 aa, Artificial Sequence
  Peptide Derived from Human Papillomavirus
VISAAACT

SEQ ID NO: 5163 - protein, 11 aa, Artificial Sequence
  Peptide Derived from Human Papillomavirus
VISAAACTNQT

SEQ ID NO: 5164 - protein, 8 aa, Artificial Sequence
  Peptide Derived from Human Papillomavirus
VIVFPESV

SEQ ID NO: 5165 - protein, 9 aa, Artificial Sequence
  Peptide Derived from Human Papillomavirus
VLMYKAREM

SEQ ID NO: 5166 - protein, 11 aa, Artificial Sequence
  Peptide Derived from Human Papillomavirus
VLMYKAREMGI

SEQ ID NO: 5167 - protein, 10 aa, Artificial Sequence
  Peptide Derived from Human Papillomavirus
VQFDGDVHNT

SEQ ID NO: 5168 - protein, 11 aa, Artificial Sequence
  Peptide Derived from Human Papillomavirus
VQFDGDVHNTM

SEQ ID NO: 5169 - protein, 10 aa, Artificial Sequence
  Peptide Derived from Human Papillomavirus
VTKLPTANNT

SEQ ID NO: 5170 - protein, 11 aa, Artificial Sequence
  Peptide Derived from Human Papillomavirus
VTKLPTANNTT

SEQ ID NO: 5171 - protein, 8 aa, Artificial Sequence
  Peptide Derived from Human Papillomavirus
VTLTYIST

SEQ ID NO: 5172 - protein, 11 aa, Artificial Sequence
  Peptide Derived from Human Papillomavirus
VVEGQVNCKGI

SEQ ID NO: 5173 - protein, 10 aa, Artificial Sequence
  Peptide Derived from Human Papillomavirus
VVPALSVSKA

SEQ ID NO: 5174 - protein, 11 aa, Artificial Sequence
  Peptide Derived from Human Papillomavirus
WTCTDGKHKNA

SEQ ID NO: 5175 - protein, 8 aa, Artificial Sequence
  Peptide Derived from Human Papillomavirus
WTMQQTSL

SEQ ID NO: 5176 - protein, 10 aa, Artificial Sequence
  Peptide Derived from Human Papillomavirus
WTMQQTSLEL

SEQ ID NO: 5177 - protein, 11 aa, Artificial Sequence
  Peptide Derived from Human Papillomavirus
YISTSQRDDFL

SEQ ID NO: 5178 - protein, 9 aa, Artificial Sequence
  Peptide Derived from Human Papillomavirus
YLCIDGQCT

SEQ ID NO: 5179 - protein, 10 aa, Artificial Sequence
  Peptide Derived from Human Papillomavirus
YLCIDGQCTV

SEQ ID NO: 5180 - protein, 11 aa, Artificial Sequence
  Peptide Derived from Human Papillomavirus
YLCIDGQCTVV

SEQ ID NO: 5181 - protein, 9 aa, Artificial Sequence
  Peptide Derived from Human Papillomavirus
YLTAPTGCL

SEQ ID NO: 5182 - protein, 9 aa, Artificial Sequence
  Peptide Derived from Human Papillomavirus
YTNWKFIYL

SEQ ID NO: 5183 - protein, 11 aa, Artificial Sequence
  Peptide Derived from Human Papillomavirus
YTNWKFIYLCI

SEQ ID NO: 5184 - protein, 11 aa, Artificial Sequence
  Peptide Derived from Human Papillomavirus
YTVEVQFDGDV

SEQ ID NO: 5185 - protein, 8 aa, Artificial Sequence
  Peptide Derived from Human Papillomavirus
YVHEGHIT

SEQ ID NO: 5186 - protein, 11 aa, Artificial Sequence
  Peptide Derived from Human Papillomavirus
YVHEGHITYFV

SEQ ID NO: 5187 - protein, 8 aa, Artificial Sequence
  Peptide Derived from Human Papillomavirus
ATLLLLIV

SEQ ID NO: 5188 - protein, 9 aa, Artificial Sequence
  Peptide Derived from Human Papillomavirus
ATLLLLIVI

SEQ ID NO: 5189 - protein, 10 aa, Artificial Sequence
  Peptide Derived from Human Papillomavirus
ATLLLLIVIL

SEQ ID NO: 5190 - protein, 10 aa, Artificial Sequence
  Peptide Derived from Human Papillomavirus
ATSPLRCFCI

SEQ ID NO: 5191 - protein, 9 aa, Artificial Sequence
  Peptide Derived from Human Papillomavirus
CIYVVFIYI

SEQ ID NO: 5192 - protein, 11 aa, Artificial Sequence
  Peptide Derived from Human Papillomavirus
CIYVVFIYIPL

SEQ ID NO: 5193 - protein, 8 aa, Artificial Sequence
  Peptide Derived from Human Papillomavirus
CLVIRPLV

SEQ ID NO: 5194 - protein, 9 aa, Artificial Sequence
  Peptide Derived from Human Papillomavirus
CLVIRPLVL

SEQ ID NO: 5195 - protein, 11 aa, Artificial Sequence
  Peptide Derived from Human Papillomavirus
CLVIRPLVLSV

SEQ ID NO: 5196 - protein, 8 aa, Artificial Sequence
  Peptide Derived from Human Papillomavirus
CVLLFVCL

SEQ ID NO: 5197 - protein, 9 aa, Artificial Sequence
  Peptide Derived from Human Papillomavirus
CVLLFVCLV

SEQ ID NO: 5198 - protein, 10 aa, Artificial Sequence
  Peptide Derived from Human Papillomavirus
CVLLFVCLVI

SEQ ID NO: 5199 - protein, 9 aa, Artificial Sequence
  Peptide Derived from Human Papillomavirus
ELNISTVSI

SEQ ID NO: 5200 - protein, 10 aa, Artificial Sequence
  Peptide Derived from Human Papillomavirus
ELNISTVSIV

SEQ ID NO: 5201 - protein, 11 aa, Artificial Sequence
  Peptide Derived from Human Papillomavirus
ELNISTVSIVL

SEQ ID NO: 5202 - protein, 8 aa, Artificial Sequence
  Peptide Derived from Human Papillomavirus
FIYIPLFV

SEQ ID NO: 5203 - protein, 9 aa, Artificial Sequence
  Peptide Derived from Human Papillomavirus
FIYIPLFVI

SEQ ID NO: 5204 - protein, 11 aa, Artificial Sequence
  Peptide Derived from Human Papillomavirus
FIYIPLFVIHT

SEQ ID NO: 5205 - protein, 8 aa, Artificial Sequence
  Peptide Derived from Human Papillomavirus
FLLCFCVL

SEQ ID NO: 5206 - protein, 9 aa, Artificial Sequence
  Peptide Derived from Human Papillomavirus
FLLCFCVLL

SEQ ID NO: 5207 - protein, 11 aa, Artificial Sequence
  Peptide Derived from Human Papillomavirus
FLLCFCVLLFV

SEQ ID NO: 5208 - protein, 9 aa, Artificial Sequence
  Peptide Derived from Human Papillomavirus
FVCLVIRPL

SEQ ID NO: 5209 - protein, 10 aa, Artificial Sequence
  Peptide Derived from Human Papillomavirus
FVCLVIRPLV

SEQ ID NO: 5210 - protein, 11 aa, Artificial Sequence
  Peptide Derived from Human Papillomavirus
FVCLVIRPLVL

SEQ ID NO: 5211 - protein, 10 aa, Artificial Sequence
  Peptide Derived from Human Papillomavirus
FVIHTHASFL

SEQ ID NO: 5212 - protein, 11 aa, Artificial Sequence
  Peptide Derived from Human Papillomavirus
IATSPLRCFCI

SEQ ID NO: 5213 - protein, 10 aa, Artificial Sequence
  Peptide Derived from Human Papillomavirus
ILWVIATSPL

SEQ ID NO: 5214 - protein, 8 aa, Artificial Sequence
  Peptide Derived from Human Papillomavirus
IVILWVIA

SEQ ID NO: 5215 - protein, 9 aa, Artificial Sequence
  Peptide Derived from Human Papillomavirus
IVILWVIAT

SEQ ID NO: 5216 - protein, 11 aa, Artificial Sequence
  Peptide Derived from Human Papillomavirus
IVLCFLLCFCV

SEQ ID NO: 5217 - protein, 8 aa, Artificial Sequence
  Peptide Derived from Human Papillomavirus
LIVILWVI

SEQ ID NO: 5218 - protein, 9 aa, Artificial Sequence
  Peptide Derived from Human Papillomavirus
LIVILWVIA

SEQ ID NO: 5219 - protein, 10 aa, Artificial Sequence
  Peptide Derived from Human Papillomavirus
LIVILWVIAT

SEQ ID NO: 5220 - protein, 8 aa, Artificial Sequence
  Peptide Derived from Human Papillomavirus
LLCFCVLL

SEQ ID NO: 5221 - protein, 10 aa, Artificial Sequence
  Peptide Derived from Human Papillomavirus
LLCFCVLLFV

SEQ ID NO: 5222 - protein, 8 aa, Artificial Sequence
  Peptide Derived from Human Papillomavirus
LLFVCLVI

SEQ ID NO: 5223 - protein, 11 aa, Artificial Sequence
  Peptide Derived from Human Papillomavirus
LLFVCLVIRPL

SEQ ID NO: 5224 - protein, 8 aa, Artificial Sequence
  Peptide Derived from Human Papillomavirus
LLIVILWV

SEQ ID NO: 5225 - protein, 9 aa, Artificial Sequence
  Peptide Derived from Human Papillomavirus
LLIVILWVI

SEQ ID NO: 5226 - protein, 10 aa, Artificial Sequence
  Peptide Derived from Human Papillomavirus
LLIVILWVIA

SEQ ID NO: 5227 - protein, 11 aa, Artificial Sequence
  Peptide Derived from Human Papillomavirus
LLIVILWVIAT

SEQ ID NO: 5228 - protein, 9 aa, Artificial Sequence
  Peptide Derived from Human Papillomavirus
LLLIVILWV

SEQ ID NO: 5229 - protein, 10 aa, Artificial Sequence
  Peptide Derived from Human Papillomavirus
LLLIVILWVI

SEQ ID NO: 5230 - protein, 11 aa, Artificial Sequence
  Peptide Derived from Human Papillomavirus
LLLIVILWVIA

SEQ ID NO: 5231 - protein, 8 aa, Artificial Sequence
  Peptide Derived from Human Papillomavirus
LLLLIVIL

SEQ ID NO: 5232 - protein, 10 aa, Artificial Sequence
  Peptide Derived from Human Papillomavirus
LLLLIVILWV

SEQ ID NO: 5233 - protein, 11 aa, Artificial Sequence
  Peptide Derived from Human Papillomavirus
LLLLIVILWVI

SEQ ID NO: 5234 - protein, 8 aa, Artificial Sequence
  Peptide Derived from Human Papillomavirus
LVIRPLVL

SEQ ID NO: 5235 - protein, 10 aa, Artificial Sequence
  Peptide Derived from Human Papillomavirus
LVIRPLVLSV

SEQ ID NO: 5236 - protein, 9 aa, Artificial Sequence
  Peptide Derived from Human Papillomavirus
LVLSVSVYA

SEQ ID NO: 5237 - protein, 10 aa, Artificial Sequence
  Peptide Derived from Human Papillomavirus
LVLSVSVYAT

SEQ ID NO: 5238 - protein, 11 aa, Artificial Sequence
  Peptide Derived from Human Papillomavirus
LVLSVSVYATL

SEQ ID NO: 5239 - protein, 8 aa, Artificial Sequence
  Peptide Derived from Human Papillomavirus
MIELNIST

SEQ ID NO: 5240 - protein, 9 aa, Artificial Sequence
  Peptide Derived from Human Papillomavirus
MIELNISTV

SEQ ID NO: 5241 - protein, 11 aa, Artificial Sequence
  Peptide Derived from Human Papillomavirus
MIELNISTVSI

SEQ ID NO: 5242 - protein, 8 aa, Artificial Sequence
  Peptide Derived from Human Papillomavirus
NISTVSIV

SEQ ID NO: 5243 - protein, 9 aa, Artificial Sequence
  Peptide Derived from Human Papillomavirus
NISTVSIVL

SEQ ID NO: 5244 - protein, 9 aa, Artificial Sequence
  Peptide Derived from Human Papillomavirus
PLFVIHTHA

SEQ ID NO: 5245 - protein, 9 aa, Artificial Sequence
  Peptide Derived from Human Papillomavirus
PLRCFCIYV

SEQ ID NO: 5246 - protein, 10 aa, Artificial Sequence
  Peptide Derived from Human Papillomavirus
PLRCFCIYVV

SEQ ID NO: 5247 - protein, 8 aa, Artificial Sequence
  Peptide Derived from Human Papillomavirus
PLVLSVSV

SEQ ID NO: 5248 - protein, 10 aa, Artificial Sequence
  Peptide Derived from Human Papillomavirus
PLVLSVSVYA

SEQ ID NO: 5249 - protein, 11 aa, Artificial Sequence
  Peptide Derived from Human Papillomavirus
PLVLSVSVYAT

SEQ ID NO: 5250 - protein, 8 aa, Artificial Sequence
  Peptide Derived from Human Papillomavirus
SIVLCFLL

SEQ ID NO: 5251 - protein, 10 aa, Artificial Sequence
  Peptide Derived from Human Papillomavirus
STVSIVLCFL

SEQ ID NO: 5252 - protein, 11 aa, Artificial Sequence
  Peptide Derived from Human Papillomavirus
STVSIVLCFLL

SEQ ID NO: 5253 - protein, 8 aa, Artificial Sequence
  Peptide Derived from Human Papillomavirus
SVSVYATL

SEQ ID NO: 5254 - protein, 9 aa, Artificial Sequence
  Peptide Derived from Human Papillomavirus
SVSVYATLL

SEQ ID NO: 5255 - protein, 10 aa, Artificial Sequence
  Peptide Derived from Human Papillomavirus
SVSVYATLLL

SEQ ID NO: 5256 - protein, 11 aa, Artificial Sequence
  Peptide Derived from Human Papillomavirus
SVSVYATLLLL

SEQ ID NO: 5257 - protein, 8 aa, Artificial Sequence
  Peptide Derived from Human Papillomavirus
SVYATLLL

SEQ ID NO: 5258 - protein, 9 aa, Artificial Sequence
  Peptide Derived from Human Papillomavirus
SVYATLLLL

SEQ ID NO: 5259 - protein, 10 aa, Artificial Sequence
  Peptide Derived from Human Papillomavirus
SVYATLLLLI

SEQ ID NO: 5260 - protein, 11 aa, Artificial Sequence
  Peptide Derived from Human Papillomavirus
SVYATLLLLIV

SEQ ID NO: 5261 - protein, 8 aa, Artificial Sequence
  Peptide Derived from Human Papillomavirus
TLLLLIVI

SEQ ID NO: 5262 - protein, 9 aa, Artificial Sequence
  Peptide Derived from Human Papillomavirus
TLLLLIVIL

SEQ ID NO: 5263 - protein, 11 aa, Artificial Sequence
  Peptide Derived from Human Papillomavirus
TLLLLIVILWV

SEQ ID NO: 5264 - protein, 9 aa, Artificial Sequence
  Peptide Derived from Human Papillomavirus
TVSIVLCFL

SEQ ID NO: 5265 - protein, 10 aa, Artificial Sequence
  Peptide Derived from Human Papillomavirus
TVSIVLCFLL

SEQ ID NO: 5266 - protein, 9 aa, Artificial Sequence
  Peptide Derived from Human Papillomavirus
VIHTHASFL

SEQ ID NO: 5267 - protein, 8 aa, Artificial Sequence
  Peptide Derived from Human Papillomavirus
VILWVIAT

SEQ ID NO: 5268 - protein, 11 aa, Artificial Sequence
  Peptide Derived from Human Papillomavirus
VILWVIATSPL

SEQ ID NO: 5269 - protein, 9 aa, Artificial Sequence
  Peptide Derived from Human Papillomavirus
VIRPLVLSV

SEQ ID NO: 5270 - protein, 11 aa, Artificial Sequence
  Peptide Derived from Human Papillomavirus
VIRPLVLSVSV

SEQ ID NO: 5271 - protein, 10 aa, Artificial Sequence
  Peptide Derived from Human Papillomavirus
VLCFLLCFCV

SEQ ID NO: 5272 - protein, 11 aa, Artificial Sequence
  Peptide Derived from Human Papillomavirus
VLCFLLCFCVL

SEQ ID NO: 5273 - protein, 8 aa, Artificial Sequence
  Peptide Derived from Human Papillomavirus
VLLFVCLV

SEQ ID NO: 5274 - protein, 9 aa, Artificial Sequence
  Peptide Derived from Human Papillomavirus
VLLFVCLVI

SEQ ID NO: 5275 - protein, 8 aa, Artificial Sequence
  Peptide Derived from Human Papillomavirus
VLSVSVYA

SEQ ID NO: 5276 - protein, 9 aa, Artificial Sequence
  Peptide Derived from Human Papillomavirus
VLSVSVYAT

SEQ ID NO: 5277 - protein, 10 aa, Artificial Sequence
  Peptide Derived from Human Papillomavirus
VLSVSVYATL

SEQ ID NO: 5278 - protein, 11 aa, Artificial Sequence
  Peptide Derived from Human Papillomavirus
VLSVSVYATLL

SEQ ID NO: 5279 - protein, 8 aa, Artificial Sequence
  Peptide Derived from Human Papillomavirus
VVFIYIPL

SEQ ID NO: 5280 - protein, 10 aa, Artificial Sequence
  Peptide Derived from Human Papillomavirus
VVFIYIPLFV

SEQ ID NO: 5281 - protein, 11 aa, Artificial Sequence
  Peptide Derived from Human Papillomavirus
VVFIYIPLFVI

SEQ ID NO: 5282 - protein, 8 aa, Artificial Sequence
  Peptide Derived from Human Papillomavirus
WVIATSPL

SEQ ID NO: 5283 - protein, 8 aa, Artificial Sequence
  Peptide Derived from Human Papillomavirus
YATLLLLI

SEQ ID NO: 5284 - protein, 9 aa, Artificial Sequence
  Peptide Derived from Human Papillomavirus
YATLLLLIV

SEQ ID NO: 5285 - protein, 10 aa, Artificial Sequence
  Peptide Derived from Human Papillomavirus
YATLLLLIVI

SEQ ID NO: 5286 - protein, 11 aa, Artificial Sequence
  Peptide Derived from Human Papillomavirus
YATLLLLIVIL

SEQ ID NO: 5287 - protein, 9 aa, Artificial Sequence
  Peptide Derived from Human Papillomavirus
YIPLFVIHT

SEQ ID NO: 5288 - protein, 11 aa, Artificial Sequence
  Peptide Derived from Human Papillomavirus
YIPLFVIHTHA

SEQ ID NO: 5289 - protein, 9 aa, Artificial Sequence
  Peptide Derived from Human Papillomavirus
YVVFIYIPL

SEQ ID NO: 5290 - protein, 11 aa, Artificial Sequence
  Peptide Derived from Human Papillomavirus
YVVFIYIPLFV

SEQ ID NO: 5291 - protein, 9 aa, Artificial Sequence
  Peptide Derived from Human Papillomavirus
ALEIPYDEL

SEQ ID NO: 5292 - protein, 11 aa, Artificial Sequence
  Peptide Derived from Human Papillomavirus
ALEIPYDELRL

SEQ ID NO: 5293 - protein, 10 aa, Artificial Sequence
  Peptide Derived from Human Papillomavirus
CIACWRRPRT

SEQ ID NO: 5294 - protein, 8 aa, Artificial Sequence
  Peptide Derived from Human Papillomavirus
CITCQRPL

SEQ ID NO: 5295 - protein, 8 aa, Artificial Sequence
  Peptide Derived from Human Papillomavirus
CLRFYSKV

SEQ ID NO: 5296 - protein, 11 aa, Artificial Sequence
  Peptide Derived from Human Papillomavirus
CTKCLRFYSKV

SEQ ID NO: 5297 - protein, 8 aa, Artificial Sequence
  Peptide Derived from Human Papillomavirus
CVYCKGQL

SEQ ID NO: 5298 - protein, 9 aa, Artificial Sequence
  Peptide Derived from Human Papillomavirus
CVYCKGQLT

SEQ ID NO: 5299 - protein, 11 aa, Artificial Sequence
  Peptide Derived from Human Papillomavirus
CVYCKGQLTET

SEQ ID NO: 5300 - protein, 8 aa, Artificial Sequence
  Peptide Derived from Human Papillomavirus
DLLIRCIT

SEQ ID NO: 5301 - protein, 10 aa, Artificial Sequence
  Peptide Derived from Human Papillomavirus
DLTIVYRDDT

SEQ ID NO: 5302 - protein, 8 aa, Artificial Sequence
  Peptide Derived from Human Papillomavirus
DTPHGVCT

SEQ ID NO: 5303 - protein, 11 aa, Artificial Sequence
  Peptide Derived from Human Papillomavirus
DTPHGVCTKCL

SEQ ID NO: 5304 - protein, 9 aa, Artificial Sequence
  Peptide Derived from Human Papillomavirus
EIPYDELRL

SEQ ID NO: 5305 - protein, 8 aa, Artificial Sequence
  Peptide Derived from Human Papillomavirus
ELSSALEI

SEQ ID NO: 5306 - protein, 8 aa, Artificial Sequence
  Peptide Derived from Human Papillomavirus
ETEVLDFA

SEQ ID NO: 5307 - protein, 10 aa, Artificial Sequence
  Peptide Derived from Human Papillomavirus
ETEVLDFAFT

SEQ ID NO: 5308 - protein, 8 aa, Artificial Sequence
  Peptide Derived from Human Papillomavirus
EVLDFAFT

SEQ ID NO: 5309 - protein, 10 aa, Artificial Sequence
  Peptide Derived from Human Papillomavirus
EVLDFAFTDL

SEQ ID NO: 5310 - protein, 11 aa, Artificial Sequence
  Peptide Derived from Human Papillomavirus
EVLDFAFTDLT

SEQ ID NO: 5311 - protein, 8 aa, Artificial Sequence
  Peptide Derived from Human Papillomavirus
FAFTDLTI

SEQ ID NO: 5312 - protein, 9 aa, Artificial Sequence
  Peptide Derived from Human Papillomavirus
FAFTDLTIV

SEQ ID NO: 5313 - protein, 10 aa, Artificial Sequence
  Peptide Derived from Human Papillomavirus
GICDLLIRCI

SEQ ID NO: 5314 - protein, 11 aa, Artificial Sequence
  Peptide Derived from Human Papillomavirus
GICDLLIRCIT

SEQ ID NO: 5315 - protein, 8 aa, Artificial Sequence
  Peptide Derived from Human Papillomavirus
GQLTETEV

SEQ ID NO: 5316 - protein, 9 aa, Artificial Sequence
  Peptide Derived from Human Papillomavirus
GQLTETEVL

SEQ ID NO: 5317 - protein, 8 aa, Artificial Sequence
  Peptide Derived from Human Papillomavirus
GTTLEKLT

SEQ ID NO: 5318 - protein, 11 aa, Artificial Sequence
  Peptide Derived from Human Papillomavirus
HLDKKKRFHNI

SEQ ID NO: 5319 - protein, 9 aa, Artificial Sequence
  Peptide Derived from Human Papillomavirus
IACWRRPRT

SEQ ID NO: 5320 - protein, 11 aa, Artificial Sequence
  Peptide Derived from Human Papillomavirus
IACWRRPRTET

SEQ ID NO: 5321 - protein, 11 aa, Artificial Sequence
  Peptide Derived from Human Papillomavirus
IVYRDDTPHGV

SEQ ID NO: 5322 - protein, 8 aa, Artificial Sequence
  Peptide Derived from Human Papillomavirus
KLHELSSA

SEQ ID NO: 5323 - protein, 9 aa, Artificial Sequence
  Peptide Derived from Human Papillomavirus
KLHELSSAL

SEQ ID NO: 5324 - protein, 11 aa, Artificial Sequence
  Peptide Derived from Human Papillomavirus
KLHELSSALEI

SEQ ID NO: 5325 - protein, 10 aa, Artificial Sequence
  Peptide Derived from Human Papillomavirus
KLTNKGICDL

SEQ ID NO: 5326 - protein, 11 aa, Artificial Sequence
  Peptide Derived from Human Papillomavirus
KLTNKGICDLL

SEQ ID NO: 5327 - protein, 11 aa, Artificial Sequence
  Peptide Derived from Human Papillomavirus
LIRCITCQRPL

SEQ ID NO: 5328 - protein, 10 aa, Artificial Sequence
  Peptide Derived from Human Papillomavirus
LTETEVLDFA

SEQ ID NO: 5329 - protein, 9 aa, Artificial Sequence
  Peptide Derived from Human Papillomavirus
LTIVYRDDT

SEQ ID NO: 5330 - protein, 9 aa, Artificial Sequence
  Peptide Derived from Human Papillomavirus
LTNKGICDL

SEQ ID NO: 5331 - protein, 10 aa, Artificial Sequence
  Peptide Derived from Human Papillomavirus
LTNKGICDLL

SEQ ID NO: 5332 - protein, 11 aa, Artificial Sequence
  Peptide Derived from Human Papillomavirus
LTNKGICDLLI

SEQ ID NO: 5333 - protein, 11 aa, Artificial Sequence
  Peptide Derived from Human Papillomavirus
NIGGRWTGRCI

SEQ ID NO: 5334 - protein, 8 aa, Artificial Sequence
  Peptide Derived from Human Papillomavirus
PAERPRKL

SEQ ID NO: 5335 - protein, 11 aa, Artificial Sequence
  Peptide Derived from Human Papillomavirus
PAERPRKLHEL

SEQ ID NO: 5336 - protein, 11 aa, Artificial Sequence
  Peptide Derived from Human Papillomavirus
PLCPEEKQRHL

SEQ ID NO: 5337 - protein, 8 aa, Artificial Sequence
  Peptide Derived from Human Papillomavirus
QLTETEVL

SEQ ID NO: 5338 - protein, 11 aa, Artificial Sequence
  Peptide Derived from Human Papillomavirus
QLTETEVLDFA

SEQ ID NO: 5339 - protein, 11 aa, Artificial Sequence
  Peptide Derived from Human Papillomavirus
RLNCVYCKGQL

SEQ ID NO: 5340 - protein, 10 aa, Artificial Sequence
  Peptide Derived from Human Papillomavirus
SALEIPYDEL

SEQ ID NO: 5341 - protein, 10 aa, Artificial Sequence
  Peptide Derived from Human Papillomavirus
SVYGTTLEKL

SEQ ID NO: 5342 - protein, 11 aa, Artificial Sequence
  Peptide Derived from Human Papillomavirus
SVYGTTLEKLT

SEQ ID NO: 5343 - protein, 8 aa, Artificial Sequence
  Peptide Derived from Human Papillomavirus
TIVYRDDT

SEQ ID NO: 5344 - protein, 10 aa, Artificial Sequence
  Peptide Derived from Human Papillomavirus
TLEKLTNKGI

SEQ ID NO: 5345 - protein, 11 aa, Artificial Sequence
  Peptide Derived from Human Papillomavirus
TTLEKLTNKGI

SEQ ID NO: 5346 - protein, 9 aa, Artificial Sequence
  Peptide Derived from Human Papillomavirus
VLDFAFTDL

SEQ ID NO: 5347 - protein, 10 aa, Artificial Sequence
  Peptide Derived from Human Papillomavirus
VLDFAFTDLT

SEQ ID NO: 5348 - protein, 11 aa, Artificial Sequence
  Peptide Derived from Human Papillomavirus
VLDFAFTDLTI

SEQ ID NO: 5349 - protein, 10 aa, Artificial Sequence
  Peptide Derived from Human Papillomavirus
ATDLHCYEQL

SEQ ID NO: 5350 - protein, 9 aa, Artificial Sequence
  Peptide Derived from Human Papillomavirus
CQCKSTLRL

SEQ ID NO: 5351 - protein, 11 aa, Artificial Sequence
  Peptide Derived from Human Papillomavirus
CQCKSTLRLCV

SEQ ID NO: 5352 - protein, 9 aa, Artificial Sequence
  Peptide Derived from Human Papillomavirus
CVQSTQVDI

SEQ ID NO: 5353 - protein, 11 aa, Artificial Sequence
  Peptide Derived from Human Papillomavirus
CVQSTQVDIRI

SEQ ID NO: 5354 - protein, 8 aa, Artificial Sequence
  Peptide Derived from Human Papillomavirus
DIRILQEL

SEQ ID NO: 5355 - protein, 9 aa, Artificial Sequence
  Peptide Derived from Human Papillomavirus
DIRILQELL

SEQ ID NO: 5356 - protein, 10 aa, Artificial Sequence
  Peptide Derived from Human Papillomavirus
DIRILQELLM

SEQ ID NO: 5357 - protein, 8 aa, Artificial Sequence
  Peptide Derived from Human Papillomavirus
DLHCYEQL

SEQ ID NO: 5358 - protein, 9 aa, Artificial Sequence
  Peptide Derived from Human Papillomavirus
DLQPEATDL

SEQ ID NO: 5359 - protein, 8 aa, Artificial Sequence
  Peptide Derived from Human Papillomavirus
DTSNYNIV

SEQ ID NO: 5360 - protein, 9 aa, Artificial Sequence
  Peptide Derived from Human Papillomavirus
DTSNYNIVT

SEQ ID NO: 5361 - protein, 10 aa, Artificial Sequence
  Peptide Derived from Human Papillomavirus
DVIDSPAGQA

SEQ ID NO: 5362 - protein, 11 aa, Artificial Sequence
  Peptide Derived from Human Papillomavirus
EATDLHCYEQL

SEQ ID NO: 5363 - protein, 9 aa, Artificial Sequence
  Peptide Derived from Human Papillomavirus
ELLMGSFGI

SEQ ID NO: 5364 - protein, 10 aa, Artificial Sequence
  Peptide Derived from Human Papillomavirus
ELLMGSFGIV

SEQ ID NO: 5365 - protein, 9 aa, Artificial Sequence
  Peptide Derived from Human Papillomavirus
ETPTLQDYV

SEQ ID NO: 5366 - protein, 10 aa, Artificial Sequence
  Peptide Derived from Human Papillomavirus
ETPTLQDYVL

SEQ ID NO: 5367 - protein, 9 aa, Artificial Sequence
  Peptide Derived from Human Papillomavirus
GIVCPNCST

SEQ ID NO: 5368 - protein, 11 aa, Artificial Sequence
  Peptide Derived from Human Papillomavirus
GIVCPNCSTRL

SEQ ID NO: 5369 - protein, 8 aa, Artificial Sequence
  Peptide Derived from Human Papillomavirus
IVCPNCST

SEQ ID NO: 5370 - protein, 10 aa, Artificial Sequence
  Peptide Derived from Human Papillomavirus
IVCPNCSTRL

SEQ ID NO: 5371 - protein, 11 aa, Artificial Sequence
  Peptide Derived from Human Papillomavirus
IVTFCCQCKST

SEQ ID NO: 5372 - protein, 8 aa, Artificial Sequence
  Peptide Derived from Human Papillomavirus
LLMGSFGI

SEQ ID NO: 5373 - protein, 9 aa, Artificial Sequence
  Peptide Derived from Human Papillomavirus
LLMGSFGIV

SEQ ID NO: 5374 - protein, 8 aa, Artificial Sequence
  Peptide Derived from Human Papillomavirus
LMGSFGIV

SEQ ID NO: 5375 - protein, 8 aa, Artificial Sequence
  Peptide Derived from Human Papillomavirus
LQDYVLDL

SEQ ID NO: 5376 - protein, 11 aa, Artificial Sequence
  Peptide Derived from Human Papillomavirus
LQELLMGSFGI

SEQ ID NO: 5377 - protein, 8 aa, Artificial Sequence
  Peptide Derived from Human Papillomavirus
LQPEATDL

SEQ ID NO: 5378 - protein, 9 aa, Artificial Sequence
  Peptide Derived from Human Papillomavirus
PAGQAEPDT

SEQ ID NO: 5379 - protein, 8 aa, Artificial Sequence
  Peptide Derived from Human Papillomavirus
PTLQDYVL

SEQ ID NO: 5380 - protein, 10 aa, Artificial Sequence
  Peptide Derived from Human Papillomavirus
PTLQDYVLDL

SEQ ID NO: 5381 - protein, 11 aa, Artificial Sequence
  Peptide Derived from Human Papillomavirus
QAEPDTSNYNI

SEQ ID NO: 5382 - protein, 11 aa, Artificial Sequence
  Peptide Derived from Human Papillomavirus
QLPDSSDEEDV

SEQ ID NO: 5383 - protein, 10 aa, Artificial Sequence
  Peptide Derived from Human Papillomavirus
QVDIRILQEL

SEQ ID NO: 5384 - protein, 11 aa, Artificial Sequence
  Peptide Derived from Human Papillomavirus
QVDIRILQELL

SEQ ID NO: 5385 - protein, 8 aa, Artificial Sequence
  Peptide Derived from Human Papillomavirus
RILQELLM

SEQ ID NO: 5386 - protein, 9 aa, Artificial Sequence
  Peptide Derived from Human Papillomavirus
RLCVQSTQV

SEQ ID NO: 5387 - protein, 11 aa, Artificial Sequence
  Peptide Derived from Human Papillomavirus
RLCVQSTQVDI

SEQ ID NO: 5388 - protein, 10 aa, Artificial Sequence
  Peptide Derived from Human Papillomavirus
STLRLCVQST

SEQ ID NO: 5389 - protein, 8 aa, Artificial Sequence
  Peptide Derived from Human Papillomavirus
STQVDIRI

SEQ ID NO: 5390 - protein, 9 aa, Artificial Sequence
  Peptide Derived from Human Papillomavirus
STQVDIRIL

SEQ ID NO: 5391 - protein, 9 aa, Artificial Sequence
  Peptide Derived from Human Papillomavirus
TLQDYVLDL

SEQ ID NO: 5392 - protein, 9 aa, Artificial Sequence
  Peptide Derived from Human Papillomavirus
TLRLCVQST

SEQ ID NO: 5393 - protein, 11 aa, Artificial Sequence
  Peptide Derived from Human Papillomavirus
TLRLCVQSTQV

SEQ ID NO: 5394 - protein, 8 aa, Artificial Sequence
  Peptide Derived from Human Papillomavirus
TQVDIRIL

SEQ ID NO: 5395 - protein, 11 aa, Artificial Sequence
  Peptide Derived from Human Papillomavirus
TQVDIRILQEL

SEQ ID NO: 5396 - protein, 9 aa, Artificial Sequence
  Peptide Derived from Human Papillomavirus
VIDSPAGQA

SEQ ID NO: 5397 - protein, 8 aa, Artificial Sequence
  Peptide Derived from Human Papillomavirus
VLDLQPEA

SEQ ID NO: 5398 - protein, 9 aa, Artificial Sequence
  Peptide Derived from Human Papillomavirus
VLDLQPEAT

SEQ ID NO: 5399 - protein, 11 aa, Artificial Sequence
  Peptide Derived from Human Papillomavirus
VLDLQPEATDL

SEQ ID NO: 5400 - protein, 8 aa, Artificial Sequence
  Peptide Derived from Human Papillomavirus
VQSTQVDI

SEQ ID NO: 5401 - protein, 10 aa, Artificial Sequence
  Peptide Derived from Human Papillomavirus
VQSTQVDIRI

SEQ ID NO: 5402 - protein, 11 aa, Artificial Sequence
  Peptide Derived from Human Papillomavirus
VQSTQVDIRIL

SEQ ID NO: 5403 - protein, 10 aa, Artificial Sequence
  Peptide Derived from Human Papillomavirus
VTFCCQCKST

SEQ ID NO: 5404 - protein, 11 aa, Artificial Sequence
  Peptide Derived from Human Papillomavirus
VTFCCQCKSTL

SEQ ID NO: 5405 - protein, 9 aa, Artificial Sequence
  Peptide Derived from Human Papillomavirus
YVLDLQPEA

SEQ ID NO: 5406 - protein, 10 aa, Artificial Sequence
  Peptide Derived from Human Papillomavirus
YVLDLQPEAT

SEQ ID NO: 5407 - protein, 8 aa, Artificial Sequence
  Peptide Derived from Human Papillomavirus
AAIANSDT

SEQ ID NO: 5408 - protein, 9 aa, Artificial Sequence
  Peptide Derived from Human Papillomavirus
AAIANSDTT

SEQ ID NO: 5409 - protein, 8 aa, Artificial Sequence
  Peptide Derived from Human Papillomavirus
AIANSDTT

SEQ ID NO: 5410 - protein, 10 aa, Artificial Sequence
  Peptide Derived from Human Papillomavirus
AILEDWNFGL

SEQ ID NO: 5411 - protein, 11 aa, Artificial Sequence
  Peptide Derived from Human Papillomavirus
AILEDWNFGLT

SEQ ID NO: 5412 - protein, 8 aa, Artificial Sequence
  Peptide Derived from Human Papillomavirus
AITCQKTA

SEQ ID NO: 5413 - protein, 10 aa, Artificial Sequence
  Peptide Derived from Human Papillomavirus
AITPGDCPPL

SEQ ID NO: 5414 - protein, 9 aa, Artificial Sequence
  Peptide Derived from Human Papillomavirus
ALQDTKSNV

SEQ ID NO: 5415 - protein, 11 aa, Artificial Sequence
  Peptide Derived from Human Papillomavirus
ALQDTKSNVPL

SEQ ID NO: 5416 - protein, 10 aa, Artificial Sequence
  Peptide Derived from Human Papillomavirus
AMDFTALQDT

SEQ ID NO: 5417 - protein, 8 aa, Artificial Sequence
  Peptide Derived from Human Papillomavirus
AQGHNNGI

SEQ ID NO: 5418 - protein, 10 aa, Artificial Sequence
  Peptide Derived from Human Papillomavirus
AQIFNKPYWM

SEQ ID NO: 5419 - protein, 11 aa, Artificial Sequence
  Peptide Derived from Human Papillomavirus
ATLANSTYFPT

SEQ ID NO: 5420 - protein, 8 aa, Artificial Sequence
  Peptide Derived from Human Papillomavirus
ATVYLPPV

SEQ ID NO: 5421 - protein, 10 aa, Artificial Sequence
  Peptide Derived from Human Papillomavirus
ATVYLPPVPV

SEQ ID NO: 5422 - protein, 9 aa, Artificial Sequence
  Peptide Derived from Human Papillomavirus
CAAIANSDT

SEQ ID NO: 5423 - protein, 10 aa, Artificial Sequence
  Peptide Derived from Human Papillomavirus
CAAIANSDTT

SEQ ID NO: 5424 - protein, 9 aa, Artificial Sequence
  Peptide Derived from Human Papillomavirus
CISMDYKQT

SEQ ID NO: 5425 - protein, 11 aa, Artificial Sequence
  Peptide Derived from Human Papillomavirus
CISMDYKQTQL

SEQ ID NO: 5426 - protein, 9 aa, Artificial Sequence
  Peptide Derived from Human Papillomavirus
CLLGCKPPI

SEQ ID NO: 5427 - protein, 11 aa, Artificial Sequence
  Peptide Derived from Human Papillomavirus
DAQIFNKPYWM

SEQ ID NO: 5428 - protein, 9 aa, Artificial Sequence
  Peptide Derived from Human Papillomavirus
DIMTYIHSM

SEQ ID NO: 5429 - protein, 8 aa, Artificial Sequence
  Peptide Derived from Human Papillomavirus
DLQFIFQL

SEQ ID NO: 5430 - protein, 11 aa, Artificial Sequence
  Peptide Derived from Human Papillomavirus
DLQFIFQLCKI

SEQ ID NO: 5431 - protein, 10 aa, Artificial Sequence
  Peptide Derived from Human Papillomavirus
DLYIKGSGST

SEQ ID NO: 5432 - protein, 11 aa, Artificial Sequence
  Peptide Derived from Human Papillomavirus
DLYIKGSGSTA

SEQ ID NO: 5433 - protein, 9 aa, Artificial Sequence
  Peptide Derived from Human Papillomavirus
DMVDTGFGA

SEQ ID NO: 5434 - protein, 10 aa, Artificial Sequence
  Peptide Derived from Human Papillomavirus
DMVDTGFGAM

SEQ ID NO: 5435 - protein, 10 aa, Artificial Sequence
  Peptide Derived from Human Papillomavirus
DQFPLGRKFL

SEQ ID NO: 5436 - protein, 11 aa, Artificial Sequence
  Peptide Derived from Human Papillomavirus
DQFPLGRKFLL

SEQ ID NO: 5437 - protein, 9 aa, Artificial Sequence
  Peptide Derived from Human Papillomavirus
DTENSNRYA

SEQ ID NO: 5438 - protein, 10 aa, Artificial Sequence
  Peptide Derived from Human Papillomavirus
DTGFGAMDFT

SEQ ID NO: 5439 - protein, 11 aa, Artificial Sequence
  Peptide Derived from Human Papillomavirus
DTGFGAMDFTA

SEQ ID NO: 5440 - protein, 8 aa, Artificial Sequence
  Peptide Derived from Human Papillomavirus
DTKSNVPL

SEQ ID NO: 5441 - protein, 10 aa, Artificial Sequence
  Peptide Derived from Human Papillomavirus
DTKSNVPLDI

SEQ ID NO: 5442 - protein, 9 aa, Artificial Sequence
  Peptide Derived from Human Papillomavirus
DTSFYNPET

SEQ ID NO: 5443 - protein, 8 aa, Artificial Sequence
  Peptide Derived from Human Papillomavirus
DTTRSTNM

SEQ ID NO: 5444 - protein, 10 aa, Artificial Sequence
  Peptide Derived from Human Papillomavirus
DTTRSTNMSV

SEQ ID NO: 5445 - protein, 10 aa, Artificial Sequence
  Peptide Derived from Human Papillomavirus
DTYRFVTSQA

SEQ ID NO: 5446 - protein, 11 aa, Artificial Sequence
  Peptide Derived from Human Papillomavirus
DTYRFVTSQAI

SEQ ID NO: 5447 - protein, 9 aa, Artificial Sequence
  Peptide Derived from Human Papillomavirus
EATVYLPPV

SEQ ID NO: 5448 - protein, 11 aa, Artificial Sequence
  Peptide Derived from Human Papillomavirus
EATVYLPPVPV

SEQ ID NO: 5449 - protein, 8 aa, Artificial Sequence
  Peptide Derived from Human Papillomavirus
ETQRLVWA

SEQ ID NO: 5450 - protein, 10 aa, Artificial Sequence
  Peptide Derived from Human Papillomavirus
ETQRLVWACV

SEQ ID NO: 5451 - protein, 8 aa, Artificial Sequence
  Peptide Derived from Human Papillomavirus
EVGRGQPL

SEQ ID NO: 5452 - protein, 10 aa, Artificial Sequence
  Peptide Derived from Human Papillomavirus
EVGRGQPLGV

SEQ ID NO: 5453 - protein, 10 aa, Artificial Sequence
  Peptide Derived from Human Papillomavirus
EVNLKEKFSA

SEQ ID NO: 5454 - protein, 8 aa, Artificial Sequence
  Peptide Derived from Human Papillomavirus
FIFQLCKI

SEQ ID NO: 5455 - protein, 9 aa, Artificial Sequence
  Peptide Derived from Human Papillomavirus
FIFQLCKIT

SEQ ID NO: 5456 - protein, 10 aa, Artificial Sequence
  Peptide Derived from Human Papillomavirus
FIFQLCKITL

SEQ ID NO: 5457 - protein, 9 aa, Artificial Sequence
  Peptide Derived from Human Papillomavirus
FLLQAGYRA

SEQ ID NO: 5458 - protein, 8 aa, Artificial Sequence
  Peptide Derived from Human Papillomavirus
FQLCKITL

SEQ ID NO: 5459 - protein, 10 aa, Artificial Sequence
  Peptide Derived from Human Papillomavirus
FQLCKITLSA

SEQ ID NO: 5460 - protein, 11 aa, Artificial Sequence
  Peptide Derived from Human Papillomavirus
FTALQDTKSNV

SEQ ID NO: 5461 - protein, 11 aa, Artificial Sequence
  Peptide Derived from Human Papillomavirus
FVRHFFNRSGT

SEQ ID NO: 5462 - protein, 8 aa, Artificial Sequence
  Peptide Derived from Human Papillomavirus
FVTSQAIT

SEQ ID NO: 5463 - protein, 8 aa, Artificial Sequence
  Peptide Derived from Human Papillomavirus
FVTVVDTT

SEQ ID NO: 5464 - protein, 11 aa, Artificial Sequence
  Peptide Derived from Human Papillomavirus
FVTVVDTTRST

SEQ ID NO: 5465 - protein, 8 aa, Artificial Sequence
  Peptide Derived from Human Papillomavirus
GAMDFTAL

SEQ ID NO: 5466 - protein, 11 aa, Artificial Sequence
  Peptide Derived from Human Papillomavirus
GAMDFTALQDT

SEQ ID NO: 5467 - protein, 8 aa, Artificial Sequence
  Peptide Derived from Human Papillomavirus
GICWGNQL

SEQ ID NO: 5468 - protein, 10 aa, Artificial Sequence
  Peptide Derived from Human Papillomavirus
GICWGNQLFV

SEQ ID NO: 5469 - protein, 11 aa, Artificial Sequence
  Peptide Derived from Human Papillomavirus
GICWGNQLFVT

SEQ ID NO: 5470 - protein, 8 aa, Artificial Sequence
  Peptide Derived from Human Papillomavirus
GISGHPLL

SEQ ID NO: 5471 - protein, 10 aa, Artificial Sequence
  Peptide Derived from Human Papillomavirus
GLEVGRGQPL

SEQ ID NO: 5472 - protein, 9 aa, Artificial Sequence
  Peptide Derived from Human Papillomavirus
GLQYRVFRV

SEQ ID NO: 5473 - protein, 11 aa, Artificial Sequence
  Peptide Derived from Human Papillomavirus
GLQYRVFRVRL

SEQ ID NO: 5474 - protein, 10 aa, Artificial Sequence
  Peptide Derived from Human Papillomavirus
GLTTPPSGSL

SEQ ID NO: 5475 - protein, 8 aa, Artificial Sequence
  Peptide Derived from Human Papillomavirus
GQPLGVGI

SEQ ID NO: 5476 - protein, 8 aa, Artificial Sequence
  Peptide Derived from Human Papillomavirus
GTDNRECI

SEQ ID NO: 5477 - protein, 10 aa, Artificial Sequence
  Peptide Derived from Human Papillomavirus
GTDNRECISM

SEQ ID NO: 5478 - protein, 9 aa, Artificial Sequence
  Peptide Derived from Human Papillomavirus
GTVGESVPT

SEQ ID NO: 5479 - protein, 11 aa, Artificial Sequence
  Peptide Derived from Human Papillomavirus
GTVGESVPTDL

SEQ ID NO: 5480 - protein, 9 aa, Artificial Sequence
  Peptide Derived from Human Papillomavirus
GVGISGHPL

SEQ ID NO: 5481 - protein, 10 aa, Artificial Sequence
  Peptide Derived from Human Papillomavirus
GVGISGHPLL

SEQ ID NO: 5482 - protein, 8 aa, Artificial Sequence
  Peptide Derived from Human Papillomavirus
HAGSARLL

SEQ ID NO: 5483 - protein, 9 aa, Artificial Sequence
  Peptide Derived from Human Papillomavirus
HAGSARLLT

SEQ ID NO: 5484 - protein, 10 aa, Artificial Sequence
  Peptide Derived from Human Papillomavirus
HAGSARLLTV

SEQ ID NO: 5485 - protein, 9 aa, Artificial Sequence
  Peptide Derived from Human Papillomavirus
ILEDWNFGL

SEQ ID NO: 5486 - protein, 10 aa, Artificial Sequence
  Peptide Derived from Human Papillomavirus
ILEDWNFGLT

SEQ ID NO: 5487 - protein, 11 aa, Artificial Sequence
  Peptide Derived from Human Papillomavirus
ILEDWNFGLTT

SEQ ID NO: 5488 - protein, 8 aa, Artificial Sequence
  Peptide Derived from Human Papillomavirus
IMTYIHSM

SEQ ID NO: 5489 - protein, 11 aa, Artificial Sequence
  Peptide Derived from Human Papillomavirus
IMTYIHSMNPA

SEQ ID NO: 5490 - protein, 9 aa, Artificial Sequence
  Peptide Derived from Human Papillomavirus
IQDGDMVDT

SEQ ID NO: 5491 - protein, 8 aa, Artificial Sequence
  Peptide Derived from Human Papillomavirus
ITLSADIM

SEQ ID NO: 5492 - protein, 9 aa, Artificial Sequence
  Peptide Derived from Human Papillomavirus
ITLSADIMT

SEQ ID NO: 5493 - protein, 11 aa, Artificial Sequence
  Peptide Derived from Human Papillomavirus
ITLSADIMTYI

SEQ ID NO: 5494 - protein, 9 aa, Artificial Sequence
  Peptide Derived from Human Papillomavirus
ITPGDCPPL

SEQ ID NO: 5495 - protein, 11 aa, Artificial Sequence
  Peptide Derived from Human Papillomavirus
ITPGDCPPLEL

SEQ ID NO: 5496 - protein, 9 aa, Artificial Sequence
  Peptide Derived from Human Papillomavirus
IVVPKVSGL

SEQ ID NO: 5497 - protein, 10 aa, Artificial Sequence
  Peptide Derived from Human Papillomavirus
KAGKRSAPSA

SEQ ID NO: 5498 - protein, 8 aa, Artificial Sequence
  Peptide Derived from Human Papillomavirus
KITLSADI

SEQ ID NO: 5499 - protein, 9 aa, Artificial Sequence
  Peptide Derived from Human Papillomavirus
KITLSADIM

SEQ ID NO: 5500 - protein, 10 aa, Artificial Sequence
  Peptide Derived from Human Papillomavirus
KITLSADIMT

SEQ ID NO: 5501 - protein, 10 aa, Artificial Sequence
  Peptide Derived from Human Papillomavirus
KIVVPKVSGL

SEQ ID NO: 5502 - protein, 10 aa, Artificial Sequence
  Peptide Derived from Human Papillomavirus
KMVAEPYGDT

SEQ ID NO: 5503 - protein, 11 aa, Artificial Sequence
  Peptide Derived from Human Papillomavirus
KMVAEPYGDTL

SEQ ID NO: 5504 - protein, 8 aa, Artificial Sequence
  Peptide Derived from Human Papillomavirus
KQTQLCLL

SEQ ID NO: 5505 - protein, 9 aa, Artificial Sequence
  Peptide Derived from Human Papillomavirus
KVSGLQYRV

SEQ ID NO: 5506 - protein, 9 aa, Artificial Sequence
  Peptide Derived from Human Papillomavirus
KVVSTDEYV

SEQ ID NO: 5507 - protein, 10 aa, Artificial Sequence
  Peptide Derived from Human Papillomavirus
KVVSTDEYVT

SEQ ID NO: 5508 - protein, 9 aa, Artificial Sequence
  Peptide Derived from Human Papillomavirus
LANSTYFPT

SEQ ID NO: 5509 - protein, 8 aa, Artificial Sequence
  Peptide Derived from Human Papillomavirus
LLGCKPPI

SEQ ID NO: 5510 - protein, 8 aa, Artificial Sequence
  Peptide Derived from Human Papillomavirus
LLNKFDDT

SEQ ID NO: 5511 - protein, 8 aa, Artificial Sequence
  Peptide Derived from Human Papillomavirus
LLQAGYRA

SEQ ID NO: 5512 - protein, 11 aa, Artificial Sequence
  Peptide Derived from Human Papillomavirus
LLTVGHPYYSI

SEQ ID NO: 5513 - protein, 8 aa, Artificial Sequence
  Peptide Derived from Human Papillomavirus
LQDTKSNV

SEQ ID NO: 5514 - protein, 10 aa, Artificial Sequence
  Peptide Derived from Human Papillomavirus
LQDTKSNVPL

SEQ ID NO: 5515 - protein, 10 aa, Artificial Sequence
  Peptide Derived from Human Papillomavirus
LQFIFQLCKI

SEQ ID NO: 5516 - protein, 11 aa, Artificial Sequence
  Peptide Derived from Human Papillomavirus
LQFIFQLCKIT

SEQ ID NO: 5517 - protein, 8 aa, Artificial Sequence
  Peptide Derived from Human Papillomavirus
LQYRVFRV

SEQ ID NO: 5518 - protein, 10 aa, Artificial Sequence
  Peptide Derived from Human Papillomavirus
LQYRVFRVRL

SEQ ID NO: 5519 - protein, 9 aa, Artificial Sequence
  Peptide Derived from Human Papillomavirus
LTTPPSGSL

SEQ ID NO: 5520 - protein, 10 aa, Artificial Sequence
  Peptide Derived from Human Papillomavirus
LTVGHPYYSI

SEQ ID NO: 5521 - protein, 8 aa, Artificial Sequence
  Peptide Derived from Human Papillomavirus
LVWACVGL

SEQ ID NO: 5522 - protein, 10 aa, Artificial Sequence
  Peptide Derived from Human Papillomavirus
LVWACVGLEV

SEQ ID NO: 5523 - protein, 11 aa, Artificial Sequence
  Peptide Derived from Human Papillomavirus
MQRAQGHNNGI

SEQ ID NO: 5524 - protein, 10 aa, Artificial Sequence
  Peptide Derived from Human Papillomavirus
MTYIHSMNPA

SEQ ID NO: 5525 - protein, 11 aa, Artificial Sequence
  Peptide Derived from Human Papillomavirus
MTYIHSMNPAI

SEQ ID NO: 5526 - protein, 9 aa, Artificial Sequence
  Peptide Derived from Human Papillomavirus
MVAEPYGDT

SEQ ID NO: 5527 - protein, 10 aa, Artificial Sequence
  Peptide Derived from Human Papillomavirus
MVAEPYGDTL

SEQ ID NO: 5528 - protein, 8 aa, Artificial Sequence
  Peptide Derived from Human Papillomavirus
MVDTGFGA

SEQ ID NO: 5529 - protein, 9 aa, Artificial Sequence
  Peptide Derived from Human Papillomavirus
MVDTGFGAM

SEQ ID NO: 5530 - protein, 8 aa, Artificial Sequence
  Peptide Derived from Human Papillomavirus
MVTSDAQI

SEQ ID NO: 5531 - protein, 11 aa, Artificial Sequence
  Peptide Derived from Human Papillomavirus
NAITPGDCPPL

SEQ ID NO: 5532 - protein, 9 aa, Artificial Sequence
  Peptide Derived from Human Papillomavirus
NIYYHAGSA

SEQ ID NO: 5533 - protein, 11 aa, Artificial Sequence
  Peptide Derived from Human Papillomavirus
NIYYHAGSARL

SEQ ID NO: 5534 - protein, 8 aa, Artificial Sequence
  Peptide Derived from Human Papillomavirus
NLKEKFSA

SEQ ID NO: 5535 - protein, 10 aa, Artificial Sequence
  Peptide Derived from Human Papillomavirus
NLKEKFSADL

SEQ ID NO: 5536 - protein, 8 aa, Artificial Sequence
  Peptide Derived from Human Papillomavirus
NMSVCAAI

SEQ ID NO: 5537 - protein, 9 aa, Artificial Sequence
  Peptide Derived from Human Papillomavirus
NMSVCAAIA

SEQ ID NO: 5538 - protein, 8 aa, Artificial Sequence
  Peptide Derived from Human Papillomavirus
NQLFVTVV

SEQ ID NO: 5539 - protein, 10 aa, Artificial Sequence
  Peptide Derived from Human Papillomavirus
NQLFVTVVDT

SEQ ID NO: 5540 - protein, 11 aa, Artificial Sequence
  Peptide Derived from Human Papillomavirus
NQLFVTVVDTT

SEQ ID NO: 5541 - protein, 10 aa, Artificial Sequence
  Peptide Derived from Human Papillomavirus
NVPLDICNSI

SEQ ID NO: 5542 - protein, 11 aa, Artificial Sequence
  Peptide Derived from Human Papillomavirus
PAILEDWNFGL

SEQ ID NO: 5543 - protein, 8 aa, Artificial Sequence
  Peptide Derived from Human Papillomavirus
PLDICNSI

SEQ ID NO: 5544 - protein, 8 aa, Artificial Sequence
  Peptide Derived from Human Papillomavirus
PLELKNSV

SEQ ID NO: 5545 - protein, 9 aa, Artificial Sequence
  Peptide Derived from Human Papillomavirus
PLELKNSVI

SEQ ID NO: 5546 - protein, 8 aa, Artificial Sequence
  Peptide Derived from Human Papillomavirus
PLGRKFLL

SEQ ID NO: 5547 - protein, 10 aa, Artificial Sequence
  Peptide Derived from Human Papillomavirus
PLGRKFLLQA

SEQ ID NO: 5548 - protein, 11 aa, Artificial Sequence
  Peptide Derived from Human Papillomavirus
PLGVGISGHPL

SEQ ID NO: 5549 - protein, 9 aa, Artificial Sequence
  Peptide Derived from Human Papillomavirus
PLLNKFDDT

SEQ ID NO: 5550 - protein, 8 aa, Artificial Sequence
  Peptide Derived from Human Papillomavirus
PTPSGSMV

SEQ ID NO: 5551 - protein, 9 aa, Artificial Sequence
  Peptide Derived from Human Papillomavirus
PTPSGSMVT

SEQ ID NO: 5552 - protein, 8 aa, Artificial Sequence
  Peptide Derived from Human Papillomavirus
PVPVSKVV

SEQ ID NO: 5553 - protein, 10 aa, Artificial Sequence
  Peptide Derived from Human Papillomavirus
PVPVSKVVST

SEQ ID NO: 5554 - protein, 8 aa, Artificial Sequence
  Peptide Derived from Human Papillomavirus
PVSKVVST

SEQ ID NO: 5555 - protein, 8 aa, Artificial Sequence
  Peptide Derived from Human Papillomavirus
QAITCQKT

SEQ ID NO: 5556 - protein, 9 aa, Artificial Sequence
  Peptide Derived from Human Papillomavirus
QAITCQKTA

SEQ ID NO: 5557 - protein, 9 aa, Artificial Sequence
  Peptide Derived from Human Papillomavirus
QIFNKPYWM

SEQ ID NO: 5558 - protein, 9 aa, Artificial Sequence
  Peptide Derived from Human Papillomavirus
QLCKITLSA

SEQ ID NO: 5559 - protein, 11 aa, Artificial Sequence
  Peptide Derived from Human Papillomavirus
QLCKITLSADI

SEQ ID NO: 5560 - protein, 11 aa, Artificial Sequence
  Peptide Derived from Human Papillomavirus
QLCLLGCKPPI

SEQ ID NO: 5561 - protein, 9 aa, Artificial Sequence
  Peptide Derived from Human Papillomavirus
QLFVTVVDT

SEQ ID NO: 5562 - protein, 10 aa, Artificial Sequence
  Peptide Derived from Human Papillomavirus
QLFVTVVDTT

SEQ ID NO: 5563 - protein, 9 aa, Artificial Sequence
  Peptide Derived from Human Papillomavirus
RAQGHNNGI

SEQ ID NO: 5564 - protein, 8 aa, Artificial Sequence
  Peptide Derived from Human Papillomavirus
RARPKFKA

SEQ ID NO: 5565 - protein, 9 aa, Artificial Sequence
  Peptide Derived from Human Papillomavirus
RLVWACVGL

SEQ ID NO: 5566 - protein, 11 aa, Artificial Sequence
  Peptide Derived from Human Papillomavirus
RLVWACVGLEV

SEQ ID NO: 5567 - protein, 8 aa, Artificial Sequence
  Peptide Derived from Human Papillomavirus
RTNIYYHA

SEQ ID NO: 5568 - protein, 11 aa, Artificial Sequence
  Peptide Derived from Human Papillomavirus
RTNIYYHAGSA

SEQ ID NO: 5569 - protein, 8 aa, Artificial Sequence
  Peptide Derived from Human Papillomavirus
SADIMTYI

SEQ ID NO: 5570 - protein, 11 aa, Artificial Sequence
  Peptide Derived from Human Papillomavirus
SADIMTYIHSM

SEQ ID NO: 5571 - protein, 9 aa, Artificial Sequence
  Peptide Derived from Human Papillomavirus
SADLDQFPL

SEQ ID NO: 5572 - protein, 8 aa, Artificial Sequence
  Peptide Derived from Human Papillomavirus
SAPSASTT

SEQ ID NO: 5573 - protein, 9 aa, Artificial Sequence
  Peptide Derived from Human Papillomavirus
SAPSASTTT

SEQ ID NO: 5574 - protein, 11 aa, Artificial Sequence
  Peptide Derived from Human Papillomavirus
SAPSASTTTPA

SEQ ID NO: 5575 - protein, 8 aa, Artificial Sequence
  Peptide Derived from Human Papillomavirus
SASTTTPA

SEQ ID NO: 5576 - protein, 9 aa, Artificial Sequence
  Peptide Derived from Human Papillomavirus
SICKYPDYL

SEQ ID NO: 5577 - protein, 11 aa, Artificial Sequence
  Peptide Derived from Human Papillomavirus
SICKYPDYLKM

SEQ ID NO: 5578 - protein, 11 aa, Artificial Sequence
  Peptide Derived from Human Papillomavirus
SIPKSDNPKKI

SEQ ID NO: 5579 - protein, 9 aa, Artificial Sequence
  Peptide Derived from Human Papillomavirus
SLEDTYRFV

SEQ ID NO: 5580 - protein, 10 aa, Artificial Sequence
  Peptide Derived from Human Papillomavirus
SLEDTYRFVT

SEQ ID NO: 5581 - protein, 8 aa, Artificial Sequence
  Peptide Derived from Human Papillomavirus
SLWRPSEA

SEQ ID NO: 5582 - protein, 9 aa, Artificial Sequence
  Peptide Derived from Human Papillomavirus
SLWRPSEAT

SEQ ID NO: 5583 - protein, 10 aa, Artificial Sequence
  Peptide Derived from Human Papillomavirus
SLWRPSEATV

SEQ ID NO: 5584 - protein, 9 aa, Artificial Sequence
  Peptide Derived from Human Papillomavirus
SMDYKQTQL

SEQ ID NO: 5585 - protein, 11 aa, Artificial Sequence
  Peptide Derived from Human Papillomavirus
SMDYKQTQLCL

SEQ ID NO: 5586 - protein, 9 aa, Artificial Sequence
  Peptide Derived from Human Papillomavirus
SMVTSDAQI

SEQ ID NO: 5587 - protein, 9 aa, Artificial Sequence
  Peptide Derived from Human Papillomavirus
SQAITCQKT

SEQ ID NO: 5588 - protein, 10 aa, Artificial Sequence
  Peptide Derived from Human Papillomavirus
SQAITCQKTA

SEQ ID NO: 5589 - protein, 9 aa, Artificial Sequence
  Peptide Derived from Human Papillomavirus
STATLANST

SEQ ID NO: 5590 - protein, 9 aa, Artificial Sequence
  Peptide Derived from Human Papillomavirus
STDEYVTRT

SEQ ID NO: 5591 - protein, 11 aa, Artificial Sequence
  Peptide Derived from Human Papillomavirus
STDEYVTRTNI

SEQ ID NO: 5592 - protein, 8 aa, Artificial Sequence
  Peptide Derived from Human Papillomavirus
STNMSVCA

SEQ ID NO: 5593 - protein, 9 aa, Artificial Sequence
  Peptide Derived from Human Papillomavirus
STNMSVCAA

SEQ ID NO: 5594 - protein, 10 aa, Artificial Sequence
  Peptide Derived from Human Papillomavirus
STNMSVCAAI

SEQ ID NO: 5595 - protein, 11 aa, Artificial Sequence
  Peptide Derived from Human Papillomavirus
STNMSVCAAIA

SEQ ID NO: 5596 - protein, 11 aa, Artificial Sequence
  Peptide Derived from Human Papillomavirus
STTTPAKRKKT

SEQ ID NO: 5597 - protein, 11 aa, Artificial Sequence
  Peptide Derived from Human Papillomavirus
STYFPTPSGSM

SEQ ID NO: 5598 - protein, 11 aa, Artificial Sequence
  Peptide Derived from Human Papillomavirus
SVCAAIANSDT

SEQ ID NO: 5599 - protein, 8 aa, Artificial Sequence
  Peptide Derived from Human Papillomavirus
SVIQDGDM

SEQ ID NO: 5600 - protein, 9 aa, Artificial Sequence
  Peptide Derived from Human Papillomavirus
SVIQDGDMV

SEQ ID NO: 5601 - protein, 11 aa, Artificial Sequence
  Peptide Derived from Human Papillomavirus
SVIQDGDMVDT

SEQ ID NO: 5602 - protein, 8 aa, Artificial Sequence
  Peptide Derived from Human Papillomavirus
SVPTDLYI

SEQ ID NO: 5603 - protein, 10 aa, Artificial Sequence
  Peptide Derived from Human Papillomavirus
TALQDTKSNV

SEQ ID NO: 5604 - protein, 8 aa, Artificial Sequence
  Peptide Derived from Human Papillomavirus
TATLANST

SEQ ID NO: 5605 - protein, 10 aa, Artificial Sequence
  Peptide Derived from Human Papillomavirus
TLANSTYFPT

SEQ ID NO: 5606 - protein, 11 aa, Artificial Sequence
  Peptide Derived from Human Papillomavirus
TLFFYLRREQM

SEQ ID NO: 5607 - protein, 8 aa, Artificial Sequence
  Peptide Derived from Human Papillomavirus
TLSADIMT

SEQ ID NO: 5608 - protein, 10 aa, Artificial Sequence
  Peptide Derived from Human Papillomavirus
TLSADIMTYI

SEQ ID NO: 5609 - protein, 9 aa, Artificial Sequence
  Peptide Derived from Human Papillomavirus
TQRLVWACV

SEQ ID NO: 5610 - protein, 11 aa, Artificial Sequence
  Peptide Derived from Human Papillomavirus
TQRLVWACVGL

SEQ ID NO: 5611 - protein, 9 aa, Artificial Sequence
  Peptide Derived from Human Papillomavirus
TTPAKRKKT

SEQ ID NO: 5612 - protein, 8 aa, Artificial Sequence
  Peptide Derived from Human Papillomavirus
TTPPSGSL

SEQ ID NO: 5613 - protein, 11 aa, Artificial Sequence
  Peptide Derived from Human Papillomavirus
TTPPSGSLEDT

SEQ ID NO: 5614 - protein, 9 aa, Artificial Sequence
  Peptide Derived from Human Papillomavirus
TTRSTNMSV

SEQ ID NO: 5615 - protein, 11 aa, Artificial Sequence
  Peptide Derived from Human Papillomavirus
TTRSTNMSVCA

SEQ ID NO: 5616 - protein, 10 aa, Artificial Sequence
  Peptide Derived from Human Papillomavirus
TTTPAKRKKT

SEQ ID NO: 5617 - protein, 8 aa, Artificial Sequence
  Peptide Derived from Human Papillomavirus
TVGESVPT

SEQ ID NO: 5618 - protein, 10 aa, Artificial Sequence
  Peptide Derived from Human Papillomavirus
TVGESVPTDL

SEQ ID NO: 5619 - protein, 9 aa, Artificial Sequence
  Peptide Derived from Human Papillomavirus
TVGHPYYSI

SEQ ID NO: 5620 - protein, 9 aa, Artificial Sequence
  Peptide Derived from Human Papillomavirus
TVVDTTRST

SEQ ID NO: 5621 - protein, 11 aa, Artificial Sequence
  Peptide Derived from Human Papillomavirus
TVVDTTRSTNM

SEQ ID NO: 5622 - protein, 9 aa, Artificial Sequence
  Peptide Derived from Human Papillomavirus
TVYLPPVPV

SEQ ID NO: 5623 - protein, 8 aa, Artificial Sequence
  Peptide Derived from Human Papillomavirus
VAEPYGDT

SEQ ID NO: 5624 - protein, 9 aa, Artificial Sequence
  Peptide Derived from Human Papillomavirus
VAEPYGDTL

SEQ ID NO: 5625 - protein, 8 aa, Artificial Sequence
  Peptide Derived from Human Papillomavirus
VIQDGDMV

SEQ ID NO: 5626 - protein, 10 aa, Artificial Sequence
  Peptide Derived from Human Papillomavirus
VIQDGDMVDT

SEQ ID NO: 5627 - protein, 10 aa, Artificial Sequence
  Peptide Derived from Human Papillomavirus
VTRTNIYYHA

SEQ ID NO: 5628 - protein, 11 aa, Artificial Sequence
  Peptide Derived from Human Papillomavirus
VTSQAITCQKT

SEQ ID NO: 5629 - protein, 10 aa, Artificial Sequence
  Peptide Derived from Human Papillomavirus
VTVVDTTRST

SEQ ID NO: 5630 - protein, 8 aa, Artificial Sequence
  Peptide Derived from Human Papillomavirus
VVDTTRST

SEQ ID NO: 5631 - protein, 10 aa, Artificial Sequence
  Peptide Derived from Human Papillomavirus
VVDTTRSTNM

SEQ ID NO: 5632 - protein, 8 aa, Artificial Sequence
  Peptide Derived from Human Papillomavirus
VVPKVSGL

SEQ ID NO: 5633 - protein, 8 aa, Artificial Sequence
  Peptide Derived from Human Papillomavirus
VVSTDEYV

SEQ ID NO: 5634 - protein, 9 aa, Artificial Sequence
  Peptide Derived from Human Papillomavirus
VVSTDEYVT

SEQ ID NO: 5635 - protein, 11 aa, Artificial Sequence
  Peptide Derived from Human Papillomavirus
VVSTDEYVTRT

SEQ ID NO: 5636 - protein, 8 aa, Artificial Sequence
  Peptide Derived from Human Papillomavirus
WACVGLEV

SEQ ID NO: 5637 - protein, 8 aa, Artificial Sequence
  Peptide Derived from Human Papillomavirus
YIHSMNPA

SEQ ID NO: 5638 - protein, 9 aa, Artificial Sequence
  Peptide Derived from Human Papillomavirus
YIHSMNPAI

SEQ ID NO: 5639 - protein, 10 aa, Artificial Sequence
  Peptide Derived from Human Papillomavirus
YIHSMNPAIL

SEQ ID NO: 5640 - protein, 8 aa, Artificial Sequence
  Peptide Derived from Human Papillomavirus
YIKGSGST

SEQ ID NO: 5641 - protein, 9 aa, Artificial Sequence
  Peptide Derived from Human Papillomavirus
YIKGSGSTA

SEQ ID NO: 5642 - protein, 10 aa, Artificial Sequence
  Peptide Derived from Human Papillomavirus
YIKGSGSTAT

SEQ ID NO: 5643 - protein, 11 aa, Artificial Sequence
  Peptide Derived from Human Papillomavirus
YIKGSGSTATL

SEQ ID NO: 5644 - protein, 10 aa, Artificial Sequence
  Peptide Derived from Human Papillomavirus
YLPPVPVSKV

SEQ ID NO: 5645 - protein, 11 aa, Artificial Sequence
  Peptide Derived from Human Papillomavirus
YLPPVPVSKVV

SEQ ID NO: 5646 - protein, 10 aa, Artificial Sequence
  Peptide Derived from Human Papillomavirus
YLRHGEEFDL

SEQ ID NO: 5647 - protein, 9 aa, Artificial Sequence
  Peptide Derived from Human Papillomavirus
YLRREQMFV

SEQ ID NO: 5648 - protein, 8 aa, Artificial Sequence
  Peptide Derived from Human Papillomavirus
YVFWEVNL

SEQ ID NO: 5649 - protein, 11 aa, Artificial Sequence
  Peptide Derived from Human Papillomavirus
YVTRTNIYYHA

SEQ ID NO: 5650 - protein, 9 aa, Artificial Sequence
  Peptide Derived from Human Papillomavirus
AAGTCPSDV

SEQ ID NO: 5651 - protein, 10 aa, Artificial Sequence
  Peptide Derived from Human Papillomavirus
AAGTCPSDVI

SEQ ID NO: 5652 - protein, 8 aa, Artificial Sequence
  Peptide Derived from Human Papillomavirus
AILDVTSV

SEQ ID NO: 5653 - protein, 10 aa, Artificial Sequence
  Peptide Derived from Human Papillomavirus
AILDVTSVST

SEQ ID NO: 5654 - protein, 8 aa, Artificial Sequence
  Peptide Derived from Human Papillomavirus
ALHRPALT

SEQ ID NO: 5655 - protein, 8 aa, Artificial Sequence
  Peptide Derived from Human Papillomavirus
ALTSRRNT

SEQ ID NO: 5656 - protein, 9 aa, Artificial Sequence
  Peptide Derived from Human Papillomavirus
ALTSRRNTV

SEQ ID NO: 5657 - protein, 9 aa, Artificial Sequence
  Peptide Derived from Human Papillomavirus
ATHNVSPST

SEQ ID NO: 5658 - protein, 10 aa, Artificial Sequence
  Peptide Derived from Human Papillomavirus
ATHNVSPSTA

SEQ ID NO: 5659 - protein, 11 aa, Artificial Sequence
  Peptide Derived from Human Papillomavirus
ATHNVSPSTAV

SEQ ID NO: 5660 - protein, 10 aa, Artificial Sequence
  Peptide Derived from Human Papillomavirus
ATQLYQTCKA

SEQ ID NO: 5661 - protein, 11 aa, Artificial Sequence
  Peptide Derived from Human Papillomavirus
ATQLYQTCKAA

SEQ ID NO: 5662 - protein, 8 aa, Artificial Sequence
  Peptide Derived from Human Papillomavirus
ATQQVKVI

SEQ ID NO: 5663 - protein, 11 aa, Artificial Sequence
  Peptide Derived from Human Papillomavirus
ATQQVKVIDPT

SEQ ID NO: 5664 - protein, 9 aa, Artificial Sequence
  Peptide Derived from Human Papillomavirus
ATTADTTPA

SEQ ID NO: 5665 - protein, 10 aa, Artificial Sequence
  Peptide Derived from Human Papillomavirus
ATTADTTPAI

SEQ ID NO: 5666 - protein, 11 aa, Artificial Sequence
  Peptide Derived from Human Papillomavirus
ATTADTTPAIL

SEQ ID NO: 5667 - protein, 11 aa, Artificial Sequence
  Peptide Derived from Human Papillomavirus
ATTTSTLNDGL

SEQ ID NO: 5668 - protein, 8 aa, Artificial Sequence
  Peptide Derived from Human Papillomavirus
AVQSTSAV

SEQ ID NO: 5669 - protein, 10 aa, Artificial Sequence
  Peptide Derived from Human Papillomavirus
AVQSTSAVSA

SEQ ID NO: 5670 - protein, 8 aa, Artificial Sequence
  Peptide Derived from Human Papillomavirus
AVSAYVPT

SEQ ID NO: 5671 - protein, 10 aa, Artificial Sequence
  Peptide Derived from Human Papillomavirus
AVSAYVPTNT

SEQ ID NO: 5672 - protein, 11 aa, Artificial Sequence
  Peptide Derived from Human Papillomavirus
AVSAYVPTNTT

SEQ ID NO: 5673 - protein, 8 aa, Artificial Sequence
  Peptide Derived from Human Papillomavirus
DIATTADT

SEQ ID NO: 5674 - protein, 9 aa, Artificial Sequence
  Peptide Derived from Human Papillomavirus
DIATTADTT

SEQ ID NO: 5675 - protein, 11 aa, Artificial Sequence
  Peptide Derived from Human Papillomavirus
DIATTADTTPA

SEQ ID NO: 5676 - protein, 9 aa, Artificial Sequence
  Peptide Derived from Human Papillomavirus
DIIALHRPA

SEQ ID NO: 5677 - protein, 10 aa, Artificial Sequence
  Peptide Derived from Human Papillomavirus
DIIALHRPAL

SEQ ID NO: 5678 - protein, 11 aa, Artificial Sequence
  Peptide Derived from Human Papillomavirus
DIIALHRPALT

SEQ ID NO: 5679 - protein, 10 aa, Artificial Sequence
  Peptide Derived from Human Papillomavirus
DIPIFSGPDV

SEQ ID NO: 5680 - protein, 8 aa, Artificial Sequence
  Peptide Derived from Human Papillomavirus
DISSINPA

SEQ ID NO: 5681 - protein, 9 aa, Artificial Sequence
  Peptide Derived from Human Papillomavirus
DIYADTDFT

SEQ ID NO: 5682 - protein, 10 aa, Artificial Sequence
  Peptide Derived from Human Papillomavirus
DIYADTDFTV

SEQ ID NO: 5683 - protein, 9 aa, Artificial Sequence
  Peptide Derived from Human Papillomavirus
DQILRYGSM

SEQ ID NO: 5684 - protein, 11 aa, Artificial Sequence
  Peptide Derived from Human Papillomavirus
DQILRYGSMGV

SEQ ID NO: 5685 - protein, 8 aa, Artificial Sequence
  Peptide Derived from Human Papillomavirus
DTDFTVDT

SEQ ID NO: 5686 - protein, 10 aa, Artificial Sequence
  Peptide Derived from Human Papillomavirus
DTDFTVDTPA

SEQ ID NO: 5687 - protein, 11 aa, Artificial Sequence
  Peptide Derived from Human Papillomavirus
DTDFTVDTPAT

SEQ ID NO: 5688 - protein, 8 aa, Artificial Sequence
  Peptide Derived from Human Papillomavirus
DTPATHNV

SEQ ID NO: 5689 - protein, 9 aa, Artificial Sequence
  Peptide Derived from Human Papillomavirus
DTTPAILDV

SEQ ID NO: 5690 - protein, 10 aa, Artificial Sequence
  Peptide Derived from Human Papillomavirus
DTTPAILDVT

SEQ ID NO: 5691 - protein, 8 aa, Artificial Sequence
  Peptide Derived from Human Papillomavirus
DVGAPAPI

SEQ ID NO: 5692 - protein, 9 aa, Artificial Sequence
  Peptide Derived from Human Papillomavirus
DVIPKIEHT

SEQ ID NO: 5693 - protein, 10 aa, Artificial Sequence
  Peptide Derived from Human Papillomavirus
DVIPKIEHTT

SEQ ID NO: 5694 - protein, 11 aa, Artificial Sequence
  Peptide Derived from Human Papillomavirus
DVIPKIEHTTI

SEQ ID NO: 5695 - protein, 9 aa, Artificial Sequence
  Peptide Derived from Human Papillomavirus
DVPIEHAPT

SEQ ID NO: 5696 - protein, 11 aa, Artificial Sequence
  Peptide Derived from Human Papillomavirus
DVPIEHAPTQV

SEQ ID NO: 5697 - protein, 10 aa, Artificial Sequence
  Peptide Derived from Human Papillomavirus
EASIPIRPPV

SEQ ID NO: 5698 - protein, 8 aa, Artificial Sequence
  Peptide Derived from Human Papillomavirus
EIPMDTFI

SEQ ID NO: 5699 - protein, 9 aa, Artificial Sequence
  Peptide Derived from Human Papillomavirus
EIPMDTFIV

SEQ ID NO: 5700 - protein, 11 aa, Artificial Sequence
  Peptide Derived from Human Papillomavirus
EIPMDTFIVST

SEQ ID NO: 5701 - protein, 9 aa, Artificial Sequence
  Peptide Derived from Human Papillomavirus
EMQPLGASA

SEQ ID NO: 5702 - protein, 10 aa, Artificial Sequence
  Peptide Derived from Human Papillomavirus
EMQPLGASAT

SEQ ID NO: 5703 - protein, 11 aa, Artificial Sequence
  Peptide Derived from Human Papillomavirus
EMQPLGASATT

SEQ ID NO: 5704 - protein, 8 aa, Artificial Sequence
  Peptide Derived from Human Papillomavirus
ETSGHLLL

SEQ ID NO: 5705 - protein, 9 aa, Artificial Sequence
  Peptide Derived from Human Papillomavirus
ETVNAEESL

SEQ ID NO: 5706 - protein, 10 aa, Artificial Sequence
  Peptide Derived from Human Papillomavirus
FIVSTNNENI

SEQ ID NO: 5707 - protein, 11 aa, Artificial Sequence
  Peptide Derived from Human Papillomavirus
FIVSTNNENIT

SEQ ID NO: 5708 - protein, 11 aa, Artificial Sequence
  Peptide Derived from Human Papillomavirus
FLDIIALHRPA

SEQ ID NO: 5709 - protein, 8 aa, Artificial Sequence
  Peptide Derived from Human Papillomavirus
FLSAPKQL

SEQ ID NO: 5710 - protein, 9 aa, Artificial Sequence
  Peptide Derived from Human Papillomavirus
FLSAPKQLI

SEQ ID NO: 5711 - protein, 10 aa, Artificial Sequence
  Peptide Derived from Human Papillomavirus
FLSAPKQLIT

SEQ ID NO: 5712 - protein, 11 aa, Artificial Sequence
  Peptide Derived from Human Papillomavirus
FTDPSVLQPPT

SEQ ID NO: 5713 - protein, 8 aa, Artificial Sequence
  Peptide Derived from Human Papillomavirus
FTDVSVAA

SEQ ID NO: 5714 - protein, 8 aa, Artificial Sequence
  Peptide Derived from Human Papillomavirus
FTVDTPAT

SEQ ID NO: 5715 - protein, 11 aa, Artificial Sequence
  Peptide Derived from Human Papillomavirus
FTVDTPATHNV

SEQ ID NO: 5716 - protein, 9 aa, Artificial Sequence
  Peptide Derived from Human Papillomavirus
FVDGGDFYL

SEQ ID NO: 5717 - protein, 11 aa, Artificial Sequence
  Peptide Derived from Human Papillomavirus
GAPAPIPHPPT

SEQ ID NO: 5718 - protein, 10 aa, Artificial Sequence
  Peptide Derived from Human Papillomavirus
GARVHYYYDI

SEQ ID NO: 5719 - protein, 9 aa, Artificial Sequence
  Peptide Derived from Human Papillomavirus
GASATTTST

SEQ ID NO: 5720 - protein, 10 aa, Artificial Sequence
  Peptide Derived from Human Papillomavirus
GASATTTSTL

SEQ ID NO: 5721 - protein, 8 aa, Artificial Sequence
  Peptide Derived from Human Papillomavirus
GATIGARV

SEQ ID NO: 5722 - protein, 8 aa, Artificial Sequence
  Peptide Derived from Human Papillomavirus
GIGSGSGT

SEQ ID NO: 5723 - protein, 9 aa, Artificial Sequence
  Peptide Derived from Human Papillomavirus
GIVDVGAPA

SEQ ID NO: 5724 - protein, 11 aa, Artificial Sequence
  Peptide Derived from Human Papillomavirus
GIVDVGAPAPI

SEQ ID NO: 5725 - protein, 10 aa, Artificial Sequence
  Peptide Derived from Human Papillomavirus
GLGIGSGSGT

SEQ ID NO: 5726 - protein, 9 aa, Artificial Sequence
  Peptide Derived from Human Papillomavirus
GLYDIYADT

SEQ ID NO: 5727 - protein, 10 aa, Artificial Sequence
  Peptide Derived from Human Papillomavirus
GLYSKATQQV

SEQ ID NO: 5728 - protein, 8 aa, Artificial Sequence
  Peptide Derived from Human Papillomavirus
GTCPSDVI

SEQ ID NO: 5729 - protein, 11 aa, Artificial Sequence
  Peptide Derived from Human Papillomavirus
GTCPSDVIPKI

SEQ ID NO: 5730 - protein, 9 aa, Artificial Sequence
  Peptide Derived from Human Papillomavirus
GTGGRTGYV

SEQ ID NO: 5731 - protein, 11 aa, Artificial Sequence
  Peptide Derived from Human Papillomavirus
GTGGRTGYVPL

SEQ ID NO: 5732 - protein, 9 aa, Artificial Sequence
  Peptide Derived from Human Papillomavirus
GVFFGGLGI

SEQ ID NO: 5733 - protein, 8 aa, Artificial Sequence
  Peptide Derived from Human Papillomavirus
GVRRPARL

SEQ ID NO: 5734 - protein, 10 aa, Artificial Sequence
  Peptide Derived from Human Papillomavirus
GVRRPARLGL

SEQ ID NO: 5735 - protein, 11 aa, Artificial Sequence
  Peptide Derived from Human Papillomavirus
HAPTQVFPFPL

SEQ ID NO: 5736 - protein, 9 aa, Artificial Sequence
  Peptide Derived from Human Papillomavirus
HLLLSSSSI

SEQ ID NO: 5737 - protein, 11 aa, Artificial Sequence
  Peptide Derived from Human Papillomavirus
HLLLSSSSIST

SEQ ID NO: 5738 - protein, 8 aa, Artificial Sequence
  Peptide Derived from Human Papillomavirus
HTTIADQI

SEQ ID NO: 5739 - protein, 9 aa, Artificial Sequence
  Peptide Derived from Human Papillomavirus
HTTIADQIL

SEQ ID NO: 5740 - protein, 11 aa, Artificial Sequence
  Peptide Derived from Human Papillomavirus
IADQILRYGSM

SEQ ID NO: 5741 - protein, 8 aa, Artificial Sequence
  Peptide Derived from Human Papillomavirus
IALHRPAL

SEQ ID NO: 5742 - protein, 9 aa, Artificial Sequence
  Peptide Derived from Human Papillomavirus
IALHRPALT

SEQ ID NO: 5743 - protein, 8 aa, Artificial Sequence
  Peptide Derived from Human Papillomavirus
IAPDPDFL

SEQ ID NO: 5744 - protein, 10 aa, Artificial Sequence
  Peptide Derived from Human Papillomavirus
IAPDPDFLDI

SEQ ID NO: 5745 - protein, 11 aa, Artificial Sequence
  Peptide Derived from Human Papillomavirus
IAPDPDFLDII

SEQ ID NO: 5746 - protein, 8 aa, Artificial Sequence
  Peptide Derived from Human Papillomavirus
IATTADTT

SEQ ID NO: 5747 - protein, 10 aa, Artificial Sequence
  Peptide Derived from Human Papillomavirus
IATTADTTPA

SEQ ID NO: 5748 - protein, 11 aa, Artificial Sequence
  Peptide Derived from Human Papillomavirus
IATTADTTPAI

SEQ ID NO: 5749 - protein, 8 aa, Artificial Sequence
  Peptide Derived from Human Papillomavirus
IIALHRPA

SEQ ID NO: 5750 - protein, 9 aa, Artificial Sequence
  Peptide Derived from Human Papillomavirus
IIALHRPAL

SEQ ID NO: 5751 - protein, 10 aa, Artificial Sequence
  Peptide Derived from Human Papillomavirus
IIALHRPALT

SEQ ID NO: 5752 - protein, 9 aa, Artificial Sequence
  Peptide Derived from Human Papillomavirus
ILDVTSVST

SEQ ID NO: 5753 - protein, 9 aa, Artificial Sequence
  Peptide Derived from Human Papillomavirus
ILRYGSMGV

SEQ ID NO: 5754 - protein, 10 aa, Artificial Sequence
  Peptide Derived from Human Papillomavirus
ITSSTPIPGV

SEQ ID NO: 5755 - protein, 10 aa, Artificial Sequence
  Peptide Derived from Human Papillomavirus
ITYENPAYET

SEQ ID NO: 5756 - protein, 11 aa, Artificial Sequence
  Peptide Derived from Human Papillomavirus
ITYENPAYETV

SEQ ID NO: 5757 - protein, 8 aa, Artificial Sequence
  Peptide Derived from Human Papillomavirus
IVDVGAPA

SEQ ID NO: 5758 - protein, 10 aa, Artificial Sequence
  Peptide Derived from Human Papillomavirus
IVDVGAPAPI

SEQ ID NO: 5759 - protein, 10 aa, Artificial Sequence
  Peptide Derived from Human Papillomavirus
IVSLVEESGI

SEQ ID NO: 5760 - protein, 11 aa, Artificial Sequence
  Peptide Derived from Human Papillomavirus
IVSLVEESGIV

SEQ ID NO: 5761 - protein, 9 aa, Artificial Sequence
  Peptide Derived from Human Papillomavirus
IVSTNNENI

SEQ ID NO: 5762 - protein, 10 aa, Artificial Sequence
  Peptide Derived from Human Papillomavirus
IVSTNNENIT

SEQ ID NO: 5763 - protein, 10 aa, Artificial Sequence
  Peptide Derived from Human Papillomavirus
KAAGTCPSDV

SEQ ID NO: 5764 - protein, 11 aa, Artificial Sequence
  Peptide Derived from Human Papillomavirus
KAAGTCPSDVI

SEQ ID NO: 5765 - protein, 8 aa, Artificial Sequence
  Peptide Derived from Human Papillomavirus
KATQQVKV

SEQ ID NO: 5766 - protein, 9 aa, Artificial Sequence
  Peptide Derived from Human Papillomavirus
KATQQVKVI

SEQ ID NO: 5767 - protein, 8 aa, Artificial Sequence
  Peptide Derived from Human Papillomavirus
KIEHTTIA

SEQ ID NO: 5768 - protein, 11 aa, Artificial Sequence
  Peptide Derived from Human Papillomavirus
KIEHTTIADQI

SEQ ID NO: 5769 - protein, 10 aa, Artificial Sequence
  Peptide Derived from Human Papillomavirus
KQLITYENPA

SEQ ID NO: 5770 - protein, 10 aa, Artificial Sequence
  Peptide Derived from Human Papillomavirus
KQTLRTRSGA

SEQ ID NO: 5771 - protein, 11 aa, Artificial Sequence
  Peptide Derived from Human Papillomavirus
KQTLRTRSGAT

SEQ ID NO: 5772 - protein, 8 aa, Artificial Sequence
  Peptide Derived from Human Papillomavirus
KVIDPTFL

SEQ ID NO: 5773 - protein, 10 aa, Artificial Sequence
  Peptide Derived from Human Papillomavirus
KVIDPTFLSA

SEQ ID NO: 5774 - protein, 8 aa, Artificial Sequence
  Peptide Derived from Human Papillomavirus
LAPTTPQV

SEQ ID NO: 5775 - protein, 10 aa, Artificial Sequence
  Peptide Derived from Human Papillomavirus
LAPTTPQVSI

SEQ ID NO: 5776 - protein, 8 aa, Artificial Sequence
  Peptide Derived from Human Papillomavirus
LITYENPA

SEQ ID NO: 5777 - protein, 11 aa, Artificial Sequence
  Peptide Derived from Human Papillomavirus
LITYENPAYET

SEQ ID NO: 5778 - protein, 8 aa, Artificial Sequence
  Peptide Derived from Human Papillomavirus
LLLSSSSI

SEQ ID NO: 5779 - protein, 10 aa, Artificial Sequence
  Peptide Derived from Human Papillomavirus
LLLSSSSIST

SEQ ID NO: 5780 - protein, 9 aa, Artificial Sequence
  Peptide Derived from Human Papillomavirus
LLSSSSIST

SEQ ID NO: 5781 - protein, 9 aa, Artificial Sequence
  Peptide Derived from Human Papillomavirus
LQPPTPAET

SEQ ID NO: 5782 - protein, 8 aa, Artificial Sequence
  Peptide Derived from Human Papillomavirus
LTSRRNTV

SEQ ID NO: 5783 - protein, 8 aa, Artificial Sequence
  Peptide Derived from Human Papillomavirus
LVEESGIV

SEQ ID NO: 5784 - protein, 10 aa, Artificial Sequence
  Peptide Derived from Human Papillomavirus
LVEESGIVDV

SEQ ID NO: 5785 - protein, 9 aa, Artificial Sequence
  Peptide Derived from Human Papillomavirus
MLKRRRKRV

SEQ ID NO: 5786 - protein, 8 aa, Artificial Sequence
  Peptide Derived from Human Papillomavirus
MQPLGASA

SEQ ID NO: 5787 - protein, 9 aa, Artificial Sequence
  Peptide Derived from Human Papillomavirus
MQPLGASAT

SEQ ID NO: 5788 - protein, 10 aa, Artificial Sequence
  Peptide Derived from Human Papillomavirus
MQPLGASATT

SEQ ID NO: 5789 - protein, 11 aa, Artificial Sequence
  Peptide Derived from Human Papillomavirus
MQPLGASATTT

SEQ ID NO: 5790 - protein, 11 aa, Artificial Sequence
  Peptide Derived from Human Papillomavirus
NAEESLYFSNT

SEQ ID NO: 5791 - protein, 9 aa, Artificial Sequence
  Peptide Derived from Human Papillomavirus
NIAPDPDFL

SEQ ID NO: 5792 - protein, 11 aa, Artificial Sequence
  Peptide Derived from Human Papillomavirus
NIAPDPDFLDI

SEQ ID NO: 5793 - protein, 8 aa, Artificial Sequence
  Peptide Derived from Human Papillomavirus
NITSSTPI

SEQ ID NO: 5794 - protein, 11 aa, Artificial Sequence
  Peptide Derived from Human Papillomavirus
NITSSTPIPGV

SEQ ID NO: 5795 - protein, 8 aa, Artificial Sequence
  Peptide Derived from Human Papillomavirus
NTTVPLST

SEQ ID NO: 5796 - protein, 8 aa, Artificial Sequence
  Peptide Derived from Human Papillomavirus
NTVRYSRL

SEQ ID NO: 5797 - protein, 8 aa, Artificial Sequence
  Peptide Derived from Human Papillomavirus
NVSPSTAV

SEQ ID NO: 5798 - protein, 11 aa, Artificial Sequence
  Peptide Derived from Human Papillomavirus
NVSPSTAVQST

SEQ ID NO: 5799 - protein, 8 aa, Artificial Sequence
  Peptide Derived from Human Papillomavirus
PAETSGHL

SEQ ID NO: 5800 - protein, 9 aa, Artificial Sequence
  Peptide Derived from Human Papillomavirus
PAETSGHLL

SEQ ID NO: 5801 - protein, 10 aa, Artificial Sequence
  Peptide Derived from Human Papillomavirus
PAETSGHLLL

SEQ ID NO: 5802 - protein, 8 aa, Artificial Sequence
  Peptide Derived from Human Papillomavirus
PAGESIEM

SEQ ID NO: 5803 - protein, 11 aa, Artificial Sequence
  Peptide Derived from Human Papillomavirus
PAGESIEMQPL

SEQ ID NO: 5804 - protein, 9 aa, Artificial Sequence
  Peptide Derived from Human Papillomavirus
PAILDVTSV

SEQ ID NO: 5805 - protein, 11 aa, Artificial Sequence
  Peptide Derived from Human Papillomavirus
PAILDVTSVST

SEQ ID NO: 5806 - protein, 9 aa, Artificial Sequence
  Peptide Derived from Human Papillomavirus
PALTSRRNT

SEQ ID NO: 5807 - protein, 10 aa, Artificial Sequence
  Peptide Derived from Human Papillomavirus
PALTSRRNTV

SEQ ID NO: 5808 - protein, 9 aa, Artificial Sequence
  Peptide Derived from Human Papillomavirus
PAPIPHPPT

SEQ ID NO: 5809 - protein, 10 aa, Artificial Sequence
  Peptide Derived from Human Papillomavirus
PAPIPHPPTT

SEQ ID NO: 5810 - protein, 10 aa, Artificial Sequence
  Peptide Derived from Human Papillomavirus
PARLGLYSKA

SEQ ID NO: 5811 - protein, 11 aa, Artificial Sequence
  Peptide Derived from Human Papillomavirus
PARLGLYSKAT

SEQ ID NO: 5812 - protein, 10 aa, Artificial Sequence
  Peptide Derived from Human Papillomavirus
PATHNVSPST

SEQ ID NO: 5813 - protein, 11 aa, Artificial Sequence
  Peptide Derived from Human Papillomavirus
PATHNVSPSTA

SEQ ID NO: 5814 - protein, 8 aa, Artificial Sequence
  Peptide Derived from Human Papillomavirus
PAYETVNA

SEQ ID NO: 5815 - protein, 9 aa, Artificial Sequence
  Peptide Derived from Human Papillomavirus
PIEHAPTQV

SEQ ID NO: 5816 - protein, 8 aa, Artificial Sequence
  Peptide Derived from Human Papillomavirus
PIFSGPDV

SEQ ID NO: 5817 - protein, 10 aa, Artificial Sequence
  Peptide Derived from Human Papillomavirus
PIFSGPDVPI

SEQ ID NO: 5818 - protein, 9 aa, Artificial Sequence
  Peptide Derived from Human Papillomavirus
PIPGVRRPA

SEQ ID NO: 5819 - protein, 11 aa, Artificial Sequence
  Peptide Derived from Human Papillomavirus
PIPGVRRPARL

SEQ ID NO: 5820 - protein, 8 aa, Artificial Sequence
  Peptide Derived from Human Papillomavirus
PIPHPPTT

SEQ ID NO: 5821 - protein, 8 aa, Artificial Sequence
  Peptide Derived from Human Papillomavirus
PIRPPVSI

SEQ ID NO: 5822 - protein, 11 aa, Artificial Sequence
  Peptide Derived from Human Papillomavirus
PIRPPVSIDPV

SEQ ID NO: 5823 - protein, 9 aa, Artificial Sequence
  Peptide Derived from Human Papillomavirus
PLAPTTPQV

SEQ ID NO: 5824 - protein, 11 aa, Artificial Sequence
  Peptide Derived from Human Papillomavirus
PLAPTTPQVSI

SEQ ID NO: 5825 - protein, 9 aa, Artificial Sequence
  Peptide Derived from Human Papillomavirus
PLDPSIVSL

SEQ ID NO: 5826 - protein, 10 aa, Artificial Sequence
  Peptide Derived from Human Papillomavirus
PLDPSIVSLV

SEQ ID NO: 5827 - protein, 8 aa, Artificial Sequence
  Peptide Derived from Human Papillomavirus
PLGASATT

SEQ ID NO: 5828 - protein, 9 aa, Artificial Sequence
  Peptide Derived from Human Papillomavirus
PLGASATTT

SEQ ID NO: 5829 - protein, 11 aa, Artificial Sequence
  Peptide Derived from Human Papillomavirus
PLGASATTTST

SEQ ID NO: 5830 - protein, 8 aa, Artificial Sequence
  Peptide Derived from Human Papillomavirus
PLSTGFDI

SEQ ID NO: 5831 - protein, 10 aa, Artificial Sequence
  Peptide Derived from Human Papillomavirus
PLSTGFDIPI

SEQ ID NO: 5832 - protein, 8 aa, Artificial Sequence
  Peptide Derived from Human Papillomavirus
PLSTRPST

SEQ ID NO: 5833 - protein, 9 aa, Artificial Sequence
  Peptide Derived from Human Papillomavirus
PLSTRPSTV

SEQ ID NO: 5834 - protein, 9 aa, Artificial Sequence
  Peptide Derived from Human Papillomavirus
PMDTFIVST

SEQ ID NO: 5835 - protein, 10 aa, Artificial Sequence
  Peptide Derived from Human Papillomavirus
PTFLSAPKQL

SEQ ID NO: 5836 - protein, 11 aa, Artificial Sequence
  Peptide Derived from Human Papillomavirus
PTFLSAPKQLI

SEQ ID NO: 5837 - protein, 8 aa, Artificial Sequence
  Peptide Derived from Human Papillomavirus
PTFTDPSV

SEQ ID NO: 5838 - protein, 9 aa, Artificial Sequence
  Peptide Derived from Human Papillomavirus
PTFTDPSVL

SEQ ID NO: 5839 - protein, 8 aa, Artificial Sequence
  Peptide Derived from Human Papillomavirus
PTNTTVPL

SEQ ID NO: 5840 - protein, 10 aa, Artificial Sequence
  Peptide Derived from Human Papillomavirus
PTNTTVPLST

SEQ ID NO: 5841 - protein, 10 aa, Artificial Sequence
  Peptide Derived from Human Papillomavirus
PTPAETSGHL

SEQ ID NO: 5842 - protein, 11 aa, Artificial Sequence
  Peptide Derived from Human Papillomavirus
PTPAETSGHLL

SEQ ID NO: 5843 - protein, 9 aa, Artificial Sequence
  Peptide Derived from Human Papillomavirus
PTQVFPFPL

SEQ ID NO: 5844 - protein, 10 aa, Artificial Sequence
  Peptide Derived from Human Papillomavirus
PTQVFPFPLA

SEQ ID NO: 5845 - protein, 8 aa, Artificial Sequence
  Peptide Derived from Human Papillomavirus
PTTPQVSI

SEQ ID NO: 5846 - protein, 10 aa, Artificial Sequence
  Peptide Derived from Human Papillomavirus
PTTPQVSIFV

SEQ ID NO: 5847 - protein, 8 aa, Artificial Sequence
  Peptide Derived from Human Papillomavirus
PTTSGFDI

SEQ ID NO: 5848 - protein, 9 aa, Artificial Sequence
  Peptide Derived from Human Papillomavirus
PTTSGFDIA

SEQ ID NO: 5849 - protein, 10 aa, Artificial Sequence
  Peptide Derived from Human Papillomavirus
PTTSGFDIAT

SEQ ID NO: 5850 - protein, 11 aa, Artificial Sequence
  Peptide Derived from Human Papillomavirus
PTTSGFDIATT

SEQ ID NO: 5851 - protein, 9 aa, Artificial Sequence
  Peptide Derived from Human Papillomavirus
PVGPLDPSI

SEQ ID NO: 5852 - protein, 10 aa, Artificial Sequence
  Peptide Derived from Human Papillomavirus
PVGPLDPSIV

SEQ ID NO: 5853 - protein, 10 aa, Artificial Sequence
  Peptide Derived from Human Papillomavirus
PVSIDPVGPL

SEQ ID NO: 5854 - protein, 8 aa, Artificial Sequence
  Peptide Derived from Human Papillomavirus
QILRYGSM

SEQ ID NO: 5855 - protein, 10 aa, Artificial Sequence
  Peptide Derived from Human Papillomavirus
QILRYGSMGV

SEQ ID NO: 5856 - protein, 9 aa, Artificial Sequence
  Peptide Derived from Human Papillomavirus
QLITYENPA

SEQ ID NO: 5857 - protein, 8 aa, Artificial Sequence
  Peptide Derived from Human Papillomavirus
QLYQTCKA

SEQ ID NO: 5858 - protein, 9 aa, Artificial Sequence
  Peptide Derived from Human Papillomavirus
QLYQTCKAA

SEQ ID NO: 5859 - protein, 11 aa, Artificial Sequence
  Peptide Derived from Human Papillomavirus
QLYQTCKAAGT

SEQ ID NO: 5860 - protein, 9 aa, Artificial Sequence
  Peptide Derived from Human Papillomavirus
QQVKVIDPT

SEQ ID NO: 5861 - protein, 11 aa, Artificial Sequence
  Peptide Derived from Human Papillomavirus
QQVKVIDPTFL

SEQ ID NO: 5862 - protein, 8 aa, Artificial Sequence
  Peptide Derived from Human Papillomavirus
QTCKAAGT

SEQ ID NO: 5863 - protein, 9 aa, Artificial Sequence
  Peptide Derived from Human Papillomavirus
QTLRTRSGA

SEQ ID NO: 5864 - protein, 10 aa, Artificial Sequence
  Peptide Derived from Human Papillomavirus
QTLRTRSGAT

SEQ ID NO: 5865 - protein, 11 aa, Artificial Sequence
  Peptide Derived from Human Papillomavirus
QTLRTRSGATI

SEQ ID NO: 5866 - protein, 8 aa, Artificial Sequence
  Peptide Derived from Human Papillomavirus
QVFPFPLA

SEQ ID NO: 5867 - protein, 10 aa, Artificial Sequence
  Peptide Derived from Human Papillomavirus
QVFPFPLAPT

SEQ ID NO: 5868 - protein, 11 aa, Artificial Sequence
  Peptide Derived from Human Papillomavirus
QVFPFPLAPTT

SEQ ID NO: 5869 - protein, 8 aa, Artificial Sequence
  Peptide Derived from Human Papillomavirus
QVKVIDPT

SEQ ID NO: 5870 - protein, 10 aa, Artificial Sequence
  Peptide Derived from Human Papillomavirus
QVKVIDPTFL

SEQ ID NO: 5871 - protein, 10 aa, Artificial Sequence
  Peptide Derived from Human Papillomavirus
RASATQLYQT

SEQ ID NO: 5872 - protein, 8 aa, Artificial Sequence
  Peptide Derived from Human Papillomavirus
RLGLYSKA

SEQ ID NO: 5873 - protein, 9 aa, Artificial Sequence
  Peptide Derived from Human Papillomavirus
RLGLYSKAT

SEQ ID NO: 5874 - protein, 8 aa, Artificial Sequence
  Peptide Derived from Human Papillomavirus
RLGNKQTL

SEQ ID NO: 5875 - protein, 10 aa, Artificial Sequence
  Peptide Derived from Human Papillomavirus
RLGNKQTLRT

SEQ ID NO: 5876 - protein, 9 aa, Artificial Sequence
  Peptide Derived from Human Papillomavirus
RTGYVPLST

SEQ ID NO: 5877 - protein, 8 aa, Artificial Sequence
  Peptide Derived from Human Papillomavirus
RTKRASAT

SEQ ID NO: 5878 - protein, 10 aa, Artificial Sequence
  Peptide Derived from Human Papillomavirus
RTKRASATQL

SEQ ID NO: 5879 - protein, 8 aa, Artificial Sequence
  Peptide Derived from Human Papillomavirus
RTRSGATI

SEQ ID NO: 5880 - protein, 10 aa, Artificial Sequence
  Peptide Derived from Human Papillomavirus
RTRSGATIGA

SEQ ID NO: 5881 - protein, 8 aa, Artificial Sequence
  Peptide Derived from Human Papillomavirus
RVHYYYDI

SEQ ID NO: 5882 - protein, 11 aa, Artificial Sequence
  Peptide Derived from Human Papillomavirus
RVHYYYDISSI

SEQ ID NO: 5883 - protein, 9 aa, Artificial Sequence
  Peptide Derived from Human Papillomavirus
RVSYFFTDV

SEQ ID NO: 5884 - protein, 11 aa, Artificial Sequence
  Peptide Derived from Human Papillomavirus
RVSYFFTDVSV

SEQ ID NO: 5885 - protein, 8 aa, Artificial Sequence
  Peptide Derived from Human Papillomavirus
SAPKQLIT

SEQ ID NO: 5886 - protein, 8 aa, Artificial Sequence
  Peptide Derived from Human Papillomavirus
SATQLYQT

SEQ ID NO: 5887 - protein, 11 aa, Artificial Sequence
  Peptide Derived from Human Papillomavirus
SATQLYQTCKA

SEQ ID NO: 5888 - protein, 8 aa, Artificial Sequence
  Peptide Derived from Human Papillomavirus
SATTTSTL

SEQ ID NO: 5889 - protein, 9 aa, Artificial Sequence
  Peptide Derived from Human Papillomavirus
SAVSAYVPT

SEQ ID NO: 5890 - protein, 11 aa, Artificial Sequence
  Peptide Derived from Human Papillomavirus
SAVSAYVPTNT

SEQ ID NO: 5891 - protein, 8 aa, Artificial Sequence
  Peptide Derived from Human Papillomavirus
SAYVPTNT

SEQ ID NO: 5892 - protein, 9 aa, Artificial Sequence
  Peptide Derived from Human Papillomavirus
SAYVPTNTT

SEQ ID NO: 5893 - protein, 10 aa, Artificial Sequence
  Peptide Derived from Human Papillomavirus
SAYVPTNTTV

SEQ ID NO: 5894 - protein, 8 aa, Artificial Sequence
  Peptide Derived from Human Papillomavirus
SIDPVGPL

SEQ ID NO: 5895 - protein, 9 aa, Artificial Sequence
  Peptide Derived from Human Papillomavirus
SIEMQPLGA

SEQ ID NO: 5896 - protein, 11 aa, Artificial Sequence
  Peptide Derived from Human Papillomavirus
SIEMQPLGASA

SEQ ID NO: 5897 - protein, 11 aa, Artificial Sequence
  Peptide Derived from Human Papillomavirus
SIFVDGGDFYL

SEQ ID NO: 5898 - protein, 9 aa, Artificial Sequence
  Peptide Derived from Human Papillomavirus
SINPAGESI

SEQ ID NO: 5899 - protein, 11 aa, Artificial Sequence
  Peptide Derived from Human Papillomavirus
SINPAGESIEM

SEQ ID NO: 5900 - protein, 8 aa, Artificial Sequence
  Peptide Derived from Human Papillomavirus
SIPIRPPV

SEQ ID NO: 5901 - protein, 10 aa, Artificial Sequence
  Peptide Derived from Human Papillomavirus
SIPIRPPVSI

SEQ ID NO: 5902 - protein, 10 aa, Artificial Sequence
  Peptide Derived from Human Papillomavirus
SISTHNYEEI

SEQ ID NO: 5903 - protein, 11 aa, Artificial Sequence
  Peptide Derived from Human Papillomavirus
SIVSLVEESGI

SEQ ID NO: 5904 - protein, 8 aa, Artificial Sequence
  Peptide Derived from Human Papillomavirus
SLVEESGI

SEQ ID NO: 5905 - protein, 9 aa, Artificial Sequence
  Peptide Derived from Human Papillomavirus
SLVEESGIV

SEQ ID NO: 5906 - protein, 11 aa, Artificial Sequence
  Peptide Derived from Human Papillomavirus
SLVEESGIVDV

SEQ ID NO: 5907 - protein, 11 aa, Artificial Sequence
  Peptide Derived from Human Papillomavirus
SLYFSNTSHNI

SEQ ID NO: 5908 - protein, 9 aa, Artificial Sequence
  Peptide Derived from Human Papillomavirus
SMGVFFGGL

SEQ ID NO: 5909 - protein, 11 aa, Artificial Sequence
  Peptide Derived from Human Papillomavirus
SMGVFFGGLGI

SEQ ID NO: 5910 - protein, 9 aa, Artificial Sequence
  Peptide Derived from Human Papillomavirus
STAVQSTSA

SEQ ID NO: 5911 - protein, 10 aa, Artificial Sequence
  Peptide Derived from Human Papillomavirus
STAVQSTSAV

SEQ ID NO: 5912 - protein, 8 aa, Artificial Sequence
  Peptide Derived from Human Papillomavirus
STGFDIPI

SEQ ID NO: 5913 - protein, 9 aa, Artificial Sequence
  Peptide Derived from Human Papillomavirus
STHENPTFT

SEQ ID NO: 5914 - protein, 8 aa, Artificial Sequence
  Peptide Derived from Human Papillomavirus
STHNYEEI

SEQ ID NO: 5915 - protein, 10 aa, Artificial Sequence
  Peptide Derived from Human Papillomavirus
STHNYEEIPM

SEQ ID NO: 5916 - protein, 8 aa, Artificial Sequence
  Peptide Derived from Human Papillomavirus
STKRTKRA

SEQ ID NO: 5917 - protein, 10 aa, Artificial Sequence
  Peptide Derived from Human Papillomavirus
STKRTKRASA

SEQ ID NO: 5918 - protein, 11 aa, Artificial Sequence
  Peptide Derived from Human Papillomavirus
STKRTKRASAT

SEQ ID NO: 5919 - protein, 10 aa, Artificial Sequence
  Peptide Derived from Human Papillomavirus
STLNDGLYDI

SEQ ID NO: 5920 - protein, 8 aa, Artificial Sequence
  Peptide Derived from Human Papillomavirus
STNNENIT

SEQ ID NO: 5921 - protein, 11 aa, Artificial Sequence
  Peptide Derived from Human Papillomavirus
STNNENITSST

SEQ ID NO: 5922 - protein, 11 aa, Artificial Sequence
  Peptide Derived from Human Papillomavirus
STPIPGVRRPA

SEQ ID NO: 5923 - protein, 10 aa, Artificial Sequence
  Peptide Derived from Human Papillomavirus
STRPSTVSEA

SEQ ID NO: 5924 - protein, 9 aa, Artificial Sequence
  Peptide Derived from Human Papillomavirus
STSAVSAYV

SEQ ID NO: 5925 - protein, 11 aa, Artificial Sequence
  Peptide Derived from Human Papillomavirus
STSAVSAYVPT

SEQ ID NO: 5926 - protein, 8 aa, Artificial Sequence
  Peptide Derived from Human Papillomavirus
STVSEASI

SEQ ID NO: 5927 - protein, 10 aa, Artificial Sequence
  Peptide Derived from Human Papillomavirus
STVSEASIPI

SEQ ID NO: 5928 - protein, 9 aa, Artificial Sequence
  Peptide Derived from Human Papillomavirus
SVLQPPTPA

SEQ ID NO: 5929 - protein, 11 aa, Artificial Sequence
  Peptide Derived from Human Papillomavirus
SVLQPPTPAET

SEQ ID NO: 5930 - protein, 9 aa, Artificial Sequence
  Peptide Derived from Human Papillomavirus
SVSTHENPT

SEQ ID NO: 5931 - protein, 11 aa, Artificial Sequence
  Peptide Derived from Human Papillomavirus
SVSTHENPTFT

SEQ ID NO: 5932 - protein, 8 aa, Artificial Sequence
  Peptide Derived from Human Papillomavirus
TADTTPAI

SEQ ID NO: 5933 - protein, 9 aa, Artificial Sequence
  Peptide Derived from Human Papillomavirus
TADTTPAIL

SEQ ID NO: 5934 - protein, 11 aa, Artificial Sequence
  Peptide Derived from Human Papillomavirus
TADTTPAILDV

SEQ ID NO: 5935 - protein, 8 aa, Artificial Sequence
  Peptide Derived from Human Papillomavirus
TAVQSTSA

SEQ ID NO: 5936 - protein, 9 aa, Artificial Sequence
  Peptide Derived from Human Papillomavirus
TAVQSTSAV

SEQ ID NO: 5937 - protein, 11 aa, Artificial Sequence
  Peptide Derived from Human Papillomavirus
TAVQSTSAVSA

SEQ ID NO: 5938 - protein, 9 aa, Artificial Sequence
  Peptide Derived from Human Papillomavirus
TLNDGLYDI

SEQ ID NO: 5939 - protein, 11 aa, Artificial Sequence
  Peptide Derived from Human Papillomavirus
TLNDGLYDIYA

SEQ ID NO: 5940 - protein, 8 aa, Artificial Sequence
  Peptide Derived from Human Papillomavirus
TLRTRSGA

SEQ ID NO: 5941 - protein, 9 aa, Artificial Sequence
  Peptide Derived from Human Papillomavirus
TLRTRSGAT

SEQ ID NO: 5942 - protein, 10 aa, Artificial Sequence
  Peptide Derived from Human Papillomavirus
TLRTRSGATI

SEQ ID NO: 5943 - protein, 9 aa, Artificial Sequence
  Peptide Derived from Human Papillomavirus
TQLYQTCKA

SEQ ID NO: 5944 - protein, 10 aa, Artificial Sequence
  Peptide Derived from Human Papillomavirus
TQLYQTCKAA

SEQ ID NO: 5945 - protein, 10 aa, Artificial Sequence
  Peptide Derived from Human Papillomavirus
TQQVKVIDPT

SEQ ID NO: 5946 - protein, 8 aa, Artificial Sequence
  Peptide Derived from Human Papillomavirus
TQVFPFPL

SEQ ID NO: 5947 - protein, 9 aa, Artificial Sequence
  Peptide Derived from Human Papillomavirus
TQVFPFPLA

SEQ ID NO: 5948 - protein, 11 aa, Artificial Sequence
  Peptide Derived from Human Papillomavirus
TQVFPFPLAPT

SEQ ID NO: 5949 - protein, 8 aa, Artificial Sequence
  Peptide Derived from Human Papillomavirus
TTADTTPA

SEQ ID NO: 5950 - protein, 9 aa, Artificial Sequence
  Peptide Derived from Human Papillomavirus
TTADTTPAI

SEQ ID NO: 5951 - protein, 10 aa, Artificial Sequence
  Peptide Derived from Human Papillomavirus
TTADTTPAIL

SEQ ID NO: 5952 - protein, 8 aa, Artificial Sequence
  Peptide Derived from Human Papillomavirus
TTIADQIL

SEQ ID NO: 5953 - protein, 8 aa, Artificial Sequence
  Peptide Derived from Human Papillomavirus
TTPAILDV

SEQ ID NO: 5954 - protein, 9 aa, Artificial Sequence
  Peptide Derived from Human Papillomavirus
TTPAILDVT

SEQ ID NO: 5955 - protein, 11 aa, Artificial Sequence
  Peptide Derived from Human Papillomavirus
TTPAILDVTSV

SEQ ID NO: 5956 - protein, 9 aa, Artificial Sequence
  Peptide Derived from Human Papillomavirus
TTPQVSIFV

SEQ ID NO: 5957 - protein, 8 aa, Artificial Sequence
  Peptide Derived from Human Papillomavirus
TTSGFDIA

SEQ ID NO: 5958 - protein, 9 aa, Artificial Sequence
  Peptide Derived from Human Papillomavirus
TTSGFDIAT

SEQ ID NO: 5959 - protein, 10 aa, Artificial Sequence
  Peptide Derived from Human Papillomavirus
TTSGFDIATT

SEQ ID NO: 5960 - protein, 11 aa, Artificial Sequence
  Peptide Derived from Human Papillomavirus
TTSGFDIATTA

SEQ ID NO: 5961 - protein, 9 aa, Artificial Sequence
  Peptide Derived from Human Papillomavirus
TTSTLNDGL

SEQ ID NO: 5962 - protein, 10 aa, Artificial Sequence
  Peptide Derived from Human Papillomavirus
TTTSTLNDGL

SEQ ID NO: 5963 - protein, 11 aa, Artificial Sequence
  Peptide Derived from Human Papillomavirus
TTVPLSTGFDI

SEQ ID NO: 5964 - protein, 10 aa, Artificial Sequence
  Peptide Derived from Human Papillomavirus
TVDTPATHNV

SEQ ID NO: 5965 - protein, 8 aa, Artificial Sequence
  Peptide Derived from Human Papillomavirus
TVNAEESL

SEQ ID NO: 5966 - protein, 10 aa, Artificial Sequence
  Peptide Derived from Human Papillomavirus
TVPLSTGFDI

SEQ ID NO: 5967 - protein, 9 aa, Artificial Sequence
  Peptide Derived from Human Papillomavirus
TVSEASIPI

SEQ ID NO: 5968 - protein, 9 aa, Artificial Sequence
  Peptide Derived from Human Papillomavirus
VIDPTFLSA

SEQ ID NO: 5969 - protein, 8 aa, Artificial Sequence
  Peptide Derived from Human Papillomavirus
VIPKIEHT

SEQ ID NO: 5970 - protein, 9 aa, Artificial Sequence
  Peptide Derived from Human Papillomavirus
VIPKIEHTT

SEQ ID NO: 5971 - protein, 10 aa, Artificial Sequence
  Peptide Derived from Human Papillomavirus
VIPKIEHTTI

SEQ ID NO: 5972 - protein, 11 aa, Artificial Sequence
  Peptide Derived from Human Papillomavirus
VIPKIEHTTIA

SEQ ID NO: 5973 - protein, 8 aa, Artificial Sequence
  Peptide Derived from Human Papillomavirus
VLQPPTPA

SEQ ID NO: 5974 - protein, 10 aa, Artificial Sequence
  Peptide Derived from Human Papillomavirus
VLQPPTPAET

SEQ ID NO: 5975 - protein, 9 aa, Artificial Sequence
  Peptide Derived from Human Papillomavirus
VQSTSAVSA

SEQ ID NO: 5976 - protein, 11 aa, Artificial Sequence
  Peptide Derived from Human Papillomavirus
VQSTSAVSAYV

SEQ ID NO: 5977 - protein, 11 aa, Artificial Sequence
  Peptide Derived from Human Papillomavirus
VTSVSTHENPT

SEQ ID NO: 5978 - protein, 8 aa, Artificial Sequence
  Peptide Derived from Human Papillomavirus
YADTDFTV

SEQ ID NO: 5979 - protein, 10 aa, Artificial Sequence
  Peptide Derived from Human Papillomavirus
YADTDFTVDT

SEQ ID NO: 5980 - protein, 8 aa, Artificial Sequence
  Peptide Derived from Human Papillomavirus
YLHPSYYM

SEQ ID NO: 5981 - protein, 9 aa, Artificial Sequence
  Peptide Derived from Human Papillomavirus
YLHPSYYML

SEQ ID NO: 5982 - protein, 10 aa, Artificial Sequence
  Peptide Derived from Human Papillomavirus
YMLKRRRKRV

SEQ ID NO: 5983 - protein, 9 aa, Artificial Sequence
  Peptide Derived from Human Papillomavirus
YQTCKAAGT

SEQ ID NO: 5984 - protein, 10 aa, Artificial Sequence
  Peptide Derived from Human Papillomavirus
YVPLSTRPST

SEQ ID NO: 5985 - protein, 11 aa, Artificial Sequence
  Peptide Derived from Human Papillomavirus
YVPLSTRPSTV

SEQ ID NO: 5986 - protein, 8 aa, Artificial Sequence
  Peptide Derived from Human Papillomavirus
YVPTNTTV

SEQ ID NO: 5987 - protein, 10 aa, Artificial Sequence
  Peptide Derived from Human Papillomavirus
YVPTNTTVPL

SEQ ID NO: 5988 - protein, 11 aa, Artificial Sequence
  Peptide Derived from Human Papillomavirus
AAAFLKSNSQA

SEQ ID NO: 5989 - protein, 8 aa, Artificial Sequence
  Peptide Derived from Human Papillomavirus
AACSQSAA

SEQ ID NO: 5990 - protein, 11 aa, Artificial Sequence
  Peptide Derived from Human Papillomavirus
AACSQSAAEDV

SEQ ID NO: 5991 - protein, 9 aa, Artificial Sequence
  Peptide Derived from Human Papillomavirus
AAEDVVDRA

SEQ ID NO: 5992 - protein, 10 aa, Artificial Sequence
  Peptide Derived from Human Papillomavirus
AAEDVVDRAA

SEQ ID NO: 5993 - protein, 10 aa, Artificial Sequence
  Peptide Derived from Human Papillomavirus
AAFLKSNSQA

SEQ ID NO: 5994 - protein, 9 aa, Artificial Sequence
  Peptide Derived from Human Papillomavirus
AANPCRTSI

SEQ ID NO: 5995 - protein, 8 aa, Artificial Sequence
  Peptide Derived from Human Papillomavirus
AARALFNI

SEQ ID NO: 5996 - protein, 9 aa, Artificial Sequence
  Peptide Derived from Human Papillomavirus
ALDGNEISI

SEQ ID NO: 5997 - protein, 11 aa, Artificial Sequence
  Peptide Derived from Human Papillomavirus
ALDGNEISIDV

SEQ ID NO: 5998 - protein, 8 aa, Artificial Sequence
  Peptide Derived from Human Papillomavirus
ALKRKFAA

SEQ ID NO: 5999 - protein, 10 aa, Artificial Sequence
  Peptide Derived from Human Papillomavirus
ALVQLKCPPL

SEQ ID NO: 6000 - protein, 11 aa, Artificial Sequence
  Peptide Derived from Human Papillomavirus
ALVQLKCPPLL

SEQ ID NO: 6001 - protein, 8 aa, Artificial Sequence
  Peptide Derived from Human Papillomavirus
ALYWFRTA

SEQ ID NO: 6002 - protein, 9 aa, Artificial Sequence
  Peptide Derived from Human Papillomavirus
ALYWFRTAM

SEQ ID NO: 6003 - protein, 8 aa, Artificial Sequence
  Peptide Derived from Human Papillomavirus
AMSNISDV

SEQ ID NO: 6004 - protein, 11 aa, Artificial Sequence
  Peptide Derived from Human Papillomavirus
AMSNISDVQGT

SEQ ID NO: 6005 - protein, 10 aa, Artificial Sequence
  Peptide Derived from Human Papillomavirus
AQLADSNSNA

SEQ ID NO: 6006 - protein, 11 aa, Artificial Sequence
  Peptide Derived from Human Papillomavirus
AQLADSNSNAA

SEQ ID NO: 6007 - protein, 10 aa, Artificial Sequence
  Peptide Derived from Human Papillomavirus
AVCALKRKFA

SEQ ID NO: 6008 - protein, 11 aa, Artificial Sequence
  Peptide Derived from Human Papillomavirus
AVCALKRKFAA

SEQ ID NO: 6009 - protein, 11 aa, Artificial Sequence
  Peptide Derived from Human Papillomavirus
AVIERRTGDNI

SEQ ID NO: 6010 - protein, 8 aa, Artificial Sequence
  Peptide Derived from Human Papillomavirus
CALKRKFA

SEQ ID NO: 6011 - protein, 9 aa, Artificial Sequence
  Peptide Derived from Human Papillomavirus
CALKRKFAA

SEQ ID NO: 6012 - protein, 8 aa, Artificial Sequence
  Peptide Derived from Human Papillomavirus
CALYWFRT

SEQ ID NO: 6013 - protein, 9 aa, Artificial Sequence
  Peptide Derived from Human Papillomavirus
CALYWFRTA

SEQ ID NO: 6014 - protein, 10 aa, Artificial Sequence
  Peptide Derived from Human Papillomavirus
CALYWFRTAM

SEQ ID NO: 6015 - protein, 11 aa, Artificial Sequence
  Peptide Derived from Human Papillomavirus
CITGYGISPSV

SEQ ID NO: 6016 - protein, 8 aa, Artificial Sequence
  Peptide Derived from Human Papillomavirus
CLTCDRGI

SEQ ID NO: 6017 - protein, 9 aa, Artificial Sequence
  Peptide Derived from Human Papillomavirus
CLTCDRGII

SEQ ID NO: 6018 - protein, 10 aa, Artificial Sequence
  Peptide Derived from Human Papillomavirus
CLTCDRGIII

SEQ ID NO: 6019 - protein, 11 aa, Artificial Sequence
  Peptide Derived from Human Papillomavirus
CLTCDRGIIIL

SEQ ID NO: 6020 - protein, 8 aa, Artificial Sequence
  Peptide Derived from Human Papillomavirus
CMLICGPA

SEQ ID NO: 6021 - protein, 10 aa, Artificial Sequence
  Peptide Derived from Human Papillomavirus
CMLICGPANT

SEQ ID NO: 6022 - protein, 9 aa, Artificial Sequence
  Peptide Derived from Human Papillomavirus
CMVIEPPKL

SEQ ID NO: 6023 - protein, 11 aa, Artificial Sequence
  Peptide Derived from Human Papillomavirus
CTDWCITGYGI

SEQ ID NO: 6024 - protein, 9 aa, Artificial Sequence
  Peptide Derived from Human Papillomavirus
CTGWFEVEA

SEQ ID NO: 6025 - protein, 10 aa, Artificial Sequence
  Peptide Derived from Human Papillomavirus
CTGWFEVEAV

SEQ ID NO: 6026 - protein, 11 aa, Artificial Sequence
  Peptide Derived from Human Papillomavirus
CTGWFEVEAVI

SEQ ID NO: 6027 - protein, 8 aa, Artificial Sequence
  Peptide Derived from Human Papillomavirus
CTYRKRKI

SEQ ID NO: 6028 - protein, 11 aa, Artificial Sequence
  Peptide Derived from Human Papillomavirus
CTYRKRKIDEL

SEQ ID NO: 6029 - protein, 10 aa, Artificial Sequence
  Peptide Derived from Human Papillomavirus
CVNSKSHFWL

SEQ ID NO: 6030 - protein, 10 aa, Artificial Sequence
  Peptide Derived from Human Papillomavirus
DAKIGMIDDV

SEQ ID NO: 6031 - protein, 11 aa, Artificial Sequence
  Peptide Derived from Human Papillomavirus
DAKIGMIDDVT

SEQ ID NO: 6032 - protein, 9 aa, Artificial Sequence
  Peptide Derived from Human Papillomavirus
DIAYYYAQL

SEQ ID NO: 6033 - protein, 10 aa, Artificial Sequence
  Peptide Derived from Human Papillomavirus
DIAYYYAQLA

SEQ ID NO: 6034 - protein, 10 aa, Artificial Sequence
  Peptide Derived from Human Papillomavirus
DLLEFIDDSM

SEQ ID NO: 6035 - protein, 8 aa, Artificial Sequence
  Peptide Derived from Human Papillomavirus
DLNAVCAL

SEQ ID NO: 6036 - protein, 9 aa, Artificial Sequence
  Peptide Derived from Human Papillomavirus
DLSEMVQWA

SEQ ID NO: 6037 - protein, 8 aa, Artificial Sequence
  Peptide Derived from Human Papillomavirus
DTEAARAL

SEQ ID NO: 6038 - protein, 11 aa, Artificial Sequence
  Peptide Derived from Human Papillomavirus
DTEAARALFNI

SEQ ID NO: 6039 - protein, 8 aa, Artificial Sequence
  Peptide Derived from Human Papillomavirus
DVKHRALV

SEQ ID NO: 6040 - protein, 10 aa, Artificial Sequence
  Peptide Derived from Human Papillomavirus
DVKHRALVQL

SEQ ID NO: 6041 - protein, 10 aa, Artificial Sequence
  Peptide Derived from Human Papillomavirus
DVQGTTPEWI

SEQ ID NO: 6042 - protein, 8 aa, Artificial Sequence
  Peptide Derived from Human Papillomavirus
DVTPISWT

SEQ ID NO: 6043 - protein, 10 aa, Artificial Sequence
  Peptide Derived from Human Papillomavirus
DVTPISWTYI

SEQ ID NO: 6044 - protein, 9 aa, Artificial Sequence
  Peptide Derived from Human Papillomavirus
EAARALFNI

SEQ ID NO: 6045 - protein, 8 aa, Artificial Sequence
  Peptide Derived from Human Papillomavirus
EAVIERRT

SEQ ID NO: 6046 - protein, 8 aa, Artificial Sequence
  Peptide Derived from Human Papillomavirus
EAYGISFM

SEQ ID NO: 6047 - protein, 10 aa, Artificial Sequence
  Peptide Derived from Human Papillomavirus
EAYGISFMEL

SEQ ID NO: 6048 - protein, 11 aa, Artificial Sequence
  Peptide Derived from Human Papillomavirus
EAYGISFMELV

SEQ ID NO: 6049 - protein, 10 aa, Artificial Sequence
  Peptide Derived from Human Papillomavirus
EISIDVKHRA

SEQ ID NO: 6050 - protein, 11 aa, Artificial Sequence
  Peptide Derived from Human Papillomavirus
EISIDVKHRAL

SEQ ID NO: 6051 - protein, 11 aa, Artificial Sequence
  Peptide Derived from Human Papillomavirus
EISNVLHSSNT

SEQ ID NO: 6052 - protein, 10 aa, Artificial Sequence
  Peptide Derived from Human Papillomavirus
ELEDSGYGNT

SEQ ID NO: 6053 - protein, 8 aa, Artificial Sequence
  Peptide Derived from Human Papillomavirus
ELTDDSDI

SEQ ID NO: 6054 - protein, 9 aa, Artificial Sequence
  Peptide Derived from Human Papillomavirus
ELTDDSDIA

SEQ ID NO: 6055 - protein, 11 aa, Artificial Sequence
  Peptide Derived from Human Papillomavirus
ELVRPFKSDKT

SEQ ID NO: 6056 - protein, 11 aa, Artificial Sequence
  Peptide Derived from Human Papillomavirus
EMVQWAYDNEL

SEQ ID NO: 6057 - protein, 8 aa, Artificial Sequence
  Peptide Derived from Human Papillomavirus
ETADDSGT

SEQ ID NO: 6058 - protein, 10 aa, Artificial Sequence
  Peptide Derived from Human Papillomavirus
ETADDSGTDL

SEQ ID NO: 6059 - protein, 11 aa, Artificial Sequence
  Peptide Derived from Human Papillomavirus
ETADDSGTDLL

SEQ ID NO: 6060 - protein, 11 aa, Artificial Sequence
  Peptide Derived from Human Papillomavirus
ETCMVIEPPKL

SEQ ID NO: 6061 - protein, 10 aa, Artificial Sequence
  Peptide Derived from Human Papillomavirus
ETNVDSCENV

SEQ ID NO: 6062 - protein, 11 aa, Artificial Sequence
  Peptide Derived from Human Papillomavirus
ETNVDSCENVT

SEQ ID NO: 6063 - protein, 9 aa, Artificial Sequence
  Peptide Derived from Human Papillomavirus
ETQQMVQQV

SEQ ID NO: 6064 - protein, 10 aa, Artificial Sequence
  Peptide Derived from Human Papillomavirus
EVEAVIERRT

SEQ ID NO: 6065 - protein, 8 aa, Artificial Sequence
  Peptide Derived from Human Papillomavirus
EVETQQMV

SEQ ID NO: 6066 - protein, 11 aa, Artificial Sequence
  Peptide Derived from Human Papillomavirus
EVETQQMVQQV

SEQ ID NO: 6067 - protein, 8 aa, Artificial Sequence
  Peptide Derived from Human Papillomavirus
EVSCETNV

SEQ ID NO: 6068 - protein, 8 aa, Artificial Sequence
  Peptide Derived from Human Papillomavirus
FAACSQSA

SEQ ID NO: 6069 - protein, 9 aa, Artificial Sequence
  Peptide Derived from Human Papillomavirus
FAACSQSAA

SEQ ID NO: 6070 - protein, 10 aa, Artificial Sequence
  Peptide Derived from Human Papillomavirus
FIDDSMENSI

SEQ ID NO: 6071 - protein, 9 aa, Artificial Sequence
  Peptide Derived from Human Papillomavirus
FLGAFKKFL

SEQ ID NO: 6072 - protein, 10 aa, Artificial Sequence
  Peptide Derived from Human Papillomavirus
FLKGCVISCV

SEQ ID NO: 6073 - protein, 11 aa, Artificial Sequence
  Peptide Derived from Human Papillomavirus
FLKGIPKKSCM

SEQ ID NO: 6074 - protein, 8 aa, Artificial Sequence
  Peptide Derived from Human Papillomavirus
FLKSNSQA

SEQ ID NO: 6075 - protein, 10 aa, Artificial Sequence
  Peptide Derived from Human Papillomavirus
FLKSNSQAKI

SEQ ID NO: 6076 - protein, 11 aa, Artificial Sequence
  Peptide Derived from Human Papillomavirus
FLKSNSQAKIV

SEQ ID NO: 6077 - protein, 10 aa, Artificial Sequence
  Peptide Derived from Human Papillomavirus
GAFKKFLKGI

SEQ ID NO: 6078 - protein, 8 aa, Artificial Sequence
  Peptide Derived from Human Papillomavirus
GIIILLLI

SEQ ID NO: 6079 - protein, 10 aa, Artificial Sequence
  Peptide Derived from Human Papillomavirus
GIMCRHYKKA

SEQ ID NO: 6080 - protein, 8 aa, Artificial Sequence
  Peptide Derived from Human Papillomavirus
GIPKKSCM

SEQ ID NO: 6081 - protein, 9 aa, Artificial Sequence
  Peptide Derived from Human Papillomavirus
GIPKKSCML

SEQ ID NO: 6082 - protein, 10 aa, Artificial Sequence
  Peptide Derived from Human Papillomavirus
GIPKKSCMLI

SEQ ID NO: 6083 - protein, 8 aa, Artificial Sequence
  Peptide Derived from Human Papillomavirus
GISFMELV

SEQ ID NO: 6084 - protein, 10 aa, Artificial Sequence
  Peptide Derived from Human Papillomavirus
GISPSVAESL

SEQ ID NO: 6085 - protein, 10 aa, Artificial Sequence
  Peptide Derived from Human Papillomavirus
GMGCTGWFEV

SEQ ID NO: 6086 - protein, 9 aa, Artificial Sequence
  Peptide Derived from Human Papillomavirus
GMIDDVTPI

SEQ ID NO: 6087 - protein, 8 aa, Artificial Sequence
  Peptide Derived from Human Papillomavirus
GMSLIQFL

SEQ ID NO: 6088 - protein, 11 aa, Artificial Sequence
  Peptide Derived from Human Papillomavirus
GQWIQSRCEKT

SEQ ID NO: 6089 - protein, 8 aa, Artificial Sequence
  Peptide Derived from Human Papillomavirus
GTDLLEFI

SEQ ID NO: 6090 - protein, 9 aa, Artificial Sequence
  Peptide Derived from Human Papillomavirus
GTDSRWPYL

SEQ ID NO: 6091 - protein, 10 aa, Artificial Sequence
  Peptide Derived from Human Papillomavirus
GTNGAGMGCT

SEQ ID NO: 6092 - protein, 10 aa, Artificial Sequence
  Peptide Derived from Human Papillomavirus
GTTPEWIDRL

SEQ ID NO: 6093 - protein, 11 aa, Artificial Sequence
  Peptide Derived from Human Papillomavirus
GTTPEWIDRLT

SEQ ID NO: 6094 - protein, 8 aa, Artificial Sequence
  Peptide Derived from Human Papillomavirus
GVGDDSEV

SEQ ID NO: 6095 - protein, 11 aa, Artificial Sequence
  Peptide Derived from Human Papillomavirus
HLQCLTCDRGI

SEQ ID NO: 6096 - protein, 8 aa, Artificial Sequence
  Peptide Derived from Human Papillomavirus
IAYYYAQL

SEQ ID NO: 6097 - protein, 9 aa, Artificial Sequence
  Peptide Derived from Human Papillomavirus
IAYYYAQLA

SEQ ID NO: 6098 - protein, 8 aa, Artificial Sequence
  Peptide Derived from Human Papillomavirus
ILYKFKEA

SEQ ID NO: 6099 - protein, 11 aa, Artificial Sequence
  Peptide Derived from Human Papillomavirus
ILYKFKEAYGI

SEQ ID NO: 6100 - protein, 9 aa, Artificial Sequence
  Peptide Derived from Human Papillomavirus
IMCRHYKKA

SEQ ID NO: 6101 - protein, 8 aa, Artificial Sequence
  Peptide Derived from Human Papillomavirus
IQADTEAA

SEQ ID NO: 6102 - protein, 10 aa, Artificial Sequence
  Peptide Derived from Human Papillomavirus
IQADTEAARA

SEQ ID NO: 6103 - protein, 11 aa, Artificial Sequence
  Peptide Derived from Human Papillomavirus
IQADTEAARAL

SEQ ID NO: 6104 - protein, 8 aa, Artificial Sequence
  Peptide Derived from Human Papillomavirus
IQEGEDDL

SEQ ID NO: 6105 - protein, 10 aa, Artificial Sequence
  Peptide Derived from Human Papillomavirus
IQEGEDDLNA

SEQ ID NO: 6106 - protein, 11 aa, Artificial Sequence
  Peptide Derived from Human Papillomavirus
IQEGEDDLNAV

SEQ ID NO: 6107 - protein, 8 aa, Artificial Sequence
  Peptide Derived from Human Papillomavirus
IQFLKGCV

SEQ ID NO: 6108 - protein, 9 aa, Artificial Sequence
  Peptide Derived from Human Papillomavirus
IQFLKGCVI

SEQ ID NO: 6109 - protein, 8 aa, Artificial Sequence
  Peptide Derived from Human Papillomavirus
IQSRCEKT

SEQ ID NO: 6110 - protein, 10 aa, Artificial Sequence
  Peptide Derived from Human Papillomavirus
ITGYGISPSV

SEQ ID NO: 6111 - protein, 11 aa, Artificial Sequence
  Peptide Derived from Human Papillomavirus
ITGYGISPSVA

SEQ ID NO: 6112 - protein, 8 aa, Artificial Sequence
  Peptide Derived from Human Papillomavirus
IVKDCGIM

SEQ ID NO: 6113 - protein, 10 aa, Artificial Sequence
  Peptide Derived from Human Papillomavirus
IVQLLRYQNI

SEQ ID NO: 6114 - protein, 9 aa, Artificial Sequence
  Peptide Derived from Human Papillomavirus
KAEKRKMSI

SEQ ID NO: 6115 - protein, 11 aa, Artificial Sequence
  Peptide Derived from Human Papillomavirus
KANILYKFKEA

SEQ ID NO: 6116 - protein, 8 aa, Artificial Sequence
  Peptide Derived from Human Papillomavirus
KIGMIDDV

SEQ ID NO: 6117 - protein, 9 aa, Artificial Sequence
  Peptide Derived from Human Papillomavirus
KIGMIDDVT

SEQ ID NO: 6118 - protein, 11 aa, Artificial Sequence
  Peptide Derived from Human Papillomavirus
KIGMIDDVTPI

SEQ ID NO: 6119 - protein, 8 aa, Artificial Sequence
  Peptide Derived from Human Papillomavirus
KIVKDCGI

SEQ ID NO: 6120 - protein, 9 aa, Artificial Sequence
  Peptide Derived from Human Papillomavirus
KIVKDCGIM

SEQ ID NO: 6121 - protein, 9 aa, Artificial Sequence
  Peptide Derived from Human Papillomavirus
KLMSNLLSI

SEQ ID NO: 6122 - protein, 8 aa, Artificial Sequence
  Peptide Derived from Human Papillomavirus
KLRSQTCA

SEQ ID NO: 6123 - protein, 9 aa, Artificial Sequence
  Peptide Derived from Human Papillomavirus
KLRSQTCAL

SEQ ID NO: 6124 - protein, 8 aa, Artificial Sequence
  Peptide Derived from Human Papillomavirus
KMSIGQWI

SEQ ID NO: 6125 - protein, 9 aa, Artificial Sequence
  Peptide Derived from Human Papillomavirus
KQHSLYTHL

SEQ ID NO: 6126 - protein, 11 aa, Artificial Sequence
  Peptide Derived from Human Papillomavirus
KTNDGGNWRPI

SEQ ID NO: 6127 - protein, 9 aa, Artificial Sequence
  Peptide Derived from Human Papillomavirus
KTSCTDWCI

SEQ ID NO: 6128 - protein, 10 aa, Artificial Sequence
  Peptide Derived from Human Papillomavirus
KTSCTDWCIT

SEQ ID NO: 6129 - protein, 9 aa, Artificial Sequence
  Peptide Derived from Human Papillomavirus
KVLIKQHSL

SEQ ID NO: 6130 - protein, 11 aa, Artificial Sequence
  Peptide Derived from Human Papillomavirus
KVLIKQHSLYT

SEQ ID NO: 6131 - protein, 8 aa, Artificial Sequence
  Peptide Derived from Human Papillomavirus
LADSNSNA

SEQ ID NO: 6132 - protein, 9 aa, Artificial Sequence
  Peptide Derived from Human Papillomavirus
LADSNSNAA

SEQ ID NO: 6133 - protein, 10 aa, Artificial Sequence
  Peptide Derived from Human Papillomavirus
LADSNSNAAA

SEQ ID NO: 6134 - protein, 8 aa, Artificial Sequence
  Peptide Derived from Human Papillomavirus
LICGPANT

SEQ ID NO: 6135 - protein, 9 aa, Artificial Sequence
  Peptide Derived from Human Papillomavirus
LIKQHSLYT

SEQ ID NO: 6136 - protein, 11 aa, Artificial Sequence
  Peptide Derived from Human Papillomavirus
LIKQHSLYTHL

SEQ ID NO: 6137 - protein, 9 aa, Artificial Sequence
  Peptide Derived from Human Papillomavirus
LIQFLKGCV

SEQ ID NO: 6138 - protein, 10 aa, Artificial Sequence
  Peptide Derived from Human Papillomavirus
LIQFLKGCVI

SEQ ID NO: 6139 - protein, 11 aa, Artificial Sequence
  Peptide Derived from Human Papillomavirus
LIRFRCSKNRL

SEQ ID NO: 6140 - protein, 9 aa, Artificial Sequence
  Peptide Derived from Human Papillomavirus
LLEFIDDSM

SEQ ID NO: 6141 - protein, 9 aa, Artificial Sequence
  Peptide Derived from Human Papillomavirus
LLLTSNTNA

SEQ ID NO: 6142 - protein, 11 aa, Artificial Sequence
  Peptide Derived from Human Papillomavirus
LLLTSNTNAGT

SEQ ID NO: 6143 - protein, 10 aa, Artificial Sequence
  Peptide Derived from Human Papillomavirus
LLRYQNIEFT

SEQ ID NO: 6144 - protein, 11 aa, Artificial Sequence
  Peptide Derived from Human Papillomavirus
LLRYQNIEFTA

SEQ ID NO: 6145 - protein, 9 aa, Artificial Sequence
  Peptide Derived from Human Papillomavirus
LLSIPETCM

SEQ ID NO: 6146 - protein, 10 aa, Artificial Sequence
  Peptide Derived from Human Papillomavirus
LLSIPETCMV

SEQ ID NO: 6147 - protein, 11 aa, Artificial Sequence
  Peptide Derived from Human Papillomavirus
LLSIPETCMVI

SEQ ID NO: 6148 - protein, 8 aa, Artificial Sequence
  Peptide Derived from Human Papillomavirus
LLTSNTNA

SEQ ID NO: 6149 - protein, 10 aa, Artificial Sequence
  Peptide Derived from Human Papillomavirus
LLTSNTNAGT

SEQ ID NO: 6150 - protein, 8 aa, Artificial Sequence
  Peptide Derived from Human Papillomavirus
LMSNLLSI

SEQ ID NO: 6151 - protein, 11 aa, Artificial Sequence
  Peptide Derived from Human Papillomavirus
LMSNLLSIPET

SEQ ID NO: 6152 - protein, 10 aa, Artificial Sequence
  Peptide Derived from Human Papillomavirus
LQCLTCDRGI

SEQ ID NO: 6153 - protein, 11 aa, Artificial Sequence
  Peptide Derived from Human Papillomavirus
LQCLTCDRGII

SEQ ID NO: 6154 - protein, 8 aa, Artificial Sequence
  Peptide Derived from Human Papillomavirus
LQEISNVL

SEQ ID NO: 6155 - protein, 9 aa, Artificial Sequence
  Peptide Derived from Human Papillomavirus
LQHSFNDNI

SEQ ID NO: 6156 - protein, 9 aa, Artificial Sequence
  Peptide Derived from Human Papillomavirus
LQPLSDAKI

SEQ ID NO: 6157 - protein, 11 aa, Artificial Sequence
  Peptide Derived from Human Papillomavirus
LQPLSDAKIGM

SEQ ID NO: 6158 - protein, 8 aa, Artificial Sequence
  Peptide Derived from Human Papillomavirus
LTCDRGII

SEQ ID NO: 6159 - protein, 9 aa, Artificial Sequence
  Peptide Derived from Human Papillomavirus
LTCDRGIII

SEQ ID NO: 6160 - protein, 10 aa, Artificial Sequence
  Peptide Derived from Human Papillomavirus
LTCDRGIIIL

SEQ ID NO: 6161 - protein, 11 aa, Artificial Sequence
  Peptide Derived from Human Papillomavirus
LTCDRGIIILL

SEQ ID NO: 6162 - protein, 8 aa, Artificial Sequence
  Peptide Derived from Human Papillomavirus
LTDDSDIA

SEQ ID NO: 6163 - protein, 9 aa, Artificial Sequence
  Peptide Derived from Human Papillomavirus
LTSNTNAGT

SEQ ID NO: 6164 - protein, 10 aa, Artificial Sequence
  Peptide Derived from Human Papillomavirus
LTVAKLMSNL

SEQ ID NO: 6165 - protein, 11 aa, Artificial Sequence
  Peptide Derived from Human Papillomavirus
LTVAKLMSNLL

SEQ ID NO: 6166 - protein, 9 aa, Artificial Sequence
  Peptide Derived from Human Papillomavirus
LVQLKCPPL

SEQ ID NO: 6167 - protein, 10 aa, Artificial Sequence
  Peptide Derived from Human Papillomavirus
LVQLKCPPLL

SEQ ID NO: 6168 - protein, 11 aa, Artificial Sequence
  Peptide Derived from Human Papillomavirus
LVQLKCPPLLL

SEQ ID NO: 6169 - protein, 10 aa, Artificial Sequence
  Peptide Derived from Human Papillomavirus
LVRPFKSDKT

SEQ ID NO: 6170 - protein, 10 aa, Artificial Sequence
  Peptide Derived from Human Papillomavirus
MADPEGTNGA

SEQ ID NO: 6171 - protein, 8 aa, Artificial Sequence
  Peptide Derived from Human Papillomavirus
MIDDVTPI

SEQ ID NO: 6172 - protein, 11 aa, Artificial Sequence
  Peptide Derived from Human Papillomavirus
MIDDVTPISWT

SEQ ID NO: 6173 - protein, 9 aa, Artificial Sequence
  Peptide Derived from Human Papillomavirus
MLICGPANT

SEQ ID NO: 6174 - protein, 8 aa, Artificial Sequence
  Peptide Derived from Human Papillomavirus
MVIEPPKL

SEQ ID NO: 6175 - protein, 10 aa, Artificial Sequence
  Peptide Derived from Human Papillomavirus
MVQWAYDNEL

SEQ ID NO: 6176 - protein, 11 aa, Artificial Sequence
  Peptide Derived from Human Papillomavirus
MVQWAYDNELT

SEQ ID NO: 6177 - protein, 11 aa, Artificial Sequence
  Peptide Derived from Human Papillomavirus
NAGTDSRWPYL

SEQ ID NO: 6178 - protein, 8 aa, Artificial Sequence
  Peptide Derived from Human Papillomavirus
NALDGNEI

SEQ ID NO: 6179 - protein, 10 aa, Artificial Sequence
  Peptide Derived from Human Papillomavirus
NALDGNEISI

SEQ ID NO: 6180 - protein, 11 aa, Artificial Sequence
  Peptide Derived from Human Papillomavirus
NAVCALKRKFA

SEQ ID NO: 6181 - protein, 8 aa, Artificial Sequence
  Peptide Derived from Human Papillomavirus
NIEFTAFL

SEQ ID NO: 6182 - protein, 10 aa, Artificial Sequence
  Peptide Derived from Human Papillomavirus
NIEFTAFLGA

SEQ ID NO: 6183 - protein, 8 aa, Artificial Sequence
  Peptide Derived from Human Papillomavirus
NIFDLSEM

SEQ ID NO: 6184 - protein, 9 aa, Artificial Sequence
  Peptide Derived from Human Papillomavirus
NIFDLSEMV

SEQ ID NO: 6185 - protein, 9 aa, Artificial Sequence
  Peptide Derived from Human Papillomavirus
NILYKFKEA

SEQ ID NO: 6186 - protein, 9 aa, Artificial Sequence
  Peptide Derived from Human Papillomavirus
NIQEGEDDL

SEQ ID NO: 6187 - protein, 11 aa, Artificial Sequence
  Peptide Derived from Human Papillomavirus
NIQEGEDDLNA

SEQ ID NO: 6188 - protein, 8 aa, Artificial Sequence
  Peptide Derived from Human Papillomavirus
NISDVQGT

SEQ ID NO: 6189 - protein, 9 aa, Artificial Sequence
  Peptide Derived from Human Papillomavirus
NISDVQGTT

SEQ ID NO: 6190 - protein, 9 aa, Artificial Sequence
  Peptide Derived from Human Papillomavirus
NISEDEDET

SEQ ID NO: 6191 - protein, 10 aa, Artificial Sequence
  Peptide Derived from Human Papillomavirus
NISEDEDETA

SEQ ID NO: 6192 - protein, 9 aa, Artificial Sequence
  Peptide Derived from Human Papillomavirus
NISTFKCSA

SEQ ID NO: 6193 - protein, 8 aa, Artificial Sequence
  Peptide Derived from Human Papillomavirus
NLLSIPET

SEQ ID NO: 6194 - protein, 10 aa, Artificial Sequence
  Peptide Derived from Human Papillomavirus
NLLSIPETCM

SEQ ID NO: 6195 - protein, 11 aa, Artificial Sequence
  Peptide Derived from Human Papillomavirus
NLLSIPETCMV

SEQ ID NO: 6196 - protein, 10 aa, Artificial Sequence
  Peptide Derived from Human Papillomavirus
NLNDLESSGV

SEQ ID NO: 6197 - protein, 9 aa, Artificial Sequence
  Peptide Derived from Human Papillomavirus
NTEVETQQM

SEQ ID NO: 6198 - protein, 10 aa, Artificial Sequence
  Peptide Derived from Human Papillomavirus
NTEVETQQMV

SEQ ID NO: 6199 - protein, 9 aa, Artificial Sequence
  Peptide Derived from Human Papillomavirus
NTGKSYFGM

SEQ ID NO: 6200 - protein, 11 aa, Artificial Sequence
  Peptide Derived from Human Papillomavirus
NTGKSYFGMSL

SEQ ID NO: 6201 - protein, 8 aa, Artificial Sequence
  Peptide Derived from Human Papillomavirus
NVDSCENV

SEQ ID NO: 6202 - protein, 9 aa, Artificial Sequence
  Peptide Derived from Human Papillomavirus
NVDSCENVT

SEQ ID NO: 6203 - protein, 10 aa, Artificial Sequence
  Peptide Derived from Human Papillomavirus
NVDSCENVTL

SEQ ID NO: 6204 - protein, 8 aa, Artificial Sequence
  Peptide Derived from Human Papillomavirus
NVLHSSNT

SEQ ID NO: 6205 - protein, 10 aa, Artificial Sequence
  Peptide Derived from Human Papillomavirus
NVLHSSNTKA

SEQ ID NO: 6206 - protein, 10 aa, Artificial Sequence
  Peptide Derived from Human Papillomavirus
NVTLQEISNV

SEQ ID NO: 6207 - protein, 11 aa, Artificial Sequence
  Peptide Derived from Human Papillomavirus
NVTLQEISNVL

SEQ ID NO: 6208 - protein, 11 aa, Artificial Sequence
  Peptide Derived from Human Papillomavirus
PANTGKSYFGM

SEQ ID NO: 6209 - protein, 11 aa, Artificial Sequence
  Peptide Derived from Human Papillomavirus
PISWTYIDDYM

SEQ ID NO: 6210 - protein, 11 aa, Artificial Sequence
  Peptide Derived from Human Papillomavirus
PIVQLLRYQNI

SEQ ID NO: 6211 - protein, 8 aa, Artificial Sequence
  Peptide Derived from Human Papillomavirus
PLLLTSNT

SEQ ID NO: 6212 - protein, 10 aa, Artificial Sequence
  Peptide Derived from Human Papillomavirus
PLLLTSNTNA

SEQ ID NO: 6213 - protein, 9 aa, Artificial Sequence
  Peptide Derived from Human Papillomavirus
PLSDAKIGM

SEQ ID NO: 6214 - protein, 10 aa, Artificial Sequence
  Peptide Derived from Human Papillomavirus
PLSDAKIGMI

SEQ ID NO: 6215 - protein, 9 aa, Artificial Sequence
  Peptide Derived from Human Papillomavirus
QADTEAARA

SEQ ID NO: 6216 - protein, 10 aa, Artificial Sequence
  Peptide Derived from Human Papillomavirus
QADTEAARAL

SEQ ID NO: 6217 - protein, 10 aa, Artificial Sequence
  Peptide Derived from Human Papillomavirus
QAKIVKDCGI

SEQ ID NO: 6218 - protein, 11 aa, Artificial Sequence
  Peptide Derived from Human Papillomavirus
QAKIVKDCGIM

SEQ ID NO: 6219 - protein, 9 aa, Artificial Sequence
  Peptide Derived from Human Papillomavirus
QLADSNSNA

SEQ ID NO: 6220 - protein, 10 aa, Artificial Sequence
  Peptide Derived from Human Papillomavirus
QLADSNSNAA

SEQ ID NO: 6221 - protein, 11 aa, Artificial Sequence
  Peptide Derived from Human Papillomavirus
QLADSNSNAAA

SEQ ID NO: 6222 - protein, 8 aa, Artificial Sequence
  Peptide Derived from Human Papillomavirus
QLKCPPLL

SEQ ID NO: 6223 - protein, 9 aa, Artificial Sequence
  Peptide Derived from Human Papillomavirus
QLKCPPLLL

SEQ ID NO: 6224 - protein, 10 aa, Artificial Sequence
  Peptide Derived from Human Papillomavirus
QLKCPPLLLT

SEQ ID NO: 6225 - protein, 8 aa, Artificial Sequence
  Peptide Derived from Human Papillomavirus
QLLRYQNI

SEQ ID NO: 6226 - protein, 11 aa, Artificial Sequence
  Peptide Derived from Human Papillomavirus
QLLRYQNIEFT

SEQ ID NO: 6227 - protein, 10 aa, Artificial Sequence
  Peptide Derived from Human Papillomavirus
QQVESQNGDT

SEQ ID NO: 6228 - protein, 10 aa, Artificial Sequence
  Peptide Derived from Human Papillomavirus
QTCALYWFRT

SEQ ID NO: 6229 - protein, 11 aa, Artificial Sequence
  Peptide Derived from Human Papillomavirus
QTCALYWFRTA

SEQ ID NO: 6230 - protein, 9 aa, Artificial Sequence
  Peptide Derived from Human Papillomavirus
QVESQNGDT

SEQ ID NO: 6231 - protein, 11 aa, Artificial Sequence
  Peptide Derived from Human Papillomavirus
QVESQNGDTNL

SEQ ID NO: 6232 - protein, 8 aa, Artificial Sequence
  Peptide Derived from Human Papillomavirus
RAANPCRT

SEQ ID NO: 6233 - protein, 10 aa, Artificial Sequence
  Peptide Derived from Human Papillomavirus
RAANPCRTSI

SEQ ID NO: 6234 - protein, 11 aa, Artificial Sequence
  Peptide Derived from Human Papillomavirus
RALVQLKCPPL

SEQ ID NO: 6235 - protein, 8 aa, Artificial Sequence
  Peptide Derived from Human Papillomavirus
RLTVAKLM

SEQ ID NO: 6236 - protein, 11 aa, Artificial Sequence
  Peptide Derived from Human Papillomavirus
RLTVAKLMSNL

SEQ ID NO: 6237 - protein, 10 aa, Artificial Sequence
  Peptide Derived from Human Papillomavirus
RTAMSNISDV

SEQ ID NO: 6238 - protein, 11 aa, Artificial Sequence
  Peptide Derived from Human Papillomavirus
RTSINKNKECT

SEQ ID NO: 6239 - protein, 8 aa, Artificial Sequence
  Peptide Derived from Human Papillomavirus
RTWCKLDL

SEQ ID NO: 6240 - protein, 9 aa, Artificial Sequence
  Peptide Derived from Human Papillomavirus
RTWCKLDLI

SEQ ID NO: 6241 - protein, 10 aa, Artificial Sequence
  Peptide Derived from Human Papillomavirus
SAAEDVVDRA

SEQ ID NO: 6242 - protein, 11 aa, Artificial Sequence
  Peptide Derived from Human Papillomavirus
SAAEDVVDRAA

SEQ ID NO: 6243 - protein, 9 aa, Artificial Sequence
  Peptide Derived from Human Papillomavirus
SAGENTRSL

SEQ ID NO: 6244 - protein, 8 aa, Artificial Sequence
  Peptide Derived from Human Papillomavirus
SIDVKHRA

SEQ ID NO: 6245 - protein, 9 aa, Artificial Sequence
  Peptide Derived from Human Papillomavirus
SIDVKHRAL

SEQ ID NO: 6246 - protein, 10 aa, Artificial Sequence
  Peptide Derived from Human Papillomavirus
SIDVKHRALV

SEQ ID NO: 6247 - protein, 9 aa, Artificial Sequence
  Peptide Derived from Human Papillomavirus
SINKNKECT

SEQ ID NO: 6248 - protein, 8 aa, Artificial Sequence
  Peptide Derived from Human Papillomavirus
SIPETCMV

SEQ ID NO: 6249 - protein, 9 aa, Artificial Sequence
  Peptide Derived from Human Papillomavirus
SIPETCMVI

SEQ ID NO: 6250 - protein, 8 aa, Artificial Sequence
  Peptide Derived from Human Papillomavirus
SIQADTEA

SEQ ID NO: 6251 - protein, 9 aa, Artificial Sequence
  Peptide Derived from Human Papillomavirus
SIQADTEAA

SEQ ID NO: 6252 - protein, 11 aa, Artificial Sequence
  Peptide Derived from Human Papillomavirus
SIQADTEAARA

SEQ ID NO: 6253 - protein, 10 aa, Artificial Sequence
  Peptide Derived from Human Papillomavirus
SLIQFLKGCV

SEQ ID NO: 6254 - protein, 11 aa, Artificial Sequence
  Peptide Derived from Human Papillomavirus
SLIQFLKGCVI

SEQ ID NO: 6255 - protein, 11 aa, Artificial Sequence
  Peptide Derived from Human Papillomavirus
SLKVLIKQHSL

SEQ ID NO: 6256 - protein, 9 aa, Artificial Sequence
  Peptide Derived from Human Papillomavirus
SLYTHLQCL

SEQ ID NO: 6257 - protein, 10 aa, Artificial Sequence
  Peptide Derived from Human Papillomavirus
SLYTHLQCLT

SEQ ID NO: 6258 - protein, 8 aa, Artificial Sequence
  Peptide Derived from Human Papillomavirus
SMENSIQA

SEQ ID NO: 6259 - protein, 10 aa, Artificial Sequence
  Peptide Derived from Human Papillomavirus
SMENSIQADT

SEQ ID NO: 6260 - protein, 11 aa, Artificial Sequence
  Peptide Derived from Human Papillomavirus
SQAKIVKDCGI

SEQ ID NO: 6261 - protein, 8 aa, Artificial Sequence
  Peptide Derived from Human Papillomavirus
SQNGDTNL

SEQ ID NO: 6262 - protein, 11 aa, Artificial Sequence
  Peptide Derived from Human Papillomavirus
SQNGDTNLNDL

SEQ ID NO: 6263 - protein, 8 aa, Artificial Sequence
  Peptide Derived from Human Papillomavirus
SQSAAEDV

SEQ ID NO: 6264 - protein, 9 aa, Artificial Sequence
  Peptide Derived from Human Papillomavirus
SQSAAEDVV

SEQ ID NO: 6265 - protein, 11 aa, Artificial Sequence
  Peptide Derived from Human Papillomavirus
SQTCALYWFRT

SEQ ID NO: 6266 - protein, 11 aa, Artificial Sequence
  Peptide Derived from Human Papillomavirus
STFKCSAGENT

SEQ ID NO: 6267 - protein, 8 aa, Artificial Sequence
  Peptide Derived from Human Papillomavirus
SVAESLKV

SEQ ID NO: 6268 - protein, 9 aa, Artificial Sequence
  Peptide Derived from Human Papillomavirus
SVAESLKVL

SEQ ID NO: 6269 - protein, 10 aa, Artificial Sequence
  Peptide Derived from Human Papillomavirus
SVAESLKVLI

SEQ ID NO: 6270 - protein, 9 aa, Artificial Sequence
  Peptide Derived from Human Papillomavirus
TADDSGTDL

SEQ ID NO: 6271 - protein, 10 aa, Artificial Sequence
  Peptide Derived from Human Papillomavirus
TADDSGTDLL

SEQ ID NO: 6272 - protein, 11 aa, Artificial Sequence
  Peptide Derived from Human Papillomavirus
TAFLGAFKKFL

SEQ ID NO: 6273 - protein, 9 aa, Artificial Sequence
  Peptide Derived from Human Papillomavirus
TAMSNISDV

SEQ ID NO: 6274 - protein, 8 aa, Artificial Sequence
  Peptide Derived from Human Papillomavirus
TLQEISNV

SEQ ID NO: 6275 - protein, 9 aa, Artificial Sequence
  Peptide Derived from Human Papillomavirus
TLQEISNVL

SEQ ID NO: 6276 - protein, 8 aa, Artificial Sequence
  Peptide Derived from Human Papillomavirus
TQQMVQQV

SEQ ID NO: 6277 - protein, 9 aa, Artificial Sequence
  Peptide Derived from Human Papillomavirus
TTPEWIDRL

SEQ ID NO: 6278 - protein, 10 aa, Artificial Sequence
  Peptide Derived from Human Papillomavirus
TTPEWIDRLT

SEQ ID NO: 6279 - protein, 11 aa, Artificial Sequence
  Peptide Derived from Human Papillomavirus
TTPEWIDRLTV

SEQ ID NO: 6280 - protein, 9 aa, Artificial Sequence
  Peptide Derived from Human Papillomavirus
TVAKLMSNL

SEQ ID NO: 6281 - protein, 10 aa, Artificial Sequence
  Peptide Derived from Human Papillomavirus
TVAKLMSNLL

SEQ ID NO: 6282 - protein, 11 aa, Artificial Sequence
  Peptide Derived from Human Papillomavirus
TVLQHSFNDNI

SEQ ID NO: 6283 - protein, 8 aa, Artificial Sequence
  Peptide Derived from Human Papillomavirus
VAESLKVL

SEQ ID NO: 6284 - protein, 9 aa, Artificial Sequence
  Peptide Derived from Human Papillomavirus
VAESLKVLI

SEQ ID NO: 6285 - protein, 8 aa, Artificial Sequence
  Peptide Derived from Human Papillomavirus
VAKLMSNL

SEQ ID NO: 6286 - protein, 9 aa, Artificial Sequence
  Peptide Derived from Human Papillomavirus
VAKLMSNLL

SEQ ID NO: 6287 - protein, 11 aa, Artificial Sequence
  Peptide Derived from Human Papillomavirus
VAKLMSNLLSI

SEQ ID NO: 6288 - protein, 11 aa, Artificial Sequence
  Peptide Derived from Human Papillomavirus
VIEPPKLRSQT

SEQ ID NO: 6289 - protein, 10 aa, Artificial Sequence
  Peptide Derived from Human Papillomavirus
VIERRTGDNI

SEQ ID NO: 6290 - protein, 9 aa, Artificial Sequence
  Peptide Derived from Human Papillomavirus
VLHSSNTKA

SEQ ID NO: 6291 - protein, 11 aa, Artificial Sequence
  Peptide Derived from Human Papillomavirus
VLHSSNTKANI

SEQ ID NO: 6292 - protein, 8 aa, Artificial Sequence
  Peptide Derived from Human Papillomavirus
VLIKQHSL

SEQ ID NO: 6293 - protein, 10 aa, Artificial Sequence
  Peptide Derived from Human Papillomavirus
VLIKQHSLYT

SEQ ID NO: 6294 - protein, 10 aa, Artificial Sequence
  Peptide Derived from Human Papillomavirus
VLQHSFNDNI

SEQ ID NO: 6295 - protein, 9 aa, Artificial Sequence
  Peptide Derived from Human Papillomavirus
VQGTTPEWI

SEQ ID NO: 6296 - protein, 8 aa, Artificial Sequence
  Peptide Derived from Human Papillomavirus
VQLKCPPL

SEQ ID NO: 6297 - protein, 9 aa, Artificial Sequence
  Peptide Derived from Human Papillomavirus
VQLKCPPLL

SEQ ID NO: 6298 - protein, 10 aa, Artificial Sequence
  Peptide Derived from Human Papillomavirus
VQLKCPPLLL

SEQ ID NO: 6299 - protein, 11 aa, Artificial Sequence
  Peptide Derived from Human Papillomavirus
VQLKCPPLLLT

SEQ ID NO: 6300 - protein, 9 aa, Artificial Sequence
  Peptide Derived from Human Papillomavirus
VQLLRYQNI

SEQ ID NO: 6301 - protein, 11 aa, Artificial Sequence
  Peptide Derived from Human Papillomavirus
VQQVESQNGDT

SEQ ID NO: 6302 - protein, 9 aa, Artificial Sequence
  Peptide Derived from Human Papillomavirus
VQWAYDNEL

SEQ ID NO: 6303 - protein, 10 aa, Artificial Sequence
  Peptide Derived from Human Papillomavirus
VQWAYDNELT

SEQ ID NO: 6304 - protein, 9 aa, Artificial Sequence
  Peptide Derived from Human Papillomavirus
VTLQEISNV

SEQ ID NO: 6305 - protein, 10 aa, Artificial Sequence
  Peptide Derived from Human Papillomavirus
VTLQEISNVL

SEQ ID NO: 6306 - protein, 9 aa, Artificial Sequence
  Peptide Derived from Human Papillomavirus
VTPISWTYI

SEQ ID NO: 6307 - protein, 11 aa, Artificial Sequence
  Peptide Derived from Human Papillomavirus
VVDRAANPCRT

SEQ ID NO: 6308 - protein, 8 aa, Artificial Sequence
  Peptide Derived from Human Papillomavirus
WAYDNELT

SEQ ID NO: 6309 - protein, 8 aa, Artificial Sequence
  Peptide Derived from Human Papillomavirus
WIDRLTVL

SEQ ID NO: 6310 - protein, 9 aa, Artificial Sequence
  Peptide Derived from Human Papillomavirus
WIQSRCEKT

SEQ ID NO: 6311 - protein, 8 aa, Artificial Sequence
  Peptide Derived from Human Papillomavirus
WLQPLSDA

SEQ ID NO: 6312 - protein, 10 aa, Artificial Sequence
  Peptide Derived from Human Papillomavirus
WLQPLSDAKI

SEQ ID NO: 6313 - protein, 8 aa, Artificial Sequence
  Peptide Derived from Human Papillomavirus
WTYIDDYM

SEQ ID NO: 6314 - protein, 11 aa, Artificial Sequence
  Peptide Derived from Human Papillomavirus
WTYIDDYMRNA

SEQ ID NO: 6315 - protein, 11 aa, Artificial Sequence
  Peptide Derived from Human Papillomavirus
YAQLADSNSNA

SEQ ID NO: 6316 - protein, 9 aa, Artificial Sequence
  Peptide Derived from Human Papillomavirus
YIDDYMRNA

SEQ ID NO: 6317 - protein, 10 aa, Artificial Sequence
  Peptide Derived from Human Papillomavirus
YIDDYMRNAL

SEQ ID NO: 6318 - protein, 8 aa, Artificial Sequence
  Peptide Derived from Human Papillomavirus
YLHSRLTV

SEQ ID NO: 6319 - protein, 11 aa, Artificial Sequence
  Peptide Derived from Human Papillomavirus
YMRNALDGNEI

SEQ ID NO: 6320 - protein, 8 aa, Artificial Sequence
  Peptide Derived from Human Papillomavirus
YQNIEFTA

SEQ ID NO: 6321 - protein, 10 aa, Artificial Sequence
  Peptide Derived from Human Papillomavirus
YQNIEFTAFL

SEQ ID NO: 6322 - protein, 8 aa, Artificial Sequence
  Peptide Derived from Human Papillomavirus
YTHLQCLT

SEQ ID NO: 6323 - protein, 9 aa, Artificial Sequence
  Peptide Derived from Human Papillomavirus
AAAKRRRPA

SEQ ID NO: 6324 - protein, 11 aa, Artificial Sequence
  Peptide Derived from Human Papillomavirus
AAAKRRRPADT

SEQ ID NO: 6325 - protein, 8 aa, Artificial Sequence
  Peptide Derived from Human Papillomavirus
AAKRRRPA

SEQ ID NO: 6326 - protein, 10 aa, Artificial Sequence
  Peptide Derived from Human Papillomavirus
AAKRRRPADT

SEQ ID NO: 6327 - protein, 11 aa, Artificial Sequence
  Peptide Derived from Human Papillomavirus
AAKRRRPADTT

SEQ ID NO: 6328 - protein, 9 aa, Artificial Sequence
  Peptide Derived from Human Papillomavirus
AAKYSKTQM

SEQ ID NO: 6329 - protein, 9 aa, Artificial Sequence
  Peptide Derived from Human Papillomavirus
ALDNRTART

SEQ ID NO: 6330 - protein, 10 aa, Artificial Sequence
  Peptide Derived from Human Papillomavirus
ALDNRTARTA

SEQ ID NO: 6331 - protein, 11 aa, Artificial Sequence
  Peptide Derived from Human Papillomavirus
ALDNRTARTAT

SEQ ID NO: 6332 - protein, 9 aa, Artificial Sequence
  Peptide Derived from Human Papillomavirus
ALLYTAKQM

SEQ ID NO: 6333 - protein, 10 aa, Artificial Sequence
  Peptide Derived from Human Papillomavirus
AQPLTKLFCA

SEQ ID NO: 6334 - protein, 10 aa, Artificial Sequence
  Peptide Derived from Human Papillomavirus
ATNCTNKQRT

SEQ ID NO: 6335 - protein, 11 aa, Artificial Sequence
  Peptide Derived from Human Papillomavirus
ATNCTNKQRTV

SEQ ID NO: 6336 - protein, 9 aa, Artificial Sequence
  Peptide Derived from Human Papillomavirus
AVQEKILDL

SEQ ID NO: 6337 - protein, 10 aa, Artificial Sequence
  Peptide Derived from Human Papillomavirus
CADPALDNRT

SEQ ID NO: 6338 - protein, 11 aa, Artificial Sequence
  Peptide Derived from Human Papillomavirus
CADPALDNRTA

SEQ ID NO: 6339 - protein, 10 aa, Artificial Sequence
  Peptide Derived from Human Papillomavirus
CALLYTAKQM

SEQ ID NO: 6340 - protein, 8 aa, Artificial Sequence
  Peptide Derived from Human Papillomavirus
CTMVTGKV

SEQ ID NO: 6341 - protein, 11 aa, Artificial Sequence
  Peptide Derived from Human Papillomavirus
CTMVTGKVDYI

SEQ ID NO: 6342 - protein, 8 aa, Artificial Sequence
  Peptide Derived from Human Papillomavirus
CTNKQRTV

SEQ ID NO: 6343 - protein, 8 aa, Artificial Sequence
  Peptide Derived from Human Papillomavirus
DAAKYSKT

SEQ ID NO: 6344 - protein, 10 aa, Artificial Sequence
  Peptide Derived from Human Papillomavirus
DAAKYSKTQM

SEQ ID NO: 6345 - protein, 11 aa, Artificial Sequence
  Peptide Derived from Human Papillomavirus
DLPSQIEHWKL

SEQ ID NO: 6346 - protein, 8 aa, Artificial Sequence
  Peptide Derived from Human Papillomavirus
DLYEADKT

SEQ ID NO: 6347 - protein, 10 aa, Artificial Sequence
  Peptide Derived from Human Papillomavirus
DLYEADKTDL

SEQ ID NO: 6348 - protein, 9 aa, Artificial Sequence
  Peptide Derived from Human Papillomavirus
DTAQPLTKL

SEQ ID NO: 6349 - protein, 10 aa, Artificial Sequence
  Peptide Derived from Human Papillomavirus
DTCTMVTGKV

SEQ ID NO: 6350 - protein, 9 aa, Artificial Sequence
  Peptide Derived from Human Papillomavirus
DTTDTAQPL

SEQ ID NO: 6351 - protein, 10 aa, Artificial Sequence
  Peptide Derived from Human Papillomavirus
DTTDTAQPLT

SEQ ID NO: 6352 - protein, 11 aa, Artificial Sequence
  Peptide Derived from Human Papillomavirus
EADKTDLPSQI

SEQ ID NO: 6353 - protein, 8 aa, Artificial Sequence
  Peptide Derived from Human Papillomavirus
EISARLNA

SEQ ID NO: 6354 - protein, 9 aa, Artificial Sequence
  Peptide Derived from Human Papillomavirus
EISARLNAV

SEQ ID NO: 6355 - protein, 9 aa, Artificial Sequence
  Peptide Derived from Human Papillomavirus
EIYIIEEDT

SEQ ID NO: 6356 - protein, 11 aa, Artificial Sequence
  Peptide Derived from Human Papillomavirus
EIYIIEEDTCT

SEQ ID NO: 6357 - protein, 8 aa, Artificial Sequence
  Peptide Derived from Human Papillomavirus
ELQMALET

SEQ ID NO: 6358 - protein, 9 aa, Artificial Sequence
  Peptide Derived from Human Papillomavirus
ELQMALETL

SEQ ID NO: 6359 - protein, 9 aa, Artificial Sequence
  Peptide Derived from Human Papillomavirus
ELYSSMSST

SEQ ID NO: 6360 - protein, 8 aa, Artificial Sequence
  Peptide Derived from Human Papillomavirus
EQQQQMFL

SEQ ID NO: 6361 - protein, 10 aa, Artificial Sequence
  Peptide Derived from Human Papillomavirus
EQQQQMFLGT

SEQ ID NO: 6362 - protein, 11 aa, Artificial Sequence
  Peptide Derived from Human Papillomavirus
EQQQQMFLGTV

SEQ ID NO: 6363 - protein, 10 aa, Artificial Sequence
  Peptide Derived from Human Papillomavirus
ETLSKSQYST

SEQ ID NO: 6364 - protein, 8 aa, Artificial Sequence
  Peptide Derived from Human Papillomavirus
EVHVGGQV

SEQ ID NO: 6365 - protein, 9 aa, Artificial Sequence
  Peptide Derived from Human Papillomavirus
EVHVGGQVI

SEQ ID NO: 6366 - protein, 10 aa, Artificial Sequence
  Peptide Derived from Human Papillomavirus
EVHVGGQVIV

SEQ ID NO: 6367 - protein, 10 aa, Artificial Sequence
  Peptide Derived from Human Papillomavirus
FLGTVKIPPT

SEQ ID NO: 6368 - protein, 11 aa, Artificial Sequence
  Peptide Derived from Human Papillomavirus
FLGTVKIPPTV

SEQ ID NO: 6369 - protein, 8 aa, Artificial Sequence
  Peptide Derived from Human Papillomavirus
FQVIELQM

SEQ ID NO: 6370 - protein, 9 aa, Artificial Sequence
  Peptide Derived from Human Papillomavirus
FQVIELQMA

SEQ ID NO: 6371 - protein, 10 aa, Artificial Sequence
  Peptide Derived from Human Papillomavirus
FQVIELQMAL

SEQ ID NO: 6372 - protein, 9 aa, Artificial Sequence
  Peptide Derived from Human Papillomavirus
FVTEQQQQM

SEQ ID NO: 6373 - protein, 11 aa, Artificial Sequence
  Peptide Derived from Human Papillomavirus
FVTEQQQQMFL

SEQ ID NO: 6374 - protein, 8 aa, Artificial Sequence
  Peptide Derived from Human Papillomavirus
GIVTVTFV

SEQ ID NO: 6375 - protein, 9 aa, Artificial Sequence
  Peptide Derived from Human Papillomavirus
GIVTVTFVT

SEQ ID NO: 6376 - protein, 11 aa, Artificial Sequence
  Peptide Derived from Human Papillomavirus
GMYYIHNCEKV

SEQ ID NO: 6377 - protein, 8 aa, Artificial Sequence
  Peptide Derived from Human Papillomavirus
GQVIVCPT

SEQ ID NO: 6378 - protein, 10 aa, Artificial Sequence
  Peptide Derived from Human Papillomavirus
GQVIVCPTSI

SEQ ID NO: 6379 - protein, 8 aa, Artificial Sequence
  Peptide Derived from Human Papillomavirus
GTVKIPPT

SEQ ID NO: 6380 - protein, 9 aa, Artificial Sequence
  Peptide Derived from Human Papillomavirus
GTVKIPPTV

SEQ ID NO: 6381 - protein, 11 aa, Artificial Sequence
  Peptide Derived from Human Papillomavirus
GTVKIPPTVQI

SEQ ID NO: 6382 - protein, 10 aa, Artificial Sequence
  Peptide Derived from Human Papillomavirus
HLCHQVVPSL

SEQ ID NO: 6383 - protein, 11 aa, Artificial Sequence
  Peptide Derived from Human Papillomavirus
HLCHQVVPSLL

SEQ ID NO: 6384 - protein, 9 aa, Artificial Sequence
  Peptide Derived from Human Papillomavirus
HLKGESNSL

SEQ ID NO: 6385 - protein, 8 aa, Artificial Sequence
  Peptide Derived from Human Papillomavirus
HQVVPSLL

SEQ ID NO: 6386 - protein, 9 aa, Artificial Sequence
  Peptide Derived from Human Papillomavirus
HQVVPSLLA

SEQ ID NO: 6387 - protein, 8 aa, Artificial Sequence
  Peptide Derived from Human Papillomavirus
HVGGQVIV

SEQ ID NO: 6388 - protein, 11 aa, Artificial Sequence
  Peptide Derived from Human Papillomavirus
HVGGQVIVCPT

SEQ ID NO: 6389 - protein, 8 aa, Artificial Sequence
  Peptide Derived from Human Papillomavirus
IIEEDTCT

SEQ ID NO: 6390 - protein, 9 aa, Artificial Sequence
  Peptide Derived from Human Papillomavirus
IIEEDTCTM

SEQ ID NO: 6391 - protein, 10 aa, Artificial Sequence
  Peptide Derived from Human Papillomavirus
IIEEDTCTMV

SEQ ID NO: 6392 - protein, 11 aa, Artificial Sequence
  Peptide Derived from Human Papillomavirus
IIEEDTCTMVT

SEQ ID NO: 6393 - protein, 10 aa, Artificial Sequence
  Peptide Derived from Human Papillomavirus
ILDLYEADKT

SEQ ID NO: 6394 - protein, 11 aa, Artificial Sequence
  Peptide Derived from Human Papillomavirus
IVHLKGESNSL

SEQ ID NO: 6395 - protein, 8 aa, Artificial Sequence
  Peptide Derived from Human Papillomavirus
IVTVTFVT

SEQ ID NO: 6396 - protein, 8 aa, Artificial Sequence
  Peptide Derived from Human Papillomavirus
KAFQVIEL

SEQ ID NO: 6397 - protein, 10 aa, Artificial Sequence
  Peptide Derived from Human Papillomavirus
KAFQVIELQM

SEQ ID NO: 6398 - protein, 11 aa, Artificial Sequence
  Peptide Derived from Human Papillomavirus
KAFQVIELQMA

SEQ ID NO: 6399 - protein, 8 aa, Artificial Sequence
  Peptide Derived from Human Papillomavirus
KILDLYEA

SEQ ID NO: 6400 - protein, 11 aa, Artificial Sequence
  Peptide Derived from Human Papillomavirus
KILDLYEADKT

SEQ ID NO: 6401 - protein, 8 aa, Artificial Sequence
  Peptide Derived from Human Papillomavirus
KIPPTVQI

SEQ ID NO: 6402 - protein, 10 aa, Artificial Sequence
  Peptide Derived from Human Papillomavirus
KIPPTVQIST

SEQ ID NO: 6403 - protein, 8 aa, Artificial Sequence
  Peptide Derived from Human Papillomavirus
KLFCADPA

SEQ ID NO: 6404 - protein, 9 aa, Artificial Sequence
  Peptide Derived from Human Papillomavirus
KLFCADPAL

SEQ ID NO: 6405 - protein, 8 aa, Artificial Sequence
  Peptide Derived from Human Papillomavirus
KLIRMECA

SEQ ID NO: 6406 - protein, 9 aa, Artificial Sequence
  Peptide Derived from Human Papillomavirus
KLIRMECAL

SEQ ID NO: 6407 - protein, 10 aa, Artificial Sequence
  Peptide Derived from Human Papillomavirus
KLIRMECALL

SEQ ID NO: 6408 - protein, 8 aa, Artificial Sequence
  Peptide Derived from Human Papillomavirus
KQGETVTV

SEQ ID NO: 6409 - protein, 8 aa, Artificial Sequence
  Peptide Derived from Human Papillomavirus
KQMGFSHL

SEQ ID NO: 6410 - protein, 10 aa, Artificial Sequence
  Peptide Derived from Human Papillomavirus
KQRTVCSSNV

SEQ ID NO: 6411 - protein, 11 aa, Artificial Sequence
  Peptide Derived from Human Papillomavirus
KQRTVCSSNVA

SEQ ID NO: 6412 - protein, 8 aa, Artificial Sequence
  Peptide Derived from Human Papillomavirus
KTDLPSQI

SEQ ID NO: 6413 - protein, 8 aa, Artificial Sequence
  Peptide Derived from Human Papillomavirus
KTKAFQVI

SEQ ID NO: 6414 - protein, 10 aa, Artificial Sequence
  Peptide Derived from Human Papillomavirus
KTKAFQVIEL

SEQ ID NO: 6415 - protein, 9 aa, Artificial Sequence
  Peptide Derived from Human Papillomavirus
KTQMWEVHV

SEQ ID NO: 6416 - protein, 10 aa, Artificial Sequence
  Peptide Derived from Human Papillomavirus
KVDYIGMYYI

SEQ ID NO: 6417 - protein, 11 aa, Artificial Sequence
  Peptide Derived from Human Papillomavirus
KVYFKYFKEDA

SEQ ID NO: 6418 - protein, 10 aa, Artificial Sequence
  Peptide Derived from Human Papillomavirus
LASKTKAFQV

SEQ ID NO: 6419 - protein, 11 aa, Artificial Sequence
  Peptide Derived from Human Papillomavirus
LASKTKAFQVI

SEQ ID NO: 6420 - protein, 8 aa, Artificial Sequence
  Peptide Derived from Human Papillomavirus
LIRMECAL

SEQ ID NO: 6421 - protein, 9 aa, Artificial Sequence
  Peptide Derived from Human Papillomavirus
LIRMECALL

SEQ ID NO: 6422 - protein, 11 aa, Artificial Sequence
  Peptide Derived from Human Papillomavirus
LIRMECALLYT

SEQ ID NO: 6423 - protein, 8 aa, Artificial Sequence
  Peptide Derived from Human Papillomavirus
LLASKTKA

SEQ ID NO: 6424 - protein, 11 aa, Artificial Sequence
  Peptide Derived from Human Papillomavirus
LLASKTKAFQV

SEQ ID NO: 6425 - protein, 8 aa, Artificial Sequence
  Peptide Derived from Human Papillomavirus
LLYTAKQM

SEQ ID NO: 6426 - protein, 8 aa, Artificial Sequence
  Peptide Derived from Human Papillomavirus
LQMALETL

SEQ ID NO: 6427 - protein, 8 aa, Artificial Sequence
  Peptide Derived from Human Papillomavirus
LQQTSLEV

SEQ ID NO: 6428 - protein, 10 aa, Artificial Sequence
  Peptide Derived from Human Papillomavirus
LQQTSLEVWL

SEQ ID NO: 6429 - protein, 10 aa, Artificial Sequence
  Peptide Derived from Human Papillomavirus
LTKLFCADPA

SEQ ID NO: 6430 - protein, 11 aa, Artificial Sequence
  Peptide Derived from Human Papillomavirus
LTKLFCADPAL

SEQ ID NO: 6431 - protein, 9 aa, Artificial Sequence
  Peptide Derived from Human Papillomavirus
MVTGKVDYI

SEQ ID NO: 6432 - protein, 11 aa, Artificial Sequence
  Peptide Derived from Human Papillomavirus
MVTGKVDYIGM

SEQ ID NO: 6433 - protein, 8 aa, Artificial Sequence
  Peptide Derived from Human Papillomavirus
NAVQEKIL

SEQ ID NO: 6434 - protein, 10 aa, Artificial Sequence
  Peptide Derived from Human Papillomavirus
NAVQEKILDL

SEQ ID NO: 6435 - protein, 8 aa, Artificial Sequence
  Peptide Derived from Human Papillomavirus
NQISTTET

SEQ ID NO: 6436 - protein, 9 aa, Artificial Sequence
  Peptide Derived from Human Papillomavirus
NQISTTETA

SEQ ID NO: 6437 - protein, 11 aa, Artificial Sequence
  Peptide Derived from Human Papillomavirus
NQISTTETADI

SEQ ID NO: 6438 - protein, 11 aa, Artificial Sequence
  Peptide Derived from Human Papillomavirus
NTMDYTNWGEI

SEQ ID NO: 6439 - protein, 8 aa, Artificial Sequence
  Peptide Derived from Human Papillomavirus
NVAPIVHL

SEQ ID NO: 6440 - protein, 8 aa, Artificial Sequence
  Peptide Derived from Human Papillomavirus
PADTTDTA

SEQ ID NO: 6441 - protein, 11 aa, Artificial Sequence
  Peptide Derived from Human Papillomavirus
PADTTDTAQPL

SEQ ID NO: 6442 - protein, 8 aa, Artificial Sequence
  Peptide Derived from Human Papillomavirus
PALDNRTA

SEQ ID NO: 6443 - protein, 10 aa, Artificial Sequence
  Peptide Derived from Human Papillomavirus
PALDNRTART

SEQ ID NO: 6444 - protein, 11 aa, Artificial Sequence
  Peptide Derived from Human Papillomavirus
PALDNRTARTA

SEQ ID NO: 6445 - protein, 8 aa, Artificial Sequence
  Peptide Derived from Human Papillomavirus
PLTKLFCA

SEQ ID NO: 6446 - protein, 11 aa, Artificial Sequence
  Peptide Derived from Human Papillomavirus
PLTKLFCADPA

SEQ ID NO: 6447 - protein, 11 aa, Artificial Sequence
  Peptide Derived from Human Papillomavirus
PQAAAKRRRPA

SEQ ID NO: 6448 - protein, 9 aa, Artificial Sequence
  Peptide Derived from Human Papillomavirus
PTSISSNQI

SEQ ID NO: 6449 - protein, 11 aa, Artificial Sequence
  Peptide Derived from Human Papillomavirus
PTSISSNQIST

SEQ ID NO: 6450 - protein, 10 aa, Artificial Sequence
  Peptide Derived from Human Papillomavirus
PTVQISTGFM

SEQ ID NO: 6451 - protein, 11 aa, Artificial Sequence
  Peptide Derived from Human Papillomavirus
PTVQISTGFMT

SEQ ID NO: 6452 - protein, 10 aa, Artificial Sequence
  Peptide Derived from Human Papillomavirus
QAAAKRRRPA

SEQ ID NO: 6453 - protein, 8 aa, Artificial Sequence
  Peptide Derived from Human Papillomavirus
QIEHWKLI

SEQ ID NO: 6454 - protein, 10 aa, Artificial Sequence
  Peptide Derived from Human Papillomavirus
QIEHWKLIRM

SEQ ID NO: 6455 - protein, 8 aa, Artificial Sequence
  Peptide Derived from Human Papillomavirus
QISTGFMT

SEQ ID NO: 6456 - protein, 9 aa, Artificial Sequence
  Peptide Derived from Human Papillomavirus
QISTGFMTL

SEQ ID NO: 6457 - protein, 8 aa, Artificial Sequence
  Peptide Derived from Human Papillomavirus
QISTTETA

SEQ ID NO: 6458 - protein, 10 aa, Artificial Sequence
  Peptide Derived from Human Papillomavirus
QISTTETADI

SEQ ID NO: 6459 - protein, 9 aa, Artificial Sequence
  Peptide Derived from Human Papillomavirus
QMFLGTVKI

SEQ ID NO: 6460 - protein, 11 aa, Artificial Sequence
  Peptide Derived from Human Papillomavirus
QMGFSHLCHQV

SEQ ID NO: 6461 - protein, 11 aa, Artificial Sequence
  Peptide Derived from Human Papillomavirus
QMWEVHVGGQV

SEQ ID NO: 6462 - protein, 8 aa, Artificial Sequence
  Peptide Derived from Human Papillomavirus
QQMFLGTV

SEQ ID NO: 6463 - protein, 10 aa, Artificial Sequence
  Peptide Derived from Human Papillomavirus
QQMFLGTVKI

SEQ ID NO: 6464 - protein, 8 aa, Artificial Sequence
  Peptide Derived from Human Papillomavirus
QQQMFLGT

SEQ ID NO: 6465 - protein, 9 aa, Artificial Sequence
  Peptide Derived from Human Papillomavirus
QQQMFLGTV

SEQ ID NO: 6466 - protein, 11 aa, Artificial Sequence
  Peptide Derived from Human Papillomavirus
QQQMFLGTVKI

SEQ ID NO: 6467 - protein, 9 aa, Artificial Sequence
  Peptide Derived from Human Papillomavirus
QQQQMFLGT

SEQ ID NO: 6468 - protein, 10 aa, Artificial Sequence
  Peptide Derived from Human Papillomavirus
QQQQMFLGTV

SEQ ID NO: 6469 - protein, 9 aa, Artificial Sequence
  Peptide Derived from Human Papillomavirus
QQTSLEVWL

SEQ ID NO: 6470 - protein, 11 aa, Artificial Sequence
  Peptide Derived from Human Papillomavirus
QTDNDNRPPQA

SEQ ID NO: 6471 - protein, 8 aa, Artificial Sequence
  Peptide Derived from Human Papillomavirus
QTSLEVWL

SEQ ID NO: 6472 - protein, 8 aa, Artificial Sequence
  Peptide Derived from Human Papillomavirus
QVIELQMA

SEQ ID NO: 6473 - protein, 9 aa, Artificial Sequence
  Peptide Derived from Human Papillomavirus
QVIELQMAL

SEQ ID NO: 6474 - protein, 11 aa, Artificial Sequence
  Peptide Derived from Human Papillomavirus
QVIELQMALET

SEQ ID NO: 6475 - protein, 9 aa, Artificial Sequence
  Peptide Derived from Human Papillomavirus
QVIVCPTSI

SEQ ID NO: 6476 - protein, 8 aa, Artificial Sequence
  Peptide Derived from Human Papillomavirus
QVVPSLLA

SEQ ID NO: 6477 - protein, 11 aa, Artificial Sequence
  Peptide Derived from Human Papillomavirus
QVVPSLLASKT

SEQ ID NO: 6478 - protein, 8 aa, Artificial Sequence
  Peptide Derived from Human Papillomavirus
RLKPYKEL

SEQ ID NO: 6479 - protein, 9 aa, Artificial Sequence
  Peptide Derived from Human Papillomavirus
RLNAVQEKI

SEQ ID NO: 6480 - protein, 10 aa, Artificial Sequence
  Peptide Derived from Human Papillomavirus
RLNAVQEKIL

SEQ ID NO: 6481 - protein, 9 aa, Artificial Sequence
  Peptide Derived from Human Papillomavirus
RMECALLYT

SEQ ID NO: 6482 - protein, 10 aa, Artificial Sequence
  Peptide Derived from Human Papillomavirus
RMECALLYTA

SEQ ID NO: 6483 - protein, 10 aa, Artificial Sequence
  Peptide Derived from Human Papillomavirus
RTARTATNCT

SEQ ID NO: 6484 - protein, 8 aa, Artificial Sequence
  Peptide Derived from Human Papillomavirus
RTVCSSNV

SEQ ID NO: 6485 - protein, 9 aa, Artificial Sequence
  Peptide Derived from Human Papillomavirus
RTVCSSNVA

SEQ ID NO: 6486 - protein, 11 aa, Artificial Sequence
  Peptide Derived from Human Papillomavirus
RTVCSSNVAPI

SEQ ID NO: 6487 - protein, 11 aa, Artificial Sequence
  Peptide Derived from Human Papillomavirus
SARLNAVQEKI

SEQ ID NO: 6488 - protein, 9 aa, Artificial Sequence
  Peptide Derived from Human Papillomavirus
SISSNQIST

SEQ ID NO: 6489 - protein, 10 aa, Artificial Sequence
  Peptide Derived from Human Papillomavirus
SISSNQISTT

SEQ ID NO: 6490 - protein, 9 aa, Artificial Sequence
  Peptide Derived from Human Papillomavirus
SLKCLRYRL

SEQ ID NO: 6491 - protein, 9 aa, Artificial Sequence
  Peptide Derived from Human Papillomavirus
SLLASKTKA

SEQ ID NO: 6492 - protein, 9 aa, Artificial Sequence
  Peptide Derived from Human Papillomavirus
SMSSTWHWT

SEQ ID NO: 6493 - protein, 8 aa, Artificial Sequence
  Peptide Derived from Human Papillomavirus
SQIEHWKL

SEQ ID NO: 6494 - protein, 9 aa, Artificial Sequence
  Peptide Derived from Human Papillomavirus
SQIEHWKLI

SEQ ID NO: 6495 - protein, 11 aa, Artificial Sequence
  Peptide Derived from Human Papillomavirus
SQIEHWKLIRM

SEQ ID NO: 6496 - protein, 8 aa, Artificial Sequence
  Peptide Derived from Human Papillomavirus
SQWTLQQT

SEQ ID NO: 6497 - protein, 10 aa, Artificial Sequence
  Peptide Derived from Human Papillomavirus
SQWTLQQTSL

SEQ ID NO: 6498 - protein, 9 aa, Artificial Sequence
  Peptide Derived from Human Papillomavirus
SQYSTSQWT

SEQ ID NO: 6499 - protein, 10 aa, Artificial Sequence
  Peptide Derived from Human Papillomavirus
SQYSTSQWTL

SEQ ID NO: 6500 - protein, 10 aa, Artificial Sequence
  Peptide Derived from Human Papillomavirus
STSQWTLQQT

SEQ ID NO: 6501 - protein, 8 aa, Artificial Sequence
  Peptide Derived from Human Papillomavirus
STTETADI

SEQ ID NO: 6502 - protein, 10 aa, Artificial Sequence
  Peptide Derived from Human Papillomavirus
STTETADIQT

SEQ ID NO: 6503 - protein, 10 aa, Artificial Sequence
  Peptide Derived from Human Papillomavirus
TAKQMGFSHL

SEQ ID NO: 6504 - protein, 8 aa, Artificial Sequence
  Peptide Derived from Human Papillomavirus
TAQPLTKL

SEQ ID NO: 6505 - protein, 11 aa, Artificial Sequence
  Peptide Derived from Human Papillomavirus
TAQPLTKLFCA

SEQ ID NO: 6506 - protein, 9 aa, Artificial Sequence
  Peptide Derived from Human Papillomavirus
TARTATNCT

SEQ ID NO: 6507 - protein, 11 aa, Artificial Sequence
  Peptide Derived from Human Papillomavirus
TATNCTNKQRT

SEQ ID NO: 6508 - protein, 9 aa, Artificial Sequence
  Peptide Derived from Human Papillomavirus
TLQQTSLEV

SEQ ID NO: 6509 - protein, 11 aa, Artificial Sequence
  Peptide Derived from Human Papillomavirus
TLQQTSLEVWL

SEQ ID NO: 6510 - protein, 9 aa, Artificial Sequence
  Peptide Derived from Human Papillomavirus
TLSKSQYST

SEQ ID NO: 6511 - protein, 10 aa, Artificial Sequence
  Peptide Derived from Human Papillomavirus
TMDYTNWGEI

SEQ ID NO: 6512 - protein, 10 aa, Artificial Sequence
  Peptide Derived from Human Papillomavirus
TMVTGKVDYI

SEQ ID NO: 6513 - protein, 8 aa, Artificial Sequence
  Peptide Derived from Human Papillomavirus
TQMWEVHV

SEQ ID NO: 6514 - protein, 8 aa, Artificial Sequence
  Peptide Derived from Human Papillomavirus
TTDTAQPL

SEQ ID NO: 6515 - protein, 9 aa, Artificial Sequence
  Peptide Derived from Human Papillomavirus
TTDTAQPLT

SEQ ID NO: 6516 - protein, 11 aa, Artificial Sequence
  Peptide Derived from Human Papillomavirus
TTDTAQPLTKL

SEQ ID NO: 6517 - protein, 9 aa, Artificial Sequence
  Peptide Derived from Human Papillomavirus
TTETADIQT

SEQ ID NO: 6518 - protein, 8 aa, Artificial Sequence
  Peptide Derived from Human Papillomavirus
TVCSSNVA

SEQ ID NO: 6519 - protein, 10 aa, Artificial Sequence
  Peptide Derived from Human Papillomavirus
TVCSSNVAPI

SEQ ID NO: 6520 - protein, 11 aa, Artificial Sequence
  Peptide Derived from Human Papillomavirus
TVCSSNVAPIV

SEQ ID NO: 6521 - protein, 8 aa, Artificial Sequence
  Peptide Derived from Human Papillomavirus
TVKIPPTV

SEQ ID NO: 6522 - protein, 10 aa, Artificial Sequence
  Peptide Derived from Human Papillomavirus
TVKIPPTVQI

SEQ ID NO: 6523 - protein, 9 aa, Artificial Sequence
  Peptide Derived from Human Papillomavirus
TVQISTGFM

SEQ ID NO: 6524 - protein, 10 aa, Artificial Sequence
  Peptide Derived from Human Papillomavirus
TVQISTGFMT

SEQ ID NO: 6525 - protein, 11 aa, Artificial Sequence
  Peptide Derived from Human Papillomavirus
TVQISTGFMTL

SEQ ID NO: 6526 - protein, 11 aa, Artificial Sequence
  Peptide Derived from Human Papillomavirus
TVQYDNDKKNT

SEQ ID NO: 6527 - protein, 8 aa, Artificial Sequence
  Peptide Derived from Human Papillomavirus
VIELQMAL

SEQ ID NO: 6528 - protein, 10 aa, Artificial Sequence
  Peptide Derived from Human Papillomavirus
VIELQMALET

SEQ ID NO: 6529 - protein, 11 aa, Artificial Sequence
  Peptide Derived from Human Papillomavirus
VIELQMALETL

SEQ ID NO: 6530 - protein, 8 aa, Artificial Sequence
  Peptide Derived from Human Papillomavirus
VIVCPTSI

SEQ ID NO: 6531 - protein, 8 aa, Artificial Sequence
  Peptide Derived from Human Papillomavirus
VQEKILDL

SEQ ID NO: 6532 - protein, 11 aa, Artificial Sequence
  Peptide Derived from Human Papillomavirus
VQEKILDLYEA

SEQ ID NO: 6533 - protein, 8 aa, Artificial Sequence
  Peptide Derived from Human Papillomavirus
VQISTGFM

SEQ ID NO: 6534 - protein, 9 aa, Artificial Sequence
  Peptide Derived from Human Papillomavirus
VQISTGFMT

SEQ ID NO: 6535 - protein, 10 aa, Artificial Sequence
  Peptide Derived from Human Papillomavirus
VQISTGFMTL

SEQ ID NO: 6536 - protein, 10 aa, Artificial Sequence
  Peptide Derived from Human Papillomavirus
VQYDNDKKNT

SEQ ID NO: 6537 - protein, 11 aa, Artificial Sequence
  Peptide Derived from Human Papillomavirus
VQYDNDKKNTM

SEQ ID NO: 6538 - protein, 8 aa, Artificial Sequence
  Peptide Derived from Human Papillomavirus
VTEQQQQM

SEQ ID NO: 6539 - protein, 10 aa, Artificial Sequence
  Peptide Derived from Human Papillomavirus
VTEQQQQMFL

SEQ ID NO: 6540 - protein, 11 aa, Artificial Sequence
  Peptide Derived from Human Papillomavirus
VTFVTEQQQQM

SEQ ID NO: 6541 - protein, 8 aa, Artificial Sequence
  Peptide Derived from Human Papillomavirus
VTGKVDYI

SEQ ID NO: 6542 - protein, 10 aa, Artificial Sequence
  Peptide Derived from Human Papillomavirus
VTGKVDYIGM

SEQ ID NO: 6543 - protein, 10 aa, Artificial Sequence
  Peptide Derived from Human Papillomavirus
VVPSLLASKT

SEQ ID NO: 6544 - protein, 8 aa, Artificial Sequence
  Peptide Derived from Human Papillomavirus
WTLQQTSL

SEQ ID NO: 6545 - protein, 10 aa, Artificial Sequence
  Peptide Derived from Human Papillomavirus
WTLQQTSLEV

SEQ ID NO: 6546 - protein, 8 aa, Artificial Sequence
  Peptide Derived from Human Papillomavirus
YIHNCEKV

SEQ ID NO: 6547 - protein, 9 aa, Artificial Sequence
  Peptide Derived from Human Papillomavirus
YIIEEDTCT

SEQ ID NO: 6548 - protein, 10 aa, Artificial Sequence
  Peptide Derived from Human Papillomavirus
YIIEEDTCTM

SEQ ID NO: 6549 - protein, 11 aa, Artificial Sequence
  Peptide Derived from Human Papillomavirus
YIIEEDTCTMV

SEQ ID NO: 6550 - protein, 11 aa, Artificial Sequence
  Peptide Derived from Human Papillomavirus
YTAKQMGFSHL

SEQ ID NO: 6551 - protein, 9 aa, Artificial Sequence
  Peptide Derived from Human Papillomavirus
YTNWGEIYI

SEQ ID NO: 6552 - protein, 10 aa, Artificial Sequence
  Peptide Derived from Human Papillomavirus
YTNWGEIYII

SEQ ID NO: 6553 - protein, 9 aa, Artificial Sequence
  Peptide Derived from Human Papillomavirus
CINFHAQHM

SEQ ID NO: 6554 - protein, 10 aa, Artificial Sequence
  Peptide Derived from Human Papillomavirus
CINFHAQHMT

SEQ ID NO: 6555 - protein, 9 aa, Artificial Sequence
  Peptide Derived from Human Papillomavirus
CLSLLLRPL

SEQ ID NO: 6556 - protein, 10 aa, Artificial Sequence
  Peptide Derived from Human Papillomavirus
CLSLLLRPLI

SEQ ID NO: 6557 - protein, 11 aa, Artificial Sequence
  Peptide Derived from Human Papillomavirus
CLSLLLRPLIL

SEQ ID NO: 6558 - protein, 9 aa, Artificial Sequence
  Peptide Derived from Human Papillomavirus
FILFLCLSL

SEQ ID NO: 6559 - protein, 10 aa, Artificial Sequence
  Peptide Derived from Human Papillomavirus
FILFLCLSLL

SEQ ID NO: 6560 - protein, 11 aa, Artificial Sequence
  Peptide Derived from Human Papillomavirus
FILFLCLSLLL

SEQ ID NO: 6561 - protein, 8 aa, Artificial Sequence
  Peptide Derived from Human Papillomavirus
FLCLSLLL

SEQ ID NO: 6562 - protein, 11 aa, Artificial Sequence
  Peptide Derived from Human Papillomavirus
FLCLSLLLRPL

SEQ ID NO: 6563 - protein, 9 aa, Artificial Sequence
  Peptide Derived from Human Papillomavirus
FLYLPMMCI

SEQ ID NO: 6564 - protein, 8 aa, Artificial Sequence
  Peptide Derived from Human Papillomavirus
FVFVLCFI

SEQ ID NO: 6565 - protein, 9 aa, Artificial Sequence
  Peptide Derived from Human Papillomavirus
FVFVLCFIL

SEQ ID NO: 6566 - protein, 11 aa, Artificial Sequence
  Peptide Derived from Human Papillomavirus
FVFVLCFILFL

SEQ ID NO: 6567 - protein, 8 aa, Artificial Sequence
  Peptide Derived from Human Papillomavirus
FVGSPLKI

SEQ ID NO: 6568 - protein, 9 aa, Artificial Sequence
  Peptide Derived from Human Papillomavirus
FVLCFILFL

SEQ ID NO: 6569 - protein, 11 aa, Artificial Sequence
  Peptide Derived from Human Papillomavirus
FVLCFILFLCL

SEQ ID NO: 6570 - protein, 8 aa, Artificial Sequence
  Peptide Derived from Human Papillomavirus
ILFLCLSL

SEQ ID NO: 6571 - protein, 9 aa, Artificial Sequence
  Peptide Derived from Human Papillomavirus
ILFLCLSLL

SEQ ID NO: 6572 - protein, 10 aa, Artificial Sequence
  Peptide Derived from Human Papillomavirus
ILFLCLSLLL

SEQ ID NO: 6573 - protein, 8 aa, Artificial Sequence
  Peptide Derived from Human Papillomavirus
ILSISTYA

SEQ ID NO: 6574 - protein, 10 aa, Artificial Sequence
  Peptide Derived from Human Papillomavirus
ILSISTYAWL

SEQ ID NO: 6575 - protein, 11 aa, Artificial Sequence
  Peptide Derived from Human Papillomavirus
ILSISTYAWLL

SEQ ID NO: 6576 - protein, 8 aa, Artificial Sequence
  Peptide Derived from Human Papillomavirus
KIFFCYLL

SEQ ID NO: 6577 - protein, 10 aa, Artificial Sequence
  Peptide Derived from Human Papillomavirus
KIFFCYLLFL

SEQ ID NO: 6578 - protein, 9 aa, Artificial Sequence
  Peptide Derived from Human Papillomavirus
LILSISTYA

SEQ ID NO: 6579 - protein, 11 aa, Artificial Sequence
  Peptide Derived from Human Papillomavirus
LILSISTYAWL

SEQ ID NO: 6580 - protein, 8 aa, Artificial Sequence
  Peptide Derived from Human Papillomavirus
LLFLYLPM

SEQ ID NO: 6581 - protein, 9 aa, Artificial Sequence
  Peptide Derived from Human Papillomavirus
LLFLYLPMM

SEQ ID NO: 6582 - protein, 11 aa, Artificial Sequence
  Peptide Derived from Human Papillomavirus
LLFLYLPMMCI

SEQ ID NO: 6583 - protein, 8 aa, Artificial Sequence
  Peptide Derived from Human Papillomavirus
LLLRPLIL

SEQ ID NO: 6584 - protein, 10 aa, Artificial Sequence
  Peptide Derived from Human Papillomavirus
LLLRPLILSI

SEQ ID NO: 6585 - protein, 11 aa, Artificial Sequence
  Peptide Derived from Human Papillomavirus
LLLWVFVGSPL

SEQ ID NO: 6586 - protein, 9 aa, Artificial Sequence
  Peptide Derived from Human Papillomavirus
LLRPLILSI

SEQ ID NO: 6587 - protein, 11 aa, Artificial Sequence
  Peptide Derived from Human Papillomavirus
LLRPLILSIST

SEQ ID NO: 6588 - protein, 8 aa, Artificial Sequence
  Peptide Derived from Human Papillomavirus
LLVLVLLL

SEQ ID NO: 6589 - protein, 10 aa, Artificial Sequence
  Peptide Derived from Human Papillomavirus
LLVLVLLLWV

SEQ ID NO: 6590 - protein, 10 aa, Artificial Sequence
  Peptide Derived from Human Papillomavirus
LLWVFVGSPL

SEQ ID NO: 6591 - protein, 9 aa, Artificial Sequence
  Peptide Derived from Human Papillomavirus
LVLLLWVFV

SEQ ID NO: 6592 - protein, 9 aa, Artificial Sequence
  Peptide Derived from Human Papillomavirus
LVLVLLLWV

SEQ ID NO: 6593 - protein, 11 aa, Artificial Sequence
  Peptide Derived from Human Papillomavirus
LVLVLLLWVFV

SEQ ID NO: 6594 - protein, 10 aa, Artificial Sequence
  Peptide Derived from Human Papillomavirus
MIFVFVLCFI

SEQ ID NO: 6595 - protein, 11 aa, Artificial Sequence
  Peptide Derived from Human Papillomavirus
MIFVFVLCFIL

SEQ ID NO: 6596 - protein, 8 aa, Artificial Sequence
  Peptide Derived from Human Papillomavirus
MMCINFHA

SEQ ID NO: 6597 - protein, 11 aa, Artificial Sequence
  Peptide Derived from Human Papillomavirus
MMCINFHAQHM

SEQ ID NO: 6598 - protein, 8 aa, Artificial Sequence
  Peptide Derived from Human Papillomavirus
PLILSIST

SEQ ID NO: 6599 - protein, 10 aa, Artificial Sequence
  Peptide Derived from Human Papillomavirus
PLILSISTYA

SEQ ID NO: 6600 - protein, 9 aa, Artificial Sequence
  Peptide Derived from Human Papillomavirus
PLKIFFCYL

SEQ ID NO: 6601 - protein, 10 aa, Artificial Sequence
  Peptide Derived from Human Papillomavirus
PLKIFFCYLL

SEQ ID NO: 6602 - protein, 9 aa, Artificial Sequence
  Peptide Derived from Human Papillomavirus
PMMCINFHA

SEQ ID NO: 6603 - protein, 8 aa, Artificial Sequence
  Peptide Derived from Human Papillomavirus
SISTYAWL

SEQ ID NO: 6604 - protein, 9 aa, Artificial Sequence
  Peptide Derived from Human Papillomavirus
SISTYAWLL

SEQ ID NO: 6605 - protein, 10 aa, Artificial Sequence
  Peptide Derived from Human Papillomavirus
SISTYAWLLV

SEQ ID NO: 6606 - protein, 11 aa, Artificial Sequence
  Peptide Derived from Human Papillomavirus
SISTYAWLLVL

SEQ ID NO: 6607 - protein, 8 aa, Artificial Sequence
  Peptide Derived from Human Papillomavirus
SLLLRPLI

SEQ ID NO: 6608 - protein, 9 aa, Artificial Sequence
  Peptide Derived from Human Papillomavirus
SLLLRPLIL

SEQ ID NO: 6609 - protein, 11 aa, Artificial Sequence
  Peptide Derived from Human Papillomavirus
SLLLRPLILSI

SEQ ID NO: 6610 - protein, 8 aa, Artificial Sequence
  Peptide Derived from Human Papillomavirus
STYAWLLV

SEQ ID NO: 6611 - protein, 9 aa, Artificial Sequence
  Peptide Derived from Human Papillomavirus
STYAWLLVL

SEQ ID NO: 6612 - protein, 10 aa, Artificial Sequence
  Peptide Derived from Human Papillomavirus
STYAWLLVLV

SEQ ID NO: 6613 - protein, 11 aa, Artificial Sequence
  Peptide Derived from Human Papillomavirus
STYAWLLVLVL

SEQ ID NO: 6614 - protein, 8 aa, Artificial Sequence
  Peptide Derived from Human Papillomavirus
VLCFILFL

SEQ ID NO: 6615 - protein, 10 aa, Artificial Sequence
  Peptide Derived from Human Papillomavirus
VLCFILFLCL

SEQ ID NO: 6616 - protein, 8 aa, Artificial Sequence
  Peptide Derived from Human Papillomavirus
VLLLWVFV

SEQ ID NO: 6617 - protein, 8 aa, Artificial Sequence
  Peptide Derived from Human Papillomavirus
VLVLLLWV

SEQ ID NO: 6618 - protein, 10 aa, Artificial Sequence
  Peptide Derived from Human Papillomavirus
VLVLLLWVFV

SEQ ID NO: 6619 - protein, 8 aa, Artificial Sequence
  Peptide Derived from Human Papillomavirus
WLLVLVLL

SEQ ID NO: 6620 - protein, 9 aa, Artificial Sequence
  Peptide Derived from Human Papillomavirus
WLLVLVLLL

SEQ ID NO: 6621 - protein, 11 aa, Artificial Sequence
  Peptide Derived from Human Papillomavirus
WLLVLVLLLWV

SEQ ID NO: 6622 - protein, 8 aa, Artificial Sequence
  Peptide Derived from Human Papillomavirus
WVFVGSPL

SEQ ID NO: 6623 - protein, 10 aa, Artificial Sequence
  Peptide Derived from Human Papillomavirus
WVFVGSPLKI

SEQ ID NO: 6624 - protein, 8 aa, Artificial Sequence
  Peptide Derived from Human Papillomavirus
YAWLLVLV

SEQ ID NO: 6625 - protein, 9 aa, Artificial Sequence
  Peptide Derived from Human Papillomavirus
YAWLLVLVL

SEQ ID NO: 6626 - protein, 10 aa, Artificial Sequence
  Peptide Derived from Human Papillomavirus
YAWLLVLVLL

SEQ ID NO: 6627 - protein, 11 aa, Artificial Sequence
  Peptide Derived from Human Papillomavirus
YAWLLVLVLLL

SEQ ID NO: 6628 - protein, 9 aa, Artificial Sequence
  Peptide Derived from Human Papillomavirus
YLLFLYLPM

SEQ ID NO: 6629 - protein, 10 aa, Artificial Sequence
  Peptide Derived from Human Papillomavirus
YLLFLYLPMM

SEQ ID NO: 6630 - protein, 11 aa, Artificial Sequence
  Peptide Derived from Human Papillomavirus
YLPMMCINFHA

SEQ ID NO: 6631 - protein, 11 aa, Artificial Sequence
  Peptide Derived from Human Papillomavirus
AACWRSRRRET

SEQ ID NO: 6632 - protein, 9 aa, Artificial Sequence
  Peptide Derived from Human Papillomavirus
ALETTIHNI

SEQ ID NO: 6633 - protein, 11 aa, Artificial Sequence
  Peptide Derived from Human Papillomavirus
ALETTIHNIEL

SEQ ID NO: 6634 - protein, 8 aa, Artificial Sequence
  Peptide Derived from Human Papillomavirus
CIICQRPL

SEQ ID NO: 6635 - protein, 8 aa, Artificial Sequence
  Peptide Derived from Human Papillomavirus
CLRFLSKI

SEQ ID NO: 6636 - protein, 8 aa, Artificial Sequence
  Peptide Derived from Human Papillomavirus
CQALETTI

SEQ ID NO: 6637 - protein, 11 aa, Artificial Sequence
  Peptide Derived from Human Papillomavirus
CQALETTIHNI

SEQ ID NO: 6638 - protein, 8 aa, Artificial Sequence
  Peptide Derived from Human Papillomavirus
CVECKKPL

SEQ ID NO: 6639 - protein, 8 aa, Artificial Sequence
  Peptide Derived from Human Papillomavirus
DLCQALET

SEQ ID NO: 6640 - protein, 9 aa, Artificial Sequence
  Peptide Derived from Human Papillomavirus
DLCQALETT

SEQ ID NO: 6641 - protein, 10 aa, Artificial Sequence
  Peptide Derived from Human Papillomavirus
DLCQALETTI

SEQ ID NO: 6642 - protein, 9 aa, Artificial Sequence
  Peptide Derived from Human Papillomavirus
DLNKRFHNI

SEQ ID NO: 6643 - protein, 8 aa, Artificial Sequence
  Peptide Derived from Human Papillomavirus
DTEEKPRT

SEQ ID NO: 6644 - protein, 9 aa, Artificial Sequence
  Peptide Derived from Human Papillomavirus
DTEEKPRTL

SEQ ID NO: 6645 - protein, 8 aa, Artificial Sequence
  Peptide Derived from Human Papillomavirus
EILIRCII

SEQ ID NO: 6646 - protein, 11 aa, Artificial Sequence
  Peptide Derived from Human Papillomavirus
ELQCVECKKPL

SEQ ID NO: 6647 - protein, 8 aa, Artificial Sequence
  Peptide Derived from Human Papillomavirus
EQTVKKPL

SEQ ID NO: 6648 - protein, 11 aa, Artificial Sequence
  Peptide Derived from Human Papillomavirus
EQTVKKPLNEI

SEQ ID NO: 6649 - protein, 9 aa, Artificial Sequence
  Peptide Derived from Human Papillomavirus
ETTIHNIEL

SEQ ID NO: 6650 - protein, 8 aa, Artificial Sequence
  Peptide Derived from Human Papillomavirus
EVYDFAFA

SEQ ID NO: 6651 - protein, 10 aa, Artificial Sequence
  Peptide Derived from Human Papillomavirus
EVYDFAFADL

SEQ ID NO: 6652 - protein, 11 aa, Artificial Sequence
  Peptide Derived from Human Papillomavirus
EVYDFAFADLT

SEQ ID NO: 6653 - protein, 8 aa, Artificial Sequence
  Peptide Derived from Human Papillomavirus
FAFADLTV

SEQ ID NO: 6654 - protein, 9 aa, Artificial Sequence
  Peptide Derived from Human Papillomavirus
FAFADLTVV

SEQ ID NO: 6655 - protein, 10 aa, Artificial Sequence
  Peptide Derived from Human Papillomavirus
FQDTEEKPRT

SEQ ID NO: 6656 - protein, 11 aa, Artificial Sequence
  Peptide Derived from Human Papillomavirus
FQDTEEKPRTL

SEQ ID NO: 6657 - protein, 10 aa, Artificial Sequence
  Peptide Derived from Human Papillomavirus
GICKLCLRFL

SEQ ID NO: 6658 - protein, 11 aa, Artificial Sequence
  Peptide Derived from Human Papillomavirus
HVDLNKRFHNI

SEQ ID NO: 6659 - protein, 10 aa, Artificial Sequence
  Peptide Derived from Human Papillomavirus
KLCLRFLSKI

SEQ ID NO: 6660 - protein, 11 aa, Artificial Sequence
  Peptide Derived from Human Papillomavirus
LIRCIICQRPL

SEQ ID NO: 6661 - protein, 10 aa, Artificial Sequence
  Peptide Derived from Human Papillomavirus
LQCVECKKPL

SEQ ID NO: 6662 - protein, 10 aa, Artificial Sequence
  Peptide Derived from Human Papillomavirus
LQRSEVYDFA

SEQ ID NO: 6663 - protein, 11 aa, Artificial Sequence
  Peptide Derived from Human Papillomavirus
NISGRWAGRCA

SEQ ID NO: 6664 - protein, 11 aa, Artificial Sequence
  Peptide Derived from Human Papillomavirus
NTLEQTVKKPL

SEQ ID NO: 6665 - protein, 11 aa, Artificial Sequence
  Peptide Derived from Human Papillomavirus
PLCPQEKKRHV

SEQ ID NO: 6666 - protein, 10 aa, Artificial Sequence
  Peptide Derived from Human Papillomavirus
PLNEILIRCI

SEQ ID NO: 6667 - protein, 11 aa, Artificial Sequence
  Peptide Derived from Human Papillomavirus
PLNEILIRCII

SEQ ID NO: 6668 - protein, 11 aa, Artificial Sequence
  Peptide Derived from Human Papillomavirus
PLQRSEVYDFA

SEQ ID NO: 6669 - protein, 8 aa, Artificial Sequence
  Peptide Derived from Human Papillomavirus
PQEKKRHV

SEQ ID NO: 6670 - protein, 10 aa, Artificial Sequence
  Peptide Derived from Human Papillomavirus
PQEKKRHVDL

SEQ ID NO: 6671 - protein, 10 aa, Artificial Sequence
  Peptide Derived from Human Papillomavirus
QALETTIHNI

SEQ ID NO: 6672 - protein, 10 aa, Artificial Sequence
  Peptide Derived from Human Papillomavirus
QTVKKPLNEI

SEQ ID NO: 6673 - protein, 11 aa, Artificial Sequence
  Peptide Derived from Human Papillomavirus
QTVKKPLNEIL

SEQ ID NO: 6674 - protein, 9 aa, Artificial Sequence
  Peptide Derived from Human Papillomavirus
RTLHDLCQA

SEQ ID NO: 6675 - protein, 10 aa, Artificial Sequence
  Peptide Derived from Human Papillomavirus
RTLHDLCQAL

SEQ ID NO: 6676 - protein, 10 aa, Artificial Sequence
  Peptide Derived from Human Papillomavirus
SVYGNTLEQT

SEQ ID NO: 6677 - protein, 11 aa, Artificial Sequence
  Peptide Derived from Human Papillomavirus
SVYGNTLEQTV

SEQ ID NO: 6678 - protein, 10 aa, Artificial Sequence
  Peptide Derived from Human Papillomavirus
TIHNIELQCV

SEQ ID NO: 6679 - protein, 10 aa, Artificial Sequence
  Peptide Derived from Human Papillomavirus
TLEQTVKKPL

SEQ ID NO: 6680 - protein, 8 aa, Artificial Sequence
  Peptide Derived from Human Papillomavirus
TLHDLCQA

SEQ ID NO: 6681 - protein, 9 aa, Artificial Sequence
  Peptide Derived from Human Papillomavirus
TLHDLCQAL

SEQ ID NO: 6682 - protein, 11 aa, Artificial Sequence
  Peptide Derived from Human Papillomavirus
TLHDLCQALET

SEQ ID NO: 6683 - protein, 8 aa, Artificial Sequence
  Peptide Derived from Human Papillomavirus
TTIHNIEL

SEQ ID NO: 6684 - protein, 11 aa, Artificial Sequence
  Peptide Derived from Human Papillomavirus
TTIHNIELQCV

SEQ ID NO: 6685 - protein, 9 aa, Artificial Sequence
  Peptide Derived from Human Papillomavirus
TVKKPLNEI

SEQ ID NO: 6686 - protein, 10 aa, Artificial Sequence
  Peptide Derived from Human Papillomavirus
TVKKPLNEIL

SEQ ID NO: 6687 - protein, 11 aa, Artificial Sequence
  Peptide Derived from Human Papillomavirus
TVKKPLNEILI

SEQ ID NO: 6688 - protein, 11 aa, Artificial Sequence
  Peptide Derived from Human Papillomavirus
VVYREGNPFGI

SEQ ID NO: 6689 - protein, 10 aa, Artificial Sequence
  Peptide Derived from Human Papillomavirus
AQPATADYYI

SEQ ID NO: 6690 - protein, 11 aa, Artificial Sequence
  Peptide Derived from Human Papillomavirus
AQPATADYYIV

SEQ ID NO: 6691 - protein, 8 aa, Artificial Sequence
  Peptide Derived from Human Papillomavirus
ATADYYIV

SEQ ID NO: 6692 - protein, 9 aa, Artificial Sequence
  Peptide Derived from Human Papillomavirus
ATADYYIVT

SEQ ID NO: 6693 - protein, 9 aa, Artificial Sequence
  Peptide Derived from Human Papillomavirus
CVNSTASDL

SEQ ID NO: 6694 - protein, 11 aa, Artificial Sequence
  Peptide Derived from Human Papillomavirus
CVNSTASDLRT

SEQ ID NO: 6695 - protein, 8 aa, Artificial Sequence
  Peptide Derived from Human Papillomavirus
DLRTIQQL

SEQ ID NO: 6696 - protein, 9 aa, Artificial Sequence
  Peptide Derived from Human Papillomavirus
DLRTIQQLL

SEQ ID NO: 6697 - protein, 10 aa, Artificial Sequence
  Peptide Derived from Human Papillomavirus
DLRTIQQLLM

SEQ ID NO: 6698 - protein, 8 aa, Artificial Sequence
  Peptide Derived from Human Papillomavirus
DLYCYEQL

SEQ ID NO: 6699 - protein, 9 aa, Artificial Sequence
  Peptide Derived from Human Papillomavirus
DLYPEPTDL

SEQ ID NO: 6700 - protein, 9 aa, Artificial Sequence
  Peptide Derived from Human Papillomavirus
GLDRPDGQA

SEQ ID NO: 6701 - protein, 8 aa, Artificial Sequence
  Peptide Derived from Human Papillomavirus
GQAQPATA

SEQ ID NO: 6702 - protein, 9 aa, Artificial Sequence
  Peptide Derived from Human Papillomavirus
GTVNIVCPT

SEQ ID NO: 6703 - protein, 11 aa, Artificial Sequence
  Peptide Derived from Human Papillomavirus
GTVNIVCPTCA

SEQ ID NO: 6704 - protein, 9 aa, Artificial Sequence
  Peptide Derived from Human Papillomavirus
HTCNTTVRL

SEQ ID NO: 6705 - protein, 11 aa, Artificial Sequence
  Peptide Derived from Human Papillomavirus
HTCNTTVRLCV

SEQ ID NO: 6706 - protein, 8 aa, Artificial Sequence
  Peptide Derived from Human Papillomavirus
IQQLLMGT

SEQ ID NO: 6707 - protein, 9 aa, Artificial Sequence
  Peptide Derived from Human Papillomavirus
IQQLLMGTV

SEQ ID NO: 6708 - protein, 11 aa, Artificial Sequence
  Peptide Derived from Human Papillomavirus
IQQLLMGTVNI

SEQ ID NO: 6709 - protein, 10 aa, Artificial Sequence
  Peptide Derived from Human Papillomavirus
IVTCCHTCNT

SEQ ID NO: 6710 - protein, 11 aa, Artificial Sequence
  Peptide Derived from Human Papillomavirus
IVTCCHTCNTT

SEQ ID NO: 6711 - protein, 8 aa, Artificial Sequence
  Peptide Derived from Human Papillomavirus
LLMGTVNI

SEQ ID NO: 6712 - protein, 9 aa, Artificial Sequence
  Peptide Derived from Human Papillomavirus
LLMGTVNIV

SEQ ID NO: 6713 - protein, 8 aa, Artificial Sequence
  Peptide Derived from Human Papillomavirus
LMGTVNIV

SEQ ID NO: 6714 - protein, 11 aa, Artificial Sequence
  Peptide Derived from Human Papillomavirus
LMGTVNIVCPT

SEQ ID NO: 6715 - protein, 8 aa, Artificial Sequence
  Peptide Derived from Human Papillomavirus
NIVCPTCA

SEQ ID NO: 6716 - protein, 8 aa, Artificial Sequence
  Peptide Derived from Human Papillomavirus
NTTVRLCV

SEQ ID NO: 6717 - protein, 11 aa, Artificial Sequence
  Peptide Derived from Human Papillomavirus
NTTVRLCVNST

SEQ ID NO: 6718 - protein, 8 aa, Artificial Sequence
  Peptide Derived from Human Papillomavirus
PATADYYI

SEQ ID NO: 6719 - protein, 9 aa, Artificial Sequence
  Peptide Derived from Human Papillomavirus
PATADYYIV

SEQ ID NO: 6720 - protein, 10 aa, Artificial Sequence
  Peptide Derived from Human Papillomavirus
PATADYYIVT

SEQ ID NO: 6721 - protein, 10 aa, Artificial Sequence
  Peptide Derived from Human Papillomavirus
PTDLYCYEQL

SEQ ID NO: 6722 - protein, 8 aa, Artificial Sequence
  Peptide Derived from Human Papillomavirus
PTLKEYVL

SEQ ID NO: 6723 - protein, 10 aa, Artificial Sequence
  Peptide Derived from Human Papillomavirus
PTLKEYVLDL

SEQ ID NO: 6724 - protein, 11 aa, Artificial Sequence
  Peptide Derived from Human Papillomavirus
QAQPATADYYI

SEQ ID NO: 6725 - protein, 9 aa, Artificial Sequence
  Peptide Derived from Human Papillomavirus
QLLMGTVNI

SEQ ID NO: 6726 - protein, 10 aa, Artificial Sequence
  Peptide Derived from Human Papillomavirus
QLLMGTVNIV

SEQ ID NO: 6727 - protein, 8 aa, Artificial Sequence
  Peptide Derived from Human Papillomavirus
QQLLMGTV

SEQ ID NO: 6728 - protein, 10 aa, Artificial Sequence
  Peptide Derived from Human Papillomavirus
QQLLMGTVNI

SEQ ID NO: 6729 - protein, 11 aa, Artificial Sequence
  Peptide Derived from Human Papillomavirus
QQLLMGTVNIV

SEQ ID NO: 6730 - protein, 8 aa, Artificial Sequence
  Peptide Derived from Human Papillomavirus
RLCVNSTA

SEQ ID NO: 6731 - protein, 11 aa, Artificial Sequence
  Peptide Derived from Human Papillomavirus
RLCVNSTASDL

SEQ ID NO: 6732 - protein, 8 aa, Artificial Sequence
  Peptide Derived from Human Papillomavirus
RTIQQLLM

SEQ ID NO: 6733 - protein, 10 aa, Artificial Sequence
  Peptide Derived from Human Papillomavirus
RTIQQLLMGT

SEQ ID NO: 6734 - protein, 11 aa, Artificial Sequence
  Peptide Derived from Human Papillomavirus
RTIQQLLMGTV

SEQ ID NO: 6735 - protein, 8 aa, Artificial Sequence
  Peptide Derived from Human Papillomavirus
STASDLRT

SEQ ID NO: 6736 - protein, 9 aa, Artificial Sequence
  Peptide Derived from Human Papillomavirus
STASDLRTI

SEQ ID NO: 6737 - protein, 8 aa, Artificial Sequence
  Peptide Derived from Human Papillomavirus
TADYYIVT

SEQ ID NO: 6738 - protein, 8 aa, Artificial Sequence
  Peptide Derived from Human Papillomavirus
TASDLRTI

SEQ ID NO: 6739 - protein, 11 aa, Artificial Sequence
  Peptide Derived from Human Papillomavirus
TASDLRTIQQL

SEQ ID NO: 6740 - protein, 9 aa, Artificial Sequence
  Peptide Derived from Human Papillomavirus
TIQQLLMGT

SEQ ID NO: 6741 - protein, 10 aa, Artificial Sequence
  Peptide Derived from Human Papillomavirus
TIQQLLMGTV

SEQ ID NO: 6742 - protein, 9 aa, Artificial Sequence
  Peptide Derived from Human Papillomavirus
TLKEYVLDL

SEQ ID NO: 6743 - protein, 10 aa, Artificial Sequence
  Peptide Derived from Human Papillomavirus
TTVRLCVNST

SEQ ID NO: 6744 - protein, 11 aa, Artificial Sequence
  Peptide Derived from Human Papillomavirus
TTVRLCVNSTA

SEQ ID NO: 6745 - protein, 8 aa, Artificial Sequence
  Peptide Derived from Human Papillomavirus
TVNIVCPT

SEQ ID NO: 6746 - protein, 10 aa, Artificial Sequence
  Peptide Derived from Human Papillomavirus
TVNIVCPTCA

SEQ ID NO: 6747 - protein, 9 aa, Artificial Sequence
  Peptide Derived from Human Papillomavirus
TVRLCVNST

SEQ ID NO: 6748 - protein, 10 aa, Artificial Sequence
  Peptide Derived from Human Papillomavirus
TVRLCVNSTA

SEQ ID NO: 6749 - protein, 9 aa, Artificial Sequence
  Peptide Derived from Human Papillomavirus
VLDLYPEPT

SEQ ID NO: 6750 - protein, 11 aa, Artificial Sequence
  Peptide Derived from Human Papillomavirus
VLDLYPEPTDL

SEQ ID NO: 6751 - protein, 9 aa, Artificial Sequence
  Peptide Derived from Human Papillomavirus
VTCCHTCNT

SEQ ID NO: 6752 - protein, 10 aa, Artificial Sequence
  Peptide Derived from Human Papillomavirus
VTCCHTCNTT

SEQ ID NO: 6753 - protein, 11 aa, Artificial Sequence
  Peptide Derived from Human Papillomavirus
VTCCHTCNTTV

SEQ ID NO: 6754 - protein, 8 aa, Artificial Sequence
  Peptide Derived from Human Papillomavirus
YIVTCCHT

SEQ ID NO: 6755 - protein, 11 aa, Artificial Sequence
  Peptide Derived from Human Papillomavirus
YIVTCCHTCNT

SEQ ID NO: 6756 - protein, 10 aa, Artificial Sequence
  Peptide Derived from Human Papillomavirus
YVLDLYPEPT

SEQ ID NO: 6757 - protein, 10 aa, Artificial Sequence
  Peptide Derived from Human Papillomavirus
AAPANDCPPL

SEQ ID NO: 6758 - protein, 8 aa, Artificial Sequence
  Peptide Derived from Human Papillomavirus
AAPTSTRT

SEQ ID NO: 6759 - protein, 11 aa, Artificial Sequence
  Peptide Derived from Human Papillomavirus
AAPTSTRTSSA

SEQ ID NO: 6760 - protein, 8 aa, Artificial Sequence
  Peptide Derived from Human Papillomavirus
AITCQKTV

SEQ ID NO: 6761 - protein, 8 aa, Artificial Sequence
  Peptide Derived from Human Papillomavirus
AQGHNNGI

SEQ ID NO: 6762 - protein, 8 aa, Artificial Sequence
  Peptide Derived from Human Papillomavirus
ATVYLPPV

SEQ ID NO: 6763 - protein, 10 aa, Artificial Sequence
  Peptide Derived from Human Papillomavirus
ATVYLPPVPV

SEQ ID NO: 6764 - protein, 9 aa, Artificial Sequence
  Peptide Derived from Human Papillomavirus
AVGHPYFSI

SEQ ID NO: 6765 - protein, 8 aa, Artificial Sequence
  Peptide Derived from Human Papillomavirus
AVPDDLYI

SEQ ID NO: 6766 - protein, 9 aa, Artificial Sequence
  Peptide Derived from Human Papillomavirus
CLLGCKPPT

SEQ ID NO: 6767 - protein, 9 aa, Artificial Sequence
  Peptide Derived from Human Papillomavirus
CLSMDYKQT

SEQ ID NO: 6768 - protein, 11 aa, Artificial Sequence
  Peptide Derived from Human Papillomavirus
CLSMDYKQTQL

SEQ ID NO: 6769 - protein, 9 aa, Artificial Sequence
  Peptide Derived from Human Papillomavirus
CMDFKTLQA

SEQ ID NO: 6770 - protein, 9 aa, Artificial Sequence
  Peptide Derived from Human Papillomavirus
CTQVTSDST

SEQ ID NO: 6771 - protein, 10 aa, Artificial Sequence
  Peptide Derived from Human Papillomavirus
DILEDWQFGL

SEQ ID NO: 6772 - protein, 11 aa, Artificial Sequence
  Peptide Derived from Human Papillomavirus
DILEDWQFGLT

SEQ ID NO: 6773 - protein, 8 aa, Artificial Sequence
  Peptide Derived from Human Papillomavirus
DLKEKFSA

SEQ ID NO: 6774 - protein, 10 aa, Artificial Sequence
  Peptide Derived from Human Papillomavirus
DLKEKFSADL

SEQ ID NO: 6775 - protein, 8 aa, Artificial Sequence
  Peptide Derived from Human Papillomavirus
DLQFVFQL

SEQ ID NO: 6776 - protein, 11 aa, Artificial Sequence
  Peptide Derived from Human Papillomavirus
DLQFVFQLCKV

SEQ ID NO: 6777 - protein, 9 aa, Artificial Sequence
  Peptide Derived from Human Papillomavirus
DLYIKGSGT

SEQ ID NO: 6778 - protein, 10 aa, Artificial Sequence
  Peptide Derived from Human Papillomavirus
DLYIKGSGTT

SEQ ID NO: 6779 - protein, 11 aa, Artificial Sequence
  Peptide Derived from Human Papillomavirus
DLYIKGSGTTA

SEQ ID NO: 6780 - protein, 10 aa, Artificial Sequence
  Peptide Derived from Human Papillomavirus
DMVDTGFGCM

SEQ ID NO: 6781 - protein, 10 aa, Artificial Sequence
  Peptide Derived from Human Papillomavirus
DQFPLGRKFL

SEQ ID NO: 6782 - protein, 11 aa, Artificial Sequence
  Peptide Derived from Human Papillomavirus
DQFPLGRKFLL

SEQ ID NO: 6783 - protein, 11 aa, Artificial Sequence
  Peptide Derived from Human Papillomavirus
DTGFGCMDFKT

SEQ ID NO: 6784 - protein, 8 aa, Artificial Sequence
  Peptide Derived from Human Papillomavirus
DTQRLVWA

SEQ ID NO: 6785 - protein, 10 aa, Artificial Sequence
  Peptide Derived from Human Papillomavirus
DTQRLVWACV

SEQ ID NO: 6786 - protein, 9 aa, Artificial Sequence
  Peptide Derived from Human Papillomavirus
DTSFYNPDT

SEQ ID NO: 6787 - protein, 8 aa, Artificial Sequence
  Peptide Derived from Human Papillomavirus
DTTRSTNM

SEQ ID NO: 6788 - protein, 9 aa, Artificial Sequence
  Peptide Derived from Human Papillomavirus
DTTRSTNMT

SEQ ID NO: 6789 - protein, 10 aa, Artificial Sequence
  Peptide Derived from Human Papillomavirus
DTTRSTNMTL

SEQ ID NO: 6790 - protein, 10 aa, Artificial Sequence
  Peptide Derived from Human Papillomavirus
DTYRFVTSQA

SEQ ID NO: 6791 - protein, 11 aa, Artificial Sequence
  Peptide Derived from Human Papillomavirus
DTYRFVTSQAI

SEQ ID NO: 6792 - protein, 10 aa, Artificial Sequence
  Peptide Derived from Human Papillomavirus
DVPIDICGST

SEQ ID NO: 6793 - protein, 9 aa, Artificial Sequence
  Peptide Derived from Human Papillomavirus
EATVYLPPV

SEQ ID NO: 6794 - protein, 11 aa, Artificial Sequence
  Peptide Derived from Human Papillomavirus
EATVYLPPVPV

SEQ ID NO: 6795 - protein, 9 aa, Artificial Sequence
  Peptide Derived from Human Papillomavirus
EAVPDDLYI

SEQ ID NO: 6796 - protein, 8 aa, Artificial Sequence
  Peptide Derived from Human Papillomavirus
EIGRGQPL

SEQ ID NO: 6797 - protein, 10 aa, Artificial Sequence
  Peptide Derived from Human Papillomavirus
EIGRGQPLGV

SEQ ID NO: 6798 - protein, 10 aa, Artificial Sequence
  Peptide Derived from Human Papillomavirus
EVDLKEKFSA

SEQ ID NO: 6799 - protein, 8 aa, Artificial Sequence
  Peptide Derived from Human Papillomavirus
EVMTYIHA

SEQ ID NO: 6800 - protein, 9 aa, Artificial Sequence
  Peptide Derived from Human Papillomavirus
EVMTYIHAM

SEQ ID NO: 6801 - protein, 9 aa, Artificial Sequence
  Peptide Derived from Human Papillomavirus
FLLQAGLKA

SEQ ID NO: 6802 - protein, 9 aa, Artificial Sequence
  Peptide Derived from Human Papillomavirus
FLRREQMFV

SEQ ID NO: 6803 - protein, 8 aa, Artificial Sequence
  Peptide Derived from Human Papillomavirus
FQLCKVTL

SEQ ID NO: 6804 - protein, 9 aa, Artificial Sequence
  Peptide Derived from Human Papillomavirus
FQLCKVTLT

SEQ ID NO: 6805 - protein, 10 aa, Artificial Sequence
  Peptide Derived from Human Papillomavirus
FQLCKVTLTA

SEQ ID NO: 6806 - protein, 8 aa, Artificial Sequence
  Peptide Derived from Human Papillomavirus
FVFQLCKV

SEQ ID NO: 6807 - protein, 9 aa, Artificial Sequence
  Peptide Derived from Human Papillomavirus
FVFQLCKVT

SEQ ID NO: 6808 - protein, 10 aa, Artificial Sequence
  Peptide Derived from Human Papillomavirus
FVFQLCKVTL

SEQ ID NO: 6809 - protein, 11 aa, Artificial Sequence
  Peptide Derived from Human Papillomavirus
FVFQLCKVTLT

SEQ ID NO: 6810 - protein, 9 aa, Artificial Sequence
  Peptide Derived from Human Papillomavirus
FVRHFFNRA

SEQ ID NO: 6811 - protein, 11 aa, Artificial Sequence
  Peptide Derived from Human Papillomavirus
FVRHFFNRAGT

SEQ ID NO: 6812 - protein, 8 aa, Artificial Sequence
  Peptide Derived from Human Papillomavirus
FVTSQAIT

SEQ ID NO: 6813 - protein, 8 aa, Artificial Sequence
  Peptide Derived from Human Papillomavirus
FVTVVDTT

SEQ ID NO: 6814 - protein, 11 aa, Artificial Sequence
  Peptide Derived from Human Papillomavirus
FVTVVDTTRST

SEQ ID NO: 6815 - protein, 8 aa, Artificial Sequence
  Peptide Derived from Human Papillomavirus
GADNRECL

SEQ ID NO: 6816 - protein, 10 aa, Artificial Sequence
  Peptide Derived from Human Papillomavirus
GADNRECLSM

SEQ ID NO: 6817 - protein, 8 aa, Artificial Sequence
  Peptide Derived from Human Papillomavirus
GICWGNQV

SEQ ID NO: 6818 - protein, 10 aa, Artificial Sequence
  Peptide Derived from Human Papillomavirus
GICWGNQVFV

SEQ ID NO: 6819 - protein, 11 aa, Artificial Sequence
  Peptide Derived from Human Papillomavirus
GICWGNQVFVT

SEQ ID NO: 6820 - protein, 8 aa, Artificial Sequence
  Peptide Derived from Human Papillomavirus
GISGHPLL

SEQ ID NO: 6821 - protein, 10 aa, Artificial Sequence
  Peptide Derived from Human Papillomavirus
GLEIGRGQPL

SEQ ID NO: 6822 - protein, 8 aa, Artificial Sequence
  Peptide Derived from Human Papillomavirus
GLKAKPKL

SEQ ID NO: 6823 - protein, 11 aa, Artificial Sequence
  Peptide Derived from Human Papillomavirus
GLKAKPKLKRA

SEQ ID NO: 6824 - protein, 9 aa, Artificial Sequence
  Peptide Derived from Human Papillomavirus
GLQYRVFRV

SEQ ID NO: 6825 - protein, 11 aa, Artificial Sequence
  Peptide Derived from Human Papillomavirus
GLQYRVFRVRL

SEQ ID NO: 6826 - protein, 8 aa, Artificial Sequence
  Peptide Derived from Human Papillomavirus
GLTPPPSA

SEQ ID NO: 6827 - protein, 10 aa, Artificial Sequence
  Peptide Derived from Human Papillomavirus
GLTPPPSASL

SEQ ID NO: 6828 - protein, 11 aa, Artificial Sequence
  Peptide Derived from Human Papillomavirus
GQPGADNRECL

SEQ ID NO: 6829 - protein, 8 aa, Artificial Sequence
  Peptide Derived from Human Papillomavirus
GQPLGVGI

SEQ ID NO: 6830 - protein, 11 aa, Artificial Sequence
  Peptide Derived from Human Papillomavirus
GTLGEAVPDDL

SEQ ID NO: 6831 - protein, 10 aa, Artificial Sequence
  Peptide Derived from Human Papillomavirus
GTTASIQSSA

SEQ ID NO: 6832 - protein, 8 aa, Artificial Sequence
  Peptide Derived from Human Papillomavirus
GVACTNAA

SEQ ID NO: 6833 - protein, 10 aa, Artificial Sequence
  Peptide Derived from Human Papillomavirus
GVACTNAAPA

SEQ ID NO: 6834 - protein, 9 aa, Artificial Sequence
  Peptide Derived from Human Papillomavirus
GVGISGHPL

SEQ ID NO: 6835 - protein, 10 aa, Artificial Sequence
  Peptide Derived from Human Papillomavirus
GVGISGHPLL

SEQ ID NO: 6836 - protein, 8 aa, Artificial Sequence
  Peptide Derived from Human Papillomavirus
HAMNPDIL

SEQ ID NO: 6837 - protein, 10 aa, Artificial Sequence
  Peptide Derived from Human Papillomavirus
HVEEYDLQFV

SEQ ID NO: 6838 - protein, 8 aa, Artificial Sequence
  Peptide Derived from Human Papillomavirus
IIEDGDMV

SEQ ID NO: 6839 - protein, 10 aa, Artificial Sequence
  Peptide Derived from Human Papillomavirus
IIEDGDMVDT

SEQ ID NO: 6840 - protein, 9 aa, Artificial Sequence
  Peptide Derived from Human Papillomavirus
ILEDWQFGL

SEQ ID NO: 6841 - protein, 10 aa, Artificial Sequence
  Peptide Derived from Human Papillomavirus
ILEDWQFGLT

SEQ ID NO: 6842 - protein, 9 aa, Artificial Sequence
  Peptide Derived from Human Papillomavirus
IQSSAFFPT

SEQ ID NO: 6843 - protein, 9 aa, Artificial Sequence
  Peptide Derived from Human Papillomavirus
KAKPKLKRA

SEQ ID NO: 6844 - protein, 10 aa, Artificial Sequence
  Peptide Derived from Human Papillomavirus
KAKPKLKRAA

SEQ ID NO: 6845 - protein, 8 aa, Artificial Sequence
  Peptide Derived from Human Papillomavirus
KLKRAAPT

SEQ ID NO: 6846 - protein, 10 aa, Artificial Sequence
  Peptide Derived from Human Papillomavirus
KLKRAAPTST

SEQ ID NO: 6847 - protein, 10 aa, Artificial Sequence
  Peptide Derived from Human Papillomavirus
KLLVPKVSGL

SEQ ID NO: 6848 - protein, 11 aa, Artificial Sequence
  Peptide Derived from Human Papillomavirus
KMTSEPYGDSL

SEQ ID NO: 6849 - protein, 8 aa, Artificial Sequence
  Peptide Derived from Human Papillomavirus
KQTQLCLL

SEQ ID NO: 6850 - protein, 10 aa, Artificial Sequence
  Peptide Derived from Human Papillomavirus
KTLQANKSDV

SEQ ID NO: 6851 - protein, 9 aa, Artificial Sequence
  Peptide Derived from Human Papillomavirus
KVSGLQYRV

SEQ ID NO: 6852 - protein, 8 aa, Artificial Sequence
  Peptide Derived from Human Papillomavirus
KVTLTAEV

SEQ ID NO: 6853 - protein, 9 aa, Artificial Sequence
  Peptide Derived from Human Papillomavirus
KVTLTAEVM

SEQ ID NO: 6854 - protein, 10 aa, Artificial Sequence
  Peptide Derived from Human Papillomavirus
KVTLTAEVMT

SEQ ID NO: 6855 - protein, 9 aa, Artificial Sequence
  Peptide Derived from Human Papillomavirus
KVVSTDEYV

SEQ ID NO: 6856 - protein, 10 aa, Artificial Sequence
  Peptide Derived from Human Papillomavirus
LAVGHPYFSI

SEQ ID NO: 6857 - protein, 11 aa, Artificial Sequence
  Peptide Derived from Human Papillomavirus
LINTIIEDGDM

SEQ ID NO: 6858 - protein, 11 aa, Artificial Sequence
  Peptide Derived from Human Papillomavirus
LLAVGHPYFSI

SEQ ID NO: 6859 - protein, 8 aa, Artificial Sequence
  Peptide Derived from Human Papillomavirus
LLGCKPPT

SEQ ID NO: 6860 - protein, 8 aa, Artificial Sequence
  Peptide Derived from Human Papillomavirus
LLNKFDDT

SEQ ID NO: 6861 - protein, 10 aa, Artificial Sequence
  Peptide Derived from Human Papillomavirus
LLNKFDDTET

SEQ ID NO: 6862 - protein, 8 aa, Artificial Sequence
  Peptide Derived from Human Papillomavirus
LLQAGLKA

SEQ ID NO: 6863 - protein, 9 aa, Artificial Sequence
  Peptide Derived from Human Papillomavirus
LLVPKVSGL

SEQ ID NO: 6864 - protein, 11 aa, Artificial Sequence
  Peptide Derived from Human Papillomavirus
LQAGLKAKPKL

SEQ ID NO: 6865 - protein, 8 aa, Artificial Sequence
  Peptide Derived from Human Papillomavirus
LQANKSDV

SEQ ID NO: 6866 - protein, 10 aa, Artificial Sequence
  Peptide Derived from Human Papillomavirus
LQANKSDVPI

SEQ ID NO: 6867 - protein, 8 aa, Artificial Sequence
  Peptide Derived from Human Papillomavirus
LQDTYRFV

SEQ ID NO: 6868 - protein, 9 aa, Artificial Sequence
  Peptide Derived from Human Papillomavirus
LQDTYRFVT

SEQ ID NO: 6869 - protein, 10 aa, Artificial Sequence
  Peptide Derived from Human Papillomavirus
LQFVFQLCKV

SEQ ID NO: 6870 - protein, 11 aa, Artificial Sequence
  Peptide Derived from Human Papillomavirus
LQFVFQLCKVT

SEQ ID NO: 6871 - protein, 11 aa, Artificial Sequence
  Peptide Derived from Human Papillomavirus
LQRAQGHNNGI

SEQ ID NO: 6872 - protein, 8 aa, Artificial Sequence
  Peptide Derived from Human Papillomavirus
LQYRVFRV

SEQ ID NO: 6873 - protein, 10 aa, Artificial Sequence
  Peptide Derived from Human Papillomavirus
LQYRVFRVRL

SEQ ID NO: 6874 - protein, 9 aa, Artificial Sequence
  Peptide Derived from Human Papillomavirus
LTAEVMTYI

SEQ ID NO: 6875 - protein, 11 aa, Artificial Sequence
  Peptide Derived from Human Papillomavirus
LTAEVMTYIHA

SEQ ID NO: 6876 - protein, 9 aa, Artificial Sequence
  Peptide Derived from Human Papillomavirus
LTPPPSASL

SEQ ID NO: 6877 - protein, 8 aa, Artificial Sequence
  Peptide Derived from Human Papillomavirus
LVPKVSGL

SEQ ID NO: 6878 - protein, 8 aa, Artificial Sequence
  Peptide Derived from Human Papillomavirus
LVWACVGL

SEQ ID NO: 6879 - protein, 10 aa, Artificial Sequence
  Peptide Derived from Human Papillomavirus
LVWACVGLEI

SEQ ID NO: 6880 - protein, 8 aa, Artificial Sequence
  Peptide Derived from Human Papillomavirus
MTLCTQVT

SEQ ID NO: 6881 - protein, 10 aa, Artificial Sequence
  Peptide Derived from Human Papillomavirus
MTSEPYGDSL

SEQ ID NO: 6882 - protein, 11 aa, Artificial Sequence
  Peptide Derived from Human Papillomavirus
MTYIHAMNPDI

SEQ ID NO: 6883 - protein, 9 aa, Artificial Sequence
  Peptide Derived from Human Papillomavirus
MVDTGFGCM

SEQ ID NO: 6884 - protein, 8 aa, Artificial Sequence
  Peptide Derived from Human Papillomavirus
MVTSESQL

SEQ ID NO: 6885 - protein, 11 aa, Artificial Sequence
  Peptide Derived from Human Papillomavirus
NAAPANDCPPL

SEQ ID NO: 6886 - protein, 10 aa, Artificial Sequence
  Peptide Derived from Human Papillomavirus
NAKKLLVPKV

SEQ ID NO: 6887 - protein, 8 aa, Artificial Sequence
  Peptide Derived from Human Papillomavirus
NMTLCTQV

SEQ ID NO: 6888 - protein, 9 aa, Artificial Sequence
  Peptide Derived from Human Papillomavirus
NMTLCTQVT

SEQ ID NO: 6889 - protein, 8 aa, Artificial Sequence
  Peptide Derived from Human Papillomavirus
NQVFVTVV

SEQ ID NO: 6890 - protein, 10 aa, Artificial Sequence
  Peptide Derived from Human Papillomavirus
NQVFVTVVDT

SEQ ID NO: 6891 - protein, 11 aa, Artificial Sequence
  Peptide Derived from Human Papillomavirus
NQVFVTVVDTT

SEQ ID NO: 6892 - protein, 9 aa, Artificial Sequence
  Peptide Derived from Human Papillomavirus
NTIIEDGDM

SEQ ID NO: 6893 - protein, 10 aa, Artificial Sequence
  Peptide Derived from Human Papillomavirus
NTIIEDGDMV

SEQ ID NO: 6894 - protein, 8 aa, Artificial Sequence
  Peptide Derived from Human Papillomavirus
PANDCPPL

SEQ ID NO: 6895 - protein, 10 aa, Artificial Sequence
  Peptide Derived from Human Papillomavirus
PANDCPPLEL

SEQ ID NO: 6896 - protein, 11 aa, Artificial Sequence
  Peptide Derived from Human Papillomavirus
PANDCPPLELI

SEQ ID NO: 6897 - protein, 8 aa, Artificial Sequence
  Peptide Derived from Human Papillomavirus
PIDICGST

SEQ ID NO: 6898 - protein, 8 aa, Artificial Sequence
  Peptide Derived from Human Papillomavirus
PLELINTI

SEQ ID NO: 6899 - protein, 9 aa, Artificial Sequence
  Peptide Derived from Human Papillomavirus
PLELINTII

SEQ ID NO: 6900 - protein, 10 aa, Artificial Sequence
  Peptide Derived from Human Papillomavirus
PLGKYTFWEV

SEQ ID NO: 6901 - protein, 8 aa, Artificial Sequence
  Peptide Derived from Human Papillomavirus
PLGRKFLL

SEQ ID NO: 6902 - protein, 10 aa, Artificial Sequence
  Peptide Derived from Human Papillomavirus
PLGRKFLLQA

SEQ ID NO: 6903 - protein, 11 aa, Artificial Sequence
  Peptide Derived from Human Papillomavirus
PLGVGISGHPL

SEQ ID NO: 6904 - protein, 9 aa, Artificial Sequence
  Peptide Derived from Human Papillomavirus
PLLNKFDDT

SEQ ID NO: 6905 - protein, 11 aa, Artificial Sequence
  Peptide Derived from Human Papillomavirus
PLLNKFDDTET

SEQ ID NO: 6906 - protein, 10 aa, Artificial Sequence
  Peptide Derived from Human Papillomavirus
PTGEHWGKGV

SEQ ID NO: 6907 - protein, 11 aa, Artificial Sequence
  Peptide Derived from Human Papillomavirus
PTGEHWGKGVA

SEQ ID NO: 6908 - protein, 8 aa, Artificial Sequence
  Peptide Derived from Human Papillomavirus
PTNAKKLL

SEQ ID NO: 6909 - protein, 9 aa, Artificial Sequence
  Peptide Derived from Human Papillomavirus
PTNAKKLLV

SEQ ID NO: 6910 - protein, 8 aa, Artificial Sequence
  Peptide Derived from Human Papillomavirus
PTPSGSMV

SEQ ID NO: 6911 - protein, 9 aa, Artificial Sequence
  Peptide Derived from Human Papillomavirus
PTPSGSMVT

SEQ ID NO: 6912 - protein, 9 aa, Artificial Sequence
  Peptide Derived from Human Papillomavirus
PTSTRTSSA

SEQ ID NO: 6913 - protein, 8 aa, Artificial Sequence
  Peptide Derived from Human Papillomavirus
PVPVSKVV

SEQ ID NO: 6914 - protein, 10 aa, Artificial Sequence
  Peptide Derived from Human Papillomavirus
PVPVSKVVST

SEQ ID NO: 6915 - protein, 8 aa, Artificial Sequence
  Peptide Derived from Human Papillomavirus
PVSKVVST

SEQ ID NO: 6916 - protein, 10 aa, Artificial Sequence
  Peptide Derived from Human Papillomavirus
QAGLKAKPKL

SEQ ID NO: 6917 - protein, 8 aa, Artificial Sequence
  Peptide Derived from Human Papillomavirus
QAITCQKT

SEQ ID NO: 6918 - protein, 9 aa, Artificial Sequence
  Peptide Derived from Human Papillomavirus
QAITCQKTV

SEQ ID NO: 6919 - protein, 9 aa, Artificial Sequence
  Peptide Derived from Human Papillomavirus
QANKSDVPI

SEQ ID NO: 6920 - protein, 11 aa, Artificial Sequence
  Peptide Derived from Human Papillomavirus
QANKSDVPIDI

SEQ ID NO: 6921 - protein, 8 aa, Artificial Sequence
  Peptide Derived from Human Papillomavirus
QLCKVTLT

SEQ ID NO: 6922 - protein, 9 aa, Artificial Sequence
  Peptide Derived from Human Papillomavirus
QLCKVTLTA

SEQ ID NO: 6923 - protein, 11 aa, Artificial Sequence
  Peptide Derived from Human Papillomavirus
QLCKVTLTAEV

SEQ ID NO: 6924 - protein, 11 aa, Artificial Sequence
  Peptide Derived from Human Papillomavirus
QLCLLGCKPPT

SEQ ID NO: 6925 - protein, 9 aa, Artificial Sequence
  Peptide Derived from Human Papillomavirus
QLFNKPYWL

SEQ ID NO: 6926 - protein, 11 aa, Artificial Sequence
  Peptide Derived from Human Papillomavirus
QMFVRHFFNRA

SEQ ID NO: 6927 - protein, 9 aa, Artificial Sequence
  Peptide Derived from Human Papillomavirus
QVFVTVVDT

SEQ ID NO: 6928 - protein, 10 aa, Artificial Sequence
  Peptide Derived from Human Papillomavirus
QVFVTVVDTT

SEQ ID NO: 6929 - protein, 9 aa, Artificial Sequence
  Peptide Derived from Human Papillomavirus
RAAPTSTRT

SEQ ID NO: 6930 - protein, 8 aa, Artificial Sequence
  Peptide Derived from Human Papillomavirus
RAGTLGEA

SEQ ID NO: 6931 - protein, 9 aa, Artificial Sequence
  Peptide Derived from Human Papillomavirus
RAGTLGEAV

SEQ ID NO: 6932 - protein, 9 aa, Artificial Sequence
  Peptide Derived from Human Papillomavirus
RAQGHNNGI

SEQ ID NO: 6933 - protein, 9 aa, Artificial Sequence
  Peptide Derived from Human Papillomavirus
RLVWACVGL

SEQ ID NO: 6934 - protein, 11 aa, Artificial Sequence
  Peptide Derived from Human Papillomavirus
RLVWACVGLEI

SEQ ID NO: 6935 - protein, 8 aa, Artificial Sequence
  Peptide Derived from Human Papillomavirus
RTSIYYYA

SEQ ID NO: 6936 - protein, 10 aa, Artificial Sequence
  Peptide Derived from Human Papillomavirus
RTSSAKRKKV

SEQ ID NO: 6937 - protein, 9 aa, Artificial Sequence
  Peptide Derived from Human Papillomavirus
SADLDQFPL

SEQ ID NO: 6938 - protein, 11 aa, Artificial Sequence
  Peptide Derived from Human Papillomavirus
SAFFPTPSGSM

SEQ ID NO: 6939 - protein, 11 aa, Artificial Sequence
  Peptide Derived from Human Papillomavirus
SASLQDTYRFV

SEQ ID NO: 6940 - protein, 8 aa, Artificial Sequence
  Peptide Derived from Human Papillomavirus
SIKNPTNA

SEQ ID NO: 6941 - protein, 11 aa, Artificial Sequence
  Peptide Derived from Human Papillomavirus
SIKNPTNAKKL

SEQ ID NO: 6942 - protein, 10 aa, Artificial Sequence
  Peptide Derived from Human Papillomavirus
SIQSSAFFPT

SEQ ID NO: 6943 - protein, 11 aa, Artificial Sequence
  Peptide Derived from Human Papillomavirus
SIYYYAGSSRL

SEQ ID NO: 6944 - protein, 11 aa, Artificial Sequence
  Peptide Derived from Human Papillomavirus
SLFFFLRREQM

SEQ ID NO: 6945 - protein, 9 aa, Artificial Sequence
  Peptide Derived from Human Papillomavirus
SLQDTYRFV

SEQ ID NO: 6946 - protein, 10 aa, Artificial Sequence
  Peptide Derived from Human Papillomavirus
SLQDTYRFVT

SEQ ID NO: 6947 - protein, 9 aa, Artificial Sequence
  Peptide Derived from Human Papillomavirus
SMDYKQTQL

SEQ ID NO: 6948 - protein, 11 aa, Artificial Sequence
  Peptide Derived from Human Papillomavirus
SMDYKQTQLCL

SEQ ID NO: 6949 - protein, 9 aa, Artificial Sequence
  Peptide Derived from Human Papillomavirus
SMVTSESQL

SEQ ID NO: 6950 - protein, 9 aa, Artificial Sequence
  Peptide Derived from Human Papillomavirus
SQAITCQKT

SEQ ID NO: 6951 - protein, 10 aa, Artificial Sequence
  Peptide Derived from Human Papillomavirus
SQAITCQKTV

SEQ ID NO: 6952 - protein, 10 aa, Artificial Sequence
  Peptide Derived from Human Papillomavirus
SQLFNKPYWL

SEQ ID NO: 6953 - protein, 9 aa, Artificial Sequence
  Peptide Derived from Human Papillomavirus
STCKYPDYL

SEQ ID NO: 6954 - protein, 11 aa, Artificial Sequence
  Peptide Derived from Human Papillomavirus
STCKYPDYLKM

SEQ ID NO: 6955 - protein, 9 aa, Artificial Sequence
  Peptide Derived from Human Papillomavirus
STDEYVSRT

SEQ ID NO: 6956 - protein, 11 aa, Artificial Sequence
  Peptide Derived from Human Papillomavirus
STDEYVSRTSI

SEQ ID NO: 6957 - protein, 8 aa, Artificial Sequence
  Peptide Derived from Human Papillomavirus
STNMTLCT

SEQ ID NO: 6958 - protein, 10 aa, Artificial Sequence
  Peptide Derived from Human Papillomavirus
STNMTLCTQV

SEQ ID NO: 6959 - protein, 11 aa, Artificial Sequence
  Peptide Derived from Human Papillomavirus
STNMTLCTQVT

SEQ ID NO: 6960 - protein, 8 aa, Artificial Sequence
  Peptide Derived from Human Papillomavirus
SVWRPSEA

SEQ ID NO: 6961 - protein, 9 aa, Artificial Sequence
  Peptide Derived from Human Papillomavirus
SVWRPSEAT

SEQ ID NO: 6962 - protein, 10 aa, Artificial Sequence
  Peptide Derived from Human Papillomavirus
SVWRPSEATV

SEQ ID NO: 6963 - protein, 8 aa, Artificial Sequence
  Peptide Derived from Human Papillomavirus
TAEVMTYI

SEQ ID NO: 6964 - protein, 10 aa, Artificial Sequence
  Peptide Derived from Human Papillomavirus
TAEVMTYIHA

SEQ ID NO: 6965 - protein, 11 aa, Artificial Sequence
  Peptide Derived from Human Papillomavirus
TAEVMTYIHAM

SEQ ID NO: 6966 - protein, 8 aa, Artificial Sequence
  Peptide Derived from Human Papillomavirus
TASIQSSA

SEQ ID NO: 6967 - protein, 8 aa, Artificial Sequence
  Peptide Derived from Human Papillomavirus
TIIEDGDM

SEQ ID NO: 6968 - protein, 9 aa, Artificial Sequence
  Peptide Derived from Human Papillomavirus
TIIEDGDMV

SEQ ID NO: 6969 - protein, 11 aa, Artificial Sequence
  Peptide Derived from Human Papillomavirus
TIIEDGDMVDT

SEQ ID NO: 6970 - protein, 11 aa, Artificial Sequence
  Peptide Derived from Human Papillomavirus
TLCTQVTSDST

SEQ ID NO: 6971 - protein, 10 aa, Artificial Sequence
  Peptide Derived from Human Papillomavirus
TLGEAVPDDL

SEQ ID NO: 6972 - protein, 9 aa, Artificial Sequence
  Peptide Derived from Human Papillomavirus
TLQANKSDV

SEQ ID NO: 6973 - protein, 11 aa, Artificial Sequence
  Peptide Derived from Human Papillomavirus
TLQANKSDVPI

SEQ ID NO: 6974 - protein, 8 aa, Artificial Sequence
  Peptide Derived from Human Papillomavirus
TLTAEVMT

SEQ ID NO: 6975 - protein, 10 aa, Artificial Sequence
  Peptide Derived from Human Papillomavirus
TLTAEVMTYI

SEQ ID NO: 6976 - protein, 9 aa, Artificial Sequence
  Peptide Derived from Human Papillomavirus
TQRLVWACV

SEQ ID NO: 6977 - protein, 11 aa, Artificial Sequence
  Peptide Derived from Human Papillomavirus
TQRLVWACVGL

SEQ ID NO: 6978 - protein, 8 aa, Artificial Sequence
  Peptide Derived from Human Papillomavirus
TQVTSDST

SEQ ID NO: 6979 - protein, 9 aa, Artificial Sequence
  Peptide Derived from Human Papillomavirus
TTASIQSSA

SEQ ID NO: 6980 - protein, 8 aa, Artificial Sequence
  Peptide Derived from Human Papillomavirus
TTRSTNMT

SEQ ID NO: 6981 - protein, 9 aa, Artificial Sequence
  Peptide Derived from Human Papillomavirus
TTRSTNMTL

SEQ ID NO: 6982 - protein, 11 aa, Artificial Sequence
  Peptide Derived from Human Papillomavirus
TTRSTNMTLCT

SEQ ID NO: 6983 - protein, 11 aa, Artificial Sequence
  Peptide Derived from Human Papillomavirus
TVPPKEKEDPL

SEQ ID NO: 6984 - protein, 9 aa, Artificial Sequence
  Peptide Derived from Human Papillomavirus
TVVDTTRST

SEQ ID NO: 6985 - protein, 11 aa, Artificial Sequence
  Peptide Derived from Human Papillomavirus
TVVDTTRSTNM

SEQ ID NO: 6986 - protein, 9 aa, Artificial Sequence
  Peptide Derived from Human Papillomavirus
TVYLPPVPV

SEQ ID NO: 6987 - protein, 9 aa, Artificial Sequence
  Peptide Derived from Human Papillomavirus
VACTNAAPA

SEQ ID NO: 6988 - protein, 8 aa, Artificial Sequence
  Peptide Derived from Human Papillomavirus
VMTYIHAM

SEQ ID NO: 6989 - protein, 8 aa, Artificial Sequence
  Peptide Derived from Human Papillomavirus
VTLTAEVM

SEQ ID NO: 6990 - protein, 9 aa, Artificial Sequence
  Peptide Derived from Human Papillomavirus
VTLTAEVMT

SEQ ID NO: 6991 - protein, 11 aa, Artificial Sequence
  Peptide Derived from Human Papillomavirus
VTLTAEVMTYI

SEQ ID NO: 6992 - protein, 11 aa, Artificial Sequence
  Peptide Derived from Human Papillomavirus
VTSQAITCQKT

SEQ ID NO: 6993 - protein, 10 aa, Artificial Sequence
  Peptide Derived from Human Papillomavirus
VTVVDTTRST

SEQ ID NO: 6994 - protein, 8 aa, Artificial Sequence
  Peptide Derived from Human Papillomavirus
VVDTTRST

SEQ ID NO: 6995 - protein, 10 aa, Artificial Sequence
  Peptide Derived from Human Papillomavirus
VVDTTRSTNM

SEQ ID NO: 6996 - protein, 11 aa, Artificial Sequence
  Peptide Derived from Human Papillomavirus
VVDTTRSTNMT

SEQ ID NO: 6997 - protein, 8 aa, Artificial Sequence
  Peptide Derived from Human Papillomavirus
VVSTDEYV

SEQ ID NO: 6998 - protein, 11 aa, Artificial Sequence
  Peptide Derived from Human Papillomavirus
VVSTDEYVSRT

SEQ ID NO: 6999 - protein, 8 aa, Artificial Sequence
  Peptide Derived from Human Papillomavirus
WACVGLEI

SEQ ID NO: 7000 - protein, 11 aa, Artificial Sequence
  Peptide Derived from Human Papillomavirus
WQFGLTPPPSA

SEQ ID NO: 7001 - protein, 8 aa, Artificial Sequence
  Peptide Derived from Human Papillomavirus
YAGSSRLL

SEQ ID NO: 7002 - protein, 9 aa, Artificial Sequence
  Peptide Derived from Human Papillomavirus
YAGSSRLLA

SEQ ID NO: 7003 - protein, 10 aa, Artificial Sequence
  Peptide Derived from Human Papillomavirus
YAGSSRLLAV

SEQ ID NO: 7004 - protein, 9 aa, Artificial Sequence
  Peptide Derived from Human Papillomavirus
YIHAMNPDI

SEQ ID NO: 7005 - protein, 10 aa, Artificial Sequence
  Peptide Derived from Human Papillomavirus
YIHAMNPDIL

SEQ ID NO: 7006 - protein, 8 aa, Artificial Sequence
  Peptide Derived from Human Papillomavirus
YIKGSGTT

SEQ ID NO: 7007 - protein, 9 aa, Artificial Sequence
  Peptide Derived from Human Papillomavirus
YIKGSGTTA

SEQ ID NO: 7008 - protein, 11 aa, Artificial Sequence
  Peptide Derived from Human Papillomavirus
YIKGSGTTASI

SEQ ID NO: 7009 - protein, 10 aa, Artificial Sequence
  Peptide Derived from Human Papillomavirus
YIRHVEEYDL

SEQ ID NO: 7010 - protein, 10 aa, Artificial Sequence
  Peptide Derived from Human Papillomavirus
YLPPVPVSKV

SEQ ID NO: 7011 - protein, 11 aa, Artificial Sequence
  Peptide Derived from Human Papillomavirus
YLPPVPVSKVV

SEQ ID NO: 7012 - protein, 8 aa, Artificial Sequence
  Peptide Derived from Human Papillomavirus
YTFWEVDL

SEQ ID NO: 7013 - protein, 11 aa, Artificial Sequence
  Peptide Derived from Human Papillomavirus
YVSRTSIYYYA

SEQ ID NO: 7014 - protein, 8 aa, Artificial Sequence
  Peptide Derived from Human Papillomavirus
AAIPLQPI

SEQ ID NO: 7015 - protein, 8 aa, Artificial Sequence
  Peptide Derived from Human Papillomavirus
AIINVSSV

SEQ ID NO: 7016 - protein, 11 aa, Artificial Sequence
  Peptide Derived from Human Papillomavirus
AIPLQPIRPPV

SEQ ID NO: 7017 - protein, 8 aa, Artificial Sequence
  Peptide Derived from Human Papillomavirus
AITSRRHT

SEQ ID NO: 7018 - protein, 9 aa, Artificial Sequence
  Peptide Derived from Human Papillomavirus
AITSRRHTV

SEQ ID NO: 7019 - protein, 8 aa, Artificial Sequence
  Peptide Derived from Human Papillomavirus
ALHRPAIT

SEQ ID NO: 7020 - protein, 9 aa, Artificial Sequence
  Peptide Derived from Human Papillomavirus
ATGTCPPDV

SEQ ID NO: 7021 - protein, 10 aa, Artificial Sequence
  Peptide Derived from Human Papillomavirus
ATGTCPPDVI

SEQ ID NO: 7022 - protein, 11 aa, Artificial Sequence
  Peptide Derived from Human Papillomavirus
ATLKTRSGKQI

SEQ ID NO: 7023 - protein, 10 aa, Artificial Sequence
  Peptide Derived from Human Papillomavirus
ATQLYQTCKA

SEQ ID NO: 7024 - protein, 11 aa, Artificial Sequence
  Peptide Derived from Human Papillomavirus
ATQLYQTCKAT

SEQ ID NO: 7025 - protein, 8 aa, Artificial Sequence
  Peptide Derived from Human Papillomavirus
ATTRTSNV

SEQ ID NO: 7026 - protein, 10 aa, Artificial Sequence
  Peptide Derived from Human Papillomavirus
ATTRTSNVSI

SEQ ID NO: 7027 - protein, 9 aa, Artificial Sequence
  Peptide Derived from Human Papillomavirus
DIIALHRPA

SEQ ID NO: 7028 - protein, 10 aa, Artificial Sequence
  Peptide Derived from Human Papillomavirus
DIIALHRPAI

SEQ ID NO: 7029 - protein, 11 aa, Artificial Sequence
  Peptide Derived from Human Papillomavirus
DIIALHRPAIT

SEQ ID NO: 7030 - protein, 9 aa, Artificial Sequence
  Peptide Derived from Human Papillomavirus
DIPSPLFPT

SEQ ID NO: 7031 - protein, 11 aa, Artificial Sequence
  Peptide Derived from Human Papillomavirus
DISPAPDPDFL

SEQ ID NO: 7032 - protein, 8 aa, Artificial Sequence
  Peptide Derived from Human Papillomavirus
DLSPIVPL

SEQ ID NO: 7033 - protein, 11 aa, Artificial Sequence
  Peptide Derived from Human Papillomavirus
DLSPIVPLDHT

SEQ ID NO: 7034 - protein, 9 aa, Artificial Sequence
  Peptide Derived from Human Papillomavirus
DQILKYGSL

SEQ ID NO: 7035 - protein, 11 aa, Artificial Sequence
  Peptide Derived from Human Papillomavirus
DQILKYGSLGV

SEQ ID NO: 7036 - protein, 8 aa, Artificial Sequence
  Peptide Derived from Human Papillomavirus
DTIVVDGA

SEQ ID NO: 7037 - protein, 11 aa, Artificial Sequence
  Peptide Derived from Human Papillomavirus
DTIVVDGADFV

SEQ ID NO: 7038 - protein, 10 aa, Artificial Sequence
  Peptide Derived from Human Papillomavirus
DTLQFQHSDI

SEQ ID NO: 7039 - protein, 10 aa, Artificial Sequence
  Peptide Derived from Human Papillomavirus
DTPVMSGPDI

SEQ ID NO: 7040 - protein, 9 aa, Artificial Sequence
  Peptide Derived from Human Papillomavirus
DTSTSSYSI

SEQ ID NO: 7041 - protein, 9 aa, Artificial Sequence
  Peptide Derived from Human Papillomavirus
DTTPAIINV

SEQ ID NO: 7042 - protein, 10 aa, Artificial Sequence
  Peptide Derived from Human Papillomavirus
DTVGPLDSSI

SEQ ID NO: 7043 - protein, 11 aa, Artificial Sequence
  Peptide Derived from Human Papillomavirus
DTVGPLDSSIV

SEQ ID NO: 7044 - protein, 9 aa, Artificial Sequence
  Peptide Derived from Human Papillomavirus
DVDNVHTPM

SEQ ID NO: 7045 - protein, 10 aa, Artificial Sequence
  Peptide Derived from Human Papillomavirus
DVIPKVEGST

SEQ ID NO: 7046 - protein, 11 aa, Artificial Sequence
  Peptide Derived from Human Papillomavirus
DVIPKVEGSTI

SEQ ID NO: 7047 - protein, 8 aa, Artificial Sequence
  Peptide Derived from Human Papillomavirus
DVTTSADT

SEQ ID NO: 7048 - protein, 9 aa, Artificial Sequence
  Peptide Derived from Human Papillomavirus
DVTTSADTT

SEQ ID NO: 7049 - protein, 11 aa, Artificial Sequence
  Peptide Derived from Human Papillomavirus
DVTTSADTTPA

SEQ ID NO: 7050 - protein, 10 aa, Artificial Sequence
  Peptide Derived from Human Papillomavirus
DVYADDVDNV

SEQ ID NO: 7051 - protein, 9 aa, Artificial Sequence
  Peptide Derived from Human Papillomavirus
EAGAPAPSI

SEQ ID NO: 7052 - protein, 11 aa, Artificial Sequence
  Peptide Derived from Human Papillomavirus
EAGAPAPSIPT

SEQ ID NO: 7053 - protein, 8 aa, Artificial Sequence
  Peptide Derived from Human Papillomavirus
ELQPLHDT

SEQ ID NO: 7054 - protein, 10 aa, Artificial Sequence
  Peptide Derived from Human Papillomavirus
ELQPLHDTST

SEQ ID NO: 7055 - protein, 8 aa, Artificial Sequence
  Peptide Derived from Human Papillomavirus
EQYELQPL

SEQ ID NO: 7056 - protein, 11 aa, Artificial Sequence
  Peptide Derived from Human Papillomavirus
EQYELQPLHDT

SEQ ID NO: 7057 - protein, 9 aa, Artificial Sequence
  Peptide Derived from Human Papillomavirus
ETSFIEAGA

SEQ ID NO: 7058 - protein, 11 aa, Artificial Sequence
  Peptide Derived from Human Papillomavirus
ETSFIEAGAPA

SEQ ID NO: 7059 - protein, 9 aa, Artificial Sequence
  Peptide Derived from Human Papillomavirus
FATTRTSNV

SEQ ID NO: 7060 - protein, 11 aa, Artificial Sequence
  Peptide Derived from Human Papillomavirus
FATTRTSNVSI

SEQ ID NO: 7061 - protein, 8 aa, Artificial Sequence
  Peptide Derived from Human Papillomavirus
FIEAGAPA

SEQ ID NO: 7062 - protein, 11 aa, Artificial Sequence
  Peptide Derived from Human Papillomavirus
FIEAGAPAPSI

SEQ ID NO: 7063 - protein, 8 aa, Artificial Sequence
  Peptide Derived from Human Papillomavirus
FIFSSPTV

SEQ ID NO: 7064 - protein, 10 aa, Artificial Sequence
  Peptide Derived from Human Papillomavirus
FIFSSPTVST

SEQ ID NO: 7065 - protein, 11 aa, Artificial Sequence
  Peptide Derived from Human Papillomavirus
FLDIIALHRPA

SEQ ID NO: 7066 - protein, 8 aa, Artificial Sequence
  Peptide Derived from Human Papillomavirus
FLTSPHKL

SEQ ID NO: 7067 - protein, 9 aa, Artificial Sequence
  Peptide Derived from Human Papillomavirus
FLTSPHKLI

SEQ ID NO: 7068 - protein, 10 aa, Artificial Sequence
  Peptide Derived from Human Papillomavirus
FLTSPHKLIT

SEQ ID NO: 7069 - protein, 9 aa, Artificial Sequence
  Peptide Derived from Human Papillomavirus
FQHSDISPA

SEQ ID NO: 7070 - protein, 8 aa, Artificial Sequence
  Peptide Derived from Human Papillomavirus
FTDVRVAA

SEQ ID NO: 7071 - protein, 11 aa, Artificial Sequence
  Peptide Derived from Human Papillomavirus
FTEPSVLHPPA

SEQ ID NO: 7072 - protein, 9 aa, Artificial Sequence
  Peptide Derived from Human Papillomavirus
FVLHPSYFI

SEQ ID NO: 7073 - protein, 10 aa, Artificial Sequence
  Peptide Derived from Human Papillomavirus
FVLHPSYFIL

SEQ ID NO: 7074 - protein, 10 aa, Artificial Sequence
  Peptide Derived from Human Papillomavirus
FVVSTDSSNV

SEQ ID NO: 7075 - protein, 11 aa, Artificial Sequence
  Peptide Derived from Human Papillomavirus
FVVSTDSSNVT

SEQ ID NO: 7076 - protein, 9 aa, Artificial Sequence
  Peptide Derived from Human Papillomavirus
GAPAPSIPT

SEQ ID NO: 7077 - protein, 10 aa, Artificial Sequence
  Peptide Derived from Human Papillomavirus
GARIHYYQDL

SEQ ID NO: 7078 - protein, 10 aa, Artificial Sequence
  Peptide Derived from Human Papillomavirus
GLYDVYADDV

SEQ ID NO: 7079 - protein, 10 aa, Artificial Sequence
  Peptide Derived from Human Papillomavirus
GLYSRNTQQV

SEQ ID NO: 7080 - protein, 8 aa, Artificial Sequence
  Peptide Derived from Human Papillomavirus
GQKATLKT

SEQ ID NO: 7081 - protein, 8 aa, Artificial Sequence
  Peptide Derived from Human Papillomavirus
GTCPPDVI

SEQ ID NO: 7082 - protein, 11 aa, Artificial Sequence
  Peptide Derived from Human Papillomavirus
GTCPPDVIPKV

SEQ ID NO: 7083 - protein, 8 aa, Artificial Sequence
  Peptide Derived from Human Papillomavirus
GTDPPTAA

SEQ ID NO: 7084 - protein, 9 aa, Artificial Sequence
  Peptide Derived from Human Papillomavirus
GTDPPTAAI

SEQ ID NO: 7085 - protein, 11 aa, Artificial Sequence
  Peptide Derived from Human Papillomavirus
GTDPPTAAIPL

SEQ ID NO: 7086 - protein, 10 aa, Artificial Sequence
  Peptide Derived from Human Papillomavirus
GTGSGSGGRT

SEQ ID NO: 7087 - protein, 9 aa, Artificial Sequence
  Peptide Derived from Human Papillomavirus
GVFFGGLGI

SEQ ID NO: 7088 - protein, 11 aa, Artificial Sequence
  Peptide Derived from Human Papillomavirus
GVFFGGLGIGT

SEQ ID NO: 7089 - protein, 11 aa, Artificial Sequence
  Peptide Derived from Human Papillomavirus
HLNPTFTEPSV

SEQ ID NO: 7090 - protein, 10 aa, Artificial Sequence
  Peptide Derived from Human Papillomavirus
HTPMQHSYST

SEQ ID NO: 7091 - protein, 10 aa, Artificial Sequence
  Peptide Derived from Human Papillomavirus
HTVPNEQYEL

SEQ ID NO: 7092 - protein, 8 aa, Artificial Sequence
  Peptide Derived from Human Papillomavirus
HTVRFSRV

SEQ ID NO: 7093 - protein, 11 aa, Artificial Sequence
  Peptide Derived from Human Papillomavirus
IADQILKYGSL

SEQ ID NO: 7094 - protein, 8 aa, Artificial Sequence
  Peptide Derived from Human Papillomavirus
IALHRPAI

SEQ ID NO: 7095 - protein, 9 aa, Artificial Sequence
  Peptide Derived from Human Papillomavirus
IALHRPAIT

SEQ ID NO: 7096 - protein, 8 aa, Artificial Sequence
  Peptide Derived from Human Papillomavirus
IIALHRPA

SEQ ID NO: 7097 - protein, 9 aa, Artificial Sequence
  Peptide Derived from Human Papillomavirus
IIALHRPAI

SEQ ID NO: 7098 - protein, 10 aa, Artificial Sequence
  Peptide Derived from Human Papillomavirus
IIALHRPAIT

SEQ ID NO: 7099 - protein, 9 aa, Artificial Sequence
  Peptide Derived from Human Papillomavirus
ILKYGSLGV

SEQ ID NO: 7100 - protein, 8 aa, Artificial Sequence
  Peptide Derived from Human Papillomavirus
IQTISTHL

SEQ ID NO: 7101 - protein, 11 aa, Artificial Sequence
  Peptide Derived from Human Papillomavirus
IQTISTHLNPT

SEQ ID NO: 7102 - protein, 8 aa, Artificial Sequence
  Peptide Derived from Human Papillomavirus
ITSRRHTV

SEQ ID NO: 7103 - protein, 8 aa, Artificial Sequence
  Peptide Derived from Human Papillomavirus
IVPLDHTV

SEQ ID NO: 7104 - protein, 8 aa, Artificial Sequence
  Peptide Derived from Human Papillomavirus
IVSLIEET

SEQ ID NO: 7105 - protein, 11 aa, Artificial Sequence
  Peptide Derived from Human Papillomavirus
IVSLIEETSFI

SEQ ID NO: 7106 - protein, 9 aa, Artificial Sequence
  Peptide Derived from Human Papillomavirus
IVVDGADFV

SEQ ID NO: 7107 - protein, 10 aa, Artificial Sequence
  Peptide Derived from Human Papillomavirus
IVVDGADFVL

SEQ ID NO: 7108 - protein, 10 aa, Artificial Sequence
  Peptide Derived from Human Papillomavirus
KATGTCPPDV

SEQ ID NO: 7109 - protein, 11 aa, Artificial Sequence
  Peptide Derived from Human Papillomavirus
KATGTCPPDVI

SEQ ID NO: 7110 - protein, 9 aa, Artificial Sequence
  Peptide Derived from Human Papillomavirus
KLITYDNPA

SEQ ID NO: 7111 - protein, 8 aa, Artificial Sequence
  Peptide Derived from Human Papillomavirus
KTRSGKQI

SEQ ID NO: 7112 - protein, 10 aa, Artificial Sequence
  Peptide Derived from Human Papillomavirus
KTRSGKQIGA

SEQ ID NO: 7113 - protein, 8 aa, Artificial Sequence
  Peptide Derived from Human Papillomavirus
KVEGSTIA

SEQ ID NO: 7114 - protein, 11 aa, Artificial Sequence
  Peptide Derived from Human Papillomavirus
KVEGSTIADQI

SEQ ID NO: 7115 - protein, 8 aa, Artificial Sequence
  Peptide Derived from Human Papillomavirus
KVVDPAFL

SEQ ID NO: 7116 - protein, 9 aa, Artificial Sequence
  Peptide Derived from Human Papillomavirus
KVVDPAFLT

SEQ ID NO: 7117 - protein, 8 aa, Artificial Sequence
  Peptide Derived from Human Papillomavirus
LIEETSFI

SEQ ID NO: 7118 - protein, 10 aa, Artificial Sequence
  Peptide Derived from Human Papillomavirus
LIEETSFIEA

SEQ ID NO: 7119 - protein, 8 aa, Artificial Sequence
  Peptide Derived from Human Papillomavirus
LITYDNPA

SEQ ID NO: 7120 - protein, 8 aa, Artificial Sequence
  Peptide Derived from Human Papillomavirus
LQFQHSDI

SEQ ID NO: 7121 - protein, 11 aa, Artificial Sequence
  Peptide Derived from Human Papillomavirus
LQFQHSDISPA

SEQ ID NO: 7122 - protein, 8 aa, Artificial Sequence
  Peptide Derived from Human Papillomavirus
LQPIRPPV

SEQ ID NO: 7123 - protein, 9 aa, Artificial Sequence
  Peptide Derived from Human Papillomavirus
LQPIRPPVT

SEQ ID NO: 7124 - protein, 10 aa, Artificial Sequence
  Peptide Derived from Human Papillomavirus
LQPIRPPVTV

SEQ ID NO: 7125 - protein, 9 aa, Artificial Sequence
  Peptide Derived from Human Papillomavirus
LQPLHDTST

SEQ ID NO: 7126 - protein, 8 aa, Artificial Sequence
  Peptide Derived from Human Papillomavirus
LTSPHKLI

SEQ ID NO: 7127 - protein, 9 aa, Artificial Sequence
  Peptide Derived from Human Papillomavirus
LTSPHKLIT

SEQ ID NO: 7128 - protein, 9 aa, Artificial Sequence
  Peptide Derived from Human Papillomavirus
MQHSYSTFA

SEQ ID NO: 7129 - protein, 10 aa, Artificial Sequence
  Peptide Derived from Human Papillomavirus
MQHSYSTFAT

SEQ ID NO: 7130 - protein, 11 aa, Artificial Sequence
  Peptide Derived from Human Papillomavirus
MQHSYSTFATT

SEQ ID NO: 7131 - protein, 8 aa, Artificial Sequence
  Peptide Derived from Human Papillomavirus
NIPMDTFV

SEQ ID NO: 7132 - protein, 9 aa, Artificial Sequence
  Peptide Derived from Human Papillomavirus
NIPMDTFVV

SEQ ID NO: 7133 - protein, 11 aa, Artificial Sequence
  Peptide Derived from Human Papillomavirus
NIPMDTFVVST

SEQ ID NO: 7134 - protein, 8 aa, Artificial Sequence
  Peptide Derived from Human Papillomavirus
NTGFDTPV

SEQ ID NO: 7135 - protein, 9 aa, Artificial Sequence
  Peptide Derived from Human Papillomavirus
NTGFDTPVM

SEQ ID NO: 7136 - protein, 8 aa, Artificial Sequence
  Peptide Derived from Human Papillomavirus
NTQQVKVV

SEQ ID NO: 7137 - protein, 11 aa, Artificial Sequence
  Peptide Derived from Human Papillomavirus
NTQQVKVVDPA

SEQ ID NO: 7138 - protein, 8 aa, Artificial Sequence
  Peptide Derived from Human Papillomavirus
NVSIPLNT

SEQ ID NO: 7139 - protein, 10 aa, Artificial Sequence
  Peptide Derived from Human Papillomavirus
NVSSVGESSI

SEQ ID NO: 7140 - protein, 8 aa, Artificial Sequence
  Peptide Derived from Human Papillomavirus
NVTSSTPI

SEQ ID NO: 7141 - protein, 9 aa, Artificial Sequence
  Peptide Derived from Human Papillomavirus
PAEASGHFI

SEQ ID NO: 7142 - protein, 11 aa, Artificial Sequence
  Peptide Derived from Human Papillomavirus
PAFESFDPEDT

SEQ ID NO: 7143 - protein, 10 aa, Artificial Sequence
  Peptide Derived from Human Papillomavirus
PAFLTSPHKL

SEQ ID NO: 7144 - protein, 11 aa, Artificial Sequence
  Peptide Derived from Human Papillomavirus
PAFLTSPHKLI

SEQ ID NO: 7145 - protein, 9 aa, Artificial Sequence
  Peptide Derived from Human Papillomavirus
PAIINVSSV

SEQ ID NO: 7146 - protein, 9 aa, Artificial Sequence
  Peptide Derived from Human Papillomavirus
PAITSRRHT

SEQ ID NO: 7147 - protein, 10 aa, Artificial Sequence
  Peptide Derived from Human Papillomavirus
PAITSRRHTV

SEQ ID NO: 7148 - protein, 11 aa, Artificial Sequence
  Peptide Derived from Human Papillomavirus
PAPAEASGHFI

SEQ ID NO: 7149 - protein, 8 aa, Artificial Sequence
  Peptide Derived from Human Papillomavirus
PAPDPDFL

SEQ ID NO: 7150 - protein, 10 aa, Artificial Sequence
  Peptide Derived from Human Papillomavirus
PAPDPDFLDI

SEQ ID NO: 7151 - protein, 11 aa, Artificial Sequence
  Peptide Derived from Human Papillomavirus
PAPDPDFLDII

SEQ ID NO: 7152 - protein, 8 aa, Artificial Sequence
  Peptide Derived from Human Papillomavirus
PIGTDPPT

SEQ ID NO: 7153 - protein, 9 aa, Artificial Sequence
  Peptide Derived from Human Papillomavirus
PIGTDPPTA

SEQ ID NO: 7154 - protein, 10 aa, Artificial Sequence
  Peptide Derived from Human Papillomavirus
PIGTDPPTAA

SEQ ID NO: 7155 - protein, 11 aa, Artificial Sequence
  Peptide Derived from Human Papillomavirus
PIGTDPPTAAI

SEQ ID NO: 7156 - protein, 8 aa, Artificial Sequence
  Peptide Derived from Human Papillomavirus
PIPGSRPV

SEQ ID NO: 7157 - protein, 9 aa, Artificial Sequence
  Peptide Derived from Human Papillomavirus
PIPGSRPVA

SEQ ID NO: 7158 - protein, 11 aa, Artificial Sequence
  Peptide Derived from Human Papillomavirus
PIPGSRPVARL

SEQ ID NO: 7159 - protein, 8 aa, Artificial Sequence
  Peptide Derived from Human Papillomavirus
PIRPPVTV

SEQ ID NO: 7160 - protein, 10 aa, Artificial Sequence
  Peptide Derived from Human Papillomavirus
PIRPPVTVDT

SEQ ID NO: 7161 - protein, 11 aa, Artificial Sequence
  Peptide Derived from Human Papillomavirus
PIRPPVTVDTV

SEQ ID NO: 7162 - protein, 10 aa, Artificial Sequence
  Peptide Derived from Human Papillomavirus
PISPFFPFDT

SEQ ID NO: 7163 - protein, 11 aa, Artificial Sequence
  Peptide Derived from Human Papillomavirus
PISPFFPFDTI

SEQ ID NO: 7164 - protein, 8 aa, Artificial Sequence
  Peptide Derived from Human Papillomavirus
PIVPLDHT

SEQ ID NO: 7165 - protein, 9 aa, Artificial Sequence
  Peptide Derived from Human Papillomavirus
PIVPLDHTV

SEQ ID NO: 7166 - protein, 9 aa, Artificial Sequence
  Peptide Derived from Human Papillomavirus
PLDSSIVSL

SEQ ID NO: 7167 - protein, 10 aa, Artificial Sequence
  Peptide Derived from Human Papillomavirus
PLDSSIVSLI

SEQ ID NO: 7168 - protein, 10 aa, Artificial Sequence
  Peptide Derived from Human Papillomavirus
PLFPTSSPFV

SEQ ID NO: 7169 - protein, 8 aa, Artificial Sequence
  Peptide Derived from Human Papillomavirus
PLNTGFDT

SEQ ID NO: 7170 - protein, 10 aa, Artificial Sequence
  Peptide Derived from Human Papillomavirus
PLNTGFDTPV

SEQ ID NO: 7171 - protein, 11 aa, Artificial Sequence
  Peptide Derived from Human Papillomavirus
PLNTGFDTPVM

SEQ ID NO: 7172 - protein, 9 aa, Artificial Sequence
  Peptide Derived from Human Papillomavirus
PLQPIRPPV

SEQ ID NO: 7173 - protein, 10 aa, Artificial Sequence
  Peptide Derived from Human Papillomavirus
PLQPIRPPVT

SEQ ID NO: 7174 - protein, 11 aa, Artificial Sequence
  Peptide Derived from Human Papillomavirus
PLQPIRPPVTV

SEQ ID NO: 7175 - protein, 9 aa, Artificial Sequence
  Peptide Derived from Human Papillomavirus
PMDTFVVST

SEQ ID NO: 7176 - protein, 8 aa, Artificial Sequence
  Peptide Derived from Human Papillomavirus
PMQHSYST

SEQ ID NO: 7177 - protein, 10 aa, Artificial Sequence
  Peptide Derived from Human Papillomavirus
PMQHSYSTFA

SEQ ID NO: 7178 - protein, 11 aa, Artificial Sequence
  Peptide Derived from Human Papillomavirus
PMQHSYSTFAT

SEQ ID NO: 7179 - protein, 10 aa, Artificial Sequence
  Peptide Derived from Human Papillomavirus
PTAAIPLQPI

SEQ ID NO: 7180 - protein, 8 aa, Artificial Sequence
  Peptide Derived from Human Papillomavirus
PTFTEPSV

SEQ ID NO: 7181 - protein, 9 aa, Artificial Sequence
  Peptide Derived from Human Papillomavirus
PTFTEPSVL

SEQ ID NO: 7182 - protein, 8 aa, Artificial Sequence
  Peptide Derived from Human Papillomavirus
PTPSGFDV

SEQ ID NO: 7183 - protein, 9 aa, Artificial Sequence
  Peptide Derived from Human Papillomavirus
PTPSGFDVT

SEQ ID NO: 7184 - protein, 10 aa, Artificial Sequence
  Peptide Derived from Human Papillomavirus
PTPSGFDVTT

SEQ ID NO: 7185 - protein, 9 aa, Artificial Sequence
  Peptide Derived from Human Papillomavirus
PTSSPFVPI

SEQ ID NO: 7186 - protein, 11 aa, Artificial Sequence
  Peptide Derived from Human Papillomavirus
PTVSTQSYENI

SEQ ID NO: 7187 - protein, 8 aa, Artificial Sequence
  Peptide Derived from Human Papillomavirus
PVMSGPDI

SEQ ID NO: 7188 - protein, 10 aa, Artificial Sequence
  Peptide Derived from Human Papillomavirus
PVTVDTVGPL

SEQ ID NO: 7189 - protein, 8 aa, Artificial Sequence
  Peptide Derived from Human Papillomavirus
QILKYGSL

SEQ ID NO: 7190 - protein, 10 aa, Artificial Sequence
  Peptide Derived from Human Papillomavirus
QILKYGSLGV

SEQ ID NO: 7191 - protein, 8 aa, Artificial Sequence
  Peptide Derived from Human Papillomavirus
QLYQTCKA

SEQ ID NO: 7192 - protein, 9 aa, Artificial Sequence
  Peptide Derived from Human Papillomavirus
QLYQTCKAT

SEQ ID NO: 7193 - protein, 11 aa, Artificial Sequence
  Peptide Derived from Human Papillomavirus
QLYQTCKATGT

SEQ ID NO: 7194 - protein, 9 aa, Artificial Sequence
  Peptide Derived from Human Papillomavirus
QQVKVVDPA

SEQ ID NO: 7195 - protein, 11 aa, Artificial Sequence
  Peptide Derived from Human Papillomavirus
QQVKVVDPAFL

SEQ ID NO: 7196 - protein, 8 aa, Artificial Sequence
  Peptide Derived from Human Papillomavirus
QTCKATGT

SEQ ID NO: 7197 - protein, 10 aa, Artificial Sequence
  Peptide Derived from Human Papillomavirus
QTISTHLNPT

SEQ ID NO: 7198 - protein, 8 aa, Artificial Sequence
  Peptide Derived from Human Papillomavirus
QVKVVDPA

SEQ ID NO: 7199 - protein, 10 aa, Artificial Sequence
  Peptide Derived from Human Papillomavirus
QVKVVDPAFL

SEQ ID NO: 7200 - protein, 11 aa, Artificial Sequence
  Peptide Derived from Human Papillomavirus
QVKVVDPAFLT

SEQ ID NO: 7201 - protein, 10 aa, Artificial Sequence
  Peptide Derived from Human Papillomavirus
RASATQLYQT

SEQ ID NO: 7202 - protein, 8 aa, Artificial Sequence
  Peptide Derived from Human Papillomavirus
RIHYYQDL

SEQ ID NO: 7203 - protein, 11 aa, Artificial Sequence
  Peptide Derived from Human Papillomavirus
RIHYYQDLSPI

SEQ ID NO: 7204 - protein, 9 aa, Artificial Sequence
  Peptide Derived from Human Papillomavirus
RLGLYSRNT

SEQ ID NO: 7205 - protein, 9 aa, Artificial Sequence
  Peptide Derived from Human Papillomavirus
RTGYVPIGT

SEQ ID NO: 7206 - protein, 9 aa, Artificial Sequence
  Peptide Derived from Human Papillomavirus
RTSNVSIPL

SEQ ID NO: 7207 - protein, 11 aa, Artificial Sequence
  Peptide Derived from Human Papillomavirus
RTSNVSIPLNT

SEQ ID NO: 7208 - protein, 8 aa, Artificial Sequence
  Peptide Derived from Human Papillomavirus
RVGQKATL

SEQ ID NO: 7209 - protein, 10 aa, Artificial Sequence
  Peptide Derived from Human Papillomavirus
RVGQKATLKT

SEQ ID NO: 7210 - protein, 8 aa, Artificial Sequence
  Peptide Derived from Human Papillomavirus
SADTTPAI

SEQ ID NO: 7211 - protein, 9 aa, Artificial Sequence
  Peptide Derived from Human Papillomavirus
SADTTPAII

SEQ ID NO: 7212 - protein, 11 aa, Artificial Sequence
  Peptide Derived from Human Papillomavirus
SADTTPAIINV

SEQ ID NO: 7213 - protein, 8 aa, Artificial Sequence
  Peptide Derived from Human Papillomavirus
SATQLYQT

SEQ ID NO: 7214 - protein, 11 aa, Artificial Sequence
  Peptide Derived from Human Papillomavirus
SATQLYQTCKA

SEQ ID NO: 7215 - protein, 9 aa, Artificial Sequence
  Peptide Derived from Human Papillomavirus
SINDGLYDV

SEQ ID NO: 7216 - protein, 11 aa, Artificial Sequence
  Peptide Derived from Human Papillomavirus
SINDGLYDVYA

SEQ ID NO: 7217 - protein, 10 aa, Artificial Sequence
  Peptide Derived from Human Papillomavirus
SIPLNTGFDT

SEQ ID NO: 7218 - protein, 10 aa, Artificial Sequence
  Peptide Derived from Human Papillomavirus
SIPTPSGFDV

SEQ ID NO: 7219 - protein, 11 aa, Artificial Sequence
  Peptide Derived from Human Papillomavirus
SIPTPSGFDVT

SEQ ID NO: 7220 - protein, 9 aa, Artificial Sequence
  Peptide Derived from Human Papillomavirus
SIQTISTHL

SEQ ID NO: 7221 - protein, 9 aa, Artificial Sequence
  Peptide Derived from Human Papillomavirus
SIVSLIEET

SEQ ID NO: 7222 - protein, 9 aa, Artificial Sequence
  Peptide Derived from Human Papillomavirus
SLGVFFGGL

SEQ ID NO: 7223 - protein, 11 aa, Artificial Sequence
  Peptide Derived from Human Papillomavirus
SLGVFFGGLGI

SEQ ID NO: 7224 - protein, 9 aa, Artificial Sequence
  Peptide Derived from Human Papillomavirus
SLIEETSFI

SEQ ID NO: 7225 - protein, 11 aa, Artificial Sequence
  Peptide Derived from Human Papillomavirus
SLIEETSFIEA

SEQ ID NO: 7226 - protein, 8 aa, Artificial Sequence
  Peptide Derived from Human Papillomavirus
STDSSNVT

SEQ ID NO: 7227 - protein, 11 aa, Artificial Sequence
  Peptide Derived from Human Papillomavirus
STDSSNVTSST

SEQ ID NO: 7228 - protein, 8 aa, Artificial Sequence
  Peptide Derived from Human Papillomavirus
STFATTRT

SEQ ID NO: 7229 - protein, 11 aa, Artificial Sequence
  Peptide Derived from Human Papillomavirus
STFATTRTSNV

SEQ ID NO: 7230 - protein, 9 aa, Artificial Sequence
  Peptide Derived from Human Papillomavirus
STHLNPTFT

SEQ ID NO: 7231 - protein, 8 aa, Artificial Sequence
  Peptide Derived from Human Papillomavirus
STIADQIL

SEQ ID NO: 7232 - protein, 10 aa, Artificial Sequence
  Peptide Derived from Human Papillomavirus
STPIPGSRPV

SEQ ID NO: 7233 - protein, 11 aa, Artificial Sequence
  Peptide Derived from Human Papillomavirus
STPIPGSRPVA

SEQ ID NO: 7234 - protein, 8 aa, Artificial Sequence
  Peptide Derived from Human Papillomavirus
STQSYENI

SEQ ID NO: 7235 - protein, 10 aa, Artificial Sequence
  Peptide Derived from Human Papillomavirus
STQSYENIPM

SEQ ID NO: 7236 - protein, 9 aa, Artificial Sequence
  Peptide Derived from Human Papillomavirus
STRRKRASA

SEQ ID NO: 7237 - protein, 10 aa, Artificial Sequence
  Peptide Derived from Human Papillomavirus
STRRKRASAT

SEQ ID NO: 7238 - protein, 11 aa, Artificial Sequence
  Peptide Derived from Human Papillomavirus
STSSYSINDGL

SEQ ID NO: 7239 - protein, 9 aa, Artificial Sequence
  Peptide Derived from Human Papillomavirus
SVGESSIQT

SEQ ID NO: 7240 - protein, 10 aa, Artificial Sequence
  Peptide Derived from Human Papillomavirus
SVGESSIQTI

SEQ ID NO: 7241 - protein, 9 aa, Artificial Sequence
  Peptide Derived from Human Papillomavirus
SVLHPPAPA

SEQ ID NO: 7242 - protein, 11 aa, Artificial Sequence
  Peptide Derived from Human Papillomavirus
SVLHPPAPAEA

SEQ ID NO: 7243 - protein, 9 aa, Artificial Sequence
  Peptide Derived from Human Papillomavirus
TAAIPLQPI

SEQ ID NO: 7244 - protein, 9 aa, Artificial Sequence
  Peptide Derived from Human Papillomavirus
TISTHLNPT

SEQ ID NO: 7245 - protein, 11 aa, Artificial Sequence
  Peptide Derived from Human Papillomavirus
TISTHLNPTFT

SEQ ID NO: 7246 - protein, 10 aa, Artificial Sequence
  Peptide Derived from Human Papillomavirus
TIVVDGADFV

SEQ ID NO: 7247 - protein, 11 aa, Artificial Sequence
  Peptide Derived from Human Papillomavirus
TIVVDGADFVL

SEQ ID NO: 7248 - protein, 10 aa, Artificial Sequence
  Peptide Derived from Human Papillomavirus
TLKTRSGKQI

SEQ ID NO: 7249 - protein, 9 aa, Artificial Sequence
  Peptide Derived from Human Papillomavirus
TLQFQHSDI

SEQ ID NO: 7250 - protein, 9 aa, Artificial Sequence
  Peptide Derived from Human Papillomavirus
TQLYQTCKA

SEQ ID NO: 7251 - protein, 10 aa, Artificial Sequence
  Peptide Derived from Human Papillomavirus
TQLYQTCKAT

SEQ ID NO: 7252 - protein, 10 aa, Artificial Sequence
  Peptide Derived from Human Papillomavirus
TQQVKVVDPA

SEQ ID NO: 7253 - protein, 9 aa, Artificial Sequence
  Peptide Derived from Human Papillomavirus
TQSYENIPM

SEQ ID NO: 7254 - protein, 11 aa, Artificial Sequence
  Peptide Derived from Human Papillomavirus
TQSYENIPMDT

SEQ ID NO: 7255 - protein, 8 aa, Artificial Sequence
  Peptide Derived from Human Papillomavirus
TTPAIINV

SEQ ID NO: 7256 - protein, 11 aa, Artificial Sequence
  Peptide Derived from Human Papillomavirus
TTPAIINVSSV

SEQ ID NO: 7257 - protein, 9 aa, Artificial Sequence
  Peptide Derived from Human Papillomavirus
TTRTSNVSI

SEQ ID NO: 7258 - protein, 11 aa, Artificial Sequence
  Peptide Derived from Human Papillomavirus
TTRTSNVSIPL

SEQ ID NO: 7259 - protein, 9 aa, Artificial Sequence
  Peptide Derived from Human Papillomavirus
TTSADTTPA

SEQ ID NO: 7260 - protein, 10 aa, Artificial Sequence
  Peptide Derived from Human Papillomavirus
TTSADTTPAI

SEQ ID NO: 7261 - protein, 11 aa, Artificial Sequence
  Peptide Derived from Human Papillomavirus
TTSADTTPAII

SEQ ID NO: 7262 - protein, 8 aa, Artificial Sequence
  Peptide Derived from Human Papillomavirus
TVDTVGPL

SEQ ID NO: 7263 - protein, 9 aa, Artificial Sequence
  Peptide Derived from Human Papillomavirus
TVGPLDSSI

SEQ ID NO: 7264 - protein, 10 aa, Artificial Sequence
  Peptide Derived from Human Papillomavirus
TVGPLDSSIV

SEQ ID NO: 7265 - protein, 9 aa, Artificial Sequence
  Peptide Derived from Human Papillomavirus
TVPNEQYEL

SEQ ID NO: 7266 - protein, 11 aa, Artificial Sequence
  Peptide Derived from Human Papillomavirus
TVRFSRVGQKA

SEQ ID NO: 7267 - protein, 10 aa, Artificial Sequence
  Peptide Derived from Human Papillomavirus
TVSTQSYENI

SEQ ID NO: 7268 - protein, 11 aa, Artificial Sequence
  Peptide Derived from Human Papillomavirus
VARLGLYSRNT

SEQ ID NO: 7269 - protein, 9 aa, Artificial Sequence
  Peptide Derived from Human Papillomavirus
VIPKVEGST

SEQ ID NO: 7270 - protein, 10 aa, Artificial Sequence
  Peptide Derived from Human Papillomavirus
VIPKVEGSTI

SEQ ID NO: 7271 - protein, 11 aa, Artificial Sequence
  Peptide Derived from Human Papillomavirus
VIPKVEGSTIA

SEQ ID NO: 7272 - protein, 8 aa, Artificial Sequence
  Peptide Derived from Human Papillomavirus
VLHPPAPA

SEQ ID NO: 7273 - protein, 10 aa, Artificial Sequence
  Peptide Derived from Human Papillomavirus
VLHPPAPAEA

SEQ ID NO: 7274 - protein, 8 aa, Artificial Sequence
  Peptide Derived from Human Papillomavirus
VLHPSYFI

SEQ ID NO: 7275 - protein, 9 aa, Artificial Sequence
  Peptide Derived from Human Papillomavirus
VLHPSYFIL

SEQ ID NO: 7276 - protein, 11 aa, Artificial Sequence
  Peptide Derived from Human Papillomavirus
VMSGPDIPSPL

SEQ ID NO: 7277 - protein, 8 aa, Artificial Sequence
  Peptide Derived from Human Papillomavirus
VTTSADTT

SEQ ID NO: 7278 - protein, 10 aa, Artificial Sequence
  Peptide Derived from Human Papillomavirus
VTTSADTTPA

SEQ ID NO: 7279 - protein, 11 aa, Artificial Sequence
  Peptide Derived from Human Papillomavirus
VTTSADTTPAI

SEQ ID NO: 7280 - protein, 9 aa, Artificial Sequence
  Peptide Derived from Human Papillomavirus
VTVDTVGPL

SEQ ID NO: 7281 - protein, 8 aa, Artificial Sequence
  Peptide Derived from Human Papillomavirus
VVDGADFV

SEQ ID NO: 7282 - protein, 9 aa, Artificial Sequence
  Peptide Derived from Human Papillomavirus
VVDGADFVL

SEQ ID NO: 7283 - protein, 8 aa, Artificial Sequence
  Peptide Derived from Human Papillomavirus
VVDPAFLT

SEQ ID NO: 7284 - protein, 9 aa, Artificial Sequence
  Peptide Derived from Human Papillomavirus
VVSTDSSNV

SEQ ID NO: 7285 - protein, 10 aa, Artificial Sequence
  Peptide Derived from Human Papillomavirus
VVSTDSSNVT

SEQ ID NO: 7286 - protein, 8 aa, Artificial Sequence
  Peptide Derived from Human Papillomavirus
YADDVDNV

SEQ ID NO: 7287 - protein, 10 aa, Artificial Sequence
  Peptide Derived from Human Papillomavirus
YADDVDNVHT

SEQ ID NO: 7288 - protein, 8 aa, Artificial Sequence
  Peptide Derived from Human Papillomavirus
YQDLSPIV

SEQ ID NO: 7289 - protein, 10 aa, Artificial Sequence
  Peptide Derived from Human Papillomavirus
YQDLSPIVPL

SEQ ID NO: 7290 - protein, 9 aa, Artificial Sequence
  Peptide Derived from Human Papillomavirus
YQTCKATGT

SEQ ID NO: 7291 - protein, 10 aa, Artificial Sequence
  Peptide Derived from Human Papillomavirus
YVPIGTDPPT

SEQ ID NO: 7292 - protein, 11 aa, Artificial Sequence
  Peptide Derived from Human Papillomavirus
YVPIGTDPPTA

SEQ ID NO: 7293 - protein, 11 aa, Artificial Sequence
  Peptide Derived from Human Papillomavirus
AAAFLKSNCQA

SEQ ID NO: 7294 - protein, 8 aa, Artificial Sequence
  Peptide Derived from Human Papillomavirus
AAETQVTV

SEQ ID NO: 7295 - protein, 10 aa, Artificial Sequence
  Peptide Derived from Human Papillomavirus
AAETQVTVNT

SEQ ID NO: 7296 - protein, 10 aa, Artificial Sequence
  Peptide Derived from Human Papillomavirus
AAFLKSNCQA

SEQ ID NO: 7297 - protein, 8 aa, Artificial Sequence
  Peptide Derived from Human Papillomavirus
AALYWYRT

SEQ ID NO: 7298 - protein, 10 aa, Artificial Sequence
  Peptide Derived from Human Papillomavirus
AALYWYRTGI

SEQ ID NO: 7299 - protein, 10 aa, Artificial Sequence
  Peptide Derived from Human Papillomavirus
AAMLAVFKDI

SEQ ID NO: 7300 - protein, 8 aa, Artificial Sequence
  Peptide Derived from Human Papillomavirus
AIFGVNPT

SEQ ID NO: 7301 - protein, 9 aa, Artificial Sequence
  Peptide Derived from Human Papillomavirus
AIFGVNPTV

SEQ ID NO: 7302 - protein, 10 aa, Artificial Sequence
  Peptide Derived from Human Papillomavirus
AIFGVNPTVA

SEQ ID NO: 7303 - protein, 9 aa, Artificial Sequence
  Peptide Derived from Human Papillomavirus
ALDGNPISI

SEQ ID NO: 7304 - protein, 8 aa, Artificial Sequence
  Peptide Derived from Human Papillomavirus
ALFHAQEV

SEQ ID NO: 7305 - protein, 9 aa, Artificial Sequence
  Peptide Derived from Human Papillomavirus
ALKEFLKGT

SEQ ID NO: 7306 - protein, 9 aa, Artificial Sequence
  Peptide Derived from Human Papillomavirus
ALYWYRTGI

SEQ ID NO: 7307 - protein, 9 aa, Artificial Sequence
  Peptide Derived from Human Papillomavirus
AMLAVFKDI

SEQ ID NO: 7308 - protein, 9 aa, Artificial Sequence
  Peptide Derived from Human Papillomavirus
AMLDDATHT

SEQ ID NO: 7309 - protein, 10 aa, Artificial Sequence
  Peptide Derived from Human Papillomavirus
AQALFHAQEV

SEQ ID NO: 7310 - protein, 8 aa, Artificial Sequence
  Peptide Derived from Human Papillomavirus
AQEVQNDA

SEQ ID NO: 7311 - protein, 10 aa, Artificial Sequence
  Peptide Derived from Human Papillomavirus
AQEVQNDAQV

SEQ ID NO: 7312 - protein, 11 aa, Artificial Sequence
  Peptide Derived from Human Papillomavirus
AQEVQNDAQVL

SEQ ID NO: 7313 - protein, 8 aa, Artificial Sequence
  Peptide Derived from Human Papillomavirus
AQKRQMNM

SEQ ID NO: 7314 - protein, 10 aa, Artificial Sequence
  Peptide Derived from Human Papillomavirus
AQLADCNSNA

SEQ ID NO: 7315 - protein, 11 aa, Artificial Sequence
  Peptide Derived from Human Papillomavirus
AQLADCNSNAA

SEQ ID NO: 7316 - protein, 8 aa, Artificial Sequence
  Peptide Derived from Human Papillomavirus
ATDTGSDM

SEQ ID NO: 7317 - protein, 9 aa, Artificial Sequence
  Peptide Derived from Human Papillomavirus
ATDTGSDMV

SEQ ID NO: 7318 - protein, 10 aa, Artificial Sequence
  Peptide Derived from Human Papillomavirus
ATLYAHIQCL

SEQ ID NO: 7319 - protein, 9 aa, Artificial Sequence
  Peptide Derived from Human Papillomavirus
AVFKDIYGL

SEQ ID NO: 7320 - protein, 10 aa, Artificial Sequence
  Peptide Derived from Human Papillomavirus
AVMCRHYKRA

SEQ ID NO: 7321 - protein, 11 aa, Artificial Sequence
  Peptide Derived from Human Papillomavirus
CAVMCRHYKRA

SEQ ID NO: 7322 - protein, 8 aa, Artificial Sequence
  Peptide Derived from Human Papillomavirus
CILLYGPA

SEQ ID NO: 7323 - protein, 10 aa, Artificial Sequence
  Peptide Derived from Human Papillomavirus
CILLYGPANT

SEQ ID NO: 7324 - protein, 8 aa, Artificial Sequence
  Peptide Derived from Human Papillomavirus
CLDCKWGV

SEQ ID NO: 7325 - protein, 9 aa, Artificial Sequence
  Peptide Derived from Human Papillomavirus
CLDCKWGVL

SEQ ID NO: 7326 - protein, 10 aa, Artificial Sequence
  Peptide Derived from Human Papillomavirus
CLDCKWGVLI

SEQ ID NO: 7327 - protein, 11 aa, Artificial Sequence
  Peptide Derived from Human Papillomavirus
CLDCKWGVLIL

SEQ ID NO: 7328 - protein, 9 aa, Artificial Sequence
  Peptide Derived from Human Papillomavirus
CMLIEPPKL

SEQ ID NO: 7329 - protein, 10 aa, Artificial Sequence
  Peptide Derived from Human Papillomavirus
CQAKYLKDCA

SEQ ID NO: 7330 - protein, 11 aa, Artificial Sequence
  Peptide Derived from Human Papillomavirus
CQAKYLKDCAV

SEQ ID NO: 7331 - protein, 8 aa, Artificial Sequence
  Peptide Derived from Human Papillomavirus
CTDWVMAI

SEQ ID NO: 7332 - protein, 11 aa, Artificial Sequence
  Peptide Derived from Human Papillomavirus
CTDWVMAIFGV

SEQ ID NO: 7333 - protein, 10 aa, Artificial Sequence
  Peptide Derived from Human Papillomavirus
CVTGQNTRPL

SEQ ID NO: 7334 - protein, 11 aa, Artificial Sequence
  Peptide Derived from Human Papillomavirus
DADTEGIPFGT

SEQ ID NO: 7335 - protein, 8 aa, Artificial Sequence
  Peptide Derived from Human Papillomavirus
DAQVLHLL

SEQ ID NO: 7336 - protein, 8 aa, Artificial Sequence
  Peptide Derived from Human Papillomavirus
DATHTCWT

SEQ ID NO: 7337 - protein, 8 aa, Artificial Sequence
  Peptide Derived from Human Papillomavirus
DIYGLSFT

SEQ ID NO: 7338 - protein, 10 aa, Artificial Sequence
  Peptide Derived from Human Papillomavirus
DIYGLSFTDL

SEQ ID NO: 7339 - protein, 11 aa, Artificial Sequence
  Peptide Derived from Human Papillomavirus
DIYGLSFTDLV

SEQ ID NO: 7340 - protein, 9 aa, Artificial Sequence
  Peptide Derived from Human Papillomavirus
DLHEDDEDA

SEQ ID NO: 7341 - protein, 11 aa, Artificial Sequence
  Peptide Derived from Human Papillomavirus
DLHEDDEDADT

SEQ ID NO: 7342 - protein, 9 aa, Artificial Sequence
  Peptide Derived from Human Papillomavirus
DLSDMVQWA

SEQ ID NO: 7343 - protein, 9 aa, Artificial Sequence
  Peptide Derived from Human Papillomavirus
DLSPRLQEI

SEQ ID NO: 7344 - protein, 11 aa, Artificial Sequence
  Peptide Derived from Human Papillomavirus
DLSPRLQEISL

SEQ ID NO: 7345 - protein, 8 aa, Artificial Sequence
  Peptide Derived from Human Papillomavirus
DLTDESDM

SEQ ID NO: 7346 - protein, 9 aa, Artificial Sequence
  Peptide Derived from Human Papillomavirus
DLTDESDMA

SEQ ID NO: 7347 - protein, 11 aa, Artificial Sequence
  Peptide Derived from Human Papillomavirus
DLVRNFKSDKT

SEQ ID NO: 7348 - protein, 9 aa, Artificial Sequence
  Peptide Derived from Human Papillomavirus
DMAFQYAQL

SEQ ID NO: 7349 - protein, 10 aa, Artificial Sequence
  Peptide Derived from Human Papillomavirus
DMAFQYAQLA

SEQ ID NO: 7350 - protein, 8 aa, Artificial Sequence
  Peptide Derived from Human Papillomavirus
DMVDFIDT

SEQ ID NO: 7351 - protein, 10 aa, Artificial Sequence
  Peptide Derived from Human Papillomavirus
DMVDFIDTQL

SEQ ID NO: 7352 - protein, 11 aa, Artificial Sequence
  Peptide Derived from Human Papillomavirus
DMVQWAFDNDL

SEQ ID NO: 7353 - protein, 8 aa, Artificial Sequence
  Peptide Derived from Human Papillomavirus
DTDLSPRL

SEQ ID NO: 7354 - protein, 11 aa, Artificial Sequence
  Peptide Derived from Human Papillomavirus
DTDLSPRLQEI

SEQ ID NO: 7355 - protein, 9 aa, Artificial Sequence
  Peptide Derived from Human Papillomavirus
DTEGIPFGT

SEQ ID NO: 7356 - protein, 10 aa, Artificial Sequence
  Peptide Derived from Human Papillomavirus
DTGSDMVDFI

SEQ ID NO: 7357 - protein, 10 aa, Artificial Sequence
  Peptide Derived from Human Papillomavirus
DTKVAMLDDA

SEQ ID NO: 7358 - protein, 11 aa, Artificial Sequence
  Peptide Derived from Human Papillomavirus
DTKVAMLDDAT

SEQ ID NO: 7359 - protein, 9 aa, Artificial Sequence
  Peptide Derived from Human Papillomavirus
DTPEWIQRL

SEQ ID NO: 7360 - protein, 10 aa, Artificial Sequence
  Peptide Derived from Human Papillomavirus
DTPEWIQRLT

SEQ ID NO: 7361 - protein, 11 aa, Artificial Sequence
  Peptide Derived from Human Papillomavirus
DTPEWIQRLTI

SEQ ID NO: 7362 - protein, 10 aa, Artificial Sequence
  Peptide Derived from Human Papillomavirus
DTQLSICEQA

SEQ ID NO: 7363 - protein, 10 aa, Artificial Sequence
  Peptide Derived from Human Papillomavirus
DVISDDEDET

SEQ ID NO: 7364 - protein, 11 aa, Artificial Sequence
  Peptide Derived from Human Papillomavirus
DVISDDEDETA

SEQ ID NO: 7365 - protein, 8 aa, Artificial Sequence
  Peptide Derived from Human Papillomavirus
EAAETQVT

SEQ ID NO: 7366 - protein, 9 aa, Artificial Sequence
  Peptide Derived from Human Papillomavirus
EAAETQVTV

SEQ ID NO: 7367 - protein, 11 aa, Artificial Sequence
  Peptide Derived from Human Papillomavirus
EAAETQVTVNT

SEQ ID NO: 7368 - protein, 11 aa, Artificial Sequence
  Peptide Derived from Human Papillomavirus
EISLNSGHKKA

SEQ ID NO: 7369 - protein, 8 aa, Artificial Sequence
  Peptide Derived from Human Papillomavirus
ELKELLQA

SEQ ID NO: 7370 - protein, 10 aa, Artificial Sequence
  Peptide Derived from Human Papillomavirus
ELLQASNKKA

SEQ ID NO: 7371 - protein, 11 aa, Artificial Sequence
  Peptide Derived from Human Papillomavirus
ELLQASNKKAA

SEQ ID NO: 7372 - protein, 8 aa, Artificial Sequence
  Peptide Derived from Human Papillomavirus
EQAEQETA

SEQ ID NO: 7373 - protein, 10 aa, Artificial Sequence
  Peptide Derived from Human Papillomavirus
EQAEQETAQA

SEQ ID NO: 7374 - protein, 11 aa, Artificial Sequence
  Peptide Derived from Human Papillomavirus
EQAEQETAQAL

SEQ ID NO: 7375 - protein, 8 aa, Artificial Sequence
  Peptide Derived from Human Papillomavirus
EQETAQAL

SEQ ID NO: 7376 - protein, 11 aa, Artificial Sequence
  Peptide Derived from Human Papillomavirus
EQETAQALFHA

SEQ ID NO: 7377 - protein, 9 aa, Artificial Sequence
  Peptide Derived from Human Papillomavirus
EQLSVDTDL

SEQ ID NO: 7378 - protein, 9 aa, Artificial Sequence
  Peptide Derived from Human Papillomavirus
ETAQALFHA

SEQ ID NO: 7379 - protein, 10 aa, Artificial Sequence
  Peptide Derived from Human Papillomavirus
ETATDTGSDM

SEQ ID NO: 7380 - protein, 11 aa, Artificial Sequence
  Peptide Derived from Human Papillomavirus
ETATDTGSDMV

SEQ ID NO: 7381 - protein, 11 aa, Artificial Sequence
  Peptide Derived from Human Papillomavirus
ETCMLIEPPKL

SEQ ID NO: 7382 - protein, 8 aa, Artificial Sequence
  Peptide Derived from Human Papillomavirus
ETIVEKKT

SEQ ID NO: 7383 - protein, 11 aa, Artificial Sequence
  Peptide Derived from Human Papillomavirus
ETIVEKKTGDV

SEQ ID NO: 7384 - protein, 8 aa, Artificial Sequence
  Peptide Derived from Human Papillomavirus
ETQVTVNT

SEQ ID NO: 7385 - protein, 10 aa, Artificial Sequence
  Peptide Derived from Human Papillomavirus
ETQVTVNTNA

SEQ ID NO: 7386 - protein, 9 aa, Artificial Sequence
  Peptide Derived from Human Papillomavirus
EVEAAETQV

SEQ ID NO: 7387 - protein, 10 aa, Artificial Sequence
  Peptide Derived from Human Papillomavirus
EVEAAETQVT

SEQ ID NO: 7388 - protein, 11 aa, Artificial Sequence
  Peptide Derived from Human Papillomavirus
EVEAAETQVTV

SEQ ID NO: 7389 - protein, 8 aa, Artificial Sequence
  Peptide Derived from Human Papillomavirus
EVQNDAQV

SEQ ID NO: 7390 - protein, 9 aa, Artificial Sequence
  Peptide Derived from Human Papillomavirus
EVQNDAQVL

SEQ ID NO: 7391 - protein, 11 aa, Artificial Sequence
  Peptide Derived from Human Papillomavirus
EVQNDAQVLHL

SEQ ID NO: 7392 - protein, 10 aa, Artificial Sequence
  Peptide Derived from Human Papillomavirus
EVSGDTPEWI

SEQ ID NO: 7393 - protein, 11 aa, Artificial Sequence
  Peptide Derived from Human Papillomavirus
FAGGSKENSPL

SEQ ID NO: 7394 - protein, 8 aa, Artificial Sequence
  Peptide Derived from Human Papillomavirus
FIDTQLSI

SEQ ID NO: 7395 - protein, 8 aa, Artificial Sequence
  Peptide Derived from Human Papillomavirus
FIHFLQGA

SEQ ID NO: 7396 - protein, 9 aa, Artificial Sequence
  Peptide Derived from Human Papillomavirus
FIHFLQGAI

SEQ ID NO: 7397 - protein, 10 aa, Artificial Sequence
  Peptide Derived from Human Papillomavirus
FIHFLQGAII

SEQ ID NO: 7398 - protein, 8 aa, Artificial Sequence
  Peptide Derived from Human Papillomavirus
FISFLRAL

SEQ ID NO: 7399 - protein, 11 aa, Artificial Sequence
  Peptide Derived from Human Papillomavirus
FLKGTPKKNCI

SEQ ID NO: 7400 - protein, 8 aa, Artificial Sequence
  Peptide Derived from Human Papillomavirus
FLKSNCQA

SEQ ID NO: 7401 - protein, 11 aa, Artificial Sequence
  Peptide Derived from Human Papillomavirus
FLKSNCQAKYL

SEQ ID NO: 7402 - protein, 10 aa, Artificial Sequence
  Peptide Derived from Human Papillomavirus
FLQGAIISFV

SEQ ID NO: 7403 - protein, 9 aa, Artificial Sequence
  Peptide Derived from Human Papillomavirus
FLRALKEFL

SEQ ID NO: 7404 - protein, 10 aa, Artificial Sequence
  Peptide Derived from Human Papillomavirus
FLRYQGVEFI

SEQ ID NO: 7405 - protein, 10 aa, Artificial Sequence
  Peptide Derived from Human Papillomavirus
FVETIVEKKT

SEQ ID NO: 7406 - protein, 10 aa, Artificial Sequence
  Peptide Derived from Human Papillomavirus
FVNSNSHFWL

SEQ ID NO: 7407 - protein, 9 aa, Artificial Sequence
  Peptide Derived from Human Papillomavirus
GIDDSNFDL

SEQ ID NO: 7408 - protein, 10 aa, Artificial Sequence
  Peptide Derived from Human Papillomavirus
GIPFGTFKCV

SEQ ID NO: 7409 - protein, 11 aa, Artificial Sequence
  Peptide Derived from Human Papillomavirus
GIPFGTFKCVT

SEQ ID NO: 7410 - protein, 8 aa, Artificial Sequence
  Peptide Derived from Human Papillomavirus
GISNISEV

SEQ ID NO: 7411 - protein, 8 aa, Artificial Sequence
  Peptide Derived from Human Papillomavirus
GLSFTDLV

SEQ ID NO: 7412 - protein, 8 aa, Artificial Sequence
  Peptide Derived from Human Papillomavirus
GLSTLLHV

SEQ ID NO: 7413 - protein, 11 aa, Artificial Sequence
  Peptide Derived from Human Papillomavirus
GLSTLLHVPET

SEQ ID NO: 7414 - protein, 8 aa, Artificial Sequence
  Peptide Derived from Human Papillomavirus
GMSFIHFL

SEQ ID NO: 7415 - protein, 11 aa, Artificial Sequence
  Peptide Derived from Human Papillomavirus
GMSFIHFLQGA

SEQ ID NO: 7416 - protein, 11 aa, Artificial Sequence
  Peptide Derived from Human Papillomavirus
GTFKCVTGQNT

SEQ ID NO: 7417 - protein, 10 aa, Artificial Sequence
  Peptide Derived from Human Papillomavirus
GTGCNGWFFV

SEQ ID NO: 7418 - protein, 8 aa, Artificial Sequence
  Peptide Derived from Human Papillomavirus
GTPKKNCI

SEQ ID NO: 7419 - protein, 9 aa, Artificial Sequence
  Peptide Derived from Human Papillomavirus
GTPKKNCIL

SEQ ID NO: 7420 - protein, 10 aa, Artificial Sequence
  Peptide Derived from Human Papillomavirus
GTPKKNCILL

SEQ ID NO: 7421 - protein, 8 aa, Artificial Sequence
  Peptide Derived from Human Papillomavirus
GVEFISFL

SEQ ID NO: 7422 - protein, 10 aa, Artificial Sequence
  Peptide Derived from Human Papillomavirus
GVEFISFLRA

SEQ ID NO: 7423 - protein, 11 aa, Artificial Sequence
  Peptide Derived from Human Papillomavirus
GVEFISFLRAL

SEQ ID NO: 7424 - protein, 8 aa, Artificial Sequence
  Peptide Derived from Human Papillomavirus
GVLILALL

SEQ ID NO: 7425 - protein, 9 aa, Artificial Sequence
  Peptide Derived from Human Papillomavirus
HAQEVQNDA

SEQ ID NO: 7426 - protein, 11 aa, Artificial Sequence
  Peptide Derived from Human Papillomavirus
HAQEVQNDAQV

SEQ ID NO: 7427 - protein, 11 aa, Artificial Sequence
  Peptide Derived from Human Papillomavirus
HIQCLDCKWGV

SEQ ID NO: 7428 - protein, 8 aa, Artificial Sequence
  Peptide Derived from Human Papillomavirus
HLLKRKFA

SEQ ID NO: 7429 - protein, 11 aa, Artificial Sequence
  Peptide Derived from Human Papillomavirus
HTCWTYFDNYM

SEQ ID NO: 7430 - protein, 8 aa, Artificial Sequence
  Peptide Derived from Human Papillomavirus
HVPETCML

SEQ ID NO: 7431 - protein, 9 aa, Artificial Sequence
  Peptide Derived from Human Papillomavirus
HVPETCMLI

SEQ ID NO: 7432 - protein, 10 aa, Artificial Sequence
  Peptide Derived from Human Papillomavirus
ILLTSNIDPA

SEQ ID NO: 7433 - protein, 9 aa, Artificial Sequence
  Peptide Derived from Human Papillomavirus
ILLYGPANT

SEQ ID NO: 7434 - protein, 10 aa, Artificial Sequence
  Peptide Derived from Human Papillomavirus
IQCLDCKWGV

SEQ ID NO: 7435 - protein, 11 aa, Artificial Sequence
  Peptide Derived from Human Papillomavirus
IQCLDCKWGVL

SEQ ID NO: 7436 - protein, 11 aa, Artificial Sequence
  Peptide Derived from Human Papillomavirus
IQRLTIIQHGI

SEQ ID NO: 7437 - protein, 8 aa, Artificial Sequence
  Peptide Derived from Human Papillomavirus
ITELKELL

SEQ ID NO: 7438 - protein, 10 aa, Artificial Sequence
  Peptide Derived from Human Papillomavirus
ITELKELLQA

SEQ ID NO: 7439 - protein, 9 aa, Artificial Sequence
  Peptide Derived from Human Papillomavirus
IVEKKTGDV

SEQ ID NO: 7440 - protein, 10 aa, Artificial Sequence
  Peptide Derived from Human Papillomavirus
IVEKKTGDVI

SEQ ID NO: 7441 - protein, 10 aa, Artificial Sequence
  Peptide Derived from Human Papillomavirus
IVQFLRYQGV

SEQ ID NO: 7442 - protein, 11 aa, Artificial Sequence
  Peptide Derived from Human Papillomavirus
KAAMLAVFKDI

SEQ ID NO: 7443 - protein, 8 aa, Artificial Sequence
  Peptide Derived from Human Papillomavirus
KAKRRLFT

SEQ ID NO: 7444 - protein, 9 aa, Artificial Sequence
  Peptide Derived from Human Papillomavirus
KAKRRLFTI

SEQ ID NO: 7445 - protein, 11 aa, Artificial Sequence
  Peptide Derived from Human Papillomavirus
KIDEGGDWRPI

SEQ ID NO: 7446 - protein, 8 aa, Artificial Sequence
  Peptide Derived from Human Papillomavirus
KLRSSVAA

SEQ ID NO: 7447 - protein, 9 aa, Artificial Sequence
  Peptide Derived from Human Papillomavirus
KLRSSVAAL

SEQ ID NO: 7448 - protein, 8 aa, Artificial Sequence
  Peptide Derived from Human Papillomavirus
KTLIKPAT

SEQ ID NO: 7449 - protein, 9 aa, Artificial Sequence
  Peptide Derived from Human Papillomavirus
KTLIKPATL

SEQ ID NO: 7450 - protein, 11 aa, Artificial Sequence
  Peptide Derived from Human Papillomavirus
KTLIKPATLYA

SEQ ID NO: 7451 - protein, 8 aa, Artificial Sequence
  Peptide Derived from Human Papillomavirus
KTTCTDWV

SEQ ID NO: 7452 - protein, 9 aa, Artificial Sequence
  Peptide Derived from Human Papillomavirus
KTTCTDWVM

SEQ ID NO: 7453 - protein, 10 aa, Artificial Sequence
  Peptide Derived from Human Papillomavirus
KTTCTDWVMA

SEQ ID NO: 7454 - protein, 11 aa, Artificial Sequence
  Peptide Derived from Human Papillomavirus
KTTCTDWVMAI

SEQ ID NO: 7455 - protein, 8 aa, Artificial Sequence
  Peptide Derived from Human Papillomavirus
KVAMLDDA

SEQ ID NO: 7456 - protein, 9 aa, Artificial Sequence
  Peptide Derived from Human Papillomavirus
KVAMLDDAT

SEQ ID NO: 7457 - protein, 11 aa, Artificial Sequence
  Peptide Derived from Human Papillomavirus
KVAMLDDATHT

SEQ ID NO: 7458 - protein, 8 aa, Artificial Sequence
  Peptide Derived from Human Papillomavirus
LADCNSNA

SEQ ID NO: 7459 - protein, 9 aa, Artificial Sequence
  Peptide Derived from Human Papillomavirus
LADCNSNAA

SEQ ID NO: 7460 - protein, 10 aa, Artificial Sequence
  Peptide Derived from Human Papillomavirus
LADCNSNAAA

SEQ ID NO: 7461 - protein, 8 aa, Artificial Sequence
  Peptide Derived from Human Papillomavirus
LADTKVAM

SEQ ID NO: 7462 - protein, 9 aa, Artificial Sequence
  Peptide Derived from Human Papillomavirus
LADTKVAML

SEQ ID NO: 7463 - protein, 10 aa, Artificial Sequence
  Peptide Derived from Human Papillomavirus
LAVFKDIYGL

SEQ ID NO: 7464 - protein, 11 aa, Artificial Sequence
  Peptide Derived from Human Papillomavirus
LIEPPKLRSSV

SEQ ID NO: 7465 - protein, 9 aa, Artificial Sequence
  Peptide Derived from Human Papillomavirus
LIKPATLYA

SEQ ID NO: 7466 - protein, 11 aa, Artificial Sequence
  Peptide Derived from Human Papillomavirus
LIKPATLYAHI

SEQ ID NO: 7467 - protein, 9 aa, Artificial Sequence
  Peptide Derived from Human Papillomavirus
LLHVPETCM

SEQ ID NO: 7468 - protein, 10 aa, Artificial Sequence
  Peptide Derived from Human Papillomavirus
LLHVPETCML

SEQ ID NO: 7469 - protein, 11 aa, Artificial Sequence
  Peptide Derived from Human Papillomavirus
LLHVPETCMLI

SEQ ID NO: 7470 - protein, 9 aa, Artificial Sequence
  Peptide Derived from Human Papillomavirus
LLQASNKKA

SEQ ID NO: 7471 - protein, 10 aa, Artificial Sequence
  Peptide Derived from Human Papillomavirus
LLQASNKKAA

SEQ ID NO: 7472 - protein, 11 aa, Artificial Sequence
  Peptide Derived from Human Papillomavirus
LLQASNKKAAM

SEQ ID NO: 7473 - protein, 9 aa, Artificial Sequence
  Peptide Derived from Human Papillomavirus
LLQLKCPPI

SEQ ID NO: 7474 - protein, 10 aa, Artificial Sequence
  Peptide Derived from Human Papillomavirus
LLQLKCPPIL

SEQ ID NO: 7475 - protein, 11 aa, Artificial Sequence
  Peptide Derived from Human Papillomavirus
LLQLKCPPILL

SEQ ID NO: 7476 - protein, 11 aa, Artificial Sequence
  Peptide Derived from Human Papillomavirus
LLRYKCGKNRL

SEQ ID NO: 7477 - protein, 9 aa, Artificial Sequence
  Peptide Derived from Human Papillomavirus
LLTSNIDPA

SEQ ID NO: 7478 - protein, 8 aa, Artificial Sequence
  Peptide Derived from Human Papillomavirus
LLYGPANT

SEQ ID NO: 7479 - protein, 8 aa, Artificial Sequence
  Peptide Derived from Human Papillomavirus
LQASNKKA

SEQ ID NO: 7480 - protein, 9 aa, Artificial Sequence
  Peptide Derived from Human Papillomavirus
LQASNKKAA

SEQ ID NO: 7481 - protein, 10 aa, Artificial Sequence
  Peptide Derived from Human Papillomavirus
LQASNKKAAM

SEQ ID NO: 7482 - protein, 11 aa, Artificial Sequence
  Peptide Derived from Human Papillomavirus
LQASNKKAAML

SEQ ID NO: 7483 - protein, 9 aa, Artificial Sequence
  Peptide Derived from Human Papillomavirus
LQGAIISFV

SEQ ID NO: 7484 - protein, 8 aa, Artificial Sequence
  Peptide Derived from Human Papillomavirus
LQLKCPPI

SEQ ID NO: 7485 - protein, 9 aa, Artificial Sequence
  Peptide Derived from Human Papillomavirus
LQLKCPPIL

SEQ ID NO: 7486 - protein, 10 aa, Artificial Sequence
  Peptide Derived from Human Papillomavirus
LQLKCPPILL

SEQ ID NO: 7487 - protein, 11 aa, Artificial Sequence
  Peptide Derived from Human Papillomavirus
LQLKCPPILLT

SEQ ID NO: 7488 - protein, 8 aa, Artificial Sequence
  Peptide Derived from Human Papillomavirus
LTDESDMA

SEQ ID NO: 7489 - protein, 8 aa, Artificial Sequence
  Peptide Derived from Human Papillomavirus
LTIIQHGI

SEQ ID NO: 7490 - protein, 8 aa, Artificial Sequence
  Peptide Derived from Human Papillomavirus
LTSNIDPA

SEQ ID NO: 7491 - protein, 9 aa, Artificial Sequence
  Peptide Derived from Human Papillomavirus
LTVAKGLST

SEQ ID NO: 7492 - protein, 10 aa, Artificial Sequence
  Peptide Derived from Human Papillomavirus
LTVAKGLSTL

SEQ ID NO: 7493 - protein, 11 aa, Artificial Sequence
  Peptide Derived from Human Papillomavirus
LTVAKGLSTLL

SEQ ID NO: 7494 - protein, 10 aa, Artificial Sequence
  Peptide Derived from Human Papillomavirus
LVRNFKSDKT

SEQ ID NO: 7495 - protein, 11 aa, Artificial Sequence
  Peptide Derived from Human Papillomavirus
LVRNFKSDKTT

SEQ ID NO: 7496 - protein, 8 aa, Artificial Sequence
  Peptide Derived from Human Papillomavirus
MAFQYAQL

SEQ ID NO: 7497 - protein, 9 aa, Artificial Sequence
  Peptide Derived from Human Papillomavirus
MAFQYAQLA

SEQ ID NO: 7498 - protein, 9 aa, Artificial Sequence
  Peptide Derived from Human Papillomavirus
MAIFGVNPT

SEQ ID NO: 7499 - protein, 10 aa, Artificial Sequence
  Peptide Derived from Human Papillomavirus
MAIFGVNPTV

SEQ ID NO: 7500 - protein, 11 aa, Artificial Sequence
  Peptide Derived from Human Papillomavirus
MAIFGVNPTVA

SEQ ID NO: 7501 - protein, 8 aa, Artificial Sequence
  Peptide Derived from Human Papillomavirus
MLAVFKDI

SEQ ID NO: 7502 - protein, 11 aa, Artificial Sequence
  Peptide Derived from Human Papillomavirus
MLAVFKDIYGL

SEQ ID NO: 7503 - protein, 8 aa, Artificial Sequence
  Peptide Derived from Human Papillomavirus
MLDDATHT

SEQ ID NO: 7504 - protein, 11 aa, Artificial Sequence
  Peptide Derived from Human Papillomavirus
MLDDATHTCWT

SEQ ID NO: 7505 - protein, 8 aa, Artificial Sequence
  Peptide Derived from Human Papillomavirus
MLIEPPKL

SEQ ID NO: 7506 - protein, 9 aa, Artificial Sequence
  Peptide Derived from Human Papillomavirus
MVDFIDTQL

SEQ ID NO: 7507 - protein, 11 aa, Artificial Sequence
  Peptide Derived from Human Papillomavirus
MVDFIDTQLSI

SEQ ID NO: 7508 - protein, 10 aa, Artificial Sequence
  Peptide Derived from Human Papillomavirus
MVQWAFDNDL

SEQ ID NO: 7509 - protein, 11 aa, Artificial Sequence
  Peptide Derived from Human Papillomavirus
MVQWAFDNDLT

SEQ ID NO: 7510 - protein, 8 aa, Artificial Sequence
  Peptide Derived from Human Papillomavirus
NAENGGSV

SEQ ID NO: 7511 - protein, 11 aa, Artificial Sequence
  Peptide Derived from Human Papillomavirus
NAENGGSVHST

SEQ ID NO: 7512 - protein, 11 aa, Artificial Sequence
  Peptide Derived from Human Papillomavirus
NAENVDPHCSI

SEQ ID NO: 7513 - protein, 8 aa, Artificial Sequence
  Peptide Derived from Human Papillomavirus
NALDGNPI

SEQ ID NO: 7514 - protein, 10 aa, Artificial Sequence
  Peptide Derived from Human Papillomavirus
NALDGNPISI

SEQ ID NO: 7515 - protein, 9 aa, Artificial Sequence
  Peptide Derived from Human Papillomavirus
NISEVSGDT

SEQ ID NO: 7516 - protein, 9 aa, Artificial Sequence
  Peptide Derived from Human Papillomavirus
NTGKSYFGM

SEQ ID NO: 7517 - protein, 10 aa, Artificial Sequence
  Peptide Derived from Human Papillomavirus
NTNAENGGSV

SEQ ID NO: 7518 - protein, 8 aa, Artificial Sequence
  Peptide Derived from Human Papillomavirus
NVDPHCSI

SEQ ID NO: 7519 - protein, 9 aa, Artificial Sequence
  Peptide Derived from Human Papillomavirus
NVDPHCSIT

SEQ ID NO: 7520 - protein, 11 aa, Artificial Sequence
  Peptide Derived from Human Papillomavirus
NVDPHCSITEL

SEQ ID NO: 7521 - protein, 10 aa, Artificial Sequence
  Peptide Derived from Human Papillomavirus
PAKDNKWPYL

SEQ ID NO: 7522 - protein, 11 aa, Artificial Sequence
  Peptide Derived from Human Papillomavirus
PANTGKSYFGM

SEQ ID NO: 7523 - protein, 8 aa, Artificial Sequence
  Peptide Derived from Human Papillomavirus
PATLYAHI

SEQ ID NO: 7524 - protein, 11 aa, Artificial Sequence
  Peptide Derived from Human Papillomavirus
PATLYAHIQCL

SEQ ID NO: 7525 - protein, 8 aa, Artificial Sequence
  Peptide Derived from Human Papillomavirus
PILLTSNI

SEQ ID NO: 7526 - protein, 11 aa, Artificial Sequence
  Peptide Derived from Human Papillomavirus
PILLTSNIDPA

SEQ ID NO: 7527 - protein, 11 aa, Artificial Sequence
  Peptide Derived from Human Papillomavirus
PISIDRKHKPL

SEQ ID NO: 7528 - protein, 11 aa, Artificial Sequence
  Peptide Derived from Human Papillomavirus
PIVQFLRYQGV

SEQ ID NO: 7529 - protein, 8 aa, Artificial Sequence
  Peptide Derived from Human Papillomavirus
PLADTKVA

SEQ ID NO: 7530 - protein, 9 aa, Artificial Sequence
  Peptide Derived from Human Papillomavirus
PLADTKVAM

SEQ ID NO: 7531 - protein, 10 aa, Artificial Sequence
  Peptide Derived from Human Papillomavirus
PLADTKVAML

SEQ ID NO: 7532 - protein, 8 aa, Artificial Sequence
  Peptide Derived from Human Papillomavirus
PLGEQLSV

SEQ ID NO: 7533 - protein, 10 aa, Artificial Sequence
  Peptide Derived from Human Papillomavirus
PLGEQLSVDT

SEQ ID NO: 7534 - protein, 10 aa, Artificial Sequence
  Peptide Derived from Human Papillomavirus
PLLQLKCPPI

SEQ ID NO: 7535 - protein, 11 aa, Artificial Sequence
  Peptide Derived from Human Papillomavirus
PLLQLKCPPIL

SEQ ID NO: 7536 - protein, 9 aa, Artificial Sequence
  Peptide Derived from Human Papillomavirus
PTVAEGFKT

SEQ ID NO: 7537 - protein, 10 aa, Artificial Sequence
  Peptide Derived from Human Papillomavirus
PTVAEGFKTL

SEQ ID NO: 7538 - protein, 11 aa, Artificial Sequence
  Peptide Derived from Human Papillomavirus
PTVAEGFKTLI

SEQ ID NO: 7539 - protein, 9 aa, Artificial Sequence
  Peptide Derived from Human Papillomavirus
QAEQETAQA

SEQ ID NO: 7540 - protein, 10 aa, Artificial Sequence
  Peptide Derived from Human Papillomavirus
QAEQETAQAL

SEQ ID NO: 7541 - protein, 9 aa, Artificial Sequence
  Peptide Derived from Human Papillomavirus
QAKYLKDCA

SEQ ID NO: 7542 - protein, 10 aa, Artificial Sequence
  Peptide Derived from Human Papillomavirus
QAKYLKDCAV

SEQ ID NO: 7543 - protein, 11 aa, Artificial Sequence
  Peptide Derived from Human Papillomavirus
QAKYLKDCAVM

SEQ ID NO: 7544 - protein, 9 aa, Artificial Sequence
  Peptide Derived from Human Papillomavirus
QALFHAQEV

SEQ ID NO: 7545 - protein, 8 aa, Artificial Sequence
  Peptide Derived from Human Papillomavirus
QASNKKAA

SEQ ID NO: 7546 - protein, 9 aa, Artificial Sequence
  Peptide Derived from Human Papillomavirus
QASNKKAAM

SEQ ID NO: 7547 - protein, 10 aa, Artificial Sequence
  Peptide Derived from Human Papillomavirus
QASNKKAAML

SEQ ID NO: 7548 - protein, 11 aa, Artificial Sequence
  Peptide Derived from Human Papillomavirus
QASNKKAAMLA

SEQ ID NO: 7549 - protein, 9 aa, Artificial Sequence
  Peptide Derived from Human Papillomavirus
QLADCNSNA

SEQ ID NO: 7550 - protein, 10 aa, Artificial Sequence
  Peptide Derived from Human Papillomavirus
QLADCNSNAA

SEQ ID NO: 7551 - protein, 11 aa, Artificial Sequence
  Peptide Derived from Human Papillomavirus
QLADCNSNAAA

SEQ ID NO: 7552 - protein, 8 aa, Artificial Sequence
  Peptide Derived from Human Papillomavirus
QLKCPPIL

SEQ ID NO: 7553 - protein, 9 aa, Artificial Sequence
  Peptide Derived from Human Papillomavirus
QLKCPPILL

SEQ ID NO: 7554 - protein, 10 aa, Artificial Sequence
  Peptide Derived from Human Papillomavirus
QLKCPPILLT

SEQ ID NO: 7555 - protein, 8 aa, Artificial Sequence
  Peptide Derived from Human Papillomavirus
QLSICEQA

SEQ ID NO: 7556 - protein, 8 aa, Artificial Sequence
  Peptide Derived from Human Papillomavirus
QLSVDTDL

SEQ ID NO: 7557 - protein, 8 aa, Artificial Sequence
  Peptide Derived from Human Papillomavirus
QMNMSQWI

SEQ ID NO: 7558 - protein, 11 aa, Artificial Sequence
  Peptide Derived from Human Papillomavirus
QVLHLLKRKFA

SEQ ID NO: 7559 - protein, 8 aa, Artificial Sequence
  Peptide Derived from Human Papillomavirus
QVTVNTNA

SEQ ID NO: 7560 - protein, 10 aa, Artificial Sequence
  Peptide Derived from Human Papillomavirus
RALKEFLKGT

SEQ ID NO: 7561 - protein, 9 aa, Artificial Sequence
  Peptide Derived from Human Papillomavirus
RAQKRQMNM

SEQ ID NO: 7562 - protein, 11 aa, Artificial Sequence
  Peptide Derived from Human Papillomavirus
RLDLHEDDEDA

SEQ ID NO: 7563 - protein, 9 aa, Artificial Sequence
  Peptide Derived from Human Papillomavirus
RLTIIQHGI

SEQ ID NO: 7564 - protein, 8 aa, Artificial Sequence
  Peptide Derived from Human Papillomavirus
RLTVAKGL

SEQ ID NO: 7565 - protein, 10 aa, Artificial Sequence
  Peptide Derived from Human Papillomavirus
RLTVAKGLST

SEQ ID NO: 7566 - protein, 11 aa, Artificial Sequence
  Peptide Derived from Human Papillomavirus
RLTVAKGLSTL

SEQ ID NO: 7567 - protein, 9 aa, Artificial Sequence
  Peptide Derived from Human Papillomavirus
RQMNMSQWI

SEQ ID NO: 7568 - protein, 10 aa, Artificial Sequence
  Peptide Derived from Human Papillomavirus
RTGISNISEV

SEQ ID NO: 7569 - protein, 8 aa, Artificial Sequence
  Peptide Derived from Human Papillomavirus
RTWSRLDL

SEQ ID NO: 7570 - protein, 10 aa, Artificial Sequence
  Peptide Derived from Human Papillomavirus
RVTVFTFPHA

SEQ ID NO: 7571 - protein, 10 aa, Artificial Sequence
  Peptide Derived from Human Papillomavirus
SICEQAEQET

SEQ ID NO: 7572 - protein, 11 aa, Artificial Sequence
  Peptide Derived from Human Papillomavirus
SICEQAEQETA

SEQ ID NO: 7573 - protein, 9 aa, Artificial Sequence
  Peptide Derived from Human Papillomavirus
SIDRKHKPL

SEQ ID NO: 7574 - protein, 10 aa, Artificial Sequence
  Peptide Derived from Human Papillomavirus
SIDRKHKPLL

SEQ ID NO: 7575 - protein, 8 aa, Artificial Sequence
  Peptide Derived from Human Papillomavirus
SITELKEL

SEQ ID NO: 7576 - protein, 9 aa, Artificial Sequence
  Peptide Derived from Human Papillomavirus
SITELKELL

SEQ ID NO: 7577 - protein, 11 aa, Artificial Sequence
  Peptide Derived from Human Papillomavirus
SITELKELLQA

SEQ ID NO: 7578 - protein, 9 aa, Artificial Sequence
  Peptide Derived from Human Papillomavirus
SLNSGHKKA

SEQ ID NO: 7579 - protein, 11 aa, Artificial Sequence
  Peptide Derived from Human Papillomavirus
SQWIKYRCSKI

SEQ ID NO: 7580 - protein, 9 aa, Artificial Sequence
  Peptide Derived from Human Papillomavirus
STLLHVPET

SEQ ID NO: 7581 - protein, 11 aa, Artificial Sequence
  Peptide Derived from Human Papillomavirus
STLLHVPETCM

SEQ ID NO: 7582 - protein, 10 aa, Artificial Sequence
  Peptide Derived from Human Papillomavirus
SVAALYWYRT

SEQ ID NO: 7583 - protein, 10 aa, Artificial Sequence
  Peptide Derived from Human Papillomavirus
SVDTDLSPRL

SEQ ID NO: 7584 - protein, 8 aa, Artificial Sequence
  Peptide Derived from Human Papillomavirus
TAQALFHA

SEQ ID NO: 7585 - protein, 11 aa, Artificial Sequence
  Peptide Derived from Human Papillomavirus
TAQALFHAQEV

SEQ ID NO: 7586 - protein, 9 aa, Artificial Sequence
  Peptide Derived from Human Papillomavirus
TATDTGSDM

SEQ ID NO: 7587 - protein, 10 aa, Artificial Sequence
  Peptide Derived from Human Papillomavirus
TATDTGSDMV

SEQ ID NO: 7588 - protein, 10 aa, Artificial Sequence
  Peptide Derived from Human Papillomavirus
TIVEKKTGDV

SEQ ID NO: 7589 - protein, 11 aa, Artificial Sequence
  Peptide Derived from Human Papillomavirus
TIVEKKTGDVI

SEQ ID NO: 7590 - protein, 8 aa, Artificial Sequence
  Peptide Derived from Human Papillomavirus
TLIKPATL

SEQ ID NO: 7591 - protein, 10 aa, Artificial Sequence
  Peptide Derived from Human Papillomavirus
TLIKPATLYA

SEQ ID NO: 7592 - protein, 8 aa, Artificial Sequence
  Peptide Derived from Human Papillomavirus
TLLHVPET

SEQ ID NO: 7593 - protein, 10 aa, Artificial Sequence
  Peptide Derived from Human Papillomavirus
TLLHVPETCM

SEQ ID NO: 7594 - protein, 11 aa, Artificial Sequence
  Peptide Derived from Human Papillomavirus
TLLHVPETCML

SEQ ID NO: 7595 - protein, 9 aa, Artificial Sequence
  Peptide Derived from Human Papillomavirus
TLYAHIQCL

SEQ ID NO: 7596 - protein, 9 aa, Artificial Sequence
  Peptide Derived from Human Papillomavirus
TQLSICEQA

SEQ ID NO: 7597 - protein, 9 aa, Artificial Sequence
  Peptide Derived from Human Papillomavirus
TQVTVNTNA

SEQ ID NO: 7598 - protein, 8 aa, Artificial Sequence
  Peptide Derived from Human Papillomavirus
TTCTDWVM

SEQ ID NO: 7599 - protein, 9 aa, Artificial Sequence
  Peptide Derived from Human Papillomavirus
TTCTDWVMA

SEQ ID NO: 7600 - protein, 10 aa, Artificial Sequence
  Peptide Derived from Human Papillomavirus
TTCTDWVMAI

SEQ ID NO: 7601 - protein, 8 aa, Artificial Sequence
  Peptide Derived from Human Papillomavirus
TVAEGFKT

SEQ ID NO: 7602 - protein, 9 aa, Artificial Sequence
  Peptide Derived from Human Papillomavirus
TVAEGFKTL

SEQ ID NO: 7603 - protein, 10 aa, Artificial Sequence
  Peptide Derived from Human Papillomavirus
TVAEGFKTLI

SEQ ID NO: 7604 - protein, 8 aa, Artificial Sequence
  Peptide Derived from Human Papillomavirus
TVAKGLST

SEQ ID NO: 7605 - protein, 9 aa, Artificial Sequence
  Peptide Derived from Human Papillomavirus
TVAKGLSTL

SEQ ID NO: 7606 - protein, 10 aa, Artificial Sequence
  Peptide Derived from Human Papillomavirus
TVAKGLSTLL

SEQ ID NO: 7607 - protein, 8 aa, Artificial Sequence
  Peptide Derived from Human Papillomavirus
TVFTFPHA

SEQ ID NO: 7608 - protein, 9 aa, Artificial Sequence
  Peptide Derived from Human Papillomavirus
VAALYWYRT

SEQ ID NO: 7609 - protein, 11 aa, Artificial Sequence
  Peptide Derived from Human Papillomavirus
VAALYWYRTGI

SEQ ID NO: 7610 - protein, 8 aa, Artificial Sequence
  Peptide Derived from Human Papillomavirus
VAEGFKTL

SEQ ID NO: 7611 - protein, 9 aa, Artificial Sequence
  Peptide Derived from Human Papillomavirus
VAEGFKTLI

SEQ ID NO: 7612 - protein, 8 aa, Artificial Sequence
  Peptide Derived from Human Papillomavirus
VAKGLSTL

SEQ ID NO: 7613 - protein, 9 aa, Artificial Sequence
  Peptide Derived from Human Papillomavirus
VAKGLSTLL

SEQ ID NO: 7614 - protein, 11 aa, Artificial Sequence
  Peptide Derived from Human Papillomavirus
VAKGLSTLLHV

SEQ ID NO: 7615 - protein, 8 aa, Artificial Sequence
  Peptide Derived from Human Papillomavirus
VAMLDDAT

SEQ ID NO: 7616 - protein, 10 aa, Artificial Sequence
  Peptide Derived from Human Papillomavirus
VAMLDDATHT

SEQ ID NO: 7617 - protein, 9 aa, Artificial Sequence
  Peptide Derived from Human Papillomavirus
VISDDEDET

SEQ ID NO: 7618 - protein, 10 aa, Artificial Sequence
  Peptide Derived from Human Papillomavirus
VISDDEDETA

SEQ ID NO: 7619 - protein, 11 aa, Artificial Sequence
  Peptide Derived from Human Papillomavirus
VISDDEDETAT

SEQ ID NO: 7620 - protein, 10 aa, Artificial Sequence
  Peptide Derived from Human Papillomavirus
VLHLLKRKFA

SEQ ID NO: 7621 - protein, 10 aa, Artificial Sequence
  Peptide Derived from Human Papillomavirus
VMAIFGVNPT

SEQ ID NO: 7622 - protein, 11 aa, Artificial Sequence
  Peptide Derived from Human Papillomavirus
VMAIFGVNPTV

SEQ ID NO: 7623 - protein, 9 aa, Artificial Sequence
  Peptide Derived from Human Papillomavirus
VMCRHYKRA

SEQ ID NO: 7624 - protein, 9 aa, Artificial Sequence
  Peptide Derived from Human Papillomavirus
VQFLRYQGV

SEQ ID NO: 7625 - protein, 8 aa, Artificial Sequence
  Peptide Derived from Human Papillomavirus
VQNDAQVL

SEQ ID NO: 7626 - protein, 10 aa, Artificial Sequence
  Peptide Derived from Human Papillomavirus
VQNDAQVLHL

SEQ ID NO: 7627 - protein, 11 aa, Artificial Sequence
  Peptide Derived from Human Papillomavirus
VQNDAQVLHLL

SEQ ID NO: 7628 - protein, 9 aa, Artificial Sequence
  Peptide Derived from Human Papillomavirus
VQWAFDNDL

SEQ ID NO: 7629 - protein, 10 aa, Artificial Sequence
  Peptide Derived from Human Papillomavirus
VQWAFDNDLT

SEQ ID NO: 7630 - protein, 9 aa, Artificial Sequence
  Peptide Derived from Human Papillomavirus
VTGQNTRPL

SEQ ID NO: 7631 - protein, 9 aa, Artificial Sequence
  Peptide Derived from Human Papillomavirus
VTVFTFPHA

SEQ ID NO: 7632 - protein, 8 aa, Artificial Sequence
  Peptide Derived from Human Papillomavirus
WAFDNDLT

SEQ ID NO: 7633 - protein, 9 aa, Artificial Sequence
  Peptide Derived from Human Papillomavirus
WIKYRCSKI

SEQ ID NO: 7634 - protein, 8 aa, Artificial Sequence
  Peptide Derived from Human Papillomavirus
WIQRLTII

SEQ ID NO: 7635 - protein, 8 aa, Artificial Sequence
  Peptide Derived from Human Papillomavirus
WLEPLADT

SEQ ID NO: 7636 - protein, 10 aa, Artificial Sequence
  Peptide Derived from Human Papillomavirus
WLEPLADTKV

SEQ ID NO: 7637 - protein, 11 aa, Artificial Sequence
  Peptide Derived from Human Papillomavirus
WLEPLADTKVA

SEQ ID NO: 7638 - protein, 8 aa, Artificial Sequence
  Peptide Derived from Human Papillomavirus
WTYFDNYM

SEQ ID NO: 7639 - protein, 11 aa, Artificial Sequence
  Peptide Derived from Human Papillomavirus
WTYFDNYMRNA

SEQ ID NO: 7640 - protein, 8 aa, Artificial Sequence
  Peptide Derived from Human Papillomavirus
WVMAIFGV

SEQ ID NO: 7641 - protein, 11 aa, Artificial Sequence
  Peptide Derived from Human Papillomavirus
WVMAIFGVNPT

SEQ ID NO: 7642 - protein, 11 aa, Artificial Sequence
  Peptide Derived from Human Papillomavirus
YAQLADCNSNA

SEQ ID NO: 7643 - protein, 8 aa, Artificial Sequence
  Peptide Derived from Human Papillomavirus
YLESRVTV

SEQ ID NO: 7644 - protein, 10 aa, Artificial Sequence
  Peptide Derived from Human Papillomavirus
YLESRVTVFT

SEQ ID NO: 7645 - protein, 8 aa, Artificial Sequence
  Peptide Derived from Human Papillomavirus
YLKDCAVM

SEQ ID NO: 7646 - protein, 11 aa, Artificial Sequence
  Peptide Derived from Human Papillomavirus
YMRNALDGNPI

SEQ ID NO: 7647 - protein, 10 aa, Artificial Sequence
  Peptide Derived from Human Papillomavirus
YQGVEFISFL

SEQ ID NO: 7648 - protein, 9 aa, Artificial Sequence
  Peptide Derived from Human Papillomavirus
AACVSYWGV

SEQ ID NO: 7649 - protein, 8 aa, Artificial Sequence
  Peptide Derived from Human Papillomavirus
AIELQMAL

SEQ ID NO: 7650 - protein, 11 aa, Artificial Sequence
  Peptide Derived from Human Papillomavirus
AIELQMALKGL

SEQ ID NO: 7651 - protein, 11 aa, Artificial Sequence
  Peptide Derived from Human Papillomavirus
AILFTAREHGI

SEQ ID NO: 7652 - protein, 11 aa, Artificial Sequence
  Peptide Derived from Human Papillomavirus
AQSKYNNEEWT

SEQ ID NO: 7653 - protein, 10 aa, Artificial Sequence
  Peptide Derived from Human Papillomavirus
ATKRPRQCGL

SEQ ID NO: 7654 - protein, 11 aa, Artificial Sequence
  Peptide Derived from Human Papillomavirus
ATKRPRQCGLT

SEQ ID NO: 7655 - protein, 8 aa, Artificial Sequence
  Peptide Derived from Human Papillomavirus
ATQIVRQL

SEQ ID NO: 7656 - protein, 11 aa, Artificial Sequence
  Peptide Derived from Human Papillomavirus
ATQIVRQLQHA

SEQ ID NO: 7657 - protein, 10 aa, Artificial Sequence
  Peptide Derived from Human Papillomavirus
CLRYRLRKYA

SEQ ID NO: 7658 - protein, 10 aa, Artificial Sequence
  Peptide Derived from Human Papillomavirus
CMNYVVWDSI

SEQ ID NO: 7659 - protein, 10 aa, Artificial Sequence
  Peptide Derived from Human Papillomavirus
CVSYWGVYYI

SEQ ID NO: 7660 - protein, 11 aa, Artificial Sequence
  Peptide Derived from Human Papillomavirus
DINSQISYWQL

SEQ ID NO: 7661 - protein, 9 aa, Artificial Sequence
  Peptide Derived from Human Papillomavirus
DTCEELWNT

SEQ ID NO: 7662 - protein, 8 aa, Artificial Sequence
  Peptide Derived from Human Papillomavirus
DTVSATQI

SEQ ID NO: 7663 - protein, 9 aa, Artificial Sequence
  Peptide Derived from Human Papillomavirus
DTVSATQIV

SEQ ID NO: 7664 - protein, 9 aa, Artificial Sequence
  Peptide Derived from Human Papillomavirus
DVVTIPNSV

SEQ ID NO: 7665 - protein, 11 aa, Artificial Sequence
  Peptide Derived from Human Papillomavirus
DVVTIPNSVQI

SEQ ID NO: 7666 - protein, 9 aa, Artificial Sequence
  Peptide Derived from Human Papillomavirus
EISSTWHWT

SEQ ID NO: 7667 - protein, 9 aa, Artificial Sequence
  Peptide Derived from Human Papillomavirus
ELQMALKGL

SEQ ID NO: 7668 - protein, 10 aa, Artificial Sequence
  Peptide Derived from Human Papillomavirus
ELQMALKGLA

SEQ ID NO: 7669 - protein, 9 aa, Artificial Sequence
  Peptide Derived from Human Papillomavirus
EQHHGRVNT

SEQ ID NO: 7670 - protein, 11 aa, Artificial Sequence
  Peptide Derived from Human Papillomavirus
EQHHGRVNTHV

SEQ ID NO: 7671 - protein, 8 aa, Artificial Sequence
  Peptide Derived from Human Papillomavirus
ETGIWDKT

SEQ ID NO: 7672 - protein, 9 aa, Artificial Sequence
  Peptide Derived from Human Papillomavirus
ETGIWDKTA

SEQ ID NO: 7673 - protein, 10 aa, Artificial Sequence
  Peptide Derived from Human Papillomavirus
ETGIWDKTAA

SEQ ID NO: 7674 - protein, 8 aa, Artificial Sequence
  Peptide Derived from Human Papillomavirus
EVQRNTFL

SEQ ID NO: 7675 - protein, 10 aa, Artificial Sequence
  Peptide Derived from Human Papillomavirus
EVQRNTFLDV

SEQ ID NO: 7676 - protein, 11 aa, Artificial Sequence
  Peptide Derived from Human Papillomavirus
EVQRNTFLDVV

SEQ ID NO: 7677 - protein, 8 aa, Artificial Sequence
  Peptide Derived from Human Papillomavirus
EVQYGGNV

SEQ ID NO: 7678 - protein, 9 aa, Artificial Sequence
  Peptide Derived from Human Papillomavirus
EVQYGGNVI

SEQ ID NO: 7679 - protein, 11 aa, Artificial Sequence
  Peptide Derived from Human Papillomavirus
FLDVVTIPNSV

SEQ ID NO: 7680 - protein, 8 aa, Artificial Sequence
  Peptide Derived from Human Papillomavirus
FTAREHGI

SEQ ID NO: 7681 - protein, 9 aa, Artificial Sequence
  Peptide Derived from Human Papillomavirus
FTAREHGIT

SEQ ID NO: 7682 - protein, 11 aa, Artificial Sequence
  Peptide Derived from Human Papillomavirus
FTAREHGITKL

SEQ ID NO: 7683 - protein, 11 aa, Artificial Sequence
  Peptide Derived from Human Papillomavirus
GILTVTYNSEV

SEQ ID NO: 7684 - protein, 9 aa, Artificial Sequence
  Peptide Derived from Human Papillomavirus
GITKLNHQV

SEQ ID NO: 7685 - protein, 10 aa, Artificial Sequence
  Peptide Derived from Human Papillomavirus
GITKLNHQVV

SEQ ID NO: 7686 - protein, 8 aa, Artificial Sequence
  Peptide Derived from Human Papillomavirus
GIWDKTAA

SEQ ID NO: 7687 - protein, 10 aa, Artificial Sequence
  Peptide Derived from Human Papillomavirus
GIWDKTAACV

SEQ ID NO: 7688 - protein, 10 aa, Artificial Sequence
  Peptide Derived from Human Papillomavirus
GLTEQHHGRV

SEQ ID NO: 7689 - protein, 9 aa, Artificial Sequence
  Peptide Derived from Human Papillomavirus
GTPKPHIQT

SEQ ID NO: 7690 - protein, 11 aa, Artificial Sequence
  Peptide Derived from Human Papillomavirus
GTPKPHIQTPA

SEQ ID NO: 7691 - protein, 10 aa, Artificial Sequence
  Peptide Derived from Human Papillomavirus
GVYYIKDGDT

SEQ ID NO: 7692 - protein, 11 aa, Artificial Sequence
  Peptide Derived from Human Papillomavirus
GVYYIKDGDTT

SEQ ID NO: 7693 - protein, 9 aa, Artificial Sequence
  Peptide Derived from Human Papillomavirus
HASTSTPKT

SEQ ID NO: 7694 - protein, 10 aa, Artificial Sequence
  Peptide Derived from Human Papillomavirus
HASTSTPKTA

SEQ ID NO: 7695 - protein, 9 aa, Artificial Sequence
  Peptide Derived from Human Papillomavirus
HLKGDKNSL

SEQ ID NO: 7696 - protein, 9 aa, Artificial Sequence
  Peptide Derived from Human Papillomavirus
HQVVPPINI

SEQ ID NO: 7697 - protein, 11 aa, Artificial Sequence
  Peptide Derived from Human Papillomavirus
HVHNPLLCSST

SEQ ID NO: 7698 - protein, 11 aa, Artificial Sequence
  Peptide Derived from Human Papillomavirus
IIHLKGDKNSL

SEQ ID NO: 7699 - protein, 10 aa, Artificial Sequence
  Peptide Derived from Human Papillomavirus
ILFTAREHGI

SEQ ID NO: 7700 - protein, 11 aa, Artificial Sequence
  Peptide Derived from Human Papillomavirus
ILFTAREHGIT

SEQ ID NO: 7701 - protein, 10 aa, Artificial Sequence
  Peptide Derived from Human Papillomavirus
ILTVTYNSEV

SEQ ID NO: 7702 - protein, 10 aa, Artificial Sequence
  Peptide Derived from Human Papillomavirus
ITETGIWDKT

SEQ ID NO: 7703 - protein, 11 aa, Artificial Sequence
  Peptide Derived from Human Papillomavirus
ITETGIWDKTA

SEQ ID NO: 7704 - protein, 8 aa, Artificial Sequence
  Peptide Derived from Human Papillomavirus
ITKLNHQV

SEQ ID NO: 7705 - protein, 9 aa, Artificial Sequence
  Peptide Derived from Human Papillomavirus
ITKLNHQVV

SEQ ID NO: 7706 - protein, 8 aa, Artificial Sequence
  Peptide Derived from Human Papillomavirus
IVRQLQHA

SEQ ID NO: 7707 - protein, 10 aa, Artificial Sequence
  Peptide Derived from Human Papillomavirus
IVRQLQHAST

SEQ ID NO: 7708 - protein, 8 aa, Artificial Sequence
  Peptide Derived from Human Papillomavirus
KAHKAIEL

SEQ ID NO: 7709 - protein, 10 aa, Artificial Sequence
  Peptide Derived from Human Papillomavirus
KAHKAIELQM

SEQ ID NO: 7710 - protein, 11 aa, Artificial Sequence
  Peptide Derived from Human Papillomavirus
KAHKAIELQMA

SEQ ID NO: 7711 - protein, 8 aa, Artificial Sequence
  Peptide Derived from Human Papillomavirus
KAIELQMA

SEQ ID NO: 7712 - protein, 9 aa, Artificial Sequence
  Peptide Derived from Human Papillomavirus
KAIELQMAL

SEQ ID NO: 7713 - protein, 10 aa, Artificial Sequence
  Peptide Derived from Human Papillomavirus
KLNHQVVPPI

SEQ ID NO: 7714 - protein, 9 aa, Artificial Sequence
  Peptide Derived from Human Papillomavirus
KMQTPKESL

SEQ ID NO: 7715 - protein, 11 aa, Artificial Sequence
  Peptide Derived from Human Papillomavirus
KTAACVSYWGV

SEQ ID NO: 7716 - protein, 8 aa, Artificial Sequence
  Peptide Derived from Human Papillomavirus
KVCSGNTT

SEQ ID NO: 7717 - protein, 10 aa, Artificial Sequence
  Peptide Derived from Human Papillomavirus
KVCSGNTTPI

SEQ ID NO: 7718 - protein, 11 aa, Artificial Sequence
  Peptide Derived from Human Papillomavirus
KVCSGNTTPII

SEQ ID NO: 7719 - protein, 8 aa, Artificial Sequence
  Peptide Derived from Human Papillomavirus
LIRLENAI

SEQ ID NO: 7720 - protein, 9 aa, Artificial Sequence
  Peptide Derived from Human Papillomavirus
LIRLENAIL

SEQ ID NO: 7721 - protein, 11 aa, Artificial Sequence
  Peptide Derived from Human Papillomavirus
LIRLENAILFT

SEQ ID NO: 7722 - protein, 8 aa, Artificial Sequence
  Peptide Derived from Human Papillomavirus
LQDTCEEL

SEQ ID NO: 7723 - protein, 11 aa, Artificial Sequence
  Peptide Derived from Human Papillomavirus
LQDTCEELWNT

SEQ ID NO: 7724 - protein, 8 aa, Artificial Sequence
  Peptide Derived from Human Papillomavirus
LQHASTST

SEQ ID NO: 7725 - protein, 11 aa, Artificial Sequence
  Peptide Derived from Human Papillomavirus
LQHASTSTPKT

SEQ ID NO: 7726 - protein, 8 aa, Artificial Sequence
  Peptide Derived from Human Papillomavirus
LQMALKGL

SEQ ID NO: 7727 - protein, 9 aa, Artificial Sequence
  Peptide Derived from Human Papillomavirus
LQMALKGLA

SEQ ID NO: 7728 - protein, 9 aa, Artificial Sequence
  Peptide Derived from Human Papillomavirus
LTEQHHGRV

SEQ ID NO: 7729 - protein, 11 aa, Artificial Sequence
  Peptide Derived from Human Papillomavirus
LTEQHHGRVNT

SEQ ID NO: 7730 - protein, 9 aa, Artificial Sequence
  Peptide Derived from Human Papillomavirus
LTVTYNSEV

SEQ ID NO: 7731 - protein, 8 aa, Artificial Sequence
  Peptide Derived from Human Papillomavirus
MQTPKESL

SEQ ID NO: 7732 - protein, 10 aa, Artificial Sequence
  Peptide Derived from Human Papillomavirus
NISKSKAHKA

SEQ ID NO: 7733 - protein, 11 aa, Artificial Sequence
  Peptide Derived from Human Papillomavirus
NISKSKAHKAI

SEQ ID NO: 7734 - protein, 8 aa, Artificial Sequence
  Peptide Derived from Human Papillomavirus
NTFLDVVT

SEQ ID NO: 7735 - protein, 9 aa, Artificial Sequence
  Peptide Derived from Human Papillomavirus
NTFLDVVTI

SEQ ID NO: 7736 - protein, 8 aa, Artificial Sequence
  Peptide Derived from Human Papillomavirus
NTGILTVT

SEQ ID NO: 7737 - protein, 8 aa, Artificial Sequence
  Peptide Derived from Human Papillomavirus
NTHVHNPL

SEQ ID NO: 7738 - protein, 9 aa, Artificial Sequence
  Peptide Derived from Human Papillomavirus
NTHVHNPLL

SEQ ID NO: 7739 - protein, 8 aa, Artificial Sequence
  Peptide Derived from Human Papillomavirus
NTTPIIHL

SEQ ID NO: 7740 - protein, 11 aa, Artificial Sequence
  Peptide Derived from Human Papillomavirus
NTWEVQYGGNV

SEQ ID NO: 7741 - protein, 9 aa, Artificial Sequence
  Peptide Derived from Human Papillomavirus
NVIDCNDSM

SEQ ID NO: 7742 - protein, 11 aa, Artificial Sequence
  Peptide Derived from Human Papillomavirus
PATKRPRQCGL

SEQ ID NO: 7743 - protein, 9 aa, Artificial Sequence
  Peptide Derived from Human Papillomavirus
PINISKSKA

SEQ ID NO: 7744 - protein, 8 aa, Artificial Sequence
  Peptide Derived from Human Papillomavirus
QISVGYMT

SEQ ID NO: 7745 - protein, 9 aa, Artificial Sequence
  Peptide Derived from Human Papillomavirus
QISVGYMTI

SEQ ID NO: 7746 - protein, 8 aa, Artificial Sequence
  Peptide Derived from Human Papillomavirus
QISYWQLI

SEQ ID NO: 7747 - protein, 10 aa, Artificial Sequence
  Peptide Derived from Human Papillomavirus
QISYWQLIRL

SEQ ID NO: 7748 - protein, 9 aa, Artificial Sequence
  Peptide Derived from Human Papillomavirus
QIVRQLQHA

SEQ ID NO: 7749 - protein, 11 aa, Artificial Sequence
  Peptide Derived from Human Papillomavirus
QIVRQLQHAST

SEQ ID NO: 7750 - protein, 8 aa, Artificial Sequence
  Peptide Derived from Human Papillomavirus
QLIRLENA

SEQ ID NO: 7751 - protein, 9 aa, Artificial Sequence
  Peptide Derived from Human Papillomavirus
QLIRLENAI

SEQ ID NO: 7752 - protein, 10 aa, Artificial Sequence
  Peptide Derived from Human Papillomavirus
QLIRLENAIL

SEQ ID NO: 7753 - protein, 9 aa, Artificial Sequence
  Peptide Derived from Human Papillomavirus
QLQHASTST

SEQ ID NO: 7754 - protein, 8 aa, Artificial Sequence
  Peptide Derived from Human Papillomavirus
QMALKGLA

SEQ ID NO: 7755 - protein, 11 aa, Artificial Sequence
  Peptide Derived from Human Papillomavirus
QTPKESLSERL

SEQ ID NO: 7756 - protein, 8 aa, Artificial Sequence
  Peptide Derived from Human Papillomavirus
QVVPPINI

SEQ ID NO: 7757 - protein, 9 aa, Artificial Sequence
  Peptide Derived from Human Papillomavirus
RLENAILFT

SEQ ID NO: 7758 - protein, 10 aa, Artificial Sequence
  Peptide Derived from Human Papillomavirus
RLENAILFTA

SEQ ID NO: 7759 - protein, 9 aa, Artificial Sequence
  Peptide Derived from Human Papillomavirus
RLSALQDKI

SEQ ID NO: 7760 - protein, 10 aa, Artificial Sequence
  Peptide Derived from Human Papillomavirus
RLSALQDKIL

SEQ ID NO: 7761 - protein, 8 aa, Artificial Sequence
  Peptide Derived from Human Papillomavirus
RQLQHAST

SEQ ID NO: 7762 - protein, 10 aa, Artificial Sequence
  Peptide Derived from Human Papillomavirus
RQLQHASTST

SEQ ID NO: 7763 - protein, 10 aa, Artificial Sequence
  Peptide Derived from Human Papillomavirus
RVNTHVHNPL

SEQ ID NO: 7764 - protein, 11 aa, Artificial Sequence
  Peptide Derived from Human Papillomavirus
RVNTHVHNPLL

SEQ ID NO: 7765 - protein, 8 aa, Artificial Sequence
  Peptide Derived from Human Papillomavirus
SALQDKIL

SEQ ID NO: 7766 - protein, 9 aa, Artificial Sequence
  Peptide Derived from Human Papillomavirus
SATQIVRQL

SEQ ID NO: 7767 - protein, 8 aa, Artificial Sequence
  Peptide Derived from Human Papillomavirus
SIYYITET

SEQ ID NO: 7768 - protein, 10 aa, Artificial Sequence
  Peptide Derived from Human Papillomavirus
SIYYITETGI

SEQ ID NO: 7769 - protein, 9 aa, Artificial Sequence
  Peptide Derived from Human Papillomavirus
SLKCLRYRL

SEQ ID NO: 7770 - protein, 8 aa, Artificial Sequence
  Peptide Derived from Human Papillomavirus
SLSERLSA

SEQ ID NO: 7771 - protein, 9 aa, Artificial Sequence
  Peptide Derived from Human Papillomavirus
SLSERLSAL

SEQ ID NO: 7772 - protein, 9 aa, Artificial Sequence
  Peptide Derived from Human Papillomavirus
SMCSTSDDT

SEQ ID NO: 7773 - protein, 10 aa, Artificial Sequence
  Peptide Derived from Human Papillomavirus
SMCSTSDDTV

SEQ ID NO: 7774 - protein, 10 aa, Artificial Sequence
  Peptide Derived from Human Papillomavirus
SQCFKKGGKT

SEQ ID NO: 7775 - protein, 11 aa, Artificial Sequence
  Peptide Derived from Human Papillomavirus
SQCFKKGGKTV

SEQ ID NO: 7776 - protein, 8 aa, Artificial Sequence
  Peptide Derived from Human Papillomavirus
SQISYWQL

SEQ ID NO: 7777 - protein, 9 aa, Artificial Sequence
  Peptide Derived from Human Papillomavirus
SQISYWQLI

SEQ ID NO: 7778 - protein, 11 aa, Artificial Sequence
  Peptide Derived from Human Papillomavirus
SQISYWQLIRL

SEQ ID NO: 7779 - protein, 8 aa, Artificial Sequence
  Peptide Derived from Human Papillomavirus
STPKTASV

SEQ ID NO: 7780 - protein, 10 aa, Artificial Sequence
  Peptide Derived from Human Papillomavirus
STPKTASVGT

SEQ ID NO: 7781 - protein, 9 aa, Artificial Sequence
  Peptide Derived from Human Papillomavirus
STSDDTVSA

SEQ ID NO: 7782 - protein, 10 aa, Artificial Sequence
  Peptide Derived from Human Papillomavirus
STSDDTVSAT

SEQ ID NO: 7783 - protein, 10 aa, Artificial Sequence
  Peptide Derived from Human Papillomavirus
STSNNKRRKV

SEQ ID NO: 7784 - protein, 8 aa, Artificial Sequence
  Peptide Derived from Human Papillomavirus
STSTPKTA

SEQ ID NO: 7785 - protein, 10 aa, Artificial Sequence
  Peptide Derived from Human Papillomavirus
STSTPKTASV

SEQ ID NO: 7786 - protein, 9 aa, Artificial Sequence
  Peptide Derived from Human Papillomavirus
SVGTPKPHI

SEQ ID NO: 7787 - protein, 11 aa, Artificial Sequence
  Peptide Derived from Human Papillomavirus
SVGTPKPHIQT

SEQ ID NO: 7788 - protein, 9 aa, Artificial Sequence
  Peptide Derived from Human Papillomavirus
SVQISVGYM

SEQ ID NO: 7789 - protein, 10 aa, Artificial Sequence
  Peptide Derived from Human Papillomavirus
SVQISVGYMT

SEQ ID NO: 7790 - protein, 11 aa, Artificial Sequence
  Peptide Derived from Human Papillomavirus
SVQISVGYMTI

SEQ ID NO: 7791 - protein, 10 aa, Artificial Sequence
  Peptide Derived from Human Papillomavirus
TAACVSYWGV

SEQ ID NO: 7792 - protein, 8 aa, Artificial Sequence
  Peptide Derived from Human Papillomavirus
TAREHGIT

SEQ ID NO: 7793 - protein, 10 aa, Artificial Sequence
  Peptide Derived from Human Papillomavirus
TAREHGITKL

SEQ ID NO: 7794 - protein, 11 aa, Artificial Sequence
  Peptide Derived from Human Papillomavirus
TASVGTPKPHI

SEQ ID NO: 7795 - protein, 8 aa, Artificial Sequence
  Peptide Derived from Human Papillomavirus
TIPNSVQI

SEQ ID NO: 7796 - protein, 10 aa, Artificial Sequence
  Peptide Derived from Human Papillomavirus
TIPNSVQISV

SEQ ID NO: 7797 - protein, 9 aa, Artificial Sequence
  Peptide Derived from Human Papillomavirus
TLQDTCEEL

SEQ ID NO: 7798 - protein, 10 aa, Artificial Sequence
  Peptide Derived from Human Papillomavirus
TQIVRQLQHA

SEQ ID NO: 7799 - protein, 8 aa, Artificial Sequence
  Peptide Derived from Human Papillomavirus
TVSATQIV

SEQ ID NO: 7800 - protein, 11 aa, Artificial Sequence
  Peptide Derived from Human Papillomavirus
TVSATQIVRQL

SEQ ID NO: 7801 - protein, 8 aa, Artificial Sequence
  Peptide Derived from Human Papillomavirus
TVTYNSEV

SEQ ID NO: 7802 - protein, 8 aa, Artificial Sequence
  Peptide Derived from Human Papillomavirus
VIDCNDSM

SEQ ID NO: 7803 - protein, 11 aa, Artificial Sequence
  Peptide Derived from Human Papillomavirus
VIDCNDSMCST

SEQ ID NO: 7804 - protein, 8 aa, Artificial Sequence
  Peptide Derived from Human Papillomavirus
VQISVGYM

SEQ ID NO: 7805 - protein, 9 aa, Artificial Sequence
  Peptide Derived from Human Papillomavirus
VQISVGYMT

SEQ ID NO: 7806 - protein, 10 aa, Artificial Sequence
  Peptide Derived from Human Papillomavirus
VQISVGYMTI

SEQ ID NO: 7807 - protein, 9 aa, Artificial Sequence
  Peptide Derived from Human Papillomavirus
VQRNTFLDV

SEQ ID NO: 7808 - protein, 10 aa, Artificial Sequence
  Peptide Derived from Human Papillomavirus
VQRNTFLDVV

SEQ ID NO: 7809 - protein, 11 aa, Artificial Sequence
  Peptide Derived from Human Papillomavirus
VQRNTFLDVVT

SEQ ID NO: 7810 - protein, 8 aa, Artificial Sequence
  Peptide Derived from Human Papillomavirus
VQYGGNVI

SEQ ID NO: 7811 - protein, 9 aa, Artificial Sequence
  Peptide Derived from Human Papillomavirus
VTIPNSVQI

SEQ ID NO: 7812 - protein, 11 aa, Artificial Sequence
  Peptide Derived from Human Papillomavirus
VTIPNSVQISV

SEQ ID NO: 7813 - protein, 11 aa, Artificial Sequence
  Peptide Derived from Human Papillomavirus
VTYNSEVQRNT

SEQ ID NO: 7814 - protein, 8 aa, Artificial Sequence
  Peptide Derived from Human Papillomavirus
VVTIPNSV

SEQ ID NO: 7815 - protein, 10 aa, Artificial Sequence
  Peptide Derived from Human Papillomavirus
VVTIPNSVQI

SEQ ID NO: 7816 - protein, 9 aa, Artificial Sequence
  Peptide Derived from Human Papillomavirus
VVWDSIYYI

SEQ ID NO: 7817 - protein, 10 aa, Artificial Sequence
  Peptide Derived from Human Papillomavirus
VVWDSIYYIT

SEQ ID NO: 7818 - protein, 9 aa, Artificial Sequence
  Peptide Derived from Human Papillomavirus
WQLIRLENA

SEQ ID NO: 7819 - protein, 10 aa, Artificial Sequence
  Peptide Derived from Human Papillomavirus
WQLIRLENAI

SEQ ID NO: 7820 - protein, 11 aa, Artificial Sequence
  Peptide Derived from Human Papillomavirus
WQLIRLENAIL

SEQ ID NO: 7821 - protein, 8 aa, Artificial Sequence
  Peptide Derived from Human Papillomavirus
WTGCNKNT

SEQ ID NO: 7822 - protein, 10 aa, Artificial Sequence
  Peptide Derived from Human Papillomavirus
WTGCNKNTGI

SEQ ID NO: 7823 - protein, 11 aa, Artificial Sequence
  Peptide Derived from Human Papillomavirus
WTGCNKNTGIL

SEQ ID NO: 7824 - protein, 10 aa, Artificial Sequence
  Peptide Derived from Human Papillomavirus
WTLQDTCEEL

SEQ ID NO: 7825 - protein, 8 aa, Artificial Sequence
  Peptide Derived from Human Papillomavirus
YADHYSEI

SEQ ID NO: 7826 - protein, 11 aa, Artificial Sequence
  Peptide Derived from Human Papillomavirus
YADHYSEISST

SEQ ID NO: 7827 - protein, 8 aa, Artificial Sequence
  Peptide Derived from Human Papillomavirus
YIKDGDTT

SEQ ID NO: 7828 - protein, 11 aa, Artificial Sequence
  Peptide Derived from Human Papillomavirus
YIKDGDTTYYV

SEQ ID NO: 7829 - protein, 11 aa, Artificial Sequence
  Peptide Derived from Human Papillomavirus
YITETGIWDKT

SEQ ID NO: 7830 - protein, 10 aa, Artificial Sequence
  Peptide Derived from Human Papillomavirus
YVVWDSIYYI

SEQ ID NO: 7831 - protein, 11 aa, Artificial Sequence
  Peptide Derived from Human Papillomavirus
YVVWDSIYYIT

SEQ ID NO: 7832 - protein, 8 aa, Artificial Sequence
  Peptide Derived from Human Papillomavirus
ATLERTEV

SEQ ID NO: 7833 - protein, 11 aa, Artificial Sequence
  Peptide Derived from Human Papillomavirus
CIAYAACHKCI

SEQ ID NO: 7834 - protein, 8 aa, Artificial Sequence
  Peptide Derived from Human Papillomavirus
CIDFYSRI

SEQ ID NO: 7835 - protein, 11 aa, Artificial Sequence
  Peptide Derived from Human Papillomavirus
CIDFYSRIREL

SEQ ID NO: 7836 - protein, 8 aa, Artificial Sequence
  Peptide Derived from Human Papillomavirus
CLRCQKPL

SEQ ID NO: 7837 - protein, 11 aa, Artificial Sequence
  Peptide Derived from Human Papillomavirus
CLRCQKPLNPA

SEQ ID NO: 7838 - protein, 8 aa, Artificial Sequence
  Peptide Derived from Human Papillomavirus
CQKPLNPA

SEQ ID NO: 7839 - protein, 8 aa, Artificial Sequence
  Peptide Derived from Human Papillomavirus
CTELNTSL

SEQ ID NO: 7840 - protein, 11 aa, Artificial Sequence
  Peptide Derived from Human Papillomavirus
CTELNTSLQDV

SEQ ID NO: 7841 - protein, 8 aa, Artificial Sequence
  Peptide Derived from Human Papillomavirus
CVYCKATL

SEQ ID NO: 7842 - protein, 11 aa, Artificial Sequence
  Peptide Derived from Human Papillomavirus
CVYCKATLERT

SEQ ID NO: 7843 - protein, 8 aa, Artificial Sequence
  Peptide Derived from Human Papillomavirus
DLCTELNT

SEQ ID NO: 7844 - protein, 10 aa, Artificial Sequence
  Peptide Derived from Human Papillomavirus
DLCTELNTSL

SEQ ID NO: 7845 - protein, 10 aa, Artificial Sequence
  Peptide Derived from Human Papillomavirus
DLFIVYRDCI

SEQ ID NO: 7846 - protein, 11 aa, Artificial Sequence
  Peptide Derived from Human Papillomavirus
DLFIVYRDCIA

SEQ ID NO: 7847 - protein, 8 aa, Artificial Sequence
  Peptide Derived from Human Papillomavirus
DQARQERL

SEQ ID NO: 7848 - protein, 11 aa, Artificial Sequence
  Peptide Derived from Human Papillomavirus
DVSIACVYCKA

SEQ ID NO: 7849 - protein, 9 aa, Artificial Sequence
  Peptide Derived from Human Papillomavirus
ELNTSLQDV

SEQ ID NO: 7850 - protein, 11 aa, Artificial Sequence
  Peptide Derived from Human Papillomavirus
ELNTSLQDVSI

SEQ ID NO: 7851 - protein, 9 aa, Artificial Sequence
  Peptide Derived from Human Papillomavirus
ELRYYSNSV

SEQ ID NO: 7852 - protein, 10 aa, Artificial Sequence
  Peptide Derived from Human Papillomavirus
ELYNLLIRCL

SEQ ID NO: 7853 - protein, 9 aa, Artificial Sequence
  Peptide Derived from Human Papillomavirus
ETLEKITNT

SEQ ID NO: 7854 - protein, 11 aa, Artificial Sequence
  Peptide Derived from Human Papillomavirus
ETLEKITNTEL

SEQ ID NO: 7855 - protein, 10 aa, Artificial Sequence
  Peptide Derived from Human Papillomavirus
EVYQFAFKDL

SEQ ID NO: 7856 - protein, 8 aa, Artificial Sequence
  Peptide Derived from Human Papillomavirus
FAFKDLFI

SEQ ID NO: 7857 - protein, 9 aa, Artificial Sequence
  Peptide Derived from Human Papillomavirus
FAFKDLFIV

SEQ ID NO: 7858 - protein, 8 aa, Artificial Sequence
  Peptide Derived from Human Papillomavirus
FIVYRDCI

SEQ ID NO: 7859 - protein, 9 aa, Artificial Sequence
  Peptide Derived from Human Papillomavirus
FIVYRDCIA

SEQ ID NO: 7860 - protein, 11 aa, Artificial Sequence
  Peptide Derived from Human Papillomavirus
FIVYRDCIAYA

SEQ ID NO: 7861 - protein, 10 aa, Artificial Sequence
  Peptide Derived from Human Papillomavirus
GQCNTCCDQA

SEQ ID NO: 7862 - protein, 9 aa, Artificial Sequence
  Peptide Derived from Human Papillomavirus
GQYRGQCNT

SEQ ID NO: 7863 - protein, 11 aa, Artificial Sequence
  Peptide Derived from Human Papillomavirus
HLKDKRRFHSI

SEQ ID NO: 7864 - protein, 8 aa, Artificial Sequence
  Peptide Derived from Human Papillomavirus
IACVYCKA

SEQ ID NO: 7865 - protein, 9 aa, Artificial Sequence
  Peptide Derived from Human Papillomavirus
IACVYCKAT

SEQ ID NO: 7866 - protein, 10 aa, Artificial Sequence
  Peptide Derived from Human Papillomavirus
IACVYCKATL

SEQ ID NO: 7867 - protein, 11 aa, Artificial Sequence
  Peptide Derived from Human Papillomavirus
IAGQYRGQCNT

SEQ ID NO: 7868 - protein, 10 aa, Artificial Sequence
  Peptide Derived from Human Papillomavirus
IAYAACHKCI

SEQ ID NO: 7869 - protein, 9 aa, Artificial Sequence
  Peptide Derived from Human Papillomavirus
ITNTELYNL

SEQ ID NO: 7870 - protein, 10 aa, Artificial Sequence
  Peptide Derived from Human Papillomavirus
ITNTELYNLL

SEQ ID NO: 7871 - protein, 11 aa, Artificial Sequence
  Peptide Derived from Human Papillomavirus
ITNTELYNLLI

SEQ ID NO: 7872 - protein, 8 aa, Artificial Sequence
  Peptide Derived from Human Papillomavirus
IVYRDCIA

SEQ ID NO: 7873 - protein, 10 aa, Artificial Sequence
  Peptide Derived from Human Papillomavirus
IVYRDCIAYA

SEQ ID NO: 7874 - protein, 11 aa, Artificial Sequence
  Peptide Derived from Human Papillomavirus
IVYRDCIAYAA

SEQ ID NO: 7875 - protein, 9 aa, Artificial Sequence
  Peptide Derived from Human Papillomavirus
KATLERTEV

SEQ ID NO: 7876 - protein, 10 aa, Artificial Sequence
  Peptide Derived from Human Papillomavirus
KITNTELYNL

SEQ ID NO: 7877 - protein, 11 aa, Artificial Sequence
  Peptide Derived from Human Papillomavirus
KITNTELYNLL

SEQ ID NO: 7878 - protein, 9 aa, Artificial Sequence
  Peptide Derived from Human Papillomavirus
KLPDLCTEL

SEQ ID NO: 7879 - protein, 11 aa, Artificial Sequence
  Peptide Derived from Human Papillomavirus
KLPDLCTELNT

SEQ ID NO: 7880 - protein, 11 aa, Artificial Sequence
  Peptide Derived from Human Papillomavirus
LIRCLRCQKPL

SEQ ID NO: 7881 - protein, 9 aa, Artificial Sequence
  Peptide Derived from Human Papillomavirus
LQDVSIACV

SEQ ID NO: 7882 - protein, 8 aa, Artificial Sequence
  Peptide Derived from Human Papillomavirus
MARFDDPT

SEQ ID NO: 7883 - protein, 8 aa, Artificial Sequence
  Peptide Derived from Human Papillomavirus
NTELYNLL

SEQ ID NO: 7884 - protein, 9 aa, Artificial Sequence
  Peptide Derived from Human Papillomavirus
NTELYNLLI

SEQ ID NO: 7885 - protein, 9 aa, Artificial Sequence
  Peptide Derived from Human Papillomavirus
NTSLQDVSI

SEQ ID NO: 7886 - protein, 10 aa, Artificial Sequence
  Peptide Derived from Human Papillomavirus
NTSLQDVSIA

SEQ ID NO: 7887 - protein, 8 aa, Artificial Sequence
  Peptide Derived from Human Papillomavirus
PAEKRRHL

SEQ ID NO: 7888 - protein, 11 aa, Artificial Sequence
  Peptide Derived from Human Papillomavirus
PLNPAEKRRHL

SEQ ID NO: 7889 - protein, 8 aa, Artificial Sequence
  Peptide Derived from Human Papillomavirus
PTQRPYKL

SEQ ID NO: 7890 - protein, 11 aa, Artificial Sequence
  Peptide Derived from Human Papillomavirus
PTQRPYKLPDL

SEQ ID NO: 7891 - protein, 8 aa, Artificial Sequence
  Peptide Derived from Human Papillomavirus
RLRRRRET

SEQ ID NO: 7892 - protein, 10 aa, Artificial Sequence
  Peptide Derived from Human Papillomavirus
RLRRRRETQV

SEQ ID NO: 7893 - protein, 11 aa, Artificial Sequence
  Peptide Derived from Human Papillomavirus
RQERLRRRRET

SEQ ID NO: 7894 - protein, 8 aa, Artificial Sequence
  Peptide Derived from Human Papillomavirus
RTEVYQFA

SEQ ID NO: 7895 - protein, 9 aa, Artificial Sequence
  Peptide Derived from Human Papillomavirus
SIACVYCKA

SEQ ID NO: 7896 - protein, 10 aa, Artificial Sequence
  Peptide Derived from Human Papillomavirus
SIACVYCKAT

SEQ ID NO: 7897 - protein, 11 aa, Artificial Sequence
  Peptide Derived from Human Papillomavirus
SIACVYCKATL

SEQ ID NO: 7898 - protein, 8 aa, Artificial Sequence
  Peptide Derived from Human Papillomavirus
SLQDVSIA

SEQ ID NO: 7899 - protein, 10 aa, Artificial Sequence
  Peptide Derived from Human Papillomavirus
SLQDVSIACV

SEQ ID NO: 7900 - protein, 10 aa, Artificial Sequence
  Peptide Derived from Human Papillomavirus
SVYGETLEKI

SEQ ID NO: 7901 - protein, 11 aa, Artificial Sequence
  Peptide Derived from Human Papillomavirus
SVYGETLEKIT

SEQ ID NO: 7902 - protein, 8 aa, Artificial Sequence
  Peptide Derived from Human Papillomavirus
TLEKITNT

SEQ ID NO: 7903 - protein, 10 aa, Artificial Sequence
  Peptide Derived from Human Papillomavirus
TLEKITNTEL

SEQ ID NO: 7904 - protein, 11 aa, Artificial Sequence
  Peptide Derived from Human Papillomavirus
TLERTEVYQFA

SEQ ID NO: 7905 - protein, 10 aa, Artificial Sequence
  Peptide Derived from Human Papillomavirus
TQRPYKLPDL

SEQ ID NO: 7906 - protein, 8 aa, Artificial Sequence
  Peptide Derived from Human Papillomavirus
YAACHKCI

SEQ ID NO: 7907 - protein, 8 aa, Artificial Sequence
  Peptide Derived from Human Papillomavirus
YQFAFKDL

SEQ ID NO: 7908 - protein, 10 aa, Artificial Sequence
  Peptide Derived from Human Papillomavirus
YQFAFKDLFI

SEQ ID NO: 7909 - protein, 11 aa, Artificial Sequence
  Peptide Derived from Human Papillomavirus
YQFAFKDLFIV

SEQ ID NO: 7910 - protein, 8 aa, Artificial Sequence
  Peptide Derived from Human Papillomavirus
AQLPARRA

SEQ ID NO: 7911 - protein, 8 aa, Artificial Sequence
  Peptide Derived from Human Papillomavirus
ATLQEIVL

SEQ ID NO: 7912 - protein, 10 aa, Artificial Sequence
  Peptide Derived from Human Papillomavirus
ATLQEIVLHL

SEQ ID NO: 7913 - protein, 10 aa, Artificial Sequence
  Peptide Derived from Human Papillomavirus
CVCCKCDGRI

SEQ ID NO: 7914 - protein, 8 aa, Artificial Sequence
  Peptide Derived from Human Papillomavirus
DLLCYEQL

SEQ ID NO: 7915 - protein, 8 aa, Artificial Sequence
  Peptide Derived from Human Papillomavirus
DLRTLQQL

SEQ ID NO: 7916 - protein, 10 aa, Artificial Sequence
  Peptide Derived from Human Papillomavirus
DLRTLQQLFL

SEQ ID NO: 7917 - protein, 8 aa, Artificial Sequence
  Peptide Derived from Human Papillomavirus
EADGVSHA

SEQ ID NO: 7918 - protein, 10 aa, Artificial Sequence
  Peptide Derived from Human Papillomavirus
EADGVSHAQL

SEQ ID NO: 7919 - protein, 8 aa, Artificial Sequence
  Peptide Derived from Human Papillomavirus
ELDPVDLL

SEQ ID NO: 7920 - protein, 8 aa, Artificial Sequence
  Peptide Derived from Human Papillomavirus
ELTVESSA

SEQ ID NO: 7921 - protein, 11 aa, Artificial Sequence
  Peptide Derived from Human Papillomavirus
ELTVESSADDL

SEQ ID NO: 7922 - protein, 8 aa, Artificial Sequence
  Peptide Derived from Human Papillomavirus
FLSTLSFV

SEQ ID NO: 7923 - protein, 8 aa, Artificial Sequence
  Peptide Derived from Human Papillomavirus
FVCPWCAT

SEQ ID NO: 7924 - protein, 9 aa, Artificial Sequence
  Peptide Derived from Human Papillomavirus
GVSHAQLPA

SEQ ID NO: 7925 - protein, 9 aa, Artificial Sequence
  Peptide Derived from Human Papillomavirus
HAQLPARRA

SEQ ID NO: 7926 - protein, 8 aa, Artificial Sequence
  Peptide Derived from Human Papillomavirus
HLEPQNEL

SEQ ID NO: 7927 - protein, 11 aa, Artificial Sequence
  Peptide Derived from Human Papillomavirus
HLEPQNELDPV

SEQ ID NO: 7928 - protein, 11 aa, Artificial Sequence
  Peptide Derived from Human Papillomavirus
IVLHLEPQNEL

SEQ ID NO: 7929 - protein, 8 aa, Artificial Sequence
  Peptide Derived from Human Papillomavirus
LQEIVLHL

SEQ ID NO: 7930 - protein, 8 aa, Artificial Sequence
  Peptide Derived from Human Papillomavirus
LQQLFLST

SEQ ID NO: 7931 - protein, 9 aa, Artificial Sequence
  Peptide Derived from Human Papillomavirus
LQQLFLSTL

SEQ ID NO: 7932 - protein, 10 aa, Artificial Sequence
  Peptide Derived from Human Papillomavirus
LTVESSADDL

SEQ ID NO: 7933 - protein, 8 aa, Artificial Sequence
  Peptide Derived from Human Papillomavirus
PQNELDPV

SEQ ID NO: 7934 - protein, 10 aa, Artificial Sequence
  Peptide Derived from Human Papillomavirus
PQNELDPVDL

SEQ ID NO: 7935 - protein, 11 aa, Artificial Sequence
  Peptide Derived from Human Papillomavirus
PQNELDPVDLL

SEQ ID NO: 7936 - protein, 9 aa, Artificial Sequence
  Peptide Derived from Human Papillomavirus
PQRHKILCV

SEQ ID NO: 7937 - protein, 10 aa, Artificial Sequence
  Peptide Derived from Human Papillomavirus
PVDLLCYEQL

SEQ ID NO: 7938 - protein, 10 aa, Artificial Sequence
  Peptide Derived from Human Papillomavirus
QLFLSTLSFV

SEQ ID NO: 7939 - protein, 8 aa, Artificial Sequence
  Peptide Derived from Human Papillomavirus
QQLFLSTL

SEQ ID NO: 7940 - protein, 11 aa, Artificial Sequence
  Peptide Derived from Human Papillomavirus
QQLFLSTLSFV

SEQ ID NO: 7941 - protein, 9 aa, Artificial Sequence
  Peptide Derived from Human Papillomavirus
RAEPQRHKI

SEQ ID NO: 7942 - protein, 10 aa, Artificial Sequence
  Peptide Derived from Human Papillomavirus
RAEPQRHKIL

SEQ ID NO: 7943 - protein, 8 aa, Artificial Sequence
  Peptide Derived from Human Papillomavirus
RATLQEIV

SEQ ID NO: 7944 - protein, 9 aa, Artificial Sequence
  Peptide Derived from Human Papillomavirus
RATLQEIVL

SEQ ID NO: 7945 - protein, 11 aa, Artificial Sequence
  Peptide Derived from Human Papillomavirus
RATLQEIVLHL

SEQ ID NO: 7946 - protein, 10 aa, Artificial Sequence
  Peptide Derived from Human Papillomavirus
RIELTVESSA

SEQ ID NO: 7947 - protein, 8 aa, Artificial Sequence
  Peptide Derived from Human Papillomavirus
RTLQQLFL

SEQ ID NO: 7948 - protein, 10 aa, Artificial Sequence
  Peptide Derived from Human Papillomavirus
RTLQQLFLST

SEQ ID NO: 7949 - protein, 11 aa, Artificial Sequence
  Peptide Derived from Human Papillomavirus
RTLQQLFLSTL

SEQ ID NO: 7950 - protein, 8 aa, Artificial Sequence
  Peptide Derived from Human Papillomavirus
SADDLRTL

SEQ ID NO: 7951 - protein, 11 aa, Artificial Sequence
  Peptide Derived from Human Papillomavirus
SADDLRTLQQL

SEQ ID NO: 7952 - protein, 11 aa, Artificial Sequence
  Peptide Derived from Human Papillomavirus
STLSFVCPWCA

SEQ ID NO: 7953 - protein, 9 aa, Artificial Sequence
  Peptide Derived from Human Papillomavirus
TLQEIVLHL

SEQ ID NO: 7954 - protein, 9 aa, Artificial Sequence
  Peptide Derived from Human Papillomavirus
TLQQLFLST

SEQ ID NO: 7955 - protein, 10 aa, Artificial Sequence
  Peptide Derived from Human Papillomavirus
TLQQLFLSTL

SEQ ID NO: 7956 - protein, 10 aa, Artificial Sequence
  Peptide Derived from Human Papillomavirus
TLSFVCPWCA

SEQ ID NO: 7957 - protein, 11 aa, Artificial Sequence
  Peptide Derived from Human Papillomavirus
TLSFVCPWCAT

SEQ ID NO: 7958 - protein, 9 aa, Artificial Sequence
  Peptide Derived from Human Papillomavirus
TVESSADDL

SEQ ID NO: 7959 - protein, 11 aa, Artificial Sequence
  Peptide Derived from Human Papillomavirus
TVESSADDLRT

SEQ ID NO: 7960 - protein, 10 aa, Artificial Sequence
  Peptide Derived from Human Papillomavirus
VLHLEPQNEL

SEQ ID NO: 7961 - protein, 11 aa, Artificial Sequence
  Peptide Derived from Human Papillomavirus
AASTSTASRPA

SEQ ID NO: 7962 - protein, 10 aa, Artificial Sequence
  Peptide Derived from Human Papillomavirus
AATAVITQDV

SEQ ID NO: 7963 - protein, 10 aa, Artificial Sequence
  Peptide Derived from Human Papillomavirus
AIGEHWAKGT

SEQ ID NO: 7964 - protein, 11 aa, Artificial Sequence
  Peptide Derived from Human Papillomavirus
AIGEHWAKGTL

SEQ ID NO: 7965 - protein, 10 aa, Artificial Sequence
  Peptide Derived from Human Papillomavirus
ALPDPNKFGL

SEQ ID NO: 7966 - protein, 9 aa, Artificial Sequence
  Peptide Derived from Human Papillomavirus
ALWRPSDST

SEQ ID NO: 7967 - protein, 10 aa, Artificial Sequence
  Peptide Derived from Human Papillomavirus
ALWRPSDSTV

SEQ ID NO: 7968 - protein, 10 aa, Artificial Sequence
  Peptide Derived from Human Papillomavirus
AMDFSTLQDT

SEQ ID NO: 7969 - protein, 8 aa, Artificial Sequence
  Peptide Derived from Human Papillomavirus
AQGHNNGI

SEQ ID NO: 7970 - protein, 11 aa, Artificial Sequence
  Peptide Derived from Human Papillomavirus
AQLQPGDCPPL

SEQ ID NO: 7971 - protein, 9 aa, Artificial Sequence
  Peptide Derived from Human Papillomavirus
ATAVITQDV

SEQ ID NO: 7972 - protein, 11 aa, Artificial Sequence
  Peptide Derived from Human Papillomavirus
AVITQDVRDNV

SEQ ID NO: 7973 - protein, 8 aa, Artificial Sequence
  Peptide Derived from Human Papillomavirus
AVTCQKDT

SEQ ID NO: 7974 - protein, 9 aa, Artificial Sequence
  Peptide Derived from Human Papillomavirus
AVTCQKDTT

SEQ ID NO: 7975 - protein, 8 aa, Artificial Sequence
  Peptide Derived from Human Papillomavirus
CASTQNPV

SEQ ID NO: 7976 - protein, 11 aa, Artificial Sequence
  Peptide Derived from Human Papillomavirus
CASTQNPVPNT

SEQ ID NO: 7977 - protein, 8 aa, Artificial Sequence
  Peptide Derived from Human Papillomavirus
CILGCVPA

SEQ ID NO: 7978 - protein, 9 aa, Artificial Sequence
  Peptide Derived from Human Papillomavirus
CILGCVPAI

SEQ ID NO: 7979 - protein, 9 aa, Artificial Sequence
  Peptide Derived from Human Papillomavirus
CLRREQLFA

SEQ ID NO: 7980 - protein, 11 aa, Artificial Sequence
  Peptide Derived from Human Papillomavirus
CQSICKYPDYL

SEQ ID NO: 7981 - protein, 9 aa, Artificial Sequence
  Peptide Derived from Human Papillomavirus
CTITLTAEV

SEQ ID NO: 7982 - protein, 10 aa, Artificial Sequence
  Peptide Derived from Human Papillomavirus
CTITLTAEVM

SEQ ID NO: 7983 - protein, 10 aa, Artificial Sequence
  Peptide Derived from Human Papillomavirus
CVPAIGEHWA

SEQ ID NO: 7984 - protein, 11 aa, Artificial Sequence
  Peptide Derived from Human Papillomavirus
CVYSPSPSGSI

SEQ ID NO: 7985 - protein, 10 aa, Artificial Sequence
  Peptide Derived from Human Papillomavirus
DLKEKFSSDL

SEQ ID NO: 7986 - protein, 8 aa, Artificial Sequence
  Peptide Derived from Human Papillomavirus
DLQFIFQL

SEQ ID NO: 7987 - protein, 10 aa, Artificial Sequence
  Peptide Derived from Human Papillomavirus
DLQFIFQLCT

SEQ ID NO: 7988 - protein, 11 aa, Artificial Sequence
  Peptide Derived from Human Papillomavirus
DLQFIFQLCTI

SEQ ID NO: 7989 - protein, 9 aa, Artificial Sequence
  Peptide Derived from Human Papillomavirus
DLYIKGTSA

SEQ ID NO: 7990 - protein, 11 aa, Artificial Sequence
  Peptide Derived from Human Papillomavirus
DLYIKGTSANM

SEQ ID NO: 7991 - protein, 9 aa, Artificial Sequence
  Peptide Derived from Human Papillomavirus
DMVDTGYGA

SEQ ID NO: 7992 - protein, 10 aa, Artificial Sequence
  Peptide Derived from Human Papillomavirus
DMVDTGYGAM

SEQ ID NO: 7993 - protein, 10 aa, Artificial Sequence
  Peptide Derived from Human Papillomavirus
DQYPLGRKFL

SEQ ID NO: 7994 - protein, 11 aa, Artificial Sequence
  Peptide Derived from Human Papillomavirus
DQYPLGRKFLV

SEQ ID NO: 7995 - protein, 8 aa, Artificial Sequence
  Peptide Derived from Human Papillomavirus
DTESAHAA

SEQ ID NO: 7996 - protein, 9 aa, Artificial Sequence
  Peptide Derived from Human Papillomavirus
DTESAHAAT

SEQ ID NO: 7997 - protein, 10 aa, Artificial Sequence
  Peptide Derived from Human Papillomavirus
DTESAHAATA

SEQ ID NO: 7998 - protein, 11 aa, Artificial Sequence
  Peptide Derived from Human Papillomavirus
DTESAHAATAV

SEQ ID NO: 7999 - protein, 11 aa, Artificial Sequence
  Peptide Derived from Human Papillomavirus
DTGYGAMDFST

SEQ ID NO: 8000 - protein, 8 aa, Artificial Sequence
  Peptide Derived from Human Papillomavirus
DTKCEVPL

SEQ ID NO: 8001 - protein, 10 aa, Artificial Sequence
  Peptide Derived from Human Papillomavirus
DTKCEVPLDI

SEQ ID NO: 8002 - protein, 8 aa, Artificial Sequence
  Peptide Derived from Human Papillomavirus
DTTRSTNL

SEQ ID NO: 8003 - protein, 9 aa, Artificial Sequence
  Peptide Derived from Human Papillomavirus
DTTRSTNLT

SEQ ID NO: 8004 - protein, 10 aa, Artificial Sequence
  Peptide Derived from Human Papillomavirus
DTTRSTNLTL

SEQ ID NO: 8005 - protein, 9 aa, Artificial Sequence
  Peptide Derived from Human Papillomavirus
DTVPTDLYI

SEQ ID NO: 8006 - protein, 9 aa, Artificial Sequence
  Peptide Derived from Human Papillomavirus
DTYRFVQSV

SEQ ID NO: 8007 - protein, 10 aa, Artificial Sequence
  Peptide Derived from Human Papillomavirus
DTYRFVQSVA

SEQ ID NO: 8008 - protein, 11 aa, Artificial Sequence
  Peptide Derived from Human Papillomavirus
DTYRFVQSVAV

SEQ ID NO: 8009 - protein, 8 aa, Artificial Sequence
  Peptide Derived from Human Papillomavirus
DVRDNVSV

SEQ ID NO: 8010 - protein, 8 aa, Artificial Sequence
  Peptide Derived from Human Papillomavirus
EIGRGQPL

SEQ ID NO: 8011 - protein, 10 aa, Artificial Sequence
  Peptide Derived from Human Papillomavirus
EIGRGQPLGI

SEQ ID NO: 8012 - protein, 8 aa, Artificial Sequence
  Peptide Derived from Human Papillomavirus
ETQRLVWA

SEQ ID NO: 8013 - protein, 10 aa, Artificial Sequence
  Peptide Derived from Human Papillomavirus
ETQRLVWACV

SEQ ID NO: 8014 - protein, 9 aa, Artificial Sequence
  Peptide Derived from Human Papillomavirus
EVMSYIHSM

SEQ ID NO: 8015 - protein, 10 aa, Artificial Sequence
  Peptide Derived from Human Papillomavirus
EVPLDICQSI

SEQ ID NO: 8016 - protein, 9 aa, Artificial Sequence
  Peptide Derived from Human Papillomavirus
FARHFWNRA

SEQ ID NO: 8017 - protein, 11 aa, Artificial Sequence
  Peptide Derived from Human Papillomavirus
FARHFWNRAGV

SEQ ID NO: 8018 - protein, 8 aa, Artificial Sequence
  Peptide Derived from Human Papillomavirus
FIFQLCTI

SEQ ID NO: 8019 - protein, 9 aa, Artificial Sequence
  Peptide Derived from Human Papillomavirus
FIFQLCTIT

SEQ ID NO: 8020 - protein, 10 aa, Artificial Sequence
  Peptide Derived from Human Papillomavirus
FIFQLCTITL

SEQ ID NO: 8021 - protein, 11 aa, Artificial Sequence
  Peptide Derived from Human Papillomavirus
FIFQLCTITLT

SEQ ID NO: 8022 - protein, 10 aa, Artificial Sequence
  Peptide Derived from Human Papillomavirus
FLKNVNVFPI

SEQ ID NO: 8023 - protein, 8 aa, Artificial Sequence
  Peptide Derived from Human Papillomavirus
FQLCTITL

SEQ ID NO: 8024 - protein, 9 aa, Artificial Sequence
  Peptide Derived from Human Papillomavirus
FQLCTITLT

SEQ ID NO: 8025 - protein, 10 aa, Artificial Sequence
  Peptide Derived from Human Papillomavirus
FQLCTITLTA

SEQ ID NO: 8026 - protein, 8 aa, Artificial Sequence
  Peptide Derived from Human Papillomavirus
FVQSVAVT

SEQ ID NO: 8027 - protein, 8 aa, Artificial Sequence
  Peptide Derived from Human Papillomavirus
FVTVVDTT

SEQ ID NO: 8028 - protein, 11 aa, Artificial Sequence
  Peptide Derived from Human Papillomavirus
FVTVVDTTRST

SEQ ID NO: 8029 - protein, 8 aa, Artificial Sequence
  Peptide Derived from Human Papillomavirus
GAGNKQAV

SEQ ID NO: 8030 - protein, 11 aa, Artificial Sequence
  Peptide Derived from Human Papillomavirus
GAGNKQAVPKV

SEQ ID NO: 8031 - protein, 8 aa, Artificial Sequence
  Peptide Derived from Human Papillomavirus
GAMDFSTL

SEQ ID NO: 8032 - protein, 11 aa, Artificial Sequence
  Peptide Derived from Human Papillomavirus
GAMDFSTLQDT

SEQ ID NO: 8033 - protein, 8 aa, Artificial Sequence
  Peptide Derived from Human Papillomavirus
GICWHNQL

SEQ ID NO: 8034 - protein, 10 aa, Artificial Sequence
  Peptide Derived from Human Papillomavirus
GICWHNQLFV

SEQ ID NO: 8035 - protein, 11 aa, Artificial Sequence
  Peptide Derived from Human Papillomavirus
GICWHNQLFVT

SEQ ID NO: 8036 - protein, 9 aa, Artificial Sequence
  Peptide Derived from Human Papillomavirus
GIIIFLKNV

SEQ ID NO: 8037 - protein, 11 aa, Artificial Sequence
  Peptide Derived from Human Papillomavirus
GIIIFLKNVNV

SEQ ID NO: 8038 - protein, 8 aa, Artificial Sequence
  Peptide Derived from Human Papillomavirus
GLRRRPTI

SEQ ID NO: 8039 - protein, 11 aa, Artificial Sequence
  Peptide Derived from Human Papillomavirus
GLSGHPFYNKL

SEQ ID NO: 8040 - protein, 10 aa, Artificial Sequence
  Peptide Derived from Human Papillomavirus
GMEIGRGQPL

SEQ ID NO: 8041 - protein, 8 aa, Artificial Sequence
  Peptide Derived from Human Papillomavirus
GQPLGIGL

SEQ ID NO: 8042 - protein, 9 aa, Artificial Sequence
  Peptide Derived from Human Papillomavirus
GTLCKPAQL

SEQ ID NO: 8043 - protein, 9 aa, Artificial Sequence
  Peptide Derived from Human Papillomavirus
GTSANMRET

SEQ ID NO: 8044 - protein, 9 aa, Artificial Sequence
  Peptide Derived from Human Papillomavirus
GVMGDTVPT

SEQ ID NO: 8045 - protein, 11 aa, Artificial Sequence
  Peptide Derived from Human Papillomavirus
GVMGDTVPTDL

SEQ ID NO: 8046 - protein, 8 aa, Artificial Sequence
  Peptide Derived from Human Papillomavirus
GVPPPPTT

SEQ ID NO: 8047 - protein, 10 aa, Artificial Sequence
  Peptide Derived from Human Papillomavirus
GVPPPPTTSL

SEQ ID NO: 8048 - protein, 11 aa, Artificial Sequence
  Peptide Derived from Human Papillomavirus
GVPPPPTTSLV

SEQ ID NO: 8049 - protein, 8 aa, Artificial Sequence
  Peptide Derived from Human Papillomavirus
HAATAVIT

SEQ ID NO: 8050 - protein, 11 aa, Artificial Sequence
  Peptide Derived from Human Papillomavirus
HAATAVITQDV

SEQ ID NO: 8051 - protein, 8 aa, Artificial Sequence
  Peptide Derived from Human Papillomavirus
HAGSSRLL

SEQ ID NO: 8052 - protein, 9 aa, Artificial Sequence
  Peptide Derived from Human Papillomavirus
HAGSSRLLT

SEQ ID NO: 8053 - protein, 10 aa, Artificial Sequence
  Peptide Derived from Human Papillomavirus
HAGSSRLLTV

SEQ ID NO: 8054 - protein, 10 aa, Artificial Sequence
  Peptide Derived from Human Papillomavirus
HVEEYDLQFI

SEQ ID NO: 8055 - protein, 8 aa, Artificial Sequence
  Peptide Derived from Human Papillomavirus
IIEDGDMV

SEQ ID NO: 8056 - protein, 10 aa, Artificial Sequence
  Peptide Derived from Human Papillomavirus
IIEDGDMVDT

SEQ ID NO: 8057 - protein, 9 aa, Artificial Sequence
  Peptide Derived from Human Papillomavirus
IIFLKNVNV

SEQ ID NO: 8058 - protein, 8 aa, Artificial Sequence
  Peptide Derived from Human Papillomavirus
IIIFLKNV

SEQ ID NO: 8059 - protein, 10 aa, Artificial Sequence
  Peptide Derived from Human Papillomavirus
IIIFLKNVNV

SEQ ID NO: 8060 - protein, 8 aa, Artificial Sequence
  Peptide Derived from Human Papillomavirus
IIYGHGII

SEQ ID NO: 8061 - protein, 9 aa, Artificial Sequence
  Peptide Derived from Human Papillomavirus
IIYGHGIII

SEQ ID NO: 8062 - protein, 11 aa, Artificial Sequence
  Peptide Derived from Human Papillomavirus
IIYGHGIIIFL

SEQ ID NO: 8063 - protein, 9 aa, Artificial Sequence
  Peptide Derived from Human Papillomavirus
ILENWNFGV

SEQ ID NO: 8064 - protein, 8 aa, Artificial Sequence
  Peptide Derived from Human Papillomavirus
ILGCVPAI

SEQ ID NO: 8065 - protein, 8 aa, Artificial Sequence
  Peptide Derived from Human Papillomavirus
ITLTAEVM

SEQ ID NO: 8066 - protein, 11 aa, Artificial Sequence
  Peptide Derived from Human Papillomavirus
ITLTAEVMSYI

SEQ ID NO: 8067 - protein, 9 aa, Artificial Sequence
  Peptide Derived from Human Papillomavirus
ITQDVRDNV

SEQ ID NO: 8068 - protein, 11 aa, Artificial Sequence
  Peptide Derived from Human Papillomavirus
ITQDVRDNVSV

SEQ ID NO: 8069 - protein, 8 aa, Artificial Sequence
  Peptide Derived from Human Papillomavirus
ITTSDSQL

SEQ ID NO: 8070 - protein, 9 aa, Artificial Sequence
  Peptide Derived from Human Papillomavirus
KAQGHNNGI

SEQ ID NO: 8071 - protein, 8 aa, Artificial Sequence
  Peptide Derived from Human Papillomavirus
KLDDTESA

SEQ ID NO: 8072 - protein, 10 aa, Artificial Sequence
  Peptide Derived from Human Papillomavirus
KLDDTESAHA

SEQ ID NO: 8073 - protein, 11 aa, Artificial Sequence
  Peptide Derived from Human Papillomavirus
KLDDTESAHAA

SEQ ID NO: 8074 - protein, 9 aa, Artificial Sequence
  Peptide Derived from Human Papillomavirus
KLKFWTVDL

SEQ ID NO: 8075 - protein, 9 aa, Artificial Sequence
  Peptide Derived from Human Papillomavirus
KQAVPKVSA

SEQ ID NO: 8076 - protein, 8 aa, Artificial Sequence
  Peptide Derived from Human Papillomavirus
KQDPYDKL

SEQ ID NO: 8077 - protein, 8 aa, Artificial Sequence
  Peptide Derived from Human Papillomavirus
KQTQLCIL

SEQ ID NO: 8078 - protein, 11 aa, Artificial Sequence
  Peptide Derived from Human Papillomavirus
KQTQLCILGCV

SEQ ID NO: 8079 - protein, 9 aa, Artificial Sequence
  Peptide Derived from Human Papillomavirus
KVSAYQYRV

SEQ ID NO: 8080 - protein, 11 aa, Artificial Sequence
  Peptide Derived from Human Papillomavirus
LLTVGNPYFRV

SEQ ID NO: 8081 - protein, 8 aa, Artificial Sequence
  Peptide Derived from Human Papillomavirus
LQDTKCEV

SEQ ID NO: 8082 - protein, 10 aa, Artificial Sequence
  Peptide Derived from Human Papillomavirus
LQDTKCEVPL

SEQ ID NO: 8083 - protein, 9 aa, Artificial Sequence
  Peptide Derived from Human Papillomavirus
LQFIFQLCT

SEQ ID NO: 8084 - protein, 10 aa, Artificial Sequence
  Peptide Derived from Human Papillomavirus
LQFIFQLCTI

SEQ ID NO: 8085 - protein, 11 aa, Artificial Sequence
  Peptide Derived from Human Papillomavirus
LQFIFQLCTIT

SEQ ID NO: 8086 - protein, 9 aa, Artificial Sequence
  Peptide Derived from Human Papillomavirus
LQPGDCPPL

SEQ ID NO: 8087 - protein, 11 aa, Artificial Sequence
  Peptide Derived from Human Papillomavirus
LQPGDCPPLEL

SEQ ID NO: 8088 - protein, 9 aa, Artificial Sequence
  Peptide Derived from Human Papillomavirus
LTAEVMSYI

SEQ ID NO: 8089 - protein, 11 aa, Artificial Sequence
  Peptide Derived from Human Papillomavirus
LTLCASTQNPV

SEQ ID NO: 8090 - protein, 10 aa, Artificial Sequence
  Peptide Derived from Human Papillomavirus
LTVGNPYFRV

SEQ ID NO: 8091 - protein, 11 aa, Artificial Sequence
  Peptide Derived from Human Papillomavirus
LTVGNPYFRVV

SEQ ID NO: 8092 - protein, 8 aa, Artificial Sequence
  Peptide Derived from Human Papillomavirus
LVDTYRFV

SEQ ID NO: 8093 - protein, 11 aa, Artificial Sequence
  Peptide Derived from Human Papillomavirus
LVDTYRFVQSV

SEQ ID NO: 8094 - protein, 11 aa, Artificial Sequence
  Peptide Derived from Human Papillomavirus
LVQAGLRRRPT

SEQ ID NO: 8095 - protein, 8 aa, Artificial Sequence
  Peptide Derived from Human Papillomavirus
LVWACVGM

SEQ ID NO: 8096 - protein, 10 aa, Artificial Sequence
  Peptide Derived from Human Papillomavirus
LVWACVGMEI

SEQ ID NO: 8097 - protein, 11 aa, Artificial Sequence
  Peptide Derived from Human Papillomavirus
MAHNIIYGHGI

SEQ ID NO: 8098 - protein, 10 aa, Artificial Sequence
  Peptide Derived from Human Papillomavirus
MALWRPSDST

SEQ ID NO: 8099 - protein, 11 aa, Artificial Sequence
  Peptide Derived from Human Papillomavirus
MALWRPSDSTV

SEQ ID NO: 8100 - protein, 8 aa, Artificial Sequence
  Peptide Derived from Human Papillomavirus
MVDTGYGA

SEQ ID NO: 8101 - protein, 9 aa, Artificial Sequence
  Peptide Derived from Human Papillomavirus
MVDTGYGAM

SEQ ID NO: 8102 - protein, 8 aa, Artificial Sequence
  Peptide Derived from Human Papillomavirus
NIIYGHGI

SEQ ID NO: 8103 - protein, 9 aa, Artificial Sequence
  Peptide Derived from Human Papillomavirus
NIIYGHGII

SEQ ID NO: 8104 - protein, 10 aa, Artificial Sequence
  Peptide Derived from Human Papillomavirus
NIIYGHGIII

SEQ ID NO: 8105 - protein, 8 aa, Artificial Sequence
  Peptide Derived from Human Papillomavirus
NLTLCAST

SEQ ID NO: 8106 - protein, 10 aa, Artificial Sequence
  Peptide Derived from Human Papillomavirus
NMRETPGSCV

SEQ ID NO: 8107 - protein, 8 aa, Artificial Sequence
  Peptide Derived from Human Papillomavirus
NQLFVTVV

SEQ ID NO: 8108 - protein, 10 aa, Artificial Sequence
  Peptide Derived from Human Papillomavirus
NQLFVTVVDT

SEQ ID NO: 8109 - protein, 11 aa, Artificial Sequence
  Peptide Derived from Human Papillomavirus
NQLFVTVVDTT

SEQ ID NO: 8110 - protein, 9 aa, Artificial Sequence
  Peptide Derived from Human Papillomavirus
NTDDYVSRT

SEQ ID NO: 8111 - protein, 11 aa, Artificial Sequence
  Peptide Derived from Human Papillomavirus
NTDDYVSRTSI

SEQ ID NO: 8112 - protein, 9 aa, Artificial Sequence
  Peptide Derived from Human Papillomavirus
NTIIEDGDM

SEQ ID NO: 8113 - protein, 10 aa, Artificial Sequence
  Peptide Derived from Human Papillomavirus
NTIIEDGDMV

SEQ ID NO: 8114 - protein, 9 aa, Artificial Sequence
  Peptide Derived from Human Papillomavirus
NVFPIFLQM

SEQ ID NO: 8115 - protein, 10 aa, Artificial Sequence
  Peptide Derived from Human Papillomavirus
NVFPIFLQMA

SEQ ID NO: 8116 - protein, 11 aa, Artificial Sequence
  Peptide Derived from Human Papillomavirus
NVFPIFLQMAL

SEQ ID NO: 8117 - protein, 9 aa, Artificial Sequence
  Peptide Derived from Human Papillomavirus
NVNVFPIFL

SEQ ID NO: 8118 - protein, 11 aa, Artificial Sequence
  Peptide Derived from Human Papillomavirus
NVNVFPIFLQM

SEQ ID NO: 8119 - protein, 9 aa, Artificial Sequence
  Peptide Derived from Human Papillomavirus
NVSVDYKQT

SEQ ID NO: 8120 - protein, 11 aa, Artificial Sequence
  Peptide Derived from Human Papillomavirus
NVSVDYKQTQL

SEQ ID NO: 8121 - protein, 8 aa, Artificial Sequence
  Peptide Derived from Human Papillomavirus
PAASTSTA

SEQ ID NO: 8122 - protein, 8 aa, Artificial Sequence
  Peptide Derived from Human Papillomavirus
PAIGEHWA

SEQ ID NO: 8123 - protein, 11 aa, Artificial Sequence
  Peptide Derived from Human Papillomavirus
PAIGEHWAKGT

SEQ ID NO: 8124 - protein, 8 aa, Artificial Sequence
  Peptide Derived from Human Papillomavirus
PIFLQMAL

SEQ ID NO: 8125 - protein, 8 aa, Artificial Sequence
  Peptide Derived from Human Papillomavirus
PLDICQSI

SEQ ID NO: 8126 - protein, 8 aa, Artificial Sequence
  Peptide Derived from Human Papillomavirus
PLELKNTI

SEQ ID NO: 8127 - protein, 9 aa, Artificial Sequence
  Peptide Derived from Human Papillomavirus
PLELKNTII

SEQ ID NO: 8128 - protein, 8 aa, Artificial Sequence
  Peptide Derived from Human Papillomavirus
PLGRKFLV

SEQ ID NO: 8129 - protein, 10 aa, Artificial Sequence
  Peptide Derived from Human Papillomavirus
PLGRKFLVQA

SEQ ID NO: 8130 - protein, 9 aa, Artificial Sequence
  Peptide Derived from Human Papillomavirus
PTDLYIKGT

SEQ ID NO: 8131 - protein, 11 aa, Artificial Sequence
  Peptide Derived from Human Papillomavirus
PTDLYIKGTSA

SEQ ID NO: 8132 - protein, 10 aa, Artificial Sequence
  Peptide Derived from Human Papillomavirus
PTIGPRKRPA

SEQ ID NO: 8133 - protein, 11 aa, Artificial Sequence
  Peptide Derived from Human Papillomavirus
PTIGPRKRPAA

SEQ ID NO: 8134 - protein, 11 aa, Artificial Sequence
  Peptide Derived from Human Papillomavirus
PTKFKHYSRHV

SEQ ID NO: 8135 - protein, 8 aa, Artificial Sequence
  Peptide Derived from Human Papillomavirus
PTTSLVDT

SEQ ID NO: 8136 - protein, 9 aa, Artificial Sequence
  Peptide Derived from Human Papillomavirus
PVPNTYDPT

SEQ ID NO: 8137 - protein, 9 aa, Artificial Sequence
  Peptide Derived from Human Papillomavirus
QAGLRRRPT

SEQ ID NO: 8138 - protein, 10 aa, Artificial Sequence
  Peptide Derived from Human Papillomavirus
QAGLRRRPTI

SEQ ID NO: 8139 - protein, 8 aa, Artificial Sequence
  Peptide Derived from Human Papillomavirus
QAVPKVSA

SEQ ID NO: 8140 - protein, 8 aa, Artificial Sequence
  Peptide Derived from Human Papillomavirus
QLCILGCV

SEQ ID NO: 8141 - protein, 10 aa, Artificial Sequence
  Peptide Derived from Human Papillomavirus
QLCILGCVPA

SEQ ID NO: 8142 - protein, 11 aa, Artificial Sequence
  Peptide Derived from Human Papillomavirus
QLCILGCVPAI

SEQ ID NO: 8143 - protein, 8 aa, Artificial Sequence
  Peptide Derived from Human Papillomavirus
QLCTITLT

SEQ ID NO: 8144 - protein, 9 aa, Artificial Sequence
  Peptide Derived from Human Papillomavirus
QLCTITLTA

SEQ ID NO: 8145 - protein, 11 aa, Artificial Sequence
  Peptide Derived from Human Papillomavirus
QLCTITLTAEV

SEQ ID NO: 8146 - protein, 11 aa, Artificial Sequence
  Peptide Derived from Human Papillomavirus
QLFARHFWNRA

SEQ ID NO: 8147 - protein, 9 aa, Artificial Sequence
  Peptide Derived from Human Papillomavirus
QLFNKPYWL

SEQ ID NO: 8148 - protein, 9 aa, Artificial Sequence
  Peptide Derived from Human Papillomavirus
QLFVTVVDT

SEQ ID NO: 8149 - protein, 10 aa, Artificial Sequence
  Peptide Derived from Human Papillomavirus
QLFVTVVDTT

SEQ ID NO: 8150 - protein, 10 aa, Artificial Sequence
  Peptide Derived from Human Papillomavirus
QLQPGDCPPL

SEQ ID NO: 8151 - protein, 11 aa, Artificial Sequence
  Peptide Derived from Human Papillomavirus
QMALWRPSDST

SEQ ID NO: 8152 - protein, 11 aa, Artificial Sequence
  Peptide Derived from Human Papillomavirus
QMSADPYGDSM

SEQ ID NO: 8153 - protein, 10 aa, Artificial Sequence
  Peptide Derived from Human Papillomavirus
QTQLCILGCV

SEQ ID NO: 8154 - protein, 8 aa, Artificial Sequence
  Peptide Derived from Human Papillomavirus
RAGVMGDT

SEQ ID NO: 8155 - protein, 9 aa, Artificial Sequence
  Peptide Derived from Human Papillomavirus
RAGVMGDTV

SEQ ID NO: 8156 - protein, 11 aa, Artificial Sequence
  Peptide Derived from Human Papillomavirus
RAGVMGDTVPT

SEQ ID NO: 8157 - protein, 9 aa, Artificial Sequence
  Peptide Derived from Human Papillomavirus
RLVWACVGM

SEQ ID NO: 8158 - protein, 11 aa, Artificial Sequence
  Peptide Derived from Human Papillomavirus
RLVWACVGMEI

SEQ ID NO: 8159 - protein, 8 aa, Artificial Sequence
  Peptide Derived from Human Papillomavirus
RTSIFYHA

SEQ ID NO: 8160 - protein, 9 aa, Artificial Sequence
  Peptide Derived from Human Papillomavirus
RVVNTDDYV

SEQ ID NO: 8161 - protein, 9 aa, Artificial Sequence
  Peptide Derived from Human Papillomavirus
SADPYGDSM

SEQ ID NO: 8162 - protein, 8 aa, Artificial Sequence
  Peptide Derived from Human Papillomavirus
SAHAATAV

SEQ ID NO: 8163 - protein, 9 aa, Artificial Sequence
  Peptide Derived from Human Papillomavirus
SAHAATAVI

SEQ ID NO: 8164 - protein, 10 aa, Artificial Sequence
  Peptide Derived from Human Papillomavirus
SAHAATAVIT

SEQ ID NO: 8165 - protein, 10 aa, Artificial Sequence
  Peptide Derived from Human Papillomavirus
SAYQYRVFRV

SEQ ID NO: 8166 - protein, 11 aa, Artificial Sequence
  Peptide Derived from Human Papillomavirus
SAYQYRVFRVA

SEQ ID NO: 8167 - protein, 9 aa, Artificial Sequence
  Peptide Derived from Human Papillomavirus
SICKYPDYL

SEQ ID NO: 8168 - protein, 11 aa, Artificial Sequence
  Peptide Derived from Human Papillomavirus
SICKYPDYLQM

SEQ ID NO: 8169 - protein, 11 aa, Artificial Sequence
  Peptide Derived from Human Papillomavirus
SIFYHAGSSRL

SEQ ID NO: 8170 - protein, 10 aa, Artificial Sequence
  Peptide Derived from Human Papillomavirus
SILENWNFGV

SEQ ID NO: 8171 - protein, 9 aa, Artificial Sequence
  Peptide Derived from Human Papillomavirus
SITTSDSQL

SEQ ID NO: 8172 - protein, 9 aa, Artificial Sequence
  Peptide Derived from Human Papillomavirus
SLVDTYRFV

SEQ ID NO: 8173 - protein, 11 aa, Artificial Sequence
  Peptide Derived from Human Papillomavirus
SMFFCLRREQL

SEQ ID NO: 8174 - protein, 10 aa, Artificial Sequence
  Peptide Derived from Human Papillomavirus
SQLFNKPYWL

SEQ ID NO: 8175 - protein, 10 aa, Artificial Sequence
  Peptide Derived from Human Papillomavirus
STASRPAKRV

SEQ ID NO: 8176 - protein, 8 aa, Artificial Sequence
  Peptide Derived from Human Papillomavirus
STIYNPET

SEQ ID NO: 8177 - protein, 11 aa, Artificial Sequence
  Peptide Derived from Human Papillomavirus
STIYNPETQRL

SEQ ID NO: 8178 - protein, 10 aa, Artificial Sequence
  Peptide Derived from Human Papillomavirus
STLQDTKCEV

SEQ ID NO: 8179 - protein, 8 aa, Artificial Sequence
  Peptide Derived from Human Papillomavirus
STNLTLCA

SEQ ID NO: 8180 - protein, 10 aa, Artificial Sequence
  Peptide Derived from Human Papillomavirus
STNLTLCAST

SEQ ID NO: 8181 - protein, 9 aa, Artificial Sequence
  Peptide Derived from Human Papillomavirus
STQNPVPNT

SEQ ID NO: 8182 - protein, 9 aa, Artificial Sequence
  Peptide Derived from Human Papillomavirus
STSTASRPA

SEQ ID NO: 8183 - protein, 10 aa, Artificial Sequence
  Peptide Derived from Human Papillomavirus
STVYLPPPSV

SEQ ID NO: 8184 - protein, 11 aa, Artificial Sequence
  Peptide Derived from Human Papillomavirus
STVYLPPPSVA

SEQ ID NO: 8185 - protein, 8 aa, Artificial Sequence
  Peptide Derived from Human Papillomavirus
SVARVVNT

SEQ ID NO: 8186 - protein, 10 aa, Artificial Sequence
  Peptide Derived from Human Papillomavirus
SVAVTCQKDT

SEQ ID NO: 8187 - protein, 11 aa, Artificial Sequence
  Peptide Derived from Human Papillomavirus
SVAVTCQKDTT

SEQ ID NO: 8188 - protein, 9 aa, Artificial Sequence
  Peptide Derived from Human Papillomavirus
SVDYKQTQL

SEQ ID NO: 8189 - protein, 11 aa, Artificial Sequence
  Peptide Derived from Human Papillomavirus
SVDYKQTQLCI

SEQ ID NO: 8190 - protein, 8 aa, Artificial Sequence
  Peptide Derived from Human Papillomavirus
TAEVMSYI

SEQ ID NO: 8191 - protein, 11 aa, Artificial Sequence
  Peptide Derived from Human Papillomavirus
TAEVMSYIHSM

SEQ ID NO: 8192 - protein, 9 aa, Artificial Sequence
  Peptide Derived from Human Papillomavirus
TASRPAKRV

SEQ ID NO: 8193 - protein, 11 aa, Artificial Sequence
  Peptide Derived from Human Papillomavirus
TASRPAKRVRI

SEQ ID NO: 8194 - protein, 8 aa, Artificial Sequence
  Peptide Derived from Human Papillomavirus
TAVITQDV

SEQ ID NO: 8195 - protein, 9 aa, Artificial Sequence
  Peptide Derived from Human Papillomavirus
TIGPRKRPA

SEQ ID NO: 8196 - protein, 10 aa, Artificial Sequence
  Peptide Derived from Human Papillomavirus
TIGPRKRPAA

SEQ ID NO: 8197 - protein, 8 aa, Artificial Sequence
  Peptide Derived from Human Papillomavirus
TIIEDGDM

SEQ ID NO: 8198 - protein, 9 aa, Artificial Sequence
  Peptide Derived from Human Papillomavirus
TIIEDGDMV

SEQ ID NO: 8199 - protein, 11 aa, Artificial Sequence
  Peptide Derived from Human Papillomavirus
TIIEDGDMVDT

SEQ ID NO: 8200 - protein, 8 aa, Artificial Sequence
  Peptide Derived from Human Papillomavirus
TITLTAEV

SEQ ID NO: 8201 - protein, 9 aa, Artificial Sequence
  Peptide Derived from Human Papillomavirus
TITLTAEVM

SEQ ID NO: 8202 - protein, 10 aa, Artificial Sequence
  Peptide Derived from Human Papillomavirus
TIYNPETQRL

SEQ ID NO: 8203 - protein, 11 aa, Artificial Sequence
  Peptide Derived from Human Papillomavirus
TIYNPETQRLV

SEQ ID NO: 8204 - protein, 10 aa, Artificial Sequence
  Peptide Derived from Human Papillomavirus
TLCASTQNPV

SEQ ID NO: 8205 - protein, 8 aa, Artificial Sequence
  Peptide Derived from Human Papillomavirus
TLCKPAQL

SEQ ID NO: 8206 - protein, 9 aa, Artificial Sequence
  Peptide Derived from Human Papillomavirus
TLQDTKCEV

SEQ ID NO: 8207 - protein, 11 aa, Artificial Sequence
  Peptide Derived from Human Papillomavirus
TLQDTKCEVPL

SEQ ID NO: 8208 - protein, 10 aa, Artificial Sequence
  Peptide Derived from Human Papillomavirus
TLTAEVMSYI

SEQ ID NO: 8209 - protein, 8 aa, Artificial Sequence
  Peptide Derived from Human Papillomavirus
TQDVRDNV

SEQ ID NO: 8210 - protein, 10 aa, Artificial Sequence
  Peptide Derived from Human Papillomavirus
TQDVRDNVSV

SEQ ID NO: 8211 - protein, 9 aa, Artificial Sequence
  Peptide Derived from Human Papillomavirus
TQLCILGCV

SEQ ID NO: 8212 - protein, 11 aa, Artificial Sequence
  Peptide Derived from Human Papillomavirus
TQLCILGCVPA

SEQ ID NO: 8213 - protein, 8 aa, Artificial Sequence
  Peptide Derived from Human Papillomavirus
TQNPVPNT

SEQ ID NO: 8214 - protein, 9 aa, Artificial Sequence
  Peptide Derived from Human Papillomavirus
TQRLVWACV

SEQ ID NO: 8215 - protein, 11 aa, Artificial Sequence
  Peptide Derived from Human Papillomavirus
TQRLVWACVGM

SEQ ID NO: 8216 - protein, 8 aa, Artificial Sequence
  Peptide Derived from Human Papillomavirus
TTRSTNLT

SEQ ID NO: 8217 - protein, 9 aa, Artificial Sequence
  Peptide Derived from Human Papillomavirus
TTRSTNLTL

SEQ ID NO: 8218 - protein, 11 aa, Artificial Sequence
  Peptide Derived from Human Papillomavirus
TTRSTNLTLCA

SEQ ID NO: 8219 - protein, 11 aa, Artificial Sequence
  Peptide Derived from Human Papillomavirus
TTSLVDTYRFV

SEQ ID NO: 8220 - protein, 9 aa, Artificial Sequence
  Peptide Derived from Human Papillomavirus
TVGNPYFRV

SEQ ID NO: 8221 - protein, 10 aa, Artificial Sequence
  Peptide Derived from Human Papillomavirus
TVGNPYFRVV

SEQ ID NO: 8222 - protein, 8 aa, Artificial Sequence
  Peptide Derived from Human Papillomavirus
TVPTDLYI

SEQ ID NO: 8223 - protein, 11 aa, Artificial Sequence
  Peptide Derived from Human Papillomavirus
TVPTDLYIKGT

SEQ ID NO: 8224 - protein, 9 aa, Artificial Sequence
  Peptide Derived from Human Papillomavirus
TVVDTTRST

SEQ ID NO: 8225 - protein, 11 aa, Artificial Sequence
  Peptide Derived from Human Papillomavirus
TVVDTTRSTNL

SEQ ID NO: 8226 - protein, 9 aa, Artificial Sequence
  Peptide Derived from Human Papillomavirus
TVYLPPPSV

SEQ ID NO: 8227 - protein, 10 aa, Artificial Sequence
  Peptide Derived from Human Papillomavirus
TVYLPPPSVA

SEQ ID NO: 8228 - protein, 11 aa, Artificial Sequence
  Peptide Derived from Human Papillomavirus
VALPDPNKFGL

SEQ ID NO: 8229 - protein, 11 aa, Artificial Sequence
  Peptide Derived from Human Papillomavirus
VARVVNTDDYV

SEQ ID NO: 8230 - protein, 9 aa, Artificial Sequence
  Peptide Derived from Human Papillomavirus
VAVTCQKDT

SEQ ID NO: 8231 - protein, 10 aa, Artificial Sequence
  Peptide Derived from Human Papillomavirus
VAVTCQKDTT

SEQ ID NO: 8232 - protein, 10 aa, Artificial Sequence
  Peptide Derived from Human Papillomavirus
VITQDVRDNV

SEQ ID NO: 8233 - protein, 8 aa, Artificial Sequence
  Peptide Derived from Human Papillomavirus
VMGDTVPT

SEQ ID NO: 8234 - protein, 10 aa, Artificial Sequence
  Peptide Derived from Human Papillomavirus
VMGDTVPTDL

SEQ ID NO: 8235 - protein, 8 aa, Artificial Sequence
  Peptide Derived from Human Papillomavirus
VMSYIHSM

SEQ ID NO: 8236 - protein, 10 aa, Artificial Sequence
  Peptide Derived from Human Papillomavirus
VQAGLRRRPT

SEQ ID NO: 8237 - protein, 11 aa, Artificial Sequence
  Peptide Derived from Human Papillomavirus
VQAGLRRRPTI

SEQ ID NO: 8238 - protein, 8 aa, Artificial Sequence
  Peptide Derived from Human Papillomavirus
VTCQKDTT

SEQ ID NO: 8239 - protein, 10 aa, Artificial Sequence
  Peptide Derived from Human Papillomavirus
VTVVDTTRST

SEQ ID NO: 8240 - protein, 8 aa, Artificial Sequence
  Peptide Derived from Human Papillomavirus
VVDTTRST

SEQ ID NO: 8241 - protein, 10 aa, Artificial Sequence
  Peptide Derived from Human Papillomavirus
VVDTTRSTNL

SEQ ID NO: 8242 - protein, 11 aa, Artificial Sequence
  Peptide Derived from Human Papillomavirus
VVDTTRSTNLT

SEQ ID NO: 8243 - protein, 8 aa, Artificial Sequence
  Peptide Derived from Human Papillomavirus
VVNTDDYV

SEQ ID NO: 8244 - protein, 11 aa, Artificial Sequence
  Peptide Derived from Human Papillomavirus
VVNTDDYVSRT

SEQ ID NO: 8245 - protein, 11 aa, Artificial Sequence
  Peptide Derived from Human Papillomavirus
VVPSGAGNKQA

SEQ ID NO: 8246 - protein, 8 aa, Artificial Sequence
  Peptide Derived from Human Papillomavirus
WACVGMEI

SEQ ID NO: 8247 - protein, 10 aa, Artificial Sequence
  Peptide Derived from Human Papillomavirus
WAKGTLCKPA

SEQ ID NO: 8248 - protein, 9 aa, Artificial Sequence
  Peptide Derived from Human Papillomavirus
YIHSMNSSI

SEQ ID NO: 8249 - protein, 10 aa, Artificial Sequence
  Peptide Derived from Human Papillomavirus
YIHSMNSSIL

SEQ ID NO: 8250 - protein, 9 aa, Artificial Sequence
  Peptide Derived from Human Papillomavirus
YIKGTSANM

SEQ ID NO: 8251 - protein, 8 aa, Artificial Sequence
  Peptide Derived from Human Papillomavirus
YLPPPSVA

SEQ ID NO: 8252 - protein, 10 aa, Artificial Sequence
  Peptide Derived from Human Papillomavirus
YLPPPSVARV

SEQ ID NO: 8253 - protein, 11 aa, Artificial Sequence
  Peptide Derived from Human Papillomavirus
YLPPPSVARVV

SEQ ID NO: 8254 - protein, 8 aa, Artificial Sequence
  Peptide Derived from Human Papillomavirus
YQYRVFRV

SEQ ID NO: 8255 - protein, 9 aa, Artificial Sequence
  Peptide Derived from Human Papillomavirus
YQYRVFRVA

SEQ ID NO: 8256 - protein, 10 aa, Artificial Sequence
  Peptide Derived from Human Papillomavirus
YQYRVFRVAL

SEQ ID NO: 8257 - protein, 11 aa, Artificial Sequence
  Peptide Derived from Human Papillomavirus
YVSRTSIFYHA

SEQ ID NO: 8258 - protein, 9 aa, Artificial Sequence
  Peptide Derived from Human Papillomavirus
AARRKRASA

SEQ ID NO: 8259 - protein, 10 aa, Artificial Sequence
  Peptide Derived from Human Papillomavirus
AARRKRASAT

SEQ ID NO: 8260 - protein, 8 aa, Artificial Sequence
  Peptide Derived from Human Papillomavirus
AASSYSNV

SEQ ID NO: 8261 - protein, 9 aa, Artificial Sequence
  Peptide Derived from Human Papillomavirus
AASSYSNVT

SEQ ID NO: 8262 - protein, 10 aa, Artificial Sequence
  Peptide Derived from Human Papillomavirus
AASSYSNVTV

SEQ ID NO: 8263 - protein, 8 aa, Artificial Sequence
  Peptide Derived from Human Papillomavirus
AATEEIEL

SEQ ID NO: 8264 - protein, 11 aa, Artificial Sequence
  Peptide Derived from Human Papillomavirus
AATEEIELQPL

SEQ ID NO: 8265 - protein, 8 aa, Artificial Sequence
  Peptide Derived from Human Papillomavirus
ALSSRRGT

SEQ ID NO: 8266 - protein, 9 aa, Artificial Sequence
  Peptide Derived from Human Papillomavirus
ALSSRRGTV

SEQ ID NO: 8267 - protein, 10 aa, Artificial Sequence
  Peptide Derived from Human Papillomavirus
ATEEIELQPL

SEQ ID NO: 8268 - protein, 11 aa, Artificial Sequence
  Peptide Derived from Human Papillomavirus
ATEEIELQPLI

SEQ ID NO: 8269 - protein, 11 aa, Artificial Sequence
  Peptide Derived from Human Papillomavirus
ATMFTRSGKQI

SEQ ID NO: 8270 - protein, 10 aa, Artificial Sequence
  Peptide Derived from Human Papillomavirus
ATNDSDLFDV

SEQ ID NO: 8271 - protein, 8 aa, Artificial Sequence
  Peptide Derived from Human Papillomavirus
AVLDITPT

SEQ ID NO: 8272 - protein, 9 aa, Artificial Sequence
  Peptide Derived from Human Papillomavirus
AVLDITPTV

SEQ ID NO: 8273 - protein, 8 aa, Artificial Sequence
  Peptide Derived from Human Papillomavirus
DIILPSHT

SEQ ID NO: 8274 - protein, 10 aa, Artificial Sequence
  Peptide Derived from Human Papillomavirus
DIILPSHTPM

SEQ ID NO: 8275 - protein, 9 aa, Artificial Sequence
  Peptide Derived from Human Papillomavirus
DIIRLHRPA

SEQ ID NO: 8276 - protein, 10 aa, Artificial Sequence
  Peptide Derived from Human Papillomavirus
DIIRLHRPAL

SEQ ID NO: 8277 - protein, 8 aa, Artificial Sequence
  Peptide Derived from Human Papillomavirus
DISPIAAT

SEQ ID NO: 8278 - protein, 11 aa, Artificial Sequence
  Peptide Derived from Human Papillomavirus
DISPIAATEEI

SEQ ID NO: 8279 - protein, 9 aa, Artificial Sequence
  Peptide Derived from Human Papillomavirus
DITPTVDSV

SEQ ID NO: 8280 - protein, 11 aa, Artificial Sequence
  Peptide Derived from Human Papillomavirus
DITPTVDSVSI

SEQ ID NO: 8281 - protein, 11 aa, Artificial Sequence
  Peptide Derived from Human Papillomavirus
DLYRTCKQSGT

SEQ ID NO: 8282 - protein, 9 aa, Artificial Sequence
  Peptide Derived from Human Papillomavirus
DTTLSFEPT

SEQ ID NO: 8283 - protein, 9 aa, Artificial Sequence
  Peptide Derived from Human Papillomavirus
DVGPTRPPV

SEQ ID NO: 8284 - protein, 10 aa, Artificial Sequence
  Peptide Derived from Human Papillomavirus
DVGPTRPPVV

SEQ ID NO: 8285 - protein, 11 aa, Artificial Sequence
  Peptide Derived from Human Papillomavirus
DVGPTRPPVVI

SEQ ID NO: 8286 - protein, 9 aa, Artificial Sequence
  Peptide Derived from Human Papillomavirus
DVINKVEGT

SEQ ID NO: 8287 - protein, 10 aa, Artificial Sequence
  Peptide Derived from Human Papillomavirus
DVINKVEGTT

SEQ ID NO: 8288 - protein, 11 aa, Artificial Sequence
  Peptide Derived from Human Papillomavirus
DVINKVEGTTL

SEQ ID NO: 8289 - protein, 10 aa, Artificial Sequence
  Peptide Derived from Human Papillomavirus
DVPIYTGPDI

SEQ ID NO: 8290 - protein, 11 aa, Artificial Sequence
  Peptide Derived from Human Papillomavirus
DVPIYTGPDII

SEQ ID NO: 8291 - protein, 10 aa, Artificial Sequence
  Peptide Derived from Human Papillomavirus
DVYADFPPPA

SEQ ID NO: 8292 - protein, 8 aa, Artificial Sequence
  Peptide Derived from Human Papillomavirus
EIELQPLI

SEQ ID NO: 8293 - protein, 10 aa, Artificial Sequence
  Peptide Derived from Human Papillomavirus
EIELQPLISA

SEQ ID NO: 8294 - protein, 11 aa, Artificial Sequence
  Peptide Derived from Human Papillomavirus
EIELQPLISAT

SEQ ID NO: 8295 - protein, 8 aa, Artificial Sequence
  Peptide Derived from Human Papillomavirus
EIPLQTFA

SEQ ID NO: 8296 - protein, 8 aa, Artificial Sequence
  Peptide Derived from Human Papillomavirus
EITSSGTT

SEQ ID NO: 8297 - protein, 9 aa, Artificial Sequence
  Peptide Derived from Human Papillomavirus
EITSSGTTT

SEQ ID NO: 8298 - protein, 11 aa, Artificial Sequence
  Peptide Derived from Human Papillomavirus
EITSSGTTTPA

SEQ ID NO: 8299 - protein, 8 aa, Artificial Sequence
  Peptide Derived from Human Papillomavirus
ELQPLISA

SEQ ID NO: 8300 - protein, 9 aa, Artificial Sequence
  Peptide Derived from Human Papillomavirus
ELQPLISAT

SEQ ID NO: 8301 - protein, 8 aa, Artificial Sequence
  Peptide Derived from Human Papillomavirus
EVPQTGEV

SEQ ID NO: 8302 - protein, 8 aa, Artificial Sequence
  Peptide Derived from Human Papillomavirus
EVSGNIFV

SEQ ID NO: 8303 - protein, 10 aa, Artificial Sequence
  Peptide Derived from Human Papillomavirus
EVSGNIFVGT

SEQ ID NO: 8304 - protein, 8 aa, Artificial Sequence
  Peptide Derived from Human Papillomavirus
FADGFVAA

SEQ ID NO: 8305 - protein, 8 aa, Artificial Sequence
  Peptide Derived from Human Papillomavirus
FASSGSGT

SEQ ID NO: 8306 - protein, 11 aa, Artificial Sequence
  Peptide Derived from Human Papillomavirus
FASSGSGTEPI

SEQ ID NO: 8307 - protein, 9 aa, Artificial Sequence
  Peptide Derived from Human Papillomavirus
FLGGLGIGT

SEQ ID NO: 8308 - protein, 8 aa, Artificial Sequence
  Peptide Derived from Human Papillomavirus
FLTHPSSL

SEQ ID NO: 8309 - protein, 9 aa, Artificial Sequence
  Peptide Derived from Human Papillomavirus
FLTHPSSLV

SEQ ID NO: 8310 - protein, 10 aa, Artificial Sequence
  Peptide Derived from Human Papillomavirus
FLTHPSSLVT

SEQ ID NO: 8311 - protein, 11 aa, Artificial Sequence
  Peptide Derived from Human Papillomavirus
FMDIIRLHRPA

SEQ ID NO: 8312 - protein, 9 aa, Artificial Sequence
  Peptide Derived from Human Papillomavirus
FTGTSGFEI

SEQ ID NO: 8313 - protein, 10 aa, Artificial Sequence
  Peptide Derived from Human Papillomavirus
FTGTSGFEIT

SEQ ID NO: 8314 - protein, 11 aa, Artificial Sequence
  Peptide Derived from Human Papillomavirus
FTNPAFSDPSI

SEQ ID NO: 8315 - protein, 8 aa, Artificial Sequence
  Peptide Derived from Human Papillomavirus
FTRSGKQI

SEQ ID NO: 8316 - protein, 8 aa, Artificial Sequence
  Peptide Derived from Human Papillomavirus
FTYPKYSL

SEQ ID NO: 8317 - protein, 9 aa, Artificial Sequence
  Peptide Derived from Human Papillomavirus
FTYPKYSLT

SEQ ID NO: 8318 - protein, 10 aa, Artificial Sequence
  Peptide Derived from Human Papillomavirus
FTYPKYSLTM

SEQ ID NO: 8319 - protein, 8 aa, Artificial Sequence
  Peptide Derived from Human Papillomavirus
GAPVPTFT

SEQ ID NO: 8320 - protein, 10 aa, Artificial Sequence
  Peptide Derived from Human Papillomavirus
GAPVPTFTGT

SEQ ID NO: 8321 - protein, 9 aa, Artificial Sequence
  Peptide Derived from Human Papillomavirus
GIFLGGLGI

SEQ ID NO: 8322 - protein, 11 aa, Artificial Sequence
  Peptide Derived from Human Papillomavirus
GIFLGGLGIGT

SEQ ID NO: 8323 - protein, 9 aa, Artificial Sequence
  Peptide Derived from Human Papillomavirus
GIHGTQYYL

SEQ ID NO: 8324 - protein, 8 aa, Artificial Sequence
  Peptide Derived from Human Papillomavirus
GQRATMFT

SEQ ID NO: 8325 - protein, 8 aa, Artificial Sequence
  Peptide Derived from Human Papillomavirus
GTCPPDVI

SEQ ID NO: 8326 - protein, 11 aa, Artificial Sequence
  Peptide Derived from Human Papillomavirus
GTCPPDVINKV

SEQ ID NO: 8327 - protein, 8 aa, Artificial Sequence
  Peptide Derived from Human Papillomavirus
GTEPISST

SEQ ID NO: 8328 - protein, 10 aa, Artificial Sequence
  Peptide Derived from Human Papillomavirus
GTEPISSTPL

SEQ ID NO: 8329 - protein, 10 aa, Artificial Sequence
  Peptide Derived from Human Papillomavirus
GTGSGSGGRT

SEQ ID NO: 8330 - protein, 8 aa, Artificial Sequence
  Peptide Derived from Human Papillomavirus
GTSGFEIT

SEQ ID NO: 8331 - protein, 8 aa, Artificial Sequence
  Peptide Derived from Human Papillomavirus
GTTLADKI

SEQ ID NO: 8332 - protein, 9 aa, Artificial Sequence
  Peptide Derived from Human Papillomavirus
GTTLADKIL

SEQ ID NO: 8333 - protein, 8 aa, Artificial Sequence
  Peptide Derived from Human Papillomavirus
GTTTPAVL

SEQ ID NO: 8334 - protein, 10 aa, Artificial Sequence
  Peptide Derived from Human Papillomavirus
GTTTPAVLDI

SEQ ID NO: 8335 - protein, 11 aa, Artificial Sequence
  Peptide Derived from Human Papillomavirus
GTTTPAVLDIT

SEQ ID NO: 8336 - protein, 8 aa, Artificial Sequence
  Peptide Derived from Human Papillomavirus
GTVRFSRL

SEQ ID NO: 8337 - protein, 8 aa, Artificial Sequence
  Peptide Derived from Human Papillomavirus
HTPMWPST

SEQ ID NO: 8338 - protein, 11 aa, Artificial Sequence
  Peptide Derived from Human Papillomavirus
HTPMWPSTSPT

SEQ ID NO: 8339 - protein, 9 aa, Artificial Sequence
  Peptide Derived from Human Papillomavirus
IAATEEIEL

SEQ ID NO: 8340 - protein, 10 aa, Artificial Sequence
  Peptide Derived from Human Papillomavirus
IIEVPQTGEV

SEQ ID NO: 8341 - protein, 9 aa, Artificial Sequence
  Peptide Derived from Human Papillomavirus
IILPSHTPM

SEQ ID NO: 8342 - protein, 8 aa, Artificial Sequence
  Peptide Derived from Human Papillomavirus
IIRLHRPA

SEQ ID NO: 8343 - protein, 9 aa, Artificial Sequence
  Peptide Derived from Human Papillomavirus
IIRLHRPAL

SEQ ID NO: 8344 - protein, 8 aa, Artificial Sequence
  Peptide Derived from Human Papillomavirus
ILPSHTPM

SEQ ID NO: 8345 - protein, 9 aa, Artificial Sequence
  Peptide Derived from Human Papillomavirus
ILQWSSLGI

SEQ ID NO: 8346 - protein, 11 aa, Artificial Sequence
  Peptide Derived from Human Papillomavirus
ILQWSSLGIFL

SEQ ID NO: 8347 - protein, 8 aa, Artificial Sequence
  Peptide Derived from Human Papillomavirus
ITPTVDSV

SEQ ID NO: 8348 - protein, 10 aa, Artificial Sequence
  Peptide Derived from Human Papillomavirus
ITPTVDSVSI

SEQ ID NO: 8349 - protein, 8 aa, Artificial Sequence
  Peptide Derived from Human Papillomavirus
ITSSGTTT

SEQ ID NO: 8350 - protein, 10 aa, Artificial Sequence
  Peptide Derived from Human Papillomavirus
ITSSGTTTPA

SEQ ID NO: 8351 - protein, 11 aa, Artificial Sequence
  Peptide Derived from Human Papillomavirus
ITSSGTTTPAV

SEQ ID NO: 8352 - protein, 10 aa, Artificial Sequence
  Peptide Derived from Human Papillomavirus
IVTLVEDSSV

SEQ ID NO: 8353 - protein, 11 aa, Artificial Sequence
  Peptide Derived from Human Papillomavirus
IVTLVEDSSVV

SEQ ID NO: 8354 - protein, 8 aa, Artificial Sequence
  Peptide Derived from Human Papillomavirus
KILQWSSL

SEQ ID NO: 8355 - protein, 10 aa, Artificial Sequence
  Peptide Derived from Human Papillomavirus
KILQWSSLGI

SEQ ID NO: 8356 - protein, 10 aa, Artificial Sequence
  Peptide Derived from Human Papillomavirus
KQSGTCPPDV

SEQ ID NO: 8357 - protein, 11 aa, Artificial Sequence
  Peptide Derived from Human Papillomavirus
KQSGTCPPDVI

SEQ ID NO: 8358 - protein, 8 aa, Artificial Sequence
  Peptide Derived from Human Papillomavirus
KVEGTTLA

SEQ ID NO: 8359 - protein, 11 aa, Artificial Sequence
  Peptide Derived from Human Papillomavirus
KVEGTTLADKI

SEQ ID NO: 8360 - protein, 11 aa, Artificial Sequence
  Peptide Derived from Human Papillomavirus
LADKILQWSSL

SEQ ID NO: 8361 - protein, 10 aa, Artificial Sequence
  Peptide Derived from Human Papillomavirus
LISATNDSDL

SEQ ID NO: 8362 - protein, 8 aa, Artificial Sequence
  Peptide Derived from Human Papillomavirus
LQPLISAT

SEQ ID NO: 8363 - protein, 11 aa, Artificial Sequence
  Peptide Derived from Human Papillomavirus
LQTFASSGSGT

SEQ ID NO: 8364 - protein, 8 aa, Artificial Sequence
  Peptide Derived from Human Papillomavirus
LQWSSLGI

SEQ ID NO: 8365 - protein, 10 aa, Artificial Sequence
  Peptide Derived from Human Papillomavirus
LQWSSLGIFL

SEQ ID NO: 8366 - protein, 8 aa, Artificial Sequence
  Peptide Derived from Human Papillomavirus
LTHPSSLV

SEQ ID NO: 8367 - protein, 9 aa, Artificial Sequence
  Peptide Derived from Human Papillomavirus
LTHPSSLVT

SEQ ID NO: 8368 - protein, 8 aa, Artificial Sequence
  Peptide Derived from Human Papillomavirus
LTMPSTAA

SEQ ID NO: 8369 - protein, 9 aa, Artificial Sequence
  Peptide Derived from Human Papillomavirus
LTSAWDVPI

SEQ ID NO: 8370 - protein, 11 aa, Artificial Sequence
  Peptide Derived from Human Papillomavirus
LTSAWDVPIYT

SEQ ID NO: 8371 - protein, 8 aa, Artificial Sequence
  Peptide Derived from Human Papillomavirus
LVEDSSVV

SEQ ID NO: 8372 - protein, 9 aa, Artificial Sequence
  Peptide Derived from Human Papillomavirus
LVEDSSVVA

SEQ ID NO: 8373 - protein, 8 aa, Artificial Sequence
  Peptide Derived from Human Papillomavirus
LVTFDNPA

SEQ ID NO: 8374 - protein, 8 aa, Artificial Sequence
  Peptide Derived from Human Papillomavirus
NASTTTYI

SEQ ID NO: 8375 - protein, 10 aa, Artificial Sequence
  Peptide Derived from Human Papillomavirus
NASTTTYIGI

SEQ ID NO: 8376 - protein, 8 aa, Artificial Sequence
  Peptide Derived from Human Papillomavirus
NIFVGTPT

SEQ ID NO: 8377 - protein, 8 aa, Artificial Sequence
  Peptide Derived from Human Papillomavirus
NQQVRVST

SEQ ID NO: 8378 - protein, 9 aa, Artificial Sequence
  Peptide Derived from Human Papillomavirus
NTVVDVGPT

SEQ ID NO: 8379 - protein, 8 aa, Artificial Sequence
  Peptide Derived from Human Papillomavirus
NVPDSDFM

SEQ ID NO: 8380 - protein, 10 aa, Artificial Sequence
  Peptide Derived from Human Papillomavirus
NVPDSDFMDI

SEQ ID NO: 8381 - protein, 11 aa, Artificial Sequence
  Peptide Derived from Human Papillomavirus
NVPDSDFMDII

SEQ ID NO: 8382 - protein, 9 aa, Artificial Sequence
  Peptide Derived from Human Papillomavirus
NVTVPLTSA

SEQ ID NO: 8383 - protein, 8 aa, Artificial Sequence
  Peptide Derived from Human Papillomavirus
PAFSDPSI

SEQ ID NO: 8384 - protein, 9 aa, Artificial Sequence
  Peptide Derived from Human Papillomavirus
PAFSDPSII

SEQ ID NO: 8385 - protein, 11 aa, Artificial Sequence
  Peptide Derived from Human Papillomavirus
PAFSDPSIIEV

SEQ ID NO: 8386 - protein, 9 aa, Artificial Sequence
  Peptide Derived from Human Papillomavirus
PALSSRRGT

SEQ ID NO: 8387 - protein, 10 aa, Artificial Sequence
  Peptide Derived from Human Papillomavirus
PALSSRRGTV

SEQ ID NO: 8388 - protein, 8 aa, Artificial Sequence
  Peptide Derived from Human Papillomavirus
PASTTPST

SEQ ID NO: 8389 - protein, 9 aa, Artificial Sequence
  Peptide Derived from Human Papillomavirus
PASTTPSTI

SEQ ID NO: 8390 - protein, 9 aa, Artificial Sequence
  Peptide Derived from Human Papillomavirus
PAVLDITPT

SEQ ID NO: 8391 - protein, 10 aa, Artificial Sequence
  Peptide Derived from Human Papillomavirus
PAVLDITPTV

SEQ ID NO: 8392 - protein, 8 aa, Artificial Sequence
  Peptide Derived from Human Papillomavirus
PAYEPLDT

SEQ ID NO: 8393 - protein, 9 aa, Artificial Sequence
  Peptide Derived from Human Papillomavirus
PAYEPLDTT

SEQ ID NO: 8394 - protein, 10 aa, Artificial Sequence
  Peptide Derived from Human Papillomavirus
PAYEPLDTTL

SEQ ID NO: 8395 - protein, 8 aa, Artificial Sequence
  Peptide Derived from Human Papillomavirus
PIAATEEI

SEQ ID NO: 8396 - protein, 10 aa, Artificial Sequence
  Peptide Derived from Human Papillomavirus
PIAATEEIEL

SEQ ID NO: 8397 - protein, 9 aa, Artificial Sequence
  Peptide Derived from Human Papillomavirus
PISSTPLPT

SEQ ID NO: 8398 - protein, 10 aa, Artificial Sequence
  Peptide Derived from Human Papillomavirus
PISSTPLPTV

SEQ ID NO: 8399 - protein, 8 aa, Artificial Sequence
  Peptide Derived from Human Papillomavirus
PIYTGPDI

SEQ ID NO: 8400 - protein, 9 aa, Artificial Sequence
  Peptide Derived from Human Papillomavirus
PIYTGPDII

SEQ ID NO: 8401 - protein, 10 aa, Artificial Sequence
  Peptide Derived from Human Papillomavirus
PIYTGPDIIL

SEQ ID NO: 8402 - protein, 11 aa, Artificial Sequence
  Peptide Derived from Human Papillomavirus
PLDTTLSFEPT

SEQ ID NO: 8403 - protein, 8 aa, Artificial Sequence
  Peptide Derived from Human Papillomavirus
PLGGRSNT

SEQ ID NO: 8404 - protein, 9 aa, Artificial Sequence
  Peptide Derived from Human Papillomavirus
PLGGRSNTV

SEQ ID NO: 8405 - protein, 10 aa, Artificial Sequence
  Peptide Derived from Human Papillomavirus
PLGGRSNTVV

SEQ ID NO: 8406 - protein, 11 aa, Artificial Sequence
  Peptide Derived from Human Papillomavirus
PLISATNDSDL

SEQ ID NO: 8407 - protein, 8 aa, Artificial Sequence
  Peptide Derived from Human Papillomavirus
PLPTVRRV

SEQ ID NO: 8408 - protein, 8 aa, Artificial Sequence
  Peptide Derived from Human Papillomavirus
PLTSAWDV

SEQ ID NO: 8409 - protein, 10 aa, Artificial Sequence
  Peptide Derived from Human Papillomavirus
PLTSAWDVPI

SEQ ID NO: 8410 - protein, 9 aa, Artificial Sequence
  Peptide Derived from Human Papillomavirus
PMWPSTSPT

SEQ ID NO: 8411 - protein, 11 aa, Artificial Sequence
  Peptide Derived from Human Papillomavirus
PMWPSTSPTNA

SEQ ID NO: 8412 - protein, 10 aa, Artificial Sequence
  Peptide Derived from Human Papillomavirus
PQTGEVSGNI

SEQ ID NO: 8413 - protein, 8 aa, Artificial Sequence
  Peptide Derived from Human Papillomavirus
PTDPSIVT

SEQ ID NO: 8414 - protein, 9 aa, Artificial Sequence
  Peptide Derived from Human Papillomavirus
PTDPSIVTL

SEQ ID NO: 8415 - protein, 10 aa, Artificial Sequence
  Peptide Derived from Human Papillomavirus
PTDPSIVTLV

SEQ ID NO: 8416 - protein, 11 aa, Artificial Sequence
  Peptide Derived from Human Papillomavirus
PTFTGTSGFEI

SEQ ID NO: 8417 - protein, 8 aa, Artificial Sequence
  Peptide Derived from Human Papillomavirus
PTNASTTT

SEQ ID NO: 8418 - protein, 10 aa, Artificial Sequence
  Peptide Derived from Human Papillomavirus
PTNASTTTYI

SEQ ID NO: 8419 - protein, 8 aa, Artificial Sequence
  Peptide Derived from Human Papillomavirus
PTRPPVVI

SEQ ID NO: 8420 - protein, 11 aa, Artificial Sequence
  Peptide Derived from Human Papillomavirus
PTRPPVVIEPV

SEQ ID NO: 8421 - protein, 11 aa, Artificial Sequence
  Peptide Derived from Human Papillomavirus
PTSGSHGYEEI

SEQ ID NO: 8422 - protein, 11 aa, Artificial Sequence
  Peptide Derived from Human Papillomavirus
PTSNVPDSDFM

SEQ ID NO: 8423 - protein, 8 aa, Artificial Sequence
  Peptide Derived from Human Papillomavirus
PTVDSVSI

SEQ ID NO: 8424 - protein, 11 aa, Artificial Sequence
  Peptide Derived from Human Papillomavirus
PTVDSVSISST

SEQ ID NO: 8425 - protein, 11 aa, Artificial Sequence
  Peptide Derived from Human Papillomavirus
PTVRRVRGPRL

SEQ ID NO: 8426 - protein, 9 aa, Artificial Sequence
  Peptide Derived from Human Papillomavirus
PVGPTDPSI

SEQ ID NO: 8427 - protein, 10 aa, Artificial Sequence
  Peptide Derived from Human Papillomavirus
PVGPTDPSIV

SEQ ID NO: 8428 - protein, 11 aa, Artificial Sequence
  Peptide Derived from Human Papillomavirus
PVGPTDPSIVT

SEQ ID NO: 8429 - protein, 8 aa, Artificial Sequence
  Peptide Derived from Human Papillomavirus
PVPTFTGT

SEQ ID NO: 8430 - protein, 10 aa, Artificial Sequence
  Peptide Derived from Human Papillomavirus
PVVIEPVGPT

SEQ ID NO: 8431 - protein, 11 aa, Artificial Sequence
  Peptide Derived from Human Papillomavirus
QQVRVSTSQFL

SEQ ID NO: 8432 - protein, 10 aa, Artificial Sequence
  Peptide Derived from Human Papillomavirus
QTFASSGSGT

SEQ ID NO: 8433 - protein, 9 aa, Artificial Sequence
  Peptide Derived from Human Papillomavirus
QTGEVSGNI

SEQ ID NO: 8434 - protein, 11 aa, Artificial Sequence
  Peptide Derived from Human Papillomavirus
QTGEVSGNIFV

SEQ ID NO: 8435 - protein, 10 aa, Artificial Sequence
  Peptide Derived from Human Papillomavirus
QVRVSTSQFL

SEQ ID NO: 8436 - protein, 11 aa, Artificial Sequence
  Peptide Derived from Human Papillomavirus
QVRVSTSQFLT

SEQ ID NO: 8437 - protein, 8 aa, Artificial Sequence
  Peptide Derived from Human Papillomavirus
RAARRKRA

SEQ ID NO: 8438 - protein, 10 aa, Artificial Sequence
  Peptide Derived from Human Papillomavirus
RAARRKRASA

SEQ ID NO: 8439 - protein, 11 aa, Artificial Sequence
  Peptide Derived from Human Papillomavirus
RAARRKRASAT

SEQ ID NO: 8440 - protein, 8 aa, Artificial Sequence
  Peptide Derived from Human Papillomavirus
RANQQVRV

SEQ ID NO: 8441 - protein, 10 aa, Artificial Sequence
  Peptide Derived from Human Papillomavirus
RANQQVRVST

SEQ ID NO: 8442 - protein, 10 aa, Artificial Sequence
  Peptide Derived from Human Papillomavirus
RASATDLYRT

SEQ ID NO: 8443 - protein, 11 aa, Artificial Sequence
  Peptide Derived from Human Papillomavirus
RIPYFFADGFV

SEQ ID NO: 8444 - protein, 8 aa, Artificial Sequence
  Peptide Derived from Human Papillomavirus
RLGQRATM

SEQ ID NO: 8445 - protein, 10 aa, Artificial Sequence
  Peptide Derived from Human Papillomavirus
RLGQRATMFT

SEQ ID NO: 8446 - protein, 10 aa, Artificial Sequence
  Peptide Derived from Human Papillomavirus
RLYSRANQQV

SEQ ID NO: 8447 - protein, 8 aa, Artificial Sequence
  Peptide Derived from Human Papillomavirus
RTCKQSGT

SEQ ID NO: 8448 - protein, 8 aa, Artificial Sequence
  Peptide Derived from Human Papillomavirus
RVHFYHDI

SEQ ID NO: 8449 - protein, 11 aa, Artificial Sequence
  Peptide Derived from Human Papillomavirus
RVHFYHDISPI

SEQ ID NO: 8450 - protein, 11 aa, Artificial Sequence
  Peptide Derived from Human Papillomavirus
RVRGPRLYSRA

SEQ ID NO: 8451 - protein, 8 aa, Artificial Sequence
  Peptide Derived from Human Papillomavirus
RVSTSQFL

SEQ ID NO: 8452 - protein, 9 aa, Artificial Sequence
  Peptide Derived from Human Papillomavirus
RVSTSQFLT

SEQ ID NO: 8453 - protein, 8 aa, Artificial Sequence
  Peptide Derived from Human Papillomavirus
SATDLYRT

SEQ ID NO: 8454 - protein, 8 aa, Artificial Sequence
  Peptide Derived from Human Papillomavirus
SATNDSDL

SEQ ID NO: 8455 - protein, 11 aa, Artificial Sequence
  Peptide Derived from Human Papillomavirus
SATNDSDLFDV

SEQ ID NO: 8456 - protein, 9 aa, Artificial Sequence
  Peptide Derived from Human Papillomavirus
SAWDVPIYT

SEQ ID NO: 8457 - protein, 8 aa, Artificial Sequence
  Peptide Derived from Human Papillomavirus
SIIEVPQT

SEQ ID NO: 8458 - protein, 11 aa, Artificial Sequence
  Peptide Derived from Human Papillomavirus
SIIEVPQTGEV

SEQ ID NO: 8459 - protein, 8 aa, Artificial Sequence
  Peptide Derived from Human Papillomavirus
SISSTSFT

SEQ ID NO: 8460 - protein, 11 aa, Artificial Sequence
  Peptide Derived from Human Papillomavirus
SISSTSFTNPA

SEQ ID NO: 8461 - protein, 11 aa, Artificial Sequence
  Peptide Derived from Human Papillomavirus
SIVTLVEDSSV

SEQ ID NO: 8462 - protein, 9 aa, Artificial Sequence
  Peptide Derived from Human Papillomavirus
SLGIFLGGL

SEQ ID NO: 8463 - protein, 11 aa, Artificial Sequence
  Peptide Derived from Human Papillomavirus
SLGIFLGGLGI

SEQ ID NO: 8464 - protein, 8 aa, Artificial Sequence
  Peptide Derived from Human Papillomavirus
SLTMPSTA

SEQ ID NO: 8465 - protein, 9 aa, Artificial Sequence
  Peptide Derived from Human Papillomavirus
SLTMPSTAA

SEQ ID NO: 8466 - protein, 9 aa, Artificial Sequence
  Peptide Derived from Human Papillomavirus
SLVTFDNPA

SEQ ID NO: 8467 - protein, 10 aa, Artificial Sequence
  Peptide Derived from Human Papillomavirus
SQFLTHPSSL

SEQ ID NO: 8468 - protein, 11 aa, Artificial Sequence
  Peptide Derived from Human Papillomavirus
SQFLTHPSSLV

SEQ ID NO: 8469 - protein, 10 aa, Artificial Sequence
  Peptide Derived from Human Papillomavirus
STAASSYSNV

SEQ ID NO: 8470 - protein, 11 aa, Artificial Sequence
  Peptide Derived from Human Papillomavirus
STAASSYSNVT

SEQ ID NO: 8471 - protein, 8 aa, Artificial Sequence
  Peptide Derived from Human Papillomavirus
STIHKSFT

SEQ ID NO: 8472 - protein, 10 aa, Artificial Sequence
  Peptide Derived from Human Papillomavirus
STPLPTVRRV

SEQ ID NO: 8473 - protein, 8 aa, Artificial Sequence
  Peptide Derived from Human Papillomavirus
STSFTNPA

SEQ ID NO: 8474 - protein, 9 aa, Artificial Sequence
  Peptide Derived from Human Papillomavirus
STSPTNAST

SEQ ID NO: 8475 - protein, 10 aa, Artificial Sequence
  Peptide Derived from Human Papillomavirus
STSPTNASTT

SEQ ID NO: 8476 - protein, 11 aa, Artificial Sequence
  Peptide Derived from Human Papillomavirus
STSPTNASTTT

SEQ ID NO: 8477 - protein, 8 aa, Artificial Sequence
  Peptide Derived from Human Papillomavirus
STTTYIGI

SEQ ID NO: 8478 - protein, 11 aa, Artificial Sequence
  Peptide Derived from Human Papillomavirus
STTTYIGIHGT

SEQ ID NO: 8479 - protein, 10 aa, Artificial Sequence
  Peptide Derived from Human Papillomavirus
SVSISSTSFT

SEQ ID NO: 8480 - protein, 9 aa, Artificial Sequence
  Peptide Derived from Human Papillomavirus
SVVASGAPV

SEQ ID NO: 8481 - protein, 11 aa, Artificial Sequence
  Peptide Derived from Human Papillomavirus
SVVASGAPVPT

SEQ ID NO: 8482 - protein, 9 aa, Artificial Sequence
  Peptide Derived from Human Papillomavirus
TAASSYSNV

SEQ ID NO: 8483 - protein, 10 aa, Artificial Sequence
  Peptide Derived from Human Papillomavirus
TAASSYSNVT

SEQ ID NO: 8484 - protein, 11 aa, Artificial Sequence
  Peptide Derived from Human Papillomavirus
TAASSYSNVTV

SEQ ID NO: 8485 - protein, 10 aa, Artificial Sequence
  Peptide Derived from Human Papillomavirus
TLSFEPTSNV

SEQ ID NO: 8486 - protein, 8 aa, Artificial Sequence
  Peptide Derived from Human Papillomavirus
TLVEDSSV

SEQ ID NO: 8487 - protein, 9 aa, Artificial Sequence
  Peptide Derived from Human Papillomavirus
TLVEDSSVV

SEQ ID NO: 8488 - protein, 10 aa, Artificial Sequence
  Peptide Derived from Human Papillomavirus
TLVEDSSVVA

SEQ ID NO: 8489 - protein, 10 aa, Artificial Sequence
  Peptide Derived from Human Papillomavirus
TMFTRSGKQI

SEQ ID NO: 8490 - protein, 8 aa, Artificial Sequence
  Peptide Derived from Human Papillomavirus
TTLADKIL

SEQ ID NO: 8491 - protein, 8 aa, Artificial Sequence
  Peptide Derived from Human Papillomavirus
TTLSFEPT

SEQ ID NO: 8492 - protein, 11 aa, Artificial Sequence
  Peptide Derived from Human Papillomavirus
TTLSFEPTSNV

SEQ ID NO: 8493 - protein, 8 aa, Artificial Sequence
  Peptide Derived from Human Papillomavirus
TTPAVLDI

SEQ ID NO: 8494 - protein, 9 aa, Artificial Sequence
  Peptide Derived from Human Papillomavirus
TTPAVLDIT

SEQ ID NO: 8495 - protein, 11 aa, Artificial Sequence
  Peptide Derived from Human Papillomavirus
TTPAVLDITPT

SEQ ID NO: 8496 - protein, 11 aa, Artificial Sequence
  Peptide Derived from Human Papillomavirus
TTPSTIHKSFT

SEQ ID NO: 8497 - protein, 9 aa, Artificial Sequence
  Peptide Derived from Human Papillomavirus
TTTPAVLDI

SEQ ID NO: 8498 - protein, 10 aa, Artificial Sequence
  Peptide Derived from Human Papillomavirus
TTTPAVLDIT

SEQ ID NO: 8499 - protein, 10 aa, Artificial Sequence
  Peptide Derived from Human Papillomavirus
TTTYIGIHGT

SEQ ID NO: 8500 - protein, 9 aa, Artificial Sequence
  Peptide Derived from Human Papillomavirus
TTYIGIHGT

SEQ ID NO: 8501 - protein, 10 aa, Artificial Sequence
  Peptide Derived from Human Papillomavirus
TVDSVSISST

SEQ ID NO: 8502 - protein, 10 aa, Artificial Sequence
  Peptide Derived from Human Papillomavirus
TVPLTSAWDV

SEQ ID NO: 8503 - protein, 11 aa, Artificial Sequence
  Peptide Derived from Human Papillomavirus
TVRFSRLGQRA

SEQ ID NO: 8504 - protein, 10 aa, Artificial Sequence
  Peptide Derived from Human Papillomavirus
TVRRVRGPRL

SEQ ID NO: 8505 - protein, 8 aa, Artificial Sequence
  Peptide Derived from Human Papillomavirus
TVVDVGPT

SEQ ID NO: 8506 - protein, 9 aa, Artificial Sequence
  Peptide Derived from Human Papillomavirus
VASGAPVPT

SEQ ID NO: 8507 - protein, 11 aa, Artificial Sequence
  Peptide Derived from Human Papillomavirus
VASGAPVPTFT

SEQ ID NO: 8508 - protein, 8 aa, Artificial Sequence
  Peptide Derived from Human Papillomavirus
VIEPVGPT

SEQ ID NO: 8509 - protein, 8 aa, Artificial Sequence
  Peptide Derived from Human Papillomavirus
VINKVEGT

SEQ ID NO: 8510 - protein, 9 aa, Artificial Sequence
  Peptide Derived from Human Papillomavirus
VINKVEGTT

SEQ ID NO: 8511 - protein, 10 aa, Artificial Sequence
  Peptide Derived from Human Papillomavirus
VINKVEGTTL

SEQ ID NO: 8512 - protein, 11 aa, Artificial Sequence
  Peptide Derived from Human Papillomavirus
VINKVEGTTLA

SEQ ID NO: 8513 - protein, 8 aa, Artificial Sequence
  Peptide Derived from Human Papillomavirus
VLDITPTV

SEQ ID NO: 8514 - protein, 11 aa, Artificial Sequence
  Peptide Derived from Human Papillomavirus
VLDITPTVDSV

SEQ ID NO: 8515 - protein, 11 aa, Artificial Sequence
  Peptide Derived from Human Papillomavirus
VTFDNPAYEPL

SEQ ID NO: 8516 - protein, 9 aa, Artificial Sequence
  Peptide Derived from Human Papillomavirus
VTLVEDSSV

SEQ ID NO: 8517 - protein, 10 aa, Artificial Sequence
  Peptide Derived from Human Papillomavirus
VTLVEDSSVV

SEQ ID NO: 8518 - protein, 11 aa, Artificial Sequence
  Peptide Derived from Human Papillomavirus
VTLVEDSSVVA

SEQ ID NO: 8519 - protein, 8 aa, Artificial Sequence
  Peptide Derived from Human Papillomavirus
VTVPLTSA

SEQ ID NO: 8520 - protein, 11 aa, Artificial Sequence
  Peptide Derived from Human Papillomavirus
VTVPLTSAWDV

SEQ ID NO: 8521 - protein, 8 aa, Artificial Sequence
  Peptide Derived from Human Papillomavirus
VVASGAPV

SEQ ID NO: 8522 - protein, 10 aa, Artificial Sequence
  Peptide Derived from Human Papillomavirus
VVASGAPVPT

SEQ ID NO: 8523 - protein, 11 aa, Artificial Sequence
  Peptide Derived from Human Papillomavirus
VVDVGPTRPPV

SEQ ID NO: 8524 - protein, 9 aa, Artificial Sequence
  Peptide Derived from Human Papillomavirus
VVIEPVGPT

SEQ ID NO: 8525 - protein, 8 aa, Artificial Sequence
  Peptide Derived from Human Papillomavirus
YADFPPPA

SEQ ID NO: 8526 - protein, 10 aa, Artificial Sequence
  Peptide Derived from Human Papillomavirus
YADFPPPAST

SEQ ID NO: 8527 - protein, 11 aa, Artificial Sequence
  Peptide Derived from Human Papillomavirus
YADFPPPASTT

SEQ ID NO: 8528 - protein, 11 aa, Artificial Sequence
  Peptide Derived from Human Papillomavirus
YIGIHGTQYYL

SEQ ID NO: 8529 - protein, 8 aa, Artificial Sequence
  Peptide Derived from Human Papillomavirus
YTGPDIIL

SEQ ID NO: 8530 - protein, 10 aa, Artificial Sequence
  Peptide Derived from Human Papillomavirus
YVPLGGRSNT

SEQ ID NO: 8531 - protein, 11 aa, Artificial Sequence
  Peptide Derived from Human Papillomavirus
YVPLGGRSNTV

SEQ ID NO: 8532 - protein, 8 aa, Artificial Sequence
  Peptide Derived from Human Papillomavirus
AIEVQIAL

SEQ ID NO: 8533 - protein, 11 aa, Artificial Sequence
  Peptide Derived from Human Papillomavirus
AIEVQIALESL

SEQ ID NO: 8534 - protein, 8 aa, Artificial Sequence
  Peptide Derived from Human Papillomavirus
ALESLSTT

SEQ ID NO: 8535 - protein, 9 aa, Artificial Sequence
  Peptide Derived from Human Papillomavirus
ALESLSTTI

SEQ ID NO: 8536 - protein, 9 aa, Artificial Sequence
  Peptide Derived from Human Papillomavirus
CLQVCKAKA

SEQ ID NO: 8537 - protein, 10 aa, Artificial Sequence
  Peptide Derived from Human Papillomavirus
CMQYVAWKYI

SEQ ID NO: 8538 - protein, 8 aa, Artificial Sequence
  Peptide Derived from Human Papillomavirus
CVTTHTHI

SEQ ID NO: 8539 - protein, 11 aa, Artificial Sequence
  Peptide Derived from Human Papillomavirus
CVTTHTHISDT

SEQ ID NO: 8540 - protein, 8 aa, Artificial Sequence
  Peptide Derived from Human Papillomavirus
DTCEELWL

SEQ ID NO: 8541 - protein, 9 aa, Artificial Sequence
  Peptide Derived from Human Papillomavirus
DTCEELWLT

SEQ ID NO: 8542 - protein, 9 aa, Artificial Sequence
  Peptide Derived from Human Papillomavirus
DVTSTYHWT

SEQ ID NO: 8543 - protein, 11 aa, Artificial Sequence
  Peptide Derived from Human Papillomavirus
DVTSTYHWTST

SEQ ID NO: 8544 - protein, 10 aa, Artificial Sequence
  Peptide Derived from Human Papillomavirus
EAKKFGCKNI

SEQ ID NO: 8545 - protein, 8 aa, Artificial Sequence
  Peptide Derived from Human Papillomavirus
ETQRNSFL

SEQ ID NO: 8546 - protein, 11 aa, Artificial Sequence
  Peptide Derived from Human Papillomavirus
ETQRNSFLSHV

SEQ ID NO: 8547 - protein, 8 aa, Artificial Sequence
  Peptide Derived from Human Papillomavirus
ETVNEYNT

SEQ ID NO: 8548 - protein, 11 aa, Artificial Sequence
  Peptide Derived from Human Papillomavirus
ETVNEYNTHKT

SEQ ID NO: 8549 - protein, 9 aa, Artificial Sequence
  Peptide Derived from Human Papillomavirus
EVHMENESI

SEQ ID NO: 8550 - protein, 9 aa, Artificial Sequence
  Peptide Derived from Human Papillomavirus
EVQIALESL

SEQ ID NO: 8551 - protein, 11 aa, Artificial Sequence
  Peptide Derived from Human Papillomavirus
EVQIALESLST

SEQ ID NO: 8552 - protein, 9 aa, Artificial Sequence
  Peptide Derived from Human Papillomavirus
FLSHVKIPV

SEQ ID NO: 8553 - protein, 10 aa, Artificial Sequence
  Peptide Derived from Human Papillomavirus
FLSHVKIPVV

SEQ ID NO: 8554 - protein, 9 aa, Artificial Sequence
  Peptide Derived from Human Papillomavirus
FQKYKTLFV

SEQ ID NO: 8555 - protein, 11 aa, Artificial Sequence
  Peptide Derived from Human Papillomavirus
FQKYKTLFVDV

SEQ ID NO: 8556 - protein, 11 aa, Artificial Sequence
  Peptide Derived from Human Papillomavirus
FVDVTSTYHWT

SEQ ID NO: 8557 - protein, 11 aa, Artificial Sequence
  Peptide Derived from Human Papillomavirus
GIYYVHDGHKT

SEQ ID NO: 8558 - protein, 10 aa, Artificial Sequence
  Peptide Derived from Human Papillomavirus
GVDYRGIYYV

SEQ ID NO: 8559 - protein, 9 aa, Artificial Sequence
  Peptide Derived from Human Papillomavirus
HAKCVTTHT

SEQ ID NO: 8560 - protein, 11 aa, Artificial Sequence
  Peptide Derived from Human Papillomavirus
HAKCVTTHTHI

SEQ ID NO: 8561 - protein, 8 aa, Artificial Sequence
  Peptide Derived from Human Papillomavirus
HISDTDNT

SEQ ID NO: 8562 - protein, 9 aa, Artificial Sequence
  Peptide Derived from Human Papillomavirus
HLKGEPNRL

SEQ ID NO: 8563 - protein, 10 aa, Artificial Sequence
  Peptide Derived from Human Papillomavirus
HTHISDTDNT

SEQ ID NO: 8564 - protein, 10 aa, Artificial Sequence
  Peptide Derived from Human Papillomavirus
HVKIPVVYRL

SEQ ID NO: 8565 - protein, 11 aa, Artificial Sequence
  Peptide Derived from Human Papillomavirus
HVKIPVVYRLV

SEQ ID NO: 8566 - protein, 8 aa, Artificial Sequence
  Peptide Derived from Human Papillomavirus
IALESLST

SEQ ID NO: 8567 - protein, 9 aa, Artificial Sequence
  Peptide Derived from Human Papillomavirus
IALESLSTT

SEQ ID NO: 8568 - protein, 10 aa, Artificial Sequence
  Peptide Derived from Human Papillomavirus
IALESLSTTI

SEQ ID NO: 8569 - protein, 10 aa, Artificial Sequence
  Peptide Derived from Human Papillomavirus
IITIIYKDET

SEQ ID NO: 8570 - protein, 9 aa, Artificial Sequence
  Peptide Derived from Human Papillomavirus
ITIIYKDET

SEQ ID NO: 8571 - protein, 8 aa, Artificial Sequence
  Peptide Derived from Human Papillomavirus
KACSAIEV

SEQ ID NO: 8572 - protein, 10 aa, Artificial Sequence
  Peptide Derived from Human Papillomavirus
KACSAIEVQI

SEQ ID NO: 8573 - protein, 11 aa, Artificial Sequence
  Peptide Derived from Human Papillomavirus
KACSAIEVQIA

SEQ ID NO: 8574 - protein, 8 aa, Artificial Sequence
  Peptide Derived from Human Papillomavirus
KAKACSAI

SEQ ID NO: 8575 - protein, 10 aa, Artificial Sequence
  Peptide Derived from Human Papillomavirus
KAKACSAIEV

SEQ ID NO: 8576 - protein, 8 aa, Artificial Sequence
  Peptide Derived from Human Papillomavirus
KIPVVYRL

SEQ ID NO: 8577 - protein, 9 aa, Artificial Sequence
  Peptide Derived from Human Papillomavirus
KIPVVYRLV

SEQ ID NO: 8578 - protein, 8 aa, Artificial Sequence
  Peptide Derived from Human Papillomavirus
KTLFVDVT

SEQ ID NO: 8579 - protein, 10 aa, Artificial Sequence
  Peptide Derived from Human Papillomavirus
KTLFVDVTST

SEQ ID NO: 8580 - protein, 8 aa, Artificial Sequence
  Peptide Derived from Human Papillomavirus
KTTPVVHL

SEQ ID NO: 8581 - protein, 8 aa, Artificial Sequence
  Peptide Derived from Human Papillomavirus
KTTTTTST

SEQ ID NO: 8582 - protein, 10 aa, Artificial Sequence
  Peptide Derived from Human Papillomavirus
KTTTTTSTSV

SEQ ID NO: 8583 - protein, 11 aa, Artificial Sequence
  Peptide Derived from Human Papillomavirus
KTYYTDFEQEA

SEQ ID NO: 8584 - protein, 11 aa, Artificial Sequence
  Peptide Derived from Human Papillomavirus
KVCSGVDYRGI

SEQ ID NO: 8585 - protein, 8 aa, Artificial Sequence
  Peptide Derived from Human Papillomavirus
LQVCKAKA

SEQ ID NO: 8586 - protein, 11 aa, Artificial Sequence
  Peptide Derived from Human Papillomavirus
LQVCKAKACSA

SEQ ID NO: 8587 - protein, 9 aa, Artificial Sequence
  Peptide Derived from Human Papillomavirus
MQYVAWKYI

SEQ ID NO: 8588 - protein, 10 aa, Artificial Sequence
  Peptide Derived from Human Papillomavirus
MVPCLQVCKA

SEQ ID NO: 8589 - protein, 9 aa, Artificial Sequence
  Peptide Derived from Human Papillomavirus
NTDSRSRSI

SEQ ID NO: 8590 - protein, 8 aa, Artificial Sequence
  Peptide Derived from Human Papillomavirus
NTHKTTTT

SEQ ID NO: 8591 - protein, 9 aa, Artificial Sequence
  Peptide Derived from Human Papillomavirus
NTHKTTTTT

SEQ ID NO: 8592 - protein, 11 aa, Artificial Sequence
  Peptide Derived from Human Papillomavirus
NTHKTTTTTST

SEQ ID NO: 8593 - protein, 8 aa, Artificial Sequence
  Peptide Derived from Human Papillomavirus
NVSPVETV

SEQ ID NO: 8594 - protein, 10 aa, Artificial Sequence
  Peptide Derived from Human Papillomavirus
PVETVNEYNT

SEQ ID NO: 8595 - protein, 9 aa, Artificial Sequence
  Peptide Derived from Human Papillomavirus
QIALESLST

SEQ ID NO: 8596 - protein, 10 aa, Artificial Sequence
  Peptide Derived from Human Papillomavirus
QIALESLSTT

SEQ ID NO: 8597 - protein, 11 aa, Artificial Sequence
  Peptide Derived from Human Papillomavirus
QIALESLSTTI

SEQ ID NO: 8598 - protein, 10 aa, Artificial Sequence
  Peptide Derived from Human Papillomavirus
QVCKAKACSA

SEQ ID NO: 8599 - protein, 11 aa, Artificial Sequence
  Peptide Derived from Human Papillomavirus
QVCKAKACSAI

SEQ ID NO: 8600 - protein, 8 aa, Artificial Sequence
  Peptide Derived from Human Papillomavirus
SAIEVQIA

SEQ ID NO: 8601 - protein, 9 aa, Artificial Sequence
  Peptide Derived from Human Papillomavirus
SAIEVQIAL

SEQ ID NO: 8602 - protein, 11 aa, Artificial Sequence
  Peptide Derived from Human Papillomavirus
SIITIIYKDET

SEQ ID NO: 8603 - protein, 8 aa, Artificial Sequence
  Peptide Derived from Human Papillomavirus
SIYCPDSV

SEQ ID NO: 8604 - protein, 11 aa, Artificial Sequence
  Peptide Derived from Human Papillomavirus
SIYCPDSVSST

SEQ ID NO: 8605 - protein, 10 aa, Artificial Sequence
  Peptide Derived from Human Papillomavirus
STCRYNVSPV

SEQ ID NO: 8606 - protein, 9 aa, Artificial Sequence
  Peptide Derived from Human Papillomavirus
STDNKNYSI

SEQ ID NO: 8607 - protein, 10 aa, Artificial Sequence
  Peptide Derived from Human Papillomavirus
STDNKNYSII

SEQ ID NO: 8608 - protein, 11 aa, Artificial Sequence
  Peptide Derived from Human Papillomavirus
STDNKNYSIIT

SEQ ID NO: 8609 - protein, 9 aa, Artificial Sequence
  Peptide Derived from Human Papillomavirus
STSVGNQDA

SEQ ID NO: 8610 - protein, 10 aa, Artificial Sequence
  Peptide Derived from Human Papillomavirus
STSVGNQDAA

SEQ ID NO: 8611 - protein, 11 aa, Artificial Sequence
  Peptide Derived from Human Papillomavirus
STSVGNQDAAV

SEQ ID NO: 8612 - protein, 11 aa, Artificial Sequence
  Peptide Derived from Human Papillomavirus
STTIYNNEEWT

SEQ ID NO: 8613 - protein, 8 aa, Artificial Sequence
  Peptide Derived from Human Papillomavirus
STYHWTST

SEQ ID NO: 8614 - protein, 8 aa, Artificial Sequence
  Peptide Derived from Human Papillomavirus
SVGNQDAA

SEQ ID NO: 8615 - protein, 9 aa, Artificial Sequence
  Peptide Derived from Human Papillomavirus
SVGNQDAAV

SEQ ID NO: 8616 - protein, 10 aa, Artificial Sequence
  Peptide Derived from Human Papillomavirus
SVSSTCRYNV

SEQ ID NO: 8617 - protein, 8 aa, Artificial Sequence
  Peptide Derived from Human Papillomavirus
TIIYKDET

SEQ ID NO: 8618 - protein, 9 aa, Artificial Sequence
  Peptide Derived from Human Papillomavirus
TIYNNEEWT

SEQ ID NO: 8619 - protein, 10 aa, Artificial Sequence
  Peptide Derived from Human Papillomavirus
TIYNNEEWTL

SEQ ID NO: 8620 - protein, 9 aa, Artificial Sequence
  Peptide Derived from Human Papillomavirus
TLFVDVTST

SEQ ID NO: 8621 - protein, 9 aa, Artificial Sequence
  Peptide Derived from Human Papillomavirus
TLRDTCEEL

SEQ ID NO: 8622 - protein, 11 aa, Artificial Sequence
  Peptide Derived from Human Papillomavirus
TLRDTCEELWL

SEQ ID NO: 8623 - protein, 10 aa, Artificial Sequence
  Peptide Derived from Human Papillomavirus
TQRNSFLSHV

SEQ ID NO: 8624 - protein, 9 aa, Artificial Sequence
  Peptide Derived from Human Papillomavirus
TTHTHISDT

SEQ ID NO: 8625 - protein, 10 aa, Artificial Sequence
  Peptide Derived from Human Papillomavirus
TTIYNNEEWT

SEQ ID NO: 8626 - protein, 11 aa, Artificial Sequence
  Peptide Derived from Human Papillomavirus
TTIYNNEEWTL

SEQ ID NO: 8627 - protein, 11 aa, Artificial Sequence
  Peptide Derived from Human Papillomavirus
TTSTSVGNQDA

SEQ ID NO: 8628 - protein, 8 aa, Artificial Sequence
  Peptide Derived from Human Papillomavirus
TTTTSTSV

SEQ ID NO: 8629 - protein, 9 aa, Artificial Sequence
  Peptide Derived from Human Papillomavirus
TTTTTSTSV

SEQ ID NO: 8630 - protein, 10 aa, Artificial Sequence
  Peptide Derived from Human Papillomavirus
TVNEYNTHKT

SEQ ID NO: 8631 - protein, 11 aa, Artificial Sequence
  Peptide Derived from Human Papillomavirus
TVNEYNTHKTT

SEQ ID NO: 8632 - protein, 8 aa, Artificial Sequence
  Peptide Derived from Human Papillomavirus
VQIALESL

SEQ ID NO: 8633 - protein, 10 aa, Artificial Sequence
  Peptide Derived from Human Papillomavirus
VQIALESLST

SEQ ID NO: 8634 - protein, 11 aa, Artificial Sequence
  Peptide Derived from Human Papillomavirus
VQIALESLSTT

SEQ ID NO: 8635 - protein, 8 aa, Artificial Sequence
  Peptide Derived from Human Papillomavirus
VTSTYHWT

SEQ ID NO: 8636 - protein, 10 aa, Artificial Sequence
  Peptide Derived from Human Papillomavirus
VTSTYHWTST

SEQ ID NO: 8637 - protein, 10 aa, Artificial Sequence
  Peptide Derived from Human Papillomavirus
VTTHTHISDT

SEQ ID NO: 8638 - protein, 11 aa, Artificial Sequence
  Peptide Derived from Human Papillomavirus
VVHLKGEPNRL

SEQ ID NO: 8639 - protein, 8 aa, Artificial Sequence
  Peptide Derived from Human Papillomavirus
WQKVCSGV

SEQ ID NO: 8640 - protein, 10 aa, Artificial Sequence
  Peptide Derived from Human Papillomavirus
WTLRDTCEEL

SEQ ID NO: 8641 - protein, 11 aa, Artificial Sequence
  Peptide Derived from Human Papillomavirus
WTSTDNKNYSI

SEQ ID NO: 8642 - protein, 8 aa, Artificial Sequence
  Peptide Derived from Human Papillomavirus
YTDFEQEA

SEQ ID NO: 8643 - protein, 8 aa, Artificial Sequence
  Peptide Derived from Human Papillomavirus
YVHDGHKT

SEQ ID NO: 8644 - protein, 11 aa, Artificial Sequence
  Peptide Derived from Human Papillomavirus
YVHDGHKTYYT

SEQ ID NO: 8645 - protein, 11 aa, Artificial Sequence
  Peptide Derived from Human Papillomavirus
ATLESITKKQL

SEQ ID NO: 8646 - protein, 8 aa, Artificial Sequence
  Peptide Derived from Human Papillomavirus
AVCRVCLL

SEQ ID NO: 8647 - protein, 8 aa, Artificial Sequence
  Peptide Derived from Human Papillomavirus
CLGCWRQT

SEQ ID NO: 8648 - protein, 8 aa, Artificial Sequence
  Peptide Derived from Human Papillomavirus
CLLFYSKV

SEQ ID NO: 8649 - protein, 8 aa, Artificial Sequence
  Peptide Derived from Human Papillomavirus
CVYCKKEL

SEQ ID NO: 8650 - protein, 9 aa, Artificial Sequence
  Peptide Derived from Human Papillomavirus
CVYCKKELT

SEQ ID NO: 8651 - protein, 11 aa, Artificial Sequence
  Peptide Derived from Human Papillomavirus
CVYCKKELTRA

SEQ ID NO: 8652 - protein, 9 aa, Artificial Sequence
  Peptide Derived from Human Papillomavirus
EIPLIDLRL

SEQ ID NO: 8653 - protein, 11 aa, Artificial Sequence
  Peptide Derived from Human Papillomavirus
ELTRAEVYNFA

SEQ ID NO: 8654 - protein, 8 aa, Artificial Sequence
  Peptide Derived from Human Papillomavirus
EVLEIPLI

SEQ ID NO: 8655 - protein, 10 aa, Artificial Sequence
  Peptide Derived from Human Papillomavirus
EVLEIPLIDL

SEQ ID NO: 8656 - protein, 8 aa, Artificial Sequence
  Peptide Derived from Human Papillomavirus
EVYNFACT

SEQ ID NO: 8657 - protein, 10 aa, Artificial Sequence
  Peptide Derived from Human Papillomavirus
EVYNFACTEL

SEQ ID NO: 8658 - protein, 8 aa, Artificial Sequence
  Peptide Derived from Human Papillomavirus
FACTELKL

SEQ ID NO: 8659 - protein, 9 aa, Artificial Sequence
  Peptide Derived from Human Papillomavirus
FACTELKLV

SEQ ID NO: 8660 - protein, 8 aa, Artificial Sequence
  Peptide Derived from Human Papillomavirus
GATLESIT

SEQ ID NO: 8661 - protein, 8 aa, Artificial Sequence
  Peptide Derived from Human Papillomavirus
HLIAHGWT

SEQ ID NO: 8662 - protein, 8 aa, Artificial Sequence
  Peptide Derived from Human Papillomavirus
HLSEVLEI

SEQ ID NO: 8663 - protein, 10 aa, Artificial Sequence
  Peptide Derived from Human Papillomavirus
HLSEVLEIPL

SEQ ID NO: 8664 - protein, 11 aa, Artificial Sequence
  Peptide Derived from Human Papillomavirus
HLSEVLEIPLI

SEQ ID NO: 8665 - protein, 10 aa, Artificial Sequence
  Peptide Derived from Human Papillomavirus
IAHGWTGSCL

SEQ ID NO: 8666 - protein, 9 aa, Artificial Sequence
  Peptide Derived from Human Papillomavirus
ITKKQLCDL

SEQ ID NO: 8667 - protein, 10 aa, Artificial Sequence
  Peptide Derived from Human Papillomavirus
ITKKQLCDLL

SEQ ID NO: 8668 - protein, 11 aa, Artificial Sequence
  Peptide Derived from Human Papillomavirus
ITKKQLCDLLI

SEQ ID NO: 8669 - protein, 11 aa, Artificial Sequence
  Peptide Derived from Human Papillomavirus
KLVYRDDFPYA

SEQ ID NO: 8670 - protein, 8 aa, Artificial Sequence
  Peptide Derived from Human Papillomavirus
KQLCDLLI

SEQ ID NO: 8671 - protein, 11 aa, Artificial Sequence
  Peptide Derived from Human Papillomavirus
LIAHGWTGSCL

SEQ ID NO: 8672 - protein, 9 aa, Artificial Sequence
  Peptide Derived from Human Papillomavirus
LIDLRLSCV

SEQ ID NO: 8673 - protein, 11 aa, Artificial Sequence
  Peptide Derived from Human Papillomavirus
LIRCYRCQSPL

SEQ ID NO: 8674 - protein, 8 aa, Artificial Sequence
  Peptide Derived from Human Papillomavirus
LTPEEKQL

SEQ ID NO: 8675 - protein, 10 aa, Artificial Sequence
  Peptide Derived from Human Papillomavirus
LTRAEVYNFA

SEQ ID NO: 8676 - protein, 10 aa, Artificial Sequence
  Peptide Derived from Human Papillomavirus
LVYRDDFPYA

SEQ ID NO: 8677 - protein, 11 aa, Artificial Sequence
  Peptide Derived from Human Papillomavirus
LVYRDDFPYAV

SEQ ID NO: 8678 - protein, 10 aa, Artificial Sequence
  Peptide Derived from Human Papillomavirus
PLIDLRLSCV

SEQ ID NO: 8679 - protein, 9 aa, Artificial Sequence
  Peptide Derived from Human Papillomavirus
PLTPEEKQL

SEQ ID NO: 8680 - protein, 8 aa, Artificial Sequence
  Peptide Derived from Human Papillomavirus
PQERPRSL

SEQ ID NO: 8681 - protein, 11 aa, Artificial Sequence
  Peptide Derived from Human Papillomavirus
PQERPRSLHHL

SEQ ID NO: 8682 - protein, 10 aa, Artificial Sequence
  Peptide Derived from Human Papillomavirus
QTSREPREST

SEQ ID NO: 8683 - protein, 11 aa, Artificial Sequence
  Peptide Derived from Human Papillomavirus
QTSREPRESTV

SEQ ID NO: 8684 - protein, 8 aa, Artificial Sequence
  Peptide Derived from Human Papillomavirus
RAEVYNFA

SEQ ID NO: 8685 - protein, 10 aa, Artificial Sequence
  Peptide Derived from Human Papillomavirus
RAEVYNFACT

SEQ ID NO: 8686 - protein, 11 aa, Artificial Sequence
  Peptide Derived from Human Papillomavirus
RLSCVYCKKEL

SEQ ID NO: 8687 - protein, 11 aa, Artificial Sequence
  Peptide Derived from Human Papillomavirus
RQTSREPREST

SEQ ID NO: 8688 - protein, 10 aa, Artificial Sequence
  Peptide Derived from Human Papillomavirus
RVCLLFYSKV

SEQ ID NO: 8689 - protein, 10 aa, Artificial Sequence
  Peptide Derived from Human Papillomavirus
SITKKQLCDL

SEQ ID NO: 8690 - protein, 11 aa, Artificial Sequence
  Peptide Derived from Human Papillomavirus
SITKKQLCDLL

SEQ ID NO: 8691 - protein, 8 aa, Artificial Sequence
  Peptide Derived from Human Papillomavirus
SLHHLSEV

SEQ ID NO: 8692 - protein, 9 aa, Artificial Sequence
  Peptide Derived from Human Papillomavirus
SLHHLSEVL

SEQ ID NO: 8693 - protein, 11 aa, Artificial Sequence
  Peptide Derived from Human Papillomavirus
SLHHLSEVLEI

SEQ ID NO: 8694 - protein, 10 aa, Artificial Sequence
  Peptide Derived from Human Papillomavirus
SVYGATLESI

SEQ ID NO: 8695 - protein, 11 aa, Artificial Sequence
  Peptide Derived from Human Papillomavirus
SVYGATLESIT

SEQ ID NO: 8696 - protein, 10 aa, Artificial Sequence
  Peptide Derived from Human Papillomavirus
TLESITKKQL

SEQ ID NO: 8697 - protein, 9 aa, Artificial Sequence
  Peptide Derived from Human Papillomavirus
VLEIPLIDL

SEQ ID NO: 8698 - protein, 11 aa, Artificial Sequence
  Peptide Derived from Human Papillomavirus
VLEIPLIDLRL

SEQ ID NO: 8699 - protein, 8 aa, Artificial Sequence
  Peptide Derived from Human Papillomavirus
YAVCRVCL

SEQ ID NO: 8700 - protein, 9 aa, Artificial Sequence
  Peptide Derived from Human Papillomavirus
YAVCRVCLL

SEQ ID NO: 8701 - protein, 8 aa, Artificial Sequence
  Peptide Derived from Human Papillomavirus
ALTVTCPL

SEQ ID NO: 8702 - protein, 10 aa, Artificial Sequence
  Peptide Derived from Human Papillomavirus
ALTVTCPLCA

SEQ ID NO: 8703 - protein, 9 aa, Artificial Sequence
  Peptide Derived from Human Papillomavirus
DIQSTKEDL

SEQ ID NO: 8704 - protein, 11 aa, Artificial Sequence
  Peptide Derived from Human Papillomavirus
DIQSTKEDLRV

SEQ ID NO: 8705 - protein, 8 aa, Artificial Sequence
  Peptide Derived from Human Papillomavirus
DLQCNEQL

SEQ ID NO: 8706 - protein, 8 aa, Artificial Sequence
  Peptide Derived from Human Papillomavirus
DLRVVQQL

SEQ ID NO: 8707 - protein, 9 aa, Artificial Sequence
  Peptide Derived from Human Papillomavirus
DLRVVQQLL

SEQ ID NO: 8708 - protein, 10 aa, Artificial Sequence
  Peptide Derived from Human Papillomavirus
DLRVVQQLLM

SEQ ID NO: 8709 - protein, 10 aa, Artificial Sequence
  Peptide Derived from Human Papillomavirus
DVVLELTPQT

SEQ ID NO: 8710 - protein, 10 aa, Artificial Sequence
  Peptide Derived from Human Papillomavirus
EIDLQCNEQL

SEQ ID NO: 8711 - protein, 8 aa, Artificial Sequence
  Peptide Derived from Human Papillomavirus
ELTPQTEI

SEQ ID NO: 8712 - protein, 10 aa, Artificial Sequence
  Peptide Derived from Human Papillomavirus
ELTPQTEIDL

SEQ ID NO: 8713 - protein, 10 aa, Artificial Sequence
  Peptide Derived from Human Papillomavirus
FVVQLDIQST

SEQ ID NO: 8714 - protein, 9 aa, Artificial Sequence
  Peptide Derived from Human Papillomavirus
GALTVTCPL

SEQ ID NO: 8715 - protein, 11 aa, Artificial Sequence
  Peptide Derived from Human Papillomavirus
GALTVTCPLCA

SEQ ID NO: 8716 - protein, 9 aa, Artificial Sequence
  Peptide Derived from Human Papillomavirus
HLQERPQQA

SEQ ID NO: 8717 - protein, 8 aa, Artificial Sequence
  Peptide Derived from Human Papillomavirus
HTCYLIHV

SEQ ID NO: 8718 - protein, 10 aa, Artificial Sequence
  Peptide Derived from Human Papillomavirus
HVPCCECKFV

SEQ ID NO: 8719 - protein, 11 aa, Artificial Sequence
  Peptide Derived from Human Papillomavirus
HVPCCECKFVV

SEQ ID NO: 8720 - protein, 8 aa, Artificial Sequence
  Peptide Derived from Human Papillomavirus
IQSTKEDL

SEQ ID NO: 8721 - protein, 10 aa, Artificial Sequence
  Peptide Derived from Human Papillomavirus
IQSTKEDLRV

SEQ ID NO: 8722 - protein, 11 aa, Artificial Sequence
  Peptide Derived from Human Papillomavirus
IQSTKEDLRVV

SEQ ID NO: 8723 - protein, 8 aa, Artificial Sequence
  Peptide Derived from Human Papillomavirus
KQHTCYLI

SEQ ID NO: 8724 - protein, 10 aa, Artificial Sequence
  Peptide Derived from Human Papillomavirus
KQHTCYLIHV

SEQ ID NO: 8725 - protein, 8 aa, Artificial Sequence
  Peptide Derived from Human Papillomavirus
KVPTLQDV

SEQ ID NO: 8726 - protein, 9 aa, Artificial Sequence
  Peptide Derived from Human Papillomavirus
KVPTLQDVV

SEQ ID NO: 8727 - protein, 10 aa, Artificial Sequence
  Peptide Derived from Human Papillomavirus
KVPTLQDVVL

SEQ ID NO: 8728 - protein, 8 aa, Artificial Sequence
  Peptide Derived from Human Papillomavirus
LLMGALTV

SEQ ID NO: 8729 - protein, 9 aa, Artificial Sequence
  Peptide Derived from Human Papillomavirus
LLMGALTVT

SEQ ID NO: 8730 - protein, 8 aa, Artificial Sequence
  Peptide Derived from Human Papillomavirus
LMGALTVT

SEQ ID NO: 8731 - protein, 11 aa, Artificial Sequence
  Peptide Derived from Human Papillomavirus
LMGALTVTCPL

SEQ ID NO: 8732 - protein, 8 aa, Artificial Sequence
  Peptide Derived from Human Papillomavirus
LQDVVLEL

SEQ ID NO: 8733 - protein, 9 aa, Artificial Sequence
  Peptide Derived from Human Papillomavirus
LQDVVLELT

SEQ ID NO: 8734 - protein, 8 aa, Artificial Sequence
  Peptide Derived from Human Papillomavirus
LQERPQQA

SEQ ID NO: 8735 - protein, 11 aa, Artificial Sequence
  Peptide Derived from Human Papillomavirus
LQERPQQARQA

SEQ ID NO: 8736 - protein, 9 aa, Artificial Sequence
  Peptide Derived from Human Papillomavirus
LTPQTEIDL

SEQ ID NO: 8737 - protein, 9 aa, Artificial Sequence
  Peptide Derived from Human Papillomavirus
LTVTCPLCA

SEQ ID NO: 8738 - protein, 11 aa, Artificial Sequence
  Peptide Derived from Human Papillomavirus
PQQARQAKQHT

SEQ ID NO: 8739 - protein, 8 aa, Artificial Sequence
  Peptide Derived from Human Papillomavirus
PTLQDVVL

SEQ ID NO: 8740 - protein, 10 aa, Artificial Sequence
  Peptide Derived from Human Papillomavirus
PTLQDVVLEL

SEQ ID NO: 8741 - protein, 11 aa, Artificial Sequence
  Peptide Derived from Human Papillomavirus
PTLQDVVLELT

SEQ ID NO: 8742 - protein, 9 aa, Artificial Sequence
  Peptide Derived from Human Papillomavirus
QAKQHTCYL

SEQ ID NO: 8743 - protein, 10 aa, Artificial Sequence
  Peptide Derived from Human Papillomavirus
QAKQHTCYLI

SEQ ID NO: 8744 - protein, 9 aa, Artificial Sequence
  Peptide Derived from Human Papillomavirus
QARQAKQHT

SEQ ID NO: 8745 - protein, 11 aa, Artificial Sequence
  Peptide Derived from Human Papillomavirus
QLDIQSTKEDL

SEQ ID NO: 8746 - protein, 8 aa, Artificial Sequence
  Peptide Derived from Human Papillomavirus
QLLMGALT

SEQ ID NO: 8747 - protein, 9 aa, Artificial Sequence
  Peptide Derived from Human Papillomavirus
QLLMGALTV

SEQ ID NO: 8748 - protein, 10 aa, Artificial Sequence
  Peptide Derived from Human Papillomavirus
QLLMGALTVT

SEQ ID NO: 8749 - protein, 10 aa, Artificial Sequence
  Peptide Derived from Human Papillomavirus
QQARQAKQHT

SEQ ID NO: 8750 - protein, 8 aa, Artificial Sequence
  Peptide Derived from Human Papillomavirus
QQLLMGAL

SEQ ID NO: 8751 - protein, 9 aa, Artificial Sequence
  Peptide Derived from Human Papillomavirus
QQLLMGALT

SEQ ID NO: 8752 - protein, 10 aa, Artificial Sequence
  Peptide Derived from Human Papillomavirus
QQLLMGALTV

SEQ ID NO: 8753 - protein, 11 aa, Artificial Sequence
  Peptide Derived from Human Papillomavirus
QQLLMGALTVT

SEQ ID NO: 8754 - protein, 10 aa, Artificial Sequence
  Peptide Derived from Human Papillomavirus
RQAKQHTCYL

SEQ ID NO: 8755 - protein, 11 aa, Artificial Sequence
  Peptide Derived from Human Papillomavirus
RQAKQHTCYLI

SEQ ID NO: 8756 - protein, 8 aa, Artificial Sequence
  Peptide Derived from Human Papillomavirus
RVVQQLLM

SEQ ID NO: 8757 - protein, 10 aa, Artificial Sequence
  Peptide Derived from Human Papillomavirus
RVVQQLLMGA

SEQ ID NO: 8758 - protein, 11 aa, Artificial Sequence
  Peptide Derived from Human Papillomavirus
RVVQQLLMGAL

SEQ ID NO: 8759 - protein, 8 aa, Artificial Sequence
  Peptide Derived from Human Papillomavirus
STKEDLRV

SEQ ID NO: 8760 - protein, 9 aa, Artificial Sequence
  Peptide Derived from Human Papillomavirus
STKEDLRVV

SEQ ID NO: 8761 - protein, 9 aa, Artificial Sequence
  Peptide Derived from Human Papillomavirus
TLQDVVLEL

SEQ ID NO: 8762 - protein, 10 aa, Artificial Sequence
  Peptide Derived from Human Papillomavirus
TLQDVVLELT

SEQ ID NO: 8763 - protein, 8 aa, Artificial Sequence
  Peptide Derived from Human Papillomavirus
TVTCPLCA

SEQ ID NO: 8764 - protein, 8 aa, Artificial Sequence
  Peptide Derived from Human Papillomavirus
VLELTPQT

SEQ ID NO: 8765 - protein, 10 aa, Artificial Sequence
  Peptide Derived from Human Papillomavirus
VLELTPQTEI

SEQ ID NO: 8766 - protein, 8 aa, Artificial Sequence
  Peptide Derived from Human Papillomavirus
VQLDIQST

SEQ ID NO: 8767 - protein, 8 aa, Artificial Sequence
  Peptide Derived from Human Papillomavirus
VQQLLMGA

SEQ ID NO: 8768 - protein, 9 aa, Artificial Sequence
  Peptide Derived from Human Papillomavirus
VQQLLMGAL

SEQ ID NO: 8769 - protein, 10 aa, Artificial Sequence
  Peptide Derived from Human Papillomavirus
VQQLLMGALT

SEQ ID NO: 8770 - protein, 11 aa, Artificial Sequence
  Peptide Derived from Human Papillomavirus
VQQLLMGALTV

SEQ ID NO: 8771 - protein, 9 aa, Artificial Sequence
  Peptide Derived from Human Papillomavirus
VVLELTPQT

SEQ ID NO: 8772 - protein, 11 aa, Artificial Sequence
  Peptide Derived from Human Papillomavirus
VVLELTPQTEI

SEQ ID NO: 8773 - protein, 9 aa, Artificial Sequence
  Peptide Derived from Human Papillomavirus
VVQLDIQST

SEQ ID NO: 8774 - protein, 9 aa, Artificial Sequence
  Peptide Derived from Human Papillomavirus
VVQQLLMGA

SEQ ID NO: 8775 - protein, 10 aa, Artificial Sequence
  Peptide Derived from Human Papillomavirus
VVQQLLMGAL

SEQ ID NO: 8776 - protein, 11 aa, Artificial Sequence
  Peptide Derived from Human Papillomavirus
VVQQLLMGALT

SEQ ID NO: 8777 - protein, 11 aa, Artificial Sequence
  Peptide Derived from Human Papillomavirus
AITCQREQPPT

SEQ ID NO: 8778 - protein, 10 aa, Artificial Sequence
  Peptide Derived from Human Papillomavirus
AMGEHWTKGA

SEQ ID NO: 8779 - protein, 11 aa, Artificial Sequence
  Peptide Derived from Human Papillomavirus
AMGEHWTKGAV

SEQ ID NO: 8780 - protein, 8 aa, Artificial Sequence
  Peptide Derived from Human Papillomavirus
AQGHNNGI

SEQ ID NO: 8781 - protein, 10 aa, Artificial Sequence
  Peptide Derived from Human Papillomavirus
AQLFNKPYWL

SEQ ID NO: 8782 - protein, 9 aa, Artificial Sequence
  Peptide Derived from Human Papillomavirus
ATDSYVKRT

SEQ ID NO: 8783 - protein, 11 aa, Artificial Sequence
  Peptide Derived from Human Papillomavirus
ATDSYVKRTSI

SEQ ID NO: 8784 - protein, 10 aa, Artificial Sequence
  Peptide Derived from Human Papillomavirus
ATEQLSKYDA

SEQ ID NO: 8785 - protein, 8 aa, Artificial Sequence
  Peptide Derived from Human Papillomavirus
ATPSGSMI

SEQ ID NO: 8786 - protein, 9 aa, Artificial Sequence
  Peptide Derived from Human Papillomavirus
ATPSGSMIT

SEQ ID NO: 8787 - protein, 8 aa, Artificial Sequence
  Peptide Derived from Human Papillomavirus
ATSKKRSA

SEQ ID NO: 8788 - protein, 10 aa, Artificial Sequence
  Peptide Derived from Human Papillomavirus
ATSKKRSAPT

SEQ ID NO: 8789 - protein, 11 aa, Artificial Sequence
  Peptide Derived from Human Papillomavirus
ATSLEDKYRYV

SEQ ID NO: 8790 - protein, 10 aa, Artificial Sequence
  Peptide Derived from Human Papillomavirus
ATWRPSENKV

SEQ ID NO: 8791 - protein, 10 aa, Artificial Sequence
  Peptide Derived from Human Papillomavirus
AVATSKKRSA

SEQ ID NO: 8792 - protein, 8 aa, Artificial Sequence
  Peptide Derived from Human Papillomavirus
AVCKSTQV

SEQ ID NO: 8793 - protein, 9 aa, Artificial Sequence
  Peptide Derived from Human Papillomavirus
AVCKSTQVT

SEQ ID NO: 8794 - protein, 10 aa, Artificial Sequence
  Peptide Derived from Human Papillomavirus
AVCKSTQVTT

SEQ ID NO: 8795 - protein, 9 aa, Artificial Sequence
  Peptide Derived from Human Papillomavirus
AVGHPYYSV

SEQ ID NO: 8796 - protein, 10 aa, Artificial Sequence
  Peptide Derived from Human Papillomavirus
AVGHPYYSVT

SEQ ID NO: 8797 - protein, 9 aa, Artificial Sequence
  Peptide Derived from Human Papillomavirus
AVNVFPIFL

SEQ ID NO: 8798 - protein, 11 aa, Artificial Sequence
  Peptide Derived from Human Papillomavirus
AVNVFPIFLQM

SEQ ID NO: 8799 - protein, 8 aa, Artificial Sequence
  Peptide Derived from Human Papillomavirus
CIFLDVGA

SEQ ID NO: 8800 - protein, 9 aa, Artificial Sequence
  Peptide Derived from Human Papillomavirus
CIFLDVGAV

SEQ ID NO: 8801 - protein, 11 aa, Artificial Sequence
  Peptide Derived from Human Papillomavirus
CIFLDVGAVNV

SEQ ID NO: 8802 - protein, 8 aa, Artificial Sequence
  Peptide Derived from Human Papillomavirus
CIVGCTPA

SEQ ID NO: 8803 - protein, 9 aa, Artificial Sequence
  Peptide Derived from Human Papillomavirus
CIVGCTPAM

SEQ ID NO: 8804 - protein, 8 aa, Artificial Sequence
  Peptide Derived from Human Papillomavirus
CQREQPPT

SEQ ID NO: 8805 - protein, 10 aa, Artificial Sequence
  Peptide Derived from Human Papillomavirus
CTPAMGEHWT

SEQ ID NO: 8806 - protein, 9 aa, Artificial Sequence
  Peptide Derived from Human Papillomavirus
DARKINQYL

SEQ ID NO: 8807 - protein, 11 aa, Artificial Sequence
  Peptide Derived from Human Papillomavirus
DAYGDSMWFYL

SEQ ID NO: 8808 - protein, 9 aa, Artificial Sequence
  Peptide Derived from Human Papillomavirus
DMIDTGFGA

SEQ ID NO: 8809 - protein, 10 aa, Artificial Sequence
  Peptide Derived from Human Papillomavirus
DMIDTGFGAM

SEQ ID NO: 8810 - protein, 8 aa, Artificial Sequence
  Peptide Derived from Human Papillomavirus
DQERLVWA

SEQ ID NO: 8811 - protein, 10 aa, Artificial Sequence
  Peptide Derived from Human Papillomavirus
DQERLVWACV

SEQ ID NO: 8812 - protein, 10 aa, Artificial Sequence
  Peptide Derived from Human Papillomavirus
DQFPLGRKFL

SEQ ID NO: 8813 - protein, 11 aa, Artificial Sequence
  Peptide Derived from Human Papillomavirus
DQFPLGRKFLM

SEQ ID NO: 8814 - protein, 8 aa, Artificial Sequence
  Peptide Derived from Human Papillomavirus
DTESSNLA

SEQ ID NO: 8815 - protein, 11 aa, Artificial Sequence
  Peptide Derived from Human Papillomavirus
DTGFGAMDFKV

SEQ ID NO: 8816 - protein, 8 aa, Artificial Sequence
  Peptide Derived from Human Papillomavirus
DTTRSTNM

SEQ ID NO: 8817 - protein, 9 aa, Artificial Sequence
  Peptide Derived from Human Papillomavirus
DTTRSTNMT

SEQ ID NO: 8818 - protein, 10 aa, Artificial Sequence
  Peptide Derived from Human Papillomavirus
DTTRSTNMTI

SEQ ID NO: 8819 - protein, 10 aa, Artificial Sequence
  Peptide Derived from Human Papillomavirus
DVGAVNVFPI

SEQ ID NO: 8820 - protein, 10 aa, Artificial Sequence
  Peptide Derived from Human Papillomavirus
DVNLQDSFST

SEQ ID NO: 8821 - protein, 11 aa, Artificial Sequence
  Peptide Derived from Human Papillomavirus
EAQLFNKPYWL

SEQ ID NO: 8822 - protein, 8 aa, Artificial Sequence
  Peptide Derived from Human Papillomavirus
ELQFVFQL

SEQ ID NO: 8823 - protein, 11 aa, Artificial Sequence
  Peptide Derived from Human Papillomavirus
ELQFVFQLCKI

SEQ ID NO: 8824 - protein, 8 aa, Artificial Sequence
  Peptide Derived from Human Papillomavirus
EQLSKYDA

SEQ ID NO: 8825 - protein, 11 aa, Artificial Sequence
  Peptide Derived from Human Papillomavirus
EQLSKYDARKI

SEQ ID NO: 8826 - protein, 11 aa, Artificial Sequence
  Peptide Derived from Human Papillomavirus
EQPPTEKQDPL

SEQ ID NO: 8827 - protein, 9 aa, Artificial Sequence
  Peptide Derived from Human Papillomavirus
ETIPAELYL

SEQ ID NO: 8828 - protein, 8 aa, Artificial Sequence
  Peptide Derived from Human Papillomavirus
EVGRGQPL

SEQ ID NO: 8829 - protein, 10 aa, Artificial Sequence
  Peptide Derived from Human Papillomavirus
EVGRGQPLGA

SEQ ID NO: 8830 - protein, 9 aa, Artificial Sequence
  Peptide Derived from Human Papillomavirus
EVMAYLHNM

SEQ ID NO: 8831 - protein, 11 aa, Artificial Sequence
  Peptide Derived from Human Papillomavirus
EVMAYLHNMNA

SEQ ID NO: 8832 - protein, 10 aa, Artificial Sequence
  Peptide Derived from Human Papillomavirus
EVPLDIVQST

SEQ ID NO: 8833 - protein, 9 aa, Artificial Sequence
  Peptide Derived from Human Papillomavirus
FARHYFNRA

SEQ ID NO: 8834 - protein, 9 aa, Artificial Sequence
  Peptide Derived from Human Papillomavirus
FLDVGAVNV

SEQ ID NO: 8835 - protein, 8 aa, Artificial Sequence
  Peptide Derived from Human Papillomavirus
FQLCKITL

SEQ ID NO: 8836 - protein, 10 aa, Artificial Sequence
  Peptide Derived from Human Papillomavirus
FQLCKITLSA

SEQ ID NO: 8837 - protein, 8 aa, Artificial Sequence
  Peptide Derived from Human Papillomavirus
FVFQLCKI

SEQ ID NO: 8838 - protein, 9 aa, Artificial Sequence
  Peptide Derived from Human Papillomavirus
FVFQLCKIT

SEQ ID NO: 8839 - protein, 10 aa, Artificial Sequence
  Peptide Derived from Human Papillomavirus
FVFQLCKITL

SEQ ID NO: 8840 - protein, 8 aa, Artificial Sequence
  Peptide Derived from Human Papillomavirus
FVTVVDTT

SEQ ID NO: 8841 - protein, 11 aa, Artificial Sequence
  Peptide Derived from Human Papillomavirus
FVTVVDTTRST

SEQ ID NO: 8842 - protein, 9 aa, Artificial Sequence
  Peptide Derived from Human Papillomavirus
GAGLSGHPL

SEQ ID NO: 8843 - protein, 8 aa, Artificial Sequence
  Peptide Derived from Human Papillomavirus
GAMDFKVL

SEQ ID NO: 8844 - protein, 9 aa, Artificial Sequence
  Peptide Derived from Human Papillomavirus
GAVCKSTQV

SEQ ID NO: 8845 - protein, 10 aa, Artificial Sequence
  Peptide Derived from Human Papillomavirus
GAVCKSTQVT

SEQ ID NO: 8846 - protein, 11 aa, Artificial Sequence
  Peptide Derived from Human Papillomavirus
GAVCKSTQVTT

SEQ ID NO: 8847 - protein, 8 aa, Artificial Sequence
  Peptide Derived from Human Papillomavirus
GAVNVFPI

SEQ ID NO: 8848 - protein, 10 aa, Artificial Sequence
  Peptide Derived from Human Papillomavirus
GAVNVFPIFL

SEQ ID NO: 8849 - protein, 8 aa, Artificial Sequence
  Peptide Derived from Human Papillomavirus
GICWGNQL

SEQ ID NO: 8850 - protein, 10 aa, Artificial Sequence
  Peptide Derived from Human Papillomavirus
GICWGNQLFV

SEQ ID NO: 8851 - protein, 11 aa, Artificial Sequence
  Peptide Derived from Human Papillomavirus
GICWGNQLFVT

SEQ ID NO: 8852 - protein, 8 aa, Artificial Sequence
  Peptide Derived from Human Papillomavirus
GLCIFLDV

SEQ ID NO: 8853 - protein, 10 aa, Artificial Sequence
  Peptide Derived from Human Papillomavirus
GLCIFLDVGA

SEQ ID NO: 8854 - protein, 11 aa, Artificial Sequence
  Peptide Derived from Human Papillomavirus
GLCIFLDVGAV

SEQ ID NO: 8855 - protein, 10 aa, Artificial Sequence
  Peptide Derived from Human Papillomavirus
GLEVGRGQPL

SEQ ID NO: 8856 - protein, 11 aa, Artificial Sequence
  Peptide Derived from Human Papillomavirus
GLSGHPLFNRL

SEQ ID NO: 8857 - protein, 8 aa, Artificial Sequence
  Peptide Derived from Human Papillomavirus
GLSPPVAT

SEQ ID NO: 8858 - protein, 10 aa, Artificial Sequence
  Peptide Derived from Human Papillomavirus
GLSPPVATSL

SEQ ID NO: 8859 - protein, 8 aa, Artificial Sequence
  Peptide Derived from Human Papillomavirus
GQPLGAGL

SEQ ID NO: 8860 - protein, 8 aa, Artificial Sequence
  Peptide Derived from Human Papillomavirus
GTRSKPAV

SEQ ID NO: 8861 - protein, 9 aa, Artificial Sequence
  Peptide Derived from Human Papillomavirus
GTRSKPAVA

SEQ ID NO: 8862 - protein, 10 aa, Artificial Sequence
  Peptide Derived from Human Papillomavirus
GTRSKPAVAT

SEQ ID NO: 8863 - protein, 8 aa, Artificial Sequence
  Peptide Derived from Human Papillomavirus
HAGSSRLL

SEQ ID NO: 8864 - protein, 9 aa, Artificial Sequence
  Peptide Derived from Human Papillomavirus
HAGSSRLLA

SEQ ID NO: 8865 - protein, 10 aa, Artificial Sequence
  Peptide Derived from Human Papillomavirus
HAGSSRLLAV

SEQ ID NO: 8866 - protein, 10 aa, Artificial Sequence
  Peptide Derived from Human Papillomavirus
HVEEYELQFV

SEQ ID NO: 8867 - protein, 10 aa, Artificial Sequence
  Peptide Derived from Human Papillomavirus
ITCQREQPPT

SEQ ID NO: 8868 - protein, 8 aa, Artificial Sequence
  Peptide Derived from Human Papillomavirus
ITLSAEVM

SEQ ID NO: 8869 - protein, 9 aa, Artificial Sequence
  Peptide Derived from Human Papillomavirus
ITLSAEVMA

SEQ ID NO: 8870 - protein, 11 aa, Artificial Sequence
  Peptide Derived from Human Papillomavirus
ITLSAEVMAYL

SEQ ID NO: 8871 - protein, 8 aa, Artificial Sequence
  Peptide Derived from Human Papillomavirus
IVGCTPAM

SEQ ID NO: 8872 - protein, 8 aa, Artificial Sequence
  Peptide Derived from Human Papillomavirus
KAEVPLDI

SEQ ID NO: 8873 - protein, 9 aa, Artificial Sequence
  Peptide Derived from Human Papillomavirus
KAEVPLDIV

SEQ ID NO: 8874 - protein, 9 aa, Artificial Sequence
  Peptide Derived from Human Papillomavirus
KINQYLRHV

SEQ ID NO: 8875 - protein, 8 aa, Artificial Sequence
  Peptide Derived from Human Papillomavirus
KITLSAEV

SEQ ID NO: 8876 - protein, 9 aa, Artificial Sequence
  Peptide Derived from Human Papillomavirus
KITLSAEVM

SEQ ID NO: 8877 - protein, 10 aa, Artificial Sequence
  Peptide Derived from Human Papillomavirus
KITLSAEVMA

SEQ ID NO: 8878 - protein, 11 aa, Artificial Sequence
  Peptide Derived from Human Papillomavirus
KMSADAYGDSM

SEQ ID NO: 8879 - protein, 8 aa, Artificial Sequence
  Peptide Derived from Human Papillomavirus
KQTQLCIV

SEQ ID NO: 8880 - protein, 11 aa, Artificial Sequence
  Peptide Derived from Human Papillomavirus
KQTQLCIVGCT

SEQ ID NO: 8881 - protein, 9 aa, Artificial Sequence
  Peptide Derived from Human Papillomavirus
KTNIPKVSA

SEQ ID NO: 8882 - protein, 8 aa, Artificial Sequence
  Peptide Derived from Human Papillomavirus
KVGETIPA

SEQ ID NO: 8883 - protein, 10 aa, Artificial Sequence
  Peptide Derived from Human Papillomavirus
KVGETIPAEL

SEQ ID NO: 8884 - protein, 8 aa, Artificial Sequence
  Peptide Derived from Human Papillomavirus
KVLQESKA

SEQ ID NO: 8885 - protein, 10 aa, Artificial Sequence
  Peptide Derived from Human Papillomavirus
KVLQESKAEV

SEQ ID NO: 8886 - protein, 9 aa, Artificial Sequence
  Peptide Derived from Human Papillomavirus
KVSAYQYRV

SEQ ID NO: 8887 - protein, 9 aa, Artificial Sequence
  Peptide Derived from Human Papillomavirus
KVVATDSYV

SEQ ID NO: 8888 - protein, 9 aa, Artificial Sequence
  Peptide Derived from Human Papillomavirus
KVYLPPTPV

SEQ ID NO: 8889 - protein, 9 aa, Artificial Sequence
  Peptide Derived from Human Papillomavirus
LAKYKFWDV

SEQ ID NO: 8890 - protein, 11 aa, Artificial Sequence
  Peptide Derived from Human Papillomavirus
LAKYKFWDVNL

SEQ ID NO: 8891 - protein, 8 aa, Artificial Sequence
  Peptide Derived from Human Papillomavirus
LALINTPI

SEQ ID NO: 8892 - protein, 10 aa, Artificial Sequence
  Peptide Derived from Human Papillomavirus
LAVGHPYYSV

SEQ ID NO: 8893 - protein, 11 aa, Artificial Sequence
  Peptide Derived from Human Papillomavirus
LAVGHPYYSVT

SEQ ID NO: 8894 - protein, 11 aa, Artificial Sequence
  Peptide Derived from Human Papillomavirus
LINTPIEDGDM

SEQ ID NO: 8895 - protein, 11 aa, Artificial Sequence
  Peptide Derived from Human Papillomavirus
LLAVGHPYYSV

SEQ ID NO: 8896 - protein, 9 aa, Artificial Sequence
  Peptide Derived from Human Papillomavirus
LLEDWNIGL

SEQ ID NO: 8897 - protein, 11 aa, Artificial Sequence
  Peptide Derived from Human Papillomavirus
LMQLGTRSKPA

SEQ ID NO: 8898 - protein, 9 aa, Artificial Sequence
  Peptide Derived from Human Papillomavirus
LQDSFSTDL

SEQ ID NO: 8899 - protein, 8 aa, Artificial Sequence
  Peptide Derived from Human Papillomavirus
LQESKAEV

SEQ ID NO: 8900 - protein, 10 aa, Artificial Sequence
  Peptide Derived from Human Papillomavirus
LQESKAEVPL

SEQ ID NO: 8901 - protein, 10 aa, Artificial Sequence
  Peptide Derived from Human Papillomavirus
LQFVFQLCKI

SEQ ID NO: 8902 - protein, 11 aa, Artificial Sequence
  Peptide Derived from Human Papillomavirus
LQFVFQLCKIT

SEQ ID NO: 8903 - protein, 11 aa, Artificial Sequence
  Peptide Derived from Human Papillomavirus
LQRAQGHNNGI

SEQ ID NO: 8904 - protein, 8 aa, Artificial Sequence
  Peptide Derived from Human Papillomavirus
LVWACVGL

SEQ ID NO: 8905 - protein, 10 aa, Artificial Sequence
  Peptide Derived from Human Papillomavirus
LVWACVGLEV

SEQ ID NO: 8906 - protein, 11 aa, Artificial Sequence
  Peptide Derived from Human Papillomavirus
MATWRPSENKV

SEQ ID NO: 8907 - protein, 9 aa, Artificial Sequence
  Peptide Derived from Human Papillomavirus
MAYLHNMNA

SEQ ID NO: 8908 - protein, 11 aa, Artificial Sequence
  Peptide Derived from Human Papillomavirus
MAYLHNMNANL

SEQ ID NO: 8909 - protein, 8 aa, Artificial Sequence
  Peptide Derived from Human Papillomavirus
MIDTGFGA

SEQ ID NO: 8910 - protein, 9 aa, Artificial Sequence
  Peptide Derived from Human Papillomavirus
MIDTGFGAM

SEQ ID NO: 8911 - protein, 8 aa, Artificial Sequence
  Peptide Derived from Human Papillomavirus
MITSEAQL

SEQ ID NO: 8912 - protein, 8 aa, Artificial Sequence
  Peptide Derived from Human Papillomavirus
MMLPMMYI

SEQ ID NO: 8913 - protein, 10 aa, Artificial Sequence
  Peptide Derived from Human Papillomavirus
MMYIYRDPPL

SEQ ID NO: 8914 - protein, 10 aa, Artificial Sequence
  Peptide Derived from Human Papillomavirus
MQLGTRSKPA

SEQ ID NO: 8915 - protein, 11 aa, Artificial Sequence
  Peptide Derived from Human Papillomavirus
MQLGTRSKPAV

SEQ ID NO: 8916 - protein, 10 aa, Artificial Sequence
  Peptide Derived from Human Papillomavirus
MTISTATEQL

SEQ ID NO: 8917 - protein, 10 aa, Artificial Sequence
  Peptide Derived from Human Papillomavirus
NANLLEDWNI

SEQ ID NO: 8918 - protein, 8 aa, Artificial Sequence
  Peptide Derived from Human Papillomavirus
NIGLSPPV

SEQ ID NO: 8919 - protein, 9 aa, Artificial Sequence
  Peptide Derived from Human Papillomavirus
NIGLSPPVA

SEQ ID NO: 8920 - protein, 10 aa, Artificial Sequence
  Peptide Derived from Human Papillomavirus
NIGLSPPVAT

SEQ ID NO: 8921 - protein, 9 aa, Artificial Sequence
  Peptide Derived from Human Papillomavirus
NISVDGKQT

SEQ ID NO: 8922 - protein, 11 aa, Artificial Sequence
  Peptide Derived from Human Papillomavirus
NISVDGKQTQL

SEQ ID NO: 8923 - protein, 10 aa, Artificial Sequence
  Peptide Derived from Human Papillomavirus
NIYNPDQERL

SEQ ID NO: 8924 - protein, 11 aa, Artificial Sequence
  Peptide Derived from Human Papillomavirus
NIYNPDQERLV

SEQ ID NO: 8925 - protein, 8 aa, Artificial Sequence
  Peptide Derived from Human Papillomavirus
NLANNNVI

SEQ ID NO: 8926 - protein, 8 aa, Artificial Sequence
  Peptide Derived from Human Papillomavirus
NLLEDWNI

SEQ ID NO: 8927 - protein, 10 aa, Artificial Sequence
  Peptide Derived from Human Papillomavirus
NLLEDWNIGL

SEQ ID NO: 8928 - protein, 8 aa, Artificial Sequence
  Peptide Derived from Human Papillomavirus
NLQDSFST

SEQ ID NO: 8929 - protein, 10 aa, Artificial Sequence
  Peptide Derived from Human Papillomavirus
NLQDSFSTDL

SEQ ID NO: 8930 - protein, 8 aa, Artificial Sequence
  Peptide Derived from Human Papillomavirus
NMTISTAT

SEQ ID NO: 8931 - protein, 11 aa, Artificial Sequence
  Peptide Derived from Human Papillomavirus
NMTISTATEQL

SEQ ID NO: 8932 - protein, 8 aa, Artificial Sequence
  Peptide Derived from Human Papillomavirus
NQLFVTVV

SEQ ID NO: 8933 - protein, 10 aa, Artificial Sequence
  Peptide Derived from Human Papillomavirus
NQLFVTVVDT

SEQ ID NO: 8934 - protein, 11 aa, Artificial Sequence
  Peptide Derived from Human Papillomavirus
NQLFVTVVDTT

SEQ ID NO: 8935 - protein, 9 aa, Artificial Sequence
  Peptide Derived from Human Papillomavirus
NTKTNIPKV

SEQ ID NO: 8936 - protein, 11 aa, Artificial Sequence
  Peptide Derived from Human Papillomavirus
NTKTNIPKVSA

SEQ ID NO: 8937 - protein, 9 aa, Artificial Sequence
  Peptide Derived from Human Papillomavirus
NTPIEDGDM

SEQ ID NO: 8938 - protein, 10 aa, Artificial Sequence
  Peptide Derived from Human Papillomavirus
NTPIEDGDMI

SEQ ID NO: 8939 - protein, 9 aa, Artificial Sequence
  Peptide Derived from Human Papillomavirus
NVFPIFLQM

SEQ ID NO: 8940 - protein, 10 aa, Artificial Sequence
  Peptide Derived from Human Papillomavirus
NVFPIFLQMA

SEQ ID NO: 8941 - protein, 11 aa, Artificial Sequence
  Peptide Derived from Human Papillomavirus
NVFPIFLQMAT

SEQ ID NO: 8942 - protein, 10 aa, Artificial Sequence
  Peptide Derived from Human Papillomavirus
NVIEDSRDNI

SEQ ID NO: 8943 - protein, 8 aa, Artificial Sequence
  Peptide Derived from Human Papillomavirus
PAMGEHWT

SEQ ID NO: 8944 - protein, 11 aa, Artificial Sequence
  Peptide Derived from Human Papillomavirus
PAMGEHWTKGA

SEQ ID NO: 8945 - protein, 11 aa, Artificial Sequence
  Peptide Derived from Human Papillomavirus
PAVATSKKRSA

SEQ ID NO: 8946 - protein, 8 aa, Artificial Sequence
  Peptide Derived from Human Papillomavirus
PIEDGDMI

SEQ ID NO: 8947 - protein, 10 aa, Artificial Sequence
  Peptide Derived from Human Papillomavirus
PIEDGDMIDT

SEQ ID NO: 8948 - protein, 8 aa, Artificial Sequence
  Peptide Derived from Human Papillomavirus
PIFLQMAT

SEQ ID NO: 8949 - protein, 10 aa, Artificial Sequence
  Peptide Derived from Human Papillomavirus
PLAKYKFWDV

SEQ ID NO: 8950 - protein, 9 aa, Artificial Sequence
  Peptide Derived from Human Papillomavirus
PLALINTPI

SEQ ID NO: 8951 - protein, 8 aa, Artificial Sequence
  Peptide Derived from Human Papillomavirus
PLDIVQST

SEQ ID NO: 8952 - protein, 9 aa, Artificial Sequence
  Peptide Derived from Human Papillomavirus
PLFNRLDDT

SEQ ID NO: 8953 - protein, 11 aa, Artificial Sequence
  Peptide Derived from Human Papillomavirus
PLGAGLSGHPL

SEQ ID NO: 8954 - protein, 8 aa, Artificial Sequence
  Peptide Derived from Human Papillomavirus
PLGRKFLM

SEQ ID NO: 8955 - protein, 10 aa, Artificial Sequence
  Peptide Derived from Human Papillomavirus
PLGRKFLMQL

SEQ ID NO: 8956 - protein, 8 aa, Artificial Sequence
  Peptide Derived from Human Papillomavirus
PLHYGLCI

SEQ ID NO: 8957 - protein, 10 aa, Artificial Sequence
  Peptide Derived from Human Papillomavirus
PLHYGLCIFL

SEQ ID NO: 8958 - protein, 11 aa, Artificial Sequence
  Peptide Derived from Human Papillomavirus
PMMYIYRDPPL

SEQ ID NO: 8959 - protein, 8 aa, Artificial Sequence
  Peptide Derived from Human Papillomavirus
PTEKQDPL

SEQ ID NO: 8960 - protein, 9 aa, Artificial Sequence
  Peptide Derived from Human Papillomavirus
PTEKQDPLA

SEQ ID NO: 8961 - protein, 8 aa, Artificial Sequence
  Peptide Derived from Human Papillomavirus
PTPVSKVV

SEQ ID NO: 8962 - protein, 9 aa, Artificial Sequence
  Peptide Derived from Human Papillomavirus
PTPVSKVVA

SEQ ID NO: 8963 - protein, 10 aa, Artificial Sequence
  Peptide Derived from Human Papillomavirus
PTPVSKVVAT

SEQ ID NO: 8964 - protein, 8 aa, Artificial Sequence
  Peptide Derived from Human Papillomavirus
PTSTSTPA

SEQ ID NO: 8965 - protein, 8 aa, Artificial Sequence
  Peptide Derived from Human Papillomavirus
PVSKVVAT

SEQ ID NO: 8966 - protein, 8 aa, Artificial Sequence
  Peptide Derived from Human Papillomavirus
QLCIVGCT

SEQ ID NO: 8967 - protein, 10 aa, Artificial Sequence
  Peptide Derived from Human Papillomavirus
QLCIVGCTPA

SEQ ID NO: 8968 - protein, 11 aa, Artificial Sequence
  Peptide Derived from Human Papillomavirus
QLCIVGCTPAM

SEQ ID NO: 8969 - protein, 9 aa, Artificial Sequence
  Peptide Derived from Human Papillomavirus
QLCKITLSA

SEQ ID NO: 8970 - protein, 11 aa, Artificial Sequence
  Peptide Derived from Human Papillomavirus
QLCKITLSAEV

SEQ ID NO: 8971 - protein, 11 aa, Artificial Sequence
  Peptide Derived from Human Papillomavirus
QLFARHYFNRA

SEQ ID NO: 8972 - protein, 9 aa, Artificial Sequence
  Peptide Derived from Human Papillomavirus
QLFNKPYWL

SEQ ID NO: 8973 - protein, 9 aa, Artificial Sequence
  Peptide Derived from Human Papillomavirus
QLFVTVVDT

SEQ ID NO: 8974 - protein, 10 aa, Artificial Sequence
  Peptide Derived from Human Papillomavirus
QLFVTVVDTT

SEQ ID NO: 8975 - protein, 9 aa, Artificial Sequence
  Peptide Derived from Human Papillomavirus
QLGTRSKPA

SEQ ID NO: 8976 - protein, 10 aa, Artificial Sequence
  Peptide Derived from Human Papillomavirus
QLGTRSKPAV

SEQ ID NO: 8977 - protein, 11 aa, Artificial Sequence
  Peptide Derived from Human Papillomavirus
QLGTRSKPAVA

SEQ ID NO: 8978 - protein, 10 aa, Artificial Sequence
  Peptide Derived from Human Papillomavirus
QLSKYDARKI

SEQ ID NO: 8979 - protein, 10 aa, Artificial Sequence
  Peptide Derived from Human Papillomavirus
QTQLCIVGCT

SEQ ID NO: 8980 - protein, 10 aa, Artificial Sequence
  Peptide Derived from Human Papillomavirus
QVTTGDCPPL

SEQ ID NO: 8981 - protein, 11 aa, Artificial Sequence
  Peptide Derived from Human Papillomavirus
QVTTGDCPPLA

SEQ ID NO: 8982 - protein, 8 aa, Artificial Sequence
  Peptide Derived from Human Papillomavirus
RAGKVGET

SEQ ID NO: 8983 - protein, 9 aa, Artificial Sequence
  Peptide Derived from Human Papillomavirus
RAGKVGETI

SEQ ID NO: 8984 - protein, 11 aa, Artificial Sequence
  Peptide Derived from Human Papillomavirus
RAGKVGETIPA

SEQ ID NO: 8985 - protein, 9 aa, Artificial Sequence
  Peptide Derived from Human Papillomavirus
RAQGHNNGI

SEQ ID NO: 8986 - protein, 10 aa, Artificial Sequence
  Peptide Derived from Human Papillomavirus
RLDDTESSNL

SEQ ID NO: 8987 - protein, 11 aa, Artificial Sequence
  Peptide Derived from Human Papillomavirus
RLDDTESSNLA

SEQ ID NO: 8988 - protein, 10 aa, Artificial Sequence
  Peptide Derived from Human Papillomavirus
RLPDPNKFGL

SEQ ID NO: 8989 - protein, 9 aa, Artificial Sequence
  Peptide Derived from Human Papillomavirus
RLVWACVGL

SEQ ID NO: 8990 - protein, 11 aa, Artificial Sequence
  Peptide Derived from Human Papillomavirus
RLVWACVGLEV

SEQ ID NO: 8991 - protein, 8 aa, Artificial Sequence
  Peptide Derived from Human Papillomavirus
RTSIFYHA

SEQ ID NO: 8992 - protein, 9 aa, Artificial Sequence
  Peptide Derived from Human Papillomavirus
SADAYGDSM

SEQ ID NO: 8993 - protein, 8 aa, Artificial Sequence
  Peptide Derived from Human Papillomavirus
SAEVMAYL

SEQ ID NO: 8994 - protein, 11 aa, Artificial Sequence
  Peptide Derived from Human Papillomavirus
SAEVMAYLHNM

SEQ ID NO: 8995 - protein, 8 aa, Artificial Sequence
  Peptide Derived from Human Papillomavirus
SAPTSTST

SEQ ID NO: 8996 - protein, 10 aa, Artificial Sequence
  Peptide Derived from Human Papillomavirus
SAPTSTSTPA

SEQ ID NO: 8997 - protein, 10 aa, Artificial Sequence
  Peptide Derived from Human Papillomavirus
SAYQYRVFRV

SEQ ID NO: 8998 - protein, 11 aa, Artificial Sequence
  Peptide Derived from Human Papillomavirus
SIFYHAGSSRL

SEQ ID NO: 8999 - protein, 9 aa, Artificial Sequence
  Peptide Derived from Human Papillomavirus
SLEDKYRYV

SEQ ID NO: 9000 - protein, 9 aa, Artificial Sequence
  Peptide Derived from Human Papillomavirus
SMITSEAQL

SEQ ID NO: 9001 - protein, 11 aa, Artificial Sequence
  Peptide Derived from Human Papillomavirus
SMWFYLRREQL

SEQ ID NO: 9002 - protein, 9 aa, Artificial Sequence
  Peptide Derived from Human Papillomavirus
STCKYPDYL

SEQ ID NO: 9003 - protein, 11 aa, Artificial Sequence
  Peptide Derived from Human Papillomavirus
STCKYPDYLKM

SEQ ID NO: 9004 - protein, 9 aa, Artificial Sequence
  Peptide Derived from Human Papillomavirus
STDLDQFPL

SEQ ID NO: 9005 - protein, 8 aa, Artificial Sequence
  Peptide Derived from Human Papillomavirus
STNMTIST

SEQ ID NO: 9006 - protein, 9 aa, Artificial Sequence
  Peptide Derived from Human Papillomavirus
STNMTISTA

SEQ ID NO: 9007 - protein, 10 aa, Artificial Sequence
  Peptide Derived from Human Papillomavirus
STNMTISTAT

SEQ ID NO: 9008 - protein, 9 aa, Artificial Sequence
  Peptide Derived from Human Papillomavirus
SVDGKQTQL

SEQ ID NO: 9009 - protein, 11 aa, Artificial Sequence
  Peptide Derived from Human Papillomavirus
SVDGKQTQLCI

SEQ ID NO: 9010 - protein, 9 aa, Artificial Sequence
  Peptide Derived from Human Papillomavirus
SVTKDNTKT

SEQ ID NO: 9011 - protein, 11 aa, Artificial Sequence
  Peptide Derived from Human Papillomavirus
SVTKDNTKTNI

SEQ ID NO: 9012 - protein, 11 aa, Artificial Sequence
  Peptide Derived from Human Papillomavirus
SVYVATPSGSM

SEQ ID NO: 9013 - protein, 11 aa, Artificial Sequence
  Peptide Derived from Human Papillomavirus
TATEQLSKYDA

SEQ ID NO: 9014 - protein, 8 aa, Artificial Sequence
  Peptide Derived from Human Papillomavirus
TIPAELYL

SEQ ID NO: 9015 - protein, 9 aa, Artificial Sequence
  Peptide Derived from Human Papillomavirus
TISTATEQL

SEQ ID NO: 9016 - protein, 8 aa, Artificial Sequence
  Peptide Derived from Human Papillomavirus
TLSAEVMA

SEQ ID NO: 9017 - protein, 10 aa, Artificial Sequence
  Peptide Derived from Human Papillomavirus
TLSAEVMAYL

SEQ ID NO: 9018 - protein, 9 aa, Artificial Sequence
  Peptide Derived from Human Papillomavirus
TQLCIVGCT

SEQ ID NO: 9019 - protein, 11 aa, Artificial Sequence
  Peptide Derived from Human Papillomavirus
TQLCIVGCTPA

SEQ ID NO: 9020 - protein, 11 aa, Artificial Sequence
  Peptide Derived from Human Papillomavirus
TQVTTGDCPPL

SEQ ID NO: 9021 - protein, 8 aa, Artificial Sequence
  Peptide Derived from Human Papillomavirus
TTGDCPPL

SEQ ID NO: 9022 - protein, 9 aa, Artificial Sequence
  Peptide Derived from Human Papillomavirus
TTGDCPPLA

SEQ ID NO: 9023 - protein, 10 aa, Artificial Sequence
  Peptide Derived from Human Papillomavirus
TTGDCPPLAL

SEQ ID NO: 9024 - protein, 11 aa, Artificial Sequence
  Peptide Derived from Human Papillomavirus
TTGDCPPLALI

SEQ ID NO: 9025 - protein, 8 aa, Artificial Sequence
  Peptide Derived from Human Papillomavirus
TTRSTNMT

SEQ ID NO: 9026 - protein, 9 aa, Artificial Sequence
  Peptide Derived from Human Papillomavirus
TTRSTNMTI

SEQ ID NO: 9027 - protein, 11 aa, Artificial Sequence
  Peptide Derived from Human Papillomavirus
TTRSTNMTIST

SEQ ID NO: 9028 - protein, 9 aa, Artificial Sequence
  Peptide Derived from Human Papillomavirus
TVVDTTRST

SEQ ID NO: 9029 - protein, 11 aa, Artificial Sequence
  Peptide Derived from Human Papillomavirus
TVVDTTRSTNM

SEQ ID NO: 9030 - protein, 10 aa, Artificial Sequence
  Peptide Derived from Human Papillomavirus
VATDSYVKRT

SEQ ID NO: 9031 - protein, 8 aa, Artificial Sequence
  Peptide Derived from Human Papillomavirus
VATPSGSM

SEQ ID NO: 9032 - protein, 9 aa, Artificial Sequence
  Peptide Derived from Human Papillomavirus
VATPSGSMI

SEQ ID NO: 9033 - protein, 10 aa, Artificial Sequence
  Peptide Derived from Human Papillomavirus
VATPSGSMIT

SEQ ID NO: 9034 - protein, 9 aa, Artificial Sequence
  Peptide Derived from Human Papillomavirus
VATSKKRSA

SEQ ID NO: 9035 - protein, 11 aa, Artificial Sequence
  Peptide Derived from Human Papillomavirus
VATSKKRSAPT

SEQ ID NO: 9036 - protein, 9 aa, Artificial Sequence
  Peptide Derived from Human Papillomavirus
VIEDSRDNI

SEQ ID NO: 9037 - protein, 11 aa, Artificial Sequence
  Peptide Derived from Human Papillomavirus
VIEDSRDNISV

SEQ ID NO: 9038 - protein, 9 aa, Artificial Sequence
  Peptide Derived from Human Papillomavirus
VLQESKAEV

SEQ ID NO: 9039 - protein, 11 aa, Artificial Sequence
  Peptide Derived from Human Papillomavirus
VLQESKAEVPL

SEQ ID NO: 9040 - protein, 8 aa, Artificial Sequence
  Peptide Derived from Human Papillomavirus
VMAYLHNM

SEQ ID NO: 9041 - protein, 10 aa, Artificial Sequence
  Peptide Derived from Human Papillomavirus
VMAYLHNMNA

SEQ ID NO: 9042 - protein, 11 aa, Artificial Sequence
  Peptide Derived from Human Papillomavirus
VQSTCKYPDYL

SEQ ID NO: 9043 - protein, 8 aa, Artificial Sequence
  Peptide Derived from Human Papillomavirus
VTKDNTKT

SEQ ID NO: 9044 - protein, 10 aa, Artificial Sequence
  Peptide Derived from Human Papillomavirus
VTKDNTKTNI

SEQ ID NO: 9045 - protein, 9 aa, Artificial Sequence
  Peptide Derived from Human Papillomavirus
VTTGDCPPL

SEQ ID NO: 9046 - protein, 10 aa, Artificial Sequence
  Peptide Derived from Human Papillomavirus
VTTGDCPPLA

SEQ ID NO: 9047 - protein, 11 aa, Artificial Sequence
  Peptide Derived from Human Papillomavirus
VTTGDCPPLAL

SEQ ID NO: 9048 - protein, 10 aa, Artificial Sequence
  Peptide Derived from Human Papillomavirus
VTVVDTTRST

SEQ ID NO: 9049 - protein, 8 aa, Artificial Sequence
  Peptide Derived from Human Papillomavirus
VVATDSYV

SEQ ID NO: 9050 - protein, 11 aa, Artificial Sequence
  Peptide Derived from Human Papillomavirus
VVATDSYVKRT

SEQ ID NO: 9051 - protein, 8 aa, Artificial Sequence
  Peptide Derived from Human Papillomavirus
VVDTTRST

SEQ ID NO: 9052 - protein, 10 aa, Artificial Sequence
  Peptide Derived from Human Papillomavirus
VVDTTRSTNM

SEQ ID NO: 9053 - protein, 11 aa, Artificial Sequence
  Peptide Derived from Human Papillomavirus
VVDTTRSTNMT

SEQ ID NO: 9054 - protein, 8 aa, Artificial Sequence
  Peptide Derived from Human Papillomavirus
WACVGLEV

SEQ ID NO: 9055 - protein, 10 aa, Artificial Sequence
  Peptide Derived from Human Papillomavirus
WTKGAVCKST

SEQ ID NO: 9056 - protein, 8 aa, Artificial Sequence
  Peptide Derived from Human Papillomavirus
YIYRDPPL

SEQ ID NO: 9057 - protein, 9 aa, Artificial Sequence
  Peptide Derived from Human Papillomavirus
YLHNMNANL

SEQ ID NO: 9058 - protein, 10 aa, Artificial Sequence
  Peptide Derived from Human Papillomavirus
YLHNMNANLL

SEQ ID NO: 9059 - protein, 8 aa, Artificial Sequence
  Peptide Derived from Human Papillomavirus
YLKMSADA

SEQ ID NO: 9060 - protein, 10 aa, Artificial Sequence
  Peptide Derived from Human Papillomavirus
YLPPTPVSKV

SEQ ID NO: 9061 - protein, 11 aa, Artificial Sequence
  Peptide Derived from Human Papillomavirus
YLPPTPVSKVV

SEQ ID NO: 9062 - protein, 10 aa, Artificial Sequence
  Peptide Derived from Human Papillomavirus
YLRHVEEYEL

SEQ ID NO: 9063 - protein, 9 aa, Artificial Sequence
  Peptide Derived from Human Papillomavirus
YLRREQLFA

SEQ ID NO: 9064 - protein, 8 aa, Artificial Sequence
  Peptide Derived from Human Papillomavirus
YQYRVFRV

SEQ ID NO: 9065 - protein, 10 aa, Artificial Sequence
  Peptide Derived from Human Papillomavirus
YQYRVFRVRL

SEQ ID NO: 9066 - protein, 9 aa, Artificial Sequence
  Peptide Derived from Human Papillomavirus
YVATPSGSM

SEQ ID NO: 9067 - protein, 10 aa, Artificial Sequence
  Peptide Derived from Human Papillomavirus
YVATPSGSMI

SEQ ID NO: 9068 - protein, 11 aa, Artificial Sequence
  Peptide Derived from Human Papillomavirus
YVATPSGSMIT

SEQ ID NO: 9069 - protein, 11 aa, Artificial Sequence
  Peptide Derived from Human Papillomavirus
YVKRTSIFYHA

SEQ ID NO: 9070 - protein, 8 aa, Artificial Sequence
  Peptide Derived from Human Papillomavirus
YVRSTAIT

SEQ ID NO: 9071 - protein, 9 aa, Artificial Sequence
  Peptide Derived from Human Papillomavirus
AAPRLYRKA

SEQ ID NO: 9072 - protein, 8 aa, Artificial Sequence
  Peptide Derived from Human Papillomavirus
ALHRPAFT

SEQ ID NO: 9073 - protein, 9 aa, Artificial Sequence
  Peptide Derived from Human Papillomavirus
ALHRPAFTT

SEQ ID NO: 9074 - protein, 8 aa, Artificial Sequence
  Peptide Derived from Human Papillomavirus
AQAEEIEM

SEQ ID NO: 9075 - protein, 11 aa, Artificial Sequence
  Peptide Derived from Human Papillomavirus
AQAEEIEMQPL

SEQ ID NO: 9076 - protein, 9 aa, Artificial Sequence
  Peptide Derived from Human Papillomavirus
ATIQTRRGT

SEQ ID NO: 9077 - protein, 11 aa, Artificial Sequence
  Peptide Derived from Human Papillomavirus
ATIQTRRGTQI

SEQ ID NO: 9078 - protein, 10 aa, Artificial Sequence
  Peptide Derived from Human Papillomavirus
ATLVSADNPL

SEQ ID NO: 9079 - protein, 9 aa, Artificial Sequence
  Peptide Derived from Human Papillomavirus
ATPSAHLPI

SEQ ID NO: 9080 - protein, 10 aa, Artificial Sequence
  Peptide Derived from Human Papillomavirus
ATQLYKTCKL

SEQ ID NO: 9081 - protein, 9 aa, Artificial Sequence
  Peptide Derived from Human Papillomavirus
ATRRKRASA

SEQ ID NO: 9082 - protein, 10 aa, Artificial Sequence
  Peptide Derived from Human Papillomavirus
ATRRKRASAT

SEQ ID NO: 9083 - protein, 10 aa, Artificial Sequence
  Peptide Derived from Human Papillomavirus
AVHGSGTEPI

SEQ ID NO: 9084 - protein, 8 aa, Artificial Sequence
  Peptide Derived from Human Papillomavirus
AVLDITPT

SEQ ID NO: 9085 - protein, 11 aa, Artificial Sequence
  Peptide Derived from Human Papillomavirus
AVLDITPTSST

SEQ ID NO: 9086 - protein, 8 aa, Artificial Sequence
  Peptide Derived from Human Papillomavirus
DISPIAQA

SEQ ID NO: 9087 - protein, 11 aa, Artificial Sequence
  Peptide Derived from Human Papillomavirus
DISPIAQAEEI

SEQ ID NO: 9088 - protein, 8 aa, Artificial Sequence
  Peptide Derived from Human Papillomavirus
DITPTSST

SEQ ID NO: 9089 - protein, 9 aa, Artificial Sequence
  Peptide Derived from Human Papillomavirus
DITPTSSTV

SEQ ID NO: 9090 - protein, 11 aa, Artificial Sequence
  Peptide Derived from Human Papillomavirus
DITPTSSTVHV

SEQ ID NO: 9091 - protein, 10 aa, Artificial Sequence
  Peptide Derived from Human Papillomavirus
DIVLPTGPST

SEQ ID NO: 9092 - protein, 10 aa, Artificial Sequence
  Peptide Derived from Human Papillomavirus
DIYANIDDEA

SEQ ID NO: 9093 - protein, 11 aa, Artificial Sequence
  Peptide Derived from Human Papillomavirus
DTSLAFSPSGV

SEQ ID NO: 9094 - protein, 8 aa, Artificial Sequence
  Peptide Derived from Human Papillomavirus
DVTHDVYI

SEQ ID NO: 9095 - protein, 9 aa, Artificial Sequence
  Peptide Derived from Human Papillomavirus
DVTPARPPI

SEQ ID NO: 9096 - protein, 10 aa, Artificial Sequence
  Peptide Derived from Human Papillomavirus
DVTPARPPIV

SEQ ID NO: 9097 - protein, 11 aa, Artificial Sequence
  Peptide Derived from Human Papillomavirus
DVTPARPPIVV

SEQ ID NO: 9098 - protein, 10 aa, Artificial Sequence
  Peptide Derived from Human Papillomavirus
DVVNKIEQKT

SEQ ID NO: 9099 - protein, 10 aa, Artificial Sequence
  Peptide Derived from Human Papillomavirus
DVYIQGSSFA

SEQ ID NO: 9100 - protein, 11 aa, Artificial Sequence
  Peptide Derived from Human Papillomavirus
DVYIQGSSFAL

SEQ ID NO: 9101 - protein, 10 aa, Artificial Sequence
  Peptide Derived from Human Papillomavirus
EAPGLSSQSV

SEQ ID NO: 9102 - protein, 11 aa, Artificial Sequence
  Peptide Derived from Human Papillomavirus
EAPGLSSQSVA

SEQ ID NO: 9103 - protein, 8 aa, Artificial Sequence
  Peptide Derived from Human Papillomavirus
EAPQTGEV

SEQ ID NO: 9104 - protein, 8 aa, Artificial Sequence
  Peptide Derived from Human Papillomavirus
EIEMQPLL

SEQ ID NO: 9105 - protein, 10 aa, Artificial Sequence
  Peptide Derived from Human Papillomavirus
EIEMQPLLSA

SEQ ID NO: 9106 - protein, 8 aa, Artificial Sequence
  Peptide Derived from Human Papillomavirus
EIPMQTFA

SEQ ID NO: 9107 - protein, 9 aa, Artificial Sequence
  Peptide Derived from Human Papillomavirus
EIPMQTFAV

SEQ ID NO: 9108 - protein, 8 aa, Artificial Sequence
  Peptide Derived from Human Papillomavirus
EITSSSTT

SEQ ID NO: 9109 - protein, 9 aa, Artificial Sequence
  Peptide Derived from Human Papillomavirus
EITSSSTTT

SEQ ID NO: 9110 - protein, 11 aa, Artificial Sequence
  Peptide Derived from Human Papillomavirus
EITSSSTTTPA

SEQ ID NO: 9111 - protein, 8 aa, Artificial Sequence
  Peptide Derived from Human Papillomavirus
EMQPLLSA

SEQ ID NO: 9112 - protein, 9 aa, Artificial Sequence
  Peptide Derived from Human Papillomavirus
EQKTWADKI

SEQ ID NO: 9113 - protein, 10 aa, Artificial Sequence
  Peptide Derived from Human Papillomavirus
EQKTWADKIL

SEQ ID NO: 9114 - protein, 10 aa, Artificial Sequence
  Peptide Derived from Human Papillomavirus
ETPFYSGPDI

SEQ ID NO: 9115 - protein, 11 aa, Artificial Sequence
  Peptide Derived from Human Papillomavirus
ETPFYSGPDIV

SEQ ID NO: 9116 - protein, 8 aa, Artificial Sequence
  Peptide Derived from Human Papillomavirus
EVSGNILI

SEQ ID NO: 9117 - protein, 10 aa, Artificial Sequence
  Peptide Derived from Human Papillomavirus
EVSGNILIST

SEQ ID NO: 9118 - protein, 8 aa, Artificial Sequence
  Peptide Derived from Human Papillomavirus
FADGDVAA

SEQ ID NO: 9119 - protein, 8 aa, Artificial Sequence
  Peptide Derived from Human Papillomavirus
FASNTTNV

SEQ ID NO: 9120 - protein, 9 aa, Artificial Sequence
  Peptide Derived from Human Papillomavirus
FASNTTNVT

SEQ ID NO: 9121 - protein, 10 aa, Artificial Sequence
  Peptide Derived from Human Papillomavirus
FASNTTNVTA

SEQ ID NO: 9122 - protein, 8 aa, Artificial Sequence
  Peptide Derived from Human Papillomavirus
FAVHGSGT

SEQ ID NO: 9123 - protein, 11 aa, Artificial Sequence
  Peptide Derived from Human Papillomavirus
FAVHGSGTEPI

SEQ ID NO: 9124 - protein, 9 aa, Artificial Sequence
  Peptide Derived from Human Papillomavirus
FIDPPVIEA

SEQ ID NO: 9125 - protein, 8 aa, Artificial Sequence
  Peptide Derived from Human Papillomavirus
FLDRPATL

SEQ ID NO: 9126 - protein, 9 aa, Artificial Sequence
  Peptide Derived from Human Papillomavirus
FLDRPATLV

SEQ ID NO: 9127 - protein, 11 aa, Artificial Sequence
  Peptide Derived from Human Papillomavirus
FLDRPATLVSA

SEQ ID NO: 9128 - protein, 11 aa, Artificial Sequence
  Peptide Derived from Human Papillomavirus
FMNIVALHRPA

SEQ ID NO: 9129 - protein, 10 aa, Artificial Sequence
  Peptide Derived from Human Papillomavirus
FQQVKVTDPA

SEQ ID NO: 9130 - protein, 9 aa, Artificial Sequence
  Peptide Derived from Human Papillomavirus
FTGSGGFEI

SEQ ID NO: 9131 - protein, 10 aa, Artificial Sequence
  Peptide Derived from Human Papillomavirus
FTGSGGFEIT

SEQ ID NO: 9132 - protein, 8 aa, Artificial Sequence
  Peptide Derived from Human Papillomavirus
FTTRRGGV

SEQ ID NO: 9133 - protein, 9 aa, Artificial Sequence
  Peptide Derived from Human Papillomavirus
FTYFGGLGI

SEQ ID NO: 9134 - protein, 11 aa, Artificial Sequence
  Peptide Derived from Human Papillomavirus
FTYFGGLGIGT

SEQ ID NO: 9135 - protein, 9 aa, Artificial Sequence
  Peptide Derived from Human Papillomavirus
FVPQSPYDV

SEQ ID NO: 9136 - protein, 10 aa, Artificial Sequence
  Peptide Derived from Human Papillomavirus
FVPQSPYDVT

SEQ ID NO: 9137 - protein, 8 aa, Artificial Sequence
  Peptide Derived from Human Papillomavirus
GAGIPNFT

SEQ ID NO: 9138 - protein, 10 aa, Artificial Sequence
  Peptide Derived from Human Papillomavirus
GARVHYYYDI

SEQ ID NO: 9139 - protein, 8 aa, Artificial Sequence
  Peptide Derived from Human Papillomavirus
GIHSYEEI

SEQ ID NO: 9140 - protein, 10 aa, Artificial Sequence
  Peptide Derived from Human Papillomavirus
GIHSYEEIPM

SEQ ID NO: 9141 - protein, 8 aa, Artificial Sequence
  Peptide Derived from Human Papillomavirus
GLGIGTGT

SEQ ID NO: 9142 - protein, 8 aa, Artificial Sequence
  Peptide Derived from Human Papillomavirus
GLSSQSVA

SEQ ID NO: 9143 - protein, 9 aa, Artificial Sequence
  Peptide Derived from Human Papillomavirus
GLSSQSVAT

SEQ ID NO: 9144 - protein, 9 aa, Artificial Sequence
  Peptide Derived from Human Papillomavirus
GLYDIYANI

SEQ ID NO: 9145 - protein, 8 aa, Artificial Sequence
  Peptide Derived from Human Papillomavirus
GTCPEDVV

SEQ ID NO: 9146 - protein, 11 aa, Artificial Sequence
  Peptide Derived from Human Papillomavirus
GTCPEDVVNKI

SEQ ID NO: 9147 - protein, 8 aa, Artificial Sequence
  Peptide Derived from Human Papillomavirus
GTEPISST

SEQ ID NO: 9148 - protein, 10 aa, Artificial Sequence
  Peptide Derived from Human Papillomavirus
GTEPISSTPI

SEQ ID NO: 9149 - protein, 8 aa, Artificial Sequence
  Peptide Derived from Human Papillomavirus
GTGSGGRA

SEQ ID NO: 9150 - protein, 11 aa, Artificial Sequence
  Peptide Derived from Human Papillomavirus
GTGSGGRAGYV

SEQ ID NO: 9151 - protein, 10 aa, Artificial Sequence
  Peptide Derived from Human Papillomavirus
GTGTGSGGRA

SEQ ID NO: 9152 - protein, 8 aa, Artificial Sequence
  Peptide Derived from Human Papillomavirus
GTQIGARV

SEQ ID NO: 9153 - protein, 9 aa, Artificial Sequence
  Peptide Derived from Human Papillomavirus
GVAPDPDFM

SEQ ID NO: 9154 - protein, 11 aa, Artificial Sequence
  Peptide Derived from Human Papillomavirus
GVAPDPDFMNI

SEQ ID NO: 9155 - protein, 11 aa, Artificial Sequence
  Peptide Derived from Human Papillomavirus
GVRFSRLGRKA

SEQ ID NO: 9156 - protein, 8 aa, Artificial Sequence
  Peptide Derived from Human Papillomavirus
HITNPLFI

SEQ ID NO: 9157 - protein, 8 aa, Artificial Sequence
  Peptide Derived from Human Papillomavirus
HLPIKPST

SEQ ID NO: 9158 - protein, 9 aa, Artificial Sequence
  Peptide Derived from Human Papillomavirus
HLPIKPSTL

SEQ ID NO: 9159 - protein, 8 aa, Artificial Sequence
  Peptide Derived from Human Papillomavirus
HVSSTHIT

SEQ ID NO: 9160 - protein, 11 aa, Artificial Sequence
  Peptide Derived from Human Papillomavirus
HVSSTHITNPL

SEQ ID NO: 9161 - protein, 10 aa, Artificial Sequence
  Peptide Derived from Human Papillomavirus
IAAPRLYRKA

SEQ ID NO: 9162 - protein, 9 aa, Artificial Sequence
  Peptide Derived from Human Papillomavirus
IAQAEEIEM

SEQ ID NO: 9163 - protein, 10 aa, Artificial Sequence
  Peptide Derived from Human Papillomavirus
ILISTPTSGI

SEQ ID NO: 9164 - protein, 9 aa, Artificial Sequence
  Peptide Derived from Human Papillomavirus
ILQWGSLFT

SEQ ID NO: 9165 - protein, 8 aa, Artificial Sequence
  Peptide Derived from Human Papillomavirus
IQGSSFAL

SEQ ID NO: 9166 - protein, 11 aa, Artificial Sequence
  Peptide Derived from Human Papillomavirus
IQGSSFALWPV

SEQ ID NO: 9167 - protein, 9 aa, Artificial Sequence
  Peptide Derived from Human Papillomavirus
IQTRRGTQI

SEQ ID NO: 9168 - protein, 11 aa, Artificial Sequence
  Peptide Derived from Human Papillomavirus
IQTRRGTQIGA

SEQ ID NO: 9169 - protein, 11 aa, Artificial Sequence
  Peptide Derived from Human Papillomavirus
ITNPLFIDPPV

SEQ ID NO: 9170 - protein, 8 aa, Artificial Sequence
  Peptide Derived from Human Papillomavirus
ITPTSSTV

SEQ ID NO: 9171 - protein, 10 aa, Artificial Sequence
  Peptide Derived from Human Papillomavirus
ITPTSSTVHV

SEQ ID NO: 9172 - protein, 8 aa, Artificial Sequence
  Peptide Derived from Human Papillomavirus
ITSSSTTT

SEQ ID NO: 9173 - protein, 10 aa, Artificial Sequence
  Peptide Derived from Human Papillomavirus
ITSSSTTTPA

SEQ ID NO: 9174 - protein, 11 aa, Artificial Sequence
  Peptide Derived from Human Papillomavirus
ITSSSTTTPAV

SEQ ID NO: 9175 - protein, 8 aa, Artificial Sequence
  Peptide Derived from Human Papillomavirus
IVALHRPA

SEQ ID NO: 9176 - protein, 10 aa, Artificial Sequence
  Peptide Derived from Human Papillomavirus
IVALHRPAFT

SEQ ID NO: 9177 - protein, 11 aa, Artificial Sequence
  Peptide Derived from Human Papillomavirus
IVALHRPAFTT

SEQ ID NO: 9178 - protein, 11 aa, Artificial Sequence
  Peptide Derived from Human Papillomavirus
IVDVTPARPPI

SEQ ID NO: 9179 - protein, 9 aa, Artificial Sequence
  Peptide Derived from Human Papillomavirus
IVLPTGPST

SEQ ID NO: 9180 - protein, 10 aa, Artificial Sequence
  Peptide Derived from Human Papillomavirus
IVTLVEESSV

SEQ ID NO: 9181 - protein, 11 aa, Artificial Sequence
  Peptide Derived from Human Papillomavirus
IVTLVEESSVI

SEQ ID NO: 9182 - protein, 9 aa, Artificial Sequence
  Peptide Derived from Human Papillomavirus
IVVESVGPT

SEQ ID NO: 9183 - protein, 8 aa, Artificial Sequence
  Peptide Derived from Human Papillomavirus
KAFQQVKV

SEQ ID NO: 9184 - protein, 9 aa, Artificial Sequence
  Peptide Derived from Human Papillomavirus
KAFQQVKVT

SEQ ID NO: 9185 - protein, 10 aa, Artificial Sequence
  Peptide Derived from Human Papillomavirus
KATIQTRRGT

SEQ ID NO: 9186 - protein, 8 aa, Artificial Sequence
  Peptide Derived from Human Papillomavirus
KIEQKTWA

SEQ ID NO: 9187 - protein, 11 aa, Artificial Sequence
  Peptide Derived from Human Papillomavirus
KIEQKTWADKI

SEQ ID NO: 9188 - protein, 8 aa, Artificial Sequence
  Peptide Derived from Human Papillomavirus
KILQWGSL

SEQ ID NO: 9189 - protein, 10 aa, Artificial Sequence
  Peptide Derived from Human Papillomavirus
KILQWGSLFT

SEQ ID NO: 9190 - protein, 10 aa, Artificial Sequence
  Peptide Derived from Human Papillomavirus
KLSGTCPEDV

SEQ ID NO: 9191 - protein, 11 aa, Artificial Sequence
  Peptide Derived from Human Papillomavirus
KLSGTCPEDVV

SEQ ID NO: 9192 - protein, 8 aa, Artificial Sequence
  Peptide Derived from Human Papillomavirus
KTCKLSGT

SEQ ID NO: 9193 - protein, 8 aa, Artificial Sequence
  Peptide Derived from Human Papillomavirus
KTWADKIL

SEQ ID NO: 9194 - protein, 8 aa, Artificial Sequence
  Peptide Derived from Human Papillomavirus
KVTDPAFL

SEQ ID NO: 9195 - protein, 8 aa, Artificial Sequence
  Peptide Derived from Human Papillomavirus
LAFSPSGV

SEQ ID NO: 9196 - protein, 9 aa, Artificial Sequence
  Peptide Derived from Human Papillomavirus
LAFSPSGVA

SEQ ID NO: 9197 - protein, 9 aa, Artificial Sequence
  Peptide Derived from Human Papillomavirus
LISTPTSGI

SEQ ID NO: 9198 - protein, 11 aa, Artificial Sequence
  Peptide Derived from Human Papillomavirus
LLSANNSFDGL

SEQ ID NO: 9199 - protein, 8 aa, Artificial Sequence
  Peptide Derived from Human Papillomavirus
LQWGSLFT

SEQ ID NO: 9200 - protein, 8 aa, Artificial Sequence
  Peptide Derived from Human Papillomavirus
LVEESSVI

SEQ ID NO: 9201 - protein, 8 aa, Artificial Sequence
  Peptide Derived from Human Papillomavirus
LVSADNPL

SEQ ID NO: 9202 - protein, 11 aa, Artificial Sequence
  Peptide Derived from Human Papillomavirus
MQTFAVHGSGT

SEQ ID NO: 9203 - protein, 9 aa, Artificial Sequence
  Peptide Derived from Human Papillomavirus
NIDDEAPGL

SEQ ID NO: 9204 - protein, 8 aa, Artificial Sequence
  Peptide Derived from Human Papillomavirus
NILISTPT

SEQ ID NO: 9205 - protein, 11 aa, Artificial Sequence
  Peptide Derived from Human Papillomavirus
NILISTPTSGI

SEQ ID NO: 9206 - protein, 9 aa, Artificial Sequence
  Peptide Derived from Human Papillomavirus
NIVALHRPA

SEQ ID NO: 9207 - protein, 11 aa, Artificial Sequence
  Peptide Derived from Human Papillomavirus
NIVALHRPAFT

SEQ ID NO: 9208 - protein, 9 aa, Artificial Sequence
  Peptide Derived from Human Papillomavirus
NTTNVTAPL

SEQ ID NO: 9209 - protein, 9 aa, Artificial Sequence
  Peptide Derived from Human Papillomavirus
NVTAPLGNV

SEQ ID NO: 9210 - protein, 8 aa, Artificial Sequence
  Peptide Derived from Human Papillomavirus
PAFLDRPA

SEQ ID NO: 9211 - protein, 9 aa, Artificial Sequence
  Peptide Derived from Human Papillomavirus
PAFLDRPAT

SEQ ID NO: 9212 - protein, 10 aa, Artificial Sequence
  Peptide Derived from Human Papillomavirus
PAFLDRPATL

SEQ ID NO: 9213 - protein, 11 aa, Artificial Sequence
  Peptide Derived from Human Papillomavirus
PAFLDRPATLV

SEQ ID NO: 9214 - protein, 10 aa, Artificial Sequence
  Peptide Derived from Human Papillomavirus
PAFTTRRGGV

SEQ ID NO: 9215 - protein, 8 aa, Artificial Sequence
  Peptide Derived from Human Papillomavirus
PARPPIVV

SEQ ID NO: 9216 - protein, 11 aa, Artificial Sequence
  Peptide Derived from Human Papillomavirus
PARPPIVVESV

SEQ ID NO: 9217 - protein, 11 aa, Artificial Sequence
  Peptide Derived from Human Papillomavirus
PATLVSADNPL

SEQ ID NO: 9218 - protein, 9 aa, Artificial Sequence
  Peptide Derived from Human Papillomavirus
PAVLDITPT

SEQ ID NO: 9219 - protein, 8 aa, Artificial Sequence
  Peptide Derived from Human Papillomavirus
PIAQAEEI

SEQ ID NO: 9220 - protein, 10 aa, Artificial Sequence
  Peptide Derived from Human Papillomavirus
PIAQAEEIEM

SEQ ID NO: 9221 - protein, 10 aa, Artificial Sequence
  Peptide Derived from Human Papillomavirus
PIKPSTLSFA

SEQ ID NO: 9222 - protein, 8 aa, Artificial Sequence
  Peptide Derived from Human Papillomavirus
PIPGFRRI

SEQ ID NO: 9223 - protein, 9 aa, Artificial Sequence
  Peptide Derived from Human Papillomavirus
PIPGFRRIA

SEQ ID NO: 9224 - protein, 10 aa, Artificial Sequence
  Peptide Derived from Human Papillomavirus
PIPGFRRIAA

SEQ ID NO: 9225 - protein, 10 aa, Artificial Sequence
  Peptide Derived from Human Papillomavirus
PIVVESVGPT

SEQ ID NO: 9226 - protein, 8 aa, Artificial Sequence
  Peptide Derived from Human Papillomavirus
PLFEGTDT

SEQ ID NO: 9227 - protein, 10 aa, Artificial Sequence
  Peptide Derived from Human Papillomavirus
PLFEGTDTSL

SEQ ID NO: 9228 - protein, 11 aa, Artificial Sequence
  Peptide Derived from Human Papillomavirus
PLFEGTDTSLA

SEQ ID NO: 9229 - protein, 8 aa, Artificial Sequence
  Peptide Derived from Human Papillomavirus
PLFIDPPV

SEQ ID NO: 9230 - protein, 9 aa, Artificial Sequence
  Peptide Derived from Human Papillomavirus
PLFIDPPVI

SEQ ID NO: 9231 - protein, 11 aa, Artificial Sequence
  Peptide Derived from Human Papillomavirus
PLFIDPPVIEA

SEQ ID NO: 9232 - protein, 8 aa, Artificial Sequence
  Peptide Derived from Human Papillomavirus
PLGNVWET

SEQ ID NO: 9233 - protein, 8 aa, Artificial Sequence
  Peptide Derived from Human Papillomavirus
PLGSRPST

SEQ ID NO: 9234 - protein, 9 aa, Artificial Sequence
  Peptide Derived from Human Papillomavirus
PLGSRPSTI

SEQ ID NO: 9235 - protein, 10 aa, Artificial Sequence
  Peptide Derived from Human Papillomavirus
PLGSRPSTIV

SEQ ID NO: 9236 - protein, 8 aa, Artificial Sequence
  Peptide Derived from Human Papillomavirus
PQSPYDVT

SEQ ID NO: 9237 - protein, 11 aa, Artificial Sequence
  Peptide Derived from Human Papillomavirus
PQSPYDVTHDV

SEQ ID NO: 9238 - protein, 10 aa, Artificial Sequence
  Peptide Derived from Human Papillomavirus
PQTGEVSGNI

SEQ ID NO: 9239 - protein, 11 aa, Artificial Sequence
  Peptide Derived from Human Papillomavirus
PQTGEVSGNIL

SEQ ID NO: 9240 - protein, 8 aa, Artificial Sequence
  Peptide Derived from Human Papillomavirus
PTDPSIVT

SEQ ID NO: 9241 - protein, 9 aa, Artificial Sequence
  Peptide Derived from Human Papillomavirus
PTDPSIVTL

SEQ ID NO: 9242 - protein, 10 aa, Artificial Sequence
  Peptide Derived from Human Papillomavirus
PTDPSIVTLV

SEQ ID NO: 9243 - protein, 10 aa, Artificial Sequence
  Peptide Derived from Human Papillomavirus
PTGPSTWPFV

SEQ ID NO: 9244 - protein, 11 aa, Artificial Sequence
  Peptide Derived from Human Papillomavirus
PTSGIHSYEEI

SEQ ID NO: 9245 - protein, 8 aa, Artificial Sequence
  Peptide Derived from Human Papillomavirus
PTSSTVHV

SEQ ID NO: 9246 - protein, 11 aa, Artificial Sequence
  Peptide Derived from Human Papillomavirus
PTSSTVHVSST

SEQ ID NO: 9247 - protein, 8 aa, Artificial Sequence
  Peptide Derived from Human Papillomavirus
PVIEAPQT

SEQ ID NO: 9248 - protein, 11 aa, Artificial Sequence
  Peptide Derived from Human Papillomavirus
PVIEAPQTGEV

SEQ ID NO: 9249 - protein, 10 aa, Artificial Sequence
  Peptide Derived from Human Papillomavirus
QAEEIEMQPL

SEQ ID NO: 9250 - protein, 11 aa, Artificial Sequence
  Peptide Derived from Human Papillomavirus
QAEEIEMQPLL

SEQ ID NO: 9251 - protein, 8 aa, Artificial Sequence
  Peptide Derived from Human Papillomavirus
QLYKTCKL

SEQ ID NO: 9252 - protein, 11 aa, Artificial Sequence
  Peptide Derived from Human Papillomavirus
QLYKTCKLSGT

SEQ ID NO: 9253 - protein, 9 aa, Artificial Sequence
  Peptide Derived from Human Papillomavirus
QQVKVTDPA

SEQ ID NO: 9254 - protein, 11 aa, Artificial Sequence
  Peptide Derived from Human Papillomavirus
QQVKVTDPAFL

SEQ ID NO: 9255 - protein, 10 aa, Artificial Sequence
  Peptide Derived from Human Papillomavirus
QTFAVHGSGT

SEQ ID NO: 9256 - protein, 9 aa, Artificial Sequence
  Peptide Derived from Human Papillomavirus
QTGEVSGNI

SEQ ID NO: 9257 - protein, 10 aa, Artificial Sequence
  Peptide Derived from Human Papillomavirus
QTGEVSGNIL

SEQ ID NO: 9258 - protein, 11 aa, Artificial Sequence
  Peptide Derived from Human Papillomavirus
QTGEVSGNILI

SEQ ID NO: 9259 - protein, 8 aa, Artificial Sequence
  Peptide Derived from Human Papillomavirus
QTRRGTQI

SEQ ID NO: 9260 - protein, 10 aa, Artificial Sequence
  Peptide Derived from Human Papillomavirus
QTRRGTQIGA

SEQ ID NO: 9261 - protein, 8 aa, Artificial Sequence
  Peptide Derived from Human Papillomavirus
QVKVTDPA

SEQ ID NO: 9262 - protein, 10 aa, Artificial Sequence
  Peptide Derived from Human Papillomavirus
QVKVTDPAFL

SEQ ID NO: 9263 - protein, 10 aa, Artificial Sequence
  Peptide Derived from Human Papillomavirus
RASATQLYKT

SEQ ID NO: 9264 - protein, 8 aa, Artificial Sequence
  Peptide Derived from Human Papillomavirus
RATRRKRA

SEQ ID NO: 9265 - protein, 10 aa, Artificial Sequence
  Peptide Derived from Human Papillomavirus
RATRRKRASA

SEQ ID NO: 9266 - protein, 11 aa, Artificial Sequence
  Peptide Derived from Human Papillomavirus
RATRRKRASAT

SEQ ID NO: 9267 - protein, 11 aa, Artificial Sequence
  Peptide Derived from Human Papillomavirus
RIAAPRLYRKA

SEQ ID NO: 9268 - protein, 11 aa, Artificial Sequence
  Peptide Derived from Human Papillomavirus
RIPYFFADGDV

SEQ ID NO: 9269 - protein, 8 aa, Artificial Sequence
  Peptide Derived from Human Papillomavirus
RLGRKATI

SEQ ID NO: 9270 - protein, 10 aa, Artificial Sequence
  Peptide Derived from Human Papillomavirus
RLGRKATIQT

SEQ ID NO: 9271 - protein, 10 aa, Artificial Sequence
  Peptide Derived from Human Papillomavirus
RLYRKAFQQV

SEQ ID NO: 9272 - protein, 8 aa, Artificial Sequence
  Peptide Derived from Human Papillomavirus
RVHYYYDI

SEQ ID NO: 9273 - protein, 11 aa, Artificial Sequence
  Peptide Derived from Human Papillomavirus
RVHYYYDISPI

SEQ ID NO: 9274 - protein, 10 aa, Artificial Sequence
  Peptide Derived from Human Papillomavirus
SADNPLFEGT

SEQ ID NO: 9275 - protein, 10 aa, Artificial Sequence
  Peptide Derived from Human Papillomavirus
SAHLPIKPST

SEQ ID NO: 9276 - protein, 11 aa, Artificial Sequence
  Peptide Derived from Human Papillomavirus
SAHLPIKPSTL

SEQ ID NO: 9277 - protein, 9 aa, Artificial Sequence
  Peptide Derived from Human Papillomavirus
SANNSFDGL

SEQ ID NO: 9278 - protein, 8 aa, Artificial Sequence
  Peptide Derived from Human Papillomavirus
SATQLYKT

SEQ ID NO: 9279 - protein, 11 aa, Artificial Sequence
  Peptide Derived from Human Papillomavirus
SATQLYKTCKL

SEQ ID NO: 9280 - protein, 11 aa, Artificial Sequence
  Peptide Derived from Human Papillomavirus
SIVTLVEESSV

SEQ ID NO: 9281 - protein, 9 aa, Artificial Sequence
  Peptide Derived from Human Papillomavirus
SLAFSPSGV

SEQ ID NO: 9282 - protein, 10 aa, Artificial Sequence
  Peptide Derived from Human Papillomavirus
SLAFSPSGVA

SEQ ID NO: 9283 - protein, 9 aa, Artificial Sequence
  Peptide Derived from Human Papillomavirus
SLFTYFGGL

SEQ ID NO: 9284 - protein, 11 aa, Artificial Sequence
  Peptide Derived from Human Papillomavirus
SLFTYFGGLGI

SEQ ID NO: 9285 - protein, 9 aa, Artificial Sequence
  Peptide Derived from Human Papillomavirus
SQSVATPSA

SEQ ID NO: 9286 - protein, 11 aa, Artificial Sequence
  Peptide Derived from Human Papillomavirus
SQSVATPSAHL

SEQ ID NO: 9287 - protein, 8 aa, Artificial Sequence
  Peptide Derived from Human Papillomavirus
STHITNPL

SEQ ID NO: 9288 - protein, 10 aa, Artificial Sequence
  Peptide Derived from Human Papillomavirus
STHITNPLFI

SEQ ID NO: 9289 - protein, 9 aa, Artificial Sequence
  Peptide Derived from Human Papillomavirus
STIVDVTPA

SEQ ID NO: 9290 - protein, 9 aa, Artificial Sequence
  Peptide Derived from Human Papillomavirus
STLSFASNT

SEQ ID NO: 9291 - protein, 10 aa, Artificial Sequence
  Peptide Derived from Human Papillomavirus
STLSFASNTT

SEQ ID NO: 9292 - protein, 10 aa, Artificial Sequence
  Peptide Derived from Human Papillomavirus
STPIPGFRRI

SEQ ID NO: 9293 - protein, 11 aa, Artificial Sequence
  Peptide Derived from Human Papillomavirus
STPIPGFRRIA

SEQ ID NO: 9294 - protein, 8 aa, Artificial Sequence
  Peptide Derived from Human Papillomavirus
STTTPAVL

SEQ ID NO: 9295 - protein, 10 aa, Artificial Sequence
  Peptide Derived from Human Papillomavirus
STTTPAVLDI

SEQ ID NO: 9296 - protein, 11 aa, Artificial Sequence
  Peptide Derived from Human Papillomavirus
STTTPAVLDIT

SEQ ID NO: 9297 - protein, 8 aa, Artificial Sequence
  Peptide Derived from Human Papillomavirus
STVHVSST

SEQ ID NO: 9298 - protein, 10 aa, Artificial Sequence
  Peptide Derived from Human Papillomavirus
STVHVSSTHI

SEQ ID NO: 9299 - protein, 11 aa, Artificial Sequence
  Peptide Derived from Human Papillomavirus
STVHVSSTHIT

SEQ ID NO: 9300 - protein, 9 aa, Artificial Sequence
  Peptide Derived from Human Papillomavirus
SVATPSAHL

SEQ ID NO: 9301 - protein, 11 aa, Artificial Sequence
  Peptide Derived from Human Papillomavirus
SVATPSAHLPI

SEQ ID NO: 9302 - protein, 9 aa, Artificial Sequence
  Peptide Derived from Human Papillomavirus
SVGPTDPSI

SEQ ID NO: 9303 - protein, 10 aa, Artificial Sequence
  Peptide Derived from Human Papillomavirus
SVGPTDPSIV

SEQ ID NO: 9304 - protein, 11 aa, Artificial Sequence
  Peptide Derived from Human Papillomavirus
SVGPTDPSIVT

SEQ ID NO: 9305 - protein, 9 aa, Artificial Sequence
  Peptide Derived from Human Papillomavirus
SVIESGAGI

SEQ ID NO: 9306 - protein, 10 aa, Artificial Sequence
  Peptide Derived from Human Papillomavirus
TAPLGNVWET

SEQ ID NO: 9307 - protein, 8 aa, Artificial Sequence
  Peptide Derived from Human Papillomavirus
TIQTRRGT

SEQ ID NO: 9308 - protein, 10 aa, Artificial Sequence
  Peptide Derived from Human Papillomavirus
TIQTRRGTQI

SEQ ID NO: 9309 - protein, 8 aa, Artificial Sequence
  Peptide Derived from Human Papillomavirus
TIVDVTPA

SEQ ID NO: 9310 - protein, 8 aa, Artificial Sequence
  Peptide Derived from Human Papillomavirus
TLSFASNT

SEQ ID NO: 9311 - protein, 9 aa, Artificial Sequence
  Peptide Derived from Human Papillomavirus
TLSFASNTT

SEQ ID NO: 9312 - protein, 11 aa, Artificial Sequence
  Peptide Derived from Human Papillomavirus
TLSFASNTTNV

SEQ ID NO: 9313 - protein, 8 aa, Artificial Sequence
  Peptide Derived from Human Papillomavirus
TLVEESSV

SEQ ID NO: 9314 - protein, 9 aa, Artificial Sequence
  Peptide Derived from Human Papillomavirus
TLVEESSVI

SEQ ID NO: 9315 - protein, 9 aa, Artificial Sequence
  Peptide Derived from Human Papillomavirus
TLVSADNPL

SEQ ID NO: 9316 - protein, 9 aa, Artificial Sequence
  Peptide Derived from Human Papillomavirus
TQLYKTCKL

SEQ ID NO: 9317 - protein, 8 aa, Artificial Sequence
  Peptide Derived from Human Papillomavirus
TTNVTAPL

SEQ ID NO: 9318 - protein, 11 aa, Artificial Sequence
  Peptide Derived from Human Papillomavirus
TTNVTAPLGNV

SEQ ID NO: 9319 - protein, 8 aa, Artificial Sequence
  Peptide Derived from Human Papillomavirus
TTPAVLDI

SEQ ID NO: 9320 - protein, 9 aa, Artificial Sequence
  Peptide Derived from Human Papillomavirus
TTPAVLDIT

SEQ ID NO: 9321 - protein, 11 aa, Artificial Sequence
  Peptide Derived from Human Papillomavirus
TTPAVLDITPT

SEQ ID NO: 9322 - protein, 9 aa, Artificial Sequence
  Peptide Derived from Human Papillomavirus
TTTPAVLDI

SEQ ID NO: 9323 - protein, 10 aa, Artificial Sequence
  Peptide Derived from Human Papillomavirus
TTTPAVLDIT

SEQ ID NO: 9324 - protein, 9 aa, Artificial Sequence
  Peptide Derived from Human Papillomavirus
TVHVSSTHI

SEQ ID NO: 9325 - protein, 10 aa, Artificial Sequence
  Peptide Derived from Human Papillomavirus
TVHVSSTHIT

SEQ ID NO: 9326 - protein, 11 aa, Artificial Sequence
  Peptide Derived from Human Papillomavirus
VAHRATRRKRA

SEQ ID NO: 9327 - protein, 9 aa, Artificial Sequence
  Peptide Derived from Human Papillomavirus
VALHRPAFT

SEQ ID NO: 9328 - protein, 10 aa, Artificial Sequence
  Peptide Derived from Human Papillomavirus
VALHRPAFTT

SEQ ID NO: 9329 - protein, 8 aa, Artificial Sequence
  Peptide Derived from Human Papillomavirus
VAPDPDFM

SEQ ID NO: 9330 - protein, 10 aa, Artificial Sequence
  Peptide Derived from Human Papillomavirus
VAPDPDFMNI

SEQ ID NO: 9331 - protein, 11 aa, Artificial Sequence
  Peptide Derived from Human Papillomavirus
VAPDPDFMNIV

SEQ ID NO: 9332 - protein, 8 aa, Artificial Sequence
  Peptide Derived from Human Papillomavirus
VATPSAHL

SEQ ID NO: 9333 - protein, 10 aa, Artificial Sequence
  Peptide Derived from Human Papillomavirus
VATPSAHLPI

SEQ ID NO: 9334 - protein, 10 aa, Artificial Sequence
  Peptide Derived from Human Papillomavirus
VIEAPQTGEV

SEQ ID NO: 9335 - protein, 8 aa, Artificial Sequence
  Peptide Derived from Human Papillomavirus
VIESGAGI

SEQ ID NO: 9336 - protein, 10 aa, Artificial Sequence
  Peptide Derived from Human Papillomavirus
VLDITPTSST

SEQ ID NO: 9337 - protein, 11 aa, Artificial Sequence
  Peptide Derived from Human Papillomavirus
VLDITPTSSTV

SEQ ID NO: 9338 - protein, 8 aa, Artificial Sequence
  Peptide Derived from Human Papillomavirus
VLPTGPST

SEQ ID NO: 9339 - protein, 8 aa, Artificial Sequence
  Peptide Derived from Human Papillomavirus
VTAPLGNV

SEQ ID NO: 9340 - protein, 11 aa, Artificial Sequence
  Peptide Derived from Human Papillomavirus
VTAPLGNVWET

SEQ ID NO: 9341 - protein, 11 aa, Artificial Sequence
  Peptide Derived from Human Papillomavirus
VTDPAFLDRPA

SEQ ID NO: 9342 - protein, 9 aa, Artificial Sequence
  Peptide Derived from Human Papillomavirus
VTLVEESSV

SEQ ID NO: 9343 - protein, 10 aa, Artificial Sequence
  Peptide Derived from Human Papillomavirus
VTLVEESSVI

SEQ ID NO: 9344 - protein, 8 aa, Artificial Sequence
  Peptide Derived from Human Papillomavirus
VTPARPPI

SEQ ID NO: 9345 - protein, 9 aa, Artificial Sequence
  Peptide Derived from Human Papillomavirus
VTPARPPIV

SEQ ID NO: 9346 - protein, 10 aa, Artificial Sequence
  Peptide Derived from Human Papillomavirus
VTPARPPIVV

SEQ ID NO: 9347 - protein, 8 aa, Artificial Sequence
  Peptide Derived from Human Papillomavirus
VVESVGPT

SEQ ID NO: 9348 - protein, 9 aa, Artificial Sequence
  Peptide Derived from Human Papillomavirus
VVNKIEQKT

SEQ ID NO: 9349 - protein, 11 aa, Artificial Sequence
  Peptide Derived from Human Papillomavirus
VVNKIEQKTWA

SEQ ID NO: 9350 - protein, 11 aa, Artificial Sequence
  Peptide Derived from Human Papillomavirus
WADKILQWGSL

SEQ ID NO: 9351 - protein, 8 aa, Artificial Sequence
  Peptide Derived from Human Papillomavirus
YANIDDEA

SEQ ID NO: 9352 - protein, 11 aa, Artificial Sequence
  Peptide Derived from Human Papillomavirus
YANIDDEAPGL

SEQ ID NO: 9353 - protein, 8 aa, Artificial Sequence
  Peptide Derived from Human Papillomavirus
YIQGSSFA

SEQ ID NO: 9354 - protein, 9 aa, Artificial Sequence
  Peptide Derived from Human Papillomavirus
YIQGSSFAL

SEQ ID NO: 9355 - protein, 10 aa, Artificial Sequence
  Peptide Derived from Human Papillomavirus
YVPLGSRPST

SEQ ID NO: 9356 - protein, 11 aa, Artificial Sequence
  Peptide Derived from Human Papillomavirus
YVPLGSRPSTI

SEQ ID NO: 9357 - protein, 8 aa, Artificial Sequence
  Peptide Derived from Human Papillomavirus
AAALYWYK

SEQ ID NO: 9358 - protein, 8 aa, Artificial Sequence
  Peptide Derived from Human Papillomavirus
AAMLAKFK

SEQ ID NO: 9359 - protein, 9 aa, Artificial Sequence
  Peptide Derived from Human Papillomavirus
AICIEKQSR

SEQ ID NO: 9360 - protein, 9 aa, Artificial Sequence
  Peptide Derived from Human Papillomavirus
ALFTAQEAK

SEQ ID NO: 9361 - protein, 11 aa, Artificial Sequence
  Peptide Derived from Human Papillomavirus
ALKRFLQGIPK

SEQ ID NO: 9362 - protein, 8 aa, Artificial Sequence
  Peptide Derived from Human Papillomavirus
ATMCRHYK

SEQ ID NO: 9363 - protein, 9 aa, Artificial Sequence
  Peptide Derived from Human Papillomavirus
ATMCRHYKR

SEQ ID NO: 9364 - protein, 8 aa, Artificial Sequence
  Peptide Derived from Human Papillomavirus
AVQVLKRK

SEQ ID NO: 9365 - protein, 9 aa, Artificial Sequence
  Peptide Derived from Human Papillomavirus
CATMCRHYK

SEQ ID NO: 9366 - protein, 10 aa, Artificial Sequence
  Peptide Derived from Human Papillomavirus
CATMCRHYKR

SEQ ID NO: 9367 - protein, 10 aa, Artificial Sequence
  Peptide Derived from Human Papillomavirus
CIEKQSRAAK

SEQ ID NO: 9368 - protein, 11 aa, Artificial Sequence
  Peptide Derived from Human Papillomavirus
CIEKQSRAAKR

SEQ ID NO: 9369 - protein, 8 aa, Artificial Sequence
  Peptide Derived from Human Papillomavirus
CMMIEPPK

SEQ ID NO: 9370 - protein, 10 aa, Artificial Sequence
  Peptide Derived from Human Papillomavirus
CMMIEPPKLR

SEQ ID NO: 9371 - protein, 9 aa, Artificial Sequence
  Peptide Derived from Human Papillomavirus
CVDNNISPR

SEQ ID NO: 9372 - protein, 11 aa, Artificial Sequence
  Peptide Derived from Human Papillomavirus
CVDNNISPRLK

SEQ ID NO: 9373 - protein, 8 aa, Artificial Sequence
  Peptide Derived from Human Papillomavirus
DAVQVLKR

SEQ ID NO: 9374 - protein, 9 aa, Artificial Sequence
  Peptide Derived from Human Papillomavirus
DAVQVLKRK

SEQ ID NO: 9375 - protein, 11 aa, Artificial Sequence
  Peptide Derived from Human Papillomavirus
DIVDDSEIAYK

SEQ ID NO: 9376 - protein, 10 aa, Artificial Sequence
  Peptide Derived from Human Papillomavirus
DSRWPYLHNR

SEQ ID NO: 9377 - protein, 11 aa, Artificial Sequence
  Peptide Derived from Human Papillomavirus
DTNSNASAFLK

SEQ ID NO: 9378 - protein, 8 aa, Artificial Sequence
  Peptide Derived from Human Papillomavirus
DTPEWIQR

SEQ ID NO: 9379 - protein, 11 aa, Artificial Sequence
  Peptide Derived from Human Papillomavirus
DVKHRPLVQLK

SEQ ID NO: 9380 - protein, 8 aa, Artificial Sequence
  Peptide Derived from Human Papillomavirus
ELNDKNWK

SEQ ID NO: 9381 - protein, 10 aa, Artificial Sequence
  Peptide Derived from Human Papillomavirus
ELVRPFKSNK

SEQ ID NO: 9382 - protein, 9 aa, Artificial Sequence
  Peptide Derived from Human Papillomavirus
ETIEKLLSK

SEQ ID NO: 9383 - protein, 11 aa, Artificial Sequence
  Peptide Derived from Human Papillomavirus
ETQQMLQVEGR

SEQ ID NO: 9384 - protein, 9 aa, Artificial Sequence
  Peptide Derived from Human Papillomavirus
FLKSNSQAK

SEQ ID NO: 9385 - protein, 8 aa, Artificial Sequence
  Peptide Derived from Human Papillomavirus
FLQGIPKK

SEQ ID NO: 9386 - protein, 9 aa, Artificial Sequence
  Peptide Derived from Human Papillomavirus
FMSFLTALK

SEQ ID NO: 9387 - protein, 10 aa, Artificial Sequence
  Peptide Derived from Human Papillomavirus
FMSFLTALKR

SEQ ID NO: 9388 - protein, 9 aa, Artificial Sequence
  Peptide Derived from Human Papillomavirus
FSELVRPFK

SEQ ID NO: 9389 - protein, 10 aa, Artificial Sequence
  Peptide Derived from Human Papillomavirus
FTAQEAKQHR

SEQ ID NO: 9390 - protein, 11 aa, Artificial Sequence
  Peptide Derived from Human Papillomavirus
GLTPSIADSIK

SEQ ID NO: 9391 - protein, 9 aa, Artificial Sequence
  Peptide Derived from Human Papillomavirus
GMVVLLLVR

SEQ ID NO: 9392 - protein, 11 aa, Artificial Sequence
  Peptide Derived from Human Papillomavirus
GMVVLLLVRYK

SEQ ID NO: 9393 - protein, 10 aa, Artificial Sequence
  Peptide Derived from Human Papillomavirus
GSGGEGVSER

SEQ ID NO: 9394 - protein, 10 aa, Artificial Sequence
  Peptide Derived from Human Papillomavirus
GSVICFVNSK

SEQ ID NO: 9395 - protein, 9 aa, Artificial Sequence
  Peptide Derived from Human Papillomavirus
GVSFSELVR

SEQ ID NO: 9396 - protein, 10 aa, Artificial Sequence
  Peptide Derived from Human Papillomavirus
HALFTAQEAK

SEQ ID NO: 9397 - protein, 11 aa, Artificial Sequence
  Peptide Derived from Human Papillomavirus
ILLYGAANTGK

SEQ ID NO: 9398 - protein, 11 aa, Artificial Sequence
  Peptide Derived from Human Papillomavirus
ILNVLKTSNAK

SEQ ID NO: 9399 - protein, 10 aa, Artificial Sequence
  Peptide Derived from Human Papillomavirus
IVDDSEIAYK

SEQ ID NO: 9400 - protein, 10 aa, Artificial Sequence
  Peptide Derived from Human Papillomavirus
IVKDCATMCR

SEQ ID NO: 9401 - protein, 9 aa, Artificial Sequence
  Peptide Derived from Human Papillomavirus
KAAMLAKFK

SEQ ID NO: 9402 - protein, 10 aa, Artificial Sequence
  Peptide Derived from Human Papillomavirus
KAICIEKQSR

SEQ ID NO: 9403 - protein, 11 aa, Artificial Sequence
  Peptide Derived from Human Papillomavirus
KIVKDCATMCR

SEQ ID NO: 9404 - protein, 10 aa, Artificial Sequence
  Peptide Derived from Human Papillomavirus
KSFFSRTWSR

SEQ ID NO: 9405 - protein, 10 aa, Artificial Sequence
  Peptide Derived from Human Papillomavirus
KSLFGMSLMK

SEQ ID NO: 9406 - protein, 10 aa, Artificial Sequence
  Peptide Derived from Human Papillomavirus
KSNSQAKIVK

SEQ ID NO: 9407 - protein, 10 aa, Artificial Sequence
  Peptide Derived from Human Papillomavirus
LLLVRYKCGK

SEQ ID NO: 9408 - protein, 9 aa, Artificial Sequence
  Peptide Derived from Human Papillomavirus
LLVRYKCGK

SEQ ID NO: 9409 - protein, 11 aa, Artificial Sequence
  Peptide Derived from Human Papillomavirus
LLVRYKCGKNR

SEQ ID NO: 9410 - protein, 10 aa, Artificial Sequence
  Peptide Derived from Human Papillomavirus
LLYGAANTGK

SEQ ID NO: 9411 - protein, 9 aa, Artificial Sequence
  Peptide Derived from Human Papillomavirus
LSLHEDEDK

SEQ ID NO: 9412 - protein, 9 aa, Artificial Sequence
  Peptide Derived from Human Papillomavirus
LTNILNVLK

SEQ ID NO: 9413 - protein, 10 aa, Artificial Sequence
  Peptide Derived from Human Papillomavirus
LTPSIADSIK

SEQ ID NO: 9414 - protein, 9 aa, Artificial Sequence
  Peptide Derived from Human Papillomavirus
LVRPFKSNK

SEQ ID NO: 9415 - protein, 8 aa, Artificial Sequence
  Peptide Derived from Human Papillomavirus
LVRYKCGK

SEQ ID NO: 9416 - protein, 10 aa, Artificial Sequence
  Peptide Derived from Human Papillomavirus
LVRYKCGKNR

SEQ ID NO: 9417 - protein, 9 aa, Artificial Sequence
  Peptide Derived from Human Papillomavirus
LVSMDVKHR

SEQ ID NO: 9418 - protein, 8 aa, Artificial Sequence
  Peptide Derived from Human Papillomavirus
MIEPPKLR

SEQ ID NO: 9419 - protein, 9 aa, Artificial Sequence
  Peptide Derived from Human Papillomavirus
MMIEPPKLR

SEQ ID NO: 9420 - protein, 8 aa, Artificial Sequence
  Peptide Derived from Human Papillomavirus
MSFLTALK

SEQ ID NO: 9421 - protein, 9 aa, Artificial Sequence
  Peptide Derived from Human Papillomavirus
MSFLTALKR

SEQ ID NO: 9422 - protein, 8 aa, Artificial Sequence
  Peptide Derived from Human Papillomavirus
MSMSQWIK

SEQ ID NO: 9423 - protein, 10 aa, Artificial Sequence
  Peptide Derived from Human Papillomavirus
MSMSQWIKYR

SEQ ID NO: 9424 - protein, 8 aa, Artificial Sequence
  Peptide Derived from Human Papillomavirus
MSQWIKYR

SEQ ID NO: 9425 - protein, 11 aa, Artificial Sequence
  Peptide Derived from Human Papillomavirus
MSQWIKYRCDR

SEQ ID NO: 9426 - protein, 8 aa, Artificial Sequence
  Peptide Derived from Human Papillomavirus
MVVLLLVR

SEQ ID NO: 9427 - protein, 10 aa, Artificial Sequence
  Peptide Derived from Human Papillomavirus
MVVLLLVRYK

SEQ ID NO: 9428 - protein, 9 aa, Artificial Sequence
  Peptide Derived from Human Papillomavirus
NAKAAMLAK

SEQ ID NO: 9429 - protein, 11 aa, Artificial Sequence
  Peptide Derived from Human Papillomavirus
NAKAAMLAKFK

SEQ ID NO: 9430 - protein, 9 aa, Artificial Sequence
  Peptide Derived from Human Papillomavirus
NINAGTDSR

SEQ ID NO: 9431 - protein, 8 aa, Artificial Sequence
  Peptide Derived from Human Papillomavirus
NLVSMDVK

SEQ ID NO: 9432 - protein, 10 aa, Artificial Sequence
  Peptide Derived from Human Papillomavirus
NLVSMDVKHR

SEQ ID NO: 9433 - protein, 9 aa, Artificial Sequence
  Peptide Derived from Human Papillomavirus
NSNASAFLK

SEQ ID NO: 9434 - protein, 8 aa, Artificial Sequence
  Peptide Derived from Human Papillomavirus
NSQAKIVK

SEQ ID NO: 9435 - protein, 9 aa, Artificial Sequence
  Peptide Derived from Human Papillomavirus
NVLKTSNAK

SEQ ID NO: 9436 - protein, 10 aa, Artificial Sequence
  Peptide Derived from Human Papillomavirus
PLTNILNVLK

SEQ ID NO: 9437 - protein, 10 aa, Artificial Sequence
  Peptide Derived from Human Papillomavirus
PMCMMIEPPK

SEQ ID NO: 9438 - protein, 8 aa, Artificial Sequence
  Peptide Derived from Human Papillomavirus
PSIADSIK

SEQ ID NO: 9439 - protein, 8 aa, Artificial Sequence
  Peptide Derived from Human Papillomavirus
PVYELNDK

SEQ ID NO: 9440 - protein, 11 aa, Artificial Sequence
  Peptide Derived from Human Papillomavirus
PVYELNDKNWK

SEQ ID NO: 9441 - protein, 8 aa, Artificial Sequence
  Peptide Derived from Human Papillomavirus
QMLQVEGR

SEQ ID NO: 9442 - protein, 9 aa, Artificial Sequence
  Peptide Derived from Human Papillomavirus
QMSMSQWIK

SEQ ID NO: 9443 - protein, 11 aa, Artificial Sequence
  Peptide Derived from Human Papillomavirus
QMSMSQWIKYR

SEQ ID NO: 9444 - protein, 8 aa, Artificial Sequence
  Peptide Derived from Human Papillomavirus
QSRAAKRR

SEQ ID NO: 9445 - protein, 9 aa, Artificial Sequence
  Peptide Derived from Human Papillomavirus
RLKAICIEK

SEQ ID NO: 9446 - protein, 10 aa, Artificial Sequence
  Peptide Derived from Human Papillomavirus
RLSLHEDEDK

SEQ ID NO: 9447 - protein, 11 aa, Artificial Sequence
  Peptide Derived from Human Papillomavirus
RSTAAALYWYK

SEQ ID NO: 9448 - protein, 9 aa, Artificial Sequence
  Peptide Derived from Human Papillomavirus
RVDDGGDWK

SEQ ID NO: 9449 - protein, 11 aa, Artificial Sequence
  Peptide Derived from Human Papillomavirus
SAFLKSNSQAK

SEQ ID NO: 9450 - protein, 9 aa, Artificial Sequence
  Peptide Derived from Human Papillomavirus
SLFGMSLMK

SEQ ID NO: 9451 - protein, 8 aa, Artificial Sequence
  Peptide Derived from Human Papillomavirus
SLHEDEDK

SEQ ID NO: 9452 - protein, 9 aa, Artificial Sequence
  Peptide Derived from Human Papillomavirus
SMSQWIKYR

SEQ ID NO: 9453 - protein, 10 aa, Artificial Sequence
  Peptide Derived from Human Papillomavirus
STAAALYWYK

SEQ ID NO: 9454 - protein, 9 aa, Artificial Sequence
  Peptide Derived from Human Papillomavirus
SVICFVNSK

SEQ ID NO: 9455 - protein, 9 aa, Artificial Sequence
  Peptide Derived from Human Papillomavirus
TAAALYWYK

SEQ ID NO: 9456 - protein, 9 aa, Artificial Sequence
  Peptide Derived from Human Papillomavirus
TAQEAKQHR

SEQ ID NO: 9457 - protein, 8 aa, Artificial Sequence
  Peptide Derived from Human Papillomavirus
TIEKLLSK

SEQ ID NO: 9458 - protein, 8 aa, Artificial Sequence
  Peptide Derived from Human Papillomavirus
TMCRHYKR

SEQ ID NO: 9459 - protein, 11 aa, Artificial Sequence
  Peptide Derived from Human Papillomavirus
TMCRHYKRAEK

SEQ ID NO: 9460 - protein, 11 aa, Artificial Sequence
  Peptide Derived from Human Papillomavirus
TSNAKAAMLAK

SEQ ID NO: 9461 - protein, 11 aa, Artificial Sequence
  Peptide Derived from Human Papillomavirus
TSNINAGTDSR

SEQ ID NO: 9462 - protein, 8 aa, Artificial Sequence
  Peptide Derived from Human Papillomavirus
VICFVNSK

SEQ ID NO: 9463 - protein, 8 aa, Artificial Sequence
  Peptide Derived from Human Papillomavirus
VLKTSNAK

SEQ ID NO: 9464 - protein, 8 aa, Artificial Sequence
  Peptide Derived from Human Papillomavirus
VLLLVRYK

SEQ ID NO: 9465 - protein, 11 aa, Artificial Sequence
  Peptide Derived from Human Papillomavirus
VLLLVRYKCGK

SEQ ID NO: 9466 - protein, 8 aa, Artificial Sequence
  Peptide Derived from Human Papillomavirus
VSFSELVR

SEQ ID NO: 9467 - protein, 11 aa, Artificial Sequence
  Peptide Derived from Human Papillomavirus
VSFSELVRPFK

SEQ ID NO: 9468 - protein, 8 aa, Artificial Sequence
  Peptide Derived from Human Papillomavirus
VSMDVKHR

SEQ ID NO: 9469 - protein, 9 aa, Artificial Sequence
  Peptide Derived from Human Papillomavirus
VVLLLVRYK

SEQ ID NO: 9470 - protein, 8 aa, Artificial Sequence
  Peptide Derived from Human Papillomavirus
WIKYRCDR

SEQ ID NO: 9471 - protein, 9 aa, Artificial Sequence
  Peptide Derived from Human Papillomavirus
WLQPLADAK

SEQ ID NO: 9472 - protein, 8 aa, Artificial Sequence
  Peptide Derived from Human Papillomavirus
YVEAVVEK

SEQ ID NO: 9473 - protein, 9 aa, Artificial Sequence
  Peptide Derived from Human Papillomavirus
YVEAVVEKK

SEQ ID NO: 9474 - protein, 8 aa, Artificial Sequence
  Peptide Derived from Human Papillomavirus
CAIYYKAR

SEQ ID NO: 9475 - protein, 8 aa, Artificial Sequence
  Peptide Derived from Human Papillomavirus
CLRYRFKK

SEQ ID NO: 9476 - protein, 9 aa, Artificial Sequence
  Peptide Derived from Human Papillomavirus
DAEKYSKNK

SEQ ID NO: 9477 - protein, 9 aa, Artificial Sequence
  Peptide Derived from Human Papillomavirus
DANTLKCLR

SEQ ID NO: 9478 - protein, 11 aa, Artificial Sequence
  Peptide Derived from Human Papillomavirus
DANTLKCLRYR

SEQ ID NO: 9479 - protein, 10 aa, Artificial Sequence
  Peptide Derived from Human Papillomavirus
DLRDHIDYWK

SEQ ID NO: 9480 - protein, 10 aa, Artificial Sequence
  Peptide Derived from Human Papillomavirus
DTGNPCHTTK

SEQ ID NO: 9481 - protein, 8 aa, Artificial Sequence
  Peptide Derived from Human Papillomavirus
ETQTTIQR

SEQ ID NO: 9482 - protein, 10 aa, Artificial Sequence
  Peptide Derived from Human Papillomavirus
ETQTTIQRPR

SEQ ID NO: 9483 - protein, 9 aa, Artificial Sequence
  Peptide Derived from Human Papillomavirus
EVSSPEIIR

SEQ ID NO: 9484 - protein, 9 aa, Artificial Sequence
  Peptide Derived from Human Papillomavirus
FLSQVKIPK

SEQ ID NO: 9485 - protein, 10 aa, Artificial Sequence
  Peptide Derived from Human Papillomavirus
FVQFKDDAEK

SEQ ID NO: 9486 - protein, 10 aa, Artificial Sequence
  Peptide Derived from Human Papillomavirus
GIRTYFVQFK

SEQ ID NO: 9487 - protein, 10 aa, Artificial Sequence
  Peptide Derived from Human Papillomavirus
GLYYVHEGIR

SEQ ID NO: 9488 - protein, 11 aa, Artificial Sequence
  Peptide Derived from Human Papillomavirus
GTEETQTTIQR

SEQ ID NO: 9489 - protein, 9 aa, Artificial Sequence
  Peptide Derived from Human Papillomavirus
HIDYWKHMR

SEQ ID NO: 9490 - protein, 10 aa, Artificial Sequence
  Peptide Derived from Human Papillomavirus
HLKGDANTLK

SEQ ID NO: 9491 - protein, 11 aa, Artificial Sequence
  Peptide Derived from Human Papillomavirus
HMRLECAIYYK

SEQ ID NO: 9492 - protein, 8 aa, Artificial Sequence
  Peptide Derived from Human Papillomavirus
HTTKLLHR

SEQ ID NO: 9493 - protein, 10 aa, Artificial Sequence
  Peptide Derived from Human Papillomavirus
ILTAFNSSHK

SEQ ID NO: 9494 - protein, 8 aa, Artificial Sequence
  Peptide Derived from Human Papillomavirus
KAREMGFK

SEQ ID NO: 9495 - protein, 11 aa, Artificial Sequence
  Peptide Derived from Human Papillomavirus
LANHPAATHTK

SEQ ID NO: 9496 - protein, 8 aa, Artificial Sequence
  Peptide Derived from Human Papillomavirus
LSQVKIPK

SEQ ID NO: 9497 - protein, 9 aa, Artificial Sequence
  Peptide Derived from Human Papillomavirus
LTAFNSSHK

SEQ ID NO: 9498 - protein, 11 aa, Artificial Sequence
  Peptide Derived from Human Papillomavirus
LTAFNSSHKGR

SEQ ID NO: 9499 - protein, 9 aa, Artificial Sequence
  Peptide Derived from Human Papillomavirus
LTAPTGCIK

SEQ ID NO: 9500 - protein, 10 aa, Artificial Sequence
  Peptide Derived from Human Papillomavirus
LTAPTGCIKK

SEQ ID NO: 9501 - protein, 9 aa, Artificial Sequence
  Peptide Derived from Human Papillomavirus
LTYDSEWQR

SEQ ID NO: 9502 - protein, 11 aa, Artificial Sequence
  Peptide Derived from Human Papillomavirus
NSNTTPIVHLK

SEQ ID NO: 9503 - protein, 8 aa, Artificial Sequence
  Peptide Derived from Human Papillomavirus
NSQYSNEK

SEQ ID NO: 9504 - protein, 9 aa, Artificial Sequence
  Peptide Derived from Human Papillomavirus
NTLKCLRYR

SEQ ID NO: 9505 - protein, 11 aa, Artificial Sequence
  Peptide Derived from Human Papillomavirus
NTLKCLRYRFK

SEQ ID NO: 9506 - protein, 9 aa, Artificial Sequence
  Peptide Derived from Human Papillomavirus
NTTPIVHLK

SEQ ID NO: 9507 - protein, 11 aa, Artificial Sequence
  Peptide Derived from Human Papillomavirus
PILTAFNSSHK

SEQ ID NO: 9508 - protein, 9 aa, Artificial Sequence
  Peptide Derived from Human Papillomavirus
PTLAVSKNK

SEQ ID NO: 9509 - protein, 8 aa, Artificial Sequence
  Peptide Derived from Human Papillomavirus
QTTIQRPR

SEQ ID NO: 9510 - protein, 10 aa, Artificial Sequence
  Peptide Derived from Human Papillomavirus
QVVPTLAVSK

SEQ ID NO: 9511 - protein, 9 aa, Artificial Sequence
  Peptide Derived from Human Papillomavirus
RLECAIYYK

SEQ ID NO: 9512 - protein, 11 aa, Artificial Sequence
  Peptide Derived from Human Papillomavirus
RLECAIYYKAR

SEQ ID NO: 9513 - protein, 8 aa, Artificial Sequence
  Peptide Derived from Human Papillomavirus
RLNVCQDK

SEQ ID NO: 9514 - protein, 8 aa, Artificial Sequence
  Peptide Derived from Human Papillomavirus
RTYFVQFK

SEQ ID NO: 9515 - protein, 11 aa, Artificial Sequence
  Peptide Derived from Human Papillomavirus
STWHWTGHNVK

SEQ ID NO: 9516 - protein, 8 aa, Artificial Sequence
  Peptide Derived from Human Papillomavirus
TAFNSSHK

SEQ ID NO: 9517 - protein, 10 aa, Artificial Sequence
  Peptide Derived from Human Papillomavirus
TAFNSSHKGR

SEQ ID NO: 9518 - protein, 8 aa, Artificial Sequence
  Peptide Derived from Human Papillomavirus
TAPTGCIK

SEQ ID NO: 9519 - protein, 9 aa, Artificial Sequence
  Peptide Derived from Human Papillomavirus
TAPTGCIKK

SEQ ID NO: 9520 - protein, 11 aa, Artificial Sequence
  Peptide Derived from Human Papillomavirus
TIYNSQYSNEK

SEQ ID NO: 9521 - protein, 8 aa, Artificial Sequence
  Peptide Derived from Human Papillomavirus
TLAVSKNK

SEQ ID NO: 9522 - protein, 8 aa, Artificial Sequence
  Peptide Derived from Human Papillomavirus
TLKCLRYR

SEQ ID NO: 9523 - protein, 10 aa, Artificial Sequence
  Peptide Derived from Human Papillomavirus
TLKCLRYRFK

SEQ ID NO: 9524 - protein, 11 aa, Artificial Sequence
  Peptide Derived from Human Papillomavirus
TLKCLRYRFKK

SEQ ID NO: 9525 - protein, 10 aa, Artificial Sequence
  Peptide Derived from Human Papillomavirus
TLTYDSEWQR

SEQ ID NO: 9526 - protein, 8 aa, Artificial Sequence
  Peptide Derived from Human Papillomavirus
TTPIVHLK

SEQ ID NO: 9527 - protein, 8 aa, Artificial Sequence
  Peptide Derived from Human Papillomavirus
VSSPEIIR

SEQ ID NO: 9528 - protein, 11 aa, Artificial Sequence
  Peptide Derived from Human Papillomavirus
VTLTYDSEWQR

SEQ ID NO: 9529 - protein, 9 aa, Artificial Sequence
  Peptide Derived from Human Papillomavirus
VVPTLAVSK

SEQ ID NO: 9530 - protein, 11 aa, Artificial Sequence
  Peptide Derived from Human Papillomavirus
VVPTLAVSKNK

SEQ ID NO: 9531 - protein, 9 aa, Artificial Sequence
  Peptide Derived from Human Papillomavirus
WTGHNVKHK

SEQ ID NO: 9532 - protein, 10 aa, Artificial Sequence
  Peptide Derived from Human Papillomavirus
YLTAPTGCIK

SEQ ID NO: 9533 - protein, 11 aa, Artificial Sequence
  Peptide Derived from Human Papillomavirus
YLTAPTGCIKK

SEQ ID NO: 9534 - protein, 11 aa, Artificial Sequence
  Peptide Derived from Human Papillomavirus
CVLLCVCLLIR

SEQ ID NO: 9535 - protein, 8 aa, Artificial Sequence
  Peptide Derived from Human Papillomavirus
FLIHTHAR

SEQ ID NO: 9536 - protein, 8 aa, Artificial Sequence
  Peptide Derived from Human Papillomavirus
ITAASAFR

SEQ ID NO: 9537 - protein, 9 aa, Artificial Sequence
  Peptide Derived from Human Papillomavirus
LLCVCLLIR

SEQ ID NO: 9538 - protein, 11 aa, Artificial Sequence
  Peptide Derived from Human Papillomavirus
LLWITAASAFR

SEQ ID NO: 9539 - protein, 10 aa, Artificial Sequence
  Peptide Derived from Human Papillomavirus
PLFLIHTHAR

SEQ ID NO: 9540 - protein, 10 aa, Artificial Sequence
  Peptide Derived from Human Papillomavirus
VLLCVCLLIR

SEQ ID NO: 9541 - protein, 9 aa, Artificial Sequence
  Peptide Derived from Human Papillomavirus
WITAASAFR

SEQ ID NO: 9542 - protein, 9 aa, Artificial Sequence
  Peptide Derived from Human Papillomavirus
AMFQDPQER

SEQ ID NO: 9543 - protein, 11 aa, Artificial Sequence
  Peptide Derived from Human Papillomavirus
AMFQDPQERPR

SEQ ID NO: 9544 - protein, 8 aa, Artificial Sequence
  Peptide Derived from Human Papillomavirus
AVCDKCLK

SEQ ID NO: 9545 - protein, 9 aa, Artificial Sequence
  Peptide Derived from Human Papillomavirus
CMSCCRSSR

SEQ ID NO: 9546 - protein, 11 aa, Artificial Sequence
  Peptide Derived from Human Papillomavirus
CMSCCRSSRTR

SEQ ID NO: 9547 - protein, 10 aa, Artificial Sequence
  Peptide Derived from Human Papillomavirus
CVYCKQQLLR

SEQ ID NO: 9548 - protein, 11 aa, Artificial Sequence
  Peptide Derived from Human Papillomavirus
CVYCKQQLLRR

SEQ ID NO: 9549 - protein, 10 aa, Artificial Sequence
  Peptide Derived from Human Papillomavirus
DIILECVYCK

SEQ ID NO: 9550 - protein, 11 aa, Artificial Sequence
  Peptide Derived from Human Papillomavirus
DLLIRCINCQK

SEQ ID NO: 9551 - protein, 8 aa, Artificial Sequence
  Peptide Derived from Human Papillomavirus
EVYDFAFR

SEQ ID NO: 9552 - protein, 11 aa, Artificial Sequence
  Peptide Derived from Human Papillomavirus
FAFRDLCIVYR

SEQ ID NO: 9553 - protein, 10 aa, Artificial Sequence
  Peptide Derived from Human Papillomavirus
GTTLEQQYNK

SEQ ID NO: 9554 - protein, 9 aa, Artificial Sequence
  Peptide Derived from Human Papillomavirus
IILECVYCK

SEQ ID NO: 9555 - protein, 8 aa, Artificial Sequence
  Peptide Derived from Human Papillomavirus
ILECVYCK

SEQ ID NO: 9556 - protein, 9 aa, Artificial Sequence
  Peptide Derived from Human Papillomavirus
LIRCINCQK

SEQ ID NO: 9557 - protein, 10 aa, Artificial Sequence
  Peptide Derived from Human Papillomavirus
LLIRCINCQK

SEQ ID NO: 9558 - protein, 8 aa, Artificial Sequence
  Peptide Derived from Human Papillomavirus
MSCCRSSR

SEQ ID NO: 9559 - protein, 10 aa, Artificial Sequence
  Peptide Derived from Human Papillomavirus
MSCCRSSRTR

SEQ ID NO: 9560 - protein, 11 aa, Artificial Sequence
  Peptide Derived from Human Papillomavirus
MSCCRSSRTRR

SEQ ID NO: 9561 - protein, 9 aa, Artificial Sequence
  Peptide Derived from Human Papillomavirus
NIRGRWTGR

SEQ ID NO: 9562 - protein, 8 aa, Artificial Sequence
  Peptide Derived from Human Papillomavirus
PLCDLLIR

SEQ ID NO: 9563 - protein, 9 aa, Artificial Sequence
  Peptide Derived from Human Papillomavirus
PLCPEEKQR

SEQ ID NO: 9564 - protein, 11 aa, Artificial Sequence
  Peptide Derived from Human Papillomavirus
RTAMFQDPQER

SEQ ID NO: 9565 - protein, 10 aa, Artificial Sequence
  Peptide Derived from Human Papillomavirus
TAMFQDPQER

SEQ ID NO: 9566 - protein, 8 aa, Artificial Sequence
  Peptide Derived from Human Papillomavirus
TLEQQYNK

SEQ ID NO: 9567 - protein, 9 aa, Artificial Sequence
  Peptide Derived from Human Papillomavirus
TTLEQQYNK

SEQ ID NO: 9568 - protein, 10 aa, Artificial Sequence
  Peptide Derived from Human Papillomavirus
WTGRCMSCCR

SEQ ID NO: 9569 - protein, 9 aa, Artificial Sequence
  Peptide Derived from Human Papillomavirus
YAVCDKCLK

SEQ ID NO: 9570 - protein, 8 aa, Artificial Sequence
  Peptide Derived from Human Papillomavirus
YSKISEYR

SEQ ID NO: 9571 - protein, 10 aa, Artificial Sequence
  Peptide Derived from Human Papillomavirus
CVQSTHVDIR

SEQ ID NO: 9572 - protein, 10 aa, Artificial Sequence
  Peptide Derived from Human Papillomavirus
GIVCPICSQK

SEQ ID NO: 9573 - protein, 9 aa, Artificial Sequence
  Peptide Derived from Human Papillomavirus
IVCPICSQK

SEQ ID NO: 9574 - protein, 8 aa, Artificial Sequence
  Peptide Derived from Human Papillomavirus
NIVTFCCK

SEQ ID NO: 9575 - protein, 9 aa, Artificial Sequence
  Peptide Derived from Human Papillomavirus
PAGQAEPDR

SEQ ID NO: 9576 - protein, 8 aa, Artificial Sequence
  Peptide Derived from Human Papillomavirus
QSTHVDIR

SEQ ID NO: 9577 - protein, 11 aa, Artificial Sequence
  Peptide Derived from Human Papillomavirus
AAISTSETTYK

SEQ ID NO: 9578 - protein, 9 aa, Artificial Sequence
  Peptide Derived from Human Papillomavirus
AANAGVDNR

SEQ ID NO: 9579 - protein, 10 aa, Artificial Sequence
  Peptide Derived from Human Papillomavirus
AISTSETTYK

SEQ ID NO: 9580 - protein, 11 aa, Artificial Sequence
  Peptide Derived from Human Papillomavirus
AMDFTTLQANK

SEQ ID NO: 9581 - protein, 10 aa, Artificial Sequence
  Peptide Derived from Human Papillomavirus
AVGHPYFPIK

SEQ ID NO: 9582 - protein, 11 aa, Artificial Sequence
  Peptide Derived from Human Papillomavirus
AVGHPYFPIKK

SEQ ID NO: 9583 - protein, 8 aa, Artificial Sequence
  Peptide Derived from Human Papillomavirus
CVGVEVGR

SEQ ID NO: 9584 - protein, 8 aa, Artificial Sequence
  Peptide Derived from Human Papillomavirus
DICTSICK

SEQ ID NO: 9585 - protein, 9 aa, Artificial Sequence
  Peptide Derived from Human Papillomavirus
DLDQFPLGR

SEQ ID NO: 9586 - protein, 10 aa, Artificial Sequence
  Peptide Derived from Human Papillomavirus
DLDQFPLGRK

SEQ ID NO: 9587 - protein, 10 aa, Artificial Sequence
  Peptide Derived from Human Papillomavirus
DLQFIFQLCK

SEQ ID NO: 9588 - protein, 8 aa, Artificial Sequence
  Peptide Derived from Human Papillomavirus
DSLFFYLR

SEQ ID NO: 9589 - protein, 9 aa, Artificial Sequence
  Peptide Derived from Human Papillomavirus
DSLFFYLRR

SEQ ID NO: 9590 - protein, 11 aa, Artificial Sequence
  Peptide Derived from Human Papillomavirus
DTSFYNPDTQR

SEQ ID NO: 9591 - protein, 10 aa, Artificial Sequence
  Peptide Derived from Human Papillomavirus
ETTYKNTNFK

SEQ ID NO: 9592 - protein, 8 aa, Artificial Sequence
  Peptide Derived from Human Papillomavirus
FLLQAGLK

SEQ ID NO: 9593 - protein, 10 aa, Artificial Sequence
  Peptide Derived from Human Papillomavirus
FLLQAGLKAK

SEQ ID NO: 9594 - protein, 8 aa, Artificial Sequence
  Peptide Derived from Human Papillomavirus
FTTLQANK

SEQ ID NO: 9595 - protein, 8 aa, Artificial Sequence
  Peptide Derived from Human Papillomavirus
FVRHLFNR

SEQ ID NO: 9596 - protein, 11 aa, Artificial Sequence
  Peptide Derived from Human Papillomavirus
FVTSQAIACQK

SEQ ID NO: 9597 - protein, 9 aa, Artificial Sequence
  Peptide Derived from Human Papillomavirus
FVTVVDTTR

SEQ ID NO: 9598 - protein, 10 aa, Artificial Sequence
  Peptide Derived from Human Papillomavirus
GISGHPLLNK

SEQ ID NO: 9599 - protein, 8 aa, Artificial Sequence
  Peptide Derived from Human Papillomavirus
GLQYRVFR

SEQ ID NO: 9600 - protein, 8 aa, Artificial Sequence
  Peptide Derived from Human Papillomavirus
GTLEDTYR

SEQ ID NO: 9601 - protein, 9 aa, Artificial Sequence
  Peptide Derived from Human Papillomavirus
ISGHPLLNK

SEQ ID NO: 9602 - protein, 9 aa, Artificial Sequence
  Peptide Derived from Human Papillomavirus
ISTSETTYK

SEQ ID NO: 9603 - protein, 10 aa, Artificial Sequence
  Peptide Derived from Human Papillomavirus
KAKPKFTLGK

SEQ ID NO: 9604 - protein, 11 aa, Artificial Sequence
  Peptide Derived from Human Papillomavirus
KAKPKFTLGKR

SEQ ID NO: 9605 - protein, 8 aa, Artificial Sequence
  Peptide Derived from Human Papillomavirus
KVSGLQYR

SEQ ID NO: 9606 - protein, 11 aa, Artificial Sequence
  Peptide Derived from Human Papillomavirus
KVSGLQYRVFR

SEQ ID NO: 9607 - protein, 11 aa, Artificial Sequence
  Peptide Derived from Human Papillomavirus
KVVSTDEYVAR

SEQ ID NO: 9608 - protein, 11 aa, Artificial Sequence
  Peptide Derived from Human Papillomavirus
LAVGHPYFPIK

SEQ ID NO: 9609 - protein, 9 aa, Artificial Sequence
  Peptide Derived from Human Papillomavirus
LLQAGLKAK

SEQ ID NO: 9610 - protein, 11 aa, Artificial Sequence
  Peptide Derived from Human Papillomavirus
LLQAGLKAKPK

SEQ ID NO: 9611 - protein, 11 aa, Artificial Sequence
  Peptide Derived from Human Papillomavirus
LVPKVSGLQYR

SEQ ID NO: 9612 - protein, 11 aa, Artificial Sequence
  Peptide Derived from Human Papillomavirus
MVTSDAQIFNK

SEQ ID NO: 9613 - protein, 10 aa, Artificial Sequence
  Peptide Derived from Human Papillomavirus
NIYYHAGTSR

SEQ ID NO: 9614 - protein, 9 aa, Artificial Sequence
  Peptide Derived from Human Papillomavirus
NTNFKEYLR

SEQ ID NO: 9615 - protein, 9 aa, Artificial Sequence
  Peptide Derived from Human Papillomavirus
NVPDDLYIK

SEQ ID NO: 9616 - protein, 9 aa, Artificial Sequence
  Peptide Derived from Human Papillomavirus
PAPKEDPLK

SEQ ID NO: 9617 - protein, 10 aa, Artificial Sequence
  Peptide Derived from Human Papillomavirus
PAPKEDPLKK

SEQ ID NO: 9618 - protein, 8 aa, Artificial Sequence
  Peptide Derived from Human Papillomavirus
PIGEHWGK

SEQ ID NO: 9619 - protein, 9 aa, Artificial Sequence
  Peptide Derived from Human Papillomavirus
PIKKPNNNK

SEQ ID NO: 9620 - protein, 10 aa, Artificial Sequence
  Peptide Derived from Human Papillomavirus
PLDICTSICK

SEQ ID NO: 9621 - protein, 11 aa, Artificial Sequence
  Peptide Derived from Human Papillomavirus
PTTSSTSTTAK

SEQ ID NO: 9622 - protein, 9 aa, Artificial Sequence
  Peptide Derived from Human Papillomavirus
QAGLKAKPK

SEQ ID NO: 9623 - protein, 11 aa, Artificial Sequence
  Peptide Derived from Human Papillomavirus
QIFNKPYWLQR

SEQ ID NO: 9624 - protein, 8 aa, Artificial Sequence
  Peptide Derived from Human Papillomavirus
QLCLIGCK

SEQ ID NO: 9625 - protein, 11 aa, Artificial Sequence
  Peptide Derived from Human Papillomavirus
QLFVTVVDTTR

SEQ ID NO: 9626 - protein, 10 aa, Artificial Sequence
  Peptide Derived from Human Papillomavirus
QMFVRHLFNR

SEQ ID NO: 9627 - protein, 10 aa, Artificial Sequence
  Peptide Derived from Human Papillomavirus
QTQLCLIGCK

SEQ ID NO: 9628 - protein, 9 aa, Artificial Sequence
  Peptide Derived from Human Papillomavirus
RIHLPDPNK

SEQ ID NO: 9629 - protein, 11 aa, Artificial Sequence
  Peptide Derived from Human Papillomavirus
SADLDQFPLGR

SEQ ID NO: 9630 - protein, 10 aa, Artificial Sequence
  Peptide Derived from Human Papillomavirus
SICKYPDYIK

SEQ ID NO: 9631 - protein, 8 aa, Artificial Sequence
  Peptide Derived from Human Papillomavirus
SLFFYLRR

SEQ ID NO: 9632 - protein, 8 aa, Artificial Sequence
  Peptide Derived from Human Papillomavirus
SSTSTTAK

SEQ ID NO: 9633 - protein, 9 aa, Artificial Sequence
  Peptide Derived from Human Papillomavirus
SSTSTTAKR

SEQ ID NO: 9634 - protein, 10 aa, Artificial Sequence
  Peptide Derived from Human Papillomavirus
SSTSTTAKRK

SEQ ID NO: 9635 - protein, 11 aa, Artificial Sequence
  Peptide Derived from Human Papillomavirus
SSTSTTAKRKK

SEQ ID NO: 9636 - protein, 8 aa, Artificial Sequence
  Peptide Derived from Human Papillomavirus
STDEYVAR

SEQ ID NO: 9637 - protein, 8 aa, Artificial Sequence
  Peptide Derived from Human Papillomavirus
STSETTYK

SEQ ID NO: 9638 - protein, 8 aa, Artificial Sequence
  Peptide Derived from Human Papillomavirus
STSTTAKR

SEQ ID NO: 9639 - protein, 9 aa, Artificial Sequence
  Peptide Derived from Human Papillomavirus
STSTTAKRK

SEQ ID NO: 9640 - protein, 10 aa, Artificial Sequence
  Peptide Derived from Human Papillomavirus
STSTTAKRKK

SEQ ID NO: 9641 - protein, 11 aa, Artificial Sequence
  Peptide Derived from Human Papillomavirus
STSTTAKRKKR

SEQ ID NO: 9642 - protein, 8 aa, Artificial Sequence
  Peptide Derived from Human Papillomavirus
STTAKRKK

SEQ ID NO: 9643 - protein, 9 aa, Artificial Sequence
  Peptide Derived from Human Papillomavirus
STTAKRKKR

SEQ ID NO: 9644 - protein, 10 aa, Artificial Sequence
  Peptide Derived from Human Papillomavirus
STTAKRKKRK

SEQ ID NO: 9645 - protein, 8 aa, Artificial Sequence
  Peptide Derived from Human Papillomavirus
TAKRKKRK

SEQ ID NO: 9646 - protein, 9 aa, Artificial Sequence
  Peptide Derived from Human Papillomavirus
TSDAQIFNK

SEQ ID NO: 9647 - protein, 10 aa, Artificial Sequence
  Peptide Derived from Human Papillomavirus
TSFYNPDTQR

SEQ ID NO: 9648 - protein, 11 aa, Artificial Sequence
  Peptide Derived from Human Papillomavirus
TSICKYPDYIK

SEQ ID NO: 9649 - protein, 9 aa, Artificial Sequence
  Peptide Derived from Human Papillomavirus
TSQAIACQK

SEQ ID NO: 9650 - protein, 9 aa, Artificial Sequence
  Peptide Derived from Human Papillomavirus
TSSTSTTAK

SEQ ID NO: 9651 - protein, 10 aa, Artificial Sequence
  Peptide Derived from Human Papillomavirus
TSSTSTTAKR

SEQ ID NO: 9652 - protein, 11 aa, Artificial Sequence
  Peptide Derived from Human Papillomavirus
TSSTSTTAKRK

SEQ ID NO: 9653 - protein, 8 aa, Artificial Sequence
  Peptide Derived from Human Papillomavirus
TSTTAKRK

SEQ ID NO: 9654 - protein, 9 aa, Artificial Sequence
  Peptide Derived from Human Papillomavirus
TSTTAKRKK

SEQ ID NO: 9655 - protein, 10 aa, Artificial Sequence
  Peptide Derived from Human Papillomavirus
TSTTAKRKKR

SEQ ID NO: 9656 - protein, 11 aa, Artificial Sequence
  Peptide Derived from Human Papillomavirus
TSTTAKRKKRK

SEQ ID NO: 9657 - protein, 8 aa, Artificial Sequence
  Peptide Derived from Human Papillomavirus
TTAKRKKR

SEQ ID NO: 9658 - protein, 9 aa, Artificial Sequence
  Peptide Derived from Human Papillomavirus
TTAKRKKRK

SEQ ID NO: 9659 - protein, 10 aa, Artificial Sequence
  Peptide Derived from Human Papillomavirus
TTSSTSTTAK

SEQ ID NO: 9660 - protein, 11 aa, Artificial Sequence
  Peptide Derived from Human Papillomavirus
TTSSTSTTAKR

SEQ ID NO: 9661 - protein, 9 aa, Artificial Sequence
  Peptide Derived from Human Papillomavirus
TTYKNTNFK

SEQ ID NO: 9662 - protein, 11 aa, Artificial Sequence
  Peptide Derived from Human Papillomavirus
TVYLPPVPVSK

SEQ ID NO: 9663 - protein, 10 aa, Artificial Sequence
  Peptide Derived from Human Papillomavirus
VSGLQYRVFR

SEQ ID NO: 9664 - protein, 9 aa, Artificial Sequence
  Peptide Derived from Human Papillomavirus
VSTDEYVAR

SEQ ID NO: 9665 - protein, 10 aa, Artificial Sequence
  Peptide Derived from Human Papillomavirus
VTSDAQIFNK

SEQ ID NO: 9666 - protein, 10 aa, Artificial Sequence
  Peptide Derived from Human Papillomavirus
VTSQAIACQK

SEQ ID NO: 9667 - protein, 8 aa, Artificial Sequence
  Peptide Derived from Human Papillomavirus
VTVVDTTR

SEQ ID NO: 9668 - protein, 10 aa, Artificial Sequence
  Peptide Derived from Human Papillomavirus
VVSTDEYVAR

SEQ ID NO: 9669 - protein, 10 aa, Artificial Sequence
  Peptide Derived from Human Papillomavirus
WACVGVEVGR

SEQ ID NO: 9670 - protein, 10 aa, Artificial Sequence
  Peptide Derived from Human Papillomavirus
YAANAGVDNR

SEQ ID NO: 9671 - protein, 9 aa, Artificial Sequence
  Peptide Derived from Human Papillomavirus
YLPPVPVSK

SEQ ID NO: 9672 - protein, 10 aa, Artificial Sequence
  Peptide Derived from Human Papillomavirus
YLRREQMFVR

SEQ ID NO: 9673 - protein, 9 aa, Artificial Sequence
  Peptide Derived from Human Papillomavirus
YTFWEVNLK

SEQ ID NO: 9674 - protein, 11 aa, Artificial Sequence
  Peptide Derived from Human Papillomavirus
YTFWEVNLKEK

SEQ ID NO: 9675 - protein, 10 aa, Artificial Sequence
  Peptide Derived from Human Papillomavirus
ALHRPALTSR

SEQ ID NO: 9676 - protein, 11 aa, Artificial Sequence
  Peptide Derived from Human Papillomavirus
ALHRPALTSRR

SEQ ID NO: 9677 - protein, 10 aa, Artificial Sequence
  Peptide Derived from Human Papillomavirus
ALTSRRTGIR

SEQ ID NO: 9678 - protein, 8 aa, Artificial Sequence
  Peptide Derived from Human Papillomavirus
ASATQLYK

SEQ ID NO: 9679 - protein, 11 aa, Artificial Sequence
  Peptide Derived from Human Papillomavirus
ASATQLYKTCK

SEQ ID NO: 9680 - protein, 9 aa, Artificial Sequence
  Peptide Derived from Human Papillomavirus
ATDTLAPVR

SEQ ID NO: 9681 - protein, 9 aa, Artificial Sequence
  Peptide Derived from Human Papillomavirus
ATQLYKTCK

SEQ ID NO: 9682 - protein, 9 aa, Artificial Sequence
  Peptide Derived from Human Papillomavirus
DIIPKVEGK

SEQ ID NO: 9683 - protein, 9 aa, Artificial Sequence
  Peptide Derived from Human Papillomavirus
FLDIVALHR

SEQ ID NO: 9684 - protein, 11 aa, Artificial Sequence
  Peptide Derived from Human Papillomavirus
GIGTGSGTGGR

SEQ ID NO: 9685 - protein, 10 aa, Artificial Sequence
  Peptide Derived from Human Papillomavirus
GIRYSRIGNK

SEQ ID NO: 9686 - protein, 11 aa, Artificial Sequence
  Peptide Derived from Human Papillomavirus
GLYSRTTQQVK

SEQ ID NO: 9687 - protein, 10 aa, Artificial Sequence
  Peptide Derived from Human Papillomavirus
GTCPPDIIPK

SEQ ID NO: 9688 - protein, 9 aa, Artificial Sequence
  Peptide Derived from Human Papillomavirus
GTGSGTGGR

SEQ ID NO: 9689 - protein, 8 aa, Artificial Sequence
  Peptide Derived from Human Papillomavirus
IIPKVEGK

SEQ ID NO: 9690 - protein, 9 aa, Artificial Sequence
  Peptide Derived from Human Papillomavirus
LTSRRTGIR

SEQ ID NO: 9691 - protein, 8 aa, Artificial Sequence
  Peptide Derived from Human Papillomavirus
MLRKRRKR

SEQ ID NO: 9692 - protein, 9 aa, Artificial Sequence
  Peptide Derived from Human Papillomavirus
PAFITTPTK

SEQ ID NO: 9693 - protein, 11 aa, Artificial Sequence
  Peptide Derived from Human Papillomavirus
PALTSRRTGIR

SEQ ID NO: 9694 - protein, 10 aa, Artificial Sequence
  Peptide Derived from Human Papillomavirus
PIPGSRPVAR

SEQ ID NO: 9695 - protein, 8 aa, Artificial Sequence
  Peptide Derived from Human Papillomavirus
PSYYMLRK

SEQ ID NO: 9696 - protein, 9 aa, Artificial Sequence
  Peptide Derived from Human Papillomavirus
PSYYMLRKR

SEQ ID NO: 9697 - protein, 10 aa, Artificial Sequence
  Peptide Derived from Human Papillomavirus
PSYYMLRKRR

SEQ ID NO: 9698 - protein, 11 aa, Artificial Sequence
  Peptide Derived from Human Papillomavirus
PSYYMLRKRRK

SEQ ID NO: 9699 - protein, 11 aa, Artificial Sequence
  Peptide Derived from Human Papillomavirus
PTATDTLAPVR

SEQ ID NO: 9700 - protein, 10 aa, Artificial Sequence
  Peptide Derived from Human Papillomavirus
PVARLGLYSR

SEQ ID NO: 9701 - protein, 9 aa, Artificial Sequence
  Peptide Derived from Human Papillomavirus
QTLRTRSGK

SEQ ID NO: 9702 - protein, 9 aa, Artificial Sequence
  Peptide Derived from Human Papillomavirus
RASATQLYK

SEQ ID NO: 9703 - protein, 9 aa, Artificial Sequence
  Peptide Derived from Human Papillomavirus
RIGNKQTLR

SEQ ID NO: 9704 - protein, 11 aa, Artificial Sequence
  Peptide Derived from Human Papillomavirus
RIGNKQTLRTR

SEQ ID NO: 9705 - protein, 8 aa, Artificial Sequence
  Peptide Derived from Human Papillomavirus
RSAKRTKR

SEQ ID NO: 9706 - protein, 9 aa, Artificial Sequence
  Peptide Derived from Human Papillomavirus
RSGKSIGAK

SEQ ID NO: 9707 - protein, 8 aa, Artificial Sequence
  Peptide Derived from Human Papillomavirus
RTGIRYSR

SEQ ID NO: 9708 - protein, 10 aa, Artificial Sequence
  Peptide Derived from Human Papillomavirus
RTGYIPLGTR

SEQ ID NO: 9709 - protein, 11 aa, Artificial Sequence
  Peptide Derived from Human Papillomavirus
RTRSGKSIGAK

SEQ ID NO: 9710 - protein, 10 aa, Artificial Sequence
  Peptide Derived from Human Papillomavirus
SATQLYKTCK

SEQ ID NO: 9711 - protein, 9 aa, Artificial Sequence
  Peptide Derived from Human Papillomavirus
SSTPIPGSR

SEQ ID NO: 9712 - protein, 8 aa, Artificial Sequence
  Peptide Derived from Human Papillomavirus
STPIPGSR

SEQ ID NO: 9713 - protein, 10 aa, Artificial Sequence
  Peptide Derived from Human Papillomavirus
TATDTLAPVR

SEQ ID NO: 9714 - protein, 8 aa, Artificial Sequence
  Peptide Derived from Human Papillomavirus
TLRTRSGK

SEQ ID NO: 9715 - protein, 8 aa, Artificial Sequence
  Peptide Derived from Human Papillomavirus
TSRRTGIR

SEQ ID NO: 9716 - protein, 11 aa, Artificial Sequence
  Peptide Derived from Human Papillomavirus
TSRRTGIRYSR

SEQ ID NO: 9717 - protein, 10 aa, Artificial Sequence
  Peptide Derived from Human Papillomavirus
TSSTPIPGSR

SEQ ID NO: 9718 - protein, 11 aa, Artificial Sequence
  Peptide Derived from Human Papillomavirus
VALHRPALTSR

SEQ ID NO: 9719 - protein, 9 aa, Artificial Sequence
  Peptide Derived from Human Papillomavirus
VARLGLYSR

SEQ ID NO: 9720 - protein, 11 aa, Artificial Sequence
  Peptide Derived from Human Papillomavirus
VTSSTPIPGSR

SEQ ID NO: 9721 - protein, 10 aa, Artificial Sequence
  Peptide Derived from Human Papillomavirus
YLHPSYYMLR

SEQ ID NO: 9722 - protein, 11 aa, Artificial Sequence
  Peptide Derived from Human Papillomavirus
YLHPSYYMLRK

SEQ ID NO: 9723 - protein, 8 aa, Artificial Sequence
  Peptide Derived from Human Papillomavirus
YMLRKRRK

SEQ ID NO: 9724 - protein, 9 aa, Artificial Sequence
  Peptide Derived from Human Papillomavirus
YMLRKRRKR

SEQ ID NO: 9725 - protein, 11 aa, Artificial Sequence
  Peptide Derived from Human Papillomavirus
YSRIGNKQTLR

SEQ ID NO: 9726 - protein, 9 aa, Artificial Sequence
  Peptide Derived from Human Papillomavirus
YSRTTQQVK

SEQ ID NO: 9727 - protein, 11 aa, Artificial Sequence
  Peptide Derived from Human Papillomavirus
AAFLKSNCQAK

SEQ ID NO: 9728 - protein, 11 aa, Artificial Sequence
  Peptide Derived from Human Papillomavirus
ALDGNPISIDR

SEQ ID NO: 9729 - protein, 11 aa, Artificial Sequence
  Peptide Derived from Human Papillomavirus
ALKSFLKGTPK

SEQ ID NO: 9730 - protein, 9 aa, Artificial Sequence
  Peptide Derived from Human Papillomavirus
ALLRYKCGK

SEQ ID NO: 9731 - protein, 11 aa, Artificial Sequence
  Peptide Derived from Human Papillomavirus
ALLRYKCGKSR

SEQ ID NO: 9732 - protein, 8 aa, Artificial Sequence
  Peptide Derived from Human Papillomavirus
ATMCKHYR

SEQ ID NO: 9733 - protein, 9 aa, Artificial Sequence
  Peptide Derived from Human Papillomavirus
ATMCKHYRR

SEQ ID NO: 9734 - protein, 9 aa, Artificial Sequence
  Peptide Derived from Human Papillomavirus
CATMCKHYR

SEQ ID NO: 9735 - protein, 10 aa, Artificial Sequence
  Peptide Derived from Human Papillomavirus
CATMCKHYRR

SEQ ID NO: 9736 - protein, 8 aa, Artificial Sequence
  Peptide Derived from Human Papillomavirus
CMLIQPPK

SEQ ID NO: 9737 - protein, 10 aa, Artificial Sequence
  Peptide Derived from Human Papillomavirus
CMLIQPPKLR

SEQ ID NO: 9738 - protein, 11 aa, Artificial Sequence
  Peptide Derived from Human Papillomavirus
CSKIDEGGDWR

SEQ ID NO: 9739 - protein, 11 aa, Artificial Sequence
  Peptide Derived from Human Papillomavirus
CTIAQLKDLLK

SEQ ID NO: 9740 - protein, 9 aa, Artificial Sequence
  Peptide Derived from Human Papillomavirus
DAQVLHVLK

SEQ ID NO: 9741 - protein, 10 aa, Artificial Sequence
  Peptide Derived from Human Papillomavirus
DAQVLHVLKR

SEQ ID NO: 9742 - protein, 11 aa, Artificial Sequence
  Peptide Derived from Human Papillomavirus
DAQVLHVLKRK

SEQ ID NO: 9743 - protein, 8 aa, Artificial Sequence
  Peptide Derived from Human Papillomavirus
DLLKVNNK

SEQ ID NO: 9744 - protein, 10 aa, Artificial Sequence
  Peptide Derived from Human Papillomavirus
DLVRNFKSDK

SEQ ID NO: 9745 - protein, 11 aa, Artificial Sequence
  Peptide Derived from Human Papillomavirus
DSNSNAAAFLK

SEQ ID NO: 9746 - protein, 11 aa, Artificial Sequence
  Peptide Derived from Human Papillomavirus
DTEGNPFGTFK

SEQ ID NO: 9747 - protein, 8 aa, Artificial Sequence
  Peptide Derived from Human Papillomavirus
DTPEWIQR

SEQ ID NO: 9748 - protein, 8 aa, Artificial Sequence
  Peptide Derived from Human Papillomavirus
EINDKNWK

SEQ ID NO: 9749 - protein, 9 aa, Artificial Sequence
  Peptide Derived from Human Papillomavirus
EISLNSGQK

SEQ ID NO: 9750 - protein, 10 aa, Artificial Sequence
  Peptide Derived from Human Papillomavirus
EISLNSGQKK

SEQ ID NO: 9751 - protein, 10 aa, Artificial Sequence
  Peptide Derived from Human Papillomavirus
ETCMLIQPPK

SEQ ID NO: 9752 - protein, 9 aa, Artificial Sequence
  Peptide Derived from Human Papillomavirus
EVDTELSPR

SEQ ID NO: 9753 - protein, 9 aa, Artificial Sequence
  Peptide Derived from Human Papillomavirus
FITFLGALK

SEQ ID NO: 9754 - protein, 10 aa, Artificial Sequence
  Peptide Derived from Human Papillomavirus
FLGALKSFLK

SEQ ID NO: 9755 - protein, 8 aa, Artificial Sequence
  Peptide Derived from Human Papillomavirus
FLKGTPKK

SEQ ID NO: 9756 - protein, 9 aa, Artificial Sequence
  Peptide Derived from Human Papillomavirus
FLKSNCQAK

SEQ ID NO: 9757 - protein, 9 aa, Artificial Sequence
  Peptide Derived from Human Papillomavirus
FTDLVRNFK

SEQ ID NO: 9758 - protein, 8 aa, Artificial Sequence
  Peptide Derived from Human Papillomavirus
GALKSFLK

SEQ ID NO: 9759 - protein, 8 aa, Artificial Sequence
  Peptide Derived from Human Papillomavirus
GAMLAVFK

SEQ ID NO: 9760 - protein, 9 aa, Artificial Sequence
  Peptide Derived from Human Papillomavirus
GLSFTDLVR

SEQ ID NO: 9761 - protein, 11 aa, Artificial Sequence
  Peptide Derived from Human Papillomavirus
GSTENSPLGER

SEQ ID NO: 9762 - protein, 9 aa, Artificial Sequence
  Peptide Derived from Human Papillomavirus
GVLILALLR

SEQ ID NO: 9763 - protein, 11 aa, Artificial Sequence
  Peptide Derived from Human Papillomavirus
GVLILALLRYK

SEQ ID NO: 9764 - protein, 11 aa, Artificial Sequence
  Peptide Derived from Human Papillomavirus
GVNPTIAEGFK

SEQ ID NO: 9765 - protein, 8 aa, Artificial Sequence
  Peptide Derived from Human Papillomavirus
HIQCLDCK

SEQ ID NO: 9766 - protein, 9 aa, Artificial Sequence
  Peptide Derived from Human Papillomavirus
IAQLKDLLK

SEQ ID NO: 9767 - protein, 8 aa, Artificial Sequence
  Peptide Derived from Human Papillomavirus
ILALLRYK

SEQ ID NO: 9768 - protein, 11 aa, Artificial Sequence
  Peptide Derived from Human Papillomavirus
ILALLRYKCGK

SEQ ID NO: 9769 - protein, 11 aa, Artificial Sequence
  Peptide Derived from Human Papillomavirus
ILLTTNIHPAK

SEQ ID NO: 9770 - protein, 8 aa, Artificial Sequence
  Peptide Derived from Human Papillomavirus
ISIDRKHK

SEQ ID NO: 9771 - protein, 8 aa, Artificial Sequence
  Peptide Derived from Human Papillomavirus
ISLNSGQK

SEQ ID NO: 9772 - protein, 9 aa, Artificial Sequence
  Peptide Derived from Human Papillomavirus
ISLNSGQKK

SEQ ID NO: 9773 - protein, 11 aa, Artificial Sequence
  Peptide Derived from Human Papillomavirus
ISLNSGQKKAK

SEQ ID NO: 9774 - protein, 8 aa, Artificial Sequence
  Peptide Derived from Human Papillomavirus
ITFLGALK

SEQ ID NO: 9775 - protein, 9 aa, Artificial Sequence
  Peptide Derived from Human Papillomavirus
KIDEGGDWR

SEQ ID NO: 9776 - protein, 9 aa, Artificial Sequence
  Peptide Derived from Human Papillomavirus
KLRAGQNHR

SEQ ID NO: 9777 - protein, 9 aa, Artificial Sequence
  Peptide Derived from Human Papillomavirus
KSFLKGTPK

SEQ ID NO: 9778 - protein, 10 aa, Artificial Sequence
  Peptide Derived from Human Papillomavirus
KSFLKGTPKK

SEQ ID NO: 9779 - protein, 10 aa, Artificial Sequence
  Peptide Derived from Human Papillomavirus
KSNCQAKYLK

SEQ ID NO: 9780 - protein, 8 aa, Artificial Sequence
  Peptide Derived from Human Papillomavirus
KSRLTVAK

SEQ ID NO: 9781 - protein, 10 aa, Artificial Sequence
  Peptide Derived from Human Papillomavirus
LALLRYKCGK

SEQ ID NO: 9782 - protein, 9 aa, Artificial Sequence
  Peptide Derived from Human Papillomavirus
LILALLRYK

SEQ ID NO: 9783 - protein, 8 aa, Artificial Sequence
  Peptide Derived from Human Papillomavirus
LIQPPKLR

SEQ ID NO: 9784 - protein, 8 aa, Artificial Sequence
  Peptide Derived from Human Papillomavirus
LLRYKCGK

SEQ ID NO: 9785 - protein, 10 aa, Artificial Sequence
  Peptide Derived from Human Papillomavirus
LLRYKCGKSR

SEQ ID NO: 9786 - protein, 10 aa, Artificial Sequence
  Peptide Derived from Human Papillomavirus
LLTTNIHPAK

SEQ ID NO: 9787 - protein, 8 aa, Artificial Sequence
  Peptide Derived from Human Papillomavirus
LSFTDLVR

SEQ ID NO: 9788 - protein, 11 aa, Artificial Sequence
  Peptide Derived from Human Papillomavirus
LSFTDLVRNFK

SEQ ID NO: 9789 - protein, 9 aa, Artificial Sequence
  Peptide Derived from Human Papillomavirus
LTTNIHPAK

SEQ ID NO: 9790 - protein, 11 aa, Artificial Sequence
  Peptide Derived from Human Papillomavirus
LVFCGPANTGK

SEQ ID NO: 9791 - protein, 9 aa, Artificial Sequence
  Peptide Derived from Human Papillomavirus
LVRNFKSDK

SEQ ID NO: 9792 - protein, 9 aa, Artificial Sequence
  Peptide Derived from Human Papillomavirus
MLIQPPKLR

SEQ ID NO: 9793 - protein, 8 aa, Artificial Sequence
  Peptide Derived from Human Papillomavirus
MSQWIRFR

SEQ ID NO: 9794 - protein, 11 aa, Artificial Sequence
  Peptide Derived from Human Papillomavirus
MSQWIRFRCSK

SEQ ID NO: 9795 - protein, 9 aa, Artificial Sequence
  Peptide Derived from Human Papillomavirus
NIHPAKDNR

SEQ ID NO: 9796 - protein, 9 aa, Artificial Sequence
  Peptide Derived from Human Papillomavirus
NMSQWIRFR

SEQ ID NO: 9797 - protein, 8 aa, Artificial Sequence
  Peptide Derived from Human Papillomavirus
NSGQKKAK

SEQ ID NO: 9798 - protein, 9 aa, Artificial Sequence
  Peptide Derived from Human Papillomavirus
NSGQKKAKR

SEQ ID NO: 9799 - protein, 10 aa, Artificial Sequence
  Peptide Derived from Human Papillomavirus
NSGQKKAKRR

SEQ ID NO: 9800 - protein, 9 aa, Artificial Sequence
  Peptide Derived from Human Papillomavirus
NSNAAAFLK

SEQ ID NO: 9801 - protein, 9 aa, Artificial Sequence
  Peptide Derived from Human Papillomavirus
PISIDRKHK

SEQ ID NO: 9802 - protein, 8 aa, Artificial Sequence
  Peptide Derived from Human Papillomavirus
PTIAEGFK

SEQ ID NO: 9803 - protein, 8 aa, Artificial Sequence
  Peptide Derived from Human Papillomavirus
PVYEINDK

SEQ ID NO: 9804 - protein, 11 aa, Artificial Sequence
  Peptide Derived from Human Papillomavirus
PVYEINDKNWK

SEQ ID NO: 9805 - protein, 11 aa, Artificial Sequence
  Peptide Derived from Human Papillomavirus
QLKDLLKVNNK

SEQ ID NO: 9806 - protein, 9 aa, Artificial Sequence
  Peptide Derived from Human Papillomavirus
QMNMSQWIR

SEQ ID NO: 9807 - protein, 11 aa, Artificial Sequence
  Peptide Derived from Human Papillomavirus
QMNMSQWIRFR

SEQ ID NO: 9808 - protein, 8 aa, Artificial Sequence
  Peptide Derived from Human Papillomavirus
QVLHVLKR

SEQ ID NO: 9809 - protein, 9 aa, Artificial Sequence
  Peptide Derived from Human Papillomavirus
QVLHVLKRK

SEQ ID NO: 9810 - protein, 11 aa, Artificial Sequence
  Peptide Derived from Human Papillomavirus
RLEVDTELSPR

SEQ ID NO: 9811 - protein, 11 aa, Artificial Sequence
  Peptide Derived from Human Papillomavirus
RSSVAALYWYR

SEQ ID NO: 9812 - protein, 8 aa, Artificial Sequence
  Peptide Derived from Human Papillomavirus
SLNSGQKK

SEQ ID NO: 9813 - protein, 10 aa, Artificial Sequence
  Peptide Derived from Human Papillomavirus
SLNSGQKKAK

SEQ ID NO: 9814 - protein, 11 aa, Artificial Sequence
  Peptide Derived from Human Papillomavirus
SLNSGQKKAKR

SEQ ID NO: 9815 - protein, 10 aa, Artificial Sequence
  Peptide Derived from Human Papillomavirus
SSVAALYWYR

SEQ ID NO: 9816 - protein, 10 aa, Artificial Sequence
  Peptide Derived from Human Papillomavirus
STENSPLGER

SEQ ID NO: 9817 - protein, 9 aa, Artificial Sequence
  Peptide Derived from Human Papillomavirus
SVAALYWYR

SEQ ID NO: 9818 - protein, 10 aa, Artificial Sequence
  Peptide Derived from Human Papillomavirus
TIAQLKDLLK

SEQ ID NO: 9819 - protein, 8 aa, Artificial Sequence
  Peptide Derived from Human Papillomavirus
TMCKHYRR

SEQ ID NO: 9820 - protein, 11 aa, Artificial Sequence
  Peptide Derived from Human Papillomavirus
TMCKHYRRAQK

SEQ ID NO: 9821 - protein, 8 aa, Artificial Sequence
  Peptide Derived from Human Papillomavirus
TTNIHPAK

SEQ ID NO: 9822 - protein, 11 aa, Artificial Sequence
  Peptide Derived from Human Papillomavirus
TTNIHPAKDNR

SEQ ID NO: 9823 - protein, 8 aa, Artificial Sequence
  Peptide Derived from Human Papillomavirus
VAALYWYR

SEQ ID NO: 9824 - protein, 8 aa, Artificial Sequence
  Peptide Derived from Human Papillomavirus
VLHVLKRK

SEQ ID NO: 9825 - protein, 8 aa, Artificial Sequence
  Peptide Derived from Human Papillomavirus
VLILALLR

SEQ ID NO: 9826 - protein, 10 aa, Artificial Sequence
  Peptide Derived from Human Papillomavirus
VLILALLRYK

SEQ ID NO: 9827 - protein, 11 aa, Artificial Sequence
  Peptide Derived from Human Papillomavirus
VMGDTPEWIQR

SEQ ID NO: 9828 - protein, 8 aa, Artificial Sequence
  Peptide Derived from Human Papillomavirus
WIRFRCSK

SEQ ID NO: 9829 - protein, 9 aa, Artificial Sequence
  Peptide Derived from Human Papillomavirus
WLEPLTDTK

SEQ ID NO: 9830 - protein, 9 aa, Artificial Sequence
  Peptide Derived from Human Papillomavirus
WTYFDTYMR

SEQ ID NO: 9831 - protein, 10 aa, Artificial Sequence
  Peptide Derived from Human Papillomavirus
YAHIQCLDCK

SEQ ID NO: 9832 - protein, 10 aa, Artificial Sequence
  Peptide Derived from Human Papillomavirus
YLKDCATMCK

SEQ ID NO: 9833 - protein, 8 aa, Artificial Sequence
  Peptide Derived from Human Papillomavirus
YVQAIVDK

SEQ ID NO: 9834 - protein, 9 aa, Artificial Sequence
  Peptide Derived from Human Papillomavirus
YVQAIVDKK

SEQ ID NO: 9835 - protein, 9 aa, Artificial Sequence
  Peptide Derived from Human Papillomavirus
AATPTGNNK

SEQ ID NO: 9836 - protein, 10 aa, Artificial Sequence
  Peptide Derived from Human Papillomavirus
AATPTGNNKR

SEQ ID NO: 9837 - protein, 11 aa, Artificial Sequence
  Peptide Derived from Human Papillomavirus
AATPTGNNKRR

SEQ ID NO: 9838 - protein, 9 aa, Artificial Sequence
  Peptide Derived from Human Papillomavirus
ALQGLAQSR

SEQ ID NO: 9839 - protein, 11 aa, Artificial Sequence
  Peptide Derived from Human Papillomavirus
ALQGLAQSRYK

SEQ ID NO: 9840 - protein, 8 aa, Artificial Sequence
  Peptide Derived from Human Papillomavirus
ATPTGNNK

SEQ ID NO: 9841 - protein, 9 aa, Artificial Sequence
  Peptide Derived from Human Papillomavirus
ATPTGNNKR

SEQ ID NO: 9842 - protein, 10 aa, Artificial Sequence
  Peptide Derived from Human Papillomavirus
ATPTGNNKRR

SEQ ID NO: 9843 - protein, 11 aa, Artificial Sequence
  Peptide Derived from Human Papillomavirus
ATPTGNNKRRK

SEQ ID NO: 9844 - protein, 8 aa, Artificial Sequence
  Peptide Derived from Human Papillomavirus
CLRYRLRK

SEQ ID NO: 9845 - protein, 11 aa, Artificial Sequence
  Peptide Derived from Human Papillomavirus
CVSHRGLYYVK

SEQ ID NO: 9846 - protein, 11 aa, Artificial Sequence
  Peptide Derived from Human Papillomavirus
DSQIQYWQLIR

SEQ ID NO: 9847 - protein, 10 aa, Artificial Sequence
  Peptide Derived from Human Papillomavirus
DTVSATQLVK

SEQ ID NO: 9848 - protein, 10 aa, Artificial Sequence
  Peptide Derived from Human Papillomavirus
GAATPTGNNK

SEQ ID NO: 9849 - protein, 11 aa, Artificial Sequence
  Peptide Derived from Human Papillomavirus
GAATPTGNNKR

SEQ ID NO: 9850 - protein, 8 aa, Artificial Sequence
  Peptide Derived from Human Papillomavirus
GLAQSRYK

SEQ ID NO: 9851 - protein, 10 aa, Artificial Sequence
  Peptide Derived from Human Papillomavirus
HLKGDRNSLK

SEQ ID NO: 9852 - protein, 8 aa, Artificial Sequence
  Peptide Derived from Human Papillomavirus
HSETQRTK

SEQ ID NO: 9853 - protein, 10 aa, Artificial Sequence
  Peptide Derived from Human Papillomavirus
IIDHYENDSK

SEQ ID NO: 9854 - protein, 8 aa, Artificial Sequence
  Peptide Derived from Human Papillomavirus
IIHLKGDR

SEQ ID NO: 9855 - protein, 8 aa, Artificial Sequence
  Peptide Derived from Human Papillomavirus
ISKSKAHK

SEQ ID NO: 9856 - protein, 11 aa, Artificial Sequence
  Peptide Derived from Human Papillomavirus
KIIDHYENDSK

SEQ ID NO: 9857 - protein, 9 aa, Artificial Sequence
  Peptide Derived from Human Papillomavirus
KTATCVSHR

SEQ ID NO: 9858 - protein, 11 aa, Artificial Sequence
  Peptide Derived from Human Papillomavirus
KTYGQTSAATR

SEQ ID NO: 9859 - protein, 11 aa, Artificial Sequence
  Peptide Derived from Human Papillomavirus
LSERLSCVQDK

SEQ ID NO: 9860 - protein, 11 aa, Artificial Sequence
  Peptide Derived from Human Papillomavirus
LTVTYHSETQR

SEQ ID NO: 9861 - protein, 10 aa, Artificial Sequence
  Peptide Derived from Human Papillomavirus
MALQGLAQSR

SEQ ID NO: 9862 - protein, 9 aa, Artificial Sequence
  Peptide Derived from Human Papillomavirus
MTDAGTWDK

SEQ ID NO: 9863 - protein, 8 aa, Artificial Sequence
  Peptide Derived from Human Papillomavirus
NAIFFAAR

SEQ ID NO: 9864 - protein, 9 aa, Artificial Sequence
  Peptide Derived from Human Papillomavirus
NISKSKAHK

SEQ ID NO: 9865 - protein, 9 aa, Artificial Sequence
  Peptide Derived from Human Papillomavirus
NSLKCLRYR

SEQ ID NO: 9866 - protein, 11 aa, Artificial Sequence
  Peptide Derived from Human Papillomavirus
NSLKCLRYRLR

SEQ ID NO: 9867 - protein, 9 aa, Artificial Sequence
  Peptide Derived from Human Papillomavirus
NTEPTHCFK

SEQ ID NO: 9868 - protein, 10 aa, Artificial Sequence
  Peptide Derived from Human Papillomavirus
NTEPTHCFKK

SEQ ID NO: 9869 - protein, 8 aa, Artificial Sequence
  Peptide Derived from Human Papillomavirus
NTFYIEFK

SEQ ID NO: 9870 - protein, 9 aa, Artificial Sequence
  Peptide Derived from Human Papillomavirus
NTTPIIHLK

SEQ ID NO: 9871 - protein, 9 aa, Artificial Sequence
  Peptide Derived from Human Papillomavirus
PAYNISKSK

SEQ ID NO: 9872 - protein, 9 aa, Artificial Sequence
  Peptide Derived from Human Papillomavirus
PIIHLKGDR

SEQ ID NO: 9873 - protein, 8 aa, Artificial Sequence
  Peptide Derived from Human Papillomavirus
PTGNNKRR

SEQ ID NO: 9874 - protein, 9 aa, Artificial Sequence
  Peptide Derived from Human Papillomavirus
PTGNNKRRK

SEQ ID NO: 9875 - protein, 9 aa, Artificial Sequence
  Peptide Derived from Human Papillomavirus
QIQYWQLIR

SEQ ID NO: 9876 - protein, 11 aa, Artificial Sequence
  Peptide Derived from Human Papillomavirus
QMALQGLAQSR

SEQ ID NO: 9877 - protein, 10 aa, Artificial Sequence
  Peptide Derived from Human Papillomavirus
QTPKETLSER

SEQ ID NO: 9878 - protein, 11 aa, Artificial Sequence
  Peptide Derived from Human Papillomavirus
QTVQVYFDGNK

SEQ ID NO: 9879 - protein, 10 aa, Artificial Sequence
  Peptide Derived from Human Papillomavirus
QVVPAYNISK

SEQ ID NO: 9880 - protein, 8 aa, Artificial Sequence
  Peptide Derived from Human Papillomavirus
QVYFDGNK

SEQ ID NO: 9881 - protein, 10 aa, Artificial Sequence
  Peptide Derived from Human Papillomavirus
RLRKHSDHYR

SEQ ID NO: 9882 - protein, 8 aa, Artificial Sequence
  Peptide Derived from Human Papillomavirus
RLSCVQDK

SEQ ID NO: 9883 - protein, 8 aa, Artificial Sequence
  Peptide Derived from Human Papillomavirus
SLKCLRYR

SEQ ID NO: 9884 - protein, 10 aa, Artificial Sequence
  Peptide Derived from Human Papillomavirus
SLKCLRYRLR

SEQ ID NO: 9885 - protein, 11 aa, Artificial Sequence
  Peptide Derived from Human Papillomavirus
SLKCLRYRLRK

SEQ ID NO: 9886 - protein, 10 aa, Artificial Sequence
  Peptide Derived from Human Papillomavirus
SSTVSVGTAK

SEQ ID NO: 9887 - protein, 9 aa, Artificial Sequence
  Peptide Derived from Human Papillomavirus
STVSVGTAK

SEQ ID NO: 9888 - protein, 8 aa, Artificial Sequence
  Peptide Derived from Human Papillomavirus
TATCVSHR

SEQ ID NO: 9889 - protein, 8 aa, Artificial Sequence
  Peptide Derived from Human Papillomavirus
TTPIIHLK

SEQ ID NO: 9890 - protein, 11 aa, Artificial Sequence
  Peptide Derived from Human Papillomavirus
TTPIIHLKGDR

SEQ ID NO: 9891 - protein, 10 aa, Artificial Sequence
  Peptide Derived from Human Papillomavirus
TVQVYFDGNK

SEQ ID NO: 9892 - protein, 9 aa, Artificial Sequence
  Peptide Derived from Human Papillomavirus
TVSATQLVK

SEQ ID NO: 9893 - protein, 8 aa, Artificial Sequence
  Peptide Derived from Human Papillomavirus
TVSVGTAK

SEQ ID NO: 9894 - protein, 10 aa, Artificial Sequence
  Peptide Derived from Human Papillomavirus
TVTYHSETQR

SEQ ID NO: 9895 - protein, 8 aa, Artificial Sequence
  Peptide Derived from Human Papillomavirus
VSATQLVK

SEQ ID NO: 9896 - protein, 10 aa, Artificial Sequence
  Peptide Derived from Human Papillomavirus
VSHRGLYYVK

SEQ ID NO: 9897 - protein, 9 aa, Artificial Sequence
  Peptide Derived from Human Papillomavirus
VTYHSETQR

SEQ ID NO: 9898 - protein, 11 aa, Artificial Sequence
  Peptide Derived from Human Papillomavirus
VTYHSETQRTK

SEQ ID NO: 9899 - protein, 9 aa, Artificial Sequence
  Peptide Derived from Human Papillomavirus
VVPAYNISK

SEQ ID NO: 9900 - protein, 11 aa, Artificial Sequence
  Peptide Derived from Human Papillomavirus
VVPAYNISKSK

SEQ ID NO: 9901 - protein, 8 aa, Artificial Sequence
  Peptide Derived from Human Papillomavirus
WTGAGNEK

SEQ ID NO: 9902 - protein, 10 aa, Artificial Sequence
  Peptide Derived from Human Papillomavirus
YIEFKSECEK

SEQ ID NO: 9903 - protein, 10 aa, Artificial Sequence
  Peptide Derived from Human Papillomavirus
YMTDAGTWDK

SEQ ID NO: 9904 - protein, 11 aa, Artificial Sequence
  Peptide Derived from Human Papillomavirus
YSSTVSVGTAK

SEQ ID NO: 9905 - protein, 9 aa, Artificial Sequence
  Peptide Derived from Human Papillomavirus
CIDFYSRIR

SEQ ID NO: 9906 - protein, 10 aa, Artificial Sequence
  Peptide Derived from Human Papillomavirus
DIEITCVYCK

SEQ ID NO: 9907 - protein, 10 aa, Artificial Sequence
  Peptide Derived from Human Papillomavirus
DSIPHAACHK

SEQ ID NO: 9908 - protein, 10 aa, Artificial Sequence
  Peptide Derived from Human Papillomavirus
DSVYGDTLEK

SEQ ID NO: 9909 - protein, 8 aa, Artificial Sequence
  Peptide Derived from Human Papillomavirus
EITCVYCK

SEQ ID NO: 9910 - protein, 11 aa, Artificial Sequence
  Peptide Derived from Human Papillomavirus
ELTEVFEFAFK

SEQ ID NO: 9911 - protein, 8 aa, Artificial Sequence
  Peptide Derived from Human Papillomavirus
EVFEFAFK

SEQ ID NO: 9912 - protein, 11 aa, Artificial Sequence
  Peptide Derived from Human Papillomavirus
FAFKDLFVVYR

SEQ ID NO: 9913 - protein, 8 aa, Artificial Sequence
  Peptide Derived from Human Papillomavirus
GLYNLLIR

SEQ ID NO: 9914 - protein, 11 aa, Artificial Sequence
  Peptide Derived from Human Papillomavirus
GLYNLLIRCLR

SEQ ID NO: 9915 - protein, 8 aa, Artificial Sequence
  Peptide Derived from Human Papillomavirus
HSCCNRAR

SEQ ID NO: 9916 - protein, 11 aa, Artificial Sequence
  Peptide Derived from Human Papillomavirus
HSCCNRARQER

SEQ ID NO: 9917 - protein, 8 aa, Artificial Sequence
  Peptide Derived from Human Papillomavirus
KLRHLNEK

SEQ ID NO: 9918 - protein, 9 aa, Artificial Sequence
  Peptide Derived from Human Papillomavirus
KLRHLNEKR

SEQ ID NO: 9919 - protein, 10 aa, Artificial Sequence
  Peptide Derived from Human Papillomavirus
KLRHLNEKRR

SEQ ID NO: 9920 - protein, 9 aa, Artificial Sequence
  Peptide Derived from Human Papillomavirus
LIRCLRCQK

SEQ ID NO: 9921 - protein, 10 aa, Artificial Sequence
  Peptide Derived from Human Papillomavirus
LLIRCLRCQK

SEQ ID NO: 9922 - protein, 10 aa, Artificial Sequence
  Peptide Derived from Human Papillomavirus
LTEVFEFAFK

SEQ ID NO: 9923 - protein, 9 aa, Artificial Sequence
  Peptide Derived from Human Papillomavirus
MARFEDPTR

SEQ ID NO: 9924 - protein, 10 aa, Artificial Sequence
  Peptide Derived from Human Papillomavirus
MARFEDPTRR

SEQ ID NO: 9925 - protein, 8 aa, Artificial Sequence
  Peptide Derived from Human Papillomavirus
NLLIRCLR

SEQ ID NO: 9926 - protein, 11 aa, Artificial Sequence
  Peptide Derived from Human Papillomavirus
NLLIRCLRCQK

SEQ ID NO: 9927 - protein, 10 aa, Artificial Sequence
  Peptide Derived from Human Papillomavirus
NTGLYNLLIR

SEQ ID NO: 9928 - protein, 11 aa, Artificial Sequence
  Peptide Derived from Human Papillomavirus
PAEKLRHLNEK

SEQ ID NO: 9929 - protein, 9 aa, Artificial Sequence
  Peptide Derived from Human Papillomavirus
PLNPAEKLR

SEQ ID NO: 9930 - protein, 9 aa, Artificial Sequence
  Peptide Derived from Human Papillomavirus
RARQERLQR

SEQ ID NO: 9931 - protein, 10 aa, Artificial Sequence
  Peptide Derived from Human Papillomavirus
RARQERLQRR

SEQ ID NO: 9932 - protein, 11 aa, Artificial Sequence
  Peptide Derived from Human Papillomavirus
RARQERLQRRR

SEQ ID NO: 9933 - protein, 9 aa, Artificial Sequence
  Peptide Derived from Human Papillomavirus
SIPHAACHK

SEQ ID NO: 9934 - protein, 9 aa, Artificial Sequence
  Peptide Derived from Human Papillomavirus
SVYGDTLEK

SEQ ID NO: 9935 - protein, 8 aa, Artificial Sequence
  Peptide Derived from Human Papillomavirus
YSRIRELR

SEQ ID NO: 9936 - protein, 9 aa, Artificial Sequence
  Peptide Derived from Human Papillomavirus
CMCCKCEAR

SEQ ID NO: 9937 - protein, 11 aa, Artificial Sequence
  Peptide Derived from Human Papillomavirus
CMCCKCEARIK

SEQ ID NO: 9938 - protein, 8 aa, Artificial Sequence
  Peptide Derived from Human Papillomavirus
ESSADDLR

SEQ ID NO: 9939 - protein, 10 aa, Artificial Sequence
  Peptide Derived from Human Papillomavirus
GVNHQHLPAR

SEQ ID NO: 9940 - protein, 11 aa, Artificial Sequence
  Peptide Derived from Human Papillomavirus
GVNHQHLPARR

SEQ ID NO: 9941 - protein, 11 aa, Artificial Sequence
  Peptide Derived from Human Papillomavirus
HLPARRAEPQR

SEQ ID NO: 9942 - protein, 9 aa, Artificial Sequence
  Peptide Derived from Human Papillomavirus
HTMLCMCCK

SEQ ID NO: 9943 - protein, 11 aa, Artificial Sequence
  Peptide Derived from Human Papillomavirus
LVVESSADDLR

SEQ ID NO: 9944 - protein, 11 aa, Artificial Sequence
  Peptide Derived from Human Papillomavirus
MLCMCCKCEAR

SEQ ID NO: 9945 - protein, 9 aa, Artificial Sequence
  Peptide Derived from Human Papillomavirus
PARRAEPQR

SEQ ID NO: 9946 - protein, 8 aa, Artificial Sequence
  Peptide Derived from Human Papillomavirus
TMLCMCCK

SEQ ID NO: 9947 - protein, 10 aa, Artificial Sequence
  Peptide Derived from Human Papillomavirus
VVESSADDLR

SEQ ID NO: 9948 - protein, 11 aa, Artificial Sequence
  Peptide Derived from Human Papillomavirus
AATSNVSEDVR

SEQ ID NO: 9949 - protein, 8 aa, Artificial Sequence
  Peptide Derived from Human Papillomavirus
AIGEHWAK

SEQ ID NO: 9950 - protein, 11 aa, Artificial Sequence
  Peptide Derived from Human Papillomavirus
AMDFSTLQDTK

SEQ ID NO: 9951 - protein, 9 aa, Artificial Sequence
  Peptide Derived from Human Papillomavirus
ATKFKQYSR

SEQ ID NO: 9952 - protein, 10 aa, Artificial Sequence
  Peptide Derived from Human Papillomavirus
ATSNVSEDVR

SEQ ID NO: 9953 - protein, 9 aa, Artificial Sequence
  Peptide Derived from Human Papillomavirus
ATTSSKPAK

SEQ ID NO: 9954 - protein, 10 aa, Artificial Sequence
  Peptide Derived from Human Papillomavirus
ATTSSKPAKR

SEQ ID NO: 9955 - protein, 8 aa, Artificial Sequence
  Peptide Derived from Human Papillomavirus
CAGVEIGR

SEQ ID NO: 9956 - protein, 11 aa, Artificial Sequence
  Peptide Derived from Human Papillomavirus
CAPAIGEHWAK

SEQ ID NO: 9957 - protein, 10 aa, Artificial Sequence
  Peptide Derived from Human Papillomavirus
CLRREQLFAR

SEQ ID NO: 9958 - protein, 8 aa, Artificial Sequence
  Peptide Derived from Human Papillomavirus
DAAPAENK

SEQ ID NO: 9959 - protein, 10 aa, Artificial Sequence
  Peptide Derived from Human Papillomavirus
DATKFKQYSR

SEQ ID NO: 9960 - protein, 8 aa, Artificial Sequence
  Peptide Derived from Human Papillomavirus
DICQSICK

SEQ ID NO: 9961 - protein, 11 aa, Artificial Sequence
  Peptide Derived from Human Papillomavirus
DIPKVSAYQYR

SEQ ID NO: 9962 - protein, 9 aa, Artificial Sequence
  Peptide Derived from Human Papillomavirus
DLDQYPLGR

SEQ ID NO: 9963 - protein, 10 aa, Artificial Sequence
  Peptide Derived from Human Papillomavirus
DLDQYPLGRK

SEQ ID NO: 9964 - protein, 8 aa, Artificial Sequence
  Peptide Derived from Human Papillomavirus
DSMFFCLR

SEQ ID NO: 9965 - protein, 9 aa, Artificial Sequence
  Peptide Derived from Human Papillomavirus
DSMFFCLRR

SEQ ID NO: 9966 - protein, 11 aa, Artificial Sequence
  Peptide Derived from Human Papillomavirus
DTSIYNPETQR

SEQ ID NO: 9967 - protein, 10 aa, Artificial Sequence
  Peptide Derived from Human Papillomavirus
DTVPQSLYIK

SEQ ID NO: 9968 - protein, 11 aa, Artificial Sequence
  Peptide Derived from Human Papillomavirus
DVRDNVSVDYK

SEQ ID NO: 9969 - protein, 8 aa, Artificial Sequence
  Peptide Derived from Human Papillomavirus
FARHFWNR

SEQ ID NO: 9970 - protein, 8 aa, Artificial Sequence
  Peptide Derived from Human Papillomavirus
FLQMALWR

SEQ ID NO: 9971 - protein, 8 aa, Artificial Sequence
  Peptide Derived from Human Papillomavirus
FLVQAGLR

SEQ ID NO: 9972 - protein, 9 aa, Artificial Sequence
  Peptide Derived from Human Papillomavirus
FLVQAGLRR

SEQ ID NO: 9973 - protein, 10 aa, Artificial Sequence
  Peptide Derived from Human Papillomavirus
FLVQAGLRRK

SEQ ID NO: 9974 - protein, 8 aa, Artificial Sequence
  Peptide Derived from Human Papillomavirus
FSTLQDTK

SEQ ID NO: 9975 - protein, 11 aa, Artificial Sequence
  Peptide Derived from Human Papillomavirus
FVQSVAITCQK

SEQ ID NO: 9976 - protein, 11 aa, Artificial Sequence
  Peptide Derived from Human Papillomavirus
GLRRKPTIGPR

SEQ ID NO: 9977 - protein, 10 aa, Artificial Sequence
  Peptide Derived from Human Papillomavirus
GLSGHPFYNK

SEQ ID NO: 9978 - protein, 11 aa, Artificial Sequence
  Peptide Derived from Human Papillomavirus
IVTSDSQLFNK

SEQ ID NO: 9979 - protein, 10 aa, Artificial Sequence
  Peptide Derived from Human Papillomavirus
KLKFWNVDLK

SEQ ID NO: 9980 - protein, 8 aa, Artificial Sequence
  Peptide Derived from Human Papillomavirus
KVSAYQYR

SEQ ID NO: 9981 - protein, 11 aa, Artificial Sequence
  Peptide Derived from Human Papillomavirus
KVSAYQYRVFR

SEQ ID NO: 9982 - protein, 10 aa, Artificial Sequence
  Peptide Derived from Human Papillomavirus
LLTVGNPYFR

SEQ ID NO: 9983 - protein, 9 aa, Artificial Sequence
  Peptide Derived from Human Papillomavirus
LSGHPFYNK

SEQ ID NO: 9984 - protein, 9 aa, Artificial Sequence
  Peptide Derived from Human Papillomavirus
LTVGNPYFR

SEQ ID NO: 9985 - protein, 8 aa, Artificial Sequence
  Peptide Derived from Human Papillomavirus
LVQAGLRR

SEQ ID NO: 9986 - protein, 9 aa, Artificial Sequence
  Peptide Derived from Human Papillomavirus
LVQAGLRRK

SEQ ID NO: 9987 - protein, 10 aa, Artificial Sequence
  Peptide Derived from Human Papillomavirus
PAENKDPYDK

SEQ ID NO: 9988 - protein, 9 aa, Artificial Sequence
  Peptide Derived from Human Papillomavirus
PAIGEHWAK

SEQ ID NO: 9989 - protein, 8 aa, Artificial Sequence
  Peptide Derived from Human Papillomavirus
PAKRVRVR

SEQ ID NO: 9990 - protein, 10 aa, Artificial Sequence
  Peptide Derived from Human Papillomavirus
PAKRVRVRAR

SEQ ID NO: 9991 - protein, 11 aa, Artificial Sequence
  Peptide Derived from Human Papillomavirus
PAKRVRVRARK

SEQ ID NO: 9992 - protein, 10 aa, Artificial Sequence
  Peptide Derived from Human Papillomavirus
PIFLQMALWR

SEQ ID NO: 9993 - protein, 10 aa, Artificial Sequence
  Peptide Derived from Human Papillomavirus
PLDICQSICK

SEQ ID NO: 9994 - protein, 10 aa, Artificial Sequence
  Peptide Derived from Human Papillomavirus
PLYGPLYHPR

SEQ ID NO: 9995 - protein, 8 aa, Artificial Sequence
  Peptide Derived from Human Papillomavirus
PSATTSSK

SEQ ID NO: 9996 - protein, 11 aa, Artificial Sequence
  Peptide Derived from Human Papillomavirus
PSATTSSKPAK

SEQ ID NO: 9997 - protein, 8 aa, Artificial Sequence
  Peptide Derived from Human Papillomavirus
PTIGPRKR

SEQ ID NO: 9998 - protein, 10 aa, Artificial Sequence
  Peptide Derived from Human Papillomavirus
PTTSLVDTYR

SEQ ID NO: 9999 - protein, 10 aa, Artificial Sequence
  Peptide Derived from Human Papillomavirus
PVPGQYDATK

SEQ ID NO: 10000 - protein, 10 aa, Artificial Sequence
  Peptide Derived from Human Papillomavirus
QLFARHFWNR

SEQ ID NO: 10001 - protein, 11 aa, Artificial Sequence
  Peptide Derived from Human Papillomavirus
QLFNKPYWLHK

SEQ ID NO: 10002 - protein, 9 aa, Artificial Sequence
  Peptide Derived from Human Papillomavirus
QSVAITCQK

SEQ ID NO: 10003 - protein, 11 aa, Artificial Sequence
  Peptide Derived from Human Papillomavirus
RLLTVGNPYFR

SEQ ID NO: 10004 - protein, 11 aa, Artificial Sequence
  Peptide Derived from Human Papillomavirus
RSAPSATTSSK

SEQ ID NO: 10005 - protein, 9 aa, Artificial Sequence
  Peptide Derived from Human Papillomavirus
RVPAGGGNK

SEQ ID NO: 10006 - protein, 9 aa, Artificial Sequence
  Peptide Derived from Human Papillomavirus
RVQLPDPNK

SEQ ID NO: 10007 - protein, 8 aa, Artificial Sequence
  Peptide Derived from Human Papillomavirus
RVRVRARK

SEQ ID NO: 10008 - protein, 10 aa, Artificial Sequence
  Peptide Derived from Human Papillomavirus
SAPSATTSSK

SEQ ID NO: 10009 - protein, 10 aa, Artificial Sequence
  Peptide Derived from Human Papillomavirus
SATTSSKPAK

SEQ ID NO: 10010 - protein, 11 aa, Artificial Sequence
  Peptide Derived from Human Papillomavirus
SATTSSKPAKR

SEQ ID NO: 10011 - protein, 9 aa, Artificial Sequence
  Peptide Derived from Human Papillomavirus
SAYQYRVFR

SEQ ID NO: 10012 - protein, 10 aa, Artificial Sequence
  Peptide Derived from Human Papillomavirus
SIFYHAGSSR

SEQ ID NO: 10013 - protein, 9 aa, Artificial Sequence
  Peptide Derived from Human Papillomavirus
SIYNPETQR

SEQ ID NO: 10014 - protein, 11 aa, Artificial Sequence
  Peptide Derived from Human Papillomavirus
SLDLDQYPLGR

SEQ ID NO: 10015 - protein, 8 aa, Artificial Sequence
  Peptide Derived from Human Papillomavirus
SMFFCLRR

SEQ ID NO: 10016 - protein, 9 aa, Artificial Sequence
  Peptide Derived from Human Papillomavirus
SSKPAKRVR

SEQ ID NO: 10017 - protein, 11 aa, Artificial Sequence
  Peptide Derived from Human Papillomavirus
SSKPAKRVRVR

SEQ ID NO: 10018 - protein, 8 aa, Artificial Sequence
  Peptide Derived from Human Papillomavirus
SVAITCQK

SEQ ID NO: 10019 - protein, 9 aa, Artificial Sequence
  Peptide Derived from Human Papillomavirus
TSDSQLFNK

SEQ ID NO: 10020 - protein, 11 aa, Artificial Sequence
  Peptide Derived from Human Papillomavirus
TSIFYHAGSSR

SEQ ID NO: 10021 - protein, 10 aa, Artificial Sequence
  Peptide Derived from Human Papillomavirus
TSIYNPETQR

SEQ ID NO: 10022 - protein, 8 aa, Artificial Sequence
  Peptide Derived from Human Papillomavirus
TSLVDTYR

SEQ ID NO: 10023 - protein, 9 aa, Artificial Sequence
  Peptide Derived from Human Papillomavirus
TSNVSEDVR

SEQ ID NO: 10024 - protein, 8 aa, Artificial Sequence
  Peptide Derived from Human Papillomavirus
TSSKPAKR

SEQ ID NO: 10025 - protein, 10 aa, Artificial Sequence
  Peptide Derived from Human Papillomavirus
TSSKPAKRVR

SEQ ID NO: 10026 - protein, 9 aa, Artificial Sequence
  Peptide Derived from Human Papillomavirus
TTSLVDTYR

SEQ ID NO: 10027 - protein, 8 aa, Artificial Sequence
  Peptide Derived from Human Papillomavirus
TTSSKPAK

SEQ ID NO: 10028 - protein, 9 aa, Artificial Sequence
  Peptide Derived from Human Papillomavirus
TTSSKPAKR

SEQ ID NO: 10029 - protein, 11 aa, Artificial Sequence
  Peptide Derived from Human Papillomavirus
TTSSKPAKRVR

SEQ ID NO: 10030 - protein, 8 aa, Artificial Sequence
  Peptide Derived from Human Papillomavirus
TVGNPYFR

SEQ ID NO: 10031 - protein, 9 aa, Artificial Sequence
  Peptide Derived from Human Papillomavirus
TVPQSLYIK

SEQ ID NO: 10032 - protein, 11 aa, Artificial Sequence
  Peptide Derived from Human Papillomavirus
TVYLPPPSVAR

SEQ ID NO: 10033 - protein, 10 aa, Artificial Sequence
  Peptide Derived from Human Papillomavirus
VSAYQYRVFR

SEQ ID NO: 10034 - protein, 10 aa, Artificial Sequence
  Peptide Derived from Human Papillomavirus
VTSDSQLFNK

SEQ ID NO: 10035 - protein, 10 aa, Artificial Sequence
  Peptide Derived from Human Papillomavirus
WACAGVEIGR

SEQ ID NO: 10036 - protein, 8 aa, Artificial Sequence
  Peptide Derived from Human Papillomavirus
WAKGTACK

SEQ ID NO: 10037 - protein, 10 aa, Artificial Sequence
  Peptide Derived from Human Papillomavirus
WAKGTACKSR

SEQ ID NO: 10038 - protein, 9 aa, Artificial Sequence
  Peptide Derived from Human Papillomavirus
YLPPPSVAR

SEQ ID NO: 10039 - protein, 10 aa, Artificial Sequence
  Peptide Derived from Human Papillomavirus
ALTSRRGTVR

SEQ ID NO: 10040 - protein, 8 aa, Artificial Sequence
  Peptide Derived from Human Papillomavirus
ASVTDLYK

SEQ ID NO: 10041 - protein, 11 aa, Artificial Sequence
  Peptide Derived from Human Papillomavirus
ASVTDLYKTCK

SEQ ID NO: 10042 - protein, 11 aa, Artificial Sequence
  Peptide Derived from Human Papillomavirus
DMDPAVPVPSR

SEQ ID NO: 10043 - protein, 9 aa, Artificial Sequence
  Peptide Derived from Human Papillomavirus
DSDFMDIIR

SEQ ID NO: 10044 - protein, 11 aa, Artificial Sequence
  Peptide Derived from Human Papillomavirus
DSSVVTSGAPR

SEQ ID NO: 10045 - protein, 9 aa, Artificial Sequence
  Peptide Derived from Human Papillomavirus
DTTLTFDPR

SEQ ID NO: 10046 - protein, 8 aa, Artificial Sequence
  Peptide Derived from Human Papillomavirus
FIPKKRKR

SEQ ID NO: 10047 - protein, 9 aa, Artificial Sequence
  Peptide Derived from Human Papillomavirus
FMDIIRLHR

SEQ ID NO: 10048 - protein, 11 aa, Artificial Sequence
  Peptide Derived from Human Papillomavirus
FTRSGTQIGAR

SEQ ID NO: 10049 - protein, 11 aa, Artificial Sequence
  Peptide Derived from Human Papillomavirus
GIGTGSGTGGR

SEQ ID NO: 10050 - protein, 10 aa, Artificial Sequence
  Peptide Derived from Human Papillomavirus
GTCPPDVVPK

SEQ ID NO: 10051 - protein, 9 aa, Artificial Sequence
  Peptide Derived from Human Papillomavirus
GTGSGTGGR

SEQ ID NO: 10052 - protein, 11 aa, Artificial Sequence
  Peptide Derived from Human Papillomavirus
GTVRFSRLGQR

SEQ ID NO: 10053 - protein, 10 aa, Artificial Sequence
  Peptide Derived from Human Papillomavirus
ISSTPLPTVR

SEQ ID NO: 10054 - protein, 11 aa, Artificial Sequence
  Peptide Derived from Human Papillomavirus
ISSTPLPTVRR

SEQ ID NO: 10055 - protein, 10 aa, Artificial Sequence
  Peptide Derived from Human Papillomavirus
KVEGTTLADK

SEQ ID NO: 10056 - protein, 9 aa, Artificial Sequence
  Peptide Derived from Human Papillomavirus
LTSRRGTVR

SEQ ID NO: 10057 - protein, 8 aa, Artificial Sequence
  Peptide Derived from Human Papillomavirus
MVSHRAAR

SEQ ID NO: 10058 - protein, 9 aa, Artificial Sequence
  Peptide Derived from Human Papillomavirus
MVSHRAARR

SEQ ID NO: 10059 - protein, 10 aa, Artificial Sequence
  Peptide Derived from Human Papillomavirus
MVSHRAARRK

SEQ ID NO: 10060 - protein, 11 aa, Artificial Sequence
  Peptide Derived from Human Papillomavirus
MVSHRAARRKR

SEQ ID NO: 10061 - protein, 10 aa, Artificial Sequence
  Peptide Derived from Human Papillomavirus
NTVVDVGPTR

SEQ ID NO: 10062 - protein, 11 aa, Artificial Sequence
  Peptide Derived from Human Papillomavirus
PALTSRRGTVR

SEQ ID NO: 10063 - protein, 8 aa, Artificial Sequence
  Peptide Derived from Human Papillomavirus
PAVPVPSR

SEQ ID NO: 10064 - protein, 11 aa, Artificial Sequence
  Peptide Derived from Human Papillomavirus
PISSTPLPTVR

SEQ ID NO: 10065 - protein, 8 aa, Artificial Sequence
  Peptide Derived from Human Papillomavirus
PLYYFIPK

SEQ ID NO: 10066 - protein, 9 aa, Artificial Sequence
  Peptide Derived from Human Papillomavirus
PLYYFIPKK

SEQ ID NO: 10067 - protein, 10 aa, Artificial Sequence
  Peptide Derived from Human Papillomavirus
PLYYFIPKKR

SEQ ID NO: 10068 - protein, 11 aa, Artificial Sequence
  Peptide Derived from Human Papillomavirus
PLYYFIPKKRK

SEQ ID NO: 10069 - protein, 10 aa, Artificial Sequence
  Peptide Derived from Human Papillomavirus
PTVRRVAGPR

SEQ ID NO: 10070 - protein, 11 aa, Artificial Sequence
  Peptide Derived from Human Papillomavirus
PVDTTLTFDPR

SEQ ID NO: 10071 - protein, 9 aa, Artificial Sequence
  Peptide Derived from Human Papillomavirus
RASVTDLYK

SEQ ID NO: 10072 - protein, 11 aa, Artificial Sequence
  Peptide Derived from Human Papillomavirus
RLGQRATMFTR

SEQ ID NO: 10073 - protein, 10 aa, Artificial Sequence
  Peptide Derived from Human Papillomavirus
RLHRPALTSR

SEQ ID NO: 10074 - protein, 11 aa, Artificial Sequence
  Peptide Derived from Human Papillomavirus
RLHRPALTSRR

SEQ ID NO: 10075 - protein, 9 aa, Artificial Sequence
  Peptide Derived from Human Papillomavirus
RSGTQIGAR

SEQ ID NO: 10076 - protein, 10 aa, Artificial Sequence
  Peptide Derived from Human Papillomavirus
RSTTSFAFFK

SEQ ID NO: 10077 - protein, 10 aa, Artificial Sequence
  Peptide Derived from Human Papillomavirus
RTGYIPLGGR

SEQ ID NO: 10078 - protein, 10 aa, Artificial Sequence
  Peptide Derived from Human Papillomavirus
RVAGPRLYSR

SEQ ID NO: 10079 - protein, 9 aa, Artificial Sequence
  Peptide Derived from Human Papillomavirus
SSTPLPTVR

SEQ ID NO: 10080 - protein, 10 aa, Artificial Sequence
  Peptide Derived from Human Papillomavirus
SSTPLPTVRR

SEQ ID NO: 10081 - protein, 10 aa, Artificial Sequence
  Peptide Derived from Human Papillomavirus
SSVVTSGAPR

SEQ ID NO: 10082 - protein, 8 aa, Artificial Sequence
  Peptide Derived from Human Papillomavirus
STPLPTVR

SEQ ID NO: 10083 - protein, 9 aa, Artificial Sequence
  Peptide Derived from Human Papillomavirus
STPLPTVRR

SEQ ID NO: 10084 - protein, 9 aa, Artificial Sequence
  Peptide Derived from Human Papillomavirus
STTSFAFFK

SEQ ID NO: 10085 - protein, 10 aa, Artificial Sequence
  Peptide Derived from Human Papillomavirus
SVANPEFLTR

SEQ ID NO: 10086 - protein, 10 aa, Artificial Sequence
  Peptide Derived from Human Papillomavirus
SVTDLYKTCK

SEQ ID NO: 10087 - protein, 9 aa, Artificial Sequence
  Peptide Derived from Human Papillomavirus
SVVTSGAPR

SEQ ID NO: 10088 - protein, 8 aa, Artificial Sequence
  Peptide Derived from Human Papillomavirus
TSRRGTVR

SEQ ID NO: 10089 - protein, 11 aa, Artificial Sequence
  Peptide Derived from Human Papillomavirus
TSRRGTVRFSR

SEQ ID NO: 10090 - protein, 8 aa, Artificial Sequence
  Peptide Derived from Human Papillomavirus
TTLTFDPR

SEQ ID NO: 10091 - protein, 8 aa, Artificial Sequence
  Peptide Derived from Human Papillomavirus
TTSFAFFK

SEQ ID NO: 10092 - protein, 10 aa, Artificial Sequence
  Peptide Derived from Human Papillomavirus
TVRFSRLGQR

SEQ ID NO: 10093 - protein, 9 aa, Artificial Sequence
  Peptide Derived from Human Papillomavirus
TVRRVAGPR

SEQ ID NO: 10094 - protein, 9 aa, Artificial Sequence
  Peptide Derived from Human Papillomavirus
TVVDVGPTR

SEQ ID NO: 10095 - protein, 9 aa, Artificial Sequence
  Peptide Derived from Human Papillomavirus
VAGPRLYSR

SEQ ID NO: 10096 - protein, 9 aa, Artificial Sequence
  Peptide Derived from Human Papillomavirus
VANPEFLTR

SEQ ID NO: 10097 - protein, 8 aa, Artificial Sequence
  Peptide Derived from Human Papillomavirus
VSHRAARR

SEQ ID NO: 10098 - protein, 9 aa, Artificial Sequence
  Peptide Derived from Human Papillomavirus
VSHRAARRK

SEQ ID NO: 10099 - protein, 10 aa, Artificial Sequence
  Peptide Derived from Human Papillomavirus
VSHRAARRKR

SEQ ID NO: 10100 - protein, 11 aa, Artificial Sequence
  Peptide Derived from Human Papillomavirus
VSVANPEFLTR

SEQ ID NO: 10101 - protein, 9 aa, Artificial Sequence
  Peptide Derived from Human Papillomavirus
VTDLYKTCK

SEQ ID NO: 10102 - protein, 8 aa, Artificial Sequence
  Peptide Derived from Human Papillomavirus
VVDVGPTR

SEQ ID NO: 10103 - protein, 8 aa, Artificial Sequence
  Peptide Derived from Human Papillomavirus
VVTSGAPR

SEQ ID NO: 10104 - protein, 11 aa, Artificial Sequence
  Peptide Derived from Human Papillomavirus
YLWPLYYFIPK

SEQ ID NO: 10105 - protein, 8 aa, Artificial Sequence
  Peptide Derived from Human Papillomavirus
AAALYWYR

SEQ ID NO: 10106 - protein, 8 aa, Artificial Sequence
  Peptide Derived from Human Papillomavirus
AAMLGKFK

SEQ ID NO: 10107 - protein, 9 aa, Artificial Sequence
  Peptide Derived from Human Papillomavirus
AICIENNSK

SEQ ID NO: 10108 - protein, 11 aa, Artificial Sequence
  Peptide Derived from Human Papillomavirus
ALKLFLKGVPK

SEQ ID NO: 10109 - protein, 8 aa, Artificial Sequence
  Peptide Derived from Human Papillomavirus
AVQVLKRK

SEQ ID NO: 10110 - protein, 11 aa, Artificial Sequence
  Peptide Derived from Human Papillomavirus
CAFLKSNSQAK

SEQ ID NO: 10111 - protein, 10 aa, Artificial Sequence
  Peptide Derived from Human Papillomavirus
CAKNRITIEK

SEQ ID NO: 10112 - protein, 10 aa, Artificial Sequence
  Peptide Derived from Human Papillomavirus
CIENNSKTAK

SEQ ID NO: 10113 - protein, 11 aa, Artificial Sequence
  Peptide Derived from Human Papillomavirus
CIENNSKTAKR

SEQ ID NO: 10114 - protein, 9 aa, Artificial Sequence
  Peptide Derived from Human Papillomavirus
CIISYANSK

SEQ ID NO: 10115 - protein, 8 aa, Artificial Sequence
  Peptide Derived from Human Papillomavirus
CMLIQPPK

SEQ ID NO: 10116 - protein, 10 aa, Artificial Sequence
  Peptide Derived from Human Papillomavirus
CMLIQPPKLR

SEQ ID NO: 10117 - protein, 9 aa, Artificial Sequence
  Peptide Derived from Human Papillomavirus
CVDYNISPR

SEQ ID NO: 10118 - protein, 11 aa, Artificial Sequence
  Peptide Derived from Human Papillomavirus
CVDYNISPRLK

SEQ ID NO: 10119 - protein, 8 aa, Artificial Sequence
  Peptide Derived from Human Papillomavirus
CVSGQNIR

SEQ ID NO: 10120 - protein, 11 aa, Artificial Sequence
  Peptide Derived from Human Papillomavirus
DSDSNACAFLK

SEQ ID NO: 10121 - protein, 9 aa, Artificial Sequence
  Peptide Derived from Human Papillomavirus
DSNACAFLK

SEQ ID NO: 10122 - protein, 11 aa, Artificial Sequence
  Peptide Derived from Human Papillomavirus
DVKHKALMQLK

SEQ ID NO: 10123 - protein, 11 aa, Artificial Sequence
  Peptide Derived from Human Papillomavirus
DVMDDSEIAYK

SEQ ID NO: 10124 - protein, 8 aa, Artificial Sequence
  Peptide Derived from Human Papillomavirus
EAVQVLKR

SEQ ID NO: 10125 - protein, 9 aa, Artificial Sequence
  Peptide Derived from Human Papillomavirus
EAVQVLKRK

SEQ ID NO: 10126 - protein, 10 aa, Artificial Sequence
  Peptide Derived from Human Papillomavirus
ELIRPFQSNK

SEQ ID NO: 10127 - protein, 8 aa, Artificial Sequence
  Peptide Derived from Human Papillomavirus
ELSDKNWK

SEQ ID NO: 10128 - protein, 8 aa, Artificial Sequence
  Peptide Derived from Human Papillomavirus
ETPEWIER

SEQ ID NO: 10129 - protein, 8 aa, Artificial Sequence
  Peptide Derived from Human Papillomavirus
FLKGVPKK

SEQ ID NO: 10130 - protein, 9 aa, Artificial Sequence
  Peptide Derived from Human Papillomavirus
FLKSNSQAK

SEQ ID NO: 10131 - protein, 10 aa, Artificial Sequence
  Peptide Derived from Human Papillomavirus
FLSALKLFLK

SEQ ID NO: 10132 - protein, 11 aa, Artificial Sequence
  Peptide Derived from Human Papillomavirus
FTFPNPFPFDK

SEQ ID NO: 10133 - protein, 9 aa, Artificial Sequence
  Peptide Derived from Human Papillomavirus
FVSFLSALK

SEQ ID NO: 10134 - protein, 9 aa, Artificial Sequence
  Peptide Derived from Human Papillomavirus
GMVMLMLVR

SEQ ID NO: 10135 - protein, 11 aa, Artificial Sequence
  Peptide Derived from Human Papillomavirus
GMVMLMLVRFK

SEQ ID NO: 10136 - protein, 9 aa, Artificial Sequence
  Peptide Derived from Human Papillomavirus
GSDGTHSER

SEQ ID NO: 10137 - protein, 8 aa, Artificial Sequence
  Peptide Derived from Human Papillomavirus
GTMCRHYK

SEQ ID NO: 10138 - protein, 9 aa, Artificial Sequence
  Peptide Derived from Human Papillomavirus
GTMCRHYKR

SEQ ID NO: 10139 - protein, 8 aa, Artificial Sequence
  Peptide Derived from Human Papillomavirus
GTVAEGFK

SEQ ID NO: 10140 - protein, 9 aa, Artificial Sequence
  Peptide Derived from Human Papillomavirus
GVSFMELIR

SEQ ID NO: 10141 - protein, 11 aa, Artificial Sequence
  Peptide Derived from Human Papillomavirus
GVTGTVAEGFK

SEQ ID NO: 10142 - protein, 9 aa, Artificial Sequence
  Peptide Derived from Human Papillomavirus
HAEAVQVLK

SEQ ID NO: 10143 - protein, 10 aa, Artificial Sequence
  Peptide Derived from Human Papillomavirus
HAEAVQVLKR

SEQ ID NO: 10144 - protein, 11 aa, Artificial Sequence
  Peptide Derived from Human Papillomavirus
HAEAVQVLKRK

SEQ ID NO: 10145 - protein, 11 aa, Artificial Sequence
  Peptide Derived from Human Papillomavirus
HSERENETPTR

SEQ ID NO: 10146 - protein, 8 aa, Artificial Sequence
  Peptide Derived from Human Papillomavirus
IISYANSK

SEQ ID NO: 10147 - protein, 11 aa, Artificial Sequence
  Peptide Derived from Human Papillomavirus
ILIHGAPNTGK

SEQ ID NO: 10148 - protein, 11 aa, Artificial Sequence
  Peptide Derived from Human Papillomavirus
ILQVLKTSNGK

SEQ ID NO: 10149 - protein, 9 aa, Artificial Sequence
  Peptide Derived from Human Papillomavirus
ITIEKLLEK

SEQ ID NO: 10150 - protein, 9 aa, Artificial Sequence
  Peptide Derived from Human Papillomavirus
ITSNINAGK

SEQ ID NO: 10151 - protein, 10 aa, Artificial Sequence
  Peptide Derived from Human Papillomavirus
IVKDCGTMCR

SEQ ID NO: 10152 - protein, 9 aa, Artificial Sequence
  Peptide Derived from Human Papillomavirus
KAAMLGKFK

SEQ ID NO: 10153 - protein, 10 aa, Artificial Sequence
  Peptide Derived from Human Papillomavirus
KAICIENNSK

SEQ ID NO: 10154 - protein, 11 aa, Artificial Sequence
  Peptide Derived from Human Papillomavirus
KIVKDCGTMCR

SEQ ID NO: 10155 - protein, 9 aa, Artificial Sequence
  Peptide Derived from Human Papillomavirus
KLFLKGVPK

SEQ ID NO: 10156 - protein, 10 aa, Artificial Sequence
  Peptide Derived from Human Papillomavirus
KLFLKGVPKK

SEQ ID NO: 10157 - protein, 10 aa, Artificial Sequence
  Peptide Derived from Human Papillomavirus
KSFFSRTWCR

SEQ ID NO: 10158 - protein, 10 aa, Artificial Sequence
  Peptide Derived from Human Papillomavirus
KSNSQAKIVK

SEQ ID NO: 10159 - protein, 9 aa, Artificial Sequence
  Peptide Derived from Human Papillomavirus
KVSDEGDWR

SEQ ID NO: 10160 - protein, 10 aa, Artificial Sequence
  Peptide Derived from Human Papillomavirus
LIHGAPNTGK

SEQ ID NO: 10161 - protein, 8 aa, Artificial Sequence
  Peptide Derived from Human Papillomavirus
LIQPPKLR

SEQ ID NO: 10162 - protein, 9 aa, Artificial Sequence
  Peptide Derived from Human Papillomavirus
LIRPFQSNK

SEQ ID NO: 10163 - protein, 10 aa, Artificial Sequence
  Peptide Derived from Human Papillomavirus
LITSNINAGK

SEQ ID NO: 10164 - protein, 11 aa, Artificial Sequence
  Peptide Derived from Human Papillomavirus
LLITSNINAGK

SEQ ID NO: 10165 - protein, 10 aa, Artificial Sequence
  Peptide Derived from Human Papillomavirus
LMLVRFKCAK

SEQ ID NO: 10166 - protein, 9 aa, Artificial Sequence
  Peptide Derived from Human Papillomavirus
LSALKLFLK

SEQ ID NO: 10167 - protein, 8 aa, Artificial Sequence
  Peptide Derived from Human Papillomavirus
LVRFKCAK

SEQ ID NO: 10168 - protein, 10 aa, Artificial Sequence
  Peptide Derived from Human Papillomavirus
LVRFKCAKNR

SEQ ID NO: 10169 - protein, 9 aa, Artificial Sequence
  Peptide Derived from Human Papillomavirus
MLIQPPKLR

SEQ ID NO: 10170 - protein, 8 aa, Artificial Sequence
  Peptide Derived from Human Papillomavirus
MLMLVRFK

SEQ ID NO: 10171 - protein, 11 aa, Artificial Sequence
  Peptide Derived from Human Papillomavirus
MLMLVRFKCAK

SEQ ID NO: 10172 - protein, 9 aa, Artificial Sequence
  Peptide Derived from Human Papillomavirus
MLVRFKCAK

SEQ ID NO: 10173 - protein, 11 aa, Artificial Sequence
  Peptide Derived from Human Papillomavirus
MLVRFKCAKNR

SEQ ID NO: 10174 - protein, 8 aa, Artificial Sequence
  Peptide Derived from Human Papillomavirus
MSMGQWIK

SEQ ID NO: 10175 - protein, 10 aa, Artificial Sequence
  Peptide Derived from Human Papillomavirus
MSMGQWIKSR

SEQ ID NO: 10176 - protein, 8 aa, Artificial Sequence
  Peptide Derived from Human Papillomavirus
MVMLMLVR

SEQ ID NO: 10177 - protein, 10 aa, Artificial Sequence
  Peptide Derived from Human Papillomavirus
MVMLMLVRFK

SEQ ID NO: 10178 - protein, 9 aa, Artificial Sequence
  Peptide Derived from Human Papillomavirus
NINAGKDDR

SEQ ID NO: 10179 - protein, 8 aa, Artificial Sequence
  Peptide Derived from Human Papillomavirus
NLHEEEDK

SEQ ID NO: 10180 - protein, 8 aa, Artificial Sequence
  Peptide Derived from Human Papillomavirus
NSKTAKRR

SEQ ID NO: 10181 - protein, 8 aa, Artificial Sequence
  Peptide Derived from Human Papillomavirus
NSQAKIVK

SEQ ID NO: 10182 - protein, 10 aa, Artificial Sequence
  Peptide Derived from Human Papillomavirus
PTRNILQVLK

SEQ ID NO: 10183 - protein, 9 aa, Artificial Sequence
  Peptide Derived from Human Papillomavirus
PVSIDVKHK

SEQ ID NO: 10184 - protein, 8 aa, Artificial Sequence
  Peptide Derived from Human Papillomavirus
PVYELSDK

SEQ ID NO: 10185 - protein, 11 aa, Artificial Sequence
  Peptide Derived from Human Papillomavirus
PVYELSDKNWK

SEQ ID NO: 10186 - protein, 9 aa, Artificial Sequence
  Peptide Derived from Human Papillomavirus
QMSMGQWIK

SEQ ID NO: 10187 - protein, 11 aa, Artificial Sequence
  Peptide Derived from Human Papillomavirus
QMSMGQWIKSR

SEQ ID NO: 10188 - protein, 9 aa, Artificial Sequence
  Peptide Derived from Human Papillomavirus
QVLKTSNGK

SEQ ID NO: 10189 - protein, 10 aa, Artificial Sequence
  Peptide Derived from Human Papillomavirus
RITIEKLLEK

SEQ ID NO: 10190 - protein, 10 aa, Artificial Sequence
  Peptide Derived from Human Papillomavirus
RLNLHEEEDK

SEQ ID NO: 10191 - protein, 11 aa, Artificial Sequence
  Peptide Derived from Human Papillomavirus
RSTAAALYWYR

SEQ ID NO: 10192 - protein, 8 aa, Artificial Sequence
  Peptide Derived from Human Papillomavirus
SALKLFLK

SEQ ID NO: 10193 - protein, 9 aa, Artificial Sequence
  Peptide Derived from Human Papillomavirus
SMGQWIKSR

SEQ ID NO: 10194 - protein, 11 aa, Artificial Sequence
  Peptide Derived from Human Papillomavirus
SSCVDYNISPR

SEQ ID NO: 10195 - protein, 10 aa, Artificial Sequence
  Peptide Derived from Human Papillomavirus
STAAALYWYR

SEQ ID NO: 10196 - protein, 11 aa, Artificial Sequence
  Peptide Derived from Human Papillomavirus
STNCMLIQPPK

SEQ ID NO: 10197 - protein, 9 aa, Artificial Sequence
  Peptide Derived from Human Papillomavirus
TAAALYWYR

SEQ ID NO: 10198 - protein, 8 aa, Artificial Sequence
  Peptide Derived from Human Papillomavirus
TIEKLLEK

SEQ ID NO: 10199 - protein, 8 aa, Artificial Sequence
  Peptide Derived from Human Papillomavirus
TMCRHYKR

SEQ ID NO: 10200 - protein, 11 aa, Artificial Sequence
  Peptide Derived from Human Papillomavirus
TMCRHYKRAEK

SEQ ID NO: 10201 - protein, 11 aa, Artificial Sequence
  Peptide Derived from Human Papillomavirus
TSNGKAAMLGK

SEQ ID NO: 10202 - protein, 8 aa, Artificial Sequence
  Peptide Derived from Human Papillomavirus
TSNINAGK

SEQ ID NO: 10203 - protein, 11 aa, Artificial Sequence
  Peptide Derived from Human Papillomavirus
TSNINAGKDDR

SEQ ID NO: 10204 - protein, 8 aa, Artificial Sequence
  Peptide Derived from Human Papillomavirus
VLKTSNGK

SEQ ID NO: 10205 - protein, 10 aa, Artificial Sequence
  Peptide Derived from Human Papillomavirus
VMDDSEIAYK

SEQ ID NO: 10206 - protein, 9 aa, Artificial Sequence
  Peptide Derived from Human Papillomavirus
VMLMLVRFK

SEQ ID NO: 10207 - protein, 8 aa, Artificial Sequence
  Peptide Derived from Human Papillomavirus
VSDEGDWR

SEQ ID NO: 10208 - protein, 8 aa, Artificial Sequence
  Peptide Derived from Human Papillomavirus
VSFLSALK

SEQ ID NO: 10209 - protein, 8 aa, Artificial Sequence
  Peptide Derived from Human Papillomavirus
VSFMELIR

SEQ ID NO: 10210 - protein, 8 aa, Artificial Sequence
  Peptide Derived from Human Papillomavirus
VSIDVKHK

SEQ ID NO: 10211 - protein, 10 aa, Artificial Sequence
  Peptide Derived from Human Papillomavirus
VTGTVAEGFK

SEQ ID NO: 10212 - protein, 8 aa, Artificial Sequence
  Peptide Derived from Human Papillomavirus
WIKSRCDK

SEQ ID NO: 10213 - protein, 9 aa, Artificial Sequence
  Peptide Derived from Human Papillomavirus
WLQPLADAK

SEQ ID NO: 10214 - protein, 8 aa, Artificial Sequence
  Peptide Derived from Human Papillomavirus
YVEAVIDR

SEQ ID NO: 10215 - protein, 9 aa, Artificial Sequence
  Peptide Derived from Human Papillomavirus
AAACTNQTR

SEQ ID NO: 10216 - protein, 8 aa, Artificial Sequence
  Peptide Derived from Human Papillomavirus
AACTNQTR

SEQ ID NO: 10217 - protein, 9 aa, Artificial Sequence
  Peptide Derived from Human Papillomavirus
ALGTSEGVR

SEQ ID NO: 10218 - protein, 10 aa, Artificial Sequence
  Peptide Derived from Human Papillomavirus
ALGTSEGVRR

SEQ ID NO: 10219 - protein, 8 aa, Artificial Sequence
  Peptide Derived from Human Papillomavirus
ALSVSKAK

SEQ ID NO: 10220 - protein, 9 aa, Artificial Sequence
  Peptide Derived from Human Papillomavirus
ATTPIIHLK

SEQ ID NO: 10221 - protein, 9 aa, Artificial Sequence
  Peptide Derived from Human Papillomavirus
ATTSTKRPR

SEQ ID NO: 10222 - protein, 10 aa, Artificial Sequence
  Peptide Derived from Human Papillomavirus
CALGTSEGVR

SEQ ID NO: 10223 - protein, 11 aa, Artificial Sequence
  Peptide Derived from Human Papillomavirus
CALGTSEGVRR

SEQ ID NO: 10224 - protein, 8 aa, Artificial Sequence
  Peptide Derived from Human Papillomavirus
CLRYRLSK

SEQ ID NO: 10225 - protein, 10 aa, Artificial Sequence
  Peptide Derived from Human Papillomavirus
CLRYRLSKYK

SEQ ID NO: 10226 - protein, 11 aa, Artificial Sequence
  Peptide Derived from Human Papillomavirus
CTVVEGQVNCK

SEQ ID NO: 10227 - protein, 8 aa, Artificial Sequence
  Peptide Derived from Human Papillomavirus
CVLMYKAR

SEQ ID NO: 10228 - protein, 9 aa, Artificial Sequence
  Peptide Derived from Human Papillomavirus
DANILKCLR

SEQ ID NO: 10229 - protein, 11 aa, Artificial Sequence
  Peptide Derived from Human Papillomavirus
DANILKCLRYR

SEQ ID NO: 10230 - protein, 9 aa, Artificial Sequence
  Peptide Derived from Human Papillomavirus
EAKKYGTGK

SEQ ID NO: 10231 - protein, 10 aa, Artificial Sequence
  Peptide Derived from Human Papillomavirus
EAKKYGTGKK

SEQ ID NO: 10232 - protein, 10 aa, Artificial Sequence
  Peptide Derived from Human Papillomavirus
EISFAGIVTK

SEQ ID NO: 10233 - protein, 9 aa, Artificial Sequence
  Peptide Derived from Human Papillomavirus
ETLNNTEYK

SEQ ID NO: 10234 - protein, 9 aa, Artificial Sequence
  Peptide Derived from Human Papillomavirus
FVNFTEEAK

SEQ ID NO: 10235 - protein, 10 aa, Artificial Sequence
  Peptide Derived from Human Papillomavirus
FVNFTEEAKK

SEQ ID NO: 10236 - protein, 8 aa, Artificial Sequence
  Peptide Derived from Human Papillomavirus
GTSEGVRR

SEQ ID NO: 10237 - protein, 10 aa, Artificial Sequence
  Peptide Derived from Human Papillomavirus
GVRRATTSTK

SEQ ID NO: 10238 - protein, 11 aa, Artificial Sequence
  Peptide Derived from Human Papillomavirus
GVRRATTSTKR

SEQ ID NO: 10239 - protein, 9 aa, Artificial Sequence
  Peptide Derived from Human Papillomavirus
HIDYWKHIR

SEQ ID NO: 10240 - protein, 11 aa, Artificial Sequence
  Peptide Derived from Human Papillomavirus
HIRLECVLMYK

SEQ ID NO: 10241 - protein, 10 aa, Artificial Sequence
  Peptide Derived from Human Papillomavirus
HLKGDANILK

SEQ ID NO: 10242 - protein, 10 aa, Artificial Sequence
  Peptide Derived from Human Papillomavirus
ILEHYENDSK

SEQ ID NO: 10243 - protein, 11 aa, Artificial Sequence
  Peptide Derived from Human Papillomavirus
ILEHYENDSKR

SEQ ID NO: 10244 - protein, 8 aa, Artificial Sequence
  Peptide Derived from Human Papillomavirus
ILKCLRYR

SEQ ID NO: 10245 - protein, 11 aa, Artificial Sequence
  Peptide Derived from Human Papillomavirus
ILKCLRYRLSK

SEQ ID NO: 10246 - protein, 11 aa, Artificial Sequence
  Peptide Derived from Human Papillomavirus
ISAAACTNQTR

SEQ ID NO: 10247 - protein, 9 aa, Artificial Sequence
  Peptide Derived from Human Papillomavirus
ISFAGIVTK

SEQ ID NO: 10248 - protein, 11 aa, Artificial Sequence
  Peptide Derived from Human Papillomavirus
KILEHYENDSK

SEQ ID NO: 10249 - protein, 11 aa, Artificial Sequence
  Peptide Derived from Human Papillomavirus
LSQRLNVCQDK

SEQ ID NO: 10250 - protein, 9 aa, Artificial Sequence
  Peptide Derived from Human Papillomavirus
LTAPTGCLK

SEQ ID NO: 10251 - protein, 10 aa, Artificial Sequence
  Peptide Derived from Human Papillomavirus
LTAPTGCLKK

SEQ ID NO: 10252 - protein, 9 aa, Artificial Sequence
  Peptide Derived from Human Papillomavirus
LTYISTSQR

SEQ ID NO: 10253 - protein, 11 aa, Artificial Sequence
  Peptide Derived from Human Papillomavirus
MLETLNNTEYK

SEQ ID NO: 10254 - protein, 9 aa, Artificial Sequence
  Peptide Derived from Human Papillomavirus
NILKCLRYR

SEQ ID NO: 10255 - protein, 10 aa, Artificial Sequence
  Peptide Derived from Human Papillomavirus
NTHHPNKLLR

SEQ ID NO: 10256 - protein, 9 aa, Artificial Sequence
  Peptide Derived from Human Papillomavirus
NTMHYTNWK

SEQ ID NO: 10257 - protein, 8 aa, Artificial Sequence
  Peptide Derived from Human Papillomavirus
NTTTSNSK

SEQ ID NO: 10258 - protein, 9 aa, Artificial Sequence
  Peptide Derived from Human Papillomavirus
PALSVSKAK

SEQ ID NO: 10259 - protein, 10 aa, Artificial Sequence
  Peptide Derived from Human Papillomavirus
PATTPIIHLK

SEQ ID NO: 10260 - protein, 10 aa, Artificial Sequence
  Peptide Derived from Human Papillomavirus
QVVPALSVSK

SEQ ID NO: 10261 - protein, 8 aa, Artificial Sequence
  Peptide Derived from Human Papillomavirus
RATTSTKR

SEQ ID NO: 10262 - protein, 10 aa, Artificial Sequence
  Peptide Derived from Human Papillomavirus
RATTSTKRPR

SEQ ID NO: 10263 - protein, 10 aa, Artificial Sequence
  Peptide Derived from Human Papillomavirus
RLCDHIDYWK

SEQ ID NO: 10264 - protein, 9 aa, Artificial Sequence
  Peptide Derived from Human Papillomavirus
RLECVLMYK

SEQ ID NO: 10265 - protein, 11 aa, Artificial Sequence
  Peptide Derived from Human Papillomavirus
RLECVLMYKAR

SEQ ID NO: 10266 - protein, 8 aa, Artificial Sequence
  Peptide Derived from Human Papillomavirus
RLNVCQDK

SEQ ID NO: 10267 - protein, 10 aa, Artificial Sequence
  Peptide Derived from Human Papillomavirus
SAAACTNQTR

SEQ ID NO: 10268 - protein, 11 aa, Artificial Sequence
  Peptide Derived from Human Papillomavirus
STWHWTCTDGK

SEQ ID NO: 10269 - protein, 11 aa, Artificial Sequence
  Peptide Derived from Human Papillomavirus
TANNTTTSNSK

SEQ ID NO: 10270 - protein, 8 aa, Artificial Sequence
  Peptide Derived from Human Papillomavirus
TAPTGCLK

SEQ ID NO: 10271 - protein, 9 aa, Artificial Sequence
  Peptide Derived from Human Papillomavirus
TAPTGCLKK

SEQ ID NO: 10272 - protein, 8 aa, Artificial Sequence
  Peptide Derived from Human Papillomavirus
TLNNTEYK

SEQ ID NO: 10273 - protein, 10 aa, Artificial Sequence
  Peptide Derived from Human Papillomavirus
TLTYISTSQR

SEQ ID NO: 10274 - protein, 8 aa, Artificial Sequence
  Peptide Derived from Human Papillomavirus
TMHYTNWK

SEQ ID NO: 10275 - protein, 8 aa, Artificial Sequence
  Peptide Derived from Human Papillomavirus
TTPIIHLK

SEQ ID NO: 10276 - protein, 8 aa, Artificial Sequence
  Peptide Derived from Human Papillomavirus
TTSTKRPR

SEQ ID NO: 10277 - protein, 10 aa, Artificial Sequence
  Peptide Derived from Human Papillomavirus
TVVEGQVNCK

SEQ ID NO: 10278 - protein, 11 aa, Artificial Sequence
  Peptide Derived from Human Papillomavirus
VTLTYISTSQR

SEQ ID NO: 10279 - protein, 9 aa, Artificial Sequence
  Peptide Derived from Human Papillomavirus
VVEGQVNCK

SEQ ID NO: 10280 - protein, 9 aa, Artificial Sequence
  Peptide Derived from Human Papillomavirus
VVPALSVSK

SEQ ID NO: 10281 - protein, 11 aa, Artificial Sequence
  Peptide Derived from Human Papillomavirus
VVPALSVSKAK

SEQ ID NO: 10282 - protein, 9 aa, Artificial Sequence
  Peptide Derived from Human Papillomavirus
WTCTDGKHK

SEQ ID NO: 10283 - protein, 10 aa, Artificial Sequence
  Peptide Derived from Human Papillomavirus
YLTAPTGCLK

SEQ ID NO: 10284 - protein, 11 aa, Artificial Sequence
  Peptide Derived from Human Papillomavirus
YLTAPTGCLKK

SEQ ID NO: 10285 - protein, 11 aa, Artificial Sequence
  Peptide Derived from Human Papillomavirus
CVLLFVCLVIR

SEQ ID NO: 10286 - protein, 11 aa, Artificial Sequence
  Peptide Derived from Human Papillomavirus
ILWVIATSPLR

SEQ ID NO: 10287 - protein, 9 aa, Artificial Sequence
  Peptide Derived from Human Papillomavirus
LLFVCLVIR

SEQ ID NO: 10288 - protein, 8 aa, Artificial Sequence
  Peptide Derived from Human Papillomavirus
VIATSPLR

SEQ ID NO: 10289 - protein, 10 aa, Artificial Sequence
  Peptide Derived from Human Papillomavirus
VLLFVCLVIR

SEQ ID NO: 10290 - protein, 9 aa, Artificial Sequence
  Peptide Derived from Human Papillomavirus
WVIATSPLR

SEQ ID NO: 10291 - protein, 10 aa, Artificial Sequence
  Peptide Derived from Human Papillomavirus
ALEIPYDELR

SEQ ID NO: 10292 - protein, 9 aa, Artificial Sequence
  Peptide Derived from Human Papillomavirus
CIACWRRPR

SEQ ID NO: 10293 - protein, 10 aa, Artificial Sequence
  Peptide Derived from Human Papillomavirus
CTKCLRFYSK

SEQ ID NO: 10294 - protein, 11 aa, Artificial Sequence
  Peptide Derived from Human Papillomavirus
DLLIRCITCQR

SEQ ID NO: 10295 - protein, 9 aa, Artificial Sequence
  Peptide Derived from Human Papillomavirus
DTPHGVCTK

SEQ ID NO: 10296 - protein, 8 aa, Artificial Sequence
  Peptide Derived from Human Papillomavirus
EIPYDELR

SEQ ID NO: 10297 - protein, 10 aa, Artificial Sequence
  Peptide Derived from Human Papillomavirus
ELRLNCVYCK

SEQ ID NO: 10298 - protein, 11 aa, Artificial Sequence
  Peptide Derived from Human Papillomavirus
FAFTDLTIVYR

SEQ ID NO: 10299 - protein, 9 aa, Artificial Sequence
  Peptide Derived from Human Papillomavirus
FTDLTIVYR

SEQ ID NO: 10300 - protein, 8 aa, Artificial Sequence
  Peptide Derived from Human Papillomavirus
GICDLLIR

SEQ ID NO: 10301 - protein, 10 aa, Artificial Sequence
  Peptide Derived from Human Papillomavirus
GTTLEKLTNK

SEQ ID NO: 10302 - protein, 8 aa, Artificial Sequence
  Peptide Derived from Human Papillomavirus
GVCTKCLR

SEQ ID NO: 10303 - protein, 8 aa, Artificial Sequence
  Peptide Derived from Human Papillomavirus
IACWRRPR

SEQ ID NO: 10304 - protein, 9 aa, Artificial Sequence
  Peptide Derived from Human Papillomavirus
KVSEFRWYR

SEQ ID NO: 10305 - protein, 9 aa, Artificial Sequence
  Peptide Derived from Human Papillomavirus
LIRCITCQR

SEQ ID NO: 10306 - protein, 10 aa, Artificial Sequence
  Peptide Derived from Human Papillomavirus
LLIRCITCQR

SEQ ID NO: 10307 - protein, 9 aa, Artificial Sequence
  Peptide Derived from Human Papillomavirus
NIGGRWTGR

SEQ ID NO: 10308 - protein, 9 aa, Artificial Sequence
  Peptide Derived from Human Papillomavirus
PLCPEEKQR

SEQ ID NO: 10309 - protein, 8 aa, Artificial Sequence
  Peptide Derived from Human Papillomavirus
RLNCVYCK

SEQ ID NO: 10310 - protein, 11 aa, Artificial Sequence
  Peptide Derived from Human Papillomavirus
SALEIPYDELR

SEQ ID NO: 10311 - protein, 9 aa, Artificial Sequence
  Peptide Derived from Human Papillomavirus
SVYGTTLEK

SEQ ID NO: 10312 - protein, 8 aa, Artificial Sequence
  Peptide Derived from Human Papillomavirus
TLEKLTNK

SEQ ID NO: 10313 - protein, 9 aa, Artificial Sequence
  Peptide Derived from Human Papillomavirus
TTLEKLTNK

SEQ ID NO: 10314 - protein, 8 aa, Artificial Sequence
  Peptide Derived from Human Papillomavirus
VSEFRWYR

SEQ ID NO: 10315 - protein, 10 aa, Artificial Sequence
  Peptide Derived from Human Papillomavirus
WTGRCIACWR

SEQ ID NO: 10316 - protein, 11 aa, Artificial Sequence
  Peptide Derived from Human Papillomavirus
WTGRCIACWRR

SEQ ID NO: 10317 - protein, 8 aa, Artificial Sequence
  Peptide Derived from Human Papillomavirus
YSKVSEFR

SEQ ID NO: 10318 - protein, 11 aa, Artificial Sequence
  Peptide Derived from Human Papillomavirus
YSKVSEFRWYR

SEQ ID NO: 10319 - protein, 10 aa, Artificial Sequence
  Peptide Derived from Human Papillomavirus
YSVYGTTLEK

SEQ ID NO: 10320 - protein, 10 aa, Artificial Sequence
  Peptide Derived from Human Papillomavirus
CVQSTQVDIR

SEQ ID NO: 10321 - protein, 10 aa, Artificial Sequence
  Peptide Derived from Human Papillomavirus
GIVCPNCSTR

SEQ ID NO: 10322 - protein, 9 aa, Artificial Sequence
  Peptide Derived from Human Papillomavirus
IVCPNCSTR

SEQ ID NO: 10323 - protein, 9 aa, Artificial Sequence
  Peptide Derived from Human Papillomavirus
IVTFCCQCK

SEQ ID NO: 10324 - protein, 10 aa, Artificial Sequence
  Peptide Derived from Human Papillomavirus
NIVTFCCQCK

SEQ ID NO: 10325 - protein, 8 aa, Artificial Sequence
  Peptide Derived from Human Papillomavirus
QSTQVDIR

SEQ ID NO: 10326 - protein, 8 aa, Artificial Sequence
  Peptide Derived from Human Papillomavirus
VTFCCQCK

SEQ ID NO: 10327 - protein, 11 aa, Artificial Sequence
  Peptide Derived from Human Papillomavirus
AAIANSDTTFK

SEQ ID NO: 10328 - protein, 10 aa, Artificial Sequence
  Peptide Derived from Human Papillomavirus
AIANSDTTFK

SEQ ID NO: 10329 - protein, 11 aa, Artificial Sequence
  Peptide Derived from Human Papillomavirus
AITCQKTAPQK

SEQ ID NO: 10330 - protein, 11 aa, Artificial Sequence
  Peptide Derived from Human Papillomavirus
AMDFTALQDTK

SEQ ID NO: 10331 - protein, 8 aa, Artificial Sequence
  Peptide Derived from Human Papillomavirus
ASTTTPAK

SEQ ID NO: 10332 - protein, 9 aa, Artificial Sequence
  Peptide Derived from Human Papillomavirus
ASTTTPAKR

SEQ ID NO: 10333 - protein, 10 aa, Artificial Sequence
  Peptide Derived from Human Papillomavirus
ASTTTPAKRK

SEQ ID NO: 10334 - protein, 11 aa, Artificial Sequence
  Peptide Derived from Human Papillomavirus
ASTTTPAKRKK

SEQ ID NO: 10335 - protein, 8 aa, Artificial Sequence
  Peptide Derived from Human Papillomavirus
CVGLEVGR

SEQ ID NO: 10336 - protein, 8 aa, Artificial Sequence
  Peptide Derived from Human Papillomavirus
DICNSICK

SEQ ID NO: 10337 - protein, 9 aa, Artificial Sequence
  Peptide Derived from Human Papillomavirus
DLDQFPLGR

SEQ ID NO: 10338 - protein, 10 aa, Artificial Sequence
  Peptide Derived from Human Papillomavirus
DLDQFPLGRK

SEQ ID NO: 10339 - protein, 10 aa, Artificial Sequence
  Peptide Derived from Human Papillomavirus
DLQFIFQLCK

SEQ ID NO: 10340 - protein, 8 aa, Artificial Sequence
  Peptide Derived from Human Papillomavirus
DTLFFYLR

SEQ ID NO: 10341 - protein, 9 aa, Artificial Sequence
  Peptide Derived from Human Papillomavirus
DTLFFYLRR

SEQ ID NO: 10342 - protein, 11 aa, Artificial Sequence
  Peptide Derived from Human Papillomavirus
DTSFYNPETQR

SEQ ID NO: 10343 - protein, 10 aa, Artificial Sequence
  Peptide Derived from Human Papillomavirus
DTTFKSSNFK

SEQ ID NO: 10344 - protein, 10 aa, Artificial Sequence
  Peptide Derived from Human Papillomavirus
ESVPTDLYIK

SEQ ID NO: 10345 - protein, 8 aa, Artificial Sequence
  Peptide Derived from Human Papillomavirus
FLLQAGYR

SEQ ID NO: 10346 - protein, 10 aa, Artificial Sequence
  Peptide Derived from Human Papillomavirus
FLLQAGYRAR

SEQ ID NO: 10347 - protein, 8 aa, Artificial Sequence
  Peptide Derived from Human Papillomavirus
FTALQDTK

SEQ ID NO: 10348 - protein, 8 aa, Artificial Sequence
  Peptide Derived from Human Papillomavirus
FVRHFFNR

SEQ ID NO: 10349 - protein, 11 aa, Artificial Sequence
  Peptide Derived from Human Papillomavirus
FVTSQAITCQK

SEQ ID NO: 10350 - protein, 9 aa, Artificial Sequence
  Peptide Derived from Human Papillomavirus
FVTVVDTTR

SEQ ID NO: 10351 - protein, 10 aa, Artificial Sequence
  Peptide Derived from Human Papillomavirus
GISGHPLLNK

SEQ ID NO: 10352 - protein, 8 aa, Artificial Sequence
  Peptide Derived from Human Papillomavirus
GLQYRVFR

SEQ ID NO: 10353 - protein, 10 aa, Artificial Sequence
  Peptide Derived from Human Papillomavirus
GLQYRVFRVR

SEQ ID NO: 10354 - protein, 8 aa, Artificial Sequence
  Peptide Derived from Human Papillomavirus
GSLEDTYR

SEQ ID NO: 10355 - protein, 9 aa, Artificial Sequence
  Peptide Derived from Human Papillomavirus
IANSDTTFK

SEQ ID NO: 10356 - protein, 9 aa, Artificial Sequence
  Peptide Derived from Human Papillomavirus
ISGHPLLNK

SEQ ID NO: 10357 - protein, 10 aa, Artificial Sequence
  Peptide Derived from Human Papillomavirus
ITCQKTAPQK

SEQ ID NO: 10358 - protein, 10 aa, Artificial Sequence
  Peptide Derived from Human Papillomavirus
KSSNFKEYLR

SEQ ID NO: 10359 - protein, 8 aa, Artificial Sequence
  Peptide Derived from Human Papillomavirus
KTAPQKPK

SEQ ID NO: 10360 - protein, 8 aa, Artificial Sequence
  Peptide Derived from Human Papillomavirus
KVSGLQYR

SEQ ID NO: 10361 - protein, 11 aa, Artificial Sequence
  Peptide Derived from Human Papillomavirus
KVSGLQYRVFR

SEQ ID NO: 10362 - protein, 11 aa, Artificial Sequence
  Peptide Derived from Human Papillomavirus
KVVSTDEYVTR

SEQ ID NO: 10363 - protein, 9 aa, Artificial Sequence
  Peptide Derived from Human Papillomavirus
LLQAGYRAR

SEQ ID NO: 10364 - protein, 11 aa, Artificial Sequence
  Peptide Derived from Human Papillomavirus
LLQAGYRARPK

SEQ ID NO: 10365 - protein, 11 aa, Artificial Sequence
  Peptide Derived from Human Papillomavirus
MVTSDAQIFNK

SEQ ID NO: 10366 - protein, 10 aa, Artificial Sequence
  Peptide Derived from Human Papillomavirus
NIYYHAGSAR

SEQ ID NO: 10367 - protein, 11 aa, Artificial Sequence
  Peptide Derived from Human Papillomavirus
NSICKYPDYLK

SEQ ID NO: 10368 - protein, 8 aa, Artificial Sequence
  Peptide Derived from Human Papillomavirus
PAKRKKTK

SEQ ID NO: 10369 - protein, 9 aa, Artificial Sequence
  Peptide Derived from Human Papillomavirus
PAKRKKTKK

SEQ ID NO: 10370 - protein, 8 aa, Artificial Sequence
  Peptide Derived from Human Papillomavirus
PIGEHWGK

SEQ ID NO: 10371 - protein, 10 aa, Artificial Sequence
  Peptide Derived from Human Papillomavirus
PLDICNSICK

SEQ ID NO: 10372 - protein, 10 aa, Artificial Sequence
  Peptide Derived from Human Papillomavirus
PSASTTTPAK

SEQ ID NO: 10373 - protein, 11 aa, Artificial Sequence
  Peptide Derived from Human Papillomavirus
PSASTTTPAKR

SEQ ID NO: 10374 - protein, 10 aa, Artificial Sequence
  Peptide Derived from Human Papillomavirus
PSGSLEDTYR

SEQ ID NO: 10375 - protein, 9 aa, Artificial Sequence
  Peptide Derived from Human Papillomavirus
QAGYRARPK

SEQ ID NO: 10376 - protein, 11 aa, Artificial Sequence
  Peptide Derived from Human Papillomavirus
QAGYRARPKFK

SEQ ID NO: 10377 - protein, 11 aa, Artificial Sequence
  Peptide Derived from Human Papillomavirus
QIFNKPYWMQR

SEQ ID NO: 10378 - protein, 8 aa, Artificial Sequence
  Peptide Derived from Human Papillomavirus
QLCLLGCK

SEQ ID NO: 10379 - protein, 11 aa, Artificial Sequence
  Peptide Derived from Human Papillomavirus
QLFVTVVDTTR

SEQ ID NO: 10380 - protein, 10 aa, Artificial Sequence
  Peptide Derived from Human Papillomavirus
QMFVRHFFNR

SEQ ID NO: 10381 - protein, 10 aa, Artificial Sequence
  Peptide Derived from Human Papillomavirus
QTQLCLLGCK

SEQ ID NO: 10382 - protein, 10 aa, Artificial Sequence
  Peptide Derived from Human Papillomavirus
RARPKFKAGK

SEQ ID NO: 10383 - protein, 11 aa, Artificial Sequence
  Peptide Derived from Human Papillomavirus
RARPKFKAGKR

SEQ ID NO: 10384 - protein, 9 aa, Artificial Sequence
  Peptide Derived from Human Papillomavirus
RVRLPDPNK

SEQ ID NO: 10385 - protein, 11 aa, Artificial Sequence
  Peptide Derived from Human Papillomavirus
SADLDQFPLGR

SEQ ID NO: 10386 - protein, 9 aa, Artificial Sequence
  Peptide Derived from Human Papillomavirus
SASTTTPAK

SEQ ID NO: 10387 - protein, 10 aa, Artificial Sequence
  Peptide Derived from Human Papillomavirus
SASTTTPAKR

SEQ ID NO: 10388 - protein, 11 aa, Artificial Sequence
  Peptide Derived from Human Papillomavirus
SASTTTPAKRK

SEQ ID NO: 10389 - protein, 10 aa, Artificial Sequence
  Peptide Derived from Human Papillomavirus
SICKYPDYLK

SEQ ID NO: 10390 - protein, 9 aa, Artificial Sequence
  Peptide Derived from Human Papillomavirus
SIPKSDNPK

SEQ ID NO: 10391 - protein, 10 aa, Artificial Sequence
  Peptide Derived from Human Papillomavirus
SIPKSDNPKK

SEQ ID NO: 10392 - protein, 9 aa, Artificial Sequence
  Peptide Derived from Human Papillomavirus
SSNFKEYLR

SEQ ID NO: 10393 - protein, 8 aa, Artificial Sequence
  Peptide Derived from Human Papillomavirus
STDEYVTR

SEQ ID NO: 10394 - protein, 8 aa, Artificial Sequence
  Peptide Derived from Human Papillomavirus
STTTPAKR

SEQ ID NO: 10395 - protein, 9 aa, Artificial Sequence
  Peptide Derived from Human Papillomavirus
STTTPAKRK

SEQ ID NO: 10396 - protein, 10 aa, Artificial Sequence
  Peptide Derived from Human Papillomavirus
STTTPAKRKK

SEQ ID NO: 10397 - protein, 9 aa, Artificial Sequence
  Peptide Derived from Human Papillomavirus
SVPTDLYIK

SEQ ID NO: 10398 - protein, 8 aa, Artificial Sequence
  Peptide Derived from Human Papillomavirus
TLFFYLRR

SEQ ID NO: 10399 - protein, 9 aa, Artificial Sequence
  Peptide Derived from Human Papillomavirus
TSDAQIFNK

SEQ ID NO: 10400 - protein, 10 aa, Artificial Sequence
  Peptide Derived from Human Papillomavirus
TSFYNPETQR

SEQ ID NO: 10401 - protein, 9 aa, Artificial Sequence
  Peptide Derived from Human Papillomavirus
TSQAITCQK

SEQ ID NO: 10402 - protein, 9 aa, Artificial Sequence
  Peptide Derived from Human Papillomavirus
TTFKSSNFK

SEQ ID NO: 10403 - protein, 8 aa, Artificial Sequence
  Peptide Derived from Human Papillomavirus
TTPAKRKK

SEQ ID NO: 10404 - protein, 10 aa, Artificial Sequence
  Peptide Derived from Human Papillomavirus
TTPAKRKKTK

SEQ ID NO: 10405 - protein, 11 aa, Artificial Sequence
  Peptide Derived from Human Papillomavirus
TTPAKRKKTKK

SEQ ID NO: 10406 - protein, 8 aa, Artificial Sequence
  Peptide Derived from Human Papillomavirus
TTTPAKRK

SEQ ID NO: 10407 - protein, 9 aa, Artificial Sequence
  Peptide Derived from Human Papillomavirus
TTTPAKRKK

SEQ ID NO: 10408 - protein, 11 aa, Artificial Sequence
  Peptide Derived from Human Papillomavirus
TTTPAKRKKTK

SEQ ID NO: 10409 - protein, 11 aa, Artificial Sequence
  Peptide Derived from Human Papillomavirus
TVGHPYYSIPK

SEQ ID NO: 10410 - protein, 11 aa, Artificial Sequence
  Peptide Derived from Human Papillomavirus
TVYLPPVPVSK

SEQ ID NO: 10411 - protein, 10 aa, Artificial Sequence
  Peptide Derived from Human Papillomavirus
VSGLQYRVFR

SEQ ID NO: 10412 - protein, 9 aa, Artificial Sequence
  Peptide Derived from Human Papillomavirus
VSTDEYVTR

SEQ ID NO: 10413 - protein, 10 aa, Artificial Sequence
  Peptide Derived from Human Papillomavirus
VTSDAQIFNK

SEQ ID NO: 10414 - protein, 10 aa, Artificial Sequence
  Peptide Derived from Human Papillomavirus
VTSQAITCQK

SEQ ID NO: 10415 - protein, 8 aa, Artificial Sequence
  Peptide Derived from Human Papillomavirus
VTVVDTTR

SEQ ID NO: 10416 - protein, 11 aa, Artificial Sequence
  Peptide Derived from Human Papillomavirus
VVPKVSGLQYR

SEQ ID NO: 10417 - protein, 10 aa, Artificial Sequence
  Peptide Derived from Human Papillomavirus
VVSTDEYVTR

SEQ ID NO: 10418 - protein, 10 aa, Artificial Sequence
  Peptide Derived from Human Papillomavirus
WACVGLEVGR

SEQ ID NO: 10419 - protein, 10 aa, Artificial Sequence
  Peptide Derived from Human Papillomavirus
YAGGPGTDNR

SEQ ID NO: 10420 - protein, 9 aa, Artificial Sequence
  Peptide Derived from Human Papillomavirus
YLPPVPVSK

SEQ ID NO: 10421 - protein, 10 aa, Artificial Sequence
  Peptide Derived from Human Papillomavirus
YLRREQMFVR

SEQ ID NO: 10422 - protein, 10 aa, Artificial Sequence
  Peptide Derived from Human Papillomavirus
YSIPKSDNPK

SEQ ID NO: 10423 - protein, 11 aa, Artificial Sequence
  Peptide Derived from Human Papillomavirus
YSIPKSDNPKK

SEQ ID NO: 10424 - protein, 9 aa, Artificial Sequence
  Peptide Derived from Human Papillomavirus
YVFWEVNLK

SEQ ID NO: 10425 - protein, 11 aa, Artificial Sequence
  Peptide Derived from Human Papillomavirus
YVFWEVNLKEK

SEQ ID NO: 10426 - protein, 10 aa, Artificial Sequence
  Peptide Derived from Human Papillomavirus
ALHRPALTSR

SEQ ID NO: 10427 - protein, 11 aa, Artificial Sequence
  Peptide Derived from Human Papillomavirus
ALHRPALTSRR

SEQ ID NO: 10428 - protein, 10 aa, Artificial Sequence
  Peptide Derived from Human Papillomavirus
ALTSRRNTVR

SEQ ID NO: 10429 - protein, 11 aa, Artificial Sequence
  Peptide Derived from Human Papillomavirus
ASATQLYQTCK

SEQ ID NO: 10430 - protein, 9 aa, Artificial Sequence
  Peptide Derived from Human Papillomavirus
ATQLYQTCK

SEQ ID NO: 10431 - protein, 9 aa, Artificial Sequence
  Peptide Derived from Human Papillomavirus
FLDIIALHR

SEQ ID NO: 10432 - protein, 11 aa, Artificial Sequence
  Peptide Derived from Human Papillomavirus
GIGSGSGTGGR

SEQ ID NO: 10433 - protein, 11 aa, Artificial Sequence
  Peptide Derived from Human Papillomavirus
GLYSKATQQVK

SEQ ID NO: 10434 - protein, 9 aa, Artificial Sequence
  Peptide Derived from Human Papillomavirus
GSGSGTGGR

SEQ ID NO: 10435 - protein, 10 aa, Artificial Sequence
  Peptide Derived from Human Papillomavirus
GTCPSDVIPK

SEQ ID NO: 10436 - protein, 10 aa, Artificial Sequence
  Peptide Derived from Human Papillomavirus
HTTIADQILR

SEQ ID NO: 10437 - protein, 11 aa, Artificial Sequence
  Peptide Derived from Human Papillomavirus
IALHRPALTSR

SEQ ID NO: 10438 - protein, 11 aa, Artificial Sequence
  Peptide Derived from Human Papillomavirus
ITSSTPIPGVR

SEQ ID NO: 10439 - protein, 9 aa, Artificial Sequence
  Peptide Derived from Human Papillomavirus
LTSRRNTVR

SEQ ID NO: 10440 - protein, 8 aa, Artificial Sequence
  Peptide Derived from Human Papillomavirus
MLKRRRKR

SEQ ID NO: 10441 - protein, 11 aa, Artificial Sequence
  Peptide Derived from Human Papillomavirus
NTVRYSRLGNK

SEQ ID NO: 10442 - protein, 11 aa, Artificial Sequence
  Peptide Derived from Human Papillomavirus
PALTSRRNTVR

SEQ ID NO: 10443 - protein, 9 aa, Artificial Sequence
  Peptide Derived from Human Papillomavirus
PARLGLYSK

SEQ ID NO: 10444 - protein, 10 aa, Artificial Sequence
  Peptide Derived from Human Papillomavirus
PIPGVRRPAR

SEQ ID NO: 10445 - protein, 8 aa, Artificial Sequence
  Peptide Derived from Human Papillomavirus
PSYYMLKR

SEQ ID NO: 10446 - protein, 9 aa, Artificial Sequence
  Peptide Derived from Human Papillomavirus
PSYYMLKRR

SEQ ID NO: 10447 - protein, 10 aa, Artificial Sequence
  Peptide Derived from Human Papillomavirus
PSYYMLKRRR

SEQ ID NO: 10448 - protein, 11 aa, Artificial Sequence
  Peptide Derived from Human Papillomavirus
PSYYMLKRRRK

SEQ ID NO: 10449 - protein, 8 aa, Artificial Sequence
  Peptide Derived from Human Papillomavirus
PTFLSAPK

SEQ ID NO: 10450 - protein, 9 aa, Artificial Sequence
  Peptide Derived from Human Papillomavirus
RLGNKQTLR

SEQ ID NO: 10451 - protein, 11 aa, Artificial Sequence
  Peptide Derived from Human Papillomavirus
RLGNKQTLRTR

SEQ ID NO: 10452 - protein, 9 aa, Artificial Sequence
  Peptide Derived from Human Papillomavirus
RSGATIGAR

SEQ ID NO: 10453 - protein, 8 aa, Artificial Sequence
  Peptide Derived from Human Papillomavirus
RSKRSTKR

SEQ ID NO: 10454 - protein, 10 aa, Artificial Sequence
  Peptide Derived from Human Papillomavirus
RSKRSTKRTK

SEQ ID NO: 10455 - protein, 11 aa, Artificial Sequence
  Peptide Derived from Human Papillomavirus
RSKRSTKRTKR

SEQ ID NO: 10456 - protein, 8 aa, Artificial Sequence
  Peptide Derived from Human Papillomavirus
RSTKRTKR

SEQ ID NO: 10457 - protein, 10 aa, Artificial Sequence
  Peptide Derived from Human Papillomavirus
RTGYVPLSTR

SEQ ID NO: 10458 - protein, 11 aa, Artificial Sequence
  Peptide Derived from Human Papillomavirus
RTRSGATIGAR

SEQ ID NO: 10459 - protein, 10 aa, Artificial Sequence
  Peptide Derived from Human Papillomavirus
SATQLYQTCK

SEQ ID NO: 10460 - protein, 9 aa, Artificial Sequence
  Peptide Derived from Human Papillomavirus
SSTPIPGVR

SEQ ID NO: 10461 - protein, 10 aa, Artificial Sequence
  Peptide Derived from Human Papillomavirus
SSTPIPGVRR

SEQ ID NO: 10462 - protein, 8 aa, Artificial Sequence
  Peptide Derived from Human Papillomavirus
STPIPGVR

SEQ ID NO: 10463 - protein, 9 aa, Artificial Sequence
  Peptide Derived from Human Papillomavirus
STPIPGVRR

SEQ ID NO: 10464 - protein, 11 aa, Artificial Sequence
  Peptide Derived from Human Papillomavirus
STVSEASIPIR

SEQ ID NO: 10465 - protein, 8 aa, Artificial Sequence
  Peptide Derived from Human Papillomavirus
TIADQILR

SEQ ID NO: 10466 - protein, 8 aa, Artificial Sequence
  Peptide Derived from Human Papillomavirus
TSRRNTVR

SEQ ID NO: 10467 - protein, 11 aa, Artificial Sequence
  Peptide Derived from Human Papillomavirus
TSRRNTVRYSR

SEQ ID NO: 10468 - protein, 10 aa, Artificial Sequence
  Peptide Derived from Human Papillomavirus
TSSTPIPGVR

SEQ ID NO: 10469 - protein, 11 aa, Artificial Sequence
  Peptide Derived from Human Papillomavirus
TSSTPIPGVRR

SEQ ID NO: 10470 - protein, 9 aa, Artificial Sequence
  Peptide Derived from Human Papillomavirus
TTIADQILR

SEQ ID NO: 10471 - protein, 10 aa, Artificial Sequence
  Peptide Derived from Human Papillomavirus
TVRYSRLGNK

SEQ ID NO: 10472 - protein, 10 aa, Artificial Sequence
  Peptide Derived from Human Papillomavirus
TVSEASIPIR

SEQ ID NO: 10473 - protein, 11 aa, Artificial Sequence
  Peptide Derived from Human Papillomavirus
VIDPTFLSAPK

SEQ ID NO: 10474 - protein, 9 aa, Artificial Sequence
  Peptide Derived from Human Papillomavirus
VSEASIPIR

SEQ ID NO: 10475 - protein, 10 aa, Artificial Sequence
  Peptide Derived from Human Papillomavirus
YLHPSYYMLK

SEQ ID NO: 10476 - protein, 11 aa, Artificial Sequence
  Peptide Derived from Human Papillomavirus
YLHPSYYMLKR

SEQ ID NO: 10477 - protein, 8 aa, Artificial Sequence
  Peptide Derived from Human Papillomavirus
YMLKRRRK

SEQ ID NO: 10478 - protein, 9 aa, Artificial Sequence
  Peptide Derived from Human Papillomavirus
YMLKRRRKR

SEQ ID NO: 10479 - protein, 9 aa, Artificial Sequence
  Peptide Derived from Human Papillomavirus
YSKATQQVK

SEQ ID NO: 10480 - protein, 11 aa, Artificial Sequence
  Peptide Derived from Human Papillomavirus
YSRLGNKQTLR

SEQ ID NO: 10481 - protein, 8 aa, Artificial Sequence
  Peptide Derived from Human Papillomavirus
AAEDVVDR

SEQ ID NO: 10482 - protein, 11 aa, Artificial Sequence
  Peptide Derived from Human Papillomavirus
AAFLKSNSQAK

SEQ ID NO: 10483 - protein, 11 aa, Artificial Sequence
  Peptide Derived from Human Papillomavirus
AANPCRTSINK

SEQ ID NO: 10484 - protein, 8 aa, Artificial Sequence
  Peptide Derived from Human Papillomavirus
AINDENWK

SEQ ID NO: 10485 - protein, 8 aa, Artificial Sequence
  Peptide Derived from Human Papillomavirus
AVCALKRK

SEQ ID NO: 10486 - protein, 8 aa, Artificial Sequence
  Peptide Derived from Human Papillomavirus
CMVIEPPK

SEQ ID NO: 10487 - protein, 10 aa, Artificial Sequence
  Peptide Derived from Human Papillomavirus
CMVIEPPKLR

SEQ ID NO: 10488 - protein, 8 aa, Artificial Sequence
  Peptide Derived from Human Papillomavirus
CSAGENTR

SEQ ID NO: 10489 - protein, 11 aa, Artificial Sequence
  Peptide Derived from Human Papillomavirus
CSAGENTRSLR

SEQ ID NO: 10490 - protein, 10 aa, Artificial Sequence
  Peptide Derived from Human Papillomavirus
CSKNRLTVAK

SEQ ID NO: 10491 - protein, 9 aa, Artificial Sequence
  Peptide Derived from Human Papillomavirus
CVISCVNSK

SEQ ID NO: 10492 - protein, 8 aa, Artificial Sequence
  Peptide Derived from Human Papillomavirus
DLIEEEDK

SEQ ID NO: 10493 - protein, 9 aa, Artificial Sequence
  Peptide Derived from Human Papillomavirus
DLNAVCALK

SEQ ID NO: 10494 - protein, 10 aa, Artificial Sequence
  Peptide Derived from Human Papillomavirus
DLNAVCALKR

SEQ ID NO: 10495 - protein, 11 aa, Artificial Sequence
  Peptide Derived from Human Papillomavirus
DLNAVCALKRK

SEQ ID NO: 10496 - protein, 11 aa, Artificial Sequence
  Peptide Derived from Human Papillomavirus
DSNSNAAAFLK

SEQ ID NO: 10497 - protein, 10 aa, Artificial Sequence
  Peptide Derived from Human Papillomavirus
DSRWPYLHSR

SEQ ID NO: 10498 - protein, 11 aa, Artificial Sequence
  Peptide Derived from Human Papillomavirus
DVKHRALVQLK

SEQ ID NO: 10499 - protein, 11 aa, Artificial Sequence
  Peptide Derived from Human Papillomavirus
DVVDRAANPCR

SEQ ID NO: 10500 - protein, 9 aa, Artificial Sequence
  Peptide Derived from Human Papillomavirus
EISIDVKHR

SEQ ID NO: 10501 - protein, 10 aa, Artificial Sequence
  Peptide Derived from Human Papillomavirus
ELVRPFKSDK

SEQ ID NO: 10502 - protein, 8 aa, Artificial Sequence
  Peptide Derived from Human Papillomavirus
ESLKVLIK

SEQ ID NO: 10503 - protein, 10 aa, Artificial Sequence
  Peptide Derived from Human Papillomavirus
ETCMVIEPPK

SEQ ID NO: 10504 - protein, 8 aa, Artificial Sequence
  Peptide Derived from Human Papillomavirus
EVEAVIER

SEQ ID NO: 10505 - protein, 9 aa, Artificial Sequence
  Peptide Derived from Human Papillomavirus
EVEAVIERR

SEQ ID NO: 10506 - protein, 10 aa, Artificial Sequence
  Peptide Derived from Human Papillomavirus
FLGAFKKFLK

SEQ ID NO: 10507 - protein, 8 aa, Artificial Sequence
  Peptide Derived from Human Papillomavirus
FLKGIPKK

SEQ ID NO: 10508 - protein, 9 aa, Artificial Sequence
  Peptide Derived from Human Papillomavirus
FLKSNSQAK

SEQ ID NO: 10509 - protein, 9 aa, Artificial Sequence
  Peptide Derived from Human Papillomavirus
FMELVRPFK

SEQ ID NO: 10510 - protein, 9 aa, Artificial Sequence
  Peptide Derived from Human Papillomavirus
FTAFLGAFK

SEQ ID NO: 10511 - protein, 10 aa, Artificial Sequence
  Peptide Derived from Human Papillomavirus
FTAFLGAFKK

SEQ ID NO: 10512 - protein, 8 aa, Artificial Sequence
  Peptide Derived from Human Papillomavirus
GAFKKFLK

SEQ ID NO: 10513 - protein, 9 aa, Artificial Sequence
  Peptide Derived from Human Papillomavirus
GIIILLLIR

SEQ ID NO: 10514 - protein, 11 aa, Artificial Sequence
  Peptide Derived from Human Papillomavirus
GIIILLLIRFR

SEQ ID NO: 10515 - protein, 8 aa, Artificial Sequence
  Peptide Derived from Human Papillomavirus
GIMCRHYK

SEQ ID NO: 10516 - protein, 9 aa, Artificial Sequence
  Peptide Derived from Human Papillomavirus
GIMCRHYKK

SEQ ID NO: 10517 - protein, 9 aa, Artificial Sequence
  Peptide Derived from Human Papillomavirus
GISFMELVR

SEQ ID NO: 10518 - protein, 11 aa, Artificial Sequence
  Peptide Derived from Human Papillomavirus
GISPSVAESLK

SEQ ID NO: 10519 - protein, 9 aa, Artificial Sequence
  Peptide Derived from Human Papillomavirus
GMSLIQFLK

SEQ ID NO: 10520 - protein, 9 aa, Artificial Sequence
  Peptide Derived from Human Papillomavirus
GTTPEWIDR

SEQ ID NO: 10521 - protein, 9 aa, Artificial Sequence
  Peptide Derived from Human Papillomavirus
HLQCLTCDR

SEQ ID NO: 10522 - protein, 10 aa, Artificial Sequence
  Peptide Derived from Human Papillomavirus
HSRLTVFEFK

SEQ ID NO: 10523 - protein, 8 aa, Artificial Sequence
  Peptide Derived from Human Papillomavirus
IIILLLIR

SEQ ID NO: 10524 - protein, 10 aa, Artificial Sequence
  Peptide Derived from Human Papillomavirus
IIILLLIRFR

SEQ ID NO: 10525 - protein, 9 aa, Artificial Sequence
  Peptide Derived from Human Papillomavirus
IILLLIRFR

SEQ ID NO: 10526 - protein, 8 aa, Artificial Sequence
  Peptide Derived from Human Papillomavirus
ILLLIRFR

SEQ ID NO: 10527 - protein, 11 aa, Artificial Sequence
  Peptide Derived from Human Papillomavirus
ILLLIRFRCSK

SEQ ID NO: 10528 - protein, 8 aa, Artificial Sequence
  Peptide Derived from Human Papillomavirus
IMCRHYKK

SEQ ID NO: 10529 - protein, 11 aa, Artificial Sequence
  Peptide Derived from Human Papillomavirus
IMCRHYKKAEK

SEQ ID NO: 10530 - protein, 8 aa, Artificial Sequence
  Peptide Derived from Human Papillomavirus
ISFMELVR

SEQ ID NO: 10531 - protein, 11 aa, Artificial Sequence
  Peptide Derived from Human Papillomavirus
ISFMELVRPFK

SEQ ID NO: 10532 - protein, 8 aa, Artificial Sequence
  Peptide Derived from Human Papillomavirus
ISIDVKHR

SEQ ID NO: 10533 - protein, 11 aa, Artificial Sequence
  Peptide Derived from Human Papillomavirus
ISNVLHSSNTK

SEQ ID NO: 10534 - protein, 10 aa, Artificial Sequence
  Peptide Derived from Human Papillomavirus
ISPSVAESLK

SEQ ID NO: 10535 - protein, 11 aa, Artificial Sequence
  Peptide Derived from Human Papillomavirus
ISWTYIDDYMR

SEQ ID NO: 10536 - protein, 10 aa, Artificial Sequence
  Peptide Derived from Human Papillomavirus
IVKDCGIMCR

SEQ ID NO: 10537 - protein, 9 aa, Artificial Sequence
  Peptide Derived from Human Papillomavirus
KANILYKFK

SEQ ID NO: 10538 - protein, 11 aa, Artificial Sequence
  Peptide Derived from Human Papillomavirus
KIVKDCGIMCR

SEQ ID NO: 10539 - protein, 10 aa, Artificial Sequence
  Peptide Derived from Human Papillomavirus
KLDLIEEEDK

SEQ ID NO: 10540 - protein, 11 aa, Artificial Sequence
  Peptide Derived from Human Papillomavirus
KMSIGQWIQSR

SEQ ID NO: 10541 - protein, 10 aa, Artificial Sequence
  Peptide Derived from Human Papillomavirus
KSFFSRTWCK

SEQ ID NO: 10542 - protein, 10 aa, Artificial Sequence
  Peptide Derived from Human Papillomavirus
KSNSQAKIVK

SEQ ID NO: 10543 - protein, 9 aa, Artificial Sequence
  Peptide Derived from Human Papillomavirus
KTNDGGNWR

SEQ ID NO: 10544 - protein, 10 aa, Artificial Sequence
  Peptide Derived from Human Papillomavirus
LICGPANTGK

SEQ ID NO: 10545 - protein, 8 aa, Artificial Sequence
  Peptide Derived from Human Papillomavirus
LIRFRCSK

SEQ ID NO: 10546 - protein, 10 aa, Artificial Sequence
  Peptide Derived from Human Papillomavirus
LIRFRCSKNR

SEQ ID NO: 10547 - protein, 9 aa, Artificial Sequence
  Peptide Derived from Human Papillomavirus
LLIRFRCSK

SEQ ID NO: 10548 - protein, 11 aa, Artificial Sequence
  Peptide Derived from Human Papillomavirus
LLIRFRCSKNR

SEQ ID NO: 10549 - protein, 10 aa, Artificial Sequence
  Peptide Derived from Human Papillomavirus
LLLIRFRCSK

SEQ ID NO: 10550 - protein, 9 aa, Artificial Sequence
  Peptide Derived from Human Papillomavirus
LVRPFKSDK

SEQ ID NO: 10551 - protein, 11 aa, Artificial Sequence
  Peptide Derived from Human Papillomavirus
MLICGPANTGK

SEQ ID NO: 10552 - protein, 10 aa, Artificial Sequence
  Peptide Derived from Human Papillomavirus
MSIGQWIQSR

SEQ ID NO: 10553 - protein, 8 aa, Artificial Sequence
  Peptide Derived from Human Papillomavirus
MSLIQFLK

SEQ ID NO: 10554 - protein, 9 aa, Artificial Sequence
  Peptide Derived from Human Papillomavirus
MVIEPPKLR

SEQ ID NO: 10555 - protein, 8 aa, Artificial Sequence
  Peptide Derived from Human Papillomavirus
NAVCALKR

SEQ ID NO: 10556 - protein, 9 aa, Artificial Sequence
  Peptide Derived from Human Papillomavirus
NAVCALKRK

SEQ ID NO: 10557 - protein, 11 aa, Artificial Sequence
  Peptide Derived from Human Papillomavirus
NSIQADTEAAR

SEQ ID NO: 10558 - protein, 9 aa, Artificial Sequence
  Peptide Derived from Human Papillomavirus
NSNAAAFLK

SEQ ID NO: 10559 - protein, 8 aa, Artificial Sequence
  Peptide Derived from Human Papillomavirus
NSQAKIVK

SEQ ID NO: 10560 - protein, 9 aa, Artificial Sequence
  Peptide Derived from Human Papillomavirus
NTKANILYK

SEQ ID NO: 10561 - protein, 11 aa, Artificial Sequence
  Peptide Derived from Human Papillomavirus
NTKANILYKFK

SEQ ID NO: 10562 - protein, 9 aa, Artificial Sequence
  Peptide Derived from Human Papillomavirus
NTNAGTDSR

SEQ ID NO: 10563 - protein, 9 aa, Artificial Sequence
  Peptide Derived from Human Papillomavirus
NVLHSSNTK

SEQ ID NO: 10564 - protein, 8 aa, Artificial Sequence
  Peptide Derived from Human Papillomavirus
PSVAESLK

SEQ ID NO: 10565 - protein, 11 aa, Artificial Sequence
  Peptide Derived from Human Papillomavirus
PVYAINDENWK

SEQ ID NO: 10566 - protein, 8 aa, Artificial Sequence
  Peptide Derived from Human Papillomavirus
QADTEAAR

SEQ ID NO: 10567 - protein, 10 aa, Artificial Sequence
  Peptide Derived from Human Papillomavirus
QSAAEDVVDR

SEQ ID NO: 10568 - protein, 9 aa, Artificial Sequence
  Peptide Derived from Human Papillomavirus
QTCALYWFR

SEQ ID NO: 10569 - protein, 8 aa, Artificial Sequence
  Peptide Derived from Human Papillomavirus
RLTVFEFK

SEQ ID NO: 10570 - protein, 11 aa, Artificial Sequence
  Peptide Derived from Human Papillomavirus
RSQTCALYWFR

SEQ ID NO: 10571 - protein, 8 aa, Artificial Sequence
  Peptide Derived from Human Papillomavirus
RTSINKNK

SEQ ID NO: 10572 - protein, 9 aa, Artificial Sequence
  Peptide Derived from Human Papillomavirus
SAAEDVVDR

SEQ ID NO: 10573 - protein, 10 aa, Artificial Sequence
  Peptide Derived from Human Papillomavirus
SAGENTRSLR

SEQ ID NO: 10574 - protein, 9 aa, Artificial Sequence
  Peptide Derived from Human Papillomavirus
SIGQWIQSR

SEQ ID NO: 10575 - protein, 11 aa, Artificial Sequence
  Peptide Derived from Human Papillomavirus
SINKNKECTYR

SEQ ID NO: 10576 - protein, 10 aa, Artificial Sequence
  Peptide Derived from Human Papillomavirus
SIQADTEAAR

SEQ ID NO: 10577 - protein, 11 aa, Artificial Sequence
  Peptide Derived from Human Papillomavirus
SSNTKANILYK

SEQ ID NO: 10578 - protein, 11 aa, Artificial Sequence
  Peptide Derived from Human Papillomavirus
SVAESLKVLIK

SEQ ID NO: 10579 - protein, 8 aa, Artificial Sequence
  Peptide Derived from Human Papillomavirus
TAFLGAFK

SEQ ID NO: 10580 - protein, 9 aa, Artificial Sequence
  Peptide Derived from Human Papillomavirus
TAFLGAFKK

SEQ ID NO: 10581 - protein, 11 aa, Artificial Sequence
  Peptide Derived from Human Papillomavirus
TSNTNAGTDSR

SEQ ID NO: 10582 - protein, 8 aa, Artificial Sequence
  Peptide Derived from Human Papillomavirus
TTPEWIDR

SEQ ID NO: 10583 - protein, 10 aa, Artificial Sequence
  Peptide Derived from Human Papillomavirus
VAESLKVLIK

SEQ ID NO: 10584 - protein, 8 aa, Artificial Sequence
  Peptide Derived from Human Papillomavirus
VIEPPKLR

SEQ ID NO: 10585 - protein, 8 aa, Artificial Sequence
  Peptide Derived from Human Papillomavirus
VISCVNSK

SEQ ID NO: 10586 - protein, 8 aa, Artificial Sequence
  Peptide Derived from Human Papillomavirus
VLHSSNTK

SEQ ID NO: 10587 - protein, 10 aa, Artificial Sequence
  Peptide Derived from Human Papillomavirus
VVDRAANPCR

SEQ ID NO: 10588 - protein, 8 aa, Artificial Sequence
  Peptide Derived from Human Papillomavirus
WIQSRCEK

SEQ ID NO: 10589 - protein, 9 aa, Artificial Sequence
  Peptide Derived from Human Papillomavirus
WLQPLSDAK

SEQ ID NO: 10590 - protein, 9 aa, Artificial Sequence
  Peptide Derived from Human Papillomavirus
WTYIDDYMR

SEQ ID NO: 10591 - protein, 9 aa, Artificial Sequence
  Peptide Derived from Human Papillomavirus
YAINDENWK

SEQ ID NO: 10592 - protein, 11 aa, Artificial Sequence
  Peptide Derived from Human Papillomavirus
YTHLQCLTCDR

SEQ ID NO: 10593 - protein, 8 aa, Artificial Sequence
  Peptide Derived from Human Papillomavirus
ALDNRTAR

SEQ ID NO: 10594 - protein, 9 aa, Artificial Sequence
  Peptide Derived from Human Papillomavirus
ATNCTNKQR

SEQ ID NO: 10595 - protein, 9 aa, Artificial Sequence
  Peptide Derived from Human Papillomavirus
CADPALDNR

SEQ ID NO: 10596 - protein, 8 aa, Artificial Sequence
  Peptide Derived from Human Papillomavirus
CALLYTAK

SEQ ID NO: 10597 - protein, 10 aa, Artificial Sequence
  Peptide Derived from Human Papillomavirus
CLRYRLKPYK

SEQ ID NO: 10598 - protein, 9 aa, Artificial Sequence
  Peptide Derived from Human Papillomavirus
DIQTDNDNR

SEQ ID NO: 10599 - protein, 10 aa, Artificial Sequence
  Peptide Derived from Human Papillomavirus
DLPSQIEHWK

SEQ ID NO: 10600 - protein, 8 aa, Artificial Sequence
  Peptide Derived from Human Papillomavirus
DTAQPLTK

SEQ ID NO: 10601 - protein, 9 aa, Artificial Sequence
  Peptide Derived from Human Papillomavirus
DTCTMVTGK

SEQ ID NO: 10602 - protein, 11 aa, Artificial Sequence
  Peptide Derived from Human Papillomavirus
DTTDTAQPLTK

SEQ ID NO: 10603 - protein, 11 aa, Artificial Sequence
  Peptide Derived from Human Papillomavirus
ELQMALETLSK

SEQ ID NO: 10604 - protein, 9 aa, Artificial Sequence
  Peptide Derived from Human Papillomavirus
ESNSLKCLR

SEQ ID NO: 10605 - protein, 11 aa, Artificial Sequence
  Peptide Derived from Human Papillomavirus
ESNSLKCLRYR

SEQ ID NO: 10606 - protein, 11 aa, Artificial Sequence
  Peptide Derived from Human Papillomavirus
ETVTVQYDNDK

SEQ ID NO: 10607 - protein, 9 aa, Artificial Sequence
  Peptide Derived from Human Papillomavirus
EVWLCEPPK

SEQ ID NO: 10608 - protein, 10 aa, Artificial Sequence
  Peptide Derived from Human Papillomavirus
GMYYIHNCEK

SEQ ID NO: 10609 - protein, 10 aa, Artificial Sequence
  Peptide Derived from Human Papillomavirus
HLKGESNSLK

SEQ ID NO: 10610 - protein, 9 aa, Artificial Sequence
  Peptide Derived from Human Papillomavirus
ILDLYEADK

SEQ ID NO: 10611 - protein, 11 aa, Artificial Sequence
  Peptide Derived from Human Papillomavirus
ISARLNAVQEK

SEQ ID NO: 10612 - protein, 10 aa, Artificial Sequence
  Peptide Derived from Human Papillomavirus
KILDLYEADK

SEQ ID NO: 10613 - protein, 8 aa, Artificial Sequence
  Peptide Derived from Human Papillomavirus
KVYFKYFK

SEQ ID NO: 10614 - protein, 8 aa, Artificial Sequence
  Peptide Derived from Human Papillomavirus
MALETLSK

SEQ ID NO: 10615 - protein, 9 aa, Artificial Sequence
  Peptide Derived from Human Papillomavirus
NSLKCLRYR

SEQ ID NO: 10616 - protein, 11 aa, Artificial Sequence
  Peptide Derived from Human Papillomavirus
NSLKCLRYRLK

SEQ ID NO: 10617 - protein, 9 aa, Artificial Sequence
  Peptide Derived from Human Papillomavirus
NVAPIVHLK

SEQ ID NO: 10618 - protein, 9 aa, Artificial Sequence
  Peptide Derived from Human Papillomavirus
PALDNRTAR

SEQ ID NO: 10619 - protein, 9 aa, Artificial Sequence
  Peptide Derived from Human Papillomavirus
PSLLASKTK

SEQ ID NO: 10620 - protein, 8 aa, Artificial Sequence
  Peptide Derived from Human Papillomavirus
PSQIEHWK

SEQ ID NO: 10621 - protein, 11 aa, Artificial Sequence
  Peptide Derived from Human Papillomavirus
PSQIEHWKLIR

SEQ ID NO: 10622 - protein, 8 aa, Artificial Sequence
  Peptide Derived from Human Papillomavirus
QAAAKRRR

SEQ ID NO: 10623 - protein, 9 aa, Artificial Sequence
  Peptide Derived from Human Papillomavirus
QIEHWKLIR

SEQ ID NO: 10624 - protein, 9 aa, Artificial Sequence
  Peptide Derived from Human Papillomavirus
QMALETLSK

SEQ ID NO: 10625 - protein, 8 aa, Artificial Sequence
  Peptide Derived from Human Papillomavirus
QMFLGTVK

SEQ ID NO: 10626 - protein, 10 aa, Artificial Sequence
  Peptide Derived from Human Papillomavirus
QVVPSLLASK

SEQ ID NO: 10627 - protein, 8 aa, Artificial Sequence
  Peptide Derived from Human Papillomavirus
RLNAVQEK

SEQ ID NO: 10628 - protein, 11 aa, Artificial Sequence
  Peptide Derived from Human Papillomavirus
RMECALLYTAK

SEQ ID NO: 10629 - protein, 9 aa, Artificial Sequence
  Peptide Derived from Human Papillomavirus
RTATNCTNK

SEQ ID NO: 10630 - protein, 11 aa, Artificial Sequence
  Peptide Derived from Human Papillomavirus
RTATNCTNKQR

SEQ ID NO: 10631 - protein, 10 aa, Artificial Sequence
  Peptide Derived from Human Papillomavirus
SARLNAVQEK

SEQ ID NO: 10632 - protein, 11 aa, Artificial Sequence
  Peptide Derived from Human Papillomavirus
SLEVWLCEPPK

SEQ ID NO: 10633 - protein, 8 aa, Artificial Sequence
  Peptide Derived from Human Papillomavirus
SLKCLRYR

SEQ ID NO: 10634 - protein, 10 aa, Artificial Sequence
  Peptide Derived from Human Papillomavirus
SLKCLRYRLK

SEQ ID NO: 10635 - protein, 8 aa, Artificial Sequence
  Peptide Derived from Human Papillomavirus
SLLASKTK

SEQ ID NO: 10636 - protein, 11 aa, Artificial Sequence
  Peptide Derived from Human Papillomavirus
SSNVAPIVHLK

SEQ ID NO: 10637 - protein, 11 aa, Artificial Sequence
  Peptide Derived from Human Papillomavirus
SSTWHWTSDNK

SEQ ID NO: 10638 - protein, 10 aa, Artificial Sequence
  Peptide Derived from Human Papillomavirus
STWHWTSDNK

SEQ ID NO: 10639 - protein, 11 aa, Artificial Sequence
  Peptide Derived from Human Papillomavirus
TADIQTDNDNR

SEQ ID NO: 10640 - protein, 11 aa, Artificial Sequence
  Peptide Derived from Human Papillomavirus
TARTATNCTNK

SEQ ID NO: 10641 - protein, 8 aa, Artificial Sequence
  Peptide Derived from Human Papillomavirus
TATNCTNK

SEQ ID NO: 10642 - protein, 10 aa, Artificial Sequence
  Peptide Derived from Human Papillomavirus
TATNCTNKQR

SEQ ID NO: 10643 - protein, 8 aa, Artificial Sequence
  Peptide Derived from Human Papillomavirus
TSDNKNSK

SEQ ID NO: 10644 - protein, 10 aa, Artificial Sequence
  Peptide Derived from Human Papillomavirus
TTDTAQPLTK

SEQ ID NO: 10645 - protein, 8 aa, Artificial Sequence
  Peptide Derived from Human Papillomavirus
TVQYDNDK

SEQ ID NO: 10646 - protein, 9 aa, Artificial Sequence
  Peptide Derived from Human Papillomavirus
TVQYDNDKK

SEQ ID NO: 10647 - protein, 10 aa, Artificial Sequence
  Peptide Derived from Human Papillomavirus
TVTVQYDNDK

SEQ ID NO: 10648 - protein, 11 aa, Artificial Sequence
  Peptide Derived from Human Papillomavirus
TVTVQYDNDKK

SEQ ID NO: 10649 - protein, 8 aa, Artificial Sequence
  Peptide Derived from Human Papillomavirus
VAPIVHLK

SEQ ID NO: 10650 - protein, 9 aa, Artificial Sequence
  Peptide Derived from Human Papillomavirus
VTVQYDNDK

SEQ ID NO: 10651 - protein, 10 aa, Artificial Sequence
  Peptide Derived from Human Papillomavirus
VTVQYDNDKK

SEQ ID NO: 10652 - protein, 9 aa, Artificial Sequence
  Peptide Derived from Human Papillomavirus
VVPSLLASK

SEQ ID NO: 10653 - protein, 11 aa, Artificial Sequence
  Peptide Derived from Human Papillomavirus
VVPSLLASKTK

SEQ ID NO: 10654 - protein, 10 aa, Artificial Sequence
  Peptide Derived from Human Papillomavirus
WLCEPPKCFK

SEQ ID NO: 10655 - protein, 11 aa, Artificial Sequence
  Peptide Derived from Human Papillomavirus
WLCEPPKCFKK

SEQ ID NO: 10656 - protein, 9 aa, Artificial Sequence
  Peptide Derived from Human Papillomavirus
WTSDNKNSK

SEQ ID NO: 10657 - protein, 11 aa, Artificial Sequence
  Peptide Derived from Human Papillomavirus
YIHNCEKVYFK

SEQ ID NO: 10658 - protein, 9 aa, Artificial Sequence
  Peptide Derived from Human Papillomavirus
FLCLSLLLR

SEQ ID NO: 10659 - protein, 11 aa, Artificial Sequence
  Peptide Derived from Human Papillomavirus
ILFLCLSLLLR

SEQ ID NO: 10660 - protein, 11 aa, Artificial Sequence
  Peptide Derived from Human Papillomavirus
LLWVFVGSPLK

SEQ ID NO: 10661 - protein, 9 aa, Artificial Sequence
  Peptide Derived from Human Papillomavirus
WVFVGSPLK

SEQ ID NO: 10662 - protein, 8 aa, Artificial Sequence
  Peptide Derived from Human Papillomavirus
AACWRSRR

SEQ ID NO: 10663 - protein, 9 aa, Artificial Sequence
  Peptide Derived from Human Papillomavirus
AACWRSRRR

SEQ ID NO: 10664 - protein, 8 aa, Artificial Sequence
  Peptide Derived from Human Papillomavirus
CAACWRSR

SEQ ID NO: 10665 - protein, 9 aa, Artificial Sequence
  Peptide Derived from Human Papillomavirus
CAACWRSRR

SEQ ID NO: 10666 - protein, 10 aa, Artificial Sequence
  Peptide Derived from Human Papillomavirus
CAACWRSRRR

SEQ ID NO: 10667 - protein, 10 aa, Artificial Sequence
  Peptide Derived from Human Papillomavirus
CVECKKPLQR

SEQ ID NO: 10668 - protein, 11 aa, Artificial Sequence
  Peptide Derived from Human Papillomavirus
EILIRCIICQR

SEQ ID NO: 10669 - protein, 8 aa, Artificial Sequence
  Peptide Derived from Human Papillomavirus
ELQCVECK

SEQ ID NO: 10670 - protein, 9 aa, Artificial Sequence
  Peptide Derived from Human Papillomavirus
ELQCVECKK

SEQ ID NO: 10671 - protein, 9 aa, Artificial Sequence
  Peptide Derived from Human Papillomavirus
FADLTVVYR

SEQ ID NO: 10672 - protein, 11 aa, Artificial Sequence
  Peptide Derived from Human Papillomavirus
FAFADLTVVYR

SEQ ID NO: 10673 - protein, 9 aa, Artificial Sequence
  Peptide Derived from Human Papillomavirus
FLSKISEYR

SEQ ID NO: 10674 - protein, 8 aa, Artificial Sequence
  Peptide Derived from Human Papillomavirus
GICKLCLR

SEQ ID NO: 10675 - protein, 10 aa, Artificial Sequence
  Peptide Derived from Human Papillomavirus
ILIRCIICQR

SEQ ID NO: 10676 - protein, 8 aa, Artificial Sequence
  Peptide Derived from Human Papillomavirus
ISGRWAGR

SEQ ID NO: 10677 - protein, 9 aa, Artificial Sequence
  Peptide Derived from Human Papillomavirus
KLCLRFLSK

SEQ ID NO: 10678 - protein, 9 aa, Artificial Sequence
  Peptide Derived from Human Papillomavirus
LIRCIICQR

SEQ ID NO: 10679 - protein, 8 aa, Artificial Sequence
  Peptide Derived from Human Papillomavirus
LSKISEYR

SEQ ID NO: 10680 - protein, 10 aa, Artificial Sequence
  Peptide Derived from Human Papillomavirus
NIELQCVECK

SEQ ID NO: 10681 - protein, 11 aa, Artificial Sequence
  Peptide Derived from Human Papillomavirus
NIELQCVECKK

SEQ ID NO: 10682 - protein, 9 aa, Artificial Sequence
  Peptide Derived from Human Papillomavirus
NISGRWAGR

SEQ ID NO: 10683 - protein, 8 aa, Artificial Sequence
  Peptide Derived from Human Papillomavirus
NTLEQTVK

SEQ ID NO: 10684 - protein, 9 aa, Artificial Sequence
  Peptide Derived from Human Papillomavirus
NTLEQTVKK

SEQ ID NO: 10685 - protein, 8 aa, Artificial Sequence
  Peptide Derived from Human Papillomavirus
PLCPQEKK

SEQ ID NO: 10686 - protein, 9 aa, Artificial Sequence
  Peptide Derived from Human Papillomavirus
PLCPQEKKR

SEQ ID NO: 10687 - protein, 8 aa, Artificial Sequence
  Peptide Derived from Human Papillomavirus
PLNEILIR

SEQ ID NO: 10688 - protein, 8 aa, Artificial Sequence
  Peptide Derived from Human Papillomavirus
TLEQTVKK

SEQ ID NO: 10689 - protein, 10 aa, Artificial Sequence
  Peptide Derived from Human Papillomavirus
WAGRCAACWR

SEQ ID NO: 10690 - protein, 10 aa, Artificial Sequence
  Peptide Derived from Human Papillomavirus
CVNSTASDLR

SEQ ID NO: 10691 - protein, 11 aa, Artificial Sequence
  Peptide Derived from Human Papillomavirus
DSSDEDEGLDR

SEQ ID NO: 10692 - protein, 8 aa, Artificial Sequence
  Peptide Derived from Human Papillomavirus
HTCNTTVR

SEQ ID NO: 10693 - protein, 8 aa, Artificial Sequence
  Peptide Derived from Human Papillomavirus
NSTASDLR

SEQ ID NO: 10694 - protein, 10 aa, Artificial Sequence
  Peptide Derived from Human Papillomavirus
SSDEDEGLDR

SEQ ID NO: 10695 - protein, 11 aa, Artificial Sequence
  Peptide Derived from Human Papillomavirus
AITCQKTVPPK

SEQ ID NO: 10696 - protein, 8 aa, Artificial Sequence
  Peptide Derived from Human Papillomavirus
ASLQDTYR

SEQ ID NO: 10697 - protein, 10 aa, Artificial Sequence
  Peptide Derived from Human Papillomavirus
AVGHPYFSIK

SEQ ID NO: 10698 - protein, 9 aa, Artificial Sequence
  Peptide Derived from Human Papillomavirus
AVPDDLYIK

SEQ ID NO: 10699 - protein, 11 aa, Artificial Sequence
  Peptide Derived from Human Papillomavirus
CMDFKTLQANK

SEQ ID NO: 10700 - protein, 11 aa, Artificial Sequence
  Peptide Derived from Human Papillomavirus
CTQVTSDSTYK

SEQ ID NO: 10701 - protein, 8 aa, Artificial Sequence
  Peptide Derived from Human Papillomavirus
CVGLEIGR

SEQ ID NO: 10702 - protein, 8 aa, Artificial Sequence
  Peptide Derived from Human Papillomavirus
DICGSTCK

SEQ ID NO: 10703 - protein, 9 aa, Artificial Sequence
  Peptide Derived from Human Papillomavirus
DLDQFPLGR

SEQ ID NO: 10704 - protein, 10 aa, Artificial Sequence
  Peptide Derived from Human Papillomavirus
DLDQFPLGRK

SEQ ID NO: 10705 - protein, 10 aa, Artificial Sequence
  Peptide Derived from Human Papillomavirus
DLQFVFQLCK

SEQ ID NO: 10706 - protein, 8 aa, Artificial Sequence
  Peptide Derived from Human Papillomavirus
DSLFFFLR

SEQ ID NO: 10707 - protein, 9 aa, Artificial Sequence
  Peptide Derived from Human Papillomavirus
DSLFFFLRR

SEQ ID NO: 10708 - protein, 10 aa, Artificial Sequence
  Peptide Derived from Human Papillomavirus
DSTYKNENFK

SEQ ID NO: 10709 - protein, 10 aa, Artificial Sequence
  Peptide Derived from Human Papillomavirus
DTGFGCMDFK

SEQ ID NO: 10710 - protein, 11 aa, Artificial Sequence
  Peptide Derived from Human Papillomavirus
DTSFYNPDTQR

SEQ ID NO: 10711 - protein, 10 aa, Artificial Sequence
  Peptide Derived from Human Papillomavirus
EAVPDDLYIK

SEQ ID NO: 10712 - protein, 8 aa, Artificial Sequence
  Peptide Derived from Human Papillomavirus
FLLQAGLK

SEQ ID NO: 10713 - protein, 10 aa, Artificial Sequence
  Peptide Derived from Human Papillomavirus
FLLQAGLKAK

SEQ ID NO: 10714 - protein, 10 aa, Artificial Sequence
  Peptide Derived from Human Papillomavirus
FLRREQMFVR

SEQ ID NO: 10715 - protein, 10 aa, Artificial Sequence
  Peptide Derived from Human Papillomavirus
FSIKNPTNAK

SEQ ID NO: 10716 - protein, 11 aa, Artificial Sequence
  Peptide Derived from Human Papillomavirus
FSIKNPTNAKK

SEQ ID NO: 10717 - protein, 8 aa, Artificial Sequence
  Peptide Derived from Human Papillomavirus
FVRHFFNR

SEQ ID NO: 10718 - protein, 11 aa, Artificial Sequence
  Peptide Derived from Human Papillomavirus
FVTSQAITCQK

SEQ ID NO: 10719 - protein, 9 aa, Artificial Sequence
  Peptide Derived from Human Papillomavirus
FVTVVDTTR

SEQ ID NO: 10720 - protein, 10 aa, Artificial Sequence
  Peptide Derived from Human Papillomavirus
GISGHPLLNK

SEQ ID NO: 10721 - protein, 9 aa, Artificial Sequence
  Peptide Derived from Human Papillomavirus
GLKAKPKLK

SEQ ID NO: 10722 - protein, 10 aa, Artificial Sequence
  Peptide Derived from Human Papillomavirus
GLKAKPKLKR

SEQ ID NO: 10723 - protein, 8 aa, Artificial Sequence
  Peptide Derived from Human Papillomavirus
GLQYRVFR

SEQ ID NO: 10724 - protein, 10 aa, Artificial Sequence
  Peptide Derived from Human Papillomavirus
GLQYRVFRVR

SEQ ID NO: 10725 - protein, 11 aa, Artificial Sequence
  Peptide Derived from Human Papillomavirus
GSTCKYPDYLK

SEQ ID NO: 10726 - protein, 9 aa, Artificial Sequence
  Peptide Derived from Human Papillomavirus
ISGHPLLNK

SEQ ID NO: 10727 - protein, 10 aa, Artificial Sequence
  Peptide Derived from Human Papillomavirus
ITCQKTVPPK

SEQ ID NO: 10728 - protein, 8 aa, Artificial Sequence
  Peptide Derived from Human Papillomavirus
KAKPKLKR

SEQ ID NO: 10729 - protein, 11 aa, Artificial Sequence
  Peptide Derived from Human Papillomavirus
KLKRAAPTSTR

SEQ ID NO: 10730 - protein, 8 aa, Artificial Sequence
  Peptide Derived from Human Papillomavirus
KTVPPKEK

SEQ ID NO: 10731 - protein, 8 aa, Artificial Sequence
  Peptide Derived from Human Papillomavirus
KVSGLQYR

SEQ ID NO: 10732 - protein, 11 aa, Artificial Sequence
  Peptide Derived from Human Papillomavirus
KVSGLQYRVFR

SEQ ID NO: 10733 - protein, 11 aa, Artificial Sequence
  Peptide Derived from Human Papillomavirus
KVVSTDEYVSR

SEQ ID NO: 10734 - protein, 11 aa, Artificial Sequence
  Peptide Derived from Human Papillomavirus
LAVGHPYFSIK

SEQ ID NO: 10735 - protein, 9 aa, Artificial Sequence
  Peptide Derived from Human Papillomavirus
LLQAGLKAK

SEQ ID NO: 10736 - protein, 11 aa, Artificial Sequence
  Peptide Derived from Human Papillomavirus
LLQAGLKAKPK

SEQ ID NO: 10737 - protein, 11 aa, Artificial Sequence
  Peptide Derived from Human Papillomavirus
LVPKVSGLQYR

SEQ ID NO: 10738 - protein, 11 aa, Artificial Sequence
  Peptide Derived from Human Papillomavirus
MVTSESQLFNK

SEQ ID NO: 10739 - protein, 9 aa, Artificial Sequence
  Peptide Derived from Human Papillomavirus
NAKKLLVPK

SEQ ID NO: 10740 - protein, 10 aa, Artificial Sequence
  Peptide Derived from Human Papillomavirus
PIDICGSTCK

SEQ ID NO: 10741 - protein, 10 aa, Artificial Sequence
  Peptide Derived from Human Papillomavirus
PSASLQDTYR

SEQ ID NO: 10742 - protein, 8 aa, Artificial Sequence
  Peptide Derived from Human Papillomavirus
PTGEHWGK

SEQ ID NO: 10743 - protein, 11 aa, Artificial Sequence
  Peptide Derived from Human Papillomavirus
PTNAKKLLVPK

SEQ ID NO: 10744 - protein, 10 aa, Artificial Sequence
  Peptide Derived from Human Papillomavirus
PTSTRTSSAK

SEQ ID NO: 10745 - protein, 11 aa, Artificial Sequence
  Peptide Derived from Human Papillomavirus
PTSTRTSSAKR

SEQ ID NO: 10746 - protein, 9 aa, Artificial Sequence
  Peptide Derived from Human Papillomavirus
QAGLKAKPK

SEQ ID NO: 10747 - protein, 11 aa, Artificial Sequence
  Peptide Derived from Human Papillomavirus
QAGLKAKPKLK

SEQ ID NO: 10748 - protein, 8 aa, Artificial Sequence
  Peptide Derived from Human Papillomavirus
QLCLLGCK

SEQ ID NO: 10749 - protein, 11 aa, Artificial Sequence
  Peptide Derived from Human Papillomavirus
QLFNKPYWLQR

SEQ ID NO: 10750 - protein, 10 aa, Artificial Sequence
  Peptide Derived from Human Papillomavirus
QMFVRHFFNR

SEQ ID NO: 10751 - protein, 10 aa, Artificial Sequence
  Peptide Derived from Human Papillomavirus
QTQLCLLGCK

SEQ ID NO: 10752 - protein, 11 aa, Artificial Sequence
  Peptide Derived from Human Papillomavirus
QVFVTVVDTTR

SEQ ID NO: 10753 - protein, 9 aa, Artificial Sequence
  Peptide Derived from Human Papillomavirus
QVTSDSTYK

SEQ ID NO: 10754 - protein, 8 aa, Artificial Sequence
  Peptide Derived from Human Papillomavirus
RAAPTSTR

SEQ ID NO: 10755 - protein, 8 aa, Artificial Sequence
  Peptide Derived from Human Papillomavirus
RTSSAKRK

SEQ ID NO: 10756 - protein, 9 aa, Artificial Sequence
  Peptide Derived from Human Papillomavirus
RTSSAKRKK

SEQ ID NO: 10757 - protein, 11 aa, Artificial Sequence
  Peptide Derived from Human Papillomavirus
RTSSAKRKKVK

SEQ ID NO: 10758 - protein, 9 aa, Artificial Sequence
  Peptide Derived from Human Papillomavirus
RVRLPDPNK

SEQ ID NO: 10759 - protein, 11 aa, Artificial Sequence
  Peptide Derived from Human Papillomavirus
SADLDQFPLGR

SEQ ID NO: 10760 - protein, 8 aa, Artificial Sequence
  Peptide Derived from Human Papillomavirus
SAKRKKVK

SEQ ID NO: 10761 - protein, 9 aa, Artificial Sequence
  Peptide Derived from Human Papillomavirus
SAKRKKVKK

SEQ ID NO: 10762 - protein, 9 aa, Artificial Sequence
  Peptide Derived from Human Papillomavirus
SASLQDTYR

SEQ ID NO: 10763 - protein, 9 aa, Artificial Sequence
  Peptide Derived from Human Papillomavirus
SIKNPTNAK

SEQ ID NO: 10764 - protein, 10 aa, Artificial Sequence
  Peptide Derived from Human Papillomavirus
SIKNPTNAKK

SEQ ID NO: 10765 - protein, 10 aa, Artificial Sequence
  Peptide Derived from Human Papillomavirus
SIYYYAGSSR

SEQ ID NO: 10766 - protein, 8 aa, Artificial Sequence
  Peptide Derived from Human Papillomavirus
SLFFFLRR

SEQ ID NO: 10767 - protein, 9 aa, Artificial Sequence
  Peptide Derived from Human Papillomavirus
SSAKRKKVK

SEQ ID NO: 10768 - protein, 10 aa, Artificial Sequence
  Peptide Derived from Human Papillomavirus
SSAKRKKVKK

SEQ ID NO: 10769 - protein, 10 aa, Artificial Sequence
  Peptide Derived from Human Papillomavirus
STCKYPDYLK

SEQ ID NO: 10770 - protein, 8 aa, Artificial Sequence
  Peptide Derived from Human Papillomavirus
STDEYVSR

SEQ ID NO: 10771 - protein, 8 aa, Artificial Sequence
  Peptide Derived from Human Papillomavirus
STRTSSAK

SEQ ID NO: 10772 - protein, 9 aa, Artificial Sequence
  Peptide Derived from Human Papillomavirus
STRTSSAKR

SEQ ID NO: 10773 - protein, 10 aa, Artificial Sequence
  Peptide Derived from Human Papillomavirus
STRTSSAKRK

SEQ ID NO: 10774 - protein, 11 aa, Artificial Sequence
  Peptide Derived from Human Papillomavirus
STRTSSAKRKK

SEQ ID NO: 10775 - protein, 9 aa, Artificial Sequence
  Peptide Derived from Human Papillomavirus
STYKNENFK

SEQ ID NO: 10776 - protein, 9 aa, Artificial Sequence
  Peptide Derived from Human Papillomavirus
TSESQLFNK

SEQ ID NO: 10777 - protein, 10 aa, Artificial Sequence
  Peptide Derived from Human Papillomavirus
TSFYNPDTQR

SEQ ID NO: 10778 - protein, 11 aa, Artificial Sequence
  Peptide Derived from Human Papillomavirus
TSIYYYAGSSR

SEQ ID NO: 10779 - protein, 9 aa, Artificial Sequence
  Peptide Derived from Human Papillomavirus
TSQAITCQK

SEQ ID NO: 10780 - protein, 8 aa, Artificial Sequence
  Peptide Derived from Human Papillomavirus
TSSAKRKK

SEQ ID NO: 10781 - protein, 10 aa, Artificial Sequence
  Peptide Derived from Human Papillomavirus
TSSAKRKKVK

SEQ ID NO: 10782 - protein, 11 aa, Artificial Sequence
  Peptide Derived from Human Papillomavirus
TSSAKRKKVKK

SEQ ID NO: 10783 - protein, 9 aa, Artificial Sequence
  Peptide Derived from Human Papillomavirus
TSTRTSSAK

SEQ ID NO: 10784 - protein, 10 aa, Artificial Sequence
  Peptide Derived from Human Papillomavirus
TSTRTSSAKR

SEQ ID NO: 10785 - protein, 11 aa, Artificial Sequence
  Peptide Derived from Human Papillomavirus
TSTRTSSAKRK

SEQ ID NO: 10786 - protein, 11 aa, Artificial Sequence
  Peptide Derived from Human Papillomavirus
TVYLPPVPVSK

SEQ ID NO: 10787 - protein, 10 aa, Artificial Sequence
  Peptide Derived from Human Papillomavirus
VSGLQYRVFR

SEQ ID NO: 10788 - protein, 9 aa, Artificial Sequence
  Peptide Derived from Human Papillomavirus
VSTDEYVSR

SEQ ID NO: 10789 - protein, 8 aa, Artificial Sequence
  Peptide Derived from Human Papillomavirus
VTSDSTYK

SEQ ID NO: 10790 - protein, 10 aa, Artificial Sequence
  Peptide Derived from Human Papillomavirus
VTSESQLFNK

SEQ ID NO: 10791 - protein, 10 aa, Artificial Sequence
  Peptide Derived from Human Papillomavirus
VTSQAITCQK

SEQ ID NO: 10792 - protein, 8 aa, Artificial Sequence
  Peptide Derived from Human Papillomavirus
VTVVDTTR

SEQ ID NO: 10793 - protein, 10 aa, Artificial Sequence
  Peptide Derived from Human Papillomavirus
VVSTDEYVSR

SEQ ID NO: 10794 - protein, 10 aa, Artificial Sequence
  Peptide Derived from Human Papillomavirus
WACVGLEIGR

SEQ ID NO: 10795 - protein, 9 aa, Artificial Sequence
  Peptide Derived from Human Papillomavirus
YLPPVPVSK

SEQ ID NO: 10796 - protein, 9 aa, Artificial Sequence
  Peptide Derived from Human Papillomavirus
YTFWEVDLK

SEQ ID NO: 10797 - protein, 11 aa, Artificial Sequence
  Peptide Derived from Human Papillomavirus
YTFWEVDLKEK

SEQ ID NO: 10798 - protein, 9 aa, Artificial Sequence
  Peptide Derived from Human Papillomavirus
AAIPLQPIR

SEQ ID NO: 10799 - protein, 8 aa, Artificial Sequence
  Peptide Derived from Human Papillomavirus
AIPLQPIR

SEQ ID NO: 10800 - protein, 10 aa, Artificial Sequence
  Peptide Derived from Human Papillomavirus
AITSRRHTVR

SEQ ID NO: 10801 - protein, 10 aa, Artificial Sequence
  Peptide Derived from Human Papillomavirus
ALHRPAITSR

SEQ ID NO: 10802 - protein, 11 aa, Artificial Sequence
  Peptide Derived from Human Papillomavirus
ALHRPAITSRR

SEQ ID NO: 10803 - protein, 11 aa, Artificial Sequence
  Peptide Derived from Human Papillomavirus
ASATQLYQTCK

SEQ ID NO: 10804 - protein, 9 aa, Artificial Sequence
  Peptide Derived from Human Papillomavirus
ATLKTRSGK

SEQ ID NO: 10805 - protein, 9 aa, Artificial Sequence
  Peptide Derived from Human Papillomavirus
ATQLYQTCK

SEQ ID NO: 10806 - protein, 8 aa, Artificial Sequence
  Peptide Derived from Human Papillomavirus
FILRRRRK

SEQ ID NO: 10807 - protein, 9 aa, Artificial Sequence
  Peptide Derived from Human Papillomavirus
FILRRRRKR

SEQ ID NO: 10808 - protein, 9 aa, Artificial Sequence
  Peptide Derived from Human Papillomavirus
FLDIIALHR

SEQ ID NO: 10809 - protein, 11 aa, Artificial Sequence
  Peptide Derived from Human Papillomavirus
FSRVGQKATLK

SEQ ID NO: 10810 - protein, 11 aa, Artificial Sequence
  Peptide Derived from Human Papillomavirus
FVLHPSYFILR

SEQ ID NO: 10811 - protein, 11 aa, Artificial Sequence
  Peptide Derived from Human Papillomavirus
GIGTGSGSGGR

SEQ ID NO: 10812 - protein, 11 aa, Artificial Sequence
  Peptide Derived from Human Papillomavirus
GLYSRNTQQVK

SEQ ID NO: 10813 - protein, 10 aa, Artificial Sequence
  Peptide Derived from Human Papillomavirus
GSTIADQILK

SEQ ID NO: 10814 - protein, 10 aa, Artificial Sequence
  Peptide Derived from Human Papillomavirus
GTCPPDVIPK

SEQ ID NO: 10815 - protein, 9 aa, Artificial Sequence
  Peptide Derived from Human Papillomavirus
GTGSGSGGR

SEQ ID NO: 10816 - protein, 10 aa, Artificial Sequence
  Peptide Derived from Human Papillomavirus
HSYSTFATTR

SEQ ID NO: 10817 - protein, 11 aa, Artificial Sequence
  Peptide Derived from Human Papillomavirus
HTVRFSRVGQK

SEQ ID NO: 10818 - protein, 11 aa, Artificial Sequence
  Peptide Derived from Human Papillomavirus
IALHRPAITSR

SEQ ID NO: 10819 - protein, 8 aa, Artificial Sequence
  Peptide Derived from Human Papillomavirus
ILRRRRKR

SEQ ID NO: 10820 - protein, 9 aa, Artificial Sequence
  Peptide Derived from Human Papillomavirus
ITSRRHTVR

SEQ ID NO: 10821 - protein, 10 aa, Artificial Sequence
  Peptide Derived from Human Papillomavirus
KATLKTRSGK

SEQ ID NO: 10822 - protein, 11 aa, Artificial Sequence
  Peptide Derived from Human Papillomavirus
KTRSGKQIGAR

SEQ ID NO: 10823 - protein, 9 aa, Artificial Sequence
  Peptide Derived from Human Papillomavirus
PAFLTSPHK

SEQ ID NO: 10824 - protein, 11 aa, Artificial Sequence
  Peptide Derived from Human Papillomavirus
PAITSRRHTVR

SEQ ID NO: 10825 - protein, 10 aa, Artificial Sequence
  Peptide Derived from Human Papillomavirus
PIPGSRPVAR

SEQ ID NO: 10826 - protein, 8 aa, Artificial Sequence
  Peptide Derived from Human Papillomavirus
PSYFILRR

SEQ ID NO: 10827 - protein, 9 aa, Artificial Sequence
  Peptide Derived from Human Papillomavirus
PSYFILRRR

SEQ ID NO: 10828 - protein, 10 aa, Artificial Sequence
  Peptide Derived from Human Papillomavirus
PSYFILRRRR

SEQ ID NO: 10829 - protein, 11 aa, Artificial Sequence
  Peptide Derived from Human Papillomavirus
PSYFILRRRRK

SEQ ID NO: 10830 - protein, 11 aa, Artificial Sequence
  Peptide Derived from Human Papillomavirus
PTAAIPLQPIR

SEQ ID NO: 10831 - protein, 10 aa, Artificial Sequence
  Peptide Derived from Human Papillomavirus
PVARLGLYSR

SEQ ID NO: 10832 - protein, 9 aa, Artificial Sequence
  Peptide Derived from Human Papillomavirus
RSGKQIGAR

SEQ ID NO: 10833 - protein, 9 aa, Artificial Sequence
  Peptide Derived from Human Papillomavirus
RVGQKATLK

SEQ ID NO: 10834 - protein, 11 aa, Artificial Sequence
  Peptide Derived from Human Papillomavirus
RVGQKATLKTR

SEQ ID NO: 10835 - protein, 10 aa, Artificial Sequence
  Peptide Derived from Human Papillomavirus
SATQLYQTCK

SEQ ID NO: 10836 - protein, 9 aa, Artificial Sequence
  Peptide Derived from Human Papillomavirus
SSTPIPGSR

SEQ ID NO: 10837 - protein, 9 aa, Artificial Sequence
  Peptide Derived from Human Papillomavirus
STIADQILK

SEQ ID NO: 10838 - protein, 8 aa, Artificial Sequence
  Peptide Derived from Human Papillomavirus
STPIPGSR

SEQ ID NO: 10839 - protein, 10 aa, Artificial Sequence
  Peptide Derived from Human Papillomavirus
TAAIPLQPIR

SEQ ID NO: 10840 - protein, 8 aa, Artificial Sequence
  Peptide Derived from Human Papillomavirus
TIADQILK

SEQ ID NO: 10841 - protein, 8 aa, Artificial Sequence
  Peptide Derived from Human Papillomavirus
TLKTRSGK

SEQ ID NO: 10842 - protein, 8 aa, Artificial Sequence
  Peptide Derived from Human Papillomavirus
TSRRHTVR

SEQ ID NO: 10843 - protein, 11 aa, Artificial Sequence
  Peptide Derived from Human Papillomavirus
TSRRHTVRFSR

SEQ ID NO: 10844 - protein, 10 aa, Artificial Sequence
  Peptide Derived from Human Papillomavirus
TSSTPIPGSR

SEQ ID NO: 10845 - protein, 10 aa, Artificial Sequence
  Peptide Derived from Human Papillomavirus
TVRFSRVGQK

SEQ ID NO: 10846 - protein, 9 aa, Artificial Sequence
  Peptide Derived from Human Papillomavirus
VARLGLYSR

SEQ ID NO: 10847 - protein, 10 aa, Artificial Sequence
  Peptide Derived from Human Papillomavirus
VLHPSYFILR

SEQ ID NO: 10848 - protein, 11 aa, Artificial Sequence
  Peptide Derived from Human Papillomavirus
VLHPSYFILRR

SEQ ID NO: 10849 - protein, 11 aa, Artificial Sequence
  Peptide Derived from Human Papillomavirus
VTSSTPIPGSR

SEQ ID NO: 10850 - protein, 9 aa, Artificial Sequence
  Peptide Derived from Human Papillomavirus
YSRNTQQVK

SEQ ID NO: 10851 - protein, 8 aa, Artificial Sequence
  Peptide Derived from Human Papillomavirus
YSTFATTR

SEQ ID NO: 10852 - protein, 11 aa, Artificial Sequence
  Peptide Derived from Human Papillomavirus
AAFLKSNCQAK

SEQ ID NO: 10853 - protein, 8 aa, Artificial Sequence
  Peptide Derived from Human Papillomavirus
AAMLAVFK

SEQ ID NO: 10854 - protein, 11 aa, Artificial Sequence
  Peptide Derived from Human Papillomavirus
ALDGNPISIDR

SEQ ID NO: 10855 - protein, 11 aa, Artificial Sequence
  Peptide Derived from Human Papillomavirus
ALKEFLKGTPK

SEQ ID NO: 10856 - protein, 9 aa, Artificial Sequence
  Peptide Derived from Human Papillomavirus
ALLRYKCGK

SEQ ID NO: 10857 - protein, 11 aa, Artificial Sequence
  Peptide Derived from Human Papillomavirus
ALLRYKCGKNR

SEQ ID NO: 10858 - protein, 8 aa, Artificial Sequence
  Peptide Derived from Human Papillomavirus
AVMCRHYK

SEQ ID NO: 10859 - protein, 9 aa, Artificial Sequence
  Peptide Derived from Human Papillomavirus
AVMCRHYKR

SEQ ID NO: 10860 - protein, 9 aa, Artificial Sequence
  Peptide Derived from Human Papillomavirus
CAVMCRHYK

SEQ ID NO: 10861 - protein, 10 aa, Artificial Sequence
  Peptide Derived from Human Papillomavirus
CAVMCRHYKR

SEQ ID NO: 10862 - protein, 8 aa, Artificial Sequence
  Peptide Derived from Human Papillomavirus
CMLIEPPK

SEQ ID NO: 10863 - protein, 10 aa, Artificial Sequence
  Peptide Derived from Human Papillomavirus
CMLIEPPKLR

SEQ ID NO: 10864 - protein, 11 aa, Artificial Sequence
  Peptide Derived from Human Papillomavirus
CSKIDEGGDWR

SEQ ID NO: 10865 - protein, 8 aa, Artificial Sequence
  Peptide Derived from Human Papillomavirus
CVTGQNTR

SEQ ID NO: 10866 - protein, 9 aa, Artificial Sequence
  Peptide Derived from Human Papillomavirus
DAQVLHLLK

SEQ ID NO: 10867 - protein, 10 aa, Artificial Sequence
  Peptide Derived from Human Papillomavirus
DAQVLHLLKR

SEQ ID NO: 10868 - protein, 11 aa, Artificial Sequence
  Peptide Derived from Human Papillomavirus
DAQVLHLLKRK

SEQ ID NO: 10869 - protein, 10 aa, Artificial Sequence
  Peptide Derived from Human Papillomavirus
DLVRNFKSDK

SEQ ID NO: 10870 - protein, 11 aa, Artificial Sequence
  Peptide Derived from Human Papillomavirus
DTEGIPFGTFK

SEQ ID NO: 10871 - protein, 8 aa, Artificial Sequence
  Peptide Derived from Human Papillomavirus
DTPEWIQR

SEQ ID NO: 10872 - protein, 8 aa, Artificial Sequence
  Peptide Derived from Human Papillomavirus
EINDKNWK

SEQ ID NO: 10873 - protein, 9 aa, Artificial Sequence
  Peptide Derived from Human Papillomavirus
EISLNSGHK

SEQ ID NO: 10874 - protein, 10 aa, Artificial Sequence
  Peptide Derived from Human Papillomavirus
EISLNSGHKK

SEQ ID NO: 10875 - protein, 11 aa, Artificial Sequence
  Peptide Derived from Human Papillomavirus
ELKELLQASNK

SEQ ID NO: 10876 - protein, 8 aa, Artificial Sequence
  Peptide Derived from Human Papillomavirus
ELLQASNK

SEQ ID NO: 10877 - protein, 9 aa, Artificial Sequence
  Peptide Derived from Human Papillomavirus
ELLQASNKK

SEQ ID NO: 10878 - protein, 10 aa, Artificial Sequence
  Peptide Derived from Human Papillomavirus
ETCMLIEPPK

SEQ ID NO: 10879 - protein, 9 aa, Artificial Sequence
  Peptide Derived from Human Papillomavirus
FISFLRALK

SEQ ID NO: 10880 - protein, 8 aa, Artificial Sequence
  Peptide Derived from Human Papillomavirus
FLKGTPKK

SEQ ID NO: 10881 - protein, 9 aa, Artificial Sequence
  Peptide Derived from Human Papillomavirus
FLKSNCQAK

SEQ ID NO: 10882 - protein, 10 aa, Artificial Sequence
  Peptide Derived from Human Papillomavirus
FLRALKEFLK

SEQ ID NO: 10883 - protein, 9 aa, Artificial Sequence
  Peptide Derived from Human Papillomavirus
FTDLVRNFK

SEQ ID NO: 10884 - protein, 11 aa, Artificial Sequence
  Peptide Derived from Human Papillomavirus
FTFPHAFPFDK

SEQ ID NO: 10885 - protein, 8 aa, Artificial Sequence
  Peptide Derived from Human Papillomavirus
FVETIVEK

SEQ ID NO: 10886 - protein, 9 aa, Artificial Sequence
  Peptide Derived from Human Papillomavirus
FVETIVEKK

SEQ ID NO: 10887 - protein, 8 aa, Artificial Sequence
  Peptide Derived from Human Papillomavirus
GIPFGTFK

SEQ ID NO: 10888 - protein, 9 aa, Artificial Sequence
  Peptide Derived from Human Papillomavirus
GLSFTDLVR

SEQ ID NO: 10889 - protein, 9 aa, Artificial Sequence
  Peptide Derived from Human Papillomavirus
GVEFISFLR

SEQ ID NO: 10890 - protein, 9 aa, Artificial Sequence
  Peptide Derived from Human Papillomavirus
GVLILALLR

SEQ ID NO: 10891 - protein, 11 aa, Artificial Sequence
  Peptide Derived from Human Papillomavirus
GVLILALLRYK

SEQ ID NO: 10892 - protein, 11 aa, Artificial Sequence
  Peptide Derived from Human Papillomavirus
GVNPTVAEGFK

SEQ ID NO: 10893 - protein, 8 aa, Artificial Sequence
  Peptide Derived from Human Papillomavirus
HIQCLDCK

SEQ ID NO: 10894 - protein, 8 aa, Artificial Sequence
  Peptide Derived from Human Papillomavirus
ILALLRYK

SEQ ID NO: 10895 - protein, 11 aa, Artificial Sequence
  Peptide Derived from Human Papillomavirus
ILALLRYKCGK

SEQ ID NO: 10896 - protein, 11 aa, Artificial Sequence
  Peptide Derived from Human Papillomavirus
ILLTSNIDPAK

SEQ ID NO: 10897 - protein, 11 aa, Artificial Sequence
  Peptide Derived from Human Papillomavirus
ILLYGPANTGK

SEQ ID NO: 10898 - protein, 8 aa, Artificial Sequence
  Peptide Derived from Human Papillomavirus
ISFLRALK

SEQ ID NO: 10899 - protein, 8 aa, Artificial Sequence
  Peptide Derived from Human Papillomavirus
ISIDRKHK

SEQ ID NO: 10900 - protein, 8 aa, Artificial Sequence
  Peptide Derived from Human Papillomavirus
ISLNSGHK

SEQ ID NO: 10901 - protein, 9 aa, Artificial Sequence
  Peptide Derived from Human Papillomavirus
ISLNSGHKK

SEQ ID NO: 10902 - protein, 11 aa, Artificial Sequence
  Peptide Derived from Human Papillomavirus
ISLNSGHKKAK

SEQ ID NO: 10903 - protein, 9 aa, Artificial Sequence
  Peptide Derived from Human Papillomavirus
KAAMLAVFK

SEQ ID NO: 10904 - protein, 9 aa, Artificial Sequence
  Peptide Derived from Human Papillomavirus
KIDEGGDWR

SEQ ID NO: 10905 - protein, 10 aa, Artificial Sequence
  Peptide Derived from Human Papillomavirus
KSNCQAKYLK

SEQ ID NO: 10906 - protein, 10 aa, Artificial Sequence
  Peptide Derived from Human Papillomavirus
LALLRYKCGK

SEQ ID NO: 10907 - protein, 8 aa, Artificial Sequence
  Peptide Derived from Human Papillomavirus
LIEPPKLR

SEQ ID NO: 10908 - protein, 9 aa, Artificial Sequence
  Peptide Derived from Human Papillomavirus
LILALLRYK

SEQ ID NO: 10909 - protein, 11 aa, Artificial Sequence
  Peptide Derived from Human Papillomavirus
LLKRKFAGGSK

SEQ ID NO: 10910 - protein, 8 aa, Artificial Sequence
  Peptide Derived from Human Papillomavirus
LLQASNKK

SEQ ID NO: 10911 - protein, 8 aa, Artificial Sequence
  Peptide Derived from Human Papillomavirus
LLRYKCGK

SEQ ID NO: 10912 - protein, 10 aa, Artificial Sequence
  Peptide Derived from Human Papillomavirus
LLRYKCGKNR

SEQ ID NO: 10913 - protein, 10 aa, Artificial Sequence
  Peptide Derived from Human Papillomavirus
LLTSNIDPAK

SEQ ID NO: 10914 - protein, 10 aa, Artificial Sequence
  Peptide Derived from Human Papillomavirus
LLYGPANTGK

SEQ ID NO: 10915 - protein, 8 aa, Artificial Sequence
  Peptide Derived from Human Papillomavirus
LSFTDLVR

SEQ ID NO: 10916 - protein, 11 aa, Artificial Sequence
  Peptide Derived from Human Papillomavirus
LSFTDLVRNFK

SEQ ID NO: 10917 - protein, 10 aa, Artificial Sequence
  Peptide Derived from Human Papillomavirus
LSVDTDLSPR

SEQ ID NO: 10918 - protein, 9 aa, Artificial Sequence
  Peptide Derived from Human Papillomavirus
LTSNIDPAK

SEQ ID NO: 10919 - protein, 9 aa, Artificial Sequence
  Peptide Derived from Human Papillomavirus
LVRNFKSDK

SEQ ID NO: 10920 - protein, 9 aa, Artificial Sequence
  Peptide Derived from Human Papillomavirus
MLIEPPKLR

SEQ ID NO: 10921 - protein, 8 aa, Artificial Sequence
  Peptide Derived from Human Papillomavirus
MSQWIKYR

SEQ ID NO: 10922 - protein, 11 aa, Artificial Sequence
  Peptide Derived from Human Papillomavirus
MSQWIKYRCSK

SEQ ID NO: 10923 - protein, 9 aa, Artificial Sequence
  Peptide Derived from Human Papillomavirus
NIDPAKDNK

SEQ ID NO: 10924 - protein, 9 aa, Artificial Sequence
  Peptide Derived from Human Papillomavirus
NMSQWIKYR

SEQ ID NO: 10925 - protein, 8 aa, Artificial Sequence
  Peptide Derived from Human Papillomavirus
NSGHKKAK

SEQ ID NO: 10926 - protein, 9 aa, Artificial Sequence
  Peptide Derived from Human Papillomavirus
NSGHKKAKR

SEQ ID NO: 10927 - protein, 10 aa, Artificial Sequence
  Peptide Derived from Human Papillomavirus
NSGHKKAKRR

SEQ ID NO: 10928 - protein, 9 aa, Artificial Sequence
  Peptide Derived from Human Papillomavirus
NSNAAAFLK

SEQ ID NO: 10929 - protein, 9 aa, Artificial Sequence
  Peptide Derived from Human Papillomavirus
PISIDRKHK

SEQ ID NO: 10930 - protein, 8 aa, Artificial Sequence
  Peptide Derived from Human Papillomavirus
PTVAEGFK

SEQ ID NO: 10931 - protein, 8 aa, Artificial Sequence
  Peptide Derived from Human Papillomavirus
PVYEINDK

SEQ ID NO: 10932 - protein, 11 aa, Artificial Sequence
  Peptide Derived from Human Papillomavirus
PVYEINDKNWK

SEQ ID NO: 10933 - protein, 11 aa, Artificial Sequence
  Peptide Derived from Human Papillomavirus
QLSVDTDLSPR

SEQ ID NO: 10934 - protein, 9 aa, Artificial Sequence
  Peptide Derived from Human Papillomavirus
QMNMSQWIK

SEQ ID NO: 10935 - protein, 11 aa, Artificial Sequence
  Peptide Derived from Human Papillomavirus
QMNMSQWIKYR

SEQ ID NO: 10936 - protein, 8 aa, Artificial Sequence
  Peptide Derived from Human Papillomavirus
QVLHLLKR

SEQ ID NO: 10937 - protein, 9 aa, Artificial Sequence
  Peptide Derived from Human Papillomavirus
QVLHLLKRK

SEQ ID NO: 10938 - protein, 8 aa, Artificial Sequence
  Peptide Derived from Human Papillomavirus
RALKEFLK

SEQ ID NO: 10939 - protein, 11 aa, Artificial Sequence
  Peptide Derived from Human Papillomavirus
RSSVAALYWYR

SEQ ID NO: 10940 - protein, 8 aa, Artificial Sequence
  Peptide Derived from Human Papillomavirus
SLNSGHKK

SEQ ID NO: 10941 - protein, 10 aa, Artificial Sequence
  Peptide Derived from Human Papillomavirus
SLNSGHKKAK

SEQ ID NO: 10942 - protein, 11 aa, Artificial Sequence
  Peptide Derived from Human Papillomavirus
SLNSGHKKAKR

SEQ ID NO: 10943 - protein, 10 aa, Artificial Sequence
  Peptide Derived from Human Papillomavirus
SSVAALYWYR

SEQ ID NO: 10944 - protein, 9 aa, Artificial Sequence
  Peptide Derived from Human Papillomavirus
SVAALYWYR

SEQ ID NO: 10945 - protein, 9 aa, Artificial Sequence
  Peptide Derived from Human Papillomavirus
SVDTDLSPR

SEQ ID NO: 10946 - protein, 8 aa, Artificial Sequence
  Peptide Derived from Human Papillomavirus
TSNIDPAK

SEQ ID NO: 10947 - protein, 11 aa, Artificial Sequence
  Peptide Derived from Human Papillomavirus
TSNIDPAKDNK

SEQ ID NO: 10948 - protein, 11 aa, Artificial Sequence
  Peptide Derived from Human Papillomavirus
TVAEGFKTLIK

SEQ ID NO: 10949 - protein, 8 aa, Artificial Sequence
  Peptide Derived from Human Papillomavirus
VAALYWYR

SEQ ID NO: 10950 - protein, 10 aa, Artificial Sequence
  Peptide Derived from Human Papillomavirus
VAEGFKTLIK

SEQ ID NO: 10951 - protein, 8 aa, Artificial Sequence
  Peptide Derived from Human Papillomavirus
VLHLLKRK

SEQ ID NO: 10952 - protein, 8 aa, Artificial Sequence
  Peptide Derived from Human Papillomavirus
VLILALLR

SEQ ID NO: 10953 - protein, 10 aa, Artificial Sequence
  Peptide Derived from Human Papillomavirus
VLILALLRYK

SEQ ID NO: 10954 - protein, 8 aa, Artificial Sequence
  Peptide Derived from Human Papillomavirus
VMCRHYKR

SEQ ID NO: 10955 - protein, 11 aa, Artificial Sequence
  Peptide Derived from Human Papillomavirus
VMCRHYKRAQK

SEQ ID NO: 10956 - protein, 11 aa, Artificial Sequence
  Peptide Derived from Human Papillomavirus
VSGDTPEWIQR

SEQ ID NO: 10957 - protein, 8 aa, Artificial Sequence
  Peptide Derived from Human Papillomavirus
WIKYRCSK

SEQ ID NO: 10958 - protein, 9 aa, Artificial Sequence
  Peptide Derived from Human Papillomavirus
WLEPLADTK

SEQ ID NO: 10959 - protein, 9 aa, Artificial Sequence
  Peptide Derived from Human Papillomavirus
WTYFDNYMR

SEQ ID NO: 10960 - protein, 10 aa, Artificial Sequence
  Peptide Derived from Human Papillomavirus
YAHIQCLDCK

SEQ ID NO: 10961 - protein, 10 aa, Artificial Sequence
  Peptide Derived from Human Papillomavirus
YLKDCAVMCR

SEQ ID NO: 10962 - protein, 9 aa, Artificial Sequence
  Peptide Derived from Human Papillomavirus
AIELQMALK

SEQ ID NO: 10963 - protein, 9 aa, Artificial Sequence
  Peptide Derived from Human Papillomavirus
ALKGLAQSK

SEQ ID NO: 10964 - protein, 8 aa, Artificial Sequence
  Peptide Derived from Human Papillomavirus
CLRYRLRK

SEQ ID NO: 10965 - protein, 8 aa, Artificial Sequence
  Peptide Derived from Human Papillomavirus
CSSTSNNK

SEQ ID NO: 10966 - protein, 9 aa, Artificial Sequence
  Peptide Derived from Human Papillomavirus
CSSTSNNKR

SEQ ID NO: 10967 - protein, 10 aa, Artificial Sequence
  Peptide Derived from Human Papillomavirus
CSSTSNNKRR

SEQ ID NO: 10968 - protein, 11 aa, Artificial Sequence
  Peptide Derived from Human Papillomavirus
CSSTSNNKRRK

SEQ ID NO: 10969 - protein, 11 aa, Artificial Sequence
  Peptide Derived from Human Papillomavirus
CVSYWGVYYIK

SEQ ID NO: 10970 - protein, 9 aa, Artificial Sequence
  Peptide Derived from Human Papillomavirus
DTTYYVQFK

SEQ ID NO: 10971 - protein, 10 aa, Artificial Sequence
  Peptide Derived from Human Papillomavirus
DTVSATQIVR

SEQ ID NO: 10972 - protein, 10 aa, Artificial Sequence
  Peptide Derived from Human Papillomavirus
FTAREHGITK

SEQ ID NO: 10973 - protein, 9 aa, Artificial Sequence
  Peptide Derived from Human Papillomavirus
GLTEQHHGR

SEQ ID NO: 10974 - protein, 8 aa, Artificial Sequence
  Peptide Derived from Human Papillomavirus
HASTSTPK

SEQ ID NO: 10975 - protein, 8 aa, Artificial Sequence
  Peptide Derived from Human Papillomavirus
HIQTPATK

SEQ ID NO: 10976 - protein, 9 aa, Artificial Sequence
  Peptide Derived from Human Papillomavirus
HIQTPATKR

SEQ ID NO: 10977 - protein, 11 aa, Artificial Sequence
  Peptide Derived from Human Papillomavirus
HIQTPATKRPR

SEQ ID NO: 10978 - protein, 10 aa, Artificial Sequence
  Peptide Derived from Human Papillomavirus
HLKGDKNSLK

SEQ ID NO: 10979 - protein, 8 aa, Artificial Sequence
  Peptide Derived from Human Papillomavirus
HVYFDGNK

SEQ ID NO: 10980 - protein, 8 aa, Artificial Sequence
  Peptide Derived from Human Papillomavirus
IIHLKGDK

SEQ ID NO: 10981 - protein, 10 aa, Artificial Sequence
  Peptide Derived from Human Papillomavirus
ILDHYENDSK

SEQ ID NO: 10982 - protein, 8 aa, Artificial Sequence
  Peptide Derived from Human Papillomavirus
ISKSKAHK

SEQ ID NO: 10983 - protein, 8 aa, Artificial Sequence
  Peptide Derived from Human Papillomavirus
ISYWQLIR

SEQ ID NO: 10984 - protein, 9 aa, Artificial Sequence
  Peptide Derived from Human Papillomavirus
ITETGIWDK

SEQ ID NO: 10985 - protein, 10 aa, Artificial Sequence
  Peptide Derived from Human Papillomavirus
KAIELQMALK

SEQ ID NO: 10986 - protein, 11 aa, Artificial Sequence
  Peptide Derived from Human Papillomavirus
KILDHYENDSK

SEQ ID NO: 10987 - protein, 9 aa, Artificial Sequence
  Peptide Derived from Human Papillomavirus
KTASVGTPK

SEQ ID NO: 10988 - protein, 11 aa, Artificial Sequence
  Peptide Derived from Human Papillomavirus
KTVHVYFDGNK

SEQ ID NO: 10989 - protein, 10 aa, Artificial Sequence
  Peptide Derived from Human Papillomavirus
LLCSSTSNNK

SEQ ID NO: 10990 - protein, 11 aa, Artificial Sequence
  Peptide Derived from Human Papillomavirus
LLCSSTSNNKR

SEQ ID NO: 10991 - protein, 11 aa, Artificial Sequence
  Peptide Derived from Human Papillomavirus
LSERLSALQDK

SEQ ID NO: 10992 - protein, 8 aa, Artificial Sequence
  Peptide Derived from Human Papillomavirus
LTEQHHGR

SEQ ID NO: 10993 - protein, 11 aa, Artificial Sequence
  Peptide Derived from Human Papillomavirus
LTVTYNSEVQR

SEQ ID NO: 10994 - protein, 10 aa, Artificial Sequence
  Peptide Derived from Human Papillomavirus
MALKGLAQSK

SEQ ID NO: 10995 - protein, 8 aa, Artificial Sequence
  Peptide Derived from Human Papillomavirus
NAILFTAR

SEQ ID NO: 10996 - protein, 9 aa, Artificial Sequence
  Peptide Derived from Human Papillomavirus
NISKSKAHK

SEQ ID NO: 10997 - protein, 9 aa, Artificial Sequence
  Peptide Derived from Human Papillomavirus
NSLKCLRYR

SEQ ID NO: 10998 - protein, 11 aa, Artificial Sequence
  Peptide Derived from Human Papillomavirus
NSLKCLRYRLR

SEQ ID NO: 10999 - protein, 11 aa, Artificial Sequence
  Peptide Derived from Human Papillomavirus
NSQISYWQLIR

SEQ ID NO: 11000 - protein, 9 aa, Artificial Sequence
  Peptide Derived from Human Papillomavirus
NTEPSQCFK

SEQ ID NO: 11001 - protein, 10 aa, Artificial Sequence
  Peptide Derived from Human Papillomavirus
NTEPSQCFKK

SEQ ID NO: 11002 - protein, 9 aa, Artificial Sequence
  Peptide Derived from Human Papillomavirus
NTTPIIHLK

SEQ ID NO: 11003 - protein, 9 aa, Artificial Sequence
  Peptide Derived from Human Papillomavirus
PIIHLKGDK

SEQ ID NO: 11004 - protein, 8 aa, Artificial Sequence
  Peptide Derived from Human Papillomavirus
PINISKSK

SEQ ID NO: 11005 - protein, 11 aa, Artificial Sequence
  Peptide Derived from Human Papillomavirus
PINISKSKAHK

SEQ ID NO: 11006 - protein, 11 aa, Artificial Sequence
  Peptide Derived from Human Papillomavirus
PLLCSSTSNNK

SEQ ID NO: 11007 - protein, 10 aa, Artificial Sequence
  Peptide Derived from Human Papillomavirus
PSQCFKKGGK

SEQ ID NO: 11008 - protein, 9 aa, Artificial Sequence
  Peptide Derived from Human Papillomavirus
QISYWQLIR

SEQ ID NO: 11009 - protein, 11 aa, Artificial Sequence
  Peptide Derived from Human Papillomavirus
QLQHASTSTPK

SEQ ID NO: 11010 - protein, 11 aa, Artificial Sequence
  Peptide Derived from Human Papillomavirus
QMALKGLAQSK

SEQ ID NO: 11011 - protein, 9 aa, Artificial Sequence
  Peptide Derived from Human Papillomavirus
QTPATKRPR

SEQ ID NO: 11012 - protein, 10 aa, Artificial Sequence
  Peptide Derived from Human Papillomavirus
QTPKESLSER

SEQ ID NO: 11013 - protein, 10 aa, Artificial Sequence
  Peptide Derived from Human Papillomavirus
QVVPPINISK

SEQ ID NO: 11014 - protein, 11 aa, Artificial Sequence
  Peptide Derived from Human Papillomavirus
RLENAILFTAR

SEQ ID NO: 11015 - protein, 8 aa, Artificial Sequence
  Peptide Derived from Human Papillomavirus
RLSALQDK

SEQ ID NO: 11016 - protein, 8 aa, Artificial Sequence
  Peptide Derived from Human Papillomavirus
SLKCLRYR

SEQ ID NO: 11017 - protein, 10 aa, Artificial Sequence
  Peptide Derived from Human Papillomavirus
SLKCLRYRLR

SEQ ID NO: 11018 - protein, 11 aa, Artificial Sequence
  Peptide Derived from Human Papillomavirus
SLKCLRYRLRK

SEQ ID NO: 11019 - protein, 8 aa, Artificial Sequence
  Peptide Derived from Human Papillomavirus
SSTSNNKR

SEQ ID NO: 11020 - protein, 9 aa, Artificial Sequence
  Peptide Derived from Human Papillomavirus
SSTSNNKRR

SEQ ID NO: 11021 - protein, 10 aa, Artificial Sequence
  Peptide Derived from Human Papillomavirus
SSTSNNKRRK

SEQ ID NO: 11022 - protein, 11 aa, Artificial Sequence
  Peptide Derived from Human Papillomavirus
SSTWHWTGCNK

SEQ ID NO: 11023 - protein, 8 aa, Artificial Sequence
  Peptide Derived from Human Papillomavirus
STSNNKRR

SEQ ID NO: 11024 - protein, 9 aa, Artificial Sequence
  Peptide Derived from Human Papillomavirus
STSNNKRRK

SEQ ID NO: 11025 - protein, 10 aa, Artificial Sequence
  Peptide Derived from Human Papillomavirus
STWHWTGCNK

SEQ ID NO: 11026 - protein, 9 aa, Artificial Sequence
  Peptide Derived from Human Papillomavirus
TAREHGITK

SEQ ID NO: 11027 - protein, 8 aa, Artificial Sequence
  Peptide Derived from Human Papillomavirus
TASVGTPK

SEQ ID NO: 11028 - protein, 8 aa, Artificial Sequence
  Peptide Derived from Human Papillomavirus
TSNNKRRK

SEQ ID NO: 11029 - protein, 8 aa, Artificial Sequence
  Peptide Derived from Human Papillomavirus
TTPIIHLK

SEQ ID NO: 11030 - protein, 11 aa, Artificial Sequence
  Peptide Derived from Human Papillomavirus
TTPIIHLKGDK

SEQ ID NO: 11031 - protein, 8 aa, Artificial Sequence
  Peptide Derived from Human Papillomavirus
TTYYVQFK

SEQ ID NO: 11032 - protein, 10 aa, Artificial Sequence
  Peptide Derived from Human Papillomavirus
TVHVYFDGNK

SEQ ID NO: 11033 - protein, 9 aa, Artificial Sequence
  Peptide Derived from Human Papillomavirus
TVSATQIVR

SEQ ID NO: 11034 - protein, 10 aa, Artificial Sequence
  Peptide Derived from Human Papillomavirus
TVTYNSEVQR

SEQ ID NO: 11035 - protein, 8 aa, Artificial Sequence
  Peptide Derived from Human Papillomavirus
VSATQIVR

SEQ ID NO: 11036 - protein, 10 aa, Artificial Sequence
  Peptide Derived from Human Papillomavirus
VSYWGVYYIK

SEQ ID NO: 11037 - protein, 9 aa, Artificial Sequence
  Peptide Derived from Human Papillomavirus
VTYNSEVQR

SEQ ID NO: 11038 - protein, 9 aa, Artificial Sequence
  Peptide Derived from Human Papillomavirus
VVPPINISK

SEQ ID NO: 11039 - protein, 11 aa, Artificial Sequence
  Peptide Derived from Human Papillomavirus
VVPPINISKSK

SEQ ID NO: 11040 - protein, 10 aa, Artificial Sequence
  Peptide Derived from Human Papillomavirus
YITETGIWDK

SEQ ID NO: 11041 - protein, 10 aa, Artificial Sequence
  Peptide Derived from Human Papillomavirus
YVQFKSECEK

SEQ ID NO: 11042 - protein, 9 aa, Artificial Sequence
  Peptide Derived from Human Papillomavirus
CIAYAACHK

SEQ ID NO: 11043 - protein, 9 aa, Artificial Sequence
  Peptide Derived from Human Papillomavirus
CIDFYSRIR

SEQ ID NO: 11044 - protein, 10 aa, Artificial Sequence
  Peptide Derived from Human Papillomavirus
CVYCKATLER

SEQ ID NO: 11045 - protein, 10 aa, Artificial Sequence
  Peptide Derived from Human Papillomavirus
DVSIACVYCK

SEQ ID NO: 11046 - protein, 8 aa, Artificial Sequence
  Peptide Derived from Human Papillomavirus
ELYNLLIR

SEQ ID NO: 11047 - protein, 11 aa, Artificial Sequence
  Peptide Derived from Human Papillomavirus
ELYNLLIRCLR

SEQ ID NO: 11048 - protein, 8 aa, Artificial Sequence
  Peptide Derived from Human Papillomavirus
EVYQFAFK

SEQ ID NO: 11049 - protein, 11 aa, Artificial Sequence
  Peptide Derived from Human Papillomavirus
FAFKDLFIVYR

SEQ ID NO: 11050 - protein, 8 aa, Artificial Sequence
  Peptide Derived from Human Papillomavirus
HSIAGQYR

SEQ ID NO: 11051 - protein, 8 aa, Artificial Sequence
  Peptide Derived from Human Papillomavirus
IAYAACHK

SEQ ID NO: 11052 - protein, 9 aa, Artificial Sequence
  Peptide Derived from Human Papillomavirus
LIRCLRCQK

SEQ ID NO: 11053 - protein, 10 aa, Artificial Sequence
  Peptide Derived from Human Papillomavirus
LLIRCLRCQK

SEQ ID NO: 11054 - protein, 10 aa, Artificial Sequence
  Peptide Derived from Human Papillomavirus
MARFDDPTQR

SEQ ID NO: 11055 - protein, 8 aa, Artificial Sequence
  Peptide Derived from Human Papillomavirus
NLLIRCLR

SEQ ID NO: 11056 - protein, 11 aa, Artificial Sequence
  Peptide Derived from Human Papillomavirus
NLLIRCLRCQK

SEQ ID NO: 11057 - protein, 10 aa, Artificial Sequence
  Peptide Derived from Human Papillomavirus
NSVYGETLEK

SEQ ID NO: 11058 - protein, 8 aa, Artificial Sequence
  Peptide Derived from Human Papillomavirus
NTCCDQAR

SEQ ID NO: 11059 - protein, 11 aa, Artificial Sequence
  Peptide Derived from Human Papillomavirus
NTCCDQARQER

SEQ ID NO: 11060 - protein, 10 aa, Artificial Sequence
  Peptide Derived from Human Papillomavirus
NTELYNLLIR

SEQ ID NO: 11061 - protein, 9 aa, Artificial Sequence
  Peptide Derived from Human Papillomavirus
PAEKRRHLK

SEQ ID NO: 11062 - protein, 11 aa, Artificial Sequence
  Peptide Derived from Human Papillomavirus
PAEKRRHLKDK

SEQ ID NO: 11063 - protein, 8 aa, Artificial Sequence
  Peptide Derived from Human Papillomavirus
PLNPAEKR

SEQ ID NO: 11064 - protein, 9 aa, Artificial Sequence
  Peptide Derived from Human Papillomavirus
PLNPAEKRR

SEQ ID NO: 11065 - protein, 8 aa, Artificial Sequence
  Peptide Derived from Human Papillomavirus
QARQERLR

SEQ ID NO: 11066 - protein, 9 aa, Artificial Sequence
  Peptide Derived from Human Papillomavirus
QARQERLRR

SEQ ID NO: 11067 - protein, 10 aa, Artificial Sequence
  Peptide Derived from Human Papillomavirus
QARQERLRRR

SEQ ID NO: 11068 - protein, 11 aa, Artificial Sequence
  Peptide Derived from Human Papillomavirus
QARQERLRRRR

SEQ ID NO: 11069 - protein, 10 aa, Artificial Sequence
  Peptide Derived from Human Papillomavirus
RTEVYQFAFK

SEQ ID NO: 11070 - protein, 8 aa, Artificial Sequence
  Peptide Derived from Human Papillomavirus
SIACVYCK

SEQ ID NO: 11071 - protein, 9 aa, Artificial Sequence
  Peptide Derived from Human Papillomavirus
SVYGETLEK

SEQ ID NO: 11072 - protein, 9 aa, Artificial Sequence
  Peptide Derived from Human Papillomavirus
VSIACVYCK

SEQ ID NO: 11073 - protein, 8 aa, Artificial Sequence
  Peptide Derived from Human Papillomavirus
YSRIRELR

SEQ ID NO: 11074 - protein, 9 aa, Artificial Sequence
  Peptide Derived from Human Papillomavirus
CVCCKCDGR

SEQ ID NO: 11075 - protein, 8 aa, Artificial Sequence
  Peptide Derived from Human Papillomavirus
ESSADDLR

SEQ ID NO: 11076 - protein, 10 aa, Artificial Sequence
  Peptide Derived from Human Papillomavirus
GVSHAQLPAR

SEQ ID NO: 11077 - protein, 11 aa, Artificial Sequence
  Peptide Derived from Human Papillomavirus
GVSHAQLPARR

SEQ ID NO: 11078 - protein, 8 aa, Artificial Sequence
  Peptide Derived from Human Papillomavirus
HAQLPARR

SEQ ID NO: 11079 - protein, 11 aa, Artificial Sequence
  Peptide Derived from Human Papillomavirus
ILCVCCKCDGR

SEQ ID NO: 11080 - protein, 8 aa, Artificial Sequence
  Peptide Derived from Human Papillomavirus
KILCVCCK

SEQ ID NO: 11081 - protein, 11 aa, Artificial Sequence
  Peptide Derived from Human Papillomavirus
LTVESSADDLR

SEQ ID NO: 11082 - protein, 9 aa, Artificial Sequence
  Peptide Derived from Human Papillomavirus
PARRAEPQR

SEQ ID NO: 11083 - protein, 11 aa, Artificial Sequence
  Peptide Derived from Human Papillomavirus
PARRAEPQRHK

SEQ ID NO: 11084 - protein, 11 aa, Artificial Sequence
  Peptide Derived from Human Papillomavirus
QLPARRAEPQR

SEQ ID NO: 11085 - protein, 8 aa, Artificial Sequence
  Peptide Derived from Human Papillomavirus
RAEPQRHK

SEQ ID NO: 11086 - protein, 10 aa, Artificial Sequence
  Peptide Derived from Human Papillomavirus
TVESSADDLR

SEQ ID NO: 11087 - protein, 9 aa, Artificial Sequence
  Peptide Derived from Human Papillomavirus
VSHAQLPAR

SEQ ID NO: 11088 - protein, 10 aa, Artificial Sequence
  Peptide Derived from Human Papillomavirus
VSHAQLPARR

SEQ ID NO: 11089 - protein, 9 aa, Artificial Sequence
  Peptide Derived from Human Papillomavirus
AASTSTASR

SEQ ID NO: 11090 - protein, 11 aa, Artificial Sequence
  Peptide Derived from Human Papillomavirus
AATAVITQDVR

SEQ ID NO: 11091 - protein, 8 aa, Artificial Sequence
  Peptide Derived from Human Papillomavirus
AIGEHWAK

SEQ ID NO: 11092 - protein, 11 aa, Artificial Sequence
  Peptide Derived from Human Papillomavirus
AMDFSTLQDTK

SEQ ID NO: 11093 - protein, 9 aa, Artificial Sequence
  Peptide Derived from Human Papillomavirus
ASRPAKRVR

SEQ ID NO: 11094 - protein, 11 aa, Artificial Sequence
  Peptide Derived from Human Papillomavirus
ASRPAKRVRIR

SEQ ID NO: 11095 - protein, 8 aa, Artificial Sequence
  Peptide Derived from Human Papillomavirus
ASTSTASR

SEQ ID NO: 11096 - protein, 11 aa, Artificial Sequence
  Peptide Derived from Human Papillomavirus
ASTSTASRPAK

SEQ ID NO: 11097 - protein, 10 aa, Artificial Sequence
  Peptide Derived from Human Papillomavirus
ATAVITQDVR

SEQ ID NO: 11098 - protein, 8 aa, Artificial Sequence
  Peptide Derived from Human Papillomavirus
AVITQDVR

SEQ ID NO: 11099 - protein, 11 aa, Artificial Sequence
  Peptide Derived from Human Papillomavirus
AVPKVSAYQYR

SEQ ID NO: 11100 - protein, 10 aa, Artificial Sequence
  Peptide Derived from Human Papillomavirus
CLRREQLFAR

SEQ ID NO: 11101 - protein, 8 aa, Artificial Sequence
  Peptide Derived from Human Papillomavirus
CVGMEIGR

SEQ ID NO: 11102 - protein, 11 aa, Artificial Sequence
  Peptide Derived from Human Papillomavirus
CVPAIGEHWAK

SEQ ID NO: 11103 - protein, 8 aa, Artificial Sequence
  Peptide Derived from Human Papillomavirus
DICQSICK

SEQ ID NO: 11104 - protein, 9 aa, Artificial Sequence
  Peptide Derived from Human Papillomavirus
DLDQYPLGR

SEQ ID NO: 11105 - protein, 10 aa, Artificial Sequence
  Peptide Derived from Human Papillomavirus
DLDQYPLGRK

SEQ ID NO: 11106 - protein, 8 aa, Artificial Sequence
  Peptide Derived from Human Papillomavirus
DSMFFCLR

SEQ ID NO: 11107 - protein, 9 aa, Artificial Sequence
  Peptide Derived from Human Papillomavirus
DSMFFCLRR

SEQ ID NO: 11108 - protein, 11 aa, Artificial Sequence
  Peptide Derived from Human Papillomavirus
DSTIYNPETQR

SEQ ID NO: 11109 - protein, 10 aa, Artificial Sequence
  Peptide Derived from Human Papillomavirus
DTVPTDLYIK

SEQ ID NO: 11110 - protein, 11 aa, Artificial Sequence
  Peptide Derived from Human Papillomavirus
DVRDNVSVDYK

SEQ ID NO: 11111 - protein, 8 aa, Artificial Sequence
  Peptide Derived from Human Papillomavirus
FARHFWNR

SEQ ID NO: 11112 - protein, 8 aa, Artificial Sequence
  Peptide Derived from Human Papillomavirus
FLQMALWR

SEQ ID NO: 11113 - protein, 8 aa, Artificial Sequence
  Peptide Derived from Human Papillomavirus
FLVQAGLR

SEQ ID NO: 11114 - protein, 9 aa, Artificial Sequence
  Peptide Derived from Human Papillomavirus
FLVQAGLRR

SEQ ID NO: 11115 - protein, 10 aa, Artificial Sequence
  Peptide Derived from Human Papillomavirus
FLVQAGLRRR

SEQ ID NO: 11116 - protein, 8 aa, Artificial Sequence
  Peptide Derived from Human Papillomavirus
FSTLQDTK

SEQ ID NO: 11117 - protein, 11 aa, Artificial Sequence
  Peptide Derived from Human Papillomavirus
FVQSVAVTCQK

SEQ ID NO: 11118 - protein, 9 aa, Artificial Sequence
  Peptide Derived from Human Papillomavirus
FVTVVDTTR

SEQ ID NO: 11119 - protein, 10 aa, Artificial Sequence
  Peptide Derived from Human Papillomavirus
GAGNKQAVPK

SEQ ID NO: 11120 - protein, 11 aa, Artificial Sequence
  Peptide Derived from Human Papillomavirus
GLRRRPTIGPR

SEQ ID NO: 11121 - protein, 10 aa, Artificial Sequence
  Peptide Derived from Human Papillomavirus
GLSGHPFYNK

SEQ ID NO: 11122 - protein, 11 aa, Artificial Sequence
  Peptide Derived from Human Papillomavirus
ITTSDSQLFNK

SEQ ID NO: 11123 - protein, 10 aa, Artificial Sequence
  Peptide Derived from Human Papillomavirus
KLKFWTVDLK

SEQ ID NO: 11124 - protein, 8 aa, Artificial Sequence
  Peptide Derived from Human Papillomavirus
KVSAYQYR

SEQ ID NO: 11125 - protein, 11 aa, Artificial Sequence
  Peptide Derived from Human Papillomavirus
KVSAYQYRVFR

SEQ ID NO: 11126 - protein, 10 aa, Artificial Sequence
  Peptide Derived from Human Papillomavirus
LLTVGNPYFR

SEQ ID NO: 11127 - protein, 9 aa, Artificial Sequence
  Peptide Derived from Human Papillomavirus
LSGHPFYNK

SEQ ID NO: 11128 - protein, 9 aa, Artificial Sequence
  Peptide Derived from Human Papillomavirus
LTVGNPYFR

SEQ ID NO: 11129 - protein, 8 aa, Artificial Sequence
  Peptide Derived from Human Papillomavirus
LVQAGLRR

SEQ ID NO: 11130 - protein, 9 aa, Artificial Sequence
  Peptide Derived from Human Papillomavirus
LVQAGLRRR

SEQ ID NO: 11131 - protein, 8 aa, Artificial Sequence
  Peptide Derived from Human Papillomavirus
NTDDYVSR

SEQ ID NO: 11132 - protein, 9 aa, Artificial Sequence
  Peptide Derived from Human Papillomavirus
NTYDPTKFK

SEQ ID NO: 11133 - protein, 10 aa, Artificial Sequence
  Peptide Derived from Human Papillomavirus
PAASTSTASR

SEQ ID NO: 11134 - protein, 9 aa, Artificial Sequence
  Peptide Derived from Human Papillomavirus
PAIGEHWAK

SEQ ID NO: 11135 - protein, 8 aa, Artificial Sequence
  Peptide Derived from Human Papillomavirus
PAKRVRIR

SEQ ID NO: 11136 - protein, 10 aa, Artificial Sequence
  Peptide Derived from Human Papillomavirus
PAKRVRIRSK

SEQ ID NO: 11137 - protein, 11 aa, Artificial Sequence
  Peptide Derived from Human Papillomavirus
PAKRVRIRSKK

SEQ ID NO: 11138 - protein, 10 aa, Artificial Sequence
  Peptide Derived from Human Papillomavirus
PIFLQMALWR

SEQ ID NO: 11139 - protein, 10 aa, Artificial Sequence
  Peptide Derived from Human Papillomavirus
PLDICQSICK

SEQ ID NO: 11140 - protein, 8 aa, Artificial Sequence
  Peptide Derived from Human Papillomavirus
PTIGPRKR

SEQ ID NO: 11141 - protein, 9 aa, Artificial Sequence
  Peptide Derived from Human Papillomavirus
PTKFKHYSR

SEQ ID NO: 11142 - protein, 10 aa, Artificial Sequence
  Peptide Derived from Human Papillomavirus
PTTSLVDTYR

SEQ ID NO: 11143 - protein, 10 aa, Artificial Sequence
  Peptide Derived from Human Papillomavirus
PVPNTYDPTK

SEQ ID NO: 11144 - protein, 10 aa, Artificial Sequence
  Peptide Derived from Human Papillomavirus
QLFARHFWNR

SEQ ID NO: 11145 - protein, 11 aa, Artificial Sequence
  Peptide Derived from Human Papillomavirus
QLFNKPYWLHK

SEQ ID NO: 11146 - protein, 11 aa, Artificial Sequence
  Peptide Derived from Human Papillomavirus
QLFVTVVDTTR

SEQ ID NO: 11147 - protein, 9 aa, Artificial Sequence
  Peptide Derived from Human Papillomavirus
QSVAVTCQK

SEQ ID NO: 11148 - protein, 11 aa, Artificial Sequence
  Peptide Derived from Human Papillomavirus
RLLTVGNPYFR

SEQ ID NO: 11149 - protein, 9 aa, Artificial Sequence
  Peptide Derived from Human Papillomavirus
RVALPDPNK

SEQ ID NO: 11150 - protein, 8 aa, Artificial Sequence
  Peptide Derived from Human Papillomavirus
RVRIRSKK

SEQ ID NO: 11151 - protein, 11 aa, Artificial Sequence
  Peptide Derived from Human Papillomavirus
RVVNTDDYVSR

SEQ ID NO: 11152 - protein, 10 aa, Artificial Sequence
  Peptide Derived from Human Papillomavirus
RVVPSGAGNK

SEQ ID NO: 11153 - protein, 9 aa, Artificial Sequence
  Peptide Derived from Human Papillomavirus
SAYQYRVFR

SEQ ID NO: 11154 - protein, 10 aa, Artificial Sequence
  Peptide Derived from Human Papillomavirus
SIFYHAGSSR

SEQ ID NO: 11155 - protein, 8 aa, Artificial Sequence
  Peptide Derived from Human Papillomavirus
SMFFCLRR

SEQ ID NO: 11156 - protein, 11 aa, Artificial Sequence
  Peptide Derived from Human Papillomavirus
SSDLDQYPLGR

SEQ ID NO: 11157 - protein, 8 aa, Artificial Sequence
  Peptide Derived from Human Papillomavirus
STASRPAK

SEQ ID NO: 11158 - protein, 9 aa, Artificial Sequence
  Peptide Derived from Human Papillomavirus
STASRPAKR

SEQ ID NO: 11159 - protein, 11 aa, Artificial Sequence
  Peptide Derived from Human Papillomavirus
STASRPAKRVR

SEQ ID NO: 11160 - protein, 10 aa, Artificial Sequence
  Peptide Derived from Human Papillomavirus
STIYNPETQR

SEQ ID NO: 11161 - protein, 10 aa, Artificial Sequence
  Peptide Derived from Human Papillomavirus
STSTASRPAK

SEQ ID NO: 11162 - protein, 11 aa, Artificial Sequence
  Peptide Derived from Human Papillomavirus
STSTASRPAKR

SEQ ID NO: 11163 - protein, 8 aa, Artificial Sequence
  Peptide Derived from Human Papillomavirus
SVAVTCQK

SEQ ID NO: 11164 - protein, 8 aa, Artificial Sequence
  Peptide Derived from Human Papillomavirus
TASRPAKR

SEQ ID NO: 11165 - protein, 10 aa, Artificial Sequence
  Peptide Derived from Human Papillomavirus
TASRPAKRVR

SEQ ID NO: 11166 - protein, 9 aa, Artificial Sequence
  Peptide Derived from Human Papillomavirus
TAVITQDVR

SEQ ID NO: 11167 - protein, 9 aa, Artificial Sequence
  Peptide Derived from Human Papillomavirus
TIYNPETQR

SEQ ID NO: 11168 - protein, 9 aa, Artificial Sequence
  Peptide Derived from Human Papillomavirus
TSDSQLFNK

SEQ ID NO: 11169 - protein, 11 aa, Artificial Sequence
  Peptide Derived from Human Papillomavirus
TSIFYHAGSSR

SEQ ID NO: 11170 - protein, 8 aa, Artificial Sequence
  Peptide Derived from Human Papillomavirus
TSLVDTYR

SEQ ID NO: 11171 - protein, 9 aa, Artificial Sequence
  Peptide Derived from Human Papillomavirus
TSTASRPAK

SEQ ID NO: 11172 - protein, 10 aa, Artificial Sequence
  Peptide Derived from Human Papillomavirus
TSTASRPAKR

SEQ ID NO: 11173 - protein, 10 aa, Artificial Sequence
  Peptide Derived from Human Papillomavirus
TTSDSQLFNK

SEQ ID NO: 11174 - protein, 9 aa, Artificial Sequence
  Peptide Derived from Human Papillomavirus
TTSLVDTYR

SEQ ID NO: 11175 - protein, 8 aa, Artificial Sequence
  Peptide Derived from Human Papillomavirus
TVGNPYFR

SEQ ID NO: 11176 - protein, 9 aa, Artificial Sequence
  Peptide Derived from Human Papillomavirus
TVPTDLYIK

SEQ ID NO: 11177 - protein, 11 aa, Artificial Sequence
  Peptide Derived from Human Papillomavirus
TVYLPPPSVAR

SEQ ID NO: 11178 - protein, 8 aa, Artificial Sequence
  Peptide Derived from Human Papillomavirus
VALPDPNK

SEQ ID NO: 11179 - protein, 10 aa, Artificial Sequence
  Peptide Derived from Human Papillomavirus
VSAYQYRVFR

SEQ ID NO: 11180 - protein, 8 aa, Artificial Sequence
  Peptide Derived from Human Papillomavirus
VTVVDTTR

SEQ ID NO: 11181 - protein, 10 aa, Artificial Sequence
  Peptide Derived from Human Papillomavirus
VVNTDDYVSR

SEQ ID NO: 11182 - protein, 9 aa, Artificial Sequence
  Peptide Derived from Human Papillomavirus
VVPSGAGNK

SEQ ID NO: 11183 - protein, 10 aa, Artificial Sequence
  Peptide Derived from Human Papillomavirus
WACVGMEIGR

SEQ ID NO: 11184 - protein, 8 aa, Artificial Sequence
  Peptide Derived from Human Papillomavirus
WAKGTLCK

SEQ ID NO: 11185 - protein, 8 aa, Artificial Sequence
  Peptide Derived from Human Papillomavirus
WTVDLKEK

SEQ ID NO: 11186 - protein, 10 aa, Artificial Sequence
  Peptide Derived from Human Papillomavirus
YIKGTSANMR

SEQ ID NO: 11187 - protein, 9 aa, Artificial Sequence
  Peptide Derived from Human Papillomavirus
YLPPPSVAR

SEQ ID NO: 11188 - protein, 10 aa, Artificial Sequence
  Peptide Derived from Human Papillomavirus
ALSSRRGTVR

SEQ ID NO: 11189 - protein, 8 aa, Artificial Sequence
  Peptide Derived from Human Papillomavirus
ASATDLYR

SEQ ID NO: 11190 - protein, 11 aa, Artificial Sequence
  Peptide Derived from Human Papillomavirus
ASATDLYRTCK

SEQ ID NO: 11191 - protein, 10 aa, Artificial Sequence
  Peptide Derived from Human Papillomavirus
ASTTPSTIHK

SEQ ID NO: 11192 - protein, 9 aa, Artificial Sequence
  Peptide Derived from Human Papillomavirus
ATDLYRTCK

SEQ ID NO: 11193 - protein, 9 aa, Artificial Sequence
  Peptide Derived from Human Papillomavirus
ATMFTRSGK

SEQ ID NO: 11194 - protein, 9 aa, Artificial Sequence
  Peptide Derived from Human Papillomavirus
DSDFMDIIR

SEQ ID NO: 11195 - protein, 9 aa, Artificial Sequence
  Peptide Derived from Human Papillomavirus
FMDIIRLHR

SEQ ID NO: 11196 - protein, 11 aa, Artificial Sequence
  Peptide Derived from Human Papillomavirus
FTRSGKQIGGR

SEQ ID NO: 11197 - protein, 11 aa, Artificial Sequence
  Peptide Derived from Human Papillomavirus
GIGTGSGSGGR

SEQ ID NO: 11198 - protein, 10 aa, Artificial Sequence
  Peptide Derived from Human Papillomavirus
GTCPPDVINK

SEQ ID NO: 11199 - protein, 9 aa, Artificial Sequence
  Peptide Derived from Human Papillomavirus
GTGSGSGGR

SEQ ID NO: 11200 - protein, 11 aa, Artificial Sequence
  Peptide Derived from Human Papillomavirus
GTVRFSRLGQR

SEQ ID NO: 11201 - protein, 10 aa, Artificial Sequence
  Peptide Derived from Human Papillomavirus
ISSTPLPTVR

SEQ ID NO: 11202 - protein, 11 aa, Artificial Sequence
  Peptide Derived from Human Papillomavirus
ISSTPLPTVRR

SEQ ID NO: 11203 - protein, 10 aa, Artificial Sequence
  Peptide Derived from Human Papillomavirus
KVEGTTLADK

SEQ ID NO: 11204 - protein, 9 aa, Artificial Sequence
  Peptide Derived from Human Papillomavirus
LSSRRGTVR

SEQ ID NO: 11205 - protein, 8 aa, Artificial Sequence
  Peptide Derived from Human Papillomavirus
MVSHRAAR

SEQ ID NO: 11206 - protein, 9 aa, Artificial Sequence
  Peptide Derived from Human Papillomavirus
MVSHRAARR

SEQ ID NO: 11207 - protein, 10 aa, Artificial Sequence
  Peptide Derived from Human Papillomavirus
MVSHRAARRK

SEQ ID NO: 11208 - protein, 11 aa, Artificial Sequence
  Peptide Derived from Human Papillomavirus
MVSHRAARRKR

SEQ ID NO: 11209 - protein, 10 aa, Artificial Sequence
  Peptide Derived from Human Papillomavirus
NTVVDVGPTR

SEQ ID NO: 11210 - protein, 11 aa, Artificial Sequence
  Peptide Derived from Human Papillomavirus
PALSSRRGTVR

SEQ ID NO: 11211 - protein, 11 aa, Artificial Sequence
  Peptide Derived from Human Papillomavirus
PASTTPSTIHK

SEQ ID NO: 11212 - protein, 11 aa, Artificial Sequence
  Peptide Derived from Human Papillomavirus
PISSTPLPTVR

SEQ ID NO: 11213 - protein, 9 aa, Artificial Sequence
  Peptide Derived from Human Papillomavirus
PLPTVRRVR

SEQ ID NO: 11214 - protein, 10 aa, Artificial Sequence
  Peptide Derived from Human Papillomavirus
PTVRRVRGPR

SEQ ID NO: 11215 - protein, 9 aa, Artificial Sequence
  Peptide Derived from Human Papillomavirus
RASATDLYR

SEQ ID NO: 11216 - protein, 10 aa, Artificial Sequence
  Peptide Derived from Human Papillomavirus
RATMFTRSGK

SEQ ID NO: 11217 - protein, 11 aa, Artificial Sequence
  Peptide Derived from Human Papillomavirus
RLGQRATMFTR

SEQ ID NO: 11218 - protein, 10 aa, Artificial Sequence
  Peptide Derived from Human Papillomavirus
RLHRPALSSR

SEQ ID NO: 11219 - protein, 11 aa, Artificial Sequence
  Peptide Derived from Human Papillomavirus
RLHRPALSSRR

SEQ ID NO: 11220 - protein, 11 aa, Artificial Sequence
  Peptide Derived from Human Papillomavirus
RLYSRANQQVR

SEQ ID NO: 11221 - protein, 9 aa, Artificial Sequence
  Peptide Derived from Human Papillomavirus
RSGKQIGGR

SEQ ID NO: 11222 - protein, 10 aa, Artificial Sequence
  Peptide Derived from Human Papillomavirus
RTGYVPLGGR

SEQ ID NO: 11223 - protein, 10 aa, Artificial Sequence
  Peptide Derived from Human Papillomavirus
RVRGPRLYSR

SEQ ID NO: 11224 - protein, 10 aa, Artificial Sequence
  Peptide Derived from Human Papillomavirus
SATDLYRTCK

SEQ ID NO: 11225 - protein, 8 aa, Artificial Sequence
  Peptide Derived from Human Papillomavirus
SSRRGTVR

SEQ ID NO: 11226 - protein, 11 aa, Artificial Sequence
  Peptide Derived from Human Papillomavirus
SSRRGTVRFSR

SEQ ID NO: 11227 - protein, 9 aa, Artificial Sequence
  Peptide Derived from Human Papillomavirus
SSTPLPTVR

SEQ ID NO: 11228 - protein, 10 aa, Artificial Sequence
  Peptide Derived from Human Papillomavirus
SSTPLPTVRR

SEQ ID NO: 11229 - protein, 11 aa, Artificial Sequence
  Peptide Derived from Human Papillomavirus
STIHKSFTYPK

SEQ ID NO: 11230 - protein, 8 aa, Artificial Sequence
  Peptide Derived from Human Papillomavirus
STPLPTVR

SEQ ID NO: 11231 - protein, 9 aa, Artificial Sequence
  Peptide Derived from Human Papillomavirus
STPLPTVRR

SEQ ID NO: 11232 - protein, 11 aa, Artificial Sequence
  Peptide Derived from Human Papillomavirus
STPLPTVRRVR

SEQ ID NO: 11233 - protein, 9 aa, Artificial Sequence
  Peptide Derived from Human Papillomavirus
STTPSTIHK

SEQ ID NO: 11234 - protein, 10 aa, Artificial Sequence
  Peptide Derived from Human Papillomavirus
TIHKSFTYPK

SEQ ID NO: 11235 - protein, 8 aa, Artificial Sequence
  Peptide Derived from Human Papillomavirus
TMFTRSGK

SEQ ID NO: 11236 - protein, 8 aa, Artificial Sequence
  Peptide Derived from Human Papillomavirus
TTPSTIHK

SEQ ID NO: 11237 - protein, 10 aa, Artificial Sequence
  Peptide Derived from Human Papillomavirus
TVRFSRLGQR

SEQ ID NO: 11238 - protein, 9 aa, Artificial Sequence
  Peptide Derived from Human Papillomavirus
TVRRVRGPR

SEQ ID NO: 11239 - protein, 9 aa, Artificial Sequence
  Peptide Derived from Human Papillomavirus
TVVDVGPTR

SEQ ID NO: 11240 - protein, 8 aa, Artificial Sequence
  Peptide Derived from Human Papillomavirus
VSHRAARR

SEQ ID NO: 11241 - protein, 9 aa, Artificial Sequence
  Peptide Derived from Human Papillomavirus
VSHRAARRK

SEQ ID NO: 11242 - protein, 10 aa, Artificial Sequence
  Peptide Derived from Human Papillomavirus
VSHRAARRKR

SEQ ID NO: 11243 - protein, 8 aa, Artificial Sequence
  Peptide Derived from Human Papillomavirus
VVDVGPTR

SEQ ID NO: 11244 - protein, 11 aa, Artificial Sequence
  Peptide Derived from Human Papillomavirus
YLWPWYYYFPK

SEQ ID NO: 11245 - protein, 9 aa, Artificial Sequence
  Peptide Derived from Human Papillomavirus
YSRANQQVR

SEQ ID NO: 11246 - protein, 9 aa, Artificial Sequence
  Peptide Derived from Human Papillomavirus
AAVSHRPGK

SEQ ID NO: 11247 - protein, 10 aa, Artificial Sequence
  Peptide Derived from Human Papillomavirus
AAVSHRPGKR

SEQ ID NO: 11248 - protein, 8 aa, Artificial Sequence
  Peptide Derived from Human Papillomavirus
AVSHRPGK

SEQ ID NO: 11249 - protein, 9 aa, Artificial Sequence
  Peptide Derived from Human Papillomavirus
AVSHRPGKR

SEQ ID NO: 11250 - protein, 11 aa, Artificial Sequence
  Peptide Derived from Human Papillomavirus
AVSHRPGKRPR

SEQ ID NO: 11251 - protein, 8 aa, Artificial Sequence
  Peptide Derived from Human Papillomavirus
CLQVCKAK

SEQ ID NO: 11252 - protein, 8 aa, Artificial Sequence
  Peptide Derived from Human Papillomavirus
CMQYVAWK

SEQ ID NO: 11253 - protein, 10 aa, Artificial Sequence
  Peptide Derived from Human Papillomavirus
DAAVSHRPGK

SEQ ID NO: 11254 - protein, 11 aa, Artificial Sequence
  Peptide Derived from Human Papillomavirus
DAAVSHRPGKR

SEQ ID NO: 11255 - protein, 9 aa, Artificial Sequence
  Peptide Derived from Human Papillomavirus
DSSRESHAK

SEQ ID NO: 11256 - protein, 8 aa, Artificial Sequence
  Peptide Derived from Human Papillomavirus
DSVSSTCR

SEQ ID NO: 11257 - protein, 8 aa, Artificial Sequence
  Peptide Derived from Human Papillomavirus
DTDNTDSR

SEQ ID NO: 11258 - protein, 10 aa, Artificial Sequence
  Peptide Derived from Human Papillomavirus
DTDNTDSRSR

SEQ ID NO: 11259 - protein, 8 aa, Artificial Sequence
  Peptide Derived from Human Papillomavirus
EAKKFGCK

SEQ ID NO: 11260 - protein, 8 aa, Artificial Sequence
  Peptide Derived from Human Papillomavirus
ELWLTEPK

SEQ ID NO: 11261 - protein, 9 aa, Artificial Sequence
  Peptide Derived from Human Papillomavirus
ELWLTEPKK

SEQ ID NO: 11262 - protein, 8 aa, Artificial Sequence
  Peptide Derived from Human Papillomavirus
ESEFDSSR

SEQ ID NO: 11263 - protein, 10 aa, Artificial Sequence
  Peptide Derived from Human Papillomavirus
ETVNEYNTHK

SEQ ID NO: 11264 - protein, 8 aa, Artificial Sequence
  Peptide Derived from Human Papillomavirus
EVWFDGSK

SEQ ID NO: 11265 - protein, 10 aa, Artificial Sequence
  Peptide Derived from Human Papillomavirus
GIYYVHDGHK

SEQ ID NO: 11266 - protein, 10 aa, Artificial Sequence
  Peptide Derived from Human Papillomavirus
HIEVWFDGSK

SEQ ID NO: 11267 - protein, 11 aa, Artificial Sequence
  Peptide Derived from Human Papillomavirus
HISDTDNTDSR

SEQ ID NO: 11268 - protein, 8 aa, Artificial Sequence
  Peptide Derived from Human Papillomavirus
HLKGEPNR

SEQ ID NO: 11269 - protein, 10 aa, Artificial Sequence
  Peptide Derived from Human Papillomavirus
HLKGEPNRLK

SEQ ID NO: 11270 - protein, 9 aa, Artificial Sequence
  Peptide Derived from Human Papillomavirus
HVKIPVVYR

SEQ ID NO: 11271 - protein, 9 aa, Artificial Sequence
  Peptide Derived from Human Papillomavirus
IIYKDETQR

SEQ ID NO: 11272 - protein, 10 aa, Artificial Sequence
  Peptide Derived from Human Papillomavirus
ISDTDNTDSR

SEQ ID NO: 11273 - protein, 11 aa, Artificial Sequence
  Peptide Derived from Human Papillomavirus
ITIIYKDETQR

SEQ ID NO: 11274 - protein, 9 aa, Artificial Sequence
  Peptide Derived from Human Papillomavirus
KTTPVVHLK

SEQ ID NO: 11275 - protein, 9 aa, Artificial Sequence
  Peptide Derived from Human Papillomavirus
KVCSGVDYR

SEQ ID NO: 11276 - protein, 11 aa, Artificial Sequence
  Peptide Derived from Human Papillomavirus
LSHVKIPVVYR

SEQ ID NO: 11277 - protein, 9 aa, Artificial Sequence
  Peptide Derived from Human Papillomavirus
LTEPKKCFK

SEQ ID NO: 11278 - protein, 10 aa, Artificial Sequence
  Peptide Derived from Human Papillomavirus
LTEPKKCFKK

SEQ ID NO: 11279 - protein, 9 aa, Artificial Sequence
  Peptide Derived from Human Papillomavirus
MVPCLQVCK

SEQ ID NO: 11280 - protein, 11 aa, Artificial Sequence
  Peptide Derived from Human Papillomavirus
MVPCLQVCKAK

SEQ ID NO: 11281 - protein, 8 aa, Artificial Sequence
  Peptide Derived from Human Papillomavirus
NSFLSHVK

SEQ ID NO: 11282 - protein, 11 aa, Artificial Sequence
  Peptide Derived from Human Papillomavirus
PVVHLKGEPNR

SEQ ID NO: 11283 - protein, 10 aa, Artificial Sequence
  Peptide Derived from Human Papillomavirus
PVVYRLVWDK

SEQ ID NO: 11284 - protein, 8 aa, Artificial Sequence
  Peptide Derived from Human Papillomavirus
RLKCCRYR

SEQ ID NO: 11285 - protein, 11 aa, Artificial Sequence
  Peptide Derived from Human Papillomavirus
RLKCCRYRFQK

SEQ ID NO: 11286 - protein, 11 aa, Artificial Sequence
  Peptide Derived from Human Papillomavirus
RLRESEFDSSR

SEQ ID NO: 11287 - protein, 8 aa, Artificial Sequence
  Peptide Derived from Human Papillomavirus
SIITIIYK

SEQ ID NO: 11288 - protein, 11 aa, Artificial Sequence
  Peptide Derived from Human Papillomavirus
SINNNNHPGDK

SEQ ID NO: 11289 - protein, 8 aa, Artificial Sequence
  Peptide Derived from Human Papillomavirus
SSRESHAK

SEQ ID NO: 11290 - protein, 11 aa, Artificial Sequence
  Peptide Derived from Human Papillomavirus
STYHWTSTDNK

SEQ ID NO: 11291 - protein, 10 aa, Artificial Sequence
  Peptide Derived from Human Papillomavirus
TIIYKDETQR

SEQ ID NO: 11292 - protein, 11 aa, Artificial Sequence
  Peptide Derived from Human Papillomavirus
TIYNNEEWTLR

SEQ ID NO: 11293 - protein, 8 aa, Artificial Sequence
  Peptide Derived from Human Papillomavirus
TTPVVHLK

SEQ ID NO: 11294 - protein, 9 aa, Artificial Sequence
  Peptide Derived from Human Papillomavirus
TVNEYNTHK

SEQ ID NO: 11295 - protein, 8 aa, Artificial Sequence
  Peptide Derived from Human Papillomavirus
VSHRPGKR

SEQ ID NO: 11296 - protein, 10 aa, Artificial Sequence
  Peptide Derived from Human Papillomavirus
VSHRPGKRPR

SEQ ID NO: 11297 - protein, 10 aa, Artificial Sequence
  Peptide Derived from Human Papillomavirus
VVHLKGEPNR

SEQ ID NO: 11298 - protein, 9 aa, Artificial Sequence
  Peptide Derived from Human Papillomavirus
VVYRLVWDK

SEQ ID NO: 11299 - protein, 10 aa, Artificial Sequence
  Peptide Derived from Human Papillomavirus
WLTEPKKCFK

SEQ ID NO: 11300 - protein, 11 aa, Artificial Sequence
  Peptide Derived from Human Papillomavirus
WLTEPKKCFKK

SEQ ID NO: 11301 - protein, 9 aa, Artificial Sequence
  Peptide Derived from Human Papillomavirus
YSIITIIYK

SEQ ID NO: 11302 - protein, 9 aa, Artificial Sequence
  Peptide Derived from Human Papillomavirus
YTDFEQEAK

SEQ ID NO: 11303 - protein, 10 aa, Artificial Sequence
  Peptide Derived from Human Papillomavirus
YTDFEQEAKK

SEQ ID NO: 11304 - protein, 8 aa, Artificial Sequence
  Peptide Derived from Human Papillomavirus
ATLESITK

SEQ ID NO: 11305 - protein, 9 aa, Artificial Sequence
  Peptide Derived from Human Papillomavirus
ATLESITKK

SEQ ID NO: 11306 - protein, 10 aa, Artificial Sequence
  Peptide Derived from Human Papillomavirus
CLGCWRQTSR

SEQ ID NO: 11307 - protein, 9 aa, Artificial Sequence
  Peptide Derived from Human Papillomavirus
CLLFYSKVR

SEQ ID NO: 11308 - protein, 10 aa, Artificial Sequence
  Peptide Derived from Human Papillomavirus
CLLFYSKVRK

SEQ ID NO: 11309 - protein, 9 aa, Artificial Sequence
  Peptide Derived from Human Papillomavirus
CTELKLVYR

SEQ ID NO: 11310 - protein, 10 aa, Artificial Sequence
  Peptide Derived from Human Papillomavirus
CVYCKKELTR

SEQ ID NO: 11311 - protein, 8 aa, Artificial Sequence
  Peptide Derived from Human Papillomavirus
DLLIRCYR

SEQ ID NO: 11312 - protein, 10 aa, Artificial Sequence
  Peptide Derived from Human Papillomavirus
DLRLSCVYCK

SEQ ID NO: 11313 - protein, 11 aa, Artificial Sequence
  Peptide Derived from Human Papillomavirus
DLRLSCVYCKK

SEQ ID NO: 11314 - protein, 8 aa, Artificial Sequence
  Peptide Derived from Human Papillomavirus
EIPLIDLR

SEQ ID NO: 11315 - protein, 11 aa, Artificial Sequence
  Peptide Derived from Human Papillomavirus
EVLEIPLIDLR

SEQ ID NO: 11316 - protein, 11 aa, Artificial Sequence
  Peptide Derived from Human Papillomavirus
EVYNFACTELK

SEQ ID NO: 11317 - protein, 11 aa, Artificial Sequence
  Peptide Derived from Human Papillomavirus
FACTELKLVYR

SEQ ID NO: 11318 - protein, 9 aa, Artificial Sequence
  Peptide Derived from Human Papillomavirus
GATLESITK

SEQ ID NO: 11319 - protein, 10 aa, Artificial Sequence
  Peptide Derived from Human Papillomavirus
GATLESITKK

SEQ ID NO: 11320 - protein, 8 aa, Artificial Sequence
  Peptide Derived from Human Papillomavirus
GSCLGCWR

SEQ ID NO: 11321 - protein, 8 aa, Artificial Sequence
  Peptide Derived from Human Papillomavirus
LLFYSKVR

SEQ ID NO: 11322 - protein, 9 aa, Artificial Sequence
  Peptide Derived from Human Papillomavirus
LLFYSKVRK

SEQ ID NO: 11323 - protein, 11 aa, Artificial Sequence
  Peptide Derived from Human Papillomavirus
LLFYSKVRKYR

SEQ ID NO: 11324 - protein, 8 aa, Artificial Sequence
  Peptide Derived from Human Papillomavirus
LSCVYCKK

SEQ ID NO: 11325 - protein, 8 aa, Artificial Sequence
  Peptide Derived from Human Papillomavirus
QLCDLLIR

SEQ ID NO: 11326 - protein, 11 aa, Artificial Sequence
  Peptide Derived from Human Papillomavirus
QLCDLLIRCYR

SEQ ID NO: 11327 - protein, 8 aa, Artificial Sequence
  Peptide Derived from Human Papillomavirus
QLHCDRKR

SEQ ID NO: 11328 - protein, 9 aa, Artificial Sequence
  Peptide Derived from Human Papillomavirus
QLHCDRKRR

SEQ ID NO: 11329 - protein, 9 aa, Artificial Sequence
  Peptide Derived from Human Papillomavirus
QSPLTPEEK

SEQ ID NO: 11330 - protein, 8 aa, Artificial Sequence
  Peptide Derived from Human Papillomavirus
RLSCVYCK

SEQ ID NO: 11331 - protein, 9 aa, Artificial Sequence
  Peptide Derived from Human Papillomavirus
RLSCVYCKK

SEQ ID NO: 11332 - protein, 9 aa, Artificial Sequence
  Peptide Derived from Human Papillomavirus
RVCLLFYSK

SEQ ID NO: 11333 - protein, 11 aa, Artificial Sequence
  Peptide Derived from Human Papillomavirus
RVCLLFYSKVR

SEQ ID NO: 11334 - protein, 8 aa, Artificial Sequence
  Peptide Derived from Human Papillomavirus
TLESITKK

SEQ ID NO: 11335 - protein, 10 aa, Artificial Sequence
  Peptide Derived from Human Papillomavirus
VLEIPLIDLR

SEQ ID NO: 11336 - protein, 10 aa, Artificial Sequence
  Peptide Derived from Human Papillomavirus
WTGSCLGCWR

SEQ ID NO: 11337 - protein, 8 aa, Artificial Sequence
  Peptide Derived from Human Papillomavirus
YSKVRKYR

SEQ ID NO: 11338 - protein, 10 aa, Artificial Sequence
  Peptide Derived from Human Papillomavirus
DIQSTKEDLR

SEQ ID NO: 11339 - protein, 8 aa, Artificial Sequence
  Peptide Derived from Human Papillomavirus
EVDHLQER

SEQ ID NO: 11340 - protein, 11 aa, Artificial Sequence
  Peptide Derived from Human Papillomavirus
FVVQLDIQSTK

SEQ ID NO: 11341 - protein, 10 aa, Artificial Sequence
  Peptide Derived from Human Papillomavirus
HLQERPQQAR

SEQ ID NO: 11342 - protein, 8 aa, Artificial Sequence
  Peptide Derived from Human Papillomavirus
HVPCCECK

SEQ ID NO: 11343 - protein, 10 aa, Artificial Sequence
  Peptide Derived from Human Papillomavirus
LIHVPCCECK

SEQ ID NO: 11344 - protein, 8 aa, Artificial Sequence
  Peptide Derived from Human Papillomavirus
QLDIQSTK

SEQ ID NO: 11345 - protein, 8 aa, Artificial Sequence
  Peptide Derived from Human Papillomavirus
QSTKEDLR

SEQ ID NO: 11346 - protein, 10 aa, Artificial Sequence
  Peptide Derived from Human Papillomavirus
VVQLDIQSTK

SEQ ID NO: 11347 - protein, 11 aa, Artificial Sequence
  Peptide Derived from Human Papillomavirus
YLIHVPCCECK

SEQ ID NO: 11348 - protein, 11 aa, Artificial Sequence
  Peptide Derived from Human Papillomavirus
AMDFKVLQESK

SEQ ID NO: 11349 - protein, 8 aa, Artificial Sequence
  Peptide Derived from Human Papillomavirus
AMGEHWTK

SEQ ID NO: 11350 - protein, 8 aa, Artificial Sequence
  Peptide Derived from Human Papillomavirus
ATDSYVKR

SEQ ID NO: 11351 - protein, 11 aa, Artificial Sequence
  Peptide Derived from Human Papillomavirus
ATEQLSKYDAR

SEQ ID NO: 11352 - protein, 9 aa, Artificial Sequence
  Peptide Derived from Human Papillomavirus
ATSLEDKYR

SEQ ID NO: 11353 - protein, 9 aa, Artificial Sequence
  Peptide Derived from Human Papillomavirus
ATWRPSENK

SEQ ID NO: 11354 - protein, 8 aa, Artificial Sequence
  Peptide Derived from Human Papillomavirus
AVATSKKR

SEQ ID NO: 11355 - protein, 11 aa, Artificial Sequence
  Peptide Derived from Human Papillomavirus
AVGHPYYSVTK

SEQ ID NO: 11356 - protein, 11 aa, Artificial Sequence
  Peptide Derived from Human Papillomavirus
CTPAMGEHWTK

SEQ ID NO: 11357 - protein, 8 aa, Artificial Sequence
  Peptide Derived from Human Papillomavirus
CVGLEVGR

SEQ ID NO: 11358 - protein, 10 aa, Artificial Sequence
  Peptide Derived from Human Papillomavirus
DARKINQYLR

SEQ ID NO: 11359 - protein, 8 aa, Artificial Sequence
  Peptide Derived from Human Papillomavirus
DIVQSTCK

SEQ ID NO: 11360 - protein, 9 aa, Artificial Sequence
  Peptide Derived from Human Papillomavirus
DLDQFPLGR

SEQ ID NO: 11361 - protein, 10 aa, Artificial Sequence
  Peptide Derived from Human Papillomavirus
DLDQFPLGRK

SEQ ID NO: 11362 - protein, 8 aa, Artificial Sequence
  Peptide Derived from Human Papillomavirus
DSMWFYLR

SEQ ID NO: 11363 - protein, 9 aa, Artificial Sequence
  Peptide Derived from Human Papillomavirus
DSMWFYLRR

SEQ ID NO: 11364 - protein, 11 aa, Artificial Sequence
  Peptide Derived from Human Papillomavirus
DSRDNISVDGK

SEQ ID NO: 11365 - protein, 10 aa, Artificial Sequence
  Peptide Derived from Human Papillomavirus
DTGFGAMDFK

SEQ ID NO: 11366 - protein, 11 aa, Artificial Sequence
  Peptide Derived from Human Papillomavirus
DTNIYNPDQER

SEQ ID NO: 11367 - protein, 10 aa, Artificial Sequence
  Peptide Derived from Human Papillomavirus
ELQFVFQLCK

SEQ ID NO: 11368 - protein, 10 aa, Artificial Sequence
  Peptide Derived from Human Papillomavirus
ELYLKGSNGR

SEQ ID NO: 11369 - protein, 10 aa, Artificial Sequence
  Peptide Derived from Human Papillomavirus
ETIPAELYLK

SEQ ID NO: 11370 - protein, 8 aa, Artificial Sequence
  Peptide Derived from Human Papillomavirus
FARHYFNR

SEQ ID NO: 11371 - protein, 11 aa, Artificial Sequence
  Peptide Derived from Human Papillomavirus
FARHYFNRAGK

SEQ ID NO: 11372 - protein, 8 aa, Artificial Sequence
  Peptide Derived from Human Papillomavirus
FLMQLGTR

SEQ ID NO: 11373 - protein, 10 aa, Artificial Sequence
  Peptide Derived from Human Papillomavirus
FLMQLGTRSK

SEQ ID NO: 11374 - protein, 8 aa, Artificial Sequence
  Peptide Derived from Human Papillomavirus
FLQMATWR

SEQ ID NO: 11375 - protein, 9 aa, Artificial Sequence
  Peptide Derived from Human Papillomavirus
FVTVVDTTR

SEQ ID NO: 11376 - protein, 10 aa, Artificial Sequence
  Peptide Derived from Human Papillomavirus
GLSGHPLFNR

SEQ ID NO: 11377 - protein, 10 aa, Artificial Sequence
  Peptide Derived from Human Papillomavirus
ISTATEQLSK

SEQ ID NO: 11378 - protein, 10 aa, Artificial Sequence
  Peptide Derived from Human Papillomavirus
ITSEAQLFNK

SEQ ID NO: 11379 - protein, 8 aa, Artificial Sequence
  Peptide Derived from Human Papillomavirus
KVSAYQYR

SEQ ID NO: 11380 - protein, 11 aa, Artificial Sequence
  Peptide Derived from Human Papillomavirus
KVSAYQYRVFR

SEQ ID NO: 11381 - protein, 10 aa, Artificial Sequence
  Peptide Derived from Human Papillomavirus
KVVATDSYVK

SEQ ID NO: 11382 - protein, 11 aa, Artificial Sequence
  Peptide Derived from Human Papillomavirus
KVVATDSYVKR

SEQ ID NO: 11383 - protein, 11 aa, Artificial Sequence
  Peptide Derived from Human Papillomavirus
KVYLPPTPVSK

SEQ ID NO: 11384 - protein, 11 aa, Artificial Sequence
  Peptide Derived from Human Papillomavirus
LANNNVIEDSR

SEQ ID NO: 11385 - protein, 9 aa, Artificial Sequence
  Peptide Derived from Human Papillomavirus
LMQLGTRSK

SEQ ID NO: 11386 - protein, 9 aa, Artificial Sequence
  Peptide Derived from Human Papillomavirus
LSGHPLFNR

SEQ ID NO: 11387 - protein, 8 aa, Artificial Sequence
  Peptide Derived from Human Papillomavirus
LSKYDARK

SEQ ID NO: 11388 - protein, 10 aa, Artificial Sequence
  Peptide Derived from Human Papillomavirus
MATWRPSENK

SEQ ID NO: 11389 - protein, 11 aa, Artificial Sequence
  Peptide Derived from Human Papillomavirus
MITSEAQLFNK

SEQ ID NO: 11390 - protein, 9 aa, Artificial Sequence
  Peptide Derived from Human Papillomavirus
MLPMMYIYR

SEQ ID NO: 11391 - protein, 10 aa, Artificial Sequence
  Peptide Derived from Human Papillomavirus
MMLPMMYIYR

SEQ ID NO: 11392 - protein, 11 aa, Artificial Sequence
  Peptide Derived from Human Papillomavirus
NIPKVSAYQYR

SEQ ID NO: 11393 - protein, 9 aa, Artificial Sequence
  Peptide Derived from Human Papillomavirus
NIYNPDQER

SEQ ID NO: 11394 - protein, 8 aa, Artificial Sequence
  Peptide Derived from Human Papillomavirus
NTKTNIPK

SEQ ID NO: 11395 - protein, 9 aa, Artificial Sequence
  Peptide Derived from Human Papillomavirus
PAMGEHWTK

SEQ ID NO: 11396 - protein, 8 aa, Artificial Sequence
  Peptide Derived from Human Papillomavirus
PAVATSKK

SEQ ID NO: 11397 - protein, 9 aa, Artificial Sequence
  Peptide Derived from Human Papillomavirus
PAVATSKKR

SEQ ID NO: 11398 - protein, 10 aa, Artificial Sequence
  Peptide Derived from Human Papillomavirus
PIFLQMATWR

SEQ ID NO: 11399 - protein, 10 aa, Artificial Sequence
  Peptide Derived from Human Papillomavirus
PLDIVQSTCK

SEQ ID NO: 11400 - protein, 10 aa, Artificial Sequence
  Peptide Derived from Human Papillomavirus
PTEKQDPLAK

SEQ ID NO: 11401 - protein, 9 aa, Artificial Sequence
  Peptide Derived from Human Papillomavirus
PTSTSTPAK

SEQ ID NO: 11402 - protein, 10 aa, Artificial Sequence
  Peptide Derived from Human Papillomavirus
PTSTSTPAKR

SEQ ID NO: 11403 - protein, 11 aa, Artificial Sequence
  Peptide Derived from Human Papillomavirus
PTSTSTPAKRK

SEQ ID NO: 11404 - protein, 9 aa, Artificial Sequence
  Peptide Derived from Human Papillomavirus
PVATSLEDK

SEQ ID NO: 11405 - protein, 11 aa, Artificial Sequence
  Peptide Derived from Human Papillomavirus
PVATSLEDKYR

SEQ ID NO: 11406 - protein, 10 aa, Artificial Sequence
  Peptide Derived from Human Papillomavirus
QLFARHYFNR

SEQ ID NO: 11407 - protein, 11 aa, Artificial Sequence
  Peptide Derived from Human Papillomavirus
QLFNKPYWLQR

SEQ ID NO: 11408 - protein, 11 aa, Artificial Sequence
  Peptide Derived from Human Papillomavirus
QLFVTVVDTTR

SEQ ID NO: 11409 - protein, 8 aa, Artificial Sequence
  Peptide Derived from Human Papillomavirus
QLSKYDAR

SEQ ID NO: 11410 - protein, 9 aa, Artificial Sequence
  Peptide Derived from Human Papillomavirus
QLSKYDARK

SEQ ID NO: 11411 - protein, 11 aa, Artificial Sequence
  Peptide Derived from Human Papillomavirus
QMATWRPSENK

SEQ ID NO: 11412 - protein, 11 aa, Artificial Sequence
  Peptide Derived from Human Papillomavirus
QSTCKYPDYLK

SEQ ID NO: 11413 - protein, 10 aa, Artificial Sequence
  Peptide Derived from Human Papillomavirus
RSKPAVATSK

SEQ ID NO: 11414 - protein, 11 aa, Artificial Sequence
  Peptide Derived from Human Papillomavirus
RSKPAVATSKK

SEQ ID NO: 11415 - protein, 9 aa, Artificial Sequence
  Peptide Derived from Human Papillomavirus
RSTAITCQR

SEQ ID NO: 11416 - protein, 9 aa, Artificial Sequence
  Peptide Derived from Human Papillomavirus
RVRLPDPNK

SEQ ID NO: 11417 - protein, 11 aa, Artificial Sequence
  Peptide Derived from Human Papillomavirus
SAPTSTSTPAK

SEQ ID NO: 11418 - protein, 9 aa, Artificial Sequence
  Peptide Derived from Human Papillomavirus
SAYQYRVFR

SEQ ID NO: 11419 - protein, 11 aa, Artificial Sequence
  Peptide Derived from Human Papillomavirus
SAYQYRVFRVR

SEQ ID NO: 11420 - protein, 10 aa, Artificial Sequence
  Peptide Derived from Human Papillomavirus
SIFYHAGSSR

SEQ ID NO: 11421 - protein, 10 aa, Artificial Sequence
  Peptide Derived from Human Papillomavirus
SLEDKYRYVR

SEQ ID NO: 11422 - protein, 8 aa, Artificial Sequence
  Peptide Derived from Human Papillomavirus
SMWFYLRR

SEQ ID NO: 11423 - protein, 8 aa, Artificial Sequence
  Peptide Derived from Human Papillomavirus
STAITCQR

SEQ ID NO: 11424 - protein, 9 aa, Artificial Sequence
  Peptide Derived from Human Papillomavirus
STATEQLSK

SEQ ID NO: 11425 - protein, 10 aa, Artificial Sequence
  Peptide Derived from Human Papillomavirus
STCKYPDYLK

SEQ ID NO: 11426 - protein, 11 aa, Artificial Sequence
  Peptide Derived from Human Papillomavirus
STDLDQFPLGR

SEQ ID NO: 11427 - protein, 8 aa, Artificial Sequence
  Peptide Derived from Human Papillomavirus
STPAKRKR

SEQ ID NO: 11428 - protein, 9 aa, Artificial Sequence
  Peptide Derived from Human Papillomavirus
STPAKRKRR

SEQ ID NO: 11429 - protein, 8 aa, Artificial Sequence
  Peptide Derived from Human Papillomavirus
STSTPAKR

SEQ ID NO: 11430 - protein, 9 aa, Artificial Sequence
  Peptide Derived from Human Papillomavirus
STSTPAKRK

SEQ ID NO: 11431 - protein, 10 aa, Artificial Sequence
  Peptide Derived from Human Papillomavirus
STSTPAKRKR

SEQ ID NO: 11432 - protein, 11 aa, Artificial Sequence
  Peptide Derived from Human Papillomavirus
STSTPAKRKRR

SEQ ID NO: 11433 - protein, 8 aa, Artificial Sequence
  Peptide Derived from Human Papillomavirus
SVTKDNTK

SEQ ID NO: 11434 - protein, 8 aa, Artificial Sequence
  Peptide Derived from Human Papillomavirus
TATEQLSK

SEQ ID NO: 11435 - protein, 9 aa, Artificial Sequence
  Peptide Derived from Human Papillomavirus
TIPAELYLK

SEQ ID NO: 11436 - protein, 11 aa, Artificial Sequence
  Peptide Derived from Human Papillomavirus
TISTATEQLSK

SEQ ID NO: 11437 - protein, 9 aa, Artificial Sequence
  Peptide Derived from Human Papillomavirus
TSEAQLFNK

SEQ ID NO: 11438 - protein, 11 aa, Artificial Sequence
  Peptide Derived from Human Papillomavirus
TSIFYHAGSSR

SEQ ID NO: 11439 - protein, 8 aa, Artificial Sequence
  Peptide Derived from Human Papillomavirus
TSLEDKYR

SEQ ID NO: 11440 - protein, 11 aa, Artificial Sequence
  Peptide Derived from Human Papillomavirus
TSLEDKYRYVR

SEQ ID NO: 11441 - protein, 8 aa, Artificial Sequence
  Peptide Derived from Human Papillomavirus
TSTPAKRK

SEQ ID NO: 11442 - protein, 9 aa, Artificial Sequence
  Peptide Derived from Human Papillomavirus
TSTPAKRKR

SEQ ID NO: 11443 - protein, 10 aa, Artificial Sequence
  Peptide Derived from Human Papillomavirus
TSTPAKRKRR

SEQ ID NO: 11444 - protein, 8 aa, Artificial Sequence
  Peptide Derived from Human Papillomavirus
TSTSTPAK

SEQ ID NO: 11445 - protein, 9 aa, Artificial Sequence
  Peptide Derived from Human Papillomavirus
TSTSTPAKR

SEQ ID NO: 11446 - protein, 10 aa, Artificial Sequence
  Peptide Derived from Human Papillomavirus
TSTSTPAKRK

SEQ ID NO: 11447 - protein, 11 aa, Artificial Sequence
  Peptide Derived from Human Papillomavirus
TSTSTPAKRKR

SEQ ID NO: 11448 - protein, 8 aa, Artificial Sequence
  Peptide Derived from Human Papillomavirus
VATDSYVK

SEQ ID NO: 11449 - protein, 9 aa, Artificial Sequence
  Peptide Derived from Human Papillomavirus
VATDSYVKR

SEQ ID NO: 11450 - protein, 8 aa, Artificial Sequence
  Peptide Derived from Human Papillomavirus
VATSLEDK

SEQ ID NO: 11451 - protein, 10 aa, Artificial Sequence
  Peptide Derived from Human Papillomavirus
VATSLEDKYR

SEQ ID NO: 11452 - protein, 10 aa, Artificial Sequence
  Peptide Derived from Human Papillomavirus
VSAYQYRVFR

SEQ ID NO: 11453 - protein, 8 aa, Artificial Sequence
  Peptide Derived from Human Papillomavirus
VTVVDTTR

SEQ ID NO: 11454 - protein, 9 aa, Artificial Sequence
  Peptide Derived from Human Papillomavirus
VVATDSYVK

SEQ ID NO: 11455 - protein, 10 aa, Artificial Sequence
  Peptide Derived from Human Papillomavirus
VVATDSYVKR

SEQ ID NO: 11456 - protein, 10 aa, Artificial Sequence
  Peptide Derived from Human Papillomavirus
WACVGLEVGR

SEQ ID NO: 11457 - protein, 8 aa, Artificial Sequence
  Peptide Derived from Human Papillomavirus
WTKGAVCK

SEQ ID NO: 11458 - protein, 8 aa, Artificial Sequence
  Peptide Derived from Human Papillomavirus
YLKGSNGR

SEQ ID NO: 11459 - protein, 9 aa, Artificial Sequence
  Peptide Derived from Human Papillomavirus
YLPPTPVSK

SEQ ID NO: 11460 - protein, 10 aa, Artificial Sequence
  Peptide Derived from Human Papillomavirus
YLRREQLFAR

SEQ ID NO: 11461 - protein, 9 aa, Artificial Sequence
  Peptide Derived from Human Papillomavirus
YSVTKDNTK

SEQ ID NO: 11462 - protein, 11 aa, Artificial Sequence
  Peptide Derived from Human Papillomavirus
YVRSTAITCQR

SEQ ID NO: 11463 - protein, 8 aa, Artificial Sequence
  Peptide Derived from Human Papillomavirus
AAPRLYRK

SEQ ID NO: 11464 - protein, 10 aa, Artificial Sequence
  Peptide Derived from Human Papillomavirus
ALHRPAFTTR

SEQ ID NO: 11465 - protein, 11 aa, Artificial Sequence
  Peptide Derived from Human Papillomavirus
ALHRPAFTTRR

SEQ ID NO: 11466 - protein, 9 aa, Artificial Sequence
  Peptide Derived from Human Papillomavirus
ALWPVYFFR

SEQ ID NO: 11467 - protein, 10 aa, Artificial Sequence
  Peptide Derived from Human Papillomavirus
ALWPVYFFRR

SEQ ID NO: 11468 - protein, 11 aa, Artificial Sequence
  Peptide Derived from Human Papillomavirus
ALWPVYFFRRR

SEQ ID NO: 11469 - protein, 8 aa, Artificial Sequence
  Peptide Derived from Human Papillomavirus
ASATQLYK

SEQ ID NO: 11470 - protein, 11 aa, Artificial Sequence
  Peptide Derived from Human Papillomavirus
ASATQLYKTCK

SEQ ID NO: 11471 - protein, 10 aa, Artificial Sequence
  Peptide Derived from Human Papillomavirus
ATPSAHLPIK

SEQ ID NO: 11472 - protein, 9 aa, Artificial Sequence
  Peptide Derived from Human Papillomavirus
ATQLYKTCK

SEQ ID NO: 11473 - protein, 9 aa, Artificial Sequence
  Peptide Derived from Human Papillomavirus
DVVNKIEQK

SEQ ID NO: 11474 - protein, 10 aa, Artificial Sequence
  Peptide Derived from Human Papillomavirus
FALWPVYFFR

SEQ ID NO: 11475 - protein, 11 aa, Artificial Sequence
  Peptide Derived from Human Papillomavirus
FALWPVYFFRR

SEQ ID NO: 11476 - protein, 9 aa, Artificial Sequence
  Peptide Derived from Human Papillomavirus
FMNIVALHR

SEQ ID NO: 11477 - protein, 9 aa, Artificial Sequence
  Peptide Derived from Human Papillomavirus
FTTRRGGVR

SEQ ID NO: 11478 - protein, 11 aa, Artificial Sequence
  Peptide Derived from Human Papillomavirus
GIGTGTGSGGR

SEQ ID NO: 11479 - protein, 10 aa, Artificial Sequence
  Peptide Derived from Human Papillomavirus
GTCPEDVVNK

SEQ ID NO: 11480 - protein, 9 aa, Artificial Sequence
  Peptide Derived from Human Papillomavirus
GTGTGSGGR

SEQ ID NO: 11481 - protein, 9 aa, Artificial Sequence
  Peptide Derived from Human Papillomavirus
GVRFSRLGR

SEQ ID NO: 11482 - protein, 10 aa, Artificial Sequence
  Peptide Derived from Human Papillomavirus
GVRFSRLGRK

SEQ ID NO: 11483 - protein, 8 aa, Artificial Sequence
  Peptide Derived from Human Papillomavirus
IAAPRLYR

SEQ ID NO: 11484 - protein, 9 aa, Artificial Sequence
  Peptide Derived from Human Papillomavirus
IAAPRLYRK

SEQ ID NO: 11485 - protein, 10 aa, Artificial Sequence
  Peptide Derived from Human Papillomavirus
ISSTPIPGFR

SEQ ID NO: 11486 - protein, 11 aa, Artificial Sequence
  Peptide Derived from Human Papillomavirus
ISSTPIPGFRR

SEQ ID NO: 11487 - protein, 8 aa, Artificial Sequence
  Peptide Derived from Human Papillomavirus
IVDVTPAR

SEQ ID NO: 11488 - protein, 8 aa, Artificial Sequence
  Peptide Derived from Human Papillomavirus
KATIQTRR

SEQ ID NO: 11489 - protein, 10 aa, Artificial Sequence
  Peptide Derived from Human Papillomavirus
KIEQKTWADK

SEQ ID NO: 11490 - protein, 10 aa, Artificial Sequence
  Peptide Derived from Human Papillomavirus
KVTDPAFLDR

SEQ ID NO: 11491 - protein, 8 aa, Artificial Sequence
  Peptide Derived from Human Papillomavirus
MVAHRATR

SEQ ID NO: 11492 - protein, 9 aa, Artificial Sequence
  Peptide Derived from Human Papillomavirus
MVAHRATRR

SEQ ID NO: 11493 - protein, 10 aa, Artificial Sequence
  Peptide Derived from Human Papillomavirus
MVAHRATRRK

SEQ ID NO: 11494 - protein, 11 aa, Artificial Sequence
  Peptide Derived from Human Papillomavirus
MVAHRATRRKR

SEQ ID NO: 11495 - protein, 11 aa, Artificial Sequence
  Peptide Derived from Human Papillomavirus
PAFTTRRGGVR

SEQ ID NO: 11496 - protein, 11 aa, Artificial Sequence
  Peptide Derived from Human Papillomavirus
PISSTPIPGFR

SEQ ID NO: 11497 - protein, 8 aa, Artificial Sequence
  Peptide Derived from Human Papillomavirus
PSAHLPIK

SEQ ID NO: 11498 - protein, 11 aa, Artificial Sequence
  Peptide Derived from Human Papillomavirus
PSTIVDVTPAR

SEQ ID NO: 11499 - protein, 8 aa, Artificial Sequence
  Peptide Derived from Human Papillomavirus
PVYFFRRR

SEQ ID NO: 11500 - protein, 9 aa, Artificial Sequence
  Peptide Derived from Human Papillomavirus
PVYFFRRRR

SEQ ID NO: 11501 - protein, 10 aa, Artificial Sequence
  Peptide Derived from Human Papillomavirus
PVYFFRRRRR

SEQ ID NO: 11502 - protein, 11 aa, Artificial Sequence
  Peptide Derived from Human Papillomavirus
PVYFFRRRRRK

SEQ ID NO: 11503 - protein, 11 aa, Artificial Sequence
  Peptide Derived from Human Papillomavirus
QTRRGTQIGAR

SEQ ID NO: 11504 - protein, 10 aa, Artificial Sequence
  Peptide Derived from Human Papillomavirus
RAGYVPLGSR

SEQ ID NO: 11505 - protein, 9 aa, Artificial Sequence
  Peptide Derived from Human Papillomavirus
RASATQLYK

SEQ ID NO: 11506 - protein, 9 aa, Artificial Sequence
  Peptide Derived from Human Papillomavirus
RIAAPRLYR

SEQ ID NO: 11507 - protein, 10 aa, Artificial Sequence
  Peptide Derived from Human Papillomavirus
RIAAPRLYRK

SEQ ID NO: 11508 - protein, 11 aa, Artificial Sequence
  Peptide Derived from Human Papillomavirus
RLGRKATIQTR

SEQ ID NO: 11509 - protein, 11 aa, Artificial Sequence
  Peptide Derived from Human Papillomavirus
RLYRKAFQQVK

SEQ ID NO: 11510 - protein, 10 aa, Artificial Sequence
  Peptide Derived from Human Papillomavirus
SATQLYKTCK

SEQ ID NO: 11511 - protein, 9 aa, Artificial Sequence
  Peptide Derived from Human Papillomavirus
SSTPIPGFR

SEQ ID NO: 11512 - protein, 10 aa, Artificial Sequence
  Peptide Derived from Human Papillomavirus
SSTPIPGFRR

SEQ ID NO: 11513 - protein, 10 aa, Artificial Sequence
  Peptide Derived from Human Papillomavirus
STIVDVTPAR

SEQ ID NO: 11514 - protein, 8 aa, Artificial Sequence
  Peptide Derived from Human Papillomavirus
STPIPGFR

SEQ ID NO: 11515 - protein, 9 aa, Artificial Sequence
  Peptide Derived from Human Papillomavirus
STPIPGFRR

SEQ ID NO: 11516 - protein, 9 aa, Artificial Sequence
  Peptide Derived from Human Papillomavirus
TIVDVTPAR

SEQ ID NO: 11517 - protein, 8 aa, Artificial Sequence
  Peptide Derived from Human Papillomavirus
TTRRGGVR

SEQ ID NO: 11518 - protein, 11 aa, Artificial Sequence
  Peptide Derived from Human Papillomavirus
TTRRGGVRFSR

SEQ ID NO: 11519 - protein, 8 aa, Artificial Sequence
  Peptide Derived from Human Papillomavirus
VAHRATRR

SEQ ID NO: 11520 - protein, 9 aa, Artificial Sequence
  Peptide Derived from Human Papillomavirus
VAHRATRRK

SEQ ID NO: 11521 - protein, 10 aa, Artificial Sequence
  Peptide Derived from Human Papillomavirus
VAHRATRRKR

SEQ ID NO: 11522 - protein, 11 aa, Artificial Sequence
  Peptide Derived from Human Papillomavirus
VALHRPAFTTR

SEQ ID NO: 11523 - protein, 11 aa, Artificial Sequence
  Peptide Derived from Human Papillomavirus
VATPSAHLPIK

SEQ ID NO: 11524 - protein, 9 aa, Artificial Sequence
  Peptide Derived from Human Papillomavirus
VTDPAFLDR

SEQ ID NO: 11525 - protein, 8 aa, Artificial Sequence
  Peptide Derived from Human Papillomavirus
VVNKIEQK

SEQ ID NO: 11526 - protein, 8 aa, Artificial Sequence
  Peptide Derived from Human Papillomavirus
AFGLTPSI

SEQ ID NO: 11527 - protein, 11 aa, Artificial Sequence
  Peptide Derived from Human Papillomavirus
AFLKSNSQAKI

SEQ ID NO: 11528 - protein, 9 aa, Artificial Sequence
  Peptide Derived from Human Papillomavirus
ALDGNLVSM

SEQ ID NO: 11529 - protein, 9 aa, Artificial Sequence
  Peptide Derived from Human Papillomavirus
ALKRFLQGI

SEQ ID NO: 11530 - protein, 9 aa, Artificial Sequence
  Peptide Derived from Human Papillomavirus
ALYWYKTGI

SEQ ID NO: 11531 - protein, 9 aa, Artificial Sequence
  Peptide Derived from Human Papillomavirus
AMLAKFKEL

SEQ ID NO: 11532 - protein, 10 aa, Artificial Sequence
  Peptide Derived from Human Papillomavirus
AMLAKFKELY

SEQ ID NO: 11533 - protein, 8 aa, Artificial Sequence
  Peptide Derived from Human Papillomavirus
ATVPCWNY

SEQ ID NO: 11534 - protein, 9 aa, Artificial Sequence
  Peptide Derived from Human Papillomavirus
ATVPCWNYI

SEQ ID NO: 11535 - protein, 9 aa, Artificial Sequence
  Peptide Derived from Human Papillomavirus
AVQVLKRKY

SEQ ID NO: 11536 - protein, 10 aa, Artificial Sequence
  Peptide Derived from Human Papillomavirus
AVQVLKRKYL

SEQ ID NO: 11537 - protein, 11 aa, Artificial Sequence
  Peptide Derived from Human Papillomavirus
AVVEKKTGDAI

SEQ ID NO: 11538 - protein, 9 aa, Artificial Sequence
  Peptide Derived from Human Papillomavirus
CFVNSKSHF

SEQ ID NO: 11539 - protein, 10 aa, Artificial Sequence
  Peptide Derived from Human Papillomavirus
CFVNSKSHFW

SEQ ID NO: 11540 - protein, 11 aa, Artificial Sequence
  Peptide Derived from Human Papillomavirus
CFVNSKSHFWL

SEQ ID NO: 11541 - protein, 11 aa, Artificial Sequence
  Peptide Derived from Human Papillomavirus
CIAAFGLTPSI

SEQ ID NO: 11542 - protein, 9 aa, Artificial Sequence
  Peptide Derived from Human Papillomavirus
CLYLHIQSL

SEQ ID NO: 11543 - protein, 9 aa, Artificial Sequence
  Peptide Derived from Human Papillomavirus
CMMIEPPKL

SEQ ID NO: 11544 - protein, 8 aa, Artificial Sequence
  Peptide Derived from Human Papillomavirus
CTFELSQM

SEQ ID NO: 11545 - protein, 11 aa, Artificial Sequence
  Peptide Derived from Human Papillomavirus
CTFELSQMVQW

SEQ ID NO: 11546 - protein, 10 aa, Artificial Sequence
  Peptide Derived from Human Papillomavirus
CVDNNISPRL

SEQ ID NO: 11547 - protein, 10 aa, Artificial Sequence
  Peptide Derived from Human Papillomavirus
CVSGQNTNTL

SEQ ID NO: 11548 - protein, 8 aa, Artificial Sequence
  Peptide Derived from Human Papillomavirus
CVSPMCMM

SEQ ID NO: 11549 - protein, 9 aa, Artificial Sequence
  Peptide Derived from Human Papillomavirus
CVSPMCMMI

SEQ ID NO: 11550 - protein, 9 aa, Artificial Sequence
  Peptide Derived from Human Papillomavirus
CWNYIDDNL

SEQ ID NO: 11551 - protein, 9 aa, Artificial Sequence
  Peptide Derived from Human Papillomavirus
DFIVNDNDY

SEQ ID NO: 11552 - protein, 10 aa, Artificial Sequence
  Peptide Derived from Human Papillomavirus
DFIVNDNDYL

SEQ ID NO: 11553 - protein, 10 aa, Artificial Sequence
  Peptide Derived from Human Papillomavirus
DISGCVDNNI

SEQ ID NO: 11554 - protein, 8 aa, Artificial Sequence
  Peptide Derived from Human Papillomavirus
DIVDDSEI

SEQ ID NO: 11555 - protein, 10 aa, Artificial Sequence
  Peptide Derived from Human Papillomavirus
DIVDDSEIAY

SEQ ID NO: 11556 - protein, 9 aa, Artificial Sequence
  Peptide Derived from Human Papillomavirus
DTGEDLVDF

SEQ ID NO: 11557 - protein, 10 aa, Artificial Sequence
  Peptide Derived from Human Papillomavirus
DTGEDLVDFI

SEQ ID NO: 11558 - protein, 9 aa, Artificial Sequence
  Peptide Derived from Human Papillomavirus
DTNSNASAF

SEQ ID NO: 11559 - protein, 10 aa, Artificial Sequence
  Peptide Derived from Human Papillomavirus
DTNSNASAFL

SEQ ID NO: 11560 - protein, 10 aa, Artificial Sequence
  Peptide Derived from Human Papillomavirus
DVKHRPLVQL

SEQ ID NO: 11561 - protein, 9 aa, Artificial Sequence
  Peptide Derived from Human Papillomavirus
DWCIAAFGL

SEQ ID NO: 11562 - protein, 8 aa, Artificial Sequence
  Peptide Derived from Human Papillomavirus
DWKQIVMF

SEQ ID NO: 11563 - protein, 9 aa, Artificial Sequence
  Peptide Derived from Human Papillomavirus
DWKQIVMFL

SEQ ID NO: 11564 - protein, 11 aa, Artificial Sequence
  Peptide Derived from Human Papillomavirus
DWKQIVMFLRY

SEQ ID NO: 11565 - protein, 9 aa, Artificial Sequence
  Peptide Derived from Human Papillomavirus
EFMSFLTAL

SEQ ID NO: 11566 - protein, 9 aa, Artificial Sequence
  Peptide Derived from Human Papillomavirus
EIAYKYAQL

SEQ ID NO: 11567 - protein, 10 aa, Artificial Sequence
  Peptide Derived from Human Papillomavirus
ELNDKNWKSF

SEQ ID NO: 11568 - protein, 11 aa, Artificial Sequence
  Peptide Derived from Human Papillomavirus
ELNDKNWKSFF

SEQ ID NO: 11569 - protein, 8 aa, Artificial Sequence
  Peptide Derived from Human Papillomavirus
ELSQMVQW

SEQ ID NO: 11570 - protein, 10 aa, Artificial Sequence
  Peptide Derived from Human Papillomavirus
ELSQMVQWAY

SEQ ID NO: 11571 - protein, 10 aa, Artificial Sequence
  Peptide Derived from Human Papillomavirus
ELYGVSFSEL

SEQ ID NO: 11572 - protein, 8 aa, Artificial Sequence
  Peptide Derived from Human Papillomavirus
ETETAHAL

SEQ ID NO: 11573 - protein, 9 aa, Artificial Sequence
  Peptide Derived from Human Papillomavirus
ETETAHALF

SEQ ID NO: 11574 - protein, 9 aa, Artificial Sequence
  Peptide Derived from Human Papillomavirus
ETETPCSQY

SEQ ID NO: 11575 - protein, 10 aa, Artificial Sequence
  Peptide Derived from Human Papillomavirus
ETIEKLLSKL

SEQ ID NO: 11576 - protein, 11 aa, Artificial Sequence
  Peptide Derived from Human Papillomavirus
ETIEKLLSKLL

SEQ ID NO: 11577 - protein, 8 aa, Artificial Sequence
  Peptide Derived from Human Papillomavirus
EVETQQML

SEQ ID NO: 11578 - protein, 9 aa, Artificial Sequence
  Peptide Derived from Human Papillomavirus
EVYGDTPEW

SEQ ID NO: 11579 - protein, 10 aa, Artificial Sequence
  Peptide Derived from Human Papillomavirus
EVYGDTPEWI

SEQ ID NO: 11580 - protein, 9 aa, Artificial Sequence
  Peptide Derived from Human Papillomavirus
EWIQRQTVL

SEQ ID NO: 11581 - protein, 9 aa, Artificial Sequence
  Peptide Derived from Human Papillomavirus
FFSRTWSRL

SEQ ID NO: 11582 - protein, 11 aa, Artificial Sequence
  Peptide Derived from Human Papillomavirus
FFSRTWSRLSL

SEQ ID NO: 11583 - protein, 8 aa, Artificial Sequence
  Peptide Derived from Human Papillomavirus
FIVNDNDY

SEQ ID NO: 11584 - protein, 9 aa, Artificial Sequence
  Peptide Derived from Human Papillomavirus
FIVNDNDYL

SEQ ID NO: 11585 - protein, 10 aa, Artificial Sequence
  Peptide Derived from Human Papillomavirus
FLKSNSQAKI

SEQ ID NO: 11586 - protein, 11 aa, Artificial Sequence
  Peptide Derived from Human Papillomavirus
FLQGIPKKNCI

SEQ ID NO: 11587 - protein, 9 aa, Artificial Sequence
  Peptide Derived from Human Papillomavirus
FLQGSVICF

SEQ ID NO: 11588 - protein, 9 aa, Artificial Sequence
  Peptide Derived from Human Papillomavirus
FLRYQGVEF

SEQ ID NO: 11589 - protein, 10 aa, Artificial Sequence
  Peptide Derived from Human Papillomavirus
FLRYQGVEFM

SEQ ID NO: 11590 - protein, 8 aa, Artificial Sequence
  Peptide Derived from Human Papillomavirus
FLTALKRF

SEQ ID NO: 11591 - protein, 9 aa, Artificial Sequence
  Peptide Derived from Human Papillomavirus
FLTALKRFL

SEQ ID NO: 11592 - protein, 8 aa, Artificial Sequence
  Peptide Derived from Human Papillomavirus
FMSFLTAL

SEQ ID NO: 11593 - protein, 11 aa, Artificial Sequence
  Peptide Derived from Human Papillomavirus
FMSFLTALKRF

SEQ ID NO: 11594 - protein, 9 aa, Artificial Sequence
  Peptide Derived from Human Papillomavirus
FTFPNEFPF

SEQ ID NO: 11595 - protein, 8 aa, Artificial Sequence
  Peptide Derived from Human Papillomavirus
FVNSKSHF

SEQ ID NO: 11596 - protein, 9 aa, Artificial Sequence
  Peptide Derived from Human Papillomavirus
FVNSKSHFW

SEQ ID NO: 11597 - protein, 10 aa, Artificial Sequence
  Peptide Derived from Human Papillomavirus
FVNSKSHFWL

SEQ ID NO: 11598 - protein, 11 aa, Artificial Sequence
  Peptide Derived from Human Papillomavirus
FWLQPLADAKI

SEQ ID NO: 11599 - protein, 8 aa, Artificial Sequence
  Peptide Derived from Human Papillomavirus
GIPKKNCI

SEQ ID NO: 11600 - protein, 9 aa, Artificial Sequence
  Peptide Derived from Human Papillomavirus
GIPKKNCIL

SEQ ID NO: 11601 - protein, 10 aa, Artificial Sequence
  Peptide Derived from Human Papillomavirus
GIPKKNCILL

SEQ ID NO: 11602 - protein, 11 aa, Artificial Sequence
  Peptide Derived from Human Papillomavirus
GIPKKNCILLY

SEQ ID NO: 11603 - protein, 9 aa, Artificial Sequence
  Peptide Derived from Human Papillomavirus
GISNISEVY

SEQ ID NO: 11604 - protein, 10 aa, Artificial Sequence
  Peptide Derived from Human Papillomavirus
GLTPSIADSI

SEQ ID NO: 11605 - protein, 11 aa, Artificial Sequence
  Peptide Derived from Human Papillomavirus
GMLDDATVPCW

SEQ ID NO: 11606 - protein, 8 aa, Artificial Sequence
  Peptide Derived from Human Papillomavirus
GMSLMKFL

SEQ ID NO: 11607 - protein, 10 aa, Artificial Sequence
  Peptide Derived from Human Papillomavirus
GMVVLLLVRY

SEQ ID NO: 11608 - protein, 8 aa, Artificial Sequence
  Peptide Derived from Human Papillomavirus
GTDSRWPY

SEQ ID NO: 11609 - protein, 9 aa, Artificial Sequence
  Peptide Derived from Human Papillomavirus
GTDSRWPYL

SEQ ID NO: 11610 - protein, 8 aa, Artificial Sequence
  Peptide Derived from Human Papillomavirus
GTGCNGWF

SEQ ID NO: 11611 - protein, 9 aa, Artificial Sequence
  Peptide Derived from Human Papillomavirus
GTGCNGWFY

SEQ ID NO: 11612 - protein, 8 aa, Artificial Sequence
  Peptide Derived from Human Papillomavirus
GVEFMSFL

SEQ ID NO: 11613 - protein, 11 aa, Artificial Sequence
  Peptide Derived from Human Papillomavirus
GVEFMSFLTAL

SEQ ID NO: 11614 - protein, 8 aa, Artificial Sequence
  Peptide Derived from Human Papillomavirus
GVSERHTI

SEQ ID NO: 11615 - protein, 11 aa, Artificial Sequence
  Peptide Derived from Human Papillomavirus
GVSFSELVRPF

SEQ ID NO: 11616 - protein, 9 aa, Artificial Sequence
  Peptide Derived from Human Papillomavirus
HIQSLACSW

SEQ ID NO: 11617 - protein, 11 aa, Artificial Sequence
  Peptide Derived from Human Papillomavirus
HIQSLACSWGM

SEQ ID NO: 11618 - protein, 8 aa, Artificial Sequence
  Peptide Derived from Human Papillomavirus
HTICQTPL

SEQ ID NO: 11619 - protein, 11 aa, Artificial Sequence
  Peptide Derived from Human Papillomavirus
HTICQTPLTNI

SEQ ID NO: 11620 - protein, 10 aa, Artificial Sequence
  Peptide Derived from Human Papillomavirus
HYKRAEKKQM

SEQ ID NO: 11621 - protein, 9 aa, Artificial Sequence
  Peptide Derived from Human Papillomavirus
IVDDSEIAY

SEQ ID NO: 11622 - protein, 11 aa, Artificial Sequence
  Peptide Derived from Human Papillomavirus
IVDDSEIAYKY

SEQ ID NO: 11623 - protein, 8 aa, Artificial Sequence
  Peptide Derived from Human Papillomavirus
IVKDCATM

SEQ ID NO: 11624 - protein, 8 aa, Artificial Sequence
  Peptide Derived from Human Papillomavirus
IVNDNDYL

SEQ ID NO: 11625 - protein, 10 aa, Artificial Sequence
  Peptide Derived from Human Papillomavirus
KFKELYGVSF

SEQ ID NO: 11626 - protein, 8 aa, Artificial Sequence
  Peptide Derived from Human Papillomavirus
KFLQGSVI

SEQ ID NO: 11627 - protein, 10 aa, Artificial Sequence
  Peptide Derived from Human Papillomavirus
KFLQGSVICF

SEQ ID NO: 11628 - protein, 9 aa, Artificial Sequence
  Peptide Derived from Human Papillomavirus
KIVKDCATM

SEQ ID NO: 11629 - protein, 8 aa, Artificial Sequence
  Peptide Derived from Human Papillomavirus
KLLCVSPM

SEQ ID NO: 11630 - protein, 10 aa, Artificial Sequence
  Peptide Derived from Human Papillomavirus
KLLCVSPMCM

SEQ ID NO: 11631 - protein, 11 aa, Artificial Sequence
  Peptide Derived from Human Papillomavirus
KLLCVSPMCMM

SEQ ID NO: 11632 - protein, 9 aa, Artificial Sequence
  Peptide Derived from Human Papillomavirus
KLRSTAAAL

SEQ ID NO: 11633 - protein, 10 aa, Artificial Sequence
  Peptide Derived from Human Papillomavirus
KLRSTAAALY

SEQ ID NO: 11634 - protein, 11 aa, Artificial Sequence
  Peptide Derived from Human Papillomavirus
KLRSTAAALYW

SEQ ID NO: 11635 - protein, 11 aa, Artificial Sequence
  Peptide Derived from Human Papillomavirus
KTGISNISEVY

SEQ ID NO: 11636 - protein, 9 aa, Artificial Sequence
  Peptide Derived from Human Papillomavirus
KTLLQQYCL

SEQ ID NO: 11637 - protein, 10 aa, Artificial Sequence
  Peptide Derived from Human Papillomavirus
KTLLQQYCLY

SEQ ID NO: 11638 - protein, 11 aa, Artificial Sequence
  Peptide Derived from Human Papillomavirus
KTLLQQYCLYL

SEQ ID NO: 11639 - protein, 9 aa, Artificial Sequence
  Peptide Derived from Human Papillomavirus
KTSNAKAAM

SEQ ID NO: 11640 - protein, 10 aa, Artificial Sequence
  Peptide Derived from Human Papillomavirus
KTSNAKAAML

SEQ ID NO: 11641 - protein, 10 aa, Artificial Sequence
  Peptide Derived from Human Papillomavirus
KYLVSPLSDI

SEQ ID NO: 11642 - protein, 9 aa, Artificial Sequence
  Peptide Derived from Human Papillomavirus
LFESEDSGY

SEQ ID NO: 11643 - protein, 9 aa, Artificial Sequence
  Peptide Derived from Human Papillomavirus
LFGMSLMKF

SEQ ID NO: 11644 - protein, 10 aa, Artificial Sequence
  Peptide Derived from Human Papillomavirus
LFGMSLMKFL

SEQ ID NO: 11645 - protein, 9 aa, Artificial Sequence
  Peptide Derived from Human Papillomavirus
LLCVSPMCM

SEQ ID NO: 11646 - protein, 10 aa, Artificial Sequence
  Peptide Derived from Human Papillomavirus
LLCVSPMCMM

SEQ ID NO: 11647 - protein, 11 aa, Artificial Sequence
  Peptide Derived from Human Papillomavirus
LLCVSPMCMMI

SEQ ID NO: 11648 - protein, 8 aa, Artificial Sequence
  Peptide Derived from Human Papillomavirus
LLQQYCLY

SEQ ID NO: 11649 - protein, 9 aa, Artificial Sequence
  Peptide Derived from Human Papillomavirus
LLQQYCLYL

SEQ ID NO: 11650 - protein, 11 aa, Artificial Sequence
  Peptide Derived from Human Papillomavirus
LLQQYCLYLHI

SEQ ID NO: 11651 - protein, 11 aa, Artificial Sequence
  Peptide Derived from Human Papillomavirus
LLSKLLCVSPM

SEQ ID NO: 11652 - protein, 10 aa, Artificial Sequence
  Peptide Derived from Human Papillomavirus
LMKFLQGSVI

SEQ ID NO: 11653 - protein, 8 aa, Artificial Sequence
  Peptide Derived from Human Papillomavirus
LTALKRFL

SEQ ID NO: 11654 - protein, 11 aa, Artificial Sequence
  Peptide Derived from Human Papillomavirus
LTALKRFLQGI

SEQ ID NO: 11655 - protein, 8 aa, Artificial Sequence
  Peptide Derived from Human Papillomavirus
LTNILNVL

SEQ ID NO: 11656 - protein, 9 aa, Artificial Sequence
  Peptide Derived from Human Papillomavirus
LTPSIADSI

SEQ ID NO: 11657 - protein, 11 aa, Artificial Sequence
  Peptide Derived from Human Papillomavirus
LVDFIVNDNDY

SEQ ID NO: 11658 - protein, 9 aa, Artificial Sequence
  Peptide Derived from Human Papillomavirus
LVQLKCPPL

SEQ ID NO: 11659 - protein, 10 aa, Artificial Sequence
  Peptide Derived from Human Papillomavirus
LVQLKCPPLL

SEQ ID NO: 11660 - protein, 11 aa, Artificial Sequence
  Peptide Derived from Human Papillomavirus
LVQLKCPPLLI

SEQ ID NO: 11661 - protein, 11 aa, Artificial Sequence
  Peptide Derived from Human Papillomavirus
LVSMDVKHRPL

SEQ ID NO: 11662 - protein, 8 aa, Artificial Sequence
  Peptide Derived from Human Papillomavirus
LVSPLSDI

SEQ ID NO: 11663 - protein, 10 aa, Artificial Sequence
  Peptide Derived from Human Papillomavirus
LVVFTFPNEF

SEQ ID NO: 11664 - protein, 11 aa, Artificial Sequence
  Peptide Derived from Human Papillomavirus
LYGAANTGKSL

SEQ ID NO: 11665 - protein, 9 aa, Artificial Sequence
  Peptide Derived from Human Papillomavirus
LYGVSFSEL

SEQ ID NO: 11666 - protein, 8 aa, Artificial Sequence
  Peptide Derived from Human Papillomavirus
LYLHIQSL

SEQ ID NO: 11667 - protein, 8 aa, Artificial Sequence
  Peptide Derived from Human Papillomavirus
LYWYKTGI

SEQ ID NO: 11668 - protein, 11 aa, Artificial Sequence
  Peptide Derived from Human Papillomavirus
LYWYKTGISNI

SEQ ID NO: 11669 - protein, 10 aa, Artificial Sequence
  Peptide Derived from Human Papillomavirus
MFLRYQGVEF

SEQ ID NO: 11670 - protein, 11 aa, Artificial Sequence
  Peptide Derived from Human Papillomavirus
MFLRYQGVEFM

SEQ ID NO: 11671 - protein, 8 aa, Artificial Sequence
  Peptide Derived from Human Papillomavirus
MLAKFKEL

SEQ ID NO: 11672 - protein, 9 aa, Artificial Sequence
  Peptide Derived from Human Papillomavirus
MLAKFKELY

SEQ ID NO: 11673 - protein, 10 aa, Artificial Sequence
  Peptide Derived from Human Papillomavirus
MLDDATVPCW

SEQ ID NO: 11674 - protein, 8 aa, Artificial Sequence
  Peptide Derived from Human Papillomavirus
MMIEPPKL

SEQ ID NO: 11675 - protein, 10 aa, Artificial Sequence
  Peptide Derived from Human Papillomavirus
MVQWAYDNDI

SEQ ID NO: 11676 - protein, 9 aa, Artificial Sequence
  Peptide Derived from Human Papillomavirus
MVVLLLVRY

SEQ ID NO: 11677 - protein, 10 aa, Artificial Sequence
  Peptide Derived from Human Papillomavirus
NINAGTDSRW

SEQ ID NO: 11678 - protein, 9 aa, Artificial Sequence
  Peptide Derived from Human Papillomavirus
NISPRLKAI

SEQ ID NO: 11679 - protein, 11 aa, Artificial Sequence
  Peptide Derived from Human Papillomavirus
NISPRLKAICI

SEQ ID NO: 11680 - protein, 10 aa, Artificial Sequence
  Peptide Derived from Human Papillomavirus
NLRNALDGNL

SEQ ID NO: 11681 - protein, 9 aa, Artificial Sequence
  Peptide Derived from Human Papillomavirus
NTEVETQQM

SEQ ID NO: 11682 - protein, 10 aa, Artificial Sequence
  Peptide Derived from Human Papillomavirus
NTEVETQQML

SEQ ID NO: 11683 - protein, 9 aa, Artificial Sequence
  Peptide Derived from Human Papillomavirus
NTGKSLFGM

SEQ ID NO: 11684 - protein, 11 aa, Artificial Sequence
  Peptide Derived from Human Papillomavirus
NTGKSLFGMSL

SEQ ID NO: 11685 - protein, 10 aa, Artificial Sequence
  Peptide Derived from Human Papillomavirus
NWKSFFSRTW

SEQ ID NO: 11686 - protein, 11 aa, Artificial Sequence
  Peptide Derived from Human Papillomavirus
NYIDDNLRNAL

SEQ ID NO: 11687 - protein, 10 aa, Artificial Sequence
  Peptide Derived from Human Papillomavirus
PFDENGNPVY

SEQ ID NO: 11688 - protein, 9 aa, Artificial Sequence
  Peptide Derived from Human Papillomavirus
PLADAKIGM

SEQ ID NO: 11689 - protein, 10 aa, Artificial Sequence
  Peptide Derived from Human Papillomavirus
PLADAKIGML

SEQ ID NO: 11690 - protein, 8 aa, Artificial Sequence
  Peptide Derived from Human Papillomavirus
PLLITSNI

SEQ ID NO: 11691 - protein, 9 aa, Artificial Sequence
  Peptide Derived from Human Papillomavirus
PLTNILNVL

SEQ ID NO: 11692 - protein, 10 aa, Artificial Sequence
  Peptide Derived from Human Papillomavirus
PLVQLKCPPL

SEQ ID NO: 11693 - protein, 11 aa, Artificial Sequence
  Peptide Derived from Human Papillomavirus
PLVQLKCPPLL

SEQ ID NO: 11694 - protein, 11 aa, Artificial Sequence
  Peptide Derived from Human Papillomavirus
PMCMMIEPPKL

SEQ ID NO: 11695 - protein, 10 aa, Artificial Sequence
  Peptide Derived from Human Papillomavirus
PVYELNDKNW

SEQ ID NO: 11696 - protein, 10 aa, Artificial Sequence
  Peptide Derived from Human Papillomavirus
PYLHNRLVVF

SEQ ID NO: 11697 - protein, 8 aa, Artificial Sequence
  Peptide Derived from Human Papillomavirus
QIVMFLRY

SEQ ID NO: 11698 - protein, 8 aa, Artificial Sequence
  Peptide Derived from Human Papillomavirus
QLKCPPLL

SEQ ID NO: 11699 - protein, 9 aa, Artificial Sequence
  Peptide Derived from Human Papillomavirus
QLKCPPLLI

SEQ ID NO: 11700 - protein, 8 aa, Artificial Sequence
  Peptide Derived from Human Papillomavirus
QMSMSQWI

SEQ ID NO: 11701 - protein, 10 aa, Artificial Sequence
  Peptide Derived from Human Papillomavirus
QMSMSQWIKY

SEQ ID NO: 11702 - protein, 11 aa, Artificial Sequence
  Peptide Derived from Human Papillomavirus
QMVQWAYDNDI

SEQ ID NO: 11703 - protein, 8 aa, Artificial Sequence
  Peptide Derived from Human Papillomavirus
QTPLTNIL

SEQ ID NO: 11704 - protein, 11 aa, Artificial Sequence
  Peptide Derived from Human Papillomavirus
QTPLTNILNVL

SEQ ID NO: 11705 - protein, 8 aa, Artificial Sequence
  Peptide Derived from Human Papillomavirus
QTVLQHSF

SEQ ID NO: 11706 - protein, 8 aa, Artificial Sequence
  Peptide Derived from Human Papillomavirus
QVLKRKYL

SEQ ID NO: 11707 - protein, 8 aa, Artificial Sequence
  Peptide Derived from Human Papillomavirus
QWAYDNDI

SEQ ID NO: 11708 - protein, 8 aa, Artificial Sequence
  Peptide Derived from Human Papillomavirus
QYCLYLHI

SEQ ID NO: 11709 - protein, 11 aa, Artificial Sequence
  Peptide Derived from Human Papillomavirus
QYCLYLHIQSL

SEQ ID NO: 11710 - protein, 10 aa, Artificial Sequence
  Peptide Derived from Human Papillomavirus
RLFESEDSGY

SEQ ID NO: 11711 - protein, 11 aa, Artificial Sequence
  Peptide Derived from Human Papillomavirus
RLVVFTFPNEF

SEQ ID NO: 11712 - protein, 8 aa, Artificial Sequence
  Peptide Derived from Human Papillomavirus
RTWSRLSL

SEQ ID NO: 11713 - protein, 8 aa, Artificial Sequence
  Peptide Derived from Human Papillomavirus
RVDDGGDW

SEQ ID NO: 11714 - protein, 11 aa, Artificial Sequence
  Peptide Derived from Human Papillomavirus
RVDDGGDWKQI

SEQ ID NO: 11715 - protein, 9 aa, Artificial Sequence
  Peptide Derived from Human Papillomavirus
RWPYLHNRL

SEQ ID NO: 11716 - protein, 11 aa, Artificial Sequence
  Peptide Derived from Human Papillomavirus
RYKCGKNRETI

SEQ ID NO: 11717 - protein, 8 aa, Artificial Sequence
  Peptide Derived from Human Papillomavirus
RYQGVEFM

SEQ ID NO: 11718 - protein, 10 aa, Artificial Sequence
  Peptide Derived from Human Papillomavirus
RYQGVEFMSF

SEQ ID NO: 11719 - protein, 11 aa, Artificial Sequence
  Peptide Derived from Human Papillomavirus
RYQGVEFMSFL

SEQ ID NO: 11720 - protein, 10 aa, Artificial Sequence
  Peptide Derived from Human Papillomavirus
SFFSRTWSRL

SEQ ID NO: 11721 - protein, 9 aa, Artificial Sequence
  Peptide Derived from Human Papillomavirus
SFLTALKRF

SEQ ID NO: 11722 - protein, 10 aa, Artificial Sequence
  Peptide Derived from Human Papillomavirus
SFLTALKRFL

SEQ ID NO: 11723 - protein, 9 aa, Artificial Sequence
  Peptide Derived from Human Papillomavirus
SFNDCTFEL

SEQ ID NO: 11724 - protein, 9 aa, Artificial Sequence
  Peptide Derived from Human Papillomavirus
SFSELVRPF

SEQ ID NO: 11725 - protein, 9 aa, Artificial Sequence
  Peptide Derived from Human Papillomavirus
SIADSIKTL

SEQ ID NO: 11726 - protein, 10 aa, Artificial Sequence
  Peptide Derived from Human Papillomavirus
SIADSIKTLL

SEQ ID NO: 11727 - protein, 9 aa, Artificial Sequence
  Peptide Derived from Human Papillomavirus
SIKTLLQQY

SEQ ID NO: 11728 - protein, 11 aa, Artificial Sequence
  Peptide Derived from Human Papillomavirus
SIKTLLQQYCL

SEQ ID NO: 11729 - protein, 8 aa, Artificial Sequence
  Peptide Derived from Human Papillomavirus
SLACSWGM

SEQ ID NO: 11730 - protein, 11 aa, Artificial Sequence
  Peptide Derived from Human Papillomavirus
SLACSWGMVVL

SEQ ID NO: 11731 - protein, 8 aa, Artificial Sequence
  Peptide Derived from Human Papillomavirus
SLFGMSLM

SEQ ID NO: 11732 - protein, 10 aa, Artificial Sequence
  Peptide Derived from Human Papillomavirus
SLFGMSLMKF

SEQ ID NO: 11733 - protein, 11 aa, Artificial Sequence
  Peptide Derived from Human Papillomavirus
SLFGMSLMKFL

SEQ ID NO: 11734 - protein, 11 aa, Artificial Sequence
  Peptide Derived from Human Papillomavirus
SLMKFLQGSVI

SEQ ID NO: 11735 - protein, 9 aa, Artificial Sequence
  Peptide Derived from Human Papillomavirus
SMDVKHRPL

SEQ ID NO: 11736 - protein, 8 aa, Artificial Sequence
  Peptide Derived from Human Papillomavirus
SMSQWIKY

SEQ ID NO: 11737 - protein, 8 aa, Artificial Sequence
  Peptide Derived from Human Papillomavirus
STAAALYW

SEQ ID NO: 11738 - protein, 9 aa, Artificial Sequence
  Peptide Derived from Human Papillomavirus
STAAALYWY

SEQ ID NO: 11739 - protein, 8 aa, Artificial Sequence
  Peptide Derived from Human Papillomavirus
STCCDWCI

SEQ ID NO: 11740 - protein, 11 aa, Artificial Sequence
  Peptide Derived from Human Papillomavirus
STCCDWCIAAF

SEQ ID NO: 11741 - protein, 8 aa, Artificial Sequence
  Peptide Derived from Human Papillomavirus
SWGMVVLL

SEQ ID NO: 11742 - protein, 9 aa, Artificial Sequence
  Peptide Derived from Human Papillomavirus
SWGMVVLLL

SEQ ID NO: 11743 - protein, 10 aa, Artificial Sequence
  Peptide Derived from Human Papillomavirus
TFELSQMVQW

SEQ ID NO: 11744 - protein, 8 aa, Artificial Sequence
  Peptide Derived from Human Papillomavirus
TFPNEFPF

SEQ ID NO: 11745 - protein, 10 aa, Artificial Sequence
  Peptide Derived from Human Papillomavirus
TICQTPLTNI

SEQ ID NO: 11746 - protein, 11 aa, Artificial Sequence
  Peptide Derived from Human Papillomavirus
TICQTPLTNIL

SEQ ID NO: 11747 - protein, 9 aa, Artificial Sequence
  Peptide Derived from Human Papillomavirus
TIEKLLSKL

SEQ ID NO: 11748 - protein, 10 aa, Artificial Sequence
  Peptide Derived from Human Papillomavirus
TIEKLLSKLL

SEQ ID NO: 11749 - protein, 8 aa, Artificial Sequence
  Peptide Derived from Human Papillomavirus
TLLQQYCL

SEQ ID NO: 11750 - protein, 9 aa, Artificial Sequence
  Peptide Derived from Human Papillomavirus
TLLQQYCLY

SEQ ID NO: 11751 - protein, 10 aa, Artificial Sequence
  Peptide Derived from Human Papillomavirus
TLLQQYCLYL

SEQ ID NO: 11752 - protein, 8 aa, Artificial Sequence
  Peptide Derived from Human Papillomavirus
TVPCWNYI

SEQ ID NO: 11753 - protein, 8 aa, Artificial Sequence
  Peptide Derived from Human Papillomavirus
VFTFPNEF

SEQ ID NO: 11754 - protein, 10 aa, Artificial Sequence
  Peptide Derived from Human Papillomavirus
VFTFPNEFPF

SEQ ID NO: 11755 - protein, 11 aa, Artificial Sequence
  Peptide Derived from Human Papillomavirus
VICFVNSKSHF

SEQ ID NO: 11756 - protein, 11 aa, Artificial Sequence
  Peptide Derived from Human Papillomavirus
VLKRKYLVSPL

SEQ ID NO: 11757 - protein, 11 aa, Artificial Sequence
  Peptide Derived from Human Papillomavirus
VLKTSNAKAAM

SEQ ID NO: 11758 - protein, 11 aa, Artificial Sequence
  Peptide Derived from Human Papillomavirus
VLQHSFNDCTF

SEQ ID NO: 11759 - protein, 11 aa, Artificial Sequence
  Peptide Derived from Human Papillomavirus
VMFLRYQGVEF

SEQ ID NO: 11760 - protein, 10 aa, Artificial Sequence
  Peptide Derived from Human Papillomavirus
VVEKKTGDAI

SEQ ID NO: 11761 - protein, 9 aa, Artificial Sequence
  Peptide Derived from Human Papillomavirus
VVFTFPNEF

SEQ ID NO: 11762 - protein, 11 aa, Artificial Sequence
  Peptide Derived from Human Papillomavirus
VVFTFPNEFPF

SEQ ID NO: 11763 - protein, 8 aa, Artificial Sequence
  Peptide Derived from Human Papillomavirus
VVLLLVRY

SEQ ID NO: 11764 - protein, 9 aa, Artificial Sequence
  Peptide Derived from Human Papillomavirus
VYELNDKNW

SEQ ID NO: 11765 - protein, 8 aa, Artificial Sequence
  Peptide Derived from Human Papillomavirus
VYGDTPEW

SEQ ID NO: 11766 - protein, 9 aa, Artificial Sequence
  Peptide Derived from Human Papillomavirus
VYGDTPEWI

SEQ ID NO: 11767 - protein, 8 aa, Artificial Sequence
  Peptide Derived from Human Papillomavirus
WIQRQTVL

SEQ ID NO: 11768 - protein, 10 aa, Artificial Sequence
  Peptide Derived from Human Papillomavirus
WLQPLADAKI

SEQ ID NO: 11769 - protein, 9 aa, Artificial Sequence
  Peptide Derived from Human Papillomavirus
WYKTGISNI

SEQ ID NO: 11770 - protein, 10 aa, Artificial Sequence
  Peptide Derived from Human Papillomavirus
YIDDNLRNAL

SEQ ID NO: 11771 - protein, 11 aa, Artificial Sequence
  Peptide Derived from Human Papillomavirus
YLHIQSLACSW

SEQ ID NO: 11772 - protein, 9 aa, Artificial Sequence
  Peptide Derived from Human Papillomavirus
YLHNRLVVF

SEQ ID NO: 11773 - protein, 11 aa, Artificial Sequence
  Peptide Derived from Human Papillomavirus
YLHNRLVVFTF

SEQ ID NO: 11774 - protein, 9 aa, Artificial Sequence
  Peptide Derived from Human Papillomavirus
YLVSPLSDI

SEQ ID NO: 11775 - protein, 10 aa, Artificial Sequence
  Peptide Derived from Human Papillomavirus
YWYKTGISNI

SEQ ID NO: 11776 - protein, 10 aa, Artificial Sequence
  Peptide Derived from Human Papillomavirus
AFNSSHKGRI

SEQ ID NO: 11777 - protein, 8 aa, Artificial Sequence
  Peptide Derived from Human Papillomavirus
AIELQLTL

SEQ ID NO: 11778 - protein, 11 aa, Artificial Sequence
  Peptide Derived from Human Papillomavirus
AIELQLTLETI

SEQ ID NO: 11779 - protein, 11 aa, Artificial Sequence
  Peptide Derived from Human Papillomavirus
AIVTLTYDSEW

SEQ ID NO: 11780 - protein, 9 aa, Artificial Sequence
  Peptide Derived from Human Papillomavirus
AIYYKAREM

SEQ ID NO: 11781 - protein, 11 aa, Artificial Sequence
  Peptide Derived from Human Papillomavirus
AIYYKAREMGF

SEQ ID NO: 11782 - protein, 11 aa, Artificial Sequence
  Peptide Derived from Human Papillomavirus
ALGTEETQTTI

SEQ ID NO: 11783 - protein, 9 aa, Artificial Sequence
  Peptide Derived from Human Papillomavirus
ALQAIELQL

SEQ ID NO: 11784 - protein, 11 aa, Artificial Sequence
  Peptide Derived from Human Papillomavirus
ALQAIELQLTL

SEQ ID NO: 11785 - protein, 9 aa, Artificial Sequence
  Peptide Derived from Human Papillomavirus
ATHTKAVAL

SEQ ID NO: 11786 - protein, 8 aa, Artificial Sequence
  Peptide Derived from Human Papillomavirus
AVSKNKAL

SEQ ID NO: 11787 - protein, 11 aa, Artificial Sequence
  Peptide Derived from Human Papillomavirus
AVSKNKALQAI

SEQ ID NO: 11788 - protein, 8 aa, Artificial Sequence
  Peptide Derived from Human Papillomavirus
AVSSTWHW

SEQ ID NO: 11789 - protein, 11 aa, Artificial Sequence
  Peptide Derived from Human Papillomavirus
CTLYTAVSSTW

SEQ ID NO: 11790 - protein, 8 aa, Artificial Sequence
  Peptide Derived from Human Papillomavirus
DICNTMHY

SEQ ID NO: 11791 - protein, 11 aa, Artificial Sequence
  Peptide Derived from Human Papillomavirus
DICNTMHYTNW

SEQ ID NO: 11792 - protein, 8 aa, Artificial Sequence
  Peptide Derived from Human Papillomavirus
DLRDHIDY

SEQ ID NO: 11793 - protein, 9 aa, Artificial Sequence
  Peptide Derived from Human Papillomavirus
DLRDHIDYW

SEQ ID NO: 11794 - protein, 11 aa, Artificial Sequence
  Peptide Derived from Human Papillomavirus
DTGNPCHTTKL

SEQ ID NO: 11795 - protein, 8 aa, Artificial Sequence
  Peptide Derived from Human Papillomavirus
DVSLEVYL

SEQ ID NO: 11796 - protein, 8 aa, Artificial Sequence
  Peptide Derived from Human Papillomavirus
DYWKHMRL

SEQ ID NO: 11797 - protein, 9 aa, Artificial Sequence
  Peptide Derived from Human Papillomavirus
ELQLTLETI

SEQ ID NO: 11798 - protein, 10 aa, Artificial Sequence
  Peptide Derived from Human Papillomavirus
ELQLTLETIY

SEQ ID NO: 11799 - protein, 8 aa, Artificial Sequence
  Peptide Derived from Human Papillomavirus
ETIYNSQY

SEQ ID NO: 11800 - protein, 9 aa, Artificial Sequence
  Peptide Derived from Human Papillomavirus
EVHAGGQVI

SEQ ID NO: 11801 - protein, 10 aa, Artificial Sequence
  Peptide Derived from Human Papillomavirus
EVHAGGQVIL

SEQ ID NO: 11802 - protein, 8 aa, Artificial Sequence
  Peptide Derived from Human Papillomavirus
EVQFDGDI

SEQ ID NO: 11803 - protein, 8 aa, Artificial Sequence
  Peptide Derived from Human Papillomavirus
EVSSPEII

SEQ ID NO: 11804 - protein, 11 aa, Artificial Sequence
  Peptide Derived from Human Papillomavirus
EVYLTAPTGCI

SEQ ID NO: 11805 - protein, 8 aa, Artificial Sequence
  Peptide Derived from Human Papillomavirus
EWQRDQFL

SEQ ID NO: 11806 - protein, 11 aa, Artificial Sequence
  Peptide Derived from Human Papillomavirus
FLSQVKIPKTI

SEQ ID NO: 11807 - protein, 11 aa, Artificial Sequence
  Peptide Derived from Human Papillomavirus
FVQFKDDAEKY

SEQ ID NO: 11808 - protein, 9 aa, Artificial Sequence
  Peptide Derived from Human Papillomavirus
GIRTYFVQF

SEQ ID NO: 11809 - protein, 9 aa, Artificial Sequence
  Peptide Derived from Human Papillomavirus
GLYYVHEGI

SEQ ID NO: 11810 - protein, 9 aa, Artificial Sequence
  Peptide Derived from Human Papillomavirus
GTEETQTTI

SEQ ID NO: 11811 - protein, 8 aa, Artificial Sequence
  Peptide Derived from Human Papillomavirus
GYTVEVQF

SEQ ID NO: 11812 - protein, 8 aa, Artificial Sequence
  Peptide Derived from Human Papillomavirus
HIDYWKHM

SEQ ID NO: 11813 - protein, 10 aa, Artificial Sequence
  Peptide Derived from Human Papillomavirus
HIDYWKHMRL

SEQ ID NO: 11814 - protein, 10 aa, Artificial Sequence
  Peptide Derived from Human Papillomavirus
HINHQVVPTL

SEQ ID NO: 11815 - protein, 9 aa, Artificial Sequence
  Peptide Derived from Human Papillomavirus
HLKGDANTL

SEQ ID NO: 11816 - protein, 8 aa, Artificial Sequence
  Peptide Derived from Human Papillomavirus
HMRLECAI

SEQ ID NO: 11817 - protein, 9 aa, Artificial Sequence
  Peptide Derived from Human Papillomavirus
HMRLECAIY

SEQ ID NO: 11818 - protein, 10 aa, Artificial Sequence
  Peptide Derived from Human Papillomavirus
HMRLECAIYY

SEQ ID NO: 11819 - protein, 9 aa, Artificial Sequence
  Peptide Derived from Human Papillomavirus
HYENDSTDL

SEQ ID NO: 11820 - protein, 8 aa, Artificial Sequence
  Peptide Derived from Human Papillomavirus
HYTNWTHI

SEQ ID NO: 11821 - protein, 9 aa, Artificial Sequence
  Peptide Derived from Human Papillomavirus
HYTNWTHIY

SEQ ID NO: 11822 - protein, 10 aa, Artificial Sequence
  Peptide Derived from Human Papillomavirus
HYTNWTHIYI

SEQ ID NO: 11823 - protein, 8 aa, Artificial Sequence
  Peptide Derived from Human Papillomavirus
ILCPTSVF

SEQ ID NO: 11824 - protein, 8 aa, Artificial Sequence
  Peptide Derived from Human Papillomavirus
ITVSTGFM

SEQ ID NO: 11825 - protein, 10 aa, Artificial Sequence
  Peptide Derived from Human Papillomavirus
ITVSTGFMSI

SEQ ID NO: 11826 - protein, 11 aa, Artificial Sequence
  Peptide Derived from Human Papillomavirus
IVHLKGDANTL

SEQ ID NO: 11827 - protein, 10 aa, Artificial Sequence
  Peptide Derived from Human Papillomavirus
IVTLTYDSEW

SEQ ID NO: 11828 - protein, 11 aa, Artificial Sequence
  Peptide Derived from Human Papillomavirus
IYNSQYSNEKW

SEQ ID NO: 11829 - protein, 8 aa, Artificial Sequence
  Peptide Derived from Human Papillomavirus
IYYKAREM

SEQ ID NO: 11830 - protein, 10 aa, Artificial Sequence
  Peptide Derived from Human Papillomavirus
IYYKAREMGF

SEQ ID NO: 11831 - protein, 9 aa, Artificial Sequence
  Peptide Derived from Human Papillomavirus
KTITVSTGF

SEQ ID NO: 11832 - protein, 10 aa, Artificial Sequence
  Peptide Derived from Human Papillomavirus
KTITVSTGFM

SEQ ID NO: 11833 - protein, 9 aa, Artificial Sequence
  Peptide Derived from Human Papillomavirus
KWTLQDVSL

SEQ ID NO: 11834 - protein, 8 aa, Artificial Sequence
  Peptide Derived from Human Papillomavirus
KYSKNKVW

SEQ ID NO: 11835 - protein, 8 aa, Artificial Sequence
  Peptide Derived from Human Papillomavirus
LTAPTGCI

SEQ ID NO: 11836 - protein, 11 aa, Artificial Sequence
  Peptide Derived from Human Papillomavirus
LTHYENDSTDL

SEQ ID NO: 11837 - protein, 11 aa, Artificial Sequence
  Peptide Derived from Human Papillomavirus
LTLETIYNSQY

SEQ ID NO: 11838 - protein, 9 aa, Artificial Sequence
  Peptide Derived from Human Papillomavirus
LYTAVSSTW

SEQ ID NO: 11839 - protein, 11 aa, Artificial Sequence
  Peptide Derived from Human Papillomavirus
LYTAVSSTWHW

SEQ ID NO: 11840 - protein, 8 aa, Artificial Sequence
  Peptide Derived from Human Papillomavirus
LYYVHEGI

SEQ ID NO: 11841 - protein, 11 aa, Artificial Sequence
  Peptide Derived from Human Papillomavirus
LYYVHEGIRTY

SEQ ID NO: 11842 - protein, 8 aa, Artificial Sequence
  Peptide Derived from Human Papillomavirus
NTLKCLRY

SEQ ID NO: 11843 - protein, 10 aa, Artificial Sequence
  Peptide Derived from Human Papillomavirus
NTLKCLRYRF

SEQ ID NO: 11844 - protein, 8 aa, Artificial Sequence
  Peptide Derived from Human Papillomavirus
NTMHYTNW

SEQ ID NO: 11845 - protein, 11 aa, Artificial Sequence
  Peptide Derived from Human Papillomavirus
NTMHYTNWTHI

SEQ ID NO: 11846 - protein, 8 aa, Artificial Sequence
  Peptide Derived from Human Papillomavirus
NTTPIVHL

SEQ ID NO: 11847 - protein, 8 aa, Artificial Sequence
  Peptide Derived from Human Papillomavirus
NVCQDKIL

SEQ ID NO: 11848 - protein, 11 aa, Artificial Sequence
  Peptide Derived from Human Papillomavirus
NVCQDKILTHY

SEQ ID NO: 11849 - protein, 8 aa, Artificial Sequence
  Peptide Derived from Human Papillomavirus
NVKHKSAI

SEQ ID NO: 11850 - protein, 11 aa, Artificial Sequence
  Peptide Derived from Human Papillomavirus
NVKHKSAIVTL

SEQ ID NO: 11851 - protein, 10 aa, Artificial Sequence
  Peptide Derived from Human Papillomavirus
PTGCIKKHGY

SEQ ID NO: 11852 - protein, 11 aa, Artificial Sequence
  Peptide Derived from Human Papillomavirus
PTLAVSKNKAL

SEQ ID NO: 11853 - protein, 10 aa, Artificial Sequence
  Peptide Derived from Human Papillomavirus
QFDGDICNTM

SEQ ID NO: 11854 - protein, 9 aa, Artificial Sequence
  Peptide Derived from Human Papillomavirus
QFKDDAEKY

SEQ ID NO: 11855 - protein, 8 aa, Artificial Sequence
  Peptide Derived from Human Papillomavirus
QFLSQVKI

SEQ ID NO: 11856 - protein, 8 aa, Artificial Sequence
  Peptide Derived from Human Papillomavirus
QLTLETIY

SEQ ID NO: 11857 - protein, 8 aa, Artificial Sequence
  Peptide Derived from Human Papillomavirus
QVDYYGLY

SEQ ID NO: 11858 - protein, 9 aa, Artificial Sequence
  Peptide Derived from Human Papillomavirus
QVDYYGLYY

SEQ ID NO: 11859 - protein, 10 aa, Artificial Sequence
  Peptide Derived from Human Papillomavirus
QVILCPTSVF

SEQ ID NO: 11860 - protein, 8 aa, Artificial Sequence
  Peptide Derived from Human Papillomavirus
QVKIPKTI

SEQ ID NO: 11861 - protein, 9 aa, Artificial Sequence
  Peptide Derived from Human Papillomavirus
QYSNEKWTL

SEQ ID NO: 11862 - protein, 8 aa, Artificial Sequence
  Peptide Derived from Human Papillomavirus
RFKKHCTL

SEQ ID NO: 11863 - protein, 9 aa, Artificial Sequence
  Peptide Derived from Human Papillomavirus
RFKKHCTLY

SEQ ID NO: 11864 - protein, 11 aa, Artificial Sequence
  Peptide Derived from Human Papillomavirus
RINCNSNTTPI

SEQ ID NO: 11865 - protein, 8 aa, Artificial Sequence
  Peptide Derived from Human Papillomavirus
RLECAIYY

SEQ ID NO: 11866 - protein, 9 aa, Artificial Sequence
  Peptide Derived from Human Papillomavirus
RLNVCQDKI

SEQ ID NO: 11867 - protein, 10 aa, Artificial Sequence
  Peptide Derived from Human Papillomavirus
RLNVCQDKIL

SEQ ID NO: 11868 - protein, 10 aa, Artificial Sequence
  Peptide Derived from Human Papillomavirus
RYRFKKHCTL

SEQ ID NO: 11869 - protein, 11 aa, Artificial Sequence
  Peptide Derived from Human Papillomavirus
RYRFKKHCTLY

SEQ ID NO: 11870 - protein, 8 aa, Artificial Sequence
  Peptide Derived from Human Papillomavirus
STDLRDHI

SEQ ID NO: 11871 - protein, 10 aa, Artificial Sequence
  Peptide Derived from Human Papillomavirus
STDLRDHIDY

SEQ ID NO: 11872 - protein, 11 aa, Artificial Sequence
  Peptide Derived from Human Papillomavirus
STDLRDHIDYW

SEQ ID NO: 11873 - protein, 8 aa, Artificial Sequence
  Peptide Derived from Human Papillomavirus
SVDSAPIL

SEQ ID NO: 11874 - protein, 11 aa, Artificial Sequence
  Peptide Derived from Human Papillomavirus
SVDSAPILTAF

SEQ ID NO: 11875 - protein, 11 aa, Artificial Sequence
  Peptide Derived from Human Papillomavirus
SVTVVEGQVDY

SEQ ID NO: 11876 - protein, 8 aa, Artificial Sequence
  Peptide Derived from Human Papillomavirus
TITVSTGF

SEQ ID NO: 11877 - protein, 9 aa, Artificial Sequence
  Peptide Derived from Human Papillomavirus
TITVSTGFM

SEQ ID NO: 11878 - protein, 11 aa, Artificial Sequence
  Peptide Derived from Human Papillomavirus
TITVSTGFMSI

SEQ ID NO: 11879 - protein, 10 aa, Artificial Sequence
  Peptide Derived from Human Papillomavirus
TLAVSKNKAL

SEQ ID NO: 11880 - protein, 10 aa, Artificial Sequence
  Peptide Derived from Human Papillomavirus
TLETIYNSQY

SEQ ID NO: 11881 - protein, 9 aa, Artificial Sequence
  Peptide Derived from Human Papillomavirus
TLKCLRYRF

SEQ ID NO: 11882 - protein, 10 aa, Artificial Sequence
  Peptide Derived from Human Papillomavirus
TLQDVSLEVY

SEQ ID NO: 11883 - protein, 11 aa, Artificial Sequence
  Peptide Derived from Human Papillomavirus
TLQDVSLEVYL

SEQ ID NO: 11884 - protein, 8 aa, Artificial Sequence
  Peptide Derived from Human Papillomavirus
TLTYDSEW

SEQ ID NO: 11885 - protein, 10 aa, Artificial Sequence
  Peptide Derived from Human Papillomavirus
TLYTAVSSTW

SEQ ID NO: 11886 - protein, 10 aa, Artificial Sequence
  Peptide Derived from Human Papillomavirus
TMHYTNWTHI

SEQ ID NO: 11887 - protein, 11 aa, Artificial Sequence
  Peptide Derived from Human Papillomavirus
TMHYTNWTHIY

SEQ ID NO: 11888 - protein, 10 aa, Artificial Sequence
  Peptide Derived from Human Papillomavirus
TVEVQFDGDI

SEQ ID NO: 11889 - protein, 9 aa, Artificial Sequence
  Peptide Derived from Human Papillomavirus
TVSTGFMSI

SEQ ID NO: 11890 - protein, 9 aa, Artificial Sequence
  Peptide Derived from Human Papillomavirus
TVVEGQVDY

SEQ ID NO: 11891 - protein, 10 aa, Artificial Sequence
  Peptide Derived from Human Papillomavirus
TVVEGQVDYY

SEQ ID NO: 11892 - protein, 11 aa, Artificial Sequence
  Peptide Derived from Human Papillomavirus
TYDSEWQRDQF

SEQ ID NO: 11893 - protein, 9 aa, Artificial Sequence
  Peptide Derived from Human Papillomavirus
VILCPTSVF

SEQ ID NO: 11894 - protein, 9 aa, Artificial Sequence
  Peptide Derived from Human Papillomavirus
VTLTYDSEW

SEQ ID NO: 11895 - protein, 10 aa, Artificial Sequence
  Peptide Derived from Human Papillomavirus
VTVVEGQVDY

SEQ ID NO: 11896 - protein, 11 aa, Artificial Sequence
  Peptide Derived from Human Papillomavirus
VTVVEGQVDYY

SEQ ID NO: 11897 - protein, 8 aa, Artificial Sequence
  Peptide Derived from Human Papillomavirus
VVEGQVDY

SEQ ID NO: 11898 - protein, 9 aa, Artificial Sequence
  Peptide Derived from Human Papillomavirus
VVEGQVDYY

SEQ ID NO: 11899 - protein, 11 aa, Artificial Sequence
  Peptide Derived from Human Papillomavirus
VVEGQVDYYGL

SEQ ID NO: 11900 - protein, 11 aa, Artificial Sequence
  Peptide Derived from Human Papillomavirus
VWEVHAGGQVI

SEQ ID NO: 11901 - protein, 10 aa, Artificial Sequence
  Peptide Derived from Human Papillomavirus
VYLTAPTGCI

SEQ ID NO: 11902 - protein, 8 aa, Artificial Sequence
  Peptide Derived from Human Papillomavirus
WTLQDVSL

SEQ ID NO: 11903 - protein, 11 aa, Artificial Sequence
  Peptide Derived from Human Papillomavirus
WTLQDVSLEVY

SEQ ID NO: 11904 - protein, 9 aa, Artificial Sequence
  Peptide Derived from Human Papillomavirus
YLTAPTGCI

SEQ ID NO: 11905 - protein, 8 aa, Artificial Sequence
  Peptide Derived from Human Papillomavirus
YTAVSSTW

SEQ ID NO: 11906 - protein, 10 aa, Artificial Sequence
  Peptide Derived from Human Papillomavirus
YTAVSSTWHW

SEQ ID NO: 11907 - protein, 8 aa, Artificial Sequence
  Peptide Derived from Human Papillomavirus
YTNWTHIY

SEQ ID NO: 11908 - protein, 9 aa, Artificial Sequence
  Peptide Derived from Human Papillomavirus
YTNWTHIYI

SEQ ID NO: 11909 - protein, 11 aa, Artificial Sequence
  Peptide Derived from Human Papillomavirus
YTVEVQFDGDI

SEQ ID NO: 11910 - protein, 9 aa, Artificial Sequence
  Peptide Derived from Human Papillomavirus
YVHEGIRTY

SEQ ID NO: 11911 - protein, 10 aa, Artificial Sequence
  Peptide Derived from Human Papillomavirus
YVHEGIRTYF

SEQ ID NO: 11912 - protein, 11 aa, Artificial Sequence
  Peptide Derived from Human Papillomavirus
YWKHMRLECAI

SEQ ID NO: 11913 - protein, 11 aa, Artificial Sequence
  Peptide Derived from Human Papillomavirus
YYGLYYVHEGI

SEQ ID NO: 11914 - protein, 9 aa, Artificial Sequence
  Peptide Derived from Human Papillomavirus
YYKAREMGF

SEQ ID NO: 11915 - protein, 10 aa, Artificial Sequence
  Peptide Derived from Human Papillomavirus
YYVHEGIRTY

SEQ ID NO: 11916 - protein, 11 aa, Artificial Sequence
  Peptide Derived from Human Papillomavirus
YYVHEGIRTYF

SEQ ID NO: 11917 - protein, 8 aa, Artificial Sequence
  Peptide Derived from Human Papillomavirus
AFRCFIVY

SEQ ID NO: 11918 - protein, 9 aa, Artificial Sequence
  Peptide Derived from Human Papillomavirus
AFRCFIVYI

SEQ ID NO: 11919 - protein, 10 aa, Artificial Sequence
  Peptide Derived from Human Papillomavirus
AFRCFIVYII

SEQ ID NO: 11920 - protein, 11 aa, Artificial Sequence
  Peptide Derived from Human Papillomavirus
AFRCFIVYIIF

SEQ ID NO: 11921 - protein, 10 aa, Artificial Sequence
  Peptide Derived from Human Papillomavirus
CFCVLLCVCL

SEQ ID NO: 11922 - protein, 11 aa, Artificial Sequence
  Peptide Derived from Human Papillomavirus
CFCVLLCVCLL

SEQ ID NO: 11923 - protein, 8 aa, Artificial Sequence
  Peptide Derived from Human Papillomavirus
CFIVYIIF

SEQ ID NO: 11924 - protein, 10 aa, Artificial Sequence
  Peptide Derived from Human Papillomavirus
CFIVYIIFVY

SEQ ID NO: 11925 - protein, 11 aa, Artificial Sequence
  Peptide Derived from Human Papillomavirus
CFIVYIIFVYI

SEQ ID NO: 11926 - protein, 9 aa, Artificial Sequence
  Peptide Derived from Human Papillomavirus
CFLLCFCVL

SEQ ID NO: 11927 - protein, 10 aa, Artificial Sequence
  Peptide Derived from Human Papillomavirus
CFLLCFCVLL

SEQ ID NO: 11928 - protein, 8 aa, Artificial Sequence
  Peptide Derived from Human Papillomavirus
CLLIRPLL

SEQ ID NO: 11929 - protein, 9 aa, Artificial Sequence
  Peptide Derived from Human Papillomavirus
CLLIRPLLL

SEQ ID NO: 11930 - protein, 9 aa, Artificial Sequence
  Peptide Derived from Human Papillomavirus
CVCLLIRPL

SEQ ID NO: 11931 - protein, 10 aa, Artificial Sequence
  Peptide Derived from Human Papillomavirus
CVCLLIRPLL

SEQ ID NO: 11932 - protein, 11 aa, Artificial Sequence
  Peptide Derived from Human Papillomavirus
CVCLLIRPLLL

SEQ ID NO: 11933 - protein, 8 aa, Artificial Sequence
  Peptide Derived from Human Papillomavirus
CVLLCVCL

SEQ ID NO: 11934 - protein, 9 aa, Artificial Sequence
  Peptide Derived from Human Papillomavirus
CVLLCVCLL

SEQ ID NO: 11935 - protein, 10 aa, Artificial Sequence
  Peptide Derived from Human Papillomavirus
CVLLCVCLLI

SEQ ID NO: 11936 - protein, 8 aa, Artificial Sequence
  Peptide Derived from Human Papillomavirus
DTASTTLL

SEQ ID NO: 11937 - protein, 11 aa, Artificial Sequence
  Peptide Derived from Human Papillomavirus
DTASTTLLACF

SEQ ID NO: 11938 - protein, 9 aa, Artificial Sequence
  Peptide Derived from Human Papillomavirus
FIVYIIFVY

SEQ ID NO: 11939 - protein, 10 aa, Artificial Sequence
  Peptide Derived from Human Papillomavirus
FIVYIIFVYI

SEQ ID NO: 11940 - protein, 9 aa, Artificial Sequence
  Peptide Derived from Human Papillomavirus
FLIHTHARF

SEQ ID NO: 11941 - protein, 10 aa, Artificial Sequence
  Peptide Derived from Human Papillomavirus
FLIHTHARFL

SEQ ID NO: 11942 - protein, 11 aa, Artificial Sequence
  Peptide Derived from Human Papillomavirus
FLIHTHARFLI

SEQ ID NO: 11943 - protein, 8 aa, Artificial Sequence
  Peptide Derived from Human Papillomavirus
FLLCFCVL

SEQ ID NO: 11944 - protein, 9 aa, Artificial Sequence
  Peptide Derived from Human Papillomavirus
FLLCFCVLL

SEQ ID NO: 11945 - protein, 8 aa, Artificial Sequence
  Peptide Derived from Human Papillomavirus
FVYIPLFL

SEQ ID NO: 11946 - protein, 9 aa, Artificial Sequence
  Peptide Derived from Human Papillomavirus
FVYIPLFLI

SEQ ID NO: 11947 - protein, 8 aa, Artificial Sequence
  Peptide Derived from Human Papillomavirus
HTHARFLI

SEQ ID NO: 11948 - protein, 8 aa, Artificial Sequence
  Peptide Derived from Human Papillomavirus
IFVYIPLF

SEQ ID NO: 11949 - protein, 9 aa, Artificial Sequence
  Peptide Derived from Human Papillomavirus
IFVYIPLFL

SEQ ID NO: 11950 - protein, 10 aa, Artificial Sequence
  Peptide Derived from Human Papillomavirus
IFVYIPLFLI

SEQ ID NO: 11951 - protein, 8 aa, Artificial Sequence
  Peptide Derived from Human Papillomavirus
IIFVYIPL

SEQ ID NO: 11952 - protein, 9 aa, Artificial Sequence
  Peptide Derived from Human Papillomavirus
IIFVYIPLF

SEQ ID NO: 11953 - protein, 10 aa, Artificial Sequence
  Peptide Derived from Human Papillomavirus
IIFVYIPLFL

SEQ ID NO: 11954 - protein, 11 aa, Artificial Sequence
  Peptide Derived from Human Papillomavirus
IIFVYIPLFLI

SEQ ID NO: 11955 - protein, 8 aa, Artificial Sequence
  Peptide Derived from Human Papillomavirus
IILVLLLW

SEQ ID NO: 11956 - protein, 9 aa, Artificial Sequence
  Peptide Derived from Human Papillomavirus
IILVLLLWI

SEQ ID NO: 11957 - protein, 8 aa, Artificial Sequence
  Peptide Derived from Human Papillomavirus
ILVLLLWI

SEQ ID NO: 11958 - protein, 10 aa, Artificial Sequence
  Peptide Derived from Human Papillomavirus
ITAASAFRCF

SEQ ID NO: 11959 - protein, 11 aa, Artificial Sequence
  Peptide Derived from Human Papillomavirus
ITAASAFRCFI

SEQ ID NO: 11960 - protein, 8 aa, Artificial Sequence
  Peptide Derived from Human Papillomavirus
IVYIIFVY

SEQ ID NO: 11961 - protein, 9 aa, Artificial Sequence
  Peptide Derived from Human Papillomavirus
IVYIIFVYI

SEQ ID NO: 11962 - protein, 11 aa, Artificial Sequence
  Peptide Derived from Human Papillomavirus
IVYIIFVYIPL

SEQ ID NO: 11963 - protein, 10 aa, Artificial Sequence
  Peptide Derived from Human Papillomavirus
LFLIHTHARF

SEQ ID NO: 11964 - protein, 11 aa, Artificial Sequence
  Peptide Derived from Human Papillomavirus
LFLIHTHARFL

SEQ ID NO: 11965 - protein, 8 aa, Artificial Sequence
  Peptide Derived from Human Papillomavirus
LIHTHARF

SEQ ID NO: 11966 - protein, 9 aa, Artificial Sequence
  Peptide Derived from Human Papillomavirus
LIHTHARFL

SEQ ID NO: 11967 - protein, 10 aa, Artificial Sequence
  Peptide Derived from Human Papillomavirus
LIHTHARFLI

SEQ ID NO: 11968 - protein, 8 aa, Artificial Sequence
  Peptide Derived from Human Papillomavirus
LIILVLLL

SEQ ID NO: 11969 - protein, 9 aa, Artificial Sequence
  Peptide Derived from Human Papillomavirus
LIILVLLLW

SEQ ID NO: 11970 - protein, 10 aa, Artificial Sequence
  Peptide Derived from Human Papillomavirus
LIILVLLLWI

SEQ ID NO: 11971 - protein, 9 aa, Artificial Sequence
  Peptide Derived from Human Papillomavirus
LLACFLLCF

SEQ ID NO: 11972 - protein, 8 aa, Artificial Sequence
  Peptide Derived from Human Papillomavirus
LLCFCVLL

SEQ ID NO: 11973 - protein, 8 aa, Artificial Sequence
  Peptide Derived from Human Papillomavirus
LLCVCLLI

SEQ ID NO: 11974 - protein, 11 aa, Artificial Sequence
  Peptide Derived from Human Papillomavirus
LLCVCLLIRPL

SEQ ID NO: 11975 - protein, 8 aa, Artificial Sequence
  Peptide Derived from Human Papillomavirus
LLIRPLLL

SEQ ID NO: 11976 - protein, 8 aa, Artificial Sequence
  Peptide Derived from Human Papillomavirus
LLLSVSTY

SEQ ID NO: 11977 - protein, 11 aa, Artificial Sequence
  Peptide Derived from Human Papillomavirus
LLLSVSTYTSL

SEQ ID NO: 11978 - protein, 11 aa, Artificial Sequence
  Peptide Derived from Human Papillomavirus
LLLWITAASAF

SEQ ID NO: 11979 - protein, 10 aa, Artificial Sequence
  Peptide Derived from Human Papillomavirus
LLSVSTYTSL

SEQ ID NO: 11980 - protein, 11 aa, Artificial Sequence
  Peptide Derived from Human Papillomavirus
LLSVSTYTSLI

SEQ ID NO: 11981 - protein, 10 aa, Artificial Sequence
  Peptide Derived from Human Papillomavirus
LLWITAASAF

SEQ ID NO: 11982 - protein, 9 aa, Artificial Sequence
  Peptide Derived from Human Papillomavirus
LWITAASAF

SEQ ID NO: 11983 - protein, 11 aa, Artificial Sequence
  Peptide Derived from Human Papillomavirus
MTNLDTASTTL

SEQ ID NO: 11984 - protein, 9 aa, Artificial Sequence
  Peptide Derived from Human Papillomavirus
NLDTASTTL

SEQ ID NO: 11985 - protein, 10 aa, Artificial Sequence
  Peptide Derived from Human Papillomavirus
NLDTASTTLL

SEQ ID NO: 11986 - protein, 11 aa, Artificial Sequence
  Peptide Derived from Human Papillomavirus
PLFLIHTHARF

SEQ ID NO: 11987 - protein, 9 aa, Artificial Sequence
  Peptide Derived from Human Papillomavirus
PLLLSVSTY

SEQ ID NO: 11988 - protein, 8 aa, Artificial Sequence
  Peptide Derived from Human Papillomavirus
SLIILVLL

SEQ ID NO: 11989 - protein, 9 aa, Artificial Sequence
  Peptide Derived from Human Papillomavirus
SLIILVLLL

SEQ ID NO: 11990 - protein, 10 aa, Artificial Sequence
  Peptide Derived from Human Papillomavirus
SLIILVLLLW

SEQ ID NO: 11991 - protein, 11 aa, Artificial Sequence
  Peptide Derived from Human Papillomavirus
SLIILVLLLWI

SEQ ID NO: 11992 - protein, 8 aa, Artificial Sequence
  Peptide Derived from Human Papillomavirus
STTLLACF

SEQ ID NO: 11993 - protein, 9 aa, Artificial Sequence
  Peptide Derived from Human Papillomavirus
STTLLACFL

SEQ ID NO: 11994 - protein, 10 aa, Artificial Sequence
  Peptide Derived from Human Papillomavirus
STTLLACFLL

SEQ ID NO: 11995 - protein, 8 aa, Artificial Sequence
  Peptide Derived from Human Papillomavirus
STYTSLII

SEQ ID NO: 11996 - protein, 9 aa, Artificial Sequence
  Peptide Derived from Human Papillomavirus
STYTSLIIL

SEQ ID NO: 11997 - protein, 11 aa, Artificial Sequence
  Peptide Derived from Human Papillomavirus
STYTSLIILVL

SEQ ID NO: 11998 - protein, 8 aa, Artificial Sequence
  Peptide Derived from Human Papillomavirus
SVSTYTSL

SEQ ID NO: 11999 - protein, 9 aa, Artificial Sequence
  Peptide Derived from Human Papillomavirus
SVSTYTSLI

SEQ ID NO: 12000 - protein, 10 aa, Artificial Sequence
  Peptide Derived from Human Papillomavirus
SVSTYTSLII

SEQ ID NO: 12001 - protein, 11 aa, Artificial Sequence
  Peptide Derived from Human Papillomavirus
SVSTYTSLIIL

SEQ ID NO: 12002 - protein, 8 aa, Artificial Sequence
  Peptide Derived from Human Papillomavirus
TLLACFLL

SEQ ID NO: 12003 - protein, 10 aa, Artificial Sequence
  Peptide Derived from Human Papillomavirus
TLLACFLLCF

SEQ ID NO: 12004 - protein, 8 aa, Artificial Sequence
  Peptide Derived from Human Papillomavirus
TTLLACFL

SEQ ID NO: 12005 - protein, 9 aa, Artificial Sequence
  Peptide Derived from Human Papillomavirus
TTLLACFLL

SEQ ID NO: 12006 - protein, 11 aa, Artificial Sequence
  Peptide Derived from Human Papillomavirus
TTLLACFLLCF

SEQ ID NO: 12007 - protein, 8 aa, Artificial Sequence
  Peptide Derived from Human Papillomavirus
TYTSLIIL

SEQ ID NO: 12008 - protein, 10 aa, Artificial Sequence
  Peptide Derived from Human Papillomavirus
TYTSLIILVL

SEQ ID NO: 12009 - protein, 11 aa, Artificial Sequence
  Peptide Derived from Human Papillomavirus
TYTSLIILVLL

SEQ ID NO: 12010 - protein, 8 aa, Artificial Sequence
  Peptide Derived from Human Papillomavirus
VLLCVCLL

SEQ ID NO: 12011 - protein, 9 aa, Artificial Sequence
  Peptide Derived from Human Papillomavirus
VLLCVCLLI

SEQ ID NO: 12012 - protein, 8 aa, Artificial Sequence
  Peptide Derived from Human Papillomavirus
VYIIFVYI

SEQ ID NO: 12013 - protein, 10 aa, Artificial Sequence
  Peptide Derived from Human Papillomavirus
VYIIFVYIPL

SEQ ID NO: 12014 - protein, 11 aa, Artificial Sequence
  Peptide Derived from Human Papillomavirus
VYIIFVYIPLF

SEQ ID NO: 12015 - protein, 8 aa, Artificial Sequence
  Peptide Derived from Human Papillomavirus
VYIPLFLI

SEQ ID NO: 12016 - protein, 8 aa, Artificial Sequence
  Peptide Derived from Human Papillomavirus
WITAASAF

SEQ ID NO: 12017 - protein, 11 aa, Artificial Sequence
  Peptide Derived from Human Papillomavirus
WITAASAFRCF

SEQ ID NO: 12018 - protein, 9 aa, Artificial Sequence
  Peptide Derived from Human Papillomavirus
YIIFVYIPL

SEQ ID NO: 12019 - protein, 10 aa, Artificial Sequence
  Peptide Derived from Human Papillomavirus
YIIFVYIPLF

SEQ ID NO: 12020 - protein, 11 aa, Artificial Sequence
  Peptide Derived from Human Papillomavirus
YIIFVYIPLFL

SEQ ID NO: 12021 - protein, 9 aa, Artificial Sequence
  Peptide Derived from Human Papillomavirus
YTSLIILVL

SEQ ID NO: 12022 - protein, 10 aa, Artificial Sequence
  Peptide Derived from Human Papillomavirus
YTSLIILVLL

SEQ ID NO: 12023 - protein, 11 aa, Artificial Sequence
  Peptide Derived from Human Papillomavirus
YTSLIILVLLL

SEQ ID NO: 12024 - protein, 9 aa, Artificial Sequence
  Peptide Derived from Human Papillomavirus
AFRDLCIVY

SEQ ID NO: 12025 - protein, 9 aa, Artificial Sequence
  Peptide Derived from Human Papillomavirus
AVCDKCLKF

SEQ ID NO: 12026 - protein, 10 aa, Artificial Sequence
  Peptide Derived from Human Papillomavirus
AVCDKCLKFY

SEQ ID NO: 12027 - protein, 8 aa, Artificial Sequence
  Peptide Derived from Human Papillomavirus
CINCQKPL

SEQ ID NO: 12028 - protein, 10 aa, Artificial Sequence
  Peptide Derived from Human Papillomavirus
CIVYRDGNPY

SEQ ID NO: 12029 - protein, 8 aa, Artificial Sequence
  Peptide Derived from Human Papillomavirus
CLKFYSKI

SEQ ID NO: 12030 - protein, 11 aa, Artificial Sequence
  Peptide Derived from Human Papillomavirus
CLKFYSKISEY

SEQ ID NO: 12031 - protein, 8 aa, Artificial Sequence
  Peptide Derived from Human Papillomavirus
CTELQTTI

SEQ ID NO: 12032 - protein, 11 aa, Artificial Sequence
  Peptide Derived from Human Papillomavirus
CTELQTTIHDI

SEQ ID NO: 12033 - protein, 8 aa, Artificial Sequence
  Peptide Derived from Human Papillomavirus
CVYCKQQL

SEQ ID NO: 12034 - protein, 9 aa, Artificial Sequence
  Peptide Derived from Human Papillomavirus
CVYCKQQLL

SEQ ID NO: 12035 - protein, 9 aa, Artificial Sequence
  Peptide Derived from Human Papillomavirus
CYSLYGTTL

SEQ ID NO: 12036 - protein, 9 aa, Artificial Sequence
  Peptide Derived from Human Papillomavirus
DFAFRDLCI

SEQ ID NO: 12037 - protein, 11 aa, Artificial Sequence
  Peptide Derived from Human Papillomavirus
DFAFRDLCIVY

SEQ ID NO: 12038 - protein, 8 aa, Artificial Sequence
  Peptide Derived from Human Papillomavirus
DIILECVY

SEQ ID NO: 12039 - protein, 9 aa, Artificial Sequence
  Peptide Derived from Human Papillomavirus
ELQTTIHDI

SEQ ID NO: 12040 - protein, 10 aa, Artificial Sequence
  Peptide Derived from Human Papillomavirus
ELQTTIHDII

SEQ ID NO: 12041 - protein, 11 aa, Artificial Sequence
  Peptide Derived from Human Papillomavirus
ELQTTIHDIIL

SEQ ID NO: 12042 - protein, 10 aa, Artificial Sequence
  Peptide Derived from Human Papillomavirus
EVYDFAFRDL

SEQ ID NO: 12043 - protein, 9 aa, Artificial Sequence
  Peptide Derived from Human Papillomavirus
EYRHYCYSL

SEQ ID NO: 12044 - protein, 10 aa, Artificial Sequence
  Peptide Derived from Human Papillomavirus
EYRHYCYSLY

SEQ ID NO: 12045 - protein, 8 aa, Artificial Sequence
  Peptide Derived from Human Papillomavirus
FYSKISEY

SEQ ID NO: 12046 - protein, 11 aa, Artificial Sequence
  Peptide Derived from Human Papillomavirus
FYSKISEYRHY

SEQ ID NO: 12047 - protein, 8 aa, Artificial Sequence
  Peptide Derived from Human Papillomavirus
GTTLEQQY

SEQ ID NO: 12048 - protein, 8 aa, Artificial Sequence
  Peptide Derived from Human Papillomavirus
HLDKKQRF

SEQ ID NO: 12049 - protein, 11 aa, Artificial Sequence
  Peptide Derived from Human Papillomavirus
HLDKKQRFHNI

SEQ ID NO: 12050 - protein, 11 aa, Artificial Sequence
  Peptide Derived from Human Papillomavirus
HYCYSLYGTTL

SEQ ID NO: 12051 - protein, 11 aa, Artificial Sequence
  Peptide Derived from Human Papillomavirus
ILECVYCKQQL

SEQ ID NO: 12052 - protein, 9 aa, Artificial Sequence
  Peptide Derived from Human Papillomavirus
IVYRDGNPY

SEQ ID NO: 12053 - protein, 9 aa, Artificial Sequence
  Peptide Derived from Human Papillomavirus
KFYSKISEY

SEQ ID NO: 12054 - protein, 8 aa, Artificial Sequence
  Peptide Derived from Human Papillomavirus
KISEYRHY

SEQ ID NO: 12055 - protein, 10 aa, Artificial Sequence
  Peptide Derived from Human Papillomavirus
KISEYRHYCY

SEQ ID NO: 12056 - protein, 9 aa, Artificial Sequence
  Peptide Derived from Human Papillomavirus
KLPQLCTEL

SEQ ID NO: 12057 - protein, 11 aa, Artificial Sequence
  Peptide Derived from Human Papillomavirus
LIRCINCQKPL

SEQ ID NO: 12058 - protein, 9 aa, Artificial Sequence
  Peptide Derived from Human Papillomavirus
LLRREVYDF

SEQ ID NO: 12059 - protein, 11 aa, Artificial Sequence
  Peptide Derived from Human Papillomavirus
LLRREVYDFAF

SEQ ID NO: 12060 - protein, 10 aa, Artificial Sequence
  Peptide Derived from Human Papillomavirus
LYGTTLEQQY

SEQ ID NO: 12061 - protein, 11 aa, Artificial Sequence
  Peptide Derived from Human Papillomavirus
NIRGRWTGRCM

SEQ ID NO: 12062 - protein, 10 aa, Artificial Sequence
  Peptide Derived from Human Papillomavirus
PLCDLLIRCI

SEQ ID NO: 12063 - protein, 11 aa, Artificial Sequence
  Peptide Derived from Human Papillomavirus
PLCPEEKQRHL

SEQ ID NO: 12064 - protein, 9 aa, Artificial Sequence
  Peptide Derived from Human Papillomavirus
PYAVCDKCL

SEQ ID NO: 12065 - protein, 11 aa, Artificial Sequence
  Peptide Derived from Human Papillomavirus
PYAVCDKCLKF

SEQ ID NO: 12066 - protein, 10 aa, Artificial Sequence
  Peptide Derived from Human Papillomavirus
QLCTELQTTI

SEQ ID NO: 12067 - protein, 8 aa, Artificial Sequence
  Peptide Derived from Human Papillomavirus
QLLRREVY

SEQ ID NO: 12068 - protein, 10 aa, Artificial Sequence
  Peptide Derived from Human Papillomavirus
QLLRREVYDF

SEQ ID NO: 12069 - protein, 8 aa, Artificial Sequence
  Peptide Derived from Human Papillomavirus
QTTIHDII

SEQ ID NO: 12070 - protein, 9 aa, Artificial Sequence
  Peptide Derived from Human Papillomavirus
QTTIHDIIL

SEQ ID NO: 12071 - protein, 9 aa, Artificial Sequence
  Peptide Derived from Human Papillomavirus
QYNKPLCDL

SEQ ID NO: 12072 - protein, 10 aa, Artificial Sequence
  Peptide Derived from Human Papillomavirus
QYNKPLCDLL

SEQ ID NO: 12073 - protein, 11 aa, Artificial Sequence
  Peptide Derived from Human Papillomavirus
QYNKPLCDLLI

SEQ ID NO: 12074 - protein, 9 aa, Artificial Sequence
  Peptide Derived from Human Papillomavirus
RFHNIRGRW

SEQ ID NO: 12075 - protein, 8 aa, Artificial Sequence
  Peptide Derived from Human Papillomavirus
RTRRETQL

SEQ ID NO: 12076 - protein, 11 aa, Artificial Sequence
  Peptide Derived from Human Papillomavirus
SLYGTTLEQQY

SEQ ID NO: 12077 - protein, 11 aa, Artificial Sequence
  Peptide Derived from Human Papillomavirus
TIHDIILECVY

SEQ ID NO: 12078 - protein, 10 aa, Artificial Sequence
  Peptide Derived from Human Papillomavirus
TLEQQYNKPL

SEQ ID NO: 12079 - protein, 8 aa, Artificial Sequence
  Peptide Derived from Human Papillomavirus
TTIHDIIL

SEQ ID NO: 12080 - protein, 11 aa, Artificial Sequence
  Peptide Derived from Human Papillomavirus
TTLEQQYNKPL

SEQ ID NO: 12081 - protein, 8 aa, Artificial Sequence
  Peptide Derived from Human Papillomavirus
VYCKQQLL

SEQ ID NO: 12082 - protein, 9 aa, Artificial Sequence
  Peptide Derived from Human Papillomavirus
VYDFAFRDL

SEQ ID NO: 12083 - protein, 11 aa, Artificial Sequence
  Peptide Derived from Human Papillomavirus
VYDFAFRDLCI

SEQ ID NO: 12084 - protein, 8 aa, Artificial Sequence
  Peptide Derived from Human Papillomavirus
VYRDGNPY

SEQ ID NO: 12085 - protein, 9 aa, Artificial Sequence
  Peptide Derived from Human Papillomavirus
CVQSTHVDI

SEQ ID NO: 12086 - protein, 8 aa, Artificial Sequence
  Peptide Derived from Human Papillomavirus
DIRTLEDL

SEQ ID NO: 12087 - protein, 9 aa, Artificial Sequence
  Peptide Derived from Human Papillomavirus
DIRTLEDLL

SEQ ID NO: 12088 - protein, 10 aa, Artificial Sequence
  Peptide Derived from Human Papillomavirus
DIRTLEDLLM

SEQ ID NO: 12089 - protein, 9 aa, Artificial Sequence
  Peptide Derived from Human Papillomavirus
DLLMGTLGI

SEQ ID NO: 12090 - protein, 9 aa, Artificial Sequence
  Peptide Derived from Human Papillomavirus
DLQPETTDL

SEQ ID NO: 12091 - protein, 10 aa, Artificial Sequence
  Peptide Derived from Human Papillomavirus
DLQPETTDLY

SEQ ID NO: 12092 - protein, 8 aa, Artificial Sequence
  Peptide Derived from Human Papillomavirus
DLYCYEQL

SEQ ID NO: 12093 - protein, 8 aa, Artificial Sequence
  Peptide Derived from Human Papillomavirus
DTPTLHEY

SEQ ID NO: 12094 - protein, 9 aa, Artificial Sequence
  Peptide Derived from Human Papillomavirus
DTPTLHEYM

SEQ ID NO: 12095 - protein, 10 aa, Artificial Sequence
  Peptide Derived from Human Papillomavirus
DTPTLHEYML

SEQ ID NO: 12096 - protein, 8 aa, Artificial Sequence
  Peptide Derived from Human Papillomavirus
ETTDLYCY

SEQ ID NO: 12097 - protein, 11 aa, Artificial Sequence
  Peptide Derived from Human Papillomavirus
ETTDLYCYEQL

SEQ ID NO: 12098 - protein, 9 aa, Artificial Sequence
  Peptide Derived from Human Papillomavirus
GTLGIVCPI

SEQ ID NO: 12099 - protein, 10 aa, Artificial Sequence
  Peptide Derived from Human Papillomavirus
HVDIRTLEDL

SEQ ID NO: 12100 - protein, 11 aa, Artificial Sequence
  Peptide Derived from Human Papillomavirus
HVDIRTLEDLL

SEQ ID NO: 12101 - protein, 8 aa, Artificial Sequence
  Peptide Derived from Human Papillomavirus
LLMGTLGI

SEQ ID NO: 12102 - protein, 11 aa, Artificial Sequence
  Peptide Derived from Human Papillomavirus
LMGTLGIVCPI

SEQ ID NO: 12103 - protein, 11 aa, Artificial Sequence
  Peptide Derived from Human Papillomavirus
MLDLQPETTDL

SEQ ID NO: 12104 - protein, 8 aa, Artificial Sequence
  Peptide Derived from Human Papillomavirus
PTLHEYML

SEQ ID NO: 12105 - protein, 10 aa, Artificial Sequence
  Peptide Derived from Human Papillomavirus
PTLHEYMLDL

SEQ ID NO: 12106 - protein, 11 aa, Artificial Sequence
  Peptide Derived from Human Papillomavirus
RLCVQSTHVDI

SEQ ID NO: 12107 - protein, 8 aa, Artificial Sequence
  Peptide Derived from Human Papillomavirus
RTLEDLLM

SEQ ID NO: 12108 - protein, 11 aa, Artificial Sequence
  Peptide Derived from Human Papillomavirus
RTLEDLLMGTL

SEQ ID NO: 12109 - protein, 9 aa, Artificial Sequence
  Peptide Derived from Human Papillomavirus
STHVDIRTL

SEQ ID NO: 12110 - protein, 10 aa, Artificial Sequence
  Peptide Derived from Human Papillomavirus
TFCCKCDSTL

SEQ ID NO: 12111 - protein, 10 aa, Artificial Sequence
  Peptide Derived from Human Papillomavirus
TLEDLLMGTL

SEQ ID NO: 12112 - protein, 8 aa, Artificial Sequence
  Peptide Derived from Human Papillomavirus
TLGIVCPI

SEQ ID NO: 12113 - protein, 9 aa, Artificial Sequence
  Peptide Derived from Human Papillomavirus
TLHEYMLDL

SEQ ID NO: 12114 - protein, 10 aa, Artificial Sequence
  Peptide Derived from Human Papillomavirus
TTDLYCYEQL

SEQ ID NO: 12115 - protein, 11 aa, Artificial Sequence
  Peptide Derived from Human Papillomavirus
VTFCCKCDSTL

SEQ ID NO: 12116 - protein, 9 aa, Artificial Sequence
  Peptide Derived from Human Papillomavirus
AISTSETTY

SEQ ID NO: 12117 - protein, 10 aa, Artificial Sequence
  Peptide Derived from Human Papillomavirus
AVGENVPDDL

SEQ ID NO: 12118 - protein, 11 aa, Artificial Sequence
  Peptide Derived from Human Papillomavirus
AVGENVPDDLY

SEQ ID NO: 12119 - protein, 9 aa, Artificial Sequence
  Peptide Derived from Human Papillomavirus
AVGHPYFPI

SEQ ID NO: 12120 - protein, 10 aa, Artificial Sequence
  Peptide Derived from Human Papillomavirus
AVNPGDCPPL

SEQ ID NO: 12121 - protein, 11 aa, Artificial Sequence
  Peptide Derived from Human Papillomavirus
CISMDYKQTQL

SEQ ID NO: 12122 - protein, 9 aa, Artificial Sequence
  Peptide Derived from Human Papillomavirus
CLIGCKPPI

SEQ ID NO: 12123 - protein, 10 aa, Artificial Sequence
  Peptide Derived from Human Papillomavirus
CTSICKYPDY

SEQ ID NO: 12124 - protein, 11 aa, Artificial Sequence
  Peptide Derived from Human Papillomavirus
CTSICKYPDYI

SEQ ID NO: 12125 - protein, 9 aa, Artificial Sequence
  Peptide Derived from Human Papillomavirus
CYENDVNVY

SEQ ID NO: 12126 - protein, 11 aa, Artificial Sequence
  Peptide Derived from Human Papillomavirus
CYENDVNVYHI

SEQ ID NO: 12127 - protein, 9 aa, Artificial Sequence
  Peptide Derived from Human Papillomavirus
DICTSICKY

SEQ ID NO: 12128 - protein, 11 aa, Artificial Sequence
  Peptide Derived from Human Papillomavirus
DLDQFPLGRKF

SEQ ID NO: 12129 - protein, 8 aa, Artificial Sequence
  Peptide Derived from Human Papillomavirus
DLQFIFQL

SEQ ID NO: 12130 - protein, 11 aa, Artificial Sequence
  Peptide Derived from Human Papillomavirus
DLQFIFQLCKI

SEQ ID NO: 12131 - protein, 10 aa, Artificial Sequence
  Peptide Derived from Human Papillomavirus
DMVDTGFGAM

SEQ ID NO: 12132 - protein, 8 aa, Artificial Sequence
  Peptide Derived from Human Papillomavirus
DTENASAY

SEQ ID NO: 12133 - protein, 9 aa, Artificial Sequence
  Peptide Derived from Human Papillomavirus
DTGFGAMDF

SEQ ID NO: 12134 - protein, 8 aa, Artificial Sequence
  Peptide Derived from Human Papillomavirus
DTTRSTNM

SEQ ID NO: 12135 - protein, 10 aa, Artificial Sequence
  Peptide Derived from Human Papillomavirus
DTTRSTNMSL

SEQ ID NO: 12136 - protein, 11 aa, Artificial Sequence
  Peptide Derived from Human Papillomavirus
DTYRFVTSQAI

SEQ ID NO: 12137 - protein, 9 aa, Artificial Sequence
  Peptide Derived from Human Papillomavirus
DVMTYIHSM

SEQ ID NO: 12138 - protein, 8 aa, Artificial Sequence
  Peptide Derived from Human Papillomavirus
DVNVYHIF

SEQ ID NO: 12139 - protein, 9 aa, Artificial Sequence
  Peptide Derived from Human Papillomavirus
DVNVYHIFF

SEQ ID NO: 12140 - protein, 11 aa, Artificial Sequence
  Peptide Derived from Human Papillomavirus
DVNVYHIFFQM

SEQ ID NO: 12141 - protein, 10 aa, Artificial Sequence
  Peptide Derived from Human Papillomavirus
DYIKMVSEPY

SEQ ID NO: 12142 - protein, 9 aa, Artificial Sequence
  Peptide Derived from Human Papillomavirus
DYKQTQLCL

SEQ ID NO: 12143 - protein, 10 aa, Artificial Sequence
  Peptide Derived from Human Papillomavirus
DYKQTQLCLI

SEQ ID NO: 12144 - protein, 9 aa, Artificial Sequence
  Peptide Derived from Human Papillomavirus
ETTYKNTNF

SEQ ID NO: 12145 - protein, 8 aa, Artificial Sequence
  Peptide Derived from Human Papillomavirus
EVGRGQPL

SEQ ID NO: 12146 - protein, 8 aa, Artificial Sequence
  Peptide Derived from Human Papillomavirus
EVNLKEKF

SEQ ID NO: 12147 - protein, 10 aa, Artificial Sequence
  Peptide Derived from Human Papillomavirus
EVPLDICTSI

SEQ ID NO: 12148 - protein, 8 aa, Artificial Sequence
  Peptide Derived from Human Papillomavirus
EYDLQFIF

SEQ ID NO: 12149 - protein, 10 aa, Artificial Sequence
  Peptide Derived from Human Papillomavirus
EYDLQFIFQL

SEQ ID NO: 12150 - protein, 9 aa, Artificial Sequence
  Peptide Derived from Human Papillomavirus
EYLRHGEEY

SEQ ID NO: 12151 - protein, 11 aa, Artificial Sequence
  Peptide Derived from Human Papillomavirus
EYLRHGEEYDL

SEQ ID NO: 12152 - protein, 8 aa, Artificial Sequence
  Peptide Derived from Human Papillomavirus
EYVARTNI

SEQ ID NO: 12153 - protein, 9 aa, Artificial Sequence
  Peptide Derived from Human Papillomavirus
EYVARTNIY

SEQ ID NO: 12154 - protein, 10 aa, Artificial Sequence
  Peptide Derived from Human Papillomavirus
EYVARTNIYY

SEQ ID NO: 12155 - protein, 8 aa, Artificial Sequence
  Peptide Derived from Human Papillomavirus
FFQMSLWL

SEQ ID NO: 12156 - protein, 9 aa, Artificial Sequence
  Peptide Derived from Human Papillomavirus
FFYLRREQM

SEQ ID NO: 12157 - protein, 10 aa, Artificial Sequence
  Peptide Derived from Human Papillomavirus
FFYLRREQMF

SEQ ID NO: 12158 - protein, 8 aa, Artificial Sequence
  Peptide Derived from Human Papillomavirus
FIFQLCKI

SEQ ID NO: 12159 - protein, 10 aa, Artificial Sequence
  Peptide Derived from Human Papillomavirus
FIFQLCKITL

SEQ ID NO: 12160 - protein, 10 aa, Artificial Sequence
  Peptide Derived from Human Papillomavirus
FIYILVITCY

SEQ ID NO: 12161 - protein, 10 aa, Artificial Sequence
  Peptide Derived from Human Papillomavirus
FWEVNLKEKF

SEQ ID NO: 12162 - protein, 8 aa, Artificial Sequence
  Peptide Derived from Human Papillomavirus
FYLRREQM

SEQ ID NO: 12163 - protein, 9 aa, Artificial Sequence
  Peptide Derived from Human Papillomavirus
FYLRREQMF

SEQ ID NO: 12164 - protein, 9 aa, Artificial Sequence
  Peptide Derived from Human Papillomavirus
FYNPDTQRL

SEQ ID NO: 12165 - protein, 11 aa, Artificial Sequence
  Peptide Derived from Human Papillomavirus
FYNPDTQRLVW

SEQ ID NO: 12166 - protein, 10 aa, Artificial Sequence
  Peptide Derived from Human Papillomavirus
GFGAMDFTTL

SEQ ID NO: 12167 - protein, 8 aa, Artificial Sequence
  Peptide Derived from Human Papillomavirus
GFPDTSFY

SEQ ID NO: 12168 - protein, 8 aa, Artificial Sequence
  Peptide Derived from Human Papillomavirus
GICWGNQL

SEQ ID NO: 12169 - protein, 9 aa, Artificial Sequence
  Peptide Derived from Human Papillomavirus
GICWGNQLF

SEQ ID NO: 12170 - protein, 8 aa, Artificial Sequence
  Peptide Derived from Human Papillomavirus
GISGHPLL

SEQ ID NO: 12171 - protein, 11 aa, Artificial Sequence
  Peptide Derived from Human Papillomavirus
GISGHPLLNKL

SEQ ID NO: 12172 - protein, 8 aa, Artificial Sequence
  Peptide Derived from Human Papillomavirus
GLKAKPKF

SEQ ID NO: 12173 - protein, 10 aa, Artificial Sequence
  Peptide Derived from Human Papillomavirus
GLKAKPKFTL

SEQ ID NO: 12174 - protein, 10 aa, Artificial Sequence
  Peptide Derived from Human Papillomavirus
GLQPPPGGTL

SEQ ID NO: 12175 - protein, 9 aa, Artificial Sequence
  Peptide Derived from Human Papillomavirus
GLQYRVFRI

SEQ ID NO: 12176 - protein, 11 aa, Artificial Sequence
  Peptide Derived from Human Papillomavirus
GLQYRVFRIHL

SEQ ID NO: 12177 - protein, 9 aa, Artificial Sequence
  Peptide Derived from Human Papillomavirus
GTLEDTYRF

SEQ ID NO: 12178 - protein, 8 aa, Artificial Sequence
  Peptide Derived from Human Papillomavirus
GVDNRECI

SEQ ID NO: 12179 - protein, 10 aa, Artificial Sequence
  Peptide Derived from Human Papillomavirus
GVDNRECISM

SEQ ID NO: 12180 - protein, 10 aa, Artificial Sequence
  Peptide Derived from Human Papillomavirus
GVEVGRGQPL

SEQ ID NO: 12181 - protein, 9 aa, Artificial Sequence
  Peptide Derived from Human Papillomavirus
GVGISGHPL

SEQ ID NO: 12182 - protein, 10 aa, Artificial Sequence
  Peptide Derived from Human Papillomavirus
GVGISGHPLL

SEQ ID NO: 12183 - protein, 8 aa, Artificial Sequence
  Peptide Derived from Human Papillomavirus
HIFFQMSL

SEQ ID NO: 12184 - protein, 9 aa, Artificial Sequence
  Peptide Derived from Human Papillomavirus
HIFFQMSLW

SEQ ID NO: 12185 - protein, 10 aa, Artificial Sequence
  Peptide Derived from Human Papillomavirus
HIFFQMSLWL

SEQ ID NO: 12186 - protein, 8 aa, Artificial Sequence
  Peptide Derived from Human Papillomavirus
HLPDPNKF

SEQ ID NO: 12187 - protein, 10 aa, Artificial Sequence
  Peptide Derived from Human Papillomavirus
HLPDPNKFGF

SEQ ID NO: 12188 - protein, 11 aa, Artificial Sequence
  Peptide Derived from Human Papillomavirus
HTPPAPKEDPL

SEQ ID NO: 12189 - protein, 8 aa, Artificial Sequence
  Peptide Derived from Human Papillomavirus
IFFQMSLW

SEQ ID NO: 12190 - protein, 9 aa, Artificial Sequence
  Peptide Derived from Human Papillomavirus
IFFQMSLWL

SEQ ID NO: 12191 - protein, 8 aa, Artificial Sequence
  Peptide Derived from Human Papillomavirus
IFNKPYWL

SEQ ID NO: 12192 - protein, 9 aa, Artificial Sequence
  Peptide Derived from Human Papillomavirus
IFQLCKITL

SEQ ID NO: 12193 - protein, 9 aa, Artificial Sequence
  Peptide Derived from Human Papillomavirus
ILEDWNFGL

SEQ ID NO: 12194 - protein, 9 aa, Artificial Sequence
  Peptide Derived from Human Papillomavirus
ILVPKVSGL

SEQ ID NO: 12195 - protein, 11 aa, Artificial Sequence
  Peptide Derived from Human Papillomavirus
ILVPKVSGLQY

SEQ ID NO: 12196 - protein, 11 aa, Artificial Sequence
  Peptide Derived from Human Papillomavirus
ITCYENDVNVY

SEQ ID NO: 12197 - protein, 8 aa, Artificial Sequence
  Peptide Derived from Human Papillomavirus
ITLTADVM

SEQ ID NO: 12198 - protein, 10 aa, Artificial Sequence
  Peptide Derived from Human Papillomavirus
ITLTADVMTY

SEQ ID NO: 12199 - protein, 11 aa, Artificial Sequence
  Peptide Derived from Human Papillomavirus
ITLTADVMTYI

SEQ ID NO: 12200 - protein, 9 aa, Artificial Sequence
  Peptide Derived from Human Papillomavirus
IYILVITCY

SEQ ID NO: 12201 - protein, 10 aa, Artificial Sequence
  Peptide Derived from Human Papillomavirus
IYYHAGTSRL

SEQ ID NO: 12202 - protein, 11 aa, Artificial Sequence
  Peptide Derived from Human Papillomavirus
IYYHAGTSRLL

SEQ ID NO: 12203 - protein, 9 aa, Artificial Sequence
  Peptide Derived from Human Papillomavirus
KFGFPDTSF

SEQ ID NO: 12204 - protein, 10 aa, Artificial Sequence
  Peptide Derived from Human Papillomavirus
KFGFPDTSFY

SEQ ID NO: 12205 - protein, 8 aa, Artificial Sequence
  Peptide Derived from Human Papillomavirus
KFLLQAGL

SEQ ID NO: 12206 - protein, 9 aa, Artificial Sequence
  Peptide Derived from Human Papillomavirus
KFSADLDQF

SEQ ID NO: 12207 - protein, 11 aa, Artificial Sequence
  Peptide Derived from Human Papillomavirus
KFSADLDQFPL

SEQ ID NO: 12208 - protein, 10 aa, Artificial Sequence
  Peptide Derived from Human Papillomavirus
KILVPKVSGL

SEQ ID NO: 12209 - protein, 9 aa, Artificial Sequence
  Peptide Derived from Human Papillomavirus
KITLTADVM

SEQ ID NO: 12210 - protein, 11 aa, Artificial Sequence
  Peptide Derived from Human Papillomavirus
KITLTADVMTY

SEQ ID NO: 12211 - protein, 11 aa, Artificial Sequence
  Peptide Derived from Human Papillomavirus
KLDDTENASAY

SEQ ID NO: 12212 - protein, 11 aa, Artificial Sequence
  Peptide Derived from Human Papillomavirus
KMVSEPYGDSL

SEQ ID NO: 12213 - protein, 10 aa, Artificial Sequence
  Peptide Derived from Human Papillomavirus
KVSGLQYRVF

SEQ ID NO: 12214 - protein, 8 aa, Artificial Sequence
  Peptide Derived from Human Papillomavirus
KVVSTDEY

SEQ ID NO: 12215 - protein, 8 aa, Artificial Sequence
  Peptide Derived from Human Papillomavirus
KYPDYIKM

SEQ ID NO: 12216 - protein, 9 aa, Artificial Sequence
  Peptide Derived from Human Papillomavirus
KYTFWEVNL

SEQ ID NO: 12217 - protein, 10 aa, Artificial Sequence
  Peptide Derived from Human Papillomavirus
LFFYLRREQM

SEQ ID NO: 12218 - protein, 11 aa, Artificial Sequence
  Peptide Derived from Human Papillomavirus
LFFYLRREQMF

SEQ ID NO: 12219 - protein, 8 aa, Artificial Sequence
  Peptide Derived from Human Papillomavirus
LIGCKPPI

SEQ ID NO: 12220 - protein, 11 aa, Artificial Sequence
  Peptide Derived from Human Papillomavirus
LINTVIQDGDM

SEQ ID NO: 12221 - protein, 8 aa, Artificial Sequence
  Peptide Derived from Human Papillomavirus
LLAVGHPY

SEQ ID NO: 12222 - protein, 9 aa, Artificial Sequence
  Peptide Derived from Human Papillomavirus
LLAVGHPYF

SEQ ID NO: 12223 - protein, 11 aa, Artificial Sequence
  Peptide Derived from Human Papillomavirus
LLAVGHPYFPI

SEQ ID NO: 12224 - protein, 8 aa, Artificial Sequence
  Peptide Derived from Human Papillomavirus
LTADVMTY

SEQ ID NO: 12225 - protein, 9 aa, Artificial Sequence
  Peptide Derived from Human Papillomavirus
LTADVMTYI

SEQ ID NO: 12226 - protein, 8 aa, Artificial Sequence
  Peptide Derived from Human Papillomavirus
LVPKVSGL

SEQ ID NO: 12227 - protein, 10 aa, Artificial Sequence
  Peptide Derived from Human Papillomavirus
LVPKVSGLQY

SEQ ID NO: 12228 - protein, 10 aa, Artificial Sequence
  Peptide Derived from Human Papillomavirus
LWLPSEATVY

SEQ ID NO: 12229 - protein, 11 aa, Artificial Sequence
  Peptide Derived from Human Papillomavirus
LWLPSEATVYL

SEQ ID NO: 12230 - protein, 11 aa, Artificial Sequence
  Peptide Derived from Human Papillomavirus
MTYIHSMNSTI

SEQ ID NO: 12231 - protein, 9 aa, Artificial Sequence
  Peptide Derived from Human Papillomavirus
MVDTGFGAM

SEQ ID NO: 12232 - protein, 11 aa, Artificial Sequence
  Peptide Derived from Human Papillomavirus
MVDTGFGAMDF

SEQ ID NO: 12233 - protein, 10 aa, Artificial Sequence
  Peptide Derived from Human Papillomavirus
MVSEPYGDSL

SEQ ID NO: 12234 - protein, 11 aa, Artificial Sequence
  Peptide Derived from Human Papillomavirus
MVSEPYGDSLF

SEQ ID NO: 12235 - protein, 8 aa, Artificial Sequence
  Peptide Derived from Human Papillomavirus
MVTSDAQI

SEQ ID NO: 12236 - protein, 9 aa, Artificial Sequence
  Peptide Derived from Human Papillomavirus
MVTSDAQIF

SEQ ID NO: 12237 - protein, 11 aa, Artificial Sequence
  Peptide Derived from Human Papillomavirus
NIYYHAGTSRL

SEQ ID NO: 12238 - protein, 8 aa, Artificial Sequence
  Peptide Derived from Human Papillomavirus
NLASSNYF

SEQ ID NO: 12239 - protein, 10 aa, Artificial Sequence
  Peptide Derived from Human Papillomavirus
NLKEKFSADL

SEQ ID NO: 12240 - protein, 8 aa, Artificial Sequence
  Peptide Derived from Human Papillomavirus
NMSLCAAI

SEQ ID NO: 12241 - protein, 8 aa, Artificial Sequence
  Peptide Derived from Human Papillomavirus
NTNFKEYL

SEQ ID NO: 12242 - protein, 9 aa, Artificial Sequence
  Peptide Derived from Human Papillomavirus
NTVIQDGDM

SEQ ID NO: 12243 - protein, 8 aa, Artificial Sequence
  Peptide Derived from Human Papillomavirus
NVPDDLYI

SEQ ID NO: 12244 - protein, 9 aa, Artificial Sequence
  Peptide Derived from Human Papillomavirus
NVYHIFFQM

SEQ ID NO: 12245 - protein, 11 aa, Artificial Sequence
  Peptide Derived from Human Papillomavirus
NVYHIFFQMSL

SEQ ID NO: 12246 - protein, 10 aa, Artificial Sequence
  Peptide Derived from Human Papillomavirus
NYFPTPSGSM

SEQ ID NO: 12247 - protein, 10 aa, Artificial Sequence
  Peptide Derived from Human Papillomavirus
PIKKPNNNKI

SEQ ID NO: 12248 - protein, 11 aa, Artificial Sequence
  Peptide Derived from Human Papillomavirus
PIKKPNNNKIL

SEQ ID NO: 12249 - protein, 8 aa, Artificial Sequence
  Peptide Derived from Human Papillomavirus
PLDICTSI

SEQ ID NO: 12250 - protein, 11 aa, Artificial Sequence
  Peptide Derived from Human Papillomavirus
PLDICTSICKY

SEQ ID NO: 12251 - protein, 9 aa, Artificial Sequence
  Peptide Derived from Human Papillomavirus
PLELINTVI

SEQ ID NO: 12252 - protein, 8 aa, Artificial Sequence
  Peptide Derived from Human Papillomavirus
PLGRKFLL

SEQ ID NO: 12253 - protein, 11 aa, Artificial Sequence
  Peptide Derived from Human Papillomavirus
PLGVGISGHPL

SEQ ID NO: 12254 - protein, 8 aa, Artificial Sequence
  Peptide Derived from Human Papillomavirus
PLKKYTFW

SEQ ID NO: 12255 - protein, 11 aa, Artificial Sequence
  Peptide Derived from Human Papillomavirus
PVSKVVSTDEY

SEQ ID NO: 12256 - protein, 8 aa, Artificial Sequence
  Peptide Derived from Human Papillomavirus
PYGDSLFF

SEQ ID NO: 12257 - protein, 9 aa, Artificial Sequence
  Peptide Derived from Human Papillomavirus
PYGDSLFFY

SEQ ID NO: 12258 - protein, 10 aa, Artificial Sequence
  Peptide Derived from Human Papillomavirus
PYGDSLFFYL

SEQ ID NO: 12259 - protein, 9 aa, Artificial Sequence
  Peptide Derived from Human Papillomavirus
QFIFQLCKI

SEQ ID NO: 12260 - protein, 11 aa, Artificial Sequence
  Peptide Derived from Human Papillomavirus
QFIFQLCKITL

SEQ ID NO: 12261 - protein, 8 aa, Artificial Sequence
  Peptide Derived from Human Papillomavirus
QFPLGRKF

SEQ ID NO: 12262 - protein, 9 aa, Artificial Sequence
  Peptide Derived from Human Papillomavirus
QFPLGRKFL

SEQ ID NO: 12263 - protein, 10 aa, Artificial Sequence
  Peptide Derived from Human Papillomavirus
QFPLGRKFLL

SEQ ID NO: 12264 - protein, 8 aa, Artificial Sequence
  Peptide Derived from Human Papillomavirus
QIFNKPYW

SEQ ID NO: 12265 - protein, 9 aa, Artificial Sequence
  Peptide Derived from Human Papillomavirus
QIFNKPYWL

SEQ ID NO: 12266 - protein, 11 aa, Artificial Sequence
  Peptide Derived from Human Papillomavirus
QLCLIGCKPPI

SEQ ID NO: 12267 - protein, 8 aa, Artificial Sequence
  Peptide Derived from Human Papillomavirus
QMFVRHLF

SEQ ID NO: 12268 - protein, 8 aa, Artificial Sequence
  Peptide Derived from Human Papillomavirus
QVTFIYIL

SEQ ID NO: 12269 - protein, 10 aa, Artificial Sequence
  Peptide Derived from Human Papillomavirus
QVTFIYILVI

SEQ ID NO: 12270 - protein, 9 aa, Artificial Sequence
  Peptide Derived from Human Papillomavirus
QYRVFRIHL

SEQ ID NO: 12271 - protein, 8 aa, Artificial Sequence
  Peptide Derived from Human Papillomavirus
RFVTSQAI

SEQ ID NO: 12272 - protein, 10 aa, Artificial Sequence
  Peptide Derived from Human Papillomavirus
RIHLPDPNKF

SEQ ID NO: 12273 - protein, 9 aa, Artificial Sequence
  Peptide Derived from Human Papillomavirus
RLLAVGHPY

SEQ ID NO: 12274 - protein, 10 aa, Artificial Sequence
  Peptide Derived from Human Papillomavirus
RLLAVGHPYF

SEQ ID NO: 12275 - protein, 10 aa, Artificial Sequence
  Peptide Derived from Human Papillomavirus
SFYNPDTQRL

SEQ ID NO: 12276 - protein, 8 aa, Artificial Sequence
  Peptide Derived from Human Papillomavirus
SICKYPDY

SEQ ID NO: 12277 - protein, 9 aa, Artificial Sequence
  Peptide Derived from Human Papillomavirus
SICKYPDYI

SEQ ID NO: 12278 - protein, 11 aa, Artificial Sequence
  Peptide Derived from Human Papillomavirus
SICKYPDYIKM

SEQ ID NO: 12279 - protein, 11 aa, Artificial Sequence
  Peptide Derived from Human Papillomavirus
SLFFYLRREQM

SEQ ID NO: 12280 - protein, 11 aa, Artificial Sequence
  Peptide Derived from Human Papillomavirus
SLWLPSEATVY

SEQ ID NO: 12281 - protein, 9 aa, Artificial Sequence
  Peptide Derived from Human Papillomavirus
SMDYKQTQL

SEQ ID NO: 12282 - protein, 11 aa, Artificial Sequence
  Peptide Derived from Human Papillomavirus
SMDYKQTQLCL

SEQ ID NO: 12283 - protein, 10 aa, Artificial Sequence
  Peptide Derived from Human Papillomavirus
SMNSTILEDW

SEQ ID NO: 12284 - protein, 9 aa, Artificial Sequence
  Peptide Derived from Human Papillomavirus
SMVTSDAQI

SEQ ID NO: 12285 - protein, 10 aa, Artificial Sequence
  Peptide Derived from Human Papillomavirus
SMVTSDAQIF

SEQ ID NO: 12286 - protein, 10 aa, Artificial Sequence
  Peptide Derived from Human Papillomavirus
STANLASSNY

SEQ ID NO: 12287 - protein, 11 aa, Artificial Sequence
  Peptide Derived from Human Papillomavirus
STANLASSNYF

SEQ ID NO: 12288 - protein, 11 aa, Artificial Sequence
  Peptide Derived from Human Papillomavirus
STDEYVARTNI

SEQ ID NO: 12289 - protein, 9 aa, Artificial Sequence
  Peptide Derived from Human Papillomavirus
STILEDWNF

SEQ ID NO: 12290 - protein, 11 aa, Artificial Sequence
  Peptide Derived from Human Papillomavirus
STILEDWNFGL

SEQ ID NO: 12291 - protein, 10 aa, Artificial Sequence
  Peptide Derived from Human Papillomavirus
STNMSLCAAI

SEQ ID NO: 12292 - protein, 11 aa, Artificial Sequence
  Peptide Derived from Human Papillomavirus
STTAKRKKRKL

SEQ ID NO: 12293 - protein, 8 aa, Artificial Sequence
  Peptide Derived from Human Papillomavirus
TFIYILVI

SEQ ID NO: 12294 - protein, 11 aa, Artificial Sequence
  Peptide Derived from Human Papillomavirus
TFIYILVITCY

SEQ ID NO: 12295 - protein, 11 aa, Artificial Sequence
  Peptide Derived from Human Papillomavirus
TFWEVNLKEKF

SEQ ID NO: 12296 - protein, 8 aa, Artificial Sequence
  Peptide Derived from Human Papillomavirus
TILEDWNF

SEQ ID NO: 12297 - protein, 10 aa, Artificial Sequence
  Peptide Derived from Human Papillomavirus
TILEDWNFGL

SEQ ID NO: 12298 - protein, 8 aa, Artificial Sequence
  Peptide Derived from Human Papillomavirus
TLEDTYRF

SEQ ID NO: 12299 - protein, 11 aa, Artificial Sequence
  Peptide Derived from Human Papillomavirus
TLQANKSEVPL

SEQ ID NO: 12300 - protein, 9 aa, Artificial Sequence
  Peptide Derived from Human Papillomavirus
TLTADVMTY

SEQ ID NO: 12301 - protein, 10 aa, Artificial Sequence
  Peptide Derived from Human Papillomavirus
TLTADVMTYI

SEQ ID NO: 12302 - protein, 10 aa, Artificial Sequence
  Peptide Derived from Human Papillomavirus
TTAKRKKRKL

SEQ ID NO: 12303 - protein, 9 aa, Artificial Sequence
  Peptide Derived from Human Papillomavirus
TTRSTNMSL

SEQ ID NO: 12304 - protein, 8 aa, Artificial Sequence
  Peptide Derived from Human Papillomavirus
TTYKNTNF

SEQ ID NO: 12305 - protein, 11 aa, Artificial Sequence
  Peptide Derived from Human Papillomavirus
TTYKNTNFKEY

SEQ ID NO: 12306 - protein, 8 aa, Artificial Sequence
  Peptide Derived from Human Papillomavirus
TVIQDGDM

SEQ ID NO: 12307 - protein, 11 aa, Artificial Sequence
  Peptide Derived from Human Papillomavirus
TVVDTTRSTNM

SEQ ID NO: 12308 - protein, 10 aa, Artificial Sequence
  Peptide Derived from Human Papillomavirus
TYIHSMNSTI

SEQ ID NO: 12309 - protein, 11 aa, Artificial Sequence
  Peptide Derived from Human Papillomavirus
TYIHSMNSTIL

SEQ ID NO: 12310 - protein, 10 aa, Artificial Sequence
  Peptide Derived from Human Papillomavirus
TYKNTNFKEY

SEQ ID NO: 12311 - protein, 11 aa, Artificial Sequence
  Peptide Derived from Human Papillomavirus
TYKNTNFKEYL

SEQ ID NO: 12312 - protein, 10 aa, Artificial Sequence
  Peptide Derived from Human Papillomavirus
TYRFVTSQAI

SEQ ID NO: 12313 - protein, 8 aa, Artificial Sequence
  Peptide Derived from Human Papillomavirus
VMTYIHSM

SEQ ID NO: 12314 - protein, 9 aa, Artificial Sequence
  Peptide Derived from Human Papillomavirus
VTFIYILVI

SEQ ID NO: 12315 - protein, 8 aa, Artificial Sequence
  Peptide Derived from Human Papillomavirus
VTSDAQIF

SEQ ID NO: 12316 - protein, 10 aa, Artificial Sequence
  Peptide Derived from Human Papillomavirus
VVDTTRSTNM

SEQ ID NO: 12317 - protein, 8 aa, Artificial Sequence
  Peptide Derived from Human Papillomavirus
VYHIFFQM

SEQ ID NO: 12318 - protein, 10 aa, Artificial Sequence
  Peptide Derived from Human Papillomavirus
VYHIFFQMSL

SEQ ID NO: 12319 - protein, 11 aa, Artificial Sequence
  Peptide Derived from Human Papillomavirus
VYHIFFQMSLW

SEQ ID NO: 12320 - protein, 9 aa, Artificial Sequence
  Peptide Derived from Human Papillomavirus
WLPSEATVY

SEQ ID NO: 12321 - protein, 10 aa, Artificial Sequence
  Peptide Derived from Human Papillomavirus
WLPSEATVYL

SEQ ID NO: 12322 - protein, 9 aa, Artificial Sequence
  Peptide Derived from Human Papillomavirus
YFPTPSGSM

SEQ ID NO: 12323 - protein, 9 aa, Artificial Sequence
  Peptide Derived from Human Papillomavirus
YIHSMNSTI

SEQ ID NO: 12324 - protein, 10 aa, Artificial Sequence
  Peptide Derived from Human Papillomavirus
YIHSMNSTIL

SEQ ID NO: 12325 - protein, 11 aa, Artificial Sequence
  Peptide Derived from Human Papillomavirus
YIKGSGSTANL

SEQ ID NO: 12326 - protein, 9 aa, Artificial Sequence
  Peptide Derived from Human Papillomavirus
YIKMVSEPY

SEQ ID NO: 12327 - protein, 8 aa, Artificial Sequence
  Peptide Derived from Human Papillomavirus
YILVITCY

SEQ ID NO: 12328 - protein, 8 aa, Artificial Sequence
  Peptide Derived from Human Papillomavirus
YLRHGEEY

SEQ ID NO: 12329 - protein, 10 aa, Artificial Sequence
  Peptide Derived from Human Papillomavirus
YLRHGEEYDL

SEQ ID NO: 12330 - protein, 8 aa, Artificial Sequence
  Peptide Derived from Human Papillomavirus
YLRREQMF

SEQ ID NO: 12331 - protein, 8 aa, Artificial Sequence
  Peptide Derived from Human Papillomavirus
YTFWEVNL

SEQ ID NO: 12332 - protein, 8 aa, Artificial Sequence
  Peptide Derived from Human Papillomavirus
YVARTNIY

SEQ ID NO: 12333 - protein, 9 aa, Artificial Sequence
  Peptide Derived from Human Papillomavirus
YVARTNIYY

SEQ ID NO: 12334 - protein, 9 aa, Artificial Sequence
  Peptide Derived from Human Papillomavirus
YYHAGTSRL

SEQ ID NO: 12335 - protein, 10 aa, Artificial Sequence
  Peptide Derived from Human Papillomavirus
YYHAGTSRLL

SEQ ID NO: 12336 - protein, 9 aa, Artificial Sequence
  Peptide Derived from Human Papillomavirus
AFITTPTKL

SEQ ID NO: 12337 - protein, 10 aa, Artificial Sequence
  Peptide Derived from Human Papillomavirus
AFITTPTKLI

SEQ ID NO: 12338 - protein, 10 aa, Artificial Sequence
  Peptide Derived from Human Papillomavirus
ALPTSINNGL

SEQ ID NO: 12339 - protein, 11 aa, Artificial Sequence
  Peptide Derived from Human Papillomavirus
ALPTSINNGLY

SEQ ID NO: 12340 - protein, 9 aa, Artificial Sequence
  Peptide Derived from Human Papillomavirus
ALTSRRTGI

SEQ ID NO: 12341 - protein, 11 aa, Artificial Sequence
  Peptide Derived from Human Papillomavirus
ALTSRRTGIRY

SEQ ID NO: 12342 - protein, 11 aa, Artificial Sequence
  Peptide Derived from Human Papillomavirus
AYEGIDVDNTL

SEQ ID NO: 12343 - protein, 8 aa, Artificial Sequence
  Peptide Derived from Human Papillomavirus
DFLDIVAL

SEQ ID NO: 12344 - protein, 11 aa, Artificial Sequence
  Peptide Derived from Human Papillomavirus
DFSTIDSAEEI

SEQ ID NO: 12345 - protein, 8 aa, Artificial Sequence
  Peptide Derived from Human Papillomavirus
DFYLHPSY

SEQ ID NO: 12346 - protein, 9 aa, Artificial Sequence
  Peptide Derived from Human Papillomavirus
DFYLHPSYY

SEQ ID NO: 12347 - protein, 10 aa, Artificial Sequence
  Peptide Derived from Human Papillomavirus
DFYLHPSYYM

SEQ ID NO: 12348 - protein, 11 aa, Artificial Sequence
  Peptide Derived from Human Papillomavirus
DFYLHPSYYML

SEQ ID NO: 12349 - protein, 11 aa, Artificial Sequence
  Peptide Derived from Human Papillomavirus
DIIPKVEGKTI

SEQ ID NO: 12350 - protein, 10 aa, Artificial Sequence
  Peptide Derived from Human Papillomavirus
DIVALHRPAL

SEQ ID NO: 12351 - protein, 8 aa, Artificial Sequence
  Peptide Derived from Human Papillomavirus
DIYADDFI

SEQ ID NO: 12352 - protein, 10 aa, Artificial Sequence
  Peptide Derived from Human Papillomavirus
DTLAPVRPPL

SEQ ID NO: 12353 - protein, 9 aa, Artificial Sequence
  Peptide Derived from Human Papillomavirus
DTTPAILDI

SEQ ID NO: 12354 - protein, 8 aa, Artificial Sequence
  Peptide Derived from Human Papillomavirus
DVDNTLYF

SEQ ID NO: 12355 - protein, 8 aa, Artificial Sequence
  Peptide Derived from Human Papillomavirus
EIPMDTFI

SEQ ID NO: 12356 - protein, 10 aa, Artificial Sequence
  Peptide Derived from Human Papillomavirus
ELQTITPSTY

SEQ ID NO: 12357 - protein, 8 aa, Artificial Sequence
  Peptide Derived from Human Papillomavirus
ETGGHFTL

SEQ ID NO: 12358 - protein, 8 aa, Artificial Sequence
  Peptide Derived from Human Papillomavirus
FITTPTKL

SEQ ID NO: 12359 - protein, 9 aa, Artificial Sequence
  Peptide Derived from Human Papillomavirus
FITTPTKLI

SEQ ID NO: 12360 - protein, 11 aa, Artificial Sequence
  Peptide Derived from Human Papillomavirus
FITTPTKLITY

SEQ ID NO: 12361 - protein, 8 aa, Artificial Sequence
  Peptide Derived from Human Papillomavirus
FTLSSSTI

SEQ ID NO: 12362 - protein, 8 aa, Artificial Sequence
  Peptide Derived from Human Papillomavirus
FYLHPSYY

SEQ ID NO: 12363 - protein, 9 aa, Artificial Sequence
  Peptide Derived from Human Papillomavirus
FYLHPSYYM

SEQ ID NO: 12364 - protein, 10 aa, Artificial Sequence
  Peptide Derived from Human Papillomavirus
FYLHPSYYML

SEQ ID NO: 12365 - protein, 8 aa, Artificial Sequence
  Peptide Derived from Human Papillomavirus
GIDVDNTL

SEQ ID NO: 12366 - protein, 9 aa, Artificial Sequence
  Peptide Derived from Human Papillomavirus
GIDVDNTLY

SEQ ID NO: 12367 - protein, 10 aa, Artificial Sequence
  Peptide Derived from Human Papillomavirus
GIDVDNTLYF

SEQ ID NO: 12368 - protein, 10 aa, Artificial Sequence
  Peptide Derived from Human Papillomavirus
GLYDIYADDF

SEQ ID NO: 12369 - protein, 11 aa, Artificial Sequence
  Peptide Derived from Human Papillomavirus
GLYDIYADDFI

SEQ ID NO: 12370 - protein, 8 aa, Artificial Sequence
  Peptide Derived from Human Papillomavirus
GTCPPDII

SEQ ID NO: 12371 - protein, 8 aa, Artificial Sequence
  Peptide Derived from Human Papillomavirus
GTGGRTGY

SEQ ID NO: 12372 - protein, 9 aa, Artificial Sequence
  Peptide Derived from Human Papillomavirus
GTGGRTGYI

SEQ ID NO: 12373 - protein, 11 aa, Artificial Sequence
  Peptide Derived from Human Papillomavirus
GTGGRTGYIPL

SEQ ID NO: 12374 - protein, 11 aa, Artificial Sequence
  Peptide Derived from Human Papillomavirus
GTRPPTATDTL

SEQ ID NO: 12375 - protein, 9 aa, Artificial Sequence
  Peptide Derived from Human Papillomavirus
GVFFGGLGI

SEQ ID NO: 12376 - protein, 9 aa, Artificial Sequence
  Peptide Derived from Human Papillomavirus
GYIPANTTI

SEQ ID NO: 12377 - protein, 11 aa, Artificial Sequence
  Peptide Derived from Human Papillomavirus
GYIPANTTIPF

SEQ ID NO: 12378 - protein, 9 aa, Artificial Sequence
  Peptide Derived from Human Papillomavirus
HFTLSSSTI

SEQ ID NO: 12379 - protein, 9 aa, Artificial Sequence
  Peptide Derived from Human Papillomavirus
HYYYDFSTI

SEQ ID NO: 12380 - protein, 8 aa, Artificial Sequence
  Peptide Derived from Human Papillomavirus
IIADAGDF

SEQ ID NO: 12381 - protein, 9 aa, Artificial Sequence
  Peptide Derived from Human Papillomavirus
IIADAGDFY

SEQ ID NO: 12382 - protein, 10 aa, Artificial Sequence
  Peptide Derived from Human Papillomavirus
IIADAGDFYL

SEQ ID NO: 12383 - protein, 10 aa, Artificial Sequence
  Peptide Derived from Human Papillomavirus
IIPKVEGKTI

SEQ ID NO: 12384 - protein, 10 aa, Artificial Sequence
  Peptide Derived from Human Papillomavirus
ILQYGSMGVF

SEQ ID NO: 12385 - protein, 11 aa, Artificial Sequence
  Peptide Derived from Human Papillomavirus
ILQYGSMGVFF

SEQ ID NO: 12386 - protein, 8 aa, Artificial Sequence
  Peptide Derived from Human Papillomavirus
ITDQAPSL

SEQ ID NO: 12387 - protein, 9 aa, Artificial Sequence
  Peptide Derived from Human Papillomavirus
ITDQAPSLI

SEQ ID NO: 12388 - protein, 11 aa, Artificial Sequence
  Peptide Derived from Human Papillomavirus
ITDQAPSLIPI

SEQ ID NO: 12389 - protein, 8 aa, Artificial Sequence
  Peptide Derived from Human Papillomavirus
ITTPTKLI

SEQ ID NO: 12390 - protein, 10 aa, Artificial Sequence
  Peptide Derived from Human Papillomavirus
ITTPTKLITY

SEQ ID NO: 12391 - protein, 11 aa, Artificial Sequence
  Peptide Derived from Human Papillomavirus
ITTSTDTTPAI

SEQ ID NO: 12392 - protein, 8 aa, Artificial Sequence
  Peptide Derived from Human Papillomavirus
ITYDNPAY

SEQ ID NO: 12393 - protein, 11 aa, Artificial Sequence
  Peptide Derived from Human Papillomavirus
ITYDNPAYEGI

SEQ ID NO: 12394 - protein, 9 aa, Artificial Sequence
  Peptide Derived from Human Papillomavirus
IVALHRPAL

SEQ ID NO: 12395 - protein, 8 aa, Artificial Sequence
  Peptide Derived from Human Papillomavirus
IVPGSPQY

SEQ ID NO: 12396 - protein, 10 aa, Artificial Sequence
  Peptide Derived from Human Papillomavirus
IVPGSPQYTI

SEQ ID NO: 12397 - protein, 11 aa, Artificial Sequence
  Peptide Derived from Human Papillomavirus
IVPGSPQYTII

SEQ ID NO: 12398 - protein, 10 aa, Artificial Sequence
  Peptide Derived from Human Papillomavirus
IVSLVEETSF

SEQ ID NO: 12399 - protein, 11 aa, Artificial Sequence
  Peptide Derived from Human Papillomavirus
IVSLVEETSFI

SEQ ID NO: 12400 - protein, 10 aa, Artificial Sequence
  Peptide Derived from Human Papillomavirus
KLITYDNPAY

SEQ ID NO: 12401 - protein, 8 aa, Artificial Sequence
  Peptide Derived from Human Papillomavirus
KTIADQIL

SEQ ID NO: 12402 - protein, 10 aa, Artificial Sequence
  Peptide Derived from Human Papillomavirus
KTIADQILQY

SEQ ID NO: 12403 - protein, 11 aa, Artificial Sequence
  Peptide Derived from Human Papillomavirus
KVEGKTIADQI

SEQ ID NO: 12404 - protein, 8 aa, Artificial Sequence
  Peptide Derived from Human Papillomavirus
KVHYYYDF

SEQ ID NO: 12405 - protein, 11 aa, Artificial Sequence
  Peptide Derived from Human Papillomavirus
KVHYYYDFSTI

SEQ ID NO: 12406 - protein, 8 aa, Artificial Sequence
  Peptide Derived from Human Papillomavirus
KVVDPAFI

SEQ ID NO: 12407 - protein, 11 aa, Artificial Sequence
  Peptide Derived from Human Papillomavirus
LIPIVPGSPQY

SEQ ID NO: 12408 - protein, 9 aa, Artificial Sequence
  Peptide Derived from Human Papillomavirus
LITYDNPAY

SEQ ID NO: 12409 - protein, 8 aa, Artificial Sequence
  Peptide Derived from Human Papillomavirus
LTSRRTGI

SEQ ID NO: 12410 - protein, 10 aa, Artificial Sequence
  Peptide Derived from Human Papillomavirus
LTSRRTGIRY

SEQ ID NO: 12411 - protein, 8 aa, Artificial Sequence
  Peptide Derived from Human Papillomavirus
LVEETSFI

SEQ ID NO: 12412 - protein, 9 aa, Artificial Sequence
  Peptide Derived from Human Papillomavirus
LVSGPDIPI

SEQ ID NO: 12413 - protein, 11 aa, Artificial Sequence
  Peptide Derived from Human Papillomavirus
LVSGPDIPINI

SEQ ID NO: 12414 - protein, 9 aa, Artificial Sequence
  Peptide Derived from Human Papillomavirus
LYDIYADDF

SEQ ID NO: 12415 - protein, 10 aa, Artificial Sequence
  Peptide Derived from Human Papillomavirus
LYDIYADDFI

SEQ ID NO: 12416 - protein, 10 aa, Artificial Sequence
  Peptide Derived from Human Papillomavirus
LYFSSNDNSI

SEQ ID NO: 12417 - protein, 9 aa, Artificial Sequence
  Peptide Derived from Human Papillomavirus
MLRKRRKRL

SEQ ID NO: 12418 - protein, 11 aa, Artificial Sequence
  Peptide Derived from Human Papillomavirus
MLRKRRKRLPY

SEQ ID NO: 12419 - protein, 8 aa, Artificial Sequence
  Peptide Derived from Human Papillomavirus
NIAPDPDF

SEQ ID NO: 12420 - protein, 9 aa, Artificial Sequence
  Peptide Derived from Human Papillomavirus
NIAPDPDFL

SEQ ID NO: 12421 - protein, 11 aa, Artificial Sequence
  Peptide Derived from Human Papillomavirus
NIAPDPDFLDI

SEQ ID NO: 12422 - protein, 10 aa, Artificial Sequence
  Peptide Derived from Human Papillomavirus
NIPLVSGPDI

SEQ ID NO: 12423 - protein, 9 aa, Artificial Sequence
  Peptide Derived from Human Papillomavirus
NITDQAPSL

SEQ ID NO: 12424 - protein, 10 aa, Artificial Sequence
  Peptide Derived from Human Papillomavirus
NITDQAPSLI

SEQ ID NO: 12425 - protein, 10 aa, Artificial Sequence
  Peptide Derived from Human Papillomavirus
NTTIPFGGAY

SEQ ID NO: 12426 - protein, 9 aa, Artificial Sequence
  Peptide Derived from Human Papillomavirus
NTVTSSTPI

SEQ ID NO: 12427 - protein, 10 aa, Artificial Sequence
  Peptide Derived from Human Papillomavirus
NYEEIPMDTF

SEQ ID NO: 12428 - protein, 11 aa, Artificial Sequence
  Peptide Derived from Human Papillomavirus
NYEEIPMDTFI

SEQ ID NO: 12429 - protein, 8 aa, Artificial Sequence
  Peptide Derived from Human Papillomavirus
PFGGAYNI

SEQ ID NO: 12430 - protein, 10 aa, Artificial Sequence
  Peptide Derived from Human Papillomavirus
PFGGAYNIPL

SEQ ID NO: 12431 - protein, 11 aa, Artificial Sequence
  Peptide Derived from Human Papillomavirus
PINITDQAPSL

SEQ ID NO: 12432 - protein, 11 aa, Artificial Sequence
  Peptide Derived from Human Papillomavirus
PIPGSRPVARL

SEQ ID NO: 12433 - protein, 9 aa, Artificial Sequence
  Peptide Derived from Human Papillomavirus
PIVPGSPQY

SEQ ID NO: 12434 - protein, 11 aa, Artificial Sequence
  Peptide Derived from Human Papillomavirus
PIVPGSPQYTI

SEQ ID NO: 12435 - protein, 8 aa, Artificial Sequence
  Peptide Derived from Human Papillomavirus
PLVSGPDI

SEQ ID NO: 12436 - protein, 10 aa, Artificial Sequence
  Peptide Derived from Human Papillomavirus
PLVSGPDIPI

SEQ ID NO: 12437 - protein, 9 aa, Artificial Sequence
  Peptide Derived from Human Papillomavirus
PTFTDPSVL

SEQ ID NO: 12438 - protein, 10 aa, Artificial Sequence
  Peptide Derived from Human Papillomavirus
PTPAETGGHF

SEQ ID NO: 12439 - protein, 8 aa, Artificial Sequence
  Peptide Derived from Human Papillomavirus
PTSINNGL

SEQ ID NO: 12440 - protein, 9 aa, Artificial Sequence
  Peptide Derived from Human Papillomavirus
PTSINNGLY

SEQ ID NO: 12441 - protein, 11 aa, Artificial Sequence
  Peptide Derived from Human Papillomavirus
PTSINNGLYDI

SEQ ID NO: 12442 - protein, 8 aa, Artificial Sequence
  Peptide Derived from Human Papillomavirus
PVARLGLY

SEQ ID NO: 12443 - protein, 9 aa, Artificial Sequence
  Peptide Derived from Human Papillomavirus
PVGPSDPSI

SEQ ID NO: 12444 - protein, 10 aa, Artificial Sequence
  Peptide Derived from Human Papillomavirus
PVPSVPSTSL

SEQ ID NO: 12445 - protein, 9 aa, Artificial Sequence
  Peptide Derived from Human Papillomavirus
PYFFSDVSL

SEQ ID NO: 12446 - protein, 8 aa, Artificial Sequence
  Peptide Derived from Human Papillomavirus
QILQYGSM

SEQ ID NO: 12447 - protein, 11 aa, Artificial Sequence
  Peptide Derived from Human Papillomavirus
QILQYGSMGVF

SEQ ID NO: 12448 - protein, 8 aa, Artificial Sequence
  Peptide Derived from Human Papillomavirus
QTITPSTY

SEQ ID NO: 12449 - protein, 11 aa, Artificial Sequence
  Peptide Derived from Human Papillomavirus
QTLRTRSGKSI

SEQ ID NO: 12450 - protein, 9 aa, Artificial Sequence
  Peptide Derived from Human Papillomavirus
QVKVVDPAF

SEQ ID NO: 12451 - protein, 10 aa, Artificial Sequence
  Peptide Derived from Human Papillomavirus
QVKVVDPAFI

SEQ ID NO: 12452 - protein, 8 aa, Artificial Sequence
  Peptide Derived from Human Papillomavirus
QYGSMGVF

SEQ ID NO: 12453 - protein, 9 aa, Artificial Sequence
  Peptide Derived from Human Papillomavirus
QYGSMGVFF

SEQ ID NO: 12454 - protein, 11 aa, Artificial Sequence
  Peptide Derived from Human Papillomavirus
QYTIIADAGDF

SEQ ID NO: 12455 - protein, 8 aa, Artificial Sequence
  Peptide Derived from Human Papillomavirus
RIGNKQTL

SEQ ID NO: 12456 - protein, 11 aa, Artificial Sequence
  Peptide Derived from Human Papillomavirus
RLPYFFSDVSL

SEQ ID NO: 12457 - protein, 9 aa, Artificial Sequence
  Peptide Derived from Human Papillomavirus
RTGIRYSRI

SEQ ID NO: 12458 - protein, 10 aa, Artificial Sequence
  Peptide Derived from Human Papillomavirus
RTKRASATQL

SEQ ID NO: 12459 - protein, 11 aa, Artificial Sequence
  Peptide Derived from Human Papillomavirus
RTKRASATQLY

SEQ ID NO: 12460 - protein, 8 aa, Artificial Sequence
  Peptide Derived from Human Papillomavirus
RTRSGKSI

SEQ ID NO: 12461 - protein, 11 aa, Artificial Sequence
  Peptide Derived from Human Papillomavirus
RYSRIGNKQTL

SEQ ID NO: 12462 - protein, 8 aa, Artificial Sequence
  Peptide Derived from Human Papillomavirus
SIGAKVHY

SEQ ID NO: 12463 - protein, 9 aa, Artificial Sequence
  Peptide Derived from Human Papillomavirus
SIGAKVHYY

SEQ ID NO: 12464 - protein, 10 aa, Artificial Sequence
  Peptide Derived from Human Papillomavirus
SIGAKVHYYY

SEQ ID NO: 12465 - protein, 10 aa, Artificial Sequence
  Peptide Derived from Human Papillomavirus
SINIAPDPDF

SEQ ID NO: 12466 - protein, 11 aa, Artificial Sequence
  Peptide Derived from Human Papillomavirus
SINIAPDPDFL

SEQ ID NO: 12467 - protein, 9 aa, Artificial Sequence
  Peptide Derived from Human Papillomavirus
SINNGLYDI

SEQ ID NO: 12468 - protein, 10 aa, Artificial Sequence
  Peptide Derived from Human Papillomavirus
SINNGLYDIY

SEQ ID NO: 12469 - protein, 9 aa, Artificial Sequence
  Peptide Derived from Human Papillomavirus
SIPPDVSGF

SEQ ID NO: 12470 - protein, 11 aa, Artificial Sequence
  Peptide Derived from Human Papillomavirus
SIPPDVSGFSI

SEQ ID NO: 12471 - protein, 11 aa, Artificial Sequence
  Peptide Derived from Human Papillomavirus
SIVSLVEETSF

SEQ ID NO: 12472 - protein, 8 aa, Artificial Sequence
  Peptide Derived from Human Papillomavirus
SLVEETSF

SEQ ID NO: 12473 - protein, 9 aa, Artificial Sequence
  Peptide Derived from Human Papillomavirus
SLVEETSFI

SEQ ID NO: 12474 - protein, 9 aa, Artificial Sequence
  Peptide Derived from Human Papillomavirus
SMGVFFGGL

SEQ ID NO: 12475 - protein, 11 aa, Artificial Sequence
  Peptide Derived from Human Papillomavirus
SMGVFFGGLGI

SEQ ID NO: 12476 - protein, 8 aa, Artificial Sequence
  Peptide Derived from Human Papillomavirus
STDTTPAI

SEQ ID NO: 12477 - protein, 9 aa, Artificial Sequence
  Peptide Derived from Human Papillomavirus
STDTTPAIL

SEQ ID NO: 12478 - protein, 11 aa, Artificial Sequence
  Peptide Derived from Human Papillomavirus
STDTTPAILDI

SEQ ID NO: 12479 - protein, 8 aa, Artificial Sequence
  Peptide Derived from Human Papillomavirus
STHNYEEI

SEQ ID NO: 12480 - protein, 10 aa, Artificial Sequence
  Peptide Derived from Human Papillomavirus
STHNYEEIPM

SEQ ID NO: 12481 - protein, 9 aa, Artificial Sequence
  Peptide Derived from Human Papillomavirus
STIDSAEEI

SEQ ID NO: 12482 - protein, 11 aa, Artificial Sequence
  Peptide Derived from Human Papillomavirus
STIDSAEEIEL

SEQ ID NO: 12483 - protein, 8 aa, Artificial Sequence
  Peptide Derived from Human Papillomavirus
STISTHNY

SEQ ID NO: 12484 - protein, 11 aa, Artificial Sequence
  Peptide Derived from Human Papillomavirus
STISTHNYEEI

SEQ ID NO: 12485 - protein, 8 aa, Artificial Sequence
  Peptide Derived from Human Papillomavirus
STSLSGYI

SEQ ID NO: 12486 - protein, 11 aa, Artificial Sequence
  Peptide Derived from Human Papillomavirus
STYTTTSHAAL

SEQ ID NO: 12487 - protein, 10 aa, Artificial Sequence
  Peptide Derived from Human Papillomavirus
SVPSTSLSGY

SEQ ID NO: 12488 - protein, 11 aa, Artificial Sequence
  Peptide Derived from Human Papillomavirus
SVPSTSLSGYI

SEQ ID NO: 12489 - protein, 8 aa, Artificial Sequence
  Peptide Derived from Human Papillomavirus
TFTDPSVL

SEQ ID NO: 12490 - protein, 9 aa, Artificial Sequence
  Peptide Derived from Human Papillomavirus
TIADQILQY

SEQ ID NO: 12491 - protein, 8 aa, Artificial Sequence
  Peptide Derived from Human Papillomavirus
TIDSAEEI

SEQ ID NO: 12492 - protein, 10 aa, Artificial Sequence
  Peptide Derived from Human Papillomavirus
TIDSAEEIEL

SEQ ID NO: 12493 - protein, 9 aa, Artificial Sequence
  Peptide Derived from Human Papillomavirus
TIIADAGDF

SEQ ID NO: 12494 - protein, 10 aa, Artificial Sequence
  Peptide Derived from Human Papillomavirus
TIIADAGDFY

SEQ ID NO: 12495 - protein, 11 aa, Artificial Sequence
  Peptide Derived from Human Papillomavirus
TIIADAGDFYL

SEQ ID NO: 12496 - protein, 8 aa, Artificial Sequence
  Peptide Derived from Human Papillomavirus
TIPFGGAY

SEQ ID NO: 12497 - protein, 10 aa, Artificial Sequence
  Peptide Derived from Human Papillomavirus
TIPFGGAYNI

SEQ ID NO: 12498 - protein, 10 aa, Artificial Sequence
  Peptide Derived from Human Papillomavirus
TISTHNYEEI

SEQ ID NO: 12499 - protein, 9 aa, Artificial Sequence
  Peptide Derived from Human Papillomavirus
TLAPVRPPL

SEQ ID NO: 12500 - protein, 10 aa, Artificial Sequence
  Peptide Derived from Human Papillomavirus
TLRTRSGKSI

SEQ ID NO: 12501 - protein, 11 aa, Artificial Sequence
  Peptide Derived from Human Papillomavirus
TLYFSSNDNSI

SEQ ID NO: 12502 - protein, 8 aa, Artificial Sequence
  Peptide Derived from Human Papillomavirus
TTHNNPTF

SEQ ID NO: 12503 - protein, 9 aa, Artificial Sequence
  Peptide Derived from Human Papillomavirus
TTIPFGGAY

SEQ ID NO: 12504 - protein, 11 aa, Artificial Sequence
  Peptide Derived from Human Papillomavirus
TTIPFGGAYNI

SEQ ID NO: 12505 - protein, 8 aa, Artificial Sequence
  Peptide Derived from Human Papillomavirus
TTPAILDI

SEQ ID NO: 12506 - protein, 9 aa, Artificial Sequence
  Peptide Derived from Human Papillomavirus
TTPTKLITY

SEQ ID NO: 12507 - protein, 11 aa, Artificial Sequence
  Peptide Derived from Human Papillomavirus
TTSHAALPTSI

SEQ ID NO: 12508 - protein, 10 aa, Artificial Sequence
  Peptide Derived from Human Papillomavirus
TTSTDTTPAI

SEQ ID NO: 12509 - protein, 11 aa, Artificial Sequence
  Peptide Derived from Human Papillomavirus
TTSTDTTPAIL

SEQ ID NO: 12510 - protein, 8 aa, Artificial Sequence
  Peptide Derived from Human Papillomavirus
TTTSHAAL

SEQ ID NO: 12511 - protein, 11 aa, Artificial Sequence
  Peptide Derived from Human Papillomavirus
TTVTTHNNPTF

SEQ ID NO: 12512 - protein, 8 aa, Artificial Sequence
  Peptide Derived from Human Papillomavirus
TVTSSTPI

SEQ ID NO: 12513 - protein, 10 aa, Artificial Sequence
  Peptide Derived from Human Papillomavirus
TVTTHNNPTF

SEQ ID NO: 12514 - protein, 10 aa, Artificial Sequence
  Peptide Derived from Human Papillomavirus
TYDNPAYEGI

SEQ ID NO: 12515 - protein, 10 aa, Artificial Sequence
  Peptide Derived from Human Papillomavirus
TYTTTSHAAL

SEQ ID NO: 12516 - protein, 8 aa, Artificial Sequence
  Peptide Derived from Human Papillomavirus
VFFGGLGI

SEQ ID NO: 12517 - protein, 9 aa, Artificial Sequence
  Peptide Derived from Human Papillomavirus
VTTHNNPTF

SEQ ID NO: 12518 - protein, 8 aa, Artificial Sequence
  Peptide Derived from Human Papillomavirus
YFFSDVSL

SEQ ID NO: 12519 - protein, 9 aa, Artificial Sequence
  Peptide Derived from Human Papillomavirus
YFSSNDNSI

SEQ ID NO: 12520 - protein, 11 aa, Artificial Sequence
  Peptide Derived from Human Papillomavirus
YFSSNDNSINI

SEQ ID NO: 12521 - protein, 8 aa, Artificial Sequence
  Peptide Derived from Human Papillomavirus
YIPANTTI

SEQ ID NO: 12522 - protein, 10 aa, Artificial Sequence
  Peptide Derived from Human Papillomavirus
YIPANTTIPF

SEQ ID NO: 12523 - protein, 8 aa, Artificial Sequence
  Peptide Derived from Human Papillomavirus
YLHPSYYM

SEQ ID NO: 12524 - protein, 9 aa, Artificial Sequence
  Peptide Derived from Human Papillomavirus
YLHPSYYML

SEQ ID NO: 12525 - protein, 10 aa, Artificial Sequence
  Peptide Derived from Human Papillomavirus
YMLRKRRKRL

SEQ ID NO: 12526 - protein, 10 aa, Artificial Sequence
  Peptide Derived from Human Papillomavirus
YTIIADAGDF

SEQ ID NO: 12527 - protein, 11 aa, Artificial Sequence
  Peptide Derived from Human Papillomavirus
YTIIADAGDFY

SEQ ID NO: 12528 - protein, 9 aa, Artificial Sequence
  Peptide Derived from Human Papillomavirus
YTTTSHAAL

SEQ ID NO: 12529 - protein, 11 aa, Artificial Sequence
  Peptide Derived from Human Papillomavirus
YYMLRKRRKRL

SEQ ID NO: 12530 - protein, 8 aa, Artificial Sequence
  Peptide Derived from Human Papillomavirus
YYYDFSTI

SEQ ID NO: 12531 - protein, 11 aa, Artificial Sequence
  Peptide Derived from Human Papillomavirus
AFLKSNCQAKY

SEQ ID NO: 12532 - protein, 9 aa, Artificial Sequence
  Peptide Derived from Human Papillomavirus
AIFGVNPTI

SEQ ID NO: 12533 - protein, 11 aa, Artificial Sequence
  Peptide Derived from Human Papillomavirus
AIVDKKTGDVI

SEQ ID NO: 12534 - protein, 9 aa, Artificial Sequence
  Peptide Derived from Human Papillomavirus
ALDGNPISI

SEQ ID NO: 12535 - protein, 9 aa, Artificial Sequence
  Peptide Derived from Human Papillomavirus
ALYWYRTGI

SEQ ID NO: 12536 - protein, 10 aa, Artificial Sequence
  Peptide Derived from Human Papillomavirus
AMLAVFKDTY

SEQ ID NO: 12537 - protein, 11 aa, Artificial Sequence
  Peptide Derived from Human Papillomavirus
AMLDDATTTCW

SEQ ID NO: 12538 - protein, 8 aa, Artificial Sequence
  Peptide Derived from Human Papillomavirus
ATDTGSDM

SEQ ID NO: 12539 - protein, 11 aa, Artificial Sequence
  Peptide Derived from Human Papillomavirus
ATDTGSDMVDF

SEQ ID NO: 12540 - protein, 8 aa, Artificial Sequence
  Peptide Derived from Human Papillomavirus
ATTTCWTY

SEQ ID NO: 12541 - protein, 9 aa, Artificial Sequence
  Peptide Derived from Human Papillomavirus
ATTTCWTYF

SEQ ID NO: 12542 - protein, 9 aa, Artificial Sequence
  Peptide Derived from Human Papillomavirus
AVFKDTYGL

SEQ ID NO: 12543 - protein, 11 aa, Artificial Sequence
  Peptide Derived from Human Papillomavirus
AVFKDTYGLSF

SEQ ID NO: 12544 - protein, 10 aa, Artificial Sequence
  Peptide Derived from Human Papillomavirus
CFFERTWSRL

SEQ ID NO: 12545 - protein, 9 aa, Artificial Sequence
  Peptide Derived from Human Papillomavirus
CLDCKWGVL

SEQ ID NO: 12546 - protein, 10 aa, Artificial Sequence
  Peptide Derived from Human Papillomavirus
CLDCKWGVLI

SEQ ID NO: 12547 - protein, 11 aa, Artificial Sequence
  Peptide Derived from Human Papillomavirus
CLDCKWGVLIL

SEQ ID NO: 12548 - protein, 9 aa, Artificial Sequence
  Peptide Derived from Human Papillomavirus
CMLIQPPKL

SEQ ID NO: 12549 - protein, 8 aa, Artificial Sequence
  Peptide Derived from Human Papillomavirus
CTDWVTAI

SEQ ID NO: 12550 - protein, 9 aa, Artificial Sequence
  Peptide Derived from Human Papillomavirus
CTDWVTAIF

SEQ ID NO: 12551 - protein, 9 aa, Artificial Sequence
  Peptide Derived from Human Papillomavirus
CTIAQLKDL

SEQ ID NO: 12552 - protein, 10 aa, Artificial Sequence
  Peptide Derived from Human Papillomavirus
CTIAQLKDLL

SEQ ID NO: 12553 - protein, 8 aa, Artificial Sequence
  Peptide Derived from Human Papillomavirus
CWTYFDTY

SEQ ID NO: 12554 - protein, 9 aa, Artificial Sequence
  Peptide Derived from Human Papillomavirus
CWTYFDTYM

SEQ ID NO: 12555 - protein, 9 aa, Artificial Sequence
  Peptide Derived from Human Papillomavirus
DFIDTQGTF

SEQ ID NO: 12556 - protein, 8 aa, Artificial Sequence
  Peptide Derived from Human Papillomavirus
DLSEMVQW

SEQ ID NO: 12557 - protein, 10 aa, Artificial Sequence
  Peptide Derived from Human Papillomavirus
DLSEMVQWAF

SEQ ID NO: 12558 - protein, 8 aa, Artificial Sequence
  Peptide Derived from Human Papillomavirus
DMAFEYAL

SEQ ID NO: 12559 - protein, 9 aa, Artificial Sequence
  Peptide Derived from Human Papillomavirus
DMAFEYALL

SEQ ID NO: 12560 - protein, 10 aa, Artificial Sequence
  Peptide Derived from Human Papillomavirus
DTEGNPFGTF

SEQ ID NO: 12561 - protein, 8 aa, Artificial Sequence
  Peptide Derived from Human Papillomavirus
DTELSPRL

SEQ ID NO: 12562 - protein, 11 aa, Artificial Sequence
  Peptide Derived from Human Papillomavirus
DTELSPRLQEI

SEQ ID NO: 12563 - protein, 9 aa, Artificial Sequence
  Peptide Derived from Human Papillomavirus
DTGSDMVDF

SEQ ID NO: 12564 - protein, 10 aa, Artificial Sequence
  Peptide Derived from Human Papillomavirus
DTGSDMVDFI

SEQ ID NO: 12565 - protein, 9 aa, Artificial Sequence
  Peptide Derived from Human Papillomavirus
DTPEWIQRL

SEQ ID NO: 12566 - protein, 11 aa, Artificial Sequence
  Peptide Derived from Human Papillomavirus
DTPEWIQRLTI

SEQ ID NO: 12567 - protein, 10 aa, Artificial Sequence
  Peptide Derived from Human Papillomavirus
DTYGLSFTDL

SEQ ID NO: 12568 - protein, 8 aa, Artificial Sequence
  Peptide Derived from Human Papillomavirus
DTYMRNAL

SEQ ID NO: 12569 - protein, 8 aa, Artificial Sequence
  Peptide Derived from Human Papillomavirus
DWRPIVQF

SEQ ID NO: 12570 - protein, 9 aa, Artificial Sequence
  Peptide Derived from Human Papillomavirus
DWRPIVQFL

SEQ ID NO: 12571 - protein, 11 aa, Artificial Sequence
  Peptide Derived from Human Papillomavirus
DWRPIVQFLRY

SEQ ID NO: 12572 - protein, 9 aa, Artificial Sequence
  Peptide Derived from Human Papillomavirus
EFITFLGAL

SEQ ID NO: 12573 - protein, 8 aa, Artificial Sequence
  Peptide Derived from Human Papillomavirus
EFPNAFPF

SEQ ID NO: 12574 - protein, 10 aa, Artificial Sequence
  Peptide Derived from Human Papillomavirus
EINDKNWKCF

SEQ ID NO: 12575 - protein, 11 aa, Artificial Sequence
  Peptide Derived from Human Papillomavirus
EINDKNWKCFF

SEQ ID NO: 12576 - protein, 8 aa, Artificial Sequence
  Peptide Derived from Human Papillomavirus
ELETAQAL

SEQ ID NO: 12577 - protein, 9 aa, Artificial Sequence
  Peptide Derived from Human Papillomavirus
ELETAQALF

SEQ ID NO: 12578 - protein, 9 aa, Artificial Sequence
  Peptide Derived from Human Papillomavirus
ELSPRLQEI

SEQ ID NO: 12579 - protein, 11 aa, Artificial Sequence
  Peptide Derived from Human Papillomavirus
ELSPRLQEISL

SEQ ID NO: 12580 - protein, 8 aa, Artificial Sequence
  Peptide Derived from Human Papillomavirus
ELTDESDM

SEQ ID NO: 12581 - protein, 10 aa, Artificial Sequence
  Peptide Derived from Human Papillomavirus
ELTDESDMAF

SEQ ID NO: 12582 - protein, 11 aa, Artificial Sequence
  Peptide Derived from Human Papillomavirus
EMVQWAFDNEL

SEQ ID NO: 12583 - protein, 11 aa, Artificial Sequence
  Peptide Derived from Human Papillomavirus
ETCMLIQPPKL

SEQ ID NO: 12584 - protein, 10 aa, Artificial Sequence
  Peptide Derived from Human Papillomavirus
EVDTELSPRL

SEQ ID NO: 12585 - protein, 9 aa, Artificial Sequence
  Peptide Derived from Human Papillomavirus
EVHNDAQVL

SEQ ID NO: 12586 - protein, 9 aa, Artificial Sequence
  Peptide Derived from Human Papillomavirus
EVMGDTPEW

SEQ ID NO: 12587 - protein, 10 aa, Artificial Sequence
  Peptide Derived from Human Papillomavirus
EVMGDTPEWI

SEQ ID NO: 12588 - protein, 8 aa, Artificial Sequence
  Peptide Derived from Human Papillomavirus
EWIQRLTI

SEQ ID NO: 12589 - protein, 9 aa, Artificial Sequence
  Peptide Derived from Human Papillomavirus
EWIQRLTII

SEQ ID NO: 12590 - protein, 9 aa, Artificial Sequence
  Peptide Derived from Human Papillomavirus
FFERTWSRL

SEQ ID NO: 12591 - protein, 11 aa, Artificial Sequence
  Peptide Derived from Human Papillomavirus
FFERTWSRLDL

SEQ ID NO: 12592 - protein, 8 aa, Artificial Sequence
  Peptide Derived from Human Papillomavirus
FIDTQGTF

SEQ ID NO: 12593 - protein, 10 aa, Artificial Sequence
  Peptide Derived from Human Papillomavirus
FIHFIQGAVI

SEQ ID NO: 12594 - protein, 10 aa, Artificial Sequence
  Peptide Derived from Human Papillomavirus
FILYAHIQCL

SEQ ID NO: 12595 - protein, 9 aa, Artificial Sequence
  Peptide Derived from Human Papillomavirus
FIQGAVISF

SEQ ID NO: 12596 - protein, 8 aa, Artificial Sequence
  Peptide Derived from Human Papillomavirus
FITFLGAL

SEQ ID NO: 12597 - protein, 11 aa, Artificial Sequence
  Peptide Derived from Human Papillomavirus
FITFLGALKSF

SEQ ID NO: 12598 - protein, 8 aa, Artificial Sequence
  Peptide Derived from Human Papillomavirus
FLGALKSF

SEQ ID NO: 12599 - protein, 9 aa, Artificial Sequence
  Peptide Derived from Human Papillomavirus
FLGALKSFL

SEQ ID NO: 12600 - protein, 11 aa, Artificial Sequence
  Peptide Derived from Human Papillomavirus
FLKGTPKKNCL

SEQ ID NO: 12601 - protein, 10 aa, Artificial Sequence
  Peptide Derived from Human Papillomavirus
FLKSNCQAKY

SEQ ID NO: 12602 - protein, 11 aa, Artificial Sequence
  Peptide Derived from Human Papillomavirus
FLKSNCQAKYL

SEQ ID NO: 12603 - protein, 9 aa, Artificial Sequence
  Peptide Derived from Human Papillomavirus
FLRYQQIEF

SEQ ID NO: 12604 - protein, 10 aa, Artificial Sequence
  Peptide Derived from Human Papillomavirus
FLRYQQIEFI

SEQ ID NO: 12605 - protein, 8 aa, Artificial Sequence
  Peptide Derived from Human Papillomavirus
FTDLVRNF

SEQ ID NO: 12606 - protein, 8 aa, Artificial Sequence
  Peptide Derived from Human Papillomavirus
FTISDSGY

SEQ ID NO: 12607 - protein, 8 aa, Artificial Sequence
  Peptide Derived from Human Papillomavirus
FVNSTSHF

SEQ ID NO: 12608 - protein, 9 aa, Artificial Sequence
  Peptide Derived from Human Papillomavirus
FVNSTSHFW

SEQ ID NO: 12609 - protein, 10 aa, Artificial Sequence
  Peptide Derived from Human Papillomavirus
FVNSTSHFWL

SEQ ID NO: 12610 - protein, 9 aa, Artificial Sequence
  Peptide Derived from Human Papillomavirus
GFKTLIQPF

SEQ ID NO: 12611 - protein, 10 aa, Artificial Sequence
  Peptide Derived from Human Papillomavirus
GFKTLIQPFI

SEQ ID NO: 12612 - protein, 11 aa, Artificial Sequence
  Peptide Derived from Human Papillomavirus
GFKTLIQPFIL

SEQ ID NO: 12613 - protein, 9 aa, Artificial Sequence
  Peptide Derived from Human Papillomavirus
GIDDSNFDL

SEQ ID NO: 12614 - protein, 9 aa, Artificial Sequence
  Peptide Derived from Human Papillomavirus
GISNISEVM

SEQ ID NO: 12615 - protein, 11 aa, Artificial Sequence
  Peptide Derived from Human Papillomavirus
GLSFTDLVRNF

SEQ ID NO: 12616 - protein, 8 aa, Artificial Sequence
  Peptide Derived from Human Papillomavirus
GMSFIHFI

SEQ ID NO: 12617 - protein, 9 aa, Artificial Sequence
  Peptide Derived from Human Papillomavirus
GTFCEQAEL

SEQ ID NO: 12618 - protein, 8 aa, Artificial Sequence
  Peptide Derived from Human Papillomavirus
GTGCNGWF

SEQ ID NO: 12619 - protein, 9 aa, Artificial Sequence
  Peptide Derived from Human Papillomavirus
GTGCNGWFY

SEQ ID NO: 12620 - protein, 8 aa, Artificial Sequence
  Peptide Derived from Human Papillomavirus
GTPKKNCL

SEQ ID NO: 12621 - protein, 10 aa, Artificial Sequence
  Peptide Derived from Human Papillomavirus
GTPKKNCLVF

SEQ ID NO: 12622 - protein, 8 aa, Artificial Sequence
  Peptide Derived from Human Papillomavirus
GTSDNSNI

SEQ ID NO: 12623 - protein, 8 aa, Artificial Sequence
  Peptide Derived from Human Papillomavirus
GVLILALL

SEQ ID NO: 12624 - protein, 10 aa, Artificial Sequence
  Peptide Derived from Human Papillomavirus
GVLILALLRY

SEQ ID NO: 12625 - protein, 10 aa, Artificial Sequence
  Peptide Derived from Human Papillomavirus
GVNPTIAEGF

SEQ ID NO: 12626 - protein, 8 aa, Artificial Sequence
  Peptide Derived from Human Papillomavirus
GWFYVQAI

SEQ ID NO: 12627 - protein, 8 aa, Artificial Sequence
  Peptide Derived from Human Papillomavirus
HFIQGAVI

SEQ ID NO: 12628 - protein, 10 aa, Artificial Sequence
  Peptide Derived from Human Papillomavirus
HFIQGAVISF

SEQ ID NO: 12629 - protein, 9 aa, Artificial Sequence
  Peptide Derived from Human Papillomavirus
HIQCLDCKW

SEQ ID NO: 12630 - protein, 8 aa, Artificial Sequence
  Peptide Derived from Human Papillomavirus
HVPETCML

SEQ ID NO: 12631 - protein, 9 aa, Artificial Sequence
  Peptide Derived from Human Papillomavirus
HVPETCMLI

SEQ ID NO: 12632 - protein, 10 aa, Artificial Sequence
  Peptide Derived from Human Papillomavirus
HYRRAQKRQM

SEQ ID NO: 12633 - protein, 8 aa, Artificial Sequence
  Peptide Derived from Human Papillomavirus
IFGVNPTI

SEQ ID NO: 12634 - protein, 11 aa, Artificial Sequence
  Peptide Derived from Human Papillomavirus
IIQHGIDDSNF

SEQ ID NO: 12635 - protein, 9 aa, Artificial Sequence
  Peptide Derived from Human Papillomavirus
ILYAHIQCL

SEQ ID NO: 12636 - protein, 10 aa, Artificial Sequence
  Peptide Derived from Human Papillomavirus
ITFLGALKSF

SEQ ID NO: 12637 - protein, 11 aa, Artificial Sequence
  Peptide Derived from Human Papillomavirus
ITFLGALKSFL

SEQ ID NO: 12638 - protein, 10 aa, Artificial Sequence
  Peptide Derived from Human Papillomavirus
ITVFEFPNAF

SEQ ID NO: 12639 - protein, 10 aa, Artificial Sequence
  Peptide Derived from Human Papillomavirus
IVDKKTGDVI

SEQ ID NO: 12640 - protein, 10 aa, Artificial Sequence
  Peptide Derived from Human Papillomavirus
IVQFLRYQQI

SEQ ID NO: 12641 - protein, 8 aa, Artificial Sequence
  Peptide Derived from Human Papillomavirus
KIDEGGDW

SEQ ID NO: 12642 - protein, 11 aa, Artificial Sequence
  Peptide Derived from Human Papillomavirus
KIDEGGDWRPI

SEQ ID NO: 12643 - protein, 11 aa, Artificial Sequence
  Peptide Derived from Human Papillomavirus
KLRAGQNHRPL

SEQ ID NO: 12644 - protein, 9 aa, Artificial Sequence
  Peptide Derived from Human Papillomavirus
KLRSSVAAL

SEQ ID NO: 12645 - protein, 10 aa, Artificial Sequence
  Peptide Derived from Human Papillomavirus
KLRSSVAALY

SEQ ID NO: 12646 - protein, 11 aa, Artificial Sequence
  Peptide Derived from Human Papillomavirus
KLRSSVAALYW

SEQ ID NO: 12647 - protein, 8 aa, Artificial Sequence
  Peptide Derived from Human Papillomavirus
KTLIQPFI

SEQ ID NO: 12648 - protein, 9 aa, Artificial Sequence
  Peptide Derived from Human Papillomavirus
KTLIQPFIL

SEQ ID NO: 12649 - protein, 10 aa, Artificial Sequence
  Peptide Derived from Human Papillomavirus
KTLIQPFILY

SEQ ID NO: 12650 - protein, 11 aa, Artificial Sequence
  Peptide Derived from Human Papillomavirus
KTTCTDWVTAI

SEQ ID NO: 12651 - protein, 9 aa, Artificial Sequence
  Peptide Derived from Human Papillomavirus
KVNNKQGAM

SEQ ID NO: 12652 - protein, 10 aa, Artificial Sequence
  Peptide Derived from Human Papillomavirus
KVNNKQGAML

SEQ ID NO: 12653 - protein, 9 aa, Artificial Sequence
  Peptide Derived from Human Papillomavirus
KWGVLILAL

SEQ ID NO: 12654 - protein, 10 aa, Artificial Sequence
  Peptide Derived from Human Papillomavirus
KWGVLILALL

SEQ ID NO: 12655 - protein, 9 aa, Artificial Sequence
  Peptide Derived from Human Papillomavirus
KYLKDCATM

SEQ ID NO: 12656 - protein, 9 aa, Artificial Sequence
  Peptide Derived from Human Papillomavirus
LFTISDSGY

SEQ ID NO: 12657 - protein, 8 aa, Artificial Sequence
  Peptide Derived from Human Papillomavirus
LILALLRY

SEQ ID NO: 12658 - protein, 9 aa, Artificial Sequence
  Peptide Derived from Human Papillomavirus
LIQLKCPPI

SEQ ID NO: 12659 - protein, 10 aa, Artificial Sequence
  Peptide Derived from Human Papillomavirus
LIQLKCPPIL

SEQ ID NO: 12660 - protein, 11 aa, Artificial Sequence
  Peptide Derived from Human Papillomavirus
LIQLKCPPILL

SEQ ID NO: 12661 - protein, 8 aa, Artificial Sequence
  Peptide Derived from Human Papillomavirus
LIQPFILY

SEQ ID NO: 12662 - protein, 11 aa, Artificial Sequence
  Peptide Derived from Human Papillomavirus
LIQPFILYAHI

SEQ ID NO: 12663 - protein, 9 aa, Artificial Sequence
  Peptide Derived from Human Papillomavirus
LLHVPETCM

SEQ ID NO: 12664 - protein, 10 aa, Artificial Sequence
  Peptide Derived from Human Papillomavirus
LLHVPETCML

SEQ ID NO: 12665 - protein, 11 aa, Artificial Sequence
  Peptide Derived from Human Papillomavirus
LLHVPETCMLI

SEQ ID NO: 12666 - protein, 11 aa, Artificial Sequence
  Peptide Derived from Human Papillomavirus
LLKVNNKQGAM

SEQ ID NO: 12667 - protein, 11 aa, Artificial Sequence
  Peptide Derived from Human Papillomavirus
LLRYKCGKSRL

SEQ ID NO: 12668 - protein, 9 aa, Artificial Sequence
  Peptide Derived from Human Papillomavirus
LTDESDMAF

SEQ ID NO: 12669 - protein, 11 aa, Artificial Sequence
  Peptide Derived from Human Papillomavirus
LTDESDMAFEY

SEQ ID NO: 12670 - protein, 8 aa, Artificial Sequence
  Peptide Derived from Human Papillomavirus
LTDTKVAM

SEQ ID NO: 12671 - protein, 9 aa, Artificial Sequence
  Peptide Derived from Human Papillomavirus
LTDTKVAML

SEQ ID NO: 12672 - protein, 8 aa, Artificial Sequence
  Peptide Derived from Human Papillomavirus
LTIIQHGI

SEQ ID NO: 12673 - protein, 10 aa, Artificial Sequence
  Peptide Derived from Human Papillomavirus
LTVAKGLSTL

SEQ ID NO: 12674 - protein, 11 aa, Artificial Sequence
  Peptide Derived from Human Papillomavirus
LTVAKGLSTLL

SEQ ID NO: 12675 - protein, 8 aa, Artificial Sequence
  Peptide Derived from Human Papillomavirus
LYAHIQCL

SEQ ID NO: 12676 - protein, 8 aa, Artificial Sequence
  Peptide Derived from Human Papillomavirus
LYWYRTGI

SEQ ID NO: 12677 - protein, 11 aa, Artificial Sequence
  Peptide Derived from Human Papillomavirus
LYWYRTGISNI

SEQ ID NO: 12678 - protein, 9 aa, Artificial Sequence
  Peptide Derived from Human Papillomavirus
MLAVFKDTY

SEQ ID NO: 12679 - protein, 11 aa, Artificial Sequence
  Peptide Derived from Human Papillomavirus
MLAVFKDTYGL

SEQ ID NO: 12680 - protein, 10 aa, Artificial Sequence
  Peptide Derived from Human Papillomavirus
MLDDATTTCW

SEQ ID NO: 12681 - protein, 8 aa, Artificial Sequence
  Peptide Derived from Human Papillomavirus
MLIQPPKL

SEQ ID NO: 12682 - protein, 11 aa, Artificial Sequence
  Peptide Derived from Human Papillomavirus
MVDFIDTQGTF

SEQ ID NO: 12683 - protein, 10 aa, Artificial Sequence
  Peptide Derived from Human Papillomavirus
MVQWAFDNEL

SEQ ID NO: 12684 - protein, 10 aa, Artificial Sequence
  Peptide Derived from Human Papillomavirus
NFDLSEMVQW

SEQ ID NO: 12685 - protein, 11 aa, Artificial Sequence
  Peptide Derived from Human Papillomavirus
NIENVNPQCTI

SEQ ID NO: 12686 - protein, 10 aa, Artificial Sequence
  Peptide Derived from Human Papillomavirus
NIHPAKDNRW

SEQ ID NO: 12687 - protein, 8 aa, Artificial Sequence
  Peptide Derived from Human Papillomavirus
NMSQWIRF

SEQ ID NO: 12688 - protein, 9 aa, Artificial Sequence
  Peptide Derived from Human Papillomavirus
NTGKSYFGM

SEQ ID NO: 12689 - protein, 11 aa, Artificial Sequence
  Peptide Derived from Human Papillomavirus
NTGKSYFGMSF

SEQ ID NO: 12690 - protein, 11 aa, Artificial Sequence
  Peptide Derived from Human Papillomavirus
NVCSGGSTEAI

SEQ ID NO: 12691 - protein, 8 aa, Artificial Sequence
  Peptide Derived from Human Papillomavirus
NVNPQCTI

SEQ ID NO: 12692 - protein, 11 aa, Artificial Sequence
  Peptide Derived from Human Papillomavirus
NVNPQCTIAQL

SEQ ID NO: 12693 - protein, 10 aa, Artificial Sequence
  Peptide Derived from Human Papillomavirus
NWKCFFERTW

SEQ ID NO: 12694 - protein, 10 aa, Artificial Sequence
  Peptide Derived from Human Papillomavirus
PFDKNGNPVY

SEQ ID NO: 12695 - protein, 8 aa, Artificial Sequence
  Peptide Derived from Human Papillomavirus
PFILYAHI

SEQ ID NO: 12696 - protein, 11 aa, Artificial Sequence
  Peptide Derived from Human Papillomavirus
PFILYAHIQCL

SEQ ID NO: 12697 - protein, 8 aa, Artificial Sequence
  Peptide Derived from Human Papillomavirus
PILLTTNI

SEQ ID NO: 12698 - protein, 11 aa, Artificial Sequence
  Peptide Derived from Human Papillomavirus
PISIDRKHKPL

SEQ ID NO: 12699 - protein, 8 aa, Artificial Sequence
  Peptide Derived from Human Papillomavirus
PIVQFLRY

SEQ ID NO: 12700 - protein, 11 aa, Artificial Sequence
  Peptide Derived from Human Papillomavirus
PIVQFLRYQQI

SEQ ID NO: 12701 - protein, 10 aa, Artificial Sequence
  Peptide Derived from Human Papillomavirus
PLIQLKCPPI

SEQ ID NO: 12702 - protein, 11 aa, Artificial Sequence
  Peptide Derived from Human Papillomavirus
PLIQLKCPPIL

SEQ ID NO: 12703 - protein, 9 aa, Artificial Sequence
  Peptide Derived from Human Papillomavirus
PLTDTKVAM

SEQ ID NO: 12704 - protein, 10 aa, Artificial Sequence
  Peptide Derived from Human Papillomavirus
PLTDTKVAML

SEQ ID NO: 12705 - protein, 10 aa, Artificial Sequence
  Peptide Derived from Human Papillomavirus
PTIAEGFKTL

SEQ ID NO: 12706 - protein, 11 aa, Artificial Sequence
  Peptide Derived from Human Papillomavirus
PTIAEGFKTLI

SEQ ID NO: 12707 - protein, 10 aa, Artificial Sequence
  Peptide Derived from Human Papillomavirus
PVYEINDKNW

SEQ ID NO: 12708 - protein, 10 aa, Artificial Sequence
  Peptide Derived from Human Papillomavirus
PYLESRITVF

SEQ ID NO: 12709 - protein, 8 aa, Artificial Sequence
  Peptide Derived from Human Papillomavirus
QFLRYQQI

SEQ ID NO: 12710 - protein, 10 aa, Artificial Sequence
  Peptide Derived from Human Papillomavirus
QFLRYQQIEF

SEQ ID NO: 12711 - protein, 11 aa, Artificial Sequence
  Peptide Derived from Human Papillomavirus
QFLRYQQIEFI

SEQ ID NO: 12712 - protein, 8 aa, Artificial Sequence
  Peptide Derived from Human Papillomavirus
QIEFITFL

SEQ ID NO: 12713 - protein, 11 aa, Artificial Sequence
  Peptide Derived from Human Papillomavirus
QIEFITFLGAL

SEQ ID NO: 12714 - protein, 8 aa, Artificial Sequence
  Peptide Derived from Human Papillomavirus
QLKCPPIL

SEQ ID NO: 12715 - protein, 9 aa, Artificial Sequence
  Peptide Derived from Human Papillomavirus
QLKCPPILL

SEQ ID NO: 12716 - protein, 8 aa, Artificial Sequence
  Peptide Derived from Human Papillomavirus
QMNMSQWI

SEQ ID NO: 12717 - protein, 10 aa, Artificial Sequence
  Peptide Derived from Human Papillomavirus
QMNMSQWIRF

SEQ ID NO: 12718 - protein, 10 aa, Artificial Sequence
  Peptide Derived from Human Papillomavirus
QVLHVLKRKF

SEQ ID NO: 12719 - protein, 8 aa, Artificial Sequence
  Peptide Derived from Human Papillomavirus
QWAFDNEL

SEQ ID NO: 12720 - protein, 10 aa, Artificial Sequence
  Peptide Derived from Human Papillomavirus
QWIRFRCSKI

SEQ ID NO: 12721 - protein, 11 aa, Artificial Sequence
  Peptide Derived from Human Papillomavirus
RITVFEFPNAF

SEQ ID NO: 12722 - protein, 8 aa, Artificial Sequence
  Peptide Derived from Human Papillomavirus
RLEVDTEL

SEQ ID NO: 12723 - protein, 10 aa, Artificial Sequence
  Peptide Derived from Human Papillomavirus
RLFTISDSGY

SEQ ID NO: 12724 - protein, 9 aa, Artificial Sequence
  Peptide Derived from Human Papillomavirus
RLTIIQHGI

SEQ ID NO: 12725 - protein, 8 aa, Artificial Sequence
  Peptide Derived from Human Papillomavirus
RLTVAKGL

SEQ ID NO: 12726 - protein, 11 aa, Artificial Sequence
  Peptide Derived from Human Papillomavirus
RLTVAKGLSTL

SEQ ID NO: 12727 - protein, 11 aa, Artificial Sequence
  Peptide Derived from Human Papillomavirus
RTGISNISEVM

SEQ ID NO: 12728 - protein, 8 aa, Artificial Sequence
  Peptide Derived from Human Papillomavirus
RTWSRLDL

SEQ ID NO: 12729 - protein, 9 aa, Artificial Sequence
  Peptide Derived from Human Papillomavirus
RWPYLESRI

SEQ ID NO: 12730 - protein, 9 aa, Artificial Sequence
  Peptide Derived from Human Papillomavirus
RYKCGKSRL

SEQ ID NO: 12731 - protein, 8 aa, Artificial Sequence
  Peptide Derived from Human Papillomavirus
RYQQIEFI

SEQ ID NO: 12732 - protein, 10 aa, Artificial Sequence
  Peptide Derived from Human Papillomavirus
RYQQIEFITF

SEQ ID NO: 12733 - protein, 11 aa, Artificial Sequence
  Peptide Derived from Human Papillomavirus
RYQQIEFITFL

SEQ ID NO: 12734 - protein, 11 aa, Artificial Sequence
  Peptide Derived from Human Papillomavirus
SFIHFIQGAVI

SEQ ID NO: 12735 - protein, 9 aa, Artificial Sequence
  Peptide Derived from Human Papillomavirus
SFTDLVRNF

SEQ ID NO: 12736 - protein, 9 aa, Artificial Sequence
  Peptide Derived from Human Papillomavirus
SFVNSTSHF

SEQ ID NO: 12737 - protein, 10 aa, Artificial Sequence
  Peptide Derived from Human Papillomavirus
SFVNSTSHFW

SEQ ID NO: 12738 - protein, 11 aa, Artificial Sequence
  Peptide Derived from Human Papillomavirus
SFVNSTSHFWL

SEQ ID NO: 12739 - protein, 9 aa, Artificial Sequence
  Peptide Derived from Human Papillomavirus
SIDRKHKPL

SEQ ID NO: 12740 - protein, 10 aa, Artificial Sequence
  Peptide Derived from Human Papillomavirus
SIDRKHKPLI

SEQ ID NO: 12741 - protein, 11 aa, Artificial Sequence
  Peptide Derived from Human Papillomavirus
STENSPLGERL

SEQ ID NO: 12742 - protein, 11 aa, Artificial Sequence
  Peptide Derived from Human Papillomavirus
STLLHVPETCM

SEQ ID NO: 12743 - protein, 10 aa, Artificial Sequence
  Peptide Derived from Human Papillomavirus
STSHFWLEPL

SEQ ID NO: 12744 - protein, 8 aa, Artificial Sequence
  Peptide Derived from Human Papillomavirus
SVAALYWY

SEQ ID NO: 12745 - protein, 11 aa, Artificial Sequence
  Peptide Derived from Human Papillomavirus
SVDGTSDNSNI

SEQ ID NO: 12746 - protein, 8 aa, Artificial Sequence
  Peptide Derived from Human Papillomavirus
SYFGMSFI

SEQ ID NO: 12747 - protein, 10 aa, Artificial Sequence
  Peptide Derived from Human Papillomavirus
SYFGMSFIHF

SEQ ID NO: 12748 - protein, 11 aa, Artificial Sequence
  Peptide Derived from Human Papillomavirus
SYFGMSFIHFI

SEQ ID NO: 12749 - protein, 8 aa, Artificial Sequence
  Peptide Derived from Human Papillomavirus
TFCEQAEL

SEQ ID NO: 12750 - protein, 9 aa, Artificial Sequence
  Peptide Derived from Human Papillomavirus
TFLGALKSF

SEQ ID NO: 12751 - protein, 10 aa, Artificial Sequence
  Peptide Derived from Human Papillomavirus
TFLGALKSFL

SEQ ID NO: 12752 - protein, 9 aa, Artificial Sequence
  Peptide Derived from Human Papillomavirus
TIAEGFKTL

SEQ ID NO: 12753 - protein, 10 aa, Artificial Sequence
  Peptide Derived from Human Papillomavirus
TIAEGFKTLI

SEQ ID NO: 12754 - protein, 8 aa, Artificial Sequence
  Peptide Derived from Human Papillomavirus
TIAQLKDL

SEQ ID NO: 12755 - protein, 9 aa, Artificial Sequence
  Peptide Derived from Human Papillomavirus
TIAQLKDLL

SEQ ID NO: 12756 - protein, 8 aa, Artificial Sequence
  Peptide Derived from Human Papillomavirus
TLIQPFIL

SEQ ID NO: 12757 - protein, 9 aa, Artificial Sequence
  Peptide Derived from Human Papillomavirus
TLIQPFILY

SEQ ID NO: 12758 - protein, 10 aa, Artificial Sequence
  Peptide Derived from Human Papillomavirus
TLLHVPETCM

SEQ ID NO: 12759 - protein, 11 aa, Artificial Sequence
  Peptide Derived from Human Papillomavirus
TLLHVPETCML

SEQ ID NO: 12760 - protein, 10 aa, Artificial Sequence
  Peptide Derived from Human Papillomavirus
TTCTDWVTAI

SEQ ID NO: 12761 - protein, 11 aa, Artificial Sequence
  Peptide Derived from Human Papillomavirus
TTCTDWVTAIF

SEQ ID NO: 12762 - protein, 10 aa, Artificial Sequence
  Peptide Derived from Human Papillomavirus
TTCWTYFDTY

SEQ ID NO: 12763 - protein, 11 aa, Artificial Sequence
  Peptide Derived from Human Papillomavirus
TTCWTYFDTYM

SEQ ID NO: 12764 - protein, 8 aa, Artificial Sequence
  Peptide Derived from Human Papillomavirus
TTTCWTYF

SEQ ID NO: 12765 - protein, 11 aa, Artificial Sequence
  Peptide Derived from Human Papillomavirus
TTTCWTYFDTY

SEQ ID NO: 12766 - protein, 9 aa, Artificial Sequence
  Peptide Derived from Human Papillomavirus
TVAKGLSTL

SEQ ID NO: 12767 - protein, 10 aa, Artificial Sequence
  Peptide Derived from Human Papillomavirus
TVAKGLSTLL

SEQ ID NO: 12768 - protein, 9 aa, Artificial Sequence
  Peptide Derived from Human Papillomavirus
TVFEFPNAF

SEQ ID NO: 12769 - protein, 11 aa, Artificial Sequence
  Peptide Derived from Human Papillomavirus
TVFEFPNAFPF

SEQ ID NO: 12770 - protein, 11 aa, Artificial Sequence
  Peptide Derived from Human Papillomavirus
TYFDTYMRNAL

SEQ ID NO: 12771 - protein, 9 aa, Artificial Sequence
  Peptide Derived from Human Papillomavirus
TYGLSFTDL

SEQ ID NO: 12772 - protein, 8 aa, Artificial Sequence
  Peptide Derived from Human Papillomavirus
VFEFPNAF

SEQ ID NO: 12773 - protein, 10 aa, Artificial Sequence
  Peptide Derived from Human Papillomavirus
VFEFPNAFPF

SEQ ID NO: 12774 - protein, 8 aa, Artificial Sequence
  Peptide Derived from Human Papillomavirus
VFKDTYGL

SEQ ID NO: 12775 - protein, 10 aa, Artificial Sequence
  Peptide Derived from Human Papillomavirus
VFKDTYGLSF

SEQ ID NO: 12776 - protein, 11 aa, Artificial Sequence
  Peptide Derived from Human Papillomavirus
VISFVNSTSHF

SEQ ID NO: 12777 - protein, 9 aa, Artificial Sequence
  Peptide Derived from Human Papillomavirus
VLHVLKRKF

SEQ ID NO: 12778 - protein, 9 aa, Artificial Sequence
  Peptide Derived from Human Papillomavirus
VLILALLRY

SEQ ID NO: 12779 - protein, 8 aa, Artificial Sequence
  Peptide Derived from Human Papillomavirus
VMGDTPEW

SEQ ID NO: 12780 - protein, 9 aa, Artificial Sequence
  Peptide Derived from Human Papillomavirus
VMGDTPEWI

SEQ ID NO: 12781 - protein, 11 aa, Artificial Sequence
  Peptide Derived from Human Papillomavirus
VTAIFGVNPTI

SEQ ID NO: 12782 - protein, 9 aa, Artificial Sequence
  Peptide Derived from Human Papillomavirus
VYEINDKNW

SEQ ID NO: 12783 - protein, 8 aa, Artificial Sequence
  Peptide Derived from Human Papillomavirus
WIQRLTII

SEQ ID NO: 12784 - protein, 9 aa, Artificial Sequence
  Peptide Derived from Human Papillomavirus
WIRFRCSKI

SEQ ID NO: 12785 - protein, 8 aa, Artificial Sequence
  Peptide Derived from Human Papillomavirus
WTYFDTYM

SEQ ID NO: 12786 - protein, 9 aa, Artificial Sequence
  Peptide Derived from Human Papillomavirus
WYRTGISNI

SEQ ID NO: 12787 - protein, 10 aa, Artificial Sequence
  Peptide Derived from Human Papillomavirus
YFDTYMRNAL

SEQ ID NO: 12788 - protein, 9 aa, Artificial Sequence
  Peptide Derived from Human Papillomavirus
YFGMSFIHF

SEQ ID NO: 12789 - protein, 10 aa, Artificial Sequence
  Peptide Derived from Human Papillomavirus
YFGMSFIHFI

SEQ ID NO: 12790 - protein, 9 aa, Artificial Sequence
  Peptide Derived from Human Papillomavirus
YLESRITVF

SEQ ID NO: 12791 - protein, 11 aa, Artificial Sequence
  Peptide Derived from Human Papillomavirus
YLESRITVFEF

SEQ ID NO: 12792 - protein, 8 aa, Artificial Sequence
  Peptide Derived from Human Papillomavirus
YLKDCATM

SEQ ID NO: 12793 - protein, 11 aa, Artificial Sequence
  Peptide Derived from Human Papillomavirus
YMRNALDGNPI

SEQ ID NO: 12794 - protein, 10 aa, Artificial Sequence
  Peptide Derived from Human Papillomavirus
YWYRTGISNI

SEQ ID NO: 12795 - protein, 8 aa, Artificial Sequence
  Peptide Derived from Human Papillomavirus
AIELQMAL

SEQ ID NO: 12796 - protein, 11 aa, Artificial Sequence
  Peptide Derived from Human Papillomavirus
AIELQMALQGL

SEQ ID NO: 12797 - protein, 11 aa, Artificial Sequence
  Peptide Derived from Human Papillomavirus
AIFFAAREHGI

SEQ ID NO: 12798 - protein, 8 aa, Artificial Sequence
  Peptide Derived from Human Papillomavirus
AIPDSVQI

SEQ ID NO: 12799 - protein, 9 aa, Artificial Sequence
  Peptide Derived from Human Papillomavirus
AIPDSVQIL

SEQ ID NO: 12800 - protein, 10 aa, Artificial Sequence
  Peptide Derived from Human Papillomavirus
ALQGLAQSRY

SEQ ID NO: 12801 - protein, 9 aa, Artificial Sequence
  Peptide Derived from Human Papillomavirus
ATCVSHRGL

SEQ ID NO: 12802 - protein, 10 aa, Artificial Sequence
  Peptide Derived from Human Papillomavirus
ATCVSHRGLY

SEQ ID NO: 12803 - protein, 11 aa, Artificial Sequence
  Peptide Derived from Human Papillomavirus
ATCVSHRGLYY

SEQ ID NO: 12804 - protein, 8 aa, Artificial Sequence
  Peptide Derived from Human Papillomavirus
ATQLVKQL

SEQ ID NO: 12805 - protein, 9 aa, Artificial Sequence
  Peptide Derived from Human Papillomavirus
ATRPGHCGL

SEQ ID NO: 12806 - protein, 8 aa, Artificial Sequence
  Peptide Derived from Human Papillomavirus
AWDSVYYM

SEQ ID NO: 12807 - protein, 11 aa, Artificial Sequence
  Peptide Derived from Human Papillomavirus
CMTYVAWDSVY

SEQ ID NO: 12808 - protein, 10 aa, Artificial Sequence
  Peptide Derived from Human Papillomavirus
CVQDKIIDHY

SEQ ID NO: 12809 - protein, 8 aa, Artificial Sequence
  Peptide Derived from Human Papillomavirus
CVSHRGLY

SEQ ID NO: 12810 - protein, 9 aa, Artificial Sequence
  Peptide Derived from Human Papillomavirus
CVSHRGLYY

SEQ ID NO: 12811 - protein, 8 aa, Artificial Sequence
  Peptide Derived from Human Papillomavirus
DIDSQIQY

SEQ ID NO: 12812 - protein, 9 aa, Artificial Sequence
  Peptide Derived from Human Papillomavirus
DIDSQIQYW

SEQ ID NO: 12813 - protein, 11 aa, Artificial Sequence
  Peptide Derived from Human Papillomavirus
DIDSQIQYWQL

SEQ ID NO: 12814 - protein, 8 aa, Artificial Sequence
  Peptide Derived from Human Papillomavirus
DISSTWHW

SEQ ID NO: 12815 - protein, 8 aa, Artificial Sequence
  Peptide Derived from Human Papillomavirus
DTVSATQL

SEQ ID NO: 12816 - protein, 11 aa, Artificial Sequence
  Peptide Derived from Human Papillomavirus
DWTLQDTCEEL

SEQ ID NO: 12817 - protein, 9 aa, Artificial Sequence
  Peptide Derived from Human Papillomavirus
EFKSECEKY

SEQ ID NO: 12818 - protein, 9 aa, Artificial Sequence
  Peptide Derived from Human Papillomavirus
ELQMALQGL

SEQ ID NO: 12819 - protein, 11 aa, Artificial Sequence
  Peptide Derived from Human Papillomavirus
ELWNTEPTHCF

SEQ ID NO: 12820 - protein, 8 aa, Artificial Sequence
  Peptide Derived from Human Papillomavirus
ETQRTKFL

SEQ ID NO: 12821 - protein, 9 aa, Artificial Sequence
  Peptide Derived from Human Papillomavirus
EVHFGNNVI

SEQ ID NO: 12822 - protein, 9 aa, Artificial Sequence
  Peptide Derived from Human Papillomavirus
FFAAREHGI

SEQ ID NO: 12823 - protein, 9 aa, Artificial Sequence
  Peptide Derived from Human Papillomavirus
GLYYVKEGY

SEQ ID NO: 12824 - protein, 9 aa, Artificial Sequence
  Peptide Derived from Human Papillomavirus
GYNTFYIEF

SEQ ID NO: 12825 - protein, 9 aa, Artificial Sequence
  Peptide Derived from Human Papillomavirus
HLKGDRNSL

SEQ ID NO: 12826 - protein, 9 aa, Artificial Sequence
  Peptide Derived from Human Papillomavirus
HYENDSKDI

SEQ ID NO: 12827 - protein, 9 aa, Artificial Sequence
  Peptide Derived from Human Papillomavirus
HYRDISSTW

SEQ ID NO: 12828 - protein, 11 aa, Artificial Sequence
  Peptide Derived from Human Papillomavirus
HYRDISSTWHW

SEQ ID NO: 12829 - protein, 10 aa, Artificial Sequence
  Peptide Derived from Human Papillomavirus
IFFAAREHGI

SEQ ID NO: 12830 - protein, 11 aa, Artificial Sequence
  Peptide Derived from Human Papillomavirus
IIHLKGDRNSL

SEQ ID NO: 12831 - protein, 8 aa, Artificial Sequence
  Peptide Derived from Human Papillomavirus
ILVGYMTM

SEQ ID NO: 12832 - protein, 8 aa, Artificial Sequence
  Peptide Derived from Human Papillomavirus
KFLNTVAI

SEQ ID NO: 12833 - protein, 10 aa, Artificial Sequence
  Peptide Derived from Human Papillomavirus
KLCSGNTTPI

SEQ ID NO: 12834 - protein, 11 aa, Artificial Sequence
  Peptide Derived from Human Papillomavirus
KLCSGNTTPII

SEQ ID NO: 12835 - protein, 11 aa, Artificial Sequence
  Peptide Derived from Human Papillomavirus
KTATCVSHRGL

SEQ ID NO: 12836 - protein, 9 aa, Artificial Sequence
  Peptide Derived from Human Papillomavirus
KTGILTVTY

SEQ ID NO: 12837 - protein, 8 aa, Artificial Sequence
  Peptide Derived from Human Papillomavirus
KYGNTGTW

SEQ ID NO: 12838 - protein, 8 aa, Artificial Sequence
  Peptide Derived from Human Papillomavirus
LIRWENAI

SEQ ID NO: 12839 - protein, 9 aa, Artificial Sequence
  Peptide Derived from Human Papillomavirus
LIRWENAIF

SEQ ID NO: 12840 - protein, 10 aa, Artificial Sequence
  Peptide Derived from Human Papillomavirus
LIRWENAIFF

SEQ ID NO: 12841 - protein, 10 aa, Artificial Sequence
  Peptide Derived from Human Papillomavirus
LWNTEPTHCF

SEQ ID NO: 12842 - protein, 8 aa, Artificial Sequence
  Peptide Derived from Human Papillomavirus
LYYVKEGY

SEQ ID NO: 12843 - protein, 11 aa, Artificial Sequence
  Peptide Derived from Human Papillomavirus
LYYVKEGYNTF

SEQ ID NO: 12844 - protein, 10 aa, Artificial Sequence
  Peptide Derived from Human Papillomavirus
MTYVAWDSVY

SEQ ID NO: 12845 - protein, 11 aa, Artificial Sequence
  Peptide Derived from Human Papillomavirus
MTYVAWDSVYY

SEQ ID NO: 12846 - protein, 11 aa, Artificial Sequence
  Peptide Derived from Human Papillomavirus
NISKSKAHKAI

SEQ ID NO: 12847 - protein, 8 aa, Artificial Sequence
  Peptide Derived from Human Papillomavirus
NTEPTHCF

SEQ ID NO: 12848 - protein, 9 aa, Artificial Sequence
  Peptide Derived from Human Papillomavirus
NTGTWEVHF

SEQ ID NO: 12849 - protein, 8 aa, Artificial Sequence
  Peptide Derived from Human Papillomavirus
NTTPIIHL

SEQ ID NO: 12850 - protein, 11 aa, Artificial Sequence
  Peptide Derived from Human Papillomavirus
NTVAIPDSVQI

SEQ ID NO: 12851 - protein, 9 aa, Artificial Sequence
  Peptide Derived from Human Papillomavirus
NVIDCNDSM

SEQ ID NO: 12852 - protein, 10 aa, Artificial Sequence
  Peptide Derived from Human Papillomavirus
PTGNNKRRKL

SEQ ID NO: 12853 - protein, 9 aa, Artificial Sequence
  Peptide Derived from Human Papillomavirus
QILVGYMTM

SEQ ID NO: 12854 - protein, 8 aa, Artificial Sequence
  Peptide Derived from Human Papillomavirus
QIQYWQLI

SEQ ID NO: 12855 - protein, 10 aa, Artificial Sequence
  Peptide Derived from Human Papillomavirus
QIQYWQLIRW

SEQ ID NO: 12856 - protein, 9 aa, Artificial Sequence
  Peptide Derived from Human Papillomavirus
QLIRWENAI

SEQ ID NO: 12857 - protein, 10 aa, Artificial Sequence
  Peptide Derived from Human Papillomavirus
QLIRWENAIF

SEQ ID NO: 12858 - protein, 11 aa, Artificial Sequence
  Peptide Derived from Human Papillomavirus
QLIRWENAIFF

SEQ ID NO: 12859 - protein, 9 aa, Artificial Sequence
  Peptide Derived from Human Papillomavirus
QLQHTPSPY

SEQ ID NO: 12860 - protein, 11 aa, Artificial Sequence
  Peptide Derived from Human Papillomavirus
QTLNHQVVPAY

SEQ ID NO: 12861 - protein, 11 aa, Artificial Sequence
  Peptide Derived from Human Papillomavirus
QTPKETLSERL

SEQ ID NO: 12862 - protein, 8 aa, Artificial Sequence
  Peptide Derived from Human Papillomavirus
QVVPAYNI

SEQ ID NO: 12863 - protein, 8 aa, Artificial Sequence
  Peptide Derived from Human Papillomavirus
QYWQLIRW

SEQ ID NO: 12864 - protein, 9 aa, Artificial Sequence
  Peptide Derived from Human Papillomavirus
RLRKHSDHY

SEQ ID NO: 12865 - protein, 9 aa, Artificial Sequence
  Peptide Derived from Human Papillomavirus
RLSCVQDKI

SEQ ID NO: 12866 - protein, 10 aa, Artificial Sequence
  Peptide Derived from Human Papillomavirus
RLSCVQDKII

SEQ ID NO: 12867 - protein, 10 aa, Artificial Sequence
  Peptide Derived from Human Papillomavirus
RTKFLNTVAI

SEQ ID NO: 12868 - protein, 8 aa, Artificial Sequence
  Peptide Derived from Human Papillomavirus
RWENAIFF

SEQ ID NO: 12869 - protein, 9 aa, Artificial Sequence
  Peptide Derived from Human Papillomavirus
RYKTEDWTL

SEQ ID NO: 12870 - protein, 11 aa, Artificial Sequence
  Peptide Derived from Human Papillomavirus
RYRLRKHSDHY

SEQ ID NO: 12871 - protein, 9 aa, Artificial Sequence
  Peptide Derived from Human Papillomavirus
SLKCLRYRL

SEQ ID NO: 12872 - protein, 11 aa, Artificial Sequence
  Peptide Derived from Human Papillomavirus
STVSVGTAKTY

SEQ ID NO: 12873 - protein, 8 aa, Artificial Sequence
  Peptide Derived from Human Papillomavirus
SVGTAKTY

SEQ ID NO: 12874 - protein, 8 aa, Artificial Sequence
  Peptide Derived from Human Papillomavirus
SVQILVGY

SEQ ID NO: 12875 - protein, 9 aa, Artificial Sequence
  Peptide Derived from Human Papillomavirus
SVQILVGYM

SEQ ID NO: 12876 - protein, 11 aa, Artificial Sequence
  Peptide Derived from Human Papillomavirus
SVQILVGYMTM

SEQ ID NO: 12877 - protein, 11 aa, Artificial Sequence
  Peptide Derived from Human Papillomavirus
SVYYMTDAGTW

SEQ ID NO: 12878 - protein, 10 aa, Artificial Sequence
  Peptide Derived from Human Papillomavirus
TLNHQVVPAY

SEQ ID NO: 12879 - protein, 9 aa, Artificial Sequence
  Peptide Derived from Human Papillomavirus
TLQDTCEEL

SEQ ID NO: 12880 - protein, 10 aa, Artificial Sequence
  Peptide Derived from Human Papillomavirus
TLQDTCEELW

SEQ ID NO: 12881 - protein, 10 aa, Artificial Sequence
  Peptide Derived from Human Papillomavirus
TVAIPDSVQI

SEQ ID NO: 12882 - protein, 11 aa, Artificial Sequence
  Peptide Derived from Human Papillomavirus
TVAIPDSVQIL

SEQ ID NO: 12883 - protein, 11 aa, Artificial Sequence
  Peptide Derived from Human Papillomavirus
TVSATQLVKQL

SEQ ID NO: 12884 - protein, 10 aa, Artificial Sequence
  Peptide Derived from Human Papillomavirus
TVSVGTAKTY

SEQ ID NO: 12885 - protein, 11 aa, Artificial Sequence
  Peptide Derived from Human Papillomavirus
TWEVHFGNNVI

SEQ ID NO: 12886 - protein, 11 aa, Artificial Sequence
  Peptide Derived from Human Papillomavirus
TYHSETQRTKF

SEQ ID NO: 12887 - protein, 9 aa, Artificial Sequence
  Peptide Derived from Human Papillomavirus
TYVAWDSVY

SEQ ID NO: 12888 - protein, 10 aa, Artificial Sequence
  Peptide Derived from Human Papillomavirus
TYVAWDSVYY

SEQ ID NO: 12889 - protein, 11 aa, Artificial Sequence
  Peptide Derived from Human Papillomavirus
TYVAWDSVYYM

SEQ ID NO: 12890 - protein, 8 aa, Artificial Sequence
  Peptide Derived from Human Papillomavirus
VIDCNDSM

SEQ ID NO: 12891 - protein, 11 aa, Artificial Sequence
  Peptide Derived from Human Papillomavirus
VYFDGNKDNCM

SEQ ID NO: 12892 - protein, 10 aa, Artificial Sequence
  Peptide Derived from Human Papillomavirus
VYYMTDAGTW

SEQ ID NO: 12893 - protein, 11 aa, Artificial Sequence
  Peptide Derived from Human Papillomavirus
WTGAGNEKTGI

SEQ ID NO: 12894 - protein, 10 aa, Artificial Sequence
  Peptide Derived from Human Papillomavirus
WTLQDTCEEL

SEQ ID NO: 12895 - protein, 11 aa, Artificial Sequence
  Peptide Derived from Human Papillomavirus
WTLQDTCEELW

SEQ ID NO: 12896 - protein, 10 aa, Artificial Sequence
  Peptide Derived from Human Papillomavirus
YFDGNKDNCM

SEQ ID NO: 12897 - protein, 11 aa, Artificial Sequence
  Peptide Derived from Human Papillomavirus
YIEFKSECEKY

SEQ ID NO: 12898 - protein, 8 aa, Artificial Sequence
  Peptide Derived from Human Papillomavirus
YMTDAGTW

SEQ ID NO: 12899 - protein, 8 aa, Artificial Sequence
  Peptide Derived from Human Papillomavirus
YVAWDSVY

SEQ ID NO: 12900 - protein, 9 aa, Artificial Sequence
  Peptide Derived from Human Papillomavirus
YVAWDSVYY

SEQ ID NO: 12901 - protein, 10 aa, Artificial Sequence
  Peptide Derived from Human Papillomavirus
YVAWDSVYYM

SEQ ID NO: 12902 - protein, 9 aa, Artificial Sequence
  Peptide Derived from Human Papillomavirus
YVKEGYNTF

SEQ ID NO: 12903 - protein, 10 aa, Artificial Sequence
  Peptide Derived from Human Papillomavirus
YVKEGYNTFY

SEQ ID NO: 12904 - protein, 11 aa, Artificial Sequence
  Peptide Derived from Human Papillomavirus
YVKEGYNTFYI

SEQ ID NO: 12905 - protein, 11 aa, Artificial Sequence
  Peptide Derived from Human Papillomavirus
YWQLIRWENAI

SEQ ID NO: 12906 - protein, 9 aa, Artificial Sequence
  Peptide Derived from Human Papillomavirus
YYMTDAGTW

SEQ ID NO: 12907 - protein, 10 aa, Artificial Sequence
  Peptide Derived from Human Papillomavirus
YYVKEGYNTF

SEQ ID NO: 12908 - protein, 11 aa, Artificial Sequence
  Peptide Derived from Human Papillomavirus
YYVKEGYNTFY

SEQ ID NO: 12909 - protein, 9 aa, Artificial Sequence
  Peptide Derived from Human Papillomavirus
AFTVYVFCF

SEQ ID NO: 12910 - protein, 10 aa, Artificial Sequence
  Peptide Derived from Human Papillomavirus
AFTVYVFCFL

SEQ ID NO: 12911 - protein, 11 aa, Artificial Sequence
  Peptide Derived from Human Papillomavirus
AFTVYVFCFLL

SEQ ID NO: 12912 - protein, 9 aa, Artificial Sequence
  Peptide Derived from Human Papillomavirus
ATAFTVYVF

SEQ ID NO: 12913 - protein, 11 aa, Artificial Sequence
  Peptide Derived from Human Papillomavirus
ATAFTVYVFCF

SEQ ID NO: 12914 - protein, 8 aa, Artificial Sequence
  Peptide Derived from Human Papillomavirus
AWVLVFVY

SEQ ID NO: 12915 - protein, 9 aa, Artificial Sequence
  Peptide Derived from Human Papillomavirus
AWVLVFVYI

SEQ ID NO: 12916 - protein, 8 aa, Artificial Sequence
  Peptide Derived from Human Papillomavirus
AYAWVLVF

SEQ ID NO: 12917 - protein, 10 aa, Artificial Sequence
  Peptide Derived from Human Papillomavirus
AYAWVLVFVY

SEQ ID NO: 12918 - protein, 11 aa, Artificial Sequence
  Peptide Derived from Human Papillomavirus
AYAWVLVFVYI

SEQ ID NO: 12919 - protein, 8 aa, Artificial Sequence
  Peptide Derived from Human Papillomavirus
CFLLPMLL

SEQ ID NO: 12920 - protein, 9 aa, Artificial Sequence
  Peptide Derived from Human Papillomavirus
CFLLPMLLL

SEQ ID NO: 12921 - protein, 11 aa, Artificial Sequence
  Peptide Derived from Human Papillomavirus
CFLLPMLLLHI

SEQ ID NO: 12922 - protein, 9 aa, Artificial Sequence
  Peptide Derived from Human Papillomavirus
CMCAYAWVL

SEQ ID NO: 12923 - protein, 11 aa, Artificial Sequence
  Peptide Derived from Human Papillomavirus
CMCAYAWVLVF

SEQ ID NO: 12924 - protein, 10 aa, Artificial Sequence
  Peptide Derived from Human Papillomavirus
CMYVCCHVPL

SEQ ID NO: 12925 - protein, 11 aa, Artificial Sequence
  Peptide Derived from Human Papillomavirus
CMYVCCHVPLL

SEQ ID NO: 12926 - protein, 9 aa, Artificial Sequence
  Peptide Derived from Human Papillomavirus
FLFCFCVCM

SEQ ID NO: 12927 - protein, 10 aa, Artificial Sequence
  Peptide Derived from Human Papillomavirus
FLFCFCVCMY

SEQ ID NO: 12928 - protein, 8 aa, Artificial Sequence
  Peptide Derived from Human Papillomavirus
FLLPMLLL

SEQ ID NO: 12929 - protein, 10 aa, Artificial Sequence
  Peptide Derived from Human Papillomavirus
FLLPMLLLHI

SEQ ID NO: 12930 - protein, 8 aa, Artificial Sequence
  Peptide Derived from Human Papillomavirus
FTVYVFCF

SEQ ID NO: 12931 - protein, 9 aa, Artificial Sequence
  Peptide Derived from Human Papillomavirus
FTVYVFCFL

SEQ ID NO: 12932 - protein, 10 aa, Artificial Sequence
  Peptide Derived from Human Papillomavirus
FTVYVFCFLL

SEQ ID NO: 12933 - protein, 8 aa, Artificial Sequence
  Peptide Derived from Human Papillomavirus
HIHAILSL

SEQ ID NO: 12934 - protein, 10 aa, Artificial Sequence
  Peptide Derived from Human Papillomavirus
HVPLLPSVCM

SEQ ID NO: 12935 - protein, 10 aa, Artificial Sequence
  Peptide Derived from Human Papillomavirus
IFLFCFCVCM

SEQ ID NO: 12936 - protein, 11 aa, Artificial Sequence
  Peptide Derived from Human Papillomavirus
IFLFCFCVCMY

SEQ ID NO: 12937 - protein, 8 aa, Artificial Sequence
  Peptide Derived from Human Papillomavirus
ITSPATAF

SEQ ID NO: 12938 - protein, 11 aa, Artificial Sequence
  Peptide Derived from Human Papillomavirus
ITSPATAFTVY

SEQ ID NO: 12939 - protein, 11 aa, Artificial Sequence
  Peptide Derived from Human Papillomavirus
IVVITSPATAF

SEQ ID NO: 12940 - protein, 8 aa, Artificial Sequence
  Peptide Derived from Human Papillomavirus
LFCFCVCM

SEQ ID NO: 12941 - protein, 9 aa, Artificial Sequence
  Peptide Derived from Human Papillomavirus
LFCFCVCMY

SEQ ID NO: 12942 - protein, 11 aa, Artificial Sequence
  Peptide Derived from Human Papillomavirus
LIFLFCFCVCM

SEQ ID NO: 12943 - protein, 8 aa, Artificial Sequence
  Peptide Derived from Human Papillomavirus
LLHIHAIL

SEQ ID NO: 12944 - protein, 10 aa, Artificial Sequence
  Peptide Derived from Human Papillomavirus
LLHIHAILSL

SEQ ID NO: 12945 - protein, 8 aa, Artificial Sequence
  Peptide Derived from Human Papillomavirus
LLLHIHAI

SEQ ID NO: 12946 - protein, 9 aa, Artificial Sequence
  Peptide Derived from Human Papillomavirus
LLLHIHAIL

SEQ ID NO: 12947 - protein, 11 aa, Artificial Sequence
  Peptide Derived from Human Papillomavirus
LLLHIHAILSL

SEQ ID NO: 12948 - protein, 9 aa, Artificial Sequence
  Peptide Derived from Human Papillomavirus
LLPMLLLHI

SEQ ID NO: 12949 - protein, 10 aa, Artificial Sequence
  Peptide Derived from Human Papillomavirus
LLPSVCMCAY

SEQ ID NO: 12950 - protein, 9 aa, Artificial Sequence
  Peptide Derived from Human Papillomavirus
LVFVYIVVI

SEQ ID NO: 12951 - protein, 9 aa, Artificial Sequence
  Peptide Derived from Human Papillomavirus
MLLLHIHAI

SEQ ID NO: 12952 - protein, 10 aa, Artificial Sequence
  Peptide Derived from Human Papillomavirus
MLLLHIHAIL

SEQ ID NO: 12953 - protein, 8 aa, Artificial Sequence
  Peptide Derived from Human Papillomavirus
MLSLIFLF

SEQ ID NO: 12954 - protein, 10 aa, Artificial Sequence
  Peptide Derived from Human Papillomavirus
MLSLIFLFCF

SEQ ID NO: 12955 - protein, 9 aa, Artificial Sequence
  Peptide Derived from Human Papillomavirus
MYVCCHVPL

SEQ ID NO: 12956 - protein, 10 aa, Artificial Sequence
  Peptide Derived from Human Papillomavirus
MYVCCHVPLL

SEQ ID NO: 12957 - protein, 8 aa, Artificial Sequence
  Peptide Derived from Human Papillomavirus
PLLPSVCM

SEQ ID NO: 12958 - protein, 11 aa, Artificial Sequence
  Peptide Derived from Human Papillomavirus
PLLPSVCMCAY

SEQ ID NO: 12959 - protein, 10 aa, Artificial Sequence
  Peptide Derived from Human Papillomavirus
PMLLLHIHAI

SEQ ID NO: 12960 - protein, 11 aa, Artificial Sequence
  Peptide Derived from Human Papillomavirus
PMLLLHIHAIL

SEQ ID NO: 12961 - protein, 8 aa, Artificial Sequence
  Peptide Derived from Human Papillomavirus
SLIFLFCF

SEQ ID NO: 12962 - protein, 9 aa, Artificial Sequence
  Peptide Derived from Human Papillomavirus
SVCMCAYAW

SEQ ID NO: 12963 - protein, 11 aa, Artificial Sequence
  Peptide Derived from Human Papillomavirus
SVCMCAYAWVL

SEQ ID NO: 12964 - protein, 8 aa, Artificial Sequence
  Peptide Derived from Human Papillomavirus
TVYVFCFL

SEQ ID NO: 12965 - protein, 9 aa, Artificial Sequence
  Peptide Derived from Human Papillomavirus
TVYVFCFLL

SEQ ID NO: 12966 - protein, 11 aa, Artificial Sequence
  Peptide Derived from Human Papillomavirus
TVYVFCFLLPM

SEQ ID NO: 12967 - protein, 8 aa, Artificial Sequence
  Peptide Derived from Human Papillomavirus
VFCFLLPM

SEQ ID NO: 12968 - protein, 9 aa, Artificial Sequence
  Peptide Derived from Human Papillomavirus
VFCFLLPML

SEQ ID NO: 12969 - protein, 10 aa, Artificial Sequence
  Peptide Derived from Human Papillomavirus
VFCFLLPMLL

SEQ ID NO: 12970 - protein, 11 aa, Artificial Sequence
  Peptide Derived from Human Papillomavirus
VFCFLLPMLLL

SEQ ID NO: 12971 - protein, 8 aa, Artificial Sequence
  Peptide Derived from Human Papillomavirus
VFVYIVVI

SEQ ID NO: 12972 - protein, 9 aa, Artificial Sequence
  Peptide Derived from Human Papillomavirus
VITSPATAF

SEQ ID NO: 12973 - protein, 10 aa, Artificial Sequence
  Peptide Derived from Human Papillomavirus
VLVFVYIVVI

SEQ ID NO: 12974 - protein, 10 aa, Artificial Sequence
  Peptide Derived from Human Papillomavirus
VVITSPATAF

SEQ ID NO: 12975 - protein, 8 aa, Artificial Sequence
  Peptide Derived from Human Papillomavirus
VYVFCFLL

SEQ ID NO: 12976 - protein, 10 aa, Artificial Sequence
  Peptide Derived from Human Papillomavirus
VYVFCFLLPM

SEQ ID NO: 12977 - protein, 11 aa, Artificial Sequence
  Peptide Derived from Human Papillomavirus
VYVFCFLLPML

SEQ ID NO: 12978 - protein, 8 aa, Artificial Sequence
  Peptide Derived from Human Papillomavirus
WVLVFVYI

SEQ ID NO: 12979 - protein, 11 aa, Artificial Sequence
  Peptide Derived from Human Papillomavirus
WVLVFVYIVVI

SEQ ID NO: 12980 - protein, 8 aa, Artificial Sequence
  Peptide Derived from Human Papillomavirus
YVCCHVPL

SEQ ID NO: 12981 - protein, 9 aa, Artificial Sequence
  Peptide Derived from Human Papillomavirus
YVCCHVPLL

SEQ ID NO: 12982 - protein, 9 aa, Artificial Sequence
  Peptide Derived from Human Papillomavirus
YVFCFLLPM

SEQ ID NO: 12983 - protein, 10 aa, Artificial Sequence
  Peptide Derived from Human Papillomavirus
YVFCFLLPML

SEQ ID NO: 12984 - protein, 11 aa, Artificial Sequence
  Peptide Derived from Human Papillomavirus
YVFCFLLPMLL

SEQ ID NO: 12985 - protein, 9 aa, Artificial Sequence
  Peptide Derived from Human Papillomavirus
AFKDLFVVY

SEQ ID NO: 12986 - protein, 8 aa, Artificial Sequence
  Peptide Derived from Human Papillomavirus
CIDFYSRI

SEQ ID NO: 12987 - protein, 11 aa, Artificial Sequence
  Peptide Derived from Human Papillomavirus
CIDFYSRIREL

SEQ ID NO: 12988 - protein, 8 aa, Artificial Sequence
  Peptide Derived from Human Papillomavirus
CLRCQKPL

SEQ ID NO: 12989 - protein, 8 aa, Artificial Sequence
  Peptide Derived from Human Papillomavirus
CTELNTSL

SEQ ID NO: 12990 - protein, 11 aa, Artificial Sequence
  Peptide Derived from Human Papillomavirus
CTELNTSLQDI

SEQ ID NO: 12991 - protein, 8 aa, Artificial Sequence
  Peptide Derived from Human Papillomavirus
CVYCKTVL

SEQ ID NO: 12992 - protein, 10 aa, Artificial Sequence
  Peptide Derived from Human Papillomavirus
CVYCKTVLEL

SEQ ID NO: 12993 - protein, 9 aa, Artificial Sequence
  Peptide Derived from Human Papillomavirus
DFYSRIREL

SEQ ID NO: 12994 - protein, 8 aa, Artificial Sequence
  Peptide Derived from Human Papillomavirus
DIEITCVY

SEQ ID NO: 12995 - protein, 10 aa, Artificial Sequence
  Peptide Derived from Human Papillomavirus
DLCTELNTSL

SEQ ID NO: 12996 - protein, 10 aa, Artificial Sequence
  Peptide Derived from Human Papillomavirus
DLFVVYRDSI

SEQ ID NO: 12997 - protein, 11 aa, Artificial Sequence
  Peptide Derived from Human Papillomavirus
DTLEKLTNTGL

SEQ ID NO: 12998 - protein, 8 aa, Artificial Sequence
  Peptide Derived from Human Papillomavirus
EFAFKDLF

SEQ ID NO: 12999 - protein, 11 aa, Artificial Sequence
  Peptide Derived from Human Papillomavirus
EFAFKDLFVVY

SEQ ID NO: 13000 - protein, 11 aa, Artificial Sequence
  Peptide Derived from Human Papillomavirus
EITCVYCKTVL

SEQ ID NO: 13001 - protein, 9 aa, Artificial Sequence
  Peptide Derived from Human Papillomavirus
ELNTSLQDI

SEQ ID NO: 13002 - protein, 11 aa, Artificial Sequence
  Peptide Derived from Human Papillomavirus
ELNTSLQDIEI

SEQ ID NO: 13003 - protein, 10 aa, Artificial Sequence
  Peptide Derived from Human Papillomavirus
ELRHYSDSVY

SEQ ID NO: 13004 - protein, 8 aa, Artificial Sequence
  Peptide Derived from Human Papillomavirus
ELTEVFEF

SEQ ID NO: 13005 - protein, 10 aa, Artificial Sequence
  Peptide Derived from Human Papillomavirus
ELTEVFEFAF

SEQ ID NO: 13006 - protein, 10 aa, Artificial Sequence
  Peptide Derived from Human Papillomavirus
EVFEFAFKDL

SEQ ID NO: 13007 - protein, 11 aa, Artificial Sequence
  Peptide Derived from Human Papillomavirus
EVFEFAFKDLF

SEQ ID NO: 13008 - protein, 8 aa, Artificial Sequence
  Peptide Derived from Human Papillomavirus
FVVYRDSI

SEQ ID NO: 13009 - protein, 8 aa, Artificial Sequence
  Peptide Derived from Human Papillomavirus
FYSRIREL

SEQ ID NO: 13010 - protein, 11 aa, Artificial Sequence
  Peptide Derived from Human Papillomavirus
FYSRIRELRHY

SEQ ID NO: 13011 - protein, 10 aa, Artificial Sequence
  Peptide Derived from Human Papillomavirus
GLYNLLIRCL

SEQ ID NO: 13012 - protein, 8 aa, Artificial Sequence
  Peptide Derived from Human Papillomavirus
HLNEKRRF

SEQ ID NO: 13013 - protein, 11 aa, Artificial Sequence
  Peptide Derived from Human Papillomavirus
HLNEKRRFHNI

SEQ ID NO: 13014 - protein, 11 aa, Artificial Sequence
  Peptide Derived from Human Papillomavirus
HYSDSVYGDTL

SEQ ID NO: 13015 - protein, 10 aa, Artificial Sequence
  Peptide Derived from Human Papillomavirus
ITCVYCKTVL

SEQ ID NO: 13016 - protein, 9 aa, Artificial Sequence
  Peptide Derived from Human Papillomavirus
KLPDLCTEL

SEQ ID NO: 13017 - protein, 11 aa, Artificial Sequence
  Peptide Derived from Human Papillomavirus
KLRHLNEKRRF

SEQ ID NO: 13018 - protein, 8 aa, Artificial Sequence
  Peptide Derived from Human Papillomavirus
KLTNTGLY

SEQ ID NO: 13019 - protein, 10 aa, Artificial Sequence
  Peptide Derived from Human Papillomavirus
KLTNTGLYNL

SEQ ID NO: 13020 - protein, 11 aa, Artificial Sequence
  Peptide Derived from Human Papillomavirus
KLTNTGLYNLL

SEQ ID NO: 13021 - protein, 10 aa, Artificial Sequence
  Peptide Derived from Human Papillomavirus
KTVLELTEVF

SEQ ID NO: 13022 - protein, 9 aa, Artificial Sequence
  Peptide Derived from Human Papillomavirus
LFVVYRDSI

SEQ ID NO: 13023 - protein, 11 aa, Artificial Sequence
  Peptide Derived from Human Papillomavirus
LIRCLRCQKPL

SEQ ID NO: 13024 - protein, 9 aa, Artificial Sequence
  Peptide Derived from Human Papillomavirus
LTEVFEFAF

SEQ ID NO: 13025 - protein, 9 aa, Artificial Sequence
  Peptide Derived from Human Papillomavirus
LTNTGLYNL

SEQ ID NO: 13026 - protein, 10 aa, Artificial Sequence
  Peptide Derived from Human Papillomavirus
LTNTGLYNLL

SEQ ID NO: 13027 - protein, 11 aa, Artificial Sequence
  Peptide Derived from Human Papillomavirus
LTNTGLYNLLI

SEQ ID NO: 13028 - protein, 9 aa, Artificial Sequence
  Peptide Derived from Human Papillomavirus
LYNLLIRCL

SEQ ID NO: 13029 - protein, 8 aa, Artificial Sequence
  Peptide Derived from Human Papillomavirus
NTGLYNLL

SEQ ID NO: 13030 - protein, 9 aa, Artificial Sequence
  Peptide Derived from Human Papillomavirus
NTGLYNLLI

SEQ ID NO: 13031 - protein, 9 aa, Artificial Sequence
  Peptide Derived from Human Papillomavirus
NTSLQDIEI

SEQ ID NO: 13032 - protein, 8 aa, Artificial Sequence
  Peptide Derived from Human Papillomavirus
PLNPAEKL

SEQ ID NO: 13033 - protein, 11 aa, Artificial Sequence
  Peptide Derived from Human Papillomavirus
PLNPAEKLRHL

SEQ ID NO: 13034 - protein, 8 aa, Artificial Sequence
  Peptide Derived from Human Papillomavirus
PTRRPYKL

SEQ ID NO: 13035 - protein, 11 aa, Artificial Sequence
  Peptide Derived from Human Papillomavirus
PTRRPYKLPDL

SEQ ID NO: 13036 - protein, 11 aa, Artificial Sequence
  Peptide Derived from Human Papillomavirus
PYKLPDLCTEL

SEQ ID NO: 13037 - protein, 10 aa, Artificial Sequence
  Peptide Derived from Human Papillomavirus
RFEDPTRRPY

SEQ ID NO: 13038 - protein, 9 aa, Artificial Sequence
  Peptide Derived from Human Papillomavirus
RFHNIAGHY

SEQ ID NO: 13039 - protein, 8 aa, Artificial Sequence
  Peptide Derived from Human Papillomavirus
RIRELRHY

SEQ ID NO: 13040 - protein, 11 aa, Artificial Sequence
  Peptide Derived from Human Papillomavirus
SIPHAACHKCI

SEQ ID NO: 13041 - protein, 11 aa, Artificial Sequence
  Peptide Derived from Human Papillomavirus
SLQDIEITCVY

SEQ ID NO: 13042 - protein, 10 aa, Artificial Sequence
  Peptide Derived from Human Papillomavirus
SVYGDTLEKL

SEQ ID NO: 13043 - protein, 10 aa, Artificial Sequence
  Peptide Derived from Human Papillomavirus
TLEKLTNTGL

SEQ ID NO: 13044 - protein, 11 aa, Artificial Sequence
  Peptide Derived from Human Papillomavirus
TLEKLTNTGLY

SEQ ID NO: 13045 - protein, 9 aa, Artificial Sequence
  Peptide Derived from Human Papillomavirus
TVLELTEVF

SEQ ID NO: 13046 - protein, 11 aa, Artificial Sequence
  Peptide Derived from Human Papillomavirus
TVLELTEVFEF

SEQ ID NO: 13047 - protein, 9 aa, Artificial Sequence
  Peptide Derived from Human Papillomavirus
VFEFAFKDL

SEQ ID NO: 13048 - protein, 10 aa, Artificial Sequence
  Peptide Derived from Human Papillomavirus
VFEFAFKDLF

SEQ ID NO: 13049 - protein, 8 aa, Artificial Sequence
  Peptide Derived from Human Papillomavirus
VLELTEVF

SEQ ID NO: 13050 - protein, 10 aa, Artificial Sequence
  Peptide Derived from Human Papillomavirus
VLELTEVFEF

SEQ ID NO: 13051 - protein, 9 aa, Artificial Sequence
  Peptide Derived from Human Papillomavirus
VYCKTVLEL

SEQ ID NO: 13052 - protein, 9 aa, Artificial Sequence
  Peptide Derived from Human Papillomavirus
VYGDTLEKL

SEQ ID NO: 13053 - protein, 10 aa, Artificial Sequence
  Peptide Derived from Human Papillomavirus
AFQQLFLNTL

SEQ ID NO: 13054 - protein, 8 aa, Artificial Sequence
  Peptide Derived from Human Papillomavirus
ATLQDIVL

SEQ ID NO: 13055 - protein, 10 aa, Artificial Sequence
  Peptide Derived from Human Papillomavirus
ATLQDIVLHL

SEQ ID NO: 13056 - protein, 10 aa, Artificial Sequence
  Peptide Derived from Human Papillomavirus
CMCCKCEARI

SEQ ID NO: 13057 - protein, 8 aa, Artificial Sequence
  Peptide Derived from Human Papillomavirus
DLLCHEQL

SEQ ID NO: 13058 - protein, 8 aa, Artificial Sequence
  Peptide Derived from Human Papillomavirus
DLRAFQQL

SEQ ID NO: 13059 - protein, 9 aa, Artificial Sequence
  Peptide Derived from Human Papillomavirus
DLRAFQQLF

SEQ ID NO: 13060 - protein, 10 aa, Artificial Sequence
  Peptide Derived from Human Papillomavirus
DLRAFQQLFL

SEQ ID NO: 13061 - protein, 10 aa, Artificial Sequence
  Peptide Derived from Human Papillomavirus
EIDGVNHQHL

SEQ ID NO: 13062 - protein, 11 aa, Artificial Sequence
  Peptide Derived from Human Papillomavirus
FLNTLSFVCPW

SEQ ID NO: 13063 - protein, 8 aa, Artificial Sequence
  Peptide Derived from Human Papillomavirus
HLEPQNEI

SEQ ID NO: 13064 - protein, 11 aa, Artificial Sequence
  Peptide Derived from Human Papillomavirus
IVLHLEPQNEI

SEQ ID NO: 13065 - protein, 11 aa, Artificial Sequence
  Peptide Derived from Human Papillomavirus
KLVVESSADDL

SEQ ID NO: 13066 - protein, 8 aa, Artificial Sequence
  Peptide Derived from Human Papillomavirus
LFLNTLSF

SEQ ID NO: 13067 - protein, 10 aa, Artificial Sequence
  Peptide Derived from Human Papillomavirus
LVVESSADDL

SEQ ID NO: 13068 - protein, 9 aa, Artificial Sequence
  Peptide Derived from Human Papillomavirus
NTLSFVCPW

SEQ ID NO: 13069 - protein, 10 aa, Artificial Sequence
  Peptide Derived from Human Papillomavirus
PVDLLCHEQL

SEQ ID NO: 13070 - protein, 9 aa, Artificial Sequence
  Peptide Derived from Human Papillomavirus
QLFLNTLSF

SEQ ID NO: 13071 - protein, 9 aa, Artificial Sequence
  Peptide Derived from Human Papillomavirus
TLQDIVLHL

SEQ ID NO: 13072 - protein, 8 aa, Artificial Sequence
  Peptide Derived from Human Papillomavirus
TLSFVCPW

SEQ ID NO: 13073 - protein, 10 aa, Artificial Sequence
  Peptide Derived from Human Papillomavirus
VLHLEPQNEI

SEQ ID NO: 13074 - protein, 9 aa, Artificial Sequence
  Peptide Derived from Human Papillomavirus
VVESSADDL

SEQ ID NO: 13075 - protein, 11 aa, Artificial Sequence
  Peptide Derived from Human Papillomavirus
ALWRPSDNTVY

SEQ ID NO: 13076 - protein, 11 aa, Artificial Sequence
  Peptide Derived from Human Papillomavirus
AYQYRVFRVQL

SEQ ID NO: 13077 - protein, 9 aa, Artificial Sequence
  Peptide Derived from Human Papillomavirus
CILGCAPAI

SEQ ID NO: 13078 - protein, 8 aa, Artificial Sequence
  Peptide Derived from Human Papillomavirus
CLRREQLF

SEQ ID NO: 13079 - protein, 8 aa, Artificial Sequence
  Peptide Derived from Human Papillomavirus
CLYTRVLI

SEQ ID NO: 13080 - protein, 9 aa, Artificial Sequence
  Peptide Derived from Human Papillomavirus
CLYTRVLIL

SEQ ID NO: 13081 - protein, 11 aa, Artificial Sequence
  Peptide Derived from Human Papillomavirus
CLYTRVLILHY

SEQ ID NO: 13082 - protein, 10 aa, Artificial Sequence
  Peptide Derived from Human Papillomavirus
CTITLTADVM

SEQ ID NO: 13083 - protein, 11 aa, Artificial Sequence
  Peptide Derived from Human Papillomavirus
CVYSPSPSGSI

SEQ ID NO: 13084 - protein, 9 aa, Artificial Sequence
  Peptide Derived from Human Papillomavirus
DICQSICKY

SEQ ID NO: 13085 - protein, 8 aa, Artificial Sequence
  Peptide Derived from Human Papillomavirus
DIPKVSAY

SEQ ID NO: 13086 - protein, 10 aa, Artificial Sequence
  Peptide Derived from Human Papillomavirus
DIPKVSAYQY

SEQ ID NO: 13087 - protein, 11 aa, Artificial Sequence
  Peptide Derived from Human Papillomavirus
DLDQYPLGRKF

SEQ ID NO: 13088 - protein, 8 aa, Artificial Sequence
  Peptide Derived from Human Papillomavirus
DLKEKFSL

SEQ ID NO: 13089 - protein, 10 aa, Artificial Sequence
  Peptide Derived from Human Papillomavirus
DLKEKFSLDL

SEQ ID NO: 13090 - protein, 8 aa, Artificial Sequence
  Peptide Derived from Human Papillomavirus
DLQFIFQL

SEQ ID NO: 13091 - protein, 11 aa, Artificial Sequence
  Peptide Derived from Human Papillomavirus
DLQFIFQLCTI

SEQ ID NO: 13092 - protein, 10 aa, Artificial Sequence
  Peptide Derived from Human Papillomavirus
DMVDTGYGAM

SEQ ID NO: 13093 - protein, 9 aa, Artificial Sequence
  Peptide Derived from Human Papillomavirus
DTGYGAMDF

SEQ ID NO: 13094 - protein, 8 aa, Artificial Sequence
  Peptide Derived from Human Papillomavirus
DTKCEVPL

SEQ ID NO: 13095 - protein, 10 aa, Artificial Sequence
  Peptide Derived from Human Papillomavirus
DTKCEVPLDI

SEQ ID NO: 13096 - protein, 8 aa, Artificial Sequence
  Peptide Derived from Human Papillomavirus
DTTPSTNL

SEQ ID NO: 13097 - protein, 10 aa, Artificial Sequence
  Peptide Derived from Human Papillomavirus
DTTPSTNLTI

SEQ ID NO: 13098 - protein, 8 aa, Artificial Sequence
  Peptide Derived from Human Papillomavirus
DTVPQSLY

SEQ ID NO: 13099 - protein, 9 aa, Artificial Sequence
  Peptide Derived from Human Papillomavirus
DTVPQSLYI

SEQ ID NO: 13100 - protein, 11 aa, Artificial Sequence
  Peptide Derived from Human Papillomavirus
DTYRFVQSVAI

SEQ ID NO: 13101 - protein, 9 aa, Artificial Sequence
  Peptide Derived from Human Papillomavirus
DVMSYIHSM

SEQ ID NO: 13102 - protein, 10 aa, Artificial Sequence
  Peptide Derived from Human Papillomavirus
DVRDNVSVDY

SEQ ID NO: 13103 - protein, 9 aa, Artificial Sequence
  Peptide Derived from Human Papillomavirus
DYKQTQLCI

SEQ ID NO: 13104 - protein, 10 aa, Artificial Sequence
  Peptide Derived from Human Papillomavirus
DYKQTQLCIL

SEQ ID NO: 13105 - protein, 10 aa, Artificial Sequence
  Peptide Derived from Human Papillomavirus
DYLQMSADPY

SEQ ID NO: 13106 - protein, 8 aa, Artificial Sequence
  Peptide Derived from Human Papillomavirus
DYVTPTSI

SEQ ID NO: 13107 - protein, 9 aa, Artificial Sequence
  Peptide Derived from Human Papillomavirus
DYVTPTSIF

SEQ ID NO: 13108 - protein, 10 aa, Artificial Sequence
  Peptide Derived from Human Papillomavirus
DYVTPTSIFY

SEQ ID NO: 13109 - protein, 8 aa, Artificial Sequence
  Peptide Derived from Human Papillomavirus
EIGRGQPL

SEQ ID NO: 13110 - protein, 10 aa, Artificial Sequence
  Peptide Derived from Human Papillomavirus
EVPLDICQSI

SEQ ID NO: 13111 - protein, 8 aa, Artificial Sequence
  Peptide Derived from Human Papillomavirus
EYDLQFIF

SEQ ID NO: 13112 - protein, 10 aa, Artificial Sequence
  Peptide Derived from Human Papillomavirus
EYDLQFIFQL

SEQ ID NO: 13113 - protein, 9 aa, Artificial Sequence
  Peptide Derived from Human Papillomavirus
FFCLRREQL

SEQ ID NO: 13114 - protein, 10 aa, Artificial Sequence
  Peptide Derived from Human Papillomavirus
FFCLRREQLF

SEQ ID NO: 13115 - protein, 8 aa, Artificial Sequence
  Peptide Derived from Human Papillomavirus
FIFQLCTI

SEQ ID NO: 13116 - protein, 10 aa, Artificial Sequence
  Peptide Derived from Human Papillomavirus
FIFQLCTITL

SEQ ID NO: 13117 - protein, 8 aa, Artificial Sequence
  Peptide Derived from Human Papillomavirus
FLRNVNVF

SEQ ID NO: 13118 - protein, 10 aa, Artificial Sequence
  Peptide Derived from Human Papillomavirus
FLRNVNVFPI

SEQ ID NO: 13119 - protein, 11 aa, Artificial Sequence
  Peptide Derived from Human Papillomavirus
FLRNVNVFPIF

SEQ ID NO: 13120 - protein, 8 aa, Artificial Sequence
  Peptide Derived from Human Papillomavirus
FWNRAGTM

SEQ ID NO: 13121 - protein, 10 aa, Artificial Sequence
  Peptide Derived from Human Papillomavirus
FWNVDLKEKF

SEQ ID NO: 13122 - protein, 9 aa, Artificial Sequence
  Peptide Derived from Human Papillomavirus
FYHAGSSRL

SEQ ID NO: 13123 - protein, 10 aa, Artificial Sequence
  Peptide Derived from Human Papillomavirus
FYHAGSSRLL

SEQ ID NO: 13124 - protein, 8 aa, Artificial Sequence
  Peptide Derived from Human Papillomavirus
GLPDTSIY

SEQ ID NO: 13125 - protein, 8 aa, Artificial Sequence
  Peptide Derived from Human Papillomavirus
GLRRKPTI

SEQ ID NO: 13126 - protein, 8 aa, Artificial Sequence
  Peptide Derived from Human Papillomavirus
GLSGHPFY

SEQ ID NO: 13127 - protein, 11 aa, Artificial Sequence
  Peptide Derived from Human Papillomavirus
GLSGHPFYNKL

SEQ ID NO: 13128 - protein, 11 aa, Artificial Sequence
  Peptide Derived from Human Papillomavirus
GMPASPGSCVY

SEQ ID NO: 13129 - protein, 9 aa, Artificial Sequence
  Peptide Derived from Human Papillomavirus
GTACKSRPL

SEQ ID NO: 13130 - protein, 11 aa, Artificial Sequence
  Peptide Derived from Human Papillomavirus
GTMGDTVPQSL

SEQ ID NO: 13131 - protein, 8 aa, Artificial Sequence
  Peptide Derived from Human Papillomavirus
GVCWHNQL

SEQ ID NO: 13132 - protein, 9 aa, Artificial Sequence
  Peptide Derived from Human Papillomavirus
GVCWHNQLF

SEQ ID NO: 13133 - protein, 10 aa, Artificial Sequence
  Peptide Derived from Human Papillomavirus
GVEIGRGQPL

SEQ ID NO: 13134 - protein, 9 aa, Artificial Sequence
  Peptide Derived from Human Papillomavirus
GVGLSGHPF

SEQ ID NO: 13135 - protein, 10 aa, Artificial Sequence
  Peptide Derived from Human Papillomavirus
GVGLSGHPFY

SEQ ID NO: 13136 - protein, 10 aa, Artificial Sequence
  Peptide Derived from Human Papillomavirus
GVPPPPTTSL

SEQ ID NO: 13137 - protein, 10 aa, Artificial Sequence
  Peptide Derived from Human Papillomavirus
GYGAMDFSTL

SEQ ID NO: 13138 - protein, 9 aa, Artificial Sequence
  Peptide Derived from Human Papillomavirus
HFWNRAGTM

SEQ ID NO: 13139 - protein, 8 aa, Artificial Sequence
  Peptide Derived from Human Papillomavirus
HIIICGHY

SEQ ID NO: 13140 - protein, 9 aa, Artificial Sequence
  Peptide Derived from Human Papillomavirus
HIIICGHYI

SEQ ID NO: 13141 - protein, 10 aa, Artificial Sequence
  Peptide Derived from Human Papillomavirus
HIIICGHYII

SEQ ID NO: 13142 - protein, 11 aa, Artificial Sequence
  Peptide Derived from Human Papillomavirus
HIIICGHYIIL

SEQ ID NO: 13143 - protein, 9 aa, Artificial Sequence
  Peptide Derived from Human Papillomavirus
HLLPLYGPL

SEQ ID NO: 13144 - protein, 10 aa, Artificial Sequence
  Peptide Derived from Human Papillomavirus
HLLPLYGPLY

SEQ ID NO: 13145 - protein, 9 aa, Artificial Sequence
  Peptide Derived from Human Papillomavirus
HVEEYDLQF

SEQ ID NO: 13146 - protein, 10 aa, Artificial Sequence
  Peptide Derived from Human Papillomavirus
HVEEYDLQFI

SEQ ID NO: 13147 - protein, 11 aa, Artificial Sequence
  Peptide Derived from Human Papillomavirus
HVEEYDLQFIF

SEQ ID NO: 13148 - protein, 8 aa, Artificial Sequence
  Peptide Derived from Human Papillomavirus
HYHLLPLY

SEQ ID NO: 13149 - protein, 11 aa, Artificial Sequence
  Peptide Derived from Human Papillomavirus
HYHLLPLYGPL

SEQ ID NO: 13150 - protein, 8 aa, Artificial Sequence
  Peptide Derived from Human Papillomavirus
IFLQMALW

SEQ ID NO: 13151 - protein, 9 aa, Artificial Sequence
  Peptide Derived from Human Papillomavirus
IFQLCTITL

SEQ ID NO: 13152 - protein, 10 aa, Artificial Sequence
  Peptide Derived from Human Papillomavirus
IFYHAGSSRL

SEQ ID NO: 13153 - protein, 11 aa, Artificial Sequence
  Peptide Derived from Human Papillomavirus
IFYHAGSSRLL

SEQ ID NO: 13154 - protein, 8 aa, Artificial Sequence
  Peptide Derived from Human Papillomavirus
IICGHYII

SEQ ID NO: 13155 - protein, 9 aa, Artificial Sequence
  Peptide Derived from Human Papillomavirus
IICGHYIIL

SEQ ID NO: 13156 - protein, 10 aa, Artificial Sequence
  Peptide Derived from Human Papillomavirus
IICGHYIILF

SEQ ID NO: 13157 - protein, 11 aa, Artificial Sequence
  Peptide Derived from Human Papillomavirus
IICGHYIILFL

SEQ ID NO: 13158 - protein, 8 aa, Artificial Sequence
  Peptide Derived from Human Papillomavirus
IIICGHYI

SEQ ID NO: 13159 - protein, 9 aa, Artificial Sequence
  Peptide Derived from Human Papillomavirus
IIICGHYII

SEQ ID NO: 13160 - protein, 10 aa, Artificial Sequence
  Peptide Derived from Human Papillomavirus
IIICGHYIIL

SEQ ID NO: 13161 - protein, 11 aa, Artificial Sequence
  Peptide Derived from Human Papillomavirus
IIICGHYIILF

SEQ ID NO: 13162 - protein, 11 aa, Artificial Sequence
  Peptide Derived from Human Papillomavirus
IILFLRNVNVF

SEQ ID NO: 13163 - protein, 10 aa, Artificial Sequence
  Peptide Derived from Human Papillomavirus
ILFLRNVNVF

SEQ ID NO: 13164 - protein, 8 aa, Artificial Sequence
  Peptide Derived from Human Papillomavirus
ILGCAPAI

SEQ ID NO: 13165 - protein, 9 aa, Artificial Sequence
  Peptide Derived from Human Papillomavirus
ILHYHLLPL

SEQ ID NO: 13166 - protein, 10 aa, Artificial Sequence
  Peptide Derived from Human Papillomavirus
ILHYHLLPLY

SEQ ID NO: 13167 - protein, 8 aa, Artificial Sequence
  Peptide Derived from Human Papillomavirus
ILVYMVHI

SEQ ID NO: 13168 - protein, 9 aa, Artificial Sequence
  Peptide Derived from Human Papillomavirus
ILVYMVHII

SEQ ID NO: 13169 - protein, 10 aa, Artificial Sequence
  Peptide Derived from Human Papillomavirus
ILVYMVHIII

SEQ ID NO: 13170 - protein, 8 aa, Artificial Sequence
  Peptide Derived from Human Papillomavirus
ITLTADVM

SEQ ID NO: 13171 - protein, 10 aa, Artificial Sequence
  Peptide Derived from Human Papillomavirus
ITLTADVMSY

SEQ ID NO: 13172 - protein, 11 aa, Artificial Sequence
  Peptide Derived from Human Papillomavirus
ITLTADVMSYI

SEQ ID NO: 13173 - protein, 8 aa, Artificial Sequence
  Peptide Derived from Human Papillomavirus
IVTSDSQL

SEQ ID NO: 13174 - protein, 9 aa, Artificial Sequence
  Peptide Derived from Human Papillomavirus
IVTSDSQLF

SEQ ID NO: 13175 - protein, 9 aa, Artificial Sequence
  Peptide Derived from Human Papillomavirus
IYNPETQRL

SEQ ID NO: 13176 - protein, 11 aa, Artificial Sequence
  Peptide Derived from Human Papillomavirus
IYNPETQRLVW

SEQ ID NO: 13177 - protein, 9 aa, Artificial Sequence
  Peptide Derived from Human Papillomavirus
KFGLPDTSI

SEQ ID NO: 13178 - protein, 10 aa, Artificial Sequence
  Peptide Derived from Human Papillomavirus
KFGLPDTSIY

SEQ ID NO: 13179 - protein, 8 aa, Artificial Sequence
  Peptide Derived from Human Papillomavirus
KFLVQAGL

SEQ ID NO: 13180 - protein, 9 aa, Artificial Sequence
  Peptide Derived from Human Papillomavirus
KFSLDLDQY

SEQ ID NO: 13181 - protein, 11 aa, Artificial Sequence
  Peptide Derived from Human Papillomavirus
KFSLDLDQYPL

SEQ ID NO: 13182 - protein, 11 aa, Artificial Sequence
  Peptide Derived from Human Papillomavirus
KFWNVDLKEKF

SEQ ID NO: 13183 - protein, 9 aa, Artificial Sequence
  Peptide Derived from Human Papillomavirus
KLKFWNVDL

SEQ ID NO: 13184 - protein, 10 aa, Artificial Sequence
  Peptide Derived from Human Papillomavirus
KVSAYQYRVF

SEQ ID NO: 13185 - protein, 8 aa, Artificial Sequence
  Peptide Derived from Human Papillomavirus
KYPDYLQM

SEQ ID NO: 13186 - protein, 9 aa, Artificial Sequence
  Peptide Derived from Human Papillomavirus
LFLRNVNVF

SEQ ID NO: 13187 - protein, 11 aa, Artificial Sequence
  Peptide Derived from Human Papillomavirus
LFLRNVNVFPI

SEQ ID NO: 13188 - protein, 8 aa, Artificial Sequence
  Peptide Derived from Human Papillomavirus
LFNKPYWL

SEQ ID NO: 13189 - protein, 8 aa, Artificial Sequence
  Peptide Derived from Human Papillomavirus
LILHYHLL

SEQ ID NO: 13190 - protein, 10 aa, Artificial Sequence
  Peptide Derived from Human Papillomavirus
LILHYHLLPL

SEQ ID NO: 13191 - protein, 11 aa, Artificial Sequence
  Peptide Derived from Human Papillomavirus
LILHYHLLPLY

SEQ ID NO: 13192 - protein, 8 aa, Artificial Sequence
  Peptide Derived from Human Papillomavirus
LLPLYGPL

SEQ ID NO: 13193 - protein, 9 aa, Artificial Sequence
  Peptide Derived from Human Papillomavirus
LLPLYGPLY

SEQ ID NO: 13194 - protein, 8 aa, Artificial Sequence
  Peptide Derived from Human Papillomavirus
LLTVGNPY

SEQ ID NO: 13195 - protein, 9 aa, Artificial Sequence
  Peptide Derived from Human Papillomavirus
LLTVGNPYF

SEQ ID NO: 13196 - protein, 8 aa, Artificial Sequence
  Peptide Derived from Human Papillomavirus
LTADVMSY

SEQ ID NO: 13197 - protein, 9 aa, Artificial Sequence
  Peptide Derived from Human Papillomavirus
LTADVMSYI

SEQ ID NO: 13198 - protein, 8 aa, Artificial Sequence
  Peptide Derived from Human Papillomavirus
LTVGNPYF

SEQ ID NO: 13199 - protein, 10 aa, Artificial Sequence
  Peptide Derived from Human Papillomavirus
LVWACAGVEI

SEQ ID NO: 13200 - protein, 8 aa, Artificial Sequence
  Peptide Derived from Human Papillomavirus
LVYMVHII

SEQ ID NO: 13201 - protein, 9 aa, Artificial Sequence
  Peptide Derived from Human Papillomavirus
LVYMVHIII

SEQ ID NO: 13202 - protein, 10 aa, Artificial Sequence
  Peptide Derived from Human Papillomavirus
LWRPSDNTVY

SEQ ID NO: 13203 - protein, 11 aa, Artificial Sequence
  Peptide Derived from Human Papillomavirus
LWRPSDNTVYL

SEQ ID NO: 13204 - protein, 11 aa, Artificial Sequence
  Peptide Derived from Human Papillomavirus
LYGPLYHPRPL

SEQ ID NO: 13205 - protein, 9 aa, Artificial Sequence
  Peptide Derived from Human Papillomavirus
LYHPRPLPL

SEQ ID NO: 13206 - protein, 8 aa, Artificial Sequence
  Peptide Derived from Human Papillomavirus
LYIKGTGM

SEQ ID NO: 13207 - protein, 8 aa, Artificial Sequence
  Peptide Derived from Human Papillomavirus
LYTRVLIL

SEQ ID NO: 13208 - protein, 10 aa, Artificial Sequence
  Peptide Derived from Human Papillomavirus
LYTRVLILHY

SEQ ID NO: 13209 - protein, 10 aa, Artificial Sequence
  Peptide Derived from Human Papillomavirus
MFFCLRREQL

SEQ ID NO: 13210 - protein, 11 aa, Artificial Sequence
  Peptide Derived from Human Papillomavirus
MFFCLRREQLF

SEQ ID NO: 13211 - protein, 9 aa, Artificial Sequence
  Peptide Derived from Human Papillomavirus
MVDTGYGAM

SEQ ID NO: 13212 - protein, 11 aa, Artificial Sequence
  Peptide Derived from Human Papillomavirus
MVDTGYGAMDF

SEQ ID NO: 13213 - protein, 10 aa, Artificial Sequence
  Peptide Derived from Human Papillomavirus
MVHIIICGHY

SEQ ID NO: 13214 - protein, 11 aa, Artificial Sequence
  Peptide Derived from Human Papillomavirus
MVHIIICGHYI

SEQ ID NO: 13215 - protein, 11 aa, Artificial Sequence
  Peptide Derived from Human Papillomavirus
NTDDYVTPTSI

SEQ ID NO: 13216 - protein, 9 aa, Artificial Sequence
  Peptide Derived from Human Papillomavirus
NTVLEDGDM

SEQ ID NO: 13217 - protein, 8 aa, Artificial Sequence
  Peptide Derived from Human Papillomavirus
NVDLKEKF

SEQ ID NO: 13218 - protein, 10 aa, Artificial Sequence
  Peptide Derived from Human Papillomavirus
NVDLKEKFSL

SEQ ID NO: 13219 - protein, 9 aa, Artificial Sequence
  Peptide Derived from Human Papillomavirus
NVFPIFLQM

SEQ ID NO: 13220 - protein, 11 aa, Artificial Sequence
  Peptide Derived from Human Papillomavirus
NVFPIFLQMAL

SEQ ID NO: 13221 - protein, 8 aa, Artificial Sequence
  Peptide Derived from Human Papillomavirus
NVNVFPIF

SEQ ID NO: 13222 - protein, 9 aa, Artificial Sequence
  Peptide Derived from Human Papillomavirus
NVNVFPIFL

SEQ ID NO: 13223 - protein, 11 aa, Artificial Sequence
  Peptide Derived from Human Papillomavirus
NVNVFPIFLQM

SEQ ID NO: 13224 - protein, 11 aa, Artificial Sequence
  Peptide Derived from Human Papillomavirus
NVSVDYKQTQL

SEQ ID NO: 13225 - protein, 8 aa, Artificial Sequence
  Peptide Derived from Human Papillomavirus
PIFLQMAL

SEQ ID NO: 13226 - protein, 9 aa, Artificial Sequence
  Peptide Derived from Human Papillomavirus
PIFLQMALW

SEQ ID NO: 13227 - protein, 8 aa, Artificial Sequence
  Peptide Derived from Human Papillomavirus
PLDICQSI

SEQ ID NO: 13228 - protein, 11 aa, Artificial Sequence
  Peptide Derived from Human Papillomavirus
PLDICQSICKY

SEQ ID NO: 13229 - protein, 9 aa, Artificial Sequence
  Peptide Derived from Human Papillomavirus
PLELKNTVL

SEQ ID NO: 13230 - protein, 11 aa, Artificial Sequence
  Peptide Derived from Human Papillomavirus
PLGVGLSGHPF

SEQ ID NO: 13231 - protein, 8 aa, Artificial Sequence
  Peptide Derived from Human Papillomavirus
PLHSILVY

SEQ ID NO: 13232 - protein, 9 aa, Artificial Sequence
  Peptide Derived from Human Papillomavirus
PLHSILVYM

SEQ ID NO: 13233 - protein, 8 aa, Artificial Sequence
  Peptide Derived from Human Papillomavirus
PLPLHSIL

SEQ ID NO: 13234 - protein, 10 aa, Artificial Sequence
  Peptide Derived from Human Papillomavirus
PLPLHSILVY

SEQ ID NO: 13235 - protein, 11 aa, Artificial Sequence
  Peptide Derived from Human Papillomavirus
PLPLHSILVYM

SEQ ID NO: 13236 - protein, 10 aa, Artificial Sequence
  Peptide Derived from Human Papillomavirus
PLSQGDCPPL

SEQ ID NO: 13237 - protein, 8 aa, Artificial Sequence
  Peptide Derived from Human Papillomavirus
PLYHPRPL

SEQ ID NO: 13238 - protein, 10 aa, Artificial Sequence
  Peptide Derived from Human Papillomavirus
PLYHPRPLPL

SEQ ID NO: 13239 - protein, 9 aa, Artificial Sequence
  Peptide Derived from Human Papillomavirus
PTTSLVDTY

SEQ ID NO: 13240 - protein, 11 aa, Artificial Sequence
  Peptide Derived from Human Papillomavirus
PTTSLVDTYRF

SEQ ID NO: 13241 - protein, 11 aa, Artificial Sequence
  Peptide Derived from Human Papillomavirus
PVPGQYDATKF

SEQ ID NO: 13242 - protein, 8 aa, Artificial Sequence
  Peptide Derived from Human Papillomavirus
PYDKLKFW

SEQ ID NO: 13243 - protein, 8 aa, Artificial Sequence
  Peptide Derived from Human Papillomavirus
PYGDSMFF

SEQ ID NO: 13244 - protein, 10 aa, Artificial Sequence
  Peptide Derived from Human Papillomavirus
PYGDSMFFCL

SEQ ID NO: 13245 - protein, 9 aa, Artificial Sequence
  Peptide Derived from Human Papillomavirus
QFIFQLCTI

SEQ ID NO: 13246 - protein, 11 aa, Artificial Sequence
  Peptide Derived from Human Papillomavirus
QFIFQLCTITL

SEQ ID NO: 13247 - protein, 11 aa, Artificial Sequence
  Peptide Derived from Human Papillomavirus
QLCILGCAPAI

SEQ ID NO: 13248 - protein, 8 aa, Artificial Sequence
  Peptide Derived from Human Papillomavirus
QLFARHFW

SEQ ID NO: 13249 - protein, 8 aa, Artificial Sequence
  Peptide Derived from Human Papillomavirus
QLFNKPYW

SEQ ID NO: 13250 - protein, 9 aa, Artificial Sequence
  Peptide Derived from Human Papillomavirus
QLFNKPYWL

SEQ ID NO: 13251 - protein, 8 aa, Artificial Sequence
  Peptide Derived from Human Papillomavirus
QLPDPNKF

SEQ ID NO: 13252 - protein, 10 aa, Artificial Sequence
  Peptide Derived from Human Papillomavirus
QLPDPNKFGL

SEQ ID NO: 13253 - protein, 11 aa, Artificial Sequence
  Peptide Derived from Human Papillomavirus
QMSADPYGDSM

SEQ ID NO: 13254 - protein, 10 aa, Artificial Sequence
  Peptide Derived from Human Papillomavirus
QYDATKFKQY

SEQ ID NO: 13255 - protein, 8 aa, Artificial Sequence
  Peptide Derived from Human Papillomavirus
QYPLGRKF

SEQ ID NO: 13256 - protein, 9 aa, Artificial Sequence
  Peptide Derived from Human Papillomavirus
QYPLGRKFL

SEQ ID NO: 13257 - protein, 9 aa, Artificial Sequence
  Peptide Derived from Human Papillomavirus
QYRVFRVQL

SEQ ID NO: 13258 - protein, 9 aa, Artificial Sequence
  Peptide Derived from Human Papillomavirus
QYSRHVEEY

SEQ ID NO: 13259 - protein, 11 aa, Artificial Sequence
  Peptide Derived from Human Papillomavirus
QYSRHVEEYDL

SEQ ID NO: 13260 - protein, 8 aa, Artificial Sequence
  Peptide Derived from Human Papillomavirus
RFVQSVAI

SEQ ID NO: 13261 - protein, 9 aa, Artificial Sequence
  Peptide Derived from Human Papillomavirus
RLLTVGNPY

SEQ ID NO: 13262 - protein, 10 aa, Artificial Sequence
  Peptide Derived from Human Papillomavirus
RLLTVGNPYF

SEQ ID NO: 13263 - protein, 11 aa, Artificial Sequence
  Peptide Derived from Human Papillomavirus
RLVWACAGVEI

SEQ ID NO: 13264 - protein, 9 aa, Artificial Sequence
  Peptide Derived from Human Papillomavirus
RVLILHYHL

SEQ ID NO: 13265 - protein, 10 aa, Artificial Sequence
  Peptide Derived from Human Papillomavirus
RVLILHYHLL

SEQ ID NO: 13266 - protein, 10 aa, Artificial Sequence
  Peptide Derived from Human Papillomavirus
RVQLPDPNKF

SEQ ID NO: 13267 - protein, 8 aa, Artificial Sequence
  Peptide Derived from Human Papillomavirus
RVVNTDDY

SEQ ID NO: 13268 - protein, 8 aa, Artificial Sequence
  Peptide Derived from Human Papillomavirus
SICKYPDY

SEQ ID NO: 13269 - protein, 9 aa, Artificial Sequence
  Peptide Derived from Human Papillomavirus
SICKYPDYL

SEQ ID NO: 13270 - protein, 11 aa, Artificial Sequence
  Peptide Derived from Human Papillomavirus
SICKYPDYLQM

SEQ ID NO: 13271 - protein, 11 aa, Artificial Sequence
  Peptide Derived from Human Papillomavirus
SIFYHAGSSRL

SEQ ID NO: 13272 - protein, 8 aa, Artificial Sequence
  Peptide Derived from Human Papillomavirus
SILEDWNF

SEQ ID NO: 13273 - protein, 9 aa, Artificial Sequence
  Peptide Derived from Human Papillomavirus
SILVYMVHI

SEQ ID NO: 13274 - protein, 10 aa, Artificial Sequence
  Peptide Derived from Human Papillomavirus
SILVYMVHII

SEQ ID NO: 13275 - protein, 11 aa, Artificial Sequence
  Peptide Derived from Human Papillomavirus
SILVYMVHIII

SEQ ID NO: 13276 - protein, 9 aa, Artificial Sequence
  Peptide Derived from Human Papillomavirus
SIVTSDSQL

SEQ ID NO: 13277 - protein, 10 aa, Artificial Sequence
  Peptide Derived from Human Papillomavirus
SIVTSDSQLF

SEQ ID NO: 13278 - protein, 10 aa, Artificial Sequence
  Peptide Derived from Human Papillomavirus
SIYNPETQRL

SEQ ID NO: 13279 - protein, 9 aa, Artificial Sequence
  Peptide Derived from Human Papillomavirus
SLDLDQYPL

SEQ ID NO: 13280 - protein, 8 aa, Artificial Sequence
  Peptide Derived from Human Papillomavirus
SLVDTYRF

SEQ ID NO: 13281 - protein, 9 aa, Artificial Sequence
  Peptide Derived from Human Papillomavirus
SLYIKGTGM

SEQ ID NO: 13282 - protein, 11 aa, Artificial Sequence
  Peptide Derived from Human Papillomavirus
SMFFCLRREQL

SEQ ID NO: 13283 - protein, 10 aa, Artificial Sequence
  Peptide Derived from Human Papillomavirus
SMNSSILEDW

SEQ ID NO: 13284 - protein, 10 aa, Artificial Sequence
  Peptide Derived from Human Papillomavirus
STQSPVPGQY

SEQ ID NO: 13285 - protein, 11 aa, Artificial Sequence
  Peptide Derived from Human Papillomavirus
SVARVVNTDDY

SEQ ID NO: 13286 - protein, 9 aa, Artificial Sequence
  Peptide Derived from Human Papillomavirus
SVDYKQTQL

SEQ ID NO: 13287 - protein, 11 aa, Artificial Sequence
  Peptide Derived from Human Papillomavirus
SVDYKQTQLCI

SEQ ID NO: 13288 - protein, 10 aa, Artificial Sequence
  Peptide Derived from Human Papillomavirus
SYIHSMNSSI

SEQ ID NO: 13289 - protein, 11 aa, Artificial Sequence
  Peptide Derived from Human Papillomavirus
SYIHSMNSSIL

SEQ ID NO: 13290 - protein, 9 aa, Artificial Sequence
  Peptide Derived from Human Papillomavirus
TITLTADVM

SEQ ID NO: 13291 - protein, 11 aa, Artificial Sequence
  Peptide Derived from Human Papillomavirus
TITLTADVMSY

SEQ ID NO: 13292 - protein, 11 aa, Artificial Sequence
  Peptide Derived from Human Papillomavirus
TLQDTKCEVPL

SEQ ID NO: 13293 - protein, 9 aa, Artificial Sequence
  Peptide Derived from Human Papillomavirus
TLTADVMSY

SEQ ID NO: 13294 - protein, 10 aa, Artificial Sequence
  Peptide Derived from Human Papillomavirus
TLTADVMSYI

SEQ ID NO: 13295 - protein, 10 aa, Artificial Sequence
  Peptide Derived from Human Papillomavirus
TMGDTVPQSL

SEQ ID NO: 13296 - protein, 11 aa, Artificial Sequence
  Peptide Derived from Human Papillomavirus
TMGDTVPQSLY

SEQ ID NO: 13297 - protein, 9 aa, Artificial Sequence
  Peptide Derived from Human Papillomavirus
TTPSTNLTI

SEQ ID NO: 13298 - protein, 8 aa, Artificial Sequence
  Peptide Derived from Human Papillomavirus
TTSLVDTY

SEQ ID NO: 13299 - protein, 10 aa, Artificial Sequence
  Peptide Derived from Human Papillomavirus
TTSLVDTYRF

SEQ ID NO: 13300 - protein, 8 aa, Artificial Sequence
  Peptide Derived from Human Papillomavirus
TVLEDGDM

SEQ ID NO: 13301 - protein, 8 aa, Artificial Sequence
  Peptide Derived from Human Papillomavirus
TVPQSLYI

SEQ ID NO: 13302 - protein, 11 aa, Artificial Sequence
  Peptide Derived from Human Papillomavirus
TVVDTTPSTNL

SEQ ID NO: 13303 - protein, 10 aa, Artificial Sequence
  Peptide Derived from Human Papillomavirus
TYRFVQSVAI

SEQ ID NO: 13304 - protein, 8 aa, Artificial Sequence
  Peptide Derived from Human Papillomavirus
VFPIFLQM

SEQ ID NO: 13305 - protein, 10 aa, Artificial Sequence
  Peptide Derived from Human Papillomavirus
VFPIFLQMAL

SEQ ID NO: 13306 - protein, 11 aa, Artificial Sequence
  Peptide Derived from Human Papillomavirus
VFPIFLQMALW

SEQ ID NO: 13307 - protein, 8 aa, Artificial Sequence
  Peptide Derived from Human Papillomavirus
VLILHYHL

SEQ ID NO: 13308 - protein, 9 aa, Artificial Sequence
  Peptide Derived from Human Papillomavirus
VLILHYHLL

SEQ ID NO: 13309 - protein, 11 aa, Artificial Sequence
  Peptide Derived from Human Papillomavirus
VLILHYHLLPL

SEQ ID NO: 13310 - protein, 8 aa, Artificial Sequence
  Peptide Derived from Human Papillomavirus
VMSYIHSM

SEQ ID NO: 13311 - protein, 8 aa, Artificial Sequence
  Peptide Derived from Human Papillomavirus
VTPTSIFY

SEQ ID NO: 13312 - protein, 8 aa, Artificial Sequence
  Peptide Derived from Human Papillomavirus
VTSDSQLF

SEQ ID NO: 13313 - protein, 10 aa, Artificial Sequence
  Peptide Derived from Human Papillomavirus
VVDTTPSTNL

SEQ ID NO: 13314 - protein, 9 aa, Artificial Sequence
  Peptide Derived from Human Papillomavirus
VWACAGVEI

SEQ ID NO: 13315 - protein, 8 aa, Artificial Sequence
  Peptide Derived from Human Papillomavirus
VYMVHIII

SEQ ID NO: 13316 - protein, 10 aa, Artificial Sequence
  Peptide Derived from Human Papillomavirus
VYSPSPSGSI

SEQ ID NO: 13317 - protein, 9 aa, Artificial Sequence
  Peptide Derived from Human Papillomavirus
YIHSMNSSI

SEQ ID NO: 13318 - protein, 10 aa, Artificial Sequence
  Peptide Derived from Human Papillomavirus
YIHSMNSSIL

SEQ ID NO: 13319 - protein, 9 aa, Artificial Sequence
  Peptide Derived from Human Papillomavirus
YLQMSADPY

SEQ ID NO: 13320 - protein, 11 aa, Artificial Sequence
  Peptide Derived from Human Papillomavirus
YMVHIIICGHY

SEQ ID NO: 13321 - protein, 9 aa, Artificial Sequence
  Peptide Derived from Human Papillomavirus
YTRVLILHY

SEQ ID NO: 13322 - protein, 11 aa, Artificial Sequence
  Peptide Derived from Human Papillomavirus
YTRVLILHYHL

SEQ ID NO: 13323 - protein, 8 aa, Artificial Sequence
  Peptide Derived from Human Papillomavirus
YVTPTSIF

SEQ ID NO: 13324 - protein, 9 aa, Artificial Sequence
  Peptide Derived from Human Papillomavirus
YVTPTSIFY

SEQ ID NO: 13325 - protein, 9 aa, Artificial Sequence
  Peptide Derived from Human Papillomavirus
AFEPVDTTL

SEQ ID NO: 13326 - protein, 11 aa, Artificial Sequence
  Peptide Derived from Human Papillomavirus
AFEPVDTTLTF

SEQ ID NO: 13327 - protein, 9 aa, Artificial Sequence
  Peptide Derived from Human Papillomavirus
AFFKYSPTI

SEQ ID NO: 13328 - protein, 8 aa, Artificial Sequence
  Peptide Derived from Human Papillomavirus
AFSDPSII

SEQ ID NO: 13329 - protein, 11 aa, Artificial Sequence
  Peptide Derived from Human Papillomavirus
ALTSRRGTVRF

SEQ ID NO: 13330 - protein, 8 aa, Artificial Sequence
  Peptide Derived from Human Papillomavirus
ATEDNDLF

SEQ ID NO: 13331 - protein, 10 aa, Artificial Sequence
  Peptide Derived from Human Papillomavirus
ATEDNDLFDI

SEQ ID NO: 13332 - protein, 11 aa, Artificial Sequence
  Peptide Derived from Human Papillomavirus
ATEDNDLFDIY

SEQ ID NO: 13333 - protein, 11 aa, Artificial Sequence
  Peptide Derived from Human Papillomavirus
ATMFTRSGTQI

SEQ ID NO: 13334 - protein, 8 aa, Artificial Sequence
  Peptide Derived from Human Papillomavirus
DFMDIIRL

SEQ ID NO: 13335 - protein, 10 aa, Artificial Sequence
  Peptide Derived from Human Papillomavirus
DIIRLHRPAL

SEQ ID NO: 13336 - protein, 11 aa, Artificial Sequence
  Peptide Derived from Human Papillomavirus
DISPIAPSPEY

SEQ ID NO: 13337 - protein, 11 aa, Artificial Sequence
  Peptide Derived from Human Papillomavirus
DITLPSTTSVW

SEQ ID NO: 13338 - protein, 11 aa, Artificial Sequence
  Peptide Derived from Human Papillomavirus
DITPSSTSVSI

SEQ ID NO: 13339 - protein, 10 aa, Artificial Sequence
  Peptide Derived from Human Papillomavirus
DLFDIYADDM

SEQ ID NO: 13340 - protein, 11 aa, Artificial Sequence
  Peptide Derived from Human Papillomavirus
DVGPTRPPVVI

SEQ ID NO: 13341 - protein, 8 aa, Artificial Sequence
  Peptide Derived from Human Papillomavirus
DVPDSDFM

SEQ ID NO: 13342 - protein, 10 aa, Artificial Sequence
  Peptide Derived from Human Papillomavirus
DVPDSDFMDI

SEQ ID NO: 13343 - protein, 11 aa, Artificial Sequence
  Peptide Derived from Human Papillomavirus
DVPDSDFMDII

SEQ ID NO: 13344 - protein, 10 aa, Artificial Sequence
  Peptide Derived from Human Papillomavirus
DVPVYTGPDI

SEQ ID NO: 13345 - protein, 11 aa, Artificial Sequence
  Peptide Derived from Human Papillomavirus
DVVPKVEGTTL

SEQ ID NO: 13346 - protein, 9 aa, Artificial Sequence
  Peptide Derived from Human Papillomavirus
EFLTRPSSL

SEQ ID NO: 13347 - protein, 10 aa, Artificial Sequence
  Peptide Derived from Human Papillomavirus
EFLTRPSSLI

SEQ ID NO: 13348 - protein, 8 aa, Artificial Sequence
  Peptide Derived from Human Papillomavirus
EYIELQPL

SEQ ID NO: 13349 - protein, 8 aa, Artificial Sequence
  Peptide Derived from Human Papillomavirus
FFKYSPTI

SEQ ID NO: 13350 - protein, 11 aa, Artificial Sequence
  Peptide Derived from Human Papillomavirus
FIPKKRKRVPY

SEQ ID NO: 13351 - protein, 8 aa, Artificial Sequence
  Peptide Derived from Human Papillomavirus
FLTRPSSL

SEQ ID NO: 13352 - protein, 9 aa, Artificial Sequence
  Peptide Derived from Human Papillomavirus
FLTRPSSLI

SEQ ID NO: 13353 - protein, 11 aa, Artificial Sequence
  Peptide Derived from Human Papillomavirus
FLTRPSSLITY

SEQ ID NO: 13354 - protein, 9 aa, Artificial Sequence
  Peptide Derived from Human Papillomavirus
FTGTSGFDI

SEQ ID NO: 13355 - protein, 11 aa, Artificial Sequence
  Peptide Derived from Human Papillomavirus
FTNPAFSDPSI

SEQ ID NO: 13356 - protein, 8 aa, Artificial Sequence
  Peptide Derived from Human Papillomavirus
FTRSGTQI

SEQ ID NO: 13357 - protein, 8 aa, Artificial Sequence
  Peptide Derived from Human Papillomavirus
FYHDISPI

SEQ ID NO: 13358 - protein, 9 aa, Artificial Sequence
  Peptide Derived from Human Papillomavirus
GIFLGGLGI

SEQ ID NO: 13359 - protein, 8 aa, Artificial Sequence
  Peptide Derived from Human Papillomavirus
GIHGTHYY

SEQ ID NO: 13360 - protein, 9 aa, Artificial Sequence
  Peptide Derived from Human Papillomavirus
GIHGTHYYL

SEQ ID NO: 13361 - protein, 10 aa, Artificial Sequence
  Peptide Derived from Human Papillomavirus
GIHGTHYYLW

SEQ ID NO: 13362 - protein, 8 aa, Artificial Sequence
  Peptide Derived from Human Papillomavirus
GTGGRTGY

SEQ ID NO: 13363 - protein, 9 aa, Artificial Sequence
  Peptide Derived from Human Papillomavirus
GTGGRTGYI

SEQ ID NO: 13364 - protein, 11 aa, Artificial Sequence
  Peptide Derived from Human Papillomavirus
GTGGRTGYIPL

SEQ ID NO: 13365 - protein, 8 aa, Artificial Sequence
  Peptide Derived from Human Papillomavirus
GTHGYEEI

SEQ ID NO: 13366 - protein, 10 aa, Artificial Sequence
  Peptide Derived from Human Papillomavirus
GTHGYEEIPL

SEQ ID NO: 13367 - protein, 9 aa, Artificial Sequence
  Peptide Derived from Human Papillomavirus
GTHYYLWPL

SEQ ID NO: 13368 - protein, 10 aa, Artificial Sequence
  Peptide Derived from Human Papillomavirus
GTHYYLWPLY

SEQ ID NO: 13369 - protein, 11 aa, Artificial Sequence
  Peptide Derived from Human Papillomavirus
GTHYYLWPLYY

SEQ ID NO: 13370 - protein, 10 aa, Artificial Sequence
  Peptide Derived from Human Papillomavirus
GTPTSGTHGY

SEQ ID NO: 13371 - protein, 10 aa, Artificial Sequence
  Peptide Derived from Human Papillomavirus
GTQIGARVHF

SEQ ID NO: 13372 - protein, 11 aa, Artificial Sequence
  Peptide Derived from Human Papillomavirus
GTQIGARVHFY

SEQ ID NO: 13373 - protein, 8 aa, Artificial Sequence
  Peptide Derived from Human Papillomavirus
GTTLADKI

SEQ ID NO: 13374 - protein, 9 aa, Artificial Sequence
  Peptide Derived from Human Papillomavirus
GTTLADKIL

SEQ ID NO: 13375 - protein, 11 aa, Artificial Sequence
  Peptide Derived from Human Papillomavirus
GTTLADKILQW

SEQ ID NO: 13376 - protein, 8 aa, Artificial Sequence
  Peptide Derived from Human Papillomavirus
GTTTPAVL

SEQ ID NO: 13377 - protein, 10 aa, Artificial Sequence
  Peptide Derived from Human Papillomavirus
GTTTPAVLDI

SEQ ID NO: 13378 - protein, 8 aa, Artificial Sequence
  Peptide Derived from Human Papillomavirus
GTVRFSRL

SEQ ID NO: 13379 - protein, 10 aa, Artificial Sequence
  Peptide Derived from Human Papillomavirus
GYEEIPLQTF

SEQ ID NO: 13380 - protein, 9 aa, Artificial Sequence
  Peptide Derived from Human Papillomavirus
HFYHDISPI

SEQ ID NO: 13381 - protein, 8 aa, Artificial Sequence
  Peptide Derived from Human Papillomavirus
HYYLWPLY

SEQ ID NO: 13382 - protein, 9 aa, Artificial Sequence
  Peptide Derived from Human Papillomavirus
HYYLWPLYY

SEQ ID NO: 13383 - protein, 10 aa, Artificial Sequence
  Peptide Derived from Human Papillomavirus
HYYLWPLYYF

SEQ ID NO: 13384 - protein, 11 aa, Artificial Sequence
  Peptide Derived from Human Papillomavirus
HYYLWPLYYFI

SEQ ID NO: 13385 - protein, 8 aa, Artificial Sequence
  Peptide Derived from Human Papillomavirus
IFLGGLGI

SEQ ID NO: 13386 - protein, 9 aa, Artificial Sequence
  Peptide Derived from Human Papillomavirus
IIRLHRPAL

SEQ ID NO: 13387 - protein, 9 aa, Artificial Sequence
  Peptide Derived from Human Papillomavirus
ILQWSSLGI

SEQ ID NO: 13388 - protein, 10 aa, Artificial Sequence
  Peptide Derived from Human Papillomavirus
ILQWSSLGIF

SEQ ID NO: 13389 - protein, 11 aa, Artificial Sequence
  Peptide Derived from Human Papillomavirus
ILQWSSLGIFL

SEQ ID NO: 13390 - protein, 10 aa, Artificial Sequence
  Peptide Derived from Human Papillomavirus
ITLPSTTSVW

SEQ ID NO: 13391 - protein, 10 aa, Artificial Sequence
  Peptide Derived from Human Papillomavirus
ITPSSTSVSI

SEQ ID NO: 13392 - protein, 8 aa, Artificial Sequence
  Peptide Derived from Human Papillomavirus
ITYDNPAF

SEQ ID NO: 13393 - protein, 8 aa, Artificial Sequence
  Peptide Derived from Human Papillomavirus
KILQWSSL

SEQ ID NO: 13394 - protein, 10 aa, Artificial Sequence
  Peptide Derived from Human Papillomavirus
KILQWSSLGI

SEQ ID NO: 13395 - protein, 11 aa, Artificial Sequence
  Peptide Derived from Human Papillomavirus
KILQWSSLGIF

SEQ ID NO: 13396 - protein, 11 aa, Artificial Sequence
  Peptide Derived from Human Papillomavirus
KVEGTTLADKI

SEQ ID NO: 13397 - protein, 9 aa, Artificial Sequence
  Peptide Derived from Human Papillomavirus
LFDIYADDM

SEQ ID NO: 13398 - protein, 9 aa, Artificial Sequence
  Peptide Derived from Human Papillomavirus
LITYDNPAF

SEQ ID NO: 13399 - protein, 8 aa, Artificial Sequence
  Peptide Derived from Human Papillomavirus
LTRPSSLI

SEQ ID NO: 13400 - protein, 10 aa, Artificial Sequence
  Peptide Derived from Human Papillomavirus
LTRPSSLITY

SEQ ID NO: 13401 - protein, 10 aa, Artificial Sequence
  Peptide Derived from Human Papillomavirus
LTSRRGTVRF

SEQ ID NO: 13402 - protein, 10 aa, Artificial Sequence
  Peptide Derived from Human Papillomavirus
LTSSWDVPVY

SEQ ID NO: 13403 - protein, 10 aa, Artificial Sequence
  Peptide Derived from Human Papillomavirus
LVSATEDNDL

SEQ ID NO: 13404 - protein, 11 aa, Artificial Sequence
  Peptide Derived from Human Papillomavirus
LVSATEDNDLF

SEQ ID NO: 13405 - protein, 8 aa, Artificial Sequence
  Peptide Derived from Human Papillomavirus
LWPLYYFI

SEQ ID NO: 13406 - protein, 9 aa, Artificial Sequence
  Peptide Derived from Human Papillomavirus
MFTRSGTQI

SEQ ID NO: 13407 - protein, 10 aa, Artificial Sequence
  Peptide Derived from Human Papillomavirus
NVTVPLTSSW

SEQ ID NO: 13408 - protein, 8 aa, Artificial Sequence
  Peptide Derived from Human Papillomavirus
PIAPSPEY

SEQ ID NO: 13409 - protein, 9 aa, Artificial Sequence
  Peptide Derived from Human Papillomavirus
PIAPSPEYI

SEQ ID NO: 13410 - protein, 11 aa, Artificial Sequence
  Peptide Derived from Human Papillomavirus
PIAPSPEYIEL

SEQ ID NO: 13411 - protein, 11 aa, Artificial Sequence
  Peptide Derived from Human Papillomavirus
PLTSSWDVPVY

SEQ ID NO: 13412 - protein, 11 aa, Artificial Sequence
  Peptide Derived from Human Papillomavirus
PLVSATEDNDL

SEQ ID NO: 13413 - protein, 9 aa, Artificial Sequence
  Peptide Derived from Human Papillomavirus
PTAPASTQY

SEQ ID NO: 13414 - protein, 10 aa, Artificial Sequence
  Peptide Derived from Human Papillomavirus
PTAPASTQYI

SEQ ID NO: 13415 - protein, 9 aa, Artificial Sequence
  Peptide Derived from Human Papillomavirus
PTDPSIVTL

SEQ ID NO: 13416 - protein, 10 aa, Artificial Sequence
  Peptide Derived from Human Papillomavirus
PTDPSIVTLI

SEQ ID NO: 13417 - protein, 9 aa, Artificial Sequence
  Peptide Derived from Human Papillomavirus
PTFTGTSGF

SEQ ID NO: 13418 - protein, 11 aa, Artificial Sequence
  Peptide Derived from Human Papillomavirus
PTFTGTSGFDI

SEQ ID NO: 13419 - protein, 9 aa, Artificial Sequence
  Peptide Derived from Human Papillomavirus
PTISSASSY

SEQ ID NO: 13420 - protein, 8 aa, Artificial Sequence
  Peptide Derived from Human Papillomavirus
PTRPPVVI

SEQ ID NO: 13421 - protein, 8 aa, Artificial Sequence
  Peptide Derived from Human Papillomavirus
PTSGTHGY

SEQ ID NO: 13422 - protein, 11 aa, Artificial Sequence
  Peptide Derived from Human Papillomavirus
PTSGTHGYEEI

SEQ ID NO: 13423 - protein, 11 aa, Artificial Sequence
  Peptide Derived from Human Papillomavirus
PTVRRVAGPRL

SEQ ID NO: 13424 - protein, 8 aa, Artificial Sequence
  Peptide Derived from Human Papillomavirus
PVDTTLTF

SEQ ID NO: 13425 - protein, 9 aa, Artificial Sequence
  Peptide Derived from Human Papillomavirus
PVGPTDPSI

SEQ ID NO: 13426 - protein, 10 aa, Artificial Sequence
  Peptide Derived from Human Papillomavirus
PVPSRSTTSF

SEQ ID NO: 13427 - protein, 8 aa, Artificial Sequence
  Peptide Derived from Human Papillomavirus
PVYTGPDI

SEQ ID NO: 13428 - protein, 10 aa, Artificial Sequence
  Peptide Derived from Human Papillomavirus
PVYTGPDITL

SEQ ID NO: 13429 - protein, 8 aa, Artificial Sequence
  Peptide Derived from Human Papillomavirus
PYFFADGF

SEQ ID NO: 13430 - protein, 8 aa, Artificial Sequence
  Peptide Derived from Human Papillomavirus
QIGARVHF

SEQ ID NO: 13431 - protein, 9 aa, Artificial Sequence
  Peptide Derived from Human Papillomavirus
QIGARVHFY

SEQ ID NO: 13432 - protein, 10 aa, Artificial Sequence
  Peptide Derived from Human Papillomavirus
QTGEVAGNVF

SEQ ID NO: 13433 - protein, 9 aa, Artificial Sequence
  Peptide Derived from Human Papillomavirus
QVSVANPEF

SEQ ID NO: 13434 - protein, 10 aa, Artificial Sequence
  Peptide Derived from Human Papillomavirus
QVSVANPEFL

SEQ ID NO: 13435 - protein, 8 aa, Artificial Sequence
  Peptide Derived from Human Papillomavirus
QWSSLGIF

SEQ ID NO: 13436 - protein, 9 aa, Artificial Sequence
  Peptide Derived from Human Papillomavirus
QWSSLGIFL

SEQ ID NO: 13437 - protein, 10 aa, Artificial Sequence
  Peptide Derived from Human Papillomavirus
QYIGIHGTHY

SEQ ID NO: 13438 - protein, 11 aa, Artificial Sequence
  Peptide Derived from Human Papillomavirus
QYIGIHGTHYY

SEQ ID NO: 13439 - protein, 11 aa, Artificial Sequence
  Peptide Derived from Human Papillomavirus
RFSRLGQRATM

SEQ ID NO: 13440 - protein, 8 aa, Artificial Sequence
  Peptide Derived from Human Papillomavirus
RLGQRATM

SEQ ID NO: 13441 - protein, 9 aa, Artificial Sequence
  Peptide Derived from Human Papillomavirus
RLGQRATMF

SEQ ID NO: 13442 - protein, 8 aa, Artificial Sequence
  Peptide Derived from Human Papillomavirus
RVAGPRLY

SEQ ID NO: 13443 - protein, 8 aa, Artificial Sequence
  Peptide Derived from Human Papillomavirus
RVHFYHDI

SEQ ID NO: 13444 - protein, 11 aa, Artificial Sequence
  Peptide Derived from Human Papillomavirus
RVHFYHDISPI

SEQ ID NO: 13445 - protein, 10 aa, Artificial Sequence
  Peptide Derived from Human Papillomavirus
RVPYFFADGF

SEQ ID NO: 13446 - protein, 11 aa, Artificial Sequence
  Peptide Derived from Human Papillomavirus
SFAFFKYSPTI

SEQ ID NO: 13447 - protein, 9 aa, Artificial Sequence
  Peptide Derived from Human Papillomavirus
SLGIFLGGL

SEQ ID NO: 13448 - protein, 11 aa, Artificial Sequence
  Peptide Derived from Human Papillomavirus
SLGIFLGGLGI

SEQ ID NO: 13449 - protein, 10 aa, Artificial Sequence
  Peptide Derived from Human Papillomavirus
SLITYDNPAF

SEQ ID NO: 13450 - protein, 11 aa, Artificial Sequence
  Peptide Derived from Human Papillomavirus
STSVSISTTNF

SEQ ID NO: 13451 - protein, 10 aa, Artificial Sequence
  Peptide Derived from Human Papillomavirus
STTNFTNPAF

SEQ ID NO: 13452 - protein, 8 aa, Artificial Sequence
  Peptide Derived from Human Papillomavirus
STTSFAFF

SEQ ID NO: 13453 - protein, 10 aa, Artificial Sequence
  Peptide Derived from Human Papillomavirus
STTSFAFFKY

SEQ ID NO: 13454 - protein, 8 aa, Artificial Sequence
  Peptide Derived from Human Papillomavirus
STTSVWPI

SEQ ID NO: 13455 - protein, 8 aa, Artificial Sequence
  Peptide Derived from Human Papillomavirus
SVANPEFL

SEQ ID NO: 13456 - protein, 9 aa, Artificial Sequence
  Peptide Derived from Human Papillomavirus
SVSISTTNF

SEQ ID NO: 13457 - protein, 9 aa, Artificial Sequence
  Peptide Derived from Human Papillomavirus
SYSNVTVPL

SEQ ID NO: 13458 - protein, 8 aa, Artificial Sequence
  Peptide Derived from Human Papillomavirus
TFTGTSGF

SEQ ID NO: 13459 - protein, 10 aa, Artificial Sequence
  Peptide Derived from Human Papillomavirus
TFTGTSGFDI

SEQ ID NO: 13460 - protein, 8 aa, Artificial Sequence
  Peptide Derived from Human Papillomavirus
TISSASSY

SEQ ID NO: 13461 - protein, 9 aa, Artificial Sequence
  Peptide Derived from Human Papillomavirus
TLADKILQW

SEQ ID NO: 13462 - protein, 9 aa, Artificial Sequence
  Peptide Derived from Human Papillomavirus
TLPSTTSVW

SEQ ID NO: 13463 - protein, 11 aa, Artificial Sequence
  Peptide Derived from Human Papillomavirus
TLPSTTSVWPI

SEQ ID NO: 13464 - protein, 10 aa, Artificial Sequence
  Peptide Derived from Human Papillomavirus
TMFTRSGTQI

SEQ ID NO: 13465 - protein, 8 aa, Artificial Sequence
  Peptide Derived from Human Papillomavirus
TTLADKIL

SEQ ID NO: 13466 - protein, 10 aa, Artificial Sequence
  Peptide Derived from Human Papillomavirus
TTLADKILQW

SEQ ID NO: 13467 - protein, 9 aa, Artificial Sequence
  Peptide Derived from Human Papillomavirus
TTNFTNPAF

SEQ ID NO: 13468 - protein, 8 aa, Artificial Sequence
  Peptide Derived from Human Papillomavirus
TTPAVLDI

SEQ ID NO: 13469 - protein, 9 aa, Artificial Sequence
  Peptide Derived from Human Papillomavirus
TTSFAFFKY

SEQ ID NO: 13470 - protein, 9 aa, Artificial Sequence
  Peptide Derived from Human Papillomavirus
TTTPAVLDI

SEQ ID NO: 13471 - protein, 8 aa, Artificial Sequence
  Peptide Derived from Human Papillomavirus
TVPLTSSW

SEQ ID NO: 13472 - protein, 10 aa, Artificial Sequence
  Peptide Derived from Human Papillomavirus
TVRRVAGPRL

SEQ ID NO: 13473 - protein, 11 aa, Artificial Sequence
  Peptide Derived from Human Papillomavirus
TVRRVAGPRLY

SEQ ID NO: 13474 - protein, 10 aa, Artificial Sequence
  Peptide Derived from Human Papillomavirus
VTSGAPRPTF

SEQ ID NO: 13475 - protein, 9 aa, Artificial Sequence
  Peptide Derived from Human Papillomavirus
VTVPLTSSW

SEQ ID NO: 13476 - protein, 10 aa, Artificial Sequence
  Peptide Derived from Human Papillomavirus
VVPKVEGTTL

SEQ ID NO: 13477 - protein, 11 aa, Artificial Sequence
  Peptide Derived from Human Papillomavirus
VVTSGAPRPTF

SEQ ID NO: 13478 - protein, 9 aa, Artificial Sequence
  Peptide Derived from Human Papillomavirus
VYTGPDITL

SEQ ID NO: 13479 - protein, 9 aa, Artificial Sequence
  Peptide Derived from Human Papillomavirus
YIGIHGTHY

SEQ ID NO: 13480 - protein, 10 aa, Artificial Sequence
  Peptide Derived from Human Papillomavirus
YIGIHGTHYY

SEQ ID NO: 13481 - protein, 11 aa, Artificial Sequence
  Peptide Derived from Human Papillomavirus
YIGIHGTHYYL

SEQ ID NO: 13482 - protein, 8 aa, Artificial Sequence
  Peptide Derived from Human Papillomavirus
YLWPLYYF

SEQ ID NO: 13483 - protein, 9 aa, Artificial Sequence
  Peptide Derived from Human Papillomavirus
YLWPLYYFI

SEQ ID NO: 13484 - protein, 8 aa, Artificial Sequence
  Peptide Derived from Human Papillomavirus
YTGPDITL

SEQ ID NO: 13485 - protein, 8 aa, Artificial Sequence
  Peptide Derived from Human Papillomavirus
YYLWPLYY

SEQ ID NO: 13486 - protein, 9 aa, Artificial Sequence
  Peptide Derived from Human Papillomavirus
YYLWPLYYF

SEQ ID NO: 13487 - protein, 10 aa, Artificial Sequence
  Peptide Derived from Human Papillomavirus
YYLWPLYYFI

SEQ ID NO: 13488 - protein, 11 aa, Artificial Sequence
  Peptide Derived from Human Papillomavirus
AFLKSNSQAKI

SEQ ID NO: 13489 - protein, 9 aa, Artificial Sequence
  Peptide Derived from Human Papillomavirus
ALDGNPVSI

SEQ ID NO: 13490 - protein, 10 aa, Artificial Sequence
  Peptide Derived from Human Papillomavirus
ALMQLKCPPL

SEQ ID NO: 13491 - protein, 11 aa, Artificial Sequence
  Peptide Derived from Human Papillomavirus
ALMQLKCPPLL

SEQ ID NO: 13492 - protein, 9 aa, Artificial Sequence
  Peptide Derived from Human Papillomavirus
ALYWYRTGM

SEQ ID NO: 13493 - protein, 9 aa, Artificial Sequence
  Peptide Derived from Human Papillomavirus
AMLGKFKEL

SEQ ID NO: 13494 - protein, 10 aa, Artificial Sequence
  Peptide Derived from Human Papillomavirus
AMLGKFKELY

SEQ ID NO: 13495 - protein, 8 aa, Artificial Sequence
  Peptide Derived from Human Papillomavirus
ATTPCWHY

SEQ ID NO: 13496 - protein, 9 aa, Artificial Sequence
  Peptide Derived from Human Papillomavirus
ATTPCWHYI

SEQ ID NO: 13497 - protein, 11 aa, Artificial Sequence
  Peptide Derived from Human Papillomavirus
AVIDRQTGDNI

SEQ ID NO: 13498 - protein, 9 aa, Artificial Sequence
  Peptide Derived from Human Papillomavirus
AVQVLKRKY

SEQ ID NO: 13499 - protein, 8 aa, Artificial Sequence
  Peptide Derived from Human Papillomavirus
CISTNCML

SEQ ID NO: 13500 - protein, 9 aa, Artificial Sequence
  Peptide Derived from Human Papillomavirus
CISTNCMLI

SEQ ID NO: 13501 - protein, 9 aa, Artificial Sequence
  Peptide Derived from Human Papillomavirus
CLYCHLQSL

SEQ ID NO: 13502 - protein, 9 aa, Artificial Sequence
  Peptide Derived from Human Papillomavirus
CMLIQPPKL

SEQ ID NO: 13503 - protein, 9 aa, Artificial Sequence
  Peptide Derived from Human Papillomavirus
CTDWCVAAF

SEQ ID NO: 13504 - protein, 10 aa, Artificial Sequence
  Peptide Derived from Human Papillomavirus
CVDYNISPRL

SEQ ID NO: 13505 - protein, 10 aa, Artificial Sequence
  Peptide Derived from Human Papillomavirus
CVSGQNIRTL

SEQ ID NO: 13506 - protein, 8 aa, Artificial Sequence
  Peptide Derived from Human Papillomavirus
CWHYIDNY

SEQ ID NO: 13507 - protein, 9 aa, Artificial Sequence
  Peptide Derived from Human Papillomavirus
CWHYIDNYL

SEQ ID NO: 13508 - protein, 9 aa, Artificial Sequence
  Peptide Derived from Human Papillomavirus
DFIDNCNVY

SEQ ID NO: 13509 - protein, 8 aa, Artificial Sequence
  Peptide Derived from Human Papillomavirus
DISSCVDY

SEQ ID NO: 13510 - protein, 10 aa, Artificial Sequence
  Peptide Derived from Human Papillomavirus
DISSCVDYNI

SEQ ID NO: 13511 - protein, 8 aa, Artificial Sequence
  Peptide Derived from Human Papillomavirus
DIVKFLRY

SEQ ID NO: 13512 - protein, 11 aa, Artificial Sequence
  Peptide Derived from Human Papillomavirus
DIVKFLRYQQI

SEQ ID NO: 13513 - protein, 8 aa, Artificial Sequence
  Peptide Derived from Human Papillomavirus
DLSQMVQW

SEQ ID NO: 13514 - protein, 10 aa, Artificial Sequence
  Peptide Derived from Human Papillomavirus
DLSQMVQWAY

SEQ ID NO: 13515 - protein, 9 aa, Artificial Sequence
  Peptide Derived from Human Papillomavirus
DTGEDMVDF

SEQ ID NO: 13516 - protein, 10 aa, Artificial Sequence
  Peptide Derived from Human Papillomavirus
DTGEDMVDFI

SEQ ID NO: 13517 - protein, 9 aa, Artificial Sequence
  Peptide Derived from Human Papillomavirus
DTTFDLSQM

SEQ ID NO: 13518 - protein, 8 aa, Artificial Sequence
  Peptide Derived from Human Papillomavirus
DVKHKALM

SEQ ID NO: 13519 - protein, 10 aa, Artificial Sequence
  Peptide Derived from Human Papillomavirus
DVKHKALMQL

SEQ ID NO: 13520 - protein, 8 aa, Artificial Sequence
  Peptide Derived from Human Papillomavirus
DVMDDSEI

SEQ ID NO: 13521 - protein, 10 aa, Artificial Sequence
  Peptide Derived from Human Papillomavirus
DVMDDSEIAY

SEQ ID NO: 13522 - protein, 9 aa, Artificial Sequence
  Peptide Derived from Human Papillomavirus
DVYGETPEW

SEQ ID NO: 13523 - protein, 10 aa, Artificial Sequence
  Peptide Derived from Human Papillomavirus
DVYGETPEWI

SEQ ID NO: 13524 - protein, 8 aa, Artificial Sequence
  Peptide Derived from Human Papillomavirus
DWRDIVKF

SEQ ID NO: 13525 - protein, 9 aa, Artificial Sequence
  Peptide Derived from Human Papillomavirus
DWRDIVKFL

SEQ ID NO: 13526 - protein, 11 aa, Artificial Sequence
  Peptide Derived from Human Papillomavirus
DWRDIVKFLRY

SEQ ID NO: 13527 - protein, 8 aa, Artificial Sequence
  Peptide Derived from Human Papillomavirus
DYNISPRL

SEQ ID NO: 13528 - protein, 11 aa, Artificial Sequence
  Peptide Derived from Human Papillomavirus
DYNISPRLKAI

SEQ ID NO: 13529 - protein, 9 aa, Artificial Sequence
  Peptide Derived from Human Papillomavirus
EFVSFLSAL

SEQ ID NO: 13530 - protein, 11 aa, Artificial Sequence
  Peptide Derived from Human Papillomavirus
EFVSFLSALKL

SEQ ID NO: 13531 - protein, 9 aa, Artificial Sequence
  Peptide Derived from Human Papillomavirus
EIAYKYAQL

SEQ ID NO: 13532 - protein, 10 aa, Artificial Sequence
  Peptide Derived from Human Papillomavirus
ELSDKNWKSF

SEQ ID NO: 13533 - protein, 11 aa, Artificial Sequence
  Peptide Derived from Human Papillomavirus
ELSDKNWKSFF

SEQ ID NO: 13534 - protein, 8 aa, Artificial Sequence
  Peptide Derived from Human Papillomavirus
ELYGVSFM

SEQ ID NO: 13535 - protein, 10 aa, Artificial Sequence
  Peptide Derived from Human Papillomavirus
ELYGVSFMEL

SEQ ID NO: 13536 - protein, 11 aa, Artificial Sequence
  Peptide Derived from Human Papillomavirus
ELYGVSFMELI

SEQ ID NO: 13537 - protein, 8 aa, Artificial Sequence
  Peptide Derived from Human Papillomavirus
ETPTRNIL

SEQ ID NO: 13538 - protein, 11 aa, Artificial Sequence
  Peptide Derived from Human Papillomavirus
ETPTRNILQVL

SEQ ID NO: 13539 - protein, 9 aa, Artificial Sequence
  Peptide Derived from Human Papillomavirus
EWIERQTVL

SEQ ID NO: 13540 - protein, 9 aa, Artificial Sequence
  Peptide Derived from Human Papillomavirus
FFSRTWCRL

SEQ ID NO: 13541 - protein, 11 aa, Artificial Sequence
  Peptide Derived from Human Papillomavirus
FFSRTWCRLNL

SEQ ID NO: 13542 - protein, 8 aa, Artificial Sequence
  Peptide Derived from Human Papillomavirus
FIDNCNVY

SEQ ID NO: 13543 - protein, 11 aa, Artificial Sequence
  Peptide Derived from Human Papillomavirus
FLKGVPKKNCI

SEQ ID NO: 13544 - protein, 10 aa, Artificial Sequence
  Peptide Derived from Human Papillomavirus
FLKSNSQAKI

SEQ ID NO: 13545 - protein, 9 aa, Artificial Sequence
  Peptide Derived from Human Papillomavirus
FLQGCIISY

SEQ ID NO: 13546 - protein, 9 aa, Artificial Sequence
  Peptide Derived from Human Papillomavirus
FLRYQQIEF

SEQ ID NO: 13547 - protein, 8 aa, Artificial Sequence
  Peptide Derived from Human Papillomavirus
FLSALKLF

SEQ ID NO: 13548 - protein, 9 aa, Artificial Sequence
  Peptide Derived from Human Papillomavirus
FLSALKLFL

SEQ ID NO: 13549 - protein, 8 aa, Artificial Sequence
  Peptide Derived from Human Papillomavirus
FMELIRPF

SEQ ID NO: 13550 - protein, 9 aa, Artificial Sequence
  Peptide Derived from Human Papillomavirus
FTFPNPFPF

SEQ ID NO: 13551 - protein, 8 aa, Artificial Sequence
  Peptide Derived from Human Papillomavirus
FVSFLSAL

SEQ ID NO: 13552 - protein, 10 aa, Artificial Sequence
  Peptide Derived from Human Papillomavirus
FVSFLSALKL

SEQ ID NO: 13553 - protein, 11 aa, Artificial Sequence
  Peptide Derived from Human Papillomavirus
FVSFLSALKLF

SEQ ID NO: 13554 - protein, 11 aa, Artificial Sequence
  Peptide Derived from Human Papillomavirus
FWLQPLADAKI

SEQ ID NO: 13555 - protein, 9 aa, Artificial Sequence
  Peptide Derived from Human Papillomavirus
GFKTLLQPY

SEQ ID NO: 13556 - protein, 11 aa, Artificial Sequence
  Peptide Derived from Human Papillomavirus
GFKTLLQPYCL

SEQ ID NO: 13557 - protein, 11 aa, Artificial Sequence
  Peptide Derived from Human Papillomavirus
GMLDDATTPCW

SEQ ID NO: 13558 - protein, 8 aa, Artificial Sequence
  Peptide Derived from Human Papillomavirus
GMSLISFL

SEQ ID NO: 13559 - protein, 9 aa, Artificial Sequence
  Peptide Derived from Human Papillomavirus
GMSNISDVY

SEQ ID NO: 13560 - protein, 10 aa, Artificial Sequence
  Peptide Derived from Human Papillomavirus
GMVMLMLVRF

SEQ ID NO: 13561 - protein, 8 aa, Artificial Sequence
  Peptide Derived from Human Papillomavirus
GTGCNGWF

SEQ ID NO: 13562 - protein, 9 aa, Artificial Sequence
  Peptide Derived from Human Papillomavirus
GTGCNGWFY

SEQ ID NO: 13563 - protein, 10 aa, Artificial Sequence
  Peptide Derived from Human Papillomavirus
GTVAEGFKTL

SEQ ID NO: 13564 - protein, 11 aa, Artificial Sequence
  Peptide Derived from Human Papillomavirus
GTVAEGFKTLL

SEQ ID NO: 13565 - protein, 8 aa, Artificial Sequence
  Peptide Derived from Human Papillomavirus
GVPKKNCI

SEQ ID NO: 13566 - protein, 9 aa, Artificial Sequence
  Peptide Derived from Human Papillomavirus
GVPKKNCIL

SEQ ID NO: 13567 - protein, 10 aa, Artificial Sequence
  Peptide Derived from Human Papillomavirus
GVPKKNCILI

SEQ ID NO: 13568 - protein, 8 aa, Artificial Sequence
  Peptide Derived from Human Papillomavirus
GVSFMELI

SEQ ID NO: 13569 - protein, 11 aa, Artificial Sequence
  Peptide Derived from Human Papillomavirus
GVSFMELIRPF

SEQ ID NO: 13570 - protein, 10 aa, Artificial Sequence
  Peptide Derived from Human Papillomavirus
GVTGTVAEGF

SEQ ID NO: 13571 - protein, 9 aa, Artificial Sequence
  Peptide Derived from Human Papillomavirus
GWFYVEAVI

SEQ ID NO: 13572 - protein, 9 aa, Artificial Sequence
  Peptide Derived from Human Papillomavirus
HLQSLACSW

SEQ ID NO: 13573 - protein, 11 aa, Artificial Sequence
  Peptide Derived from Human Papillomavirus
HLQSLACSWGM

SEQ ID NO: 13574 - protein, 11 aa, Artificial Sequence
  Peptide Derived from Human Papillomavirus
HYIDNYLRNAL

SEQ ID NO: 13575 - protein, 10 aa, Artificial Sequence
  Peptide Derived from Human Papillomavirus
HYKRAEKRQM

SEQ ID NO: 13576 - protein, 11 aa, Artificial Sequence
  Peptide Derived from Human Papillomavirus
IISYANSKSHF

SEQ ID NO: 13577 - protein, 10 aa, Artificial Sequence
  Peptide Derived from Human Papillomavirus
ITIEKLLEKL

SEQ ID NO: 13578 - protein, 11 aa, Artificial Sequence
  Peptide Derived from Human Papillomavirus
ITIEKLLEKLL

SEQ ID NO: 13579 - protein, 8 aa, Artificial Sequence
  Peptide Derived from Human Papillomavirus
IVKDCGTM

SEQ ID NO: 13580 - protein, 10 aa, Artificial Sequence
  Peptide Derived from Human Papillomavirus
IVKFLRYQQI

SEQ ID NO: 13581 - protein, 10 aa, Artificial Sequence
  Peptide Derived from Human Papillomavirus
KFKELYGVSF

SEQ ID NO: 13582 - protein, 11 aa, Artificial Sequence
  Peptide Derived from Human Papillomavirus
KFKELYGVSFM

SEQ ID NO: 13583 - protein, 8 aa, Artificial Sequence
  Peptide Derived from Human Papillomavirus
KFLRYQQI

SEQ ID NO: 13584 - protein, 10 aa, Artificial Sequence
  Peptide Derived from Human Papillomavirus
KFLRYQQIEF

SEQ ID NO: 13585 - protein, 9 aa, Artificial Sequence
  Peptide Derived from Human Papillomavirus
KIVKDCGTM

SEQ ID NO: 13586 - protein, 10 aa, Artificial Sequence
  Peptide Derived from Human Papillomavirus
KLLCISTNCM

SEQ ID NO: 13587 - protein, 11 aa, Artificial Sequence
  Peptide Derived from Human Papillomavirus
KLLCISTNCML

SEQ ID NO: 13588 - protein, 9 aa, Artificial Sequence
  Peptide Derived from Human Papillomavirus
KLLEKLLCI

SEQ ID NO: 13589 - protein, 9 aa, Artificial Sequence
  Peptide Derived from Human Papillomavirus
KLRSTAAAL

SEQ ID NO: 13590 - protein, 10 aa, Artificial Sequence
  Peptide Derived from Human Papillomavirus
KLRSTAAALY

SEQ ID NO: 13591 - protein, 11 aa, Artificial Sequence
  Peptide Derived from Human Papillomavirus
KLRSTAAALYW

SEQ ID NO: 13592 - protein, 8 aa, Artificial Sequence
  Peptide Derived from Human Papillomavirus
KTAKRRLF

SEQ ID NO: 13593 - protein, 10 aa, Artificial Sequence
  Peptide Derived from Human Papillomavirus
KTAKRRLFEL

SEQ ID NO: 13594 - protein, 9 aa, Artificial Sequence
  Peptide Derived from Human Papillomavirus
KTLLQPYCL

SEQ ID NO: 13595 - protein, 10 aa, Artificial Sequence
  Peptide Derived from Human Papillomavirus
KTLLQPYCLY

SEQ ID NO: 13596 - protein, 9 aa, Artificial Sequence
  Peptide Derived from Human Papillomavirus
KTSNGKAAM

SEQ ID NO: 13597 - protein, 10 aa, Artificial Sequence
  Peptide Derived from Human Papillomavirus
KTSNGKAAML

SEQ ID NO: 13598 - protein, 8 aa, Artificial Sequence
  Peptide Derived from Human Papillomavirus
KVSDEGDW

SEQ ID NO: 13599 - protein, 11 aa, Artificial Sequence
  Peptide Derived from Human Papillomavirus
KVSDEGDWRDI

SEQ ID NO: 13600 - protein, 10 aa, Artificial Sequence
  Peptide Derived from Human Papillomavirus
KYVGSPLSDI

SEQ ID NO: 13601 - protein, 9 aa, Artificial Sequence
  Peptide Derived from Human Papillomavirus
LFELPDSGY

SEQ ID NO: 13602 - protein, 9 aa, Artificial Sequence
  Peptide Derived from Human Papillomavirus
LISFLQGCI

SEQ ID NO: 13603 - protein, 10 aa, Artificial Sequence
  Peptide Derived from Human Papillomavirus
LISFLQGCII

SEQ ID NO: 13604 - protein, 9 aa, Artificial Sequence
  Peptide Derived from Human Papillomavirus
LLCISTNCM

SEQ ID NO: 13605 - protein, 10 aa, Artificial Sequence
  Peptide Derived from Human Papillomavirus
LLCISTNCML

SEQ ID NO: 13606 - protein, 11 aa, Artificial Sequence
  Peptide Derived from Human Papillomavirus
LLCISTNCMLI

SEQ ID NO: 13607 - protein, 8 aa, Artificial Sequence
  Peptide Derived from Human Papillomavirus
LLEKLLCI

SEQ ID NO: 13608 - protein, 8 aa, Artificial Sequence
  Peptide Derived from Human Papillomavirus
LLQPYCLY

SEQ ID NO: 13609 - protein, 11 aa, Artificial Sequence
  Peptide Derived from Human Papillomavirus
LLQPYCLYCHL

SEQ ID NO: 13610 - protein, 9 aa, Artificial Sequence
  Peptide Derived from Human Papillomavirus
LMQLKCPPL

SEQ ID NO: 13611 - protein, 10 aa, Artificial Sequence
  Peptide Derived from Human Papillomavirus
LMQLKCPPLL

SEQ ID NO: 13612 - protein, 11 aa, Artificial Sequence
  Peptide Derived from Human Papillomavirus
LMQLKCPPLLI

SEQ ID NO: 13613 - protein, 11 aa, Artificial Sequence
  Peptide Derived from Human Papillomavirus
LVRFKCAKNRI

SEQ ID NO: 13614 - protein, 10 aa, Artificial Sequence
  Peptide Derived from Human Papillomavirus
LVVFTFPNPF

SEQ ID NO: 13615 - protein, 8 aa, Artificial Sequence
  Peptide Derived from Human Papillomavirus
LYCHLQSL

SEQ ID NO: 13616 - protein, 9 aa, Artificial Sequence
  Peptide Derived from Human Papillomavirus
LYGVSFMEL

SEQ ID NO: 13617 - protein, 10 aa, Artificial Sequence
  Peptide Derived from Human Papillomavirus
LYGVSFMELI

SEQ ID NO: 13618 - protein, 8 aa, Artificial Sequence
  Peptide Derived from Human Papillomavirus
LYWYRTGM

SEQ ID NO: 13619 - protein, 11 aa, Artificial Sequence
  Peptide Derived from Human Papillomavirus
LYWYRTGMSNI

SEQ ID NO: 13620 - protein, 10 aa, Artificial Sequence
  Peptide Derived from Human Papillomavirus
MLDDATTPCW

SEQ ID NO: 13621 - protein, 8 aa, Artificial Sequence
  Peptide Derived from Human Papillomavirus
MLGKFKEL

SEQ ID NO: 13622 - protein, 9 aa, Artificial Sequence
  Peptide Derived from Human Papillomavirus
MLGKFKELY

SEQ ID NO: 13623 - protein, 8 aa, Artificial Sequence
  Peptide Derived from Human Papillomavirus
MLIQPPKL

SEQ ID NO: 13624 - protein, 11 aa, Artificial Sequence
  Peptide Derived from Human Papillomavirus
MVDFIDNCNVY

SEQ ID NO: 13625 - protein, 9 aa, Artificial Sequence
  Peptide Derived from Human Papillomavirus
MVMLMLVRF

SEQ ID NO: 13626 - protein, 11 aa, Artificial Sequence
  Peptide Derived from Human Papillomavirus
MVQVEEQQTTL

SEQ ID NO: 13627 - protein, 11 aa, Artificial Sequence
  Peptide Derived from Human Papillomavirus
MVQWAYDNDVM

SEQ ID NO: 13628 - protein, 10 aa, Artificial Sequence
  Peptide Derived from Human Papillomavirus
NINAGKDDRW

SEQ ID NO: 13629 - protein, 9 aa, Artificial Sequence
  Peptide Derived from Human Papillomavirus
NISPRLKAI

SEQ ID NO: 13630 - protein, 11 aa, Artificial Sequence
  Peptide Derived from Human Papillomavirus
NISPRLKAICI

SEQ ID NO: 13631 - protein, 9 aa, Artificial Sequence
  Peptide Derived from Human Papillomavirus
NTEVETQQM

SEQ ID NO: 13632 - protein, 9 aa, Artificial Sequence
  Peptide Derived from Human Papillomavirus
NTGKSYFGM

SEQ ID NO: 13633 - protein, 11 aa, Artificial Sequence
  Peptide Derived from Human Papillomavirus
NTGKSYFGMSL

SEQ ID NO: 13634 - protein, 10 aa, Artificial Sequence
  Peptide Derived from Human Papillomavirus
NWKSFFSRTW

SEQ ID NO: 13635 - protein, 10 aa, Artificial Sequence
  Peptide Derived from Human Papillomavirus
PFDKNGNPVY

SEQ ID NO: 13636 - protein, 9 aa, Artificial Sequence
  Peptide Derived from Human Papillomavirus
PLADAKIGM

SEQ ID NO: 13637 - protein, 10 aa, Artificial Sequence
  Peptide Derived from Human Papillomavirus
PLADAKIGML

SEQ ID NO: 13638 - protein, 8 aa, Artificial Sequence
  Peptide Derived from Human Papillomavirus
PLLITSNI

SEQ ID NO: 13639 - protein, 11 aa, Artificial Sequence
  Peptide Derived from Human Papillomavirus
PLSDISSCVDY

SEQ ID NO: 13640 - protein, 9 aa, Artificial Sequence
  Peptide Derived from Human Papillomavirus
PTRNILQVL

SEQ ID NO: 13641 - protein, 11 aa, Artificial Sequence
  Peptide Derived from Human Papillomavirus
PVSIDVKHKAL

SEQ ID NO: 13642 - protein, 10 aa, Artificial Sequence
  Peptide Derived from Human Papillomavirus
PVYELSDKNW

SEQ ID NO: 13643 - protein, 8 aa, Artificial Sequence
  Peptide Derived from Human Papillomavirus
PYCLYCHL

SEQ ID NO: 13644 - protein, 11 aa, Artificial Sequence
  Peptide Derived from Human Papillomavirus
PYCLYCHLQSL

SEQ ID NO: 13645 - protein, 10 aa, Artificial Sequence
  Peptide Derived from Human Papillomavirus
PYLHSRLVVF

SEQ ID NO: 13646 - protein, 8 aa, Artificial Sequence
  Peptide Derived from Human Papillomavirus
QIEFVSFL

SEQ ID NO: 13647 - protein, 11 aa, Artificial Sequence
  Peptide Derived from Human Papillomavirus
QIEFVSFLSAL

SEQ ID NO: 13648 - protein, 8 aa, Artificial Sequence
  Peptide Derived from Human Papillomavirus
QLKCPPLL

SEQ ID NO: 13649 - protein, 9 aa, Artificial Sequence
  Peptide Derived from Human Papillomavirus
QLKCPPLLI

SEQ ID NO: 13650 - protein, 8 aa, Artificial Sequence
  Peptide Derived from Human Papillomavirus
QMSMGQWI

SEQ ID NO: 13651 - protein, 8 aa, Artificial Sequence
  Peptide Derived from Human Papillomavirus
QTVLQHSF

SEQ ID NO: 13652 - protein, 9 aa, Artificial Sequence
  Peptide Derived from Human Papillomavirus
QVEEQQTTL

SEQ ID NO: 13653 - protein, 9 aa, Artificial Sequence
  Peptide Derived from Human Papillomavirus
QWAYDNDVM

SEQ ID NO: 13654 - protein, 9 aa, Artificial Sequence
  Peptide Derived from Human Papillomavirus
RFKCAKNRI

SEQ ID NO: 13655 - protein, 11 aa, Artificial Sequence
  Peptide Derived from Human Papillomavirus
RFKCAKNRITI

SEQ ID NO: 13656 - protein, 8 aa, Artificial Sequence
  Peptide Derived from Human Papillomavirus
RITIEKLL

SEQ ID NO: 13657 - protein, 11 aa, Artificial Sequence
  Peptide Derived from Human Papillomavirus
RITIEKLLEKL

SEQ ID NO: 13658 - protein, 10 aa, Artificial Sequence
  Peptide Derived from Human Papillomavirus
RLFELPDSGY

SEQ ID NO: 13659 - protein, 11 aa, Artificial Sequence
  Peptide Derived from Human Papillomavirus
RLVVFTFPNPF

SEQ ID NO: 13660 - protein, 11 aa, Artificial Sequence
  Peptide Derived from Human Papillomavirus
RTGMSNISDVY

SEQ ID NO: 13661 - protein, 8 aa, Artificial Sequence
  Peptide Derived from Human Papillomavirus
RTWCRLNL

SEQ ID NO: 13662 - protein, 9 aa, Artificial Sequence
  Peptide Derived from Human Papillomavirus
RWPYLHSRL

SEQ ID NO: 13663 - protein, 10 aa, Artificial Sequence
  Peptide Derived from Human Papillomavirus
RYQQIEFVSF

SEQ ID NO: 13664 - protein, 11 aa, Artificial Sequence
  Peptide Derived from Human Papillomavirus
RYQQIEFVSFL

SEQ ID NO: 13665 - protein, 10 aa, Artificial Sequence
  Peptide Derived from Human Papillomavirus
SFFSRTWCRL

SEQ ID NO: 13666 - protein, 8 aa, Artificial Sequence
  Peptide Derived from Human Papillomavirus
SFLQGCII

SEQ ID NO: 13667 - protein, 10 aa, Artificial Sequence
  Peptide Derived from Human Papillomavirus
SFLQGCIISY

SEQ ID NO: 13668 - protein, 8 aa, Artificial Sequence
  Peptide Derived from Human Papillomavirus
SFLSALKL

SEQ ID NO: 13669 - protein, 9 aa, Artificial Sequence
  Peptide Derived from Human Papillomavirus
SFLSALKLF

SEQ ID NO: 13670 - protein, 10 aa, Artificial Sequence
  Peptide Derived from Human Papillomavirus
SFLSALKLFL

SEQ ID NO: 13671 - protein, 9 aa, Artificial Sequence
  Peptide Derived from Human Papillomavirus
SFMELIRPF

SEQ ID NO: 13672 - protein, 9 aa, Artificial Sequence
  Peptide Derived from Human Papillomavirus
SFNDTTFDL

SEQ ID NO: 13673 - protein, 9 aa, Artificial Sequence
  Peptide Derived from Human Papillomavirus
SIDVKHKAL

SEQ ID NO: 13674 - protein, 10 aa, Artificial Sequence
  Peptide Derived from Human Papillomavirus
SIDVKHKALM

SEQ ID NO: 13675 - protein, 8 aa, Artificial Sequence
  Peptide Derived from Human Papillomavirus
SLACSWGM

SEQ ID NO: 13676 - protein, 10 aa, Artificial Sequence
  Peptide Derived from Human Papillomavirus
SLACSWGMVM

SEQ ID NO: 13677 - protein, 11 aa, Artificial Sequence
  Peptide Derived from Human Papillomavirus
SLACSWGMVML

SEQ ID NO: 13678 - protein, 10 aa, Artificial Sequence
  Peptide Derived from Human Papillomavirus
SLISFLQGCI

SEQ ID NO: 13679 - protein, 11 aa, Artificial Sequence
  Peptide Derived from Human Papillomavirus
SLISFLQGCII

SEQ ID NO: 13680 - protein, 8 aa, Artificial Sequence
  Peptide Derived from Human Papillomavirus
STAAALYW

SEQ ID NO: 13681 - protein, 9 aa, Artificial Sequence
  Peptide Derived from Human Papillomavirus
STAAALYWY

SEQ ID NO: 13682 - protein, 11 aa, Artificial Sequence
  Peptide Derived from Human Papillomavirus
STCTDWCVAAF

SEQ ID NO: 13683 - protein, 11 aa, Artificial Sequence
  Peptide Derived from Human Papillomavirus
STFKCVSGQNI

SEQ ID NO: 13684 - protein, 8 aa, Artificial Sequence
  Peptide Derived from Human Papillomavirus
SWGMVMLM

SEQ ID NO: 13685 - protein, 9 aa, Artificial Sequence
  Peptide Derived from Human Papillomavirus
SWGMVMLML

SEQ ID NO: 13686 - protein, 9 aa, Artificial Sequence
  Peptide Derived from Human Papillomavirus
SYANSKSHF

SEQ ID NO: 13687 - protein, 10 aa, Artificial Sequence
  Peptide Derived from Human Papillomavirus
SYANSKSHFW

SEQ ID NO: 13688 - protein, 11 aa, Artificial Sequence
  Peptide Derived from Human Papillomavirus
SYANSKSHFWL

SEQ ID NO: 13689 - protein, 8 aa, Artificial Sequence
  Peptide Derived from Human Papillomavirus
SYFGMSLI

SEQ ID NO: 13690 - protein, 10 aa, Artificial Sequence
  Peptide Derived from Human Papillomavirus
SYFGMSLISF

SEQ ID NO: 13691 - protein, 11 aa, Artificial Sequence
  Peptide Derived from Human Papillomavirus
SYFGMSLISFL

SEQ ID NO: 13692 - protein, 10 aa, Artificial Sequence
  Peptide Derived from Human Papillomavirus
TFDLSQMVQW

SEQ ID NO: 13693 - protein, 10 aa, Artificial Sequence
  Peptide Derived from Human Papillomavirus
TFKCVSGQNI

SEQ ID NO: 13694 - protein, 8 aa, Artificial Sequence
  Peptide Derived from Human Papillomavirus
TFPNPFPF

SEQ ID NO: 13695 - protein, 9 aa, Artificial Sequence
  Peptide Derived from Human Papillomavirus
TIEKLLEKL

SEQ ID NO: 13696 - protein, 10 aa, Artificial Sequence
  Peptide Derived from Human Papillomavirus
TIEKLLEKLL

SEQ ID NO: 13697 - protein, 8 aa, Artificial Sequence
  Peptide Derived from Human Papillomavirus
TLLQPYCL

SEQ ID NO: 13698 - protein, 9 aa, Artificial Sequence
  Peptide Derived from Human Papillomavirus
TLLQPYCLY

SEQ ID NO: 13699 - protein, 8 aa, Artificial Sequence
  Peptide Derived from Human Papillomavirus
TTFDLSQM

SEQ ID NO: 13700 - protein, 11 aa, Artificial Sequence
  Peptide Derived from Human Papillomavirus
TTFDLSQMVQW

SEQ ID NO: 13701 - protein, 8 aa, Artificial Sequence
  Peptide Derived from Human Papillomavirus
TTPCWHYI

SEQ ID NO: 13702 - protein, 11 aa, Artificial Sequence
  Peptide Derived from Human Papillomavirus
TTPCWHYIDNY

SEQ ID NO: 13703 - protein, 9 aa, Artificial Sequence
  Peptide Derived from Human Papillomavirus
TVAEGFKTL

SEQ ID NO: 13704 - protein, 10 aa, Artificial Sequence
  Peptide Derived from Human Papillomavirus
TVAEGFKTLL

SEQ ID NO: 13705 - protein, 8 aa, Artificial Sequence
  Peptide Derived from Human Papillomavirus
VFTFPNPF

SEQ ID NO: 13706 - protein, 10 aa, Artificial Sequence
  Peptide Derived from Human Papillomavirus
VFTFPNPFPF

SEQ ID NO: 13707 - protein, 10 aa, Artificial Sequence
  Peptide Derived from Human Papillomavirus
VIDRQTGDNI

SEQ ID NO: 13708 - protein, 11 aa, Artificial Sequence
  Peptide Derived from Human Papillomavirus
VLKRKYVGSPL

SEQ ID NO: 13709 - protein, 11 aa, Artificial Sequence
  Peptide Derived from Human Papillomavirus
VLKTSNGKAAM

SEQ ID NO: 13710 - protein, 11 aa, Artificial Sequence
  Peptide Derived from Human Papillomavirus
VLQHSFNDTTF

SEQ ID NO: 13711 - protein, 9 aa, Artificial Sequence
  Peptide Derived from Human Papillomavirus
VMDDSEIAY

SEQ ID NO: 13712 - protein, 11 aa, Artificial Sequence
  Peptide Derived from Human Papillomavirus
VMDDSEIAYKY

SEQ ID NO: 13713 - protein, 8 aa, Artificial Sequence
  Peptide Derived from Human Papillomavirus
VMLMLVRF

SEQ ID NO: 13714 - protein, 9 aa, Artificial Sequence
  Peptide Derived from Human Papillomavirus
VTGTVAEGF

SEQ ID NO: 13715 - protein, 9 aa, Artificial Sequence
  Peptide Derived from Human Papillomavirus
VVFTFPNPF

SEQ ID NO: 13716 - protein, 11 aa, Artificial Sequence
  Peptide Derived from Human Papillomavirus
VVFTFPNPFPF

SEQ ID NO: 13717 - protein, 9 aa, Artificial Sequence
  Peptide Derived from Human Papillomavirus
VYELSDKNW

SEQ ID NO: 13718 - protein, 8 aa, Artificial Sequence
  Peptide Derived from Human Papillomavirus
VYGETPEW

SEQ ID NO: 13719 - protein, 9 aa, Artificial Sequence
  Peptide Derived from Human Papillomavirus
VYGETPEWI

SEQ ID NO: 13720 - protein, 8 aa, Artificial Sequence
  Peptide Derived from Human Papillomavirus
WFYVEAVI

SEQ ID NO: 13721 - protein, 8 aa, Artificial Sequence
  Peptide Derived from Human Papillomavirus
WIERQTVL

SEQ ID NO: 13722 - protein, 10 aa, Artificial Sequence
  Peptide Derived from Human Papillomavirus
WLQPLADAKI

SEQ ID NO: 13723 - protein, 9 aa, Artificial Sequence
  Peptide Derived from Human Papillomavirus
WYRTGMSNI

SEQ ID NO: 13724 - protein, 9 aa, Artificial Sequence
  Peptide Derived from Human Papillomavirus
YFGMSLISF

SEQ ID NO: 13725 - protein, 10 aa, Artificial Sequence
  Peptide Derived from Human Papillomavirus
YFGMSLISFL

SEQ ID NO: 13726 - protein, 10 aa, Artificial Sequence
  Peptide Derived from Human Papillomavirus
YIDNYLRNAL

SEQ ID NO: 13727 - protein, 9 aa, Artificial Sequence
  Peptide Derived from Human Papillomavirus
YLHSRLVVF

SEQ ID NO: 13728 - protein, 11 aa, Artificial Sequence
  Peptide Derived from Human Papillomavirus
YLHSRLVVFTF

SEQ ID NO: 13729 - protein, 9 aa, Artificial Sequence
  Peptide Derived from Human Papillomavirus
YVGSPLSDI

SEQ ID NO: 13730 - protein, 10 aa, Artificial Sequence
  Peptide Derived from Human Papillomavirus
YWYRTGMSNI

SEQ ID NO: 13731 - protein, 8 aa, Artificial Sequence
  Peptide Derived from Human Papillomavirus
AIELQMML

SEQ ID NO: 13732 - protein, 11 aa, Artificial Sequence
  Peptide Derived from Human Papillomavirus
AIELQMMLETL

SEQ ID NO: 13733 - protein, 8 aa, Artificial Sequence
  Peptide Derived from Human Papillomavirus
AIVTLTYI

SEQ ID NO: 13734 - protein, 9 aa, Artificial Sequence
  Peptide Derived from Human Papillomavirus
ALQAIELQM

SEQ ID NO: 13735 - protein, 10 aa, Artificial Sequence
  Peptide Derived from Human Papillomavirus
ALQAIELQMM

SEQ ID NO: 13736 - protein, 11 aa, Artificial Sequence
  Peptide Derived from Human Papillomavirus
ALQAIELQMML

SEQ ID NO: 13737 - protein, 10 aa, Artificial Sequence
  Peptide Derived from Human Papillomavirus
ALSVSKAKAL

SEQ ID NO: 13738 - protein, 8 aa, Artificial Sequence
  Peptide Derived from Human Papillomavirus
ATTPIIHL

SEQ ID NO: 13739 - protein, 10 aa, Artificial Sequence
  Peptide Derived from Human Papillomavirus
AVSCPATTPI

SEQ ID NO: 13740 - protein, 11 aa, Artificial Sequence
  Peptide Derived from Human Papillomavirus
AVSCPATTPII

SEQ ID NO: 13741 - protein, 9 aa, Artificial Sequence
  Peptide Derived from Human Papillomavirus
CLRYRLSKY

SEQ ID NO: 13742 - protein, 10 aa, Artificial Sequence
  Peptide Derived from Human Papillomavirus
CTDGKHKNAI

SEQ ID NO: 13743 - protein, 10 aa, Artificial Sequence
  Peptide Derived from Human Papillomavirus
CVLMYKAREM

SEQ ID NO: 13744 - protein, 8 aa, Artificial Sequence
  Peptide Derived from Human Papillomavirus
DFLNTVKI

SEQ ID NO: 13745 - protein, 8 aa, Artificial Sequence
  Peptide Derived from Human Papillomavirus
DVHNTMHY

SEQ ID NO: 13746 - protein, 11 aa, Artificial Sequence
  Peptide Derived from Human Papillomavirus
DVHNTMHYTNW

SEQ ID NO: 13747 - protein, 9 aa, Artificial Sequence
  Peptide Derived from Human Papillomavirus
DWTMQQTSL

SEQ ID NO: 13748 - protein, 11 aa, Artificial Sequence
  Peptide Derived from Human Papillomavirus
DWTMQQTSLEL

SEQ ID NO: 13749 - protein, 8 aa, Artificial Sequence
  Peptide Derived from Human Papillomavirus
DYWKHIRL

SEQ ID NO: 13750 - protein, 11 aa, Artificial Sequence
  Peptide Derived from Human Papillomavirus
EISFAGIVTKL

SEQ ID NO: 13751 - protein, 9 aa, Artificial Sequence
  Peptide Derived from Human Papillomavirus
ELQMMLETL

SEQ ID NO: 13752 - protein, 11 aa, Artificial Sequence
  Peptide Derived from Human Papillomavirus
ELYLTAPTGCL

SEQ ID NO: 13753 - protein, 8 aa, Artificial Sequence
  Peptide Derived from Human Papillomavirus
ETLNNTEY

SEQ ID NO: 13754 - protein, 9 aa, Artificial Sequence
  Peptide Derived from Human Papillomavirus
EVHAGGQVI

SEQ ID NO: 13755 - protein, 11 aa, Artificial Sequence
  Peptide Derived from Human Papillomavirus
EVHAGGQVIVF

SEQ ID NO: 13756 - protein, 9 aa, Artificial Sequence
  Peptide Derived from Human Papillomavirus
EYKNEDWTM

SEQ ID NO: 13757 - protein, 8 aa, Artificial Sequence
  Peptide Derived from Human Papillomavirus
FTEEAKKY

SEQ ID NO: 13758 - protein, 11 aa, Artificial Sequence
  Peptide Derived from Human Papillomavirus
FVNFTEEAKKY

SEQ ID NO: 13759 - protein, 10 aa, Artificial Sequence
  Peptide Derived from Human Papillomavirus
GIYYVHEGHI

SEQ ID NO: 13760 - protein, 8 aa, Artificial Sequence
  Peptide Derived from Human Papillomavirus
GYTVEVQF

SEQ ID NO: 13761 - protein, 8 aa, Artificial Sequence
  Peptide Derived from Human Papillomavirus
HIDYWKHI

SEQ ID NO: 13762 - protein, 10 aa, Artificial Sequence
  Peptide Derived from Human Papillomavirus
HIDYWKHIRL

SEQ ID NO: 13763 - protein, 8 aa, Artificial Sequence
  Peptide Derived from Human Papillomavirus
HIRLECVL

SEQ ID NO: 13764 - protein, 9 aa, Artificial Sequence
  Peptide Derived from Human Papillomavirus
HIRLECVLM

SEQ ID NO: 13765 - protein, 10 aa, Artificial Sequence
  Peptide Derived from Human Papillomavirus
HIRLECVLMY

SEQ ID NO: 13766 - protein, 8 aa, Artificial Sequence
  Peptide Derived from Human Papillomavirus
HITYFVNF

SEQ ID NO: 13767 - protein, 8 aa, Artificial Sequence
  Peptide Derived from Human Papillomavirus
HLKGDANI

SEQ ID NO: 13768 - protein, 9 aa, Artificial Sequence
  Peptide Derived from Human Papillomavirus
HLKGDANIL

SEQ ID NO: 13769 - protein, 9 aa, Artificial Sequence
  Peptide Derived from Human Papillomavirus
HYENDSKRL

SEQ ID NO: 13770 - protein, 8 aa, Artificial Sequence
  Peptide Derived from Human Papillomavirus
HYTNWKFI

SEQ ID NO: 13771 - protein, 9 aa, Artificial Sequence
  Peptide Derived from Human Papillomavirus
HYTNWKFIY

SEQ ID NO: 13772 - protein, 10 aa, Artificial Sequence
  Peptide Derived from Human Papillomavirus
HYTNWKFIYL

SEQ ID NO: 13773 - protein, 10 aa, Artificial Sequence
  Peptide Derived from Human Papillomavirus
IIHLKGDANI

SEQ ID NO: 13774 - protein, 11 aa, Artificial Sequence
  Peptide Derived from Human Papillomavirus
IIHLKGDANIL

SEQ ID NO: 13775 - protein, 9 aa, Artificial Sequence
  Peptide Derived from Human Papillomavirus
ILKCLRYRL

SEQ ID NO: 13776 - protein, 8 aa, Artificial Sequence
  Peptide Derived from Human Papillomavirus
IVFPESVF

SEQ ID NO: 13777 - protein, 9 aa, Artificial Sequence
  Peptide Derived from Human Papillomavirus
IYYVHEGHI

SEQ ID NO: 13778 - protein, 11 aa, Artificial Sequence
  Peptide Derived from Human Papillomavirus
IYYVHEGHITY

SEQ ID NO: 13779 - protein, 11 aa, Artificial Sequence
  Peptide Derived from Human Papillomavirus
KWEVHAGGQVI

SEQ ID NO: 13780 - protein, 8 aa, Artificial Sequence
  Peptide Derived from Human Papillomavirus
KYGTGKKW

SEQ ID NO: 13781 - protein, 8 aa, Artificial Sequence
  Peptide Derived from Human Papillomavirus
LMYKAREM

SEQ ID NO: 13782 - protein, 10 aa, Artificial Sequence
  Peptide Derived from Human Papillomavirus
LMYKAREMGI

SEQ ID NO: 13783 - protein, 8 aa, Artificial Sequence
  Peptide Derived from Human Papillomavirus
LTAPTGCL

SEQ ID NO: 13784 - protein, 9 aa, Artificial Sequence
  Peptide Derived from Human Papillomavirus
LYEQVSSTW

SEQ ID NO: 13785 - protein, 11 aa, Artificial Sequence
  Peptide Derived from Human Papillomavirus
LYEQVSSTWHW

SEQ ID NO: 13786 - protein, 10 aa, Artificial Sequence
  Peptide Derived from Human Papillomavirus
LYLTAPTGCL

SEQ ID NO: 13787 - protein, 10 aa, Artificial Sequence
  Peptide Derived from Human Papillomavirus
MLETLNNTEY

SEQ ID NO: 13788 - protein, 11 aa, Artificial Sequence
  Peptide Derived from Human Papillomavirus
MMLETLNNTEY

SEQ ID NO: 13789 - protein, 9 aa, Artificial Sequence
  Peptide Derived from Human Papillomavirus
MYKAREMGI

SEQ ID NO: 13790 - protein, 9 aa, Artificial Sequence
  Peptide Derived from Human Papillomavirus
NFTEEAKKY

SEQ ID NO: 13791 - protein, 8 aa, Artificial Sequence
  Peptide Derived from Human Papillomavirus
NILKCLRY

SEQ ID NO: 13792 - protein, 10 aa, Artificial Sequence
  Peptide Derived from Human Papillomavirus
NILKCLRYRL

SEQ ID NO: 13793 - protein, 9 aa, Artificial Sequence
  Peptide Derived from Human Papillomavirus
NTEYKNEDW

SEQ ID NO: 13794 - protein, 11 aa, Artificial Sequence
  Peptide Derived from Human Papillomavirus
NTEYKNEDWTM

SEQ ID NO: 13795 - protein, 8 aa, Artificial Sequence
  Peptide Derived from Human Papillomavirus
NTHHPNKL

SEQ ID NO: 13796 - protein, 9 aa, Artificial Sequence
  Peptide Derived from Human Papillomavirus
NTHHPNKLL

SEQ ID NO: 13797 - protein, 8 aa, Artificial Sequence
  Peptide Derived from Human Papillomavirus
NTMHYTNW

SEQ ID NO: 13798 - protein, 10 aa, Artificial Sequence
  Peptide Derived from Human Papillomavirus
NTMHYTNWKF

SEQ ID NO: 13799 - protein, 11 aa, Artificial Sequence
  Peptide Derived from Human Papillomavirus
NTMHYTNWKFI

SEQ ID NO: 13800 - protein, 9 aa, Artificial Sequence
  Peptide Derived from Human Papillomavirus
NTVSVSTGY

SEQ ID NO: 13801 - protein, 10 aa, Artificial Sequence
  Peptide Derived from Human Papillomavirus
NTVSVSTGYM

SEQ ID NO: 13802 - protein, 8 aa, Artificial Sequence
  Peptide Derived from Human Papillomavirus
NVCQDKIL

SEQ ID NO: 13803 - protein, 11 aa, Artificial Sequence
  Peptide Derived from Human Papillomavirus
NVCQDKILEHY

SEQ ID NO: 13804 - protein, 9 aa, Artificial Sequence
  Peptide Derived from Human Papillomavirus
NWKFIYLCI

SEQ ID NO: 13805 - protein, 11 aa, Artificial Sequence
  Peptide Derived from Human Papillomavirus
PIIHLKGDANI

SEQ ID NO: 13806 - protein, 10 aa, Artificial Sequence
  Peptide Derived from Human Papillomavirus
PTGCLKKHGY

SEQ ID NO: 13807 - protein, 10 aa, Artificial Sequence
  Peptide Derived from Human Papillomavirus
QFDGDVHNTM

SEQ ID NO: 13808 - protein, 10 aa, Artificial Sequence
  Peptide Derived from Human Papillomavirus
QLYEQVSSTW

SEQ ID NO: 13809 - protein, 8 aa, Artificial Sequence
  Peptide Derived from Human Papillomavirus
QTSLELYL

SEQ ID NO: 13810 - protein, 10 aa, Artificial Sequence
  Peptide Derived from Human Papillomavirus
QVIVFPESVF

SEQ ID NO: 13811 - protein, 8 aa, Artificial Sequence
  Peptide Derived from Human Papillomavirus
QVNCKGIY

SEQ ID NO: 13812 - protein, 9 aa, Artificial Sequence
  Peptide Derived from Human Papillomavirus
QVNCKGIYY

SEQ ID NO: 13813 - protein, 8 aa, Artificial Sequence
  Peptide Derived from Human Papillomavirus
QVSSTWHW

SEQ ID NO: 13814 - protein, 8 aa, Artificial Sequence
  Peptide Derived from Human Papillomavirus
RLCDHIDY

SEQ ID NO: 13815 - protein, 9 aa, Artificial Sequence
  Peptide Derived from Human Papillomavirus
RLCDHIDYW

SEQ ID NO: 13816 - protein, 8 aa, Artificial Sequence
  Peptide Derived from Human Papillomavirus
RLECVLMY

SEQ ID NO: 13817 - protein, 9 aa, Artificial Sequence
  Peptide Derived from Human Papillomavirus
RLNVCQDKI

SEQ ID NO: 13818 - protein, 10 aa, Artificial Sequence
  Peptide Derived from Human Papillomavirus
RLNVCQDKIL

SEQ ID NO: 13819 - protein, 8 aa, Artificial Sequence
  Peptide Derived from Human Papillomavirus
RLSKYKQL

SEQ ID NO: 13820 - protein, 9 aa, Artificial Sequence
  Peptide Derived from Human Papillomavirus
RLSKYKQLY

SEQ ID NO: 13821 - protein, 10 aa, Artificial Sequence
  Peptide Derived from Human Papillomavirus
RYRLSKYKQL

SEQ ID NO: 13822 - protein, 11 aa, Artificial Sequence
  Peptide Derived from Human Papillomavirus
RYRLSKYKQLY

SEQ ID NO: 13823 - protein, 9 aa, Artificial Sequence
  Peptide Derived from Human Papillomavirus
SFAGIVTKL

SEQ ID NO: 13824 - protein, 10 aa, Artificial Sequence
  Peptide Derived from Human Papillomavirus
SINHQVVPAL

SEQ ID NO: 13825 - protein, 8 aa, Artificial Sequence
  Peptide Derived from Human Papillomavirus
STSQRDDF

SEQ ID NO: 13826 - protein, 9 aa, Artificial Sequence
  Peptide Derived from Human Papillomavirus
STSQRDDFL

SEQ ID NO: 13827 - protein, 10 aa, Artificial Sequence
  Peptide Derived from Human Papillomavirus
SVDSVNCGVI

SEQ ID NO: 13828 - protein, 8 aa, Artificial Sequence
  Peptide Derived from Human Papillomavirus
SVFSSDEI

SEQ ID NO: 13829 - protein, 10 aa, Artificial Sequence
  Peptide Derived from Human Papillomavirus
SVFSSDEISF

SEQ ID NO: 13830 - protein, 8 aa, Artificial Sequence
  Peptide Derived from Human Papillomavirus
SVSKAKAL

SEQ ID NO: 13831 - protein, 11 aa, Artificial Sequence
  Peptide Derived from Human Papillomavirus
SVSKAKALQAI

SEQ ID NO: 13832 - protein, 9 aa, Artificial Sequence
  Peptide Derived from Human Papillomavirus
SVSTGYMTI

SEQ ID NO: 13833 - protein, 9 aa, Artificial Sequence
  Peptide Derived from Human Papillomavirus
TMHYTNWKF

SEQ ID NO: 13834 - protein, 10 aa, Artificial Sequence
  Peptide Derived from Human Papillomavirus
TMHYTNWKFI

SEQ ID NO: 13835 - protein, 11 aa, Artificial Sequence
  Peptide Derived from Human Papillomavirus
TMHYTNWKFIY

SEQ ID NO: 13836 - protein, 9 aa, Artificial Sequence
  Peptide Derived from Human Papillomavirus
TMQQTSLEL

SEQ ID NO: 13837 - protein, 10 aa, Artificial Sequence
  Peptide Derived from Human Papillomavirus
TMQQTSLELY

SEQ ID NO: 13838 - protein, 11 aa, Artificial Sequence
  Peptide Derived from Human Papillomavirus
TMQQTSLELYL

SEQ ID NO: 13839 - protein, 10 aa, Artificial Sequence
  Peptide Derived from Human Papillomavirus
TTSNSKTCAL

SEQ ID NO: 13840 - protein, 11 aa, Artificial Sequence
  Peptide Derived from Human Papillomavirus
TTTSNSKTCAL

SEQ ID NO: 13841 - protein, 8 aa, Artificial Sequence
  Peptide Derived from Human Papillomavirus
TVSVSTGY

SEQ ID NO: 13842 - protein, 9 aa, Artificial Sequence
  Peptide Derived from Human Papillomavirus
TVSVSTGYM

SEQ ID NO: 13843 - protein, 11 aa, Artificial Sequence
  Peptide Derived from Human Papillomavirus
TVSVSTGYMTI

SEQ ID NO: 13844 - protein, 11 aa, Artificial Sequence
  Peptide Derived from Human Papillomavirus
TYISTSQRDDF

SEQ ID NO: 13845 - protein, 9 aa, Artificial Sequence
  Peptide Derived from Human Papillomavirus
VFSSDEISF

SEQ ID NO: 13846 - protein, 9 aa, Artificial Sequence
  Peptide Derived from Human Papillomavirus
VIVFPESVF

SEQ ID NO: 13847 - protein, 9 aa, Artificial Sequence
  Peptide Derived from Human Papillomavirus
VLMYKAREM

SEQ ID NO: 13848 - protein, 11 aa, Artificial Sequence
  Peptide Derived from Human Papillomavirus
VLMYKAREMGI

SEQ ID NO: 13849 - protein, 11 aa, Artificial Sequence
  Peptide Derived from Human Papillomavirus
VVEGQVNCKGI

SEQ ID NO: 13850 - protein, 8 aa, Artificial Sequence
  Peptide Derived from Human Papillomavirus
WTMQQTSL

SEQ ID NO: 13851 - protein, 10 aa, Artificial Sequence
  Peptide Derived from Human Papillomavirus
WTMQQTSLEL

SEQ ID NO: 13852 - protein, 11 aa, Artificial Sequence
  Peptide Derived from Human Papillomavirus
WTMQQTSLELY

SEQ ID NO: 13853 - protein, 10 aa, Artificial Sequence
  Peptide Derived from Human Papillomavirus
YISTSQRDDF

SEQ ID NO: 13854 - protein, 11 aa, Artificial Sequence
  Peptide Derived from Human Papillomavirus
YISTSQRDDFL

SEQ ID NO: 13855 - protein, 9 aa, Artificial Sequence
  Peptide Derived from Human Papillomavirus
YLTAPTGCL

SEQ ID NO: 13856 - protein, 8 aa, Artificial Sequence
  Peptide Derived from Human Papillomavirus
YTNWKFIY

SEQ ID NO: 13857 - protein, 9 aa, Artificial Sequence
  Peptide Derived from Human Papillomavirus
YTNWKFIYL

SEQ ID NO: 13858 - protein, 11 aa, Artificial Sequence
  Peptide Derived from Human Papillomavirus
YTNWKFIYLCI

SEQ ID NO: 13859 - protein, 9 aa, Artificial Sequence
  Peptide Derived from Human Papillomavirus
YVHEGHITY

SEQ ID NO: 13860 - protein, 10 aa, Artificial Sequence
  Peptide Derived from Human Papillomavirus
YVHEGHITYF

SEQ ID NO: 13861 - protein, 11 aa, Artificial Sequence
  Peptide Derived from Human Papillomavirus
YWKHIRLECVL

SEQ ID NO: 13862 - protein, 8 aa, Artificial Sequence
  Peptide Derived from Human Papillomavirus
YYVHEGHI

SEQ ID NO: 13863 - protein, 10 aa, Artificial Sequence
  Peptide Derived from Human Papillomavirus
YYVHEGHITY

SEQ ID NO: 13864 - protein, 11 aa, Artificial Sequence
  Peptide Derived from Human Papillomavirus
YYVHEGHITYF

SEQ ID NO: 13865 - protein, 9 aa, Artificial Sequence
  Peptide Derived from Human Papillomavirus
ATLLLLIVI

SEQ ID NO: 13866 - protein, 10 aa, Artificial Sequence
  Peptide Derived from Human Papillomavirus
ATLLLLIVIL

SEQ ID NO: 13867 - protein, 11 aa, Artificial Sequence
  Peptide Derived from Human Papillomavirus
ATLLLLIVILW

SEQ ID NO: 13868 - protein, 8 aa, Artificial Sequence
  Peptide Derived from Human Papillomavirus
ATSPLRCF

SEQ ID NO: 13869 - protein, 10 aa, Artificial Sequence
  Peptide Derived from Human Papillomavirus
ATSPLRCFCI

SEQ ID NO: 13870 - protein, 11 aa, Artificial Sequence
  Peptide Derived from Human Papillomavirus
ATSPLRCFCIY

SEQ ID NO: 13871 - protein, 8 aa, Artificial Sequence
  Peptide Derived from Human Papillomavirus
CFCIYVVF

SEQ ID NO: 13872 - protein, 9 aa, Artificial Sequence
  Peptide Derived from Human Papillomavirus
CFCIYVVFI

SEQ ID NO: 13873 - protein, 10 aa, Artificial Sequence
  Peptide Derived from Human Papillomavirus
CFCIYVVFIY

SEQ ID NO: 13874 - protein, 11 aa, Artificial Sequence
  Peptide Derived from Human Papillomavirus
CFCIYVVFIYI

SEQ ID NO: 13875 - protein, 10 aa, Artificial Sequence
  Peptide Derived from Human Papillomavirus
CFCVLLFVCL

SEQ ID NO: 13876 - protein, 9 aa, Artificial Sequence
  Peptide Derived from Human Papillomavirus
CFLLCFCVL

SEQ ID NO: 13877 - protein, 10 aa, Artificial Sequence
  Peptide Derived from Human Papillomavirus
CFLLCFCVLL

SEQ ID NO: 13878 - protein, 11 aa, Artificial Sequence
  Peptide Derived from Human Papillomavirus
CFLLCFCVLLF

SEQ ID NO: 13879 - protein, 8 aa, Artificial Sequence
  Peptide Derived from Human Papillomavirus
CIYVVFIY

SEQ ID NO: 13880 - protein, 9 aa, Artificial Sequence
  Peptide Derived from Human Papillomavirus
CIYVVFIYI

SEQ ID NO: 13881 - protein, 11 aa, Artificial Sequence
  Peptide Derived from Human Papillomavirus
CIYVVFIYIPL

SEQ ID NO: 13882 - protein, 9 aa, Artificial Sequence
  Peptide Derived from Human Papillomavirus
CLVIRPLVL

SEQ ID NO: 13883 - protein, 8 aa, Artificial Sequence
  Peptide Derived from Human Papillomavirus
CVLLFVCL

SEQ ID NO: 13884 - protein, 10 aa, Artificial Sequence
  Peptide Derived from Human Papillomavirus
CVLLFVCLVI

SEQ ID NO: 13885 - protein, 9 aa, Artificial Sequence
  Peptide Derived from Human Papillomavirus
ELNISTVSI

SEQ ID NO: 13886 - protein, 11 aa, Artificial Sequence
  Peptide Derived from Human Papillomavirus
ELNISTVSIVL

SEQ ID NO: 13887 - protein, 9 aa, Artificial Sequence
  Peptide Derived from Human Papillomavirus
FIYIPLFVI

SEQ ID NO: 13888 - protein, 8 aa, Artificial Sequence
  Peptide Derived from Human Papillomavirus
FLLCFCVL

SEQ ID NO: 13889 - protein, 9 aa, Artificial Sequence
  Peptide Derived from Human Papillomavirus
FLLCFCVLL

SEQ ID NO: 13890 - protein, 10 aa, Artificial Sequence
  Peptide Derived from Human Papillomavirus
FLLCFCVLLF

SEQ ID NO: 13891 - protein, 9 aa, Artificial Sequence
  Peptide Derived from Human Papillomavirus
FVCLVIRPL

SEQ ID NO: 13892 - protein, 11 aa, Artificial Sequence
  Peptide Derived from Human Papillomavirus
FVCLVIRPLVL

SEQ ID NO: 13893 - protein, 9 aa, Artificial Sequence
  Peptide Derived from Human Papillomavirus
FVIHTHASF

SEQ ID NO: 13894 - protein, 10 aa, Artificial Sequence
  Peptide Derived from Human Papillomavirus
FVIHTHASFL

SEQ ID NO: 13895 - protein, 10 aa, Artificial Sequence
  Peptide Derived from Human Papillomavirus
ILWVIATSPL

SEQ ID NO: 13896 - protein, 9 aa, Artificial Sequence
  Peptide Derived from Human Papillomavirus
IVLCFLLCF

SEQ ID NO: 13897 - protein, 8 aa, Artificial Sequence
  Peptide Derived from Human Papillomavirus
IYIPLFVI

SEQ ID NO: 13898 - protein, 8 aa, Artificial Sequence
  Peptide Derived from Human Papillomavirus
IYVVFIYI

SEQ ID NO: 13899 - protein, 10 aa, Artificial Sequence
  Peptide Derived from Human Papillomavirus
IYVVFIYIPL

SEQ ID NO: 13900 - protein, 11 aa, Artificial Sequence
  Peptide Derived from Human Papillomavirus
IYVVFIYIPLF

SEQ ID NO: 13901 - protein, 10 aa, Artificial Sequence
  Peptide Derived from Human Papillomavirus
LFVCLVIRPL

SEQ ID NO: 13902 - protein, 10 aa, Artificial Sequence
  Peptide Derived from Human Papillomavirus
LFVIHTHASF

SEQ ID NO: 13903 - protein, 11 aa, Artificial Sequence
  Peptide Derived from Human Papillomavirus
LFVIHTHASFL

SEQ ID NO: 13904 - protein, 8 aa, Artificial Sequence
  Peptide Derived from Human Papillomavirus
LIVILWVI

SEQ ID NO: 13905 - protein, 8 aa, Artificial Sequence
  Peptide Derived from Human Papillomavirus
LLCFCVLL

SEQ ID NO: 13906 - protein, 9 aa, Artificial Sequence
  Peptide Derived from Human Papillomavirus
LLCFCVLLF

SEQ ID NO: 13907 - protein, 8 aa, Artificial Sequence
  Peptide Derived from Human Papillomavirus
LLFVCLVI

SEQ ID NO: 13908 - protein, 11 aa, Artificial Sequence
  Peptide Derived from Human Papillomavirus
LLFVCLVIRPL

SEQ ID NO: 13909 - protein, 9 aa, Artificial Sequence
  Peptide Derived from Human Papillomavirus
LLIVILWVI

SEQ ID NO: 13910 - protein, 8 aa, Artificial Sequence
  Peptide Derived from Human Papillomavirus
LLLIVILW

SEQ ID NO: 13911 - protein, 10 aa, Artificial Sequence
  Peptide Derived from Human Papillomavirus
LLLIVILWVI

SEQ ID NO: 13912 - protein, 8 aa, Artificial Sequence
  Peptide Derived from Human Papillomavirus
LLLLIVIL

SEQ ID NO: 13913 - protein, 9 aa, Artificial Sequence
  Peptide Derived from Human Papillomavirus
LLLLIVILW

SEQ ID NO: 13914 - protein, 11 aa, Artificial Sequence
  Peptide Derived from Human Papillomavirus
LLLLIVILWVI

SEQ ID NO: 13915 - protein, 8 aa, Artificial Sequence
  Peptide Derived from Human Papillomavirus
LVIRPLVL

SEQ ID NO: 13916 - protein, 8 aa, Artificial Sequence
  Peptide Derived from Human Papillomavirus
LVLSVSVY

SEQ ID NO: 13917 - protein, 11 aa, Artificial Sequence
  Peptide Derived from Human Papillomavirus
LVLSVSVYATL

SEQ ID NO: 13918 - protein, 9 aa, Artificial Sequence
  Peptide Derived from Human Papillomavirus
LWVIATSPL

SEQ ID NO: 13919 - protein, 11 aa, Artificial Sequence
  Peptide Derived from Human Papillomavirus
MIELNISTVSI

SEQ ID NO: 13920 - protein, 9 aa, Artificial Sequence
  Peptide Derived from Human Papillomavirus
NISTVSIVL

SEQ ID NO: 13921 - protein, 11 aa, Artificial Sequence
  Peptide Derived from Human Papillomavirus
NISTVSIVLCF

SEQ ID NO: 13922 - protein, 11 aa, Artificial Sequence
  Peptide Derived from Human Papillomavirus
PLFVIHTHASF

SEQ ID NO: 13923 - protein, 8 aa, Artificial Sequence
  Peptide Derived from Human Papillomavirus
PLRCFCIY

SEQ ID NO: 13924 - protein, 11 aa, Artificial Sequence
  Peptide Derived from Human Papillomavirus
PLRCFCIYVVF

SEQ ID NO: 13925 - protein, 9 aa, Artificial Sequence
  Peptide Derived from Human Papillomavirus
PLVLSVSVY

SEQ ID NO: 13926 - protein, 8 aa, Artificial Sequence
  Peptide Derived from Human Papillomavirus
SIVLCFLL

SEQ ID NO: 13927 - protein, 10 aa, Artificial Sequence
  Peptide Derived from Human Papillomavirus
SIVLCFLLCF

SEQ ID NO: 13928 - protein, 9 aa, Artificial Sequence
  Peptide Derived from Human Papillomavirus
STVSIVLCF

SEQ ID NO: 13929 - protein, 10 aa, Artificial Sequence
  Peptide Derived from Human Papillomavirus
STVSIVLCFL

SEQ ID NO: 13930 - protein, 11 aa, Artificial Sequence
  Peptide Derived from Human Papillomavirus
STVSIVLCFLL

SEQ ID NO: 13931 - protein, 8 aa, Artificial Sequence
  Peptide Derived from Human Papillomavirus
SVSVYATL

SEQ ID NO: 13932 - protein, 9 aa, Artificial Sequence
  Peptide Derived from Human Papillomavirus
SVSVYATLL

SEQ ID NO: 13933 - protein, 10 aa, Artificial Sequence
  Peptide Derived from Human Papillomavirus
SVSVYATLLL

SEQ ID NO: 13934 - protein, 11 aa, Artificial Sequence
  Peptide Derived from Human Papillomavirus
SVSVYATLLLL

SEQ ID NO: 13935 - protein, 8 aa, Artificial Sequence
  Peptide Derived from Human Papillomavirus
SVYATLLL

SEQ ID NO: 13936 - protein, 9 aa, Artificial Sequence
  Peptide Derived from Human Papillomavirus
SVYATLLLL

SEQ ID NO: 13937 - protein, 10 aa, Artificial Sequence
  Peptide Derived from Human Papillomavirus
SVYATLLLLI

SEQ ID NO: 13938 - protein, 8 aa, Artificial Sequence
  Peptide Derived from Human Papillomavirus
TLLLLIVI

SEQ ID NO: 13939 - protein, 9 aa, Artificial Sequence
  Peptide Derived from Human Papillomavirus
TLLLLIVIL

SEQ ID NO: 13940 - protein, 10 aa, Artificial Sequence
  Peptide Derived from Human Papillomavirus
TLLLLIVILW

SEQ ID NO: 13941 - protein, 8 aa, Artificial Sequence
  Peptide Derived from Human Papillomavirus
TVSIVLCF

SEQ ID NO: 13942 - protein, 9 aa, Artificial Sequence
  Peptide Derived from Human Papillomavirus
TVSIVLCFL

SEQ ID NO: 13943 - protein, 10 aa, Artificial Sequence
  Peptide Derived from Human Papillomavirus
TVSIVLCFLL

SEQ ID NO: 13944 - protein, 8 aa, Artificial Sequence
  Peptide Derived from Human Papillomavirus
VFIYIPLF

SEQ ID NO: 13945 - protein, 10 aa, Artificial Sequence
  Peptide Derived from Human Papillomavirus
VFIYIPLFVI

SEQ ID NO: 13946 - protein, 10 aa, Artificial Sequence
  Peptide Derived from Human Papillomavirus
VIATSPLRCF

SEQ ID NO: 13947 - protein, 8 aa, Artificial Sequence
  Peptide Derived from Human Papillomavirus
VIHTHASF

SEQ ID NO: 13948 - protein, 9 aa, Artificial Sequence
  Peptide Derived from Human Papillomavirus
VIHTHASFL

SEQ ID NO: 13949 - protein, 11 aa, Artificial Sequence
  Peptide Derived from Human Papillomavirus
VILWVIATSPL

SEQ ID NO: 13950 - protein, 8 aa, Artificial Sequence
  Peptide Derived from Human Papillomavirus
VLCFLLCF

SEQ ID NO: 13951 - protein, 11 aa, Artificial Sequence
  Peptide Derived from Human Papillomavirus
VLCFLLCFCVL

SEQ ID NO: 13952 - protein, 9 aa, Artificial Sequence
  Peptide Derived from Human Papillomavirus
VLLFVCLVI

SEQ ID NO: 13953 - protein, 10 aa, Artificial Sequence
  Peptide Derived from Human Papillomavirus
VLSVSVYATL

SEQ ID NO: 13954 - protein, 11 aa, Artificial Sequence
  Peptide Derived from Human Papillomavirus
VLSVSVYATLL

SEQ ID NO: 13955 - protein, 8 aa, Artificial Sequence
  Peptide Derived from Human Papillomavirus
VVFIYIPL

SEQ ID NO: 13956 - protein, 9 aa, Artificial Sequence
  Peptide Derived from Human Papillomavirus
VVFIYIPLF

SEQ ID NO: 13957 - protein, 11 aa, Artificial Sequence
  Peptide Derived from Human Papillomavirus
VVFIYIPLFVI

SEQ ID NO: 13958 - protein, 8 aa, Artificial Sequence
  Peptide Derived from Human Papillomavirus
VYATLLLL

SEQ ID NO: 13959 - protein, 9 aa, Artificial Sequence
  Peptide Derived from Human Papillomavirus
VYATLLLLI

SEQ ID NO: 13960 - protein, 11 aa, Artificial Sequence
  Peptide Derived from Human Papillomavirus
VYATLLLLIVI

SEQ ID NO: 13961 - protein, 8 aa, Artificial Sequence
  Peptide Derived from Human Papillomavirus
WVIATSPL

SEQ ID NO: 13962 - protein, 11 aa, Artificial Sequence
  Peptide Derived from Human Papillomavirus
WVIATSPLRCF

SEQ ID NO: 13963 - protein, 9 aa, Artificial Sequence
  Peptide Derived from Human Papillomavirus
YVVFIYIPL

SEQ ID NO: 13964 - protein, 10 aa, Artificial Sequence
  Peptide Derived from Human Papillomavirus
YVVFIYIPLF

SEQ ID NO: 13965 - protein, 9 aa, Artificial Sequence
  Peptide Derived from Human Papillomavirus
AFTDLTIVY

SEQ ID NO: 13966 - protein, 9 aa, Artificial Sequence
  Peptide Derived from Human Papillomavirus
ALEIPYDEL

SEQ ID NO: 13967 - protein, 11 aa, Artificial Sequence
  Peptide Derived from Human Papillomavirus
ALEIPYDELRL

SEQ ID NO: 13968 - protein, 8 aa, Artificial Sequence
  Peptide Derived from Human Papillomavirus
CITCQRPL

SEQ ID NO: 13969 - protein, 11 aa, Artificial Sequence
  Peptide Derived from Human Papillomavirus
CLRFYSKVSEF

SEQ ID NO: 13970 - protein, 8 aa, Artificial Sequence
  Peptide Derived from Human Papillomavirus
CTKCLRFY

SEQ ID NO: 13971 - protein, 8 aa, Artificial Sequence
  Peptide Derived from Human Papillomavirus
CVYCKGQL

SEQ ID NO: 13972 - protein, 9 aa, Artificial Sequence
  Peptide Derived from Human Papillomavirus
DFAFTDLTI

SEQ ID NO: 13973 - protein, 11 aa, Artificial Sequence
  Peptide Derived from Human Papillomavirus
DFAFTDLTIVY

SEQ ID NO: 13974 - protein, 11 aa, Artificial Sequence
  Peptide Derived from Human Papillomavirus
DTPHGVCTKCL

SEQ ID NO: 13975 - protein, 10 aa, Artificial Sequence
  Peptide Derived from Human Papillomavirus
EFRWYRYSVY

SEQ ID NO: 13976 - protein, 9 aa, Artificial Sequence
  Peptide Derived from Human Papillomavirus
EIPYDELRL

SEQ ID NO: 13977 - protein, 8 aa, Artificial Sequence
  Peptide Derived from Human Papillomavirus
ELRLNCVY

SEQ ID NO: 13978 - protein, 8 aa, Artificial Sequence
  Peptide Derived from Human Papillomavirus
ELSSALEI

SEQ ID NO: 13979 - protein, 10 aa, Artificial Sequence
  Peptide Derived from Human Papillomavirus
ELSSALEIPY

SEQ ID NO: 13980 - protein, 9 aa, Artificial Sequence
  Peptide Derived from Human Papillomavirus
ETEVLDFAF

SEQ ID NO: 13981 - protein, 10 aa, Artificial Sequence
  Peptide Derived from Human Papillomavirus
EVLDFAFTDL

SEQ ID NO: 13982 - protein, 8 aa, Artificial Sequence
  Peptide Derived from Human Papillomavirus
FTDLTIVY

SEQ ID NO: 13983 - protein, 8 aa, Artificial Sequence
  Peptide Derived from Human Papillomavirus
FYSKVSEF

SEQ ID NO: 13984 - protein, 10 aa, Artificial Sequence
  Peptide Derived from Human Papillomavirus
FYSKVSEFRW

SEQ ID NO: 13985 - protein, 11 aa, Artificial Sequence
  Peptide Derived from Human Papillomavirus
FYSKVSEFRWY

SEQ ID NO: 13986 - protein, 10 aa, Artificial Sequence
  Peptide Derived from Human Papillomavirus
GICDLLIRCI

SEQ ID NO: 13987 - protein, 9 aa, Artificial Sequence
  Peptide Derived from Human Papillomavirus
GVCTKCLRF

SEQ ID NO: 13988 - protein, 10 aa, Artificial Sequence
  Peptide Derived from Human Papillomavirus
GVCTKCLRFY

SEQ ID NO: 13989 - protein, 8 aa, Artificial Sequence
  Peptide Derived from Human Papillomavirus
HLDKKKRF

SEQ ID NO: 13990 - protein, 11 aa, Artificial Sequence
  Peptide Derived from Human Papillomavirus
HLDKKKRFHNI

SEQ ID NO: 13991 - protein, 9 aa, Artificial Sequence
  Peptide Derived from Human Papillomavirus
KLHELSSAL

SEQ ID NO: 13992 - protein, 11 aa, Artificial Sequence
  Peptide Derived from Human Papillomavirus
KLHELSSALEI

SEQ ID NO: 13993 - protein, 10 aa, Artificial Sequence
  Peptide Derived from Human Papillomavirus
KLTNKGICDL

SEQ ID NO: 13994 - protein, 11 aa, Artificial Sequence
  Peptide Derived from Human Papillomavirus
KLTNKGICDLL

SEQ ID NO: 13995 - protein, 8 aa, Artificial Sequence
  Peptide Derived from Human Papillomavirus
KVSEFRWY

SEQ ID NO: 13996 - protein, 10 aa, Artificial Sequence
  Peptide Derived from Human Papillomavirus
KVSEFRWYRY

SEQ ID NO: 13997 - protein, 11 aa, Artificial Sequence
  Peptide Derived from Human Papillomavirus
LIRCITCQRPL

SEQ ID NO: 13998 - protein, 9 aa, Artificial Sequence
  Peptide Derived from Human Papillomavirus
LTETEVLDF

SEQ ID NO: 13999 - protein, 11 aa, Artificial Sequence
  Peptide Derived from Human Papillomavirus
LTETEVLDFAF

SEQ ID NO: 14000 - protein, 9 aa, Artificial Sequence
  Peptide Derived from Human Papillomavirus
LTNKGICDL

SEQ ID NO: 14001 - protein, 10 aa, Artificial Sequence
  Peptide Derived from Human Papillomavirus
LTNKGICDLL

SEQ ID NO: 14002 - protein, 11 aa, Artificial Sequence
  Peptide Derived from Human Papillomavirus
LTNKGICDLLI

SEQ ID NO: 14003 - protein, 11 aa, Artificial Sequence
  Peptide Derived from Human Papillomavirus
NIGGRWTGRCI

SEQ ID NO: 14004 - protein, 11 aa, Artificial Sequence
  Peptide Derived from Human Papillomavirus
PLCPEEKQRHL

SEQ ID NO: 14005 - protein, 11 aa, Artificial Sequence
  Peptide Derived from Human Papillomavirus
PYDELRLNCVY

SEQ ID NO: 14006 - protein, 8 aa, Artificial Sequence
  Peptide Derived from Human Papillomavirus
QLTETEVL

SEQ ID NO: 14007 - protein, 10 aa, Artificial Sequence
  Peptide Derived from Human Papillomavirus
QLTETEVLDF

SEQ ID NO: 14008 - protein, 9 aa, Artificial Sequence
  Peptide Derived from Human Papillomavirus
RFHNIGGRW

SEQ ID NO: 14009 - protein, 9 aa, Artificial Sequence
  Peptide Derived from Human Papillomavirus
RFYSKVSEF

SEQ ID NO: 14010 - protein, 11 aa, Artificial Sequence
  Peptide Derived from Human Papillomavirus
RFYSKVSEFRW

SEQ ID NO: 14011 - protein, 11 aa, Artificial Sequence
  Peptide Derived from Human Papillomavirus
RLNCVYCKGQL

SEQ ID NO: 14012 - protein, 10 aa, Artificial Sequence
  Peptide Derived from Human Papillomavirus
RWTGRCIACW

SEQ ID NO: 14013 - protein, 8 aa, Artificial Sequence
  Peptide Derived from Human Papillomavirus
RWYRYSVY

SEQ ID NO: 14014 - protein, 9 aa, Artificial Sequence
  Peptide Derived from Human Papillomavirus
RYSVYGTTL

SEQ ID NO: 14015 - protein, 10 aa, Artificial Sequence
  Peptide Derived from Human Papillomavirus
SVYGTTLEKL

SEQ ID NO: 14016 - protein, 10 aa, Artificial Sequence
  Peptide Derived from Human Papillomavirus
TLEKLTNKGI

SEQ ID NO: 14017 - protein, 11 aa, Artificial Sequence
  Peptide Derived from Human Papillomavirus
TTLEKLTNKGI

SEQ ID NO: 14018 - protein, 9 aa, Artificial Sequence
  Peptide Derived from Human Papillomavirus
VLDFAFTDL

SEQ ID NO: 14019 - protein, 11 aa, Artificial Sequence
  Peptide Derived from Human Papillomavirus
VLDFAFTDLTI

SEQ ID NO: 14020 - protein, 9 aa, Artificial Sequence
  Peptide Derived from Human Papillomavirus
VYGTTLEKL

SEQ ID NO: 14021 - protein, 9 aa, Artificial Sequence
  Peptide Derived from Human Papillomavirus
WTGRCIACW

SEQ ID NO: 14022 - protein, 11 aa, Artificial Sequence
  Peptide Derived from Human Papillomavirus
WYRYSVYGTTL

SEQ ID NO: 14023 - protein, 10 aa, Artificial Sequence
  Peptide Derived from Human Papillomavirus
ATDLHCYEQL

SEQ ID NO: 14024 - protein, 9 aa, Artificial Sequence
  Peptide Derived from Human Papillomavirus
CVQSTQVDI

SEQ ID NO: 14025 - protein, 11 aa, Artificial Sequence
  Peptide Derived from Human Papillomavirus
CVQSTQVDIRI

SEQ ID NO: 14026 - protein, 8 aa, Artificial Sequence
  Peptide Derived from Human Papillomavirus
DIRILQEL

SEQ ID NO: 14027 - protein, 9 aa, Artificial Sequence
  Peptide Derived from Human Papillomavirus
DIRILQELL

SEQ ID NO: 14028 - protein, 10 aa, Artificial Sequence
  Peptide Derived from Human Papillomavirus
DIRILQELLM

SEQ ID NO: 14029 - protein, 8 aa, Artificial Sequence
  Peptide Derived from Human Papillomavirus
DLHCYEQL

SEQ ID NO: 14030 - protein, 9 aa, Artificial Sequence
  Peptide Derived from Human Papillomavirus
DLQPEATDL

SEQ ID NO: 14031 - protein, 10 aa, Artificial Sequence
  Peptide Derived from Human Papillomavirus
DTSNYNIVTF

SEQ ID NO: 14032 - protein, 9 aa, Artificial Sequence
  Peptide Derived from Human Papillomavirus
ELLMGSFGI

SEQ ID NO: 14033 - protein, 8 aa, Artificial Sequence
  Peptide Derived from Human Papillomavirus
ETPTLQDY

SEQ ID NO: 14034 - protein, 10 aa, Artificial Sequence
  Peptide Derived from Human Papillomavirus
ETPTLQDYVL

SEQ ID NO: 14035 - protein, 11 aa, Artificial Sequence
  Peptide Derived from Human Papillomavirus
GIVCPNCSTRL

SEQ ID NO: 14036 - protein, 10 aa, Artificial Sequence
  Peptide Derived from Human Papillomavirus
ILQELLMGSF

SEQ ID NO: 14037 - protein, 10 aa, Artificial Sequence
  Peptide Derived from Human Papillomavirus
IVCPNCSTRL

SEQ ID NO: 14038 - protein, 8 aa, Artificial Sequence
  Peptide Derived from Human Papillomavirus
LLMGSFGI

SEQ ID NO: 14039 - protein, 8 aa, Artificial Sequence
  Peptide Derived from Human Papillomavirus
PTLQDYVL

SEQ ID NO: 14040 - protein, 10 aa, Artificial Sequence
  Peptide Derived from Human Papillomavirus
PTLQDYVLDL

SEQ ID NO: 14041 - protein, 10 aa, Artificial Sequence
  Peptide Derived from Human Papillomavirus
QVDIRILQEL

SEQ ID NO: 14042 - protein, 11 aa, Artificial Sequence
  Peptide Derived from Human Papillomavirus
QVDIRILQELL

SEQ ID NO: 14043 - protein, 8 aa, Artificial Sequence
  Peptide Derived from Human Papillomavirus
RILQELLM

SEQ ID NO: 14044 - protein, 11 aa, Artificial Sequence
  Peptide Derived from Human Papillomavirus
RILQELLMGSF

SEQ ID NO: 14045 - protein, 11 aa, Artificial Sequence
  Peptide Derived from Human Papillomavirus
RLCVQSTQVDI

SEQ ID NO: 14046 - protein, 8 aa, Artificial Sequence
  Peptide Derived from Human Papillomavirus
STQVDIRI

SEQ ID NO: 14047 - protein, 9 aa, Artificial Sequence
  Peptide Derived from Human Papillomavirus
STQVDIRIL

SEQ ID NO: 14048 - protein, 10 aa, Artificial Sequence
  Peptide Derived from Human Papillomavirus
TFCCQCKSTL

SEQ ID NO: 14049 - protein, 9 aa, Artificial Sequence
  Peptide Derived from Human Papillomavirus
TLQDYVLDL

SEQ ID NO: 14050 - protein, 11 aa, Artificial Sequence
  Peptide Derived from Human Papillomavirus
VLDLQPEATDL

SEQ ID NO: 14051 - protein, 11 aa, Artificial Sequence
  Peptide Derived from Human Papillomavirus
VTFCCQCKSTL

SEQ ID NO: 14052 - protein, 9 aa, Artificial Sequence
  Peptide Derived from Human Papillomavirus
AIANSDTTF

SEQ ID NO: 14053 - protein, 8 aa, Artificial Sequence
  Peptide Derived from Human Papillomavirus
AILEDWNF

SEQ ID NO: 14054 - protein, 10 aa, Artificial Sequence
  Peptide Derived from Human Papillomavirus
AILEDWNFGL

SEQ ID NO: 14055 - protein, 10 aa, Artificial Sequence
  Peptide Derived from Human Papillomavirus
AITPGDCPPL

SEQ ID NO: 14056 - protein, 11 aa, Artificial Sequence
  Peptide Derived from Human Papillomavirus
ALQDTKSNVPL

SEQ ID NO: 14057 - protein, 8 aa, Artificial Sequence
  Peptide Derived from Human Papillomavirus
ATLANSTY

SEQ ID NO: 14058 - protein, 9 aa, Artificial Sequence
  Peptide Derived from Human Papillomavirus
ATLANSTYF

SEQ ID NO: 14059 - protein, 11 aa, Artificial Sequence
  Peptide Derived from Human Papillomavirus
CISMDYKQTQL

SEQ ID NO: 14060 - protein, 9 aa, Artificial Sequence
  Peptide Derived from Human Papillomavirus
CLLGCKPPI

SEQ ID NO: 14061 - protein, 9 aa, Artificial Sequence
  Peptide Derived from Human Papillomavirus
DICNSICKY

SEQ ID NO: 14062 - protein, 9 aa, Artificial Sequence
  Peptide Derived from Human Papillomavirus
DIMTYIHSM

SEQ ID NO: 14063 - protein, 11 aa, Artificial Sequence
  Peptide Derived from Human Papillomavirus
DLDQFPLGRKF

SEQ ID NO: 14064 - protein, 8 aa, Artificial Sequence
  Peptide Derived from Human Papillomavirus
DLQFIFQL

SEQ ID NO: 14065 - protein, 11 aa, Artificial Sequence
  Peptide Derived from Human Papillomavirus
DLQFIFQLCKI

SEQ ID NO: 14066 - protein, 10 aa, Artificial Sequence
  Peptide Derived from Human Papillomavirus
DMVDTGFGAM

SEQ ID NO: 14067 - protein, 8 aa, Artificial Sequence
  Peptide Derived from Human Papillomavirus
DTENSNRY

SEQ ID NO: 14068 - protein, 9 aa, Artificial Sequence
  Peptide Derived from Human Papillomavirus
DTGFGAMDF

SEQ ID NO: 14069 - protein, 8 aa, Artificial Sequence
  Peptide Derived from Human Papillomavirus
DTKSNVPL

SEQ ID NO: 14070 - protein, 10 aa, Artificial Sequence
  Peptide Derived from Human Papillomavirus
DTKSNVPLDI

SEQ ID NO: 14071 - protein, 9 aa, Artificial Sequence
  Peptide Derived from Human Papillomavirus
DTTFKSSNF

SEQ ID NO: 14072 - protein, 8 aa, Artificial Sequence
  Peptide Derived from Human Papillomavirus
DTTRSTNM

SEQ ID NO: 14073 - protein, 11 aa, Artificial Sequence
  Peptide Derived from Human Papillomavirus
DTYRFVTSQAI

SEQ ID NO: 14074 - protein, 9 aa, Artificial Sequence
  Peptide Derived from Human Papillomavirus
DYKQTQLCL

SEQ ID NO: 14075 - protein, 10 aa, Artificial Sequence
  Peptide Derived from Human Papillomavirus
DYKQTQLCLL

SEQ ID NO: 14076 - protein, 10 aa, Artificial Sequence
  Peptide Derived from Human Papillomavirus
DYLKMVAEPY

SEQ ID NO: 14077 - protein, 9 aa, Artificial Sequence
  Peptide Derived from Human Papillomavirus
DYVFWEVNL

SEQ ID NO: 14078 - protein, 8 aa, Artificial Sequence
  Peptide Derived from Human Papillomavirus
EFDLQFIF

SEQ ID NO: 14079 - protein, 10 aa, Artificial Sequence
  Peptide Derived from Human Papillomavirus
EFDLQFIFQL

SEQ ID NO: 14080 - protein, 8 aa, Artificial Sequence
  Peptide Derived from Human Papillomavirus
EVGRGQPL

SEQ ID NO: 14081 - protein, 8 aa, Artificial Sequence
  Peptide Derived from Human Papillomavirus
EVNLKEKF

SEQ ID NO: 14082 - protein, 9 aa, Artificial Sequence
  Peptide Derived from Human Papillomavirus
EYLRHGEEF

SEQ ID NO: 14083 - protein, 11 aa, Artificial Sequence
  Peptide Derived from Human Papillomavirus
EYLRHGEEFDL

SEQ ID NO: 14084 - protein, 8 aa, Artificial Sequence
  Peptide Derived from Human Papillomavirus
EYVTRTNI

SEQ ID NO: 14085 - protein, 9 aa, Artificial Sequence
  Peptide Derived from Human Papillomavirus
EYVTRTNIY

SEQ ID NO: 14086 - protein, 10 aa, Artificial Sequence
  Peptide Derived from Human Papillomavirus
EYVTRTNIYY

SEQ ID NO: 14087 - protein, 9 aa, Artificial Sequence
  Peptide Derived from Human Papillomavirus
FFYLRREQM

SEQ ID NO: 14088 - protein, 10 aa, Artificial Sequence
  Peptide Derived from Human Papillomavirus
FFYLRREQMF

SEQ ID NO: 14089 - protein, 8 aa, Artificial Sequence
  Peptide Derived from Human Papillomavirus
FIFQLCKI

SEQ ID NO: 14090 - protein, 10 aa, Artificial Sequence
  Peptide Derived from Human Papillomavirus
FIFQLCKITL

SEQ ID NO: 14091 - protein, 10 aa, Artificial Sequence
  Peptide Derived from Human Papillomavirus
FWEVNLKEKF

SEQ ID NO: 14092 - protein, 8 aa, Artificial Sequence
  Peptide Derived from Human Papillomavirus
FYLRREQM

SEQ ID NO: 14093 - protein, 9 aa, Artificial Sequence
  Peptide Derived from Human Papillomavirus
FYLRREQMF

SEQ ID NO: 14094 - protein, 9 aa, Artificial Sequence
  Peptide Derived from Human Papillomavirus
FYNPETQRL

SEQ ID NO: 14095 - protein, 11 aa, Artificial Sequence
  Peptide Derived from Human Papillomavirus
FYNPETQRLVW

SEQ ID NO: 14096 - protein, 10 aa, Artificial Sequence
  Peptide Derived from Human Papillomavirus
GFGAMDFTAL

SEQ ID NO: 14097 - protein, 8 aa, Artificial Sequence
  Peptide Derived from Human Papillomavirus
GFPDTSFY

SEQ ID NO: 14098 - protein, 8 aa, Artificial Sequence
  Peptide Derived from Human Papillomavirus
GICWGNQL

SEQ ID NO: 14099 - protein, 9 aa, Artificial Sequence
  Peptide Derived from Human Papillomavirus
GICWGNQLF

SEQ ID NO: 14100 - protein, 8 aa, Artificial Sequence
  Peptide Derived from Human Papillomavirus
GISGHPLL

SEQ ID NO: 14101 - protein, 11 aa, Artificial Sequence
  Peptide Derived from Human Papillomavirus
GISGHPLLNKF

SEQ ID NO: 14102 - protein, 10 aa, Artificial Sequence
  Peptide Derived from Human Papillomavirus
GLEVGRGQPL

SEQ ID NO: 14103 - protein, 11 aa, Artificial Sequence
  Peptide Derived from Human Papillomavirus
GLQYRVFRVRL

SEQ ID NO: 14104 - protein, 10 aa, Artificial Sequence
  Peptide Derived from Human Papillomavirus
GLTTPPSGSL

SEQ ID NO: 14105 - protein, 8 aa, Artificial Sequence
  Peptide Derived from Human Papillomavirus
GTDNRECI

SEQ ID NO: 14106 - protein, 10 aa, Artificial Sequence
  Peptide Derived from Human Papillomavirus
GTDNRECISM

SEQ ID NO: 14107 - protein, 11 aa, Artificial Sequence
  Peptide Derived from Human Papillomavirus
GTVGESVPTDL

SEQ ID NO: 14108 - protein, 9 aa, Artificial Sequence
  Peptide Derived from Human Papillomavirus
GVGISGHPL

SEQ ID NO: 14109 - protein, 10 aa, Artificial Sequence
  Peptide Derived from Human Papillomavirus
GVGISGHPLL

SEQ ID NO: 14110 - protein, 8 aa, Artificial Sequence
  Peptide Derived from Human Papillomavirus
GYRARPKF

SEQ ID NO: 14111 - protein, 8 aa, Artificial Sequence
  Peptide Derived from Human Papillomavirus
IFNKPYWM

SEQ ID NO: 14112 - protein, 9 aa, Artificial Sequence
  Peptide Derived from Human Papillomavirus
IFQLCKITL

SEQ ID NO: 14113 - protein, 9 aa, Artificial Sequence
  Peptide Derived from Human Papillomavirus
ILEDWNFGL

SEQ ID NO: 14114 - protein, 8 aa, Artificial Sequence
  Peptide Derived from Human Papillomavirus
IMTYIHSM

SEQ ID NO: 14115 - protein, 8 aa, Artificial Sequence
  Peptide Derived from Human Papillomavirus
ITLSADIM

SEQ ID NO: 14116 - protein, 10 aa, Artificial Sequence
  Peptide Derived from Human Papillomavirus
ITLSADIMTY

SEQ ID NO: 14117 - protein, 11 aa, Artificial Sequence
  Peptide Derived from Human Papillomavirus
ITLSADIMTYI

SEQ ID NO: 14118 - protein, 9 aa, Artificial Sequence
  Peptide Derived from Human Papillomavirus
ITPGDCPPL

SEQ ID NO: 14119 - protein, 11 aa, Artificial Sequence
  Peptide Derived from Human Papillomavirus
ITPGDCPPLEL

SEQ ID NO: 14120 - protein, 9 aa, Artificial Sequence
  Peptide Derived from Human Papillomavirus
IVVPKVSGL

SEQ ID NO: 14121 - protein, 11 aa, Artificial Sequence
  Peptide Derived from Human Papillomavirus
IVVPKVSGLQY

SEQ ID NO: 14122 - protein, 10 aa, Artificial Sequence
  Peptide Derived from Human Papillomavirus
IYYHAGSARL

SEQ ID NO: 14123 - protein, 11 aa, Artificial Sequence
  Peptide Derived from Human Papillomavirus
IYYHAGSARLL

SEQ ID NO: 14124 - protein, 11 aa, Artificial Sequence
  Peptide Derived from Human Papillomavirus
KFDDTENSNRY

SEQ ID NO: 14125 - protein, 9 aa, Artificial Sequence
  Peptide Derived from Human Papillomavirus
KFGFPDTSF

SEQ ID NO: 14126 - protein, 10 aa, Artificial Sequence
  Peptide Derived from Human Papillomavirus
KFGFPDTSFY

SEQ ID NO: 14127 - protein, 8 aa, Artificial Sequence
  Peptide Derived from Human Papillomavirus
KFLLQAGY

SEQ ID NO: 14128 - protein, 9 aa, Artificial Sequence
  Peptide Derived from Human Papillomavirus
KFSADLDQF

SEQ ID NO: 14129 - protein, 11 aa, Artificial Sequence
  Peptide Derived from Human Papillomavirus
KFSADLDQFPL

SEQ ID NO: 14130 - protein, 8 aa, Artificial Sequence
  Peptide Derived from Human Papillomavirus
KITLSADI

SEQ ID NO: 14131 - protein, 9 aa, Artificial Sequence
  Peptide Derived from Human Papillomavirus
KITLSADIM

SEQ ID NO: 14132 - protein, 11 aa, Artificial Sequence
  Peptide Derived from Human Papillomavirus
KITLSADIMTY

SEQ ID NO: 14133 - protein, 10 aa, Artificial Sequence
  Peptide Derived from Human Papillomavirus
KIVVPKVSGL

SEQ ID NO: 14134 - protein, 11 aa, Artificial Sequence
  Peptide Derived from Human Papillomavirus
KMVAEPYGDTL

SEQ ID NO: 14135 - protein, 10 aa, Artificial Sequence
  Peptide Derived from Human Papillomavirus
KVSGLQYRVF

SEQ ID NO: 14136 - protein, 8 aa, Artificial Sequence
  Peptide Derived from Human Papillomavirus
KVVSTDEY

SEQ ID NO: 14137 - protein, 8 aa, Artificial Sequence
  Peptide Derived from Human Papillomavirus
KYPDYLKM

SEQ ID NO: 14138 - protein, 10 aa, Artificial Sequence
  Peptide Derived from Human Papillomavirus
LFFYLRREQM

SEQ ID NO: 14139 - protein, 11 aa, Artificial Sequence
  Peptide Derived from Human Papillomavirus
LFFYLRREQMF

SEQ ID NO: 14140 - protein, 8 aa, Artificial Sequence
  Peptide Derived from Human Papillomavirus
LLGCKPPI

SEQ ID NO: 14141 - protein, 8 aa, Artificial Sequence
  Peptide Derived from Human Papillomavirus
LLTVGHPY

SEQ ID NO: 14142 - protein, 9 aa, Artificial Sequence
  Peptide Derived from Human Papillomavirus
LLTVGHPYY

SEQ ID NO: 14143 - protein, 11 aa, Artificial Sequence
  Peptide Derived from Human Papillomavirus
LLTVGHPYYSI

SEQ ID NO: 14144 - protein, 9 aa, Artificial Sequence
  Peptide Derived from Human Papillomavirus
LTTPPSGSL

SEQ ID NO: 14145 - protein, 8 aa, Artificial Sequence
  Peptide Derived from Human Papillomavirus
LTVGHPYY

SEQ ID NO: 14146 - protein, 10 aa, Artificial Sequence
  Peptide Derived from Human Papillomavirus
LTVGHPYYSI

SEQ ID NO: 14147 - protein, 8 aa, Artificial Sequence
  Peptide Derived from Human Papillomavirus
LVWACVGL

SEQ ID NO: 14148 - protein, 10 aa, Artificial Sequence
  Peptide Derived from Human Papillomavirus
LWRPSEATVY

SEQ ID NO: 14149 - protein, 11 aa, Artificial Sequence
  Peptide Derived from Human Papillomavirus
LWRPSEATVYL

SEQ ID NO: 14150 - protein, 11 aa, Artificial Sequence
  Peptide Derived from Human Papillomavirus
MTYIHSMNPAI

SEQ ID NO: 14151 - protein, 10 aa, Artificial Sequence
  Peptide Derived from Human Papillomavirus
MVAEPYGDTL

SEQ ID NO: 14152 - protein, 11 aa, Artificial Sequence
  Peptide Derived from Human Papillomavirus
MVAEPYGDTLF

SEQ ID NO: 14153 - protein, 9 aa, Artificial Sequence
  Peptide Derived from Human Papillomavirus
MVDTGFGAM

SEQ ID NO: 14154 - protein, 11 aa, Artificial Sequence
  Peptide Derived from Human Papillomavirus
MVDTGFGAMDF

SEQ ID NO: 14155 - protein, 8 aa, Artificial Sequence
  Peptide Derived from Human Papillomavirus
MVTSDAQI

SEQ ID NO: 14156 - protein, 9 aa, Artificial Sequence
  Peptide Derived from Human Papillomavirus
MVTSDAQIF

SEQ ID NO: 14157 - protein, 11 aa, Artificial Sequence
  Peptide Derived from Human Papillomavirus
NIYYHAGSARL

SEQ ID NO: 14158 - protein, 10 aa, Artificial Sequence
  Peptide Derived from Human Papillomavirus
NLKEKFSADL

SEQ ID NO: 14159 - protein, 8 aa, Artificial Sequence
  Peptide Derived from Human Papillomavirus
NMSVCAAI

SEQ ID NO: 14160 - protein, 10 aa, Artificial Sequence
  Peptide Derived from Human Papillomavirus
NVPLDICNSI

SEQ ID NO: 14161 - protein, 8 aa, Artificial Sequence
  Peptide Derived from Human Papillomavirus
PFKDYVFW

SEQ ID NO: 14162 - protein, 8 aa, Artificial Sequence
  Peptide Derived from Human Papillomavirus
PLDICNSI

SEQ ID NO: 14163 - protein, 11 aa, Artificial Sequence
  Peptide Derived from Human Papillomavirus
PLDICNSICKY

SEQ ID NO: 14164 - protein, 9 aa, Artificial Sequence
  Peptide Derived from Human Papillomavirus
PLELKNSVI

SEQ ID NO: 14165 - protein, 8 aa, Artificial Sequence
  Peptide Derived from Human Papillomavirus
PLGRKFLL

SEQ ID NO: 14166 - protein, 11 aa, Artificial Sequence
  Peptide Derived from Human Papillomavirus
PLGVGISGHPL

SEQ ID NO: 14167 - protein, 11 aa, Artificial Sequence
  Peptide Derived from Human Papillomavirus
PVSKVVSTDEY

SEQ ID NO: 14168 - protein, 8 aa, Artificial Sequence
  Peptide Derived from Human Papillomavirus
PYGDTLFF

SEQ ID NO: 14169 - protein, 9 aa, Artificial Sequence
  Peptide Derived from Human Papillomavirus
PYGDTLFFY

SEQ ID NO: 14170 - protein, 10 aa, Artificial Sequence
  Peptide Derived from Human Papillomavirus
PYGDTLFFYL

SEQ ID NO: 14171 - protein, 9 aa, Artificial Sequence
  Peptide Derived from Human Papillomavirus
QFIFQLCKI

SEQ ID NO: 14172 - protein, 11 aa, Artificial Sequence
  Peptide Derived from Human Papillomavirus
QFIFQLCKITL

SEQ ID NO: 14173 - protein, 8 aa, Artificial Sequence
  Peptide Derived from Human Papillomavirus
QFPLGRKF

SEQ ID NO: 14174 - protein, 9 aa, Artificial Sequence
  Peptide Derived from Human Papillomavirus
QFPLGRKFL

SEQ ID NO: 14175 - protein, 10 aa, Artificial Sequence
  Peptide Derived from Human Papillomavirus
QFPLGRKFLL

SEQ ID NO: 14176 - protein, 8 aa, Artificial Sequence
  Peptide Derived from Human Papillomavirus
QIFNKPYW

SEQ ID NO: 14177 - protein, 9 aa, Artificial Sequence
  Peptide Derived from Human Papillomavirus
QIFNKPYWM

SEQ ID NO: 14178 - protein, 11 aa, Artificial Sequence
  Peptide Derived from Human Papillomavirus
QLCKITLSADI

SEQ ID NO: 14179 - protein, 11 aa, Artificial Sequence
  Peptide Derived from Human Papillomavirus
QLCLLGCKPPI

SEQ ID NO: 14180 - protein, 8 aa, Artificial Sequence
  Peptide Derived from Human Papillomavirus
QMFVRHFF

SEQ ID NO: 14181 - protein, 9 aa, Artificial Sequence
  Peptide Derived from Human Papillomavirus
QYRVFRVRL

SEQ ID NO: 14182 - protein, 8 aa, Artificial Sequence
  Peptide Derived from Human Papillomavirus
RFVTSQAI

SEQ ID NO: 14183 - protein, 9 aa, Artificial Sequence
  Peptide Derived from Human Papillomavirus
RLLTVGHPY

SEQ ID NO: 14184 - protein, 10 aa, Artificial Sequence
  Peptide Derived from Human Papillomavirus
RLLTVGHPYY

SEQ ID NO: 14185 - protein, 8 aa, Artificial Sequence
  Peptide Derived from Human Papillomavirus
RLPDPNKF

SEQ ID NO: 14186 - protein, 10 aa, Artificial Sequence
  Peptide Derived from Human Papillomavirus
RLPDPNKFGF

SEQ ID NO: 14187 - protein, 9 aa, Artificial Sequence
  Peptide Derived from Human Papillomavirus
RLVWACVGL

SEQ ID NO: 14188 - protein, 10 aa, Artificial Sequence
  Peptide Derived from Human Papillomavirus
RVRLPDPNKF

SEQ ID NO: 14189 - protein, 10 aa, Artificial Sequence
  Peptide Derived from Human Papillomavirus
SFYNPETQRL

SEQ ID NO: 14190 - protein, 8 aa, Artificial Sequence
  Peptide Derived from Human Papillomavirus
SICKYPDY

SEQ ID NO: 14191 - protein, 9 aa, Artificial Sequence
  Peptide Derived from Human Papillomavirus
SICKYPDYL

SEQ ID NO: 14192 - protein, 11 aa, Artificial Sequence
  Peptide Derived from Human Papillomavirus
SICKYPDYLKM

SEQ ID NO: 14193 - protein, 11 aa, Artificial Sequence
  Peptide Derived from Human Papillomavirus
SIPKSDNPKKI

SEQ ID NO: 14194 - protein, 8 aa, Artificial Sequence
  Peptide Derived from Human Papillomavirus
SLEDTYRF

SEQ ID NO: 14195 - protein, 11 aa, Artificial Sequence
  Peptide Derived from Human Papillomavirus
SLWRPSEATVY

SEQ ID NO: 14196 - protein, 9 aa, Artificial Sequence
  Peptide Derived from Human Papillomavirus
SMDYKQTQL

SEQ ID NO: 14197 - protein, 11 aa, Artificial Sequence
  Peptide Derived from Human Papillomavirus
SMDYKQTQLCL

SEQ ID NO: 14198 - protein, 10 aa, Artificial Sequence
  Peptide Derived from Human Papillomavirus
SMNPAILEDW

SEQ ID NO: 14199 - protein, 9 aa, Artificial Sequence
  Peptide Derived from Human Papillomavirus
SMVTSDAQI

SEQ ID NO: 14200 - protein, 10 aa, Artificial Sequence
  Peptide Derived from Human Papillomavirus
SMVTSDAQIF

SEQ ID NO: 14201 - protein, 10 aa, Artificial Sequence
  Peptide Derived from Human Papillomavirus
STATLANSTY

SEQ ID NO: 14202 - protein, 11 aa, Artificial Sequence
  Peptide Derived from Human Papillomavirus
STATLANSTYF

SEQ ID NO: 14203 - protein, 11 aa, Artificial Sequence
  Peptide Derived from Human Papillomavirus
STDEYVTRTNI

SEQ ID NO: 14204 - protein, 10 aa, Artificial Sequence
  Peptide Derived from Human Papillomavirus
STNMSVCAAI

SEQ ID NO: 14205 - protein, 11 aa, Artificial Sequence
  Peptide Derived from Human Papillomavirus
STYFPTPSGSM

SEQ ID NO: 14206 - protein, 8 aa, Artificial Sequence
  Peptide Derived from Human Papillomavirus
SVIQDGDM

SEQ ID NO: 14207 - protein, 8 aa, Artificial Sequence
  Peptide Derived from Human Papillomavirus
SVPTDLYI

SEQ ID NO: 14208 - protein, 10 aa, Artificial Sequence
  Peptide Derived from Human Papillomavirus
TFKSSNFKEY

SEQ ID NO: 14209 - protein, 11 aa, Artificial Sequence
  Peptide Derived from Human Papillomavirus
TFKSSNFKEYL

SEQ ID NO: 14210 - protein, 8 aa, Artificial Sequence
  Peptide Derived from Human Papillomavirus
TLANSTYF

SEQ ID NO: 14211 - protein, 11 aa, Artificial Sequence
  Peptide Derived from Human Papillomavirus
TLFFYLRREQM

SEQ ID NO: 14212 - protein, 9 aa, Artificial Sequence
  Peptide Derived from Human Papillomavirus
TLSADIMTY

SEQ ID NO: 14213 - protein, 10 aa, Artificial Sequence
  Peptide Derived from Human Papillomavirus
TLSADIMTYI

SEQ ID NO: 14214 - protein, 8 aa, Artificial Sequence
  Peptide Derived from Human Papillomavirus
TTFKSSNF

SEQ ID NO: 14215 - protein, 11 aa, Artificial Sequence
  Peptide Derived from Human Papillomavirus
TTFKSSNFKEY

SEQ ID NO: 14216 - protein, 8 aa, Artificial Sequence
  Peptide Derived from Human Papillomavirus
TTPPSGSL

SEQ ID NO: 14217 - protein, 10 aa, Artificial Sequence
  Peptide Derived from Human Papillomavirus
TVGESVPTDL

SEQ ID NO: 14218 - protein, 11 aa, Artificial Sequence
  Peptide Derived from Human Papillomavirus
TVGESVPTDLY

SEQ ID NO: 14219 - protein, 9 aa, Artificial Sequence
  Peptide Derived from Human Papillomavirus
TVGHPYYSI

SEQ ID NO: 14220 - protein, 11 aa, Artificial Sequence
  Peptide Derived from Human Papillomavirus
TVVDTTRSTNM

SEQ ID NO: 14221 - protein, 10 aa, Artificial Sequence
  Peptide Derived from Human Papillomavirus
TYFPTPSGSM

SEQ ID NO: 14222 - protein, 10 aa, Artificial Sequence
  Peptide Derived from Human Papillomavirus
TYIHSMNPAI

SEQ ID NO: 14223 - protein, 11 aa, Artificial Sequence
  Peptide Derived from Human Papillomavirus
TYIHSMNPAIL

SEQ ID NO: 14224 - protein, 10 aa, Artificial Sequence
  Peptide Derived from Human Papillomavirus
TYRFVTSQAI

SEQ ID NO: 14225 - protein, 11 aa, Artificial Sequence
  Peptide Derived from Human Papillomavirus
VFWEVNLKEKF

SEQ ID NO: 14226 - protein, 8 aa, Artificial Sequence
  Peptide Derived from Human Papillomavirus
VTRTNIYY

SEQ ID NO: 14227 - protein, 8 aa, Artificial Sequence
  Peptide Derived from Human Papillomavirus
VTSDAQIF

SEQ ID NO: 14228 - protein, 10 aa, Artificial Sequence
  Peptide Derived from Human Papillomavirus
VVDTTRSTNM

SEQ ID NO: 14229 - protein, 8 aa, Artificial Sequence
  Peptide Derived from Human Papillomavirus
VVPKVSGL

SEQ ID NO: 14230 - protein, 10 aa, Artificial Sequence
  Peptide Derived from Human Papillomavirus
VVPKVSGLQY

SEQ ID NO: 14231 - protein, 9 aa, Artificial Sequence
  Peptide Derived from Human Papillomavirus
YFPTPSGSM

SEQ ID NO: 14232 - protein, 9 aa, Artificial Sequence
  Peptide Derived from Human Papillomavirus
YIHSMNPAI

SEQ ID NO: 14233 - protein, 10 aa, Artificial Sequence
  Peptide Derived from Human Papillomavirus
YIHSMNPAIL

SEQ ID NO: 14234 - protein, 11 aa, Artificial Sequence
  Peptide Derived from Human Papillomavirus
YIKGSGSTATL

SEQ ID NO: 14235 - protein, 9 aa, Artificial Sequence
  Peptide Derived from Human Papillomavirus
YLKMVAEPY

SEQ ID NO: 14236 - protein, 8 aa, Artificial Sequence
  Peptide Derived from Human Papillomavirus
YLRHGEEF

SEQ ID NO: 14237 - protein, 10 aa, Artificial Sequence
  Peptide Derived from Human Papillomavirus
YLRHGEEFDL

SEQ ID NO: 14238 - protein, 8 aa, Artificial Sequence
  Peptide Derived from Human Papillomavirus
YLRREQMF

SEQ ID NO: 14239 - protein, 8 aa, Artificial Sequence
  Peptide Derived from Human Papillomavirus
YVFWEVNL

SEQ ID NO: 14240 - protein, 8 aa, Artificial Sequence
  Peptide Derived from Human Papillomavirus
YVTRTNIY

SEQ ID NO: 14241 - protein, 9 aa, Artificial Sequence
  Peptide Derived from Human Papillomavirus
YVTRTNIYY

SEQ ID NO: 14242 - protein, 9 aa, Artificial Sequence
  Peptide Derived from Human Papillomavirus
YYHAGSARL

SEQ ID NO: 14243 - protein, 10 aa, Artificial Sequence
  Peptide Derived from Human Papillomavirus
YYHAGSARLL

SEQ ID NO: 14244 - protein, 11 aa, Artificial Sequence
  Peptide Derived from Human Papillomavirus
ALTSRRNTVRY

SEQ ID NO: 14245 - protein, 9 aa, Artificial Sequence
  Peptide Derived from Human Papillomavirus
ATIGARVHY

SEQ ID NO: 14246 - protein, 10 aa, Artificial Sequence
  Peptide Derived from Human Papillomavirus
ATIGARVHYY

SEQ ID NO: 14247 - protein, 11 aa, Artificial Sequence
  Peptide Derived from Human Papillomavirus
ATIGARVHYYY

SEQ ID NO: 14248 - protein, 8 aa, Artificial Sequence
  Peptide Derived from Human Papillomavirus
ATQQVKVI

SEQ ID NO: 14249 - protein, 10 aa, Artificial Sequence
  Peptide Derived from Human Papillomavirus
ATTADTTPAI

SEQ ID NO: 14250 - protein, 11 aa, Artificial Sequence
  Peptide Derived from Human Papillomavirus
ATTADTTPAIL

SEQ ID NO: 14251 - protein, 11 aa, Artificial Sequence
  Peptide Derived from Human Papillomavirus
ATTTSTLNDGL

SEQ ID NO: 14252 - protein, 11 aa, Artificial Sequence
  Peptide Derived from Human Papillomavirus
AVQSTSAVSAY

SEQ ID NO: 14253 - protein, 11 aa, Artificial Sequence
  Peptide Derived from Human Papillomavirus
AYETVNAEESL

SEQ ID NO: 14254 - protein, 11 aa, Artificial Sequence
  Peptide Derived from Human Papillomavirus
AYVPTNTTVPL

SEQ ID NO: 14255 - protein, 8 aa, Artificial Sequence
  Peptide Derived from Human Papillomavirus
DFLDIIAL

SEQ ID NO: 14256 - protein, 8 aa, Artificial Sequence
  Peptide Derived from Human Papillomavirus
DFYLHPSY

SEQ ID NO: 14257 - protein, 9 aa, Artificial Sequence
  Peptide Derived from Human Papillomavirus
DFYLHPSYY

SEQ ID NO: 14258 - protein, 10 aa, Artificial Sequence
  Peptide Derived from Human Papillomavirus
DFYLHPSYYM

SEQ ID NO: 14259 - protein, 11 aa, Artificial Sequence
  Peptide Derived from Human Papillomavirus
DFYLHPSYYML

SEQ ID NO: 14260 - protein, 10 aa, Artificial Sequence
  Peptide Derived from Human Papillomavirus
DIIALHRPAL

SEQ ID NO: 14261 - protein, 8 aa, Artificial Sequence
  Peptide Derived from Human Papillomavirus
DIYADTDF

SEQ ID NO: 14262 - protein, 8 aa, Artificial Sequence
  Peptide Derived from Human Papillomavirus
DVGAPAPI

SEQ ID NO: 14263 - protein, 11 aa, Artificial Sequence
  Peptide Derived from Human Papillomavirus
DVIPKIEHTTI

SEQ ID NO: 14264 - protein, 8 aa, Artificial Sequence
  Peptide Derived from Human Papillomavirus
EIPMDTFI

SEQ ID NO: 14265 - protein, 8 aa, Artificial Sequence
  Peptide Derived from Human Papillomavirus
ETSGHLLL

SEQ ID NO: 14266 - protein, 9 aa, Artificial Sequence
  Peptide Derived from Human Papillomavirus
ETVNAEESL

SEQ ID NO: 14267 - protein, 10 aa, Artificial Sequence
  Peptide Derived from Human Papillomavirus
ETVNAEESLY

SEQ ID NO: 14268 - protein, 11 aa, Artificial Sequence
  Peptide Derived from Human Papillomavirus
ETVNAEESLYF

SEQ ID NO: 14269 - protein, 10 aa, Artificial Sequence
  Peptide Derived from Human Papillomavirus
FIVSTNNENI

SEQ ID NO: 14270 - protein, 8 aa, Artificial Sequence
  Peptide Derived from Human Papillomavirus
FLSAPKQL

SEQ ID NO: 14271 - protein, 9 aa, Artificial Sequence
  Peptide Derived from Human Papillomavirus
FLSAPKQLI

SEQ ID NO: 14272 - protein, 11 aa, Artificial Sequence
  Peptide Derived from Human Papillomavirus
FLSAPKQLITY

SEQ ID NO: 14273 - protein, 8 aa, Artificial Sequence
  Peptide Derived from Human Papillomavirus
FVDGGDFY

SEQ ID NO: 14274 - protein, 9 aa, Artificial Sequence
  Peptide Derived from Human Papillomavirus
FVDGGDFYL

SEQ ID NO: 14275 - protein, 8 aa, Artificial Sequence
  Peptide Derived from Human Papillomavirus
FYLHPSYY

SEQ ID NO: 14276 - protein, 9 aa, Artificial Sequence
  Peptide Derived from Human Papillomavirus
FYLHPSYYM

SEQ ID NO: 14277 - protein, 10 aa, Artificial Sequence
  Peptide Derived from Human Papillomavirus
FYLHPSYYML

SEQ ID NO: 14278 - protein, 11 aa, Artificial Sequence
  Peptide Derived from Human Papillomavirus
GIVDVGAPAPI

SEQ ID NO: 14279 - protein, 11 aa, Artificial Sequence
  Peptide Derived from Human Papillomavirus
GLYDIYADTDF

SEQ ID NO: 14280 - protein, 8 aa, Artificial Sequence
  Peptide Derived from Human Papillomavirus
GTCPSDVI

SEQ ID NO: 14281 - protein, 11 aa, Artificial Sequence
  Peptide Derived from Human Papillomavirus
GTCPSDVIPKI

SEQ ID NO: 14282 - protein, 8 aa, Artificial Sequence
  Peptide Derived from Human Papillomavirus
GTGGRTGY

SEQ ID NO: 14283 - protein, 11 aa, Artificial Sequence
  Peptide Derived from Human Papillomavirus
GTGGRTGYVPL

SEQ ID NO: 14284 - protein, 9 aa, Artificial Sequence
  Peptide Derived from Human Papillomavirus
GVFFGGLGI

SEQ ID NO: 14285 - protein, 8 aa, Artificial Sequence
  Peptide Derived from Human Papillomavirus
GVRRPARL

SEQ ID NO: 14286 - protein, 10 aa, Artificial Sequence
  Peptide Derived from Human Papillomavirus
GVRRPARLGL

SEQ ID NO: 14287 - protein, 11 aa, Artificial Sequence
  Peptide Derived from Human Papillomavirus
GVRRPARLGLY

SEQ ID NO: 14288 - protein, 9 aa, Artificial Sequence
  Peptide Derived from Human Papillomavirus
HLLLSSSSI

SEQ ID NO: 14289 - protein, 8 aa, Artificial Sequence
  Peptide Derived from Human Papillomavirus
HTTIADQI

SEQ ID NO: 14290 - protein, 9 aa, Artificial Sequence
  Peptide Derived from Human Papillomavirus
HTTIADQIL

SEQ ID NO: 14291 - protein, 11 aa, Artificial Sequence
  Peptide Derived from Human Papillomavirus
HTTIADQILRY

SEQ ID NO: 14292 - protein, 9 aa, Artificial Sequence
  Peptide Derived from Human Papillomavirus
HYYYDISSI

SEQ ID NO: 14293 - protein, 9 aa, Artificial Sequence
  Peptide Derived from Human Papillomavirus
IFSGPDVPI

SEQ ID NO: 14294 - protein, 8 aa, Artificial Sequence
  Peptide Derived from Human Papillomavirus
IFVDGGDF

SEQ ID NO: 14295 - protein, 9 aa, Artificial Sequence
  Peptide Derived from Human Papillomavirus
IFVDGGDFY

SEQ ID NO: 14296 - protein, 10 aa, Artificial Sequence
  Peptide Derived from Human Papillomavirus
IFVDGGDFYL

SEQ ID NO: 14297 - protein, 9 aa, Artificial Sequence
  Peptide Derived from Human Papillomavirus
IIALHRPAL

SEQ ID NO: 14298 - protein, 10 aa, Artificial Sequence
  Peptide Derived from Human Papillomavirus
ILRYGSMGVF

SEQ ID NO: 14299 - protein, 11 aa, Artificial Sequence
  Peptide Derived from Human Papillomavirus
ILRYGSMGVFF

SEQ ID NO: 14300 - protein, 8 aa, Artificial Sequence
  Peptide Derived from Human Papillomavirus
ITYENPAY

SEQ ID NO: 14301 - protein, 10 aa, Artificial Sequence
  Peptide Derived from Human Papillomavirus
IVDVGAPAPI

SEQ ID NO: 14302 - protein, 10 aa, Artificial Sequence
  Peptide Derived from Human Papillomavirus
IVSLVEESGI

SEQ ID NO: 14303 - protein, 9 aa, Artificial Sequence
  Peptide Derived from Human Papillomavirus
IVSTNNENI

SEQ ID NO: 14304 - protein, 11 aa, Artificial Sequence
  Peptide Derived from Human Papillomavirus
KIEHTTIADQI

SEQ ID NO: 14305 - protein, 8 aa, Artificial Sequence
  Peptide Derived from Human Papillomavirus
KVIDPTFL

SEQ ID NO: 14306 - protein, 9 aa, Artificial Sequence
  Peptide Derived from Human Papillomavirus
LITYENPAY

SEQ ID NO: 14307 - protein, 8 aa, Artificial Sequence
  Peptide Derived from Human Papillomavirus
LLLSSSSI

SEQ ID NO: 14308 - protein, 10 aa, Artificial Sequence
  Peptide Derived from Human Papillomavirus
LTSRRNTVRY

SEQ ID NO: 14309 - protein, 10 aa, Artificial Sequence
  Peptide Derived from Human Papillomavirus
LYDIYADTDF

SEQ ID NO: 14310 - protein, 10 aa, Artificial Sequence
  Peptide Derived from Human Papillomavirus
LYFSNTSHNI

SEQ ID NO: 14311 - protein, 11 aa, Artificial Sequence
  Peptide Derived from Human Papillomavirus
MLKRRRKRVSY

SEQ ID NO: 14312 - protein, 8 aa, Artificial Sequence
  Peptide Derived from Human Papillomavirus
NIAPDPDF

SEQ ID NO: 14313 - protein, 9 aa, Artificial Sequence
  Peptide Derived from Human Papillomavirus
NIAPDPDFL

SEQ ID NO: 14314 - protein, 11 aa, Artificial Sequence
  Peptide Derived from Human Papillomavirus
NIAPDPDFLDI

SEQ ID NO: 14315 - protein, 8 aa, Artificial Sequence
  Peptide Derived from Human Papillomavirus
NITSSTPI

SEQ ID NO: 14316 - protein, 10 aa, Artificial Sequence
  Peptide Derived from Human Papillomavirus
NTTVPLSTGF

SEQ ID NO: 14317 - protein, 8 aa, Artificial Sequence
  Peptide Derived from Human Papillomavirus
NTVRYSRL

SEQ ID NO: 14318 - protein, 10 aa, Artificial Sequence
  Peptide Derived from Human Papillomavirus
NYEEIPMDTF

SEQ ID NO: 14319 - protein, 11 aa, Artificial Sequence
  Peptide Derived from Human Papillomavirus
NYEEIPMDTFI

SEQ ID NO: 14320 - protein, 10 aa, Artificial Sequence
  Peptide Derived from Human Papillomavirus
PIEHAPTQVF

SEQ ID NO: 14321 - protein, 10 aa, Artificial Sequence
  Peptide Derived from Human Papillomavirus
PIFSGPDVPI

SEQ ID NO: 14322 - protein, 11 aa, Artificial Sequence
  Peptide Derived from Human Papillomavirus
PIPGVRRPARL

SEQ ID NO: 14323 - protein, 11 aa, Artificial Sequence
  Peptide Derived from Human Papillomavirus
PIPHPPTTSGF

SEQ ID NO: 14324 - protein, 8 aa, Artificial Sequence
  Peptide Derived from Human Papillomavirus
PIRPPVSI

SEQ ID NO: 14325 - protein, 11 aa, Artificial Sequence
  Peptide Derived from Human Papillomavirus
PLAPTTPQVSI

SEQ ID NO: 14326 - protein, 9 aa, Artificial Sequence
  Peptide Derived from Human Papillomavirus
PLDPSIVSL

SEQ ID NO: 14327 - protein, 8 aa, Artificial Sequence
  Peptide Derived from Human Papillomavirus
PLSTGFDI

SEQ ID NO: 14328 - protein, 10 aa, Artificial Sequence
  Peptide Derived from Human Papillomavirus
PLSTGFDIPI

SEQ ID NO: 14329 - protein, 11 aa, Artificial Sequence
  Peptide Derived from Human Papillomavirus
PLSTGFDIPIF

SEQ ID NO: 14330 - protein, 10 aa, Artificial Sequence
  Peptide Derived from Human Papillomavirus
PTFLSAPKQL

SEQ ID NO: 14331 - protein, 11 aa, Artificial Sequence
  Peptide Derived from Human Papillomavirus
PTFLSAPKQLI

SEQ ID NO: 14332 - protein, 9 aa, Artificial Sequence
  Peptide Derived from Human Papillomavirus
PTFTDPSVL

SEQ ID NO: 14333 - protein, 8 aa, Artificial Sequence
  Peptide Derived from Human Papillomavirus
PTNTTVPL

SEQ ID NO: 14334 - protein, 10 aa, Artificial Sequence
  Peptide Derived from Human Papillomavirus
PTPAETSGHL

SEQ ID NO: 14335 - protein, 11 aa, Artificial Sequence
  Peptide Derived from Human Papillomavirus
PTPAETSGHLL

SEQ ID NO: 14336 - protein, 9 aa, Artificial Sequence
  Peptide Derived from Human Papillomavirus
PTQVFPFPL

SEQ ID NO: 14337 - protein, 8 aa, Artificial Sequence
  Peptide Derived from Human Papillomavirus
PTTPQVSI

SEQ ID NO: 14338 - protein, 9 aa, Artificial Sequence
  Peptide Derived from Human Papillomavirus
PTTPQVSIF

SEQ ID NO: 14339 - protein, 8 aa, Artificial Sequence
  Peptide Derived from Human Papillomavirus
PTTSGFDI

SEQ ID NO: 14340 - protein, 9 aa, Artificial Sequence
  Peptide Derived from Human Papillomavirus
PVGPLDPSI

SEQ ID NO: 14341 - protein, 10 aa, Artificial Sequence
  Peptide Derived from Human Papillomavirus
PVSIDPVGPL

SEQ ID NO: 14342 - protein, 8 aa, Artificial Sequence
  Peptide Derived from Human Papillomavirus
QILRYGSM

SEQ ID NO: 14343 - protein, 11 aa, Artificial Sequence
  Peptide Derived from Human Papillomavirus
QILRYGSMGVF

SEQ ID NO: 14344 - protein, 10 aa, Artificial Sequence
  Peptide Derived from Human Papillomavirus
QLITYENPAY

SEQ ID NO: 14345 - protein, 11 aa, Artificial Sequence
  Peptide Derived from Human Papillomavirus
QTLRTRSGATI

SEQ ID NO: 14346 - protein, 9 aa, Artificial Sequence
  Peptide Derived from Human Papillomavirus
QVKVIDPTF

SEQ ID NO: 14347 - protein, 10 aa, Artificial Sequence
  Peptide Derived from Human Papillomavirus
QVKVIDPTFL

SEQ ID NO: 14348 - protein, 11 aa, Artificial Sequence
  Peptide Derived from Human Papillomavirus
QVSIFVDGGDF

SEQ ID NO: 14349 - protein, 8 aa, Artificial Sequence
  Peptide Derived from Human Papillomavirus
RLGNKQTL

SEQ ID NO: 14350 - protein, 10 aa, Artificial Sequence
  Peptide Derived from Human Papillomavirus
RTKRASATQL

SEQ ID NO: 14351 - protein, 11 aa, Artificial Sequence
  Peptide Derived from Human Papillomavirus
RTKRASATQLY

SEQ ID NO: 14352 - protein, 8 aa, Artificial Sequence
  Peptide Derived from Human Papillomavirus
RTRSGATI

SEQ ID NO: 14353 - protein, 8 aa, Artificial Sequence
  Peptide Derived from Human Papillomavirus
RVHYYYDI

SEQ ID NO: 14354 - protein, 11 aa, Artificial Sequence
  Peptide Derived from Human Papillomavirus
RVHYYYDISSI

SEQ ID NO: 14355 - protein, 8 aa, Artificial Sequence
  Peptide Derived from Human Papillomavirus
RYGSMGVF

SEQ ID NO: 14356 - protein, 9 aa, Artificial Sequence
  Peptide Derived from Human Papillomavirus
RYGSMGVFF

SEQ ID NO: 14357 - protein, 11 aa, Artificial Sequence
  Peptide Derived from Human Papillomavirus
RYSRLGNKQTL

SEQ ID NO: 14358 - protein, 8 aa, Artificial Sequence
  Peptide Derived from Human Papillomavirus
SIDPVGPL

SEQ ID NO: 14359 - protein, 9 aa, Artificial Sequence
  Peptide Derived from Human Papillomavirus
SIFVDGGDF

SEQ ID NO: 14360 - protein, 10 aa, Artificial Sequence
  Peptide Derived from Human Papillomavirus
SIFVDGGDFY

SEQ ID NO: 14361 - protein, 11 aa, Artificial Sequence
  Peptide Derived from Human Papillomavirus
SIFVDGGDFYL

SEQ ID NO: 14362 - protein, 9 aa, Artificial Sequence
  Peptide Derived from Human Papillomavirus
SINPAGESI

SEQ ID NO: 14363 - protein, 11 aa, Artificial Sequence
  Peptide Derived from Human Papillomavirus
SINPAGESIEM

SEQ ID NO: 14364 - protein, 10 aa, Artificial Sequence
  Peptide Derived from Human Papillomavirus
SIPIRPPVSI

SEQ ID NO: 14365 - protein, 10 aa, Artificial Sequence
  Peptide Derived from Human Papillomavirus
SISTHNYEEI

SEQ ID NO: 14366 - protein, 11 aa, Artificial Sequence
  Peptide Derived from Human Papillomavirus
SIVSLVEESGI

SEQ ID NO: 14367 - protein, 8 aa, Artificial Sequence
  Peptide Derived from Human Papillomavirus
SLVEESGI

SEQ ID NO: 14368 - protein, 11 aa, Artificial Sequence
  Peptide Derived from Human Papillomavirus
SLYFSNTSHNI

SEQ ID NO: 14369 - protein, 9 aa, Artificial Sequence
  Peptide Derived from Human Papillomavirus
SMGVFFGGL

SEQ ID NO: 14370 - protein, 11 aa, Artificial Sequence
  Peptide Derived from Human Papillomavirus
SMGVFFGGLGI

SEQ ID NO: 14371 - protein, 8 aa, Artificial Sequence
  Peptide Derived from Human Papillomavirus
STGFDIPI

SEQ ID NO: 14372 - protein, 9 aa, Artificial Sequence
  Peptide Derived from Human Papillomavirus
STGFDIPIF

SEQ ID NO: 14373 - protein, 8 aa, Artificial Sequence
  Peptide Derived from Human Papillomavirus
STHENPTF

SEQ ID NO: 14374 - protein, 8 aa, Artificial Sequence
  Peptide Derived from Human Papillomavirus
STHNYEEI

SEQ ID NO: 14375 - protein, 10 aa, Artificial Sequence
  Peptide Derived from Human Papillomavirus
STHNYEEIPM

SEQ ID NO: 14376 - protein, 8 aa, Artificial Sequence
  Peptide Derived from Human Papillomavirus
STLNDGLY

SEQ ID NO: 14377 - protein, 10 aa, Artificial Sequence
  Peptide Derived from Human Papillomavirus
STLNDGLYDI

SEQ ID NO: 14378 - protein, 11 aa, Artificial Sequence
  Peptide Derived from Human Papillomavirus
STLNDGLYDIY

SEQ ID NO: 14379 - protein, 8 aa, Artificial Sequence
  Peptide Derived from Human Papillomavirus
STSAVSAY

SEQ ID NO: 14380 - protein, 8 aa, Artificial Sequence
  Peptide Derived from Human Papillomavirus
STVSEASI

SEQ ID NO: 14381 - protein, 10 aa, Artificial Sequence
  Peptide Derived from Human Papillomavirus
STVSEASIPI

SEQ ID NO: 14382 - protein, 10 aa, Artificial Sequence
  Peptide Derived from Human Papillomavirus
SVSTHENPTF

SEQ ID NO: 14383 - protein, 11 aa, Artificial Sequence
  Peptide Derived from Human Papillomavirus
TFIVSTNNENI

SEQ ID NO: 14384 - protein, 9 aa, Artificial Sequence
  Peptide Derived from Human Papillomavirus
TFLSAPKQL

SEQ ID NO: 14385 - protein, 10 aa, Artificial Sequence
  Peptide Derived from Human Papillomavirus
TFLSAPKQLI

SEQ ID NO: 14386 - protein, 8 aa, Artificial Sequence
  Peptide Derived from Human Papillomavirus
TFTDPSVL

SEQ ID NO: 14387 - protein, 9 aa, Artificial Sequence
  Peptide Derived from Human Papillomavirus
TIADQILRY

SEQ ID NO: 14388 - protein, 8 aa, Artificial Sequence
  Peptide Derived from Human Papillomavirus
TIGARVHY

SEQ ID NO: 14389 - protein, 9 aa, Artificial Sequence
  Peptide Derived from Human Papillomavirus
TIGARVHYY

SEQ ID NO: 14390 - protein, 10 aa, Artificial Sequence
  Peptide Derived from Human Papillomavirus
TIGARVHYYY

SEQ ID NO: 14391 - protein, 9 aa, Artificial Sequence
  Peptide Derived from Human Papillomavirus
TLNDGLYDI

SEQ ID NO: 14392 - protein, 10 aa, Artificial Sequence
  Peptide Derived from Human Papillomavirus
TLNDGLYDIY

SEQ ID NO: 14393 - protein, 10 aa, Artificial Sequence
  Peptide Derived from Human Papillomavirus
TLRTRSGATI

SEQ ID NO: 14394 - protein, 9 aa, Artificial Sequence
  Peptide Derived from Human Papillomavirus
TTADTTPAI

SEQ ID NO: 14395 - protein, 10 aa, Artificial Sequence
  Peptide Derived from Human Papillomavirus
TTADTTPAIL

SEQ ID NO: 14396 - protein, 8 aa, Artificial Sequence
  Peptide Derived from Human Papillomavirus
TTIADQIL

SEQ ID NO: 14397 - protein, 10 aa, Artificial Sequence
  Peptide Derived from Human Papillomavirus
TTIADQILRY

SEQ ID NO: 14398 - protein, 8 aa, Artificial Sequence
  Peptide Derived from Human Papillomavirus
TTPQVSIF

SEQ ID NO: 14399 - protein, 9 aa, Artificial Sequence
  Peptide Derived from Human Papillomavirus
TTSTLNDGL

SEQ ID NO: 14400 - protein, 10 aa, Artificial Sequence
  Peptide Derived from Human Papillomavirus
TTSTLNDGLY

SEQ ID NO: 14401 - protein, 10 aa, Artificial Sequence
  Peptide Derived from Human Papillomavirus
TTTSTLNDGL

SEQ ID NO: 14402 - protein, 11 aa, Artificial Sequence
  Peptide Derived from Human Papillomavirus
TTTSTLNDGLY

SEQ ID NO: 14403 - protein, 9 aa, Artificial Sequence
  Peptide Derived from Human Papillomavirus
TTVPLSTGF

SEQ ID NO: 14404 - protein, 11 aa, Artificial Sequence
  Peptide Derived from Human Papillomavirus
TTVPLSTGFDI

SEQ ID NO: 14405 - protein, 8 aa, Artificial Sequence
  Peptide Derived from Human Papillomavirus
TVNAEESL

SEQ ID NO: 14406 - protein, 9 aa, Artificial Sequence
  Peptide Derived from Human Papillomavirus
TVNAEESLY

SEQ ID NO: 14407 - protein, 10 aa, Artificial Sequence
  Peptide Derived from Human Papillomavirus
TVNAEESLYF

SEQ ID NO: 14408 - protein, 8 aa, Artificial Sequence
  Peptide Derived from Human Papillomavirus
TVPLSTGF

SEQ ID NO: 14409 - protein, 10 aa, Artificial Sequence
  Peptide Derived from Human Papillomavirus
TVPLSTGFDI

SEQ ID NO: 14410 - protein, 9 aa, Artificial Sequence
  Peptide Derived from Human Papillomavirus
TVSEASIPI

SEQ ID NO: 14411 - protein, 8 aa, Artificial Sequence
  Peptide Derived from Human Papillomavirus
VFFGGLGI

SEQ ID NO: 14412 - protein, 10 aa, Artificial Sequence
  Peptide Derived from Human Papillomavirus
VIPKIEHTTI

SEQ ID NO: 14413 - protein, 9 aa, Artificial Sequence
  Peptide Derived from Human Papillomavirus
YFSNTSHNI

SEQ ID NO: 14414 - protein, 8 aa, Artificial Sequence
  Peptide Derived from Human Papillomavirus
YLHPSYYM

SEQ ID NO: 14415 - protein, 9 aa, Artificial Sequence
  Peptide Derived from Human Papillomavirus
YLHPSYYML

SEQ ID NO: 14416 - protein, 10 aa, Artificial Sequence
  Peptide Derived from Human Papillomavirus
YVPTNTTVPL

SEQ ID NO: 14417 - protein, 8 aa, Artificial Sequence
  Peptide Derived from Human Papillomavirus
YYYDISSI

SEQ ID NO: 14418 - protein, 9 aa, Artificial Sequence
  Peptide Derived from Human Papillomavirus
AFKKFLKGI

SEQ ID NO: 14419 - protein, 9 aa, Artificial Sequence
  Peptide Derived from Human Papillomavirus
AFLGAFKKF

SEQ ID NO: 14420 - protein, 10 aa, Artificial Sequence
  Peptide Derived from Human Papillomavirus
AFLGAFKKFL

SEQ ID NO: 14421 - protein, 11 aa, Artificial Sequence
  Peptide Derived from Human Papillomavirus
AFLKSNSQAKI

SEQ ID NO: 14422 - protein, 10 aa, Artificial Sequence
  Peptide Derived from Human Papillomavirus
AINDENWKSF

SEQ ID NO: 14423 - protein, 11 aa, Artificial Sequence
  Peptide Derived from Human Papillomavirus
AINDENWKSFF

SEQ ID NO: 14424 - protein, 9 aa, Artificial Sequence
  Peptide Derived from Human Papillomavirus
ALDGNEISI

SEQ ID NO: 14425 - protein, 10 aa, Artificial Sequence
  Peptide Derived from Human Papillomavirus
ALVQLKCPPL

SEQ ID NO: 14426 - protein, 11 aa, Artificial Sequence
  Peptide Derived from Human Papillomavirus
ALVQLKCPPLL

SEQ ID NO: 14427 - protein, 9 aa, Artificial Sequence
  Peptide Derived from Human Papillomavirus
ALYWFRTAM

SEQ ID NO: 14428 - protein, 9 aa, Artificial Sequence
  Peptide Derived from Human Papillomavirus
AVCALKRKF

SEQ ID NO: 14429 - protein, 11 aa, Artificial Sequence
  Peptide Derived from Human Papillomavirus
AVIERRTGDNI

SEQ ID NO: 14430 - protein, 9 aa, Artificial Sequence
  Peptide Derived from Human Papillomavirus
AYGISFMEL

SEQ ID NO: 14431 - protein, 8 aa, Artificial Sequence
  Peptide Derived from Human Papillomavirus
CLTCDRGI

SEQ ID NO: 14432 - protein, 9 aa, Artificial Sequence
  Peptide Derived from Human Papillomavirus
CLTCDRGII

SEQ ID NO: 14433 - protein, 10 aa, Artificial Sequence
  Peptide Derived from Human Papillomavirus
CLTCDRGIII

SEQ ID NO: 14434 - protein, 11 aa, Artificial Sequence
  Peptide Derived from Human Papillomavirus
CLTCDRGIIIL

SEQ ID NO: 14435 - protein, 9 aa, Artificial Sequence
  Peptide Derived from Human Papillomavirus
CMVIEPPKL

SEQ ID NO: 14436 - protein, 9 aa, Artificial Sequence
  Peptide Derived from Human Papillomavirus
CTDWCITGY

SEQ ID NO: 14437 - protein, 11 aa, Artificial Sequence
  Peptide Derived from Human Papillomavirus
CTDWCITGYGI

SEQ ID NO: 14438 - protein, 11 aa, Artificial Sequence
  Peptide Derived from Human Papillomavirus
CTGWFEVEAVI

SEQ ID NO: 14439 - protein, 8 aa, Artificial Sequence
  Peptide Derived from Human Papillomavirus
CTYRKRKI

SEQ ID NO: 14440 - protein, 11 aa, Artificial Sequence
  Peptide Derived from Human Papillomavirus
CTYRKRKIDEL

SEQ ID NO: 14441 - protein, 8 aa, Artificial Sequence
  Peptide Derived from Human Papillomavirus
CVNSKSHF

SEQ ID NO: 14442 - protein, 9 aa, Artificial Sequence
  Peptide Derived from Human Papillomavirus
CVNSKSHFW

SEQ ID NO: 14443 - protein, 10 aa, Artificial Sequence
  Peptide Derived from Human Papillomavirus
CVNSKSHFWL

SEQ ID NO: 14444 - protein, 9 aa, Artificial Sequence
  Peptide Derived from Human Papillomavirus
DIAYYYAQL

SEQ ID NO: 14445 - protein, 10 aa, Artificial Sequence
  Peptide Derived from Human Papillomavirus
DLLEFIDDSM

SEQ ID NO: 14446 - protein, 8 aa, Artificial Sequence
  Peptide Derived from Human Papillomavirus
DLNAVCAL

SEQ ID NO: 14447 - protein, 8 aa, Artificial Sequence
  Peptide Derived from Human Papillomavirus
DLSEMVQW

SEQ ID NO: 14448 - protein, 10 aa, Artificial Sequence
  Peptide Derived from Human Papillomavirus
DLSEMVQWAY

SEQ ID NO: 14449 - protein, 8 aa, Artificial Sequence
  Peptide Derived from Human Papillomavirus
DTEAARAL

SEQ ID NO: 14450 - protein, 9 aa, Artificial Sequence
  Peptide Derived from Human Papillomavirus
DTEAARALF

SEQ ID NO: 14451 - protein, 11 aa, Artificial Sequence
  Peptide Derived from Human Papillomavirus
DTEAARALFNI

SEQ ID NO: 14452 - protein, 10 aa, Artificial Sequence
  Peptide Derived from Human Papillomavirus
DVKHRALVQL

SEQ ID NO: 14453 - protein, 9 aa, Artificial Sequence
  Peptide Derived from Human Papillomavirus
DVQGTTPEW

SEQ ID NO: 14454 - protein, 10 aa, Artificial Sequence
  Peptide Derived from Human Papillomavirus
DVQGTTPEWI

SEQ ID NO: 14455 - protein, 9 aa, Artificial Sequence
  Peptide Derived from Human Papillomavirus
DVTPISWTY

SEQ ID NO: 14456 - protein, 10 aa, Artificial Sequence
  Peptide Derived from Human Papillomavirus
DVTPISWTYI

SEQ ID NO: 14457 - protein, 9 aa, Artificial Sequence
  Peptide Derived from Human Papillomavirus
DWCITGYGI

SEQ ID NO: 14458 - protein, 11 aa, Artificial Sequence
  Peptide Derived from Human Papillomavirus
EFIDDSMENSI

SEQ ID NO: 14459 - protein, 8 aa, Artificial Sequence
  Peptide Derived from Human Papillomavirus
EFKNPFPF

SEQ ID NO: 14460 - protein, 9 aa, Artificial Sequence
  Peptide Derived from Human Papillomavirus
EFTAFLGAF

SEQ ID NO: 14461 - protein, 11 aa, Artificial Sequence
  Peptide Derived from Human Papillomavirus
EISIDVKHRAL

SEQ ID NO: 14462 - protein, 8 aa, Artificial Sequence
  Peptide Derived from Human Papillomavirus
ELTDDSDI

SEQ ID NO: 14463 - protein, 10 aa, Artificial Sequence
  Peptide Derived from Human Papillomavirus
ELTDDSDIAY

SEQ ID NO: 14464 - protein, 11 aa, Artificial Sequence
  Peptide Derived from Human Papillomavirus
ELTDDSDIAYY

SEQ ID NO: 14465 - protein, 11 aa, Artificial Sequence
  Peptide Derived from Human Papillomavirus
EMVQWAYDNEL

SEQ ID NO: 14466 - protein, 10 aa, Artificial Sequence
  Peptide Derived from Human Papillomavirus
ETADDSGTDL

SEQ ID NO: 14467 - protein, 11 aa, Artificial Sequence
  Peptide Derived from Human Papillomavirus
ETADDSGTDLL

SEQ ID NO: 14468 - protein, 11 aa, Artificial Sequence
  Peptide Derived from Human Papillomavirus
ETCMVIEPPKL

SEQ ID NO: 14469 - protein, 9 aa, Artificial Sequence
  Peptide Derived from Human Papillomavirus
EWIDRLTVL

SEQ ID NO: 14470 - protein, 9 aa, Artificial Sequence
  Peptide Derived from Human Papillomavirus
FFSRTWCKL

SEQ ID NO: 14471 - protein, 11 aa, Artificial Sequence
  Peptide Derived from Human Papillomavirus
FFSRTWCKLDL

SEQ ID NO: 14472 - protein, 10 aa, Artificial Sequence
  Peptide Derived from Human Papillomavirus
FIDDSMENSI

SEQ ID NO: 14473 - protein, 8 aa, Artificial Sequence
  Peptide Derived from Human Papillomavirus
FLGAFKKF

SEQ ID NO: 14474 - protein, 9 aa, Artificial Sequence
  Peptide Derived from Human Papillomavirus
FLGAFKKFL

SEQ ID NO: 14475 - protein, 11 aa, Artificial Sequence
  Peptide Derived from Human Papillomavirus
FLKGIPKKSCM

SEQ ID NO: 14476 - protein, 10 aa, Artificial Sequence
  Peptide Derived from Human Papillomavirus
FLKSNSQAKI

SEQ ID NO: 14477 - protein, 8 aa, Artificial Sequence
  Peptide Derived from Human Papillomavirus
FMELVRPF

SEQ ID NO: 14478 - protein, 8 aa, Artificial Sequence
  Peptide Derived from Human Papillomavirus
FTAFLGAF

SEQ ID NO: 14479 - protein, 11 aa, Artificial Sequence
  Peptide Derived from Human Papillomavirus
FTAFLGAFKKF

SEQ ID NO: 14480 - protein, 11 aa, Artificial Sequence
  Peptide Derived from Human Papillomavirus
FWLQPLSDAKI

SEQ ID NO: 14481 - protein, 8 aa, Artificial Sequence
  Peptide Derived from Human Papillomavirus
GIIILLLI

SEQ ID NO: 14482 - protein, 10 aa, Artificial Sequence
  Peptide Derived from Human Papillomavirus
GIIILLLIRF

SEQ ID NO: 14483 - protein, 8 aa, Artificial Sequence
  Peptide Derived from Human Papillomavirus
GIPKKSCM

SEQ ID NO: 14484 - protein, 9 aa, Artificial Sequence
  Peptide Derived from Human Papillomavirus
GIPKKSCML

SEQ ID NO: 14485 - protein, 10 aa, Artificial Sequence
  Peptide Derived from Human Papillomavirus
GIPKKSCMLI

SEQ ID NO: 14486 - protein, 11 aa, Artificial Sequence
  Peptide Derived from Human Papillomavirus
GISFMELVRPF

SEQ ID NO: 14487 - protein, 10 aa, Artificial Sequence
  Peptide Derived from Human Papillomavirus
GISPSVAESL

SEQ ID NO: 14488 - protein, 8 aa, Artificial Sequence
  Peptide Derived from Human Papillomavirus
GMGCTGWF

SEQ ID NO: 14489 - protein, 9 aa, Artificial Sequence
  Peptide Derived from Human Papillomavirus
GMIDDVTPI

SEQ ID NO: 14490 - protein, 11 aa, Artificial Sequence
  Peptide Derived from Human Papillomavirus
GMIDDVTPISW

SEQ ID NO: 14491 - protein, 8 aa, Artificial Sequence
  Peptide Derived from Human Papillomavirus
GMSLIQFL

SEQ ID NO: 14492 - protein, 8 aa, Artificial Sequence
  Peptide Derived from Human Papillomavirus
GTDLLEFI

SEQ ID NO: 14493 - protein, 8 aa, Artificial Sequence
  Peptide Derived from Human Papillomavirus
GTDSRWPY

SEQ ID NO: 14494 - protein, 9 aa, Artificial Sequence
  Peptide Derived from Human Papillomavirus
GTDSRWPYL

SEQ ID NO: 14495 - protein, 10 aa, Artificial Sequence
  Peptide Derived from Human Papillomavirus
GTTPEWIDRL

SEQ ID NO: 14496 - protein, 9 aa, Artificial Sequence
  Peptide Derived from Human Papillomavirus
GWFEVEAVI

SEQ ID NO: 14497 - protein, 11 aa, Artificial Sequence
  Peptide Derived from Human Papillomavirus
HLQCLTCDRGI

SEQ ID NO: 14498 - protein, 10 aa, Artificial Sequence
  Peptide Derived from Human Papillomavirus
HYKKAEKRKM

SEQ ID NO: 14499 - protein, 10 aa, Artificial Sequence
  Peptide Derived from Human Papillomavirus
IFDLSEMVQW

SEQ ID NO: 14500 - protein, 9 aa, Artificial Sequence
  Peptide Derived from Human Papillomavirus
IIILLLIRF

SEQ ID NO: 14501 - protein, 8 aa, Artificial Sequence
  Peptide Derived from Human Papillomavirus
IILLLIRF

SEQ ID NO: 14502 - protein, 9 aa, Artificial Sequence
  Peptide Derived from Human Papillomavirus
ILYKFKEAY

SEQ ID NO: 14503 - protein, 11 aa, Artificial Sequence
  Peptide Derived from Human Papillomavirus
ILYKFKEAYGI

SEQ ID NO: 14504 - protein, 8 aa, Artificial Sequence
  Peptide Derived from Human Papillomavirus
IVKDCGIM

SEQ ID NO: 14505 - protein, 10 aa, Artificial Sequence
  Peptide Derived from Human Papillomavirus
IVQLLRYQNI

SEQ ID NO: 14506 - protein, 8 aa, Artificial Sequence
  Peptide Derived from Human Papillomavirus
KFKEAYGI

SEQ ID NO: 14507 - protein, 10 aa, Artificial Sequence
  Peptide Derived from Human Papillomavirus
KFKEAYGISF

SEQ ID NO: 14508 - protein, 11 aa, Artificial Sequence
  Peptide Derived from Human Papillomavirus
KFKEAYGISFM

SEQ ID NO: 14509 - protein, 10 aa, Artificial Sequence
  Peptide Derived from Human Papillomavirus
KIDELEDSGY

SEQ ID NO: 14510 - protein, 11 aa, Artificial Sequence
  Peptide Derived from Human Papillomavirus
KIGMIDDVTPI

SEQ ID NO: 14511 - protein, 8 aa, Artificial Sequence
  Peptide Derived from Human Papillomavirus
KIVKDCGI

SEQ ID NO: 14512 - protein, 9 aa, Artificial Sequence
  Peptide Derived from Human Papillomavirus
KIVKDCGIM

SEQ ID NO: 14513 - protein, 9 aa, Artificial Sequence
  Peptide Derived from Human Papillomavirus
KLMSNLLSI

SEQ ID NO: 14514 - protein, 9 aa, Artificial Sequence
  Peptide Derived from Human Papillomavirus
KLRSQTCAL

SEQ ID NO: 14515 - protein, 10 aa, Artificial Sequence
  Peptide Derived from Human Papillomavirus
KLRSQTCALY

SEQ ID NO: 14516 - protein, 11 aa, Artificial Sequence
  Peptide Derived from Human Papillomavirus
KLRSQTCALYW

SEQ ID NO: 14517 - protein, 8 aa, Artificial Sequence
  Peptide Derived from Human Papillomavirus
KMSIGQWI

SEQ ID NO: 14518 - protein, 8 aa, Artificial Sequence
  Peptide Derived from Human Papillomavirus
KTNDGGNW

SEQ ID NO: 14519 - protein, 11 aa, Artificial Sequence
  Peptide Derived from Human Papillomavirus
KTNDGGNWRPI

SEQ ID NO: 14520 - protein, 9 aa, Artificial Sequence
  Peptide Derived from Human Papillomavirus
KTSCTDWCI

SEQ ID NO: 14521 - protein, 9 aa, Artificial Sequence
  Peptide Derived from Human Papillomavirus
KVLIKQHSL

SEQ ID NO: 14522 - protein, 10 aa, Artificial Sequence
  Peptide Derived from Human Papillomavirus
KVLIKQHSLY

SEQ ID NO: 14523 - protein, 11 aa, Artificial Sequence
  Peptide Derived from Human Papillomavirus
LFNIQEGEDDL

SEQ ID NO: 14524 - protein, 8 aa, Artificial Sequence
  Peptide Derived from Human Papillomavirus
LIKQHSLY

SEQ ID NO: 14525 - protein, 11 aa, Artificial Sequence
  Peptide Derived from Human Papillomavirus
LIKQHSLYTHL

SEQ ID NO: 14526 - protein, 10 aa, Artificial Sequence
  Peptide Derived from Human Papillomavirus
LIQFLKGCVI

SEQ ID NO: 14527 - protein, 11 aa, Artificial Sequence
  Peptide Derived from Human Papillomavirus
LIRFRCSKNRL

SEQ ID NO: 14528 - protein, 9 aa, Artificial Sequence
  Peptide Derived from Human Papillomavirus
LLEFIDDSM

SEQ ID NO: 14529 - protein, 9 aa, Artificial Sequence
  Peptide Derived from Human Papillomavirus
LLRYQNIEF

SEQ ID NO: 14530 - protein, 9 aa, Artificial Sequence
  Peptide Derived from Human Papillomavirus
LLSIPETCM

SEQ ID NO: 14531 - protein, 11 aa, Artificial Sequence
  Peptide Derived from Human Papillomavirus
LLSIPETCMVI

SEQ ID NO: 14532 - protein, 8 aa, Artificial Sequence
  Peptide Derived from Human Papillomavirus
LMSNLLSI

SEQ ID NO: 14533 - protein, 8 aa, Artificial Sequence
  Peptide Derived from Human Papillomavirus
LTCDRGII

SEQ ID NO: 14534 - protein, 9 aa, Artificial Sequence
  Peptide Derived from Human Papillomavirus
LTCDRGIII

SEQ ID NO: 14535 - protein, 10 aa, Artificial Sequence
  Peptide Derived from Human Papillomavirus
LTCDRGIIIL

SEQ ID NO: 14536 - protein, 11 aa, Artificial Sequence
  Peptide Derived from Human Papillomavirus
LTCDRGIIILL

SEQ ID NO: 14537 - protein, 9 aa, Artificial Sequence
  Peptide Derived from Human Papillomavirus
LTDDSDIAY

SEQ ID NO: 14538 - protein, 10 aa, Artificial Sequence
  Peptide Derived from Human Papillomavirus
LTDDSDIAYY

SEQ ID NO: 14539 - protein, 11 aa, Artificial Sequence
  Peptide Derived from Human Papillomavirus
LTDDSDIAYYY

SEQ ID NO: 14540 - protein, 10 aa, Artificial Sequence
  Peptide Derived from Human Papillomavirus
LTVAKLMSNL

SEQ ID NO: 14541 - protein, 11 aa, Artificial Sequence
  Peptide Derived from Human Papillomavirus
LTVAKLMSNLL

SEQ ID NO: 14542 - protein, 10 aa, Artificial Sequence
  Peptide Derived from Human Papillomavirus
LTVFEFKNPF

SEQ ID NO: 14543 - protein, 8 aa, Artificial Sequence
  Peptide Derived from Human Papillomavirus
LTVLQHSF

SEQ ID NO: 14544 - protein, 9 aa, Artificial Sequence
  Peptide Derived from Human Papillomavirus
LVQLKCPPL

SEQ ID NO: 14545 - protein, 10 aa, Artificial Sequence
  Peptide Derived from Human Papillomavirus
LVQLKCPPLL

SEQ ID NO: 14546 - protein, 11 aa, Artificial Sequence
  Peptide Derived from Human Papillomavirus
LVQLKCPPLLL

SEQ ID NO: 14547 - protein, 8 aa, Artificial Sequence
  Peptide Derived from Human Papillomavirus
LYKFKEAY

SEQ ID NO: 14548 - protein, 10 aa, Artificial Sequence
  Peptide Derived from Human Papillomavirus
LYKFKEAYGI

SEQ ID NO: 14549 - protein, 8 aa, Artificial Sequence
  Peptide Derived from Human Papillomavirus
LYTHLQCL

SEQ ID NO: 14550 - protein, 8 aa, Artificial Sequence
  Peptide Derived from Human Papillomavirus
LYWFRTAM

SEQ ID NO: 14551 - protein, 11 aa, Artificial Sequence
  Peptide Derived from Human Papillomavirus
LYWFRTAMSNI

SEQ ID NO: 14552 - protein, 8 aa, Artificial Sequence
  Peptide Derived from Human Papillomavirus
MIDDVTPI

SEQ ID NO: 14553 - protein, 10 aa, Artificial Sequence
  Peptide Derived from Human Papillomavirus
MIDDVTPISW

SEQ ID NO: 14554 - protein, 8 aa, Artificial Sequence
  Peptide Derived from Human Papillomavirus
MVIEPPKL

SEQ ID NO: 14555 - protein, 10 aa, Artificial Sequence
  Peptide Derived from Human Papillomavirus
MVQWAYDNEL

SEQ ID NO: 14556 - protein, 8 aa, Artificial Sequence
  Peptide Derived from Human Papillomavirus
NIEFTAFL

SEQ ID NO: 14557 - protein, 11 aa, Artificial Sequence
  Peptide Derived from Human Papillomavirus
NIEFTAFLGAF

SEQ ID NO: 14558 - protein, 8 aa, Artificial Sequence
  Peptide Derived from Human Papillomavirus
NIFDLSEM

SEQ ID NO: 14559 - protein, 11 aa, Artificial Sequence
  Peptide Derived from Human Papillomavirus
NIFDLSEMVQW

SEQ ID NO: 14560 - protein, 10 aa, Artificial Sequence
  Peptide Derived from Human Papillomavirus
NILYKFKEAY

SEQ ID NO: 14561 - protein, 9 aa, Artificial Sequence
  Peptide Derived from Human Papillomavirus
NIQEGEDDL

SEQ ID NO: 14562 - protein, 10 aa, Artificial Sequence
  Peptide Derived from Human Papillomavirus
NLLSIPETCM

SEQ ID NO: 14563 - protein, 9 aa, Artificial Sequence
  Peptide Derived from Human Papillomavirus
NTEVETQQM

SEQ ID NO: 14564 - protein, 9 aa, Artificial Sequence
  Peptide Derived from Human Papillomavirus
NTGKSYFGM

SEQ ID NO: 14565 - protein, 11 aa, Artificial Sequence
  Peptide Derived from Human Papillomavirus
NTGKSYFGMSL

SEQ ID NO: 14566 - protein, 8 aa, Artificial Sequence
  Peptide Derived from Human Papillomavirus
NTKANILY

SEQ ID NO: 14567 - protein, 10 aa, Artificial Sequence
  Peptide Derived from Human Papillomavirus
NTKANILYKF

SEQ ID NO: 14568 - protein, 10 aa, Artificial Sequence
  Peptide Derived from Human Papillomavirus
NTNAGTDSRW

SEQ ID NO: 14569 - protein, 10 aa, Artificial Sequence
  Peptide Derived from Human Papillomavirus
NVDSCENVTL

SEQ ID NO: 14570 - protein, 11 aa, Artificial Sequence
  Peptide Derived from Human Papillomavirus
NVTLQEISNVL

SEQ ID NO: 14571 - protein, 10 aa, Artificial Sequence
  Peptide Derived from Human Papillomavirus
NWKSFFSRTW

SEQ ID NO: 14572 - protein, 8 aa, Artificial Sequence
  Peptide Derived from Human Papillomavirus
NWRPIVQL

SEQ ID NO: 14573 - protein, 9 aa, Artificial Sequence
  Peptide Derived from Human Papillomavirus
NWRPIVQLL

SEQ ID NO: 14574 - protein, 11 aa, Artificial Sequence
  Peptide Derived from Human Papillomavirus
NWRPIVQLLRY

SEQ ID NO: 14575 - protein, 10 aa, Artificial Sequence
  Peptide Derived from Human Papillomavirus
PFDENGNPVY

SEQ ID NO: 14576 - protein, 10 aa, Artificial Sequence
  Peptide Derived from Human Papillomavirus
PISWTYIDDY

SEQ ID NO: 14577 - protein, 11 aa, Artificial Sequence
  Peptide Derived from Human Papillomavirus
PISWTYIDDYM

SEQ ID NO: 14578 - protein, 8 aa, Artificial Sequence
  Peptide Derived from Human Papillomavirus
PIVQLLRY

SEQ ID NO: 14579 - protein, 11 aa, Artificial Sequence
  Peptide Derived from Human Papillomavirus
PIVQLLRYQNI

SEQ ID NO: 14580 - protein, 9 aa, Artificial Sequence
  Peptide Derived from Human Papillomavirus
PLSDAKIGM

SEQ ID NO: 14581 - protein, 10 aa, Artificial Sequence
  Peptide Derived from Human Papillomavirus
PLSDAKIGMI

SEQ ID NO: 14582 - protein, 10 aa, Artificial Sequence
  Peptide Derived from Human Papillomavirus
PVYAINDENW

SEQ ID NO: 14583 - protein, 10 aa, Artificial Sequence
  Peptide Derived from Human Papillomavirus
PYLHSRLTVF

SEQ ID NO: 14584 - protein, 8 aa, Artificial Sequence
  Peptide Derived from Human Papillomavirus
QFLKGCVI

SEQ ID NO: 14585 - protein, 8 aa, Artificial Sequence
  Peptide Derived from Human Papillomavirus
QLKCPPLL

SEQ ID NO: 14586 - protein, 9 aa, Artificial Sequence
  Peptide Derived from Human Papillomavirus
QLKCPPLLL

SEQ ID NO: 14587 - protein, 8 aa, Artificial Sequence
  Peptide Derived from Human Papillomavirus
QLLRYQNI

SEQ ID NO: 14588 - protein, 10 aa, Artificial Sequence
  Peptide Derived from Human Papillomavirus
QLLRYQNIEF

SEQ ID NO: 14589 - protein, 8 aa, Artificial Sequence
  Peptide Derived from Human Papillomavirus
QTCALYWF

SEQ ID NO: 14590 - protein, 11 aa, Artificial Sequence
  Peptide Derived from Human Papillomavirus
QVESQNGDTNL

SEQ ID NO: 14591 - protein, 8 aa, Artificial Sequence
  Peptide Derived from Human Papillomavirus
QWAYDNEL

SEQ ID NO: 14592 - protein, 9 aa, Artificial Sequence
  Peptide Derived from Human Papillomavirus
RFRCSKNRL

SEQ ID NO: 14593 - protein, 8 aa, Artificial Sequence
  Peptide Derived from Human Papillomavirus
RLTVAKLM

SEQ ID NO: 14594 - protein, 11 aa, Artificial Sequence
  Peptide Derived from Human Papillomavirus
RLTVAKLMSNL

SEQ ID NO: 14595 - protein, 11 aa, Artificial Sequence
  Peptide Derived from Human Papillomavirus
RLTVFEFKNPF

SEQ ID NO: 14596 - protein, 9 aa, Artificial Sequence
  Peptide Derived from Human Papillomavirus
RLTVLQHSF

SEQ ID NO: 14597 - protein, 8 aa, Artificial Sequence
  Peptide Derived from Human Papillomavirus
RTWCKLDL

SEQ ID NO: 14598 - protein, 9 aa, Artificial Sequence
  Peptide Derived from Human Papillomavirus
RTWCKLDLI

SEQ ID NO: 14599 - protein, 9 aa, Artificial Sequence
  Peptide Derived from Human Papillomavirus
RWPYLHSRL

SEQ ID NO: 14600 - protein, 10 aa, Artificial Sequence
  Peptide Derived from Human Papillomavirus
RYQNIEFTAF

SEQ ID NO: 14601 - protein, 11 aa, Artificial Sequence
  Peptide Derived from Human Papillomavirus
RYQNIEFTAFL

SEQ ID NO: 14602 - protein, 10 aa, Artificial Sequence
  Peptide Derived from Human Papillomavirus
SFFSRTWCKL

SEQ ID NO: 14603 - protein, 9 aa, Artificial Sequence
  Peptide Derived from Human Papillomavirus
SFMELVRPF

SEQ ID NO: 14604 - protein, 9 aa, Artificial Sequence
  Peptide Derived from Human Papillomavirus
SFNDNIFDL

SEQ ID NO: 14605 - protein, 9 aa, Artificial Sequence
  Peptide Derived from Human Papillomavirus
SIDVKHRAL

SEQ ID NO: 14606 - protein, 10 aa, Artificial Sequence
  Peptide Derived from Human Papillomavirus
SINKNKECTY

SEQ ID NO: 14607 - protein, 9 aa, Artificial Sequence
  Peptide Derived from Human Papillomavirus
SIPETCMVI

SEQ ID NO: 14608 - protein, 11 aa, Artificial Sequence
  Peptide Derived from Human Papillomavirus
SLIQFLKGCVI

SEQ ID NO: 14609 - protein, 11 aa, Artificial Sequence
  Peptide Derived from Human Papillomavirus
SLKVLIKQHSL

SEQ ID NO: 14610 - protein, 9 aa, Artificial Sequence
  Peptide Derived from Human Papillomavirus
SLYTHLQCL

SEQ ID NO: 14611 - protein, 9 aa, Artificial Sequence
  Peptide Derived from Human Papillomavirus
SVAESLKVL

SEQ ID NO: 14612 - protein, 10 aa, Artificial Sequence
  Peptide Derived from Human Papillomavirus
SVAESLKVLI

SEQ ID NO: 14613 - protein, 8 aa, Artificial Sequence
  Peptide Derived from Human Papillomavirus
SWTYIDDY

SEQ ID NO: 14614 - protein, 9 aa, Artificial Sequence
  Peptide Derived from Human Papillomavirus
SWTYIDDYM

SEQ ID NO: 14615 - protein, 8 aa, Artificial Sequence
  Peptide Derived from Human Papillomavirus
SYFGMSLI

SEQ ID NO: 14616 - protein, 10 aa, Artificial Sequence
  Peptide Derived from Human Papillomavirus
SYFGMSLIQF

SEQ ID NO: 14617 - protein, 11 aa, Artificial Sequence
  Peptide Derived from Human Papillomavirus
SYFGMSLIQFL

SEQ ID NO: 14618 - protein, 9 aa, Artificial Sequence
  Peptide Derived from Human Papillomavirus
TLQEISNVL

SEQ ID NO: 14619 - protein, 9 aa, Artificial Sequence
  Peptide Derived from Human Papillomavirus
TTPEWIDRL

SEQ ID NO: 14620 - protein, 9 aa, Artificial Sequence
  Peptide Derived from Human Papillomavirus
TVAKLMSNL

SEQ ID NO: 14621 - protein, 10 aa, Artificial Sequence
  Peptide Derived from Human Papillomavirus
TVAKLMSNLL

SEQ ID NO: 14622 - protein, 9 aa, Artificial Sequence
  Peptide Derived from Human Papillomavirus
TVFEFKNPF

SEQ ID NO: 14623 - protein, 11 aa, Artificial Sequence
  Peptide Derived from Human Papillomavirus
TVFEFKNPFPF

SEQ ID NO: 14624 - protein, 11 aa, Artificial Sequence
  Peptide Derived from Human Papillomavirus
TVLQHSFNDNI

SEQ ID NO: 14625 - protein, 8 aa, Artificial Sequence
  Peptide Derived from Human Papillomavirus
TWCKLDLI

SEQ ID NO: 14626 - protein, 11 aa, Artificial Sequence
  Peptide Derived from Human Papillomavirus
TYIDDYMRNAL

SEQ ID NO: 14627 - protein, 10 aa, Artificial Sequence
  Peptide Derived from Human Papillomavirus
TYRKRKIDEL

SEQ ID NO: 14628 - protein, 8 aa, Artificial Sequence
  Peptide Derived from Human Papillomavirus
VFEFKNPF

SEQ ID NO: 14629 - protein, 10 aa, Artificial Sequence
  Peptide Derived from Human Papillomavirus
VFEFKNPFPF

SEQ ID NO: 14630 - protein, 10 aa, Artificial Sequence
  Peptide Derived from Human Papillomavirus
VIERRTGDNI

SEQ ID NO: 14631 - protein, 11 aa, Artificial Sequence
  Peptide Derived from Human Papillomavirus
VISCVNSKSHF

SEQ ID NO: 14632 - protein, 11 aa, Artificial Sequence
  Peptide Derived from Human Papillomavirus
VLHSSNTKANI

SEQ ID NO: 14633 - protein, 8 aa, Artificial Sequence
  Peptide Derived from Human Papillomavirus
VLIKQHSL

SEQ ID NO: 14634 - protein, 9 aa, Artificial Sequence
  Peptide Derived from Human Papillomavirus
VLIKQHSLY

SEQ ID NO: 14635 - protein, 10 aa, Artificial Sequence
  Peptide Derived from Human Papillomavirus
VLQHSFNDNI

SEQ ID NO: 14636 - protein, 11 aa, Artificial Sequence
  Peptide Derived from Human Papillomavirus
VLQHSFNDNIF

SEQ ID NO: 14637 - protein, 10 aa, Artificial Sequence
  Peptide Derived from Human Papillomavirus
VTLQEISNVL

SEQ ID NO: 14638 - protein, 8 aa, Artificial Sequence
  Peptide Derived from Human Papillomavirus
VTPISWTY

SEQ ID NO: 14639 - protein, 9 aa, Artificial Sequence
  Peptide Derived from Human Papillomavirus
VTPISWTYI

SEQ ID NO: 14640 - protein, 9 aa, Artificial Sequence
  Peptide Derived from Human Papillomavirus
VYAINDENW

SEQ ID NO: 14641 - protein, 8 aa, Artificial Sequence
  Peptide Derived from Human Papillomavirus
WFEVEAVI

SEQ ID NO: 14642 - protein, 9 aa, Artificial Sequence
  Peptide Derived from Human Papillomavirus
WFRTAMSNI

SEQ ID NO: 14643 - protein, 8 aa, Artificial Sequence
  Peptide Derived from Human Papillomavirus
WIDRLTVL

SEQ ID NO: 14644 - protein, 10 aa, Artificial Sequence
  Peptide Derived from Human Papillomavirus
WLQPLSDAKI

SEQ ID NO: 14645 - protein, 8 aa, Artificial Sequence
  Peptide Derived from Human Papillomavirus
WTYIDDYM

SEQ ID NO: 14646 - protein, 9 aa, Artificial Sequence
  Peptide Derived from Human Papillomavirus
YFGMSLIQF

SEQ ID NO: 14647 - protein, 10 aa, Artificial Sequence
  Peptide Derived from Human Papillomavirus
YFGMSLIQFL

SEQ ID NO: 14648 - protein, 10 aa, Artificial Sequence
  Peptide Derived from Human Papillomavirus
YIDDYMRNAL

SEQ ID NO: 14649 - protein, 9 aa, Artificial Sequence
  Peptide Derived from Human Papillomavirus
YLHSRLTVF

SEQ ID NO: 14650 - protein, 11 aa, Artificial Sequence
  Peptide Derived from Human Papillomavirus
YLHSRLTVFEF

SEQ ID NO: 14651 - protein, 11 aa, Artificial Sequence
  Peptide Derived from Human Papillomavirus
YMRNALDGNEI

SEQ ID NO: 14652 - protein, 10 aa, Artificial Sequence
  Peptide Derived from Human Papillomavirus
YWFRTAMSNI

SEQ ID NO: 14653 - protein, 9 aa, Artificial Sequence
  Peptide Derived from Human Papillomavirus
AFQVIELQM

SEQ ID NO: 14654 - protein, 11 aa, Artificial Sequence
  Peptide Derived from Human Papillomavirus
AFQVIELQMAL

SEQ ID NO: 14655 - protein, 10 aa, Artificial Sequence
  Peptide Derived from Human Papillomavirus
ALETLSKSQY

SEQ ID NO: 14656 - protein, 9 aa, Artificial Sequence
  Peptide Derived from Human Papillomavirus
ALLYTAKQM

SEQ ID NO: 14657 - protein, 11 aa, Artificial Sequence
  Peptide Derived from Human Papillomavirus
ALLYTAKQMGF

SEQ ID NO: 14658 - protein, 9 aa, Artificial Sequence
  Peptide Derived from Human Papillomavirus
AVQEKILDL

SEQ ID NO: 14659 - protein, 10 aa, Artificial Sequence
  Peptide Derived from Human Papillomavirus
AVQEKILDLY

SEQ ID NO: 14660 - protein, 9 aa, Artificial Sequence
  Peptide Derived from Human Papillomavirus
CLRYRLKPY

SEQ ID NO: 14661 - protein, 10 aa, Artificial Sequence
  Peptide Derived from Human Papillomavirus
CTMVTGKVDY

SEQ ID NO: 14662 - protein, 11 aa, Artificial Sequence
  Peptide Derived from Human Papillomavirus
CTMVTGKVDYI

SEQ ID NO: 14663 - protein, 9 aa, Artificial Sequence
  Peptide Derived from Human Papillomavirus
DLPSQIEHW

SEQ ID NO: 14664 - protein, 11 aa, Artificial Sequence
  Peptide Derived from Human Papillomavirus
DLPSQIEHWKL

SEQ ID NO: 14665 - protein, 10 aa, Artificial Sequence
  Peptide Derived from Human Papillomavirus
DLYEADKTDL

SEQ ID NO: 14666 - protein, 9 aa, Artificial Sequence
  Peptide Derived from Human Papillomavirus
DTAQPLTKL

SEQ ID NO: 14667 - protein, 10 aa, Artificial Sequence
  Peptide Derived from Human Papillomavirus
DTAQPLTKLF

SEQ ID NO: 14668 - protein, 9 aa, Artificial Sequence
  Peptide Derived from Human Papillomavirus
DTTDTAQPL

SEQ ID NO: 14669 - protein, 8 aa, Artificial Sequence
  Peptide Derived from Human Papillomavirus
DYIGMYYI

SEQ ID NO: 14670 - protein, 8 aa, Artificial Sequence
  Peptide Derived from Human Papillomavirus
DYTNWGEI

SEQ ID NO: 14671 - protein, 9 aa, Artificial Sequence
  Peptide Derived from Human Papillomavirus
DYTNWGEIY

SEQ ID NO: 14672 - protein, 10 aa, Artificial Sequence
  Peptide Derived from Human Papillomavirus
DYTNWGEIYI

SEQ ID NO: 14673 - protein, 11 aa, Artificial Sequence
  Peptide Derived from Human Papillomavirus
DYTNWGEIYII

SEQ ID NO: 14674 - protein, 9 aa, Artificial Sequence
  Peptide Derived from Human Papillomavirus
ELQMALETL

SEQ ID NO: 14675 - protein, 10 aa, Artificial Sequence
  Peptide Derived from Human Papillomavirus
ELYSSMSSTW

SEQ ID NO: 14676 - protein, 8 aa, Artificial Sequence
  Peptide Derived from Human Papillomavirus
ETLSKSQY

SEQ ID NO: 14677 - protein, 9 aa, Artificial Sequence
  Peptide Derived from Human Papillomavirus
EVHVGGQVI

SEQ ID NO: 14678 - protein, 11 aa, Artificial Sequence
  Peptide Derived from Human Papillomavirus
EVWLCEPPKCF

SEQ ID NO: 14679 - protein, 9 aa, Artificial Sequence
  Peptide Derived from Human Papillomavirus
FVTEQQQQM

SEQ ID NO: 14680 - protein, 10 aa, Artificial Sequence
  Peptide Derived from Human Papillomavirus
FVTEQQQQMF

SEQ ID NO: 14681 - protein, 11 aa, Artificial Sequence
  Peptide Derived from Human Papillomavirus
FVTEQQQQMFL

SEQ ID NO: 14682 - protein, 11 aa, Artificial Sequence
  Peptide Derived from Human Papillomavirus
GTVKIPPTVQI

SEQ ID NO: 14683 - protein, 10 aa, Artificial Sequence
  Peptide Derived from Human Papillomavirus
HLCHQVVPSL

SEQ ID NO: 14684 - protein, 11 aa, Artificial Sequence
  Peptide Derived from Human Papillomavirus
HLCHQVVPSLL

SEQ ID NO: 14685 - protein, 9 aa, Artificial Sequence
  Peptide Derived from Human Papillomavirus
HLKGESNSL

SEQ ID NO: 14686 - protein, 11 aa, Artificial Sequence
  Peptide Derived from Human Papillomavirus
HWKLIRMECAL

SEQ ID NO: 14687 - protein, 9 aa, Artificial Sequence
  Peptide Derived from Human Papillomavirus
IIEEDTCTM

SEQ ID NO: 14688 - protein, 11 aa, Artificial Sequence
  Peptide Derived from Human Papillomavirus
IVHLKGESNSL

SEQ ID NO: 14689 - protein, 11 aa, Artificial Sequence
  Peptide Derived from Human Papillomavirus
IYIIEEDTCTM

SEQ ID NO: 14690 - protein, 8 aa, Artificial Sequence
  Peptide Derived from Human Papillomavirus
KIPPTVQI

SEQ ID NO: 14691 - protein, 9 aa, Artificial Sequence
  Peptide Derived from Human Papillomavirus
KLFCADPAL

SEQ ID NO: 14692 - protein, 9 aa, Artificial Sequence
  Peptide Derived from Human Papillomavirus
KLIRMECAL

SEQ ID NO: 14693 - protein, 10 aa, Artificial Sequence
  Peptide Derived from Human Papillomavirus
KLIRMECALL

SEQ ID NO: 14694 - protein, 11 aa, Artificial Sequence
  Peptide Derived from Human Papillomavirus
KLIRMECALLY

SEQ ID NO: 14695 - protein, 8 aa, Artificial Sequence
  Peptide Derived from Human Papillomavirus
KTDLPSQI

SEQ ID NO: 14696 - protein, 11 aa, Artificial Sequence
  Peptide Derived from Human Papillomavirus
KTDLPSQIEHW

SEQ ID NO: 14697 - protein, 8 aa, Artificial Sequence
  Peptide Derived from Human Papillomavirus
KTKAFQVI

SEQ ID NO: 14698 - protein, 10 aa, Artificial Sequence
  Peptide Derived from Human Papillomavirus
KTKAFQVIEL

SEQ ID NO: 14699 - protein, 8 aa, Artificial Sequence
  Peptide Derived from Human Papillomavirus
KVDYIGMY

SEQ ID NO: 14700 - protein, 9 aa, Artificial Sequence
  Peptide Derived from Human Papillomavirus
KVDYIGMYY

SEQ ID NO: 14701 - protein, 10 aa, Artificial Sequence
  Peptide Derived from Human Papillomavirus
KVDYIGMYYI

SEQ ID NO: 14702 - protein, 10 aa, Artificial Sequence
  Peptide Derived from Human Papillomavirus
KYFKEDAAKY

SEQ ID NO: 14703 - protein, 8 aa, Artificial Sequence
  Peptide Derived from Human Papillomavirus
KYSKTQMW

SEQ ID NO: 14704 - protein, 8 aa, Artificial Sequence
  Peptide Derived from Human Papillomavirus
LFCADPAL

SEQ ID NO: 14705 - protein, 8 aa, Artificial Sequence
  Peptide Derived from Human Papillomavirus
LIRMECAL

SEQ ID NO: 14706 - protein, 9 aa, Artificial Sequence
  Peptide Derived from Human Papillomavirus
LIRMECALL

SEQ ID NO: 14707 - protein, 10 aa, Artificial Sequence
  Peptide Derived from Human Papillomavirus
LIRMECALLY

SEQ ID NO: 14708 - protein, 9 aa, Artificial Sequence
  Peptide Derived from Human Papillomavirus
LLASKTKAF

SEQ ID NO: 14709 - protein, 8 aa, Artificial Sequence
  Peptide Derived from Human Papillomavirus
LLYTAKQM

SEQ ID NO: 14710 - protein, 10 aa, Artificial Sequence
  Peptide Derived from Human Papillomavirus
LLYTAKQMGF

SEQ ID NO: 14711 - protein, 11 aa, Artificial Sequence
  Peptide Derived from Human Papillomavirus
LTKLFCADPAL

SEQ ID NO: 14712 - protein, 9 aa, Artificial Sequence
  Peptide Derived from Human Papillomavirus
LYEADKTDL

SEQ ID NO: 14713 - protein, 9 aa, Artificial Sequence
  Peptide Derived from Human Papillomavirus
LYSSMSSTW

SEQ ID NO: 14714 - protein, 11 aa, Artificial Sequence
  Peptide Derived from Human Papillomavirus
LYSSMSSTWHW

SEQ ID NO: 14715 - protein, 9 aa, Artificial Sequence
  Peptide Derived from Human Papillomavirus
LYTAKQMGF

SEQ ID NO: 14716 - protein, 8 aa, Artificial Sequence
  Peptide Derived from Human Papillomavirus
MFLGTVKI

SEQ ID NO: 14717 - protein, 8 aa, Artificial Sequence
  Peptide Derived from Human Papillomavirus
MVTGKVDY

SEQ ID NO: 14718 - protein, 9 aa, Artificial Sequence
  Peptide Derived from Human Papillomavirus
MVTGKVDYI

SEQ ID NO: 14719 - protein, 11 aa, Artificial Sequence
  Peptide Derived from Human Papillomavirus
MVTGKVDYIGM

SEQ ID NO: 14720 - protein, 11 aa, Artificial Sequence
  Peptide Derived from Human Papillomavirus
MWEVHVGGQVI

SEQ ID NO: 14721 - protein, 11 aa, Artificial Sequence
  Peptide Derived from Human Papillomavirus
MYYIHNCEKVY

SEQ ID NO: 14722 - protein, 8 aa, Artificial Sequence
  Peptide Derived from Human Papillomavirus
NTMDYTNW

SEQ ID NO: 14723 - protein, 11 aa, Artificial Sequence
  Peptide Derived from Human Papillomavirus
NTMDYTNWGEI

SEQ ID NO: 14724 - protein, 8 aa, Artificial Sequence
  Peptide Derived from Human Papillomavirus
NVAPIVHL

SEQ ID NO: 14725 - protein, 8 aa, Artificial Sequence
  Peptide Derived from Human Papillomavirus
NWGEIYII

SEQ ID NO: 14726 - protein, 9 aa, Artificial Sequence
  Peptide Derived from Human Papillomavirus
PTSISSNQI

SEQ ID NO: 14727 - protein, 9 aa, Artificial Sequence
  Peptide Derived from Human Papillomavirus
PTVQISTGF

SEQ ID NO: 14728 - protein, 10 aa, Artificial Sequence
  Peptide Derived from Human Papillomavirus
PTVQISTGFM

SEQ ID NO: 14729 - protein, 9 aa, Artificial Sequence
  Peptide Derived from Human Papillomavirus
PYKELYSSM

SEQ ID NO: 14730 - protein, 8 aa, Artificial Sequence
  Peptide Derived from Human Papillomavirus
QIEHWKLI

SEQ ID NO: 14731 - protein, 10 aa, Artificial Sequence
  Peptide Derived from Human Papillomavirus
QIEHWKLIRM

SEQ ID NO: 14732 - protein, 9 aa, Artificial Sequence
  Peptide Derived from Human Papillomavirus
QISTGFMTL

SEQ ID NO: 14733 - protein, 10 aa, Artificial Sequence
  Peptide Derived from Human Papillomavirus
QISTTETADI

SEQ ID NO: 14734 - protein, 9 aa, Artificial Sequence
  Peptide Derived from Human Papillomavirus
QMFLGTVKI

SEQ ID NO: 14735 - protein, 8 aa, Artificial Sequence
  Peptide Derived from Human Papillomavirus
QTSLEVWL

SEQ ID NO: 14736 - protein, 9 aa, Artificial Sequence
  Peptide Derived from Human Papillomavirus
QVIELQMAL

SEQ ID NO: 14737 - protein, 9 aa, Artificial Sequence
  Peptide Derived from Human Papillomavirus
QVIVCPTSI

SEQ ID NO: 14738 - protein, 9 aa, Artificial Sequence
  Peptide Derived from Human Papillomavirus
QWTLQQTSL

SEQ ID NO: 14739 - protein, 10 aa, Artificial Sequence
  Peptide Derived from Human Papillomavirus
QYDNDKKNTM

SEQ ID NO: 14740 - protein, 9 aa, Artificial Sequence
  Peptide Derived from Human Papillomavirus
QYSTSQWTL

SEQ ID NO: 14741 - protein, 8 aa, Artificial Sequence
  Peptide Derived from Human Papillomavirus
RLKPYKEL

SEQ ID NO: 14742 - protein, 9 aa, Artificial Sequence
  Peptide Derived from Human Papillomavirus
RLKPYKELY

SEQ ID NO: 14743 - protein, 9 aa, Artificial Sequence
  Peptide Derived from Human Papillomavirus
RLNAVQEKI

SEQ ID NO: 14744 - protein, 10 aa, Artificial Sequence
  Peptide Derived from Human Papillomavirus
RLNAVQEKIL

SEQ ID NO: 14745 - protein, 8 aa, Artificial Sequence
  Peptide Derived from Human Papillomavirus
RMECALLY

SEQ ID NO: 14746 - protein, 11 aa, Artificial Sequence
  Peptide Derived from Human Papillomavirus
RTVCSSNVAPI

SEQ ID NO: 14747 - protein, 10 aa, Artificial Sequence
  Peptide Derived from Human Papillomavirus
RYRLKPYKEL

SEQ ID NO: 14748 - protein, 11 aa, Artificial Sequence
  Peptide Derived from Human Papillomavirus
RYRLKPYKELY

SEQ ID NO: 14749 - protein, 9 aa, Artificial Sequence
  Peptide Derived from Human Papillomavirus
SLKCLRYRL

SEQ ID NO: 14750 - protein, 10 aa, Artificial Sequence
  Peptide Derived from Human Papillomavirus
SLLASKTKAF

SEQ ID NO: 14751 - protein, 8 aa, Artificial Sequence
  Peptide Derived from Human Papillomavirus
SMSSTWHW

SEQ ID NO: 14752 - protein, 8 aa, Artificial Sequence
  Peptide Derived from Human Papillomavirus
STTETADI

SEQ ID NO: 14753 - protein, 10 aa, Artificial Sequence
  Peptide Derived from Human Papillomavirus
TFVTEQQQQM

SEQ ID NO: 14754 - protein, 11 aa, Artificial Sequence
  Peptide Derived from Human Papillomavirus
TFVTEQQQQMF

SEQ ID NO: 14755 - protein, 10 aa, Artificial Sequence
  Peptide Derived from Human Papillomavirus
TLQQTSLEVW

SEQ ID NO: 14756 - protein, 11 aa, Artificial Sequence
  Peptide Derived from Human Papillomavirus
TLQQTSLEVWL

SEQ ID NO: 14757 - protein, 10 aa, Artificial Sequence
  Peptide Derived from Human Papillomavirus
TMDYTNWGEI

SEQ ID NO: 14758 - protein, 11 aa, Artificial Sequence
  Peptide Derived from Human Papillomavirus
TMDYTNWGEIY

SEQ ID NO: 14759 - protein, 9 aa, Artificial Sequence
  Peptide Derived from Human Papillomavirus
TMVTGKVDY

SEQ ID NO: 14760 - protein, 10 aa, Artificial Sequence
  Peptide Derived from Human Papillomavirus
TMVTGKVDYI

SEQ ID NO: 14761 - protein, 8 aa, Artificial Sequence
  Peptide Derived from Human Papillomavirus
TTDTAQPL

SEQ ID NO: 14762 - protein, 11 aa, Artificial Sequence
  Peptide Derived from Human Papillomavirus
TTDTAQPLTKL

SEQ ID NO: 14763 - protein, 10 aa, Artificial Sequence
  Peptide Derived from Human Papillomavirus
TVCSSNVAPI

SEQ ID NO: 14764 - protein, 10 aa, Artificial Sequence
  Peptide Derived from Human Papillomavirus
TVKIPPTVQI

SEQ ID NO: 14765 - protein, 8 aa, Artificial Sequence
  Peptide Derived from Human Papillomavirus
TVQISTGF

SEQ ID NO: 14766 - protein, 9 aa, Artificial Sequence
  Peptide Derived from Human Papillomavirus
TVQISTGFM

SEQ ID NO: 14767 - protein, 11 aa, Artificial Sequence
  Peptide Derived from Human Papillomavirus
TVQISTGFMTL

SEQ ID NO: 14768 - protein, 8 aa, Artificial Sequence
  Peptide Derived from Human Papillomavirus
VIELQMAL

SEQ ID NO: 14769 - protein, 11 aa, Artificial Sequence
  Peptide Derived from Human Papillomavirus
VIELQMALETL

SEQ ID NO: 14770 - protein, 8 aa, Artificial Sequence
  Peptide Derived from Human Papillomavirus
VIVCPTSI

SEQ ID NO: 14771 - protein, 8 aa, Artificial Sequence
  Peptide Derived from Human Papillomavirus
VTEQQQQM

SEQ ID NO: 14772 - protein, 9 aa, Artificial Sequence
  Peptide Derived from Human Papillomavirus
VTEQQQQMF

SEQ ID NO: 14773 - protein, 10 aa, Artificial Sequence
  Peptide Derived from Human Papillomavirus
VTEQQQQMFL

SEQ ID NO: 14774 - protein, 11 aa, Artificial Sequence
  Peptide Derived from Human Papillomavirus
VTFVTEQQQQM

SEQ ID NO: 14775 - protein, 8 aa, Artificial Sequence
  Peptide Derived from Human Papillomavirus
VTGKVDYI

SEQ ID NO: 14776 - protein, 10 aa, Artificial Sequence
  Peptide Derived from Human Papillomavirus
VTGKVDYIGM

SEQ ID NO: 14777 - protein, 11 aa, Artificial Sequence
  Peptide Derived from Human Papillomavirus
VTGKVDYIGMY

SEQ ID NO: 14778 - protein, 10 aa, Artificial Sequence
  Peptide Derived from Human Papillomavirus
VWLCEPPKCF

SEQ ID NO: 14779 - protein, 9 aa, Artificial Sequence
  Peptide Derived from Human Papillomavirus
WLCEPPKCF

SEQ ID NO: 14780 - protein, 8 aa, Artificial Sequence
  Peptide Derived from Human Papillomavirus
WTLQQTSL

SEQ ID NO: 14781 - protein, 11 aa, Artificial Sequence
  Peptide Derived from Human Papillomavirus
WTLQQTSLEVW

SEQ ID NO: 14782 - protein, 9 aa, Artificial Sequence
  Peptide Derived from Human Papillomavirus
YFKEDAAKY

SEQ ID NO: 14783 - protein, 9 aa, Artificial Sequence
  Peptide Derived from Human Papillomavirus
YIHNCEKVY

SEQ ID NO: 14784 - protein, 10 aa, Artificial Sequence
  Peptide Derived from Human Papillomavirus
YIHNCEKVYF

SEQ ID NO: 14785 - protein, 10 aa, Artificial Sequence
  Peptide Derived from Human Papillomavirus
YIIEEDTCTM

SEQ ID NO: 14786 - protein, 8 aa, Artificial Sequence
  Peptide Derived from Human Papillomavirus
YTAKQMGF

SEQ ID NO: 14787 - protein, 11 aa, Artificial Sequence
  Peptide Derived from Human Papillomavirus
YTAKQMGFSHL

SEQ ID NO: 14788 - protein, 8 aa, Artificial Sequence
  Peptide Derived from Human Papillomavirus
YTNWGEIY

SEQ ID NO: 14789 - protein, 9 aa, Artificial Sequence
  Peptide Derived from Human Papillomavirus
YTNWGEIYI

SEQ ID NO: 14790 - protein, 10 aa, Artificial Sequence
  Peptide Derived from Human Papillomavirus
YTNWGEIYII

SEQ ID NO: 14791 - protein, 10 aa, Artificial Sequence
  Peptide Derived from Human Papillomavirus
YYIHNCEKVY

SEQ ID NO: 14792 - protein, 11 aa, Artificial Sequence
  Peptide Derived from Human Papillomavirus
YYIHNCEKVYF

SEQ ID NO: 14793 - protein, 8 aa, Artificial Sequence
  Peptide Derived from Human Papillomavirus
AWLLVLVL

SEQ ID NO: 14794 - protein, 9 aa, Artificial Sequence
  Peptide Derived from Human Papillomavirus
AWLLVLVLL

SEQ ID NO: 14795 - protein, 10 aa, Artificial Sequence
  Peptide Derived from Human Papillomavirus
AWLLVLVLLL

SEQ ID NO: 14796 - protein, 11 aa, Artificial Sequence
  Peptide Derived from Human Papillomavirus
AWLLVLVLLLW

SEQ ID NO: 14797 - protein, 8 aa, Artificial Sequence
  Peptide Derived from Human Papillomavirus
CFILFLCL

SEQ ID NO: 14798 - protein, 10 aa, Artificial Sequence
  Peptide Derived from Human Papillomavirus
CFILFLCLSL

SEQ ID NO: 14799 - protein, 11 aa, Artificial Sequence
  Peptide Derived from Human Papillomavirus
CFILFLCLSLL

SEQ ID NO: 14800 - protein, 9 aa, Artificial Sequence
  Peptide Derived from Human Papillomavirus
CINFHAQHM

SEQ ID NO: 14801 - protein, 9 aa, Artificial Sequence
  Peptide Derived from Human Papillomavirus
CLSLLLRPL

SEQ ID NO: 14802 - protein, 10 aa, Artificial Sequence
  Peptide Derived from Human Papillomavirus
CLSLLLRPLI

SEQ ID NO: 14803 - protein, 11 aa, Artificial Sequence
  Peptide Derived from Human Papillomavirus
CLSLLLRPLIL

SEQ ID NO: 14804 - protein, 8 aa, Artificial Sequence
  Peptide Derived from Human Papillomavirus
CYLLFLYL

SEQ ID NO: 14805 - protein, 10 aa, Artificial Sequence
  Peptide Derived from Human Papillomavirus
CYLLFLYLPM

SEQ ID NO: 14806 - protein, 11 aa, Artificial Sequence
  Peptide Derived from Human Papillomavirus
CYLLFLYLPMM

SEQ ID NO: 14807 - protein, 8 aa, Artificial Sequence
  Peptide Derived from Human Papillomavirus
FFCYLLFL

SEQ ID NO: 14808 - protein, 9 aa, Artificial Sequence
  Peptide Derived from Human Papillomavirus
FFCYLLFLY

SEQ ID NO: 14809 - protein, 10 aa, Artificial Sequence
  Peptide Derived from Human Papillomavirus
FFCYLLFLYL

SEQ ID NO: 14810 - protein, 9 aa, Artificial Sequence
  Peptide Derived from Human Papillomavirus
FILFLCLSL

SEQ ID NO: 14811 - protein, 10 aa, Artificial Sequence
  Peptide Derived from Human Papillomavirus
FILFLCLSLL

SEQ ID NO: 14812 - protein, 11 aa, Artificial Sequence
  Peptide Derived from Human Papillomavirus
FILFLCLSLLL

SEQ ID NO: 14813 - protein, 8 aa, Artificial Sequence
  Peptide Derived from Human Papillomavirus
FLCLSLLL

SEQ ID NO: 14814 - protein, 11 aa, Artificial Sequence
  Peptide Derived from Human Papillomavirus
FLCLSLLLRPL

SEQ ID NO: 14815 - protein, 9 aa, Artificial Sequence
  Peptide Derived from Human Papillomavirus
FLYLPMMCI

SEQ ID NO: 14816 - protein, 11 aa, Artificial Sequence
  Peptide Derived from Human Papillomavirus
FLYLPMMCINF

SEQ ID NO: 14817 - protein, 8 aa, Artificial Sequence
  Peptide Derived from Human Papillomavirus
FVFVLCFI

SEQ ID NO: 14818 - protein, 9 aa, Artificial Sequence
  Peptide Derived from Human Papillomavirus
FVFVLCFIL

SEQ ID NO: 14819 - protein, 10 aa, Artificial Sequence
  Peptide Derived from Human Papillomavirus
FVFVLCFILF

SEQ ID NO: 14820 - protein, 11 aa, Artificial Sequence
  Peptide Derived from Human Papillomavirus
FVFVLCFILFL

SEQ ID NO: 14821 - protein, 8 aa, Artificial Sequence
  Peptide Derived from Human Papillomavirus
FVGSPLKI

SEQ ID NO: 14822 - protein, 9 aa, Artificial Sequence
  Peptide Derived from Human Papillomavirus
FVGSPLKIF

SEQ ID NO: 14823 - protein, 10 aa, Artificial Sequence
  Peptide Derived from Human Papillomavirus
FVGSPLKIFF

SEQ ID NO: 14824 - protein, 8 aa, Artificial Sequence
  Peptide Derived from Human Papillomavirus
FVLCFILF

SEQ ID NO: 14825 - protein, 9 aa, Artificial Sequence
  Peptide Derived from Human Papillomavirus
FVLCFILFL

SEQ ID NO: 14826 - protein, 11 aa, Artificial Sequence
  Peptide Derived from Human Papillomavirus
FVLCFILFLCL

SEQ ID NO: 14827 - protein, 8 aa, Artificial Sequence
  Peptide Derived from Human Papillomavirus
IFFCYLLF

SEQ ID NO: 14828 - protein, 9 aa, Artificial Sequence
  Peptide Derived from Human Papillomavirus
IFFCYLLFL

SEQ ID NO: 14829 - protein, 10 aa, Artificial Sequence
  Peptide Derived from Human Papillomavirus
IFFCYLLFLY

SEQ ID NO: 14830 - protein, 11 aa, Artificial Sequence
  Peptide Derived from Human Papillomavirus
IFFCYLLFLYL

SEQ ID NO: 14831 - protein, 8 aa, Artificial Sequence
  Peptide Derived from Human Papillomavirus
IFVFVLCF

SEQ ID NO: 14832 - protein, 9 aa, Artificial Sequence
  Peptide Derived from Human Papillomavirus
IFVFVLCFI

SEQ ID NO: 14833 - protein, 10 aa, Artificial Sequence
  Peptide Derived from Human Papillomavirus
IFVFVLCFIL

SEQ ID NO: 14834 - protein, 11 aa, Artificial Sequence
  Peptide Derived from Human Papillomavirus
IFVFVLCFILF

SEQ ID NO: 14835 - protein, 8 aa, Artificial Sequence
  Peptide Derived from Human Papillomavirus
ILFLCLSL

SEQ ID NO: 14836 - protein, 9 aa, Artificial Sequence
  Peptide Derived from Human Papillomavirus
ILFLCLSLL

SEQ ID NO: 14837 - protein, 10 aa, Artificial Sequence
  Peptide Derived from Human Papillomavirus
ILFLCLSLLL

SEQ ID NO: 14838 - protein, 9 aa, Artificial Sequence
  Peptide Derived from Human Papillomavirus
ILSISTYAW

SEQ ID NO: 14839 - protein, 10 aa, Artificial Sequence
  Peptide Derived from Human Papillomavirus
ILSISTYAWL

SEQ ID NO: 14840 - protein, 11 aa, Artificial Sequence
  Peptide Derived from Human Papillomavirus
ILSISTYAWLL

SEQ ID NO: 14841 - protein, 8 aa, Artificial Sequence
  Peptide Derived from Human Papillomavirus
KIFFCYLL

SEQ ID NO: 14842 - protein, 9 aa, Artificial Sequence
  Peptide Derived from Human Papillomavirus
KIFFCYLLF

SEQ ID NO: 14843 - protein, 10 aa, Artificial Sequence
  Peptide Derived from Human Papillomavirus
KIFFCYLLFL

SEQ ID NO: 14844 - protein, 11 aa, Artificial Sequence
  Peptide Derived from Human Papillomavirus
KIFFCYLLFLY

SEQ ID NO: 14845 - protein, 8 aa, Artificial Sequence
  Peptide Derived from Human Papillomavirus
LFLCLSLL

SEQ ID NO: 14846 - protein, 9 aa, Artificial Sequence
  Peptide Derived from Human Papillomavirus
LFLCLSLLL

SEQ ID NO: 14847 - protein, 8 aa, Artificial Sequence
  Peptide Derived from Human Papillomavirus
LFLYLPMM

SEQ ID NO: 14848 - protein, 10 aa, Artificial Sequence
  Peptide Derived from Human Papillomavirus
LFLYLPMMCI

SEQ ID NO: 14849 - protein, 8 aa, Artificial Sequence
  Peptide Derived from Human Papillomavirus
LILSISTY

SEQ ID NO: 14850 - protein, 10 aa, Artificial Sequence
  Peptide Derived from Human Papillomavirus
LILSISTYAW

SEQ ID NO: 14851 - protein, 11 aa, Artificial Sequence
  Peptide Derived from Human Papillomavirus
LILSISTYAWL

SEQ ID NO: 14852 - protein, 8 aa, Artificial Sequence
  Peptide Derived from Human Papillomavirus
LLFLYLPM

SEQ ID NO: 14853 - protein, 9 aa, Artificial Sequence
  Peptide Derived from Human Papillomavirus
LLFLYLPMM

SEQ ID NO: 14854 - protein, 11 aa, Artificial Sequence
  Peptide Derived from Human Papillomavirus
LLFLYLPMMCI

SEQ ID NO: 14855 - protein, 8 aa, Artificial Sequence
  Peptide Derived from Human Papillomavirus
LLLRPLIL

SEQ ID NO: 14856 - protein, 10 aa, Artificial Sequence
  Peptide Derived from Human Papillomavirus
LLLRPLILSI

SEQ ID NO: 14857 - protein, 11 aa, Artificial Sequence
  Peptide Derived from Human Papillomavirus
LLLWVFVGSPL

SEQ ID NO: 14858 - protein, 9 aa, Artificial Sequence
  Peptide Derived from Human Papillomavirus
LLRPLILSI

SEQ ID NO: 14859 - protein, 8 aa, Artificial Sequence
  Peptide Derived from Human Papillomavirus
LLVLVLLL

SEQ ID NO: 14860 - protein, 9 aa, Artificial Sequence
  Peptide Derived from Human Papillomavirus
LLVLVLLLW

SEQ ID NO: 14861 - protein, 11 aa, Artificial Sequence
  Peptide Derived from Human Papillomavirus
LLVLVLLLWVF

SEQ ID NO: 14862 - protein, 10 aa, Artificial Sequence
  Peptide Derived from Human Papillomavirus
LLWVFVGSPL

SEQ ID NO: 14863 - protein, 8 aa, Artificial Sequence
  Peptide Derived from Human Papillomavirus
LVLLLWVF

SEQ ID NO: 14864 - protein, 8 aa, Artificial Sequence
  Peptide Derived from Human Papillomavirus
LVLVLLLW

SEQ ID NO: 14865 - protein, 10 aa, Artificial Sequence
  Peptide Derived from Human Papillomavirus
LVLVLLLWVF

SEQ ID NO: 14866 - protein, 9 aa, Artificial Sequence
  Peptide Derived from Human Papillomavirus
LWVFVGSPL

SEQ ID NO: 14867 - protein, 11 aa, Artificial Sequence
  Peptide Derived from Human Papillomavirus
LWVFVGSPLKI

SEQ ID NO: 14868 - protein, 8 aa, Artificial Sequence
  Peptide Derived from Human Papillomavirus
LYLPMMCI

SEQ ID NO: 14869 - protein, 10 aa, Artificial Sequence
  Peptide Derived from Human Papillomavirus
LYLPMMCINF

SEQ ID NO: 14870 - protein, 9 aa, Artificial Sequence
  Peptide Derived from Human Papillomavirus
MIFVFVLCF

SEQ ID NO: 14871 - protein, 10 aa, Artificial Sequence
  Peptide Derived from Human Papillomavirus
MIFVFVLCFI

SEQ ID NO: 14872 - protein, 11 aa, Artificial Sequence
  Peptide Derived from Human Papillomavirus
MIFVFVLCFIL

SEQ ID NO: 14873 - protein, 11 aa, Artificial Sequence
  Peptide Derived from Human Papillomavirus
MMCINFHAQHM

SEQ ID NO: 14874 - protein, 9 aa, Artificial Sequence
  Peptide Derived from Human Papillomavirus
PLILSISTY

SEQ ID NO: 14875 - protein, 11 aa, Artificial Sequence
  Peptide Derived from Human Papillomavirus
PLILSISTYAW

SEQ ID NO: 14876 - protein, 8 aa, Artificial Sequence
  Peptide Derived from Human Papillomavirus
PLKIFFCY

SEQ ID NO: 14877 - protein, 9 aa, Artificial Sequence
  Peptide Derived from Human Papillomavirus
PLKIFFCYL

SEQ ID NO: 14878 - protein, 10 aa, Artificial Sequence
  Peptide Derived from Human Papillomavirus
PLKIFFCYLL

SEQ ID NO: 14879 - protein, 11 aa, Artificial Sequence
  Peptide Derived from Human Papillomavirus
PLKIFFCYLLF

SEQ ID NO: 14880 - protein, 8 aa, Artificial Sequence
  Peptide Derived from Human Papillomavirus
SISTYAWL

SEQ ID NO: 14881 - protein, 9 aa, Artificial Sequence
  Peptide Derived from Human Papillomavirus
SISTYAWLL

SEQ ID NO: 14882 - protein, 11 aa, Artificial Sequence
  Peptide Derived from Human Papillomavirus
SISTYAWLLVL

SEQ ID NO: 14883 - protein, 8 aa, Artificial Sequence
  Peptide Derived from Human Papillomavirus
SLLLRPLI

SEQ ID NO: 14884 - protein, 9 aa, Artificial Sequence
  Peptide Derived from Human Papillomavirus
SLLLRPLIL

SEQ ID NO: 14885 - protein, 11 aa, Artificial Sequence
  Peptide Derived from Human Papillomavirus
SLLLRPLILSI

SEQ ID NO: 14886 - protein, 9 aa, Artificial Sequence
  Peptide Derived from Human Papillomavirus
STYAWLLVL

SEQ ID NO: 14887 - protein, 11 aa, Artificial Sequence
  Peptide Derived from Human Papillomavirus
STYAWLLVLVL

SEQ ID NO: 14888 - protein, 8 aa, Artificial Sequence
  Peptide Derived from Human Papillomavirus
TYAWLLVL

SEQ ID NO: 14889 - protein, 10 aa, Artificial Sequence
  Peptide Derived from Human Papillomavirus
TYAWLLVLVL

SEQ ID NO: 14890 - protein, 11 aa, Artificial Sequence
  Peptide Derived from Human Papillomavirus
TYAWLLVLVLL

SEQ ID NO: 14891 - protein, 9 aa, Artificial Sequence
  Peptide Derived from Human Papillomavirus
VFVGSPLKI

SEQ ID NO: 14892 - protein, 10 aa, Artificial Sequence
  Peptide Derived from Human Papillomavirus
VFVGSPLKIF

SEQ ID NO: 14893 - protein, 11 aa, Artificial Sequence
  Peptide Derived from Human Papillomavirus
VFVGSPLKIFF

SEQ ID NO: 14894 - protein, 8 aa, Artificial Sequence
  Peptide Derived from Human Papillomavirus
VFVLCFIL

SEQ ID NO: 14895 - protein, 9 aa, Artificial Sequence
  Peptide Derived from Human Papillomavirus
VFVLCFILF

SEQ ID NO: 14896 - protein, 10 aa, Artificial Sequence
  Peptide Derived from Human Papillomavirus
VFVLCFILFL

SEQ ID NO: 14897 - protein, 8 aa, Artificial Sequence
  Peptide Derived from Human Papillomavirus
VLCFILFL

SEQ ID NO: 14898 - protein, 10 aa, Artificial Sequence
  Peptide Derived from Human Papillomavirus
VLCFILFLCL

SEQ ID NO: 14899 - protein, 9 aa, Artificial Sequence
  Peptide Derived from Human Papillomavirus
VLVLLLWVF

SEQ ID NO: 14900 - protein, 8 aa, Artificial Sequence
  Peptide Derived from Human Papillomavirus
WLLVLVLL

SEQ ID NO: 14901 - protein, 9 aa, Artificial Sequence
  Peptide Derived from Human Papillomavirus
WLLVLVLLL

SEQ ID NO: 14902 - protein, 10 aa, Artificial Sequence
  Peptide Derived from Human Papillomavirus
WLLVLVLLLW

SEQ ID NO: 14903 - protein, 8 aa, Artificial Sequence
  Peptide Derived from Human Papillomavirus
WVFVGSPL

SEQ ID NO: 14904 - protein, 10 aa, Artificial Sequence
  Peptide Derived from Human Papillomavirus
WVFVGSPLKI

SEQ ID NO: 14905 - protein, 11 aa, Artificial Sequence
  Peptide Derived from Human Papillomavirus
WVFVGSPLKIF

SEQ ID NO: 14906 - protein, 9 aa, Artificial Sequence
  Peptide Derived from Human Papillomavirus
YLLFLYLPM

SEQ ID NO: 14907 - protein, 10 aa, Artificial Sequence
  Peptide Derived from Human Papillomavirus
YLLFLYLPMM

SEQ ID NO: 14908 - protein, 9 aa, Artificial Sequence
  Peptide Derived from Human Papillomavirus
YLPMMCINF

SEQ ID NO: 14909 - protein, 9 aa, Artificial Sequence
  Peptide Derived from Human Papillomavirus
AFADLTVVY

SEQ ID NO: 14910 - protein, 9 aa, Artificial Sequence
  Peptide Derived from Human Papillomavirus
ALETTIHNI

SEQ ID NO: 14911 - protein, 11 aa, Artificial Sequence
  Peptide Derived from Human Papillomavirus
ALETTIHNIEL

SEQ ID NO: 14912 - protein, 8 aa, Artificial Sequence
  Peptide Derived from Human Papillomavirus
CIICQRPL

SEQ ID NO: 14913 - protein, 8 aa, Artificial Sequence
  Peptide Derived from Human Papillomavirus
CLRFLSKI

SEQ ID NO: 14914 - protein, 11 aa, Artificial Sequence
  Peptide Derived from Human Papillomavirus
CLRFLSKISEY

SEQ ID NO: 14915 - protein, 8 aa, Artificial Sequence
  Peptide Derived from Human Papillomavirus
CVECKKPL

SEQ ID NO: 14916 - protein, 11 aa, Artificial Sequence
  Peptide Derived from Human Papillomavirus
CWRSRRRETAL

SEQ ID NO: 14917 - protein, 11 aa, Artificial Sequence
  Peptide Derived from Human Papillomavirus
DFAFADLTVVY

SEQ ID NO: 14918 - protein, 10 aa, Artificial Sequence
  Peptide Derived from Human Papillomavirus
DLCQALETTI

SEQ ID NO: 14919 - protein, 9 aa, Artificial Sequence
  Peptide Derived from Human Papillomavirus
DLNKRFHNI

SEQ ID NO: 14920 - protein, 9 aa, Artificial Sequence
  Peptide Derived from Human Papillomavirus
DTEEKPRTL

SEQ ID NO: 14921 - protein, 8 aa, Artificial Sequence
  Peptide Derived from Human Papillomavirus
EILIRCII

SEQ ID NO: 14922 - protein, 11 aa, Artificial Sequence
  Peptide Derived from Human Papillomavirus
ELQCVECKKPL

SEQ ID NO: 14923 - protein, 9 aa, Artificial Sequence
  Peptide Derived from Human Papillomavirus
ETTIHNIEL

SEQ ID NO: 14924 - protein, 10 aa, Artificial Sequence
  Peptide Derived from Human Papillomavirus
EVYDFAFADL

SEQ ID NO: 14925 - protein, 10 aa, Artificial Sequence
  Peptide Derived from Human Papillomavirus
EYRHYNYSVY

SEQ ID NO: 14926 - protein, 8 aa, Artificial Sequence
  Peptide Derived from Human Papillomavirus
FLSKISEY

SEQ ID NO: 14927 - protein, 11 aa, Artificial Sequence
  Peptide Derived from Human Papillomavirus
FLSKISEYRHY

SEQ ID NO: 14928 - protein, 9 aa, Artificial Sequence
  Peptide Derived from Human Papillomavirus
GICKLCLRF

SEQ ID NO: 14929 - protein, 10 aa, Artificial Sequence
  Peptide Derived from Human Papillomavirus
GICKLCLRFL

SEQ ID NO: 14930 - protein, 8 aa, Artificial Sequence
  Peptide Derived from Human Papillomavirus
HVDLNKRF

SEQ ID NO: 14931 - protein, 11 aa, Artificial Sequence
  Peptide Derived from Human Papillomavirus
HVDLNKRFHNI

SEQ ID NO: 14932 - protein, 11 aa, Artificial Sequence
  Peptide Derived from Human Papillomavirus
HYNYSVYGNTL

SEQ ID NO: 14933 - protein, 8 aa, Artificial Sequence
  Peptide Derived from Human Papillomavirus
KISEYRHY

SEQ ID NO: 14934 - protein, 10 aa, Artificial Sequence
  Peptide Derived from Human Papillomavirus
KISEYRHYNY

SEQ ID NO: 14935 - protein, 10 aa, Artificial Sequence
  Peptide Derived from Human Papillomavirus
KLCLRFLSKI

SEQ ID NO: 14936 - protein, 11 aa, Artificial Sequence
  Peptide Derived from Human Papillomavirus
LIRCIICQRPL

SEQ ID NO: 14937 - protein, 11 aa, Artificial Sequence
  Peptide Derived from Human Papillomavirus
LTVVYREGNPF

SEQ ID NO: 14938 - protein, 11 aa, Artificial Sequence
  Peptide Derived from Human Papillomavirus
NTLEQTVKKPL

SEQ ID NO: 14939 - protein, 9 aa, Artificial Sequence
  Peptide Derived from Human Papillomavirus
NYSVYGNTL

SEQ ID NO: 14940 - protein, 9 aa, Artificial Sequence
  Peptide Derived from Human Papillomavirus
PFGICKLCL

SEQ ID NO: 14941 - protein, 11 aa, Artificial Sequence
  Peptide Derived from Human Papillomavirus
PFGICKLCLRF

SEQ ID NO: 14942 - protein, 10 aa, Artificial Sequence
  Peptide Derived from Human Papillomavirus
PLNEILIRCI

SEQ ID NO: 14943 - protein, 11 aa, Artificial Sequence
  Peptide Derived from Human Papillomavirus
PLNEILIRCII

SEQ ID NO: 14944 - protein, 8 aa, Artificial Sequence
  Peptide Derived from Human Papillomavirus
PLQRSEVY

SEQ ID NO: 14945 - protein, 10 aa, Artificial Sequence
  Peptide Derived from Human Papillomavirus
PLQRSEVYDF

SEQ ID NO: 14946 - protein, 10 aa, Artificial Sequence
  Peptide Derived from Human Papillomavirus
QTVKKPLNEI

SEQ ID NO: 14947 - protein, 11 aa, Artificial Sequence
  Peptide Derived from Human Papillomavirus
QTVKKPLNEIL

SEQ ID NO: 14948 - protein, 9 aa, Artificial Sequence
  Peptide Derived from Human Papillomavirus
RFHNISGRW

SEQ ID NO: 14949 - protein, 9 aa, Artificial Sequence
  Peptide Derived from Human Papillomavirus
RFLSKISEY

SEQ ID NO: 14950 - protein, 10 aa, Artificial Sequence
  Peptide Derived from Human Papillomavirus
RTLHDLCQAL

SEQ ID NO: 14951 - protein, 10 aa, Artificial Sequence
  Peptide Derived from Human Papillomavirus
RWAGRCAACW

SEQ ID NO: 14952 - protein, 10 aa, Artificial Sequence
  Peptide Derived from Human Papillomavirus
TLEQTVKKPL

SEQ ID NO: 14953 - protein, 9 aa, Artificial Sequence
  Peptide Derived from Human Papillomavirus
TLHDLCQAL

SEQ ID NO: 14954 - protein, 8 aa, Artificial Sequence
  Peptide Derived from Human Papillomavirus
TTIHNIEL

SEQ ID NO: 14955 - protein, 9 aa, Artificial Sequence
  Peptide Derived from Human Papillomavirus
TVKKPLNEI

SEQ ID NO: 14956 - protein, 10 aa, Artificial Sequence
  Peptide Derived from Human Papillomavirus
TVKKPLNEIL

SEQ ID NO: 14957 - protein, 11 aa, Artificial Sequence
  Peptide Derived from Human Papillomavirus
TVKKPLNEILI

SEQ ID NO: 14958 - protein, 10 aa, Artificial Sequence
  Peptide Derived from Human Papillomavirus
TVVYREGNPF

SEQ ID NO: 14959 - protein, 9 aa, Artificial Sequence
  Peptide Derived from Human Papillomavirus
VVYREGNPF

SEQ ID NO: 14960 - protein, 11 aa, Artificial Sequence
  Peptide Derived from Human Papillomavirus
VVYREGNPFGI

SEQ ID NO: 14961 - protein, 9 aa, Artificial Sequence
  Peptide Derived from Human Papillomavirus
VYDFAFADL

SEQ ID NO: 14962 - protein, 8 aa, Artificial Sequence
  Peptide Derived from Human Papillomavirus
VYREGNPF

SEQ ID NO: 14963 - protein, 10 aa, Artificial Sequence
  Peptide Derived from Human Papillomavirus
VYREGNPFGI

SEQ ID NO: 14964 - protein, 9 aa, Artificial Sequence
  Peptide Derived from Human Papillomavirus
CVNSTASDL

SEQ ID NO: 14965 - protein, 8 aa, Artificial Sequence
  Peptide Derived from Human Papillomavirus
DLRTIQQL

SEQ ID NO: 14966 - protein, 9 aa, Artificial Sequence
  Peptide Derived from Human Papillomavirus
DLRTIQQLL

SEQ ID NO: 14967 - protein, 10 aa, Artificial Sequence
  Peptide Derived from Human Papillomavirus
DLRTIQQLLM

SEQ ID NO: 14968 - protein, 8 aa, Artificial Sequence
  Peptide Derived from Human Papillomavirus
DLYCYEQL

SEQ ID NO: 14969 - protein, 9 aa, Artificial Sequence
  Peptide Derived from Human Papillomavirus
DLYPEPTDL

SEQ ID NO: 14970 - protein, 10 aa, Artificial Sequence
  Peptide Derived from Human Papillomavirus
DLYPEPTDLY

SEQ ID NO: 14971 - protein, 9 aa, Artificial Sequence
  Peptide Derived from Human Papillomavirus
HTCNTTVRL

SEQ ID NO: 14972 - protein, 8 aa, Artificial Sequence
  Peptide Derived from Human Papillomavirus
LLMGTVNI

SEQ ID NO: 14973 - protein, 8 aa, Artificial Sequence
  Peptide Derived from Human Papillomavirus
LYPEPTDL

SEQ ID NO: 14974 - protein, 9 aa, Artificial Sequence
  Peptide Derived from Human Papillomavirus
LYPEPTDLY

SEQ ID NO: 14975 - protein, 11 aa, Artificial Sequence
  Peptide Derived from Human Papillomavirus
LYPEPTDLYCY

SEQ ID NO: 14976 - protein, 10 aa, Artificial Sequence
  Peptide Derived from Human Papillomavirus
PTDLYCYEQL

SEQ ID NO: 14977 - protein, 8 aa, Artificial Sequence
  Peptide Derived from Human Papillomavirus
PTLKEYVL

SEQ ID NO: 14978 - protein, 10 aa, Artificial Sequence
  Peptide Derived from Human Papillomavirus
PTLKEYVLDL

SEQ ID NO: 14979 - protein, 11 aa, Artificial Sequence
  Peptide Derived from Human Papillomavirus
PTLKEYVLDLY

SEQ ID NO: 14980 - protein, 9 aa, Artificial Sequence
  Peptide Derived from Human Papillomavirus
QLLMGTVNI

SEQ ID NO: 14981 - protein, 11 aa, Artificial Sequence
  Peptide Derived from Human Papillomavirus
RLCVNSTASDL

SEQ ID NO: 14982 - protein, 8 aa, Artificial Sequence
  Peptide Derived from Human Papillomavirus
RTIQQLLM

SEQ ID NO: 14983 - protein, 9 aa, Artificial Sequence
  Peptide Derived from Human Papillomavirus
STASDLRTI

SEQ ID NO: 14984 - protein, 9 aa, Artificial Sequence
  Peptide Derived from Human Papillomavirus
TLKEYVLDL

SEQ ID NO: 14985 - protein, 10 aa, Artificial Sequence
  Peptide Derived from Human Papillomavirus
TLKEYVLDLY

SEQ ID NO: 14986 - protein, 11 aa, Artificial Sequence
  Peptide Derived from Human Papillomavirus
VLDLYPEPTDL

SEQ ID NO: 14987 - protein, 10 aa, Artificial Sequence
  Peptide Derived from Human Papillomavirus
AFFPTPSGSM

SEQ ID NO: 14988 - protein, 10 aa, Artificial Sequence
  Peptide Derived from Human Papillomavirus
AMNPDILEDW

SEQ ID NO: 14989 - protein, 9 aa, Artificial Sequence
  Peptide Derived from Human Papillomavirus
AVGHPYFSI

SEQ ID NO: 14990 - protein, 8 aa, Artificial Sequence
  Peptide Derived from Human Papillomavirus
AVPDDLYI

SEQ ID NO: 14991 - protein, 11 aa, Artificial Sequence
  Peptide Derived from Human Papillomavirus
CLSMDYKQTQL

SEQ ID NO: 14992 - protein, 10 aa, Artificial Sequence
  Peptide Derived from Human Papillomavirus
CTQVTSDSTY

SEQ ID NO: 14993 - protein, 9 aa, Artificial Sequence
  Peptide Derived from Human Papillomavirus
DICGSTCKY

SEQ ID NO: 14994 - protein, 8 aa, Artificial Sequence
  Peptide Derived from Human Papillomavirus
DILEDWQF

SEQ ID NO: 14995 - protein, 10 aa, Artificial Sequence
  Peptide Derived from Human Papillomavirus
DILEDWQFGL

SEQ ID NO: 14996 - protein, 11 aa, Artificial Sequence
  Peptide Derived from Human Papillomavirus
DLDQFPLGRKF

SEQ ID NO: 14997 - protein, 10 aa, Artificial Sequence
  Peptide Derived from Human Papillomavirus
DLKEKFSADL

SEQ ID NO: 14998 - protein, 8 aa, Artificial Sequence
  Peptide Derived from Human Papillomavirus
DLQFVFQL

SEQ ID NO: 14999 - protein, 10 aa, Artificial Sequence
  Peptide Derived from Human Papillomavirus
DMVDTGFGCM

SEQ ID NO: 15000 - protein, 8 aa, Artificial Sequence
  Peptide Derived from Human Papillomavirus
DTETGNKY

SEQ ID NO: 15001 - protein, 9 aa, Artificial Sequence
  Peptide Derived from Human Papillomavirus
DTGFGCMDF

SEQ ID NO: 15002 - protein, 8 aa, Artificial Sequence
  Peptide Derived from Human Papillomavirus
DTTRSTNM

SEQ ID NO: 15003 - protein, 10 aa, Artificial Sequence
  Peptide Derived from Human Papillomavirus
DTTRSTNMTL

SEQ ID NO: 15004 - protein, 11 aa, Artificial Sequence
  Peptide Derived from Human Papillomavirus
DTYRFVTSQAI

SEQ ID NO: 15005 - protein, 9 aa, Artificial Sequence
  Peptide Derived from Human Papillomavirus
DYKQTQLCL

SEQ ID NO: 15006 - protein, 10 aa, Artificial Sequence
  Peptide Derived from Human Papillomavirus
DYKQTQLCLL

SEQ ID NO: 15007 - protein, 10 aa, Artificial Sequence
  Peptide Derived from Human Papillomavirus
DYLKMTSEPY

SEQ ID NO: 15008 - protein, 8 aa, Artificial Sequence
  Peptide Derived from Human Papillomavirus
EIGRGQPL

SEQ ID NO: 15009 - protein, 8 aa, Artificial Sequence
  Peptide Derived from Human Papillomavirus
EVDLKEKF

SEQ ID NO: 15010 - protein, 9 aa, Artificial Sequence
  Peptide Derived from Human Papillomavirus
EVMTYIHAM

SEQ ID NO: 15011 - protein, 8 aa, Artificial Sequence
  Peptide Derived from Human Papillomavirus
EYDLQFVF

SEQ ID NO: 15012 - protein, 10 aa, Artificial Sequence
  Peptide Derived from Human Papillomavirus
EYDLQFVFQL

SEQ ID NO: 15013 - protein, 9 aa, Artificial Sequence
  Peptide Derived from Human Papillomavirus
EYIRHVEEY

SEQ ID NO: 15014 - protein, 11 aa, Artificial Sequence
  Peptide Derived from Human Papillomavirus
EYIRHVEEYDL

SEQ ID NO: 15015 - protein, 8 aa, Artificial Sequence
  Peptide Derived from Human Papillomavirus
EYVSRTSI

SEQ ID NO: 15016 - protein, 9 aa, Artificial Sequence
  Peptide Derived from Human Papillomavirus
EYVSRTSIY

SEQ ID NO: 15017 - protein, 10 aa, Artificial Sequence
  Peptide Derived from Human Papillomavirus
EYVSRTSIYY

SEQ ID NO: 15018 - protein, 11 aa, Artificial Sequence
  Peptide Derived from Human Papillomavirus
EYVSRTSIYYY

SEQ ID NO: 15019 - protein, 9 aa, Artificial Sequence
  Peptide Derived from Human Papillomavirus
FFFLRREQM

SEQ ID NO: 15020 - protein, 10 aa, Artificial Sequence
  Peptide Derived from Human Papillomavirus
FFFLRREQMF

SEQ ID NO: 15021 - protein, 8 aa, Artificial Sequence
  Peptide Derived from Human Papillomavirus
FFLRREQM

SEQ ID NO: 15022 - protein, 9 aa, Artificial Sequence
  Peptide Derived from Human Papillomavirus
FFLRREQMF

SEQ ID NO: 15023 - protein, 8 aa, Artificial Sequence
  Peptide Derived from Human Papillomavirus
FFNRAGTL

SEQ ID NO: 15024 - protein, 9 aa, Artificial Sequence
  Peptide Derived from Human Papillomavirus
FFPTPSGSM

SEQ ID NO: 15025 - protein, 8 aa, Artificial Sequence
  Peptide Derived from Human Papillomavirus
FLRREQMF

SEQ ID NO: 15026 - protein, 10 aa, Artificial Sequence
  Peptide Derived from Human Papillomavirus
FVFQLCKVTL

SEQ ID NO: 15027 - protein, 10 aa, Artificial Sequence
  Peptide Derived from Human Papillomavirus
FWEVDLKEKF

SEQ ID NO: 15028 - protein, 9 aa, Artificial Sequence
  Peptide Derived from Human Papillomavirus
FYNPDTQRL

SEQ ID NO: 15029 - protein, 11 aa, Artificial Sequence
  Peptide Derived from Human Papillomavirus
FYNPDTQRLVW

SEQ ID NO: 15030 - protein, 10 aa, Artificial Sequence
  Peptide Derived from Human Papillomavirus
GFGCMDFKTL

SEQ ID NO: 15031 - protein, 8 aa, Artificial Sequence
  Peptide Derived from Human Papillomavirus
GFPDTSFY

SEQ ID NO: 15032 - protein, 9 aa, Artificial Sequence
  Peptide Derived from Human Papillomavirus
GICWGNQVF

SEQ ID NO: 15033 - protein, 8 aa, Artificial Sequence
  Peptide Derived from Human Papillomavirus
GISGHPLL

SEQ ID NO: 15034 - protein, 11 aa, Artificial Sequence
  Peptide Derived from Human Papillomavirus
GISGHPLLNKF

SEQ ID NO: 15035 - protein, 10 aa, Artificial Sequence
  Peptide Derived from Human Papillomavirus
GLEIGRGQPL

SEQ ID NO: 15036 - protein, 8 aa, Artificial Sequence
  Peptide Derived from Human Papillomavirus
GLKAKPKL

SEQ ID NO: 15037 - protein, 11 aa, Artificial Sequence
  Peptide Derived from Human Papillomavirus
GLQYRVFRVRL

SEQ ID NO: 15038 - protein, 10 aa, Artificial Sequence
  Peptide Derived from Human Papillomavirus
GLTPPPSASL

SEQ ID NO: 15039 - protein, 11 aa, Artificial Sequence
  Peptide Derived from Human Papillomavirus
GTLGEAVPDDL

SEQ ID NO: 15040 - protein, 11 aa, Artificial Sequence
  Peptide Derived from Human Papillomavirus
GTTASIQSSAF

SEQ ID NO: 15041 - protein, 9 aa, Artificial Sequence
  Peptide Derived from Human Papillomavirus
GVGISGHPL

SEQ ID NO: 15042 - protein, 10 aa, Artificial Sequence
  Peptide Derived from Human Papillomavirus
GVGISGHPLL

SEQ ID NO: 15043 - protein, 9 aa, Artificial Sequence
  Peptide Derived from Human Papillomavirus
HFFNRAGTL

SEQ ID NO: 15044 - protein, 9 aa, Artificial Sequence
  Peptide Derived from Human Papillomavirus
HVEEYDLQF

SEQ ID NO: 15045 - protein, 11 aa, Artificial Sequence
  Peptide Derived from Human Papillomavirus
HVEEYDLQFVF

SEQ ID NO: 15046 - protein, 9 aa, Artificial Sequence
  Peptide Derived from Human Papillomavirus
ILEDWQFGL

SEQ ID NO: 15047 - protein, 10 aa, Artificial Sequence
  Peptide Derived from Human Papillomavirus
IYYYAGSSRL

SEQ ID NO: 15048 - protein, 11 aa, Artificial Sequence
  Peptide Derived from Human Papillomavirus
IYYYAGSSRLL

SEQ ID NO: 15049 - protein, 11 aa, Artificial Sequence
  Peptide Derived from Human Papillomavirus
KFDDTETGNKY

SEQ ID NO: 15050 - protein, 9 aa, Artificial Sequence
  Peptide Derived from Human Papillomavirus
KFGFPDTSF

SEQ ID NO: 15051 - protein, 10 aa, Artificial Sequence
  Peptide Derived from Human Papillomavirus
KFGFPDTSFY

SEQ ID NO: 15052 - protein, 8 aa, Artificial Sequence
  Peptide Derived from Human Papillomavirus
KFLLQAGL

SEQ ID NO: 15053 - protein, 9 aa, Artificial Sequence
  Peptide Derived from Human Papillomavirus
KFSADLDQF

SEQ ID NO: 15054 - protein, 11 aa, Artificial Sequence
  Peptide Derived from Human Papillomavirus
KFSADLDQFPL

SEQ ID NO: 15055 - protein, 10 aa, Artificial Sequence
  Peptide Derived from Human Papillomavirus
KLLVPKVSGL

SEQ ID NO: 15056 - protein, 11 aa, Artificial Sequence
  Peptide Derived from Human Papillomavirus
KMTSEPYGDSL

SEQ ID NO: 15057 - protein, 10 aa, Artificial Sequence
  Peptide Derived from Human Papillomavirus
KVSGLQYRVF

SEQ ID NO: 15058 - protein, 9 aa, Artificial Sequence
  Peptide Derived from Human Papillomavirus
KVTLTAEVM

SEQ ID NO: 15059 - protein, 11 aa, Artificial Sequence
  Peptide Derived from Human Papillomavirus
KVTLTAEVMTY

SEQ ID NO: 15060 - protein, 8 aa, Artificial Sequence
  Peptide Derived from Human Papillomavirus
KVVSTDEY

SEQ ID NO: 15061 - protein, 8 aa, Artificial Sequence
  Peptide Derived from Human Papillomavirus
KYPDYLKM

SEQ ID NO: 15062 - protein, 9 aa, Artificial Sequence
  Peptide Derived from Human Papillomavirus
KYTFWEVDL

SEQ ID NO: 15063 - protein, 10 aa, Artificial Sequence
  Peptide Derived from Human Papillomavirus
LFFFLRREQM

SEQ ID NO: 15064 - protein, 11 aa, Artificial Sequence
  Peptide Derived from Human Papillomavirus
LFFFLRREQMF

SEQ ID NO: 15065 - protein, 8 aa, Artificial Sequence
  Peptide Derived from Human Papillomavirus
LFNKPYWL

SEQ ID NO: 15066 - protein, 11 aa, Artificial Sequence
  Peptide Derived from Human Papillomavirus
LINTIIEDGDM

SEQ ID NO: 15067 - protein, 8 aa, Artificial Sequence
  Peptide Derived from Human Papillomavirus
LLAVGHPY

SEQ ID NO: 15068 - protein, 9 aa, Artificial Sequence
  Peptide Derived from Human Papillomavirus
LLAVGHPYF

SEQ ID NO: 15069 - protein, 11 aa, Artificial Sequence
  Peptide Derived from Human Papillomavirus
LLAVGHPYFSI

SEQ ID NO: 15070 - protein, 9 aa, Artificial Sequence
  Peptide Derived from Human Papillomavirus
LLVPKVSGL

SEQ ID NO: 15071 - protein, 11 aa, Artificial Sequence
  Peptide Derived from Human Papillomavirus
LLVPKVSGLQY

SEQ ID NO: 15072 - protein, 8 aa, Artificial Sequence
  Peptide Derived from Human Papillomavirus
LTAEVMTY

SEQ ID NO: 15073 - protein, 9 aa, Artificial Sequence
  Peptide Derived from Human Papillomavirus
LTAEVMTYI

SEQ ID NO: 15074 - protein, 9 aa, Artificial Sequence
  Peptide Derived from Human Papillomavirus
LTPPPSASL

SEQ ID NO: 15075 - protein, 8 aa, Artificial Sequence
  Peptide Derived from Human Papillomavirus
LVPKVSGL

SEQ ID NO: 15076 - protein, 10 aa, Artificial Sequence
  Peptide Derived from Human Papillomavirus
LVPKVSGLQY

SEQ ID NO: 15077 - protein, 8 aa, Artificial Sequence
  Peptide Derived from Human Papillomavirus
LVWACVGL

SEQ ID NO: 15078 - protein, 10 aa, Artificial Sequence
  Peptide Derived from Human Papillomavirus
LVWACVGLEI

SEQ ID NO: 15079 - protein, 10 aa, Artificial Sequence
  Peptide Derived from Human Papillomavirus
MTSEPYGDSL

SEQ ID NO: 15080 - protein, 11 aa, Artificial Sequence
  Peptide Derived from Human Papillomavirus
MTSEPYGDSLF

SEQ ID NO: 15081 - protein, 11 aa, Artificial Sequence
  Peptide Derived from Human Papillomavirus
MTYIHAMNPDI

SEQ ID NO: 15082 - protein, 9 aa, Artificial Sequence
  Peptide Derived from Human Papillomavirus
MVDTGFGCM

SEQ ID NO: 15083 - protein, 11 aa, Artificial Sequence
  Peptide Derived from Human Papillomavirus
MVDTGFGCMDF

SEQ ID NO: 15084 - protein, 8 aa, Artificial Sequence
  Peptide Derived from Human Papillomavirus
MVTSESQL

SEQ ID NO: 15085 - protein, 9 aa, Artificial Sequence
  Peptide Derived from Human Papillomavirus
MVTSESQLF

SEQ ID NO: 15086 - protein, 9 aa, Artificial Sequence
  Peptide Derived from Human Papillomavirus
NTIIEDGDM

SEQ ID NO: 15087 - protein, 11 aa, Artificial Sequence
  Peptide Derived from Human Papillomavirus
PIDICGSTCKY

SEQ ID NO: 15088 - protein, 8 aa, Artificial Sequence
  Peptide Derived from Human Papillomavirus
PLELINTI

SEQ ID NO: 15089 - protein, 9 aa, Artificial Sequence
  Peptide Derived from Human Papillomavirus
PLELINTII

SEQ ID NO: 15090 - protein, 8 aa, Artificial Sequence
  Peptide Derived from Human Papillomavirus
PLGKYTFW

SEQ ID NO: 15091 - protein, 8 aa, Artificial Sequence
  Peptide Derived from Human Papillomavirus
PLGRKFLL

SEQ ID NO: 15092 - protein, 11 aa, Artificial Sequence
  Peptide Derived from Human Papillomavirus
PLGVGISGHPL

SEQ ID NO: 15093 - protein, 8 aa, Artificial Sequence
  Peptide Derived from Human Papillomavirus
PTNAKKLL

SEQ ID NO: 15094 - protein, 11 aa, Artificial Sequence
  Peptide Derived from Human Papillomavirus
PVSKVVSTDEY

SEQ ID NO: 15095 - protein, 8 aa, Artificial Sequence
  Peptide Derived from Human Papillomavirus
PYGDSLFF

SEQ ID NO: 15096 - protein, 9 aa, Artificial Sequence
  Peptide Derived from Human Papillomavirus
PYGDSLFFF

SEQ ID NO: 15097 - protein, 10 aa, Artificial Sequence
  Peptide Derived from Human Papillomavirus
PYGDSLFFFL

SEQ ID NO: 15098 - protein, 8 aa, Artificial Sequence
  Peptide Derived from Human Papillomavirus
QFPLGRKF

SEQ ID NO: 15099 - protein, 9 aa, Artificial Sequence
  Peptide Derived from Human Papillomavirus
QFPLGRKFL

SEQ ID NO: 15100 - protein, 10 aa, Artificial Sequence
  Peptide Derived from Human Papillomavirus
QFPLGRKFLL

SEQ ID NO: 15101 - protein, 11 aa, Artificial Sequence
  Peptide Derived from Human Papillomavirus
QFVFQLCKVTL

SEQ ID NO: 15102 - protein, 8 aa, Artificial Sequence
  Peptide Derived from Human Papillomavirus
QLFNKPYW

SEQ ID NO: 15103 - protein, 9 aa, Artificial Sequence
  Peptide Derived from Human Papillomavirus
QLFNKPYWL

SEQ ID NO: 15104 - protein, 8 aa, Artificial Sequence
  Peptide Derived from Human Papillomavirus
QMFVRHFF

SEQ ID NO: 15105 - protein, 8 aa, Artificial Sequence
  Peptide Derived from Human Papillomavirus
QVTSDSTY

SEQ ID NO: 15106 - protein, 9 aa, Artificial Sequence
  Peptide Derived from Human Papillomavirus
QYRVFRVRL

SEQ ID NO: 15107 - protein, 8 aa, Artificial Sequence
  Peptide Derived from Human Papillomavirus
RFVTSQAI

SEQ ID NO: 15108 - protein, 9 aa, Artificial Sequence
  Peptide Derived from Human Papillomavirus
RLLAVGHPY

SEQ ID NO: 15109 - protein, 10 aa, Artificial Sequence
  Peptide Derived from Human Papillomavirus
RLLAVGHPYF

SEQ ID NO: 15110 - protein, 8 aa, Artificial Sequence
  Peptide Derived from Human Papillomavirus
RLPDPNKF

SEQ ID NO: 15111 - protein, 10 aa, Artificial Sequence
  Peptide Derived from Human Papillomavirus
RLPDPNKFGF

SEQ ID NO: 15112 - protein, 9 aa, Artificial Sequence
  Peptide Derived from Human Papillomavirus
RLVWACVGL

SEQ ID NO: 15113 - protein, 11 aa, Artificial Sequence
  Peptide Derived from Human Papillomavirus
RLVWACVGLEI

SEQ ID NO: 15114 - protein, 10 aa, Artificial Sequence
  Peptide Derived from Human Papillomavirus
RVRLPDPNKF

SEQ ID NO: 15115 - protein, 10 aa, Artificial Sequence
  Peptide Derived from Human Papillomavirus
SFYNPDTQRL

SEQ ID NO: 15116 - protein, 11 aa, Artificial Sequence
  Peptide Derived from Human Papillomavirus
SIKNPTNAKKL

SEQ ID NO: 15117 - protein, 8 aa, Artificial Sequence
  Peptide Derived from Human Papillomavirus
SIQSSAFF

SEQ ID NO: 15118 - protein, 11 aa, Artificial Sequence
  Peptide Derived from Human Papillomavirus
SIYYYAGSSRL

SEQ ID NO: 15119 - protein, 11 aa, Artificial Sequence
  Peptide Derived from Human Papillomavirus
SLFFFLRREQM

SEQ ID NO: 15120 - protein, 8 aa, Artificial Sequence
  Peptide Derived from Human Papillomavirus
SLQDTYRF

SEQ ID NO: 15121 - protein, 9 aa, Artificial Sequence
  Peptide Derived from Human Papillomavirus
SMDYKQTQL

SEQ ID NO: 15122 - protein, 11 aa, Artificial Sequence
  Peptide Derived from Human Papillomavirus
SMDYKQTQLCL

SEQ ID NO: 15123 - protein, 9 aa, Artificial Sequence
  Peptide Derived from Human Papillomavirus
SMVTSESQL

SEQ ID NO: 15124 - protein, 10 aa, Artificial Sequence
  Peptide Derived from Human Papillomavirus
SMVTSESQLF

SEQ ID NO: 15125 - protein, 8 aa, Artificial Sequence
  Peptide Derived from Human Papillomavirus
STCKYPDY

SEQ ID NO: 15126 - protein, 9 aa, Artificial Sequence
  Peptide Derived from Human Papillomavirus
STCKYPDYL

SEQ ID NO: 15127 - protein, 11 aa, Artificial Sequence
  Peptide Derived from Human Papillomavirus
STCKYPDYLKM

SEQ ID NO: 15128 - protein, 11 aa, Artificial Sequence
  Peptide Derived from Human Papillomavirus
STDEYVSRTSI

SEQ ID NO: 15129 - protein, 8 aa, Artificial Sequence
  Peptide Derived from Human Papillomavirus
STYKNENF

SEQ ID NO: 15130 - protein, 11 aa, Artificial Sequence
  Peptide Derived from Human Papillomavirus
STYKNENFKEY

SEQ ID NO: 15131 - protein, 11 aa, Artificial Sequence
  Peptide Derived from Human Papillomavirus
SVWRPSEATVY

SEQ ID NO: 15132 - protein, 11 aa, Artificial Sequence
  Peptide Derived from Human Papillomavirus
TFWEVDLKEKF

SEQ ID NO: 15133 - protein, 8 aa, Artificial Sequence
  Peptide Derived from Human Papillomavirus
TIIEDGDM

SEQ ID NO: 15134 - protein, 10 aa, Artificial Sequence
  Peptide Derived from Human Papillomavirus
TLGEAVPDDL

SEQ ID NO: 15135 - protein, 11 aa, Artificial Sequence
  Peptide Derived from Human Papillomavirus
TLGEAVPDDLY

SEQ ID NO: 15136 - protein, 11 aa, Artificial Sequence
  Peptide Derived from Human Papillomavirus
TLQANKSDVPI

SEQ ID NO: 15137 - protein, 9 aa, Artificial Sequence
  Peptide Derived from Human Papillomavirus
TLTAEVMTY

SEQ ID NO: 15138 - protein, 10 aa, Artificial Sequence
  Peptide Derived from Human Papillomavirus
TLTAEVMTYI

SEQ ID NO: 15139 - protein, 10 aa, Artificial Sequence
  Peptide Derived from Human Papillomavirus
TTASIQSSAF

SEQ ID NO: 15140 - protein, 11 aa, Artificial Sequence
  Peptide Derived from Human Papillomavirus
TTASIQSSAFF

SEQ ID NO: 15141 - protein, 9 aa, Artificial Sequence
  Peptide Derived from Human Papillomavirus
TTRSTNMTL

SEQ ID NO: 15142 - protein, 11 aa, Artificial Sequence
  Peptide Derived from Human Papillomavirus
TVPPKEKEDPL

SEQ ID NO: 15143 - protein, 11 aa, Artificial Sequence
  Peptide Derived from Human Papillomavirus
TVVDTTRSTNM

SEQ ID NO: 15144 - protein, 10 aa, Artificial Sequence
  Peptide Derived from Human Papillomavirus
TYIHAMNPDI

SEQ ID NO: 15145 - protein, 11 aa, Artificial Sequence
  Peptide Derived from Human Papillomavirus
TYIHAMNPDIL

SEQ ID NO: 15146 - protein, 10 aa, Artificial Sequence
  Peptide Derived from Human Papillomavirus
TYKNENFKEY

SEQ ID NO: 15147 - protein, 11 aa, Artificial Sequence
  Peptide Derived from Human Papillomavirus
TYKNENFKEYI

SEQ ID NO: 15148 - protein, 10 aa, Artificial Sequence
  Peptide Derived from Human Papillomavirus
TYRFVTSQAI

SEQ ID NO: 15149 - protein, 9 aa, Artificial Sequence
  Peptide Derived from Human Papillomavirus
VFQLCKVTL

SEQ ID NO: 15150 - protein, 8 aa, Artificial Sequence
  Peptide Derived from Human Papillomavirus
VMTYIHAM

SEQ ID NO: 15151 - protein, 8 aa, Artificial Sequence
  Peptide Derived from Human Papillomavirus
VTLTAEVM

SEQ ID NO: 15152 - protein, 10 aa, Artificial Sequence
  Peptide Derived from Human Papillomavirus
VTLTAEVMTY

SEQ ID NO: 15153 - protein, 11 aa, Artificial Sequence
  Peptide Derived from Human Papillomavirus
VTLTAEVMTYI

SEQ ID NO: 15154 - protein, 8 aa, Artificial Sequence
  Peptide Derived from Human Papillomavirus
VTSESQLF

SEQ ID NO: 15155 - protein, 10 aa, Artificial Sequence
  Peptide Derived from Human Papillomavirus
VVDTTRSTNM

SEQ ID NO: 15156 - protein, 9 aa, Artificial Sequence
  Peptide Derived from Human Papillomavirus
VWACVGLEI

SEQ ID NO: 15157 - protein, 10 aa, Artificial Sequence
  Peptide Derived from Human Papillomavirus
VWRPSEATVY

SEQ ID NO: 15158 - protein, 11 aa, Artificial Sequence
  Peptide Derived from Human Papillomavirus
VWRPSEATVYL

SEQ ID NO: 15159 - protein, 9 aa, Artificial Sequence
  Peptide Derived from Human Papillomavirus
YIHAMNPDI

SEQ ID NO: 15160 - protein, 10 aa, Artificial Sequence
  Peptide Derived from Human Papillomavirus
YIHAMNPDIL

SEQ ID NO: 15161 - protein, 11 aa, Artificial Sequence
  Peptide Derived from Human Papillomavirus
YIKGSGTTASI

SEQ ID NO: 15162 - protein, 8 aa, Artificial Sequence
  Peptide Derived from Human Papillomavirus
YIRHVEEY

SEQ ID NO: 15163 - protein, 10 aa, Artificial Sequence
  Peptide Derived from Human Papillomavirus
YIRHVEEYDL

SEQ ID NO: 15164 - protein, 9 aa, Artificial Sequence
  Peptide Derived from Human Papillomavirus
YLKMTSEPY

SEQ ID NO: 15165 - protein, 8 aa, Artificial Sequence
  Peptide Derived from Human Papillomavirus
YTFWEVDL

SEQ ID NO: 15166 - protein, 8 aa, Artificial Sequence
  Peptide Derived from Human Papillomavirus
YVSRTSIY

SEQ ID NO: 15167 - protein, 9 aa, Artificial Sequence
  Peptide Derived from Human Papillomavirus
YVSRTSIYY

SEQ ID NO: 15168 - protein, 10 aa, Artificial Sequence
  Peptide Derived from Human Papillomavirus
YVSRTSIYYY

SEQ ID NO: 15169 - protein, 8 aa, Artificial Sequence
  Peptide Derived from Human Papillomavirus
YYAGSSRL

SEQ ID NO: 15170 - protein, 9 aa, Artificial Sequence
  Peptide Derived from Human Papillomavirus
YYAGSSRLL

SEQ ID NO: 15171 - protein, 9 aa, Artificial Sequence
  Peptide Derived from Human Papillomavirus
YYYAGSSRL

SEQ ID NO: 15172 - protein, 10 aa, Artificial Sequence
  Peptide Derived from Human Papillomavirus
YYYAGSSRLL

SEQ ID NO: 15173 - protein, 11 aa, Artificial Sequence
  Peptide Derived from Human Papillomavirus
AFESFDPEDTL

SEQ ID NO: 15174 - protein, 9 aa, Artificial Sequence
  Peptide Derived from Human Papillomavirus
AFLTSPHKL

SEQ ID NO: 15175 - protein, 10 aa, Artificial Sequence
  Peptide Derived from Human Papillomavirus
AFLTSPHKLI

SEQ ID NO: 15176 - protein, 11 aa, Artificial Sequence
  Peptide Derived from Human Papillomavirus
AITSRRHTVRF

SEQ ID NO: 15177 - protein, 10 aa, Artificial Sequence
  Peptide Derived from Human Papillomavirus
ATGTCPPDVI

SEQ ID NO: 15178 - protein, 11 aa, Artificial Sequence
  Peptide Derived from Human Papillomavirus
ATLKTRSGKQI

SEQ ID NO: 15179 - protein, 10 aa, Artificial Sequence
  Peptide Derived from Human Papillomavirus
ATTRTSNVSI

SEQ ID NO: 15180 - protein, 8 aa, Artificial Sequence
  Peptide Derived from Human Papillomavirus
DFLDIIAL

SEQ ID NO: 15181 - protein, 8 aa, Artificial Sequence
  Peptide Derived from Human Papillomavirus
DFVLHPSY

SEQ ID NO: 15182 - protein, 9 aa, Artificial Sequence
  Peptide Derived from Human Papillomavirus
DFVLHPSYF

SEQ ID NO: 15183 - protein, 10 aa, Artificial Sequence
  Peptide Derived from Human Papillomavirus
DFVLHPSYFI

SEQ ID NO: 15184 - protein, 11 aa, Artificial Sequence
  Peptide Derived from Human Papillomavirus
DFVLHPSYFIL

SEQ ID NO: 15185 - protein, 10 aa, Artificial Sequence
  Peptide Derived from Human Papillomavirus
DIIALHRPAI

SEQ ID NO: 15186 - protein, 10 aa, Artificial Sequence
  Peptide Derived from Human Papillomavirus
DISPAPDPDF

SEQ ID NO: 15187 - protein, 11 aa, Artificial Sequence
  Peptide Derived from Human Papillomavirus
DISPAPDPDFL

SEQ ID NO: 15188 - protein, 8 aa, Artificial Sequence
  Peptide Derived from Human Papillomavirus
DLSPIVPL

SEQ ID NO: 15189 - protein, 10 aa, Artificial Sequence
  Peptide Derived from Human Papillomavirus
DTIVVDGADF

SEQ ID NO: 15190 - protein, 10 aa, Artificial Sequence
  Peptide Derived from Human Papillomavirus
DTLQFQHSDI

SEQ ID NO: 15191 - protein, 10 aa, Artificial Sequence
  Peptide Derived from Human Papillomavirus
DTPVMSGPDI

SEQ ID NO: 15192 - protein, 9 aa, Artificial Sequence
  Peptide Derived from Human Papillomavirus
DTSTSSYSI

SEQ ID NO: 15193 - protein, 10 aa, Artificial Sequence
  Peptide Derived from Human Papillomavirus
DTVGPLDSSI

SEQ ID NO: 15194 - protein, 9 aa, Artificial Sequence
  Peptide Derived from Human Papillomavirus
DVDNVHTPM

SEQ ID NO: 15195 - protein, 11 aa, Artificial Sequence
  Peptide Derived from Human Papillomavirus
DVIPKVEGSTI

SEQ ID NO: 15196 - protein, 11 aa, Artificial Sequence
  Peptide Derived from Human Papillomavirus
FIEAGAPAPSI

SEQ ID NO: 15197 - protein, 10 aa, Artificial Sequence
  Peptide Derived from Human Papillomavirus
FILRRRRKRF

SEQ ID NO: 15198 - protein, 8 aa, Artificial Sequence
  Peptide Derived from Human Papillomavirus
FLTSPHKL

SEQ ID NO: 15199 - protein, 9 aa, Artificial Sequence
  Peptide Derived from Human Papillomavirus
FLTSPHKLI

SEQ ID NO: 15200 - protein, 11 aa, Artificial Sequence
  Peptide Derived from Human Papillomavirus
FLTSPHKLITY

SEQ ID NO: 15201 - protein, 8 aa, Artificial Sequence
  Peptide Derived from Human Papillomavirus
FVLHPSYF

SEQ ID NO: 15202 - protein, 9 aa, Artificial Sequence
  Peptide Derived from Human Papillomavirus
FVLHPSYFI

SEQ ID NO: 15203 - protein, 10 aa, Artificial Sequence
  Peptide Derived from Human Papillomavirus
FVLHPSYFIL

SEQ ID NO: 15204 - protein, 8 aa, Artificial Sequence
  Peptide Derived from Human Papillomavirus
FVPISPFF

SEQ ID NO: 15205 - protein, 10 aa, Artificial Sequence
  Peptide Derived from Human Papillomavirus
FVPISPFFPF

SEQ ID NO: 15206 - protein, 8 aa, Artificial Sequence
  Peptide Derived from Human Papillomavirus
GTCPPDVI

SEQ ID NO: 15207 - protein, 9 aa, Artificial Sequence
  Peptide Derived from Human Papillomavirus
GTDPPTAAI

SEQ ID NO: 15208 - protein, 11 aa, Artificial Sequence
  Peptide Derived from Human Papillomavirus
GTDPPTAAIPL

SEQ ID NO: 15209 - protein, 9 aa, Artificial Sequence
  Peptide Derived from Human Papillomavirus
GVFFGGLGI

SEQ ID NO: 15210 - protein, 8 aa, Artificial Sequence
  Peptide Derived from Human Papillomavirus
HTPMQHSY

SEQ ID NO: 15211 - protein, 11 aa, Artificial Sequence
  Peptide Derived from Human Papillomavirus
HTPMQHSYSTF

SEQ ID NO: 15212 - protein, 8 aa, Artificial Sequence
  Peptide Derived from Human Papillomavirus
HTVPNEQY

SEQ ID NO: 15213 - protein, 10 aa, Artificial Sequence
  Peptide Derived from Human Papillomavirus
HTVPNEQYEL

SEQ ID NO: 15214 - protein, 9 aa, Artificial Sequence
  Peptide Derived from Human Papillomavirus
HYYQDLSPI

SEQ ID NO: 15215 - protein, 9 aa, Artificial Sequence
  Peptide Derived from Human Papillomavirus
IIALHRPAI

SEQ ID NO: 15216 - protein, 10 aa, Artificial Sequence
  Peptide Derived from Human Papillomavirus
ILKYGSLGVF

SEQ ID NO: 15217 - protein, 11 aa, Artificial Sequence
  Peptide Derived from Human Papillomavirus
ILKYGSLGVFF

SEQ ID NO: 15218 - protein, 9 aa, Artificial Sequence
  Peptide Derived from Human Papillomavirus
ILRRRRKRF

SEQ ID NO: 15219 - protein, 11 aa, Artificial Sequence
  Peptide Derived from Human Papillomavirus
ILRRRRKRFPY

SEQ ID NO: 15220 - protein, 10 aa, Artificial Sequence
  Peptide Derived from Human Papillomavirus
ITSRRHTVRF

SEQ ID NO: 15221 - protein, 8 aa, Artificial Sequence
  Peptide Derived from Human Papillomavirus
ITYDNPAF

SEQ ID NO: 15222 - protein, 11 aa, Artificial Sequence
  Peptide Derived from Human Papillomavirus
ITYDNPAFESF

SEQ ID NO: 15223 - protein, 10 aa, Artificial Sequence
  Peptide Derived from Human Papillomavirus
IVSLIEETSF

SEQ ID NO: 15224 - protein, 11 aa, Artificial Sequence
  Peptide Derived from Human Papillomavirus
IVSLIEETSFI

SEQ ID NO: 15225 - protein, 8 aa, Artificial Sequence
  Peptide Derived from Human Papillomavirus
IVVDGADF

SEQ ID NO: 15226 - protein, 10 aa, Artificial Sequence
  Peptide Derived from Human Papillomavirus
IVVDGADFVL

SEQ ID NO: 15227 - protein, 10 aa, Artificial Sequence
  Peptide Derived from Human Papillomavirus
KLITYDNPAF

SEQ ID NO: 15228 - protein, 8 aa, Artificial Sequence
  Peptide Derived from Human Papillomavirus
KTRSGKQI

SEQ ID NO: 15229 - protein, 11 aa, Artificial Sequence
  Peptide Derived from Human Papillomavirus
KVEGSTIADQI

SEQ ID NO: 15230 - protein, 8 aa, Artificial Sequence
  Peptide Derived from Human Papillomavirus
KVVDPAFL

SEQ ID NO: 15231 - protein, 8 aa, Artificial Sequence
  Peptide Derived from Human Papillomavirus
KYGSLGVF

SEQ ID NO: 15232 - protein, 9 aa, Artificial Sequence
  Peptide Derived from Human Papillomavirus
KYGSLGVFF

SEQ ID NO: 15233 - protein, 8 aa, Artificial Sequence
  Peptide Derived from Human Papillomavirus
LFPTSSPF

SEQ ID NO: 15234 - protein, 11 aa, Artificial Sequence
  Peptide Derived from Human Papillomavirus
LFPTSSPFVPI

SEQ ID NO: 15235 - protein, 8 aa, Artificial Sequence
  Peptide Derived from Human Papillomavirus
LIEETSFI

SEQ ID NO: 15236 - protein, 9 aa, Artificial Sequence
  Peptide Derived from Human Papillomavirus
LITYDNPAF

SEQ ID NO: 15237 - protein, 8 aa, Artificial Sequence
  Peptide Derived from Human Papillomavirus
LTSPHKLI

SEQ ID NO: 15238 - protein, 10 aa, Artificial Sequence
  Peptide Derived from Human Papillomavirus
LTSPHKLITY

SEQ ID NO: 15239 - protein, 9 aa, Artificial Sequence
  Peptide Derived from Human Papillomavirus
NTGFDTPVM

SEQ ID NO: 15240 - protein, 10 aa, Artificial Sequence
  Peptide Derived from Human Papillomavirus
NVHTPMQHSY

SEQ ID NO: 15241 - protein, 10 aa, Artificial Sequence
  Peptide Derived from Human Papillomavirus
NVSIPLNTGF

SEQ ID NO: 15242 - protein, 10 aa, Artificial Sequence
  Peptide Derived from Human Papillomavirus
NVSSVGESSI

SEQ ID NO: 15243 - protein, 8 aa, Artificial Sequence
  Peptide Derived from Human Papillomavirus
NVTSSTPI

SEQ ID NO: 15244 - protein, 8 aa, Artificial Sequence
  Peptide Derived from Human Papillomavirus
PFFPFDTI

SEQ ID NO: 15245 - protein, 8 aa, Artificial Sequence
  Peptide Derived from Human Papillomavirus
PFVPISPF

SEQ ID NO: 15246 - protein, 9 aa, Artificial Sequence
  Peptide Derived from Human Papillomavirus
PFVPISPFF

SEQ ID NO: 15247 - protein, 11 aa, Artificial Sequence
  Peptide Derived from Human Papillomavirus
PFVPISPFFPF

SEQ ID NO: 15248 - protein, 11 aa, Artificial Sequence
  Peptide Derived from Human Papillomavirus
PIGTDPPTAAI

SEQ ID NO: 15249 - protein, 11 aa, Artificial Sequence
  Peptide Derived from Human Papillomavirus
PIPGSRPVARL

SEQ ID NO: 15250 - protein, 8 aa, Artificial Sequence
  Peptide Derived from Human Papillomavirus
PISPFFPF

SEQ ID NO: 15251 - protein, 11 aa, Artificial Sequence
  Peptide Derived from Human Papillomavirus
PISPFFPFDTI

SEQ ID NO: 15252 - protein, 11 aa, Artificial Sequence
  Peptide Derived from Human Papillomavirus
PLDHTVPNEQY

SEQ ID NO: 15253 - protein, 9 aa, Artificial Sequence
  Peptide Derived from Human Papillomavirus
PLDSSIVSL

SEQ ID NO: 15254 - protein, 10 aa, Artificial Sequence
  Peptide Derived from Human Papillomavirus
PLDSSIVSLI

SEQ ID NO: 15255 - protein, 9 aa, Artificial Sequence
  Peptide Derived from Human Papillomavirus
PLFPTSSPF

SEQ ID NO: 15256 - protein, 10 aa, Artificial Sequence
  Peptide Derived from Human Papillomavirus
PLHDTSTSSY

SEQ ID NO: 15257 - protein, 11 aa, Artificial Sequence
  Peptide Derived from Human Papillomavirus
PLNTGFDTPVM

SEQ ID NO: 15258 - protein, 9 aa, Artificial Sequence
  Peptide Derived from Human Papillomavirus
PMQHSYSTF

SEQ ID NO: 15259 - protein, 10 aa, Artificial Sequence
  Peptide Derived from Human Papillomavirus
PTAAIPLQPI

SEQ ID NO: 15260 - protein, 9 aa, Artificial Sequence
  Peptide Derived from Human Papillomavirus
PTFTEPSVL

SEQ ID NO: 15261 - protein, 9 aa, Artificial Sequence
  Peptide Derived from Human Papillomavirus
PTSSPFVPI

SEQ ID NO: 15262 - protein, 8 aa, Artificial Sequence
  Peptide Derived from Human Papillomavirus
PTVSTQSY

SEQ ID NO: 15263 - protein, 11 aa, Artificial Sequence
  Peptide Derived from Human Papillomavirus
PTVSTQSYENI

SEQ ID NO: 15264 - protein, 8 aa, Artificial Sequence
  Peptide Derived from Human Papillomavirus
PVARLGLY

SEQ ID NO: 15265 - protein, 8 aa, Artificial Sequence
  Peptide Derived from Human Papillomavirus
PVMSGPDI

SEQ ID NO: 15266 - protein, 10 aa, Artificial Sequence
  Peptide Derived from Human Papillomavirus
PVTVDTVGPL

SEQ ID NO: 15267 - protein, 8 aa, Artificial Sequence
  Peptide Derived from Human Papillomavirus
QIGARIHY

SEQ ID NO: 15268 - protein, 9 aa, Artificial Sequence
  Peptide Derived from Human Papillomavirus
QIGARIHYY

SEQ ID NO: 15269 - protein, 8 aa, Artificial Sequence
  Peptide Derived from Human Papillomavirus
QILKYGSL

SEQ ID NO: 15270 - protein, 11 aa, Artificial Sequence
  Peptide Derived from Human Papillomavirus
QILKYGSLGVF

SEQ ID NO: 15271 - protein, 11 aa, Artificial Sequence
  Peptide Derived from Human Papillomavirus
QTISTHLNPTF

SEQ ID NO: 15272 - protein, 9 aa, Artificial Sequence
  Peptide Derived from Human Papillomavirus
QVKVVDPAF

SEQ ID NO: 15273 - protein, 10 aa, Artificial Sequence
  Peptide Derived from Human Papillomavirus
QVKVVDPAFL

SEQ ID NO: 15274 - protein, 11 aa, Artificial Sequence
  Peptide Derived from Human Papillomavirus
RFSRVGQKATL

SEQ ID NO: 15275 - protein, 8 aa, Artificial Sequence
  Peptide Derived from Human Papillomavirus
RIHYYQDL

SEQ ID NO: 15276 - protein, 11 aa, Artificial Sequence
  Peptide Derived from Human Papillomavirus
RIHYYQDLSPI

SEQ ID NO: 15277 - protein, 9 aa, Artificial Sequence
  Peptide Derived from Human Papillomavirus
RTSNVSIPL

SEQ ID NO: 15278 - protein, 8 aa, Artificial Sequence
  Peptide Derived from Human Papillomavirus
RVGQKATL

SEQ ID NO: 15279 - protein, 8 aa, Artificial Sequence
  Peptide Derived from Human Papillomavirus
SFDPEDTL

SEQ ID NO: 15280 - protein, 10 aa, Artificial Sequence
  Peptide Derived from Human Papillomavirus
SFDPEDTLQF

SEQ ID NO: 15281 - protein, 10 aa, Artificial Sequence
  Peptide Derived from Human Papillomavirus
SINDGLYDVY

SEQ ID NO: 15282 - protein, 8 aa, Artificial Sequence
  Peptide Derived from Human Papillomavirus
SIPLNTGF

SEQ ID NO: 15283 - protein, 8 aa, Artificial Sequence
  Peptide Derived from Human Papillomavirus
SIPTPSGF

SEQ ID NO: 15284 - protein, 9 aa, Artificial Sequence
  Peptide Derived from Human Papillomavirus
SIQTISTHL

SEQ ID NO: 15285 - protein, 11 aa, Artificial Sequence
  Peptide Derived from Human Papillomavirus
SIVSLIEETSF

SEQ ID NO: 15286 - protein, 9 aa, Artificial Sequence
  Peptide Derived from Human Papillomavirus
SLGVFFGGL

SEQ ID NO: 15287 - protein, 11 aa, Artificial Sequence
  Peptide Derived from Human Papillomavirus
SLGVFFGGLGI

SEQ ID NO: 15288 - protein, 8 aa, Artificial Sequence
  Peptide Derived from Human Papillomavirus
SLIEETSF

SEQ ID NO: 15289 - protein, 9 aa, Artificial Sequence
  Peptide Derived from Human Papillomavirus
SLIEETSFI

SEQ ID NO: 15290 - protein, 8 aa, Artificial Sequence
  Peptide Derived from Human Papillomavirus
STHLNPTF

SEQ ID NO: 15291 - protein, 8 aa, Artificial Sequence
  Peptide Derived from Human Papillomavirus
STIADQIL

SEQ ID NO: 15292 - protein, 10 aa, Artificial Sequence
  Peptide Derived from Human Papillomavirus
STIADQILKY

SEQ ID NO: 15293 - protein, 8 aa, Artificial Sequence
  Peptide Derived from Human Papillomavirus
STQSYENI

SEQ ID NO: 15294 - protein, 10 aa, Artificial Sequence
  Peptide Derived from Human Papillomavirus
STQSYENIPM

SEQ ID NO: 15295 - protein, 11 aa, Artificial Sequence
  Peptide Derived from Human Papillomavirus
STSSYSINDGL

SEQ ID NO: 15296 - protein, 10 aa, Artificial Sequence
  Peptide Derived from Human Papillomavirus
SVGESSIQTI

SEQ ID NO: 15297 - protein, 10 aa, Artificial Sequence
  Peptide Derived from Human Papillomavirus
SYENIPMDTF

SEQ ID NO: 15298 - protein, 8 aa, Artificial Sequence
  Peptide Derived from Human Papillomavirus
SYSINDGL

SEQ ID NO: 15299 - protein, 9 aa, Artificial Sequence
  Peptide Derived from Human Papillomavirus
SYSINDGLY

SEQ ID NO: 15300 - protein, 8 aa, Artificial Sequence
  Peptide Derived from Human Papillomavirus
TFTEPSVL

SEQ ID NO: 15301 - protein, 9 aa, Artificial Sequence
  Peptide Derived from Human Papillomavirus
TIADQILKY

SEQ ID NO: 15302 - protein, 10 aa, Artificial Sequence
  Peptide Derived from Human Papillomavirus
TISTHLNPTF

SEQ ID NO: 15303 - protein, 9 aa, Artificial Sequence
  Peptide Derived from Human Papillomavirus
TIVVDGADF

SEQ ID NO: 15304 - protein, 11 aa, Artificial Sequence
  Peptide Derived from Human Papillomavirus
TIVVDGADFVL

SEQ ID NO: 15305 - protein, 10 aa, Artificial Sequence
  Peptide Derived from Human Papillomavirus
TLKTRSGKQI

SEQ ID NO: 15306 - protein, 9 aa, Artificial Sequence
  Peptide Derived from Human Papillomavirus
TLQFQHSDI

SEQ ID NO: 15307 - protein, 9 aa, Artificial Sequence
  Peptide Derived from Human Papillomavirus
TTRTSNVSI

SEQ ID NO: 15308 - protein, 11 aa, Artificial Sequence
  Peptide Derived from Human Papillomavirus
TTRTSNVSIPL

SEQ ID NO: 15309 - protein, 10 aa, Artificial Sequence
  Peptide Derived from Human Papillomavirus
TTSADTTPAI

SEQ ID NO: 15310 - protein, 11 aa, Artificial Sequence
  Peptide Derived from Human Papillomavirus
TTSADTTPAII

SEQ ID NO: 15311 - protein, 8 aa, Artificial Sequence
  Peptide Derived from Human Papillomavirus
TVDTVGPL

SEQ ID NO: 15312 - protein, 9 aa, Artificial Sequence
  Peptide Derived from Human Papillomavirus
TVGPLDSSI

SEQ ID NO: 15313 - protein, 9 aa, Artificial Sequence
  Peptide Derived from Human Papillomavirus
TVPNEQYEL

SEQ ID NO: 15314 - protein, 10 aa, Artificial Sequence
  Peptide Derived from Human Papillomavirus
TVSTQSYENI

SEQ ID NO: 15315 - protein, 10 aa, Artificial Sequence
  Peptide Derived from Human Papillomavirus
TYDNPAFESF

SEQ ID NO: 15316 - protein, 8 aa, Artificial Sequence
  Peptide Derived from Human Papillomavirus
VFFGGLGI

SEQ ID NO: 15317 - protein, 10 aa, Artificial Sequence
  Peptide Derived from Human Papillomavirus
VIPKVEGSTI

SEQ ID NO: 15318 - protein, 8 aa, Artificial Sequence
  Peptide Derived from Human Papillomavirus
VLHPSYFI

SEQ ID NO: 15319 - protein, 9 aa, Artificial Sequence
  Peptide Derived from Human Papillomavirus
VLHPSYFIL

SEQ ID NO: 15320 - protein, 11 aa, Artificial Sequence
  Peptide Derived from Human Papillomavirus
VMSGPDIPSPL

SEQ ID NO: 15321 - protein, 11 aa, Artificial Sequence
  Peptide Derived from Human Papillomavirus
VTTSADTTPAI

SEQ ID NO: 15322 - protein, 9 aa, Artificial Sequence
  Peptide Derived from Human Papillomavirus
VTVDTVGPL

SEQ ID NO: 15323 - protein, 9 aa, Artificial Sequence
  Peptide Derived from Human Papillomavirus
VVDGADFVL

SEQ ID NO: 15324 - protein, 11 aa, Artificial Sequence
  Peptide Derived from Human Papillomavirus
YFILRRRRKRF

SEQ ID NO: 15325 - protein, 8 aa, Artificial Sequence
  Peptide Derived from Human Papillomavirus
YYQDLSPI

SEQ ID NO: 15326 - protein, 11 aa, Artificial Sequence
  Peptide Derived from Human Papillomavirus
YYQDLSPIVPL

SEQ ID NO: 15327 - protein, 11 aa, Artificial Sequence
  Peptide Derived from Human Papillomavirus
AFLKSNCQAKY

SEQ ID NO: 15328 - protein, 9 aa, Artificial Sequence
  Peptide Derived from Human Papillomavirus
ALDGNPISI

SEQ ID NO: 15329 - protein, 9 aa, Artificial Sequence
  Peptide Derived from Human Papillomavirus
ALYWYRTGI

SEQ ID NO: 15330 - protein, 9 aa, Artificial Sequence
  Peptide Derived from Human Papillomavirus
AMLAVFKDI

SEQ ID NO: 15331 - protein, 10 aa, Artificial Sequence
  Peptide Derived from Human Papillomavirus
AMLAVFKDIY

SEQ ID NO: 15332 - protein, 11 aa, Artificial Sequence
  Peptide Derived from Human Papillomavirus
AMLDDATHTCW

SEQ ID NO: 15333 - protein, 8 aa, Artificial Sequence
  Peptide Derived from Human Papillomavirus
ATDTGSDM

SEQ ID NO: 15334 - protein, 11 aa, Artificial Sequence
  Peptide Derived from Human Papillomavirus
ATDTGSDMVDF

SEQ ID NO: 15335 - protein, 8 aa, Artificial Sequence
  Peptide Derived from Human Papillomavirus
ATHTCWTY

SEQ ID NO: 15336 - protein, 9 aa, Artificial Sequence
  Peptide Derived from Human Papillomavirus
ATHTCWTYF

SEQ ID NO: 15337 - protein, 10 aa, Artificial Sequence
  Peptide Derived from Human Papillomavirus
ATLYAHIQCL

SEQ ID NO: 15338 - protein, 9 aa, Artificial Sequence
  Peptide Derived from Human Papillomavirus
AVFKDIYGL

SEQ ID NO: 15339 - protein, 11 aa, Artificial Sequence
  Peptide Derived from Human Papillomavirus
AVFKDIYGLSF

SEQ ID NO: 15340 - protein, 10 aa, Artificial Sequence
  Peptide Derived from Human Papillomavirus
CFFERTWSRL

SEQ ID NO: 15341 - protein, 9 aa, Artificial Sequence
  Peptide Derived from Human Papillomavirus
CLDCKWGVL

SEQ ID NO: 15342 - protein, 10 aa, Artificial Sequence
  Peptide Derived from Human Papillomavirus
CLDCKWGVLI

SEQ ID NO: 15343 - protein, 11 aa, Artificial Sequence
  Peptide Derived from Human Papillomavirus
CLDCKWGVLIL

SEQ ID NO: 15344 - protein, 9 aa, Artificial Sequence
  Peptide Derived from Human Papillomavirus
CMLIEPPKL

SEQ ID NO: 15345 - protein, 8 aa, Artificial Sequence
  Peptide Derived from Human Papillomavirus
CTDWVMAI

SEQ ID NO: 15346 - protein, 9 aa, Artificial Sequence
  Peptide Derived from Human Papillomavirus
CTDWVMAIF

SEQ ID NO: 15347 - protein, 10 aa, Artificial Sequence
  Peptide Derived from Human Papillomavirus
CVTGQNTRPL

SEQ ID NO: 15348 - protein, 8 aa, Artificial Sequence
  Peptide Derived from Human Papillomavirus
CWTYFDNY

SEQ ID NO: 15349 - protein, 9 aa, Artificial Sequence
  Peptide Derived from Human Papillomavirus
CWTYFDNYM

SEQ ID NO: 15350 - protein, 9 aa, Artificial Sequence
  Peptide Derived from Human Papillomavirus
DFIDTQLSI

SEQ ID NO: 15351 - protein, 10 aa, Artificial Sequence
  Peptide Derived from Human Papillomavirus
DIYGLSFTDL

SEQ ID NO: 15352 - protein, 8 aa, Artificial Sequence
  Peptide Derived from Human Papillomavirus
DLSDMVQW

SEQ ID NO: 15353 - protein, 10 aa, Artificial Sequence
  Peptide Derived from Human Papillomavirus
DLSDMVQWAF

SEQ ID NO: 15354 - protein, 9 aa, Artificial Sequence
  Peptide Derived from Human Papillomavirus
DLSPRLQEI

SEQ ID NO: 15355 - protein, 11 aa, Artificial Sequence
  Peptide Derived from Human Papillomavirus
DLSPRLQEISL

SEQ ID NO: 15356 - protein, 8 aa, Artificial Sequence
  Peptide Derived from Human Papillomavirus
DLTDESDM

SEQ ID NO: 15357 - protein, 10 aa, Artificial Sequence
  Peptide Derived from Human Papillomavirus
DLTDESDMAF

SEQ ID NO: 15358 - protein, 9 aa, Artificial Sequence
  Peptide Derived from Human Papillomavirus
DMAFQYAQL

SEQ ID NO: 15359 - protein, 10 aa, Artificial Sequence
  Peptide Derived from Human Papillomavirus
DMVDFIDTQL

SEQ ID NO: 15360 - protein, 11 aa, Artificial Sequence
  Peptide Derived from Human Papillomavirus
DMVQWAFDNDL

SEQ ID NO: 15361 - protein, 8 aa, Artificial Sequence
  Peptide Derived from Human Papillomavirus
DTDLSPRL

SEQ ID NO: 15362 - protein, 11 aa, Artificial Sequence
  Peptide Derived from Human Papillomavirus
DTDLSPRLQEI

SEQ ID NO: 15363 - protein, 10 aa, Artificial Sequence
  Peptide Derived from Human Papillomavirus
DTEGIPFGTF

SEQ ID NO: 15364 - protein, 9 aa, Artificial Sequence
  Peptide Derived from Human Papillomavirus
DTGSDMVDF

SEQ ID NO: 15365 - protein, 10 aa, Artificial Sequence
  Peptide Derived from Human Papillomavirus
DTGSDMVDFI

SEQ ID NO: 15366 - protein, 9 aa, Artificial Sequence
  Peptide Derived from Human Papillomavirus
DTPEWIQRL

SEQ ID NO: 15367 - protein, 11 aa, Artificial Sequence
  Peptide Derived from Human Papillomavirus
DTPEWIQRLTI

SEQ ID NO: 15368 - protein, 8 aa, Artificial Sequence
  Peptide Derived from Human Papillomavirus
DWRPIVQF

SEQ ID NO: 15369 - protein, 9 aa, Artificial Sequence
  Peptide Derived from Human Papillomavirus
DWRPIVQFL

SEQ ID NO: 15370 - protein, 11 aa, Artificial Sequence
  Peptide Derived from Human Papillomavirus
DWRPIVQFLRY

SEQ ID NO: 15371 - protein, 9 aa, Artificial Sequence
  Peptide Derived from Human Papillomavirus
EFISFLRAL

SEQ ID NO: 15372 - protein, 10 aa, Artificial Sequence
  Peptide Derived from Human Papillomavirus
EINDKNWKCF

SEQ ID NO: 15373 - protein, 11 aa, Artificial Sequence
  Peptide Derived from Human Papillomavirus
EINDKNWKCFF

SEQ ID NO: 15374 - protein, 10 aa, Artificial Sequence
  Peptide Derived from Human Papillomavirus
ETATDTGSDM

SEQ ID NO: 15375 - protein, 11 aa, Artificial Sequence
  Peptide Derived from Human Papillomavirus
ETCMLIEPPKL

SEQ ID NO: 15376 - protein, 9 aa, Artificial Sequence
  Peptide Derived from Human Papillomavirus
EVQNDAQVL

SEQ ID NO: 15377 - protein, 11 aa, Artificial Sequence
  Peptide Derived from Human Papillomavirus
EVQNDAQVLHL

SEQ ID NO: 15378 - protein, 9 aa, Artificial Sequence
  Peptide Derived from Human Papillomavirus
EVSGDTPEW

SEQ ID NO: 15379 - protein, 10 aa, Artificial Sequence
  Peptide Derived from Human Papillomavirus
EVSGDTPEWI

SEQ ID NO: 15380 - protein, 8 aa, Artificial Sequence
  Peptide Derived from Human Papillomavirus
EWIQRLTI

SEQ ID NO: 15381 - protein, 9 aa, Artificial Sequence
  Peptide Derived from Human Papillomavirus
EWIQRLTII

SEQ ID NO: 15382 - protein, 9 aa, Artificial Sequence
  Peptide Derived from Human Papillomavirus
FFERTWSRL

SEQ ID NO: 15383 - protein, 11 aa, Artificial Sequence
  Peptide Derived from Human Papillomavirus
FFERTWSRLDL

SEQ ID NO: 15384 - protein, 8 aa, Artificial Sequence
  Peptide Derived from Human Papillomavirus
FIDTQLSI

SEQ ID NO: 15385 - protein, 9 aa, Artificial Sequence
  Peptide Derived from Human Papillomavirus
FIHFLQGAI

SEQ ID NO: 15386 - protein, 10 aa, Artificial Sequence
  Peptide Derived from Human Papillomavirus
FIHFLQGAII

SEQ ID NO: 15387 - protein, 8 aa, Artificial Sequence
  Peptide Derived from Human Papillomavirus
FISFLRAL

SEQ ID NO: 15388 - protein, 11 aa, Artificial Sequence
  Peptide Derived from Human Papillomavirus
FISFLRALKEF

SEQ ID NO: 15389 - protein, 11 aa, Artificial Sequence
  Peptide Derived from Human Papillomavirus
FLKGTPKKNCI

SEQ ID NO: 15390 - protein, 10 aa, Artificial Sequence
  Peptide Derived from Human Papillomavirus
FLKSNCQAKY

SEQ ID NO: 15391 - protein, 11 aa, Artificial Sequence
  Peptide Derived from Human Papillomavirus
FLKSNCQAKYL

SEQ ID NO: 15392 - protein, 9 aa, Artificial Sequence
  Peptide Derived from Human Papillomavirus
FLQGAIISF

SEQ ID NO: 15393 - protein, 8 aa, Artificial Sequence
  Peptide Derived from Human Papillomavirus
FLRALKEF

SEQ ID NO: 15394 - protein, 9 aa, Artificial Sequence
  Peptide Derived from Human Papillomavirus
FLRALKEFL

SEQ ID NO: 15395 - protein, 9 aa, Artificial Sequence
  Peptide Derived from Human Papillomavirus
FLRYQGVEF

SEQ ID NO: 15396 - protein, 10 aa, Artificial Sequence
  Peptide Derived from Human Papillomavirus
FLRYQGVEFI

SEQ ID NO: 15397 - protein, 8 aa, Artificial Sequence
  Peptide Derived from Human Papillomavirus
FTDLVRNF

SEQ ID NO: 15398 - protein, 9 aa, Artificial Sequence
  Peptide Derived from Human Papillomavirus
FTFPHAFPF

SEQ ID NO: 15399 - protein, 8 aa, Artificial Sequence
  Peptide Derived from Human Papillomavirus
FTISDSGY

SEQ ID NO: 15400 - protein, 8 aa, Artificial Sequence
  Peptide Derived from Human Papillomavirus
FVNSNSHF

SEQ ID NO: 15401 - protein, 9 aa, Artificial Sequence
  Peptide Derived from Human Papillomavirus
FVNSNSHFW

SEQ ID NO: 15402 - protein, 10 aa, Artificial Sequence
  Peptide Derived from Human Papillomavirus
FVNSNSHFWL

SEQ ID NO: 15403 - protein, 11 aa, Artificial Sequence
  Peptide Derived from Human Papillomavirus
GFKTLIKPATL

SEQ ID NO: 15404 - protein, 9 aa, Artificial Sequence
  Peptide Derived from Human Papillomavirus
GIDDSNFDL

SEQ ID NO: 15405 - protein, 11 aa, Artificial Sequence
  Peptide Derived from Human Papillomavirus
GLSFTDLVRNF

SEQ ID NO: 15406 - protein, 8 aa, Artificial Sequence
  Peptide Derived from Human Papillomavirus
GMSFIHFL

SEQ ID NO: 15407 - protein, 8 aa, Artificial Sequence
  Peptide Derived from Human Papillomavirus
GTGCNGWF

SEQ ID NO: 15408 - protein, 9 aa, Artificial Sequence
  Peptide Derived from Human Papillomavirus
GTGCNGWFF

SEQ ID NO: 15409 - protein, 8 aa, Artificial Sequence
  Peptide Derived from Human Papillomavirus
GTPKKNCI

SEQ ID NO: 15410 - protein, 9 aa, Artificial Sequence
  Peptide Derived from Human Papillomavirus
GTPKKNCIL

SEQ ID NO: 15411 - protein, 10 aa, Artificial Sequence
  Peptide Derived from Human Papillomavirus
GTPKKNCILL

SEQ ID NO: 15412 - protein, 11 aa, Artificial Sequence
  Peptide Derived from Human Papillomavirus
GTPKKNCILLY

SEQ ID NO: 15413 - protein, 8 aa, Artificial Sequence
  Peptide Derived from Human Papillomavirus
GVEFISFL

SEQ ID NO: 15414 - protein, 11 aa, Artificial Sequence
  Peptide Derived from Human Papillomavirus
GVEFISFLRAL

SEQ ID NO: 15415 - protein, 8 aa, Artificial Sequence
  Peptide Derived from Human Papillomavirus
GVLILALL

SEQ ID NO: 15416 - protein, 10 aa, Artificial Sequence
  Peptide Derived from Human Papillomavirus
GVLILALLRY

SEQ ID NO: 15417 - protein, 10 aa, Artificial Sequence
  Peptide Derived from Human Papillomavirus
GVNPTVAEGF

SEQ ID NO: 15418 - protein, 8 aa, Artificial Sequence
  Peptide Derived from Human Papillomavirus
GWFFVETI

SEQ ID NO: 15419 - protein, 8 aa, Artificial Sequence
  Peptide Derived from Human Papillomavirus
HFLQGAII

SEQ ID NO: 15420 - protein, 10 aa, Artificial Sequence
  Peptide Derived from Human Papillomavirus
HFLQGAIISF

SEQ ID NO: 15421 - protein, 9 aa, Artificial Sequence
  Peptide Derived from Human Papillomavirus
HIQCLDCKW

SEQ ID NO: 15422 - protein, 10 aa, Artificial Sequence
  Peptide Derived from Human Papillomavirus
HTCWTYFDNY

SEQ ID NO: 15423 - protein, 11 aa, Artificial Sequence
  Peptide Derived from Human Papillomavirus
HTCWTYFDNYM

SEQ ID NO: 15424 - protein, 8 aa, Artificial Sequence
  Peptide Derived from Human Papillomavirus
HVPETCML

SEQ ID NO: 15425 - protein, 9 aa, Artificial Sequence
  Peptide Derived from Human Papillomavirus
HVPETCMLI

SEQ ID NO: 15426 - protein, 10 aa, Artificial Sequence
  Peptide Derived from Human Papillomavirus
HYKRAQKRQM

SEQ ID NO: 15427 - protein, 11 aa, Artificial Sequence
  Peptide Derived from Human Papillomavirus
IIQHGIDDSNF

SEQ ID NO: 15428 - protein, 11 aa, Artificial Sequence
  Peptide Derived from Human Papillomavirus
IISFVNSNSHF

SEQ ID NO: 15429 - protein, 8 aa, Artificial Sequence
  Peptide Derived from Human Papillomavirus
ITELKELL

SEQ ID NO: 15430 - protein, 10 aa, Artificial Sequence
  Peptide Derived from Human Papillomavirus
IVEKKTGDVI

SEQ ID NO: 15431 - protein, 9 aa, Artificial Sequence
  Peptide Derived from Human Papillomavirus
IYGLSFTDL

SEQ ID NO: 15432 - protein, 8 aa, Artificial Sequence
  Peptide Derived from Human Papillomavirus
KIDEGGDW

SEQ ID NO: 15433 - protein, 11 aa, Artificial Sequence
  Peptide Derived from Human Papillomavirus
KIDEGGDWRPI

SEQ ID NO: 15434 - protein, 9 aa, Artificial Sequence
  Peptide Derived from Human Papillomavirus
KLRSSVAAL

SEQ ID NO: 15435 - protein, 10 aa, Artificial Sequence
  Peptide Derived from Human Papillomavirus
KLRSSVAALY

SEQ ID NO: 15436 - protein, 11 aa, Artificial Sequence
  Peptide Derived from Human Papillomavirus
KLRSSVAALYW

SEQ ID NO: 15437 - protein, 9 aa, Artificial Sequence
  Peptide Derived from Human Papillomavirus
KTLIKPATL

SEQ ID NO: 15438 - protein, 10 aa, Artificial Sequence
  Peptide Derived from Human Papillomavirus
KTLIKPATLY

SEQ ID NO: 15439 - protein, 9 aa, Artificial Sequence
  Peptide Derived from Human Papillomavirus
KTTCTDWVM

SEQ ID NO: 15440 - protein, 11 aa, Artificial Sequence
  Peptide Derived from Human Papillomavirus
KTTCTDWVMAI

SEQ ID NO: 15441 - protein, 9 aa, Artificial Sequence
  Peptide Derived from Human Papillomavirus
KWGVLILAL

SEQ ID NO: 15442 - protein, 10 aa, Artificial Sequence
  Peptide Derived from Human Papillomavirus
KWGVLILALL

SEQ ID NO: 15443 - protein, 9 aa, Artificial Sequence
  Peptide Derived from Human Papillomavirus
KYLKDCAVM

SEQ ID NO: 15444 - protein, 9 aa, Artificial Sequence
  Peptide Derived from Human Papillomavirus
LFTISDSGY

SEQ ID NO: 15445 - protein, 8 aa, Artificial Sequence
  Peptide Derived from Human Papillomavirus
LIKPATLY

SEQ ID NO: 15446 - protein, 11 aa, Artificial Sequence
  Peptide Derived from Human Papillomavirus
LIKPATLYAHI

SEQ ID NO: 15447 - protein, 8 aa, Artificial Sequence
  Peptide Derived from Human Papillomavirus
LILALLRY

SEQ ID NO: 15448 - protein, 9 aa, Artificial Sequence
  Peptide Derived from Human Papillomavirus
LLHVPETCM

SEQ ID NO: 15449 - protein, 10 aa, Artificial Sequence
  Peptide Derived from Human Papillomavirus
LLHVPETCML

SEQ ID NO: 15450 - protein, 11 aa, Artificial Sequence
  Peptide Derived from Human Papillomavirus
LLHVPETCMLI

SEQ ID NO: 15451 - protein, 11 aa, Artificial Sequence
  Peptide Derived from Human Papillomavirus
LLQASNKKAAM

SEQ ID NO: 15452 - protein, 9 aa, Artificial Sequence
  Peptide Derived from Human Papillomavirus
LLQLKCPPI

SEQ ID NO: 15453 - protein, 10 aa, Artificial Sequence
  Peptide Derived from Human Papillomavirus
LLQLKCPPIL

SEQ ID NO: 15454 - protein, 11 aa, Artificial Sequence
  Peptide Derived from Human Papillomavirus
LLQLKCPPILL

SEQ ID NO: 15455 - protein, 11 aa, Artificial Sequence
  Peptide Derived from Human Papillomavirus
LLRYKCGKNRL

SEQ ID NO: 15456 - protein, 9 aa, Artificial Sequence
  Peptide Derived from Human Papillomavirus
LTDESDMAF

SEQ ID NO: 15457 - protein, 11 aa, Artificial Sequence
  Peptide Derived from Human Papillomavirus
LTDESDMAFQY

SEQ ID NO: 15458 - protein, 8 aa, Artificial Sequence
  Peptide Derived from Human Papillomavirus
LTIIQHGI

SEQ ID NO: 15459 - protein, 10 aa, Artificial Sequence
  Peptide Derived from Human Papillomavirus
LTVAKGLSTL

SEQ ID NO: 15460 - protein, 11 aa, Artificial Sequence
  Peptide Derived from Human Papillomavirus
LTVAKGLSTLL

SEQ ID NO: 15461 - protein, 8 aa, Artificial Sequence
  Peptide Derived from Human Papillomavirus
LYAHIQCL

SEQ ID NO: 15462 - protein, 11 aa, Artificial Sequence
  Peptide Derived from Human Papillomavirus
LYGPANTGKSY

SEQ ID NO: 15463 - protein, 8 aa, Artificial Sequence
  Peptide Derived from Human Papillomavirus
LYWYRTGI

SEQ ID NO: 15464 - protein, 11 aa, Artificial Sequence
  Peptide Derived from Human Papillomavirus
LYWYRTGISNI

SEQ ID NO: 15465 - protein, 8 aa, Artificial Sequence
  Peptide Derived from Human Papillomavirus
MLAVFKDI

SEQ ID NO: 15466 - protein, 9 aa, Artificial Sequence
  Peptide Derived from Human Papillomavirus
MLAVFKDIY

SEQ ID NO: 15467 - protein, 11 aa, Artificial Sequence
  Peptide Derived from Human Papillomavirus
MLAVFKDIYGL

SEQ ID NO: 15468 - protein, 10 aa, Artificial Sequence
  Peptide Derived from Human Papillomavirus
MLDDATHTCW

SEQ ID NO: 15469 - protein, 8 aa, Artificial Sequence
  Peptide Derived from Human Papillomavirus
MLIEPPKL

SEQ ID NO: 15470 - protein, 9 aa, Artificial Sequence
  Peptide Derived from Human Papillomavirus
MVDFIDTQL

SEQ ID NO: 15471 - protein, 11 aa, Artificial Sequence
  Peptide Derived from Human Papillomavirus
MVDFIDTQLSI

SEQ ID NO: 15472 - protein, 10 aa, Artificial Sequence
  Peptide Derived from Human Papillomavirus
MVQWAFDNDL

SEQ ID NO: 15473 - protein, 10 aa, Artificial Sequence
  Peptide Derived from Human Papillomavirus
NFDLSDMVQW

SEQ ID NO: 15474 - protein, 10 aa, Artificial Sequence
  Peptide Derived from Human Papillomavirus
NIDPAKDNKW

SEQ ID NO: 15475 - protein, 8 aa, Artificial Sequence
  Peptide Derived from Human Papillomavirus
NMSQWIKY

SEQ ID NO: 15476 - protein, 9 aa, Artificial Sequence
  Peptide Derived from Human Papillomavirus
NTGKSYFGM

SEQ ID NO: 15477 - protein, 11 aa, Artificial Sequence
  Peptide Derived from Human Papillomavirus
NTGKSYFGMSF

SEQ ID NO: 15478 - protein, 8 aa, Artificial Sequence
  Peptide Derived from Human Papillomavirus
NVDPHCSI

SEQ ID NO: 15479 - protein, 11 aa, Artificial Sequence
  Peptide Derived from Human Papillomavirus
NVDPHCSITEL

SEQ ID NO: 15480 - protein, 10 aa, Artificial Sequence
  Peptide Derived from Human Papillomavirus
NWKCFFERTW

SEQ ID NO: 15481 - protein, 10 aa, Artificial Sequence
  Peptide Derived from Human Papillomavirus
PFDKNGNPVY

SEQ ID NO: 15482 - protein, 8 aa, Artificial Sequence
  Peptide Derived from Human Papillomavirus
PILLTSNI

SEQ ID NO: 15483 - protein, 11 aa, Artificial Sequence
  Peptide Derived from Human Papillomavirus
PISIDRKHKPL

SEQ ID NO: 15484 - protein, 8 aa, Artificial Sequence
  Peptide Derived from Human Papillomavirus
PIVQFLRY

SEQ ID NO: 15485 - protein, 9 aa, Artificial Sequence
  Peptide Derived from Human Papillomavirus
PLADTKVAM

SEQ ID NO: 15486 - protein, 10 aa, Artificial Sequence
  Peptide Derived from Human Papillomavirus
PLADTKVAML

SEQ ID NO: 15487 - protein, 10 aa, Artificial Sequence
  Peptide Derived from Human Papillomavirus
PLLQLKCPPI

SEQ ID NO: 15488 - protein, 11 aa, Artificial Sequence
  Peptide Derived from Human Papillomavirus
PLLQLKCPPIL

SEQ ID NO: 15489 - protein, 10 aa, Artificial Sequence
  Peptide Derived from Human Papillomavirus
PTVAEGFKTL

SEQ ID NO: 15490 - protein, 11 aa, Artificial Sequence
  Peptide Derived from Human Papillomavirus
PTVAEGFKTLI

SEQ ID NO: 15491 - protein, 10 aa, Artificial Sequence
  Peptide Derived from Human Papillomavirus
PVYEINDKNW

SEQ ID NO: 15492 - protein, 10 aa, Artificial Sequence
  Peptide Derived from Human Papillomavirus
PYLESRVTVF

SEQ ID NO: 15493 - protein, 10 aa, Artificial Sequence
  Peptide Derived from Human Papillomavirus
QFLRYQGVEF

SEQ ID NO: 15494 - protein, 11 aa, Artificial Sequence
  Peptide Derived from Human Papillomavirus
QFLRYQGVEFI

SEQ ID NO: 15495 - protein, 8 aa, Artificial Sequence
  Peptide Derived from Human Papillomavirus
QLKCPPIL

SEQ ID NO: 15496 - protein, 9 aa, Artificial Sequence
  Peptide Derived from Human Papillomavirus
QLKCPPILL

SEQ ID NO: 15497 - protein, 8 aa, Artificial Sequence
  Peptide Derived from Human Papillomavirus
QLSVDTDL

SEQ ID NO: 15498 - protein, 8 aa, Artificial Sequence
  Peptide Derived from Human Papillomavirus
QMNMSQWI

SEQ ID NO: 15499 - protein, 10 aa, Artificial Sequence
  Peptide Derived from Human Papillomavirus
QMNMSQWIKY

SEQ ID NO: 15500 - protein, 10 aa, Artificial Sequence
  Peptide Derived from Human Papillomavirus
QVLHLLKRKF

SEQ ID NO: 15501 - protein, 8 aa, Artificial Sequence
  Peptide Derived from Human Papillomavirus
QWAFDNDL

SEQ ID NO: 15502 - protein, 10 aa, Artificial Sequence
  Peptide Derived from Human Papillomavirus
QWIKYRCSKI

SEQ ID NO: 15503 - protein, 10 aa, Artificial Sequence
  Peptide Derived from Human Papillomavirus
RLFTISDSGY

SEQ ID NO: 15504 - protein, 9 aa, Artificial Sequence
  Peptide Derived from Human Papillomavirus
RLTIIQHGI

SEQ ID NO: 15505 - protein, 8 aa, Artificial Sequence
  Peptide Derived from Human Papillomavirus
RLTVAKGL

SEQ ID NO: 15506 - protein, 11 aa, Artificial Sequence
  Peptide Derived from Human Papillomavirus
RLTVAKGLSTL

SEQ ID NO: 15507 - protein, 8 aa, Artificial Sequence
  Peptide Derived from Human Papillomavirus
RTWSRLDL

SEQ ID NO: 15508 - protein, 11 aa, Artificial Sequence
  Peptide Derived from Human Papillomavirus
RVTVFTFPHAF

SEQ ID NO: 15509 - protein, 9 aa, Artificial Sequence
  Peptide Derived from Human Papillomavirus
RYKCGKNRL

SEQ ID NO: 15510 - protein, 8 aa, Artificial Sequence
  Peptide Derived from Human Papillomavirus
RYQGVEFI

SEQ ID NO: 15511 - protein, 10 aa, Artificial Sequence
  Peptide Derived from Human Papillomavirus
RYQGVEFISF

SEQ ID NO: 15512 - protein, 11 aa, Artificial Sequence
  Peptide Derived from Human Papillomavirus
RYQGVEFISFL

SEQ ID NO: 15513 - protein, 10 aa, Artificial Sequence
  Peptide Derived from Human Papillomavirus
SFIHFLQGAI

SEQ ID NO: 15514 - protein, 11 aa, Artificial Sequence
  Peptide Derived from Human Papillomavirus
SFIHFLQGAII

SEQ ID NO: 15515 - protein, 9 aa, Artificial Sequence
  Peptide Derived from Human Papillomavirus
SFLRALKEF

SEQ ID NO: 15516 - protein, 10 aa, Artificial Sequence
  Peptide Derived from Human Papillomavirus
SFLRALKEFL

SEQ ID NO: 15517 - protein, 9 aa, Artificial Sequence
  Peptide Derived from Human Papillomavirus
SFTDLVRNF

SEQ ID NO: 15518 - protein, 9 aa, Artificial Sequence
  Peptide Derived from Human Papillomavirus
SFVNSNSHF

SEQ ID NO: 15519 - protein, 10 aa, Artificial Sequence
  Peptide Derived from Human Papillomavirus
SFVNSNSHFW

SEQ ID NO: 15520 - protein, 11 aa, Artificial Sequence
  Peptide Derived from Human Papillomavirus
SFVNSNSHFWL

SEQ ID NO: 15521 - protein, 9 aa, Artificial Sequence
  Peptide Derived from Human Papillomavirus
SIDRKHKPL

SEQ ID NO: 15522 - protein, 10 aa, Artificial Sequence
  Peptide Derived from Human Papillomavirus
SIDRKHKPLL

SEQ ID NO: 15523 - protein, 8 aa, Artificial Sequence
  Peptide Derived from Human Papillomavirus
SITELKEL

SEQ ID NO: 15524 - protein, 9 aa, Artificial Sequence
  Peptide Derived from Human Papillomavirus
SITELKELL

SEQ ID NO: 15525 - protein, 11 aa, Artificial Sequence
  Peptide Derived from Human Papillomavirus
STLLHVPETCM

SEQ ID NO: 15526 - protein, 8 aa, Artificial Sequence
  Peptide Derived from Human Papillomavirus
SVAALYWY

SEQ ID NO: 15527 - protein, 10 aa, Artificial Sequence
  Peptide Derived from Human Papillomavirus
SVDTDLSPRL

SEQ ID NO: 15528 - protein, 8 aa, Artificial Sequence
  Peptide Derived from Human Papillomavirus
SYFGMSFI

SEQ ID NO: 15529 - protein, 10 aa, Artificial Sequence
  Peptide Derived from Human Papillomavirus
SYFGMSFIHF

SEQ ID NO: 15530 - protein, 11 aa, Artificial Sequence
  Peptide Derived from Human Papillomavirus
SYFGMSFIHFL

SEQ ID NO: 15531 - protein, 8 aa, Artificial Sequence
  Peptide Derived from Human Papillomavirus
TFPHAFPF

SEQ ID NO: 15532 - protein, 11 aa, Artificial Sequence
  Peptide Derived from Human Papillomavirus
TIVEKKTGDVI

SEQ ID NO: 15533 - protein, 8 aa, Artificial Sequence
  Peptide Derived from Human Papillomavirus
TLIKPATL

SEQ ID NO: 15534 - protein, 9 aa, Artificial Sequence
  Peptide Derived from Human Papillomavirus
TLIKPATLY

SEQ ID NO: 15535 - protein, 10 aa, Artificial Sequence
  Peptide Derived from Human Papillomavirus
TLLHVPETCM

SEQ ID NO: 15536 - protein, 11 aa, Artificial Sequence
  Peptide Derived from Human Papillomavirus
TLLHVPETCML

SEQ ID NO: 15537 - protein, 9 aa, Artificial Sequence
  Peptide Derived from Human Papillomavirus
TLYAHIQCL

SEQ ID NO: 15538 - protein, 8 aa, Artificial Sequence
  Peptide Derived from Human Papillomavirus
TTCTDWVM

SEQ ID NO: 15539 - protein, 10 aa, Artificial Sequence
  Peptide Derived from Human Papillomavirus
TTCTDWVMAI

SEQ ID NO: 15540 - protein, 11 aa, Artificial Sequence
  Peptide Derived from Human Papillomavirus
TTCTDWVMAIF

SEQ ID NO: 15541 - protein, 9 aa, Artificial Sequence
  Peptide Derived from Human Papillomavirus
TVAEGFKTL

SEQ ID NO: 15542 - protein, 10 aa, Artificial Sequence
  Peptide Derived from Human Papillomavirus
TVAEGFKTLI

SEQ ID NO: 15543 - protein, 9 aa, Artificial Sequence
  Peptide Derived from Human Papillomavirus
TVAKGLSTL

SEQ ID NO: 15544 - protein, 10 aa, Artificial Sequence
  Peptide Derived from Human Papillomavirus
TVAKGLSTLL

SEQ ID NO: 15545 - protein, 9 aa, Artificial Sequence
  Peptide Derived from Human Papillomavirus
TVFTFPHAF

SEQ ID NO: 15546 - protein, 11 aa, Artificial Sequence
  Peptide Derived from Human Papillomavirus
TVFTFPHAFPF

SEQ ID NO: 15547 - protein, 11 aa, Artificial Sequence
  Peptide Derived from Human Papillomavirus
TYFDNYMRNAL

SEQ ID NO: 15548 - protein, 8 aa, Artificial Sequence
  Peptide Derived from Human Papillomavirus
VFKDIYGL

SEQ ID NO: 15549 - protein, 10 aa, Artificial Sequence
  Peptide Derived from Human Papillomavirus
VFKDIYGLSF

SEQ ID NO: 15550 - protein, 8 aa, Artificial Sequence
  Peptide Derived from Human Papillomavirus
VFTFPHAF

SEQ ID NO: 15551 - protein, 10 aa, Artificial Sequence
  Peptide Derived from Human Papillomavirus
VFTFPHAFPF

SEQ ID NO: 15552 - protein, 9 aa, Artificial Sequence
  Peptide Derived from Human Papillomavirus
VLHLLKRKF

SEQ ID NO: 15553 - protein, 9 aa, Artificial Sequence
  Peptide Derived from Human Papillomavirus
VLILALLRY

SEQ ID NO: 15554 - protein, 9 aa, Artificial Sequence
  Peptide Derived from Human Papillomavirus
VTGQNTRPL

SEQ ID NO: 15555 - protein, 10 aa, Artificial Sequence
  Peptide Derived from Human Papillomavirus
VTVFTFPHAF

SEQ ID NO: 15556 - protein, 9 aa, Artificial Sequence
  Peptide Derived from Human Papillomavirus
VYEINDKNW

SEQ ID NO: 15557 - protein, 9 aa, Artificial Sequence
  Peptide Derived from Human Papillomavirus
WIKYRCSKI

SEQ ID NO: 15558 - protein, 8 aa, Artificial Sequence
  Peptide Derived from Human Papillomavirus
WIQRLTII

SEQ ID NO: 15559 - protein, 8 aa, Artificial Sequence
  Peptide Derived from Human Papillomavirus
WTYFDNYM

SEQ ID NO: 15560 - protein, 9 aa, Artificial Sequence
  Peptide Derived from Human Papillomavirus
WYRTGISNI

SEQ ID NO: 15561 - protein, 10 aa, Artificial Sequence
  Peptide Derived from Human Papillomavirus
YFDNYMRNAL

SEQ ID NO: 15562 - protein, 9 aa, Artificial Sequence
  Peptide Derived from Human Papillomavirus
YFGMSFIHF

SEQ ID NO: 15563 - protein, 10 aa, Artificial Sequence
  Peptide Derived from Human Papillomavirus
YFGMSFIHFL

SEQ ID NO: 15564 - protein, 9 aa, Artificial Sequence
  Peptide Derived from Human Papillomavirus
YLESRVTVF

SEQ ID NO: 15565 - protein, 11 aa, Artificial Sequence
  Peptide Derived from Human Papillomavirus
YLESRVTVFTF

SEQ ID NO: 15566 - protein, 8 aa, Artificial Sequence
  Peptide Derived from Human Papillomavirus
YLKDCAVM

SEQ ID NO: 15567 - protein, 11 aa, Artificial Sequence
  Peptide Derived from Human Papillomavirus
YMRNALDGNPI

SEQ ID NO: 15568 - protein, 10 aa, Artificial Sequence
  Peptide Derived from Human Papillomavirus
YWYRTGISNI

SEQ ID NO: 15569 - protein, 8 aa, Artificial Sequence
  Peptide Derived from Human Papillomavirus
AIELQMAL

SEQ ID NO: 15570 - protein, 11 aa, Artificial Sequence
  Peptide Derived from Human Papillomavirus
AIELQMALKGL

SEQ ID NO: 15571 - protein, 11 aa, Artificial Sequence
  Peptide Derived from Human Papillomavirus
AILFTAREHGI

SEQ ID NO: 15572 - protein, 10 aa, Artificial Sequence
  Peptide Derived from Human Papillomavirus
ALKGLAQSKY

SEQ ID NO: 15573 - protein, 10 aa, Artificial Sequence
  Peptide Derived from Human Papillomavirus
ALQDKILDHY

SEQ ID NO: 15574 - protein, 10 aa, Artificial Sequence
  Peptide Derived from Human Papillomavirus
ATKRPRQCGL

SEQ ID NO: 15575 - protein, 8 aa, Artificial Sequence
  Peptide Derived from Human Papillomavirus
ATQIVRQL

SEQ ID NO: 15576 - protein, 9 aa, Artificial Sequence
  Peptide Derived from Human Papillomavirus
CLRYRLRKY

SEQ ID NO: 15577 - protein, 10 aa, Artificial Sequence
  Peptide Derived from Human Papillomavirus
CMNYVVWDSI

SEQ ID NO: 15578 - protein, 11 aa, Artificial Sequence
  Peptide Derived from Human Papillomavirus
CMNYVVWDSIY

SEQ ID NO: 15579 - protein, 8 aa, Artificial Sequence
  Peptide Derived from Human Papillomavirus
CVSYWGVY

SEQ ID NO: 15580 - protein, 9 aa, Artificial Sequence
  Peptide Derived from Human Papillomavirus
CVSYWGVYY

SEQ ID NO: 15581 - protein, 10 aa, Artificial Sequence
  Peptide Derived from Human Papillomavirus
CVSYWGVYYI

SEQ ID NO: 15582 - protein, 8 aa, Artificial Sequence
  Peptide Derived from Human Papillomavirus
DINSQISY

SEQ ID NO: 15583 - protein, 9 aa, Artificial Sequence
  Peptide Derived from Human Papillomavirus
DINSQISYW

SEQ ID NO: 15584 - protein, 11 aa, Artificial Sequence
  Peptide Derived from Human Papillomavirus
DINSQISYWQL

SEQ ID NO: 15585 - protein, 8 aa, Artificial Sequence
  Peptide Derived from Human Papillomavirus
DTTYYVQF

SEQ ID NO: 15586 - protein, 8 aa, Artificial Sequence
  Peptide Derived from Human Papillomavirus
DTVSATQI

SEQ ID NO: 15587 - protein, 11 aa, Artificial Sequence
  Peptide Derived from Human Papillomavirus
DVVTIPNSVQI

SEQ ID NO: 15588 - protein, 8 aa, Artificial Sequence
  Peptide Derived from Human Papillomavirus
EISSTWHW

SEQ ID NO: 15589 - protein, 9 aa, Artificial Sequence
  Peptide Derived from Human Papillomavirus
ELQMALKGL

SEQ ID NO: 15590 - protein, 11 aa, Artificial Sequence
  Peptide Derived from Human Papillomavirus
ELWNTEPSQCF

SEQ ID NO: 15591 - protein, 8 aa, Artificial Sequence
  Peptide Derived from Human Papillomavirus
EVQRNTFL

SEQ ID NO: 15592 - protein, 9 aa, Artificial Sequence
  Peptide Derived from Human Papillomavirus
EVQYGGNVI

SEQ ID NO: 15593 - protein, 11 aa, Artificial Sequence
  Peptide Derived from Human Papillomavirus
EWTLQDTCEEL

SEQ ID NO: 15594 - protein, 8 aa, Artificial Sequence
  Peptide Derived from Human Papillomavirus
FTAREHGI

SEQ ID NO: 15595 - protein, 11 aa, Artificial Sequence
  Peptide Derived from Human Papillomavirus
FTAREHGITKL

SEQ ID NO: 15596 - protein, 9 aa, Artificial Sequence
  Peptide Derived from Human Papillomavirus
HLKGDKNSL

SEQ ID NO: 15597 - protein, 11 aa, Artificial Sequence
  Peptide Derived from Human Papillomavirus
HWTGCNKNTGI

SEQ ID NO: 15598 - protein, 9 aa, Artificial Sequence
  Peptide Derived from Human Papillomavirus
HYENDSKDI

SEQ ID NO: 15599 - protein, 9 aa, Artificial Sequence
  Peptide Derived from Human Papillomavirus
HYSEISSTW

SEQ ID NO: 15600 - protein, 11 aa, Artificial Sequence
  Peptide Derived from Human Papillomavirus
HYSEISSTWHW

SEQ ID NO: 15601 - protein, 11 aa, Artificial Sequence
  Peptide Derived from Human Papillomavirus
IIHLKGDKNSL

SEQ ID NO: 15602 - protein, 10 aa, Artificial Sequence
  Peptide Derived from Human Papillomavirus
ILFTAREHGI

SEQ ID NO: 15603 - protein, 11 aa, Artificial Sequence
  Peptide Derived from Human Papillomavirus
IWDKTAACVSY

SEQ ID NO: 15604 - protein, 9 aa, Artificial Sequence
  Peptide Derived from Human Papillomavirus
IYYITETGI

SEQ ID NO: 15605 - protein, 10 aa, Artificial Sequence
  Peptide Derived from Human Papillomavirus
IYYITETGIW

SEQ ID NO: 15606 - protein, 10 aa, Artificial Sequence
  Peptide Derived from Human Papillomavirus
KLNHQVVPPI

SEQ ID NO: 15607 - protein, 9 aa, Artificial Sequence
  Peptide Derived from Human Papillomavirus
KMQTPKESL

SEQ ID NO: 15608 - protein, 8 aa, Artificial Sequence
  Peptide Derived from Human Papillomavirus
KTAACVSY

SEQ ID NO: 15609 - protein, 9 aa, Artificial Sequence
  Peptide Derived from Human Papillomavirus
KTAACVSYW

SEQ ID NO: 15610 - protein, 10 aa, Artificial Sequence
  Peptide Derived from Human Papillomavirus
KVCSGNTTPI

SEQ ID NO: 15611 - protein, 11 aa, Artificial Sequence
  Peptide Derived from Human Papillomavirus
KVCSGNTTPII

SEQ ID NO: 15612 - protein, 9 aa, Artificial Sequence
  Peptide Derived from Human Papillomavirus
KYADHYSEI

SEQ ID NO: 15613 - protein, 8 aa, Artificial Sequence
  Peptide Derived from Human Papillomavirus
KYGNSNTW

SEQ ID NO: 15614 - protein, 9 aa, Artificial Sequence
  Peptide Derived from Human Papillomavirus
KYNNEEWTL

SEQ ID NO: 15615 - protein, 9 aa, Artificial Sequence
  Peptide Derived from Human Papillomavirus
LFTAREHGI

SEQ ID NO: 15616 - protein, 8 aa, Artificial Sequence
  Peptide Derived from Human Papillomavirus
LIRLENAI

SEQ ID NO: 15617 - protein, 9 aa, Artificial Sequence
  Peptide Derived from Human Papillomavirus
LIRLENAIL

SEQ ID NO: 15618 - protein, 10 aa, Artificial Sequence
  Peptide Derived from Human Papillomavirus
LIRLENAILF

SEQ ID NO: 15619 - protein, 10 aa, Artificial Sequence
  Peptide Derived from Human Papillomavirus
LWNTEPSQCF

SEQ ID NO: 15620 - protein, 11 aa, Artificial Sequence
  Peptide Derived from Human Papillomavirus
NISKSKAHKAI

SEQ ID NO: 15621 - protein, 8 aa, Artificial Sequence
  Peptide Derived from Human Papillomavirus
NTEPSQCF

SEQ ID NO: 15622 - protein, 9 aa, Artificial Sequence
  Peptide Derived from Human Papillomavirus
NTFLDVVTI

SEQ ID NO: 15623 - protein, 9 aa, Artificial Sequence
  Peptide Derived from Human Papillomavirus
NTGILTVTY

SEQ ID NO: 15624 - protein, 8 aa, Artificial Sequence
  Peptide Derived from Human Papillomavirus
NTHVHNPL

SEQ ID NO: 15625 - protein, 9 aa, Artificial Sequence
  Peptide Derived from Human Papillomavirus
NTHVHNPLL

SEQ ID NO: 15626 - protein, 8 aa, Artificial Sequence
  Peptide Derived from Human Papillomavirus
NTTPIIHL

SEQ ID NO: 15627 - protein, 9 aa, Artificial Sequence
  Peptide Derived from Human Papillomavirus
NVIDCNDSM

SEQ ID NO: 15628 - protein, 8 aa, Artificial Sequence
  Peptide Derived from Human Papillomavirus
NYVVWDSI

SEQ ID NO: 15629 - protein, 9 aa, Artificial Sequence
  Peptide Derived from Human Papillomavirus
NYVVWDSIY

SEQ ID NO: 15630 - protein, 10 aa, Artificial Sequence
  Peptide Derived from Human Papillomavirus
NYVVWDSIYY

SEQ ID NO: 15631 - protein, 11 aa, Artificial Sequence
  Peptide Derived from Human Papillomavirus
NYVVWDSIYYI

SEQ ID NO: 15632 - protein, 9 aa, Artificial Sequence
  Peptide Derived from Human Papillomavirus
QFKSECEKY

SEQ ID NO: 15633 - protein, 9 aa, Artificial Sequence
  Peptide Derived from Human Papillomavirus
QISVGYMTI

SEQ ID NO: 15634 - protein, 8 aa, Artificial Sequence
  Peptide Derived from Human Papillomavirus
QISYWQLI

SEQ ID NO: 15635 - protein, 10 aa, Artificial Sequence
  Peptide Derived from Human Papillomavirus
QISYWQLIRL

SEQ ID NO: 15636 - protein, 9 aa, Artificial Sequence
  Peptide Derived from Human Papillomavirus
QLIRLENAI

SEQ ID NO: 15637 - protein, 10 aa, Artificial Sequence
  Peptide Derived from Human Papillomavirus
QLIRLENAIL

SEQ ID NO: 15638 - protein, 11 aa, Artificial Sequence
  Peptide Derived from Human Papillomavirus
QLIRLENAILF

SEQ ID NO: 15639 - protein, 11 aa, Artificial Sequence
  Peptide Derived from Human Papillomavirus
QTPKESLSERL

SEQ ID NO: 15640 - protein, 8 aa, Artificial Sequence
  Peptide Derived from Human Papillomavirus
QVVPPINI

SEQ ID NO: 15641 - protein, 8 aa, Artificial Sequence
  Peptide Derived from Human Papillomavirus
RLENAILF

SEQ ID NO: 15642 - protein, 9 aa, Artificial Sequence
  Peptide Derived from Human Papillomavirus
RLRKYADHY

SEQ ID NO: 15643 - protein, 9 aa, Artificial Sequence
  Peptide Derived from Human Papillomavirus
RLSALQDKI

SEQ ID NO: 15644 - protein, 10 aa, Artificial Sequence
  Peptide Derived from Human Papillomavirus
RLSALQDKIL

SEQ ID NO: 15645 - protein, 10 aa, Artificial Sequence
  Peptide Derived from Human Papillomavirus
RVNTHVHNPL

SEQ ID NO: 15646 - protein, 11 aa, Artificial Sequence
  Peptide Derived from Human Papillomavirus
RVNTHVHNPLL

SEQ ID NO: 15647 - protein, 11 aa, Artificial Sequence
  Peptide Derived from Human Papillomavirus
RYRLRKYADHY

SEQ ID NO: 15648 - protein, 10 aa, Artificial Sequence
  Peptide Derived from Human Papillomavirus
SIYYITETGI

SEQ ID NO: 15649 - protein, 11 aa, Artificial Sequence
  Peptide Derived from Human Papillomavirus
SIYYITETGIW

SEQ ID NO: 15650 - protein, 9 aa, Artificial Sequence
  Peptide Derived from Human Papillomavirus
SLKCLRYRL

SEQ ID NO: 15651 - protein, 9 aa, Artificial Sequence
  Peptide Derived from Human Papillomavirus
SLSERLSAL

SEQ ID NO: 15652 - protein, 9 aa, Artificial Sequence
  Peptide Derived from Human Papillomavirus
SVGTPKPHI

SEQ ID NO: 15653 - protein, 8 aa, Artificial Sequence
  Peptide Derived from Human Papillomavirus
SVQISVGY

SEQ ID NO: 15654 - protein, 9 aa, Artificial Sequence
  Peptide Derived from Human Papillomavirus
SVQISVGYM

SEQ ID NO: 15655 - protein, 11 aa, Artificial Sequence
  Peptide Derived from Human Papillomavirus
SVQISVGYMTI

SEQ ID NO: 15656 - protein, 8 aa, Artificial Sequence
  Peptide Derived from Human Papillomavirus
SYWGVYYI

SEQ ID NO: 15657 - protein, 8 aa, Artificial Sequence
  Peptide Derived from Human Papillomavirus
SYWQLIRL

SEQ ID NO: 15658 - protein, 8 aa, Artificial Sequence
  Peptide Derived from Human Papillomavirus
TFLDVVTI

SEQ ID NO: 15659 - protein, 8 aa, Artificial Sequence
  Peptide Derived from Human Papillomavirus
TIPNSVQI

SEQ ID NO: 15660 - protein, 9 aa, Artificial Sequence
  Peptide Derived from Human Papillomavirus
TLQDTCEEL

SEQ ID NO: 15661 - protein, 10 aa, Artificial Sequence
  Peptide Derived from Human Papillomavirus
TLQDTCEELW

SEQ ID NO: 15662 - protein, 11 aa, Artificial Sequence
  Peptide Derived from Human Papillomavirus
TVSATQIVRQL

SEQ ID NO: 15663 - protein, 11 aa, Artificial Sequence
  Peptide Derived from Human Papillomavirus
TWEVQYGGNVI

SEQ ID NO: 15664 - protein, 11 aa, Artificial Sequence
  Peptide Derived from Human Papillomavirus
TYNSEVQRNTF

SEQ ID NO: 15665 - protein, 8 aa, Artificial Sequence
  Peptide Derived from Human Papillomavirus
VIDCNDSM

SEQ ID NO: 15666 - protein, 9 aa, Artificial Sequence
  Peptide Derived from Human Papillomavirus
VTIPNSVQI

SEQ ID NO: 15667 - protein, 10 aa, Artificial Sequence
  Peptide Derived from Human Papillomavirus
VVTIPNSVQI

SEQ ID NO: 15668 - protein, 8 aa, Artificial Sequence
  Peptide Derived from Human Papillomavirus
VVWDSIYY

SEQ ID NO: 15669 - protein, 9 aa, Artificial Sequence
  Peptide Derived from Human Papillomavirus
VVWDSIYYI

SEQ ID NO: 15670 - protein, 8 aa, Artificial Sequence
  Peptide Derived from Human Papillomavirus
VWDSIYYI

SEQ ID NO: 15671 - protein, 11 aa, Artificial Sequence
  Peptide Derived from Human Papillomavirus
VYFDGNKDNCM

SEQ ID NO: 15672 - protein, 11 aa, Artificial Sequence
  Peptide Derived from Human Papillomavirus
VYYIKDGDTTY

SEQ ID NO: 15673 - protein, 10 aa, Artificial Sequence
  Peptide Derived from Human Papillomavirus
WTGCNKNTGI

SEQ ID NO: 15674 - protein, 11 aa, Artificial Sequence
  Peptide Derived from Human Papillomavirus
WTGCNKNTGIL

SEQ ID NO: 15675 - protein, 10 aa, Artificial Sequence
  Peptide Derived from Human Papillomavirus
WTLQDTCEEL

SEQ ID NO: 15676 - protein, 11 aa, Artificial Sequence
  Peptide Derived from Human Papillomavirus
WTLQDTCEELW

SEQ ID NO: 15677 - protein, 10 aa, Artificial Sequence
  Peptide Derived from Human Papillomavirus
YFDGNKDNCM

SEQ ID NO: 15678 - protein, 9 aa, Artificial Sequence
  Peptide Derived from Human Papillomavirus
YIKDGDTTY

SEQ ID NO: 15679 - protein, 10 aa, Artificial Sequence
  Peptide Derived from Human Papillomavirus
YIKDGDTTYY

SEQ ID NO: 15680 - protein, 8 aa, Artificial Sequence
  Peptide Derived from Human Papillomavirus
YITETGIW

SEQ ID NO: 15681 - protein, 11 aa, Artificial Sequence
  Peptide Derived from Human Papillomavirus
YVQFKSECEKY

SEQ ID NO: 15682 - protein, 8 aa, Artificial Sequence
  Peptide Derived from Human Papillomavirus
YVVWDSIY

SEQ ID NO: 15683 - protein, 9 aa, Artificial Sequence
  Peptide Derived from Human Papillomavirus
YVVWDSIYY

SEQ ID NO: 15684 - protein, 10 aa, Artificial Sequence
  Peptide Derived from Human Papillomavirus
YVVWDSIYYI

SEQ ID NO: 15685 - protein, 11 aa, Artificial Sequence
  Peptide Derived from Human Papillomavirus
YWQLIRLENAI

SEQ ID NO: 15686 - protein, 10 aa, Artificial Sequence
  Peptide Derived from Human Papillomavirus
YYIKDGDTTY

SEQ ID NO: 15687 - protein, 11 aa, Artificial Sequence
  Peptide Derived from Human Papillomavirus
YYIKDGDTTYY

SEQ ID NO: 15688 - protein, 8 aa, Artificial Sequence
  Peptide Derived from Human Papillomavirus
YYITETGI

SEQ ID NO: 15689 - protein, 9 aa, Artificial Sequence
  Peptide Derived from Human Papillomavirus
YYITETGIW

SEQ ID NO: 15690 - protein, 9 aa, Artificial Sequence
  Peptide Derived from Human Papillomavirus
AFKDLFIVY

SEQ ID NO: 15691 - protein, 9 aa, Artificial Sequence
  Peptide Derived from Human Papillomavirus
ATLERTEVY

SEQ ID NO: 15692 - protein, 11 aa, Artificial Sequence
  Peptide Derived from Human Papillomavirus
ATLERTEVYQF

SEQ ID NO: 15693 - protein, 9 aa, Artificial Sequence
  Peptide Derived from Human Papillomavirus
AYAACHKCI

SEQ ID NO: 15694 - protein, 11 aa, Artificial Sequence
  Peptide Derived from Human Papillomavirus
AYAACHKCIDF

SEQ ID NO: 15695 - protein, 11 aa, Artificial Sequence
  Peptide Derived from Human Papillomavirus
CIAYAACHKCI

SEQ ID NO: 15696 - protein, 8 aa, Artificial Sequence
  Peptide Derived from Human Papillomavirus
CIDFYSRI

SEQ ID NO: 15697 - protein, 11 aa, Artificial Sequence
  Peptide Derived from Human Papillomavirus
CIDFYSRIREL

SEQ ID NO: 15698 - protein, 8 aa, Artificial Sequence
  Peptide Derived from Human Papillomavirus
CLRCQKPL

SEQ ID NO: 15699 - protein, 8 aa, Artificial Sequence
  Peptide Derived from Human Papillomavirus
CTELNTSL

SEQ ID NO: 15700 - protein, 8 aa, Artificial Sequence
  Peptide Derived from Human Papillomavirus
CVYCKATL

SEQ ID NO: 15701 - protein, 9 aa, Artificial Sequence
  Peptide Derived from Human Papillomavirus
DFYSRIREL

SEQ ID NO: 15702 - protein, 11 aa, Artificial Sequence
  Peptide Derived from Human Papillomavirus
DFYSRIRELRY

SEQ ID NO: 15703 - protein, 10 aa, Artificial Sequence
  Peptide Derived from Human Papillomavirus
DLCTELNTSL

SEQ ID NO: 15704 - protein, 10 aa, Artificial Sequence
  Peptide Derived from Human Papillomavirus
DLFIVYRDCI

SEQ ID NO: 15705 - protein, 8 aa, Artificial Sequence
  Peptide Derived from Human Papillomavirus
DVSIACVY

SEQ ID NO: 15706 - protein, 11 aa, Artificial Sequence
  Peptide Derived from Human Papillomavirus
ELNTSLQDVSI

SEQ ID NO: 15707 - protein, 10 aa, Artificial Sequence
  Peptide Derived from Human Papillomavirus
ELRYYSNSVY

SEQ ID NO: 15708 - protein, 10 aa, Artificial Sequence
  Peptide Derived from Human Papillomavirus
ELYNLLIRCL

SEQ ID NO: 15709 - protein, 11 aa, Artificial Sequence
  Peptide Derived from Human Papillomavirus
ETLEKITNTEL

SEQ ID NO: 15710 - protein, 10 aa, Artificial Sequence
  Peptide Derived from Human Papillomavirus
EVYQFAFKDL

SEQ ID NO: 15711 - protein, 11 aa, Artificial Sequence
  Peptide Derived from Human Papillomavirus
EVYQFAFKDLF

SEQ ID NO: 15712 - protein, 8 aa, Artificial Sequence
  Peptide Derived from Human Papillomavirus
FIVYRDCI

SEQ ID NO: 15713 - protein, 10 aa, Artificial Sequence
  Peptide Derived from Human Papillomavirus
FIVYRDCIAY

SEQ ID NO: 15714 - protein, 8 aa, Artificial Sequence
  Peptide Derived from Human Papillomavirus
FYSRIREL

SEQ ID NO: 15715 - protein, 10 aa, Artificial Sequence
  Peptide Derived from Human Papillomavirus
FYSRIRELRY

SEQ ID NO: 15716 - protein, 11 aa, Artificial Sequence
  Peptide Derived from Human Papillomavirus
FYSRIRELRYY

SEQ ID NO: 15717 - protein, 8 aa, Artificial Sequence
  Peptide Derived from Human Papillomavirus
HLKDKRRF

SEQ ID NO: 15718 - protein, 11 aa, Artificial Sequence
  Peptide Derived from Human Papillomavirus
HLKDKRRFHSI

SEQ ID NO: 15719 - protein, 9 aa, Artificial Sequence
  Peptide Derived from Human Papillomavirus
ITNTELYNL

SEQ ID NO: 15720 - protein, 10 aa, Artificial Sequence
  Peptide Derived from Human Papillomavirus
ITNTELYNLL

SEQ ID NO: 15721 - protein, 11 aa, Artificial Sequence
  Peptide Derived from Human Papillomavirus
ITNTELYNLLI

SEQ ID NO: 15722 - protein, 9 aa, Artificial Sequence
  Peptide Derived from Human Papillomavirus
IVYRDCIAY

SEQ ID NO: 15723 - protein, 8 aa, Artificial Sequence
  Peptide Derived from Human Papillomavirus
KITNTELY

SEQ ID NO: 15724 - protein, 10 aa, Artificial Sequence
  Peptide Derived from Human Papillomavirus
KITNTELYNL

SEQ ID NO: 15725 - protein, 11 aa, Artificial Sequence
  Peptide Derived from Human Papillomavirus
KITNTELYNLL

SEQ ID NO: 15726 - protein, 9 aa, Artificial Sequence
  Peptide Derived from Human Papillomavirus
KLPDLCTEL

SEQ ID NO: 15727 - protein, 9 aa, Artificial Sequence
  Peptide Derived from Human Papillomavirus
LFIVYRDCI

SEQ ID NO: 15728 - protein, 11 aa, Artificial Sequence
  Peptide Derived from Human Papillomavirus
LFIVYRDCIAY

SEQ ID NO: 15729 - protein, 11 aa, Artificial Sequence
  Peptide Derived from Human Papillomavirus
LIRCLRCQKPL

SEQ ID NO: 15730 - protein, 9 aa, Artificial Sequence
  Peptide Derived from Human Papillomavirus
LYNLLIRCL

SEQ ID NO: 15731 - protein, 8 aa, Artificial Sequence
  Peptide Derived from Human Papillomavirus
NTELYNLL

SEQ ID NO: 15732 - protein, 9 aa, Artificial Sequence
  Peptide Derived from Human Papillomavirus
NTELYNLLI

SEQ ID NO: 15733 - protein, 9 aa, Artificial Sequence
  Peptide Derived from Human Papillomavirus
NTSLQDVSI

SEQ ID NO: 15734 - protein, 11 aa, Artificial Sequence
  Peptide Derived from Human Papillomavirus
PLNPAEKRRHL

SEQ ID NO: 15735 - protein, 8 aa, Artificial Sequence
  Peptide Derived from Human Papillomavirus
PTQRPYKL

SEQ ID NO: 15736 - protein, 11 aa, Artificial Sequence
  Peptide Derived from Human Papillomavirus
PTQRPYKLPDL

SEQ ID NO: 15737 - protein, 11 aa, Artificial Sequence
  Peptide Derived from Human Papillomavirus
PYKLPDLCTEL

SEQ ID NO: 15738 - protein, 8 aa, Artificial Sequence
  Peptide Derived from Human Papillomavirus
QFAFKDLF

SEQ ID NO: 15739 - protein, 9 aa, Artificial Sequence
  Peptide Derived from Human Papillomavirus
QFAFKDLFI

SEQ ID NO: 15740 - protein, 11 aa, Artificial Sequence
  Peptide Derived from Human Papillomavirus
QFAFKDLFIVY

SEQ ID NO: 15741 - protein, 10 aa, Artificial Sequence
  Peptide Derived from Human Papillomavirus
RFDDPTQRPY

SEQ ID NO: 15742 - protein, 9 aa, Artificial Sequence
  Peptide Derived from Human Papillomavirus
RFHSIAGQY

SEQ ID NO: 15743 - protein, 8 aa, Artificial Sequence
  Peptide Derived from Human Papillomavirus
RIRELRYY

SEQ ID NO: 15744 - protein, 9 aa, Artificial Sequence
  Peptide Derived from Human Papillomavirus
RTEVYQFAF

SEQ ID NO: 15745 - protein, 8 aa, Artificial Sequence
  Peptide Derived from Human Papillomavirus
RYYSNSVY

SEQ ID NO: 15746 - protein, 11 aa, Artificial Sequence
  Peptide Derived from Human Papillomavirus
SIACVYCKATL

SEQ ID NO: 15747 - protein, 11 aa, Artificial Sequence
  Peptide Derived from Human Papillomavirus
SLQDVSIACVY

SEQ ID NO: 15748 - protein, 10 aa, Artificial Sequence
  Peptide Derived from Human Papillomavirus
SVYGETLEKI

SEQ ID NO: 15749 - protein, 10 aa, Artificial Sequence
  Peptide Derived from Human Papillomavirus
TLEKITNTEL

SEQ ID NO: 15750 - protein, 11 aa, Artificial Sequence
  Peptide Derived from Human Papillomavirus
TLEKITNTELY

SEQ ID NO: 15751 - protein, 8 aa, Artificial Sequence
  Peptide Derived from Human Papillomavirus
TLERTEVY

SEQ ID NO: 15752 - protein, 10 aa, Artificial Sequence
  Peptide Derived from Human Papillomavirus
TLERTEVYQF

SEQ ID NO: 15753 - protein, 9 aa, Artificial Sequence
  Peptide Derived from Human Papillomavirus
VYGETLEKI

SEQ ID NO: 15754 - protein, 9 aa, Artificial Sequence
  Peptide Derived from Human Papillomavirus
VYQFAFKDL

SEQ ID NO: 15755 - protein, 10 aa, Artificial Sequence
  Peptide Derived from Human Papillomavirus
VYQFAFKDLF

SEQ ID NO: 15756 - protein, 11 aa, Artificial Sequence
  Peptide Derived from Human Papillomavirus
VYQFAFKDLFI

SEQ ID NO: 15757 - protein, 8 aa, Artificial Sequence
  Peptide Derived from Human Papillomavirus
VYRDCIAY

SEQ ID NO: 15758 - protein, 11 aa, Artificial Sequence
  Peptide Derived from Human Papillomavirus
YYSNSVYGETL

SEQ ID NO: 15759 - protein, 8 aa, Artificial Sequence
  Peptide Derived from Human Papillomavirus
ATLQEIVL

SEQ ID NO: 15760 - protein, 10 aa, Artificial Sequence
  Peptide Derived from Human Papillomavirus
ATLQEIVLHL

SEQ ID NO: 15761 - protein, 10 aa, Artificial Sequence
  Peptide Derived from Human Papillomavirus
CVCCKCDGRI

SEQ ID NO: 15762 - protein, 8 aa, Artificial Sequence
  Peptide Derived from Human Papillomavirus
DLLCYEQL

SEQ ID NO: 15763 - protein, 8 aa, Artificial Sequence
  Peptide Derived from Human Papillomavirus
DLRTLQQL

SEQ ID NO: 15764 - protein, 9 aa, Artificial Sequence
  Peptide Derived from Human Papillomavirus
DLRTLQQLF

SEQ ID NO: 15765 - protein, 10 aa, Artificial Sequence
  Peptide Derived from Human Papillomavirus
DLRTLQQLFL

SEQ ID NO: 15766 - protein, 8 aa, Artificial Sequence
  Peptide Derived from Human Papillomavirus
ELDPVDLL

SEQ ID NO: 15767 - protein, 10 aa, Artificial Sequence
  Peptide Derived from Human Papillomavirus
ELDPVDLLCY

SEQ ID NO: 15768 - protein, 11 aa, Artificial Sequence
  Peptide Derived from Human Papillomavirus
ELTVESSADDL

SEQ ID NO: 15769 - protein, 11 aa, Artificial Sequence
  Peptide Derived from Human Papillomavirus
FLSTLSFVCPW

SEQ ID NO: 15770 - protein, 8 aa, Artificial Sequence
  Peptide Derived from Human Papillomavirus
HLEPQNEL

SEQ ID NO: 15771 - protein, 11 aa, Artificial Sequence
  Peptide Derived from Human Papillomavirus
IVLHLEPQNEL

SEQ ID NO: 15772 - protein, 8 aa, Artificial Sequence
  Peptide Derived from Human Papillomavirus
LFLSTLSF

SEQ ID NO: 15773 - protein, 10 aa, Artificial Sequence
  Peptide Derived from Human Papillomavirus
LTVESSADDL

SEQ ID NO: 15774 - protein, 10 aa, Artificial Sequence
  Peptide Derived from Human Papillomavirus
PVDLLCYEQL

SEQ ID NO: 15775 - protein, 9 aa, Artificial Sequence
  Peptide Derived from Human Papillomavirus
QLFLSTLSF

SEQ ID NO: 15776 - protein, 8 aa, Artificial Sequence
  Peptide Derived from Human Papillomavirus
RTLQQLFL

SEQ ID NO: 15777 - protein, 11 aa, Artificial Sequence
  Peptide Derived from Human Papillomavirus
RTLQQLFLSTL

SEQ ID NO: 15778 - protein, 9 aa, Artificial Sequence
  Peptide Derived from Human Papillomavirus
STLSFVCPW

SEQ ID NO: 15779 - protein, 9 aa, Artificial Sequence
  Peptide Derived from Human Papillomavirus
TLQEIVLHL

SEQ ID NO: 15780 - protein, 10 aa, Artificial Sequence
  Peptide Derived from Human Papillomavirus
TLQQLFLSTL

SEQ ID NO: 15781 - protein, 8 aa, Artificial Sequence
  Peptide Derived from Human Papillomavirus
TLSFVCPW

SEQ ID NO: 15782 - protein, 9 aa, Artificial Sequence
  Peptide Derived from Human Papillomavirus
TVESSADDL

SEQ ID NO: 15783 - protein, 10 aa, Artificial Sequence
  Peptide Derived from Human Papillomavirus
VLHLEPQNEL

SEQ ID NO: 15784 - protein, 11 aa, Artificial Sequence
  Peptide Derived from Human Papillomavirus
AIGEHWAKGTL

SEQ ID NO: 15785 - protein, 8 aa, Artificial Sequence
  Peptide Derived from Human Papillomavirus
ALPDPNKF

SEQ ID NO: 15786 - protein, 10 aa, Artificial Sequence
  Peptide Derived from Human Papillomavirus
ALPDPNKFGL

SEQ ID NO: 15787 - protein, 11 aa, Artificial Sequence
  Peptide Derived from Human Papillomavirus
ALWRPSDSTVY

SEQ ID NO: 15788 - protein, 8 aa, Artificial Sequence
  Peptide Derived from Human Papillomavirus
AVPKVSAY

SEQ ID NO: 15789 - protein, 10 aa, Artificial Sequence
  Peptide Derived from Human Papillomavirus
AVPKVSAYQY

SEQ ID NO: 15790 - protein, 11 aa, Artificial Sequence
  Peptide Derived from Human Papillomavirus
AYQYRVFRVAL

SEQ ID NO: 15791 - protein, 9 aa, Artificial Sequence
  Peptide Derived from Human Papillomavirus
CILGCVPAI

SEQ ID NO: 15792 - protein, 8 aa, Artificial Sequence
  Peptide Derived from Human Papillomavirus
CLRREQLF

SEQ ID NO: 15793 - protein, 10 aa, Artificial Sequence
  Peptide Derived from Human Papillomavirus
CTITLTAEVM

SEQ ID NO: 15794 - protein, 9 aa, Artificial Sequence
  Peptide Derived from Human Papillomavirus
CVPAIGEHW

SEQ ID NO: 15795 - protein, 11 aa, Artificial Sequence
  Peptide Derived from Human Papillomavirus
CVYSPSPSGSI

SEQ ID NO: 15796 - protein, 9 aa, Artificial Sequence
  Peptide Derived from Human Papillomavirus
DICQSICKY

SEQ ID NO: 15797 - protein, 11 aa, Artificial Sequence
  Peptide Derived from Human Papillomavirus
DLDQYPLGRKF

SEQ ID NO: 15798 - protein, 10 aa, Artificial Sequence
  Peptide Derived from Human Papillomavirus
DLKEKFSSDL

SEQ ID NO: 15799 - protein, 8 aa, Artificial Sequence
  Peptide Derived from Human Papillomavirus
DLQFIFQL

SEQ ID NO: 15800 - protein, 11 aa, Artificial Sequence
  Peptide Derived from Human Papillomavirus
DLQFIFQLCTI

SEQ ID NO: 15801 - protein, 11 aa, Artificial Sequence
  Peptide Derived from Human Papillomavirus
DLYIKGTSANM

SEQ ID NO: 15802 - protein, 10 aa, Artificial Sequence
  Peptide Derived from Human Papillomavirus
DMVDTGYGAM

SEQ ID NO: 15803 - protein, 9 aa, Artificial Sequence
  Peptide Derived from Human Papillomavirus
DTGYGAMDF

SEQ ID NO: 15804 - protein, 8 aa, Artificial Sequence
  Peptide Derived from Human Papillomavirus
DTKCEVPL

SEQ ID NO: 15805 - protein, 10 aa, Artificial Sequence
  Peptide Derived from Human Papillomavirus
DTKCEVPLDI

SEQ ID NO: 15806 - protein, 11 aa, Artificial Sequence
  Peptide Derived from Human Papillomavirus
DTTPPEKQDPY

SEQ ID NO: 15807 - protein, 8 aa, Artificial Sequence
  Peptide Derived from Human Papillomavirus
DTTRSTNL

SEQ ID NO: 15808 - protein, 10 aa, Artificial Sequence
  Peptide Derived from Human Papillomavirus
DTTRSTNLTL

SEQ ID NO: 15809 - protein, 8 aa, Artificial Sequence
  Peptide Derived from Human Papillomavirus
DTVPTDLY

SEQ ID NO: 15810 - protein, 9 aa, Artificial Sequence
  Peptide Derived from Human Papillomavirus
DTVPTDLYI

SEQ ID NO: 15811 - protein, 10 aa, Artificial Sequence
  Peptide Derived from Human Papillomavirus
DVRDNVSVDY

SEQ ID NO: 15812 - protein, 9 aa, Artificial Sequence
  Peptide Derived from Human Papillomavirus
DYKQTQLCI

SEQ ID NO: 15813 - protein, 10 aa, Artificial Sequence
  Peptide Derived from Human Papillomavirus
DYKQTQLCIL

SEQ ID NO: 15814 - protein, 10 aa, Artificial Sequence
  Peptide Derived from Human Papillomavirus
DYLQMSADPY

SEQ ID NO: 15815 - protein, 8 aa, Artificial Sequence
  Peptide Derived from Human Papillomavirus
DYVSRTSI

SEQ ID NO: 15816 - protein, 9 aa, Artificial Sequence
  Peptide Derived from Human Papillomavirus
DYVSRTSIF

SEQ ID NO: 15817 - protein, 10 aa, Artificial Sequence
  Peptide Derived from Human Papillomavirus
DYVSRTSIFY

SEQ ID NO: 15818 - protein, 8 aa, Artificial Sequence
  Peptide Derived from Human Papillomavirus
EIGRGQPL

SEQ ID NO: 15819 - protein, 10 aa, Artificial Sequence
  Peptide Derived from Human Papillomavirus
EIGRGQPLGI

SEQ ID NO: 15820 - protein, 8 aa, Artificial Sequence
  Peptide Derived from Human Papillomavirus
ETPGSCVY

SEQ ID NO: 15821 - protein, 9 aa, Artificial Sequence
  Peptide Derived from Human Papillomavirus
EVMSYIHSM

SEQ ID NO: 15822 - protein, 10 aa, Artificial Sequence
  Peptide Derived from Human Papillomavirus
EVPLDICQSI

SEQ ID NO: 15823 - protein, 8 aa, Artificial Sequence
  Peptide Derived from Human Papillomavirus
EYDLQFIF

SEQ ID NO: 15824 - protein, 10 aa, Artificial Sequence
  Peptide Derived from Human Papillomavirus
EYDLQFIFQL

SEQ ID NO: 15825 - protein, 9 aa, Artificial Sequence
  Peptide Derived from Human Papillomavirus
FFCLRREQL

SEQ ID NO: 15826 - protein, 10 aa, Artificial Sequence
  Peptide Derived from Human Papillomavirus
FFCLRREQLF

SEQ ID NO: 15827 - protein, 8 aa, Artificial Sequence
  Peptide Derived from Human Papillomavirus
FIFQLCTI

SEQ ID NO: 15828 - protein, 10 aa, Artificial Sequence
  Peptide Derived from Human Papillomavirus
FIFQLCTITL

SEQ ID NO: 15829 - protein, 8 aa, Artificial Sequence
  Peptide Derived from Human Papillomavirus
FLKNVNVF

SEQ ID NO: 15830 - protein, 10 aa, Artificial Sequence
  Peptide Derived from Human Papillomavirus
FLKNVNVFPI

SEQ ID NO: 15831 - protein, 11 aa, Artificial Sequence
  Peptide Derived from Human Papillomavirus
FLKNVNVFPIF

SEQ ID NO: 15832 - protein, 8 aa, Artificial Sequence
  Peptide Derived from Human Papillomavirus
FWNRAGVM

SEQ ID NO: 15833 - protein, 10 aa, Artificial Sequence
  Peptide Derived from Human Papillomavirus
FWTVDLKEKF

SEQ ID NO: 15834 - protein, 9 aa, Artificial Sequence
  Peptide Derived from Human Papillomavirus
FYHAGSSRL

SEQ ID NO: 15835 - protein, 10 aa, Artificial Sequence
  Peptide Derived from Human Papillomavirus
FYHAGSSRLL

SEQ ID NO: 15836 - protein, 8 aa, Artificial Sequence
  Peptide Derived from Human Papillomavirus
GICWHNQL

SEQ ID NO: 15837 - protein, 9 aa, Artificial Sequence
  Peptide Derived from Human Papillomavirus
GICWHNQLF

SEQ ID NO: 15838 - protein, 9 aa, Artificial Sequence
  Peptide Derived from Human Papillomavirus
GIGLSGHPF

SEQ ID NO: 15839 - protein, 10 aa, Artificial Sequence
  Peptide Derived from Human Papillomavirus
GIGLSGHPFY

SEQ ID NO: 15840 - protein, 8 aa, Artificial Sequence
  Peptide Derived from Human Papillomavirus
GLPDSTIY

SEQ ID NO: 15841 - protein, 8 aa, Artificial Sequence
  Peptide Derived from Human Papillomavirus
GLRRRPTI

SEQ ID NO: 15842 - protein, 8 aa, Artificial Sequence
  Peptide Derived from Human Papillomavirus
GLSGHPFY

SEQ ID NO: 15843 - protein, 11 aa, Artificial Sequence
  Peptide Derived from Human Papillomavirus
GLSGHPFYNKL

SEQ ID NO: 15844 - protein, 10 aa, Artificial Sequence
  Peptide Derived from Human Papillomavirus
GMEIGRGQPL

SEQ ID NO: 15845 - protein, 9 aa, Artificial Sequence
  Peptide Derived from Human Papillomavirus
GTLCKPAQL

SEQ ID NO: 15846 - protein, 11 aa, Artificial Sequence
  Peptide Derived from Human Papillomavirus
GVMGDTVPTDL

SEQ ID NO: 15847 - protein, 10 aa, Artificial Sequence
  Peptide Derived from Human Papillomavirus
GVPPPPTTSL

SEQ ID NO: 15848 - protein, 10 aa, Artificial Sequence
  Peptide Derived from Human Papillomavirus
GYGAMDFSTL

SEQ ID NO: 15849 - protein, 9 aa, Artificial Sequence
  Peptide Derived from Human Papillomavirus
HFWNRAGVM

SEQ ID NO: 15850 - protein, 9 aa, Artificial Sequence
  Peptide Derived from Human Papillomavirus
HVEEYDLQF

SEQ ID NO: 15851 - protein, 10 aa, Artificial Sequence
  Peptide Derived from Human Papillomavirus
HVEEYDLQFI

SEQ ID NO: 15852 - protein, 11 aa, Artificial Sequence
  Peptide Derived from Human Papillomavirus
HVEEYDLQFIF

SEQ ID NO: 15853 - protein, 9 aa, Artificial Sequence
  Peptide Derived from Human Papillomavirus
HYSRHVEEY

SEQ ID NO: 15854 - protein, 11 aa, Artificial Sequence
  Peptide Derived from Human Papillomavirus
HYSRHVEEYDL

SEQ ID NO: 15855 - protein, 9 aa, Artificial Sequence
  Peptide Derived from Human Papillomavirus
IFLKNVNVF

SEQ ID NO: 15856 - protein, 11 aa, Artificial Sequence
  Peptide Derived from Human Papillomavirus
IFLKNVNVFPI

SEQ ID NO: 15857 - protein, 8 aa, Artificial Sequence
  Peptide Derived from Human Papillomavirus
IFLQMALW

SEQ ID NO: 15858 - protein, 9 aa, Artificial Sequence
  Peptide Derived from Human Papillomavirus
IFQLCTITL

SEQ ID NO: 15859 - protein, 10 aa, Artificial Sequence
  Peptide Derived from Human Papillomavirus
IFYHAGSSRL

SEQ ID NO: 15860 - protein, 11 aa, Artificial Sequence
  Peptide Derived from Human Papillomavirus
IFYHAGSSRLL

SEQ ID NO: 15861 - protein, 10 aa, Artificial Sequence
  Peptide Derived from Human Papillomavirus
IIFLKNVNVF

SEQ ID NO: 15862 - protein, 11 aa, Artificial Sequence
  Peptide Derived from Human Papillomavirus
IIIFLKNVNVF

SEQ ID NO: 15863 - protein, 8 aa, Artificial Sequence
  Peptide Derived from Human Papillomavirus
IIYGHGII

SEQ ID NO: 15864 - protein, 9 aa, Artificial Sequence
  Peptide Derived from Human Papillomavirus
IIYGHGIII

SEQ ID NO: 15865 - protein, 10 aa, Artificial Sequence
  Peptide Derived from Human Papillomavirus
IIYGHGIIIF

SEQ ID NO: 15866 - protein, 11 aa, Artificial Sequence
  Peptide Derived from Human Papillomavirus
IIYGHGIIIFL

SEQ ID NO: 15867 - protein, 8 aa, Artificial Sequence
  Peptide Derived from Human Papillomavirus
ILGCVPAI

SEQ ID NO: 15868 - protein, 8 aa, Artificial Sequence
  Peptide Derived from Human Papillomavirus
ITLTAEVM

SEQ ID NO: 15869 - protein, 10 aa, Artificial Sequence
  Peptide Derived from Human Papillomavirus
ITLTAEVMSY

SEQ ID NO: 15870 - protein, 11 aa, Artificial Sequence
  Peptide Derived from Human Papillomavirus
ITLTAEVMSYI

SEQ ID NO: 15871 - protein, 8 aa, Artificial Sequence
  Peptide Derived from Human Papillomavirus
ITTSDSQL

SEQ ID NO: 15872 - protein, 9 aa, Artificial Sequence
  Peptide Derived from Human Papillomavirus
ITTSDSQLF

SEQ ID NO: 15873 - protein, 8 aa, Artificial Sequence
  Peptide Derived from Human Papillomavirus
IYGHGIII

SEQ ID NO: 15874 - protein, 9 aa, Artificial Sequence
  Peptide Derived from Human Papillomavirus
IYGHGIIIF

SEQ ID NO: 15875 - protein, 10 aa, Artificial Sequence
  Peptide Derived from Human Papillomavirus
IYGHGIIIFL

SEQ ID NO: 15876 - protein, 9 aa, Artificial Sequence
  Peptide Derived from Human Papillomavirus
IYNPETQRL

SEQ ID NO: 15877 - protein, 11 aa, Artificial Sequence
  Peptide Derived from Human Papillomavirus
IYNPETQRLVW

SEQ ID NO: 15878 - protein, 9 aa, Artificial Sequence
  Peptide Derived from Human Papillomavirus
KFGLPDSTI

SEQ ID NO: 15879 - protein, 10 aa, Artificial Sequence
  Peptide Derived from Human Papillomavirus
KFGLPDSTIY

SEQ ID NO: 15880 - protein, 8 aa, Artificial Sequence
  Peptide Derived from Human Papillomavirus
KFLVQAGL

SEQ ID NO: 15881 - protein, 9 aa, Artificial Sequence
  Peptide Derived from Human Papillomavirus
KFSSDLDQY

SEQ ID NO: 15882 - protein, 11 aa, Artificial Sequence
  Peptide Derived from Human Papillomavirus
KFSSDLDQYPL

SEQ ID NO: 15883 - protein, 11 aa, Artificial Sequence
  Peptide Derived from Human Papillomavirus
KFWTVDLKEKF

SEQ ID NO: 15884 - protein, 9 aa, Artificial Sequence
  Peptide Derived from Human Papillomavirus
KLKFWTVDL

SEQ ID NO: 15885 - protein, 10 aa, Artificial Sequence
  Peptide Derived from Human Papillomavirus
KVSAYQYRVF

SEQ ID NO: 15886 - protein, 8 aa, Artificial Sequence
  Peptide Derived from Human Papillomavirus
KYPDYLQM

SEQ ID NO: 15887 - protein, 8 aa, Artificial Sequence
  Peptide Derived from Human Papillomavirus
LFNKPYWL

SEQ ID NO: 15888 - protein, 8 aa, Artificial Sequence
  Peptide Derived from Human Papillomavirus
LLTVGNPY

SEQ ID NO: 15889 - protein, 9 aa, Artificial Sequence
  Peptide Derived from Human Papillomavirus
LLTVGNPYF

SEQ ID NO: 15890 - protein, 8 aa, Artificial Sequence
  Peptide Derived from Human Papillomavirus
LTAEVMSY

SEQ ID NO: 15891 - protein, 9 aa, Artificial Sequence
  Peptide Derived from Human Papillomavirus
LTAEVMSYI

SEQ ID NO: 15892 - protein, 8 aa, Artificial Sequence
  Peptide Derived from Human Papillomavirus
LTVGNPYF

SEQ ID NO: 15893 - protein, 8 aa, Artificial Sequence
  Peptide Derived from Human Papillomavirus
LVWACVGM

SEQ ID NO: 15894 - protein, 10 aa, Artificial Sequence
  Peptide Derived from Human Papillomavirus
LVWACVGMEI

SEQ ID NO: 15895 - protein, 10 aa, Artificial Sequence
  Peptide Derived from Human Papillomavirus
LWRPSDSTVY

SEQ ID NO: 15896 - protein, 11 aa, Artificial Sequence
  Peptide Derived from Human Papillomavirus
LWRPSDSTVYL

SEQ ID NO: 15897 - protein, 10 aa, Artificial Sequence
  Peptide Derived from Human Papillomavirus
LYIKGTSANM

SEQ ID NO: 15898 - protein, 10 aa, Artificial Sequence
  Peptide Derived from Human Papillomavirus
MFFCLRREQL

SEQ ID NO: 15899 - protein, 11 aa, Artificial Sequence
  Peptide Derived from Human Papillomavirus
MFFCLRREQLF

SEQ ID NO: 15900 - protein, 9 aa, Artificial Sequence
  Peptide Derived from Human Papillomavirus
MVDTGYGAM

SEQ ID NO: 15901 - protein, 11 aa, Artificial Sequence
  Peptide Derived from Human Papillomavirus
MVDTGYGAMDF

SEQ ID NO: 15902 - protein, 8 aa, Artificial Sequence
  Peptide Derived from Human Papillomavirus
NIIYGHGI

SEQ ID NO: 15903 - protein, 9 aa, Artificial Sequence
  Peptide Derived from Human Papillomavirus
NIIYGHGII

SEQ ID NO: 15904 - protein, 10 aa, Artificial Sequence
  Peptide Derived from Human Papillomavirus
NIIYGHGIII

SEQ ID NO: 15905 - protein, 11 aa, Artificial Sequence
  Peptide Derived from Human Papillomavirus
NIIYGHGIIIF

SEQ ID NO: 15906 - protein, 11 aa, Artificial Sequence
  Peptide Derived from Human Papillomavirus
NMRETPGSCVY

SEQ ID NO: 15907 - protein, 11 aa, Artificial Sequence
  Peptide Derived from Human Papillomavirus
NTDDYVSRTSI

SEQ ID NO: 15908 - protein, 9 aa, Artificial Sequence
  Peptide Derived from Human Papillomavirus
NTIIEDGDM

SEQ ID NO: 15909 - protein, 8 aa, Artificial Sequence
  Peptide Derived from Human Papillomavirus
NTYDPTKF

SEQ ID NO: 15910 - protein, 11 aa, Artificial Sequence
  Peptide Derived from Human Papillomavirus
NTYDPTKFKHY

SEQ ID NO: 15911 - protein, 9 aa, Artificial Sequence
  Peptide Derived from Human Papillomavirus
NVFPIFLQM

SEQ ID NO: 15912 - protein, 11 aa, Artificial Sequence
  Peptide Derived from Human Papillomavirus
NVFPIFLQMAL

SEQ ID NO: 15913 - protein, 8 aa, Artificial Sequence
  Peptide Derived from Human Papillomavirus
NVNVFPIF

SEQ ID NO: 15914 - protein, 9 aa, Artificial Sequence
  Peptide Derived from Human Papillomavirus
NVNVFPIFL

SEQ ID NO: 15915 - protein, 11 aa, Artificial Sequence
  Peptide Derived from Human Papillomavirus
NVNVFPIFLQM

SEQ ID NO: 15916 - protein, 11 aa, Artificial Sequence
  Peptide Derived from Human Papillomavirus
NVSVDYKQTQL

SEQ ID NO: 15917 - protein, 8 aa, Artificial Sequence
  Peptide Derived from Human Papillomavirus
PIFLQMAL

SEQ ID NO: 15918 - protein, 9 aa, Artificial Sequence
  Peptide Derived from Human Papillomavirus
PIFLQMALW

SEQ ID NO: 15919 - protein, 8 aa, Artificial Sequence
  Peptide Derived from Human Papillomavirus
PLDICQSI

SEQ ID NO: 15920 - protein, 11 aa, Artificial Sequence
  Peptide Derived from Human Papillomavirus
PLDICQSICKY

SEQ ID NO: 15921 - protein, 8 aa, Artificial Sequence
  Peptide Derived from Human Papillomavirus
PLELKNTI

SEQ ID NO: 15922 - protein, 9 aa, Artificial Sequence
  Peptide Derived from Human Papillomavirus
PLELKNTII

SEQ ID NO: 15923 - protein, 11 aa, Artificial Sequence
  Peptide Derived from Human Papillomavirus
PLGIGLSGHPF

SEQ ID NO: 15924 - protein, 9 aa, Artificial Sequence
  Peptide Derived from Human Papillomavirus
PTTSLVDTY

SEQ ID NO: 15925 - protein, 11 aa, Artificial Sequence
  Peptide Derived from Human Papillomavirus
PTTSLVDTYRF

SEQ ID NO: 15926 - protein, 11 aa, Artificial Sequence
  Peptide Derived from Human Papillomavirus
PVPNTYDPTKF

SEQ ID NO: 15927 - protein, 8 aa, Artificial Sequence
  Peptide Derived from Human Papillomavirus
PYDKLKFW

SEQ ID NO: 15928 - protein, 8 aa, Artificial Sequence
  Peptide Derived from Human Papillomavirus
PYGDSMFF

SEQ ID NO: 15929 - protein, 10 aa, Artificial Sequence
  Peptide Derived from Human Papillomavirus
PYGDSMFFCL

SEQ ID NO: 15930 - protein, 9 aa, Artificial Sequence
  Peptide Derived from Human Papillomavirus
QFIFQLCTI

SEQ ID NO: 15931 - protein, 11 aa, Artificial Sequence
  Peptide Derived from Human Papillomavirus
QFIFQLCTITL

SEQ ID NO: 15932 - protein, 11 aa, Artificial Sequence
  Peptide Derived from Human Papillomavirus
QLCILGCVPAI

SEQ ID NO: 15933 - protein, 8 aa, Artificial Sequence
  Peptide Derived from Human Papillomavirus
QLFARHFW

SEQ ID NO: 15934 - protein, 8 aa, Artificial Sequence
  Peptide Derived from Human Papillomavirus
QLFNKPYW

SEQ ID NO: 15935 - protein, 9 aa, Artificial Sequence
  Peptide Derived from Human Papillomavirus
QLFNKPYWL

SEQ ID NO: 15936 - protein, 10 aa, Artificial Sequence
  Peptide Derived from Human Papillomavirus
QLQPGDCPPL

SEQ ID NO: 15937 - protein, 11 aa, Artificial Sequence
  Peptide Derived from Human Papillomavirus
QMSADPYGDSM

SEQ ID NO: 15938 - protein, 8 aa, Artificial Sequence
  Peptide Derived from Human Papillomavirus
QYPLGRKF

SEQ ID NO: 15939 - protein, 9 aa, Artificial Sequence
  Peptide Derived from Human Papillomavirus
QYPLGRKFL

SEQ ID NO: 15940 - protein, 9 aa, Artificial Sequence
  Peptide Derived from Human Papillomavirus
QYRVFRVAL

SEQ ID NO: 15941 - protein, 9 aa, Artificial Sequence
  Peptide Derived from Human Papillomavirus
RLLTVGNPY

SEQ ID NO: 15942 - protein, 10 aa, Artificial Sequence
  Peptide Derived from Human Papillomavirus
RLLTVGNPYF

SEQ ID NO: 15943 - protein, 9 aa, Artificial Sequence
  Peptide Derived from Human Papillomavirus
RLVWACVGM

SEQ ID NO: 15944 - protein, 11 aa, Artificial Sequence
  Peptide Derived from Human Papillomavirus
RLVWACVGMEI

SEQ ID NO: 15945 - protein, 10 aa, Artificial Sequence
  Peptide Derived from Human Papillomavirus
RVALPDPNKF

SEQ ID NO: 15946 - protein, 8 aa, Artificial Sequence
  Peptide Derived from Human Papillomavirus
RVVNTDDY

SEQ ID NO: 15947 - protein, 8 aa, Artificial Sequence
  Peptide Derived from Human Papillomavirus
SICKYPDY

SEQ ID NO: 15948 - protein, 9 aa, Artificial Sequence
  Peptide Derived from Human Papillomavirus
SICKYPDYL

SEQ ID NO: 15949 - protein, 11 aa, Artificial Sequence
  Peptide Derived from Human Papillomavirus
SICKYPDYLQM

SEQ ID NO: 15950 - protein, 11 aa, Artificial Sequence
  Peptide Derived from Human Papillomavirus
SIFYHAGSSRL

SEQ ID NO: 15951 - protein, 8 aa, Artificial Sequence
  Peptide Derived from Human Papillomavirus
SILENWNF

SEQ ID NO: 15952 - protein, 9 aa, Artificial Sequence
  Peptide Derived from Human Papillomavirus
SITTSDSQL

SEQ ID NO: 15953 - protein, 10 aa, Artificial Sequence
  Peptide Derived from Human Papillomavirus
SITTSDSQLF

SEQ ID NO: 15954 - protein, 8 aa, Artificial Sequence
  Peptide Derived from Human Papillomavirus
SLVDTYRF

SEQ ID NO: 15955 - protein, 11 aa, Artificial Sequence
  Peptide Derived from Human Papillomavirus
SMFFCLRREQL

SEQ ID NO: 15956 - protein, 10 aa, Artificial Sequence
  Peptide Derived from Human Papillomavirus
SMNSSILENW

SEQ ID NO: 15957 - protein, 11 aa, Artificial Sequence
  Peptide Derived from Human Papillomavirus
STIYNPETQRL

SEQ ID NO: 15958 - protein, 10 aa, Artificial Sequence
  Peptide Derived from Human Papillomavirus
STQNPVPNTY

SEQ ID NO: 15959 - protein, 11 aa, Artificial Sequence
  Peptide Derived from Human Papillomavirus
SVARVVNTDDY

SEQ ID NO: 15960 - protein, 9 aa, Artificial Sequence
  Peptide Derived from Human Papillomavirus
SVDYKQTQL

SEQ ID NO: 15961 - protein, 11 aa, Artificial Sequence
  Peptide Derived from Human Papillomavirus
SVDYKQTQLCI

SEQ ID NO: 15962 - protein, 10 aa, Artificial Sequence
  Peptide Derived from Human Papillomavirus
SYIHSMNSSI

SEQ ID NO: 15963 - protein, 11 aa, Artificial Sequence
  Peptide Derived from Human Papillomavirus
SYIHSMNSSIL

SEQ ID NO: 15964 - protein, 8 aa, Artificial Sequence
  Peptide Derived from Human Papillomavirus
TIIEDGDM

SEQ ID NO: 15965 - protein, 9 aa, Artificial Sequence
  Peptide Derived from Human Papillomavirus
TITLTAEVM

SEQ ID NO: 15966 - protein, 11 aa, Artificial Sequence
  Peptide Derived from Human Papillomavirus
TITLTAEVMSY

SEQ ID NO: 15967 - protein, 10 aa, Artificial Sequence
  Peptide Derived from Human Papillomavirus
TIYNPETQRL

SEQ ID NO: 15968 - protein, 8 aa, Artificial Sequence
  Peptide Derived from Human Papillomavirus
TLCKPAQL

SEQ ID NO: 15969 - protein, 11 aa, Artificial Sequence
  Peptide Derived from Human Papillomavirus
TLQDTKCEVPL

SEQ ID NO: 15970 - protein, 9 aa, Artificial Sequence
  Peptide Derived from Human Papillomavirus
TLTAEVMSY

SEQ ID NO: 15971 - protein, 10 aa, Artificial Sequence
  Peptide Derived from Human Papillomavirus
TLTAEVMSYI

SEQ ID NO: 15972 - protein, 10 aa, Artificial Sequence
  Peptide Derived from Human Papillomavirus
TTPPEKQDPY

SEQ ID NO: 15973 - protein, 9 aa, Artificial Sequence
  Peptide Derived from Human Papillomavirus
TTRSTNLTL

SEQ ID NO: 15974 - protein, 8 aa, Artificial Sequence
  Peptide Derived from Human Papillomavirus
TTSDSQLF

SEQ ID NO: 15975 - protein, 8 aa, Artificial Sequence
  Peptide Derived from Human Papillomavirus
TTSLVDTY

SEQ ID NO: 15976 - protein, 10 aa, Artificial Sequence
  Peptide Derived from Human Papillomavirus
TTSLVDTYRF

SEQ ID NO: 15977 - protein, 8 aa, Artificial Sequence
  Peptide Derived from Human Papillomavirus
TVDLKEKF

SEQ ID NO: 15978 - protein, 8 aa, Artificial Sequence
  Peptide Derived from Human Papillomavirus
TVPTDLYI

SEQ ID NO: 15979 - protein, 11 aa, Artificial Sequence
  Peptide Derived from Human Papillomavirus
TVVDTTRSTNL

SEQ ID NO: 15980 - protein, 10 aa, Artificial Sequence
  Peptide Derived from Human Papillomavirus
TYDPTKFKHY

SEQ ID NO: 15981 - protein, 8 aa, Artificial Sequence
  Peptide Derived from Human Papillomavirus
VFPIFLQM

SEQ ID NO: 15982 - protein, 10 aa, Artificial Sequence
  Peptide Derived from Human Papillomavirus
VFPIFLQMAL

SEQ ID NO: 15983 - protein, 11 aa, Artificial Sequence
  Peptide Derived from Human Papillomavirus
VFPIFLQMALW

SEQ ID NO: 15984 - protein, 10 aa, Artificial Sequence
  Peptide Derived from Human Papillomavirus
VMGDTVPTDL

SEQ ID NO: 15985 - protein, 11 aa, Artificial Sequence
  Peptide Derived from Human Papillomavirus
VMGDTVPTDLY

SEQ ID NO: 15986 - protein, 8 aa, Artificial Sequence
  Peptide Derived from Human Papillomavirus
VMSYIHSM

SEQ ID NO: 15987 - protein, 10 aa, Artificial Sequence
  Peptide Derived from Human Papillomavirus
VVDTTRSTNL

SEQ ID NO: 15988 - protein, 9 aa, Artificial Sequence
  Peptide Derived from Human Papillomavirus
VWACVGMEI

SEQ ID NO: 15989 - protein, 10 aa, Artificial Sequence
  Peptide Derived from Human Papillomavirus
VYSPSPSGSI

SEQ ID NO: 15990 - protein, 9 aa, Artificial Sequence
  Peptide Derived from Human Papillomavirus
WTVDLKEKF

SEQ ID NO: 15991 - protein, 9 aa, Artificial Sequence
  Peptide Derived from Human Papillomavirus
YIHSMNSSI

SEQ ID NO: 15992 - protein, 10 aa, Artificial Sequence
  Peptide Derived from Human Papillomavirus
YIHSMNSSIL

SEQ ID NO: 15993 - protein, 9 aa, Artificial Sequence
  Peptide Derived from Human Papillomavirus
YIKGTSANM

SEQ ID NO: 15994 - protein, 9 aa, Artificial Sequence
  Peptide Derived from Human Papillomavirus
YLQMSADPY

SEQ ID NO: 15995 - protein, 8 aa, Artificial Sequence
  Peptide Derived from Human Papillomavirus
YVSRTSIF

SEQ ID NO: 15996 - protein, 9 aa, Artificial Sequence
  Peptide Derived from Human Papillomavirus
YVSRTSIFY

SEQ ID NO: 15997 - protein, 8 aa, Artificial Sequence
  Peptide Derived from Human Papillomavirus
AFSDPSII

SEQ ID NO: 15998 - protein, 11 aa, Artificial Sequence
  Peptide Derived from Human Papillomavirus
ALSSRRGTVRF

SEQ ID NO: 15999 - protein, 10 aa, Artificial Sequence
  Peptide Derived from Human Papillomavirus
ATEEIELQPL

SEQ ID NO: 16000 - protein, 11 aa, Artificial Sequence
  Peptide Derived from Human Papillomavirus
ATEEIELQPLI

SEQ ID NO: 16001 - protein, 11 aa, Artificial Sequence
  Peptide Derived from Human Papillomavirus
ATMFTRSGKQI

SEQ ID NO: 16002 - protein, 8 aa, Artificial Sequence
  Peptide Derived from Human Papillomavirus
ATNDSDLF

SEQ ID NO: 16003 - protein, 11 aa, Artificial Sequence
  Peptide Derived from Human Papillomavirus
ATNDSDLFDVY

SEQ ID NO: 16004 - protein, 9 aa, Artificial Sequence
  Peptide Derived from Human Papillomavirus
AYEPLDTTL

SEQ ID NO: 16005 - protein, 11 aa, Artificial Sequence
  Peptide Derived from Human Papillomavirus
AYEPLDTTLSF

SEQ ID NO: 16006 - protein, 8 aa, Artificial Sequence
  Peptide Derived from Human Papillomavirus
DFMDIIRL

SEQ ID NO: 16007 - protein, 10 aa, Artificial Sequence
  Peptide Derived from Human Papillomavirus
DIILPSHTPM

SEQ ID NO: 16008 - protein, 11 aa, Artificial Sequence
  Peptide Derived from Human Papillomavirus
DIILPSHTPMW

SEQ ID NO: 16009 - protein, 10 aa, Artificial Sequence
  Peptide Derived from Human Papillomavirus
DIIRLHRPAL

SEQ ID NO: 16010 - protein, 11 aa, Artificial Sequence
  Peptide Derived from Human Papillomavirus
DISPIAATEEI

SEQ ID NO: 16011 - protein, 11 aa, Artificial Sequence
  Peptide Derived from Human Papillomavirus
DITPTVDSVSI

SEQ ID NO: 16012 - protein, 9 aa, Artificial Sequence
  Peptide Derived from Human Papillomavirus
DLFDVYADF

SEQ ID NO: 16013 - protein, 11 aa, Artificial Sequence
  Peptide Derived from Human Papillomavirus
DVGPTRPPVVI

SEQ ID NO: 16014 - protein, 11 aa, Artificial Sequence
  Peptide Derived from Human Papillomavirus
DVINKVEGTTL

SEQ ID NO: 16015 - protein, 10 aa, Artificial Sequence
  Peptide Derived from Human Papillomavirus
DVPIYTGPDI

SEQ ID NO: 16016 - protein, 11 aa, Artificial Sequence
  Peptide Derived from Human Papillomavirus
DVPIYTGPDII

SEQ ID NO: 16017 - protein, 8 aa, Artificial Sequence
  Peptide Derived from Human Papillomavirus
EIELQPLI

SEQ ID NO: 16018 - protein, 8 aa, Artificial Sequence
  Peptide Derived from Human Papillomavirus
FLTHPSSL

SEQ ID NO: 16019 - protein, 11 aa, Artificial Sequence
  Peptide Derived from Human Papillomavirus
FLTHPSSLVTF

SEQ ID NO: 16020 - protein, 9 aa, Artificial Sequence
  Peptide Derived from Human Papillomavirus
FTGTSGFEI

SEQ ID NO: 16021 - protein, 11 aa, Artificial Sequence
  Peptide Derived from Human Papillomavirus
FTNPAFSDPSI

SEQ ID NO: 16022 - protein, 8 aa, Artificial Sequence
  Peptide Derived from Human Papillomavirus
FTRSGKQI

SEQ ID NO: 16023 - protein, 8 aa, Artificial Sequence
  Peptide Derived from Human Papillomavirus
FTYPKYSL

SEQ ID NO: 16024 - protein, 10 aa, Artificial Sequence
  Peptide Derived from Human Papillomavirus
FTYPKYSLTM

SEQ ID NO: 16025 - protein, 8 aa, Artificial Sequence
  Peptide Derived from Human Papillomavirus
FYHDISPI

SEQ ID NO: 16026 - protein, 9 aa, Artificial Sequence
  Peptide Derived from Human Papillomavirus
GIFLGGLGI

SEQ ID NO: 16027 - protein, 8 aa, Artificial Sequence
  Peptide Derived from Human Papillomavirus
GIHGTQYY

SEQ ID NO: 16028 - protein, 9 aa, Artificial Sequence
  Peptide Derived from Human Papillomavirus
GIHGTQYYL

SEQ ID NO: 16029 - protein, 10 aa, Artificial Sequence
  Peptide Derived from Human Papillomavirus
GIHGTQYYLW

SEQ ID NO: 16030 - protein, 8 aa, Artificial Sequence
  Peptide Derived from Human Papillomavirus
GTCPPDVI

SEQ ID NO: 16031 - protein, 10 aa, Artificial Sequence
  Peptide Derived from Human Papillomavirus
GTEPISSTPL

SEQ ID NO: 16032 - protein, 10 aa, Artificial Sequence
  Peptide Derived from Human Papillomavirus
GTPTSGSHGY

SEQ ID NO: 16033 - protein, 9 aa, Artificial Sequence
  Peptide Derived from Human Papillomavirus
GTQYYLWPW

SEQ ID NO: 16034 - protein, 10 aa, Artificial Sequence
  Peptide Derived from Human Papillomavirus
GTQYYLWPWY

SEQ ID NO: 16035 - protein, 11 aa, Artificial Sequence
  Peptide Derived from Human Papillomavirus
GTQYYLWPWYY

SEQ ID NO: 16036 - protein, 8 aa, Artificial Sequence
  Peptide Derived from Human Papillomavirus
GTTLADKI

SEQ ID NO: 16037 - protein, 9 aa, Artificial Sequence
  Peptide Derived from Human Papillomavirus
GTTLADKIL

SEQ ID NO: 16038 - protein, 11 aa, Artificial Sequence
  Peptide Derived from Human Papillomavirus
GTTLADKILQW

SEQ ID NO: 16039 - protein, 8 aa, Artificial Sequence
  Peptide Derived from Human Papillomavirus
GTTTPAVL

SEQ ID NO: 16040 - protein, 10 aa, Artificial Sequence
  Peptide Derived from Human Papillomavirus
GTTTPAVLDI

SEQ ID NO: 16041 - protein, 8 aa, Artificial Sequence
  Peptide Derived from Human Papillomavirus
GTVRFSRL

SEQ ID NO: 16042 - protein, 10 aa, Artificial Sequence
  Peptide Derived from Human Papillomavirus
GYEEIPLQTF

SEQ ID NO: 16043 - protein, 9 aa, Artificial Sequence
  Peptide Derived from Human Papillomavirus
HFYHDISPI

SEQ ID NO: 16044 - protein, 8 aa, Artificial Sequence
  Peptide Derived from Human Papillomavirus
IFLGGLGI

SEQ ID NO: 16045 - protein, 9 aa, Artificial Sequence
  Peptide Derived from Human Papillomavirus
IILPSHTPM

SEQ ID NO: 16046 - protein, 10 aa, Artificial Sequence
  Peptide Derived from Human Papillomavirus
IILPSHTPMW

SEQ ID NO: 16047 - protein, 9 aa, Artificial Sequence
  Peptide Derived from Human Papillomavirus
IIRLHRPAL

SEQ ID NO: 16048 - protein, 8 aa, Artificial Sequence
  Peptide Derived from Human Papillomavirus
ILPSHTPM

SEQ ID NO: 16049 - protein, 9 aa, Artificial Sequence
  Peptide Derived from Human Papillomavirus
ILPSHTPMW

SEQ ID NO: 16050 - protein, 9 aa, Artificial Sequence
  Peptide Derived from Human Papillomavirus
ILQWSSLGI

SEQ ID NO: 16051 - protein, 10 aa, Artificial Sequence
  Peptide Derived from Human Papillomavirus
ILQWSSLGIF

SEQ ID NO: 16052 - protein, 11 aa, Artificial Sequence
  Peptide Derived from Human Papillomavirus
ILQWSSLGIFL

SEQ ID NO: 16053 - protein, 10 aa, Artificial Sequence
  Peptide Derived from Human Papillomavirus
ITPTVDSVSI

SEQ ID NO: 16054 - protein, 8 aa, Artificial Sequence
  Peptide Derived from Human Papillomavirus
IYTGPDII

SEQ ID NO: 16055 - protein, 9 aa, Artificial Sequence
  Peptide Derived from Human Papillomavirus
IYTGPDIIL

SEQ ID NO: 16056 - protein, 8 aa, Artificial Sequence
  Peptide Derived from Human Papillomavirus
KILQWSSL

SEQ ID NO: 16057 - protein, 10 aa, Artificial Sequence
  Peptide Derived from Human Papillomavirus
KILQWSSLGI

SEQ ID NO: 16058 - protein, 11 aa, Artificial Sequence
  Peptide Derived from Human Papillomavirus
KILQWSSLGIF

SEQ ID NO: 16059 - protein, 11 aa, Artificial Sequence
  Peptide Derived from Human Papillomavirus
KVEGTTLADKI

SEQ ID NO: 16060 - protein, 8 aa, Artificial Sequence
  Peptide Derived from Human Papillomavirus
LFDVYADF

SEQ ID NO: 16061 - protein, 10 aa, Artificial Sequence
  Peptide Derived from Human Papillomavirus
LISATNDSDL

SEQ ID NO: 16062 - protein, 11 aa, Artificial Sequence
  Peptide Derived from Human Papillomavirus
LISATNDSDLF

SEQ ID NO: 16063 - protein, 10 aa, Artificial Sequence
  Peptide Derived from Human Papillomavirus
LTHPSSLVTF

SEQ ID NO: 16064 - protein, 11 aa, Artificial Sequence
  Peptide Derived from Human Papillomavirus
LTMPSTAASSY

SEQ ID NO: 16065 - protein, 9 aa, Artificial Sequence
  Peptide Derived from Human Papillomavirus
LTSAWDVPI

SEQ ID NO: 16066 - protein, 10 aa, Artificial Sequence
  Peptide Derived from Human Papillomavirus
LTSAWDVPIY

SEQ ID NO: 16067 - protein, 9 aa, Artificial Sequence
  Peptide Derived from Human Papillomavirus
LVTFDNPAY

SEQ ID NO: 16068 - protein, 8 aa, Artificial Sequence
  Peptide Derived from Human Papillomavirus
LWPWYYYF

SEQ ID NO: 16069 - protein, 9 aa, Artificial Sequence
  Peptide Derived from Human Papillomavirus
MFTRSGKQI

SEQ ID NO: 16070 - protein, 8 aa, Artificial Sequence
  Peptide Derived from Human Papillomavirus
NVPDSDFM

SEQ ID NO: 16071 - protein, 10 aa, Artificial Sequence
  Peptide Derived from Human Papillomavirus
NVPDSDFMDI

SEQ ID NO: 16072 - protein, 11 aa, Artificial Sequence
  Peptide Derived from Human Papillomavirus
NVPDSDFMDII

SEQ ID NO: 16073 - protein, 10 aa, Artificial Sequence
  Peptide Derived from Human Papillomavirus
NVTVPLTSAW

SEQ ID NO: 16074 - protein, 8 aa, Artificial Sequence
  Peptide Derived from Human Papillomavirus
PIAATEEI

SEQ ID NO: 16075 - protein, 10 aa, Artificial Sequence
  Peptide Derived from Human Papillomavirus
PIAATEEIEL

SEQ ID NO: 16076 - protein, 8 aa, Artificial Sequence
  Peptide Derived from Human Papillomavirus
PIYTGPDI

SEQ ID NO: 16077 - protein, 9 aa, Artificial Sequence
  Peptide Derived from Human Papillomavirus
PIYTGPDII

SEQ ID NO: 16078 - protein, 10 aa, Artificial Sequence
  Peptide Derived from Human Papillomavirus
PIYTGPDIIL

SEQ ID NO: 16079 - protein, 8 aa, Artificial Sequence
  Peptide Derived from Human Papillomavirus
PLDTTLSF

SEQ ID NO: 16080 - protein, 11 aa, Artificial Sequence
  Peptide Derived from Human Papillomavirus
PLISATNDSDL

SEQ ID NO: 16081 - protein, 10 aa, Artificial Sequence
  Peptide Derived from Human Papillomavirus
PLTSAWDVPI

SEQ ID NO: 16082 - protein, 11 aa, Artificial Sequence
  Peptide Derived from Human Papillomavirus
PLTSAWDVPIY

SEQ ID NO: 16083 - protein, 9 aa, Artificial Sequence
  Peptide Derived from Human Papillomavirus
PTDPSIVTL

SEQ ID NO: 16084 - protein, 9 aa, Artificial Sequence
  Peptide Derived from Human Papillomavirus
PTFTGTSGF

SEQ ID NO: 16085 - protein, 11 aa, Artificial Sequence
  Peptide Derived from Human Papillomavirus
PTFTGTSGFEI

SEQ ID NO: 16086 - protein, 9 aa, Artificial Sequence
  Peptide Derived from Human Papillomavirus
PTNASTTTY

SEQ ID NO: 16087 - protein, 10 aa, Artificial Sequence
  Peptide Derived from Human Papillomavirus
PTNASTTTYI

SEQ ID NO: 16088 - protein, 8 aa, Artificial Sequence
  Peptide Derived from Human Papillomavirus
PTRPPVVI

SEQ ID NO: 16089 - protein, 8 aa, Artificial Sequence
  Peptide Derived from Human Papillomavirus
PTSGSHGY

SEQ ID NO: 16090 - protein, 11 aa, Artificial Sequence
  Peptide Derived from Human Papillomavirus
PTSGSHGYEEI

SEQ ID NO: 16091 - protein, 10 aa, Artificial Sequence
  Peptide Derived from Human Papillomavirus
PTSNVPDSDF

SEQ ID NO: 16092 - protein, 11 aa, Artificial Sequence
  Peptide Derived from Human Papillomavirus
PTSNVPDSDFM

SEQ ID NO: 16093 - protein, 8 aa, Artificial Sequence
  Peptide Derived from Human Papillomavirus
PTVDSVSI

SEQ ID NO: 16094 - protein, 11 aa, Artificial Sequence
  Peptide Derived from Human Papillomavirus
PTVRRVRGPRL

SEQ ID NO: 16095 - protein, 9 aa, Artificial Sequence
  Peptide Derived from Human Papillomavirus
PVGPTDPSI

SEQ ID NO: 16096 - protein, 11 aa, Artificial Sequence
  Peptide Derived from Human Papillomavirus
PVPTFTGTSGF

SEQ ID NO: 16097 - protein, 8 aa, Artificial Sequence
  Peptide Derived from Human Papillomavirus
PYFFADGF

SEQ ID NO: 16098 - protein, 9 aa, Artificial Sequence
  Peptide Derived from Human Papillomavirus
QFLTHPSSL

SEQ ID NO: 16099 - protein, 8 aa, Artificial Sequence
  Peptide Derived from Human Papillomavirus
QIGGRVHF

SEQ ID NO: 16100 - protein, 9 aa, Artificial Sequence
  Peptide Derived from Human Papillomavirus
QIGGRVHFY

SEQ ID NO: 16101 - protein, 9 aa, Artificial Sequence
  Peptide Derived from Human Papillomavirus
QTGEVSGNI

SEQ ID NO: 16102 - protein, 10 aa, Artificial Sequence
  Peptide Derived from Human Papillomavirus
QTGEVSGNIF

SEQ ID NO: 16103 - protein, 9 aa, Artificial Sequence
  Peptide Derived from Human Papillomavirus
QVRVSTSQF

SEQ ID NO: 16104 - protein, 10 aa, Artificial Sequence
  Peptide Derived from Human Papillomavirus
QVRVSTSQFL

SEQ ID NO: 16105 - protein, 8 aa, Artificial Sequence
  Peptide Derived from Human Papillomavirus
QWSSLGIF

SEQ ID NO: 16106 - protein, 9 aa, Artificial Sequence
  Peptide Derived from Human Papillomavirus
QWSSLGIFL

SEQ ID NO: 16107 - protein, 8 aa, Artificial Sequence
  Peptide Derived from Human Papillomavirus
QYYLWPWY

SEQ ID NO: 16108 - protein, 9 aa, Artificial Sequence
  Peptide Derived from Human Papillomavirus
QYYLWPWYY

SEQ ID NO: 16109 - protein, 10 aa, Artificial Sequence
  Peptide Derived from Human Papillomavirus
QYYLWPWYYY

SEQ ID NO: 16110 - protein, 11 aa, Artificial Sequence
  Peptide Derived from Human Papillomavirus
QYYLWPWYYYF

SEQ ID NO: 16111 - protein, 11 aa, Artificial Sequence
  Peptide Derived from Human Papillomavirus
RFSRLGQRATM

SEQ ID NO: 16112 - protein, 10 aa, Artificial Sequence
  Peptide Derived from Human Papillomavirus
RIPYFFADGF

SEQ ID NO: 16113 - protein, 8 aa, Artificial Sequence
  Peptide Derived from Human Papillomavirus
RLGQRATM

SEQ ID NO: 16114 - protein, 9 aa, Artificial Sequence
  Peptide Derived from Human Papillomavirus
RLGQRATMF

SEQ ID NO: 16115 - protein, 8 aa, Artificial Sequence
  Peptide Derived from Human Papillomavirus
RVHFYHDI

SEQ ID NO: 16116 - protein, 11 aa, Artificial Sequence
  Peptide Derived from Human Papillomavirus
RVHFYHDISPI

SEQ ID NO: 16117 - protein, 8 aa, Artificial Sequence
  Peptide Derived from Human Papillomavirus
RVRGPRLY

SEQ ID NO: 16118 - protein, 8 aa, Artificial Sequence
  Peptide Derived from Human Papillomavirus
RVSTSQFL

SEQ ID NO: 16119 - protein, 9 aa, Artificial Sequence
  Peptide Derived from Human Papillomavirus
SFTYPKYSL

SEQ ID NO: 16120 - protein, 11 aa, Artificial Sequence
  Peptide Derived from Human Papillomavirus
SFTYPKYSLTM

SEQ ID NO: 16121 - protein, 9 aa, Artificial Sequence
  Peptide Derived from Human Papillomavirus
SLGIFLGGL

SEQ ID NO: 16122 - protein, 11 aa, Artificial Sequence
  Peptide Derived from Human Papillomavirus
SLGIFLGGLGI

SEQ ID NO: 16123 - protein, 10 aa, Artificial Sequence
  Peptide Derived from Human Papillomavirus
SLVTFDNPAY

SEQ ID NO: 16124 - protein, 9 aa, Artificial Sequence
  Peptide Derived from Human Papillomavirus
STIHKSFTY

SEQ ID NO: 16125 - protein, 9 aa, Artificial Sequence
  Peptide Derived from Human Papillomavirus
STSFTNPAF

SEQ ID NO: 16126 - protein, 11 aa, Artificial Sequence
  Peptide Derived from Human Papillomavirus
STTPSTIHKSF

SEQ ID NO: 16127 - protein, 8 aa, Artificial Sequence
  Peptide Derived from Human Papillomavirus
STTTYIGI

SEQ ID NO: 16128 - protein, 9 aa, Artificial Sequence
  Peptide Derived from Human Papillomavirus
SVSISSTSF

SEQ ID NO: 16129 - protein, 9 aa, Artificial Sequence
  Peptide Derived from Human Papillomavirus
SYSNVTVPL

SEQ ID NO: 16130 - protein, 10 aa, Artificial Sequence
  Peptide Derived from Human Papillomavirus
TFDNPAYEPL

SEQ ID NO: 16131 - protein, 8 aa, Artificial Sequence
  Peptide Derived from Human Papillomavirus
TFTGTSGF

SEQ ID NO: 16132 - protein, 10 aa, Artificial Sequence
  Peptide Derived from Human Papillomavirus
TFTGTSGFEI

SEQ ID NO: 16133 - protein, 8 aa, Artificial Sequence
  Peptide Derived from Human Papillomavirus
TIHKSFTY

SEQ ID NO: 16134 - protein, 11 aa, Artificial Sequence
  Peptide Derived from Human Papillomavirus
TIHKSFTYPKY

SEQ ID NO: 16135 - protein, 9 aa, Artificial Sequence
  Peptide Derived from Human Papillomavirus
TLADKILQW

SEQ ID NO: 16136 - protein, 10 aa, Artificial Sequence
  Peptide Derived from Human Papillomavirus
TMFTRSGKQI

SEQ ID NO: 16137 - protein, 10 aa, Artificial Sequence
  Peptide Derived from Human Papillomavirus
TMPSTAASSY

SEQ ID NO: 16138 - protein, 8 aa, Artificial Sequence
  Peptide Derived from Human Papillomavirus
TTLADKIL

SEQ ID NO: 16139 - protein, 10 aa, Artificial Sequence
  Peptide Derived from Human Papillomavirus
TTLADKILQW

SEQ ID NO: 16140 - protein, 8 aa, Artificial Sequence
  Peptide Derived from Human Papillomavirus
TTPAVLDI

SEQ ID NO: 16141 - protein, 10 aa, Artificial Sequence
  Peptide Derived from Human Papillomavirus
TTPSTIHKSF

SEQ ID NO: 16142 - protein, 9 aa, Artificial Sequence
  Peptide Derived from Human Papillomavirus
TTTPAVLDI

SEQ ID NO: 16143 - protein, 11 aa, Artificial Sequence
  Peptide Derived from Human Papillomavirus
TTYIGIHGTQY

SEQ ID NO: 16144 - protein, 8 aa, Artificial Sequence
  Peptide Derived from Human Papillomavirus
TVPLTSAW

SEQ ID NO: 16145 - protein, 10 aa, Artificial Sequence
  Peptide Derived from Human Papillomavirus
TVRRVRGPRL

SEQ ID NO: 16146 - protein, 11 aa, Artificial Sequence
  Peptide Derived from Human Papillomavirus
TVRRVRGPRLY

SEQ ID NO: 16147 - protein, 10 aa, Artificial Sequence
  Peptide Derived from Human Papillomavirus
TYIGIHGTQY

SEQ ID NO: 16148 - protein, 11 aa, Artificial Sequence
  Peptide Derived from Human Papillomavirus
TYIGIHGTQYY

SEQ ID NO: 16149 - protein, 9 aa, Artificial Sequence
  Peptide Derived from Human Papillomavirus
TYPKYSLTM

SEQ ID NO: 16150 - protein, 10 aa, Artificial Sequence
  Peptide Derived from Human Papillomavirus
VINKVEGTTL

SEQ ID NO: 16151 - protein, 8 aa, Artificial Sequence
  Peptide Derived from Human Papillomavirus
VTFDNPAY

SEQ ID NO: 16152 - protein, 11 aa, Artificial Sequence
  Peptide Derived from Human Papillomavirus
VTFDNPAYEPL

SEQ ID NO: 16153 - protein, 9 aa, Artificial Sequence
  Peptide Derived from Human Papillomavirus
VTVPLTSAW

SEQ ID NO: 16154 - protein, 11 aa, Artificial Sequence
  Peptide Derived from Human Papillomavirus
VVASGAPVPTF

SEQ ID NO: 16155 - protein, 9 aa, Artificial Sequence
  Peptide Derived from Human Papillomavirus
YFPKKRKRI

SEQ ID NO: 16156 - protein, 11 aa, Artificial Sequence
  Peptide Derived from Human Papillomavirus
YFPKKRKRIPY

SEQ ID NO: 16157 - protein, 9 aa, Artificial Sequence
  Peptide Derived from Human Papillomavirus
YIGIHGTQY

SEQ ID NO: 16158 - protein, 10 aa, Artificial Sequence
  Peptide Derived from Human Papillomavirus
YIGIHGTQYY

SEQ ID NO: 16159 - protein, 11 aa, Artificial Sequence
  Peptide Derived from Human Papillomavirus
YIGIHGTQYYL

SEQ ID NO: 16160 - protein, 8 aa, Artificial Sequence
  Peptide Derived from Human Papillomavirus
YLWPWYYY

SEQ ID NO: 16161 - protein, 9 aa, Artificial Sequence
  Peptide Derived from Human Papillomavirus
YLWPWYYYF

SEQ ID NO: 16162 - protein, 8 aa, Artificial Sequence
  Peptide Derived from Human Papillomavirus
YTGPDIIL

SEQ ID NO: 16163 - protein, 10 aa, Artificial Sequence
  Peptide Derived from Human Papillomavirus
YYFPKKRKRI

SEQ ID NO: 16164 - protein, 8 aa, Artificial Sequence
  Peptide Derived from Human Papillomavirus
YYLWPWYY

SEQ ID NO: 16165 - protein, 9 aa, Artificial Sequence
  Peptide Derived from Human Papillomavirus
YYLWPWYYY

SEQ ID NO: 16166 - protein, 10 aa, Artificial Sequence
  Peptide Derived from Human Papillomavirus
YYLWPWYYYF

SEQ ID NO: 16167 - protein, 11 aa, Artificial Sequence
  Peptide Derived from Human Papillomavirus
YYYFPKKRKRI

SEQ ID NO: 16168 - protein, 8 aa, Artificial Sequence
  Peptide Derived from Human Papillomavirus
AIEVQIAL

SEQ ID NO: 16169 - protein, 11 aa, Artificial Sequence
  Peptide Derived from Human Papillomavirus
AIEVQIALESL

SEQ ID NO: 16170 - protein, 9 aa, Artificial Sequence
  Peptide Derived from Human Papillomavirus
ALESLSTTI

SEQ ID NO: 16171 - protein, 10 aa, Artificial Sequence
  Peptide Derived from Human Papillomavirus
ALESLSTTIY

SEQ ID NO: 16172 - protein, 9 aa, Artificial Sequence
  Peptide Derived from Human Papillomavirus
CFKKEGQHI

SEQ ID NO: 16173 - protein, 9 aa, Artificial Sequence
  Peptide Derived from Human Papillomavirus
CMQYVAWKY

SEQ ID NO: 16174 - protein, 10 aa, Artificial Sequence
  Peptide Derived from Human Papillomavirus
CMQYVAWKYI

SEQ ID NO: 16175 - protein, 11 aa, Artificial Sequence
  Peptide Derived from Human Papillomavirus
CMQYVAWKYIY

SEQ ID NO: 16176 - protein, 8 aa, Artificial Sequence
  Peptide Derived from Human Papillomavirus
CVTTHTHI

SEQ ID NO: 16177 - protein, 9 aa, Artificial Sequence
  Peptide Derived from Human Papillomavirus
DFEQEAKKF

SEQ ID NO: 16178 - protein, 8 aa, Artificial Sequence
  Peptide Derived from Human Papillomavirus
DTCEELWL

SEQ ID NO: 16179 - protein, 8 aa, Artificial Sequence
  Peptide Derived from Human Papillomavirus
DVTSTYHW

SEQ ID NO: 16180 - protein, 11 aa, Artificial Sequence
  Peptide Derived from Human Papillomavirus
ELWLTEPKKCF

SEQ ID NO: 16181 - protein, 8 aa, Artificial Sequence
  Peptide Derived from Human Papillomavirus
ETQRNSFL

SEQ ID NO: 16182 - protein, 9 aa, Artificial Sequence
  Peptide Derived from Human Papillomavirus
EVHMENESI

SEQ ID NO: 16183 - protein, 10 aa, Artificial Sequence
  Peptide Derived from Human Papillomavirus
EVHMENESIY

SEQ ID NO: 16184 - protein, 9 aa, Artificial Sequence
  Peptide Derived from Human Papillomavirus
EVQIALESL

SEQ ID NO: 16185 - protein, 11 aa, Artificial Sequence
  Peptide Derived from Human Papillomavirus
EWTLRDTCEEL

SEQ ID NO: 16186 - protein, 11 aa, Artificial Sequence
  Peptide Derived from Human Papillomavirus
FLSHVKIPVVY

SEQ ID NO: 16187 - protein, 8 aa, Artificial Sequence
  Peptide Derived from Human Papillomavirus
FVDVTSTY

SEQ ID NO: 16188 - protein, 10 aa, Artificial Sequence
  Peptide Derived from Human Papillomavirus
FVDVTSTYHW

SEQ ID NO: 16189 - protein, 8 aa, Artificial Sequence
  Peptide Derived from Human Papillomavirus
GVDYRGIY

SEQ ID NO: 16190 - protein, 9 aa, Artificial Sequence
  Peptide Derived from Human Papillomavirus
GVDYRGIYY

SEQ ID NO: 16191 - protein, 11 aa, Artificial Sequence
  Peptide Derived from Human Papillomavirus
GWQKVCSGVDY

SEQ ID NO: 16192 - protein, 9 aa, Artificial Sequence
  Peptide Derived from Human Papillomavirus
HLKGEPNRL

SEQ ID NO: 16193 - protein, 8 aa, Artificial Sequence
  Peptide Derived from Human Papillomavirus
HMENESIY

SEQ ID NO: 16194 - protein, 8 aa, Artificial Sequence
  Peptide Derived from Human Papillomavirus
HVKIPVVY

SEQ ID NO: 16195 - protein, 10 aa, Artificial Sequence
  Peptide Derived from Human Papillomavirus
HVKIPVVYRL

SEQ ID NO: 16196 - protein, 10 aa, Artificial Sequence
  Peptide Derived from Human Papillomavirus
HWTSTDNKNY

SEQ ID NO: 16197 - protein, 11 aa, Artificial Sequence
  Peptide Derived from Human Papillomavirus
IWEVHMENESI

SEQ ID NO: 16198 - protein, 11 aa, Artificial Sequence
  Peptide Derived from Human Papillomavirus
IYKDETQRNSF

SEQ ID NO: 16199 - protein, 9 aa, Artificial Sequence
  Peptide Derived from Human Papillomavirus
IYNNEEWTL

SEQ ID NO: 16200 - protein, 9 aa, Artificial Sequence
  Peptide Derived from Human Papillomavirus
IYYNGDCGW

SEQ ID NO: 16201 - protein, 11 aa, Artificial Sequence
  Peptide Derived from Human Papillomavirus
IYYVHDGHKTY

SEQ ID NO: 16202 - protein, 8 aa, Artificial Sequence
  Peptide Derived from Human Papillomavirus
KFGCKNIW

SEQ ID NO: 16203 - protein, 8 aa, Artificial Sequence
  Peptide Derived from Human Papillomavirus
KIPVVYRL

SEQ ID NO: 16204 - protein, 10 aa, Artificial Sequence
  Peptide Derived from Human Papillomavirus
KIPVVYRLVW

SEQ ID NO: 16205 - protein, 11 aa, Artificial Sequence
  Peptide Derived from Human Papillomavirus
KTLFVDVTSTY

SEQ ID NO: 16206 - protein, 8 aa, Artificial Sequence
  Peptide Derived from Human Papillomavirus
KTTPVVHL

SEQ ID NO: 16207 - protein, 8 aa, Artificial Sequence
  Peptide Derived from Human Papillomavirus
KVCSGVDY

SEQ ID NO: 16208 - protein, 11 aa, Artificial Sequence
  Peptide Derived from Human Papillomavirus
KVCSGVDYRGI

SEQ ID NO: 16209 - protein, 11 aa, Artificial Sequence
  Peptide Derived from Human Papillomavirus
KYIYYNGDCGW

SEQ ID NO: 16210 - protein, 9 aa, Artificial Sequence
  Peptide Derived from Human Papillomavirus
LFVDVTSTY

SEQ ID NO: 16211 - protein, 11 aa, Artificial Sequence
  Peptide Derived from Human Papillomavirus
LFVDVTSTYHW

SEQ ID NO: 16212 - protein, 8 aa, Artificial Sequence
  Peptide Derived from Human Papillomavirus
LTEPKKCF

SEQ ID NO: 16213 - protein, 10 aa, Artificial Sequence
  Peptide Derived from Human Papillomavirus
LWLTEPKKCF

SEQ ID NO: 16214 - protein, 9 aa, Artificial Sequence
  Peptide Derived from Human Papillomavirus
NTDSRSRSI

SEQ ID NO: 16215 - protein, 11 aa, Artificial Sequence
  Peptide Derived from Human Papillomavirus
NVSPVETVNEY

SEQ ID NO: 16216 - protein, 8 aa, Artificial Sequence
  Peptide Derived from Human Papillomavirus
NYSIITII

SEQ ID NO: 16217 - protein, 9 aa, Artificial Sequence
  Peptide Derived from Human Papillomavirus
NYSIITIIY

SEQ ID NO: 16218 - protein, 8 aa, Artificial Sequence
  Peptide Derived from Human Papillomavirus
PVETVNEY

SEQ ID NO: 16219 - protein, 8 aa, Artificial Sequence
  Peptide Derived from Human Papillomavirus
PVVYRLVW

SEQ ID NO: 16220 - protein, 11 aa, Artificial Sequence
  Peptide Derived from Human Papillomavirus
QIALESLSTTI

SEQ ID NO: 16221 - protein, 11 aa, Artificial Sequence
  Peptide Derived from Human Papillomavirus
QVCKAKACSAI

SEQ ID NO: 16222 - protein, 8 aa, Artificial Sequence
  Peptide Derived from Human Papillomavirus
QYVAWKYI

SEQ ID NO: 16223 - protein, 9 aa, Artificial Sequence
  Peptide Derived from Human Papillomavirus
QYVAWKYIY

SEQ ID NO: 16224 - protein, 10 aa, Artificial Sequence
  Peptide Derived from Human Papillomavirus
QYVAWKYIYY

SEQ ID NO: 16225 - protein, 8 aa, Artificial Sequence
  Peptide Derived from Human Papillomavirus
RFQKYKTL

SEQ ID NO: 16226 - protein, 9 aa, Artificial Sequence
  Peptide Derived from Human Papillomavirus
RFQKYKTLF

SEQ ID NO: 16227 - protein, 9 aa, Artificial Sequence
  Peptide Derived from Human Papillomavirus
RLKCCRYRF

SEQ ID NO: 16228 - protein, 10 aa, Artificial Sequence
  Peptide Derived from Human Papillomavirus
RYRFQKYKTL

SEQ ID NO: 16229 - protein, 11 aa, Artificial Sequence
  Peptide Derived from Human Papillomavirus
RYRFQKYKTLF

SEQ ID NO: 16230 - protein, 8 aa, Artificial Sequence
  Peptide Derived from Human Papillomavirus
SFLSHVKI

SEQ ID NO: 16231 - protein, 9 aa, Artificial Sequence
  Peptide Derived from Human Papillomavirus
STDNKNYSI

SEQ ID NO: 16232 - protein, 10 aa, Artificial Sequence
  Peptide Derived from Human Papillomavirus
STDNKNYSII

SEQ ID NO: 16233 - protein, 10 aa, Artificial Sequence
  Peptide Derived from Human Papillomavirus
STTIYNNEEW

SEQ ID NO: 16234 - protein, 8 aa, Artificial Sequence
  Peptide Derived from Human Papillomavirus
SVSSTCRY

SEQ ID NO: 16235 - protein, 8 aa, Artificial Sequence
  Peptide Derived from Human Papillomavirus
TIYNNEEW

SEQ ID NO: 16236 - protein, 10 aa, Artificial Sequence
  Peptide Derived from Human Papillomavirus
TIYNNEEWTL

SEQ ID NO: 16237 - protein, 10 aa, Artificial Sequence
  Peptide Derived from Human Papillomavirus
TLFVDVTSTY

SEQ ID NO: 16238 - protein, 9 aa, Artificial Sequence
  Peptide Derived from Human Papillomavirus
TLRDTCEEL

SEQ ID NO: 16239 - protein, 10 aa, Artificial Sequence
  Peptide Derived from Human Papillomavirus
TLRDTCEELW

SEQ ID NO: 16240 - protein, 11 aa, Artificial Sequence
  Peptide Derived from Human Papillomavirus
TLRDTCEELWL

SEQ ID NO: 16241 - protein, 9 aa, Artificial Sequence
  Peptide Derived from Human Papillomavirus
TTIYNNEEW

SEQ ID NO: 16242 - protein, 11 aa, Artificial Sequence
  Peptide Derived from Human Papillomavirus
TTIYNNEEWTL

SEQ ID NO: 16243 - protein, 11 aa, Artificial Sequence
  Peptide Derived from Human Papillomavirus
VVHLKGEPNRL

SEQ ID NO: 16244 - protein, 11 aa, Artificial Sequence
  Peptide Derived from Human Papillomavirus
VWFDGSKNNCM

SEQ ID NO: 16245 - protein, 10 aa, Artificial Sequence
  Peptide Derived from Human Papillomavirus
WFDGSKNNCM

SEQ ID NO: 16246 - protein, 9 aa, Artificial Sequence
  Peptide Derived from Human Papillomavirus
WLTEPKKCF

SEQ ID NO: 16247 - protein, 10 aa, Artificial Sequence
  Peptide Derived from Human Papillomavirus
WTLRDTCEEL

SEQ ID NO: 16248 - protein, 11 aa, Artificial Sequence
  Peptide Derived from Human Papillomavirus
WTLRDTCEELW

SEQ ID NO: 16249 - protein, 9 aa, Artificial Sequence
  Peptide Derived from Human Papillomavirus
WTSTDNKNY

SEQ ID NO: 16250 - protein, 11 aa, Artificial Sequence
  Peptide Derived from Human Papillomavirus
WTSTDNKNYSI

SEQ ID NO: 16251 - protein, 10 aa, Artificial Sequence
  Peptide Derived from Human Papillomavirus
YIYYNGDCGW

SEQ ID NO: 16252 - protein, 11 aa, Artificial Sequence
  Peptide Derived from Human Papillomavirus
YTDFEQEAKKF

SEQ ID NO: 16253 - protein, 8 aa, Artificial Sequence
  Peptide Derived from Human Papillomavirus
YVAWKYIY

SEQ ID NO: 16254 - protein, 9 aa, Artificial Sequence
  Peptide Derived from Human Papillomavirus
YVAWKYIYY

SEQ ID NO: 16255 - protein, 9 aa, Artificial Sequence
  Peptide Derived from Human Papillomavirus
YVHDGHKTY

SEQ ID NO: 16256 - protein, 10 aa, Artificial Sequence
  Peptide Derived from Human Papillomavirus
YVHDGHKTYY

SEQ ID NO: 16257 - protein, 8 aa, Artificial Sequence
  Peptide Derived from Human Papillomavirus
YYNGDCGW

SEQ ID NO: 16258 - protein, 10 aa, Artificial Sequence
  Peptide Derived from Human Papillomavirus
YYVHDGHKTY

SEQ ID NO: 16259 - protein, 11 aa, Artificial Sequence
  Peptide Derived from Human Papillomavirus
YYVHDGHKTYY

SEQ ID NO: 16260 - protein, 11 aa, Artificial Sequence
  Peptide Derived from Human Papillomavirus
ATLESITKKQL

SEQ ID NO: 16261 - protein, 8 aa, Artificial Sequence
  Peptide Derived from Human Papillomavirus
AVCRVCLL

SEQ ID NO: 16262 - protein, 9 aa, Artificial Sequence
  Peptide Derived from Human Papillomavirus
AVCRVCLLF

SEQ ID NO: 16263 - protein, 10 aa, Artificial Sequence
  Peptide Derived from Human Papillomavirus
AVCRVCLLFY

SEQ ID NO: 16264 - protein, 11 aa, Artificial Sequence
  Peptide Derived from Human Papillomavirus
CLLFYSKVRKY

SEQ ID NO: 16265 - protein, 8 aa, Artificial Sequence
  Peptide Derived from Human Papillomavirus
CTELKLVY

SEQ ID NO: 16266 - protein, 8 aa, Artificial Sequence
  Peptide Derived from Human Papillomavirus
CVYCKKEL

SEQ ID NO: 16267 - protein, 8 aa, Artificial Sequence
  Peptide Derived from Human Papillomavirus
CYRCQSPL

SEQ ID NO: 16268 - protein, 11 aa, Artificial Sequence
  Peptide Derived from Human Papillomavirus
DFPYAVCRVCL

SEQ ID NO: 16269 - protein, 8 aa, Artificial Sequence
  Peptide Derived from Human Papillomavirus
DLRLSCVY

SEQ ID NO: 16270 - protein, 9 aa, Artificial Sequence
  Peptide Derived from Human Papillomavirus
DYSVYGATL

SEQ ID NO: 16271 - protein, 9 aa, Artificial Sequence
  Peptide Derived from Human Papillomavirus
EIPLIDLRL

SEQ ID NO: 16272 - protein, 10 aa, Artificial Sequence
  Peptide Derived from Human Papillomavirus
ELKLVYRDDF

SEQ ID NO: 16273 - protein, 8 aa, Artificial Sequence
  Peptide Derived from Human Papillomavirus
ELTRAEVY

SEQ ID NO: 16274 - protein, 10 aa, Artificial Sequence
  Peptide Derived from Human Papillomavirus
ELTRAEVYNF

SEQ ID NO: 16275 - protein, 8 aa, Artificial Sequence
  Peptide Derived from Human Papillomavirus
EVLEIPLI

SEQ ID NO: 16276 - protein, 10 aa, Artificial Sequence
  Peptide Derived from Human Papillomavirus
EVLEIPLIDL

SEQ ID NO: 16277 - protein, 10 aa, Artificial Sequence
  Peptide Derived from Human Papillomavirus
EVYNFACTEL

SEQ ID NO: 16278 - protein, 8 aa, Artificial Sequence
  Peptide Derived from Human Papillomavirus
FYSKVRKY

SEQ ID NO: 16279 - protein, 10 aa, Artificial Sequence
  Peptide Derived from Human Papillomavirus
FYSKVRKYRY

SEQ ID NO: 16280 - protein, 11 aa, Artificial Sequence
  Peptide Derived from Human Papillomavirus
FYSKVRKYRYY

SEQ ID NO: 16281 - protein, 10 aa, Artificial Sequence
  Peptide Derived from Human Papillomavirus
GWTGSCLGCW

SEQ ID NO: 16282 - protein, 8 aa, Artificial Sequence
  Peptide Derived from Human Papillomavirus
HLSEVLEI

SEQ ID NO: 16283 - protein, 10 aa, Artificial Sequence
  Peptide Derived from Human Papillomavirus
HLSEVLEIPL

SEQ ID NO: 16284 - protein, 11 aa, Artificial Sequence
  Peptide Derived from Human Papillomavirus
HLSEVLEIPLI

SEQ ID NO: 16285 - protein, 9 aa, Artificial Sequence
  Peptide Derived from Human Papillomavirus
ITKKQLCDL

SEQ ID NO: 16286 - protein, 10 aa, Artificial Sequence
  Peptide Derived from Human Papillomavirus
ITKKQLCDLL

SEQ ID NO: 16287 - protein, 11 aa, Artificial Sequence
  Peptide Derived from Human Papillomavirus
ITKKQLCDLLI

SEQ ID NO: 16288 - protein, 8 aa, Artificial Sequence
  Peptide Derived from Human Papillomavirus
KLVYRDDF

SEQ ID NO: 16289 - protein, 10 aa, Artificial Sequence
  Peptide Derived from Human Papillomavirus
KLVYRDDFPY

SEQ ID NO: 16290 - protein, 8 aa, Artificial Sequence
  Peptide Derived from Human Papillomavirus
KVRKYRYY

SEQ ID NO: 16291 - protein, 10 aa, Artificial Sequence
  Peptide Derived from Human Papillomavirus
KVRKYRYYDY

SEQ ID NO: 16292 - protein, 10 aa, Artificial Sequence
  Peptide Derived from Human Papillomavirus
KYRYYDYSVY

SEQ ID NO: 16293 - protein, 9 aa, Artificial Sequence
  Peptide Derived from Human Papillomavirus
LFYSKVRKY

SEQ ID NO: 16294 - protein, 11 aa, Artificial Sequence
  Peptide Derived from Human Papillomavirus
LFYSKVRKYRY

SEQ ID NO: 16295 - protein, 11 aa, Artificial Sequence
  Peptide Derived from Human Papillomavirus
LIAHGWTGSCL

SEQ ID NO: 16296 - protein, 10 aa, Artificial Sequence
  Peptide Derived from Human Papillomavirus
LIDLRLSCVY

SEQ ID NO: 16297 - protein, 11 aa, Artificial Sequence
  Peptide Derived from Human Papillomavirus
LIRCYRCQSPL

SEQ ID NO: 16298 - protein, 10 aa, Artificial Sequence
  Peptide Derived from Human Papillomavirus
LLFYSKVRKY

SEQ ID NO: 16299 - protein, 8 aa, Artificial Sequence
  Peptide Derived from Human Papillomavirus
LTPEEKQL

SEQ ID NO: 16300 - protein, 9 aa, Artificial Sequence
  Peptide Derived from Human Papillomavirus
LTRAEVYNF

SEQ ID NO: 16301 - protein, 9 aa, Artificial Sequence
  Peptide Derived from Human Papillomavirus
LVYRDDFPY

SEQ ID NO: 16302 - protein, 9 aa, Artificial Sequence
  Peptide Derived from Human Papillomavirus
NFACTELKL

SEQ ID NO: 16303 - protein, 11 aa, Artificial Sequence
  Peptide Derived from Human Papillomavirus
NFACTELKLVY

SEQ ID NO: 16304 - protein, 11 aa, Artificial Sequence
  Peptide Derived from Human Papillomavirus
PLIDLRLSCVY

SEQ ID NO: 16305 - protein, 9 aa, Artificial Sequence
  Peptide Derived from Human Papillomavirus
PLTPEEKQL

SEQ ID NO: 16306 - protein, 9 aa, Artificial Sequence
  Peptide Derived from Human Papillomavirus
PYAVCRVCL

SEQ ID NO: 16307 - protein, 10 aa, Artificial Sequence
  Peptide Derived from Human Papillomavirus
PYAVCRVCLL

SEQ ID NO: 16308 - protein, 11 aa, Artificial Sequence
  Peptide Derived from Human Papillomavirus
PYAVCRVCLLF

SEQ ID NO: 16309 - protein, 10 aa, Artificial Sequence
  Peptide Derived from Human Papillomavirus
QLCDLLIRCY

SEQ ID NO: 16310 - protein, 10 aa, Artificial Sequence
  Peptide Derived from Human Papillomavirus
QLHCDRKRRF

SEQ ID NO: 16311 - protein, 9 aa, Artificial Sequence
  Peptide Derived from Human Papillomavirus
RFHLIAHGW

SEQ ID NO: 16312 - protein, 11 aa, Artificial Sequence
  Peptide Derived from Human Papillomavirus
RLSCVYCKKEL

SEQ ID NO: 16313 - protein, 8 aa, Artificial Sequence
  Peptide Derived from Human Papillomavirus
RYYDYSVY

SEQ ID NO: 16314 - protein, 10 aa, Artificial Sequence
  Peptide Derived from Human Papillomavirus
SITKKQLCDL

SEQ ID NO: 16315 - protein, 11 aa, Artificial Sequence
  Peptide Derived from Human Papillomavirus
SITKKQLCDLL

SEQ ID NO: 16316 - protein, 9 aa, Artificial Sequence
  Peptide Derived from Human Papillomavirus
SLHHLSEVL

SEQ ID NO: 16317 - protein, 11 aa, Artificial Sequence
  Peptide Derived from Human Papillomavirus
SLHHLSEVLEI

SEQ ID NO: 16318 - protein, 10 aa, Artificial Sequence
  Peptide Derived from Human Papillomavirus
SVYGATLESI

SEQ ID NO: 16319 - protein, 10 aa, Artificial Sequence
  Peptide Derived from Human Papillomavirus
TLESITKKQL

SEQ ID NO: 16320 - protein, 9 aa, Artificial Sequence
  Peptide Derived from Human Papillomavirus
VLEIPLIDL

SEQ ID NO: 16321 - protein, 11 aa, Artificial Sequence
  Peptide Derived from Human Papillomavirus
VLEIPLIDLRL

SEQ ID NO: 16322 - protein, 9 aa, Artificial Sequence
  Peptide Derived from Human Papillomavirus
VYGATLESI

SEQ ID NO: 16323 - protein, 9 aa, Artificial Sequence
  Peptide Derived from Human Papillomavirus
VYNFACTEL

SEQ ID NO: 16324 - protein, 11 aa, Artificial Sequence
  Peptide Derived from Human Papillomavirus
VYNFACTELKL

SEQ ID NO: 16325 - protein, 8 aa, Artificial Sequence
  Peptide Derived from Human Papillomavirus
VYRDDFPY

SEQ ID NO: 16326 - protein, 9 aa, Artificial Sequence
  Peptide Derived from Human Papillomavirus
WTGSCLGCW

SEQ ID NO: 16327 - protein, 11 aa, Artificial Sequence
  Peptide Derived from Human Papillomavirus
YYDYSVYGATL

SEQ ID NO: 16328 - protein, 8 aa, Artificial Sequence
  Peptide Derived from Human Papillomavirus
ALTVTCPL

SEQ ID NO: 16329 - protein, 9 aa, Artificial Sequence
  Peptide Derived from Human Papillomavirus
DIQSTKEDL

SEQ ID NO: 16330 - protein, 8 aa, Artificial Sequence
  Peptide Derived from Human Papillomavirus
DLQCNEQL

SEQ ID NO: 16331 - protein, 8 aa, Artificial Sequence
  Peptide Derived from Human Papillomavirus
DLRVVQQL

SEQ ID NO: 16332 - protein, 9 aa, Artificial Sequence
  Peptide Derived from Human Papillomavirus
DLRVVQQLL

SEQ ID NO: 16333 - protein, 10 aa, Artificial Sequence
  Peptide Derived from Human Papillomavirus
DLRVVQQLLM

SEQ ID NO: 16334 - protein, 10 aa, Artificial Sequence
  Peptide Derived from Human Papillomavirus
EIDLQCNEQL

SEQ ID NO: 16335 - protein, 8 aa, Artificial Sequence
  Peptide Derived from Human Papillomavirus
ELTPQTEI

SEQ ID NO: 16336 - protein, 10 aa, Artificial Sequence
  Peptide Derived from Human Papillomavirus
ELTPQTEIDL

SEQ ID NO: 16337 - protein, 9 aa, Artificial Sequence
  Peptide Derived from Human Papillomavirus
HVPCCECKF

SEQ ID NO: 16338 - protein, 8 aa, Artificial Sequence
  Peptide Derived from Human Papillomavirus
KFVVQLDI

SEQ ID NO: 16339 - protein, 10 aa, Artificial Sequence
  Peptide Derived from Human Papillomavirus
KVPTLQDVVL

SEQ ID NO: 16340 - protein, 11 aa, Artificial Sequence
  Peptide Derived from Human Papillomavirus
LIHVPCCECKF

SEQ ID NO: 16341 - protein, 11 aa, Artificial Sequence
  Peptide Derived from Human Papillomavirus
LMGALTVTCPL

SEQ ID NO: 16342 - protein, 9 aa, Artificial Sequence
  Peptide Derived from Human Papillomavirus
LTPQTEIDL

SEQ ID NO: 16343 - protein, 8 aa, Artificial Sequence
  Peptide Derived from Human Papillomavirus
PTLQDVVL

SEQ ID NO: 16344 - protein, 10 aa, Artificial Sequence
  Peptide Derived from Human Papillomavirus
PTLQDVVLEL

SEQ ID NO: 16345 - protein, 11 aa, Artificial Sequence
  Peptide Derived from Human Papillomavirus
QLDIQSTKEDL

SEQ ID NO: 16346 - protein, 8 aa, Artificial Sequence
  Peptide Derived from Human Papillomavirus
RVVQQLLM

SEQ ID NO: 16347 - protein, 11 aa, Artificial Sequence
  Peptide Derived from Human Papillomavirus
RVVQQLLMGAL

SEQ ID NO: 16348 - protein, 9 aa, Artificial Sequence
  Peptide Derived from Human Papillomavirus
TLQDVVLEL

SEQ ID NO: 16349 - protein, 10 aa, Artificial Sequence
  Peptide Derived from Human Papillomavirus
VLELTPQTEI

SEQ ID NO: 16350 - protein, 11 aa, Artificial Sequence
  Peptide Derived from Human Papillomavirus
VVLELTPQTEI

SEQ ID NO: 16351 - protein, 10 aa, Artificial Sequence
  Peptide Derived from Human Papillomavirus
VVQQLLMGAL

SEQ ID NO: 16352 - protein, 11 aa, Artificial Sequence
  Peptide Derived from Human Papillomavirus
ATDSYVKRTSI

SEQ ID NO: 16353 - protein, 8 aa, Artificial Sequence
  Peptide Derived from Human Papillomavirus
ATEQLSKY

SEQ ID NO: 16354 - protein, 8 aa, Artificial Sequence
  Peptide Derived from Human Papillomavirus
ATPSGSMI

SEQ ID NO: 16355 - protein, 8 aa, Artificial Sequence
  Peptide Derived from Human Papillomavirus
ATSLEDKY

SEQ ID NO: 16356 - protein, 10 aa, Artificial Sequence
  Peptide Derived from Human Papillomavirus
ATSLEDKYRY

SEQ ID NO: 16357 - protein, 11 aa, Artificial Sequence
  Peptide Derived from Human Papillomavirus
ATWRPSENKVY

SEQ ID NO: 16358 - protein, 8 aa, Artificial Sequence
  Peptide Derived from Human Papillomavirus
AVNVFPIF

SEQ ID NO: 16359 - protein, 9 aa, Artificial Sequence
  Peptide Derived from Human Papillomavirus
AVNVFPIFL

SEQ ID NO: 16360 - protein, 11 aa, Artificial Sequence
  Peptide Derived from Human Papillomavirus
AVNVFPIFLQM

SEQ ID NO: 16361 - protein, 8 aa, Artificial Sequence
  Peptide Derived from Human Papillomavirus
AYGDSMWF

SEQ ID NO: 16362 - protein, 9 aa, Artificial Sequence
  Peptide Derived from Human Papillomavirus
AYGDSMWFY

SEQ ID NO: 16363 - protein, 10 aa, Artificial Sequence
  Peptide Derived from Human Papillomavirus
AYGDSMWFYL

SEQ ID NO: 16364 - protein, 10 aa, Artificial Sequence
  Peptide Derived from Human Papillomavirus
AYLHNMNANL

SEQ ID NO: 16365 - protein, 11 aa, Artificial Sequence
  Peptide Derived from Human Papillomavirus
AYLHNMNANLL

SEQ ID NO: 16366 - protein, 11 aa, Artificial Sequence
  Peptide Derived from Human Papillomavirus
AYQYRVFRVRL

SEQ ID NO: 16367 - protein, 9 aa, Artificial Sequence
  Peptide Derived from Human Papillomavirus
CIVGCTPAM

SEQ ID NO: 16368 - protein, 9 aa, Artificial Sequence
  Peptide Derived from Human Papillomavirus
CTPAMGEHW

SEQ ID NO: 16369 - protein, 9 aa, Artificial Sequence
  Peptide Derived from Human Papillomavirus
DIVQSTCKY

SEQ ID NO: 16370 - protein, 11 aa, Artificial Sequence
  Peptide Derived from Human Papillomavirus
DLDQFPLGRKF

SEQ ID NO: 16371 - protein, 10 aa, Artificial Sequence
  Peptide Derived from Human Papillomavirus
DMIDTGFGAM

SEQ ID NO: 16372 - protein, 9 aa, Artificial Sequence
  Peptide Derived from Human Papillomavirus
DTGFGAMDF

SEQ ID NO: 16373 - protein, 8 aa, Artificial Sequence
  Peptide Derived from Human Papillomavirus
DTTRSTNM

SEQ ID NO: 16374 - protein, 10 aa, Artificial Sequence
  Peptide Derived from Human Papillomavirus
DTTRSTNMTI

SEQ ID NO: 16375 - protein, 8 aa, Artificial Sequence
  Peptide Derived from Human Papillomavirus
DVGAVNVF

SEQ ID NO: 16376 - protein, 10 aa, Artificial Sequence
  Peptide Derived from Human Papillomavirus
DVGAVNVFPI

SEQ ID NO: 16377 - protein, 11 aa, Artificial Sequence
  Peptide Derived from Human Papillomavirus
DVGAVNVFPIF

SEQ ID NO: 16378 - protein, 8 aa, Artificial Sequence
  Peptide Derived from Human Papillomavirus
DVNLQDSF

SEQ ID NO: 16379 - protein, 10 aa, Artificial Sequence
  Peptide Derived from Human Papillomavirus
DYLKMSADAY

SEQ ID NO: 16380 - protein, 8 aa, Artificial Sequence
  Peptide Derived from Human Papillomavirus
ELQFVFQL

SEQ ID NO: 16381 - protein, 11 aa, Artificial Sequence
  Peptide Derived from Human Papillomavirus
ELQFVFQLCKI

SEQ ID NO: 16382 - protein, 8 aa, Artificial Sequence
  Peptide Derived from Human Papillomavirus
ETIPAELY

SEQ ID NO: 16383 - protein, 9 aa, Artificial Sequence
  Peptide Derived from Human Papillomavirus
ETIPAELYL

SEQ ID NO: 16384 - protein, 8 aa, Artificial Sequence
  Peptide Derived from Human Papillomavirus
EVGRGQPL

SEQ ID NO: 16385 - protein, 9 aa, Artificial Sequence
  Peptide Derived from Human Papillomavirus
EVMAYLHNM

SEQ ID NO: 16386 - protein, 8 aa, Artificial Sequence
  Peptide Derived from Human Papillomavirus
EYELQFVF

SEQ ID NO: 16387 - protein, 10 aa, Artificial Sequence
  Peptide Derived from Human Papillomavirus
EYELQFVFQL

SEQ ID NO: 16388 - protein, 10 aa, Artificial Sequence
  Peptide Derived from Human Papillomavirus
FLDVGAVNVF

SEQ ID NO: 16389 - protein, 8 aa, Artificial Sequence
  Peptide Derived from Human Papillomavirus
FVFQLCKI

SEQ ID NO: 16390 - protein, 10 aa, Artificial Sequence
  Peptide Derived from Human Papillomavirus
FVFQLCKITL

SEQ ID NO: 16391 - protein, 10 aa, Artificial Sequence
  Peptide Derived from Human Papillomavirus
FWDVNLQDSF

SEQ ID NO: 16392 - protein, 9 aa, Artificial Sequence
  Peptide Derived from Human Papillomavirus
FYHAGSSRL

SEQ ID NO: 16393 - protein, 10 aa, Artificial Sequence
  Peptide Derived from Human Papillomavirus
FYHAGSSRLL

SEQ ID NO: 16394 - protein, 8 aa, Artificial Sequence
  Peptide Derived from Human Papillomavirus
FYLRREQL

SEQ ID NO: 16395 - protein, 9 aa, Artificial Sequence
  Peptide Derived from Human Papillomavirus
FYLRREQLF

SEQ ID NO: 16396 - protein, 10 aa, Artificial Sequence
  Peptide Derived from Human Papillomavirus
GFGAMDFKVL

SEQ ID NO: 16397 - protein, 8 aa, Artificial Sequence
  Peptide Derived from Human Papillomavirus
GICWGNQL

SEQ ID NO: 16398 - protein, 9 aa, Artificial Sequence
  Peptide Derived from Human Papillomavirus
GICWGNQLF

SEQ ID NO: 16399 - protein, 10 aa, Artificial Sequence
  Peptide Derived from Human Papillomavirus
GLEVGRGQPL

SEQ ID NO: 16400 - protein, 8 aa, Artificial Sequence
  Peptide Derived from Human Papillomavirus
GLPDTNIY

SEQ ID NO: 16401 - protein, 8 aa, Artificial Sequence
  Peptide Derived from Human Papillomavirus
GLSGHPLF

SEQ ID NO: 16402 - protein, 11 aa, Artificial Sequence
  Peptide Derived from Human Papillomavirus
GLSGHPLFNRL

SEQ ID NO: 16403 - protein, 10 aa, Artificial Sequence
  Peptide Derived from Human Papillomavirus
GLSPPVATSL

SEQ ID NO: 16404 - protein, 9 aa, Artificial Sequence
  Peptide Derived from Human Papillomavirus
HVEEYELQF

SEQ ID NO: 16405 - protein, 11 aa, Artificial Sequence
  Peptide Derived from Human Papillomavirus
HVEEYELQFVF

SEQ ID NO: 16406 - protein, 8 aa, Artificial Sequence
  Peptide Derived from Human Papillomavirus
HYGLCIFL

SEQ ID NO: 16407 - protein, 11 aa, Artificial Sequence
  Peptide Derived from Human Papillomavirus
IFLDVGAVNVF

SEQ ID NO: 16408 - protein, 8 aa, Artificial Sequence
  Peptide Derived from Human Papillomavirus
IFLQMATW

SEQ ID NO: 16409 - protein, 10 aa, Artificial Sequence
  Peptide Derived from Human Papillomavirus
IFYHAGSSRL

SEQ ID NO: 16410 - protein, 11 aa, Artificial Sequence
  Peptide Derived from Human Papillomavirus
IFYHAGSSRLL

SEQ ID NO: 16411 - protein, 8 aa, Artificial Sequence
  Peptide Derived from Human Papillomavirus
ITLSAEVM

SEQ ID NO: 16412 - protein, 10 aa, Artificial Sequence
  Peptide Derived from Human Papillomavirus
ITLSAEVMAY

SEQ ID NO: 16413 - protein, 11 aa, Artificial Sequence
  Peptide Derived from Human Papillomavirus
ITLSAEVMAYL

SEQ ID NO: 16414 - protein, 8 aa, Artificial Sequence
  Peptide Derived from Human Papillomavirus
ITSEAQLF

SEQ ID NO: 16415 - protein, 8 aa, Artificial Sequence
  Peptide Derived from Human Papillomavirus
IVGCTPAM

SEQ ID NO: 16416 - protein, 8 aa, Artificial Sequence
  Peptide Derived from Human Papillomavirus
IVQSTCKY

SEQ ID NO: 16417 - protein, 11 aa, Artificial Sequence
  Peptide Derived from Human Papillomavirus
IVQSTCKYPDY

SEQ ID NO: 16418 - protein, 9 aa, Artificial Sequence
  Peptide Derived from Human Papillomavirus
IYNPDQERL

SEQ ID NO: 16419 - protein, 11 aa, Artificial Sequence
  Peptide Derived from Human Papillomavirus
IYNPDQERLVW

SEQ ID NO: 16420 - protein, 9 aa, Artificial Sequence
  Peptide Derived from Human Papillomavirus
IYRDPPLHY

SEQ ID NO: 16421 - protein, 11 aa, Artificial Sequence
  Peptide Derived from Human Papillomavirus
IYRDPPLHYGL

SEQ ID NO: 16422 - protein, 9 aa, Artificial Sequence
  Peptide Derived from Human Papillomavirus
KFGLPDTNI

SEQ ID NO: 16423 - protein, 10 aa, Artificial Sequence
  Peptide Derived from Human Papillomavirus
KFGLPDTNIY

SEQ ID NO: 16424 - protein, 11 aa, Artificial Sequence
  Peptide Derived from Human Papillomavirus
KFWDVNLQDSF

SEQ ID NO: 16425 - protein, 9 aa, Artificial Sequence
  Peptide Derived from Human Papillomavirus
KITLSAEVM

SEQ ID NO: 16426 - protein, 11 aa, Artificial Sequence
  Peptide Derived from Human Papillomavirus
KITLSAEVMAY

SEQ ID NO: 16427 - protein, 11 aa, Artificial Sequence
  Peptide Derived from Human Papillomavirus
KMSADAYGDSM

SEQ ID NO: 16428 - protein, 10 aa, Artificial Sequence
  Peptide Derived from Human Papillomavirus
KTNIPKVSAY

SEQ ID NO: 16429 - protein, 10 aa, Artificial Sequence
  Peptide Derived from Human Papillomavirus
KVGETIPAEL

SEQ ID NO: 16430 - protein, 11 aa, Artificial Sequence
  Peptide Derived from Human Papillomavirus
KVGETIPAELY

SEQ ID NO: 16431 - protein, 10 aa, Artificial Sequence
  Peptide Derived from Human Papillomavirus
KVSAYQYRVF

SEQ ID NO: 16432 - protein, 8 aa, Artificial Sequence
  Peptide Derived from Human Papillomavirus
KVVATDSY

SEQ ID NO: 16433 - protein, 10 aa, Artificial Sequence
  Peptide Derived from Human Papillomavirus
KYDARKINQY

SEQ ID NO: 16434 - protein, 11 aa, Artificial Sequence
  Peptide Derived from Human Papillomavirus
KYDARKINQYL

SEQ ID NO: 16435 - protein, 9 aa, Artificial Sequence
  Peptide Derived from Human Papillomavirus
KYKFWDVNL

SEQ ID NO: 16436 - protein, 8 aa, Artificial Sequence
  Peptide Derived from Human Papillomavirus
KYPDYLKM

SEQ ID NO: 16437 - protein, 10 aa, Artificial Sequence
  Peptide Derived from Human Papillomavirus
KYRYVRSTAI

SEQ ID NO: 16438 - protein, 8 aa, Artificial Sequence
  Peptide Derived from Human Papillomavirus
LFNKPYWL

SEQ ID NO: 16439 - protein, 11 aa, Artificial Sequence
  Peptide Derived from Human Papillomavirus
LINTPIEDGDM

SEQ ID NO: 16440 - protein, 8 aa, Artificial Sequence
  Peptide Derived from Human Papillomavirus
LLAVGHPY

SEQ ID NO: 16441 - protein, 9 aa, Artificial Sequence
  Peptide Derived from Human Papillomavirus
LLAVGHPYY

SEQ ID NO: 16442 - protein, 9 aa, Artificial Sequence
  Peptide Derived from Human Papillomavirus
LLEDWNIGL

SEQ ID NO: 16443 - protein, 8 aa, Artificial Sequence
  Peptide Derived from Human Papillomavirus
LVWACVGL

SEQ ID NO: 16444 - protein, 9 aa, Artificial Sequence
  Peptide Derived from Human Papillomavirus
MIDTGFGAM

SEQ ID NO: 16445 - protein, 11 aa, Artificial Sequence
  Peptide Derived from Human Papillomavirus
MIDTGFGAMDF

SEQ ID NO: 16446 - protein, 8 aa, Artificial Sequence
  Peptide Derived from Human Papillomavirus
MITSEAQL

SEQ ID NO: 16447 - protein, 9 aa, Artificial Sequence
  Peptide Derived from Human Papillomavirus
MITSEAQLF

SEQ ID NO: 16448 - protein, 8 aa, Artificial Sequence
  Peptide Derived from Human Papillomavirus
MLPMMYIY

SEQ ID NO: 16449 - protein, 8 aa, Artificial Sequence
  Peptide Derived from Human Papillomavirus
MMLPMMYI

SEQ ID NO: 16450 - protein, 9 aa, Artificial Sequence
  Peptide Derived from Human Papillomavirus
MMLPMMYIY

SEQ ID NO: 16451 - protein, 10 aa, Artificial Sequence
  Peptide Derived from Human Papillomavirus
MMYIYRDPPL

SEQ ID NO: 16452 - protein, 10 aa, Artificial Sequence
  Peptide Derived from Human Papillomavirus
MTISTATEQL

SEQ ID NO: 16453 - protein, 10 aa, Artificial Sequence
  Peptide Derived from Human Papillomavirus
MWFYLRREQL

SEQ ID NO: 16454 - protein, 11 aa, Artificial Sequence
  Peptide Derived from Human Papillomavirus
MWFYLRREQLF

SEQ ID NO: 16455 - protein, 9 aa, Artificial Sequence
  Peptide Derived from Human Papillomavirus
MYIYRDPPL

SEQ ID NO: 16456 - protein, 11 aa, Artificial Sequence
  Peptide Derived from Human Papillomavirus
MYIYRDPPLHY

SEQ ID NO: 16457 - protein, 8 aa, Artificial Sequence
  Peptide Derived from Human Papillomavirus
NIPKVSAY

SEQ ID NO: 16458 - protein, 10 aa, Artificial Sequence
  Peptide Derived from Human Papillomavirus
NIPKVSAYQY

SEQ ID NO: 16459 - protein, 11 aa, Artificial Sequence
  Peptide Derived from Human Papillomavirus
NISVDGKQTQL

SEQ ID NO: 16460 - protein, 10 aa, Artificial Sequence
  Peptide Derived from Human Papillomavirus
NIYNPDQERL

SEQ ID NO: 16461 - protein, 8 aa, Artificial Sequence
  Peptide Derived from Human Papillomavirus
NLANNNVI

SEQ ID NO: 16462 - protein, 8 aa, Artificial Sequence
  Peptide Derived from Human Papillomavirus
NLLEDWNI

SEQ ID NO: 16463 - protein, 10 aa, Artificial Sequence
  Peptide Derived from Human Papillomavirus
NLLEDWNIGL

SEQ ID NO: 16464 - protein, 10 aa, Artificial Sequence
  Peptide Derived from Human Papillomavirus
NLQDSFSTDL

SEQ ID NO: 16465 - protein, 10 aa, Artificial Sequence
  Peptide Derived from Human Papillomavirus
NMNANLLEDW

SEQ ID NO: 16466 - protein, 11 aa, Artificial Sequence
  Peptide Derived from Human Papillomavirus
NMTISTATEQL

SEQ ID NO: 16467 - protein, 9 aa, Artificial Sequence
  Peptide Derived from Human Papillomavirus
NTPIEDGDM

SEQ ID NO: 16468 - protein, 10 aa, Artificial Sequence
  Peptide Derived from Human Papillomavirus
NTPIEDGDMI

SEQ ID NO: 16469 - protein, 9 aa, Artificial Sequence
  Peptide Derived from Human Papillomavirus
NVFPIFLQM

SEQ ID NO: 16470 - protein, 10 aa, Artificial Sequence
  Peptide Derived from Human Papillomavirus
NVIEDSRDNI

SEQ ID NO: 16471 - protein, 8 aa, Artificial Sequence
  Peptide Derived from Human Papillomavirus
PIEDGDMI

SEQ ID NO: 16472 - protein, 9 aa, Artificial Sequence
  Peptide Derived from Human Papillomavirus
PIFLQMATW

SEQ ID NO: 16473 - protein, 8 aa, Artificial Sequence
  Peptide Derived from Human Papillomavirus
PLAKYKFW

SEQ ID NO: 16474 - protein, 9 aa, Artificial Sequence
  Peptide Derived from Human Papillomavirus
PLALINTPI

SEQ ID NO: 16475 - protein, 11 aa, Artificial Sequence
  Peptide Derived from Human Papillomavirus
PLDIVQSTCKY

SEQ ID NO: 16476 - protein, 11 aa, Artificial Sequence
  Peptide Derived from Human Papillomavirus
PLGAGLSGHPL

SEQ ID NO: 16477 - protein, 8 aa, Artificial Sequence
  Peptide Derived from Human Papillomavirus
PLGRKFLM

SEQ ID NO: 16478 - protein, 10 aa, Artificial Sequence
  Peptide Derived from Human Papillomavirus
PLGRKFLMQL

SEQ ID NO: 16479 - protein, 8 aa, Artificial Sequence
  Peptide Derived from Human Papillomavirus
PLHYGLCI

SEQ ID NO: 16480 - protein, 9 aa, Artificial Sequence
  Peptide Derived from Human Papillomavirus
PLHYGLCIF

SEQ ID NO: 16481 - protein, 10 aa, Artificial Sequence
  Peptide Derived from Human Papillomavirus
PLHYGLCIFL

SEQ ID NO: 16482 - protein, 11 aa, Artificial Sequence
  Peptide Derived from Human Papillomavirus
PMMYIYRDPPL

SEQ ID NO: 16483 - protein, 8 aa, Artificial Sequence
  Peptide Derived from Human Papillomavirus
PTEKQDPL

SEQ ID NO: 16484 - protein, 11 aa, Artificial Sequence
  Peptide Derived from Human Papillomavirus
PTEKQDPLAKY

SEQ ID NO: 16485 - protein, 10 aa, Artificial Sequence
  Peptide Derived from Human Papillomavirus
PVATSLEDKY

SEQ ID NO: 16486 - protein, 11 aa, Artificial Sequence
  Peptide Derived from Human Papillomavirus
PVSKVVATDSY

SEQ ID NO: 16487 - protein, 8 aa, Artificial Sequence
  Peptide Derived from Human Papillomavirus
QFPLGRKF

SEQ ID NO: 16488 - protein, 9 aa, Artificial Sequence
  Peptide Derived from Human Papillomavirus
QFPLGRKFL

SEQ ID NO: 16489 - protein, 10 aa, Artificial Sequence
  Peptide Derived from Human Papillomavirus
QFPLGRKFLM

SEQ ID NO: 16490 - protein, 9 aa, Artificial Sequence
  Peptide Derived from Human Papillomavirus
QFVFQLCKI

SEQ ID NO: 16491 - protein, 11 aa, Artificial Sequence
  Peptide Derived from Human Papillomavirus
QFVFQLCKITL

SEQ ID NO: 16492 - protein, 11 aa, Artificial Sequence
  Peptide Derived from Human Papillomavirus
QLCIVGCTPAM

SEQ ID NO: 16493 - protein, 8 aa, Artificial Sequence
  Peptide Derived from Human Papillomavirus
QLFARHYF

SEQ ID NO: 16494 - protein, 8 aa, Artificial Sequence
  Peptide Derived from Human Papillomavirus
QLFNKPYW

SEQ ID NO: 16495 - protein, 9 aa, Artificial Sequence
  Peptide Derived from Human Papillomavirus
QLFNKPYWL

SEQ ID NO: 16496 - protein, 10 aa, Artificial Sequence
  Peptide Derived from Human Papillomavirus
QLSKYDARKI

SEQ ID NO: 16497 - protein, 10 aa, Artificial Sequence
  Peptide Derived from Human Papillomavirus
QVTTGDCPPL

SEQ ID NO: 16498 - protein, 9 aa, Artificial Sequence
  Peptide Derived from Human Papillomavirus
QYLRHVEEY

SEQ ID NO: 16499 - protein, 11 aa, Artificial Sequence
  Peptide Derived from Human Papillomavirus
QYLRHVEEYEL

SEQ ID NO: 16500 - protein, 9 aa, Artificial Sequence
  Peptide Derived from Human Papillomavirus
QYRVFRVRL

SEQ ID NO: 16501 - protein, 10 aa, Artificial Sequence
  Peptide Derived from Human Papillomavirus
RLDDTESSNL

SEQ ID NO: 16502 - protein, 9 aa, Artificial Sequence
  Peptide Derived from Human Papillomavirus
RLLAVGHPY

SEQ ID NO: 16503 - protein, 10 aa, Artificial Sequence
  Peptide Derived from Human Papillomavirus
RLLAVGHPYY

SEQ ID NO: 16504 - protein, 8 aa, Artificial Sequence
  Peptide Derived from Human Papillomavirus
RLPDPNKF

SEQ ID NO: 16505 - protein, 10 aa, Artificial Sequence
  Peptide Derived from Human Papillomavirus
RLPDPNKFGL

SEQ ID NO: 16506 - protein, 9 aa, Artificial Sequence
  Peptide Derived from Human Papillomavirus
RLVWACVGL

SEQ ID NO: 16507 - protein, 10 aa, Artificial Sequence
  Peptide Derived from Human Papillomavirus
RVRLPDPNKF

SEQ ID NO: 16508 - protein, 8 aa, Artificial Sequence
  Peptide Derived from Human Papillomavirus
RYVRSTAI

SEQ ID NO: 16509 - protein, 9 aa, Artificial Sequence
  Peptide Derived from Human Papillomavirus
SFSTDLDQF

SEQ ID NO: 16510 - protein, 11 aa, Artificial Sequence
  Peptide Derived from Human Papillomavirus
SFSTDLDQFPL

SEQ ID NO: 16511 - protein, 11 aa, Artificial Sequence
  Peptide Derived from Human Papillomavirus
SIFYHAGSSRL

SEQ ID NO: 16512 - protein, 8 aa, Artificial Sequence
  Peptide Derived from Human Papillomavirus
SLEDKYRY

SEQ ID NO: 16513 - protein, 9 aa, Artificial Sequence
  Peptide Derived from Human Papillomavirus
SMITSEAQL

SEQ ID NO: 16514 - protein, 10 aa, Artificial Sequence
  Peptide Derived from Human Papillomavirus
SMITSEAQLF

SEQ ID NO: 16515 - protein, 11 aa, Artificial Sequence
  Peptide Derived from Human Papillomavirus
SMWFYLRREQL

SEQ ID NO: 16516 - protein, 10 aa, Artificial Sequence
  Peptide Derived from Human Papillomavirus
STATEQLSKY

SEQ ID NO: 16517 - protein, 8 aa, Artificial Sequence
  Peptide Derived from Human Papillomavirus
STCKYPDY

SEQ ID NO: 16518 - protein, 9 aa, Artificial Sequence
  Peptide Derived from Human Papillomavirus
STCKYPDYL

SEQ ID NO: 16519 - protein, 11 aa, Artificial Sequence
  Peptide Derived from Human Papillomavirus
STCKYPDYLKM

SEQ ID NO: 16520 - protein, 9 aa, Artificial Sequence
  Peptide Derived from Human Papillomavirus
STDLDQFPL

SEQ ID NO: 16521 - protein, 9 aa, Artificial Sequence
  Peptide Derived from Human Papillomavirus
SVDGKQTQL

SEQ ID NO: 16522 - protein, 11 aa, Artificial Sequence
  Peptide Derived from Human Papillomavirus
SVDGKQTQLCI

SEQ ID NO: 16523 - protein, 11 aa, Artificial Sequence
  Peptide Derived from Human Papillomavirus
SVTKDNTKTNI

SEQ ID NO: 16524 - protein, 11 aa, Artificial Sequence
  Peptide Derived from Human Papillomavirus
SVYVATPSGSM

SEQ ID NO: 16525 - protein, 8 aa, Artificial Sequence
  Peptide Derived from Human Papillomavirus
SYVKRTSI

SEQ ID NO: 16526 - protein, 9 aa, Artificial Sequence
  Peptide Derived from Human Papillomavirus
SYVKRTSIF

SEQ ID NO: 16527 - protein, 10 aa, Artificial Sequence
  Peptide Derived from Human Papillomavirus
SYVKRTSIFY

SEQ ID NO: 16528 - protein, 8 aa, Artificial Sequence
  Peptide Derived from Human Papillomavirus
TIPAELYL

SEQ ID NO: 16529 - protein, 9 aa, Artificial Sequence
  Peptide Derived from Human Papillomavirus
TISTATEQL

SEQ ID NO: 16530 - protein, 9 aa, Artificial Sequence
  Peptide Derived from Human Papillomavirus
TLSAEVMAY

SEQ ID NO: 16531 - protein, 10 aa, Artificial Sequence
  Peptide Derived from Human Papillomavirus
TLSAEVMAYL

SEQ ID NO: 16532 - protein, 8 aa, Artificial Sequence
  Peptide Derived from Human Papillomavirus
TTGDCPPL

SEQ ID NO: 16533 - protein, 10 aa, Artificial Sequence
  Peptide Derived from Human Papillomavirus
TTGDCPPLAL

SEQ ID NO: 16534 - protein, 11 aa, Artificial Sequence
  Peptide Derived from Human Papillomavirus
TTGDCPPLALI

SEQ ID NO: 16535 - protein, 9 aa, Artificial Sequence
  Peptide Derived from Human Papillomavirus
TTRSTNMTI

SEQ ID NO: 16536 - protein, 11 aa, Artificial Sequence
  Peptide Derived from Human Papillomavirus
TVVDTTRSTNM

SEQ ID NO: 16537 - protein, 10 aa, Artificial Sequence
  Peptide Derived from Human Papillomavirus
TWRPSENKVY

SEQ ID NO: 16538 - protein, 11 aa, Artificial Sequence
  Peptide Derived from Human Papillomavirus
TWRPSENKVYL

SEQ ID NO: 16539 - protein, 8 aa, Artificial Sequence
  Peptide Derived from Human Papillomavirus
VFPIFLQM

SEQ ID NO: 16540 - protein, 11 aa, Artificial Sequence
  Peptide Derived from Human Papillomavirus
VFPIFLQMATW

SEQ ID NO: 16541 - protein, 9 aa, Artificial Sequence
  Peptide Derived from Human Papillomavirus
VFQLCKITL

SEQ ID NO: 16542 - protein, 9 aa, Artificial Sequence
  Peptide Derived from Human Papillomavirus
VIEDSRDNI

SEQ ID NO: 16543 - protein, 11 aa, Artificial Sequence
  Peptide Derived from Human Papillomavirus
VLQESKAEVPL

SEQ ID NO: 16544 - protein, 8 aa, Artificial Sequence
  Peptide Derived from Human Papillomavirus
VMAYLHNM

SEQ ID NO: 16545 - protein, 10 aa, Artificial Sequence
  Peptide Derived from Human Papillomavirus
VTKDNTKTNI

SEQ ID NO: 16546 - protein, 9 aa, Artificial Sequence
  Peptide Derived from Human Papillomavirus
VTTGDCPPL

SEQ ID NO: 16547 - protein, 11 aa, Artificial Sequence
  Peptide Derived from Human Papillomavirus
VTTGDCPPLAL

SEQ ID NO: 16548 - protein, 10 aa, Artificial Sequence
  Peptide Derived from Human Papillomavirus
VVDTTRSTNM

SEQ ID NO: 16549 - protein, 10 aa, Artificial Sequence
  Peptide Derived from Human Papillomavirus
VYVATPSGSM

SEQ ID NO: 16550 - protein, 11 aa, Artificial Sequence
  Peptide Derived from Human Papillomavirus
VYVATPSGSMI

SEQ ID NO: 16551 - protein, 9 aa, Artificial Sequence
  Peptide Derived from Human Papillomavirus
WFYLRREQL

SEQ ID NO: 16552 - protein, 10 aa, Artificial Sequence
  Peptide Derived from Human Papillomavirus
WFYLRREQLF

SEQ ID NO: 16553 - protein, 8 aa, Artificial Sequence
  Peptide Derived from Human Papillomavirus
YIYRDPPL

SEQ ID NO: 16554 - protein, 10 aa, Artificial Sequence
  Peptide Derived from Human Papillomavirus
YIYRDPPLHY

SEQ ID NO: 16555 - protein, 9 aa, Artificial Sequence
  Peptide Derived from Human Papillomavirus
YLHNMNANL

SEQ ID NO: 16556 - protein, 10 aa, Artificial Sequence
  Peptide Derived from Human Papillomavirus
YLHNMNANLL

SEQ ID NO: 16557 - protein, 9 aa, Artificial Sequence
  Peptide Derived from Human Papillomavirus
YLKMSADAY

SEQ ID NO: 16558 - protein, 8 aa, Artificial Sequence
  Peptide Derived from Human Papillomavirus
YLRHVEEY

SEQ ID NO: 16559 - protein, 10 aa, Artificial Sequence
  Peptide Derived from Human Papillomavirus
YLRHVEEYEL

SEQ ID NO: 16560 - protein, 8 aa, Artificial Sequence
  Peptide Derived from Human Papillomavirus
YLRREQLF

SEQ ID NO: 16561 - protein, 9 aa, Artificial Sequence
  Peptide Derived from Human Papillomavirus
YVATPSGSM

SEQ ID NO: 16562 - protein, 10 aa, Artificial Sequence
  Peptide Derived from Human Papillomavirus
YVATPSGSMI

SEQ ID NO: 16563 - protein, 8 aa, Artificial Sequence
  Peptide Derived from Human Papillomavirus
YVKRTSIF

SEQ ID NO: 16564 - protein, 9 aa, Artificial Sequence
  Peptide Derived from Human Papillomavirus
YVKRTSIFY

SEQ ID NO: 16565 - protein, 9 aa, Artificial Sequence
  Peptide Derived from Human Papillomavirus
AFLDRPATL

SEQ ID NO: 16566 - protein, 11 aa, Artificial Sequence
  Peptide Derived from Human Papillomavirus
AFTTRRGGVRF

SEQ ID NO: 16567 - protein, 8 aa, Artificial Sequence
  Peptide Derived from Human Papillomavirus
ALWPVYFF

SEQ ID NO: 16568 - protein, 11 aa, Artificial Sequence
  Peptide Derived from Human Papillomavirus
ATIQTRRGTQI

SEQ ID NO: 16569 - protein, 10 aa, Artificial Sequence
  Peptide Derived from Human Papillomavirus
ATLVSADNPL

SEQ ID NO: 16570 - protein, 11 aa, Artificial Sequence
  Peptide Derived from Human Papillomavirus
ATLVSADNPLF

SEQ ID NO: 16571 - protein, 9 aa, Artificial Sequence
  Peptide Derived from Human Papillomavirus
ATPSAHLPI

SEQ ID NO: 16572 - protein, 10 aa, Artificial Sequence
  Peptide Derived from Human Papillomavirus
ATQLYKTCKL

SEQ ID NO: 16573 - protein, 10 aa, Artificial Sequence
  Peptide Derived from Human Papillomavirus
AVHGSGTEPI

SEQ ID NO: 16574 - protein, 8 aa, Artificial Sequence
  Peptide Derived from Human Papillomavirus
DFMNIVAL

SEQ ID NO: 16575 - protein, 11 aa, Artificial Sequence
  Peptide Derived from Human Papillomavirus
DISPIAQAEEI

SEQ ID NO: 16576 - protein, 11 aa, Artificial Sequence
  Peptide Derived from Human Papillomavirus
DIVLPTGPSTW

SEQ ID NO: 16577 - protein, 8 aa, Artificial Sequence
  Peptide Derived from Human Papillomavirus
DVTHDVYI

SEQ ID NO: 16578 - protein, 9 aa, Artificial Sequence
  Peptide Derived from Human Papillomavirus
DVTPARPPI

SEQ ID NO: 16579 - protein, 11 aa, Artificial Sequence
  Peptide Derived from Human Papillomavirus
DVVNKIEQKTW

SEQ ID NO: 16580 - protein, 9 aa, Artificial Sequence
  Peptide Derived from Human Papillomavirus
DVYIQGSSF

SEQ ID NO: 16581 - protein, 11 aa, Artificial Sequence
  Peptide Derived from Human Papillomavirus
DVYIQGSSFAL

SEQ ID NO: 16582 - protein, 8 aa, Artificial Sequence
  Peptide Derived from Human Papillomavirus
EIEMQPLL

SEQ ID NO: 16583 - protein, 10 aa, Artificial Sequence
  Peptide Derived from Human Papillomavirus
ETPFYSGPDI

SEQ ID NO: 16584 - protein, 8 aa, Artificial Sequence
  Peptide Derived from Human Papillomavirus
EVSGNILI

SEQ ID NO: 16585 - protein, 10 aa, Artificial Sequence
  Peptide Derived from Human Papillomavirus
FFRRRRRKRI

SEQ ID NO: 16586 - protein, 8 aa, Artificial Sequence
  Peptide Derived from Human Papillomavirus
FLDRPATL

SEQ ID NO: 16587 - protein, 9 aa, Artificial Sequence
  Peptide Derived from Human Papillomavirus
FTGSGGFEI

SEQ ID NO: 16588 - protein, 10 aa, Artificial Sequence
  Peptide Derived from Human Papillomavirus
FTTRRGGVRF

SEQ ID NO: 16589 - protein, 9 aa, Artificial Sequence
  Peptide Derived from Human Papillomavirus
FTYFGGLGI

SEQ ID NO: 16590 - protein, 9 aa, Artificial Sequence
  Peptide Derived from Human Papillomavirus
FYSGPDIVL

SEQ ID NO: 16591 - protein, 10 aa, Artificial Sequence
  Peptide Derived from Human Papillomavirus
GFRRIAAPRL

SEQ ID NO: 16592 - protein, 11 aa, Artificial Sequence
  Peptide Derived from Human Papillomavirus
GFRRIAAPRLY

SEQ ID NO: 16593 - protein, 8 aa, Artificial Sequence
  Peptide Derived from Human Papillomavirus
GIHSYEEI

SEQ ID NO: 16594 - protein, 10 aa, Artificial Sequence
  Peptide Derived from Human Papillomavirus
GIHSYEEIPM

SEQ ID NO: 16595 - protein, 11 aa, Artificial Sequence
  Peptide Derived from Human Papillomavirus
GIPNFTGSGGF

SEQ ID NO: 16596 - protein, 9 aa, Artificial Sequence
  Peptide Derived from Human Papillomavirus
GLYDIYANI

SEQ ID NO: 16597 - protein, 11 aa, Artificial Sequence
  Peptide Derived from Human Papillomavirus
GTCPEDVVNKI

SEQ ID NO: 16598 - protein, 8 aa, Artificial Sequence
  Peptide Derived from Human Papillomavirus
GTDTSLAF

SEQ ID NO: 16599 - protein, 10 aa, Artificial Sequence
  Peptide Derived from Human Papillomavirus
GTEPISSTPI

SEQ ID NO: 16600 - protein, 10 aa, Artificial Sequence
  Peptide Derived from Human Papillomavirus
GTGSGGRAGY

SEQ ID NO: 16601 - protein, 10 aa, Artificial Sequence
  Peptide Derived from Human Papillomavirus
GTQIGARVHY

SEQ ID NO: 16602 - protein, 11 aa, Artificial Sequence
  Peptide Derived from Human Papillomavirus
GTQIGARVHYY

SEQ ID NO: 16603 - protein, 8 aa, Artificial Sequence
  Peptide Derived from Human Papillomavirus
GVAPDPDF

SEQ ID NO: 16604 - protein, 9 aa, Artificial Sequence
  Peptide Derived from Human Papillomavirus
GVAPDPDFM

SEQ ID NO: 16605 - protein, 11 aa, Artificial Sequence
  Peptide Derived from Human Papillomavirus
GVAPDPDFMNI

SEQ ID NO: 16606 - protein, 8 aa, Artificial Sequence
  Peptide Derived from Human Papillomavirus
HITNPLFI

SEQ ID NO: 16607 - protein, 9 aa, Artificial Sequence
  Peptide Derived from Human Papillomavirus
HLPIKPSTL

SEQ ID NO: 16608 - protein, 11 aa, Artificial Sequence
  Peptide Derived from Human Papillomavirus
HLPIKPSTLSF

SEQ ID NO: 16609 - protein, 11 aa, Artificial Sequence
  Peptide Derived from Human Papillomavirus
HVSSTHITNPL

SEQ ID NO: 16610 - protein, 9 aa, Artificial Sequence
  Peptide Derived from Human Papillomavirus
HYYYDISPI

SEQ ID NO: 16611 - protein, 10 aa, Artificial Sequence
  Peptide Derived from Human Papillomavirus
ILISTPTSGI

SEQ ID NO: 16612 - protein, 8 aa, Artificial Sequence
  Peptide Derived from Human Papillomavirus
ILQWGSLF

SEQ ID NO: 16613 - protein, 10 aa, Artificial Sequence
  Peptide Derived from Human Papillomavirus
ILQWGSLFTY

SEQ ID NO: 16614 - protein, 11 aa, Artificial Sequence
  Peptide Derived from Human Papillomavirus
ILQWGSLFTYF

SEQ ID NO: 16615 - protein, 9 aa, Artificial Sequence
  Peptide Derived from Human Papillomavirus
IVALHRPAF

SEQ ID NO: 16616 - protein, 11 aa, Artificial Sequence
  Peptide Derived from Human Papillomavirus
IVDVTPARPPI

SEQ ID NO: 16617 - protein, 10 aa, Artificial Sequence
  Peptide Derived from Human Papillomavirus
IVLPTGPSTW

SEQ ID NO: 16618 - protein, 11 aa, Artificial Sequence
  Peptide Derived from Human Papillomavirus
IVTLVEESSVI

SEQ ID NO: 16619 - protein, 11 aa, Artificial Sequence
  Peptide Derived from Human Papillomavirus
KIEQKTWADKI

SEQ ID NO: 16620 - protein, 8 aa, Artificial Sequence
  Peptide Derived from Human Papillomavirus
KILQWGSL

SEQ ID NO: 16621 - protein, 9 aa, Artificial Sequence
  Peptide Derived from Human Papillomavirus
KILQWGSLF

SEQ ID NO: 16622 - protein, 11 aa, Artificial Sequence
  Peptide Derived from Human Papillomavirus
KILQWGSLFTY

SEQ ID NO: 16623 - protein, 8 aa, Artificial Sequence
  Peptide Derived from Human Papillomavirus
KTWADKIL

SEQ ID NO: 16624 - protein, 10 aa, Artificial Sequence
  Peptide Derived from Human Papillomavirus
KTWADKILQW

SEQ ID NO: 16625 - protein, 8 aa, Artificial Sequence
  Peptide Derived from Human Papillomavirus
KVTDPAFL

SEQ ID NO: 16626 - protein, 9 aa, Artificial Sequence
  Peptide Derived from Human Papillomavirus
LFEGTDTSL

SEQ ID NO: 16627 - protein, 11 aa, Artificial Sequence
  Peptide Derived from Human Papillomavirus
LFEGTDTSLAF

SEQ ID NO: 16628 - protein, 8 aa, Artificial Sequence
  Peptide Derived from Human Papillomavirus
LFIDPPVI

SEQ ID NO: 16629 - protein, 8 aa, Artificial Sequence
  Peptide Derived from Human Papillomavirus
LFTYFGGL

SEQ ID NO: 16630 - protein, 10 aa, Artificial Sequence
  Peptide Derived from Human Papillomavirus
LFTYFGGLGI

SEQ ID NO: 16631 - protein, 9 aa, Artificial Sequence
  Peptide Derived from Human Papillomavirus
LISTPTSGI

SEQ ID NO: 16632 - protein, 8 aa, Artificial Sequence
  Peptide Derived from Human Papillomavirus
LLSANNSF

SEQ ID NO: 16633 - protein, 11 aa, Artificial Sequence
  Peptide Derived from Human Papillomavirus
LLSANNSFDGL

SEQ ID NO: 16634 - protein, 8 aa, Artificial Sequence
  Peptide Derived from Human Papillomavirus
LVEESSVI

SEQ ID NO: 16635 - protein, 8 aa, Artificial Sequence
  Peptide Derived from Human Papillomavirus
LVSADNPL

SEQ ID NO: 16636 - protein, 9 aa, Artificial Sequence
  Peptide Derived from Human Papillomavirus
LVSADNPLF

SEQ ID NO: 16637 - protein, 8 aa, Artificial Sequence
  Peptide Derived from Human Papillomavirus
LYDIYANI

SEQ ID NO: 16638 - protein, 8 aa, Artificial Sequence
  Peptide Derived from Human Papillomavirus
NFTGSGGF

SEQ ID NO: 16639 - protein, 10 aa, Artificial Sequence
  Peptide Derived from Human Papillomavirus
NFTGSGGFEI

SEQ ID NO: 16640 - protein, 9 aa, Artificial Sequence
  Peptide Derived from Human Papillomavirus
NIDDEAPGL

SEQ ID NO: 16641 - protein, 11 aa, Artificial Sequence
  Peptide Derived from Human Papillomavirus
NILISTPTSGI

SEQ ID NO: 16642 - protein, 10 aa, Artificial Sequence
  Peptide Derived from Human Papillomavirus
NIVALHRPAF

SEQ ID NO: 16643 - protein, 9 aa, Artificial Sequence
  Peptide Derived from Human Papillomavirus
NTTNVTAPL

SEQ ID NO: 16644 - protein, 10 aa, Artificial Sequence
  Peptide Derived from Human Papillomavirus
NVTAPLGNVW

SEQ ID NO: 16645 - protein, 8 aa, Artificial Sequence
  Peptide Derived from Human Papillomavirus
NVWETPFY

SEQ ID NO: 16646 - protein, 8 aa, Artificial Sequence
  Peptide Derived from Human Papillomavirus
PFVPQSPY

SEQ ID NO: 16647 - protein, 8 aa, Artificial Sequence
  Peptide Derived from Human Papillomavirus
PFYSGPDI

SEQ ID NO: 16648 - protein, 10 aa, Artificial Sequence
  Peptide Derived from Human Papillomavirus
PFYSGPDIVL

SEQ ID NO: 16649 - protein, 8 aa, Artificial Sequence
  Peptide Derived from Human Papillomavirus
PIAQAEEI

SEQ ID NO: 16650 - protein, 10 aa, Artificial Sequence
  Peptide Derived from Human Papillomavirus
PIAQAEEIEM

SEQ ID NO: 16651 - protein, 9 aa, Artificial Sequence
  Peptide Derived from Human Papillomavirus
PIKPSTLSF

SEQ ID NO: 16652 - protein, 8 aa, Artificial Sequence
  Peptide Derived from Human Papillomavirus
PIPGFRRI

SEQ ID NO: 16653 - protein, 10 aa, Artificial Sequence
  Peptide Derived from Human Papillomavirus
PISSTPIPGF

SEQ ID NO: 16654 - protein, 10 aa, Artificial Sequence
  Peptide Derived from Human Papillomavirus
PLFEGTDTSL

SEQ ID NO: 16655 - protein, 9 aa, Artificial Sequence
  Peptide Derived from Human Papillomavirus
PLFIDPPVI

SEQ ID NO: 16656 - protein, 10 aa, Artificial Sequence
  Peptide Derived from Human Papillomavirus
PLGNVWETPF

SEQ ID NO: 16657 - protein, 11 aa, Artificial Sequence
  Peptide Derived from Human Papillomavirus
PLGNVWETPFY

SEQ ID NO: 16658 - protein, 9 aa, Artificial Sequence
  Peptide Derived from Human Papillomavirus
PLGSRPSTI

SEQ ID NO: 16659 - protein, 9 aa, Artificial Sequence
  Peptide Derived from Human Papillomavirus
PLLSANNSF

SEQ ID NO: 16660 - protein, 9 aa, Artificial Sequence
  Peptide Derived from Human Papillomavirus
PTDPSIVTL

SEQ ID NO: 16661 - protein, 9 aa, Artificial Sequence
  Peptide Derived from Human Papillomavirus
PTGPSTWPF

SEQ ID NO: 16662 - protein, 8 aa, Artificial Sequence
  Peptide Derived from Human Papillomavirus
PTSGIHSY

SEQ ID NO: 16663 - protein, 11 aa, Artificial Sequence
  Peptide Derived from Human Papillomavirus
PTSGIHSYEEI

SEQ ID NO: 16664 - protein, 9 aa, Artificial Sequence
  Peptide Derived from Human Papillomavirus
PYDVTHDVY

SEQ ID NO: 16665 - protein, 10 aa, Artificial Sequence
  Peptide Derived from Human Papillomavirus
PYDVTHDVYI

SEQ ID NO: 16666 - protein, 8 aa, Artificial Sequence
  Peptide Derived from Human Papillomavirus
QIGARVHY

SEQ ID NO: 16667 - protein, 9 aa, Artificial Sequence
  Peptide Derived from Human Papillomavirus
QIGARVHYY

SEQ ID NO: 16668 - protein, 10 aa, Artificial Sequence
  Peptide Derived from Human Papillomavirus
QIGARVHYYY

SEQ ID NO: 16669 - protein, 8 aa, Artificial Sequence
  Peptide Derived from Human Papillomavirus
QLYKTCKL

SEQ ID NO: 16670 - protein, 9 aa, Artificial Sequence
  Peptide Derived from Human Papillomavirus
QTGEVSGNI

SEQ ID NO: 16671 - protein, 10 aa, Artificial Sequence
  Peptide Derived from Human Papillomavirus
QTGEVSGNIL

SEQ ID NO: 16672 - protein, 11 aa, Artificial Sequence
  Peptide Derived from Human Papillomavirus
QTGEVSGNILI

SEQ ID NO: 16673 - protein, 8 aa, Artificial Sequence
  Peptide Derived from Human Papillomavirus
QTRRGTQI

SEQ ID NO: 16674 - protein, 9 aa, Artificial Sequence
  Peptide Derived from Human Papillomavirus
QVKVTDPAF

SEQ ID NO: 16675 - protein, 10 aa, Artificial Sequence
  Peptide Derived from Human Papillomavirus
QVKVTDPAFL

SEQ ID NO: 16676 - protein, 8 aa, Artificial Sequence
  Peptide Derived from Human Papillomavirus
QWGSLFTY

SEQ ID NO: 16677 - protein, 9 aa, Artificial Sequence
  Peptide Derived from Human Papillomavirus
QWGSLFTYF

SEQ ID NO: 16678 - protein, 11 aa, Artificial Sequence
  Peptide Derived from Human Papillomavirus
RFSRLGRKATI

SEQ ID NO: 16679 - protein, 8 aa, Artificial Sequence
  Peptide Derived from Human Papillomavirus
RIAAPRLY

SEQ ID NO: 16680 - protein, 8 aa, Artificial Sequence
  Peptide Derived from Human Papillomavirus
RLGRKATI

SEQ ID NO: 16681 - protein, 8 aa, Artificial Sequence
  Peptide Derived from Human Papillomavirus
RVHYYYDI

SEQ ID NO: 16682 - protein, 11 aa, Artificial Sequence
  Peptide Derived from Human Papillomavirus
RVHYYYDISPI

SEQ ID NO: 16683 - protein, 8 aa, Artificial Sequence
  Peptide Derived from Human Papillomavirus
SFALWPVY

SEQ ID NO: 16684 - protein, 9 aa, Artificial Sequence
  Peptide Derived from Human Papillomavirus
SFALWPVYF

SEQ ID NO: 16685 - protein, 10 aa, Artificial Sequence
  Peptide Derived from Human Papillomavirus
SFALWPVYFF

SEQ ID NO: 16686 - protein, 8 aa, Artificial Sequence
  Peptide Derived from Human Papillomavirus
SFDGLYDI

SEQ ID NO: 16687 - protein, 9 aa, Artificial Sequence
  Peptide Derived from Human Papillomavirus
SFDGLYDIY

SEQ ID NO: 16688 - protein, 9 aa, Artificial Sequence
  Peptide Derived from Human Papillomavirus
SLFTYFGGL

SEQ ID NO: 16689 - protein, 11 aa, Artificial Sequence
  Peptide Derived from Human Papillomavirus
SLFTYFGGLGI

SEQ ID NO: 16690 - protein, 8 aa, Artificial Sequence
  Peptide Derived from Human Papillomavirus
STHITNPL

SEQ ID NO: 16691 - protein, 9 aa, Artificial Sequence
  Peptide Derived from Human Papillomavirus
STHITNPLF

SEQ ID NO: 16692 - protein, 10 aa, Artificial Sequence
  Peptide Derived from Human Papillomavirus
STHITNPLFI

SEQ ID NO: 16693 - protein, 10 aa, Artificial Sequence
  Peptide Derived from Human Papillomavirus
STPIPGFRRI

SEQ ID NO: 16694 - protein, 10 aa, Artificial Sequence
  Peptide Derived from Human Papillomavirus
STPTSGIHSY

SEQ ID NO: 16695 - protein, 8 aa, Artificial Sequence
  Peptide Derived from Human Papillomavirus
STTTPAVL

SEQ ID NO: 16696 - protein, 10 aa, Artificial Sequence
  Peptide Derived from Human Papillomavirus
STTTPAVLDI

SEQ ID NO: 16697 - protein, 10 aa, Artificial Sequence
  Peptide Derived from Human Papillomavirus
STVHVSSTHI

SEQ ID NO: 16698 - protein, 11 aa, Artificial Sequence
  Peptide Derived from Human Papillomavirus
STWPFVPQSPY

SEQ ID NO: 16699 - protein, 9 aa, Artificial Sequence
  Peptide Derived from Human Papillomavirus
SVATPSAHL

SEQ ID NO: 16700 - protein, 11 aa, Artificial Sequence
  Peptide Derived from Human Papillomavirus
SVATPSAHLPI

SEQ ID NO: 16701 - protein, 9 aa, Artificial Sequence
  Peptide Derived from Human Papillomavirus
SVGPTDPSI

SEQ ID NO: 16702 - protein, 9 aa, Artificial Sequence
  Peptide Derived from Human Papillomavirus
SVIESGAGI

SEQ ID NO: 16703 - protein, 10 aa, Artificial Sequence
  Peptide Derived from Human Papillomavirus
SYEEIPMQTF

SEQ ID NO: 16704 - protein, 10 aa, Artificial Sequence
  Peptide Derived from Human Papillomavirus
TIQTRRGTQI

SEQ ID NO: 16705 - protein, 9 aa, Artificial Sequence
  Peptide Derived from Human Papillomavirus
TLVEESSVI

SEQ ID NO: 16706 - protein, 9 aa, Artificial Sequence
  Peptide Derived from Human Papillomavirus
TLVSADNPL

SEQ ID NO: 16707 - protein, 10 aa, Artificial Sequence
  Peptide Derived from Human Papillomavirus
TLVSADNPLF

SEQ ID NO: 16708 - protein, 8 aa, Artificial Sequence
  Peptide Derived from Human Papillomavirus
TTNVTAPL

SEQ ID NO: 16709 - protein, 8 aa, Artificial Sequence
  Peptide Derived from Human Papillomavirus
TTPAVLDI

SEQ ID NO: 16710 - protein, 9 aa, Artificial Sequence
  Peptide Derived from Human Papillomavirus
TTRRGGVRF

SEQ ID NO: 16711 - protein, 9 aa, Artificial Sequence
  Peptide Derived from Human Papillomavirus
TTTPAVLDI

SEQ ID NO: 16712 - protein, 9 aa, Artificial Sequence
  Peptide Derived from Human Papillomavirus
TVHVSSTHI

SEQ ID NO: 16713 - protein, 9 aa, Artificial Sequence
  Peptide Derived from Human Papillomavirus
TWADKILQW

SEQ ID NO: 16714 - protein, 10 aa, Artificial Sequence
  Peptide Derived from Human Papillomavirus
TWPFVPQSPY

SEQ ID NO: 16715 - protein, 8 aa, Artificial Sequence
  Peptide Derived from Human Papillomavirus
TYFGGLGI

SEQ ID NO: 16716 - protein, 8 aa, Artificial Sequence
  Peptide Derived from Human Papillomavirus
VIESGAGI

SEQ ID NO: 16717 - protein, 11 aa, Artificial Sequence
  Peptide Derived from Human Papillomavirus
VIESGAGIPNF

SEQ ID NO: 16718 - protein, 9 aa, Artificial Sequence
  Peptide Derived from Human Papillomavirus
VLPTGPSTW

SEQ ID NO: 16719 - protein, 11 aa, Artificial Sequence
  Peptide Derived from Human Papillomavirus
VLPTGPSTWPF

SEQ ID NO: 16720 - protein, 9 aa, Artificial Sequence
  Peptide Derived from Human Papillomavirus
VTAPLGNVW

SEQ ID NO: 16721 - protein, 10 aa, Artificial Sequence
  Peptide Derived from Human Papillomavirus
VTLVEESSVI

SEQ ID NO: 16722 - protein, 8 aa, Artificial Sequence
  Peptide Derived from Human Papillomavirus
VTPARPPI

SEQ ID NO: 16723 - protein, 10 aa, Artificial Sequence
  Peptide Derived from Human Papillomavirus
VVNKIEQKTW

SEQ ID NO: 16724 - protein, 8 aa, Artificial Sequence
  Peptide Derived from Human Papillomavirus
VYIQGSSF

SEQ ID NO: 16725 - protein, 10 aa, Artificial Sequence
  Peptide Derived from Human Papillomavirus
VYIQGSSFAL

SEQ ID NO: 16726 - protein, 11 aa, Artificial Sequence
  Peptide Derived from Human Papillomavirus
VYIQGSSFALW

SEQ ID NO: 16727 - protein, 11 aa, Artificial Sequence
  Peptide Derived from Human Papillomavirus
YFFRRRRRKRI

SEQ ID NO: 16728 - protein, 9 aa, Artificial Sequence
  Peptide Derived from Human Papillomavirus
YIQGSSFAL

SEQ ID NO: 16729 - protein, 10 aa, Artificial Sequence
  Peptide Derived from Human Papillomavirus
YIQGSSFALW

SEQ ID NO: 16730 - protein, 11 aa, Artificial Sequence
  Peptide Derived from Human Papillomavirus
YVPLGSRPSTI

SEQ ID NO: 16731 - protein, 8 aa, Artificial Sequence
  Peptide Derived from Human Papillomavirus
YYYDISPI

SEQ ID NO: 16732 - protein, 10 aa, Artificial Sequence
  Peptide Derived from Human Papillomavirus
CPPLLITSNI

SEQ ID NO: 16733 - protein, 9 aa, Artificial Sequence
  Peptide Derived from Human Papillomavirus
EPPKLRSTA

SEQ ID NO: 16734 - protein, 10 aa, Artificial Sequence
  Peptide Derived from Human Papillomavirus
EPPKLRSTAA

SEQ ID NO: 16735 - protein, 11 aa, Artificial Sequence
  Peptide Derived from Human Papillomavirus
EPPKLRSTAAA

SEQ ID NO: 16736 - protein, 10 aa, Artificial Sequence
  Peptide Derived from Human Papillomavirus
FPFDENGNPV

SEQ ID NO: 16737 - protein, 11 aa, Artificial Sequence
  Peptide Derived from Human Papillomavirus
FPFDENGNPVY

SEQ ID NO: 16738 - protein, 8 aa, Artificial Sequence
  Peptide Derived from Human Papillomavirus
IPKKNCIL

SEQ ID NO: 16739 - protein, 9 aa, Artificial Sequence
  Peptide Derived from Human Papillomavirus
IPKKNCILL

SEQ ID NO: 16740 - protein, 10 aa, Artificial Sequence
  Peptide Derived from Human Papillomavirus
IPKKNCILLY

SEQ ID NO: 16741 - protein, 11 aa, Artificial Sequence
  Peptide Derived from Human Papillomavirus
NPVYELNDKNW

SEQ ID NO: 16742 - protein, 8 aa, Artificial Sequence
  Peptide Derived from Human Papillomavirus
PPKLRSTA

SEQ ID NO: 16743 - protein, 9 aa, Artificial Sequence
  Peptide Derived from Human Papillomavirus
PPKLRSTAA

SEQ ID NO: 16744 - protein, 10 aa, Artificial Sequence
  Peptide Derived from Human Papillomavirus
PPKLRSTAAA

SEQ ID NO: 16745 - protein, 11 aa, Artificial Sequence
  Peptide Derived from Human Papillomavirus
PPKLRSTAAAL

SEQ ID NO: 16746 - protein, 9 aa, Artificial Sequence
  Peptide Derived from Human Papillomavirus
PPLLITSNI

SEQ ID NO: 16747 - protein, 11 aa, Artificial Sequence
  Peptide Derived from Human Papillomavirus
PPLLITSNINA

SEQ ID NO: 16748 - protein, 8 aa, Artificial Sequence
  Peptide Derived from Human Papillomavirus
QPLADAKI

SEQ ID NO: 16749 - protein, 10 aa, Artificial Sequence
  Peptide Derived from Human Papillomavirus
QPLADAKIGM

SEQ ID NO: 16750 - protein, 11 aa, Artificial Sequence
  Peptide Derived from Human Papillomavirus
QPLADAKIGML

SEQ ID NO: 16751 - protein, 11 aa, Artificial Sequence
  Peptide Derived from Human Papillomavirus
RPLVQLKCPPL

SEQ ID NO: 16752 - protein, 10 aa, Artificial Sequence
  Peptide Derived from Human Papillomavirus
SPLSDISGCV

SEQ ID NO: 16753 - protein, 9 aa, Artificial Sequence
  Peptide Derived from Human Papillomavirus
SPRLKAICI

SEQ ID NO: 16754 - protein, 10 aa, Artificial Sequence
  Peptide Derived from Human Papillomavirus
TPEWIQRQTV

SEQ ID NO: 16755 - protein, 11 aa, Artificial Sequence
  Peptide Derived from Human Papillomavirus
TPEWIQRQTVL

SEQ ID NO: 16756 - protein, 9 aa, Artificial Sequence
  Peptide Derived from Human Papillomavirus
TPLTNILNV

SEQ ID NO: 16757 - protein, 10 aa, Artificial Sequence
  Peptide Derived from Human Papillomavirus
TPLTNILNVL

SEQ ID NO: 16758 - protein, 8 aa, Artificial Sequence
  Peptide Derived from Human Papillomavirus
TPSIADSI

SEQ ID NO: 16759 - protein, 11 aa, Artificial Sequence
  Peptide Derived from Human Papillomavirus
TPSIADSIKTL

SEQ ID NO: 16760 - protein, 11 aa, Artificial Sequence
  Peptide Derived from Human Papillomavirus
VPCWNYIDDNL

SEQ ID NO: 16761 - protein, 8 aa, Artificial Sequence
  Peptide Derived from Human Papillomavirus
WPYLHNRL

SEQ ID NO: 16762 - protein, 9 aa, Artificial Sequence
  Peptide Derived from Human Papillomavirus
WPYLHNRLV

SEQ ID NO: 16763 - protein, 10 aa, Artificial Sequence
  Peptide Derived from Human Papillomavirus
WPYLHNRLVV

SEQ ID NO: 16764 - protein, 11 aa, Artificial Sequence
  Peptide Derived from Human Papillomavirus
WPYLHNRLVVF

SEQ ID NO: 16765 - protein, 11 aa, Artificial Sequence
  Peptide Derived from Human Papillomavirus
APTGCIKKHGY

SEQ ID NO: 16766 - protein, 11 aa, Artificial Sequence
  Peptide Derived from Human Papillomavirus
CPTSVFSSNEV

SEQ ID NO: 16767 - protein, 9 aa, Artificial Sequence
  Peptide Derived from Human Papillomavirus
HPAATHTKA

SEQ ID NO: 16768 - protein, 10 aa, Artificial Sequence
  Peptide Derived from Human Papillomavirus
HPAATHTKAV

SEQ ID NO: 16769 - protein, 11 aa, Artificial Sequence
  Peptide Derived from Human Papillomavirus
HPAATHTKAVA

SEQ ID NO: 16770 - protein, 11 aa, Artificial Sequence
  Peptide Derived from Human Papillomavirus
IPKTITVSTGF

SEQ ID NO: 16771 - protein, 8 aa, Artificial Sequence
  Peptide Derived from Human Papillomavirus
NPCHTTKL

SEQ ID NO: 16772 - protein, 9 aa, Artificial Sequence
  Peptide Derived from Human Papillomavirus
NPCHTTKLL

SEQ ID NO: 16773 - protein, 9 aa, Artificial Sequence
  Peptide Derived from Human Papillomavirus
SPEIIRQHL

SEQ ID NO: 16774 - protein, 10 aa, Artificial Sequence
  Peptide Derived from Human Papillomavirus
SPEIIRQHLA

SEQ ID NO: 16775 - protein, 10 aa, Artificial Sequence
  Peptide Derived from Human Papillomavirus
TPIVHLKGDA

SEQ ID NO: 16776 - protein, 11 aa, Artificial Sequence
  Peptide Derived from Human Papillomavirus
VPTLAVSKNKA

SEQ ID NO: 16777 - protein, 10 aa, Artificial Sequence
  Peptide Derived from Human Papillomavirus
IPLFLIHTHA

SEQ ID NO: 16778 - protein, 10 aa, Artificial Sequence
  Peptide Derived from Human Papillomavirus
RPLLLSVSTY

SEQ ID NO: 16779 - protein, 9 aa, Artificial Sequence
  Peptide Derived from Human Papillomavirus
CPEEKQRHL

SEQ ID NO: 16780 - protein, 9 aa, Artificial Sequence
  Peptide Derived from Human Papillomavirus
DPQERPRKL

SEQ ID NO: 16781 - protein, 8 aa, Artificial Sequence
  Peptide Derived from Human Papillomavirus
KPLCDLLI

SEQ ID NO: 16782 - protein, 11 aa, Artificial Sequence
  Peptide Derived from Human Papillomavirus
KPLCDLLIRCI

SEQ ID NO: 16783 - protein, 8 aa, Artificial Sequence
  Peptide Derived from Human Papillomavirus
LPQLCTEL

SEQ ID NO: 16784 - protein, 10 aa, Artificial Sequence
  Peptide Derived from Human Papillomavirus
NPYAVCDKCL

SEQ ID NO: 16785 - protein, 8 aa, Artificial Sequence
  Peptide Derived from Human Papillomavirus
RPRKLPQL

SEQ ID NO: 16786 - protein, 9 aa, Artificial Sequence
  Peptide Derived from Human Papillomavirus
EPDRAHYNI

SEQ ID NO: 16787 - protein, 10 aa, Artificial Sequence
  Peptide Derived from Human Papillomavirus
EPDRAHYNIV

SEQ ID NO: 16788 - protein, 11 aa, Artificial Sequence
  Peptide Derived from Human Papillomavirus
GPAGQAEPDRA

SEQ ID NO: 16789 - protein, 8 aa, Artificial Sequence
  Peptide Derived from Human Papillomavirus
QPETTDLY

SEQ ID NO: 16790 - protein, 10 aa, Artificial Sequence
  Peptide Derived from Human Papillomavirus
QPETTDLYCY

SEQ ID NO: 16791 - protein, 8 aa, Artificial Sequence
  Peptide Derived from Human Papillomavirus
TPTLHEYM

SEQ ID NO: 16792 - protein, 9 aa, Artificial Sequence
  Peptide Derived from Human Papillomavirus
TPTLHEYML

SEQ ID NO: 16793 - protein, 11 aa, Artificial Sequence
  Peptide Derived from Human Papillomavirus
TPTLHEYMLDL

SEQ ID NO: 16794 - protein, 10 aa, Artificial Sequence
  Peptide Derived from Human Papillomavirus
APKEDPLKKY

SEQ ID NO: 16795 - protein, 10 aa, Artificial Sequence
  Peptide Derived from Human Papillomavirus
CPPLELINTV

SEQ ID NO: 16796 - protein, 11 aa, Artificial Sequence
  Peptide Derived from Human Papillomavirus
CPPLELINTVI

SEQ ID NO: 16797 - protein, 8 aa, Artificial Sequence
  Peptide Derived from Human Papillomavirus
DPLKKYTF

SEQ ID NO: 16798 - protein, 9 aa, Artificial Sequence
  Peptide Derived from Human Papillomavirus
DPLKKYTFW

SEQ ID NO: 16799 - protein, 11 aa, Artificial Sequence
  Peptide Derived from Human Papillomavirus
DPLKKYTFWEV

SEQ ID NO: 16800 - protein, 8 aa, Artificial Sequence
  Peptide Derived from Human Papillomavirus
EPYGDSLF

SEQ ID NO: 16801 - protein, 9 aa, Artificial Sequence
  Peptide Derived from Human Papillomavirus
EPYGDSLFF

SEQ ID NO: 16802 - protein, 10 aa, Artificial Sequence
  Peptide Derived from Human Papillomavirus
EPYGDSLFFY

SEQ ID NO: 16803 - protein, 11 aa, Artificial Sequence
  Peptide Derived from Human Papillomavirus
EPYGDSLFFYL

SEQ ID NO: 16804 - protein, 11 aa, Artificial Sequence
  Peptide Derived from Human Papillomavirus
FPIKKPNNNKI

SEQ ID NO: 16805 - protein, 8 aa, Artificial Sequence
  Peptide Derived from Human Papillomavirus
FPLGRKFL

SEQ ID NO: 16806 - protein, 9 aa, Artificial Sequence
  Peptide Derived from Human Papillomavirus
FPLGRKFLL

SEQ ID NO: 16807 - protein, 11 aa, Artificial Sequence
  Peptide Derived from Human Papillomavirus
FPLGRKFLLQA

SEQ ID NO: 16808 - protein, 8 aa, Artificial Sequence
  Peptide Derived from Human Papillomavirus
FPTPSGSM

SEQ ID NO: 16809 - protein, 9 aa, Artificial Sequence
  Peptide Derived from Human Papillomavirus
FPTPSGSMV

SEQ ID NO: 16810 - protein, 11 aa, Artificial Sequence
  Peptide Derived from Human Papillomavirus
KPKFTLGKRKA

SEQ ID NO: 16811 - protein, 8 aa, Artificial Sequence
  Peptide Derived from Human Papillomavirus
KPNNNKIL

SEQ ID NO: 16812 - protein, 9 aa, Artificial Sequence
  Peptide Derived from Human Papillomavirus
KPNNNKILV

SEQ ID NO: 16813 - protein, 8 aa, Artificial Sequence
  Peptide Derived from Human Papillomavirus
KPPIGEHW

SEQ ID NO: 16814 - protein, 8 aa, Artificial Sequence
  Peptide Derived from Human Papillomavirus
KPYWLQRA

SEQ ID NO: 16815 - protein, 9 aa, Artificial Sequence
  Peptide Derived from Human Papillomavirus
LPDPNKFGF

SEQ ID NO: 16816 - protein, 9 aa, Artificial Sequence
  Peptide Derived from Human Papillomavirus
LPPVPVSKV

SEQ ID NO: 16817 - protein, 10 aa, Artificial Sequence
  Peptide Derived from Human Papillomavirus
LPPVPVSKVV

SEQ ID NO: 16818 - protein, 8 aa, Artificial Sequence
  Peptide Derived from Human Papillomavirus
LPSEATVY

SEQ ID NO: 16819 - protein, 9 aa, Artificial Sequence
  Peptide Derived from Human Papillomavirus
LPSEATVYL

SEQ ID NO: 16820 - protein, 8 aa, Artificial Sequence
  Peptide Derived from Human Papillomavirus
NPDTQRLV

SEQ ID NO: 16821 - protein, 9 aa, Artificial Sequence
  Peptide Derived from Human Papillomavirus
NPDTQRLVW

SEQ ID NO: 16822 - protein, 10 aa, Artificial Sequence
  Peptide Derived from Human Papillomavirus
NPDTQRLVWA

SEQ ID NO: 16823 - protein, 8 aa, Artificial Sequence
  Peptide Derived from Human Papillomavirus
NPGDCPPL

SEQ ID NO: 16824 - protein, 10 aa, Artificial Sequence
  Peptide Derived from Human Papillomavirus
NPGDCPPLEL

SEQ ID NO: 16825 - protein, 11 aa, Artificial Sequence
  Peptide Derived from Human Papillomavirus
NPGDCPPLELI

SEQ ID NO: 16826 - protein, 9 aa, Artificial Sequence
  Peptide Derived from Human Papillomavirus
PPAPKEDPL

SEQ ID NO: 16827 - protein, 10 aa, Artificial Sequence
  Peptide Derived from Human Papillomavirus
PPGGTLEDTY

SEQ ID NO: 16828 - protein, 9 aa, Artificial Sequence
  Peptide Derived from Human Papillomavirus
PPLELINTV

SEQ ID NO: 16829 - protein, 10 aa, Artificial Sequence
  Peptide Derived from Human Papillomavirus
PPLELINTVI

SEQ ID NO: 16830 - protein, 11 aa, Artificial Sequence
  Peptide Derived from Human Papillomavirus
PPPGGTLEDTY

SEQ ID NO: 16831 - protein, 8 aa, Artificial Sequence
  Peptide Derived from Human Papillomavirus
PPVPVSKV

SEQ ID NO: 16832 - protein, 9 aa, Artificial Sequence
  Peptide Derived from Human Papillomavirus
PPVPVSKVV

SEQ ID NO: 16833 - protein, 8 aa, Artificial Sequence
  Peptide Derived from Human Papillomavirus
QPPPGGTL

SEQ ID NO: 16834 - protein, 8 aa, Artificial Sequence
  Peptide Derived from Human Papillomavirus
SPCTNVAV

SEQ ID NO: 16835 - protein, 10 aa, Artificial Sequence
  Peptide Derived from Human Papillomavirus
TPPAPKEDPL

SEQ ID NO: 16836 - protein, 11 aa, Artificial Sequence
  Peptide Derived from Human Papillomavirus
TPSGSMVTSDA

SEQ ID NO: 16837 - protein, 11 aa, Artificial Sequence
  Peptide Derived from Human Papillomavirus
TPTTSSTSTTA

SEQ ID NO: 16838 - protein, 9 aa, Artificial Sequence
  Peptide Derived from Human Papillomavirus
VPKVSGLQY

SEQ ID NO: 16839 - protein, 11 aa, Artificial Sequence
  Peptide Derived from Human Papillomavirus
VPKVSGLQYRV

SEQ ID NO: 16840 - protein, 9 aa, Artificial Sequence
  Peptide Derived from Human Papillomavirus
VPLDICTSI

SEQ ID NO: 16841 - protein, 8 aa, Artificial Sequence
  Peptide Derived from Human Papillomavirus
YPDYIKMV

SEQ ID NO: 16842 - protein, 9 aa, Artificial Sequence
  Peptide Derived from Human Papillomavirus
APDPDFLDI

SEQ ID NO: 16843 - protein, 10 aa, Artificial Sequence
  Peptide Derived from Human Papillomavirus
APDPDFLDIV

SEQ ID NO: 16844 - protein, 11 aa, Artificial Sequence
  Peptide Derived from Human Papillomavirus
APDPDFLDIVA

SEQ ID NO: 16845 - protein, 8 aa, Artificial Sequence
  Peptide Derived from Human Papillomavirus
APSLIPIV

SEQ ID NO: 16846 - protein, 8 aa, Artificial Sequence
  Peptide Derived from Human Papillomavirus
APTSVPSI

SEQ ID NO: 16847 - protein, 9 aa, Artificial Sequence
  Peptide Derived from Human Papillomavirus
APVRPPLTV

SEQ ID NO: 16848 - protein, 9 aa, Artificial Sequence
  Peptide Derived from Human Papillomavirus
CPPDIIPKV

SEQ ID NO: 16849 - protein, 11 aa, Artificial Sequence
  Peptide Derived from Human Papillomavirus
DPAFITTPTKL

SEQ ID NO: 16850 - protein, 8 aa, Artificial Sequence
  Peptide Derived from Human Papillomavirus
DPDFLDIV

SEQ ID NO: 16851 - protein, 9 aa, Artificial Sequence
  Peptide Derived from Human Papillomavirus
DPDFLDIVA

SEQ ID NO: 16852 - protein, 10 aa, Artificial Sequence
  Peptide Derived from Human Papillomavirus
DPDFLDIVAL

SEQ ID NO: 16853 - protein, 8 aa, Artificial Sequence
  Peptide Derived from Human Papillomavirus
DPSIVSLV

SEQ ID NO: 16854 - protein, 11 aa, Artificial Sequence
  Peptide Derived from Human Papillomavirus
DPSVLQPPTPA

SEQ ID NO: 16855 - protein, 10 aa, Artificial Sequence
  Peptide Derived from Human Papillomavirus
DPVGPSDPSI

SEQ ID NO: 16856 - protein, 11 aa, Artificial Sequence
  Peptide Derived from Human Papillomavirus
DPVGPSDPSIV

SEQ ID NO: 16857 - protein, 8 aa, Artificial Sequence
  Peptide Derived from Human Papillomavirus
GPDIPINI

SEQ ID NO: 16858 - protein, 8 aa, Artificial Sequence
  Peptide Derived from Human Papillomavirus
GPSDPSIV

SEQ ID NO: 16859 - protein, 10 aa, Artificial Sequence
  Peptide Derived from Human Papillomavirus
GPSDPSIVSL

SEQ ID NO: 16860 - protein, 11 aa, Artificial Sequence
  Peptide Derived from Human Papillomavirus
GPSDPSIVSLV

SEQ ID NO: 16861 - protein, 9 aa, Artificial Sequence
  Peptide Derived from Human Papillomavirus
IPANTTIPF

SEQ ID NO: 16862 - protein, 9 aa, Artificial Sequence
  Peptide Derived from Human Papillomavirus
IPFGGAYNI

SEQ ID NO: 16863 - protein, 11 aa, Artificial Sequence
  Peptide Derived from Human Papillomavirus
IPFGGAYNIPL

SEQ ID NO: 16864 - protein, 8 aa, Artificial Sequence
  Peptide Derived from Human Papillomavirus
IPGSRPVA

SEQ ID NO: 16865 - protein, 10 aa, Artificial Sequence
  Peptide Derived from Human Papillomavirus
IPGSRPVARL

SEQ ID NO: 16866 - protein, 9 aa, Artificial Sequence
  Peptide Derived from Human Papillomavirus
IPINITDQA

SEQ ID NO: 16867 - protein, 10 aa, Artificial Sequence
  Peptide Derived from Human Papillomavirus
IPIVPGSPQY

SEQ ID NO: 16868 - protein, 9 aa, Artificial Sequence
  Peptide Derived from Human Papillomavirus
IPKVEGKTI

SEQ ID NO: 16869 - protein, 10 aa, Artificial Sequence
  Peptide Derived from Human Papillomavirus
IPKVEGKTIA

SEQ ID NO: 16870 - protein, 10 aa, Artificial Sequence
  Peptide Derived from Human Papillomavirus
IPLGTRPPTA

SEQ ID NO: 16871 - protein, 9 aa, Artificial Sequence
  Peptide Derived from Human Papillomavirus
IPLVSGPDI

SEQ ID NO: 16872 - protein, 11 aa, Artificial Sequence
  Peptide Derived from Human Papillomavirus
IPLVSGPDIPI

SEQ ID NO: 16873 - protein, 8 aa, Artificial Sequence
  Peptide Derived from Human Papillomavirus
IPMDTFIV

SEQ ID NO: 16874 - protein, 8 aa, Artificial Sequence
  Peptide Derived from Human Papillomavirus
IPPDVSGF

SEQ ID NO: 16875 - protein, 10 aa, Artificial Sequence
  Peptide Derived from Human Papillomavirus
IPPDVSGFSI

SEQ ID NO: 16876 - protein, 9 aa, Artificial Sequence
  Peptide Derived from Human Papillomavirus
LPTSINNGL

SEQ ID NO: 16877 - protein, 10 aa, Artificial Sequence
  Peptide Derived from Human Papillomavirus
LPTSINNGLY

SEQ ID NO: 16878 - protein, 8 aa, Artificial Sequence
  Peptide Derived from Human Papillomavirus
LPYFFSDV

SEQ ID NO: 16879 - protein, 10 aa, Artificial Sequence
  Peptide Derived from Human Papillomavirus
LPYFFSDVSL

SEQ ID NO: 16880 - protein, 11 aa, Artificial Sequence
  Peptide Derived from Human Papillomavirus
LPYFFSDVSLA

SEQ ID NO: 16881 - protein, 9 aa, Artificial Sequence
  Peptide Derived from Human Papillomavirus
NPAYEGIDV

SEQ ID NO: 16882 - protein, 11 aa, Artificial Sequence
  Peptide Derived from Human Papillomavirus
NPNTVTSSTPI

SEQ ID NO: 16883 - protein, 9 aa, Artificial Sequence
  Peptide Derived from Human Papillomavirus
NPTFTDPSV

SEQ ID NO: 16884 - protein, 10 aa, Artificial Sequence
  Peptide Derived from Human Papillomavirus
NPTFTDPSVL

SEQ ID NO: 16885 - protein, 8 aa, Artificial Sequence
  Peptide Derived from Human Papillomavirus
PPDIIPKV

SEQ ID NO: 16886 - protein, 9 aa, Artificial Sequence
  Peptide Derived from Human Papillomavirus
PPDVSGFSI

SEQ ID NO: 16887 - protein, 8 aa, Artificial Sequence
  Peptide Derived from Human Papillomavirus
PPLTVDPV

SEQ ID NO: 16888 - protein, 8 aa, Artificial Sequence
  Peptide Derived from Human Papillomavirus
PPTATDTL

SEQ ID NO: 16889 - protein, 9 aa, Artificial Sequence
  Peptide Derived from Human Papillomavirus
PPTATDTLA

SEQ ID NO: 16890 - protein, 11 aa, Artificial Sequence
  Peptide Derived from Human Papillomavirus
PPTATDTLAPV

SEQ ID NO: 16891 - protein, 11 aa, Artificial Sequence
  Peptide Derived from Human Papillomavirus
PPTPAETGGHF

SEQ ID NO: 16892 - protein, 11 aa, Artificial Sequence
  Peptide Derived from Human Papillomavirus
RPALTSRRTGI

SEQ ID NO: 16893 - protein, 9 aa, Artificial Sequence
  Peptide Derived from Human Papillomavirus
RPPLTVDPV

SEQ ID NO: 16894 - protein, 9 aa, Artificial Sequence
  Peptide Derived from Human Papillomavirus
RPPTATDTL

SEQ ID NO: 16895 - protein, 10 aa, Artificial Sequence
  Peptide Derived from Human Papillomavirus
RPPTATDTLA

SEQ ID NO: 16896 - protein, 8 aa, Artificial Sequence
  Peptide Derived from Human Papillomavirus
RPVARLGL

SEQ ID NO: 16897 - protein, 9 aa, Artificial Sequence
  Peptide Derived from Human Papillomavirus
RPVARLGLY

SEQ ID NO: 16898 - protein, 8 aa, Artificial Sequence
  Peptide Derived from Human Papillomavirus
SPQYTIIA

SEQ ID NO: 16899 - protein, 10 aa, Artificial Sequence
  Peptide Derived from Human Papillomavirus
SPQYTIIADA

SEQ ID NO: 16900 - protein, 9 aa, Artificial Sequence
  Peptide Derived from Human Papillomavirus
TPAETGGHF

SEQ ID NO: 16901 - protein, 11 aa, Artificial Sequence
  Peptide Derived from Human Papillomavirus
TPAETGGHFTL

SEQ ID NO: 16902 - protein, 11 aa, Artificial Sequence
  Peptide Derived from Human Papillomavirus
TPAILDINNTV

SEQ ID NO: 16903 - protein, 9 aa, Artificial Sequence
  Peptide Derived from Human Papillomavirus
TPIPGSRPV

SEQ ID NO: 16904 - protein, 10 aa, Artificial Sequence
  Peptide Derived from Human Papillomavirus
TPIPGSRPVA

SEQ ID NO: 16905 - protein, 11 aa, Artificial Sequence
  Peptide Derived from Human Papillomavirus
TPSTYTTTSHA

SEQ ID NO: 16906 - protein, 8 aa, Artificial Sequence
  Peptide Derived from Human Papillomavirus
TPTKLITY

SEQ ID NO: 16907 - protein, 11 aa, Artificial Sequence
  Peptide Derived from Human Papillomavirus
TPVPSVPSTSL

SEQ ID NO: 16908 - protein, 9 aa, Artificial Sequence
  Peptide Derived from Human Papillomavirus
VPGSPQYTI

SEQ ID NO: 16909 - protein, 10 aa, Artificial Sequence
  Peptide Derived from Human Papillomavirus
VPGSPQYTII

SEQ ID NO: 16910 - protein, 11 aa, Artificial Sequence
  Peptide Derived from Human Papillomavirus
VPGSPQYTIIA

SEQ ID NO: 16911 - protein, 8 aa, Artificial Sequence
  Peptide Derived from Human Papillomavirus
VPSIPPDV

SEQ ID NO: 16912 - protein, 11 aa, Artificial Sequence
  Peptide Derived from Human Papillomavirus
VPSIPPDVSGF

SEQ ID NO: 16913 - protein, 9 aa, Artificial Sequence
  Peptide Derived from Human Papillomavirus
VPSTSLSGY

SEQ ID NO: 16914 - protein, 10 aa, Artificial Sequence
  Peptide Derived from Human Papillomavirus
VPSTSLSGYI

SEQ ID NO: 16915 - protein, 9 aa, Artificial Sequence
  Peptide Derived from Human Papillomavirus
VPSVPSTSL

SEQ ID NO: 16916 - protein, 10 aa, Artificial Sequence
  Peptide Derived from Human Papillomavirus
CPPILLTTNI

SEQ ID NO: 16917 - protein, 8 aa, Artificial Sequence
  Peptide Derived from Human Papillomavirus
EPLTDTKV

SEQ ID NO: 16918 - protein, 9 aa, Artificial Sequence
  Peptide Derived from Human Papillomavirus
EPLTDTKVA

SEQ ID NO: 16919 - protein, 10 aa, Artificial Sequence
  Peptide Derived from Human Papillomavirus
EPLTDTKVAM

SEQ ID NO: 16920 - protein, 11 aa, Artificial Sequence
  Peptide Derived from Human Papillomavirus
EPLTDTKVAML

SEQ ID NO: 16921 - protein, 10 aa, Artificial Sequence
  Peptide Derived from Human Papillomavirus
FPFDKNGNPV

SEQ ID NO: 16922 - protein, 11 aa, Artificial Sequence
  Peptide Derived from Human Papillomavirus
FPFDKNGNPVY

SEQ ID NO: 16923 - protein, 9 aa, Artificial Sequence
  Peptide Derived from Human Papillomavirus
GPANTGKSY

SEQ ID NO: 16924 - protein, 10 aa, Artificial Sequence
  Peptide Derived from Human Papillomavirus
GPANTGKSYF

SEQ ID NO: 16925 - protein, 8 aa, Artificial Sequence
  Peptide Derived from Human Papillomavirus
HPAKDNRW

SEQ ID NO: 16926 - protein, 10 aa, Artificial Sequence
  Peptide Derived from Human Papillomavirus
HPAKDNRWPY

SEQ ID NO: 16927 - protein, 11 aa, Artificial Sequence
  Peptide Derived from Human Papillomavirus
HPAKDNRWPYL

SEQ ID NO: 16928 - protein, 11 aa, Artificial Sequence
  Peptide Derived from Human Papillomavirus
KPLIQLKCPPI

SEQ ID NO: 16929 - protein, 8 aa, Artificial Sequence
  Peptide Derived from Human Papillomavirus
NPFGTFKL

SEQ ID NO: 16930 - protein, 10 aa, Artificial Sequence
  Peptide Derived from Human Papillomavirus
NPFGTFKLRA

SEQ ID NO: 16931 - protein, 9 aa, Artificial Sequence
  Peptide Derived from Human Papillomavirus
NPQCTIAQL

SEQ ID NO: 16932 - protein, 8 aa, Artificial Sequence
  Peptide Derived from Human Papillomavirus
NPTIAEGF

SEQ ID NO: 16933 - protein, 11 aa, Artificial Sequence
  Peptide Derived from Human Papillomavirus
NPTIAEGFKTL

SEQ ID NO: 16934 - protein, 11 aa, Artificial Sequence
  Peptide Derived from Human Papillomavirus
NPVYEINDKNW

SEQ ID NO: 16935 - protein, 9 aa, Artificial Sequence
  Peptide Derived from Human Papillomavirus
PPILLTTNI

SEQ ID NO: 16936 - protein, 8 aa, Artificial Sequence
  Peptide Derived from Human Papillomavirus
PPKLRSSV

SEQ ID NO: 16937 - protein, 9 aa, Artificial Sequence
  Peptide Derived from Human Papillomavirus
PPKLRSSVA

SEQ ID NO: 16938 - protein, 10 aa, Artificial Sequence
  Peptide Derived from Human Papillomavirus
PPKLRSSVAA

SEQ ID NO: 16939 - protein, 11 aa, Artificial Sequence
  Peptide Derived from Human Papillomavirus
PPKLRSSVAAL

SEQ ID NO: 16940 - protein, 9 aa, Artificial Sequence
  Peptide Derived from Human Papillomavirus
QPFILYAHI

SEQ ID NO: 16941 - protein, 9 aa, Artificial Sequence
  Peptide Derived from Human Papillomavirus
QPPKLRSSV

SEQ ID NO: 16942 - protein, 10 aa, Artificial Sequence
  Peptide Derived from Human Papillomavirus
QPPKLRSSVA

SEQ ID NO: 16943 - protein, 11 aa, Artificial Sequence
  Peptide Derived from Human Papillomavirus
QPPKLRSSVAA

SEQ ID NO: 16944 - protein, 9 aa, Artificial Sequence
  Peptide Derived from Human Papillomavirus
RPIVQFLRY

SEQ ID NO: 16945 - protein, 9 aa, Artificial Sequence
  Peptide Derived from Human Papillomavirus
SPLGERLEV

SEQ ID NO: 16946 - protein, 9 aa, Artificial Sequence
  Peptide Derived from Human Papillomavirus
SPRLQEISL

SEQ ID NO: 16947 - protein, 8 aa, Artificial Sequence
  Peptide Derived from Human Papillomavirus
TPEWIQRL

SEQ ID NO: 16948 - protein, 10 aa, Artificial Sequence
  Peptide Derived from Human Papillomavirus
TPEWIQRLTI

SEQ ID NO: 16949 - protein, 11 aa, Artificial Sequence
  Peptide Derived from Human Papillomavirus
TPEWIQRLTII

SEQ ID NO: 16950 - protein, 8 aa, Artificial Sequence
  Peptide Derived from Human Papillomavirus
TPKKNCLV

SEQ ID NO: 16951 - protein, 9 aa, Artificial Sequence
  Peptide Derived from Human Papillomavirus
TPKKNCLVF

SEQ ID NO: 16952 - protein, 8 aa, Artificial Sequence
  Peptide Derived from Human Papillomavirus
VPETCMLI

SEQ ID NO: 16953 - protein, 8 aa, Artificial Sequence
  Peptide Derived from Human Papillomavirus
WPYLESRI

SEQ ID NO: 16954 - protein, 10 aa, Artificial Sequence
  Peptide Derived from Human Papillomavirus
WPYLESRITV

SEQ ID NO: 16955 - protein, 11 aa, Artificial Sequence
  Peptide Derived from Human Papillomavirus
WPYLESRITVF

SEQ ID NO: 16956 - protein, 9 aa, Artificial Sequence
  Peptide Derived from Human Papillomavirus
GPVNPLLGA

SEQ ID NO: 16957 - protein, 10 aa, Artificial Sequence
  Peptide Derived from Human Papillomavirus
GPVNPLLGAA

SEQ ID NO: 16958 - protein, 8 aa, Artificial Sequence
  Peptide Derived from Human Papillomavirus
IPDSVQIL

SEQ ID NO: 16959 - protein, 9 aa, Artificial Sequence
  Peptide Derived from Human Papillomavirus
IPDSVQILV

SEQ ID NO: 16960 - protein, 11 aa, Artificial Sequence
  Peptide Derived from Human Papillomavirus
IPDSVQILVGY

SEQ ID NO: 16961 - protein, 8 aa, Artificial Sequence
  Peptide Derived from Human Papillomavirus
RPGHCGLA

SEQ ID NO: 16962 - protein, 9 aa, Artificial Sequence
  Peptide Derived from Human Papillomavirus
SPYSSTVSV

SEQ ID NO: 16963 - protein, 10 aa, Artificial Sequence
  Peptide Derived from Human Papillomavirus
TPKETLSERL

SEQ ID NO: 16964 - protein, 9 aa, Artificial Sequence
  Peptide Derived from Human Papillomavirus
TPSPYSSTV

SEQ ID NO: 16965 - protein, 11 aa, Artificial Sequence
  Peptide Derived from Human Papillomavirus
TPSPYSSTVSV

SEQ ID NO: 16966 - protein, 11 aa, Artificial Sequence
  Peptide Derived from Human Papillomavirus
TPTGNNKRRKL

SEQ ID NO: 16967 - protein, 11 aa, Artificial Sequence
  Peptide Derived from Human Papillomavirus
VPAYNISKSKA

SEQ ID NO: 16968 - protein, 8 aa, Artificial Sequence
  Peptide Derived from Human Papillomavirus
LPMLLLHI

SEQ ID NO: 16969 - protein, 10 aa, Artificial Sequence
  Peptide Derived from Human Papillomavirus
LPMLLLHIHA

SEQ ID NO: 16970 - protein, 11 aa, Artificial Sequence
  Peptide Derived from Human Papillomavirus
LPMLLLHIHAI

SEQ ID NO: 16971 - protein, 8 aa, Artificial Sequence
  Peptide Derived from Human Papillomavirus
LPSVCMCA

SEQ ID NO: 16972 - protein, 9 aa, Artificial Sequence
  Peptide Derived from Human Papillomavirus
LPSVCMCAY

SEQ ID NO: 16973 - protein, 10 aa, Artificial Sequence
  Peptide Derived from Human Papillomavirus
LPSVCMCAYA

SEQ ID NO: 16974 - protein, 11 aa, Artificial Sequence
  Peptide Derived from Human Papillomavirus
LPSVCMCAYAW

SEQ ID NO: 16975 - protein, 8 aa, Artificial Sequence
  Peptide Derived from Human Papillomavirus
SPATAFTV

SEQ ID NO: 16976 - protein, 9 aa, Artificial Sequence
  Peptide Derived from Human Papillomavirus
SPATAFTVY

SEQ ID NO: 16977 - protein, 10 aa, Artificial Sequence
  Peptide Derived from Human Papillomavirus
SPATAFTVYV

SEQ ID NO: 16978 - protein, 11 aa, Artificial Sequence
  Peptide Derived from Human Papillomavirus
SPATAFTVYVF

SEQ ID NO: 16979 - protein, 9 aa, Artificial Sequence
  Peptide Derived from Human Papillomavirus
VPLLPSVCM

SEQ ID NO: 16980 - protein, 11 aa, Artificial Sequence
  Peptide Derived from Human Papillomavirus
VPLLPSVCMCA

SEQ ID NO: 16981 - protein, 9 aa, Artificial Sequence
  Peptide Derived from Human Papillomavirus
DPTRRPYKL

SEQ ID NO: 16982 - protein, 10 aa, Artificial Sequence
  Peptide Derived from Human Papillomavirus
IPHAACHKCI

SEQ ID NO: 16983 - protein, 9 aa, Artificial Sequence
  Peptide Derived from Human Papillomavirus
KPLNPAEKL

SEQ ID NO: 16984 - protein, 8 aa, Artificial Sequence
  Peptide Derived from Human Papillomavirus
LPDLCTEL

SEQ ID NO: 16985 - protein, 9 aa, Artificial Sequence
  Peptide Derived from Human Papillomavirus
NPAEKLRHL

SEQ ID NO: 16986 - protein, 8 aa, Artificial Sequence
  Peptide Derived from Human Papillomavirus
RPYKLPDL

SEQ ID NO: 16987 - protein, 8 aa, Artificial Sequence
  Peptide Derived from Human Papillomavirus
EPQNEIPV

SEQ ID NO: 16988 - protein, 10 aa, Artificial Sequence
  Peptide Derived from Human Papillomavirus
EPQNEIPVDL

SEQ ID NO: 16989 - protein, 11 aa, Artificial Sequence
  Peptide Derived from Human Papillomavirus
EPQNEIPVDLL

SEQ ID NO: 16990 - protein, 8 aa, Artificial Sequence
  Peptide Derived from Human Papillomavirus
EPQRHTML

SEQ ID NO: 16991 - protein, 10 aa, Artificial Sequence
  Peptide Derived from Human Papillomavirus
EPQRHTMLCM

SEQ ID NO: 16992 - protein, 9 aa, Artificial Sequence
  Peptide Derived from Human Papillomavirus
GPKATLQDI

SEQ ID NO: 16993 - protein, 10 aa, Artificial Sequence
  Peptide Derived from Human Papillomavirus
GPKATLQDIV

SEQ ID NO: 16994 - protein, 11 aa, Artificial Sequence
  Peptide Derived from Human Papillomavirus
GPKATLQDIVL

SEQ ID NO: 16995 - protein, 11 aa, Artificial Sequence
  Peptide Derived from Human Papillomavirus
IPVDLLCHEQL

SEQ ID NO: 16996 - protein, 9 aa, Artificial Sequence
  Peptide Derived from Human Papillomavirus
APAENKDPY

SEQ ID NO: 16997 - protein, 8 aa, Artificial Sequence
  Peptide Derived from Human Papillomavirus
APAIGEHW

SEQ ID NO: 16998 - protein, 9 aa, Artificial Sequence
  Peptide Derived from Human Papillomavirus
APAIGEHWA

SEQ ID NO: 16999 - protein, 11 aa, Artificial Sequence
  Peptide Derived from Human Papillomavirus
APSATTSSKPA

SEQ ID NO: 17000 - protein, 10 aa, Artificial Sequence
  Peptide Derived from Human Papillomavirus
CPPLELKNTV

SEQ ID NO: 17001 - protein, 11 aa, Artificial Sequence
  Peptide Derived from Human Papillomavirus
CPPLELKNTVL

SEQ ID NO: 17002 - protein, 8 aa, Artificial Sequence
  Peptide Derived from Human Papillomavirus
DPYDKLKF

SEQ ID NO: 17003 - protein, 9 aa, Artificial Sequence
  Peptide Derived from Human Papillomavirus
DPYDKLKFW

SEQ ID NO: 17004 - protein, 11 aa, Artificial Sequence
  Peptide Derived from Human Papillomavirus
DPYDKLKFWNV

SEQ ID NO: 17005 - protein, 8 aa, Artificial Sequence
  Peptide Derived from Human Papillomavirus
DPYGDSMF

SEQ ID NO: 17006 - protein, 9 aa, Artificial Sequence
  Peptide Derived from Human Papillomavirus
DPYGDSMFF

SEQ ID NO: 17007 - protein, 11 aa, Artificial Sequence
  Peptide Derived from Human Papillomavirus
DPYGDSMFFCL

SEQ ID NO: 17008 - protein, 8 aa, Artificial Sequence
  Peptide Derived from Human Papillomavirus
FPIFLQMA

SEQ ID NO: 17009 - protein, 9 aa, Artificial Sequence
  Peptide Derived from Human Papillomavirus
FPIFLQMAL

SEQ ID NO: 17010 - protein, 10 aa, Artificial Sequence
  Peptide Derived from Human Papillomavirus
FPIFLQMALW

SEQ ID NO: 17011 - protein, 9 aa, Artificial Sequence
  Peptide Derived from Human Papillomavirus
GPLYHPRPL

SEQ ID NO: 17012 - protein, 11 aa, Artificial Sequence
  Peptide Derived from Human Papillomavirus
GPLYHPRPLPL

SEQ ID NO: 17013 - protein, 10 aa, Artificial Sequence
  Peptide Derived from Human Papillomavirus
GPRKRSAPSA

SEQ ID NO: 17014 - protein, 10 aa, Artificial Sequence
  Peptide Derived from Human Papillomavirus
HPRPLPLHSI

SEQ ID NO: 17015 - protein, 11 aa, Artificial Sequence
  Peptide Derived from Human Papillomavirus
HPRPLPLHSIL

SEQ ID NO: 17016 - protein, 9 aa, Artificial Sequence
  Peptide Derived from Human Papillomavirus
IPKVSAYQY

SEQ ID NO: 17017 - protein, 11 aa, Artificial Sequence
  Peptide Derived from Human Papillomavirus
IPKVSAYQYRV

SEQ ID NO: 17018 - protein, 8 aa, Artificial Sequence
  Peptide Derived from Human Papillomavirus
KPAKRVRV

SEQ ID NO: 17019 - protein, 10 aa, Artificial Sequence
  Peptide Derived from Human Papillomavirus
KPAKRVRVRA

SEQ ID NO: 17020 - protein, 11 aa, Artificial Sequence
  Peptide Derived from Human Papillomavirus
KPTIGPRKRSA

SEQ ID NO: 17021 - protein, 8 aa, Artificial Sequence
  Peptide Derived from Human Papillomavirus
KPYWLHKA

SEQ ID NO: 17022 - protein, 9 aa, Artificial Sequence
  Peptide Derived from Human Papillomavirus
LPDPNKFGL

SEQ ID NO: 17023 - protein, 8 aa, Artificial Sequence
  Peptide Derived from Human Papillomavirus
LPLHSILV

SEQ ID NO: 17024 - protein, 9 aa, Artificial Sequence
  Peptide Derived from Human Papillomavirus
LPLHSILVY

SEQ ID NO: 17025 - protein, 10 aa, Artificial Sequence
  Peptide Derived from Human Papillomavirus
LPLHSILVYM

SEQ ID NO: 17026 - protein, 11 aa, Artificial Sequence
  Peptide Derived from Human Papillomavirus
LPLHSILVYMV

SEQ ID NO: 17027 - protein, 8 aa, Artificial Sequence
  Peptide Derived from Human Papillomavirus
LPLYGPLY

SEQ ID NO: 17028 - protein, 9 aa, Artificial Sequence
  Peptide Derived from Human Papillomavirus
LPPPSVARV

SEQ ID NO: 17029 - protein, 10 aa, Artificial Sequence
  Peptide Derived from Human Papillomavirus
LPPPSVARVV

SEQ ID NO: 17030 - protein, 9 aa, Artificial Sequence
  Peptide Derived from Human Papillomavirus
MPASPGSCV

SEQ ID NO: 17031 - protein, 10 aa, Artificial Sequence
  Peptide Derived from Human Papillomavirus
MPASPGSCVY

SEQ ID NO: 17032 - protein, 8 aa, Artificial Sequence
  Peptide Derived from Human Papillomavirus
NPETQRLV

SEQ ID NO: 17033 - protein, 9 aa, Artificial Sequence
  Peptide Derived from Human Papillomavirus
NPETQRLVW

SEQ ID NO: 17034 - protein, 10 aa, Artificial Sequence
  Peptide Derived from Human Papillomavirus
NPETQRLVWA

SEQ ID NO: 17035 - protein, 8 aa, Artificial Sequence
  Peptide Derived from Human Papillomavirus
NPYFRVPA

SEQ ID NO: 17036 - protein, 9 aa, Artificial Sequence
  Peptide Derived from Human Papillomavirus
PPLELKNTV

SEQ ID NO: 17037 - protein, 10 aa, Artificial Sequence
  Peptide Derived from Human Papillomavirus
PPLELKNTVL

SEQ ID NO: 17038 - protein, 8 aa, Artificial Sequence
  Peptide Derived from Human Papillomavirus
PPPPTTSL

SEQ ID NO: 17039 - protein, 9 aa, Artificial Sequence
  Peptide Derived from Human Papillomavirus
PPPPTTSLV

SEQ ID NO: 17040 - protein, 8 aa, Artificial Sequence
  Peptide Derived from Human Papillomavirus
PPPSVARV

SEQ ID NO: 17041 - protein, 9 aa, Artificial Sequence
  Peptide Derived from Human Papillomavirus
PPPSVARVV

SEQ ID NO: 17042 - protein, 8 aa, Artificial Sequence
  Peptide Derived from Human Papillomavirus
PPPTTSLV

SEQ ID NO: 17043 - protein, 11 aa, Artificial Sequence
  Peptide Derived from Human Papillomavirus
PPPTTSLVDTY

SEQ ID NO: 17044 - protein, 8 aa, Artificial Sequence
  Peptide Derived from Human Papillomavirus
PPSVARVV

SEQ ID NO: 17045 - protein, 10 aa, Artificial Sequence
  Peptide Derived from Human Papillomavirus
PPTTSLVDTY

SEQ ID NO: 17046 - protein, 8 aa, Artificial Sequence
  Peptide Derived from Human Papillomavirus
RPLPLHSI

SEQ ID NO: 17047 - protein, 9 aa, Artificial Sequence
  Peptide Derived from Human Papillomavirus
RPLPLHSIL

SEQ ID NO: 17048 - protein, 10 aa, Artificial Sequence
  Peptide Derived from Human Papillomavirus
RPLPLHSILV

SEQ ID NO: 17049 - protein, 11 aa, Artificial Sequence
  Peptide Derived from Human Papillomavirus
RPLPLHSILVY

SEQ ID NO: 17050 - protein, 11 aa, Artificial Sequence
  Peptide Derived from Human Papillomavirus
RPLSQGDCPPL

SEQ ID NO: 17051 - protein, 8 aa, Artificial Sequence
  Peptide Derived from Human Papillomavirus
RPSDNTVY

SEQ ID NO: 17052 - protein, 9 aa, Artificial Sequence
  Peptide Derived from Human Papillomavirus
RPSDNTVYL

SEQ ID NO: 17053 - protein, 8 aa, Artificial Sequence
  Peptide Derived from Human Papillomavirus
SPSPSGSI

SEQ ID NO: 17054 - protein, 9 aa, Artificial Sequence
  Peptide Derived from Human Papillomavirus
SPSPSGSIV

SEQ ID NO: 17055 - protein, 9 aa, Artificial Sequence
  Peptide Derived from Human Papillomavirus
SPVPGQYDA

SEQ ID NO: 17056 - protein, 8 aa, Artificial Sequence
  Peptide Derived from Human Papillomavirus
TPSTNLTI

SEQ ID NO: 17057 - protein, 10 aa, Artificial Sequence
  Peptide Derived from Human Papillomavirus
TPSTNLTICA

SEQ ID NO: 17058 - protein, 9 aa, Artificial Sequence
  Peptide Derived from Human Papillomavirus
TPTSIFYHA

SEQ ID NO: 17059 - protein, 11 aa, Artificial Sequence
  Peptide Derived from Human Papillomavirus
VPAGGGNKQDI

SEQ ID NO: 17060 - protein, 10 aa, Artificial Sequence
  Peptide Derived from Human Papillomavirus
VPGQYDATKF

SEQ ID NO: 17061 - protein, 9 aa, Artificial Sequence
  Peptide Derived from Human Papillomavirus
VPLDICQSI

SEQ ID NO: 17062 - protein, 9 aa, Artificial Sequence
  Peptide Derived from Human Papillomavirus
VPPPPTTSL

SEQ ID NO: 17063 - protein, 10 aa, Artificial Sequence
  Peptide Derived from Human Papillomavirus
VPPPPTTSLV

SEQ ID NO: 17064 - protein, 9 aa, Artificial Sequence
  Peptide Derived from Human Papillomavirus
YPDYLQMSA

SEQ ID NO: 17065 - protein, 8 aa, Artificial Sequence
  Peptide Derived from Human Papillomavirus
YPLGRKFL

SEQ ID NO: 17066 - protein, 9 aa, Artificial Sequence
  Peptide Derived from Human Papillomavirus
YPLGRKFLV

SEQ ID NO: 17067 - protein, 11 aa, Artificial Sequence
  Peptide Derived from Human Papillomavirus
YPLGRKFLVQA

SEQ ID NO: 17068 - protein, 8 aa, Artificial Sequence
  Peptide Derived from Human Papillomavirus
APASTQYI

SEQ ID NO: 17069 - protein, 10 aa, Artificial Sequence
  Peptide Derived from Human Papillomavirus
APASTQYIGI

SEQ ID NO: 17070 - protein, 9 aa, Artificial Sequence
  Peptide Derived from Human Papillomavirus
APSPEYIEL

SEQ ID NO: 17071 - protein, 9 aa, Artificial Sequence
  Peptide Derived from Human Papillomavirus
CPPDVVPKV

SEQ ID NO: 17072 - protein, 11 aa, Artificial Sequence
  Peptide Derived from Human Papillomavirus
DPRSDVPDSDF

SEQ ID NO: 17073 - protein, 8 aa, Artificial Sequence
  Peptide Derived from Human Papillomavirus
DPSIVTLI

SEQ ID NO: 17074 - protein, 8 aa, Artificial Sequence
  Peptide Derived from Human Papillomavirus
EPISSTPL

SEQ ID NO: 17075 - protein, 11 aa, Artificial Sequence
  Peptide Derived from Human Papillomavirus
EPISSTPLPTV

SEQ ID NO: 17076 - protein, 9 aa, Artificial Sequence
  Peptide Derived from Human Papillomavirus
EPVDTTLTF

SEQ ID NO: 17077 - protein, 10 aa, Artificial Sequence
  Peptide Derived from Human Papillomavirus
EPVGPTDPSI

SEQ ID NO: 17078 - protein, 11 aa, Artificial Sequence
  Peptide Derived from Human Papillomavirus
EPVGPTDPSIV

SEQ ID NO: 17079 - protein, 8 aa, Artificial Sequence
  Peptide Derived from Human Papillomavirus
GPRLYSRA

SEQ ID NO: 17080 - protein, 9 aa, Artificial Sequence
  Peptide Derived from Human Papillomavirus
GPRLYSRAY

SEQ ID NO: 17081 - protein, 8 aa, Artificial Sequence
  Peptide Derived from Human Papillomavirus
GPTDPSIV

SEQ ID NO: 17082 - protein, 10 aa, Artificial Sequence
  Peptide Derived from Human Papillomavirus
GPTDPSIVTL

SEQ ID NO: 17083 - protein, 11 aa, Artificial Sequence
  Peptide Derived from Human Papillomavirus
GPTDPSIVTLI

SEQ ID NO: 17084 - protein, 8 aa, Artificial Sequence
  Peptide Derived from Human Papillomavirus
GPTRPPVV

SEQ ID NO: 17085 - protein, 9 aa, Artificial Sequence
  Peptide Derived from Human Papillomavirus
GPTRPPVVI

SEQ ID NO: 17086 - protein, 8 aa, Artificial Sequence
  Peptide Derived from Human Papillomavirus
IPKKRKRV

SEQ ID NO: 17087 - protein, 10 aa, Artificial Sequence
  Peptide Derived from Human Papillomavirus
IPKKRKRVPY

SEQ ID NO: 17088 - protein, 11 aa, Artificial Sequence
  Peptide Derived from Human Papillomavirus
IPKKRKRVPYF

SEQ ID NO: 17089 - protein, 10 aa, Artificial Sequence
  Peptide Derived from Human Papillomavirus
IPLGGRSNTV

SEQ ID NO: 17090 - protein, 11 aa, Artificial Sequence
  Peptide Derived from Human Papillomavirus
IPLGGRSNTVV

SEQ ID NO: 17091 - protein, 8 aa, Artificial Sequence
  Peptide Derived from Human Papillomavirus
LPSTTSVW

SEQ ID NO: 17092 - protein, 10 aa, Artificial Sequence
  Peptide Derived from Human Papillomavirus
LPSTTSVWPI

SEQ ID NO: 17093 - protein, 11 aa, Artificial Sequence
  Peptide Derived from Human Papillomavirus
LPSTTSVWPIV

SEQ ID NO: 17094 - protein, 8 aa, Artificial Sequence
  Peptide Derived from Human Papillomavirus
LPTVRRVA

SEQ ID NO: 17095 - protein, 11 aa, Artificial Sequence
  Peptide Derived from Human Papillomavirus
NPAFEPVDTTL

SEQ ID NO: 17096 - protein, 9 aa, Artificial Sequence
  Peptide Derived from Human Papillomavirus
NPAFSDPSI

SEQ ID NO: 17097 - protein, 10 aa, Artificial Sequence
  Peptide Derived from Human Papillomavirus
NPAFSDPSII

SEQ ID NO: 17098 - protein, 11 aa, Artificial Sequence
  Peptide Derived from Human Papillomavirus
NPEFLTRPSSL

SEQ ID NO: 17099 - protein, 8 aa, Artificial Sequence
  Peptide Derived from Human Papillomavirus
PPDVVPKV

SEQ ID NO: 17100 - protein, 8 aa, Artificial Sequence
  Peptide Derived from Human Papillomavirus
PPVVIEPV

SEQ ID NO: 17101 - protein, 11 aa, Artificial Sequence
  Peptide Derived from Human Papillomavirus
RPALTSRRGTV

SEQ ID NO: 17102 - protein, 9 aa, Artificial Sequence
  Peptide Derived from Human Papillomavirus
RPPVVIEPV

SEQ ID NO: 17103 - protein, 8 aa, Artificial Sequence
  Peptide Derived from Human Papillomavirus
RPSSLITY

SEQ ID NO: 17104 - protein, 10 aa, Artificial Sequence
  Peptide Derived from Human Papillomavirus
RPTFTGTSGF

SEQ ID NO: 17105 - protein, 10 aa, Artificial Sequence
  Peptide Derived from Human Papillomavirus
SPEYIELQPL

SEQ ID NO: 17106 - protein, 11 aa, Artificial Sequence
  Peptide Derived from Human Papillomavirus
SPEYIELQPLV

SEQ ID NO: 17107 - protein, 9 aa, Artificial Sequence
  Peptide Derived from Human Papillomavirus
SPIAPSPEY

SEQ ID NO: 17108 - protein, 10 aa, Artificial Sequence
  Peptide Derived from Human Papillomavirus
SPIAPSPEYI

SEQ ID NO: 17109 - protein, 10 aa, Artificial Sequence
  Peptide Derived from Human Papillomavirus
SPTAPASTQY

SEQ ID NO: 17110 - protein, 11 aa, Artificial Sequence
  Peptide Derived from Human Papillomavirus
SPTAPASTQYI

SEQ ID NO: 17111 - protein, 10 aa, Artificial Sequence
  Peptide Derived from Human Papillomavirus
SPTISSASSY

SEQ ID NO: 17112 - protein, 9 aa, Artificial Sequence
  Peptide Derived from Human Papillomavirus
TPLPTVRRV

SEQ ID NO: 17113 - protein, 10 aa, Artificial Sequence
  Peptide Derived from Human Papillomavirus
TPLPTVRRVA

SEQ ID NO: 17114 - protein, 9 aa, Artificial Sequence
  Peptide Derived from Human Papillomavirus
TPSSTSVSI

SEQ ID NO: 17115 - protein, 9 aa, Artificial Sequence
  Peptide Derived from Human Papillomavirus
TPTSGTHGY

SEQ ID NO: 17116 - protein, 9 aa, Artificial Sequence
  Peptide Derived from Human Papillomavirus
VPDSDFMDI

SEQ ID NO: 17117 - protein, 10 aa, Artificial Sequence
  Peptide Derived from Human Papillomavirus
VPDSDFMDII

SEQ ID NO: 17118 - protein, 9 aa, Artificial Sequence
  Peptide Derived from Human Papillomavirus
VPKVEGTTL

SEQ ID NO: 17119 - protein, 10 aa, Artificial Sequence
  Peptide Derived from Human Papillomavirus
VPKVEGTTLA

SEQ ID NO: 17120 - protein, 9 aa, Artificial Sequence
  Peptide Derived from Human Papillomavirus
VPLTSSWDV

SEQ ID NO: 17121 - protein, 11 aa, Artificial Sequence
  Peptide Derived from Human Papillomavirus
VPLTSSWDVPV

SEQ ID NO: 17122 - protein, 8 aa, Artificial Sequence
  Peptide Derived from Human Papillomavirus
VPQTGEVA

SEQ ID NO: 17123 - protein, 11 aa, Artificial Sequence
  Peptide Derived from Human Papillomavirus
VPQTGEVAGNV

SEQ ID NO: 17124 - protein, 9 aa, Artificial Sequence
  Peptide Derived from Human Papillomavirus
VPSRSTTSF

SEQ ID NO: 17125 - protein, 10 aa, Artificial Sequence
  Peptide Derived from Human Papillomavirus
VPSRSTTSFA

SEQ ID NO: 17126 - protein, 11 aa, Artificial Sequence
  Peptide Derived from Human Papillomavirus
VPSRSTTSFAF

SEQ ID NO: 17127 - protein, 11 aa, Artificial Sequence
  Peptide Derived from Human Papillomavirus
VPVPSRSTTSF

SEQ ID NO: 17128 - protein, 9 aa, Artificial Sequence
  Peptide Derived from Human Papillomavirus
VPVYTGPDI

SEQ ID NO: 17129 - protein, 11 aa, Artificial Sequence
  Peptide Derived from Human Papillomavirus
VPVYTGPDITL

SEQ ID NO: 17130 - protein, 9 aa, Artificial Sequence
  Peptide Derived from Human Papillomavirus
VPYFFADGF

SEQ ID NO: 17131 - protein, 10 aa, Artificial Sequence
  Peptide Derived from Human Papillomavirus
VPYFFADGFV

SEQ ID NO: 17132 - protein, 11 aa, Artificial Sequence
  Peptide Derived from Human Papillomavirus
VPYFFADGFVA

SEQ ID NO: 17133 - protein, 8 aa, Artificial Sequence
  Peptide Derived from Human Papillomavirus
WPIVSPTA

SEQ ID NO: 17134 - protein, 10 aa, Artificial Sequence
  Peptide Derived from Human Papillomavirus
WPIVSPTAPA

SEQ ID NO: 17135 - protein, 8 aa, Artificial Sequence
  Peptide Derived from Human Papillomavirus
APNTGKSY

SEQ ID NO: 17136 - protein, 9 aa, Artificial Sequence
  Peptide Derived from Human Papillomavirus
APNTGKSYF

SEQ ID NO: 17137 - protein, 11 aa, Artificial Sequence
  Peptide Derived from Human Papillomavirus
APNTGKSYFGM

SEQ ID NO: 17138 - protein, 10 aa, Artificial Sequence
  Peptide Derived from Human Papillomavirus
CPPLLITSNI

SEQ ID NO: 17139 - protein, 10 aa, Artificial Sequence
  Peptide Derived from Human Papillomavirus
FPFDKNGNPV

SEQ ID NO: 17140 - protein, 11 aa, Artificial Sequence
  Peptide Derived from Human Papillomavirus
FPFDKNGNPVY

SEQ ID NO: 17141 - protein, 11 aa, Artificial Sequence
  Peptide Derived from Human Papillomavirus
LPDSGYGNTEV

SEQ ID NO: 17142 - protein, 11 aa, Artificial Sequence
  Peptide Derived from Human Papillomavirus
NPVSIDVKHKA

SEQ ID NO: 17143 - protein, 11 aa, Artificial Sequence
  Peptide Derived from Human Papillomavirus
NPVYELSDKNW

SEQ ID NO: 17144 - protein, 8 aa, Artificial Sequence
  Peptide Derived from Human Papillomavirus
PPKLRSTA

SEQ ID NO: 17145 - protein, 9 aa, Artificial Sequence
  Peptide Derived from Human Papillomavirus
PPKLRSTAA

SEQ ID NO: 17146 - protein, 10 aa, Artificial Sequence
  Peptide Derived from Human Papillomavirus
PPKLRSTAAA

SEQ ID NO: 17147 - protein, 11 aa, Artificial Sequence
  Peptide Derived from Human Papillomavirus
PPKLRSTAAAL

SEQ ID NO: 17148 - protein, 9 aa, Artificial Sequence
  Peptide Derived from Human Papillomavirus
PPLLITSNI

SEQ ID NO: 17149 - protein, 11 aa, Artificial Sequence
  Peptide Derived from Human Papillomavirus
PPLLITSNINA

SEQ ID NO: 17150 - protein, 8 aa, Artificial Sequence
  Peptide Derived from Human Papillomavirus
QPLADAKI

SEQ ID NO: 17151 - protein, 10 aa, Artificial Sequence
  Peptide Derived from Human Papillomavirus
QPLADAKIGM

SEQ ID NO: 17152 - protein, 11 aa, Artificial Sequence
  Peptide Derived from Human Papillomavirus
QPLADAKIGML

SEQ ID NO: 17153 - protein, 9 aa, Artificial Sequence
  Peptide Derived from Human Papillomavirus
QPPKLRSTA

SEQ ID NO: 17154 - protein, 10 aa, Artificial Sequence
  Peptide Derived from Human Papillomavirus
QPPKLRSTAA

SEQ ID NO: 17155 - protein, 11 aa, Artificial Sequence
  Peptide Derived from Human Papillomavirus
QPPKLRSTAAA

SEQ ID NO: 17156 - protein, 9 aa, Artificial Sequence
  Peptide Derived from Human Papillomavirus
QPYCLYCHL

SEQ ID NO: 17157 - protein, 10 aa, Artificial Sequence
  Peptide Derived from Human Papillomavirus
SPLSDISSCV

SEQ ID NO: 17158 - protein, 9 aa, Artificial Sequence
  Peptide Derived from Human Papillomavirus
SPRLKAICI

SEQ ID NO: 17159 - protein, 10 aa, Artificial Sequence
  Peptide Derived from Human Papillomavirus
TPCWHYIDNY

SEQ ID NO: 17160 - protein, 11 aa, Artificial Sequence
  Peptide Derived from Human Papillomavirus
TPCWHYIDNYL

SEQ ID NO: 17161 - protein, 10 aa, Artificial Sequence
  Peptide Derived from Human Papillomavirus
TPEWIERQTV

SEQ ID NO: 17162 - protein, 11 aa, Artificial Sequence
  Peptide Derived from Human Papillomavirus
TPEWIERQTVL

SEQ ID NO: 17163 - protein, 9 aa, Artificial Sequence
  Peptide Derived from Human Papillomavirus
TPTRNILQV

SEQ ID NO: 17164 - protein, 10 aa, Artificial Sequence
  Peptide Derived from Human Papillomavirus
TPTRNILQVL

SEQ ID NO: 17165 - protein, 8 aa, Artificial Sequence
  Peptide Derived from Human Papillomavirus
VPKKNCIL

SEQ ID NO: 17166 - protein, 9 aa, Artificial Sequence
  Peptide Derived from Human Papillomavirus
VPKKNCILI

SEQ ID NO: 17167 - protein, 8 aa, Artificial Sequence
  Peptide Derived from Human Papillomavirus
WPYLHSRL

SEQ ID NO: 17168 - protein, 9 aa, Artificial Sequence
  Peptide Derived from Human Papillomavirus
WPYLHSRLV

SEQ ID NO: 17169 - protein, 10 aa, Artificial Sequence
  Peptide Derived from Human Papillomavirus
WPYLHSRLVV

SEQ ID NO: 17170 - protein, 11 aa, Artificial Sequence
  Peptide Derived from Human Papillomavirus
WPYLHSRLVVF

SEQ ID NO: 17171 - protein, 11 aa, Artificial Sequence
  Peptide Derived from Human Papillomavirus
APTGCLKKHGY

SEQ ID NO: 17172 - protein, 8 aa, Artificial Sequence
  Peptide Derived from Human Papillomavirus
CPATTPII

SEQ ID NO: 17173 - protein, 10 aa, Artificial Sequence
  Peptide Derived from Human Papillomavirus
CPATTPIIHL

SEQ ID NO: 17174 - protein, 11 aa, Artificial Sequence
  Peptide Derived from Human Papillomavirus
FPESVFSSDEI

SEQ ID NO: 17175 - protein, 11 aa, Artificial Sequence
  Peptide Derived from Human Papillomavirus
HPNKLLRGDSV

SEQ ID NO: 17176 - protein, 11 aa, Artificial Sequence
  Peptide Derived from Human Papillomavirus
IPNTVSVSTGY

SEQ ID NO: 17177 - protein, 10 aa, Artificial Sequence
  Peptide Derived from Human Papillomavirus
TPIIHLKGDA

SEQ ID NO: 17178 - protein, 9 aa, Artificial Sequence
  Peptide Derived from Human Papillomavirus
VPALSVSKA

SEQ ID NO: 17179 - protein, 11 aa, Artificial Sequence
  Peptide Derived from Human Papillomavirus
VPALSVSKAKA

SEQ ID NO: 17180 - protein, 10 aa, Artificial Sequence
  Peptide Derived from Human Papillomavirus
IPLFVIHTHA

SEQ ID NO: 17181 - protein, 9 aa, Artificial Sequence
  Peptide Derived from Human Papillomavirus
RPLVLSVSV

SEQ ID NO: 17182 - protein, 10 aa, Artificial Sequence
  Peptide Derived from Human Papillomavirus
RPLVLSVSVY

SEQ ID NO: 17183 - protein, 11 aa, Artificial Sequence
  Peptide Derived from Human Papillomavirus
RPLVLSVSVYA

SEQ ID NO: 17184 - protein, 8 aa, Artificial Sequence
  Peptide Derived from Human Papillomavirus
SPLRCFCI

SEQ ID NO: 17185 - protein, 9 aa, Artificial Sequence
  Peptide Derived from Human Papillomavirus
SPLRCFCIY

SEQ ID NO: 17186 - protein, 10 aa, Artificial Sequence
  Peptide Derived from Human Papillomavirus
SPLRCFCIYV

SEQ ID NO: 17187 - protein, 11 aa, Artificial Sequence
  Peptide Derived from Human Papillomavirus
SPLRCFCIYVV

SEQ ID NO: 17188 - protein, 9 aa, Artificial Sequence
  Peptide Derived from Human Papillomavirus
CPEEKQRHL

SEQ ID NO: 17189 - protein, 8 aa, Artificial Sequence
  Peptide Derived from Human Papillomavirus
IPYDELRL

SEQ ID NO: 17190 - protein, 11 aa, Artificial Sequence
  Peptide Derived from Human Papillomavirus
IPYDELRLNCV

SEQ ID NO: 17191 - protein, 9 aa, Artificial Sequence
  Peptide Derived from Human Papillomavirus
NPAERPRKL

SEQ ID NO: 17192 - protein, 8 aa, Artificial Sequence
  Peptide Derived from Human Papillomavirus
RPRKLHEL

SEQ ID NO: 17193 - protein, 11 aa, Artificial Sequence
  Peptide Derived from Human Papillomavirus
RPRKLHELSSA

SEQ ID NO: 17194 - protein, 8 aa, Artificial Sequence
  Peptide Derived from Human Papillomavirus
RPRTETQV

SEQ ID NO: 17195 - protein, 10 aa, Artificial Sequence
  Peptide Derived from Human Papillomavirus
TPHGVCTKCL

SEQ ID NO: 17196 - protein, 8 aa, Artificial Sequence
  Peptide Derived from Human Papillomavirus
CPNCSTRL

SEQ ID NO: 17197 - protein, 9 aa, Artificial Sequence
  Peptide Derived from Human Papillomavirus
EPDTSNYNI

SEQ ID NO: 17198 - protein, 10 aa, Artificial Sequence
  Peptide Derived from Human Papillomavirus
EPDTSNYNIV

SEQ ID NO: 17199 - protein, 10 aa, Artificial Sequence
  Peptide Derived from Human Papillomavirus
LPDSSDEEDV

SEQ ID NO: 17200 - protein, 11 aa, Artificial Sequence
  Peptide Derived from Human Papillomavirus
LPDSSDEEDVI

SEQ ID NO: 17201 - protein, 10 aa, Artificial Sequence
  Peptide Derived from Human Papillomavirus
QPEATDLHCY

SEQ ID NO: 17202 - protein, 8 aa, Artificial Sequence
  Peptide Derived from Human Papillomavirus
TPTLQDYV

SEQ ID NO: 17203 - protein, 9 aa, Artificial Sequence
  Peptide Derived from Human Papillomavirus
TPTLQDYVL

SEQ ID NO: 17204 - protein, 11 aa, Artificial Sequence
  Peptide Derived from Human Papillomavirus
TPTLQDYVLDL

SEQ ID NO: 17205 - protein, 10 aa, Artificial Sequence
  Peptide Derived from Human Papillomavirus
APQKPKEDPF

SEQ ID NO: 17206 - protein, 10 aa, Artificial Sequence
  Peptide Derived from Human Papillomavirus
APSASTTTPA

SEQ ID NO: 17207 - protein, 10 aa, Artificial Sequence
  Peptide Derived from Human Papillomavirus
CPPLELKNSV

SEQ ID NO: 17208 - protein, 11 aa, Artificial Sequence
  Peptide Derived from Human Papillomavirus
CPPLELKNSVI

SEQ ID NO: 17209 - protein, 8 aa, Artificial Sequence
  Peptide Derived from Human Papillomavirus
DPFKDYVF

SEQ ID NO: 17210 - protein, 9 aa, Artificial Sequence
  Peptide Derived from Human Papillomavirus
DPFKDYVFW

SEQ ID NO: 17211 - protein, 11 aa, Artificial Sequence
  Peptide Derived from Human Papillomavirus
DPFKDYVFWEV

SEQ ID NO: 17212 - protein, 8 aa, Artificial Sequence
  Peptide Derived from Human Papillomavirus
EPYGDTLF

SEQ ID NO: 17213 - protein, 9 aa, Artificial Sequence
  Peptide Derived from Human Papillomavirus
EPYGDTLFF

SEQ ID NO: 17214 - protein, 10 aa, Artificial Sequence
  Peptide Derived from Human Papillomavirus
EPYGDTLFFY

SEQ ID NO: 17215 - protein, 11 aa, Artificial Sequence
  Peptide Derived from Human Papillomavirus
EPYGDTLFFYL

SEQ ID NO: 17216 - protein, 8 aa, Artificial Sequence
  Peptide Derived from Human Papillomavirus
FPLGRKFL

SEQ ID NO: 17217 - protein, 9 aa, Artificial Sequence
  Peptide Derived from Human Papillomavirus
FPLGRKFLL

SEQ ID NO: 17218 - protein, 11 aa, Artificial Sequence
  Peptide Derived from Human Papillomavirus
FPLGRKFLLQA

SEQ ID NO: 17219 - protein, 8 aa, Artificial Sequence
  Peptide Derived from Human Papillomavirus
FPTPSGSM

SEQ ID NO: 17220 - protein, 9 aa, Artificial Sequence
  Peptide Derived from Human Papillomavirus
FPTPSGSMV

SEQ ID NO: 17221 - protein, 10 aa, Artificial Sequence
  Peptide Derived from Human Papillomavirus
GPGTDNRECI

SEQ ID NO: 17222 - protein, 10 aa, Artificial Sequence
  Peptide Derived from Human Papillomavirus
IPKSDNPKKI

SEQ ID NO: 17223 - protein, 11 aa, Artificial Sequence
  Peptide Derived from Human Papillomavirus
IPKSDNPKKIV

SEQ ID NO: 17224 - protein, 10 aa, Artificial Sequence
  Peptide Derived from Human Papillomavirus
KPKEDPFKDY

SEQ ID NO: 17225 - protein, 11 aa, Artificial Sequence
  Peptide Derived from Human Papillomavirus
KPKEDPFKDYV

SEQ ID NO: 17226 - protein, 8 aa, Artificial Sequence
  Peptide Derived from Human Papillomavirus
KPPIGEHW

SEQ ID NO: 17227 - protein, 8 aa, Artificial Sequence
  Peptide Derived from Human Papillomavirus
KPYWMQRA

SEQ ID NO: 17228 - protein, 9 aa, Artificial Sequence
  Peptide Derived from Human Papillomavirus
LPDPNKFGF

SEQ ID NO: 17229 - protein, 9 aa, Artificial Sequence
  Peptide Derived from Human Papillomavirus
LPPVPVSKV

SEQ ID NO: 17230 - protein, 10 aa, Artificial Sequence
  Peptide Derived from Human Papillomavirus
LPPVPVSKVV

SEQ ID NO: 17231 - protein, 8 aa, Artificial Sequence
  Peptide Derived from Human Papillomavirus
NPAILEDW

SEQ ID NO: 17232 - protein, 10 aa, Artificial Sequence
  Peptide Derived from Human Papillomavirus
NPAILEDWNF

SEQ ID NO: 17233 - protein, 8 aa, Artificial Sequence
  Peptide Derived from Human Papillomavirus
NPETQRLV

SEQ ID NO: 17234 - protein, 9 aa, Artificial Sequence
  Peptide Derived from Human Papillomavirus
NPETQRLVW

SEQ ID NO: 17235 - protein, 10 aa, Artificial Sequence
  Peptide Derived from Human Papillomavirus
NPETQRLVWA

SEQ ID NO: 17236 - protein, 10 aa, Artificial Sequence
  Peptide Derived from Human Papillomavirus
NPKKIVVPKV

SEQ ID NO: 17237 - protein, 9 aa, Artificial Sequence
  Peptide Derived from Human Papillomavirus
PPLELKNSV

SEQ ID NO: 17238 - protein, 10 aa, Artificial Sequence
  Peptide Derived from Human Papillomavirus
PPLELKNSVI

SEQ ID NO: 17239 - protein, 10 aa, Artificial Sequence
  Peptide Derived from Human Papillomavirus
PPSGSLEDTY

SEQ ID NO: 17240 - protein, 8 aa, Artificial Sequence
  Peptide Derived from Human Papillomavirus
PPVPVSKV

SEQ ID NO: 17241 - protein, 9 aa, Artificial Sequence
  Peptide Derived from Human Papillomavirus
PPVPVSKVV

SEQ ID NO: 17242 - protein, 11 aa, Artificial Sequence
  Peptide Derived from Human Papillomavirus
RPKFKAGKRSA

SEQ ID NO: 17243 - protein, 8 aa, Artificial Sequence
  Peptide Derived from Human Papillomavirus
RPSEATVY

SEQ ID NO: 17244 - protein, 9 aa, Artificial Sequence
  Peptide Derived from Human Papillomavirus
RPSEATVYL

SEQ ID NO: 17245 - protein, 8 aa, Artificial Sequence
  Peptide Derived from Human Papillomavirus
SPCSNNAI

SEQ ID NO: 17246 - protein, 8 aa, Artificial Sequence
  Peptide Derived from Human Papillomavirus
TPGDCPPL

SEQ ID NO: 17247 - protein, 10 aa, Artificial Sequence
  Peptide Derived from Human Papillomavirus
TPGDCPPLEL

SEQ ID NO: 17248 - protein, 11 aa, Artificial Sequence
  Peptide Derived from Human Papillomavirus
TPPSGSLEDTY

SEQ ID NO: 17249 - protein, 11 aa, Artificial Sequence
  Peptide Derived from Human Papillomavirus
TPSGSMVTSDA

SEQ ID NO: 17250 - protein, 9 aa, Artificial Sequence
  Peptide Derived from Human Papillomavirus
VPKVSGLQY

SEQ ID NO: 17251 - protein, 11 aa, Artificial Sequence
  Peptide Derived from Human Papillomavirus
VPKVSGLQYRV

SEQ ID NO: 17252 - protein, 9 aa, Artificial Sequence
  Peptide Derived from Human Papillomavirus
VPLDICNSI

SEQ ID NO: 17253 - protein, 8 aa, Artificial Sequence
  Peptide Derived from Human Papillomavirus
YPDYLKMV

SEQ ID NO: 17254 - protein, 9 aa, Artificial Sequence
  Peptide Derived from Human Papillomavirus
YPDYLKMVA

SEQ ID NO: 17255 - protein, 9 aa, Artificial Sequence
  Peptide Derived from Human Papillomavirus
APDPDFLDI

SEQ ID NO: 17256 - protein, 10 aa, Artificial Sequence
  Peptide Derived from Human Papillomavirus
APDPDFLDII

SEQ ID NO: 17257 - protein, 11 aa, Artificial Sequence
  Peptide Derived from Human Papillomavirus
APDPDFLDIIA

SEQ ID NO: 17258 - protein, 8 aa, Artificial Sequence
  Peptide Derived from Human Papillomavirus
APKQLITY

SEQ ID NO: 17259 - protein, 8 aa, Artificial Sequence
  Peptide Derived from Human Papillomavirus
APTQVFPF

SEQ ID NO: 17260 - protein, 10 aa, Artificial Sequence
  Peptide Derived from Human Papillomavirus
APTQVFPFPL

SEQ ID NO: 17261 - protein, 11 aa, Artificial Sequence
  Peptide Derived from Human Papillomavirus
APTQVFPFPLA

SEQ ID NO: 17262 - protein, 9 aa, Artificial Sequence
  Peptide Derived from Human Papillomavirus
APTTPQVSI

SEQ ID NO: 17263 - protein, 10 aa, Artificial Sequence
  Peptide Derived from Human Papillomavirus
APTTPQVSIF

SEQ ID NO: 17264 - protein, 11 aa, Artificial Sequence
  Peptide Derived from Human Papillomavirus
APTTPQVSIFV

SEQ ID NO: 17265 - protein, 9 aa, Artificial Sequence
  Peptide Derived from Human Papillomavirus
CPSDVIPKI

SEQ ID NO: 17266 - protein, 8 aa, Artificial Sequence
  Peptide Derived from Human Papillomavirus
DPDFLDII

SEQ ID NO: 17267 - protein, 9 aa, Artificial Sequence
  Peptide Derived from Human Papillomavirus
DPDFLDIIA

SEQ ID NO: 17268 - protein, 10 aa, Artificial Sequence
  Peptide Derived from Human Papillomavirus
DPDFLDIIAL

SEQ ID NO: 17269 - protein, 8 aa, Artificial Sequence
  Peptide Derived from Human Papillomavirus
DPSIVSLV

SEQ ID NO: 17270 - protein, 11 aa, Artificial Sequence
  Peptide Derived from Human Papillomavirus
DPSVLQPPTPA

SEQ ID NO: 17271 - protein, 11 aa, Artificial Sequence
  Peptide Derived from Human Papillomavirus
DPTFLSAPKQL

SEQ ID NO: 17272 - protein, 10 aa, Artificial Sequence
  Peptide Derived from Human Papillomavirus
DPVGPLDPSI

SEQ ID NO: 17273 - protein, 11 aa, Artificial Sequence
  Peptide Derived from Human Papillomavirus
DPVGPLDPSIV

SEQ ID NO: 17274 - protein, 10 aa, Artificial Sequence
  Peptide Derived from Human Papillomavirus
FPLAPTTPQV

SEQ ID NO: 17275 - protein, 9 aa, Artificial Sequence
  Peptide Derived from Human Papillomavirus
GPDVPIEHA

SEQ ID NO: 17276 - protein, 8 aa, Artificial Sequence
  Peptide Derived from Human Papillomavirus
GPLDPSIV

SEQ ID NO: 17277 - protein, 10 aa, Artificial Sequence
  Peptide Derived from Human Papillomavirus
GPLDPSIVSL

SEQ ID NO: 17278 - protein, 11 aa, Artificial Sequence
  Peptide Derived from Human Papillomavirus
GPLDPSIVSLV

SEQ ID NO: 17279 - protein, 8 aa, Artificial Sequence
  Peptide Derived from Human Papillomavirus
HPPTTSGF

SEQ ID NO: 17280 - protein, 10 aa, Artificial Sequence
  Peptide Derived from Human Papillomavirus
HPPTTSGFDI

SEQ ID NO: 17281 - protein, 11 aa, Artificial Sequence
  Peptide Derived from Human Papillomavirus
HPPTTSGFDIA

SEQ ID NO: 17282 - protein, 8 aa, Artificial Sequence
  Peptide Derived from Human Papillomavirus
IPGVRRPA

SEQ ID NO: 17283 - protein, 10 aa, Artificial Sequence
  Peptide Derived from Human Papillomavirus
IPGVRRPARL

SEQ ID NO: 17284 - protein, 10 aa, Artificial Sequence
  Peptide Derived from Human Papillomavirus
IPHPPTTSGF

SEQ ID NO: 17285 - protein, 9 aa, Artificial Sequence
  Peptide Derived from Human Papillomavirus
IPIFSGPDV

SEQ ID NO: 17286 - protein, 11 aa, Artificial Sequence
  Peptide Derived from Human Papillomavirus
IPIFSGPDVPI

SEQ ID NO: 17287 - protein, 9 aa, Artificial Sequence
  Peptide Derived from Human Papillomavirus
IPIRPPVSI

SEQ ID NO: 17288 - protein, 9 aa, Artificial Sequence
  Peptide Derived from Human Papillomavirus
IPKIEHTTI

SEQ ID NO: 17289 - protein, 10 aa, Artificial Sequence
  Peptide Derived from Human Papillomavirus
IPKIEHTTIA

SEQ ID NO: 17290 - protein, 8 aa, Artificial Sequence
  Peptide Derived from Human Papillomavirus
IPMDTFIV

SEQ ID NO: 17291 - protein, 9 aa, Artificial Sequence
  Peptide Derived from Human Papillomavirus
NPAGESIEM

SEQ ID NO: 17292 - protein, 9 aa, Artificial Sequence
  Peptide Derived from Human Papillomavirus
NPAYETVNA

SEQ ID NO: 17293 - protein, 9 aa, Artificial Sequence
  Peptide Derived from Human Papillomavirus
NPTFTDPSV

SEQ ID NO: 17294 - protein, 10 aa, Artificial Sequence
  Peptide Derived from Human Papillomavirus
NPTFTDPSVL

SEQ ID NO: 17295 - protein, 11 aa, Artificial Sequence
  Peptide Derived from Human Papillomavirus
PPTPAETSGHL

SEQ ID NO: 17296 - protein, 9 aa, Artificial Sequence
  Peptide Derived from Human Papillomavirus
PPTTSGFDI

SEQ ID NO: 17297 - protein, 10 aa, Artificial Sequence
  Peptide Derived from Human Papillomavirus
PPTTSGFDIA

SEQ ID NO: 17298 - protein, 8 aa, Artificial Sequence
  Peptide Derived from Human Papillomavirus
PPVSIDPV

SEQ ID NO: 17299 - protein, 11 aa, Artificial Sequence
  Peptide Derived from Human Papillomavirus
PPVSIDPVGPL

SEQ ID NO: 17300 - protein, 11 aa, Artificial Sequence
  Peptide Derived from Human Papillomavirus
RPALTSRRNTV

SEQ ID NO: 17301 - protein, 8 aa, Artificial Sequence
  Peptide Derived from Human Papillomavirus
RPARLGLY

SEQ ID NO: 17302 - protein, 11 aa, Artificial Sequence
  Peptide Derived from Human Papillomavirus
RPARLGLYSKA

SEQ ID NO: 17303 - protein, 9 aa, Artificial Sequence
  Peptide Derived from Human Papillomavirus
RPPVSIDPV

SEQ ID NO: 17304 - protein, 8 aa, Artificial Sequence
  Peptide Derived from Human Papillomavirus
RPSTVSEA

SEQ ID NO: 17305 - protein, 10 aa, Artificial Sequence
  Peptide Derived from Human Papillomavirus
RPSTVSEASI

SEQ ID NO: 17306 - protein, 11 aa, Artificial Sequence
  Peptide Derived from Human Papillomavirus
SPSTAVQSTSA

SEQ ID NO: 17307 - protein, 9 aa, Artificial Sequence
  Peptide Derived from Human Papillomavirus
TPAETSGHL

SEQ ID NO: 17308 - protein, 10 aa, Artificial Sequence
  Peptide Derived from Human Papillomavirus
TPAETSGHLL

SEQ ID NO: 17309 - protein, 11 aa, Artificial Sequence
  Peptide Derived from Human Papillomavirus
TPAETSGHLLL

SEQ ID NO: 17310 - protein, 10 aa, Artificial Sequence
  Peptide Derived from Human Papillomavirus
TPAILDVTSV

SEQ ID NO: 17311 - protein, 10 aa, Artificial Sequence
  Peptide Derived from Human Papillomavirus
TPIPGVRRPA

SEQ ID NO: 17312 - protein, 8 aa, Artificial Sequence
  Peptide Derived from Human Papillomavirus
TPQVSIFV

SEQ ID NO: 17313 - protein, 10 aa, Artificial Sequence
  Peptide Derived from Human Papillomavirus
VPIEHAPTQV

SEQ ID NO: 17314 - protein, 11 aa, Artificial Sequence
  Peptide Derived from Human Papillomavirus
VPIEHAPTQVF

SEQ ID NO: 17315 - protein, 9 aa, Artificial Sequence
  Peptide Derived from Human Papillomavirus
VPLSTGFDI

SEQ ID NO: 17316 - protein, 11 aa, Artificial Sequence
  Peptide Derived from Human Papillomavirus
VPLSTGFDIPI

SEQ ID NO: 17317 - protein, 10 aa, Artificial Sequence
  Peptide Derived from Human Papillomavirus
VPLSTRPSTV

SEQ ID NO: 17318 - protein, 9 aa, Artificial Sequence
  Peptide Derived from Human Papillomavirus
VPTNTTVPL

SEQ ID NO: 17319 - protein, 8 aa, Artificial Sequence
  Peptide Derived from Human Papillomavirus
DPEGTNGA

SEQ ID NO: 17320 - protein, 10 aa, Artificial Sequence
  Peptide Derived from Human Papillomavirus
DPEGTNGAGM

SEQ ID NO: 17321 - protein, 11 aa, Artificial Sequence
  Peptide Derived from Human Papillomavirus
EPPKLRSQTCA

SEQ ID NO: 17322 - protein, 10 aa, Artificial Sequence
  Peptide Derived from Human Papillomavirus
FPFDENGNPV

SEQ ID NO: 17323 - protein, 11 aa, Artificial Sequence
  Peptide Derived from Human Papillomavirus
FPFDENGNPVY

SEQ ID NO: 17324 - protein, 9 aa, Artificial Sequence
  Peptide Derived from Human Papillomavirus
GPANTGKSY

SEQ ID NO: 17325 - protein, 10 aa, Artificial Sequence
  Peptide Derived from Human Papillomavirus
GPANTGKSYF

SEQ ID NO: 17326 - protein, 8 aa, Artificial Sequence
  Peptide Derived from Human Papillomavirus
IPETCMVI

SEQ ID NO: 17327 - protein, 8 aa, Artificial Sequence
  Peptide Derived from Human Papillomavirus
IPKKSCML

SEQ ID NO: 17328 - protein, 9 aa, Artificial Sequence
  Peptide Derived from Human Papillomavirus
IPKKSCMLI

SEQ ID NO: 17329 - protein, 11 aa, Artificial Sequence
  Peptide Derived from Human Papillomavirus
NPVYAINDENW

SEQ ID NO: 17330 - protein, 10 aa, Artificial Sequence
  Peptide Derived from Human Papillomavirus
PPKLRSQTCA

SEQ ID NO: 17331 - protein, 11 aa, Artificial Sequence
  Peptide Derived from Human Papillomavirus
PPKLRSQTCAL

SEQ ID NO: 17332 - protein, 11 aa, Artificial Sequence
  Peptide Derived from Human Papillomavirus
PPLLLTSNTNA

SEQ ID NO: 17333 - protein, 8 aa, Artificial Sequence
  Peptide Derived from Human Papillomavirus
QPLSDAKI

SEQ ID NO: 17334 - protein, 10 aa, Artificial Sequence
  Peptide Derived from Human Papillomavirus
QPLSDAKIGM

SEQ ID NO: 17335 - protein, 11 aa, Artificial Sequence
  Peptide Derived from Human Papillomavirus
QPLSDAKIGMI

SEQ ID NO: 17336 - protein, 9 aa, Artificial Sequence
  Peptide Derived from Human Papillomavirus
RPIVQLLRY

SEQ ID NO: 17337 - protein, 8 aa, Artificial Sequence
  Peptide Derived from Human Papillomavirus
SPSVAESL

SEQ ID NO: 17338 - protein, 10 aa, Artificial Sequence
  Peptide Derived from Human Papillomavirus
SPSVAESLKV

SEQ ID NO: 17339 - protein, 11 aa, Artificial Sequence
  Peptide Derived from Human Papillomavirus
SPSVAESLKVL

SEQ ID NO: 17340 - protein, 8 aa, Artificial Sequence
  Peptide Derived from Human Papillomavirus
TPEWIDRL

SEQ ID NO: 17341 - protein, 10 aa, Artificial Sequence
  Peptide Derived from Human Papillomavirus
TPEWIDRLTV

SEQ ID NO: 17342 - protein, 11 aa, Artificial Sequence
  Peptide Derived from Human Papillomavirus
TPEWIDRLTVL

SEQ ID NO: 17343 - protein, 8 aa, Artificial Sequence
  Peptide Derived from Human Papillomavirus
TPISWTYI

SEQ ID NO: 17344 - protein, 11 aa, Artificial Sequence
  Peptide Derived from Human Papillomavirus
TPISWTYIDDY

SEQ ID NO: 17345 - protein, 8 aa, Artificial Sequence
  Peptide Derived from Human Papillomavirus
WPYLHSRL

SEQ ID NO: 17346 - protein, 10 aa, Artificial Sequence
  Peptide Derived from Human Papillomavirus
WPYLHSRLTV

SEQ ID NO: 17347 - protein, 11 aa, Artificial Sequence
  Peptide Derived from Human Papillomavirus
WPYLHSRLTVF

SEQ ID NO: 17348 - protein, 10 aa, Artificial Sequence
  Peptide Derived from Human Papillomavirus
CPTSISSNQI

SEQ ID NO: 17349 - protein, 9 aa, Artificial Sequence
  Peptide Derived from Human Papillomavirus
DPALDNRTA

SEQ ID NO: 17350 - protein, 11 aa, Artificial Sequence
  Peptide Derived from Human Papillomavirus
IPPTVQISTGF

SEQ ID NO: 17351 - protein, 10 aa, Artificial Sequence
  Peptide Derived from Human Papillomavirus
KPYKELYSSM

SEQ ID NO: 17352 - protein, 8 aa, Artificial Sequence
  Peptide Derived from Human Papillomavirus
LPSQIEHW

SEQ ID NO: 17353 - protein, 10 aa, Artificial Sequence
  Peptide Derived from Human Papillomavirus
LPSQIEHWKL

SEQ ID NO: 17354 - protein, 11 aa, Artificial Sequence
  Peptide Derived from Human Papillomavirus
LPSQIEHWKLI

SEQ ID NO: 17355 - protein, 10 aa, Artificial Sequence
  Peptide Derived from Human Papillomavirus
PPTVQISTGF

SEQ ID NO: 17356 - protein, 11 aa, Artificial Sequence
  Peptide Derived from Human Papillomavirus
PPTVQISTGFM

SEQ ID NO: 17357 - protein, 9 aa, Artificial Sequence
  Peptide Derived from Human Papillomavirus
QPLTKLFCA

SEQ ID NO: 17358 - protein, 9 aa, Artificial Sequence
  Peptide Derived from Human Papillomavirus
RPADTTDTA

SEQ ID NO: 17359 - protein, 11 aa, Artificial Sequence
  Peptide Derived from Human Papillomavirus
VPSLLASKTKA

SEQ ID NO: 17360 - protein, 8 aa, Artificial Sequence
  Peptide Derived from Human Papillomavirus
LPMMCINF

SEQ ID NO: 17361 - protein, 10 aa, Artificial Sequence
  Peptide Derived from Human Papillomavirus
LPMMCINFHA

SEQ ID NO: 17362 - protein, 10 aa, Artificial Sequence
  Peptide Derived from Human Papillomavirus
RPLILSISTY

SEQ ID NO: 17363 - protein, 11 aa, Artificial Sequence
  Peptide Derived from Human Papillomavirus
RPLILSISTYA

SEQ ID NO: 17364 - protein, 9 aa, Artificial Sequence
  Peptide Derived from Human Papillomavirus
SPLKIFFCY

SEQ ID NO: 17365 - protein, 10 aa, Artificial Sequence
  Peptide Derived from Human Papillomavirus
SPLKIFFCYL

SEQ ID NO: 17366 - protein, 11 aa, Artificial Sequence
  Peptide Derived from Human Papillomavirus
SPLKIFFCYLL

SEQ ID NO: 17367 - protein, 9 aa, Artificial Sequence
  Peptide Derived from Human Papillomavirus
CPQEKKRHV

SEQ ID NO: 17368 - protein, 11 aa, Artificial Sequence
  Peptide Derived from Human Papillomavirus
CPQEKKRHVDL

SEQ ID NO: 17369 - protein, 8 aa, Artificial Sequence
  Peptide Derived from Human Papillomavirus
KPLNEILI

SEQ ID NO: 17370 - protein, 11 aa, Artificial Sequence
  Peptide Derived from Human Papillomavirus
KPLNEILIRCI

SEQ ID NO: 17371 - protein, 8 aa, Artificial Sequence
  Peptide Derived from Human Papillomavirus
KPLQRSEV

SEQ ID NO: 17372 - protein, 9 aa, Artificial Sequence
  Peptide Derived from Human Papillomavirus
KPLQRSEVY

SEQ ID NO: 17373 - protein, 11 aa, Artificial Sequence
  Peptide Derived from Human Papillomavirus
KPLQRSEVYDF

SEQ ID NO: 17374 - protein, 8 aa, Artificial Sequence
  Peptide Derived from Human Papillomavirus
KPRTLHDL

SEQ ID NO: 17375 - protein, 11 aa, Artificial Sequence
  Peptide Derived from Human Papillomavirus
KPRTLHDLCQA

SEQ ID NO: 17376 - protein, 8 aa, Artificial Sequence
  Peptide Derived from Human Papillomavirus
NPFGICKL

SEQ ID NO: 17377 - protein, 10 aa, Artificial Sequence
  Peptide Derived from Human Papillomavirus
NPFGICKLCL

SEQ ID NO: 17378 - protein, 8 aa, Artificial Sequence
  Peptide Derived from Human Papillomavirus
EPTDLYCY

SEQ ID NO: 17379 - protein, 11 aa, Artificial Sequence
  Peptide Derived from Human Papillomavirus
EPTDLYCYEQL

SEQ ID NO: 17380 - protein, 8 aa, Artificial Sequence
  Peptide Derived from Human Papillomavirus
KPTLKEYV

SEQ ID NO: 17381 - protein, 9 aa, Artificial Sequence
  Peptide Derived from Human Papillomavirus
KPTLKEYVL

SEQ ID NO: 17382 - protein, 11 aa, Artificial Sequence
  Peptide Derived from Human Papillomavirus
KPTLKEYVLDL

SEQ ID NO: 17383 - protein, 8 aa, Artificial Sequence
  Peptide Derived from Human Papillomavirus
QPATADYY

SEQ ID NO: 17384 - protein, 9 aa, Artificial Sequence
  Peptide Derived from Human Papillomavirus
QPATADYYI

SEQ ID NO: 17385 - protein, 10 aa, Artificial Sequence
  Peptide Derived from Human Papillomavirus
QPATADYYIV

SEQ ID NO: 17386 - protein, 9 aa, Artificial Sequence
  Peptide Derived from Human Papillomavirus
RPDGQAQPA

SEQ ID NO: 17387 - protein, 11 aa, Artificial Sequence
  Peptide Derived from Human Papillomavirus
RPDGQAQPATA

SEQ ID NO: 17388 - protein, 8 aa, Artificial Sequence
  Peptide Derived from Human Papillomavirus
YPEPTDLY

SEQ ID NO: 17389 - protein, 10 aa, Artificial Sequence
  Peptide Derived from Human Papillomavirus
YPEPTDLYCY

SEQ ID NO: 17390 - protein, 9 aa, Artificial Sequence
  Peptide Derived from Human Papillomavirus
APANDCPPL

SEQ ID NO: 17391 - protein, 11 aa, Artificial Sequence
  Peptide Derived from Human Papillomavirus
APANDCPPLEL

SEQ ID NO: 17392 - protein, 10 aa, Artificial Sequence
  Peptide Derived from Human Papillomavirus
APTSTRTSSA

SEQ ID NO: 17393 - protein, 10 aa, Artificial Sequence
  Peptide Derived from Human Papillomavirus
CPPLELINTI

SEQ ID NO: 17394 - protein, 11 aa, Artificial Sequence
  Peptide Derived from Human Papillomavirus
CPPLELINTII

SEQ ID NO: 17395 - protein, 8 aa, Artificial Sequence
  Peptide Derived from Human Papillomavirus
DPLGKYTF

SEQ ID NO: 17396 - protein, 9 aa, Artificial Sequence
  Peptide Derived from Human Papillomavirus
DPLGKYTFW

SEQ ID NO: 17397 - protein, 11 aa, Artificial Sequence
  Peptide Derived from Human Papillomavirus
DPLGKYTFWEV

SEQ ID NO: 17398 - protein, 8 aa, Artificial Sequence
  Peptide Derived from Human Papillomavirus
EPYGDSLF

SEQ ID NO: 17399 - protein, 9 aa, Artificial Sequence
  Peptide Derived from Human Papillomavirus
EPYGDSLFF

SEQ ID NO: 17400 - protein, 10 aa, Artificial Sequence
  Peptide Derived from Human Papillomavirus
EPYGDSLFFF

SEQ ID NO: 17401 - protein, 11 aa, Artificial Sequence
  Peptide Derived from Human Papillomavirus
EPYGDSLFFFL

SEQ ID NO: 17402 - protein, 8 aa, Artificial Sequence
  Peptide Derived from Human Papillomavirus
FPLGRKFL

SEQ ID NO: 17403 - protein, 9 aa, Artificial Sequence
  Peptide Derived from Human Papillomavirus
FPLGRKFLL

SEQ ID NO: 17404 - protein, 11 aa, Artificial Sequence
  Peptide Derived from Human Papillomavirus
FPLGRKFLLQA

SEQ ID NO: 17405 - protein, 8 aa, Artificial Sequence
  Peptide Derived from Human Papillomavirus
FPTPSGSM

SEQ ID NO: 17406 - protein, 9 aa, Artificial Sequence
  Peptide Derived from Human Papillomavirus
FPTPSGSMV

SEQ ID NO: 17407 - protein, 8 aa, Artificial Sequence
  Peptide Derived from Human Papillomavirus
KPKLKRAA

SEQ ID NO: 17408 - protein, 8 aa, Artificial Sequence
  Peptide Derived from Human Papillomavirus
KPPTGEHW

SEQ ID NO: 17409 - protein, 8 aa, Artificial Sequence
  Peptide Derived from Human Papillomavirus
KPYWLQRA

SEQ ID NO: 17410 - protein, 9 aa, Artificial Sequence
  Peptide Derived from Human Papillomavirus
LPDPNKFGF

SEQ ID NO: 17411 - protein, 9 aa, Artificial Sequence
  Peptide Derived from Human Papillomavirus
LPPVPVSKV

SEQ ID NO: 17412 - protein, 10 aa, Artificial Sequence
  Peptide Derived from Human Papillomavirus
LPPVPVSKVV

SEQ ID NO: 17413 - protein, 8 aa, Artificial Sequence
  Peptide Derived from Human Papillomavirus
NPDILEDW

SEQ ID NO: 17414 - protein, 10 aa, Artificial Sequence
  Peptide Derived from Human Papillomavirus
NPDILEDWQF

SEQ ID NO: 17415 - protein, 8 aa, Artificial Sequence
  Peptide Derived from Human Papillomavirus
NPDTQRLV

SEQ ID NO: 17416 - protein, 9 aa, Artificial Sequence
  Peptide Derived from Human Papillomavirus
NPDTQRLVW

SEQ ID NO: 17417 - protein, 10 aa, Artificial Sequence
  Peptide Derived from Human Papillomavirus
NPDTQRLVWA

SEQ ID NO: 17418 - protein, 8 aa, Artificial Sequence
  Peptide Derived from Human Papillomavirus
NPTNAKKL

SEQ ID NO: 17419 - protein, 9 aa, Artificial Sequence
  Peptide Derived from Human Papillomavirus
NPTNAKKLL

SEQ ID NO: 17420 - protein, 10 aa, Artificial Sequence
  Peptide Derived from Human Papillomavirus
NPTNAKKLLV

SEQ ID NO: 17421 - protein, 9 aa, Artificial Sequence
  Peptide Derived from Human Papillomavirus
PPKEKEDPL

SEQ ID NO: 17422 - protein, 9 aa, Artificial Sequence
  Peptide Derived from Human Papillomavirus
PPLELINTI

SEQ ID NO: 17423 - protein, 10 aa, Artificial Sequence
  Peptide Derived from Human Papillomavirus
PPLELINTII

SEQ ID NO: 17424 - protein, 11 aa, Artificial Sequence
  Peptide Derived from Human Papillomavirus
PPPSASLQDTY

SEQ ID NO: 17425 - protein, 10 aa, Artificial Sequence
  Peptide Derived from Human Papillomavirus
PPSASLQDTY

SEQ ID NO: 17426 - protein, 11 aa, Artificial Sequence
  Peptide Derived from Human Papillomavirus
PPTGEHWGKGV

SEQ ID NO: 17427 - protein, 8 aa, Artificial Sequence
  Peptide Derived from Human Papillomavirus
PPVPVSKV

SEQ ID NO: 17428 - protein, 9 aa, Artificial Sequence
  Peptide Derived from Human Papillomavirus
PPVPVSKVV

SEQ ID NO: 17429 - protein, 10 aa, Artificial Sequence
  Peptide Derived from Human Papillomavirus
QPGADNRECL

SEQ ID NO: 17430 - protein, 8 aa, Artificial Sequence
  Peptide Derived from Human Papillomavirus
RPSEATVY

SEQ ID NO: 17431 - protein, 9 aa, Artificial Sequence
  Peptide Derived from Human Papillomavirus
RPSEATVYL

SEQ ID NO: 17432 - protein, 8 aa, Artificial Sequence
  Peptide Derived from Human Papillomavirus
TPPPSASL

SEQ ID NO: 17433 - protein, 9 aa, Artificial Sequence
  Peptide Derived from Human Papillomavirus
VPKVSGLQY

SEQ ID NO: 17434 - protein, 11 aa, Artificial Sequence
  Peptide Derived from Human Papillomavirus
VPKVSGLQYRV

SEQ ID NO: 17435 - protein, 10 aa, Artificial Sequence
  Peptide Derived from Human Papillomavirus
VPPKEKEDPL

SEQ ID NO: 17436 - protein, 9 aa, Artificial Sequence
  Peptide Derived from Human Papillomavirus
APAEASGHF

SEQ ID NO: 17437 - protein, 10 aa, Artificial Sequence
  Peptide Derived from Human Papillomavirus
APAEASGHFI

SEQ ID NO: 17438 - protein, 11 aa, Artificial Sequence
  Peptide Derived from Human Papillomavirus
APAEASGHFIF

SEQ ID NO: 17439 - protein, 9 aa, Artificial Sequence
  Peptide Derived from Human Papillomavirus
APDPDFLDI

SEQ ID NO: 17440 - protein, 10 aa, Artificial Sequence
  Peptide Derived from Human Papillomavirus
APDPDFLDII

SEQ ID NO: 17441 - protein, 11 aa, Artificial Sequence
  Peptide Derived from Human Papillomavirus
APDPDFLDIIA

SEQ ID NO: 17442 - protein, 10 aa, Artificial Sequence
  Peptide Derived from Human Papillomavirus
APSIPTPSGF

SEQ ID NO: 17443 - protein, 9 aa, Artificial Sequence
  Peptide Derived from Human Papillomavirus
CPPDVIPKV

SEQ ID NO: 17444 - protein, 11 aa, Artificial Sequence
  Peptide Derived from Human Papillomavirus
DPAFLTSPHKL

SEQ ID NO: 17445 - protein, 8 aa, Artificial Sequence
  Peptide Derived from Human Papillomavirus
DPDFLDII

SEQ ID NO: 17446 - protein, 9 aa, Artificial Sequence
  Peptide Derived from Human Papillomavirus
DPDFLDIIA

SEQ ID NO: 17447 - protein, 10 aa, Artificial Sequence
  Peptide Derived from Human Papillomavirus
DPDFLDIIAL

SEQ ID NO: 17448 - protein, 8 aa, Artificial Sequence
  Peptide Derived from Human Papillomavirus
DPEDTLQF

SEQ ID NO: 17449 - protein, 9 aa, Artificial Sequence
  Peptide Derived from Human Papillomavirus
DPPTAAIPL

SEQ ID NO: 17450 - protein, 9 aa, Artificial Sequence
  Peptide Derived from Human Papillomavirus
EPSVLHPPA

SEQ ID NO: 17451 - protein, 11 aa, Artificial Sequence
  Peptide Derived from Human Papillomavirus
EPSVLHPPAPA

SEQ ID NO: 17452 - protein, 8 aa, Artificial Sequence
  Peptide Derived from Human Papillomavirus
FPFDTIVV

SEQ ID NO: 17453 - protein, 11 aa, Artificial Sequence
  Peptide Derived from Human Papillomavirus
FPFDTIVVDGA

SEQ ID NO: 17454 - protein, 8 aa, Artificial Sequence
  Peptide Derived from Human Papillomavirus
FPTSSPFV

SEQ ID NO: 17455 - protein, 10 aa, Artificial Sequence
  Peptide Derived from Human Papillomavirus
FPTSSPFVPI

SEQ ID NO: 17456 - protein, 8 aa, Artificial Sequence
  Peptide Derived from Human Papillomavirus
FPYFFTDV

SEQ ID NO: 17457 - protein, 10 aa, Artificial Sequence
  Peptide Derived from Human Papillomavirus
FPYFFTDVRV

SEQ ID NO: 17458 - protein, 11 aa, Artificial Sequence
  Peptide Derived from Human Papillomavirus
FPYFFTDVRVA

SEQ ID NO: 17459 - protein, 8 aa, Artificial Sequence
  Peptide Derived from Human Papillomavirus
GPDIPSPL

SEQ ID NO: 17460 - protein, 9 aa, Artificial Sequence
  Peptide Derived from Human Papillomavirus
GPDIPSPLF

SEQ ID NO: 17461 - protein, 8 aa, Artificial Sequence
  Peptide Derived from Human Papillomavirus
GPLDSSIV

SEQ ID NO: 17462 - protein, 10 aa, Artificial Sequence
  Peptide Derived from Human Papillomavirus
GPLDSSIVSL

SEQ ID NO: 17463 - protein, 11 aa, Artificial Sequence
  Peptide Derived from Human Papillomavirus
GPLDSSIVSLI

SEQ ID NO: 17464 - protein, 8 aa, Artificial Sequence
  Peptide Derived from Human Papillomavirus
HPPAPAEA

SEQ ID NO: 17465 - protein, 8 aa, Artificial Sequence
  Peptide Derived from Human Papillomavirus
IPGSRPVA

SEQ ID NO: 17466 - protein, 10 aa, Artificial Sequence
  Peptide Derived from Human Papillomavirus
IPGSRPVARL

SEQ ID NO: 17467 - protein, 9 aa, Artificial Sequence
  Peptide Derived from Human Papillomavirus
IPKVEGSTI

SEQ ID NO: 17468 - protein, 10 aa, Artificial Sequence
  Peptide Derived from Human Papillomavirus
IPKVEGSTIA

SEQ ID NO: 17469 - protein, 11 aa, Artificial Sequence
  Peptide Derived from Human Papillomavirus
IPLNTGFDTPV

SEQ ID NO: 17470 - protein, 10 aa, Artificial Sequence
  Peptide Derived from Human Papillomavirus
IPLQPIRPPV

SEQ ID NO: 17471 - protein, 8 aa, Artificial Sequence
  Peptide Derived from Human Papillomavirus
IPMDTFVV

SEQ ID NO: 17472 - protein, 9 aa, Artificial Sequence
  Peptide Derived from Human Papillomavirus
IPTPSGFDV

SEQ ID NO: 17473 - protein, 9 aa, Artificial Sequence
  Peptide Derived from Human Papillomavirus
NPTFTEPSV

SEQ ID NO: 17474 - protein, 10 aa, Artificial Sequence
  Peptide Derived from Human Papillomavirus
NPTFTEPSVL

SEQ ID NO: 17475 - protein, 11 aa, Artificial Sequence
  Peptide Derived from Human Papillomavirus
PPAPAEASGHF

SEQ ID NO: 17476 - protein, 8 aa, Artificial Sequence
  Peptide Derived from Human Papillomavirus
PPDVIPKV

SEQ ID NO: 17477 - protein, 8 aa, Artificial Sequence
  Peptide Derived from Human Papillomavirus
PPTAAIPL

SEQ ID NO: 17478 - protein, 11 aa, Artificial Sequence
  Peptide Derived from Human Papillomavirus
PPTAAIPLQPI

SEQ ID NO: 17479 - protein, 8 aa, Artificial Sequence
  Peptide Derived from Human Papillomavirus
PPVTVDTV

SEQ ID NO: 17480 - protein, 11 aa, Artificial Sequence
  Peptide Derived from Human Papillomavirus
PPVTVDTVGPL

SEQ ID NO: 17481 - protein, 9 aa, Artificial Sequence
  Peptide Derived from Human Papillomavirus
QPIRPPVTV

SEQ ID NO: 17482 - protein, 11 aa, Artificial Sequence
  Peptide Derived from Human Papillomavirus
QPLHDTSTSSY

SEQ ID NO: 17483 - protein, 11 aa, Artificial Sequence
  Peptide Derived from Human Papillomavirus
RPAITSRRHTV

SEQ ID NO: 17484 - protein, 9 aa, Artificial Sequence
  Peptide Derived from Human Papillomavirus
RPPVTVDTV

SEQ ID NO: 17485 - protein, 8 aa, Artificial Sequence
  Peptide Derived from Human Papillomavirus
RPVARLGL

SEQ ID NO: 17486 - protein, 9 aa, Artificial Sequence
  Peptide Derived from Human Papillomavirus
RPVARLGLY

SEQ ID NO: 17487 - protein, 8 aa, Artificial Sequence
  Peptide Derived from Human Papillomavirus
SPAPDPDF

SEQ ID NO: 17488 - protein, 9 aa, Artificial Sequence
  Peptide Derived from Human Papillomavirus
SPAPDPDFL

SEQ ID NO: 17489 - protein, 11 aa, Artificial Sequence
  Peptide Derived from Human Papillomavirus
SPAPDPDFLDI

SEQ ID NO: 17490 - protein, 9 aa, Artificial Sequence
  Peptide Derived from Human Papillomavirus
SPFFPFDTI

SEQ ID NO: 17491 - protein, 10 aa, Artificial Sequence
  Peptide Derived from Human Papillomavirus
SPFFPFDTIV

SEQ ID NO: 17492 - protein, 11 aa, Artificial Sequence
  Peptide Derived from Human Papillomavirus
SPFFPFDTIVV

SEQ ID NO: 17493 - protein, 9 aa, Artificial Sequence
  Peptide Derived from Human Papillomavirus
SPFVPISPF

SEQ ID NO: 17494 - protein, 10 aa, Artificial Sequence
  Peptide Derived from Human Papillomavirus
SPFVPISPFF

SEQ ID NO: 17495 - protein, 8 aa, Artificial Sequence
  Peptide Derived from Human Papillomavirus
SPHKLITY

SEQ ID NO: 17496 - protein, 10 aa, Artificial Sequence
  Peptide Derived from Human Papillomavirus
SPIVPLDHTV

SEQ ID NO: 17497 - protein, 10 aa, Artificial Sequence
  Peptide Derived from Human Papillomavirus
SPLFPTSSPF

SEQ ID NO: 17498 - protein, 11 aa, Artificial Sequence
  Peptide Derived from Human Papillomavirus
SPLFPTSSPFV

SEQ ID NO: 17499 - protein, 9 aa, Artificial Sequence
  Peptide Derived from Human Papillomavirus
SPTVSTQSY

SEQ ID NO: 17500 - protein, 10 aa, Artificial Sequence
  Peptide Derived from Human Papillomavirus
TPAIINVSSV

SEQ ID NO: 17501 - protein, 9 aa, Artificial Sequence
  Peptide Derived from Human Papillomavirus
TPIPGSRPV

SEQ ID NO: 17502 - protein, 10 aa, Artificial Sequence
  Peptide Derived from Human Papillomavirus
TPIPGSRPVA

SEQ ID NO: 17503 - protein, 10 aa, Artificial Sequence
  Peptide Derived from Human Papillomavirus
TPMQHSYSTF

SEQ ID NO: 17504 - protein, 11 aa, Artificial Sequence
  Peptide Derived from Human Papillomavirus
TPMQHSYSTFA

SEQ ID NO: 17505 - protein, 11 aa, Artificial Sequence
  Peptide Derived from Human Papillomavirus
TPSGFDVTTSA

SEQ ID NO: 17506 - protein, 9 aa, Artificial Sequence
  Peptide Derived from Human Papillomavirus
TPVMSGPDI

SEQ ID NO: 17507 - protein, 10 aa, Artificial Sequence
  Peptide Derived from Human Papillomavirus
VPIGTDPPTA

SEQ ID NO: 17508 - protein, 11 aa, Artificial Sequence
  Peptide Derived from Human Papillomavirus
VPIGTDPPTAA

SEQ ID NO: 17509 - protein, 9 aa, Artificial Sequence
  Peptide Derived from Human Papillomavirus
VPISPFFPF

SEQ ID NO: 17510 - protein, 8 aa, Artificial Sequence
  Peptide Derived from Human Papillomavirus
VPNEQYEL

SEQ ID NO: 17511 - protein, 11 aa, Artificial Sequence
  Peptide Derived from Human Papillomavirus
VPNEQYELQPL

SEQ ID NO: 17512 - protein, 10 aa, Artificial Sequence
  Peptide Derived from Human Papillomavirus
CPPILLTSNI

SEQ ID NO: 17513 - protein, 8 aa, Artificial Sequence
  Peptide Derived from Human Papillomavirus
DPAKDNKW

SEQ ID NO: 17514 - protein, 10 aa, Artificial Sequence
  Peptide Derived from Human Papillomavirus
DPAKDNKWPY

SEQ ID NO: 17515 - protein, 11 aa, Artificial Sequence
  Peptide Derived from Human Papillomavirus
DPAKDNKWPYL

SEQ ID NO: 17516 - protein, 9 aa, Artificial Sequence
  Peptide Derived from Human Papillomavirus
DPHCSITEL

SEQ ID NO: 17517 - protein, 8 aa, Artificial Sequence
  Peptide Derived from Human Papillomavirus
EPLADTKV

SEQ ID NO: 17518 - protein, 9 aa, Artificial Sequence
  Peptide Derived from Human Papillomavirus
EPLADTKVA

SEQ ID NO: 17519 - protein, 10 aa, Artificial Sequence
  Peptide Derived from Human Papillomavirus
EPLADTKVAM

SEQ ID NO: 17520 - protein, 11 aa, Artificial Sequence
  Peptide Derived from Human Papillomavirus
EPLADTKVAML

SEQ ID NO: 17521 - protein, 9 aa, Artificial Sequence
  Peptide Derived from Human Papillomavirus
EPPKLRSSV

SEQ ID NO: 17522 - protein, 10 aa, Artificial Sequence
  Peptide Derived from Human Papillomavirus
EPPKLRSSVA

SEQ ID NO: 17523 - protein, 11 aa, Artificial Sequence
  Peptide Derived from Human Papillomavirus
EPPKLRSSVAA

SEQ ID NO: 17524 - protein, 10 aa, Artificial Sequence
  Peptide Derived from Human Papillomavirus
FPFDKNGNPV

SEQ ID NO: 17525 - protein, 11 aa, Artificial Sequence
  Peptide Derived from Human Papillomavirus
FPFDKNGNPVY

SEQ ID NO: 17526 - protein, 9 aa, Artificial Sequence
  Peptide Derived from Human Papillomavirus
GPANTGKSY

SEQ ID NO: 17527 - protein, 10 aa, Artificial Sequence
  Peptide Derived from Human Papillomavirus
GPANTGKSYF

SEQ ID NO: 17528 - protein, 9 aa, Artificial Sequence
  Peptide Derived from Human Papillomavirus
IPFGTFKCV

SEQ ID NO: 17529 - protein, 9 aa, Artificial Sequence
  Peptide Derived from Human Papillomavirus
KPATLYAHI

SEQ ID NO: 17530 - protein, 11 aa, Artificial Sequence
  Peptide Derived from Human Papillomavirus
KPLLQLKCPPI

SEQ ID NO: 17531 - protein, 8 aa, Artificial Sequence
  Peptide Derived from Human Papillomavirus
NPTVAEGF

SEQ ID NO: 17532 - protein, 11 aa, Artificial Sequence
  Peptide Derived from Human Papillomavirus
NPTVAEGFKTL

SEQ ID NO: 17533 - protein, 11 aa, Artificial Sequence
  Peptide Derived from Human Papillomavirus
NPVYEINDKNW

SEQ ID NO: 17534 - protein, 9 aa, Artificial Sequence
  Peptide Derived from Human Papillomavirus
PPILLTSNI

SEQ ID NO: 17535 - protein, 8 aa, Artificial Sequence
  Peptide Derived from Human Papillomavirus
PPKLRSSV

SEQ ID NO: 17536 - protein, 9 aa, Artificial Sequence
  Peptide Derived from Human Papillomavirus
PPKLRSSVA

SEQ ID NO: 17537 - protein, 10 aa, Artificial Sequence
  Peptide Derived from Human Papillomavirus
PPKLRSSVAA

SEQ ID NO: 17538 - protein, 11 aa, Artificial Sequence
  Peptide Derived from Human Papillomavirus
PPKLRSSVAAL

SEQ ID NO: 17539 - protein, 9 aa, Artificial Sequence
  Peptide Derived from Human Papillomavirus
RPIVQFLRY

SEQ ID NO: 17540 - protein, 9 aa, Artificial Sequence
  Peptide Derived from Human Papillomavirus
SPLGEQLSV

SEQ ID NO: 17541 - protein, 9 aa, Artificial Sequence
  Peptide Derived from Human Papillomavirus
SPRLQEISL

SEQ ID NO: 17542 - protein, 8 aa, Artificial Sequence
  Peptide Derived from Human Papillomavirus
TPEWIQRL

SEQ ID NO: 17543 - protein, 10 aa, Artificial Sequence
  Peptide Derived from Human Papillomavirus
TPEWIQRLTI

SEQ ID NO: 17544 - protein, 11 aa, Artificial Sequence
  Peptide Derived from Human Papillomavirus
TPEWIQRLTII

SEQ ID NO: 17545 - protein, 8 aa, Artificial Sequence
  Peptide Derived from Human Papillomavirus
TPKKNCIL

SEQ ID NO: 17546 - protein, 9 aa, Artificial Sequence
  Peptide Derived from Human Papillomavirus
TPKKNCILL

SEQ ID NO: 17547 - protein, 10 aa, Artificial Sequence
  Peptide Derived from Human Papillomavirus
TPKKNCILLY

SEQ ID NO: 17548 - protein, 8 aa, Artificial Sequence
  Peptide Derived from Human Papillomavirus
VPETCMLI

SEQ ID NO: 17549 - protein, 8 aa, Artificial Sequence
  Peptide Derived from Human Papillomavirus
WPYLESRV

SEQ ID NO: 17550 - protein, 10 aa, Artificial Sequence
  Peptide Derived from Human Papillomavirus
WPYLESRVTV

SEQ ID NO: 17551 - protein, 11 aa, Artificial Sequence
  Peptide Derived from Human Papillomavirus
WPYLESRVTVF

SEQ ID NO: 17552 - protein, 9 aa, Artificial Sequence
  Peptide Derived from Human Papillomavirus
IPNSVQISV

SEQ ID NO: 17553 - protein, 11 aa, Artificial Sequence
  Peptide Derived from Human Papillomavirus
IPNSVQISVGY

SEQ ID NO: 17554 - protein, 8 aa, Artificial Sequence
  Peptide Derived from Human Papillomavirus
KPHIQTPA

SEQ ID NO: 17555 - protein, 10 aa, Artificial Sequence
  Peptide Derived from Human Papillomavirus
PPINISKSKA

SEQ ID NO: 17556 - protein, 10 aa, Artificial Sequence
  Peptide Derived from Human Papillomavirus
TPKESLSERL

SEQ ID NO: 17557 - protein, 10 aa, Artificial Sequence
  Peptide Derived from Human Papillomavirus
TPKPHIQTPA

SEQ ID NO: 17558 - protein, 11 aa, Artificial Sequence
  Peptide Derived from Human Papillomavirus
VPPINISKSKA

SEQ ID NO: 17559 - protein, 9 aa, Artificial Sequence
  Peptide Derived from Human Papillomavirus
DPTQRPYKL

SEQ ID NO: 17560 - protein, 8 aa, Artificial Sequence
  Peptide Derived from Human Papillomavirus
LPDLCTEL

SEQ ID NO: 17561 - protein, 9 aa, Artificial Sequence
  Peptide Derived from Human Papillomavirus
NPAEKRRHL

SEQ ID NO: 17562 - protein, 8 aa, Artificial Sequence
  Peptide Derived from Human Papillomavirus
RPYKLPDL

SEQ ID NO: 17563 - protein, 8 aa, Artificial Sequence
  Peptide Derived from Human Papillomavirus
DPVDLLCY

SEQ ID NO: 17564 - protein, 11 aa, Artificial Sequence
  Peptide Derived from Human Papillomavirus
DPVDLLCYEQL

SEQ ID NO: 17565 - protein, 9 aa, Artificial Sequence
  Peptide Derived from Human Papillomavirus
EPQNELDPV

SEQ ID NO: 17566 - protein, 11 aa, Artificial Sequence
  Peptide Derived from Human Papillomavirus
EPQNELDPVDL

SEQ ID NO: 17567 - protein, 8 aa, Artificial Sequence
  Peptide Derived from Human Papillomavirus
EPQRHKIL

SEQ ID NO: 17568 - protein, 10 aa, Artificial Sequence
  Peptide Derived from Human Papillomavirus
EPQRHKILCV

SEQ ID NO: 17569 - protein, 9 aa, Artificial Sequence
  Peptide Derived from Human Papillomavirus
GPRATLQEI

SEQ ID NO: 17570 - protein, 10 aa, Artificial Sequence
  Peptide Derived from Human Papillomavirus
GPRATLQEIV

SEQ ID NO: 17571 - protein, 11 aa, Artificial Sequence
  Peptide Derived from Human Papillomavirus
GPRATLQEIVL

SEQ ID NO: 17572 - protein, 10 aa, Artificial Sequence
  Peptide Derived from Human Papillomavirus
CPPLELKNTI

SEQ ID NO: 17573 - protein, 11 aa, Artificial Sequence
  Peptide Derived from Human Papillomavirus
CPPLELKNTII

SEQ ID NO: 17574 - protein, 8 aa, Artificial Sequence
  Peptide Derived from Human Papillomavirus
DPTKFKHY

SEQ ID NO: 17575 - protein, 8 aa, Artificial Sequence
  Peptide Derived from Human Papillomavirus
DPYDKLKF

SEQ ID NO: 17576 - protein, 9 aa, Artificial Sequence
  Peptide Derived from Human Papillomavirus
DPYDKLKFW

SEQ ID NO: 17577 - protein, 11 aa, Artificial Sequence
  Peptide Derived from Human Papillomavirus
DPYDKLKFWTV

SEQ ID NO: 17578 - protein, 8 aa, Artificial Sequence
  Peptide Derived from Human Papillomavirus
DPYGDSMF

SEQ ID NO: 17579 - protein, 9 aa, Artificial Sequence
  Peptide Derived from Human Papillomavirus
DPYGDSMFF

SEQ ID NO: 17580 - protein, 11 aa, Artificial Sequence
  Peptide Derived from Human Papillomavirus
DPYGDSMFFCL

SEQ ID NO: 17581 - protein, 8 aa, Artificial Sequence
  Peptide Derived from Human Papillomavirus
FPIFLQMA

SEQ ID NO: 17582 - protein, 9 aa, Artificial Sequence
  Peptide Derived from Human Papillomavirus
FPIFLQMAL

SEQ ID NO: 17583 - protein, 10 aa, Artificial Sequence
  Peptide Derived from Human Papillomavirus
FPIFLQMALW

SEQ ID NO: 17584 - protein, 8 aa, Artificial Sequence
  Peptide Derived from Human Papillomavirus
GPRKRPAA

SEQ ID NO: 17585 - protein, 8 aa, Artificial Sequence
  Peptide Derived from Human Papillomavirus
KPYWLHKA

SEQ ID NO: 17586 - protein, 9 aa, Artificial Sequence
  Peptide Derived from Human Papillomavirus
LPDPNKFGL

SEQ ID NO: 17587 - protein, 9 aa, Artificial Sequence
  Peptide Derived from Human Papillomavirus
LPPPSVARV

SEQ ID NO: 17588 - protein, 10 aa, Artificial Sequence
  Peptide Derived from Human Papillomavirus
LPPPSVARVV

SEQ ID NO: 17589 - protein, 8 aa, Artificial Sequence
  Peptide Derived from Human Papillomavirus
NPETQRLV

SEQ ID NO: 17590 - protein, 9 aa, Artificial Sequence
  Peptide Derived from Human Papillomavirus
NPETQRLVW

SEQ ID NO: 17591 - protein, 10 aa, Artificial Sequence
  Peptide Derived from Human Papillomavirus
NPETQRLVWA

SEQ ID NO: 17592 - protein, 11 aa, Artificial Sequence
  Peptide Derived from Human Papillomavirus
NPYFRVVPSGA

SEQ ID NO: 17593 - protein, 8 aa, Artificial Sequence
  Peptide Derived from Human Papillomavirus
PPEKQDPY

SEQ ID NO: 17594 - protein, 11 aa, Artificial Sequence
  Peptide Derived from Human Papillomavirus
PPEKQDPYDKL

SEQ ID NO: 17595 - protein, 9 aa, Artificial Sequence
  Peptide Derived from Human Papillomavirus
PPLELKNTI

SEQ ID NO: 17596 - protein, 10 aa, Artificial Sequence
  Peptide Derived from Human Papillomavirus
PPLELKNTII

SEQ ID NO: 17597 - protein, 8 aa, Artificial Sequence
  Peptide Derived from Human Papillomavirus
PPPPTTSL

SEQ ID NO: 17598 - protein, 9 aa, Artificial Sequence
  Peptide Derived from Human Papillomavirus
PPPPTTSLV

SEQ ID NO: 17599 - protein, 8 aa, Artificial Sequence
  Peptide Derived from Human Papillomavirus
PPPSVARV

SEQ ID NO: 17600 - protein, 9 aa, Artificial Sequence
  Peptide Derived from Human Papillomavirus
PPPSVARVV

SEQ ID NO: 17601 - protein, 8 aa, Artificial Sequence
  Peptide Derived from Human Papillomavirus
PPPTTSLV

SEQ ID NO: 17602 - protein, 11 aa, Artificial Sequence
  Peptide Derived from Human Papillomavirus
PPPTTSLVDTY

SEQ ID NO: 17603 - protein, 8 aa, Artificial Sequence
  Peptide Derived from Human Papillomavirus
PPSVARVV

SEQ ID NO: 17604 - protein, 10 aa, Artificial Sequence
  Peptide Derived from Human Papillomavirus
PPTTSLVDTY

SEQ ID NO: 17605 - protein, 8 aa, Artificial Sequence
  Peptide Derived from Human Papillomavirus
QPGDCPPL

SEQ ID NO: 17606 - protein, 10 aa, Artificial Sequence
  Peptide Derived from Human Papillomavirus
QPGDCPPLEL

SEQ ID NO: 17607 - protein, 9 aa, Artificial Sequence
  Peptide Derived from Human Papillomavirus
RPAASTSTA

SEQ ID NO: 17608 - protein, 8 aa, Artificial Sequence
  Peptide Derived from Human Papillomavirus
RPAKRVRI

SEQ ID NO: 17609 - protein, 8 aa, Artificial Sequence
  Peptide Derived from Human Papillomavirus
RPSDSTVY

SEQ ID NO: 17610 - protein, 9 aa, Artificial Sequence
  Peptide Derived from Human Papillomavirus
RPSDSTVYL

SEQ ID NO: 17611 - protein, 11 aa, Artificial Sequence
  Peptide Derived from Human Papillomavirus
RPTIGPRKRPA

SEQ ID NO: 17612 - protein, 8 aa, Artificial Sequence
  Peptide Derived from Human Papillomavirus
SPSPSGSI

SEQ ID NO: 17613 - protein, 9 aa, Artificial Sequence
  Peptide Derived from Human Papillomavirus
TPPEKQDPY

SEQ ID NO: 17614 - protein, 8 aa, Artificial Sequence
  Peptide Derived from Human Papillomavirus
VPAIGEHW

SEQ ID NO: 17615 - protein, 9 aa, Artificial Sequence
  Peptide Derived from Human Papillomavirus
VPAIGEHWA

SEQ ID NO: 17616 - protein, 9 aa, Artificial Sequence
  Peptide Derived from Human Papillomavirus
VPKVSAYQY

SEQ ID NO: 17617 - protein, 11 aa, Artificial Sequence
  Peptide Derived from Human Papillomavirus
VPKVSAYQYRV

SEQ ID NO: 17618 - protein, 9 aa, Artificial Sequence
  Peptide Derived from Human Papillomavirus
VPLDICQSI

SEQ ID NO: 17619 - protein, 10 aa, Artificial Sequence
  Peptide Derived from Human Papillomavirus
VPNTYDPTKF

SEQ ID NO: 17620 - protein, 9 aa, Artificial Sequence
  Peptide Derived from Human Papillomavirus
VPPPPTTSL

SEQ ID NO: 17621 - protein, 10 aa, Artificial Sequence
  Peptide Derived from Human Papillomavirus
VPPPPTTSLV

SEQ ID NO: 17622 - protein, 10 aa, Artificial Sequence
  Peptide Derived from Human Papillomavirus
VPSGAGNKQA

SEQ ID NO: 17623 - protein, 11 aa, Artificial Sequence
  Peptide Derived from Human Papillomavirus
VPSGAGNKQAV

SEQ ID NO: 17624 - protein, 9 aa, Artificial Sequence
  Peptide Derived from Human Papillomavirus
YPDYLQMSA

SEQ ID NO: 17625 - protein, 8 aa, Artificial Sequence
  Peptide Derived from Human Papillomavirus
YPLGRKFL

SEQ ID NO: 17626 - protein, 9 aa, Artificial Sequence
  Peptide Derived from Human Papillomavirus
YPLGRKFLV

SEQ ID NO: 17627 - protein, 11 aa, Artificial Sequence
  Peptide Derived from Human Papillomavirus
YPLGRKFLVQA

SEQ ID NO: 17628 - protein, 9 aa, Artificial Sequence
  Peptide Derived from Human Papillomavirus
CPPDVINKV

SEQ ID NO: 17629 - protein, 8 aa, Artificial Sequence
  Peptide Derived from Human Papillomavirus
DPSIVTLV

SEQ ID NO: 17630 - protein, 8 aa, Artificial Sequence
  Peptide Derived from Human Papillomavirus
EPISSTPL

SEQ ID NO: 17631 - protein, 11 aa, Artificial Sequence
  Peptide Derived from Human Papillomavirus
EPISSTPLPTV

SEQ ID NO: 17632 - protein, 9 aa, Artificial Sequence
  Peptide Derived from Human Papillomavirus
EPLDTTLSF

SEQ ID NO: 17633 - protein, 11 aa, Artificial Sequence
  Peptide Derived from Human Papillomavirus
EPTSNVPDSDF

SEQ ID NO: 17634 - protein, 10 aa, Artificial Sequence
  Peptide Derived from Human Papillomavirus
EPVGPTDPSI

SEQ ID NO: 17635 - protein, 11 aa, Artificial Sequence
  Peptide Derived from Human Papillomavirus
EPVGPTDPSIV

SEQ ID NO: 17636 - protein, 8 aa, Artificial Sequence
  Peptide Derived from Human Papillomavirus
FPKKRKRI

SEQ ID NO: 17637 - protein, 10 aa, Artificial Sequence
  Peptide Derived from Human Papillomavirus
FPKKRKRIPY

SEQ ID NO: 17638 - protein, 11 aa, Artificial Sequence
  Peptide Derived from Human Papillomavirus
FPKKRKRIPYF

SEQ ID NO: 17639 - protein, 8 aa, Artificial Sequence
  Peptide Derived from Human Papillomavirus
GPRLYSRA

SEQ ID NO: 17640 - protein, 8 aa, Artificial Sequence
  Peptide Derived from Human Papillomavirus
GPTDPSIV

SEQ ID NO: 17641 - protein, 10 aa, Artificial Sequence
  Peptide Derived from Human Papillomavirus
GPTDPSIVTL

SEQ ID NO: 17642 - protein, 11 aa, Artificial Sequence
  Peptide Derived from Human Papillomavirus
GPTDPSIVTLV

SEQ ID NO: 17643 - protein, 8 aa, Artificial Sequence
  Peptide Derived from Human Papillomavirus
GPTRPPVV

SEQ ID NO: 17644 - protein, 9 aa, Artificial Sequence
  Peptide Derived from Human Papillomavirus
GPTRPPVVI

SEQ ID NO: 17645 - protein, 8 aa, Artificial Sequence
  Peptide Derived from Human Papillomavirus
HPSSLVTF

SEQ ID NO: 17646 - protein, 9 aa, Artificial Sequence
  Peptide Derived from Human Papillomavirus
IPYFFADGF

SEQ ID NO: 17647 - protein, 10 aa, Artificial Sequence
  Peptide Derived from Human Papillomavirus
IPYFFADGFV

SEQ ID NO: 17648 - protein, 11 aa, Artificial Sequence
  Peptide Derived from Human Papillomavirus
IPYFFADGFVA

SEQ ID NO: 17649 - protein, 8 aa, Artificial Sequence
  Peptide Derived from Human Papillomavirus
LPSHTPMW

SEQ ID NO: 17650 - protein, 9 aa, Artificial Sequence
  Peptide Derived from Human Papillomavirus
MPSTAASSY

SEQ ID NO: 17651 - protein, 9 aa, Artificial Sequence
  Peptide Derived from Human Papillomavirus
NPAFSDPSI

SEQ ID NO: 17652 - protein, 10 aa, Artificial Sequence
  Peptide Derived from Human Papillomavirus
NPAFSDPSII

SEQ ID NO: 17653 - protein, 11 aa, Artificial Sequence
  Peptide Derived from Human Papillomavirus
NPAYEPLDTTL

SEQ ID NO: 17654 - protein, 10 aa, Artificial Sequence
  Peptide Derived from Human Papillomavirus
PPASTTPSTI

SEQ ID NO: 17655 - protein, 8 aa, Artificial Sequence
  Peptide Derived from Human Papillomavirus
PPDVINKV

SEQ ID NO: 17656 - protein, 11 aa, Artificial Sequence
  Peptide Derived from Human Papillomavirus
PPPASTTPSTI

SEQ ID NO: 17657 - protein, 8 aa, Artificial Sequence
  Peptide Derived from Human Papillomavirus
PPVVIEPV

SEQ ID NO: 17658 - protein, 11 aa, Artificial Sequence
  Peptide Derived from Human Papillomavirus
RPALSSRRGTV

SEQ ID NO: 17659 - protein, 9 aa, Artificial Sequence
  Peptide Derived from Human Papillomavirus
RPPVVIEPV

SEQ ID NO: 17660 - protein, 9 aa, Artificial Sequence
  Peptide Derived from Human Papillomavirus
SPIAATEEI

SEQ ID NO: 17661 - protein, 11 aa, Artificial Sequence
  Peptide Derived from Human Papillomavirus
SPIAATEEIEL

SEQ ID NO: 17662 - protein, 10 aa, Artificial Sequence
  Peptide Derived from Human Papillomavirus
SPTNASTTTY

SEQ ID NO: 17663 - protein, 11 aa, Artificial Sequence
  Peptide Derived from Human Papillomavirus
SPTNASTTTYI

SEQ ID NO: 17664 - protein, 11 aa, Artificial Sequence
  Peptide Derived from Human Papillomavirus
TPAVLDITPTV

SEQ ID NO: 17665 - protein, 9 aa, Artificial Sequence
  Peptide Derived from Human Papillomavirus
TPLPTVRRV

SEQ ID NO: 17666 - protein, 9 aa, Artificial Sequence
  Peptide Derived from Human Papillomavirus
TPSTIHKSF

SEQ ID NO: 17667 - protein, 11 aa, Artificial Sequence
  Peptide Derived from Human Papillomavirus
TPSTIHKSFTY

SEQ ID NO: 17668 - protein, 9 aa, Artificial Sequence
  Peptide Derived from Human Papillomavirus
TPTSGSHGY

SEQ ID NO: 17669 - protein, 9 aa, Artificial Sequence
  Peptide Derived from Human Papillomavirus
TPTVDSVSI

SEQ ID NO: 17670 - protein, 9 aa, Artificial Sequence
  Peptide Derived from Human Papillomavirus
VPDSDFMDI

SEQ ID NO: 17671 - protein, 10 aa, Artificial Sequence
  Peptide Derived from Human Papillomavirus
VPDSDFMDII

SEQ ID NO: 17672 - protein, 9 aa, Artificial Sequence
  Peptide Derived from Human Papillomavirus
VPIYTGPDI

SEQ ID NO: 17673 - protein, 10 aa, Artificial Sequence
  Peptide Derived from Human Papillomavirus
VPIYTGPDII

SEQ ID NO: 17674 - protein, 11 aa, Artificial Sequence
  Peptide Derived from Human Papillomavirus
VPIYTGPDIIL

SEQ ID NO: 17675 - protein, 10 aa, Artificial Sequence
  Peptide Derived from Human Papillomavirus
VPLGGRSNTV

SEQ ID NO: 17676 - protein, 11 aa, Artificial Sequence
  Peptide Derived from Human Papillomavirus
VPLGGRSNTVV

SEQ ID NO: 17677 - protein, 9 aa, Artificial Sequence
  Peptide Derived from Human Papillomavirus
VPLTSAWDV

SEQ ID NO: 17678 - protein, 11 aa, Artificial Sequence
  Peptide Derived from Human Papillomavirus
VPLTSAWDVPI

SEQ ID NO: 17679 - protein, 11 aa, Artificial Sequence
  Peptide Derived from Human Papillomavirus
VPQTGEVSGNI

SEQ ID NO: 17680 - protein, 10 aa, Artificial Sequence
  Peptide Derived from Human Papillomavirus
VPTFTGTSGF

SEQ ID NO: 17681 - protein, 9 aa, Artificial Sequence
  Peptide Derived from Human Papillomavirus
WPSTSPTNA

SEQ ID NO: 17682 - protein, 8 aa, Artificial Sequence
  Peptide Derived from Human Papillomavirus
YPKYSLTM

SEQ ID NO: 17683 - protein, 11 aa, Artificial Sequence
  Peptide Derived from Human Papillomavirus
CPDSVSSTCRY

SEQ ID NO: 17684 - protein, 10 aa, Artificial Sequence
  Peptide Derived from Human Papillomavirus
EPNRLKCCRY

SEQ ID NO: 17685 - protein, 9 aa, Artificial Sequence
  Peptide Derived from Human Papillomavirus
HPGDKTTPV

SEQ ID NO: 17686 - protein, 10 aa, Artificial Sequence
  Peptide Derived from Human Papillomavirus
HPGDKTTPVV

SEQ ID NO: 17687 - protein, 8 aa, Artificial Sequence
  Peptide Derived from Human Papillomavirus
IPVVYRLV

SEQ ID NO: 17688 - protein, 9 aa, Artificial Sequence
  Peptide Derived from Human Papillomavirus
IPVVYRLVW

SEQ ID NO: 17689 - protein, 8 aa, Artificial Sequence
  Peptide Derived from Human Papillomavirus
RPGKRPRL

SEQ ID NO: 17690 - protein, 9 aa, Artificial Sequence
  Peptide Derived from Human Papillomavirus
RPRLRESEF

SEQ ID NO: 17691 - protein, 9 aa, Artificial Sequence
  Peptide Derived from Human Papillomavirus
SPVETVNEY

SEQ ID NO: 17692 - protein, 9 aa, Artificial Sequence
  Peptide Derived from Human Papillomavirus
VPCLQVCKA

SEQ ID NO: 17693 - protein, 11 aa, Artificial Sequence
  Peptide Derived from Human Papillomavirus
VPCLQVCKAKA

SEQ ID NO: 17694 - protein, 8 aa, Artificial Sequence
  Peptide Derived from Human Papillomavirus
FPYAVCRV

SEQ ID NO: 17695 - protein, 10 aa, Artificial Sequence
  Peptide Derived from Human Papillomavirus
FPYAVCRVCL

SEQ ID NO: 17696 - protein, 11 aa, Artificial Sequence
  Peptide Derived from Human Papillomavirus
FPYAVCRVCLL

SEQ ID NO: 17697 - protein, 8 aa, Artificial Sequence
  Peptide Derived from Human Papillomavirus
IPLIDLRL

SEQ ID NO: 17698 - protein, 11 aa, Artificial Sequence
  Peptide Derived from Human Papillomavirus
IPLIDLRLSCV

SEQ ID NO: 17699 - protein, 9 aa, Artificial Sequence
  Peptide Derived from Human Papillomavirus
NPQERPRSL

SEQ ID NO: 17700 - protein, 8 aa, Artificial Sequence
  Peptide Derived from Human Papillomavirus
RPRSLHHL

SEQ ID NO: 17701 - protein, 11 aa, Artificial Sequence
  Peptide Derived from Human Papillomavirus
RPRSLHHLSEV

SEQ ID NO: 17702 - protein, 10 aa, Artificial Sequence
  Peptide Derived from Human Papillomavirus
SPLTPEEKQL

SEQ ID NO: 17703 - protein, 8 aa, Artificial Sequence
  Peptide Derived from Human Papillomavirus
RPQQARQA

SEQ ID NO: 17704 - protein, 8 aa, Artificial Sequence
  Peptide Derived from Human Papillomavirus
TPQTEIDL

SEQ ID NO: 17705 - protein, 8 aa, Artificial Sequence
  Peptide Derived from Human Papillomavirus
VPCCECKF

SEQ ID NO: 17706 - protein, 9 aa, Artificial Sequence
  Peptide Derived from Human Papillomavirus
VPCCECKFV

SEQ ID NO: 17707 - protein, 10 aa, Artificial Sequence
  Peptide Derived from Human Papillomavirus
VPCCECKFVV

SEQ ID NO: 17708 - protein, 8 aa, Artificial Sequence
  Peptide Derived from Human Papillomavirus
VPTLQDVV

SEQ ID NO: 17709 - protein, 9 aa, Artificial Sequence
  Peptide Derived from Human Papillomavirus
VPTLQDVVL

SEQ ID NO: 17710 - protein, 11 aa, Artificial Sequence
  Peptide Derived from Human Papillomavirus
VPTLQDVVLEL

SEQ ID NO: 17711 - protein, 9 aa, Artificial Sequence
  Peptide Derived from Human Papillomavirus
APTSTSTPA

SEQ ID NO: 17712 - protein, 11 aa, Artificial Sequence
  Peptide Derived from Human Papillomavirus
CPPLALINTPI

SEQ ID NO: 17713 - protein, 8 aa, Artificial Sequence
  Peptide Derived from Human Papillomavirus
DPLAKYKF

SEQ ID NO: 17714 - protein, 9 aa, Artificial Sequence
  Peptide Derived from Human Papillomavirus
DPLAKYKFW

SEQ ID NO: 17715 - protein, 11 aa, Artificial Sequence
  Peptide Derived from Human Papillomavirus
DPLAKYKFWDV

SEQ ID NO: 17716 - protein, 8 aa, Artificial Sequence
  Peptide Derived from Human Papillomavirus
DPPLHYGL

SEQ ID NO: 17717 - protein, 10 aa, Artificial Sequence
  Peptide Derived from Human Papillomavirus
DPPLHYGLCI

SEQ ID NO: 17718 - protein, 11 aa, Artificial Sequence
  Peptide Derived from Human Papillomavirus
DPPLHYGLCIF

SEQ ID NO: 17719 - protein, 8 aa, Artificial Sequence
  Peptide Derived from Human Papillomavirus
EPPPSSVY

SEQ ID NO: 17720 - protein, 9 aa, Artificial Sequence
  Peptide Derived from Human Papillomavirus
EPPPSSVYV

SEQ ID NO: 17721 - protein, 10 aa, Artificial Sequence
  Peptide Derived from Human Papillomavirus
EPPPSSVYVA

SEQ ID NO: 17722 - protein, 8 aa, Artificial Sequence
  Peptide Derived from Human Papillomavirus
FPIFLQMA

SEQ ID NO: 17723 - protein, 10 aa, Artificial Sequence
  Peptide Derived from Human Papillomavirus
FPIFLQMATW

SEQ ID NO: 17724 - protein, 8 aa, Artificial Sequence
  Peptide Derived from Human Papillomavirus
FPLGRKFL

SEQ ID NO: 17725 - protein, 9 aa, Artificial Sequence
  Peptide Derived from Human Papillomavirus
FPLGRKFLM

SEQ ID NO: 17726 - protein, 11 aa, Artificial Sequence
  Peptide Derived from Human Papillomavirus
FPLGRKFLMQL

SEQ ID NO: 17727 - protein, 9 aa, Artificial Sequence
  Peptide Derived from Human Papillomavirus
IPKVSAYQY

SEQ ID NO: 17728 - protein, 11 aa, Artificial Sequence
  Peptide Derived from Human Papillomavirus
IPKVSAYQYRV

SEQ ID NO: 17729 - protein, 8 aa, Artificial Sequence
  Peptide Derived from Human Papillomavirus
KPYWLQRA

SEQ ID NO: 17730 - protein, 9 aa, Artificial Sequence
  Peptide Derived from Human Papillomavirus
LPDPNKFGL

SEQ ID NO: 17731 - protein, 9 aa, Artificial Sequence
  Peptide Derived from Human Papillomavirus
LPPTPVSKV

SEQ ID NO: 17732 - protein, 10 aa, Artificial Sequence
  Peptide Derived from Human Papillomavirus
LPPTPVSKVV

SEQ ID NO: 17733 - protein, 11 aa, Artificial Sequence
  Peptide Derived from Human Papillomavirus
LPPTPVSKVVA

SEQ ID NO: 17734 - protein, 8 aa, Artificial Sequence
  Peptide Derived from Human Papillomavirus
NPDQERLV

SEQ ID NO: 17735 - protein, 9 aa, Artificial Sequence
  Peptide Derived from Human Papillomavirus
NPDQERLVW

SEQ ID NO: 17736 - protein, 10 aa, Artificial Sequence
  Peptide Derived from Human Papillomavirus
NPDQERLVWA

SEQ ID NO: 17737 - protein, 10 aa, Artificial Sequence
  Peptide Derived from Human Papillomavirus
PPLALINTPI

SEQ ID NO: 17738 - protein, 9 aa, Artificial Sequence
  Peptide Derived from Human Papillomavirus
PPLHYGLCI

SEQ ID NO: 17739 - protein, 10 aa, Artificial Sequence
  Peptide Derived from Human Papillomavirus
PPLHYGLCIF

SEQ ID NO: 17740 - protein, 11 aa, Artificial Sequence
  Peptide Derived from Human Papillomavirus
PPLHYGLCIFL

SEQ ID NO: 17741 - protein, 8 aa, Artificial Sequence
  Peptide Derived from Human Papillomavirus
PPPSSVYV

SEQ ID NO: 17742 - protein, 9 aa, Artificial Sequence
  Peptide Derived from Human Papillomavirus
PPPSSVYVA

SEQ ID NO: 17743 - protein, 8 aa, Artificial Sequence
  Peptide Derived from Human Papillomavirus
PPSSVYVA

SEQ ID NO: 17744 - protein, 9 aa, Artificial Sequence
  Peptide Derived from Human Papillomavirus
PPTEKQDPL

SEQ ID NO: 17745 - protein, 10 aa, Artificial Sequence
  Peptide Derived from Human Papillomavirus
PPTEKQDPLA

SEQ ID NO: 17746 - protein, 8 aa, Artificial Sequence
  Peptide Derived from Human Papillomavirus
PPTPVSKV

SEQ ID NO: 17747 - protein, 9 aa, Artificial Sequence
  Peptide Derived from Human Papillomavirus
PPTPVSKVV

SEQ ID NO: 17748 - protein, 10 aa, Artificial Sequence
  Peptide Derived from Human Papillomavirus
PPTPVSKVVA

SEQ ID NO: 17749 - protein, 11 aa, Artificial Sequence
  Peptide Derived from Human Papillomavirus
PPVATSLEDKY

SEQ ID NO: 17750 - protein, 10 aa, Artificial Sequence
  Peptide Derived from Human Papillomavirus
QPPTEKQDPL

SEQ ID NO: 17751 - protein, 11 aa, Artificial Sequence
  Peptide Derived from Human Papillomavirus
QPPTEKQDPLA

SEQ ID NO: 17752 - protein, 8 aa, Artificial Sequence
  Peptide Derived from Human Papillomavirus
RPSENKVY

SEQ ID NO: 17753 - protein, 9 aa, Artificial Sequence
  Peptide Derived from Human Papillomavirus
RPSENKVYL

SEQ ID NO: 17754 - protein, 8 aa, Artificial Sequence
  Peptide Derived from Human Papillomavirus
SPPVATSL

SEQ ID NO: 17755 - protein, 8 aa, Artificial Sequence
  Peptide Derived from Human Papillomavirus
TPAMGEHW

SEQ ID NO: 17756 - protein, 8 aa, Artificial Sequence
  Peptide Derived from Human Papillomavirus
TPIEDGDM

SEQ ID NO: 17757 - protein, 9 aa, Artificial Sequence
  Peptide Derived from Human Papillomavirus
TPIEDGDMI

SEQ ID NO: 17758 - protein, 11 aa, Artificial Sequence
  Peptide Derived from Human Papillomavirus
TPSGSMITSEA

SEQ ID NO: 17759 - protein, 8 aa, Artificial Sequence
  Peptide Derived from Human Papillomavirus
TPVSKVVA

SEQ ID NO: 17760 - protein, 9 aa, Artificial Sequence
  Peptide Derived from Human Papillomavirus
YPDYLKMSA

SEQ ID NO: 17761 - protein, 11 aa, Artificial Sequence
  Peptide Derived from Human Papillomavirus
YPDYLKMSADA

SEQ ID NO: 17762 - protein, 9 aa, Artificial Sequence
  Peptide Derived from Human Papillomavirus
APDPDFMNI

SEQ ID NO: 17763 - protein, 10 aa, Artificial Sequence
  Peptide Derived from Human Papillomavirus
APDPDFMNIV

SEQ ID NO: 17764 - protein, 11 aa, Artificial Sequence
  Peptide Derived from Human Papillomavirus
APDPDFMNIVA

SEQ ID NO: 17765 - protein, 9 aa, Artificial Sequence
  Peptide Derived from Human Papillomavirus
APGLSSQSV

SEQ ID NO: 17766 - protein, 10 aa, Artificial Sequence
  Peptide Derived from Human Papillomavirus
APGLSSQSVA

SEQ ID NO: 17767 - protein, 11 aa, Artificial Sequence
  Peptide Derived from Human Papillomavirus
APLGNVWETPF

SEQ ID NO: 17768 - protein, 11 aa, Artificial Sequence
  Peptide Derived from Human Papillomavirus
APQTGEVSGNI

SEQ ID NO: 17769 - protein, 8 aa, Artificial Sequence
  Peptide Derived from Human Papillomavirus
APRLYRKA

SEQ ID NO: 17770 - protein, 9 aa, Artificial Sequence
  Peptide Derived from Human Papillomavirus
APRLYRKAF

SEQ ID NO: 17771 - protein, 9 aa, Artificial Sequence
  Peptide Derived from Human Papillomavirus
CPEDVVNKI

SEQ ID NO: 17772 - protein, 9 aa, Artificial Sequence
  Peptide Derived from Human Papillomavirus
DPAFLDRPA

SEQ ID NO: 17773 - protein, 11 aa, Artificial Sequence
  Peptide Derived from Human Papillomavirus
DPAFLDRPATL

SEQ ID NO: 17774 - protein, 8 aa, Artificial Sequence
  Peptide Derived from Human Papillomavirus
DPDFMNIV

SEQ ID NO: 17775 - protein, 9 aa, Artificial Sequence
  Peptide Derived from Human Papillomavirus
DPDFMNIVA

SEQ ID NO: 17776 - protein, 10 aa, Artificial Sequence
  Peptide Derived from Human Papillomavirus
DPDFMNIVAL

SEQ ID NO: 17777 - protein, 8 aa, Artificial Sequence
  Peptide Derived from Human Papillomavirus
DPSIVTLV

SEQ ID NO: 17778 - protein, 8 aa, Artificial Sequence
  Peptide Derived from Human Papillomavirus
EPISSTPI

SEQ ID NO: 17779 - protein, 11 aa, Artificial Sequence
  Peptide Derived from Human Papillomavirus
EPISSTPIPGF

SEQ ID NO: 17780 - protein, 8 aa, Artificial Sequence
  Peptide Derived from Human Papillomavirus
GPSTWPFV

SEQ ID NO: 17781 - protein, 8 aa, Artificial Sequence
  Peptide Derived from Human Papillomavirus
GPTDPSIV

SEQ ID NO: 17782 - protein, 10 aa, Artificial Sequence
  Peptide Derived from Human Papillomavirus
GPTDPSIVTL

SEQ ID NO: 17783 - protein, 11 aa, Artificial Sequence
  Peptide Derived from Human Papillomavirus
GPTDPSIVTLV

SEQ ID NO: 17784 - protein, 8 aa, Artificial Sequence
  Peptide Derived from Human Papillomavirus
IPGFRRIA

SEQ ID NO: 17785 - protein, 9 aa, Artificial Sequence
  Peptide Derived from Human Papillomavirus
IPGFRRIAA

SEQ ID NO: 17786 - protein, 8 aa, Artificial Sequence
  Peptide Derived from Human Papillomavirus
IPMQTFAV

SEQ ID NO: 17787 - protein, 10 aa, Artificial Sequence
  Peptide Derived from Human Papillomavirus
IPNFTGSGGF

SEQ ID NO: 17788 - protein, 10 aa, Artificial Sequence
  Peptide Derived from Human Papillomavirus
IPYFFADGDV

SEQ ID NO: 17789 - protein, 11 aa, Artificial Sequence
  Peptide Derived from Human Papillomavirus
IPYFFADGDVA

SEQ ID NO: 17790 - protein, 8 aa, Artificial Sequence
  Peptide Derived from Human Papillomavirus
KPSTLSFA

SEQ ID NO: 17791 - protein, 8 aa, Artificial Sequence
  Peptide Derived from Human Papillomavirus
LPIKPSTL

SEQ ID NO: 17792 - protein, 10 aa, Artificial Sequence
  Peptide Derived from Human Papillomavirus
LPIKPSTLSF

SEQ ID NO: 17793 - protein, 11 aa, Artificial Sequence
  Peptide Derived from Human Papillomavirus
LPIKPSTLSFA

SEQ ID NO: 17794 - protein, 8 aa, Artificial Sequence
  Peptide Derived from Human Papillomavirus
LPTGPSTW

SEQ ID NO: 17795 - protein, 10 aa, Artificial Sequence
  Peptide Derived from Human Papillomavirus
LPTGPSTWPF

SEQ ID NO: 17796 - protein, 11 aa, Artificial Sequence
  Peptide Derived from Human Papillomavirus
LPTGPSTWPFV

SEQ ID NO: 17797 - protein, 11 aa, Artificial Sequence
  Peptide Derived from Human Papillomavirus
NPLFEGTDTSL

SEQ ID NO: 17798 - protein, 9 aa, Artificial Sequence
  Peptide Derived from Human Papillomavirus
NPLFIDPPV

SEQ ID NO: 17799 - protein, 10 aa, Artificial Sequence
  Peptide Derived from Human Papillomavirus
NPLFIDPPVI

SEQ ID NO: 17800 - protein, 8 aa, Artificial Sequence
  Peptide Derived from Human Papillomavirus
PPIVVESV

SEQ ID NO: 17801 - protein, 10 aa, Artificial Sequence
  Peptide Derived from Human Papillomavirus
QPLLSANNSF

SEQ ID NO: 17802 - protein, 11 aa, Artificial Sequence
  Peptide Derived from Human Papillomavirus
RPAFTTRRGGV

SEQ ID NO: 17803 - protein, 8 aa, Artificial Sequence
  Peptide Derived from Human Papillomavirus
RPATLVSA

SEQ ID NO: 17804 - protein, 9 aa, Artificial Sequence
  Peptide Derived from Human Papillomavirus
RPPIVVESV

SEQ ID NO: 17805 - protein, 8 aa, Artificial Sequence
  Peptide Derived from Human Papillomavirus
RPSTIVDV

SEQ ID NO: 17806 - protein, 11 aa, Artificial Sequence
  Peptide Derived from Human Papillomavirus
RPSTIVDVTPA

SEQ ID NO: 17807 - protein, 9 aa, Artificial Sequence
  Peptide Derived from Human Papillomavirus
SPIAQAEEI

SEQ ID NO: 17808 - protein, 11 aa, Artificial Sequence
  Peptide Derived from Human Papillomavirus
SPIAQAEEIEM

SEQ ID NO: 17809 - protein, 11 aa, Artificial Sequence
  Peptide Derived from Human Papillomavirus
SPSGVAPDPDF

SEQ ID NO: 17810 - protein, 9 aa, Artificial Sequence
  Peptide Derived from Human Papillomavirus
SPYDVTHDV

SEQ ID NO: 17811 - protein, 10 aa, Artificial Sequence
  Peptide Derived from Human Papillomavirus
SPYDVTHDVY

SEQ ID NO: 17812 - protein, 11 aa, Artificial Sequence
  Peptide Derived from Human Papillomavirus
SPYDVTHDVYI

SEQ ID NO: 17813 - protein, 8 aa, Artificial Sequence
  Peptide Derived from Human Papillomavirus
TPARPPIV

SEQ ID NO: 17814 - protein, 9 aa, Artificial Sequence
  Peptide Derived from Human Papillomavirus
TPARPPIVV

SEQ ID NO: 17815 - protein, 9 aa, Artificial Sequence
  Peptide Derived from Human Papillomavirus
TPFYSGPDI

SEQ ID NO: 17816 - protein, 10 aa, Artificial Sequence
  Peptide Derived from Human Papillomavirus
TPFYSGPDIV

SEQ ID NO: 17817 - protein, 11 aa, Artificial Sequence
  Peptide Derived from Human Papillomavirus
TPFYSGPDIVL

SEQ ID NO: 17818 - protein, 9 aa, Artificial Sequence
  Peptide Derived from Human Papillomavirus
TPIPGFRRI

SEQ ID NO: 17819 - protein, 10 aa, Artificial Sequence
  Peptide Derived from Human Papillomavirus
TPIPGFRRIA

SEQ ID NO: 17820 - protein, 11 aa, Artificial Sequence
  Peptide Derived from Human Papillomavirus
TPIPGFRRIAA

SEQ ID NO: 17821 - protein, 8 aa, Artificial Sequence
  Peptide Derived from Human Papillomavirus
TPSAHLPI

SEQ ID NO: 17822 - protein, 9 aa, Artificial Sequence
  Peptide Derived from Human Papillomavirus
TPTSGIHSY

SEQ ID NO: 17823 - protein, 9 aa, Artificial Sequence
  Peptide Derived from Human Papillomavirus
TPTSSTVHV

SEQ ID NO: 17824 - protein, 10 aa, Artificial Sequence
  Peptide Derived from Human Papillomavirus
VPLGSRPSTI

SEQ ID NO: 17825 - protein, 11 aa, Artificial Sequence
  Peptide Derived from Human Papillomavirus
VPLGSRPSTIV

SEQ ID NO: 17826 - protein, 8 aa, Artificial Sequence
  Peptide Derived from Human Papillomavirus
VPQSPYDV

SEQ ID NO: 17827 - protein, 9 aa, Artificial Sequence
  Peptide Derived from Human Papillomavirus
WPFVPQSPY

SEQ ID NO: 17828 - protein, 11 aa, Artificial Sequence
  Peptide Derived from Human Papillomavirus
WPFVPQSPYDV

SEQ ID NO: 17829 - protein, 10 aa, Artificial Sequence
  Peptide Derived from Human Papillomavirus
AHALFTAQEA

SEQ ID NO: 17830 - protein, 9 aa, Artificial Sequence
  Peptide Derived from Human Papillomavirus
AKAAMLAKF

SEQ ID NO: 17831 - protein, 9 aa, Artificial Sequence
  Peptide Derived from Human Papillomavirus
AKFKELYGV

SEQ ID NO: 17832 - protein, 11 aa, Artificial Sequence
  Peptide Derived from Human Papillomavirus
AKFKELYGVSF

SEQ ID NO: 17833 - protein, 9 aa, Artificial Sequence
  Peptide Derived from Human Papillomavirus
AKIGMLDDA

SEQ ID NO: 17834 - protein, 11 aa, Artificial Sequence
  Peptide Derived from Human Papillomavirus
AKIGMLDDATV

SEQ ID NO: 17835 - protein, 8 aa, Artificial Sequence
  Peptide Derived from Human Papillomavirus
AKIVKDCA

SEQ ID NO: 17836 - protein, 10 aa, Artificial Sequence
  Peptide Derived from Human Papillomavirus
AKIVKDCATM

SEQ ID NO: 17837 - protein, 8 aa, Artificial Sequence
  Peptide Derived from Human Papillomavirus
AKQHRDAV

SEQ ID NO: 17838 - protein, 10 aa, Artificial Sequence
  Peptide Derived from Human Papillomavirus
AKQHRDAVQV

SEQ ID NO: 17839 - protein, 11 aa, Artificial Sequence
  Peptide Derived from Human Papillomavirus
AKQHRDAVQVL

SEQ ID NO: 17840 - protein, 9 aa, Artificial Sequence
  Peptide Derived from Human Papillomavirus
DKENDGDSL

SEQ ID NO: 17841 - protein, 8 aa, Artificial Sequence
  Peptide Derived from Human Papillomavirus
DKNWKSFF

SEQ ID NO: 17842 - protein, 9 aa, Artificial Sequence
  Peptide Derived from Human Papillomavirus
DRVDDGGDW

SEQ ID NO: 17843 - protein, 10 aa, Artificial Sequence
  Peptide Derived from Human Papillomavirus
EKKQMSMSQW

SEQ ID NO: 17844 - protein, 11 aa, Artificial Sequence
  Peptide Derived from Human Papillomavirus
EKKQMSMSQWI

SEQ ID NO: 17845 - protein, 8 aa, Artificial Sequence
  Peptide Derived from Human Papillomavirus
EKKTGDAI

SEQ ID NO: 17846 - protein, 8 aa, Artificial Sequence
  Peptide Derived from Human Papillomavirus
EKLLSKLL

SEQ ID NO: 17847 - protein, 10 aa, Artificial Sequence
  Peptide Derived from Human Papillomavirus
EKLLSKLLCV

SEQ ID NO: 17848 - protein, 11 aa, Artificial Sequence
  Peptide Derived from Human Papillomavirus
EKQSRAAKRRL

SEQ ID NO: 17849 - protein, 10 aa, Artificial Sequence
  Peptide Derived from Human Papillomavirus
ERHTICQTPL

SEQ ID NO: 17850 - protein, 9 aa, Artificial Sequence
  Peptide Derived from Human Papillomavirus
FKELYGVSF

SEQ ID NO: 17851 - protein, 11 aa, Artificial Sequence
  Peptide Derived from Human Papillomavirus
FKSNKSTCCDW

SEQ ID NO: 17852 - protein, 10 aa, Artificial Sequence
  Peptide Derived from Human Papillomavirus
GKNRETIEKL

SEQ ID NO: 17853 - protein, 11 aa, Artificial Sequence
  Peptide Derived from Human Papillomavirus
GKNRETIEKLL

SEQ ID NO: 17854 - protein, 9 aa, Artificial Sequence
  Peptide Derived from Human Papillomavirus
GKSLFGMSL

SEQ ID NO: 17855 - protein, 10 aa, Artificial Sequence
  Peptide Derived from Human Papillomavirus
GKSLFGMSLM

SEQ ID NO: 17856 - protein, 8 aa, Artificial Sequence
  Peptide Derived from Human Papillomavirus
HRDAVQVL

SEQ ID NO: 17857 - protein, 8 aa, Artificial Sequence
  Peptide Derived from Human Papillomavirus
IKTLLQQY

SEQ ID NO: 17858 - protein, 10 aa, Artificial Sequence
  Peptide Derived from Human Papillomavirus
IKTLLQQYCL

SEQ ID NO: 17859 - protein, 11 aa, Artificial Sequence
  Peptide Derived from Human Papillomavirus
IKTLLQQYCLY

SEQ ID NO: 17860 - protein, 8 aa, Artificial Sequence
  Peptide Derived from Human Papillomavirus
IKYRCDRV

SEQ ID NO: 17861 - protein, 8 aa, Artificial Sequence
  Peptide Derived from Human Papillomavirus
KHRPLVQL

SEQ ID NO: 17862 - protein, 8 aa, Artificial Sequence
  Peptide Derived from Human Papillomavirus
KKNCILLY

SEQ ID NO: 17863 - protein, 10 aa, Artificial Sequence
  Peptide Derived from Human Papillomavirus
KKNCILLYGA

SEQ ID NO: 17864 - protein, 11 aa, Artificial Sequence
  Peptide Derived from Human Papillomavirus
KKNCILLYGAA

SEQ ID NO: 17865 - protein, 9 aa, Artificial Sequence
  Peptide Derived from Human Papillomavirus
KKQMSMSQW

SEQ ID NO: 17866 - protein, 10 aa, Artificial Sequence
  Peptide Derived from Human Papillomavirus
KKQMSMSQWI

SEQ ID NO: 17867 - protein, 8 aa, Artificial Sequence
  Peptide Derived from Human Papillomavirus
KRAEKKQM

SEQ ID NO: 17868 - protein, 10 aa, Artificial Sequence
  Peptide Derived from Human Papillomavirus
KRAEKKQMSM

SEQ ID NO: 17869 - protein, 9 aa, Artificial Sequence
  Peptide Derived from Human Papillomavirus
KRKYLVSPL

SEQ ID NO: 17870 - protein, 10 aa, Artificial Sequence
  Peptide Derived from Human Papillomavirus
LHIQSLACSW

SEQ ID NO: 17871 - protein, 8 aa, Artificial Sequence
  Peptide Derived from Human Papillomavirus
LHNRLVVF

SEQ ID NO: 17872 - protein, 10 aa, Artificial Sequence
  Peptide Derived from Human Papillomavirus
LHNRLVVFTF

SEQ ID NO: 17873 - protein, 8 aa, Artificial Sequence
  Peptide Derived from Human Papillomavirus
LKCPPLLI

SEQ ID NO: 17874 - protein, 8 aa, Artificial Sequence
  Peptide Derived from Human Papillomavirus
LKRFLQGI

SEQ ID NO: 17875 - protein, 10 aa, Artificial Sequence
  Peptide Derived from Human Papillomavirus
LKRKYLVSPL

SEQ ID NO: 17876 - protein, 9 aa, Artificial Sequence
  Peptide Derived from Human Papillomavirus
LKSNSQAKI

SEQ ID NO: 17877 - protein, 10 aa, Artificial Sequence
  Peptide Derived from Human Papillomavirus
LKSNSQAKIV

SEQ ID NO: 17878 - protein, 8 aa, Artificial Sequence
  Peptide Derived from Human Papillomavirus
LKTSNAKA

SEQ ID NO: 17879 - protein, 9 aa, Artificial Sequence
  Peptide Derived from Human Papillomavirus
LKTSNAKAA

SEQ ID NO: 17880 - protein, 10 aa, Artificial Sequence
  Peptide Derived from Human Papillomavirus
LKTSNAKAAM

SEQ ID NO: 17881 - protein, 11 aa, Artificial Sequence
  Peptide Derived from Human Papillomavirus
LKTSNAKAAML

SEQ ID NO: 17882 - protein, 9 aa, Artificial Sequence
  Peptide Derived from Human Papillomavirus
LRNALDGNL

SEQ ID NO: 17883 - protein, 10 aa, Artificial Sequence
  Peptide Derived from Human Papillomavirus
LRNALDGNLV

SEQ ID NO: 17884 - protein, 8 aa, Artificial Sequence
  Peptide Derived from Human Papillomavirus
LRSTAAAL

SEQ ID NO: 17885 - protein, 9 aa, Artificial Sequence
  Peptide Derived from Human Papillomavirus
LRSTAAALY

SEQ ID NO: 17886 - protein, 10 aa, Artificial Sequence
  Peptide Derived from Human Papillomavirus
LRSTAAALYW

SEQ ID NO: 17887 - protein, 11 aa, Artificial Sequence
  Peptide Derived from Human Papillomavirus
LRSTAAALYWY

SEQ ID NO: 17888 - protein, 8 aa, Artificial Sequence
  Peptide Derived from Human Papillomavirus
LRYQGVEF

SEQ ID NO: 17889 - protein, 9 aa, Artificial Sequence
  Peptide Derived from Human Papillomavirus
LRYQGVEFM

SEQ ID NO: 17890 - protein, 11 aa, Artificial Sequence
  Peptide Derived from Human Papillomavirus
LRYQGVEFMSF

SEQ ID NO: 17891 - protein, 8 aa, Artificial Sequence
  Peptide Derived from Human Papillomavirus
MKFLQGSV

SEQ ID NO: 17892 - protein, 9 aa, Artificial Sequence
  Peptide Derived from Human Papillomavirus
MKFLQGSVI

SEQ ID NO: 17893 - protein, 11 aa, Artificial Sequence
  Peptide Derived from Human Papillomavirus
MKFLQGSVICF

SEQ ID NO: 17894 - protein, 8 aa, Artificial Sequence
  Peptide Derived from Human Papillomavirus
NKSTCCDW

SEQ ID NO: 17895 - protein, 10 aa, Artificial Sequence
  Peptide Derived from Human Papillomavirus
NKSTCCDWCI

SEQ ID NO: 17896 - protein, 11 aa, Artificial Sequence
  Peptide Derived from Human Papillomavirus
NKSTCCDWCIA

SEQ ID NO: 17897 - protein, 8 aa, Artificial Sequence
  Peptide Derived from Human Papillomavirus
NRETIEKL

SEQ ID NO: 17898 - protein, 9 aa, Artificial Sequence
  Peptide Derived from Human Papillomavirus
NRETIEKLL

SEQ ID NO: 17899 - protein, 8 aa, Artificial Sequence
  Peptide Derived from Human Papillomavirus
NRLVVFTF

SEQ ID NO: 17900 - protein, 8 aa, Artificial Sequence
  Peptide Derived from Human Papillomavirus
PKKNCILL

SEQ ID NO: 17901 - protein, 9 aa, Artificial Sequence
  Peptide Derived from Human Papillomavirus
PKKNCILLY

SEQ ID NO: 17902 - protein, 11 aa, Artificial Sequence
  Peptide Derived from Human Papillomavirus
PKKNCILLYGA

SEQ ID NO: 17903 - protein, 8 aa, Artificial Sequence
  Peptide Derived from Human Papillomavirus
PKLRSTAA

SEQ ID NO: 17904 - protein, 9 aa, Artificial Sequence
  Peptide Derived from Human Papillomavirus
PKLRSTAAA

SEQ ID NO: 17905 - protein, 10 aa, Artificial Sequence
  Peptide Derived from Human Papillomavirus
PKLRSTAAAL

SEQ ID NO: 17906 - protein, 11 aa, Artificial Sequence
  Peptide Derived from Human Papillomavirus
PKLRSTAAALY

SEQ ID NO: 17907 - protein, 8 aa, Artificial Sequence
  Peptide Derived from Human Papillomavirus
PRLKAICI

SEQ ID NO: 17908 - protein, 8 aa, Artificial Sequence
  Peptide Derived from Human Papillomavirus
QHRDAVQV

SEQ ID NO: 17909 - protein, 9 aa, Artificial Sequence
  Peptide Derived from Human Papillomavirus
QHRDAVQVL

SEQ ID NO: 17910 - protein, 9 aa, Artificial Sequence
  Peptide Derived from Human Papillomavirus
QHSFNDCTF

SEQ ID NO: 17911 - protein, 11 aa, Artificial Sequence
  Peptide Derived from Human Papillomavirus
QHSFNDCTFEL

SEQ ID NO: 17912 - protein, 10 aa, Artificial Sequence
  Peptide Derived from Human Papillomavirus
QRQTVLQHSF

SEQ ID NO: 17913 - protein, 11 aa, Artificial Sequence
  Peptide Derived from Human Papillomavirus
RHETETPCSQY

SEQ ID NO: 17914 - protein, 9 aa, Artificial Sequence
  Peptide Derived from Human Papillomavirus
RHTICQTPL

SEQ ID NO: 17915 - protein, 11 aa, Artificial Sequence
  Peptide Derived from Human Papillomavirus
RHYKRAEKKQM

SEQ ID NO: 17916 - protein, 8 aa, Artificial Sequence
  Peptide Derived from Human Papillomavirus
RKYLVSPL

SEQ ID NO: 17917 - protein, 11 aa, Artificial Sequence
  Peptide Derived from Human Papillomavirus
RKYLVSPLSDI

SEQ ID NO: 17918 - protein, 11 aa, Artificial Sequence
  Peptide Derived from Human Papillomavirus
RRLFESEDSGY

SEQ ID NO: 17919 - protein, 8 aa, Artificial Sequence
  Peptide Derived from Human Papillomavirus
SHFWLQPL

SEQ ID NO: 17920 - protein, 9 aa, Artificial Sequence
  Peptide Derived from Human Papillomavirus
SHFWLQPLA

SEQ ID NO: 17921 - protein, 11 aa, Artificial Sequence
  Peptide Derived from Human Papillomavirus
SHFWLQPLADA

SEQ ID NO: 17922 - protein, 9 aa, Artificial Sequence
  Peptide Derived from Human Papillomavirus
SKLLCVSPM

SEQ ID NO: 17923 - protein, 11 aa, Artificial Sequence
  Peptide Derived from Human Papillomavirus
SKLLCVSPMCM

SEQ ID NO: 17924 - protein, 10 aa, Artificial Sequence
  Peptide Derived from Human Papillomavirus
SKSHFWLQPL

SEQ ID NO: 17925 - protein, 11 aa, Artificial Sequence
  Peptide Derived from Human Papillomavirus
SKSHFWLQPLA

SEQ ID NO: 17926 - protein, 8 aa, Artificial Sequence
  Peptide Derived from Human Papillomavirus
SRAAKRRL

SEQ ID NO: 17927 - protein, 9 aa, Artificial Sequence
  Peptide Derived from Human Papillomavirus
SRAAKRRLF

SEQ ID NO: 17928 - protein, 9 aa, Artificial Sequence
  Peptide Derived from Human Papillomavirus
SRTWSRLSL

SEQ ID NO: 17929 - protein, 10 aa, Artificial Sequence
  Peptide Derived from Human Papillomavirus
SRWPYLHNRL

SEQ ID NO: 17930 - protein, 11 aa, Artificial Sequence
  Peptide Derived from Human Papillomavirus
SRWPYLHNRLV

SEQ ID NO: 17931 - protein, 11 aa, Artificial Sequence
  Peptide Derived from Human Papillomavirus
VKDCATMCRHY

SEQ ID NO: 17932 - protein, 9 aa, Artificial Sequence
  Peptide Derived from Human Papillomavirus
VKHRPLVQL

SEQ ID NO: 17933 - protein, 8 aa, Artificial Sequence
  Peptide Derived from Human Papillomavirus
WKQIVMFL

SEQ ID NO: 17934 - protein, 10 aa, Artificial Sequence
  Peptide Derived from Human Papillomavirus
WKQIVMFLRY

SEQ ID NO: 17935 - protein, 9 aa, Artificial Sequence
  Peptide Derived from Human Papillomavirus
WKSFFSRTW

SEQ ID NO: 17936 - protein, 10 aa, Artificial Sequence
  Peptide Derived from Human Papillomavirus
YKCGKNRETI

SEQ ID NO: 17937 - protein, 9 aa, Artificial Sequence
  Peptide Derived from Human Papillomavirus
YKRAEKKQM

SEQ ID NO: 17938 - protein, 11 aa, Artificial Sequence
  Peptide Derived from Human Papillomavirus
YKRAEKKQMSM

SEQ ID NO: 17939 - protein, 8 aa, Artificial Sequence
  Peptide Derived from Human Papillomavirus
YKTGISNI

SEQ ID NO: 17940 - protein, 11 aa, Artificial Sequence
  Peptide Derived from Human Papillomavirus
YKTGISNISEV

SEQ ID NO: 17941 - protein, 9 aa, Artificial Sequence
  Peptide Derived from Human Papillomavirus
AREMGFKHI

SEQ ID NO: 17942 - protein, 9 aa, Artificial Sequence
  Peptide Derived from Human Papillomavirus
DHIDYWKHM

SEQ ID NO: 17943 - protein, 11 aa, Artificial Sequence
  Peptide Derived from Human Papillomavirus
DHIDYWKHMRL

SEQ ID NO: 17944 - protein, 8 aa, Artificial Sequence
  Peptide Derived from Human Papillomavirus
EKWTLQDV

SEQ ID NO: 17945 - protein, 10 aa, Artificial Sequence
  Peptide Derived from Human Papillomavirus
EKWTLQDVSL

SEQ ID NO: 17946 - protein, 8 aa, Artificial Sequence
  Peptide Derived from Human Papillomavirus
EKYSKNKV

SEQ ID NO: 17947 - protein, 9 aa, Artificial Sequence
  Peptide Derived from Human Papillomavirus
EKYSKNKVW

SEQ ID NO: 17948 - protein, 11 aa, Artificial Sequence
  Peptide Derived from Human Papillomavirus
EKYSKNKVWEV

SEQ ID NO: 17949 - protein, 8 aa, Artificial Sequence
  Peptide Derived from Human Papillomavirus
FKDDAEKY

SEQ ID NO: 17950 - protein, 8 aa, Artificial Sequence
  Peptide Derived from Human Papillomavirus
FKHINHQV

SEQ ID NO: 17951 - protein, 9 aa, Artificial Sequence
  Peptide Derived from Human Papillomavirus
FKHINHQVV

SEQ ID NO: 17952 - protein, 8 aa, Artificial Sequence
  Peptide Derived from Human Papillomavirus
FKKHCTLY

SEQ ID NO: 17953 - protein, 10 aa, Artificial Sequence
  Peptide Derived from Human Papillomavirus
FKKHCTLYTA

SEQ ID NO: 17954 - protein, 11 aa, Artificial Sequence
  Peptide Derived from Human Papillomavirus
FKKHCTLYTAV

SEQ ID NO: 17955 - protein, 9 aa, Artificial Sequence
  Peptide Derived from Human Papillomavirus
GHNVKHKSA

SEQ ID NO: 17956 - protein, 10 aa, Artificial Sequence
  Peptide Derived from Human Papillomavirus
GHNVKHKSAI

SEQ ID NO: 17957 - protein, 11 aa, Artificial Sequence
  Peptide Derived from Human Papillomavirus
GHNVKHKSAIV

SEQ ID NO: 17958 - protein, 8 aa, Artificial Sequence
  Peptide Derived from Human Papillomavirus
HKSAIVTL

SEQ ID NO: 17959 - protein, 10 aa, Artificial Sequence
  Peptide Derived from Human Papillomavirus
HKSAIVTLTY

SEQ ID NO: 17960 - protein, 8 aa, Artificial Sequence
  Peptide Derived from Human Papillomavirus
HRDSVDSA

SEQ ID NO: 17961 - protein, 10 aa, Artificial Sequence
  Peptide Derived from Human Papillomavirus
HRDSVDSAPI

SEQ ID NO: 17962 - protein, 11 aa, Artificial Sequence
  Peptide Derived from Human Papillomavirus
HRDSVDSAPIL

SEQ ID NO: 17963 - protein, 8 aa, Artificial Sequence
  Peptide Derived from Human Papillomavirus
IKKHGYTV

SEQ ID NO: 17964 - protein, 10 aa, Artificial Sequence
  Peptide Derived from Human Papillomavirus
IKKHGYTVEV

SEQ ID NO: 17965 - protein, 10 aa, Artificial Sequence
  Peptide Derived from Human Papillomavirus
IRQHLANHPA

SEQ ID NO: 17966 - protein, 11 aa, Artificial Sequence
  Peptide Derived from Human Papillomavirus
IRQHLANHPAA

SEQ ID NO: 17967 - protein, 8 aa, Artificial Sequence
  Peptide Derived from Human Papillomavirus
IRTYFVQF

SEQ ID NO: 17968 - protein, 8 aa, Artificial Sequence
  Peptide Derived from Human Papillomavirus
KHCTLYTA

SEQ ID NO: 17969 - protein, 9 aa, Artificial Sequence
  Peptide Derived from Human Papillomavirus
KHCTLYTAV

SEQ ID NO: 17970 - protein, 8 aa, Artificial Sequence
  Peptide Derived from Human Papillomavirus
KHGYTVEV

SEQ ID NO: 17971 - protein, 10 aa, Artificial Sequence
  Peptide Derived from Human Papillomavirus
KHGYTVEVQF

SEQ ID NO: 17972 - protein, 8 aa, Artificial Sequence
  Peptide Derived from Human Papillomavirus
KHINHQVV

SEQ ID NO: 17973 - protein, 11 aa, Artificial Sequence
  Peptide Derived from Human Papillomavirus
KHINHQVVPTL

SEQ ID NO: 17974 - protein, 9 aa, Artificial Sequence
  Peptide Derived from Human Papillomavirus
KHKSAIVTL

SEQ ID NO: 17975 - protein, 11 aa, Artificial Sequence
  Peptide Derived from Human Papillomavirus
KHKSAIVTLTY

SEQ ID NO: 17976 - protein, 8 aa, Artificial Sequence
  Peptide Derived from Human Papillomavirus
KHMRLECA

SEQ ID NO: 17977 - protein, 9 aa, Artificial Sequence
  Peptide Derived from Human Papillomavirus
KHMRLECAI

SEQ ID NO: 17978 - protein, 10 aa, Artificial Sequence
  Peptide Derived from Human Papillomavirus
KHMRLECAIY

SEQ ID NO: 17979 - protein, 11 aa, Artificial Sequence
  Peptide Derived from Human Papillomavirus
KHMRLECAIYY

SEQ ID NO: 17980 - protein, 9 aa, Artificial Sequence
  Peptide Derived from Human Papillomavirus
KKHCTLYTA

SEQ ID NO: 17981 - protein, 10 aa, Artificial Sequence
  Peptide Derived from Human Papillomavirus
KKHCTLYTAV

SEQ ID NO: 17982 - protein, 9 aa, Artificial Sequence
  Peptide Derived from Human Papillomavirus
KKHGYTVEV

SEQ ID NO: 17983 - protein, 11 aa, Artificial Sequence
  Peptide Derived from Human Papillomavirus
KKHGYTVEVQF

SEQ ID NO: 17984 - protein, 9 aa, Artificial Sequence
  Peptide Derived from Human Papillomavirus
LHRDSVDSA

SEQ ID NO: 17985 - protein, 11 aa, Artificial Sequence
  Peptide Derived from Human Papillomavirus
LHRDSVDSAPI

SEQ ID NO: 17986 - protein, 8 aa, Artificial Sequence
  Peptide Derived from Human Papillomavirus
LKCLRYRF

SEQ ID NO: 17987 - protein, 8 aa, Artificial Sequence
  Peptide Derived from Human Papillomavirus
LKGDANTL

SEQ ID NO: 17988 - protein, 11 aa, Artificial Sequence
  Peptide Derived from Human Papillomavirus
LKGDANTLKCL

SEQ ID NO: 17989 - protein, 8 aa, Artificial Sequence
  Peptide Derived from Human Papillomavirus
LRDHIDYW

SEQ ID NO: 17990 - protein, 11 aa, Artificial Sequence
  Peptide Derived from Human Papillomavirus
LRDHIDYWKHM

SEQ ID NO: 17991 - protein, 11 aa, Artificial Sequence
  Peptide Derived from Human Papillomavirus
LRYRFKKHCTL

SEQ ID NO: 17992 - protein, 9 aa, Artificial Sequence
  Peptide Derived from Human Papillomavirus
MHYTNWTHI

SEQ ID NO: 17993 - protein, 10 aa, Artificial Sequence
  Peptide Derived from Human Papillomavirus
MHYTNWTHIY

SEQ ID NO: 17994 - protein, 11 aa, Artificial Sequence
  Peptide Derived from Human Papillomavirus
MHYTNWTHIYI

SEQ ID NO: 17995 - protein, 8 aa, Artificial Sequence
  Peptide Derived from Human Papillomavirus
MRLECAIY

SEQ ID NO: 17996 - protein, 9 aa, Artificial Sequence
  Peptide Derived from Human Papillomavirus
MRLECAIYY

SEQ ID NO: 17997 - protein, 11 aa, Artificial Sequence
  Peptide Derived from Human Papillomavirus
MRLECAIYYKA

SEQ ID NO: 17998 - protein, 10 aa, Artificial Sequence
  Peptide Derived from Human Papillomavirus
NHPAATHTKA

SEQ ID NO: 17999 - protein, 11 aa, Artificial Sequence
  Peptide Derived from Human Papillomavirus
NHPAATHTKAV

SEQ ID NO: 18000 - protein, 8 aa, Artificial Sequence
  Peptide Derived from Human Papillomavirus
NHQVVPTL

SEQ ID NO: 18001 - protein, 9 aa, Artificial Sequence
  Peptide Derived from Human Papillomavirus
NHQVVPTLA

SEQ ID NO: 18002 - protein, 10 aa, Artificial Sequence
  Peptide Derived from Human Papillomavirus
NHQVVPTLAV

SEQ ID NO: 18003 - protein, 9 aa, Artificial Sequence
  Peptide Derived from Human Papillomavirus
NKALQAIEL

SEQ ID NO: 18004 - protein, 11 aa, Artificial Sequence
  Peptide Derived from Human Papillomavirus
NKALQAIELQL

SEQ ID NO: 18005 - protein, 8 aa, Artificial Sequence
  Peptide Derived from Human Papillomavirus
NKVWEVHA

SEQ ID NO: 18006 - protein, 10 aa, Artificial Sequence
  Peptide Derived from Human Papillomavirus
PKTITVSTGF

SEQ ID NO: 18007 - protein, 11 aa, Artificial Sequence
  Peptide Derived from Human Papillomavirus
PKTITVSTGFM

SEQ ID NO: 18008 - protein, 8 aa, Artificial Sequence
  Peptide Derived from Human Papillomavirus
QHLANHPA

SEQ ID NO: 18009 - protein, 9 aa, Artificial Sequence
  Peptide Derived from Human Papillomavirus
QHLANHPAA

SEQ ID NO: 18010 - protein, 9 aa, Artificial Sequence
  Peptide Derived from Human Papillomavirus
QRDQFLSQV

SEQ ID NO: 18011 - protein, 11 aa, Artificial Sequence
  Peptide Derived from Human Papillomavirus
QRDQFLSQVKI

SEQ ID NO: 18012 - protein, 10 aa, Artificial Sequence
  Peptide Derived from Human Papillomavirus
QRLNVCQDKI

SEQ ID NO: 18013 - protein, 11 aa, Artificial Sequence
  Peptide Derived from Human Papillomavirus
QRLNVCQDKIL

SEQ ID NO: 18014 - protein, 8 aa, Artificial Sequence
  Peptide Derived from Human Papillomavirus
SKNKALQA

SEQ ID NO: 18015 - protein, 9 aa, Artificial Sequence
  Peptide Derived from Human Papillomavirus
SKNKALQAI

SEQ ID NO: 18016 - protein, 11 aa, Artificial Sequence
  Peptide Derived from Human Papillomavirus
SKNKALQAIEL

SEQ ID NO: 18017 - protein, 8 aa, Artificial Sequence
  Peptide Derived from Human Papillomavirus
SKNKVWEV

SEQ ID NO: 18018 - protein, 10 aa, Artificial Sequence
  Peptide Derived from Human Papillomavirus
SKNKVWEVHA

SEQ ID NO: 18019 - protein, 9 aa, Artificial Sequence
  Peptide Derived from Human Papillomavirus
THIYICEEA

SEQ ID NO: 18020 - protein, 11 aa, Artificial Sequence
  Peptide Derived from Human Papillomavirus
THIYICEEASV

SEQ ID NO: 18021 - protein, 8 aa, Artificial Sequence
  Peptide Derived from Human Papillomavirus
THTKAVAL

SEQ ID NO: 18022 - protein, 10 aa, Artificial Sequence
  Peptide Derived from Human Papillomavirus
THYENDSTDL

SEQ ID NO: 18023 - protein, 9 aa, Artificial Sequence
  Peptide Derived from Human Papillomavirus
TKLLHRDSV

SEQ ID NO: 18024 - protein, 8 aa, Artificial Sequence
  Peptide Derived from Human Papillomavirus
VHAGGQVI

SEQ ID NO: 18025 - protein, 9 aa, Artificial Sequence
  Peptide Derived from Human Papillomavirus
VHAGGQVIL

SEQ ID NO: 18026 - protein, 8 aa, Artificial Sequence
  Peptide Derived from Human Papillomavirus
VHEGIRTY

SEQ ID NO: 18027 - protein, 9 aa, Artificial Sequence
  Peptide Derived from Human Papillomavirus
VHEGIRTYF

SEQ ID NO: 18028 - protein, 10 aa, Artificial Sequence
  Peptide Derived from Human Papillomavirus
VHEGIRTYFV

SEQ ID NO: 18029 - protein, 10 aa, Artificial Sequence
  Peptide Derived from Human Papillomavirus
VHLKGDANTL

SEQ ID NO: 18030 - protein, 8 aa, Artificial Sequence
  Peptide Derived from Human Papillomavirus
VKHKSAIV

SEQ ID NO: 18031 - protein, 10 aa, Artificial Sequence
  Peptide Derived from Human Papillomavirus
VKHKSAIVTL

SEQ ID NO: 18032 - protein, 9 aa, Artificial Sequence
  Peptide Derived from Human Papillomavirus
VKIPKTITV

SEQ ID NO: 18033 - protein, 8 aa, Artificial Sequence
  Peptide Derived from Human Papillomavirus
WHWTGHNV

SEQ ID NO: 18034 - protein, 9 aa, Artificial Sequence
  Peptide Derived from Human Papillomavirus
WKHMRLECA

SEQ ID NO: 18035 - protein, 10 aa, Artificial Sequence
  Peptide Derived from Human Papillomavirus
WKHMRLECAI

SEQ ID NO: 18036 - protein, 11 aa, Artificial Sequence
  Peptide Derived from Human Papillomavirus
WKHMRLECAIY

SEQ ID NO: 18037 - protein, 8 aa, Artificial Sequence
  Peptide Derived from Human Papillomavirus
YKAREMGF

SEQ ID NO: 18038 - protein, 11 aa, Artificial Sequence
  Peptide Derived from Human Papillomavirus
YKAREMGFKHI

SEQ ID NO: 18039 - protein, 9 aa, Artificial Sequence
  Peptide Derived from Human Papillomavirus
YRFKKHCTL

SEQ ID NO: 18040 - protein, 10 aa, Artificial Sequence
  Peptide Derived from Human Papillomavirus
YRFKKHCTLY

SEQ ID NO: 18041 - protein, 8 aa, Artificial Sequence
  Peptide Derived from Human Papillomavirus
FRCFIVYI

SEQ ID NO: 18042 - protein, 9 aa, Artificial Sequence
  Peptide Derived from Human Papillomavirus
FRCFIVYII

SEQ ID NO: 18043 - protein, 10 aa, Artificial Sequence
  Peptide Derived from Human Papillomavirus
FRCFIVYIIF

SEQ ID NO: 18044 - protein, 11 aa, Artificial Sequence
  Peptide Derived from Human Papillomavirus
FRCFIVYIIFV

SEQ ID NO: 18045 - protein, 8 aa, Artificial Sequence
  Peptide Derived from Human Papillomavirus
IHTHARFL

SEQ ID NO: 18046 - protein, 9 aa, Artificial Sequence
  Peptide Derived from Human Papillomavirus
IHTHARFLI

SEQ ID NO: 18047 - protein, 8 aa, Artificial Sequence
  Peptide Derived from Human Papillomavirus
IRPLLLSV

SEQ ID NO: 18048 - protein, 11 aa, Artificial Sequence
  Peptide Derived from Human Papillomavirus
IRPLLLSVSTY

SEQ ID NO: 18049 - protein, 10 aa, Artificial Sequence
  Peptide Derived from Human Papillomavirus
CKQQLLRREV

SEQ ID NO: 18050 - protein, 11 aa, Artificial Sequence
  Peptide Derived from Human Papillomavirus
CKQQLLRREVY

SEQ ID NO: 18051 - protein, 10 aa, Artificial Sequence
  Peptide Derived from Human Papillomavirus
DKCLKFYSKI

SEQ ID NO: 18052 - protein, 9 aa, Artificial Sequence
  Peptide Derived from Human Papillomavirus
DKKQRFHNI

SEQ ID NO: 18053 - protein, 9 aa, Artificial Sequence
  Peptide Derived from Human Papillomavirus
ERPRKLPQL

SEQ ID NO: 18054 - protein, 8 aa, Artificial Sequence
  Peptide Derived from Human Papillomavirus
FHNIRGRW

SEQ ID NO: 18055 - protein, 8 aa, Artificial Sequence
  Peptide Derived from Human Papillomavirus
FRDLCIVY

SEQ ID NO: 18056 - protein, 8 aa, Artificial Sequence
  Peptide Derived from Human Papillomavirus
GRWTGRCM

SEQ ID NO: 18057 - protein, 9 aa, Artificial Sequence
  Peptide Derived from Human Papillomavirus
IHDIILECV

SEQ ID NO: 18058 - protein, 10 aa, Artificial Sequence
  Peptide Derived from Human Papillomavirus
IHDIILECVY

SEQ ID NO: 18059 - protein, 10 aa, Artificial Sequence
  Peptide Derived from Human Papillomavirus
IRCINCQKPL

SEQ ID NO: 18060 - protein, 10 aa, Artificial Sequence
  Peptide Derived from Human Papillomavirus
IRGRWTGRCM

SEQ ID NO: 18061 - protein, 8 aa, Artificial Sequence
  Peptide Derived from Human Papillomavirus
KKQRFHNI

SEQ ID NO: 18062 - protein, 10 aa, Artificial Sequence
  Peptide Derived from Human Papillomavirus
LKFYSKISEY

SEQ ID NO: 18063 - protein, 8 aa, Artificial Sequence
  Peptide Derived from Human Papillomavirus
LRREVYDF

SEQ ID NO: 18064 - protein, 9 aa, Artificial Sequence
  Peptide Derived from Human Papillomavirus
LRREVYDFA

SEQ ID NO: 18065 - protein, 10 aa, Artificial Sequence
  Peptide Derived from Human Papillomavirus
LRREVYDFAF

SEQ ID NO: 18066 - protein, 8 aa, Artificial Sequence
  Peptide Derived from Human Papillomavirus
MHQKRTAM

SEQ ID NO: 18067 - protein, 9 aa, Artificial Sequence
  Peptide Derived from Human Papillomavirus
MHQKRTAMF

SEQ ID NO: 18068 - protein, 8 aa, Artificial Sequence
  Peptide Derived from Human Papillomavirus
NKPLCDLL

SEQ ID NO: 18069 - protein, 9 aa, Artificial Sequence
  Peptide Derived from Human Papillomavirus
NKPLCDLLI

SEQ ID NO: 18070 - protein, 11 aa, Artificial Sequence
  Peptide Derived from Human Papillomavirus
PRKLPQLCTEL

SEQ ID NO: 18071 - protein, 10 aa, Artificial Sequence
  Peptide Derived from Human Papillomavirus
QRFHNIRGRW

SEQ ID NO: 18072 - protein, 10 aa, Artificial Sequence
  Peptide Derived from Human Papillomavirus
QRHLDKKQRF

SEQ ID NO: 18073 - protein, 9 aa, Artificial Sequence
  Peptide Derived from Human Papillomavirus
RHLDKKQRF

SEQ ID NO: 18074 - protein, 8 aa, Artificial Sequence
  Peptide Derived from Human Papillomavirus
RHYCYSLY

SEQ ID NO: 18075 - protein, 10 aa, Artificial Sequence
  Peptide Derived from Human Papillomavirus
RKLPQLCTEL

SEQ ID NO: 18076 - protein, 8 aa, Artificial Sequence
  Peptide Derived from Human Papillomavirus
RREVYDFA

SEQ ID NO: 18077 - protein, 9 aa, Artificial Sequence
  Peptide Derived from Human Papillomavirus
RREVYDFAF

SEQ ID NO: 18078 - protein, 9 aa, Artificial Sequence
  Peptide Derived from Human Papillomavirus
SKISEYRHY

SEQ ID NO: 18079 - protein, 11 aa, Artificial Sequence
  Peptide Derived from Human Papillomavirus
SKISEYRHYCY

SEQ ID NO: 18080 - protein, 9 aa, Artificial Sequence
  Peptide Derived from Human Papillomavirus
SRTRRETQL

SEQ ID NO: 18081 - protein, 8 aa, Artificial Sequence
  Peptide Derived from Human Papillomavirus
YRDGNPYA

SEQ ID NO: 18082 - protein, 9 aa, Artificial Sequence
  Peptide Derived from Human Papillomavirus
YRDGNPYAV

SEQ ID NO: 18083 - protein, 8 aa, Artificial Sequence
  Peptide Derived from Human Papillomavirus
YRHYCYSL

SEQ ID NO: 18084 - protein, 9 aa, Artificial Sequence
  Peptide Derived from Human Papillomavirus
YRHYCYSLY

SEQ ID NO: 18085 - protein, 8 aa, Artificial Sequence
  Peptide Derived from Human Papillomavirus
AHYNIVTF

SEQ ID NO: 18086 - protein, 9 aa, Artificial Sequence
  Peptide Derived from Human Papillomavirus
CKCDSTLRL

SEQ ID NO: 18087 - protein, 11 aa, Artificial Sequence
  Peptide Derived from Human Papillomavirus
CKCDSTLRLCV

SEQ ID NO: 18088 - protein, 8 aa, Artificial Sequence
  Peptide Derived from Human Papillomavirus
DRAHYNIV

SEQ ID NO: 18089 - protein, 10 aa, Artificial Sequence
  Peptide Derived from Human Papillomavirus
DRAHYNIVTF

SEQ ID NO: 18090 - protein, 8 aa, Artificial Sequence
  Peptide Derived from Human Papillomavirus
IRTLEDLL

SEQ ID NO: 18091 - protein, 9 aa, Artificial Sequence
  Peptide Derived from Human Papillomavirus
IRTLEDLLM

SEQ ID NO: 18092 - protein, 8 aa, Artificial Sequence
  Peptide Derived from Human Papillomavirus
LHEYMLDL

SEQ ID NO: 18093 - protein, 10 aa, Artificial Sequence
  Peptide Derived from Human Papillomavirus
LRLCVQSTHV

SEQ ID NO: 18094 - protein, 8 aa, Artificial Sequence
  Peptide Derived from Human Papillomavirus
MHGDTPTL

SEQ ID NO: 18095 - protein, 11 aa, Artificial Sequence
  Peptide Derived from Human Papillomavirus
MHGDTPTLHEY

SEQ ID NO: 18096 - protein, 8 aa, Artificial Sequence
  Peptide Derived from Human Papillomavirus
THVDIRTL

SEQ ID NO: 18097 - protein, 11 aa, Artificial Sequence
  Peptide Derived from Human Papillomavirus
THVDIRTLEDL

SEQ ID NO: 18098 - protein, 8 aa, Artificial Sequence
  Peptide Derived from Human Papillomavirus
AKRKKRKL

SEQ ID NO: 18099 - protein, 9 aa, Artificial Sequence
  Peptide Derived from Human Papillomavirus
ARTNIYYHA

SEQ ID NO: 18100 - protein, 9 aa, Artificial Sequence
  Peptide Derived from Human Papillomavirus
CKITLTADV

SEQ ID NO: 18101 - protein, 10 aa, Artificial Sequence
  Peptide Derived from Human Papillomavirus
CKITLTADVM

SEQ ID NO: 18102 - protein, 9 aa, Artificial Sequence
  Peptide Derived from Human Papillomavirus
CKPPIGEHW

SEQ ID NO: 18103 - protein, 9 aa, Artificial Sequence
  Peptide Derived from Human Papillomavirus
CKYPDYIKM

SEQ ID NO: 18104 - protein, 10 aa, Artificial Sequence
  Peptide Derived from Human Papillomavirus
CKYPDYIKMV

SEQ ID NO: 18105 - protein, 10 aa, Artificial Sequence
  Peptide Derived from Human Papillomavirus
EKFSADLDQF

SEQ ID NO: 18106 - protein, 11 aa, Artificial Sequence
  Peptide Derived from Human Papillomavirus
FKEYLRHGEEY

SEQ ID NO: 18107 - protein, 11 aa, Artificial Sequence
  Peptide Derived from Human Papillomavirus
FRIHLPDPNKF

SEQ ID NO: 18108 - protein, 8 aa, Artificial Sequence
  Peptide Derived from Human Papillomavirus
GHNNGICW

SEQ ID NO: 18109 - protein, 8 aa, Artificial Sequence
  Peptide Derived from Human Papillomavirus
GHPLLNKL

SEQ ID NO: 18110 - protein, 9 aa, Artificial Sequence
  Peptide Derived from Human Papillomavirus
GKGSPCTNV

SEQ ID NO: 18111 - protein, 10 aa, Artificial Sequence
  Peptide Derived from Human Papillomavirus
GKGSPCTNVA

SEQ ID NO: 18112 - protein, 11 aa, Artificial Sequence
  Peptide Derived from Human Papillomavirus
GKGSPCTNVAV

SEQ ID NO: 18113 - protein, 8 aa, Artificial Sequence
  Peptide Derived from Human Papillomavirus
GRGQPLGV

SEQ ID NO: 18114 - protein, 10 aa, Artificial Sequence
  Peptide Derived from Human Papillomavirus
GRGQPLGVGI

SEQ ID NO: 18115 - protein, 8 aa, Artificial Sequence
  Peptide Derived from Human Papillomavirus
GRKFLLQA

SEQ ID NO: 18116 - protein, 10 aa, Artificial Sequence
  Peptide Derived from Human Papillomavirus
GRKFLLQAGL

SEQ ID NO: 18117 - protein, 9 aa, Artificial Sequence
  Peptide Derived from Human Papillomavirus
IHLPDPNKF

SEQ ID NO: 18118 - protein, 11 aa, Artificial Sequence
  Peptide Derived from Human Papillomavirus
IHLPDPNKFGF

SEQ ID NO: 18119 - protein, 8 aa, Artificial Sequence
  Peptide Derived from Human Papillomavirus
IHSMNSTI

SEQ ID NO: 18120 - protein, 9 aa, Artificial Sequence
  Peptide Derived from Human Papillomavirus
IHSMNSTIL

SEQ ID NO: 18121 - protein, 8 aa, Artificial Sequence
  Peptide Derived from Human Papillomavirus
IKGSGSTA

SEQ ID NO: 18122 - protein, 10 aa, Artificial Sequence
  Peptide Derived from Human Papillomavirus
IKGSGSTANL

SEQ ID NO: 18123 - protein, 11 aa, Artificial Sequence
  Peptide Derived from Human Papillomavirus
IKGSGSTANLA

SEQ ID NO: 18124 - protein, 9 aa, Artificial Sequence
  Peptide Derived from Human Papillomavirus
IKKPNNNKI

SEQ ID NO: 18125 - protein, 10 aa, Artificial Sequence
  Peptide Derived from Human Papillomavirus
IKKPNNNKIL

SEQ ID NO: 18126 - protein, 11 aa, Artificial Sequence
  Peptide Derived from Human Papillomavirus
IKKPNNNKILV

SEQ ID NO: 18127 - protein, 8 aa, Artificial Sequence
  Peptide Derived from Human Papillomavirus
IKMVSEPY

SEQ ID NO: 18128 - protein, 8 aa, Artificial Sequence
  Peptide Derived from Human Papillomavirus
KKPNNNKI

SEQ ID NO: 18129 - protein, 9 aa, Artificial Sequence
  Peptide Derived from Human Papillomavirus
KKPNNNKIL

SEQ ID NO: 18130 - protein, 10 aa, Artificial Sequence
  Peptide Derived from Human Papillomavirus
KKPNNNKILV

SEQ ID NO: 18131 - protein, 8 aa, Artificial Sequence
  Peptide Derived from Human Papillomavirus
KKYTFWEV

SEQ ID NO: 18132 - protein, 10 aa, Artificial Sequence
  Peptide Derived from Human Papillomavirus
KKYTFWEVNL

SEQ ID NO: 18133 - protein, 9 aa, Artificial Sequence
  Peptide Derived from Human Papillomavirus
LKAKPKFTL

SEQ ID NO: 18134 - protein, 9 aa, Artificial Sequence
  Peptide Derived from Human Papillomavirus
LKEKFSADL

SEQ ID NO: 18135 - protein, 9 aa, Artificial Sequence
  Peptide Derived from Human Papillomavirus
LKKYTFWEV

SEQ ID NO: 18136 - protein, 11 aa, Artificial Sequence
  Peptide Derived from Human Papillomavirus
LKKYTFWEVNL

SEQ ID NO: 18137 - protein, 9 aa, Artificial Sequence
  Peptide Derived from Human Papillomavirus
LRHGEEYDL

SEQ ID NO: 18138 - protein, 11 aa, Artificial Sequence
  Peptide Derived from Human Papillomavirus
LRHGEEYDLQF

SEQ ID NO: 18139 - protein, 8 aa, Artificial Sequence
  Peptide Derived from Human Papillomavirus
LRREQMFV

SEQ ID NO: 18140 - protein, 11 aa, Artificial Sequence
  Peptide Derived from Human Papillomavirus
LRREQMFVRHL

SEQ ID NO: 18141 - protein, 10 aa, Artificial Sequence
  Peptide Derived from Human Papillomavirus
NKFGFPDTSF

SEQ ID NO: 18142 - protein, 11 aa, Artificial Sequence
  Peptide Derived from Human Papillomavirus
NKFGFPDTSFY

SEQ ID NO: 18143 - protein, 8 aa, Artificial Sequence
  Peptide Derived from Human Papillomavirus
NKILVPKV

SEQ ID NO: 18144 - protein, 11 aa, Artificial Sequence
  Peptide Derived from Human Papillomavirus
NKILVPKVSGL

SEQ ID NO: 18145 - protein, 9 aa, Artificial Sequence
  Peptide Derived from Human Papillomavirus
NKLDDTENA

SEQ ID NO: 18146 - protein, 11 aa, Artificial Sequence
  Peptide Derived from Human Papillomavirus
NKLDDTENASA

SEQ ID NO: 18147 - protein, 9 aa, Artificial Sequence
  Peptide Derived from Human Papillomavirus
NKPYWLQRA

SEQ ID NO: 18148 - protein, 9 aa, Artificial Sequence
  Peptide Derived from Human Papillomavirus
NKSEVPLDI

SEQ ID NO: 18149 - protein, 10 aa, Artificial Sequence
  Peptide Derived from Human Papillomavirus
NRAGAVGENV

SEQ ID NO: 18150 - protein, 9 aa, Artificial Sequence
  Peptide Derived from Human Papillomavirus
NRECISMDY

SEQ ID NO: 18151 - protein, 9 aa, Artificial Sequence
  Peptide Derived from Human Papillomavirus
PKEDPLKKY

SEQ ID NO: 18152 - protein, 11 aa, Artificial Sequence
  Peptide Derived from Human Papillomavirus
PKEDPLKKYTF

SEQ ID NO: 18153 - protein, 10 aa, Artificial Sequence
  Peptide Derived from Human Papillomavirus
PKFTLGKRKA

SEQ ID NO: 18154 - protein, 8 aa, Artificial Sequence
  Peptide Derived from Human Papillomavirus
PKVSGLQY

SEQ ID NO: 18155 - protein, 10 aa, Artificial Sequence
  Peptide Derived from Human Papillomavirus
PKVSGLQYRV

SEQ ID NO: 18156 - protein, 11 aa, Artificial Sequence
  Peptide Derived from Human Papillomavirus
PKVSGLQYRVF

SEQ ID NO: 18157 - protein, 10 aa, Artificial Sequence
  Peptide Derived from Human Papillomavirus
QRAQGHNNGI

SEQ ID NO: 18158 - protein, 8 aa, Artificial Sequence
  Peptide Derived from Human Papillomavirus
QRLVWACV

SEQ ID NO: 18159 - protein, 10 aa, Artificial Sequence
  Peptide Derived from Human Papillomavirus
QRLVWACVGV

SEQ ID NO: 18160 - protein, 8 aa, Artificial Sequence
  Peptide Derived from Human Papillomavirus
RHGEEYDL

SEQ ID NO: 18161 - protein, 10 aa, Artificial Sequence
  Peptide Derived from Human Papillomavirus
RHGEEYDLQF

SEQ ID NO: 18162 - protein, 11 aa, Artificial Sequence
  Peptide Derived from Human Papillomavirus
RHGEEYDLQFI

SEQ ID NO: 18163 - protein, 9 aa, Artificial Sequence
  Peptide Derived from Human Papillomavirus
RHLFNRAGA

SEQ ID NO: 18164 - protein, 10 aa, Artificial Sequence
  Peptide Derived from Human Papillomavirus
RHLFNRAGAV

SEQ ID NO: 18165 - protein, 9 aa, Artificial Sequence
  Peptide Derived from Human Papillomavirus
RKFLLQAGL

SEQ ID NO: 18166 - protein, 11 aa, Artificial Sequence
  Peptide Derived from Human Papillomavirus
RKFLLQAGLKA

SEQ ID NO: 18167 - protein, 10 aa, Artificial Sequence
  Peptide Derived from Human Papillomavirus
RREQMFVRHL

SEQ ID NO: 18168 - protein, 11 aa, Artificial Sequence
  Peptide Derived from Human Papillomavirus
RREQMFVRHLF

SEQ ID NO: 18169 - protein, 9 aa, Artificial Sequence
  Peptide Derived from Human Papillomavirus
SKVVSTDEY

SEQ ID NO: 18170 - protein, 10 aa, Artificial Sequence
  Peptide Derived from Human Papillomavirus
SKVVSTDEYV

SEQ ID NO: 18171 - protein, 11 aa, Artificial Sequence
  Peptide Derived from Human Papillomavirus
SKVVSTDEYVA

SEQ ID NO: 18172 - protein, 10 aa, Artificial Sequence
  Peptide Derived from Human Papillomavirus
SRLLAVGHPY

SEQ ID NO: 18173 - protein, 11 aa, Artificial Sequence
  Peptide Derived from Human Papillomavirus
SRLLAVGHPYF

SEQ ID NO: 18174 - protein, 8 aa, Artificial Sequence
  Peptide Derived from Human Papillomavirus
TRSTNMSL

SEQ ID NO: 18175 - protein, 10 aa, Artificial Sequence
  Peptide Derived from Human Papillomavirus
TRSTNMSLCA

SEQ ID NO: 18176 - protein, 11 aa, Artificial Sequence
  Peptide Derived from Human Papillomavirus
TRSTNMSLCAA

SEQ ID NO: 18177 - protein, 8 aa, Artificial Sequence
  Peptide Derived from Human Papillomavirus
VRHLFNRA

SEQ ID NO: 18178 - protein, 10 aa, Artificial Sequence
  Peptide Derived from Human Papillomavirus
VRHLFNRAGA

SEQ ID NO: 18179 - protein, 11 aa, Artificial Sequence
  Peptide Derived from Human Papillomavirus
VRHLFNRAGAV

SEQ ID NO: 18180 - protein, 8 aa, Artificial Sequence
  Peptide Derived from Human Papillomavirus
YHAGTSRL

SEQ ID NO: 18181 - protein, 9 aa, Artificial Sequence
  Peptide Derived from Human Papillomavirus
YHAGTSRLL

SEQ ID NO: 18182 - protein, 10 aa, Artificial Sequence
  Peptide Derived from Human Papillomavirus
YHAGTSRLLA

SEQ ID NO: 18183 - protein, 11 aa, Artificial Sequence
  Peptide Derived from Human Papillomavirus
YHAGTSRLLAV

SEQ ID NO: 18184 - protein, 9 aa, Artificial Sequence
  Peptide Derived from Human Papillomavirus
YHIFFQMSL

SEQ ID NO: 18185 - protein, 10 aa, Artificial Sequence
  Peptide Derived from Human Papillomavirus
YHIFFQMSLW

SEQ ID NO: 18186 - protein, 11 aa, Artificial Sequence
  Peptide Derived from Human Papillomavirus
YHIFFQMSLWL

SEQ ID NO: 18187 - protein, 9 aa, Artificial Sequence
  Peptide Derived from Human Papillomavirus
YKNTNFKEY

SEQ ID NO: 18188 - protein, 10 aa, Artificial Sequence
  Peptide Derived from Human Papillomavirus
YKNTNFKEYL

SEQ ID NO: 18189 - protein, 8 aa, Artificial Sequence
  Peptide Derived from Human Papillomavirus
YKQTQLCL

SEQ ID NO: 18190 - protein, 9 aa, Artificial Sequence
  Peptide Derived from Human Papillomavirus
YKQTQLCLI

SEQ ID NO: 18191 - protein, 8 aa, Artificial Sequence
  Peptide Derived from Human Papillomavirus
YRFVTSQA

SEQ ID NO: 18192 - protein, 9 aa, Artificial Sequence
  Peptide Derived from Human Papillomavirus
YRFVTSQAI

SEQ ID NO: 18193 - protein, 10 aa, Artificial Sequence
  Peptide Derived from Human Papillomavirus
YRFVTSQAIA

SEQ ID NO: 18194 - protein, 8 aa, Artificial Sequence
  Peptide Derived from Human Papillomavirus
YRVFRIHL

SEQ ID NO: 18195 - protein, 9 aa, Artificial Sequence
  Peptide Derived from Human Papillomavirus
AKRTKRASA

SEQ ID NO: 18196 - protein, 9 aa, Artificial Sequence
  Peptide Derived from Human Papillomavirus
AKVHYYYDF

SEQ ID NO: 18197 - protein, 11 aa, Artificial Sequence
  Peptide Derived from Human Papillomavirus
CKQAGTCPPDI

SEQ ID NO: 18198 - protein, 10 aa, Artificial Sequence
  Peptide Derived from Human Papillomavirus
GHFTLSSSTI

SEQ ID NO: 18199 - protein, 8 aa, Artificial Sequence
  Peptide Derived from Human Papillomavirus
GKSIGAKV

SEQ ID NO: 18200 - protein, 10 aa, Artificial Sequence
  Peptide Derived from Human Papillomavirus
GKSIGAKVHY

SEQ ID NO: 18201 - protein, 11 aa, Artificial Sequence
  Peptide Derived from Human Papillomavirus
GKSIGAKVHYY

SEQ ID NO: 18202 - protein, 8 aa, Artificial Sequence
  Peptide Derived from Human Papillomavirus
GKTIADQI

SEQ ID NO: 18203 - protein, 9 aa, Artificial Sequence
  Peptide Derived from Human Papillomavirus
GKTIADQIL

SEQ ID NO: 18204 - protein, 11 aa, Artificial Sequence
  Peptide Derived from Human Papillomavirus
GKTIADQILQY

SEQ ID NO: 18205 - protein, 8 aa, Artificial Sequence
  Peptide Derived from Human Papillomavirus
GRTGYIPL

SEQ ID NO: 18206 - protein, 11 aa, Artificial Sequence
  Peptide Derived from Human Papillomavirus
HKRSAKRTKRA

SEQ ID NO: 18207 - protein, 8 aa, Artificial Sequence
  Peptide Derived from Human Papillomavirus
KRASATQL

SEQ ID NO: 18208 - protein, 9 aa, Artificial Sequence
  Peptide Derived from Human Papillomavirus
KRASATQLY

SEQ ID NO: 18209 - protein, 10 aa, Artificial Sequence
  Peptide Derived from Human Papillomavirus
KRLPYFFSDV

SEQ ID NO: 18210 - protein, 8 aa, Artificial Sequence
  Peptide Derived from Human Papillomavirus
KRRKRLPY

SEQ ID NO: 18211 - protein, 9 aa, Artificial Sequence
  Peptide Derived from Human Papillomavirus
KRRKRLPYF

SEQ ID NO: 18212 - protein, 10 aa, Artificial Sequence
  Peptide Derived from Human Papillomavirus
KRRKRLPYFF

SEQ ID NO: 18213 - protein, 10 aa, Artificial Sequence
  Peptide Derived from Human Papillomavirus
KRSAKRTKRA

SEQ ID NO: 18214 - protein, 8 aa, Artificial Sequence
  Peptide Derived from Human Papillomavirus
KRTKRASA

SEQ ID NO: 18215 - protein, 11 aa, Artificial Sequence
  Peptide Derived from Human Papillomavirus
KRTKRASATQL

SEQ ID NO: 18216 - protein, 8 aa, Artificial Sequence
  Peptide Derived from Human Papillomavirus
LHPSYYML

SEQ ID NO: 18217 - protein, 8 aa, Artificial Sequence
  Peptide Derived from Human Papillomavirus
LRKRRKRL

SEQ ID NO: 18218 - protein, 10 aa, Artificial Sequence
  Peptide Derived from Human Papillomavirus
LRKRRKRLPY

SEQ ID NO: 18219 - protein, 11 aa, Artificial Sequence
  Peptide Derived from Human Papillomavirus
LRKRRKRLPYF

SEQ ID NO: 18220 - protein, 9 aa, Artificial Sequence
  Peptide Derived from Human Papillomavirus
LRTRSGKSI

SEQ ID NO: 18221 - protein, 11 aa, Artificial Sequence
  Peptide Derived from Human Papillomavirus
LRTRSGKSIGA

SEQ ID NO: 18222 - protein, 8 aa, Artificial Sequence
  Peptide Derived from Human Papillomavirus
PKVEGKTI

SEQ ID NO: 18223 - protein, 9 aa, Artificial Sequence
  Peptide Derived from Human Papillomavirus
PKVEGKTIA

SEQ ID NO: 18224 - protein, 8 aa, Artificial Sequence
  Peptide Derived from Human Papillomavirus
RKRLPYFF

SEQ ID NO: 18225 - protein, 11 aa, Artificial Sequence
  Peptide Derived from Human Papillomavirus
RKRLPYFFSDV

SEQ ID NO: 18226 - protein, 9 aa, Artificial Sequence
  Peptide Derived from Human Papillomavirus
RKRRKRLPY

SEQ ID NO: 18227 - protein, 10 aa, Artificial Sequence
  Peptide Derived from Human Papillomavirus
RKRRKRLPYF

SEQ ID NO: 18228 - protein, 11 aa, Artificial Sequence
  Peptide Derived from Human Papillomavirus
RKRRKRLPYFF

SEQ ID NO: 18229 - protein, 8 aa, Artificial Sequence
  Peptide Derived from Human Papillomavirus
RRKRLPYF

SEQ ID NO: 18230 - protein, 9 aa, Artificial Sequence
  Peptide Derived from Human Papillomavirus
RRKRLPYFF

SEQ ID NO: 18231 - protein, 10 aa, Artificial Sequence
  Peptide Derived from Human Papillomavirus
RRTGIRYSRI

SEQ ID NO: 18232 - protein, 9 aa, Artificial Sequence
  Peptide Derived from Human Papillomavirus
SHAALPTSI

SEQ ID NO: 18233 - protein, 9 aa, Artificial Sequence
  Peptide Derived from Human Papillomavirus
SRIGNKQTL

SEQ ID NO: 18234 - protein, 9 aa, Artificial Sequence
  Peptide Derived from Human Papillomavirus
SRPVARLGL

SEQ ID NO: 18235 - protein, 10 aa, Artificial Sequence
  Peptide Derived from Human Papillomavirus
SRPVARLGLY

SEQ ID NO: 18236 - protein, 8 aa, Artificial Sequence
  Peptide Derived from Human Papillomavirus
SRRTGIRY

SEQ ID NO: 18237 - protein, 11 aa, Artificial Sequence
  Peptide Derived from Human Papillomavirus
SRRTGIRYSRI

SEQ ID NO: 18238 - protein, 9 aa, Artificial Sequence
  Peptide Derived from Human Papillomavirus
SRTTQQVKV

SEQ ID NO: 18239 - protein, 10 aa, Artificial Sequence
  Peptide Derived from Human Papillomavirus
SRTTQQVKVV

SEQ ID NO: 18240 - protein, 9 aa, Artificial Sequence
  Peptide Derived from Human Papillomavirus
THNYEEIPM

SEQ ID NO: 18241 - protein, 10 aa, Artificial Sequence
  Peptide Derived from Human Papillomavirus
TKLITYDNPA

SEQ ID NO: 18242 - protein, 11 aa, Artificial Sequence
  Peptide Derived from Human Papillomavirus
TKLITYDNPAY

SEQ ID NO: 18243 - protein, 9 aa, Artificial Sequence
  Peptide Derived from Human Papillomavirus
TKRASATQL

SEQ ID NO: 18244 - protein, 10 aa, Artificial Sequence
  Peptide Derived from Human Papillomavirus
TKRASATQLY

SEQ ID NO: 18245 - protein, 10 aa, Artificial Sequence
  Peptide Derived from Human Papillomavirus
TRPPTATDTL

SEQ ID NO: 18246 - protein, 11 aa, Artificial Sequence
  Peptide Derived from Human Papillomavirus
TRPPTATDTLA

SEQ ID NO: 18247 - protein, 9 aa, Artificial Sequence
  Peptide Derived from Human Papillomavirus
TRSGKSIGA

SEQ ID NO: 18248 - protein, 11 aa, Artificial Sequence
  Peptide Derived from Human Papillomavirus
TRSGKSIGAKV

SEQ ID NO: 18249 - protein, 10 aa, Artificial Sequence
  Peptide Derived from Human Papillomavirus
VHYYYDFSTI

SEQ ID NO: 18250 - protein, 8 aa, Artificial Sequence
  Peptide Derived from Human Papillomavirus
VKVVDPAF

SEQ ID NO: 18251 - protein, 9 aa, Artificial Sequence
  Peptide Derived from Human Papillomavirus
VKVVDPAFI

SEQ ID NO: 18252 - protein, 10 aa, Artificial Sequence
  Peptide Derived from Human Papillomavirus
VRPPLTVDPV

SEQ ID NO: 18253 - protein, 10 aa, Artificial Sequence
  Peptide Derived from Human Papillomavirus
AHIQCLDCKW

SEQ ID NO: 18254 - protein, 8 aa, Artificial Sequence
  Peptide Derived from Human Papillomavirus
AKDNRWPY

SEQ ID NO: 18255 - protein, 9 aa, Artificial Sequence
  Peptide Derived from Human Papillomavirus
AKDNRWPYL

SEQ ID NO: 18256 - protein, 8 aa, Artificial Sequence
  Peptide Derived from Human Papillomavirus
AKGLSTLL

SEQ ID NO: 18257 - protein, 10 aa, Artificial Sequence
  Peptide Derived from Human Papillomavirus
AKGLSTLLHV

SEQ ID NO: 18258 - protein, 8 aa, Artificial Sequence
  Peptide Derived from Human Papillomavirus
AKRRLFTI

SEQ ID NO: 18259 - protein, 8 aa, Artificial Sequence
  Peptide Derived from Human Papillomavirus
AKYLKDCA

SEQ ID NO: 18260 - protein, 10 aa, Artificial Sequence
  Peptide Derived from Human Papillomavirus
AKYLKDCATM

SEQ ID NO: 18261 - protein, 8 aa, Artificial Sequence
  Peptide Derived from Human Papillomavirus
CKWGVLIL

SEQ ID NO: 18262 - protein, 9 aa, Artificial Sequence
  Peptide Derived from Human Papillomavirus
CKWGVLILA

SEQ ID NO: 18263 - protein, 10 aa, Artificial Sequence
  Peptide Derived from Human Papillomavirus
CKWGVLILAL

SEQ ID NO: 18264 - protein, 11 aa, Artificial Sequence
  Peptide Derived from Human Papillomavirus
CKWGVLILALL

SEQ ID NO: 18265 - protein, 8 aa, Artificial Sequence
  Peptide Derived from Human Papillomavirus
DKKTGDVI

SEQ ID NO: 18266 - protein, 8 aa, Artificial Sequence
  Peptide Derived from Human Papillomavirus
DKNGNPVY

SEQ ID NO: 18267 - protein, 10 aa, Artificial Sequence
  Peptide Derived from Human Papillomavirus
DKNGNPVYEI

SEQ ID NO: 18268 - protein, 8 aa, Artificial Sequence
  Peptide Derived from Human Papillomavirus
DKNWKCFF

SEQ ID NO: 18269 - protein, 8 aa, Artificial Sequence
  Peptide Derived from Human Papillomavirus
DKTTCTDW

SEQ ID NO: 18270 - protein, 9 aa, Artificial Sequence
  Peptide Derived from Human Papillomavirus
DKTTCTDWV

SEQ ID NO: 18271 - protein, 11 aa, Artificial Sequence
  Peptide Derived from Human Papillomavirus
DKTTCTDWVTA

SEQ ID NO: 18272 - protein, 8 aa, Artificial Sequence
  Peptide Derived from Human Papillomavirus
DRKHKPLI

SEQ ID NO: 18273 - protein, 10 aa, Artificial Sequence
  Peptide Derived from Human Papillomavirus
DRKHKPLIQL

SEQ ID NO: 18274 - protein, 9 aa, Artificial Sequence
  Peptide Derived from Human Papillomavirus
ERLEVDTEL

SEQ ID NO: 18275 - protein, 9 aa, Artificial Sequence
  Peptide Derived from Human Papillomavirus
ERTWSRLDL

SEQ ID NO: 18276 - protein, 10 aa, Artificial Sequence
  Peptide Derived from Human Papillomavirus
FHAQEVHNDA

SEQ ID NO: 18277 - protein, 9 aa, Artificial Sequence
  Peptide Derived from Human Papillomavirus
FKDTYGLSF

SEQ ID NO: 18278 - protein, 11 aa, Artificial Sequence
  Peptide Derived from Human Papillomavirus
FKSDKTTCTDW

SEQ ID NO: 18279 - protein, 8 aa, Artificial Sequence
  Peptide Derived from Human Papillomavirus
FKTLIQPF

SEQ ID NO: 18280 - protein, 9 aa, Artificial Sequence
  Peptide Derived from Human Papillomavirus
FKTLIQPFI

SEQ ID NO: 18281 - protein, 10 aa, Artificial Sequence
  Peptide Derived from Human Papillomavirus
FKTLIQPFIL

SEQ ID NO: 18282 - protein, 11 aa, Artificial Sequence
  Peptide Derived from Human Papillomavirus
FKTLIQPFILY

SEQ ID NO: 18283 - protein, 8 aa, Artificial Sequence
  Peptide Derived from Human Papillomavirus
GKSRLTVA

SEQ ID NO: 18284 - protein, 11 aa, Artificial Sequence
  Peptide Derived from Human Papillomavirus
GKSRLTVAKGL

SEQ ID NO: 18285 - protein, 9 aa, Artificial Sequence
  Peptide Derived from Human Papillomavirus
GKSYFGMSF

SEQ ID NO: 18286 - protein, 10 aa, Artificial Sequence
  Peptide Derived from Human Papillomavirus
GKSYFGMSFI

SEQ ID NO: 18287 - protein, 8 aa, Artificial Sequence
  Peptide Derived from Human Papillomavirus
IHFIQGAV

SEQ ID NO: 18288 - protein, 9 aa, Artificial Sequence
  Peptide Derived from Human Papillomavirus
IHFIQGAVI

SEQ ID NO: 18289 - protein, 11 aa, Artificial Sequence
  Peptide Derived from Human Papillomavirus
IHFIQGAVISF

SEQ ID NO: 18290 - protein, 9 aa, Artificial Sequence
  Peptide Derived from Human Papillomavirus
IHPAKDNRW

SEQ ID NO: 18291 - protein, 11 aa, Artificial Sequence
  Peptide Derived from Human Papillomavirus
IHPAKDNRWPY

SEQ ID NO: 18292 - protein, 8 aa, Artificial Sequence
  Peptide Derived from Human Papillomavirus
IRFRCSKI

SEQ ID NO: 18293 - protein, 8 aa, Artificial Sequence
  Peptide Derived from Human Papillomavirus
KHKPLIQL

SEQ ID NO: 18294 - protein, 11 aa, Artificial Sequence
  Peptide Derived from Human Papillomavirus
KHYRRAQKRQM

SEQ ID NO: 18295 - protein, 8 aa, Artificial Sequence
  Peptide Derived from Human Papillomavirus
KKAKRRLF

SEQ ID NO: 18296 - protein, 10 aa, Artificial Sequence
  Peptide Derived from Human Papillomavirus
KKAKRRLFTI

SEQ ID NO: 18297 - protein, 11 aa, Artificial Sequence
  Peptide Derived from Human Papillomavirus
KKNCLVFCGPA

SEQ ID NO: 18298 - protein, 9 aa, Artificial Sequence
  Peptide Derived from Human Papillomavirus
KRQMNMSQW

SEQ ID NO: 18299 - protein, 10 aa, Artificial Sequence
  Peptide Derived from Human Papillomavirus
KRQMNMSQWI

SEQ ID NO: 18300 - protein, 8 aa, Artificial Sequence
  Peptide Derived from Human Papillomavirus
LHEEEEDA

SEQ ID NO: 18301 - protein, 8 aa, Artificial Sequence
  Peptide Derived from Human Papillomavirus
LHVLKRKF

SEQ ID NO: 18302 - protein, 9 aa, Artificial Sequence
  Peptide Derived from Human Papillomavirus
LHVLKRKFA

SEQ ID NO: 18303 - protein, 8 aa, Artificial Sequence
  Peptide Derived from Human Papillomavirus
LHVPETCM

SEQ ID NO: 18304 - protein, 9 aa, Artificial Sequence
  Peptide Derived from Human Papillomavirus
LHVPETCML

SEQ ID NO: 18305 - protein, 10 aa, Artificial Sequence
  Peptide Derived from Human Papillomavirus
LHVPETCMLI

SEQ ID NO: 18306 - protein, 8 aa, Artificial Sequence
  Peptide Derived from Human Papillomavirus
LKCPPILL

SEQ ID NO: 18307 - protein, 11 aa, Artificial Sequence
  Peptide Derived from Human Papillomavirus
LKDCATMCKHY

SEQ ID NO: 18308 - protein, 10 aa, Artificial Sequence
  Peptide Derived from Human Papillomavirus
LKGTPKKNCL

SEQ ID NO: 18309 - protein, 11 aa, Artificial Sequence
  Peptide Derived from Human Papillomavirus
LKGTPKKNCLV

SEQ ID NO: 18310 - protein, 9 aa, Artificial Sequence
  Peptide Derived from Human Papillomavirus
LKSNCQAKY

SEQ ID NO: 18311 - protein, 10 aa, Artificial Sequence
  Peptide Derived from Human Papillomavirus
LKSNCQAKYL

SEQ ID NO: 18312 - protein, 9 aa, Artificial Sequence
  Peptide Derived from Human Papillomavirus
LKVNNKQGA

SEQ ID NO: 18313 - protein, 10 aa, Artificial Sequence
  Peptide Derived from Human Papillomavirus
LKVNNKQGAM

SEQ ID NO: 18314 - protein, 11 aa, Artificial Sequence
  Peptide Derived from Human Papillomavirus
LKVNNKQGAML

SEQ ID NO: 18315 - protein, 10 aa, Artificial Sequence
  Peptide Derived from Human Papillomavirus
LRAGQNHRPL

SEQ ID NO: 18316 - protein, 8 aa, Artificial Sequence
  Peptide Derived from Human Papillomavirus
LRSSVAAL

SEQ ID NO: 18317 - protein, 9 aa, Artificial Sequence
  Peptide Derived from Human Papillomavirus
LRSSVAALY

SEQ ID NO: 18318 - protein, 10 aa, Artificial Sequence
  Peptide Derived from Human Papillomavirus
LRSSVAALYW

SEQ ID NO: 18319 - protein, 11 aa, Artificial Sequence
  Peptide Derived from Human Papillomavirus
LRSSVAALYWY

SEQ ID NO: 18320 - protein, 10 aa, Artificial Sequence
  Peptide Derived from Human Papillomavirus
LRYKCGKSRL

SEQ ID NO: 18321 - protein, 8 aa, Artificial Sequence
  Peptide Derived from Human Papillomavirus
LRYQQIEF

SEQ ID NO: 18322 - protein, 9 aa, Artificial Sequence
  Peptide Derived from Human Papillomavirus
LRYQQIEFI

SEQ ID NO: 18323 - protein, 11 aa, Artificial Sequence
  Peptide Derived from Human Papillomavirus
LRYQQIEFITF

SEQ ID NO: 18324 - protein, 10 aa, Artificial Sequence
  Peptide Derived from Human Papillomavirus
MRNALDGNPI

SEQ ID NO: 18325 - protein, 8 aa, Artificial Sequence
  Peptide Derived from Human Papillomavirus
NKQGAMLA

SEQ ID NO: 18326 - protein, 9 aa, Artificial Sequence
  Peptide Derived from Human Papillomavirus
NKQGAMLAV

SEQ ID NO: 18327 - protein, 10 aa, Artificial Sequence
  Peptide Derived from Human Papillomavirus
NKQGAMLAVF

SEQ ID NO: 18328 - protein, 10 aa, Artificial Sequence
  Peptide Derived from Human Papillomavirus
NRWPYLESRI

SEQ ID NO: 18329 - protein, 8 aa, Artificial Sequence
  Peptide Derived from Human Papillomavirus
PKKNCLVF

SEQ ID NO: 18330 - protein, 8 aa, Artificial Sequence
  Peptide Derived from Human Papillomavirus
PKLRSSVA

SEQ ID NO: 18331 - protein, 9 aa, Artificial Sequence
  Peptide Derived from Human Papillomavirus
PKLRSSVAA

SEQ ID NO: 18332 - protein, 10 aa, Artificial Sequence
  Peptide Derived from Human Papillomavirus
PKLRSSVAAL

SEQ ID NO: 18333 - protein, 11 aa, Artificial Sequence
  Peptide Derived from Human Papillomavirus
PKLRSSVAALY

SEQ ID NO: 18334 - protein, 8 aa, Artificial Sequence
  Peptide Derived from Human Papillomavirus
PRLQEISL

SEQ ID NO: 18335 - protein, 9 aa, Artificial Sequence
  Peptide Derived from Human Papillomavirus
QHGIDDSNF

SEQ ID NO: 18336 - protein, 11 aa, Artificial Sequence
  Peptide Derived from Human Papillomavirus
QHGIDDSNFDL

SEQ ID NO: 18337 - protein, 8 aa, Artificial Sequence
  Peptide Derived from Human Papillomavirus
QKKAKRRL

SEQ ID NO: 18338 - protein, 9 aa, Artificial Sequence
  Peptide Derived from Human Papillomavirus
QKKAKRRLF

SEQ ID NO: 18339 - protein, 11 aa, Artificial Sequence
  Peptide Derived from Human Papillomavirus
QKKAKRRLFTI

SEQ ID NO: 18340 - protein, 10 aa, Artificial Sequence
  Peptide Derived from Human Papillomavirus
QKRQMNMSQW

SEQ ID NO: 18341 - protein, 11 aa, Artificial Sequence
  Peptide Derived from Human Papillomavirus
QKRQMNMSQWI

SEQ ID NO: 18342 - protein, 10 aa, Artificial Sequence
  Peptide Derived from Human Papillomavirus
QRLTIIQHGI

SEQ ID NO: 18343 - protein, 9 aa, Artificial Sequence
  Peptide Derived from Human Papillomavirus
RKHKPLIQL

SEQ ID NO: 18344 - protein, 8 aa, Artificial Sequence
  Peptide Derived from Human Papillomavirus
RRAQKRQM

SEQ ID NO: 18345 - protein, 10 aa, Artificial Sequence
  Peptide Derived from Human Papillomavirus
RRAQKRQMNM

SEQ ID NO: 18346 - protein, 11 aa, Artificial Sequence
  Peptide Derived from Human Papillomavirus
RRLFTISDSGY

SEQ ID NO: 18347 - protein, 8 aa, Artificial Sequence
  Peptide Derived from Human Papillomavirus
SHFWLEPL

SEQ ID NO: 18348 - protein, 9 aa, Artificial Sequence
  Peptide Derived from Human Papillomavirus
SKIDEGGDW

SEQ ID NO: 18349 - protein, 8 aa, Artificial Sequence
  Peptide Derived from Human Papillomavirus
SRITVFEF

SEQ ID NO: 18350 - protein, 11 aa, Artificial Sequence
  Peptide Derived from Human Papillomavirus
SRITVFEFPNA

SEQ ID NO: 18351 - protein, 9 aa, Artificial Sequence
  Peptide Derived from Human Papillomavirus
SRLTVAKGL

SEQ ID NO: 18352 - protein, 9 aa, Artificial Sequence
  Peptide Derived from Human Papillomavirus
TKVAMLDDA

SEQ ID NO: 18353 - protein, 8 aa, Artificial Sequence
  Peptide Derived from Human Papillomavirus
VHNDAQVL

SEQ ID NO: 18354 - protein, 10 aa, Artificial Sequence
  Peptide Derived from Human Papillomavirus
VHNDAQVLHV

SEQ ID NO: 18355 - protein, 11 aa, Artificial Sequence
  Peptide Derived from Human Papillomavirus
VHNDAQVLHVL

SEQ ID NO: 18356 - protein, 9 aa, Artificial Sequence
  Peptide Derived from Human Papillomavirus
WKCFFERTW

SEQ ID NO: 18357 - protein, 8 aa, Artificial Sequence
  Peptide Derived from Human Papillomavirus
WRPIVQFL

SEQ ID NO: 18358 - protein, 10 aa, Artificial Sequence
  Peptide Derived from Human Papillomavirus
WRPIVQFLRY

SEQ ID NO: 18359 - protein, 8 aa, Artificial Sequence
  Peptide Derived from Human Papillomavirus
YKCGKSRL

SEQ ID NO: 18360 - protein, 10 aa, Artificial Sequence
  Peptide Derived from Human Papillomavirus
YKCGKSRLTV

SEQ ID NO: 18361 - protein, 11 aa, Artificial Sequence
  Peptide Derived from Human Papillomavirus
YKCGKSRLTVA

SEQ ID NO: 18362 - protein, 9 aa, Artificial Sequence
  Peptide Derived from Human Papillomavirus
YRRAQKRQM

SEQ ID NO: 18363 - protein, 11 aa, Artificial Sequence
  Peptide Derived from Human Papillomavirus
YRRAQKRQMNM

SEQ ID NO: 18364 - protein, 8 aa, Artificial Sequence
  Peptide Derived from Human Papillomavirus
YRTGISNI

SEQ ID NO: 18365 - protein, 11 aa, Artificial Sequence
  Peptide Derived from Human Papillomavirus
YRTGISNISEV

SEQ ID NO: 18366 - protein, 9 aa, Artificial Sequence
  Peptide Derived from Human Papillomavirus
AHKAIELQM

SEQ ID NO: 18367 - protein, 10 aa, Artificial Sequence
  Peptide Derived from Human Papillomavirus
AHKAIELQMA

SEQ ID NO: 18368 - protein, 11 aa, Artificial Sequence
  Peptide Derived from Human Papillomavirus
AHKAIELQMAL

SEQ ID NO: 18369 - protein, 9 aa, Artificial Sequence
  Peptide Derived from Human Papillomavirus
AKTYGQTSA

SEQ ID NO: 18370 - protein, 10 aa, Artificial Sequence
  Peptide Derived from Human Papillomavirus
AKTYGQTSAA

SEQ ID NO: 18371 - protein, 9 aa, Artificial Sequence
  Peptide Derived from Human Papillomavirus
AREHGIQTL

SEQ ID NO: 18372 - protein, 10 aa, Artificial Sequence
  Peptide Derived from Human Papillomavirus
DHYENDSKDI

SEQ ID NO: 18373 - protein, 10 aa, Artificial Sequence
  Peptide Derived from Human Papillomavirus
DHYRDISSTW

SEQ ID NO: 18374 - protein, 8 aa, Artificial Sequence
  Peptide Derived from Human Papillomavirus
DRNSLKCL

SEQ ID NO: 18375 - protein, 10 aa, Artificial Sequence
  Peptide Derived from Human Papillomavirus
DRNSLKCLRY

SEQ ID NO: 18376 - protein, 11 aa, Artificial Sequence
  Peptide Derived from Human Papillomavirus
EHGIQTLNHQV

SEQ ID NO: 18377 - protein, 8 aa, Artificial Sequence
  Peptide Derived from Human Papillomavirus
EKQHCGPV

SEQ ID NO: 18378 - protein, 11 aa, Artificial Sequence
  Peptide Derived from Human Papillomavirus
EKQHCGPVNPL

SEQ ID NO: 18379 - protein, 8 aa, Artificial Sequence
  Peptide Derived from Human Papillomavirus
EKTGILTV

SEQ ID NO: 18380 - protein, 10 aa, Artificial Sequence
  Peptide Derived from Human Papillomavirus
EKTGILTVTY

SEQ ID NO: 18381 - protein, 9 aa, Artificial Sequence
  Peptide Derived from Human Papillomavirus
EKYGNTGTW

SEQ ID NO: 18382 - protein, 11 aa, Artificial Sequence
  Peptide Derived from Human Papillomavirus
EKYGNTGTWEV

SEQ ID NO: 18383 - protein, 10 aa, Artificial Sequence
  Peptide Derived from Human Papillomavirus
ERLSCVQDKI

SEQ ID NO: 18384 - protein, 11 aa, Artificial Sequence
  Peptide Derived from Human Papillomavirus
ERLSCVQDKII

SEQ ID NO: 18385 - protein, 8 aa, Artificial Sequence
  Peptide Derived from Human Papillomavirus
FKKGGQTV

SEQ ID NO: 18386 - protein, 10 aa, Artificial Sequence
  Peptide Derived from Human Papillomavirus
FKKGGQTVQV

SEQ ID NO: 18387 - protein, 11 aa, Artificial Sequence
  Peptide Derived from Human Papillomavirus
FKKGGQTVQVY

SEQ ID NO: 18388 - protein, 8 aa, Artificial Sequence
  Peptide Derived from Human Papillomavirus
FKSECEKY

SEQ ID NO: 18389 - protein, 8 aa, Artificial Sequence
  Peptide Derived from Human Papillomavirus
HKAIELQM

SEQ ID NO: 18390 - protein, 9 aa, Artificial Sequence
  Peptide Derived from Human Papillomavirus
HKAIELQMA

SEQ ID NO: 18391 - protein, 10 aa, Artificial Sequence
  Peptide Derived from Human Papillomavirus
HKAIELQMAL

SEQ ID NO: 18392 - protein, 11 aa, Artificial Sequence
  Peptide Derived from Human Papillomavirus
HRGLYYVKEGY

SEQ ID NO: 18393 - protein, 10 aa, Artificial Sequence
  Peptide Derived from Human Papillomavirus
IHLKGDRNSL

SEQ ID NO: 18394 - protein, 8 aa, Artificial Sequence
  Peptide Derived from Human Papillomavirus
IRWENAIF

SEQ ID NO: 18395 - protein, 9 aa, Artificial Sequence
  Peptide Derived from Human Papillomavirus
IRWENAIFF

SEQ ID NO: 18396 - protein, 10 aa, Artificial Sequence
  Peptide Derived from Human Papillomavirus
IRWENAIFFA

SEQ ID NO: 18397 - protein, 11 aa, Artificial Sequence
  Peptide Derived from Human Papillomavirus
IRWENAIFFAA

SEQ ID NO: 18398 - protein, 9 aa, Artificial Sequence
  Peptide Derived from Human Papillomavirus
KHSDHYRDI

SEQ ID NO: 18399 - protein, 9 aa, Artificial Sequence
  Peptide Derived from Human Papillomavirus
KKGGQTVQV

SEQ ID NO: 18400 - protein, 10 aa, Artificial Sequence
  Peptide Derived from Human Papillomavirus
KKGGQTVQVY

SEQ ID NO: 18401 - protein, 11 aa, Artificial Sequence
  Peptide Derived from Human Papillomavirus
KKGGQTVQVYF

SEQ ID NO: 18402 - protein, 8 aa, Artificial Sequence
  Peptide Derived from Human Papillomavirus
LKCLRYRL

SEQ ID NO: 18403 - protein, 8 aa, Artificial Sequence
  Peptide Derived from Human Papillomavirus
LKGDRNSL

SEQ ID NO: 18404 - protein, 11 aa, Artificial Sequence
  Peptide Derived from Human Papillomavirus
LKGDRNSLKCL

SEQ ID NO: 18405 - protein, 8 aa, Artificial Sequence
  Peptide Derived from Human Papillomavirus
LRKHSDHY

SEQ ID NO: 18406 - protein, 11 aa, Artificial Sequence
  Peptide Derived from Human Papillomavirus
LRKHSDHYRDI

SEQ ID NO: 18407 - protein, 8 aa, Artificial Sequence
  Peptide Derived from Human Papillomavirus
NHQVVPAY

SEQ ID NO: 18408 - protein, 10 aa, Artificial Sequence
  Peptide Derived from Human Papillomavirus
NHQVVPAYNI

SEQ ID NO: 18409 - protein, 8 aa, Artificial Sequence
  Peptide Derived from Human Papillomavirus
NKDNCMTY

SEQ ID NO: 18410 - protein, 9 aa, Artificial Sequence
  Peptide Derived from Human Papillomavirus
NKDNCMTYV

SEQ ID NO: 18411 - protein, 10 aa, Artificial Sequence
  Peptide Derived from Human Papillomavirus
NKDNCMTYVA

SEQ ID NO: 18412 - protein, 11 aa, Artificial Sequence
  Peptide Derived from Human Papillomavirus
NKDNCMTYVAW

SEQ ID NO: 18413 - protein, 9 aa, Artificial Sequence
  Peptide Derived from Human Papillomavirus
PKETLSERL

SEQ ID NO: 18414 - protein, 9 aa, Artificial Sequence
  Peptide Derived from Human Papillomavirus
QHCGPVNPL

SEQ ID NO: 18415 - protein, 10 aa, Artificial Sequence
  Peptide Derived from Human Papillomavirus
QHCGPVNPLL

SEQ ID NO: 18416 - protein, 11 aa, Artificial Sequence
  Peptide Derived from Human Papillomavirus
QHTPSPYSSTV

SEQ ID NO: 18417 - protein, 9 aa, Artificial Sequence
  Peptide Derived from Human Papillomavirus
QRTKFLNTV

SEQ ID NO: 18418 - protein, 10 aa, Artificial Sequence
  Peptide Derived from Human Papillomavirus
QRTKFLNTVA

SEQ ID NO: 18419 - protein, 11 aa, Artificial Sequence
  Peptide Derived from Human Papillomavirus
QRTKFLNTVAI

SEQ ID NO: 18420 - protein, 10 aa, Artificial Sequence
  Peptide Derived from Human Papillomavirus
RKHSDHYRDI

SEQ ID NO: 18421 - protein, 11 aa, Artificial Sequence
  Peptide Derived from Human Papillomavirus
RKLCSGNTTPI

SEQ ID NO: 18422 - protein, 8 aa, Artificial Sequence
  Peptide Derived from Human Papillomavirus
SHRGLYYV

SEQ ID NO: 18423 - protein, 9 aa, Artificial Sequence
  Peptide Derived from Human Papillomavirus
SKAHKAIEL

SEQ ID NO: 18424 - protein, 11 aa, Artificial Sequence
  Peptide Derived from Human Papillomavirus
SKAHKAIELQM

SEQ ID NO: 18425 - protein, 8 aa, Artificial Sequence
  Peptide Derived from Human Papillomavirus
SKDIDSQI

SEQ ID NO: 18426 - protein, 10 aa, Artificial Sequence
  Peptide Derived from Human Papillomavirus
SKDIDSQIQY

SEQ ID NO: 18427 - protein, 11 aa, Artificial Sequence
  Peptide Derived from Human Papillomavirus
SKDIDSQIQYW

SEQ ID NO: 18428 - protein, 8 aa, Artificial Sequence
  Peptide Derived from Human Papillomavirus
SKSKAHKA

SEQ ID NO: 18429 - protein, 9 aa, Artificial Sequence
  Peptide Derived from Human Papillomavirus
SKSKAHKAI

SEQ ID NO: 18430 - protein, 11 aa, Artificial Sequence
  Peptide Derived from Human Papillomavirus
SKSKAHKAIEL

SEQ ID NO: 18431 - protein, 8 aa, Artificial Sequence
  Peptide Derived from Human Papillomavirus
SRYKTEDW

SEQ ID NO: 18432 - protein, 10 aa, Artificial Sequence
  Peptide Derived from Human Papillomavirus
SRYKTEDWTL

SEQ ID NO: 18433 - protein, 11 aa, Artificial Sequence
  Peptide Derived from Human Papillomavirus
THCFKKGGQTV

SEQ ID NO: 18434 - protein, 8 aa, Artificial Sequence
  Peptide Derived from Human Papillomavirus
TKFLNTVA

SEQ ID NO: 18435 - protein, 9 aa, Artificial Sequence
  Peptide Derived from Human Papillomavirus
TKFLNTVAI

SEQ ID NO: 18436 - protein, 8 aa, Artificial Sequence
  Peptide Derived from Human Papillomavirus
TRPGHCGL

SEQ ID NO: 18437 - protein, 9 aa, Artificial Sequence
  Peptide Derived from Human Papillomavirus
TRPGHCGLA

SEQ ID NO: 18438 - protein, 8 aa, Artificial Sequence
  Peptide Derived from Human Papillomavirus
VHFGNNVI

SEQ ID NO: 18439 - protein, 8 aa, Artificial Sequence
  Peptide Derived from Human Papillomavirus
VKEGYNTF

SEQ ID NO: 18440 - protein, 9 aa, Artificial Sequence
  Peptide Derived from Human Papillomavirus
VKEGYNTFY

SEQ ID NO: 18441 - protein, 10 aa, Artificial Sequence
  Peptide Derived from Human Papillomavirus
VKEGYNTFYI

SEQ ID NO: 18442 - protein, 11 aa, Artificial Sequence
  Peptide Derived from Human Papillomavirus
VKQLQHTPSPY

SEQ ID NO: 18443 - protein, 10 aa, Artificial Sequence
  Peptide Derived from Human Papillomavirus
YHSETQRTKF

SEQ ID NO: 18444 - protein, 11 aa, Artificial Sequence
  Peptide Derived from Human Papillomavirus
YHSETQRTKFL

SEQ ID NO: 18445 - protein, 8 aa, Artificial Sequence
  Peptide Derived from Human Papillomavirus
YKTEDWTL

SEQ ID NO: 18446 - protein, 8 aa, Artificial Sequence
  Peptide Derived from Human Papillomavirus
YRDISSTW

SEQ ID NO: 18447 - protein, 10 aa, Artificial Sequence
  Peptide Derived from Human Papillomavirus
YRDISSTWHW

SEQ ID NO: 18448 - protein, 10 aa, Artificial Sequence
  Peptide Derived from Human Papillomavirus
YRLRKHSDHY

SEQ ID NO: 18449 - protein, 9 aa, Artificial Sequence
  Peptide Derived from Human Papillomavirus
CHVPLLPSV

SEQ ID NO: 18450 - protein, 11 aa, Artificial Sequence
  Peptide Derived from Human Papillomavirus
CHVPLLPSVCM

SEQ ID NO: 18451 - protein, 9 aa, Artificial Sequence
  Peptide Derived from Human Papillomavirus
LHIHAILSL

SEQ ID NO: 18452 - protein, 11 aa, Artificial Sequence
  Peptide Derived from Human Papillomavirus
ARFEDPTRRPY

SEQ ID NO: 18453 - protein, 8 aa, Artificial Sequence
  Peptide Derived from Human Papillomavirus
CHKCIDFY

SEQ ID NO: 18454 - protein, 11 aa, Artificial Sequence
  Peptide Derived from Human Papillomavirus
CHKCIDFYSRI

SEQ ID NO: 18455 - protein, 8 aa, Artificial Sequence
  Peptide Derived from Human Papillomavirus
CHSCCNRA

SEQ ID NO: 18456 - protein, 10 aa, Artificial Sequence
  Peptide Derived from Human Papillomavirus
CKTVLELTEV

SEQ ID NO: 18457 - protein, 11 aa, Artificial Sequence
  Peptide Derived from Human Papillomavirus
CKTVLELTEVF

SEQ ID NO: 18458 - protein, 8 aa, Artificial Sequence
  Peptide Derived from Human Papillomavirus
EKLTNTGL

SEQ ID NO: 18459 - protein, 9 aa, Artificial Sequence
  Peptide Derived from Human Papillomavirus
EKLTNTGLY

SEQ ID NO: 18460 - protein, 11 aa, Artificial Sequence
  Peptide Derived from Human Papillomavirus
EKLTNTGLYNL

SEQ ID NO: 18461 - protein, 8 aa, Artificial Sequence
  Peptide Derived from Human Papillomavirus
EKRRFHNI

SEQ ID NO: 18462 - protein, 9 aa, Artificial Sequence
  Peptide Derived from Human Papillomavirus
EKRRFHNIA

SEQ ID NO: 18463 - protein, 11 aa, Artificial Sequence
  Peptide Derived from Human Papillomavirus
ERLQRRRETQV

SEQ ID NO: 18464 - protein, 8 aa, Artificial Sequence
  Peptide Derived from Human Papillomavirus
FHNIAGHY

SEQ ID NO: 18465 - protein, 8 aa, Artificial Sequence
  Peptide Derived from Human Papillomavirus
FKDLFVVY

SEQ ID NO: 18466 - protein, 10 aa, Artificial Sequence
  Peptide Derived from Human Papillomavirus
HKCIDFYSRI

SEQ ID NO: 18467 - protein, 10 aa, Artificial Sequence
  Peptide Derived from Human Papillomavirus
IRCLRCQKPL

SEQ ID NO: 18468 - protein, 11 aa, Artificial Sequence
  Peptide Derived from Human Papillomavirus
IRELRHYSDSV

SEQ ID NO: 18469 - protein, 8 aa, Artificial Sequence
  Peptide Derived from Human Papillomavirus
KRRFHNIA

SEQ ID NO: 18470 - protein, 11 aa, Artificial Sequence
  Peptide Derived from Human Papillomavirus
KRRFHNIAGHY

SEQ ID NO: 18471 - protein, 10 aa, Artificial Sequence
  Peptide Derived from Human Papillomavirus
LRCQKPLNPA

SEQ ID NO: 18472 - protein, 10 aa, Artificial Sequence
  Peptide Derived from Human Papillomavirus
LRHLNEKRRF

SEQ ID NO: 18473 - protein, 8 aa, Artificial Sequence
  Peptide Derived from Human Papillomavirus
LRHYSDSV

SEQ ID NO: 18474 - protein, 9 aa, Artificial Sequence
  Peptide Derived from Human Papillomavirus
LRHYSDSVY

SEQ ID NO: 18475 - protein, 8 aa, Artificial Sequence
  Peptide Derived from Human Papillomavirus
NRARQERL

SEQ ID NO: 18476 - protein, 9 aa, Artificial Sequence
  Peptide Derived from Human Papillomavirus
PHAACHKCI

SEQ ID NO: 18477 - protein, 11 aa, Artificial Sequence
  Peptide Derived from Human Papillomavirus
PHAACHKCIDF

SEQ ID NO: 18478 - protein, 10 aa, Artificial Sequence
  Peptide Derived from Human Papillomavirus
QKPLNPAEKL

SEQ ID NO: 18479 - protein, 8 aa, Artificial Sequence
  Peptide Derived from Human Papillomavirus
QRRRETQV

SEQ ID NO: 18480 - protein, 9 aa, Artificial Sequence
  Peptide Derived from Human Papillomavirus
RHLNEKRRF

SEQ ID NO: 18481 - protein, 8 aa, Artificial Sequence
  Peptide Derived from Human Papillomavirus
RHYSDSVY

SEQ ID NO: 18482 - protein, 10 aa, Artificial Sequence
  Peptide Derived from Human Papillomavirus
RRFHNIAGHY

SEQ ID NO: 18483 - protein, 9 aa, Artificial Sequence
  Peptide Derived from Human Papillomavirus
RRPYKLPDL

SEQ ID NO: 18484 - protein, 9 aa, Artificial Sequence
  Peptide Derived from Human Papillomavirus
SRIRELRHY

SEQ ID NO: 18485 - protein, 10 aa, Artificial Sequence
  Peptide Derived from Human Papillomavirus
TRRPYKLPDL

SEQ ID NO: 18486 - protein, 10 aa, Artificial Sequence
  Peptide Derived from Human Papillomavirus
YKLPDLCTEL

SEQ ID NO: 18487 - protein, 8 aa, Artificial Sequence
  Peptide Derived from Human Papillomavirus
YRDSIPHA

SEQ ID NO: 18488 - protein, 9 aa, Artificial Sequence
  Peptide Derived from Human Papillomavirus
YRDSIPHAA

SEQ ID NO: 18489 - protein, 11 aa, Artificial Sequence
  Peptide Derived from Human Papillomavirus
ARIKLVVESSA

SEQ ID NO: 18490 - protein, 11 aa, Artificial Sequence
  Peptide Derived from Human Papillomavirus
ARRAEPQRHTM

SEQ ID NO: 18491 - protein, 9 aa, Artificial Sequence
  Peptide Derived from Human Papillomavirus
CKCEARIKL

SEQ ID NO: 18492 - protein, 10 aa, Artificial Sequence
  Peptide Derived from Human Papillomavirus
CKCEARIKLV

SEQ ID NO: 18493 - protein, 11 aa, Artificial Sequence
  Peptide Derived from Human Papillomavirus
CKCEARIKLVV

SEQ ID NO: 18494 - protein, 9 aa, Artificial Sequence
  Peptide Derived from Human Papillomavirus
IKLVVESSA

SEQ ID NO: 18495 - protein, 9 aa, Artificial Sequence
  Peptide Derived from Human Papillomavirus
LHLEPQNEI

SEQ ID NO: 18496 - protein, 11 aa, Artificial Sequence
  Peptide Derived from Human Papillomavirus
LHLEPQNEIPV

SEQ ID NO: 18497 - protein, 8 aa, Artificial Sequence
  Peptide Derived from Human Papillomavirus
LRAFQQLF

SEQ ID NO: 18498 - protein, 9 aa, Artificial Sequence
  Peptide Derived from Human Papillomavirus
LRAFQQLFL

SEQ ID NO: 18499 - protein, 8 aa, Artificial Sequence
  Peptide Derived from Human Papillomavirus
MHGPKATL

SEQ ID NO: 18500 - protein, 11 aa, Artificial Sequence
  Peptide Derived from Human Papillomavirus
MHGPKATLQDI

SEQ ID NO: 18501 - protein, 10 aa, Artificial Sequence
  Peptide Derived from Human Papillomavirus
NHQHLPARRA

SEQ ID NO: 18502 - protein, 8 aa, Artificial Sequence
  Peptide Derived from Human Papillomavirus
PKATLQDI

SEQ ID NO: 18503 - protein, 9 aa, Artificial Sequence
  Peptide Derived from Human Papillomavirus
PKATLQDIV

SEQ ID NO: 18504 - protein, 10 aa, Artificial Sequence
  Peptide Derived from Human Papillomavirus
PKATLQDIVL

SEQ ID NO: 18505 - protein, 8 aa, Artificial Sequence
  Peptide Derived from Human Papillomavirus
QHLPARRA

SEQ ID NO: 18506 - protein, 8 aa, Artificial Sequence
  Peptide Derived from Human Papillomavirus
QRHTMLCM

SEQ ID NO: 18507 - protein, 10 aa, Artificial Sequence
  Peptide Derived from Human Papillomavirus
RRAEPQRHTM

SEQ ID NO: 18508 - protein, 11 aa, Artificial Sequence
  Peptide Derived from Human Papillomavirus
RRAEPQRHTML

SEQ ID NO: 18509 - protein, 11 aa, Artificial Sequence
  Peptide Derived from Human Papillomavirus
AKGTACKSRPL

SEQ ID NO: 18510 - protein, 8 aa, Artificial Sequence
  Peptide Derived from Human Papillomavirus
AKRVRVRA

SEQ ID NO: 18511 - protein, 8 aa, Artificial Sequence
  Peptide Derived from Human Papillomavirus
ARHFWNRA

SEQ ID NO: 18512 - protein, 11 aa, Artificial Sequence
  Peptide Derived from Human Papillomavirus
ARHFWNRAGTM

SEQ ID NO: 18513 - protein, 9 aa, Artificial Sequence
  Peptide Derived from Human Papillomavirus
ARVVNTDDY

SEQ ID NO: 18514 - protein, 10 aa, Artificial Sequence
  Peptide Derived from Human Papillomavirus
ARVVNTDDYV

SEQ ID NO: 18515 - protein, 9 aa, Artificial Sequence
  Peptide Derived from Human Papillomavirus
CKYPDYLQM

SEQ ID NO: 18516 - protein, 11 aa, Artificial Sequence
  Peptide Derived from Human Papillomavirus
CKYPDYLQMSA

SEQ ID NO: 18517 - protein, 8 aa, Artificial Sequence
  Peptide Derived from Human Papillomavirus
DKLKFWNV

SEQ ID NO: 18518 - protein, 10 aa, Artificial Sequence
  Peptide Derived from Human Papillomavirus
DKLKFWNVDL

SEQ ID NO: 18519 - protein, 8 aa, Artificial Sequence
  Peptide Derived from Human Papillomavirus
EHWAKGTA

SEQ ID NO: 18520 - protein, 10 aa, Artificial Sequence
  Peptide Derived from Human Papillomavirus
EKFSLDLDQY

SEQ ID NO: 18521 - protein, 8 aa, Artificial Sequence
  Peptide Derived from Human Papillomavirus
FKQYSRHV

SEQ ID NO: 18522 - protein, 11 aa, Artificial Sequence
  Peptide Derived from Human Papillomavirus
FKQYSRHVEEY

SEQ ID NO: 18523 - protein, 11 aa, Artificial Sequence
  Peptide Derived from Human Papillomavirus
FRVQLPDPNKF

SEQ ID NO: 18524 - protein, 8 aa, Artificial Sequence
  Peptide Derived from Human Papillomavirus
GHNNGVCW

SEQ ID NO: 18525 - protein, 8 aa, Artificial Sequence
  Peptide Derived from Human Papillomavirus
GHPFYNKL

SEQ ID NO: 18526 - protein, 8 aa, Artificial Sequence
  Peptide Derived from Human Papillomavirus
GHYIILFL

SEQ ID NO: 18527 - protein, 11 aa, Artificial Sequence
  Peptide Derived from Human Papillomavirus
GHYIILFLRNV

SEQ ID NO: 18528 - protein, 8 aa, Artificial Sequence
  Peptide Derived from Human Papillomavirus
GRGQPLGV

SEQ ID NO: 18529 - protein, 10 aa, Artificial Sequence
  Peptide Derived from Human Papillomavirus
GRGQPLGVGL

SEQ ID NO: 18530 - protein, 8 aa, Artificial Sequence
  Peptide Derived from Human Papillomavirus
GRKFLVQA

SEQ ID NO: 18531 - protein, 10 aa, Artificial Sequence
  Peptide Derived from Human Papillomavirus
GRKFLVQAGL

SEQ ID NO: 18532 - protein, 10 aa, Artificial Sequence
  Peptide Derived from Human Papillomavirus
HKAQGHNNGV

SEQ ID NO: 18533 - protein, 8 aa, Artificial Sequence
  Peptide Derived from Human Papillomavirus
IHSMNSSI

SEQ ID NO: 18534 - protein, 9 aa, Artificial Sequence
  Peptide Derived from Human Papillomavirus
IHSMNSSIL

SEQ ID NO: 18535 - protein, 8 aa, Artificial Sequence
  Peptide Derived from Human Papillomavirus
IKGTGMPA

SEQ ID NO: 18536 - protein, 11 aa, Artificial Sequence
  Peptide Derived from Human Papillomavirus
LHKAQGHNNGV

SEQ ID NO: 18537 - protein, 8 aa, Artificial Sequence
  Peptide Derived from Human Papillomavirus
LHSILVYM

SEQ ID NO: 18538 - protein, 9 aa, Artificial Sequence
  Peptide Derived from Human Papillomavirus
LHSILVYMV

SEQ ID NO: 18539 - protein, 11 aa, Artificial Sequence
  Peptide Derived from Human Papillomavirus
LHSILVYMVHI

SEQ ID NO: 18540 - protein, 8 aa, Artificial Sequence
  Peptide Derived from Human Papillomavirus
LHYHLLPL

SEQ ID NO: 18541 - protein, 9 aa, Artificial Sequence
  Peptide Derived from Human Papillomavirus
LHYHLLPLY

SEQ ID NO: 18542 - protein, 9 aa, Artificial Sequence
  Peptide Derived from Human Papillomavirus
LKEKFSLDL

SEQ ID NO: 18543 - protein, 8 aa, Artificial Sequence
  Peptide Derived from Human Papillomavirus
LKFWNVDL

SEQ ID NO: 18544 - protein, 11 aa, Artificial Sequence
  Peptide Derived from Human Papillomavirus
LKNTVLEDGDM

SEQ ID NO: 18545 - protein, 9 aa, Artificial Sequence
  Peptide Derived from Human Papillomavirus
LRNVNVFPI

SEQ ID NO: 18546 - protein, 10 aa, Artificial Sequence
  Peptide Derived from Human Papillomavirus
LRNVNVFPIF

SEQ ID NO: 18547 - protein, 11 aa, Artificial Sequence
  Peptide Derived from Human Papillomavirus
LRNVNVFPIFL

SEQ ID NO: 18548 - protein, 8 aa, Artificial Sequence
  Peptide Derived from Human Papillomavirus
LRREQLFA

SEQ ID NO: 18549 - protein, 11 aa, Artificial Sequence
  Peptide Derived from Human Papillomavirus
LRREQLFARHF

SEQ ID NO: 18550 - protein, 8 aa, Artificial Sequence
  Peptide Derived from Human Papillomavirus
NKDPYDKL

SEQ ID NO: 18551 - protein, 10 aa, Artificial Sequence
  Peptide Derived from Human Papillomavirus
NKDPYDKLKF

SEQ ID NO: 18552 - protein, 11 aa, Artificial Sequence
  Peptide Derived from Human Papillomavirus
NKDPYDKLKFW

SEQ ID NO: 18553 - protein, 10 aa, Artificial Sequence
  Peptide Derived from Human Papillomavirus
NKFGLPDTSI

SEQ ID NO: 18554 - protein, 11 aa, Artificial Sequence
  Peptide Derived from Human Papillomavirus
NKFGLPDTSIY

SEQ ID NO: 18555 - protein, 11 aa, Artificial Sequence
  Peptide Derived from Human Papillomavirus
NKLDDTESSHA

SEQ ID NO: 18556 - protein, 9 aa, Artificial Sequence
  Peptide Derived from Human Papillomavirus
NKPYWLHKA

SEQ ID NO: 18557 - protein, 8 aa, Artificial Sequence
  Peptide Derived from Human Papillomavirus
NKQDIPKV

SEQ ID NO: 18558 - protein, 10 aa, Artificial Sequence
  Peptide Derived from Human Papillomavirus
NKQDIPKVSA

SEQ ID NO: 18559 - protein, 11 aa, Artificial Sequence
  Peptide Derived from Human Papillomavirus
NKQDIPKVSAY

SEQ ID NO: 18560 - protein, 10 aa, Artificial Sequence
  Peptide Derived from Human Papillomavirus
NRAGTMGDTV

SEQ ID NO: 18561 - protein, 8 aa, Artificial Sequence
  Peptide Derived from Human Papillomavirus
PKVSAYQY

SEQ ID NO: 18562 - protein, 10 aa, Artificial Sequence
  Peptide Derived from Human Papillomavirus
PKVSAYQYRV

SEQ ID NO: 18563 - protein, 11 aa, Artificial Sequence
  Peptide Derived from Human Papillomavirus
PKVSAYQYRVF

SEQ ID NO: 18564 - protein, 9 aa, Artificial Sequence
  Peptide Derived from Human Papillomavirus
PRKRSAPSA

SEQ ID NO: 18565 - protein, 9 aa, Artificial Sequence
  Peptide Derived from Human Papillomavirus
PRPLPLHSI

SEQ ID NO: 18566 - protein, 10 aa, Artificial Sequence
  Peptide Derived from Human Papillomavirus
PRPLPLHSIL

SEQ ID NO: 18567 - protein, 11 aa, Artificial Sequence
  Peptide Derived from Human Papillomavirus
PRPLPLHSILV

SEQ ID NO: 18568 - protein, 8 aa, Artificial Sequence
  Peptide Derived from Human Papillomavirus
QRLVWACA

SEQ ID NO: 18569 - protein, 10 aa, Artificial Sequence
  Peptide Derived from Human Papillomavirus
QRLVWACAGV

SEQ ID NO: 18570 - protein, 10 aa, Artificial Sequence
  Peptide Derived from Human Papillomavirus
RHFWNRAGTM

SEQ ID NO: 18571 - protein, 8 aa, Artificial Sequence
  Peptide Derived from Human Papillomavirus
RHVEEYDL

SEQ ID NO: 18572 - protein, 10 aa, Artificial Sequence
  Peptide Derived from Human Papillomavirus
RHVEEYDLQF

SEQ ID NO: 18573 - protein, 11 aa, Artificial Sequence
  Peptide Derived from Human Papillomavirus
RHVEEYDLQFI

SEQ ID NO: 18574 - protein, 9 aa, Artificial Sequence
  Peptide Derived from Human Papillomavirus
RKFLVQAGL

SEQ ID NO: 18575 - protein, 8 aa, Artificial Sequence
  Peptide Derived from Human Papillomavirus
RKRSAPSA

SEQ ID NO: 18576 - protein, 10 aa, Artificial Sequence
  Peptide Derived from Human Papillomavirus
RREQLFARHF

SEQ ID NO: 18577 - protein, 11 aa, Artificial Sequence
  Peptide Derived from Human Papillomavirus
RREQLFARHFW

SEQ ID NO: 18578 - protein, 8 aa, Artificial Sequence
  Peptide Derived from Human Papillomavirus
SHAATSNV

SEQ ID NO: 18579 - protein, 9 aa, Artificial Sequence
  Peptide Derived from Human Papillomavirus
SKPAKRVRV

SEQ ID NO: 18580 - protein, 11 aa, Artificial Sequence
  Peptide Derived from Human Papillomavirus
SKPAKRVRVRA

SEQ ID NO: 18581 - protein, 9 aa, Artificial Sequence
  Peptide Derived from Human Papillomavirus
SRHVEEYDL

SEQ ID NO: 18582 - protein, 11 aa, Artificial Sequence
  Peptide Derived from Human Papillomavirus
SRHVEEYDLQF

SEQ ID NO: 18583 - protein, 10 aa, Artificial Sequence
  Peptide Derived from Human Papillomavirus
SRLLTVGNPY

SEQ ID NO: 18584 - protein, 11 aa, Artificial Sequence
  Peptide Derived from Human Papillomavirus
SRLLTVGNPYF

SEQ ID NO: 18585 - protein, 9 aa, Artificial Sequence
  Peptide Derived from Human Papillomavirus
TKCEVPLDI

SEQ ID NO: 18586 - protein, 10 aa, Artificial Sequence
  Peptide Derived from Human Papillomavirus
TKFKQYSRHV

SEQ ID NO: 18587 - protein, 8 aa, Artificial Sequence
  Peptide Derived from Human Papillomavirus
TRVLILHY

SEQ ID NO: 18588 - protein, 10 aa, Artificial Sequence
  Peptide Derived from Human Papillomavirus
TRVLILHYHL

SEQ ID NO: 18589 - protein, 11 aa, Artificial Sequence
  Peptide Derived from Human Papillomavirus
TRVLILHYHLL

SEQ ID NO: 18590 - protein, 9 aa, Artificial Sequence
  Peptide Derived from Human Papillomavirus
VHIIICGHY

SEQ ID NO: 18591 - protein, 10 aa, Artificial Sequence
  Peptide Derived from Human Papillomavirus
VHIIICGHYI

SEQ ID NO: 18592 - protein, 11 aa, Artificial Sequence
  Peptide Derived from Human Papillomavirus
VHIIICGHYII

SEQ ID NO: 18593 - protein, 9 aa, Artificial Sequence
  Peptide Derived from Human Papillomavirus
VRDNVSVDY

SEQ ID NO: 18594 - protein, 9 aa, Artificial Sequence
  Peptide Derived from Human Papillomavirus
WHNQLFVTV

SEQ ID NO: 18595 - protein, 10 aa, Artificial Sequence
  Peptide Derived from Human Papillomavirus
WHNQLFVTVV

SEQ ID NO: 18596 - protein, 8 aa, Artificial Sequence
  Peptide Derived from Human Papillomavirus
WRPSDNTV

SEQ ID NO: 18597 - protein, 9 aa, Artificial Sequence
  Peptide Derived from Human Papillomavirus
WRPSDNTVY

SEQ ID NO: 18598 - protein, 10 aa, Artificial Sequence
  Peptide Derived from Human Papillomavirus
WRPSDNTVYL

SEQ ID NO: 18599 - protein, 8 aa, Artificial Sequence
  Peptide Derived from Human Papillomavirus
YHAGSSRL

SEQ ID NO: 18600 - protein, 9 aa, Artificial Sequence
  Peptide Derived from Human Papillomavirus
YHAGSSRLL

SEQ ID NO: 18601 - protein, 11 aa, Artificial Sequence
  Peptide Derived from Human Papillomavirus
YHAGSSRLLTV

SEQ ID NO: 18602 - protein, 10 aa, Artificial Sequence
  Peptide Derived from Human Papillomavirus
YHLLPLYGPL

SEQ ID NO: 18603 - protein, 11 aa, Artificial Sequence
  Peptide Derived from Human Papillomavirus
YHLLPLYGPLY

SEQ ID NO: 18604 - protein, 8 aa, Artificial Sequence
  Peptide Derived from Human Papillomavirus
YHPRPLPL

SEQ ID NO: 18605 - protein, 11 aa, Artificial Sequence
  Peptide Derived from Human Papillomavirus
YHPRPLPLHSI

SEQ ID NO: 18606 - protein, 8 aa, Artificial Sequence
  Peptide Derived from Human Papillomavirus
YKQTQLCI

SEQ ID NO: 18607 - protein, 9 aa, Artificial Sequence
  Peptide Derived from Human Papillomavirus
YKQTQLCIL

SEQ ID NO: 18608 - protein, 8 aa, Artificial Sequence
  Peptide Derived from Human Papillomavirus
YRFVQSVA

SEQ ID NO: 18609 - protein, 9 aa, Artificial Sequence
  Peptide Derived from Human Papillomavirus
YRFVQSVAI

SEQ ID NO: 18610 - protein, 8 aa, Artificial Sequence
  Peptide Derived from Human Papillomavirus
YRVFRVQL

SEQ ID NO: 18611 - protein, 8 aa, Artificial Sequence
  Peptide Derived from Human Papillomavirus
ARRKRASV

SEQ ID NO: 18612 - protein, 11 aa, Artificial Sequence
  Peptide Derived from Human Papillomavirus
ARRKRASVTDL

SEQ ID NO: 18613 - protein, 9 aa, Artificial Sequence
  Peptide Derived from Human Papillomavirus
ARVHFYHDI

SEQ ID NO: 18614 - protein, 11 aa, Artificial Sequence
  Peptide Derived from Human Papillomavirus
CKQSGTCPPDV

SEQ ID NO: 18615 - protein, 9 aa, Artificial Sequence
  Peptide Derived from Human Papillomavirus
DKILQWSSL

SEQ ID NO: 18616 - protein, 11 aa, Artificial Sequence
  Peptide Derived from Human Papillomavirus
DKILQWSSLGI

SEQ ID NO: 18617 - protein, 10 aa, Artificial Sequence
  Peptide Derived from Human Papillomavirus
FKYSPTISSA

SEQ ID NO: 18618 - protein, 9 aa, Artificial Sequence
  Peptide Derived from Human Papillomavirus
GRSNTVVDV

SEQ ID NO: 18619 - protein, 8 aa, Artificial Sequence
  Peptide Derived from Human Papillomavirus
GRTGYIPL

SEQ ID NO: 18620 - protein, 9 aa, Artificial Sequence
  Peptide Derived from Human Papillomavirus
HRAARRKRA

SEQ ID NO: 18621 - protein, 11 aa, Artificial Sequence
  Peptide Derived from Human Papillomavirus
HRAARRKRASV

SEQ ID NO: 18622 - protein, 8 aa, Artificial Sequence
  Peptide Derived from Human Papillomavirus
IHGTHYYL

SEQ ID NO: 18623 - protein, 9 aa, Artificial Sequence
  Peptide Derived from Human Papillomavirus
IHGTHYYLW

SEQ ID NO: 18624 - protein, 11 aa, Artificial Sequence
  Peptide Derived from Human Papillomavirus
IHGTHYYLWPL

SEQ ID NO: 18625 - protein, 8 aa, Artificial Sequence
  Peptide Derived from Human Papillomavirus
IRLHRPAL

SEQ ID NO: 18626 - protein, 8 aa, Artificial Sequence
  Peptide Derived from Human Papillomavirus
KKRKRVPY

SEQ ID NO: 18627 - protein, 9 aa, Artificial Sequence
  Peptide Derived from Human Papillomavirus
KKRKRVPYF

SEQ ID NO: 18628 - protein, 10 aa, Artificial Sequence
  Peptide Derived from Human Papillomavirus
KKRKRVPYFF

SEQ ID NO: 18629 - protein, 11 aa, Artificial Sequence
  Peptide Derived from Human Papillomavirus
KKRKRVPYFFA

SEQ ID NO: 18630 - protein, 8 aa, Artificial Sequence
  Peptide Derived from Human Papillomavirus
KRASVTDL

SEQ ID NO: 18631 - protein, 9 aa, Artificial Sequence
  Peptide Derived from Human Papillomavirus
KRASVTDLY

SEQ ID NO: 18632 - protein, 8 aa, Artificial Sequence
  Peptide Derived from Human Papillomavirus
KRKRVPYF

SEQ ID NO: 18633 - protein, 9 aa, Artificial Sequence
  Peptide Derived from Human Papillomavirus
KRKRVPYFF

SEQ ID NO: 18634 - protein, 10 aa, Artificial Sequence
  Peptide Derived from Human Papillomavirus
KRKRVPYFFA

SEQ ID NO: 18635 - protein, 8 aa, Artificial Sequence
  Peptide Derived from Human Papillomavirus
KRVPYFFA

SEQ ID NO: 18636 - protein, 11 aa, Artificial Sequence
  Peptide Derived from Human Papillomavirus
KRVPYFFADGF

SEQ ID NO: 18637 - protein, 9 aa, Artificial Sequence
  Peptide Derived from Human Papillomavirus
PKKRKRVPY

SEQ ID NO: 18638 - protein, 10 aa, Artificial Sequence
  Peptide Derived from Human Papillomavirus
PKKRKRVPYF

SEQ ID NO: 18639 - protein, 11 aa, Artificial Sequence
  Peptide Derived from Human Papillomavirus
PKKRKRVPYFF

SEQ ID NO: 18640 - protein, 8 aa, Artificial Sequence
  Peptide Derived from Human Papillomavirus
PKVEGTTL

SEQ ID NO: 18641 - protein, 9 aa, Artificial Sequence
  Peptide Derived from Human Papillomavirus
PKVEGTTLA

SEQ ID NO: 18642 - protein, 8 aa, Artificial Sequence
  Peptide Derived from Human Papillomavirus
PRLYSRAY

SEQ ID NO: 18643 - protein, 11 aa, Artificial Sequence
  Peptide Derived from Human Papillomavirus
PRLYSRAYQQV

SEQ ID NO: 18644 - protein, 11 aa, Artificial Sequence
  Peptide Derived from Human Papillomavirus
PRPTFTGTSGF

SEQ ID NO: 18645 - protein, 10 aa, Artificial Sequence
  Peptide Derived from Human Papillomavirus
PRSDVPDSDF

SEQ ID NO: 18646 - protein, 11 aa, Artificial Sequence
  Peptide Derived from Human Papillomavirus
PRSDVPDSDFM

SEQ ID NO: 18647 - protein, 9 aa, Artificial Sequence
  Peptide Derived from Human Papillomavirus
RKRASVTDL

SEQ ID NO: 18648 - protein, 10 aa, Artificial Sequence
  Peptide Derived from Human Papillomavirus
RKRASVTDLY

SEQ ID NO: 18649 - protein, 8 aa, Artificial Sequence
  Peptide Derived from Human Papillomavirus
RKRVPYFF

SEQ ID NO: 18650 - protein, 9 aa, Artificial Sequence
  Peptide Derived from Human Papillomavirus
RKRVPYFFA

SEQ ID NO: 18651 - protein, 10 aa, Artificial Sequence
  Peptide Derived from Human Papillomavirus
RRGTVRFSRL

SEQ ID NO: 18652 - protein, 10 aa, Artificial Sequence
  Peptide Derived from Human Papillomavirus
RRKRASVTDL

SEQ ID NO: 18653 - protein, 11 aa, Artificial Sequence
  Peptide Derived from Human Papillomavirus
RRKRASVTDLY

SEQ ID NO: 18654 - protein, 8 aa, Artificial Sequence
  Peptide Derived from Human Papillomavirus
RRVAGPRL

SEQ ID NO: 18655 - protein, 9 aa, Artificial Sequence
  Peptide Derived from Human Papillomavirus
RRVAGPRLY

SEQ ID NO: 18656 - protein, 10 aa, Artificial Sequence
  Peptide Derived from Human Papillomavirus
SHRAARRKRA

SEQ ID NO: 18657 - protein, 9 aa, Artificial Sequence
  Peptide Derived from Human Papillomavirus
SRAYQQVSV

SEQ ID NO: 18658 - protein, 10 aa, Artificial Sequence
  Peptide Derived from Human Papillomavirus
SRAYQQVSVA

SEQ ID NO: 18659 - protein, 9 aa, Artificial Sequence
  Peptide Derived from Human Papillomavirus
SRLGQRATM

SEQ ID NO: 18660 - protein, 10 aa, Artificial Sequence
  Peptide Derived from Human Papillomavirus
SRLGQRATMF

SEQ ID NO: 18661 - protein, 8 aa, Artificial Sequence
  Peptide Derived from Human Papillomavirus
SRRGTVRF

SEQ ID NO: 18662 - protein, 11 aa, Artificial Sequence
  Peptide Derived from Human Papillomavirus
SRRGTVRFSRL

SEQ ID NO: 18663 - protein, 8 aa, Artificial Sequence
  Peptide Derived from Human Papillomavirus
SRSTTSFA

SEQ ID NO: 18664 - protein, 9 aa, Artificial Sequence
  Peptide Derived from Human Papillomavirus
SRSTTSFAF

SEQ ID NO: 18665 - protein, 10 aa, Artificial Sequence
  Peptide Derived from Human Papillomavirus
SRSTTSFAFF

SEQ ID NO: 18666 - protein, 9 aa, Artificial Sequence
  Peptide Derived from Human Papillomavirus
THGYEEIPL

SEQ ID NO: 18667 - protein, 8 aa, Artificial Sequence
  Peptide Derived from Human Papillomavirus
THYYLWPL

SEQ ID NO: 18668 - protein, 9 aa, Artificial Sequence
  Peptide Derived from Human Papillomavirus
THYYLWPLY

SEQ ID NO: 18669 - protein, 10 aa, Artificial Sequence
  Peptide Derived from Human Papillomavirus
THYYLWPLYY

SEQ ID NO: 18670 - protein, 11 aa, Artificial Sequence
  Peptide Derived from Human Papillomavirus
THYYLWPLYYF

SEQ ID NO: 18671 - protein, 10 aa, Artificial Sequence
  Peptide Derived from Human Papillomavirus
TRPPVVIEPV

SEQ ID NO: 18672 - protein, 9 aa, Artificial Sequence
  Peptide Derived from Human Papillomavirus
TRPSSLITY

SEQ ID NO: 18673 - protein, 9 aa, Artificial Sequence
  Peptide Derived from Human Papillomavirus
TRSGTQIGA

SEQ ID NO: 18674 - protein, 11 aa, Artificial Sequence
  Peptide Derived from Human Papillomavirus
TRSGTQIGARV

SEQ ID NO: 18675 - protein, 10 aa, Artificial Sequence
  Peptide Derived from Human Papillomavirus
VHFYHDISPI

SEQ ID NO: 18676 - protein, 11 aa, Artificial Sequence
  Peptide Derived from Human Papillomavirus
VHFYHDISPIA

SEQ ID NO: 18677 - protein, 10 aa, Artificial Sequence
  Peptide Derived from Human Papillomavirus
VRFSRLGQRA

SEQ ID NO: 18678 - protein, 9 aa, Artificial Sequence
  Peptide Derived from Human Papillomavirus
VRRVAGPRL

SEQ ID NO: 18679 - protein, 10 aa, Artificial Sequence
  Peptide Derived from Human Papillomavirus
VRRVAGPRLY

SEQ ID NO: 18680 - protein, 8 aa, Artificial Sequence
  Peptide Derived from Human Papillomavirus
YHDISPIA

SEQ ID NO: 18681 - protein, 9 aa, Artificial Sequence
  Peptide Derived from Human Papillomavirus
AKIGMLDDA

SEQ ID NO: 18682 - protein, 10 aa, Artificial Sequence
  Peptide Derived from Human Papillomavirus
AKIVKDCGTM

SEQ ID NO: 18683 - protein, 10 aa, Artificial Sequence
  Peptide Derived from Human Papillomavirus
AKNRITIEKL

SEQ ID NO: 18684 - protein, 11 aa, Artificial Sequence
  Peptide Derived from Human Papillomavirus
AKNRITIEKLL

SEQ ID NO: 18685 - protein, 8 aa, Artificial Sequence
  Peptide Derived from Human Papillomavirus
AKRRLFEL

SEQ ID NO: 18686 - protein, 10 aa, Artificial Sequence
  Peptide Derived from Human Papillomavirus
CHLQSLACSW

SEQ ID NO: 18687 - protein, 9 aa, Artificial Sequence
  Peptide Derived from Human Papillomavirus
DKENDGDSF

SEQ ID NO: 18688 - protein, 8 aa, Artificial Sequence
  Peptide Derived from Human Papillomavirus
DKNGNPVY

SEQ ID NO: 18689 - protein, 10 aa, Artificial Sequence
  Peptide Derived from Human Papillomavirus
DKNGNPVYEL

SEQ ID NO: 18690 - protein, 8 aa, Artificial Sequence
  Peptide Derived from Human Papillomavirus
DKNWKSFF

SEQ ID NO: 18691 - protein, 9 aa, Artificial Sequence
  Peptide Derived from Human Papillomavirus
DKVSDEGDW

SEQ ID NO: 18692 - protein, 8 aa, Artificial Sequence
  Peptide Derived from Human Papillomavirus
DRQTGDNI

SEQ ID NO: 18693 - protein, 10 aa, Artificial Sequence
  Peptide Derived from Human Papillomavirus
DRWPYLHSRL

SEQ ID NO: 18694 - protein, 11 aa, Artificial Sequence
  Peptide Derived from Human Papillomavirus
DRWPYLHSRLV

SEQ ID NO: 18695 - protein, 8 aa, Artificial Sequence
  Peptide Derived from Human Papillomavirus
EHAEAVQV

SEQ ID NO: 18696 - protein, 9 aa, Artificial Sequence
  Peptide Derived from Human Papillomavirus
EHAEAVQVL

SEQ ID NO: 18697 - protein, 11 aa, Artificial Sequence
  Peptide Derived from Human Papillomavirus
EKLLCISTNCM

SEQ ID NO: 18698 - protein, 8 aa, Artificial Sequence
  Peptide Derived from Human Papillomavirus
EKLLEKLL

SEQ ID NO: 18699 - protein, 10 aa, Artificial Sequence
  Peptide Derived from Human Papillomavirus
EKLLEKLLCI

SEQ ID NO: 18700 - protein, 10 aa, Artificial Sequence
  Peptide Derived from Human Papillomavirus
EKRQMSMGQW

SEQ ID NO: 18701 - protein, 11 aa, Artificial Sequence
  Peptide Derived from Human Papillomavirus
EKRQMSMGQWI

SEQ ID NO: 18702 - protein, 11 aa, Artificial Sequence
  Peptide Derived from Human Papillomavirus
ERENETPTRNI

SEQ ID NO: 18703 - protein, 10 aa, Artificial Sequence
  Peptide Derived from Human Papillomavirus
ERQTVLQHSF

SEQ ID NO: 18704 - protein, 10 aa, Artificial Sequence
  Peptide Derived from Human Papillomavirus
FHAQEAEEHA

SEQ ID NO: 18705 - protein, 8 aa, Artificial Sequence
  Peptide Derived from Human Papillomavirus
FKCAKNRI

SEQ ID NO: 18706 - protein, 10 aa, Artificial Sequence
  Peptide Derived from Human Papillomavirus
FKCAKNRITI

SEQ ID NO: 18707 - protein, 9 aa, Artificial Sequence
  Peptide Derived from Human Papillomavirus
FKCVSGQNI

SEQ ID NO: 18708 - protein, 9 aa, Artificial Sequence
  Peptide Derived from Human Papillomavirus
FKELYGVSF

SEQ ID NO: 18709 - protein, 10 aa, Artificial Sequence
  Peptide Derived from Human Papillomavirus
FKELYGVSFM

SEQ ID NO: 18710 - protein, 8 aa, Artificial Sequence
  Peptide Derived from Human Papillomavirus
FKTLLQPY

SEQ ID NO: 18711 - protein, 10 aa, Artificial Sequence
  Peptide Derived from Human Papillomavirus
FKTLLQPYCL

SEQ ID NO: 18712 - protein, 11 aa, Artificial Sequence
  Peptide Derived from Human Papillomavirus
FKTLLQPYCLY

SEQ ID NO: 18713 - protein, 9 aa, Artificial Sequence
  Peptide Derived from Human Papillomavirus
GKAAMLGKF

SEQ ID NO: 18714 - protein, 8 aa, Artificial Sequence
  Peptide Derived from Human Papillomavirus
GKDDRWPY

SEQ ID NO: 18715 - protein, 9 aa, Artificial Sequence
  Peptide Derived from Human Papillomavirus
GKDDRWPYL

SEQ ID NO: 18716 - protein, 9 aa, Artificial Sequence
  Peptide Derived from Human Papillomavirus
GKFKELYGV

SEQ ID NO: 18717 - protein, 11 aa, Artificial Sequence
  Peptide Derived from Human Papillomavirus
GKFKELYGVSF

SEQ ID NO: 18718 - protein, 9 aa, Artificial Sequence
  Peptide Derived from Human Papillomavirus
GKSYFGMSL

SEQ ID NO: 18719 - protein, 10 aa, Artificial Sequence
  Peptide Derived from Human Papillomavirus
GKSYFGMSLI

SEQ ID NO: 18720 - protein, 11 aa, Artificial Sequence
  Peptide Derived from Human Papillomavirus
IHGAPNTGKSY

SEQ ID NO: 18721 - protein, 8 aa, Artificial Sequence
  Peptide Derived from Human Papillomavirus
IKSRCDKV

SEQ ID NO: 18722 - protein, 8 aa, Artificial Sequence
  Peptide Derived from Human Papillomavirus
KHKALMQL

SEQ ID NO: 18723 - protein, 10 aa, Artificial Sequence
  Peptide Derived from Human Papillomavirus
KKNCILIHGA

SEQ ID NO: 18724 - protein, 8 aa, Artificial Sequence
  Peptide Derived from Human Papillomavirus
KRAEKRQM

SEQ ID NO: 18725 - protein, 10 aa, Artificial Sequence
  Peptide Derived from Human Papillomavirus
KRAEKRQMSM

SEQ ID NO: 18726 - protein, 9 aa, Artificial Sequence
  Peptide Derived from Human Papillomavirus
KRKYVGSPL

SEQ ID NO: 18727 - protein, 9 aa, Artificial Sequence
  Peptide Derived from Human Papillomavirus
KRQMSMGQW

SEQ ID NO: 18728 - protein, 10 aa, Artificial Sequence
  Peptide Derived from Human Papillomavirus
KRQMSMGQWI

SEQ ID NO: 18729 - protein, 8 aa, Artificial Sequence
  Peptide Derived from Human Papillomavirus
LHSRLVVF

SEQ ID NO: 18730 - protein, 10 aa, Artificial Sequence
  Peptide Derived from Human Papillomavirus
LHSRLVVFTF

SEQ ID NO: 18731 - protein, 8 aa, Artificial Sequence
  Peptide Derived from Human Papillomavirus
LKCPPLLI

SEQ ID NO: 18732 - protein, 10 aa, Artificial Sequence
  Peptide Derived from Human Papillomavirus
LKGVPKKNCI

SEQ ID NO: 18733 - protein, 11 aa, Artificial Sequence
  Peptide Derived from Human Papillomavirus
LKGVPKKNCIL

SEQ ID NO: 18734 - protein, 8 aa, Artificial Sequence
  Peptide Derived from Human Papillomavirus
LKLFLKGV

SEQ ID NO: 18735 - protein, 10 aa, Artificial Sequence
  Peptide Derived from Human Papillomavirus
LKRKYVGSPL

SEQ ID NO: 18736 - protein, 9 aa, Artificial Sequence
  Peptide Derived from Human Papillomavirus
LKSNSQAKI

SEQ ID NO: 18737 - protein, 10 aa, Artificial Sequence
  Peptide Derived from Human Papillomavirus
LKSNSQAKIV

SEQ ID NO: 18738 - protein, 8 aa, Artificial Sequence
  Peptide Derived from Human Papillomavirus
LKTSNGKA

SEQ ID NO: 18739 - protein, 9 aa, Artificial Sequence
  Peptide Derived from Human Papillomavirus
LKTSNGKAA

SEQ ID NO: 18740 - protein, 10 aa, Artificial Sequence
  Peptide Derived from Human Papillomavirus
LKTSNGKAAM

SEQ ID NO: 18741 - protein, 11 aa, Artificial Sequence
  Peptide Derived from Human Papillomavirus
LKTSNGKAAML

SEQ ID NO: 18742 - protein, 10 aa, Artificial Sequence
  Peptide Derived from Human Papillomavirus
LRNALDGNPV

SEQ ID NO: 18743 - protein, 8 aa, Artificial Sequence
  Peptide Derived from Human Papillomavirus
LRSTAAAL

SEQ ID NO: 18744 - protein, 9 aa, Artificial Sequence
  Peptide Derived from Human Papillomavirus
LRSTAAALY

SEQ ID NO: 18745 - protein, 10 aa, Artificial Sequence
  Peptide Derived from Human Papillomavirus
LRSTAAALYW

SEQ ID NO: 18746 - protein, 11 aa, Artificial Sequence
  Peptide Derived from Human Papillomavirus
LRSTAAALYWY

SEQ ID NO: 18747 - protein, 8 aa, Artificial Sequence
  Peptide Derived from Human Papillomavirus
LRYQQIEF

SEQ ID NO: 18748 - protein, 9 aa, Artificial Sequence
  Peptide Derived from Human Papillomavirus
LRYQQIEFV

SEQ ID NO: 18749 - protein, 11 aa, Artificial Sequence
  Peptide Derived from Human Papillomavirus
LRYQQIEFVSF

SEQ ID NO: 18750 - protein, 8 aa, Artificial Sequence
  Peptide Derived from Human Papillomavirus
NKSTCTDW

SEQ ID NO: 18751 - protein, 10 aa, Artificial Sequence
  Peptide Derived from Human Papillomavirus
NKSTCTDWCV

SEQ ID NO: 18752 - protein, 11 aa, Artificial Sequence
  Peptide Derived from Human Papillomavirus
NKSTCTDWCVA

SEQ ID NO: 18753 - protein, 8 aa, Artificial Sequence
  Peptide Derived from Human Papillomavirus
NRITIEKL

SEQ ID NO: 18754 - protein, 9 aa, Artificial Sequence
  Peptide Derived from Human Papillomavirus
NRITIEKLL

SEQ ID NO: 18755 - protein, 8 aa, Artificial Sequence
  Peptide Derived from Human Papillomavirus
PKKNCILI

SEQ ID NO: 18756 - protein, 11 aa, Artificial Sequence
  Peptide Derived from Human Papillomavirus
PKKNCILIHGA

SEQ ID NO: 18757 - protein, 8 aa, Artificial Sequence
  Peptide Derived from Human Papillomavirus
PKLRSTAA

SEQ ID NO: 18758 - protein, 9 aa, Artificial Sequence
  Peptide Derived from Human Papillomavirus
PKLRSTAAA

SEQ ID NO: 18759 - protein, 10 aa, Artificial Sequence
  Peptide Derived from Human Papillomavirus
PKLRSTAAAL

SEQ ID NO: 18760 - protein, 11 aa, Artificial Sequence
  Peptide Derived from Human Papillomavirus
PKLRSTAAALY

SEQ ID NO: 18761 - protein, 8 aa, Artificial Sequence
  Peptide Derived from Human Papillomavirus
PRLKAICI

SEQ ID NO: 18762 - protein, 9 aa, Artificial Sequence
  Peptide Derived from Human Papillomavirus
QHSFNDTTF

SEQ ID NO: 18763 - protein, 11 aa, Artificial Sequence
  Peptide Derived from Human Papillomavirus
QHSFNDTTFDL

SEQ ID NO: 18764 - protein, 11 aa, Artificial Sequence
  Peptide Derived from Human Papillomavirus
RHYKRAEKRQM

SEQ ID NO: 18765 - protein, 8 aa, Artificial Sequence
  Peptide Derived from Human Papillomavirus
RKYVGSPL

SEQ ID NO: 18766 - protein, 11 aa, Artificial Sequence
  Peptide Derived from Human Papillomavirus
RKYVGSPLSDI

SEQ ID NO: 18767 - protein, 11 aa, Artificial Sequence
  Peptide Derived from Human Papillomavirus
RRLFELPDSGY

SEQ ID NO: 18768 - protein, 8 aa, Artificial Sequence
  Peptide Derived from Human Papillomavirus
SHFWLQPL

SEQ ID NO: 18769 - protein, 9 aa, Artificial Sequence
  Peptide Derived from Human Papillomavirus
SHFWLQPLA

SEQ ID NO: 18770 - protein, 11 aa, Artificial Sequence
  Peptide Derived from Human Papillomavirus
SHFWLQPLADA

SEQ ID NO: 18771 - protein, 10 aa, Artificial Sequence
  Peptide Derived from Human Papillomavirus
SKSHFWLQPL

SEQ ID NO: 18772 - protein, 11 aa, Artificial Sequence
  Peptide Derived from Human Papillomavirus
SKSHFWLQPLA

SEQ ID NO: 18773 - protein, 8 aa, Artificial Sequence
  Peptide Derived from Human Papillomavirus
SKTAKRRL

SEQ ID NO: 18774 - protein, 9 aa, Artificial Sequence
  Peptide Derived from Human Papillomavirus
SKTAKRRLF

SEQ ID NO: 18775 - protein, 11 aa, Artificial Sequence
  Peptide Derived from Human Papillomavirus
SKTAKRRLFEL

SEQ ID NO: 18776 - protein, 8 aa, Artificial Sequence
  Peptide Derived from Human Papillomavirus
SRLVVFTF

SEQ ID NO: 18777 - protein, 9 aa, Artificial Sequence
  Peptide Derived from Human Papillomavirus
SRTWCRLNL

SEQ ID NO: 18778 - protein, 8 aa, Artificial Sequence
  Peptide Derived from Human Papillomavirus
TRNILQVL

SEQ ID NO: 18779 - protein, 11 aa, Artificial Sequence
  Peptide Derived from Human Papillomavirus
VKDCGTMCRHY

SEQ ID NO: 18780 - protein, 9 aa, Artificial Sequence
  Peptide Derived from Human Papillomavirus
VKFLRYQQI

SEQ ID NO: 18781 - protein, 11 aa, Artificial Sequence
  Peptide Derived from Human Papillomavirus
VKFLRYQQIEF

SEQ ID NO: 18782 - protein, 9 aa, Artificial Sequence
  Peptide Derived from Human Papillomavirus
VKHKALMQL

SEQ ID NO: 18783 - protein, 10 aa, Artificial Sequence
  Peptide Derived from Human Papillomavirus
VRFKCAKNRI

SEQ ID NO: 18784 - protein, 8 aa, Artificial Sequence
  Peptide Derived from Human Papillomavirus
WHYIDNYL

SEQ ID NO: 18785 - protein, 11 aa, Artificial Sequence
  Peptide Derived from Human Papillomavirus
WHYIDNYLRNA

SEQ ID NO: 18786 - protein, 9 aa, Artificial Sequence
  Peptide Derived from Human Papillomavirus
WKSFFSRTW

SEQ ID NO: 18787 - protein, 8 aa, Artificial Sequence
  Peptide Derived from Human Papillomavirus
WRDIVKFL

SEQ ID NO: 18788 - protein, 10 aa, Artificial Sequence
  Peptide Derived from Human Papillomavirus
WRDIVKFLRY

SEQ ID NO: 18789 - protein, 9 aa, Artificial Sequence
  Peptide Derived from Human Papillomavirus
YKRAEKRQM

SEQ ID NO: 18790 - protein, 11 aa, Artificial Sequence
  Peptide Derived from Human Papillomavirus
YKRAEKRQMSM

SEQ ID NO: 18791 - protein, 8 aa, Artificial Sequence
  Peptide Derived from Human Papillomavirus
YRTGMSNI

SEQ ID NO: 18792 - protein, 11 aa, Artificial Sequence
  Peptide Derived from Human Papillomavirus
YRTGMSNISDV

SEQ ID NO: 18793 - protein, 9 aa, Artificial Sequence
  Peptide Derived from Human Papillomavirus
AKALQAIEL

SEQ ID NO: 18794 - protein, 11 aa, Artificial Sequence
  Peptide Derived from Human Papillomavirus
AKALQAIELQM

SEQ ID NO: 18795 - protein, 10 aa, Artificial Sequence
  Peptide Derived from Human Papillomavirus
AKKYGTGKKW

SEQ ID NO: 18796 - protein, 9 aa, Artificial Sequence
  Peptide Derived from Human Papillomavirus
AREMGIHSI

SEQ ID NO: 18797 - protein, 9 aa, Artificial Sequence
  Peptide Derived from Human Papillomavirus
DHIDYWKHI

SEQ ID NO: 18798 - protein, 11 aa, Artificial Sequence
  Peptide Derived from Human Papillomavirus
DHIDYWKHIRL

SEQ ID NO: 18799 - protein, 11 aa, Artificial Sequence
  Peptide Derived from Human Papillomavirus
EHRNTHHPNKL

SEQ ID NO: 18800 - protein, 10 aa, Artificial Sequence
  Peptide Derived from Human Papillomavirus
EHYENDSKRL

SEQ ID NO: 18801 - protein, 9 aa, Artificial Sequence
  Peptide Derived from Human Papillomavirus
GHITYFVNF

SEQ ID NO: 18802 - protein, 8 aa, Artificial Sequence
  Peptide Derived from Human Papillomavirus
GKHKNAIV

SEQ ID NO: 18803 - protein, 10 aa, Artificial Sequence
  Peptide Derived from Human Papillomavirus
GKHKNAIVTL

SEQ ID NO: 18804 - protein, 8 aa, Artificial Sequence
  Peptide Derived from Human Papillomavirus
GKKWEVHA

SEQ ID NO: 18805 - protein, 8 aa, Artificial Sequence
  Peptide Derived from Human Papillomavirus
HKNAIVTL

SEQ ID NO: 18806 - protein, 10 aa, Artificial Sequence
  Peptide Derived from Human Papillomavirus
HKNAIVTLTY

SEQ ID NO: 18807 - protein, 11 aa, Artificial Sequence
  Peptide Derived from Human Papillomavirus
HKNAIVTLTYI

SEQ ID NO: 18808 - protein, 10 aa, Artificial Sequence
  Peptide Derived from Human Papillomavirus
HRNTHHPNKL

SEQ ID NO: 18809 - protein, 11 aa, Artificial Sequence
  Peptide Derived from Human Papillomavirus
HRNTHHPNKLL

SEQ ID NO: 18810 - protein, 9 aa, Artificial Sequence
  Peptide Derived from Human Papillomavirus
IHLKGDANI

SEQ ID NO: 18811 - protein, 10 aa, Artificial Sequence
  Peptide Derived from Human Papillomavirus
IHLKGDANIL

SEQ ID NO: 18812 - protein, 8 aa, Artificial Sequence
  Peptide Derived from Human Papillomavirus
IHSINHQV

SEQ ID NO: 18813 - protein, 9 aa, Artificial Sequence
  Peptide Derived from Human Papillomavirus
IHSINHQVV

SEQ ID NO: 18814 - protein, 11 aa, Artificial Sequence
  Peptide Derived from Human Papillomavirus
IHSINHQVVPA

SEQ ID NO: 18815 - protein, 8 aa, Artificial Sequence
  Peptide Derived from Human Papillomavirus
IRLECVLM

SEQ ID NO: 18816 - protein, 9 aa, Artificial Sequence
  Peptide Derived from Human Papillomavirus
IRLECVLMY

SEQ ID NO: 18817 - protein, 11 aa, Artificial Sequence
  Peptide Derived from Human Papillomavirus
IRLECVLMYKA

SEQ ID NO: 18818 - protein, 8 aa, Artificial Sequence
  Peptide Derived from Human Papillomavirus
KHGYTVEV

SEQ ID NO: 18819 - protein, 10 aa, Artificial Sequence
  Peptide Derived from Human Papillomavirus
KHGYTVEVQF

SEQ ID NO: 18820 - protein, 8 aa, Artificial Sequence
  Peptide Derived from Human Papillomavirus
KHIRLECV

SEQ ID NO: 18821 - protein, 9 aa, Artificial Sequence
  Peptide Derived from Human Papillomavirus
KHIRLECVL

SEQ ID NO: 18822 - protein, 10 aa, Artificial Sequence
  Peptide Derived from Human Papillomavirus
KHIRLECVLM

SEQ ID NO: 18823 - protein, 11 aa, Artificial Sequence
  Peptide Derived from Human Papillomavirus
KHIRLECVLMY

SEQ ID NO: 18824 - protein, 9 aa, Artificial Sequence
  Peptide Derived from Human Papillomavirus
KHKNAIVTL

SEQ ID NO: 18825 - protein, 11 aa, Artificial Sequence
  Peptide Derived from Human Papillomavirus
KHKNAIVTLTY

SEQ ID NO: 18826 - protein, 9 aa, Artificial Sequence
  Peptide Derived from Human Papillomavirus
KKHGYTVEV

SEQ ID NO: 18827 - protein, 11 aa, Artificial Sequence
  Peptide Derived from Human Papillomavirus
KKHGYTVEVQF

SEQ ID NO: 18828 - protein, 11 aa, Artificial Sequence
  Peptide Derived from Human Papillomavirus
KKWEVHAGGQV

SEQ ID NO: 18829 - protein, 9 aa, Artificial Sequence
  Peptide Derived from Human Papillomavirus
KKYGTGKKW

SEQ ID NO: 18830 - protein, 11 aa, Artificial Sequence
  Peptide Derived from Human Papillomavirus
KKYGTGKKWEV

SEQ ID NO: 18831 - protein, 9 aa, Artificial Sequence
  Peptide Derived from Human Papillomavirus
KRLCDHIDY

SEQ ID NO: 18832 - protein, 10 aa, Artificial Sequence
  Peptide Derived from Human Papillomavirus
KRLCDHIDYW

SEQ ID NO: 18833 - protein, 8 aa, Artificial Sequence
  Peptide Derived from Human Papillomavirus
LKCLRYRL

SEQ ID NO: 18834 - protein, 11 aa, Artificial Sequence
  Peptide Derived from Human Papillomavirus
LKCLRYRLSKY

SEQ ID NO: 18835 - protein, 8 aa, Artificial Sequence
  Peptide Derived from Human Papillomavirus
LKGDANIL

SEQ ID NO: 18836 - protein, 11 aa, Artificial Sequence
  Peptide Derived from Human Papillomavirus
LKGDANILKCL

SEQ ID NO: 18837 - protein, 8 aa, Artificial Sequence
  Peptide Derived from Human Papillomavirus
LKKHGYTV

SEQ ID NO: 18838 - protein, 10 aa, Artificial Sequence
  Peptide Derived from Human Papillomavirus
LKKHGYTVEV

SEQ ID NO: 18839 - protein, 9 aa, Artificial Sequence
  Peptide Derived from Human Papillomavirus
LRGDSVDSV

SEQ ID NO: 18840 - protein, 8 aa, Artificial Sequence
  Peptide Derived from Human Papillomavirus
LRYRLSKY

SEQ ID NO: 18841 - protein, 11 aa, Artificial Sequence
  Peptide Derived from Human Papillomavirus
LRYRLSKYKQL

SEQ ID NO: 18842 - protein, 8 aa, Artificial Sequence
  Peptide Derived from Human Papillomavirus
MHYTNWKF

SEQ ID NO: 18843 - protein, 9 aa, Artificial Sequence
  Peptide Derived from Human Papillomavirus
MHYTNWKFI

SEQ ID NO: 18844 - protein, 10 aa, Artificial Sequence
  Peptide Derived from Human Papillomavirus
MHYTNWKFIY

SEQ ID NO: 18845 - protein, 11 aa, Artificial Sequence
  Peptide Derived from Human Papillomavirus
MHYTNWKFIYL

SEQ ID NO: 18846 - protein, 8 aa, Artificial Sequence
  Peptide Derived from Human Papillomavirus
NHQVVPAL

SEQ ID NO: 18847 - protein, 10 aa, Artificial Sequence
  Peptide Derived from Human Papillomavirus
NHQVVPALSV

SEQ ID NO: 18848 - protein, 9 aa, Artificial Sequence
  Peptide Derived from Human Papillomavirus
NKLLRGDSV

SEQ ID NO: 18849 - protein, 9 aa, Artificial Sequence
  Peptide Derived from Human Papillomavirus
QRDDFLNTV

SEQ ID NO: 18850 - protein, 11 aa, Artificial Sequence
  Peptide Derived from Human Papillomavirus
QRDDFLNTVKI

SEQ ID NO: 18851 - protein, 10 aa, Artificial Sequence
  Peptide Derived from Human Papillomavirus
QRLNVCQDKI

SEQ ID NO: 18852 - protein, 11 aa, Artificial Sequence
  Peptide Derived from Human Papillomavirus
QRLNVCQDKIL

SEQ ID NO: 18853 - protein, 8 aa, Artificial Sequence
  Peptide Derived from Human Papillomavirus
SKAKALQA

SEQ ID NO: 18854 - protein, 9 aa, Artificial Sequence
  Peptide Derived from Human Papillomavirus
SKAKALQAI

SEQ ID NO: 18855 - protein, 11 aa, Artificial Sequence
  Peptide Derived from Human Papillomavirus
SKAKALQAIEL

SEQ ID NO: 18856 - protein, 8 aa, Artificial Sequence
  Peptide Derived from Human Papillomavirus
SKRLCDHI

SEQ ID NO: 18857 - protein, 10 aa, Artificial Sequence
  Peptide Derived from Human Papillomavirus
SKRLCDHIDY

SEQ ID NO: 18858 - protein, 11 aa, Artificial Sequence
  Peptide Derived from Human Papillomavirus
SKRLCDHIDYW

SEQ ID NO: 18859 - protein, 10 aa, Artificial Sequence
  Peptide Derived from Human Papillomavirus
SKYKQLYEQV

SEQ ID NO: 18860 - protein, 8 aa, Artificial Sequence
  Peptide Derived from Human Papillomavirus
THHPNKLL

SEQ ID NO: 18861 - protein, 8 aa, Artificial Sequence
  Peptide Derived from Human Papillomavirus
TRAVSCPA

SEQ ID NO: 18862 - protein, 8 aa, Artificial Sequence
  Peptide Derived from Human Papillomavirus
VHAGGQVI

SEQ ID NO: 18863 - protein, 9 aa, Artificial Sequence
  Peptide Derived from Human Papillomavirus
VHAGGQVIV

SEQ ID NO: 18864 - protein, 10 aa, Artificial Sequence
  Peptide Derived from Human Papillomavirus
VHAGGQVIVF

SEQ ID NO: 18865 - protein, 8 aa, Artificial Sequence
  Peptide Derived from Human Papillomavirus
VHEGHITY

SEQ ID NO: 18866 - protein, 9 aa, Artificial Sequence
  Peptide Derived from Human Papillomavirus
VHEGHITYF

SEQ ID NO: 18867 - protein, 10 aa, Artificial Sequence
  Peptide Derived from Human Papillomavirus
VHEGHITYFV

SEQ ID NO: 18868 - protein, 10 aa, Artificial Sequence
  Peptide Derived from Human Papillomavirus
VHNTMHYTNW

SEQ ID NO: 18869 - protein, 9 aa, Artificial Sequence
  Peptide Derived from Human Papillomavirus
VKIPNTVSV

SEQ ID NO: 18870 - protein, 8 aa, Artificial Sequence
  Peptide Derived from Human Papillomavirus
WKFIYLCI

SEQ ID NO: 18871 - protein, 9 aa, Artificial Sequence
  Peptide Derived from Human Papillomavirus
WKHIRLECV

SEQ ID NO: 18872 - protein, 10 aa, Artificial Sequence
  Peptide Derived from Human Papillomavirus
WKHIRLECVL

SEQ ID NO: 18873 - protein, 11 aa, Artificial Sequence
  Peptide Derived from Human Papillomavirus
WKHIRLECVLM

SEQ ID NO: 18874 - protein, 8 aa, Artificial Sequence
  Peptide Derived from Human Papillomavirus
YKAREMGI

SEQ ID NO: 18875 - protein, 11 aa, Artificial Sequence
  Peptide Derived from Human Papillomavirus
YKAREMGIHSI

SEQ ID NO: 18876 - protein, 8 aa, Artificial Sequence
  Peptide Derived from Human Papillomavirus
YKNEDWTM

SEQ ID NO: 18877 - protein, 8 aa, Artificial Sequence
  Peptide Derived from Human Papillomavirus
YKQLYEQV

SEQ ID NO: 18878 - protein, 9 aa, Artificial Sequence
  Peptide Derived from Human Papillomavirus
YRLSKYKQL

SEQ ID NO: 18879 - protein, 10 aa, Artificial Sequence
  Peptide Derived from Human Papillomavirus
YRLSKYKQLY

SEQ ID NO: 18880 - protein, 8 aa, Artificial Sequence
  Peptide Derived from Human Papillomavirus
IHTHASFL

SEQ ID NO: 18881 - protein, 8 aa, Artificial Sequence
  Peptide Derived from Human Papillomavirus
IRPLVLSV

SEQ ID NO: 18882 - protein, 10 aa, Artificial Sequence
  Peptide Derived from Human Papillomavirus
IRPLVLSVSV

SEQ ID NO: 18883 - protein, 11 aa, Artificial Sequence
  Peptide Derived from Human Papillomavirus
IRPLVLSVSVY

SEQ ID NO: 18884 - protein, 8 aa, Artificial Sequence
  Peptide Derived from Human Papillomavirus
LRCFCIYV

SEQ ID NO: 18885 - protein, 9 aa, Artificial Sequence
  Peptide Derived from Human Papillomavirus
LRCFCIYVV

SEQ ID NO: 18886 - protein, 10 aa, Artificial Sequence
  Peptide Derived from Human Papillomavirus
LRCFCIYVVF

SEQ ID NO: 18887 - protein, 11 aa, Artificial Sequence
  Peptide Derived from Human Papillomavirus
LRCFCIYVVFI

SEQ ID NO: 18888 - protein, 10 aa, Artificial Sequence
  Peptide Derived from Human Papillomavirus
CKGQLTETEV

SEQ ID NO: 18889 - protein, 11 aa, Artificial Sequence
  Peptide Derived from Human Papillomavirus
CKGQLTETEVL

SEQ ID NO: 18890 - protein, 9 aa, Artificial Sequence
  Peptide Derived from Human Papillomavirus
DKKKRFHNI

SEQ ID NO: 18891 - protein, 8 aa, Artificial Sequence
  Peptide Derived from Human Papillomavirus
EKLTNKGI

SEQ ID NO: 18892 - protein, 11 aa, Artificial Sequence
  Peptide Derived from Human Papillomavirus
EKLTNKGICDL

SEQ ID NO: 18893 - protein, 9 aa, Artificial Sequence
  Peptide Derived from Human Papillomavirus
ERPRKLHEL

SEQ ID NO: 18894 - protein, 8 aa, Artificial Sequence
  Peptide Derived from Human Papillomavirus
FHNIGGRW

SEQ ID NO: 18895 - protein, 11 aa, Artificial Sequence
  Peptide Derived from Human Papillomavirus
FKNPAERPRKL

SEQ ID NO: 18896 - protein, 8 aa, Artificial Sequence
  Peptide Derived from Human Papillomavirus
FRWYRYSV

SEQ ID NO: 18897 - protein, 9 aa, Artificial Sequence
  Peptide Derived from Human Papillomavirus
FRWYRYSVY

SEQ ID NO: 18898 - protein, 8 aa, Artificial Sequence
  Peptide Derived from Human Papillomavirus
GRWTGRCI

SEQ ID NO: 18899 - protein, 9 aa, Artificial Sequence
  Peptide Derived from Human Papillomavirus
GRWTGRCIA

SEQ ID NO: 18900 - protein, 11 aa, Artificial Sequence
  Peptide Derived from Human Papillomavirus
GRWTGRCIACW

SEQ ID NO: 18901 - protein, 10 aa, Artificial Sequence
  Peptide Derived from Human Papillomavirus
IRCITCQRPL

SEQ ID NO: 18902 - protein, 8 aa, Artificial Sequence
  Peptide Derived from Human Papillomavirus
KKKRFHNI

SEQ ID NO: 18903 - protein, 11 aa, Artificial Sequence
  Peptide Derived from Human Papillomavirus
KKRFHNIGGRW

SEQ ID NO: 18904 - protein, 10 aa, Artificial Sequence
  Peptide Derived from Human Papillomavirus
KRFHNIGGRW

SEQ ID NO: 18905 - protein, 8 aa, Artificial Sequence
  Peptide Derived from Human Papillomavirus
LHELSSAL

SEQ ID NO: 18906 - protein, 10 aa, Artificial Sequence
  Peptide Derived from Human Papillomavirus
LHELSSALEI

SEQ ID NO: 18907 - protein, 10 aa, Artificial Sequence
  Peptide Derived from Human Papillomavirus
LRFYSKVSEF

SEQ ID NO: 18908 - protein, 8 aa, Artificial Sequence
  Peptide Derived from Human Papillomavirus
NKGICDLL

SEQ ID NO: 18909 - protein, 9 aa, Artificial Sequence
  Peptide Derived from Human Papillomavirus
NKGICDLLI

SEQ ID NO: 18910 - protein, 9 aa, Artificial Sequence
  Peptide Derived from Human Papillomavirus
PHGVCTKCL

SEQ ID NO: 18911 - protein, 11 aa, Artificial Sequence
  Peptide Derived from Human Papillomavirus
PHGVCTKCLRF

SEQ ID NO: 18912 - protein, 10 aa, Artificial Sequence
  Peptide Derived from Human Papillomavirus
PRKLHELSSA

SEQ ID NO: 18913 - protein, 11 aa, Artificial Sequence
  Peptide Derived from Human Papillomavirus
PRKLHELSSAL

SEQ ID NO: 18914 - protein, 10 aa, Artificial Sequence
  Peptide Derived from Human Papillomavirus
QRHLDKKKRF

SEQ ID NO: 18915 - protein, 9 aa, Artificial Sequence
  Peptide Derived from Human Papillomavirus
RHLDKKKRF

SEQ ID NO: 18916 - protein, 9 aa, Artificial Sequence
  Peptide Derived from Human Papillomavirus
RKLHELSSA

SEQ ID NO: 18917 - protein, 10 aa, Artificial Sequence
  Peptide Derived from Human Papillomavirus
RKLHELSSAL

SEQ ID NO: 18918 - protein, 9 aa, Artificial Sequence
  Peptide Derived from Human Papillomavirus
RRPRTETQV

SEQ ID NO: 18919 - protein, 8 aa, Artificial Sequence
  Peptide Derived from Human Papillomavirus
SKVSEFRW

SEQ ID NO: 18920 - protein, 9 aa, Artificial Sequence
  Peptide Derived from Human Papillomavirus
SKVSEFRWY

SEQ ID NO: 18921 - protein, 11 aa, Artificial Sequence
  Peptide Derived from Human Papillomavirus
SKVSEFRWYRY

SEQ ID NO: 18922 - protein, 10 aa, Artificial Sequence
  Peptide Derived from Human Papillomavirus
TKCLRFYSKV

SEQ ID NO: 18923 - protein, 10 aa, Artificial Sequence
  Peptide Derived from Human Papillomavirus
WRRPRTETQV

SEQ ID NO: 18924 - protein, 9 aa, Artificial Sequence
  Peptide Derived from Human Papillomavirus
YRDDTPHGV

SEQ ID NO: 18925 - protein, 10 aa, Artificial Sequence
  Peptide Derived from Human Papillomavirus
YRYSVYGTTL

SEQ ID NO: 18926 - protein, 9 aa, Artificial Sequence
  Peptide Derived from Human Papillomavirus
CKSTLRLCV

SEQ ID NO: 18927 - protein, 8 aa, Artificial Sequence
  Peptide Derived from Human Papillomavirus
IRILQELL

SEQ ID NO: 18928 - protein, 9 aa, Artificial Sequence
  Peptide Derived from Human Papillomavirus
IRILQELLM

SEQ ID NO: 18929 - protein, 10 aa, Artificial Sequence
  Peptide Derived from Human Papillomavirus
LRLCVQSTQV

SEQ ID NO: 18930 - protein, 8 aa, Artificial Sequence
  Peptide Derived from Human Papillomavirus
MRGETPTL

SEQ ID NO: 18931 - protein, 11 aa, Artificial Sequence
  Peptide Derived from Human Papillomavirus
MRGETPTLQDY

SEQ ID NO: 18932 - protein, 10 aa, Artificial Sequence
  Peptide Derived from Human Papillomavirus
ARLLTVGHPY

SEQ ID NO: 18933 - protein, 11 aa, Artificial Sequence
  Peptide Derived from Human Papillomavirus
ARLLTVGHPYY

SEQ ID NO: 18934 - protein, 9 aa, Artificial Sequence
  Peptide Derived from Human Papillomavirus
CKITLSADI

SEQ ID NO: 18935 - protein, 10 aa, Artificial Sequence
  Peptide Derived from Human Papillomavirus
CKITLSADIM

SEQ ID NO: 18936 - protein, 9 aa, Artificial Sequence
  Peptide Derived from Human Papillomavirus
CKPPIGEHW

SEQ ID NO: 18937 - protein, 9 aa, Artificial Sequence
  Peptide Derived from Human Papillomavirus
CKYPDYLKM

SEQ ID NO: 18938 - protein, 10 aa, Artificial Sequence
  Peptide Derived from Human Papillomavirus
CKYPDYLKMV

SEQ ID NO: 18939 - protein, 11 aa, Artificial Sequence
  Peptide Derived from Human Papillomavirus
CKYPDYLKMVA

SEQ ID NO: 18940 - protein, 10 aa, Artificial Sequence
  Peptide Derived from Human Papillomavirus
EKFSADLDQF

SEQ ID NO: 18941 - protein, 8 aa, Artificial Sequence
  Peptide Derived from Human Papillomavirus
FKAGKRSA

SEQ ID NO: 18942 - protein, 11 aa, Artificial Sequence
  Peptide Derived from Human Papillomavirus
FKAGKRSAPSA

SEQ ID NO: 18943 - protein, 9 aa, Artificial Sequence
  Peptide Derived from Human Papillomavirus
FKDYVFWEV

SEQ ID NO: 18944 - protein, 11 aa, Artificial Sequence
  Peptide Derived from Human Papillomavirus
FKDYVFWEVNL

SEQ ID NO: 18945 - protein, 11 aa, Artificial Sequence
  Peptide Derived from Human Papillomavirus
FKEYLRHGEEF

SEQ ID NO: 18946 - protein, 9 aa, Artificial Sequence
  Peptide Derived from Human Papillomavirus
FKSSNFKEY

SEQ ID NO: 18947 - protein, 10 aa, Artificial Sequence
  Peptide Derived from Human Papillomavirus
FKSSNFKEYL

SEQ ID NO: 18948 - protein, 11 aa, Artificial Sequence
  Peptide Derived from Human Papillomavirus
FRVRLPDPNKF

SEQ ID NO: 18949 - protein, 8 aa, Artificial Sequence
  Peptide Derived from Human Papillomavirus
GHNNGICW

SEQ ID NO: 18950 - protein, 8 aa, Artificial Sequence
  Peptide Derived from Human Papillomavirus
GHPLLNKF

SEQ ID NO: 18951 - protein, 10 aa, Artificial Sequence
  Peptide Derived from Human Papillomavirus
GKGSPCSNNA

SEQ ID NO: 18952 - protein, 11 aa, Artificial Sequence
  Peptide Derived from Human Papillomavirus
GKGSPCSNNAI

SEQ ID NO: 18953 - protein, 8 aa, Artificial Sequence
  Peptide Derived from Human Papillomavirus
GKRSAPSA

SEQ ID NO: 18954 - protein, 8 aa, Artificial Sequence
  Peptide Derived from Human Papillomavirus
GRGQPLGV

SEQ ID NO: 18955 - protein, 10 aa, Artificial Sequence
  Peptide Derived from Human Papillomavirus
GRGQPLGVGI

SEQ ID NO: 18956 - protein, 8 aa, Artificial Sequence
  Peptide Derived from Human Papillomavirus
GRKFLLQA

SEQ ID NO: 18957 - protein, 10 aa, Artificial Sequence
  Peptide Derived from Human Papillomavirus
GRKFLLQAGY

SEQ ID NO: 18958 - protein, 8 aa, Artificial Sequence
  Peptide Derived from Human Papillomavirus
IHSMNPAI

SEQ ID NO: 18959 - protein, 9 aa, Artificial Sequence
  Peptide Derived from Human Papillomavirus
IHSMNPAIL

SEQ ID NO: 18960 - protein, 8 aa, Artificial Sequence
  Peptide Derived from Human Papillomavirus
IKGSGSTA

SEQ ID NO: 18961 - protein, 10 aa, Artificial Sequence
  Peptide Derived from Human Papillomavirus
IKGSGSTATL

SEQ ID NO: 18962 - protein, 11 aa, Artificial Sequence
  Peptide Derived from Human Papillomavirus
IKGSGSTATLA

SEQ ID NO: 18963 - protein, 8 aa, Artificial Sequence
  Peptide Derived from Human Papillomavirus
KKIVVPKV

SEQ ID NO: 18964 - protein, 11 aa, Artificial Sequence
  Peptide Derived from Human Papillomavirus
KKIVVPKVSGL

SEQ ID NO: 18965 - protein, 9 aa, Artificial Sequence
  Peptide Derived from Human Papillomavirus
LKEKFSADL

SEQ ID NO: 18966 - protein, 8 aa, Artificial Sequence
  Peptide Derived from Human Papillomavirus
LKMVAEPY

SEQ ID NO: 18967 - protein, 11 aa, Artificial Sequence
  Peptide Derived from Human Papillomavirus
LKNSVIQDGDM

SEQ ID NO: 18968 - protein, 9 aa, Artificial Sequence
  Peptide Derived from Human Papillomavirus
LRHGEEFDL

SEQ ID NO: 18969 - protein, 11 aa, Artificial Sequence
  Peptide Derived from Human Papillomavirus
LRHGEEFDLQF

SEQ ID NO: 18970 - protein, 8 aa, Artificial Sequence
  Peptide Derived from Human Papillomavirus
LRREQMFV

SEQ ID NO: 18971 - protein, 11 aa, Artificial Sequence
  Peptide Derived from Human Papillomavirus
LRREQMFVRHF

SEQ ID NO: 18972 - protein, 10 aa, Artificial Sequence
  Peptide Derived from Human Papillomavirus
NKFGFPDTSF

SEQ ID NO: 18973 - protein, 11 aa, Artificial Sequence
  Peptide Derived from Human Papillomavirus
NKFGFPDTSFY

SEQ ID NO: 18974 - protein, 9 aa, Artificial Sequence
  Peptide Derived from Human Papillomavirus
NKPYWMQRA

SEQ ID NO: 18975 - protein, 9 aa, Artificial Sequence
  Peptide Derived from Human Papillomavirus
NRECISMDY

SEQ ID NO: 18976 - protein, 10 aa, Artificial Sequence
  Peptide Derived from Human Papillomavirus
NRSGTVGESV

SEQ ID NO: 18977 - protein, 9 aa, Artificial Sequence
  Peptide Derived from Human Papillomavirus
PKEDPFKDY

SEQ ID NO: 18978 - protein, 10 aa, Artificial Sequence
  Peptide Derived from Human Papillomavirus
PKEDPFKDYV

SEQ ID NO: 18979 - protein, 11 aa, Artificial Sequence
  Peptide Derived from Human Papillomavirus
PKEDPFKDYVF

SEQ ID NO: 18980 - protein, 10 aa, Artificial Sequence
  Peptide Derived from Human Papillomavirus
PKFKAGKRSA

SEQ ID NO: 18981 - protein, 9 aa, Artificial Sequence
  Peptide Derived from Human Papillomavirus
PKKIVVPKV

SEQ ID NO: 18982 - protein, 9 aa, Artificial Sequence
  Peptide Derived from Human Papillomavirus
PKSDNPKKI

SEQ ID NO: 18983 - protein, 10 aa, Artificial Sequence
  Peptide Derived from Human Papillomavirus
PKSDNPKKIV

SEQ ID NO: 18984 - protein, 11 aa, Artificial Sequence
  Peptide Derived from Human Papillomavirus
PKSDNPKKIVV

SEQ ID NO: 18985 - protein, 8 aa, Artificial Sequence
  Peptide Derived from Human Papillomavirus
PKVSGLQY

SEQ ID NO: 18986 - protein, 10 aa, Artificial Sequence
  Peptide Derived from Human Papillomavirus
PKVSGLQYRV

SEQ ID NO: 18987 - protein, 11 aa, Artificial Sequence
  Peptide Derived from Human Papillomavirus
PKVSGLQYRVF

SEQ ID NO: 18988 - protein, 8 aa, Artificial Sequence
  Peptide Derived from Human Papillomavirus
QKPKEDPF

SEQ ID NO: 18989 - protein, 11 aa, Artificial Sequence
  Peptide Derived from Human Papillomavirus
QKPKEDPFKDY

SEQ ID NO: 18990 - protein, 10 aa, Artificial Sequence
  Peptide Derived from Human Papillomavirus
QRAQGHNNGI

SEQ ID NO: 18991 - protein, 8 aa, Artificial Sequence
  Peptide Derived from Human Papillomavirus
QRLVWACV

SEQ ID NO: 18992 - protein, 10 aa, Artificial Sequence
  Peptide Derived from Human Papillomavirus
QRLVWACVGL

SEQ ID NO: 18993 - protein, 10 aa, Artificial Sequence
  Peptide Derived from Human Papillomavirus
RHFFNRSGTV

SEQ ID NO: 18994 - protein, 8 aa, Artificial Sequence
  Peptide Derived from Human Papillomavirus
RHGEEFDL

SEQ ID NO: 18995 - protein, 10 aa, Artificial Sequence
  Peptide Derived from Human Papillomavirus
RHGEEFDLQF

SEQ ID NO: 18996 - protein, 11 aa, Artificial Sequence
  Peptide Derived from Human Papillomavirus
RHGEEFDLQFI

SEQ ID NO: 18997 - protein, 9 aa, Artificial Sequence
  Peptide Derived from Human Papillomavirus
RKFLLQAGY

SEQ ID NO: 18998 - protein, 11 aa, Artificial Sequence
  Peptide Derived from Human Papillomavirus
RKFLLQAGYRA

SEQ ID NO: 18999 - protein, 10 aa, Artificial Sequence
  Peptide Derived from Human Papillomavirus
RREQMFVRHF

SEQ ID NO: 19000 - protein, 11 aa, Artificial Sequence
  Peptide Derived from Human Papillomavirus
RREQMFVRHFF

SEQ ID NO: 19001 - protein, 9 aa, Artificial Sequence
  Peptide Derived from Human Papillomavirus
SKVVSTDEY

SEQ ID NO: 19002 - protein, 10 aa, Artificial Sequence
  Peptide Derived from Human Papillomavirus
SKVVSTDEYV

SEQ ID NO: 19003 - protein, 9 aa, Artificial Sequence
  Peptide Derived from Human Papillomavirus
TKSNVPLDI

SEQ ID NO: 19004 - protein, 8 aa, Artificial Sequence
  Peptide Derived from Human Papillomavirus
TRSTNMSV

SEQ ID NO: 19005 - protein, 10 aa, Artificial Sequence
  Peptide Derived from Human Papillomavirus
TRSTNMSVCA

SEQ ID NO: 19006 - protein, 11 aa, Artificial Sequence
  Peptide Derived from Human Papillomavirus
TRSTNMSVCAA

SEQ ID NO: 19007 - protein, 9 aa, Artificial Sequence
  Peptide Derived from Human Papillomavirus
TRTNIYYHA

SEQ ID NO: 19008 - protein, 11 aa, Artificial Sequence
  Peptide Derived from Human Papillomavirus
VRHFFNRSGTV

SEQ ID NO: 19009 - protein, 9 aa, Artificial Sequence
  Peptide Derived from Human Papillomavirus
VRLPDPNKF

SEQ ID NO: 19010 - protein, 11 aa, Artificial Sequence
  Peptide Derived from Human Papillomavirus
VRLPDPNKFGF

SEQ ID NO: 19011 - protein, 8 aa, Artificial Sequence
  Peptide Derived from Human Papillomavirus
WRPSEATV

SEQ ID NO: 19012 - protein, 9 aa, Artificial Sequence
  Peptide Derived from Human Papillomavirus
WRPSEATVY

SEQ ID NO: 19013 - protein, 10 aa, Artificial Sequence
  Peptide Derived from Human Papillomavirus
WRPSEATVYL

SEQ ID NO: 19014 - protein, 8 aa, Artificial Sequence
  Peptide Derived from Human Papillomavirus
YHAGSARL

SEQ ID NO: 19015 - protein, 9 aa, Artificial Sequence
  Peptide Derived from Human Papillomavirus
YHAGSARLL

SEQ ID NO: 19016 - protein, 11 aa, Artificial Sequence
  Peptide Derived from Human Papillomavirus
YHAGSARLLTV

SEQ ID NO: 19017 - protein, 8 aa, Artificial Sequence
  Peptide Derived from Human Papillomavirus
YKQTQLCL

SEQ ID NO: 19018 - protein, 9 aa, Artificial Sequence
  Peptide Derived from Human Papillomavirus
YKQTQLCLL

SEQ ID NO: 19019 - protein, 9 aa, Artificial Sequence
  Peptide Derived from Human Papillomavirus
YRARPKFKA

SEQ ID NO: 19020 - protein, 8 aa, Artificial Sequence
  Peptide Derived from Human Papillomavirus
YRFVTSQA

SEQ ID NO: 19021 - protein, 9 aa, Artificial Sequence
  Peptide Derived from Human Papillomavirus
YRFVTSQAI

SEQ ID NO: 19022 - protein, 8 aa, Artificial Sequence
  Peptide Derived from Human Papillomavirus
YRVFRVRL

SEQ ID NO: 19023 - protein, 9 aa, Artificial Sequence
  Peptide Derived from Human Papillomavirus
ARLGLYSKA

SEQ ID NO: 19024 - protein, 9 aa, Artificial Sequence
  Peptide Derived from Human Papillomavirus
ARVHYYYDI

SEQ ID NO: 19025 - protein, 11 aa, Artificial Sequence
  Peptide Derived from Human Papillomavirus
CKAAGTCPSDV

SEQ ID NO: 19026 - protein, 8 aa, Artificial Sequence
  Peptide Derived from Human Papillomavirus
EHAPTQVF

SEQ ID NO: 19027 - protein, 10 aa, Artificial Sequence
  Peptide Derived from Human Papillomavirus
EHAPTQVFPF

SEQ ID NO: 19028 - protein, 9 aa, Artificial Sequence
  Peptide Derived from Human Papillomavirus
EHTTIADQI

SEQ ID NO: 19029 - protein, 10 aa, Artificial Sequence
  Peptide Derived from Human Papillomavirus
EHTTIADQIL

SEQ ID NO: 19030 - protein, 10 aa, Artificial Sequence
  Peptide Derived from Human Papillomavirus
GHLLLSSSSI

SEQ ID NO: 19031 - protein, 8 aa, Artificial Sequence
  Peptide Derived from Human Papillomavirus
GRTGYVPL

SEQ ID NO: 19032 - protein, 10 aa, Artificial Sequence
  Peptide Derived from Human Papillomavirus
IRPPVSIDPV

SEQ ID NO: 19033 - protein, 8 aa, Artificial Sequence
  Peptide Derived from Human Papillomavirus
KRASATQL

SEQ ID NO: 19034 - protein, 9 aa, Artificial Sequence
  Peptide Derived from Human Papillomavirus
KRASATQLY

SEQ ID NO: 19035 - protein, 9 aa, Artificial Sequence
  Peptide Derived from Human Papillomavirus
KRRRKRVSY

SEQ ID NO: 19036 - protein, 10 aa, Artificial Sequence
  Peptide Derived from Human Papillomavirus
KRRRKRVSYF

SEQ ID NO: 19037 - protein, 11 aa, Artificial Sequence
  Peptide Derived from Human Papillomavirus
KRRRKRVSYFF

SEQ ID NO: 19038 - protein, 10 aa, Artificial Sequence
  Peptide Derived from Human Papillomavirus
KRSTKRTKRA

SEQ ID NO: 19039 - protein, 8 aa, Artificial Sequence
  Peptide Derived from Human Papillomavirus
KRTKRASA

SEQ ID NO: 19040 - protein, 11 aa, Artificial Sequence
  Peptide Derived from Human Papillomavirus
KRTKRASATQL

SEQ ID NO: 19041 - protein, 10 aa, Artificial Sequence
  Peptide Derived from Human Papillomavirus
KRVSYFFTDV

SEQ ID NO: 19042 - protein, 8 aa, Artificial Sequence
  Peptide Derived from Human Papillomavirus
LHPSYYML

SEQ ID NO: 19043 - protein, 8 aa, Artificial Sequence
  Peptide Derived from Human Papillomavirus
LKRRRKRV

SEQ ID NO: 19044 - protein, 10 aa, Artificial Sequence
  Peptide Derived from Human Papillomavirus
LKRRRKRVSY

SEQ ID NO: 19045 - protein, 11 aa, Artificial Sequence
  Peptide Derived from Human Papillomavirus
LKRRRKRVSYF

SEQ ID NO: 19046 - protein, 9 aa, Artificial Sequence
  Peptide Derived from Human Papillomavirus
LRTRSGATI

SEQ ID NO: 19047 - protein, 11 aa, Artificial Sequence
  Peptide Derived from Human Papillomavirus
LRTRSGATIGA

SEQ ID NO: 19048 - protein, 8 aa, Artificial Sequence
  Peptide Derived from Human Papillomavirus
LRYGSMGV

SEQ ID NO: 19049 - protein, 9 aa, Artificial Sequence
  Peptide Derived from Human Papillomavirus
LRYGSMGVF

SEQ ID NO: 19050 - protein, 10 aa, Artificial Sequence
  Peptide Derived from Human Papillomavirus
LRYGSMGVFF

SEQ ID NO: 19051 - protein, 11 aa, Artificial Sequence
  Peptide Derived from Human Papillomavirus
NKQTLRTRSGA

SEQ ID NO: 19052 - protein, 9 aa, Artificial Sequence
  Peptide Derived from Human Papillomavirus
PHPPTTSGF

SEQ ID NO: 19053 - protein, 11 aa, Artificial Sequence
  Peptide Derived from Human Papillomavirus
PHPPTTSGFDI

SEQ ID NO: 19054 - protein, 8 aa, Artificial Sequence
  Peptide Derived from Human Papillomavirus
PKIEHTTI

SEQ ID NO: 19055 - protein, 9 aa, Artificial Sequence
  Peptide Derived from Human Papillomavirus
PKIEHTTIA

SEQ ID NO: 19056 - protein, 11 aa, Artificial Sequence
  Peptide Derived from Human Papillomavirus
PKQLITYENPA

SEQ ID NO: 19057 - protein, 8 aa, Artificial Sequence
  Peptide Derived from Human Papillomavirus
RKRVSYFF

SEQ ID NO: 19058 - protein, 11 aa, Artificial Sequence
  Peptide Derived from Human Papillomavirus
RKRVSYFFTDV

SEQ ID NO: 19059 - protein, 8 aa, Artificial Sequence
  Peptide Derived from Human Papillomavirus
RRKRVSYF

SEQ ID NO: 19060 - protein, 9 aa, Artificial Sequence
  Peptide Derived from Human Papillomavirus
RRKRVSYFF

SEQ ID NO: 19061 - protein, 10 aa, Artificial Sequence
  Peptide Derived from Human Papillomavirus
RRNTVRYSRL

SEQ ID NO: 19062 - protein, 8 aa, Artificial Sequence
  Peptide Derived from Human Papillomavirus
RRPARLGL

SEQ ID NO: 19063 - protein, 9 aa, Artificial Sequence
  Peptide Derived from Human Papillomavirus
RRPARLGLY

SEQ ID NO: 19064 - protein, 8 aa, Artificial Sequence
  Peptide Derived from Human Papillomavirus
RRRKRVSY

SEQ ID NO: 19065 - protein, 9 aa, Artificial Sequence
  Peptide Derived from Human Papillomavirus
RRRKRVSYF

SEQ ID NO: 19066 - protein, 10 aa, Artificial Sequence
  Peptide Derived from Human Papillomavirus
RRRKRVSYFF

SEQ ID NO: 19067 - protein, 10 aa, Artificial Sequence
  Peptide Derived from Human Papillomavirus
SHNIAPDPDF

SEQ ID NO: 19068 - protein, 11 aa, Artificial Sequence
  Peptide Derived from Human Papillomavirus
SHNIAPDPDFL

SEQ ID NO: 19069 - protein, 9 aa, Artificial Sequence
  Peptide Derived from Human Papillomavirus
SKATQQVKV

SEQ ID NO: 19070 - protein, 10 aa, Artificial Sequence
  Peptide Derived from Human Papillomavirus
SKATQQVKVI

SEQ ID NO: 19071 - protein, 11 aa, Artificial Sequence
  Peptide Derived from Human Papillomavirus
SKRSTKRTKRA

SEQ ID NO: 19072 - protein, 9 aa, Artificial Sequence
  Peptide Derived from Human Papillomavirus
SRLGNKQTL

SEQ ID NO: 19073 - protein, 8 aa, Artificial Sequence
  Peptide Derived from Human Papillomavirus
SRRNTVRY

SEQ ID NO: 19074 - protein, 11 aa, Artificial Sequence
  Peptide Derived from Human Papillomavirus
SRRNTVRYSRL

SEQ ID NO: 19075 - protein, 9 aa, Artificial Sequence
  Peptide Derived from Human Papillomavirus
THNVSPSTA

SEQ ID NO: 19076 - protein, 10 aa, Artificial Sequence
  Peptide Derived from Human Papillomavirus
THNVSPSTAV

SEQ ID NO: 19077 - protein, 9 aa, Artificial Sequence
  Peptide Derived from Human Papillomavirus
THNYEEIPM

SEQ ID NO: 19078 - protein, 9 aa, Artificial Sequence
  Peptide Derived from Human Papillomavirus
TKRASATQL

SEQ ID NO: 19079 - protein, 10 aa, Artificial Sequence
  Peptide Derived from Human Papillomavirus
TKRASATQLY

SEQ ID NO: 19080 - protein, 9 aa, Artificial Sequence
  Peptide Derived from Human Papillomavirus
TKRTKRASA

SEQ ID NO: 19081 - protein, 9 aa, Artificial Sequence
  Peptide Derived from Human Papillomavirus
TRPSTVSEA

SEQ ID NO: 19082 - protein, 11 aa, Artificial Sequence
  Peptide Derived from Human Papillomavirus
TRPSTVSEASI

SEQ ID NO: 19083 - protein, 9 aa, Artificial Sequence
  Peptide Derived from Human Papillomavirus
TRSGATIGA

SEQ ID NO: 19084 - protein, 11 aa, Artificial Sequence
  Peptide Derived from Human Papillomavirus
TRSGATIGARV

SEQ ID NO: 19085 - protein, 10 aa, Artificial Sequence
  Peptide Derived from Human Papillomavirus
VHYYYDISSI

SEQ ID NO: 19086 - protein, 8 aa, Artificial Sequence
  Peptide Derived from Human Papillomavirus
VKVIDPTF

SEQ ID NO: 19087 - protein, 9 aa, Artificial Sequence
  Peptide Derived from Human Papillomavirus
VKVIDPTFL

SEQ ID NO: 19088 - protein, 11 aa, Artificial Sequence
  Peptide Derived from Human Papillomavirus
VKVIDPTFLSA

SEQ ID NO: 19089 - protein, 9 aa, Artificial Sequence
  Peptide Derived from Human Papillomavirus
VRRPARLGL

SEQ ID NO: 19090 - protein, 10 aa, Artificial Sequence
  Peptide Derived from Human Papillomavirus
VRRPARLGLY

SEQ ID NO: 19091 - protein, 9 aa, Artificial Sequence
  Peptide Derived from Human Papillomavirus
AKIGMIDDV

SEQ ID NO: 19092 - protein, 9 aa, Artificial Sequence
  Peptide Derived from Human Papillomavirus
AKIVKDCGI

SEQ ID NO: 19093 - protein, 10 aa, Artificial Sequence
  Peptide Derived from Human Papillomavirus
AKIVKDCGIM

SEQ ID NO: 19094 - protein, 8 aa, Artificial Sequence
  Peptide Derived from Human Papillomavirus
AKLMSNLL

SEQ ID NO: 19095 - protein, 10 aa, Artificial Sequence
  Peptide Derived from Human Papillomavirus
AKLMSNLLSI

SEQ ID NO: 19096 - protein, 9 aa, Artificial Sequence
  Peptide Derived from Human Papillomavirus
DKENHGGNI

SEQ ID NO: 19097 - protein, 8 aa, Artificial Sequence
  Peptide Derived from Human Papillomavirus
DKTSCTDW

SEQ ID NO: 19098 - protein, 10 aa, Artificial Sequence
  Peptide Derived from Human Papillomavirus
DKTSCTDWCI

SEQ ID NO: 19099 - protein, 11 aa, Artificial Sequence
  Peptide Derived from Human Papillomavirus
DRAANPCRTSI

SEQ ID NO: 19100 - protein, 8 aa, Artificial Sequence
  Peptide Derived from Human Papillomavirus
DRGIIILL

SEQ ID NO: 19101 - protein, 9 aa, Artificial Sequence
  Peptide Derived from Human Papillomavirus
DRGIIILLL

SEQ ID NO: 19102 - protein, 10 aa, Artificial Sequence
  Peptide Derived from Human Papillomavirus
DRGIIILLLI

SEQ ID NO: 19103 - protein, 10 aa, Artificial Sequence
  Peptide Derived from Human Papillomavirus
DRLTVLQHSF

SEQ ID NO: 19104 - protein, 10 aa, Artificial Sequence
  Peptide Derived from Human Papillomavirus
EKRKMSIGQW

SEQ ID NO: 19105 - protein, 11 aa, Artificial Sequence
  Peptide Derived from Human Papillomavirus
EKRKMSIGQWI

SEQ ID NO: 19106 - protein, 9 aa, Artificial Sequence
  Peptide Derived from Human Papillomavirus
EKTNDGGNW

SEQ ID NO: 19107 - protein, 8 aa, Artificial Sequence
  Peptide Derived from Human Papillomavirus
ERRTGDNI

SEQ ID NO: 19108 - protein, 9 aa, Artificial Sequence
  Peptide Derived from Human Papillomavirus
FKEAYGISF

SEQ ID NO: 19109 - protein, 10 aa, Artificial Sequence
  Peptide Derived from Human Papillomavirus
FKEAYGISFM

SEQ ID NO: 19110 - protein, 8 aa, Artificial Sequence
  Peptide Derived from Human Papillomavirus
FKKFLKGI

SEQ ID NO: 19111 - protein, 11 aa, Artificial Sequence
  Peptide Derived from Human Papillomavirus
FKSDKTSCTDW

SEQ ID NO: 19112 - protein, 8 aa, Artificial Sequence
  Peptide Derived from Human Papillomavirus
FRCSKNRL

SEQ ID NO: 19113 - protein, 10 aa, Artificial Sequence
  Peptide Derived from Human Papillomavirus
FRCSKNRLTV

SEQ ID NO: 19114 - protein, 11 aa, Artificial Sequence
  Peptide Derived from Human Papillomavirus
FRCSKNRLTVA

SEQ ID NO: 19115 - protein, 8 aa, Artificial Sequence
  Peptide Derived from Human Papillomavirus
FRTAMSNI

SEQ ID NO: 19116 - protein, 11 aa, Artificial Sequence
  Peptide Derived from Human Papillomavirus
FRTAMSNISDV

SEQ ID NO: 19117 - protein, 9 aa, Artificial Sequence
  Peptide Derived from Human Papillomavirus
GKSYFGMSL

SEQ ID NO: 19118 - protein, 10 aa, Artificial Sequence
  Peptide Derived from Human Papillomavirus
GKSYFGMSLI

SEQ ID NO: 19119 - protein, 10 aa, Artificial Sequence
  Peptide Derived from Human Papillomavirus
IKQHSLYTHL

SEQ ID NO: 19120 - protein, 10 aa, Artificial Sequence
  Peptide Derived from Human Papillomavirus
IRFRCSKNRL

SEQ ID NO: 19121 - protein, 8 aa, Artificial Sequence
  Peptide Derived from Human Papillomavirus
KHRALVQL

SEQ ID NO: 19122 - protein, 8 aa, Artificial Sequence
  Peptide Derived from Human Papillomavirus
KKAEKRKM

SEQ ID NO: 19123 - protein, 10 aa, Artificial Sequence
  Peptide Derived from Human Papillomavirus
KKAEKRKMSI

SEQ ID NO: 19124 - protein, 11 aa, Artificial Sequence
  Peptide Derived from Human Papillomavirus
KKSCMLICGPA

SEQ ID NO: 19125 - protein, 11 aa, Artificial Sequence
  Peptide Derived from Human Papillomavirus
KRKFAACSQSA

SEQ ID NO: 19126 - protein, 9 aa, Artificial Sequence
  Peptide Derived from Human Papillomavirus
KRKMSIGQW

SEQ ID NO: 19127 - protein, 10 aa, Artificial Sequence
  Peptide Derived from Human Papillomavirus
KRKMSIGQWI

SEQ ID NO: 19128 - protein, 8 aa, Artificial Sequence
  Peptide Derived from Human Papillomavirus
LHSRLTVF

SEQ ID NO: 19129 - protein, 10 aa, Artificial Sequence
  Peptide Derived from Human Papillomavirus
LHSRLTVFEF

SEQ ID NO: 19130 - protein, 8 aa, Artificial Sequence
  Peptide Derived from Human Papillomavirus
LHSSNTKA

SEQ ID NO: 19131 - protein, 10 aa, Artificial Sequence
  Peptide Derived from Human Papillomavirus
LHSSNTKANI

SEQ ID NO: 19132 - protein, 11 aa, Artificial Sequence
  Peptide Derived from Human Papillomavirus
LHSSNTKANIL

SEQ ID NO: 19133 - protein, 8 aa, Artificial Sequence
  Peptide Derived from Human Papillomavirus
LKCPPLLL

SEQ ID NO: 19134 - protein, 9 aa, Artificial Sequence
  Peptide Derived from Human Papillomavirus
LKGCVISCV

SEQ ID NO: 19135 - protein, 10 aa, Artificial Sequence
  Peptide Derived from Human Papillomavirus
LKGIPKKSCM

SEQ ID NO: 19136 - protein, 11 aa, Artificial Sequence
  Peptide Derived from Human Papillomavirus
LKGIPKKSCML

SEQ ID NO: 19137 - protein, 9 aa, Artificial Sequence
  Peptide Derived from Human Papillomavirus
LKSNSQAKI

SEQ ID NO: 19138 - protein, 10 aa, Artificial Sequence
  Peptide Derived from Human Papillomavirus
LKSNSQAKIV

SEQ ID NO: 19139 - protein, 10 aa, Artificial Sequence
  Peptide Derived from Human Papillomavirus
LKVLIKQHSL

SEQ ID NO: 19140 - protein, 11 aa, Artificial Sequence
  Peptide Derived from Human Papillomavirus
LKVLIKQHSLY

SEQ ID NO: 19141 - protein, 8 aa, Artificial Sequence
  Peptide Derived from Human Papillomavirus
LRSQTCAL

SEQ ID NO: 19142 - protein, 9 aa, Artificial Sequence
  Peptide Derived from Human Papillomavirus
LRSQTCALY

SEQ ID NO: 19143 - protein, 10 aa, Artificial Sequence
  Peptide Derived from Human Papillomavirus
LRSQTCALYW

SEQ ID NO: 19144 - protein, 11 aa, Artificial Sequence
  Peptide Derived from Human Papillomavirus
LRSQTCALYWF

SEQ ID NO: 19145 - protein, 8 aa, Artificial Sequence
  Peptide Derived from Human Papillomavirus
LRYQNIEF

SEQ ID NO: 19146 - protein, 10 aa, Artificial Sequence
  Peptide Derived from Human Papillomavirus
LRYQNIEFTA

SEQ ID NO: 19147 - protein, 11 aa, Artificial Sequence
  Peptide Derived from Human Papillomavirus
LRYQNIEFTAF

SEQ ID NO: 19148 - protein, 10 aa, Artificial Sequence
  Peptide Derived from Human Papillomavirus
MRNALDGNEI

SEQ ID NO: 19149 - protein, 9 aa, Artificial Sequence
  Peptide Derived from Human Papillomavirus
NHGGNISTF

SEQ ID NO: 19150 - protein, 11 aa, Artificial Sequence
  Peptide Derived from Human Papillomavirus
NKECTYRKRKI

SEQ ID NO: 19151 - protein, 8 aa, Artificial Sequence
  Peptide Derived from Human Papillomavirus
NKNKECTY

SEQ ID NO: 19152 - protein, 8 aa, Artificial Sequence
  Peptide Derived from Human Papillomavirus
NRLTVAKL

SEQ ID NO: 19153 - protein, 9 aa, Artificial Sequence
  Peptide Derived from Human Papillomavirus
NRLTVAKLM

SEQ ID NO: 19154 - protein, 8 aa, Artificial Sequence
  Peptide Derived from Human Papillomavirus
PKKSCMLI

SEQ ID NO: 19155 - protein, 9 aa, Artificial Sequence
  Peptide Derived from Human Papillomavirus
PKLRSQTCA

SEQ ID NO: 19156 - protein, 10 aa, Artificial Sequence
  Peptide Derived from Human Papillomavirus
PKLRSQTCAL

SEQ ID NO: 19157 - protein, 11 aa, Artificial Sequence
  Peptide Derived from Human Papillomavirus
PKLRSQTCALY

SEQ ID NO: 19158 - protein, 8 aa, Artificial Sequence
  Peptide Derived from Human Papillomavirus
QHSFNDNI

SEQ ID NO: 19159 - protein, 9 aa, Artificial Sequence
  Peptide Derived from Human Papillomavirus
QHSFNDNIF

SEQ ID NO: 19160 - protein, 11 aa, Artificial Sequence
  Peptide Derived from Human Papillomavirus
QHSFNDNIFDL

SEQ ID NO: 19161 - protein, 8 aa, Artificial Sequence
  Peptide Derived from Human Papillomavirus
QHSLYTHL

SEQ ID NO: 19162 - protein, 11 aa, Artificial Sequence
  Peptide Derived from Human Papillomavirus
QHSLYTHLQCL

SEQ ID NO: 19163 - protein, 11 aa, Artificial Sequence
  Peptide Derived from Human Papillomavirus
RHYKKAEKRKM

SEQ ID NO: 19164 - protein, 10 aa, Artificial Sequence
  Peptide Derived from Human Papillomavirus
RKFAACSQSA

SEQ ID NO: 19165 - protein, 11 aa, Artificial Sequence
  Peptide Derived from Human Papillomavirus
RKFAACSQSAA

SEQ ID NO: 19166 - protein, 11 aa, Artificial Sequence
  Peptide Derived from Human Papillomavirus
RKIDELEDSGY

SEQ ID NO: 19167 - protein, 8 aa, Artificial Sequence
  Peptide Derived from Human Papillomavirus
RKMSIGQW

SEQ ID NO: 19168 - protein, 9 aa, Artificial Sequence
  Peptide Derived from Human Papillomavirus
RKMSIGQWI

SEQ ID NO: 19169 - protein, 8 aa, Artificial Sequence
  Peptide Derived from Human Papillomavirus
RKRKIDEL

SEQ ID NO: 19170 - protein, 8 aa, Artificial Sequence
  Peptide Derived from Human Papillomavirus
SHFWLQPL

SEQ ID NO: 19171 - protein, 11 aa, Artificial Sequence
  Peptide Derived from Human Papillomavirus
SHFWLQPLSDA

SEQ ID NO: 19172 - protein, 8 aa, Artificial Sequence
  Peptide Derived from Human Papillomavirus
SKNRLTVA

SEQ ID NO: 19173 - protein, 10 aa, Artificial Sequence
  Peptide Derived from Human Papillomavirus
SKNRLTVAKL

SEQ ID NO: 19174 - protein, 11 aa, Artificial Sequence
  Peptide Derived from Human Papillomavirus
SKNRLTVAKLM

SEQ ID NO: 19175 - protein, 10 aa, Artificial Sequence
  Peptide Derived from Human Papillomavirus
SKSHFWLQPL

SEQ ID NO: 19176 - protein, 8 aa, Artificial Sequence
  Peptide Derived from Human Papillomavirus
SRLTVFEF

SEQ ID NO: 19177 - protein, 9 aa, Artificial Sequence
  Peptide Derived from Human Papillomavirus
SRTWCKLDL

SEQ ID NO: 19178 - protein, 10 aa, Artificial Sequence
  Peptide Derived from Human Papillomavirus
SRTWCKLDLI

SEQ ID NO: 19179 - protein, 10 aa, Artificial Sequence
  Peptide Derived from Human Papillomavirus
SRWPYLHSRL

SEQ ID NO: 19180 - protein, 9 aa, Artificial Sequence
  Peptide Derived from Human Papillomavirus
TKANILYKF

SEQ ID NO: 19181 - protein, 11 aa, Artificial Sequence
  Peptide Derived from Human Papillomavirus
VKDCGIMCRHY

SEQ ID NO: 19182 - protein, 9 aa, Artificial Sequence
  Peptide Derived from Human Papillomavirus
VKHRALVQL

SEQ ID NO: 19183 - protein, 9 aa, Artificial Sequence
  Peptide Derived from Human Papillomavirus
WKSFFSRTW

SEQ ID NO: 19184 - protein, 8 aa, Artificial Sequence
  Peptide Derived from Human Papillomavirus
WRPIVQLL

SEQ ID NO: 19185 - protein, 10 aa, Artificial Sequence
  Peptide Derived from Human Papillomavirus
WRPIVQLLRY

SEQ ID NO: 19186 - protein, 9 aa, Artificial Sequence
  Peptide Derived from Human Papillomavirus
YKFKEAYGI

SEQ ID NO: 19187 - protein, 11 aa, Artificial Sequence
  Peptide Derived from Human Papillomavirus
YKFKEAYGISF

SEQ ID NO: 19188 - protein, 9 aa, Artificial Sequence
  Peptide Derived from Human Papillomavirus
YKKAEKRKM

SEQ ID NO: 19189 - protein, 11 aa, Artificial Sequence
  Peptide Derived from Human Papillomavirus
YKKAEKRKMSI

SEQ ID NO: 19190 - protein, 9 aa, Artificial Sequence
  Peptide Derived from Human Papillomavirus
YRKRKIDEL

SEQ ID NO: 19191 - protein, 9 aa, Artificial Sequence
  Peptide Derived from Human Papillomavirus
AKQMGFSHL

SEQ ID NO: 19192 - protein, 8 aa, Artificial Sequence
  Peptide Derived from Human Papillomavirus
AKYSKTQM

SEQ ID NO: 19193 - protein, 9 aa, Artificial Sequence
  Peptide Derived from Human Papillomavirus
AKYSKTQMW

SEQ ID NO: 19194 - protein, 11 aa, Artificial Sequence
  Peptide Derived from Human Papillomavirus
AKYSKTQMWEV

SEQ ID NO: 19195 - protein, 10 aa, Artificial Sequence
  Peptide Derived from Human Papillomavirus
ARLNAVQEKI

SEQ ID NO: 19196 - protein, 11 aa, Artificial Sequence
  Peptide Derived from Human Papillomavirus
ARLNAVQEKIL

SEQ ID NO: 19197 - protein, 8 aa, Artificial Sequence
  Peptide Derived from Human Papillomavirus
CHQVVPSL

SEQ ID NO: 19198 - protein, 9 aa, Artificial Sequence
  Peptide Derived from Human Papillomavirus
CHQVVPSLL

SEQ ID NO: 19199 - protein, 10 aa, Artificial Sequence
  Peptide Derived from Human Papillomavirus
CHQVVPSLLA

SEQ ID NO: 19200 - protein, 8 aa, Artificial Sequence
  Peptide Derived from Human Papillomavirus
DKKNTMDY

SEQ ID NO: 19201 - protein, 11 aa, Artificial Sequence
  Peptide Derived from Human Papillomavirus
DKKNTMDYTNW

SEQ ID NO: 19202 - protein, 9 aa, Artificial Sequence
  Peptide Derived from Human Papillomavirus
DKTDLPSQI

SEQ ID NO: 19203 - protein, 8 aa, Artificial Sequence
  Peptide Derived from Human Papillomavirus
EHWKLIRM

SEQ ID NO: 19204 - protein, 11 aa, Artificial Sequence
  Peptide Derived from Human Papillomavirus
EHWKLIRMECA

SEQ ID NO: 19205 - protein, 9 aa, Artificial Sequence
  Peptide Derived from Human Papillomavirus
EKILDLYEA

SEQ ID NO: 19206 - protein, 8 aa, Artificial Sequence
  Peptide Derived from Human Papillomavirus
EKVYFKYF

SEQ ID NO: 19207 - protein, 8 aa, Artificial Sequence
  Peptide Derived from Human Papillomavirus
FKEDAAKY

SEQ ID NO: 19208 - protein, 8 aa, Artificial Sequence
  Peptide Derived from Human Papillomavirus
FKKQGETV

SEQ ID NO: 19209 - protein, 10 aa, Artificial Sequence
  Peptide Derived from Human Papillomavirus
FKKQGETVTV

SEQ ID NO: 19210 - protein, 8 aa, Artificial Sequence
  Peptide Derived from Human Papillomavirus
FKYFKEDA

SEQ ID NO: 19211 - protein, 9 aa, Artificial Sequence
  Peptide Derived from Human Papillomavirus
FKYFKEDAA

SEQ ID NO: 19212 - protein, 11 aa, Artificial Sequence
  Peptide Derived from Human Papillomavirus
FKYFKEDAAKY

SEQ ID NO: 19213 - protein, 8 aa, Artificial Sequence
  Peptide Derived from Human Papillomavirus
GKVDYIGM

SEQ ID NO: 19214 - protein, 9 aa, Artificial Sequence
  Peptide Derived from Human Papillomavirus
GKVDYIGMY

SEQ ID NO: 19215 - protein, 10 aa, Artificial Sequence
  Peptide Derived from Human Papillomavirus
GKVDYIGMYY

SEQ ID NO: 19216 - protein, 11 aa, Artificial Sequence
  Peptide Derived from Human Papillomavirus
GKVDYIGMYYI

SEQ ID NO: 19217 - protein, 8 aa, Artificial Sequence
  Peptide Derived from Human Papillomavirus
IHNCEKVY

SEQ ID NO: 19218 - protein, 9 aa, Artificial Sequence
  Peptide Derived from Human Papillomavirus
IHNCEKVYF

SEQ ID NO: 19219 - protein, 11 aa, Artificial Sequence
  Peptide Derived from Human Papillomavirus
IHNCEKVYFKY

SEQ ID NO: 19220 - protein, 8 aa, Artificial Sequence
  Peptide Derived from Human Papillomavirus
IRMECALL

SEQ ID NO: 19221 - protein, 9 aa, Artificial Sequence
  Peptide Derived from Human Papillomavirus
IRMECALLY

SEQ ID NO: 19222 - protein, 11 aa, Artificial Sequence
  Peptide Derived from Human Papillomavirus
IRMECALLYTA

SEQ ID NO: 19223 - protein, 10 aa, Artificial Sequence
  Peptide Derived from Human Papillomavirus
KKNTMDYTNW

SEQ ID NO: 19224 - protein, 9 aa, Artificial Sequence
  Peptide Derived from Human Papillomavirus
KKQGETVTV

SEQ ID NO: 19225 - protein, 11 aa, Artificial Sequence
  Peptide Derived from Human Papillomavirus
KKQGETVTVQY

SEQ ID NO: 19226 - protein, 8 aa, Artificial Sequence
  Peptide Derived from Human Papillomavirus
LKCLRYRL

SEQ ID NO: 19227 - protein, 11 aa, Artificial Sequence
  Peptide Derived from Human Papillomavirus
LKCLRYRLKPY

SEQ ID NO: 19228 - protein, 8 aa, Artificial Sequence
  Peptide Derived from Human Papillomavirus
LKGESNSL

SEQ ID NO: 19229 - protein, 11 aa, Artificial Sequence
  Peptide Derived from Human Papillomavirus
LKGESNSLKCL

SEQ ID NO: 19230 - protein, 8 aa, Artificial Sequence
  Peptide Derived from Human Papillomavirus
LKPYKELY

SEQ ID NO: 19231 - protein, 11 aa, Artificial Sequence
  Peptide Derived from Human Papillomavirus
LKPYKELYSSM

SEQ ID NO: 19232 - protein, 8 aa, Artificial Sequence
  Peptide Derived from Human Papillomavirus
LRYRLKPY

SEQ ID NO: 19233 - protein, 11 aa, Artificial Sequence
  Peptide Derived from Human Papillomavirus
LRYRLKPYKEL

SEQ ID NO: 19234 - protein, 8 aa, Artificial Sequence
  Peptide Derived from Human Papillomavirus
NKNSKNGI

SEQ ID NO: 19235 - protein, 9 aa, Artificial Sequence
  Peptide Derived from Human Papillomavirus
NKNSKNGIV

SEQ ID NO: 19236 - protein, 11 aa, Artificial Sequence
  Peptide Derived from Human Papillomavirus
NKNSKNGIVTV

SEQ ID NO: 19237 - protein, 11 aa, Artificial Sequence
  Peptide Derived from Human Papillomavirus
NKQRTVCSSNV

SEQ ID NO: 19238 - protein, 8 aa, Artificial Sequence
  Peptide Derived from Human Papillomavirus
NRPPQAAA

SEQ ID NO: 19239 - protein, 11 aa, Artificial Sequence
  Peptide Derived from Human Papillomavirus
PKCFKKQGETV

SEQ ID NO: 19240 - protein, 9 aa, Artificial Sequence
  Peptide Derived from Human Papillomavirus
QRTVCSSNV

SEQ ID NO: 19241 - protein, 10 aa, Artificial Sequence
  Peptide Derived from Human Papillomavirus
QRTVCSSNVA

SEQ ID NO: 19242 - protein, 10 aa, Artificial Sequence
  Peptide Derived from Human Papillomavirus
RRPADTTDTA

SEQ ID NO: 19243 - protein, 11 aa, Artificial Sequence
  Peptide Derived from Human Papillomavirus
RRRPADTTDTA

SEQ ID NO: 19244 - protein, 8 aa, Artificial Sequence
  Peptide Derived from Human Papillomavirus
SHLCHQVV

SEQ ID NO: 19245 - protein, 11 aa, Artificial Sequence
  Peptide Derived from Human Papillomavirus
SHLCHQVVPSL

SEQ ID NO: 19246 - protein, 8 aa, Artificial Sequence
  Peptide Derived from Human Papillomavirus
SKNGIVTV

SEQ ID NO: 19247 - protein, 10 aa, Artificial Sequence
  Peptide Derived from Human Papillomavirus
SKNGIVTVTF

SEQ ID NO: 19248 - protein, 11 aa, Artificial Sequence
  Peptide Derived from Human Papillomavirus
SKNGIVTVTFV

SEQ ID NO: 19249 - protein, 10 aa, Artificial Sequence
  Peptide Derived from Human Papillomavirus
SKSQYSTSQW

SEQ ID NO: 19250 - protein, 8 aa, Artificial Sequence
  Peptide Derived from Human Papillomavirus
SKTKAFQV

SEQ ID NO: 19251 - protein, 9 aa, Artificial Sequence
  Peptide Derived from Human Papillomavirus
SKTKAFQVI

SEQ ID NO: 19252 - protein, 11 aa, Artificial Sequence
  Peptide Derived from Human Papillomavirus
SKTKAFQVIEL

SEQ ID NO: 19253 - protein, 8 aa, Artificial Sequence
  Peptide Derived from Human Papillomavirus
SKTQMWEV

SEQ ID NO: 19254 - protein, 10 aa, Artificial Sequence
  Peptide Derived from Human Papillomavirus
SKTQMWEVHV

SEQ ID NO: 19255 - protein, 9 aa, Artificial Sequence
  Peptide Derived from Human Papillomavirus
TKAFQVIEL

SEQ ID NO: 19256 - protein, 11 aa, Artificial Sequence
  Peptide Derived from Human Papillomavirus
TKAFQVIELQM

SEQ ID NO: 19257 - protein, 9 aa, Artificial Sequence
  Peptide Derived from Human Papillomavirus
TKLFCADPA

SEQ ID NO: 19258 - protein, 10 aa, Artificial Sequence
  Peptide Derived from Human Papillomavirus
TKLFCADPAL

SEQ ID NO: 19259 - protein, 10 aa, Artificial Sequence
  Peptide Derived from Human Papillomavirus
VHLKGESNSL

SEQ ID NO: 19260 - protein, 8 aa, Artificial Sequence
  Peptide Derived from Human Papillomavirus
VHVGGQVI

SEQ ID NO: 19261 - protein, 9 aa, Artificial Sequence
  Peptide Derived from Human Papillomavirus
VHVGGQVIV

SEQ ID NO: 19262 - protein, 9 aa, Artificial Sequence
  Peptide Derived from Human Papillomavirus
VKIPPTVQI

SEQ ID NO: 19263 - protein, 9 aa, Artificial Sequence
  Peptide Derived from Human Papillomavirus
WKLIRMECA

SEQ ID NO: 19264 - protein, 10 aa, Artificial Sequence
  Peptide Derived from Human Papillomavirus
WKLIRMECAL

SEQ ID NO: 19265 - protein, 11 aa, Artificial Sequence
  Peptide Derived from Human Papillomavirus
WKLIRMECALL

SEQ ID NO: 19266 - protein, 8 aa, Artificial Sequence
  Peptide Derived from Human Papillomavirus
YKELYSSM

SEQ ID NO: 19267 - protein, 9 aa, Artificial Sequence
  Peptide Derived from Human Papillomavirus
YRLKPYKEL

SEQ ID NO: 19268 - protein, 10 aa, Artificial Sequence
  Peptide Derived from Human Papillomavirus
YRLKPYKELY

SEQ ID NO: 19269 - protein, 8 aa, Artificial Sequence
  Peptide Derived from Human Papillomavirus
LKIFFCYL

SEQ ID NO: 19270 - protein, 9 aa, Artificial Sequence
  Peptide Derived from Human Papillomavirus
LKIFFCYLL

SEQ ID NO: 19271 - protein, 10 aa, Artificial Sequence
  Peptide Derived from Human Papillomavirus
LKIFFCYLLF

SEQ ID NO: 19272 - protein, 11 aa, Artificial Sequence
  Peptide Derived from Human Papillomavirus
LKIFFCYLLFL

SEQ ID NO: 19273 - protein, 8 aa, Artificial Sequence
  Peptide Derived from Human Papillomavirus
LRPLILSI

SEQ ID NO: 19274 - protein, 11 aa, Artificial Sequence
  Peptide Derived from Human Papillomavirus
LRPLILSISTY

SEQ ID NO: 19275 - protein, 10 aa, Artificial Sequence
  Peptide Derived from Human Papillomavirus
CKKPLQRSEV

SEQ ID NO: 19276 - protein, 11 aa, Artificial Sequence
  Peptide Derived from Human Papillomavirus
CKKPLQRSEVY

SEQ ID NO: 19277 - protein, 8 aa, Artificial Sequence
  Peptide Derived from Human Papillomavirus
CKLCLRFL

SEQ ID NO: 19278 - protein, 11 aa, Artificial Sequence
  Peptide Derived from Human Papillomavirus
CKLCLRFLSKI

SEQ ID NO: 19279 - protein, 8 aa, Artificial Sequence
  Peptide Derived from Human Papillomavirus
EKKRHVDL

SEQ ID NO: 19280 - protein, 9 aa, Artificial Sequence
  Peptide Derived from Human Papillomavirus
EKPRTLHDL

SEQ ID NO: 19281 - protein, 8 aa, Artificial Sequence
  Peptide Derived from Human Papillomavirus
FHNISGRW

SEQ ID NO: 19282 - protein, 9 aa, Artificial Sequence
  Peptide Derived from Human Papillomavirus
FHNISGRWA

SEQ ID NO: 19283 - protein, 8 aa, Artificial Sequence
  Peptide Derived from Human Papillomavirus
GRWAGRCA

SEQ ID NO: 19284 - protein, 9 aa, Artificial Sequence
  Peptide Derived from Human Papillomavirus
GRWAGRCAA

SEQ ID NO: 19285 - protein, 11 aa, Artificial Sequence
  Peptide Derived from Human Papillomavirus
GRWAGRCAACW

SEQ ID NO: 19286 - protein, 9 aa, Artificial Sequence
  Peptide Derived from Human Papillomavirus
IHNIELQCV

SEQ ID NO: 19287 - protein, 10 aa, Artificial Sequence
  Peptide Derived from Human Papillomavirus
IRCIICQRPL

SEQ ID NO: 19288 - protein, 8 aa, Artificial Sequence
  Peptide Derived from Human Papillomavirus
KKPLNEIL

SEQ ID NO: 19289 - protein, 9 aa, Artificial Sequence
  Peptide Derived from Human Papillomavirus
KKPLNEILI

SEQ ID NO: 19290 - protein, 9 aa, Artificial Sequence
  Peptide Derived from Human Papillomavirus
KKPLQRSEV

SEQ ID NO: 19291 - protein, 10 aa, Artificial Sequence
  Peptide Derived from Human Papillomavirus
KKPLQRSEVY

SEQ ID NO: 19292 - protein, 11 aa, Artificial Sequence
  Peptide Derived from Human Papillomavirus
KKRHVDLNKRF

SEQ ID NO: 19293 - protein, 10 aa, Artificial Sequence
  Peptide Derived from Human Papillomavirus
KRFHNISGRW

SEQ ID NO: 19294 - protein, 11 aa, Artificial Sequence
  Peptide Derived from Human Papillomavirus
KRFHNISGRWA

SEQ ID NO: 19295 - protein, 10 aa, Artificial Sequence
  Peptide Derived from Human Papillomavirus
KRHVDLNKRF

SEQ ID NO: 19296 - protein, 8 aa, Artificial Sequence
  Peptide Derived from Human Papillomavirus
LHDLCQAL

SEQ ID NO: 19297 - protein, 10 aa, Artificial Sequence
  Peptide Derived from Human Papillomavirus
LRFLSKISEY

SEQ ID NO: 19298 - protein, 11 aa, Artificial Sequence
  Peptide Derived from Human Papillomavirus
NKRFHNISGRW

SEQ ID NO: 19299 - protein, 10 aa, Artificial Sequence
  Peptide Derived from Human Papillomavirus
PRTLHDLCQA

SEQ ID NO: 19300 - protein, 11 aa, Artificial Sequence
  Peptide Derived from Human Papillomavirus
PRTLHDLCQAL

SEQ ID NO: 19301 - protein, 8 aa, Artificial Sequence
  Peptide Derived from Human Papillomavirus
QRSEVYDF

SEQ ID NO: 19302 - protein, 9 aa, Artificial Sequence
  Peptide Derived from Human Papillomavirus
QRSEVYDFA

SEQ ID NO: 19303 - protein, 10 aa, Artificial Sequence
  Peptide Derived from Human Papillomavirus
QRSEVYDFAF

SEQ ID NO: 19304 - protein, 11 aa, Artificial Sequence
  Peptide Derived from Human Papillomavirus
QRSEVYDFAFA

SEQ ID NO: 19305 - protein, 9 aa, Artificial Sequence
  Peptide Derived from Human Papillomavirus
RHVDLNKRF

SEQ ID NO: 19306 - protein, 8 aa, Artificial Sequence
  Peptide Derived from Human Papillomavirus
RHYNYSVY

SEQ ID NO: 19307 - protein, 9 aa, Artificial Sequence
  Peptide Derived from Human Papillomavirus
SKISEYRHY

SEQ ID NO: 19308 - protein, 11 aa, Artificial Sequence
  Peptide Derived from Human Papillomavirus
SKISEYRHYNY

SEQ ID NO: 19309 - protein, 8 aa, Artificial Sequence
  Peptide Derived from Human Papillomavirus
SRRRETAL

SEQ ID NO: 19310 - protein, 8 aa, Artificial Sequence
  Peptide Derived from Human Papillomavirus
VKKPLNEI

SEQ ID NO: 19311 - protein, 9 aa, Artificial Sequence
  Peptide Derived from Human Papillomavirus
VKKPLNEIL

SEQ ID NO: 19312 - protein, 10 aa, Artificial Sequence
  Peptide Derived from Human Papillomavirus
VKKPLNEILI

SEQ ID NO: 19313 - protein, 9 aa, Artificial Sequence
  Peptide Derived from Human Papillomavirus
WRSRRRETA

SEQ ID NO: 19314 - protein, 10 aa, Artificial Sequence
  Peptide Derived from Human Papillomavirus
WRSRRRETAL

SEQ ID NO: 19315 - protein, 9 aa, Artificial Sequence
  Peptide Derived from Human Papillomavirus
YREGNPFGI

SEQ ID NO: 19316 - protein, 8 aa, Artificial Sequence
  Peptide Derived from Human Papillomavirus
YRHYNYSV

SEQ ID NO: 19317 - protein, 9 aa, Artificial Sequence
  Peptide Derived from Human Papillomavirus
YRHYNYSVY

SEQ ID NO: 19318 - protein, 8 aa, Artificial Sequence
  Peptide Derived from Human Papillomavirus
CHTCNTTV

SEQ ID NO: 19319 - protein, 10 aa, Artificial Sequence
  Peptide Derived from Human Papillomavirus
CHTCNTTVRL

SEQ ID NO: 19320 - protein, 10 aa, Artificial Sequence
  Peptide Derived from Human Papillomavirus
DRPDGQAQPA

SEQ ID NO: 19321 - protein, 9 aa, Artificial Sequence
  Peptide Derived from Human Papillomavirus
GHKPTLKEY

SEQ ID NO: 19322 - protein, 10 aa, Artificial Sequence
  Peptide Derived from Human Papillomavirus
GHKPTLKEYV

SEQ ID NO: 19323 - protein, 11 aa, Artificial Sequence
  Peptide Derived from Human Papillomavirus
GHKPTLKEYVL

SEQ ID NO: 19324 - protein, 8 aa, Artificial Sequence
  Peptide Derived from Human Papillomavirus
HKPTLKEY

SEQ ID NO: 19325 - protein, 9 aa, Artificial Sequence
  Peptide Derived from Human Papillomavirus
HKPTLKEYV

SEQ ID NO: 19326 - protein, 10 aa, Artificial Sequence
  Peptide Derived from Human Papillomavirus
HKPTLKEYVL

SEQ ID NO: 19327 - protein, 8 aa, Artificial Sequence
  Peptide Derived from Human Papillomavirus
LKEYVLDL

SEQ ID NO: 19328 - protein, 9 aa, Artificial Sequence
  Peptide Derived from Human Papillomavirus
LKEYVLDLY

SEQ ID NO: 19329 - protein, 8 aa, Artificial Sequence
  Peptide Derived from Human Papillomavirus
LRTIQQLL

SEQ ID NO: 19330 - protein, 9 aa, Artificial Sequence
  Peptide Derived from Human Papillomavirus
LRTIQQLLM

SEQ ID NO: 19331 - protein, 8 aa, Artificial Sequence
  Peptide Derived from Human Papillomavirus
MRGHKPTL

SEQ ID NO: 19332 - protein, 11 aa, Artificial Sequence
  Peptide Derived from Human Papillomavirus
MRGHKPTLKEY

SEQ ID NO: 19333 - protein, 9 aa, Artificial Sequence
  Peptide Derived from Human Papillomavirus
VRLCVNSTA

SEQ ID NO: 19334 - protein, 9 aa, Artificial Sequence
  Peptide Derived from Human Papillomavirus
AKKLLVPKV

SEQ ID NO: 19335 - protein, 8 aa, Artificial Sequence
  Peptide Derived from Human Papillomavirus
AKPKLKRA

SEQ ID NO: 19336 - protein, 9 aa, Artificial Sequence
  Peptide Derived from Human Papillomavirus
AKPKLKRAA

SEQ ID NO: 19337 - protein, 9 aa, Artificial Sequence
  Peptide Derived from Human Papillomavirus
CKPPTGEHW

SEQ ID NO: 19338 - protein, 9 aa, Artificial Sequence
  Peptide Derived from Human Papillomavirus
CKVTLTAEV

SEQ ID NO: 19339 - protein, 10 aa, Artificial Sequence
  Peptide Derived from Human Papillomavirus
CKVTLTAEVM

SEQ ID NO: 19340 - protein, 9 aa, Artificial Sequence
  Peptide Derived from Human Papillomavirus
CKYPDYLKM

SEQ ID NO: 19341 - protein, 8 aa, Artificial Sequence
  Peptide Derived from Human Papillomavirus
EHWGKGVA

SEQ ID NO: 19342 - protein, 9 aa, Artificial Sequence
  Peptide Derived from Human Papillomavirus
EKEDPLGKY

SEQ ID NO: 19343 - protein, 11 aa, Artificial Sequence
  Peptide Derived from Human Papillomavirus
EKEDPLGKYTF

SEQ ID NO: 19344 - protein, 10 aa, Artificial Sequence
  Peptide Derived from Human Papillomavirus
EKFSADLDQF

SEQ ID NO: 19345 - protein, 8 aa, Artificial Sequence
  Peptide Derived from Human Papillomavirus
FKEYIRHV

SEQ ID NO: 19346 - protein, 11 aa, Artificial Sequence
  Peptide Derived from Human Papillomavirus
FKEYIRHVEEY

SEQ ID NO: 19347 - protein, 11 aa, Artificial Sequence
  Peptide Derived from Human Papillomavirus
FKTLQANKSDV

SEQ ID NO: 19348 - protein, 11 aa, Artificial Sequence
  Peptide Derived from Human Papillomavirus
FRVRLPDPNKF

SEQ ID NO: 19349 - protein, 8 aa, Artificial Sequence
  Peptide Derived from Human Papillomavirus
GHNNGICW

SEQ ID NO: 19350 - protein, 8 aa, Artificial Sequence
  Peptide Derived from Human Papillomavirus
GHPLLNKF

SEQ ID NO: 19351 - protein, 9 aa, Artificial Sequence
  Peptide Derived from Human Papillomavirus
GKGVACTNA

SEQ ID NO: 19352 - protein, 10 aa, Artificial Sequence
  Peptide Derived from Human Papillomavirus
GKGVACTNAA

SEQ ID NO: 19353 - protein, 8 aa, Artificial Sequence
  Peptide Derived from Human Papillomavirus
GKYTFWEV

SEQ ID NO: 19354 - protein, 10 aa, Artificial Sequence
  Peptide Derived from Human Papillomavirus
GKYTFWEVDL

SEQ ID NO: 19355 - protein, 8 aa, Artificial Sequence
  Peptide Derived from Human Papillomavirus
GRGQPLGV

SEQ ID NO: 19356 - protein, 10 aa, Artificial Sequence
  Peptide Derived from Human Papillomavirus
GRGQPLGVGI

SEQ ID NO: 19357 - protein, 8 aa, Artificial Sequence
  Peptide Derived from Human Papillomavirus
GRKFLLQA

SEQ ID NO: 19358 - protein, 10 aa, Artificial Sequence
  Peptide Derived from Human Papillomavirus
GRKFLLQAGL

SEQ ID NO: 19359 - protein, 8 aa, Artificial Sequence
  Peptide Derived from Human Papillomavirus
IHAMNPDI

SEQ ID NO: 19360 - protein, 9 aa, Artificial Sequence
  Peptide Derived from Human Papillomavirus
IHAMNPDIL

SEQ ID NO: 19361 - protein, 8 aa, Artificial Sequence
  Peptide Derived from Human Papillomavirus
IKGSGTTA

SEQ ID NO: 19362 - protein, 10 aa, Artificial Sequence
  Peptide Derived from Human Papillomavirus
IKGSGTTASI

SEQ ID NO: 19363 - protein, 10 aa, Artificial Sequence
  Peptide Derived from Human Papillomavirus
IKNPTNAKKL

SEQ ID NO: 19364 - protein, 11 aa, Artificial Sequence
  Peptide Derived from Human Papillomavirus
IKNPTNAKKLL

SEQ ID NO: 19365 - protein, 9 aa, Artificial Sequence
  Peptide Derived from Human Papillomavirus
IRHVEEYDL

SEQ ID NO: 19366 - protein, 11 aa, Artificial Sequence
  Peptide Derived from Human Papillomavirus
IRHVEEYDLQF

SEQ ID NO: 19367 - protein, 8 aa, Artificial Sequence
  Peptide Derived from Human Papillomavirus
KKLLVPKV

SEQ ID NO: 19368 - protein, 11 aa, Artificial Sequence
  Peptide Derived from Human Papillomavirus
KKLLVPKVSGL

SEQ ID NO: 19369 - protein, 10 aa, Artificial Sequence
  Peptide Derived from Human Papillomavirus
LKAKPKLKRA

SEQ ID NO: 19370 - protein, 11 aa, Artificial Sequence
  Peptide Derived from Human Papillomavirus
LKAKPKLKRAA

SEQ ID NO: 19371 - protein, 9 aa, Artificial Sequence
  Peptide Derived from Human Papillomavirus
LKEKFSADL

SEQ ID NO: 19372 - protein, 8 aa, Artificial Sequence
  Peptide Derived from Human Papillomavirus
LKMTSEPY

SEQ ID NO: 19373 - protein, 8 aa, Artificial Sequence
  Peptide Derived from Human Papillomavirus
LRREQMFV

SEQ ID NO: 19374 - protein, 11 aa, Artificial Sequence
  Peptide Derived from Human Papillomavirus
LRREQMFVRHF

SEQ ID NO: 19375 - protein, 10 aa, Artificial Sequence
  Peptide Derived from Human Papillomavirus
NKFGFPDTSF

SEQ ID NO: 19376 - protein, 11 aa, Artificial Sequence
  Peptide Derived from Human Papillomavirus
NKFGFPDTSFY

SEQ ID NO: 19377 - protein, 9 aa, Artificial Sequence
  Peptide Derived from Human Papillomavirus
NKPYWLQRA

SEQ ID NO: 19378 - protein, 9 aa, Artificial Sequence
  Peptide Derived from Human Papillomavirus
NKSDVPIDI

SEQ ID NO: 19379 - protein, 9 aa, Artificial Sequence
  Peptide Derived from Human Papillomavirus
NKYPGQPGA

SEQ ID NO: 19380 - protein, 9 aa, Artificial Sequence
  Peptide Derived from Human Papillomavirus
NRAGTLGEA

SEQ ID NO: 19381 - protein, 10 aa, Artificial Sequence
  Peptide Derived from Human Papillomavirus
NRAGTLGEAV

SEQ ID NO: 19382 - protein, 9 aa, Artificial Sequence
  Peptide Derived from Human Papillomavirus
NRECLSMDY

SEQ ID NO: 19383 - protein, 8 aa, Artificial Sequence
  Peptide Derived from Human Papillomavirus
PKEKEDPL

SEQ ID NO: 19384 - protein, 11 aa, Artificial Sequence
  Peptide Derived from Human Papillomavirus
PKEKEDPLGKY

SEQ ID NO: 19385 - protein, 8 aa, Artificial Sequence
  Peptide Derived from Human Papillomavirus
PKVSGLQY

SEQ ID NO: 19386 - protein, 10 aa, Artificial Sequence
  Peptide Derived from Human Papillomavirus
PKVSGLQYRV

SEQ ID NO: 19387 - protein, 11 aa, Artificial Sequence
  Peptide Derived from Human Papillomavirus
PKVSGLQYRVF

SEQ ID NO: 19388 - protein, 10 aa, Artificial Sequence
  Peptide Derived from Human Papillomavirus
QRAQGHNNGI

SEQ ID NO: 19389 - protein, 8 aa, Artificial Sequence
  Peptide Derived from Human Papillomavirus
QRLVWACV

SEQ ID NO: 19390 - protein, 10 aa, Artificial Sequence
  Peptide Derived from Human Papillomavirus
QRLVWACVGL

SEQ ID NO: 19391 - protein, 10 aa, Artificial Sequence
  Peptide Derived from Human Papillomavirus
RHFFNRAGTL

SEQ ID NO: 19392 - protein, 8 aa, Artificial Sequence
  Peptide Derived from Human Papillomavirus
RHVEEYDL

SEQ ID NO: 19393 - protein, 10 aa, Artificial Sequence
  Peptide Derived from Human Papillomavirus
RHVEEYDLQF

SEQ ID NO: 19394 - protein, 11 aa, Artificial Sequence
  Peptide Derived from Human Papillomavirus
RHVEEYDLQFV

SEQ ID NO: 19395 - protein, 9 aa, Artificial Sequence
  Peptide Derived from Human Papillomavirus
RKFLLQAGL

SEQ ID NO: 19396 - protein, 11 aa, Artificial Sequence
  Peptide Derived from Human Papillomavirus
RKFLLQAGLKA

SEQ ID NO: 19397 - protein, 10 aa, Artificial Sequence
  Peptide Derived from Human Papillomavirus
RREQMFVRHF

SEQ ID NO: 19398 - protein, 11 aa, Artificial Sequence
  Peptide Derived from Human Papillomavirus
RREQMFVRHFF

SEQ ID NO: 19399 - protein, 9 aa, Artificial Sequence
  Peptide Derived from Human Papillomavirus
SKVVSTDEY

SEQ ID NO: 19400 - protein, 10 aa, Artificial Sequence
  Peptide Derived from Human Papillomavirus
SKVVSTDEYV

SEQ ID NO: 19401 - protein, 10 aa, Artificial Sequence
  Peptide Derived from Human Papillomavirus
SRLLAVGHPY

SEQ ID NO: 19402 - protein, 11 aa, Artificial Sequence
  Peptide Derived from Human Papillomavirus
SRLLAVGHPYF

SEQ ID NO: 19403 - protein, 8 aa, Artificial Sequence
  Peptide Derived from Human Papillomavirus
SRTSIYYY

SEQ ID NO: 19404 - protein, 9 aa, Artificial Sequence
  Peptide Derived from Human Papillomavirus
SRTSIYYYA

SEQ ID NO: 19405 - protein, 8 aa, Artificial Sequence
  Peptide Derived from Human Papillomavirus
TRSTNMTL

SEQ ID NO: 19406 - protein, 11 aa, Artificial Sequence
  Peptide Derived from Human Papillomavirus
TRTSSAKRKKV

SEQ ID NO: 19407 - protein, 8 aa, Artificial Sequence
  Peptide Derived from Human Papillomavirus
VRHFFNRA

SEQ ID NO: 19408 - protein, 11 aa, Artificial Sequence
  Peptide Derived from Human Papillomavirus
VRHFFNRAGTL

SEQ ID NO: 19409 - protein, 9 aa, Artificial Sequence
  Peptide Derived from Human Papillomavirus
VRLPDPNKF

SEQ ID NO: 19410 - protein, 11 aa, Artificial Sequence
  Peptide Derived from Human Papillomavirus
VRLPDPNKFGF

SEQ ID NO: 19411 - protein, 8 aa, Artificial Sequence
  Peptide Derived from Human Papillomavirus
WRPSEATV

SEQ ID NO: 19412 - protein, 9 aa, Artificial Sequence
  Peptide Derived from Human Papillomavirus
WRPSEATVY

SEQ ID NO: 19413 - protein, 10 aa, Artificial Sequence
  Peptide Derived from Human Papillomavirus
WRPSEATVYL

SEQ ID NO: 19414 - protein, 9 aa, Artificial Sequence
  Peptide Derived from Human Papillomavirus
YKNENFKEY

SEQ ID NO: 19415 - protein, 10 aa, Artificial Sequence
  Peptide Derived from Human Papillomavirus
YKNENFKEYI

SEQ ID NO: 19416 - protein, 8 aa, Artificial Sequence
  Peptide Derived from Human Papillomavirus
YKQTQLCL

SEQ ID NO: 19417 - protein, 9 aa, Artificial Sequence
  Peptide Derived from Human Papillomavirus
YKQTQLCLL

SEQ ID NO: 19418 - protein, 8 aa, Artificial Sequence
  Peptide Derived from Human Papillomavirus
YRFVTSQA

SEQ ID NO: 19419 - protein, 9 aa, Artificial Sequence
  Peptide Derived from Human Papillomavirus
YRFVTSQAI

SEQ ID NO: 19420 - protein, 8 aa, Artificial Sequence
  Peptide Derived from Human Papillomavirus
YRVFRVRL

SEQ ID NO: 19421 - protein, 9 aa, Artificial Sequence
  Peptide Derived from Human Papillomavirus
ARIHYYQDL

SEQ ID NO: 19422 - protein, 11 aa, Artificial Sequence
  Peptide Derived from Human Papillomavirus
CKATGTCPPDV

SEQ ID NO: 19423 - protein, 9 aa, Artificial Sequence
  Peptide Derived from Human Papillomavirus
DHTVPNEQY

SEQ ID NO: 19424 - protein, 11 aa, Artificial Sequence
  Peptide Derived from Human Papillomavirus
DHTVPNEQYEL

SEQ ID NO: 19425 - protein, 10 aa, Artificial Sequence
  Peptide Derived from Human Papillomavirus
GHFIFSSPTV

SEQ ID NO: 19426 - protein, 8 aa, Artificial Sequence
  Peptide Derived from Human Papillomavirus
GKQIGARI

SEQ ID NO: 19427 - protein, 10 aa, Artificial Sequence
  Peptide Derived from Human Papillomavirus
GKQIGARIHY

SEQ ID NO: 19428 - protein, 11 aa, Artificial Sequence
  Peptide Derived from Human Papillomavirus
GKQIGARIHYY

SEQ ID NO: 19429 - protein, 8 aa, Artificial Sequence
  Peptide Derived from Human Papillomavirus
GRTGYVPI

SEQ ID NO: 19430 - protein, 10 aa, Artificial Sequence
  Peptide Derived from Human Papillomavirus
HKLITYDNPA

SEQ ID NO: 19431 - protein, 11 aa, Artificial Sequence
  Peptide Derived from Human Papillomavirus
HKLITYDNPAF

SEQ ID NO: 19432 - protein, 10 aa, Artificial Sequence
  Peptide Derived from Human Papillomavirus
HKRSTRRKRA

SEQ ID NO: 19433 - protein, 10 aa, Artificial Sequence
  Peptide Derived from Human Papillomavirus
IHYYQDLSPI

SEQ ID NO: 19434 - protein, 11 aa, Artificial Sequence
  Peptide Derived from Human Papillomavirus
IHYYQDLSPIV

SEQ ID NO: 19435 - protein, 10 aa, Artificial Sequence
  Peptide Derived from Human Papillomavirus
IRPPVTVDTV

SEQ ID NO: 19436 - protein, 8 aa, Artificial Sequence
  Peptide Derived from Human Papillomavirus
KRASATQL

SEQ ID NO: 19437 - protein, 9 aa, Artificial Sequence
  Peptide Derived from Human Papillomavirus
KRASATQLY

SEQ ID NO: 19438 - protein, 10 aa, Artificial Sequence
  Peptide Derived from Human Papillomavirus
KRFPYFFTDV

SEQ ID NO: 19439 - protein, 9 aa, Artificial Sequence
  Peptide Derived from Human Papillomavirus
KRSTRRKRA

SEQ ID NO: 19440 - protein, 11 aa, Artificial Sequence
  Peptide Derived from Human Papillomavirus
KRSTRRKRASA

SEQ ID NO: 19441 - protein, 9 aa, Artificial Sequence
  Peptide Derived from Human Papillomavirus
LHDTSTSSY

SEQ ID NO: 19442 - protein, 11 aa, Artificial Sequence
  Peptide Derived from Human Papillomavirus
LHDTSTSSYSI

SEQ ID NO: 19443 - protein, 9 aa, Artificial Sequence
  Peptide Derived from Human Papillomavirus
LHPPAPAEA

SEQ ID NO: 19444 - protein, 8 aa, Artificial Sequence
  Peptide Derived from Human Papillomavirus
LHPSYFIL

SEQ ID NO: 19445 - protein, 9 aa, Artificial Sequence
  Peptide Derived from Human Papillomavirus
LKTRSGKQI

SEQ ID NO: 19446 - protein, 11 aa, Artificial Sequence
  Peptide Derived from Human Papillomavirus
LKTRSGKQIGA

SEQ ID NO: 19447 - protein, 8 aa, Artificial Sequence
  Peptide Derived from Human Papillomavirus
LKYGSLGV

SEQ ID NO: 19448 - protein, 9 aa, Artificial Sequence
  Peptide Derived from Human Papillomavirus
LKYGSLGVF

SEQ ID NO: 19449 - protein, 10 aa, Artificial Sequence
  Peptide Derived from Human Papillomavirus
LKYGSLGVFF

SEQ ID NO: 19450 - protein, 8 aa, Artificial Sequence
  Peptide Derived from Human Papillomavirus
LRRRRKRF

SEQ ID NO: 19451 - protein, 10 aa, Artificial Sequence
  Peptide Derived from Human Papillomavirus
LRRRRKRFPY

SEQ ID NO: 19452 - protein, 11 aa, Artificial Sequence
  Peptide Derived from Human Papillomavirus
LRRRRKRFPYF

SEQ ID NO: 19453 - protein, 11 aa, Artificial Sequence
  Peptide Derived from Human Papillomavirus
PHKLITYDNPA

SEQ ID NO: 19454 - protein, 8 aa, Artificial Sequence
  Peptide Derived from Human Papillomavirus
PKVEGSTI

SEQ ID NO: 19455 - protein, 9 aa, Artificial Sequence
  Peptide Derived from Human Papillomavirus
PKVEGSTIA

SEQ ID NO: 19456 - protein, 8 aa, Artificial Sequence
  Peptide Derived from Human Papillomavirus
QHSDISPA

SEQ ID NO: 19457 - protein, 8 aa, Artificial Sequence
  Peptide Derived from Human Papillomavirus
QHSYSTFA

SEQ ID NO: 19458 - protein, 11 aa, Artificial Sequence
  Peptide Derived from Human Papillomavirus
RHKRSTRRKRA

SEQ ID NO: 19459 - protein, 9 aa, Artificial Sequence
  Peptide Derived from Human Papillomavirus
RHTVRFSRV

SEQ ID NO: 19460 - protein, 9 aa, Artificial Sequence
  Peptide Derived from Human Papillomavirus
RKRASATQL

SEQ ID NO: 19461 - protein, 10 aa, Artificial Sequence
  Peptide Derived from Human Papillomavirus
RKRASATQLY

SEQ ID NO: 19462 - protein, 8 aa, Artificial Sequence
  Peptide Derived from Human Papillomavirus
RKRFPYFF

SEQ ID NO: 19463 - protein, 11 aa, Artificial Sequence
  Peptide Derived from Human Papillomavirus
RKRFPYFFTDV

SEQ ID NO: 19464 - protein, 10 aa, Artificial Sequence
  Peptide Derived from Human Papillomavirus
RRHTVRFSRV

SEQ ID NO: 19465 - protein, 10 aa, Artificial Sequence
  Peptide Derived from Human Papillomavirus
RRKRASATQL

SEQ ID NO: 19466 - protein, 11 aa, Artificial Sequence
  Peptide Derived from Human Papillomavirus
RRKRASATQLY

SEQ ID NO: 19467 - protein, 8 aa, Artificial Sequence
  Peptide Derived from Human Papillomavirus
RRKRFPYF

SEQ ID NO: 19468 - protein, 9 aa, Artificial Sequence
  Peptide Derived from Human Papillomavirus
RRKRFPYFF

SEQ ID NO: 19469 - protein, 8 aa, Artificial Sequence
  Peptide Derived from Human Papillomavirus
RRRKRFPY

SEQ ID NO: 19470 - protein, 9 aa, Artificial Sequence
  Peptide Derived from Human Papillomavirus
RRRKRFPYF

SEQ ID NO: 19471 - protein, 10 aa, Artificial Sequence
  Peptide Derived from Human Papillomavirus
RRRKRFPYFF

SEQ ID NO: 19472 - protein, 9 aa, Artificial Sequence
  Peptide Derived from Human Papillomavirus
RRRRKRFPY

SEQ ID NO: 19473 - protein, 10 aa, Artificial Sequence
  Peptide Derived from Human Papillomavirus
RRRRKRFPYF

SEQ ID NO: 19474 - protein, 11 aa, Artificial Sequence
  Peptide Derived from Human Papillomavirus
RRRRKRFPYFF

SEQ ID NO: 19475 - protein, 9 aa, Artificial Sequence
  Peptide Derived from Human Papillomavirus
SRNTQQVKV

SEQ ID NO: 19476 - protein, 10 aa, Artificial Sequence
  Peptide Derived from Human Papillomavirus
SRNTQQVKVV

SEQ ID NO: 19477 - protein, 9 aa, Artificial Sequence
  Peptide Derived from Human Papillomavirus
SRPVARLGL

SEQ ID NO: 19478 - protein, 10 aa, Artificial Sequence
  Peptide Derived from Human Papillomavirus
SRPVARLGLY

SEQ ID NO: 19479 - protein, 8 aa, Artificial Sequence
  Peptide Derived from Human Papillomavirus
SRRHTVRF

SEQ ID NO: 19480 - protein, 11 aa, Artificial Sequence
  Peptide Derived from Human Papillomavirus
SRRHTVRFSRV

SEQ ID NO: 19481 - protein, 9 aa, Artificial Sequence
  Peptide Derived from Human Papillomavirus
SRVGQKATL

SEQ ID NO: 19482 - protein, 8 aa, Artificial Sequence
  Peptide Derived from Human Papillomavirus
TRRKRASA

SEQ ID NO: 19483 - protein, 11 aa, Artificial Sequence
  Peptide Derived from Human Papillomavirus
TRRKRASATQL

SEQ ID NO: 19484 - protein, 9 aa, Artificial Sequence
  Peptide Derived from Human Papillomavirus
TRSGKQIGA

SEQ ID NO: 19485 - protein, 11 aa, Artificial Sequence
  Peptide Derived from Human Papillomavirus
TRSGKQIGARI

SEQ ID NO: 19486 - protein, 8 aa, Artificial Sequence
  Peptide Derived from Human Papillomavirus
TRTSNVSI

SEQ ID NO: 19487 - protein, 10 aa, Artificial Sequence
  Peptide Derived from Human Papillomavirus
TRTSNVSIPL

SEQ ID NO: 19488 - protein, 9 aa, Artificial Sequence
  Peptide Derived from Human Papillomavirus
VHTPMQHSY

SEQ ID NO: 19489 - protein, 8 aa, Artificial Sequence
  Peptide Derived from Human Papillomavirus
VKVVDPAF

SEQ ID NO: 19490 - protein, 9 aa, Artificial Sequence
  Peptide Derived from Human Papillomavirus
VKVVDPAFL

SEQ ID NO: 19491 - protein, 10 aa, Artificial Sequence
  Peptide Derived from Human Papillomavirus
VRFSRVGQKA

SEQ ID NO: 19492 - protein, 10 aa, Artificial Sequence
  Peptide Derived from Human Papillomavirus
AHIQCLDCKW

SEQ ID NO: 19493 - protein, 8 aa, Artificial Sequence
  Peptide Derived from Human Papillomavirus
AKDNKWPY

SEQ ID NO: 19494 - protein, 9 aa, Artificial Sequence
  Peptide Derived from Human Papillomavirus
AKDNKWPYL

SEQ ID NO: 19495 - protein, 8 aa, Artificial Sequence
  Peptide Derived from Human Papillomavirus
AKGLSTLL

SEQ ID NO: 19496 - protein, 10 aa, Artificial Sequence
  Peptide Derived from Human Papillomavirus
AKGLSTLLHV

SEQ ID NO: 19497 - protein, 8 aa, Artificial Sequence
  Peptide Derived from Human Papillomavirus
AKRRLFTI

SEQ ID NO: 19498 - protein, 8 aa, Artificial Sequence
  Peptide Derived from Human Papillomavirus
AKYLKDCA

SEQ ID NO: 19499 - protein, 9 aa, Artificial Sequence
  Peptide Derived from Human Papillomavirus
AKYLKDCAV

SEQ ID NO: 19500 - protein, 10 aa, Artificial Sequence
  Peptide Derived from Human Papillomavirus
AKYLKDCAVM

SEQ ID NO: 19501 - protein, 8 aa, Artificial Sequence
  Peptide Derived from Human Papillomavirus
CKWGVLIL

SEQ ID NO: 19502 - protein, 9 aa, Artificial Sequence
  Peptide Derived from Human Papillomavirus
CKWGVLILA

SEQ ID NO: 19503 - protein, 10 aa, Artificial Sequence
  Peptide Derived from Human Papillomavirus
CKWGVLILAL

SEQ ID NO: 19504 - protein, 11 aa, Artificial Sequence
  Peptide Derived from Human Papillomavirus
CKWGVLILALL

SEQ ID NO: 19505 - protein, 8 aa, Artificial Sequence
  Peptide Derived from Human Papillomavirus
DKNGNPVY

SEQ ID NO: 19506 - protein, 10 aa, Artificial Sequence
  Peptide Derived from Human Papillomavirus
DKNGNPVYEI

SEQ ID NO: 19507 - protein, 8 aa, Artificial Sequence
  Peptide Derived from Human Papillomavirus
DKNWKCFF

SEQ ID NO: 19508 - protein, 8 aa, Artificial Sequence
  Peptide Derived from Human Papillomavirus
DKTTCTDW

SEQ ID NO: 19509 - protein, 9 aa, Artificial Sequence
  Peptide Derived from Human Papillomavirus
DKTTCTDWV

SEQ ID NO: 19510 - protein, 10 aa, Artificial Sequence
  Peptide Derived from Human Papillomavirus
DKTTCTDWVM

SEQ ID NO: 19511 - protein, 11 aa, Artificial Sequence
  Peptide Derived from Human Papillomavirus
DKTTCTDWVMA

SEQ ID NO: 19512 - protein, 8 aa, Artificial Sequence
  Peptide Derived from Human Papillomavirus
DRKHKPLL

SEQ ID NO: 19513 - protein, 10 aa, Artificial Sequence
  Peptide Derived from Human Papillomavirus
DRKHKPLLQL

SEQ ID NO: 19514 - protein, 8 aa, Artificial Sequence
  Peptide Derived from Human Papillomavirus
EKKTGDVI

SEQ ID NO: 19515 - protein, 9 aa, Artificial Sequence
  Peptide Derived from Human Papillomavirus
ERTWSRLDL

SEQ ID NO: 19516 - protein, 10 aa, Artificial Sequence
  Peptide Derived from Human Papillomavirus
FHAQEVQNDA

SEQ ID NO: 19517 - protein, 9 aa, Artificial Sequence
  Peptide Derived from Human Papillomavirus
FKDIYGLSF

SEQ ID NO: 19518 - protein, 11 aa, Artificial Sequence
  Peptide Derived from Human Papillomavirus
FKSDKTTCTDW

SEQ ID NO: 19519 - protein, 8 aa, Artificial Sequence
  Peptide Derived from Human Papillomavirus
FKTLIKPA

SEQ ID NO: 19520 - protein, 10 aa, Artificial Sequence
  Peptide Derived from Human Papillomavirus
FKTLIKPATL

SEQ ID NO: 19521 - protein, 11 aa, Artificial Sequence
  Peptide Derived from Human Papillomavirus
FKTLIKPATLY

SEQ ID NO: 19522 - protein, 9 aa, Artificial Sequence
  Peptide Derived from Human Papillomavirus
GHKKAKRRL

SEQ ID NO: 19523 - protein, 10 aa, Artificial Sequence
  Peptide Derived from Human Papillomavirus
GHKKAKRRLF

SEQ ID NO: 19524 - protein, 8 aa, Artificial Sequence
  Peptide Derived from Human Papillomavirus
GKNRLTVA

SEQ ID NO: 19525 - protein, 11 aa, Artificial Sequence
  Peptide Derived from Human Papillomavirus
GKNRLTVAKGL

SEQ ID NO: 19526 - protein, 9 aa, Artificial Sequence
  Peptide Derived from Human Papillomavirus
GKSYFGMSF

SEQ ID NO: 19527 - protein, 10 aa, Artificial Sequence
  Peptide Derived from Human Papillomavirus
GKSYFGMSFI

SEQ ID NO: 19528 - protein, 8 aa, Artificial Sequence
  Peptide Derived from Human Papillomavirus
HKKAKRRL

SEQ ID NO: 19529 - protein, 9 aa, Artificial Sequence
  Peptide Derived from Human Papillomavirus
HKKAKRRLF

SEQ ID NO: 19530 - protein, 11 aa, Artificial Sequence
  Peptide Derived from Human Papillomavirus
HKKAKRRLFTI

SEQ ID NO: 19531 - protein, 8 aa, Artificial Sequence
  Peptide Derived from Human Papillomavirus
IHFLQGAI

SEQ ID NO: 19532 - protein, 9 aa, Artificial Sequence
  Peptide Derived from Human Papillomavirus
IHFLQGAII

SEQ ID NO: 19533 - protein, 11 aa, Artificial Sequence
  Peptide Derived from Human Papillomavirus
IHFLQGAIISF

SEQ ID NO: 19534 - protein, 8 aa, Artificial Sequence
  Peptide Derived from Human Papillomavirus
IKPATLYA

SEQ ID NO: 19535 - protein, 10 aa, Artificial Sequence
  Peptide Derived from Human Papillomavirus
IKPATLYAHI

SEQ ID NO: 19536 - protein, 8 aa, Artificial Sequence
  Peptide Derived from Human Papillomavirus
IKYRCSKI

SEQ ID NO: 19537 - protein, 8 aa, Artificial Sequence
  Peptide Derived from Human Papillomavirus
KHKPLLQL

SEQ ID NO: 19538 - protein, 8 aa, Artificial Sequence
  Peptide Derived from Human Papillomavirus
KKAAMLAV

SEQ ID NO: 19539 - protein, 9 aa, Artificial Sequence
  Peptide Derived from Human Papillomavirus
KKAAMLAVF

SEQ ID NO: 19540 - protein, 8 aa, Artificial Sequence
  Peptide Derived from Human Papillomavirus
KKAKRRLF

SEQ ID NO: 19541 - protein, 10 aa, Artificial Sequence
  Peptide Derived from Human Papillomavirus
KKAKRRLFTI

SEQ ID NO: 19542 - protein, 8 aa, Artificial Sequence
  Peptide Derived from Human Papillomavirus
KKNCILLY

SEQ ID NO: 19543 - protein, 11 aa, Artificial Sequence
  Peptide Derived from Human Papillomavirus
KKNCILLYGPA

SEQ ID NO: 19544 - protein, 8 aa, Artificial Sequence
  Peptide Derived from Human Papillomavirus
KRAQKRQM

SEQ ID NO: 19545 - protein, 10 aa, Artificial Sequence
  Peptide Derived from Human Papillomavirus
KRAQKRQMNM

SEQ ID NO: 19546 - protein, 9 aa, Artificial Sequence
  Peptide Derived from Human Papillomavirus
KRQMNMSQW

SEQ ID NO: 19547 - protein, 10 aa, Artificial Sequence
  Peptide Derived from Human Papillomavirus
KRQMNMSQWI

SEQ ID NO: 19548 - protein, 8 aa, Artificial Sequence
  Peptide Derived from Human Papillomavirus
LHEDDEDA

SEQ ID NO: 19549 - protein, 8 aa, Artificial Sequence
  Peptide Derived from Human Papillomavirus
LHLLKRKF

SEQ ID NO: 19550 - protein, 9 aa, Artificial Sequence
  Peptide Derived from Human Papillomavirus
LHLLKRKFA

SEQ ID NO: 19551 - protein, 8 aa, Artificial Sequence
  Peptide Derived from Human Papillomavirus
LHVPETCM

SEQ ID NO: 19552 - protein, 9 aa, Artificial Sequence
  Peptide Derived from Human Papillomavirus
LHVPETCML

SEQ ID NO: 19553 - protein, 10 aa, Artificial Sequence
  Peptide Derived from Human Papillomavirus
LHVPETCMLI

SEQ ID NO: 19554 - protein, 8 aa, Artificial Sequence
  Peptide Derived from Human Papillomavirus
LKCPPILL

SEQ ID NO: 19555 - protein, 11 aa, Artificial Sequence
  Peptide Derived from Human Papillomavirus
LKDCAVMCRHY

SEQ ID NO: 19556 - protein, 10 aa, Artificial Sequence
  Peptide Derived from Human Papillomavirus
LKGTPKKNCI

SEQ ID NO: 19557 - protein, 11 aa, Artificial Sequence
  Peptide Derived from Human Papillomavirus
LKGTPKKNCIL

SEQ ID NO: 19558 - protein, 9 aa, Artificial Sequence
  Peptide Derived from Human Papillomavirus
LKSNCQAKY

SEQ ID NO: 19559 - protein, 10 aa, Artificial Sequence
  Peptide Derived from Human Papillomavirus
LKSNCQAKYL

SEQ ID NO: 19560 - protein, 8 aa, Artificial Sequence
  Peptide Derived from Human Papillomavirus
LRALKEFL

SEQ ID NO: 19561 - protein, 8 aa, Artificial Sequence
  Peptide Derived from Human Papillomavirus
LRSSVAAL

SEQ ID NO: 19562 - protein, 9 aa, Artificial Sequence
  Peptide Derived from Human Papillomavirus
LRSSVAALY

SEQ ID NO: 19563 - protein, 10 aa, Artificial Sequence
  Peptide Derived from Human Papillomavirus
LRSSVAALYW

SEQ ID NO: 19564 - protein, 11 aa, Artificial Sequence
  Peptide Derived from Human Papillomavirus
LRSSVAALYWY

SEQ ID NO: 19565 - protein, 10 aa, Artificial Sequence
  Peptide Derived from Human Papillomavirus
LRYKCGKNRL

SEQ ID NO: 19566 - protein, 8 aa, Artificial Sequence
  Peptide Derived from Human Papillomavirus
LRYQGVEF

SEQ ID NO: 19567 - protein, 9 aa, Artificial Sequence
  Peptide Derived from Human Papillomavirus
LRYQGVEFI

SEQ ID NO: 19568 - protein, 11 aa, Artificial Sequence
  Peptide Derived from Human Papillomavirus
LRYQGVEFISF

SEQ ID NO: 19569 - protein, 10 aa, Artificial Sequence
  Peptide Derived from Human Papillomavirus
MRNALDGNPI

SEQ ID NO: 19570 - protein, 8 aa, Artificial Sequence
  Peptide Derived from Human Papillomavirus
NKKAAMLA

SEQ ID NO: 19571 - protein, 9 aa, Artificial Sequence
  Peptide Derived from Human Papillomavirus
NKKAAMLAV

SEQ ID NO: 19572 - protein, 10 aa, Artificial Sequence
  Peptide Derived from Human Papillomavirus
NKKAAMLAVF

SEQ ID NO: 19573 - protein, 10 aa, Artificial Sequence
  Peptide Derived from Human Papillomavirus
NKWPYLESRV

SEQ ID NO: 19574 - protein, 9 aa, Artificial Sequence
  Peptide Derived from Human Papillomavirus
NRLTVAKGL

SEQ ID NO: 19575 - protein, 8 aa, Artificial Sequence
  Peptide Derived from Human Papillomavirus
PHCSITEL

SEQ ID NO: 19576 - protein, 11 aa, Artificial Sequence
  Peptide Derived from Human Papillomavirus
PHCSITELKEL

SEQ ID NO: 19577 - protein, 8 aa, Artificial Sequence
  Peptide Derived from Human Papillomavirus
PKKNCILL

SEQ ID NO: 19578 - protein, 9 aa, Artificial Sequence
  Peptide Derived from Human Papillomavirus
PKKNCILLY

SEQ ID NO: 19579 - protein, 8 aa, Artificial Sequence
  Peptide Derived from Human Papillomavirus
PKLRSSVA

SEQ ID NO: 19580 - protein, 9 aa, Artificial Sequence
  Peptide Derived from Human Papillomavirus
PKLRSSVAA

SEQ ID NO: 19581 - protein, 10 aa, Artificial Sequence
  Peptide Derived from Human Papillomavirus
PKLRSSVAAL

SEQ ID NO: 19582 - protein, 11 aa, Artificial Sequence
  Peptide Derived from Human Papillomavirus
PKLRSSVAALY

SEQ ID NO: 19583 - protein, 8 aa, Artificial Sequence
  Peptide Derived from Human Papillomavirus
PRLQEISL

SEQ ID NO: 19584 - protein, 9 aa, Artificial Sequence
  Peptide Derived from Human Papillomavirus
QHGIDDSNF

SEQ ID NO: 19585 - protein, 11 aa, Artificial Sequence
  Peptide Derived from Human Papillomavirus
QHGIDDSNFDL

SEQ ID NO: 19586 - protein, 10 aa, Artificial Sequence
  Peptide Derived from Human Papillomavirus
QKRQMNMSQW

SEQ ID NO: 19587 - protein, 11 aa, Artificial Sequence
  Peptide Derived from Human Papillomavirus
QKRQMNMSQWI

SEQ ID NO: 19588 - protein, 10 aa, Artificial Sequence
  Peptide Derived from Human Papillomavirus
QRLTIIQHGI

SEQ ID NO: 19589 - protein, 11 aa, Artificial Sequence
  Peptide Derived from Human Papillomavirus
RHYKRAQKRQM

SEQ ID NO: 19590 - protein, 9 aa, Artificial Sequence
  Peptide Derived from Human Papillomavirus
RKHKPLLQL

SEQ ID NO: 19591 - protein, 11 aa, Artificial Sequence
  Peptide Derived from Human Papillomavirus
RRLFTISDSGY

SEQ ID NO: 19592 - protein, 8 aa, Artificial Sequence
  Peptide Derived from Human Papillomavirus
SHFWLEPL

SEQ ID NO: 19593 - protein, 9 aa, Artificial Sequence
  Peptide Derived from Human Papillomavirus
SHFWLEPLA

SEQ ID NO: 19594 - protein, 11 aa, Artificial Sequence
  Peptide Derived from Human Papillomavirus
SKENSPLGEQL

SEQ ID NO: 19595 - protein, 9 aa, Artificial Sequence
  Peptide Derived from Human Papillomavirus
SKIDEGGDW

SEQ ID NO: 19596 - protein, 8 aa, Artificial Sequence
  Peptide Derived from Human Papillomavirus
SRVTVFTF

SEQ ID NO: 19597 - protein, 11 aa, Artificial Sequence
  Peptide Derived from Human Papillomavirus
SRVTVFTFPHA

SEQ ID NO: 19598 - protein, 8 aa, Artificial Sequence
  Peptide Derived from Human Papillomavirus
THTCWTYF

SEQ ID NO: 19599 - protein, 11 aa, Artificial Sequence
  Peptide Derived from Human Papillomavirus
THTCWTYFDNY

SEQ ID NO: 19600 - protein, 9 aa, Artificial Sequence
  Peptide Derived from Human Papillomavirus
TKVAMLDDA

SEQ ID NO: 19601 - protein, 9 aa, Artificial Sequence
  Peptide Derived from Human Papillomavirus
WKCFFERTW

SEQ ID NO: 19602 - protein, 8 aa, Artificial Sequence
  Peptide Derived from Human Papillomavirus
WRPIVQFL

SEQ ID NO: 19603 - protein, 10 aa, Artificial Sequence
  Peptide Derived from Human Papillomavirus
WRPIVQFLRY

SEQ ID NO: 19604 - protein, 8 aa, Artificial Sequence
  Peptide Derived from Human Papillomavirus
YKCGKNRL

SEQ ID NO: 19605 - protein, 10 aa, Artificial Sequence
  Peptide Derived from Human Papillomavirus
YKCGKNRLTV

SEQ ID NO: 19606 - protein, 11 aa, Artificial Sequence
  Peptide Derived from Human Papillomavirus
YKCGKNRLTVA

SEQ ID NO: 19607 - protein, 9 aa, Artificial Sequence
  Peptide Derived from Human Papillomavirus
YKRAQKRQM

SEQ ID NO: 19608 - protein, 11 aa, Artificial Sequence
  Peptide Derived from Human Papillomavirus
YKRAQKRQMNM

SEQ ID NO: 19609 - protein, 8 aa, Artificial Sequence
  Peptide Derived from Human Papillomavirus
YRTGISNI

SEQ ID NO: 19610 - protein, 11 aa, Artificial Sequence
  Peptide Derived from Human Papillomavirus
YRTGISNISEV

SEQ ID NO: 19611 - protein, 9 aa, Artificial Sequence
  Peptide Derived from Human Papillomavirus
AHKAIELQM

SEQ ID NO: 19612 - protein, 10 aa, Artificial Sequence
  Peptide Derived from Human Papillomavirus
AHKAIELQMA

SEQ ID NO: 19613 - protein, 11 aa, Artificial Sequence
  Peptide Derived from Human Papillomavirus
AHKAIELQMAL

SEQ ID NO: 19614 - protein, 9 aa, Artificial Sequence
  Peptide Derived from Human Papillomavirus
AREHGITKL

SEQ ID NO: 19615 - protein, 10 aa, Artificial Sequence
  Peptide Derived from Human Papillomavirus
DHYENDSKDI

SEQ ID NO: 19616 - protein, 10 aa, Artificial Sequence
  Peptide Derived from Human Papillomavirus
DHYSEISSTW

SEQ ID NO: 19617 - protein, 8 aa, Artificial Sequence
  Peptide Derived from Human Papillomavirus
DKNSLKCL

SEQ ID NO: 19618 - protein, 10 aa, Artificial Sequence
  Peptide Derived from Human Papillomavirus
DKNSLKCLRY

SEQ ID NO: 19619 - protein, 9 aa, Artificial Sequence
  Peptide Derived from Human Papillomavirus
DKTAACVSY

SEQ ID NO: 19620 - protein, 10 aa, Artificial Sequence
  Peptide Derived from Human Papillomavirus
DKTAACVSYW

SEQ ID NO: 19621 - protein, 11 aa, Artificial Sequence
  Peptide Derived from Human Papillomavirus
EHGITKLNHQV

SEQ ID NO: 19622 - protein, 9 aa, Artificial Sequence
  Peptide Derived from Human Papillomavirus
EKYGNSNTW

SEQ ID NO: 19623 - protein, 11 aa, Artificial Sequence
  Peptide Derived from Human Papillomavirus
EKYGNSNTWEV

SEQ ID NO: 19624 - protein, 10 aa, Artificial Sequence
  Peptide Derived from Human Papillomavirus
ERLSALQDKI

SEQ ID NO: 19625 - protein, 11 aa, Artificial Sequence
  Peptide Derived from Human Papillomavirus
ERLSALQDKIL

SEQ ID NO: 19626 - protein, 8 aa, Artificial Sequence
  Peptide Derived from Human Papillomavirus
FKKGGKTV

SEQ ID NO: 19627 - protein, 10 aa, Artificial Sequence
  Peptide Derived from Human Papillomavirus
FKKGGKTVHV

SEQ ID NO: 19628 - protein, 11 aa, Artificial Sequence
  Peptide Derived from Human Papillomavirus
FKKGGKTVHVY

SEQ ID NO: 19629 - protein, 8 aa, Artificial Sequence
  Peptide Derived from Human Papillomavirus
FKSECEKY

SEQ ID NO: 19630 - protein, 8 aa, Artificial Sequence
  Peptide Derived from Human Papillomavirus
GKTVHVYF

SEQ ID NO: 19631 - protein, 11 aa, Artificial Sequence
  Peptide Derived from Human Papillomavirus
GRVNTHVHNPL

SEQ ID NO: 19632 - protein, 9 aa, Artificial Sequence
  Peptide Derived from Human Papillomavirus
HHGRVNTHV

SEQ ID NO: 19633 - protein, 8 aa, Artificial Sequence
  Peptide Derived from Human Papillomavirus
HKAIELQM

SEQ ID NO: 19634 - protein, 9 aa, Artificial Sequence
  Peptide Derived from Human Papillomavirus
HKAIELQMA

SEQ ID NO: 19635 - protein, 10 aa, Artificial Sequence
  Peptide Derived from Human Papillomavirus
HKAIELQMAL

SEQ ID NO: 19636 - protein, 10 aa, Artificial Sequence
  Peptide Derived from Human Papillomavirus
IHLKGDKNSL

SEQ ID NO: 19637 - protein, 8 aa, Artificial Sequence
  Peptide Derived from Human Papillomavirus
IKDGDTTY

SEQ ID NO: 19638 - protein, 9 aa, Artificial Sequence
  Peptide Derived from Human Papillomavirus
IKDGDTTYY

SEQ ID NO: 19639 - protein, 10 aa, Artificial Sequence
  Peptide Derived from Human Papillomavirus
IKDGDTTYYV

SEQ ID NO: 19640 - protein, 8 aa, Artificial Sequence
  Peptide Derived from Human Papillomavirus
IRLENAIL

SEQ ID NO: 19641 - protein, 9 aa, Artificial Sequence
  Peptide Derived from Human Papillomavirus
IRLENAILF

SEQ ID NO: 19642 - protein, 11 aa, Artificial Sequence
  Peptide Derived from Human Papillomavirus
IRLENAILFTA

SEQ ID NO: 19643 - protein, 9 aa, Artificial Sequence
  Peptide Derived from Human Papillomavirus
KKGGKTVHV

SEQ ID NO: 19644 - protein, 10 aa, Artificial Sequence
  Peptide Derived from Human Papillomavirus
KKGGKTVHVY

SEQ ID NO: 19645 - protein, 11 aa, Artificial Sequence
  Peptide Derived from Human Papillomavirus
KKGGKTVHVYF

SEQ ID NO: 19646 - protein, 8 aa, Artificial Sequence
  Peptide Derived from Human Papillomavirus
KRPRQCGL

SEQ ID NO: 19647 - protein, 8 aa, Artificial Sequence
  Peptide Derived from Human Papillomavirus
LKCLRYRL

SEQ ID NO: 19648 - protein, 11 aa, Artificial Sequence
  Peptide Derived from Human Papillomavirus
LKCLRYRLRKY

SEQ ID NO: 19649 - protein, 8 aa, Artificial Sequence
  Peptide Derived from Human Papillomavirus
LKGDKNSL

SEQ ID NO: 19650 - protein, 11 aa, Artificial Sequence
  Peptide Derived from Human Papillomavirus
LKGDKNSLKCL

SEQ ID NO: 19651 - protein, 9 aa, Artificial Sequence
  Peptide Derived from Human Papillomavirus
LKGLAQSKY

SEQ ID NO: 19652 - protein, 8 aa, Artificial Sequence
  Peptide Derived from Human Papillomavirus
LRKYADHY

SEQ ID NO: 19653 - protein, 11 aa, Artificial Sequence
  Peptide Derived from Human Papillomavirus
LRKYADHYSEI

SEQ ID NO: 19654 - protein, 8 aa, Artificial Sequence
  Peptide Derived from Human Papillomavirus
LRYRLRKY

SEQ ID NO: 19655 - protein, 9 aa, Artificial Sequence
  Peptide Derived from Human Papillomavirus
LRYRLRKYA

SEQ ID NO: 19656 - protein, 10 aa, Artificial Sequence
  Peptide Derived from Human Papillomavirus
MKMQTPKESL

SEQ ID NO: 19657 - protein, 8 aa, Artificial Sequence
  Peptide Derived from Human Papillomavirus
NHQVVPPI

SEQ ID NO: 19658 - protein, 10 aa, Artificial Sequence
  Peptide Derived from Human Papillomavirus
NHQVVPPINI

SEQ ID NO: 19659 - protein, 8 aa, Artificial Sequence
  Peptide Derived from Human Papillomavirus
NKDNCMNY

SEQ ID NO: 19660 - protein, 9 aa, Artificial Sequence
  Peptide Derived from Human Papillomavirus
NKDNCMNYV

SEQ ID NO: 19661 - protein, 10 aa, Artificial Sequence
  Peptide Derived from Human Papillomavirus
NKDNCMNYVV

SEQ ID NO: 19662 - protein, 11 aa, Artificial Sequence
  Peptide Derived from Human Papillomavirus
NKDNCMNYVVW

SEQ ID NO: 19663 - protein, 9 aa, Artificial Sequence
  Peptide Derived from Human Papillomavirus
NKNTGILTV

SEQ ID NO: 19664 - protein, 11 aa, Artificial Sequence
  Peptide Derived from Human Papillomavirus
NKNTGILTVTY

SEQ ID NO: 19665 - protein, 9 aa, Artificial Sequence
  Peptide Derived from Human Papillomavirus
PKESLSERL

SEQ ID NO: 19666 - protein, 11 aa, Artificial Sequence
  Peptide Derived from Human Papillomavirus
PKESLSERLSA

SEQ ID NO: 19667 - protein, 9 aa, Artificial Sequence
  Peptide Derived from Human Papillomavirus
PKPHIQTPA

SEQ ID NO: 19668 - protein, 11 aa, Artificial Sequence
  Peptide Derived from Human Papillomavirus
QHASTSTPKTA

SEQ ID NO: 19669 - protein, 10 aa, Artificial Sequence
  Peptide Derived from Human Papillomavirus
QHHGRVNTHV

SEQ ID NO: 19670 - protein, 8 aa, Artificial Sequence
  Peptide Derived from Human Papillomavirus
QRNTFLDV

SEQ ID NO: 19671 - protein, 9 aa, Artificial Sequence
  Peptide Derived from Human Papillomavirus
QRNTFLDVV

SEQ ID NO: 19672 - protein, 11 aa, Artificial Sequence
  Peptide Derived from Human Papillomavirus
QRNTFLDVVTI

SEQ ID NO: 19673 - protein, 11 aa, Artificial Sequence
  Peptide Derived from Human Papillomavirus
RKVCSGNTTPI

SEQ ID NO: 19674 - protein, 10 aa, Artificial Sequence
  Peptide Derived from Human Papillomavirus
RKYADHYSEI

SEQ ID NO: 19675 - protein, 9 aa, Artificial Sequence
  Peptide Derived from Human Papillomavirus
SKAHKAIEL

SEQ ID NO: 19676 - protein, 11 aa, Artificial Sequence
  Peptide Derived from Human Papillomavirus
SKAHKAIELQM

SEQ ID NO: 19677 - protein, 8 aa, Artificial Sequence
  Peptide Derived from Human Papillomavirus
SKDINSQI

SEQ ID NO: 19678 - protein, 10 aa, Artificial Sequence
  Peptide Derived from Human Papillomavirus
SKDINSQISY

SEQ ID NO: 19679 - protein, 11 aa, Artificial Sequence
  Peptide Derived from Human Papillomavirus
SKDINSQISYW

SEQ ID NO: 19680 - protein, 8 aa, Artificial Sequence
  Peptide Derived from Human Papillomavirus
SKSKAHKA

SEQ ID NO: 19681 - protein, 9 aa, Artificial Sequence
  Peptide Derived from Human Papillomavirus
SKSKAHKAI

SEQ ID NO: 19682 - protein, 11 aa, Artificial Sequence
  Peptide Derived from Human Papillomavirus
SKSKAHKAIEL

SEQ ID NO: 19683 - protein, 8 aa, Artificial Sequence
  Peptide Derived from Human Papillomavirus
SKYNNEEW

SEQ ID NO: 19684 - protein, 10 aa, Artificial Sequence
  Peptide Derived from Human Papillomavirus
SKYNNEEWTL

SEQ ID NO: 19685 - protein, 8 aa, Artificial Sequence
  Peptide Derived from Human Papillomavirus
THVHNPLL

SEQ ID NO: 19686 - protein, 8 aa, Artificial Sequence
  Peptide Derived from Human Papillomavirus
TKLNHQVV

SEQ ID NO: 19687 - protein, 11 aa, Artificial Sequence
  Peptide Derived from Human Papillomavirus
TKLNHQVVPPI

SEQ ID NO: 19688 - protein, 9 aa, Artificial Sequence
  Peptide Derived from Human Papillomavirus
TKRPRQCGL

SEQ ID NO: 19689 - protein, 10 aa, Artificial Sequence
  Peptide Derived from Human Papillomavirus
YRLRKYADHY

SEQ ID NO: 19690 - protein, 11 aa, Artificial Sequence
  Peptide Derived from Human Papillomavirus
ARFDDPTQRPY

SEQ ID NO: 19691 - protein, 8 aa, Artificial Sequence
  Peptide Derived from Human Papillomavirus
CHKCIDFY

SEQ ID NO: 19692 - protein, 11 aa, Artificial Sequence
  Peptide Derived from Human Papillomavirus
CHKCIDFYSRI

SEQ ID NO: 19693 - protein, 10 aa, Artificial Sequence
  Peptide Derived from Human Papillomavirus
CKATLERTEV

SEQ ID NO: 19694 - protein, 11 aa, Artificial Sequence
  Peptide Derived from Human Papillomavirus
CKATLERTEVY

SEQ ID NO: 19695 - protein, 8 aa, Artificial Sequence
  Peptide Derived from Human Papillomavirus
DKRRFHSI

SEQ ID NO: 19696 - protein, 9 aa, Artificial Sequence
  Peptide Derived from Human Papillomavirus
DKRRFHSIA

SEQ ID NO: 19697 - protein, 8 aa, Artificial Sequence
  Peptide Derived from Human Papillomavirus
EKITNTEL

SEQ ID NO: 19698 - protein, 9 aa, Artificial Sequence
  Peptide Derived from Human Papillomavirus
EKITNTELY

SEQ ID NO: 19699 - protein, 11 aa, Artificial Sequence
  Peptide Derived from Human Papillomavirus
EKITNTELYNL

SEQ ID NO: 19700 - protein, 11 aa, Artificial Sequence
  Peptide Derived from Human Papillomavirus
ERLRRRRETQV

SEQ ID NO: 19701 - protein, 8 aa, Artificial Sequence
  Peptide Derived from Human Papillomavirus
ERTEVYQF

SEQ ID NO: 19702 - protein, 9 aa, Artificial Sequence
  Peptide Derived from Human Papillomavirus
ERTEVYQFA

SEQ ID NO: 19703 - protein, 10 aa, Artificial Sequence
  Peptide Derived from Human Papillomavirus
ERTEVYQFAF

SEQ ID NO: 19704 - protein, 8 aa, Artificial Sequence
  Peptide Derived from Human Papillomavirus
FHSIAGQY

SEQ ID NO: 19705 - protein, 8 aa, Artificial Sequence
  Peptide Derived from Human Papillomavirus
FKDLFIVY

SEQ ID NO: 19706 - protein, 10 aa, Artificial Sequence
  Peptide Derived from Human Papillomavirus
HKCIDFYSRI

SEQ ID NO: 19707 - protein, 10 aa, Artificial Sequence
  Peptide Derived from Human Papillomavirus
IRCLRCQKPL

SEQ ID NO: 19708 - protein, 11 aa, Artificial Sequence
  Peptide Derived from Human Papillomavirus
IRELRYYSNSV

SEQ ID NO: 19709 - protein, 8 aa, Artificial Sequence
  Peptide Derived from Human Papillomavirus
KRRFHSIA

SEQ ID NO: 19710 - protein, 11 aa, Artificial Sequence
  Peptide Derived from Human Papillomavirus
KRRFHSIAGQY

SEQ ID NO: 19711 - protein, 11 aa, Artificial Sequence
  Peptide Derived from Human Papillomavirus
KRRHLKDKRRF

SEQ ID NO: 19712 - protein, 10 aa, Artificial Sequence
  Peptide Derived from Human Papillomavirus
LKDKRRFHSI

SEQ ID NO: 19713 - protein, 11 aa, Artificial Sequence
  Peptide Derived from Human Papillomavirus
LKDKRRFHSIA

SEQ ID NO: 19714 - protein, 10 aa, Artificial Sequence
  Peptide Derived from Human Papillomavirus
LRCQKPLNPA

SEQ ID NO: 19715 - protein, 9 aa, Artificial Sequence
  Peptide Derived from Human Papillomavirus
LRRRRETQV

SEQ ID NO: 19716 - protein, 8 aa, Artificial Sequence
  Peptide Derived from Human Papillomavirus
LRYYSNSV

SEQ ID NO: 19717 - protein, 9 aa, Artificial Sequence
  Peptide Derived from Human Papillomavirus
LRYYSNSVY

SEQ ID NO: 19718 - protein, 9 aa, Artificial Sequence
  Peptide Derived from Human Papillomavirus
QRPYKLPDL

SEQ ID NO: 19719 - protein, 9 aa, Artificial Sequence
  Peptide Derived from Human Papillomavirus
RHLKDKRRF

SEQ ID NO: 19720 - protein, 10 aa, Artificial Sequence
  Peptide Derived from Human Papillomavirus
RRFHSIAGQY

SEQ ID NO: 19721 - protein, 10 aa, Artificial Sequence
  Peptide Derived from Human Papillomavirus
RRHLKDKRRF

SEQ ID NO: 19722 - protein, 8 aa, Artificial Sequence
  Peptide Derived from Human Papillomavirus
RRRRETQV

SEQ ID NO: 19723 - protein, 8 aa, Artificial Sequence
  Peptide Derived from Human Papillomavirus
SRIRELRY

SEQ ID NO: 19724 - protein, 9 aa, Artificial Sequence
  Peptide Derived from Human Papillomavirus
SRIRELRYY

SEQ ID NO: 19725 - protein, 10 aa, Artificial Sequence
  Peptide Derived from Human Papillomavirus
YKLPDLCTEL

SEQ ID NO: 19726 - protein, 8 aa, Artificial Sequence
  Peptide Derived from Human Papillomavirus
YRDCIAYA

SEQ ID NO: 19727 - protein, 9 aa, Artificial Sequence
  Peptide Derived from Human Papillomavirus
YRDCIAYAA

SEQ ID NO: 19728 - protein, 11 aa, Artificial Sequence
  Peptide Derived from Human Papillomavirus
ARRAEPQRHKI

SEQ ID NO: 19729 - protein, 9 aa, Artificial Sequence
  Peptide Derived from Human Papillomavirus
CKCDGRIEL

SEQ ID NO: 19730 - protein, 11 aa, Artificial Sequence
  Peptide Derived from Human Papillomavirus
CKCDGRIELTV

SEQ ID NO: 19731 - protein, 11 aa, Artificial Sequence
  Peptide Derived from Human Papillomavirus
GRIELTVESSA

SEQ ID NO: 19732 - protein, 9 aa, Artificial Sequence
  Peptide Derived from Human Papillomavirus
LHLEPQNEL

SEQ ID NO: 19733 - protein, 8 aa, Artificial Sequence
  Peptide Derived from Human Papillomavirus
LRTLQQLF

SEQ ID NO: 19734 - protein, 9 aa, Artificial Sequence
  Peptide Derived from Human Papillomavirus
LRTLQQLFL

SEQ ID NO: 19735 - protein, 8 aa, Artificial Sequence
  Peptide Derived from Human Papillomavirus
MHGPRATL

SEQ ID NO: 19736 - protein, 11 aa, Artificial Sequence
  Peptide Derived from Human Papillomavirus
MHGPRATLQEI

SEQ ID NO: 19737 - protein, 8 aa, Artificial Sequence
  Peptide Derived from Human Papillomavirus
PRATLQEI

SEQ ID NO: 19738 - protein, 9 aa, Artificial Sequence
  Peptide Derived from Human Papillomavirus
PRATLQEIV

SEQ ID NO: 19739 - protein, 10 aa, Artificial Sequence
  Peptide Derived from Human Papillomavirus
PRATLQEIVL

SEQ ID NO: 19740 - protein, 8 aa, Artificial Sequence
  Peptide Derived from Human Papillomavirus
QRHKILCV

SEQ ID NO: 19741 - protein, 10 aa, Artificial Sequence
  Peptide Derived from Human Papillomavirus
RRAEPQRHKI

SEQ ID NO: 19742 - protein, 11 aa, Artificial Sequence
  Peptide Derived from Human Papillomavirus
RRAEPQRHKIL

SEQ ID NO: 19743 - protein, 10 aa, Artificial Sequence
  Peptide Derived from Human Papillomavirus
SHAQLPARRA

SEQ ID NO: 19744 - protein, 8 aa, Artificial Sequence
  Peptide Derived from Human Papillomavirus
AHAATAVI

SEQ ID NO: 19745 - protein, 10 aa, Artificial Sequence
  Peptide Derived from Human Papillomavirus
AHNIIYGHGI

SEQ ID NO: 19746 - protein, 11 aa, Artificial Sequence
  Peptide Derived from Human Papillomavirus
AHNIIYGHGII

SEQ ID NO: 19747 - protein, 9 aa, Artificial Sequence
  Peptide Derived from Human Papillomavirus
AKGTLCKPA

SEQ ID NO: 19748 - protein, 11 aa, Artificial Sequence
  Peptide Derived from Human Papillomavirus
AKGTLCKPAQL

SEQ ID NO: 19749 - protein, 8 aa, Artificial Sequence
  Peptide Derived from Human Papillomavirus
ARHFWNRA

SEQ ID NO: 19750 - protein, 10 aa, Artificial Sequence
  Peptide Derived from Human Papillomavirus
ARHFWNRAGV

SEQ ID NO: 19751 - protein, 11 aa, Artificial Sequence
  Peptide Derived from Human Papillomavirus
ARHFWNRAGVM

SEQ ID NO: 19752 - protein, 9 aa, Artificial Sequence
  Peptide Derived from Human Papillomavirus
ARVVNTDDY

SEQ ID NO: 19753 - protein, 10 aa, Artificial Sequence
  Peptide Derived from Human Papillomavirus
ARVVNTDDYV

SEQ ID NO: 19754 - protein, 9 aa, Artificial Sequence
  Peptide Derived from Human Papillomavirus
CKYPDYLQM

SEQ ID NO: 19755 - protein, 11 aa, Artificial Sequence
  Peptide Derived from Human Papillomavirus
CKYPDYLQMSA

SEQ ID NO: 19756 - protein, 8 aa, Artificial Sequence
  Peptide Derived from Human Papillomavirus
DKLKFWTV

SEQ ID NO: 19757 - protein, 10 aa, Artificial Sequence
  Peptide Derived from Human Papillomavirus
DKLKFWTVDL

SEQ ID NO: 19758 - protein, 8 aa, Artificial Sequence
  Peptide Derived from Human Papillomavirus
EHWAKGTL

SEQ ID NO: 19759 - protein, 10 aa, Artificial Sequence
  Peptide Derived from Human Papillomavirus
EKFSSDLDQY

SEQ ID NO: 19760 - protein, 9 aa, Artificial Sequence
  Peptide Derived from Human Papillomavirus
EKQDPYDKL

SEQ ID NO: 19761 - protein, 11 aa, Artificial Sequence
  Peptide Derived from Human Papillomavirus
EKQDPYDKLKF

SEQ ID NO: 19762 - protein, 8 aa, Artificial Sequence
  Peptide Derived from Human Papillomavirus
FKHYSRHV

SEQ ID NO: 19763 - protein, 11 aa, Artificial Sequence
  Peptide Derived from Human Papillomavirus
FKHYSRHVEEY

SEQ ID NO: 19764 - protein, 11 aa, Artificial Sequence
  Peptide Derived from Human Papillomavirus
FRVALPDPNKF

SEQ ID NO: 19765 - protein, 8 aa, Artificial Sequence
  Peptide Derived from Human Papillomavirus
FRVVPSGA

SEQ ID NO: 19766 - protein, 8 aa, Artificial Sequence
  Peptide Derived from Human Papillomavirus
GHGIIIFL

SEQ ID NO: 19767 - protein, 11 aa, Artificial Sequence
  Peptide Derived from Human Papillomavirus
GHGIIIFLKNV

SEQ ID NO: 19768 - protein, 8 aa, Artificial Sequence
  Peptide Derived from Human Papillomavirus
GHNNGICW

SEQ ID NO: 19769 - protein, 8 aa, Artificial Sequence
  Peptide Derived from Human Papillomavirus
GHPFYNKL

SEQ ID NO: 19770 - protein, 8 aa, Artificial Sequence
  Peptide Derived from Human Papillomavirus
GRGQPLGI

SEQ ID NO: 19771 - protein, 10 aa, Artificial Sequence
  Peptide Derived from Human Papillomavirus
GRGQPLGIGL

SEQ ID NO: 19772 - protein, 8 aa, Artificial Sequence
  Peptide Derived from Human Papillomavirus
GRKFLVQA

SEQ ID NO: 19773 - protein, 10 aa, Artificial Sequence
  Peptide Derived from Human Papillomavirus
GRKFLVQAGL

SEQ ID NO: 19774 - protein, 10 aa, Artificial Sequence
  Peptide Derived from Human Papillomavirus
HKAQGHNNGI

SEQ ID NO: 19775 - protein, 8 aa, Artificial Sequence
  Peptide Derived from Human Papillomavirus
IHSMNSSI

SEQ ID NO: 19776 - protein, 9 aa, Artificial Sequence
  Peptide Derived from Human Papillomavirus
IHSMNSSIL

SEQ ID NO: 19777 - protein, 8 aa, Artificial Sequence
  Peptide Derived from Human Papillomavirus
IKGTSANM

SEQ ID NO: 19778 - protein, 10 aa, Artificial Sequence
  Peptide Derived from Human Papillomavirus
KHYSRHVEEY

SEQ ID NO: 19779 - protein, 10 aa, Artificial Sequence
  Peptide Derived from Human Papillomavirus
KRPAASTSTA

SEQ ID NO: 19780 - protein, 11 aa, Artificial Sequence
  Peptide Derived from Human Papillomavirus
LHKAQGHNNGI

SEQ ID NO: 19781 - protein, 9 aa, Artificial Sequence
  Peptide Derived from Human Papillomavirus
LKEKFSSDL

SEQ ID NO: 19782 - protein, 8 aa, Artificial Sequence
  Peptide Derived from Human Papillomavirus
LKFWTVDL

SEQ ID NO: 19783 - protein, 11 aa, Artificial Sequence
  Peptide Derived from Human Papillomavirus
LKNTIIEDGDM

SEQ ID NO: 19784 - protein, 9 aa, Artificial Sequence
  Peptide Derived from Human Papillomavirus
LKNVNVFPI

SEQ ID NO: 19785 - protein, 10 aa, Artificial Sequence
  Peptide Derived from Human Papillomavirus
LKNVNVFPIF

SEQ ID NO: 19786 - protein, 11 aa, Artificial Sequence
  Peptide Derived from Human Papillomavirus
LKNVNVFPIFL

SEQ ID NO: 19787 - protein, 8 aa, Artificial Sequence
  Peptide Derived from Human Papillomavirus
LRREQLFA

SEQ ID NO: 19788 - protein, 11 aa, Artificial Sequence
  Peptide Derived from Human Papillomavirus
LRREQLFARHF

SEQ ID NO: 19789 - protein, 9 aa, Artificial Sequence
  Peptide Derived from Human Papillomavirus
MRETPGSCV

SEQ ID NO: 19790 - protein, 10 aa, Artificial Sequence
  Peptide Derived from Human Papillomavirus
MRETPGSCVY

SEQ ID NO: 19791 - protein, 10 aa, Artificial Sequence
  Peptide Derived from Human Papillomavirus
NKFGLPDSTI

SEQ ID NO: 19792 - protein, 11 aa, Artificial Sequence
  Peptide Derived from Human Papillomavirus
NKFGLPDSTIY

SEQ ID NO: 19793 - protein, 9 aa, Artificial Sequence
  Peptide Derived from Human Papillomavirus
NKLDDTESA

SEQ ID NO: 19794 - protein, 11 aa, Artificial Sequence
  Peptide Derived from Human Papillomavirus
NKLDDTESAHA

SEQ ID NO: 19795 - protein, 9 aa, Artificial Sequence
  Peptide Derived from Human Papillomavirus
NKPYWLHKA

SEQ ID NO: 19796 - protein, 8 aa, Artificial Sequence
  Peptide Derived from Human Papillomavirus
NKQAVPKV

SEQ ID NO: 19797 - protein, 10 aa, Artificial Sequence
  Peptide Derived from Human Papillomavirus
NKQAVPKVSA

SEQ ID NO: 19798 - protein, 11 aa, Artificial Sequence
  Peptide Derived from Human Papillomavirus
NKQAVPKVSAY

SEQ ID NO: 19799 - protein, 10 aa, Artificial Sequence
  Peptide Derived from Human Papillomavirus
NRAGVMGDTV

SEQ ID NO: 19800 - protein, 8 aa, Artificial Sequence
  Peptide Derived from Human Papillomavirus
PKVSAYQY

SEQ ID NO: 19801 - protein, 10 aa, Artificial Sequence
  Peptide Derived from Human Papillomavirus
PKVSAYQYRV

SEQ ID NO: 19802 - protein, 11 aa, Artificial Sequence
  Peptide Derived from Human Papillomavirus
PKVSAYQYRVF

SEQ ID NO: 19803 - protein, 8 aa, Artificial Sequence
  Peptide Derived from Human Papillomavirus
QRLVWACV

SEQ ID NO: 19804 - protein, 10 aa, Artificial Sequence
  Peptide Derived from Human Papillomavirus
QRLVWACVGM

SEQ ID NO: 19805 - protein, 9 aa, Artificial Sequence
  Peptide Derived from Human Papillomavirus
RHFWNRAGV

SEQ ID NO: 19806 - protein, 10 aa, Artificial Sequence
  Peptide Derived from Human Papillomavirus
RHFWNRAGVM

SEQ ID NO: 19807 - protein, 8 aa, Artificial Sequence
  Peptide Derived from Human Papillomavirus
RHVEEYDL

SEQ ID NO: 19808 - protein, 10 aa, Artificial Sequence
  Peptide Derived from Human Papillomavirus
RHVEEYDLQF

SEQ ID NO: 19809 - protein, 11 aa, Artificial Sequence
  Peptide Derived from Human Papillomavirus
RHVEEYDLQFI

SEQ ID NO: 19810 - protein, 9 aa, Artificial Sequence
  Peptide Derived from Human Papillomavirus
RKFLVQAGL

SEQ ID NO: 19811 - protein, 11 aa, Artificial Sequence
  Peptide Derived from Human Papillomavirus
RKRPAASTSTA

SEQ ID NO: 19812 - protein, 10 aa, Artificial Sequence
  Peptide Derived from Human Papillomavirus
RREQLFARHF

SEQ ID NO: 19813 - protein, 11 aa, Artificial Sequence
  Peptide Derived from Human Papillomavirus
RREQLFARHFW

SEQ ID NO: 19814 - protein, 9 aa, Artificial Sequence
  Peptide Derived from Human Papillomavirus
SRHVEEYDL

SEQ ID NO: 19815 - protein, 11 aa, Artificial Sequence
  Peptide Derived from Human Papillomavirus
SRHVEEYDLQF

SEQ ID NO: 19816 - protein, 10 aa, Artificial Sequence
  Peptide Derived from Human Papillomavirus
SRLLTVGNPY

SEQ ID NO: 19817 - protein, 11 aa, Artificial Sequence
  Peptide Derived from Human Papillomavirus
SRLLTVGNPYF

SEQ ID NO: 19818 - protein, 9 aa, Artificial Sequence
  Peptide Derived from Human Papillomavirus
SRPAKRVRI

SEQ ID NO: 19819 - protein, 9 aa, Artificial Sequence
  Peptide Derived from Human Papillomavirus
SRTSIFYHA

SEQ ID NO: 19820 - protein, 9 aa, Artificial Sequence
  Peptide Derived from Human Papillomavirus
TKCEVPLDI

SEQ ID NO: 19821 - protein, 10 aa, Artificial Sequence
  Peptide Derived from Human Papillomavirus
TKFKHYSRHV

SEQ ID NO: 19822 - protein, 8 aa, Artificial Sequence
  Peptide Derived from Human Papillomavirus
TRSTNLTL

SEQ ID NO: 19823 - protein, 10 aa, Artificial Sequence
  Peptide Derived from Human Papillomavirus
TRSTNLTLCA

SEQ ID NO: 19824 - protein, 9 aa, Artificial Sequence
  Peptide Derived from Human Papillomavirus
VRDNVSVDY

SEQ ID NO: 19825 - protein, 9 aa, Artificial Sequence
  Peptide Derived from Human Papillomavirus
WHNQLFVTV

SEQ ID NO: 19826 - protein, 10 aa, Artificial Sequence
  Peptide Derived from Human Papillomavirus
WHNQLFVTVV

SEQ ID NO: 19827 - protein, 8 aa, Artificial Sequence
  Peptide Derived from Human Papillomavirus
WRPSDSTV

SEQ ID NO: 19828 - protein, 9 aa, Artificial Sequence
  Peptide Derived from Human Papillomavirus
WRPSDSTVY

SEQ ID NO: 19829 - protein, 10 aa, Artificial Sequence
  Peptide Derived from Human Papillomavirus
WRPSDSTVYL

SEQ ID NO: 19830 - protein, 8 aa, Artificial Sequence
  Peptide Derived from Human Papillomavirus
YHAGSSRL

SEQ ID NO: 19831 - protein, 9 aa, Artificial Sequence
  Peptide Derived from Human Papillomavirus
YHAGSSRLL

SEQ ID NO: 19832 - protein, 11 aa, Artificial Sequence
  Peptide Derived from Human Papillomavirus
YHAGSSRLLTV

SEQ ID NO: 19833 - protein, 8 aa, Artificial Sequence
  Peptide Derived from Human Papillomavirus
YKQTQLCI

SEQ ID NO: 19834 - protein, 9 aa, Artificial Sequence
  Peptide Derived from Human Papillomavirus
YKQTQLCIL

SEQ ID NO: 19835 - protein, 8 aa, Artificial Sequence
  Peptide Derived from Human Papillomavirus
YRFVQSVA

SEQ ID NO: 19836 - protein, 9 aa, Artificial Sequence
  Peptide Derived from Human Papillomavirus
YRFVQSVAV

SEQ ID NO: 19837 - protein, 8 aa, Artificial Sequence
  Peptide Derived from Human Papillomavirus
YRVFRVAL

SEQ ID NO: 19838 - protein, 8 aa, Artificial Sequence
  Peptide Derived from Human Papillomavirus
ARRKRASA

SEQ ID NO: 19839 - protein, 11 aa, Artificial Sequence
  Peptide Derived from Human Papillomavirus
ARRKRASATDL

SEQ ID NO: 19840 - protein, 11 aa, Artificial Sequence
  Peptide Derived from Human Papillomavirus
CKQSGTCPPDV

SEQ ID NO: 19841 - protein, 9 aa, Artificial Sequence
  Peptide Derived from Human Papillomavirus
DKILQWSSL

SEQ ID NO: 19842 - protein, 11 aa, Artificial Sequence
  Peptide Derived from Human Papillomavirus
DKILQWSSLGI

SEQ ID NO: 19843 - protein, 8 aa, Artificial Sequence
  Peptide Derived from Human Papillomavirus
GKQIGGRV

SEQ ID NO: 19844 - protein, 10 aa, Artificial Sequence
  Peptide Derived from Human Papillomavirus
GKQIGGRVHF

SEQ ID NO: 19845 - protein, 11 aa, Artificial Sequence
  Peptide Derived from Human Papillomavirus
GKQIGGRVHFY

SEQ ID NO: 19846 - protein, 9 aa, Artificial Sequence
  Peptide Derived from Human Papillomavirus
GRSNTVVDV

SEQ ID NO: 19847 - protein, 8 aa, Artificial Sequence
  Peptide Derived from Human Papillomavirus
GRTGYVPL

SEQ ID NO: 19848 - protein, 9 aa, Artificial Sequence
  Peptide Derived from Human Papillomavirus
GRVHFYHDI

SEQ ID NO: 19849 - protein, 9 aa, Artificial Sequence
  Peptide Derived from Human Papillomavirus
HKSFTYPKY

SEQ ID NO: 19850 - protein, 11 aa, Artificial Sequence
  Peptide Derived from Human Papillomavirus
HKSFTYPKYSL

SEQ ID NO: 19851 - protein, 9 aa, Artificial Sequence
  Peptide Derived from Human Papillomavirus
HRAARRKRA

SEQ ID NO: 19852 - protein, 11 aa, Artificial Sequence
  Peptide Derived from Human Papillomavirus
HRAARRKRASA

SEQ ID NO: 19853 - protein, 8 aa, Artificial Sequence
  Peptide Derived from Human Papillomavirus
IHGTQYYL

SEQ ID NO: 19854 - protein, 9 aa, Artificial Sequence
  Peptide Derived from Human Papillomavirus
IHGTQYYLW

SEQ ID NO: 19855 - protein, 11 aa, Artificial Sequence
  Peptide Derived from Human Papillomavirus
IHGTQYYLWPW

SEQ ID NO: 19856 - protein, 10 aa, Artificial Sequence
  Peptide Derived from Human Papillomavirus
IHKSFTYPKY

SEQ ID NO: 19857 - protein, 8 aa, Artificial Sequence
  Peptide Derived from Human Papillomavirus
IRLHRPAL

SEQ ID NO: 19858 - protein, 8 aa, Artificial Sequence
  Peptide Derived from Human Papillomavirus
KKRKRIPY

SEQ ID NO: 19859 - protein, 9 aa, Artificial Sequence
  Peptide Derived from Human Papillomavirus
KKRKRIPYF

SEQ ID NO: 19860 - protein, 10 aa, Artificial Sequence
  Peptide Derived from Human Papillomavirus
KKRKRIPYFF

SEQ ID NO: 19861 - protein, 11 aa, Artificial Sequence
  Peptide Derived from Human Papillomavirus
KKRKRIPYFFA

SEQ ID NO: 19862 - protein, 8 aa, Artificial Sequence
  Peptide Derived from Human Papillomavirus
KRASATDL

SEQ ID NO: 19863 - protein, 9 aa, Artificial Sequence
  Peptide Derived from Human Papillomavirus
KRASATDLY

SEQ ID NO: 19864 - protein, 8 aa, Artificial Sequence
  Peptide Derived from Human Papillomavirus
KRIPYFFA

SEQ ID NO: 19865 - protein, 11 aa, Artificial Sequence
  Peptide Derived from Human Papillomavirus
KRIPYFFADGF

SEQ ID NO: 19866 - protein, 8 aa, Artificial Sequence
  Peptide Derived from Human Papillomavirus
KRKRIPYF

SEQ ID NO: 19867 - protein, 9 aa, Artificial Sequence
  Peptide Derived from Human Papillomavirus
KRKRIPYFF

SEQ ID NO: 19868 - protein, 10 aa, Artificial Sequence
  Peptide Derived from Human Papillomavirus
KRKRIPYFFA

SEQ ID NO: 19869 - protein, 8 aa, Artificial Sequence
  Peptide Derived from Human Papillomavirus
NKVEGTTL

SEQ ID NO: 19870 - protein, 9 aa, Artificial Sequence
  Peptide Derived from Human Papillomavirus
NKVEGTTLA

SEQ ID NO: 19871 - protein, 9 aa, Artificial Sequence
  Peptide Derived from Human Papillomavirus
PKKRKRIPY

SEQ ID NO: 19872 - protein, 10 aa, Artificial Sequence
  Peptide Derived from Human Papillomavirus
PKKRKRIPYF

SEQ ID NO: 19873 - protein, 11 aa, Artificial Sequence
  Peptide Derived from Human Papillomavirus
PKKRKRIPYFF

SEQ ID NO: 19874 - protein, 11 aa, Artificial Sequence
  Peptide Derived from Human Papillomavirus
PKYSLTMPSTA

SEQ ID NO: 19875 - protein, 11 aa, Artificial Sequence
  Peptide Derived from Human Papillomavirus
PRLYSRANQQV

SEQ ID NO: 19876 - protein, 9 aa, Artificial Sequence
  Peptide Derived from Human Papillomavirus
RKRASATDL

SEQ ID NO: 19877 - protein, 10 aa, Artificial Sequence
  Peptide Derived from Human Papillomavirus
RKRASATDLY

SEQ ID NO: 19878 - protein, 8 aa, Artificial Sequence
  Peptide Derived from Human Papillomavirus
RKRIPYFF

SEQ ID NO: 19879 - protein, 9 aa, Artificial Sequence
  Peptide Derived from Human Papillomavirus
RKRIPYFFA

SEQ ID NO: 19880 - protein, 10 aa, Artificial Sequence
  Peptide Derived from Human Papillomavirus
RRGTVRFSRL

SEQ ID NO: 19881 - protein, 10 aa, Artificial Sequence
  Peptide Derived from Human Papillomavirus
RRKRASATDL

SEQ ID NO: 19882 - protein, 11 aa, Artificial Sequence
  Peptide Derived from Human Papillomavirus
RRKRASATDLY

SEQ ID NO: 19883 - protein, 8 aa, Artificial Sequence
  Peptide Derived from Human Papillomavirus
RRVRGPRL

SEQ ID NO: 19884 - protein, 9 aa, Artificial Sequence
  Peptide Derived from Human Papillomavirus
RRVRGPRLY

SEQ ID NO: 19885 - protein, 9 aa, Artificial Sequence
  Peptide Derived from Human Papillomavirus
SHGYEEIPL

SEQ ID NO: 19886 - protein, 10 aa, Artificial Sequence
  Peptide Derived from Human Papillomavirus
SHRAARRKRA

SEQ ID NO: 19887 - protein, 9 aa, Artificial Sequence
  Peptide Derived from Human Papillomavirus
SRANQQVRV

SEQ ID NO: 19888 - protein, 9 aa, Artificial Sequence
  Peptide Derived from Human Papillomavirus
SRLGQRATM

SEQ ID NO: 19889 - protein, 10 aa, Artificial Sequence
  Peptide Derived from Human Papillomavirus
SRLGQRATMF

SEQ ID NO: 19890 - protein, 8 aa, Artificial Sequence
  Peptide Derived from Human Papillomavirus
SRRGTVRF

SEQ ID NO: 19891 - protein, 11 aa, Artificial Sequence
  Peptide Derived from Human Papillomavirus
SRRGTVRFSRL

SEQ ID NO: 19892 - protein, 9 aa, Artificial Sequence
  Peptide Derived from Human Papillomavirus
THPSSLVTF

SEQ ID NO: 19893 - protein, 10 aa, Artificial Sequence
  Peptide Derived from Human Papillomavirus
TRPPVVIEPV

SEQ ID NO: 19894 - protein, 11 aa, Artificial Sequence
  Peptide Derived from Human Papillomavirus
TRSGKQIGGRV

SEQ ID NO: 19895 - protein, 10 aa, Artificial Sequence
  Peptide Derived from Human Papillomavirus
VHFYHDISPI

SEQ ID NO: 19896 - protein, 11 aa, Artificial Sequence
  Peptide Derived from Human Papillomavirus
VHFYHDISPIA

SEQ ID NO: 19897 - protein, 10 aa, Artificial Sequence
  Peptide Derived from Human Papillomavirus
VRFSRLGQRA

SEQ ID NO: 19898 - protein, 10 aa, Artificial Sequence
  Peptide Derived from Human Papillomavirus
VRGPRLYSRA

SEQ ID NO: 19899 - protein, 9 aa, Artificial Sequence
  Peptide Derived from Human Papillomavirus
VRRVRGPRL

SEQ ID NO: 19900 - protein, 10 aa, Artificial Sequence
  Peptide Derived from Human Papillomavirus
VRRVRGPRLY

SEQ ID NO: 19901 - protein, 8 aa, Artificial Sequence
  Peptide Derived from Human Papillomavirus
VRVSTSQF

SEQ ID NO: 19902 - protein, 9 aa, Artificial Sequence
  Peptide Derived from Human Papillomavirus
VRVSTSQFL

SEQ ID NO: 19903 - protein, 8 aa, Artificial Sequence
  Peptide Derived from Human Papillomavirus
YHDISPIA

SEQ ID NO: 19904 - protein, 9 aa, Artificial Sequence
  Peptide Derived from Human Papillomavirus
YHDISPIAA

SEQ ID NO: 19905 - protein, 9 aa, Artificial Sequence
  Peptide Derived from Human Papillomavirus
AKACSAIEV

SEQ ID NO: 19906 - protein, 11 aa, Artificial Sequence
  Peptide Derived from Human Papillomavirus
AKACSAIEVQI

SEQ ID NO: 19907 - protein, 10 aa, Artificial Sequence
  Peptide Derived from Human Papillomavirus
AKCVTTHTHI

SEQ ID NO: 19908 - protein, 9 aa, Artificial Sequence
  Peptide Derived from Human Papillomavirus
AKKFGCKNI

SEQ ID NO: 19909 - protein, 10 aa, Artificial Sequence
  Peptide Derived from Human Papillomavirus
AKKFGCKNIW

SEQ ID NO: 19910 - protein, 8 aa, Artificial Sequence
  Peptide Derived from Human Papillomavirus
CKAKACSA

SEQ ID NO: 19911 - protein, 9 aa, Artificial Sequence
  Peptide Derived from Human Papillomavirus
CKAKACSAI

SEQ ID NO: 19912 - protein, 11 aa, Artificial Sequence
  Peptide Derived from Human Papillomavirus
CKAKACSAIEV

SEQ ID NO: 19913 - protein, 9 aa, Artificial Sequence
  Peptide Derived from Human Papillomavirus
CKNIWEVHM

SEQ ID NO: 19914 - protein, 8 aa, Artificial Sequence
  Peptide Derived from Human Papillomavirus
CRYNVSPV

SEQ ID NO: 19915 - protein, 11 aa, Artificial Sequence
  Peptide Derived from Human Papillomavirus
CRYNVSPVETV

SEQ ID NO: 19916 - protein, 8 aa, Artificial Sequence
  Peptide Derived from Human Papillomavirus
CRYRFQKY

SEQ ID NO: 19917 - protein, 11 aa, Artificial Sequence
  Peptide Derived from Human Papillomavirus
CRYRFQKYKTL

SEQ ID NO: 19918 - protein, 9 aa, Artificial Sequence
  Peptide Derived from Human Papillomavirus
DKTTPVVHL

SEQ ID NO: 19919 - protein, 8 aa, Artificial Sequence
  Peptide Derived from Human Papillomavirus
FKKEGQHI

SEQ ID NO: 19920 - protein, 10 aa, Artificial Sequence
  Peptide Derived from Human Papillomavirus
FKKEGQHIEV

SEQ ID NO: 19921 - protein, 11 aa, Artificial Sequence
  Peptide Derived from Human Papillomavirus
FKKEGQHIEVW

SEQ ID NO: 19922 - protein, 9 aa, Artificial Sequence
  Peptide Derived from Human Papillomavirus
GHKTYYTDF

SEQ ID NO: 19923 - protein, 11 aa, Artificial Sequence
  Peptide Derived from Human Papillomavirus
GKRPRLRESEF

SEQ ID NO: 19924 - protein, 11 aa, Artificial Sequence
  Peptide Derived from Human Papillomavirus
HKTTTTTSTSV

SEQ ID NO: 19925 - protein, 8 aa, Artificial Sequence
  Peptide Derived from Human Papillomavirus
HKTYYTDF

SEQ ID NO: 19926 - protein, 9 aa, Artificial Sequence
  Peptide Derived from Human Papillomavirus
HRPGKRPRL

SEQ ID NO: 19927 - protein, 11 aa, Artificial Sequence
  Peptide Derived from Human Papillomavirus
KKCFKKEGQHI

SEQ ID NO: 19928 - protein, 9 aa, Artificial Sequence
  Peptide Derived from Human Papillomavirus
KKEGQHIEV

SEQ ID NO: 19929 - protein, 10 aa, Artificial Sequence
  Peptide Derived from Human Papillomavirus
KKEGQHIEVW

SEQ ID NO: 19930 - protein, 11 aa, Artificial Sequence
  Peptide Derived from Human Papillomavirus
KKEGQHIEVWF

SEQ ID NO: 19931 - protein, 8 aa, Artificial Sequence
  Peptide Derived from Human Papillomavirus
KKFGCKNI

SEQ ID NO: 19932 - protein, 9 aa, Artificial Sequence
  Peptide Derived from Human Papillomavirus
KKFGCKNIW

SEQ ID NO: 19933 - protein, 11 aa, Artificial Sequence
  Peptide Derived from Human Papillomavirus
KKFGCKNIWEV

SEQ ID NO: 19934 - protein, 10 aa, Artificial Sequence
  Peptide Derived from Human Papillomavirus
KRPRLRESEF

SEQ ID NO: 19935 - protein, 8 aa, Artificial Sequence
  Peptide Derived from Human Papillomavirus
LKCCRYRF

SEQ ID NO: 19936 - protein, 11 aa, Artificial Sequence
  Peptide Derived from Human Papillomavirus
LKCCRYRFQKY

SEQ ID NO: 19937 - protein, 8 aa, Artificial Sequence
  Peptide Derived from Human Papillomavirus
LKGEPNRL

SEQ ID NO: 19938 - protein, 8 aa, Artificial Sequence
  Peptide Derived from Human Papillomavirus
LRDTCEEL

SEQ ID NO: 19939 - protein, 9 aa, Artificial Sequence
  Peptide Derived from Human Papillomavirus
LRDTCEELW

SEQ ID NO: 19940 - protein, 10 aa, Artificial Sequence
  Peptide Derived from Human Papillomavirus
LRDTCEELWL

SEQ ID NO: 19941 - protein, 10 aa, Artificial Sequence
  Peptide Derived from Human Papillomavirus
NHPGDKTTPV

SEQ ID NO: 19942 - protein, 11 aa, Artificial Sequence
  Peptide Derived from Human Papillomavirus
NHPGDKTTPVV

SEQ ID NO: 19943 - protein, 9 aa, Artificial Sequence
  Peptide Derived from Human Papillomavirus
NKNYSIITI

SEQ ID NO: 19944 - protein, 10 aa, Artificial Sequence
  Peptide Derived from Human Papillomavirus
NKNYSIITII

SEQ ID NO: 19945 - protein, 11 aa, Artificial Sequence
  Peptide Derived from Human Papillomavirus
NKNYSIITIIY

SEQ ID NO: 19946 - protein, 8 aa, Artificial Sequence
  Peptide Derived from Human Papillomavirus
NRLKCCRY

SEQ ID NO: 19947 - protein, 10 aa, Artificial Sequence
  Peptide Derived from Human Papillomavirus
NRLKCCRYRF

SEQ ID NO: 19948 - protein, 8 aa, Artificial Sequence
  Peptide Derived from Human Papillomavirus
PRLRESEF

SEQ ID NO: 19949 - protein, 9 aa, Artificial Sequence
  Peptide Derived from Human Papillomavirus
QKVCSGVDY

SEQ ID NO: 19950 - protein, 8 aa, Artificial Sequence
  Peptide Derived from Human Papillomavirus
QKYKTLFV

SEQ ID NO: 19951 - protein, 10 aa, Artificial Sequence
  Peptide Derived from Human Papillomavirus
QKYKTLFVDV

SEQ ID NO: 19952 - protein, 9 aa, Artificial Sequence
  Peptide Derived from Human Papillomavirus
QRNSFLSHV

SEQ ID NO: 19953 - protein, 11 aa, Artificial Sequence
  Peptide Derived from Human Papillomavirus
QRNSFLSHVKI

SEQ ID NO: 19954 - protein, 10 aa, Artificial Sequence
  Peptide Derived from Human Papillomavirus
SHRPGKRPRL

SEQ ID NO: 19955 - protein, 8 aa, Artificial Sequence
  Peptide Derived from Human Papillomavirus
SHVKIPVV

SEQ ID NO: 19956 - protein, 9 aa, Artificial Sequence
  Peptide Derived from Human Papillomavirus
SHVKIPVVY

SEQ ID NO: 19957 - protein, 11 aa, Artificial Sequence
  Peptide Derived from Human Papillomavirus
SHVKIPVVYRL

SEQ ID NO: 19958 - protein, 8 aa, Artificial Sequence
  Peptide Derived from Human Papillomavirus
SKNNCMQY

SEQ ID NO: 19959 - protein, 9 aa, Artificial Sequence
  Peptide Derived from Human Papillomavirus
SKNNCMQYV

SEQ ID NO: 19960 - protein, 10 aa, Artificial Sequence
  Peptide Derived from Human Papillomavirus
SKNNCMQYVA

SEQ ID NO: 19961 - protein, 11 aa, Artificial Sequence
  Peptide Derived from Human Papillomavirus
SKNNCMQYVAW

SEQ ID NO: 19962 - protein, 9 aa, Artificial Sequence
  Peptide Derived from Human Papillomavirus
SRESHAKCV

SEQ ID NO: 19963 - protein, 8 aa, Artificial Sequence
  Peptide Derived from Human Papillomavirus
VHDGHKTY

SEQ ID NO: 19964 - protein, 9 aa, Artificial Sequence
  Peptide Derived from Human Papillomavirus
VHDGHKTYY

SEQ ID NO: 19965 - protein, 10 aa, Artificial Sequence
  Peptide Derived from Human Papillomavirus
VHLKGEPNRL

SEQ ID NO: 19966 - protein, 8 aa, Artificial Sequence
  Peptide Derived from Human Papillomavirus
VHMENESI

SEQ ID NO: 19967 - protein, 9 aa, Artificial Sequence
  Peptide Derived from Human Papillomavirus
VHMENESIY

SEQ ID NO: 19968 - protein, 9 aa, Artificial Sequence
  Peptide Derived from Human Papillomavirus
VKIPVVYRL

SEQ ID NO: 19969 - protein, 10 aa, Artificial Sequence
  Peptide Derived from Human Papillomavirus
VKIPVVYRLV

SEQ ID NO: 19970 - protein, 11 aa, Artificial Sequence
  Peptide Derived from Human Papillomavirus
VKIPVVYRLVW

SEQ ID NO: 19971 - protein, 11 aa, Artificial Sequence
  Peptide Derived from Human Papillomavirus
YHWTSTDNKNY

SEQ ID NO: 19972 - protein, 10 aa, Artificial Sequence
  Peptide Derived from Human Papillomavirus
YKDETQRNSF

SEQ ID NO: 19973 - protein, 11 aa, Artificial Sequence
  Peptide Derived from Human Papillomavirus
YKDETQRNSFL

SEQ ID NO: 19974 - protein, 8 aa, Artificial Sequence
  Peptide Derived from Human Papillomavirus
YKTLFVDV

SEQ ID NO: 19975 - protein, 9 aa, Artificial Sequence
  Peptide Derived from Human Papillomavirus
YRFQKYKTL

SEQ ID NO: 19976 - protein, 10 aa, Artificial Sequence
  Peptide Derived from Human Papillomavirus
YRFQKYKTLF

SEQ ID NO: 19977 - protein, 11 aa, Artificial Sequence
  Peptide Derived from Human Papillomavirus
YRFQKYKTLFV

SEQ ID NO: 19978 - protein, 9 aa, Artificial Sequence
  Peptide Derived from Human Papillomavirus
AHGWTGSCL

SEQ ID NO: 19979 - protein, 8 aa, Artificial Sequence
  Peptide Derived from Human Papillomavirus
CKKELTRA

SEQ ID NO: 19980 - protein, 10 aa, Artificial Sequence
  Peptide Derived from Human Papillomavirus
CKKELTRAEV

SEQ ID NO: 19981 - protein, 11 aa, Artificial Sequence
  Peptide Derived from Human Papillomavirus
CKKELTRAEVY

SEQ ID NO: 19982 - protein, 8 aa, Artificial Sequence
  Peptide Derived from Human Papillomavirus
CRVCLLFY

SEQ ID NO: 19983 - protein, 11 aa, Artificial Sequence
  Peptide Derived from Human Papillomavirus
CRVCLLFYSKV

SEQ ID NO: 19984 - protein, 8 aa, Artificial Sequence
  Peptide Derived from Human Papillomavirus
DRKRRFHL

SEQ ID NO: 19985 - protein, 9 aa, Artificial Sequence
  Peptide Derived from Human Papillomavirus
DRKRRFHLI

SEQ ID NO: 19986 - protein, 10 aa, Artificial Sequence
  Peptide Derived from Human Papillomavirus
DRKRRFHLIA

SEQ ID NO: 19987 - protein, 9 aa, Artificial Sequence
  Peptide Derived from Human Papillomavirus
ERPRSLHHL

SEQ ID NO: 19988 - protein, 8 aa, Artificial Sequence
  Peptide Derived from Human Papillomavirus
FHLIAHGW

SEQ ID NO: 19989 - protein, 9 aa, Artificial Sequence
  Peptide Derived from Human Papillomavirus
HHLSEVLEI

SEQ ID NO: 19990 - protein, 11 aa, Artificial Sequence
  Peptide Derived from Human Papillomavirus
HHLSEVLEIPL

SEQ ID NO: 19991 - protein, 10 aa, Artificial Sequence
  Peptide Derived from Human Papillomavirus
IRCYRCQSPL

SEQ ID NO: 19992 - protein, 9 aa, Artificial Sequence
  Peptide Derived from Human Papillomavirus
KKELTRAEV

SEQ ID NO: 19993 - protein, 10 aa, Artificial Sequence
  Peptide Derived from Human Papillomavirus
KKELTRAEVY

SEQ ID NO: 19994 - protein, 8 aa, Artificial Sequence
  Peptide Derived from Human Papillomavirus
KKQLCDLL

SEQ ID NO: 19995 - protein, 9 aa, Artificial Sequence
  Peptide Derived from Human Papillomavirus
KKQLCDLLI

SEQ ID NO: 19996 - protein, 8 aa, Artificial Sequence
  Peptide Derived from Human Papillomavirus
KRRFHLIA

SEQ ID NO: 19997 - protein, 11 aa, Artificial Sequence
  Peptide Derived from Human Papillomavirus
KRRFHLIAHGW

SEQ ID NO: 19998 - protein, 9 aa, Artificial Sequence
  Peptide Derived from Human Papillomavirus
LHCDRKRRF

SEQ ID NO: 19999 - protein, 11 aa, Artificial Sequence
  Peptide Derived from Human Papillomavirus
LHCDRKRRFHL

SEQ ID NO: 20000 - protein, 8 aa, Artificial Sequence
  Peptide Derived from Human Papillomavirus
LHHLSEVL

SEQ ID NO: 20001 - protein, 10 aa, Artificial Sequence
  Peptide Derived from Human Papillomavirus
LHHLSEVLEI

SEQ ID NO: 20002 - protein, 9 aa, Artificial Sequence
  Peptide Derived from Human Papillomavirus
LKLVYRDDF

SEQ ID NO: 20003 - protein, 11 aa, Artificial Sequence
  Peptide Derived from Human Papillomavirus
LKLVYRDDFPY

SEQ ID NO: 20004 - protein, 10 aa, Artificial Sequence
  Peptide Derived from Human Papillomavirus
PRSLHHLSEV

SEQ ID NO: 20005 - protein, 11 aa, Artificial Sequence
  Peptide Derived from Human Papillomavirus
PRSLHHLSEVL

SEQ ID NO: 20006 - protein, 8 aa, Artificial Sequence
  Peptide Derived from Human Papillomavirus
RKRRFHLI

SEQ ID NO: 20007 - protein, 9 aa, Artificial Sequence
  Peptide Derived from Human Papillomavirus
RKRRFHLIA

SEQ ID NO: 20008 - protein, 8 aa, Artificial Sequence
  Peptide Derived from Human Papillomavirus
RKYRYYDY

SEQ ID NO: 20009 - protein, 10 aa, Artificial Sequence
  Peptide Derived from Human Papillomavirus
RKYRYYDYSV

SEQ ID NO: 20010 - protein, 11 aa, Artificial Sequence
  Peptide Derived from Human Papillomavirus
RKYRYYDYSVY

SEQ ID NO: 20011 - protein, 10 aa, Artificial Sequence
  Peptide Derived from Human Papillomavirus
RRFHLIAHGW

SEQ ID NO: 20012 - protein, 8 aa, Artificial Sequence
  Peptide Derived from Human Papillomavirus
SKVRKYRY

SEQ ID NO: 20013 - protein, 9 aa, Artificial Sequence
  Peptide Derived from Human Papillomavirus
SKVRKYRYY

SEQ ID NO: 20014 - protein, 11 aa, Artificial Sequence
  Peptide Derived from Human Papillomavirus
SKVRKYRYYDY

SEQ ID NO: 20015 - protein, 9 aa, Artificial Sequence
  Peptide Derived from Human Papillomavirus
SREPRESTV

SEQ ID NO: 20016 - protein, 8 aa, Artificial Sequence
  Peptide Derived from Human Papillomavirus
TKKQLCDL

SEQ ID NO: 20017 - protein, 9 aa, Artificial Sequence
  Peptide Derived from Human Papillomavirus
TKKQLCDLL

SEQ ID NO: 20018 - protein, 10 aa, Artificial Sequence
  Peptide Derived from Human Papillomavirus
TKKQLCDLLI

SEQ ID NO: 20019 - protein, 8 aa, Artificial Sequence
  Peptide Derived from Human Papillomavirus
TRAEVYNF

SEQ ID NO: 20020 - protein, 9 aa, Artificial Sequence
  Peptide Derived from Human Papillomavirus
TRAEVYNFA

SEQ ID NO: 20021 - protein, 9 aa, Artificial Sequence
  Peptide Derived from Human Papillomavirus
VRKYRYYDY

SEQ ID NO: 20022 - protein, 11 aa, Artificial Sequence
  Peptide Derived from Human Papillomavirus
VRKYRYYDYSV

SEQ ID NO: 20023 - protein, 8 aa, Artificial Sequence
  Peptide Derived from Human Papillomavirus
YRDDFPYA

SEQ ID NO: 20024 - protein, 9 aa, Artificial Sequence
  Peptide Derived from Human Papillomavirus
YRDDFPYAV

SEQ ID NO: 20025 - protein, 8 aa, Artificial Sequence
  Peptide Derived from Human Papillomavirus
YRYYDYSV

SEQ ID NO: 20026 - protein, 9 aa, Artificial Sequence
  Peptide Derived from Human Papillomavirus
YRYYDYSVY

SEQ ID NO: 20027 - protein, 11 aa, Artificial Sequence
  Peptide Derived from Human Papillomavirus
YRYYDYSVYGA

SEQ ID NO: 20028 - protein, 8 aa, Artificial Sequence
  Peptide Derived from Human Papillomavirus
AKQHTCYL

SEQ ID NO: 20029 - protein, 9 aa, Artificial Sequence
  Peptide Derived from Human Papillomavirus
AKQHTCYLI

SEQ ID NO: 20030 - protein, 11 aa, Artificial Sequence
  Peptide Derived from Human Papillomavirus
AKQHTCYLIHV

SEQ ID NO: 20031 - protein, 10 aa, Artificial Sequence
  Peptide Derived from Human Papillomavirus
ARQAKQHTCY

SEQ ID NO: 20032 - protein, 11 aa, Artificial Sequence
  Peptide Derived from Human Papillomavirus
ARQAKQHTCYL

SEQ ID NO: 20033 - protein, 9 aa, Artificial Sequence
  Peptide Derived from Human Papillomavirus
CKFVVQLDI

SEQ ID NO: 20034 - protein, 10 aa, Artificial Sequence
  Peptide Derived from Human Papillomavirus
DHLQERPQQA

SEQ ID NO: 20035 - protein, 9 aa, Artificial Sequence
  Peptide Derived from Human Papillomavirus
ERPQQARQA

SEQ ID NO: 20036 - protein, 9 aa, Artificial Sequence
  Peptide Derived from Human Papillomavirus
GKVPTLQDV

SEQ ID NO: 20037 - protein, 10 aa, Artificial Sequence
  Peptide Derived from Human Papillomavirus
GKVPTLQDVV

SEQ ID NO: 20038 - protein, 11 aa, Artificial Sequence
  Peptide Derived from Human Papillomavirus
GKVPTLQDVVL

SEQ ID NO: 20039 - protein, 10 aa, Artificial Sequence
  Peptide Derived from Human Papillomavirus
IHVPCCECKF

SEQ ID NO: 20040 - protein, 11 aa, Artificial Sequence
  Peptide Derived from Human Papillomavirus
IHVPCCECKFV

SEQ ID NO: 20041 - protein, 8 aa, Artificial Sequence
  Peptide Derived from Human Papillomavirus
LRVVQQLL

SEQ ID NO: 20042 - protein, 9 aa, Artificial Sequence
  Peptide Derived from Human Papillomavirus
LRVVQQLLM

SEQ ID NO: 20043 - protein, 11 aa, Artificial Sequence
  Peptide Derived from Human Papillomavirus
LRVVQQLLMGA

SEQ ID NO: 20044 - protein, 8 aa, Artificial Sequence
  Peptide Derived from Human Papillomavirus
MHGKVPTL

SEQ ID NO: 20045 - protein, 11 aa, Artificial Sequence
  Peptide Derived from Human Papillomavirus
MHGKVPTLQDV

SEQ ID NO: 20046 - protein, 9 aa, Artificial Sequence
  Peptide Derived from Human Papillomavirus
QHTCYLIHV

SEQ ID NO: 20047 - protein, 8 aa, Artificial Sequence
  Peptide Derived from Human Papillomavirus
TKEDLRVV

SEQ ID NO: 20048 - protein, 11 aa, Artificial Sequence
  Peptide Derived from Human Papillomavirus
TKEDLRVVQQL

SEQ ID NO: 20049 - protein, 8 aa, Artificial Sequence
  Peptide Derived from Human Papillomavirus
AKYKFWDV

SEQ ID NO: 20050 - protein, 10 aa, Artificial Sequence
  Peptide Derived from Human Papillomavirus
AKYKFWDVNL

SEQ ID NO: 20051 - protein, 8 aa, Artificial Sequence
  Peptide Derived from Human Papillomavirus
ARHYFNRA

SEQ ID NO: 20052 - protein, 11 aa, Artificial Sequence
  Peptide Derived from Human Papillomavirus
ARHYFNRAGKV

SEQ ID NO: 20053 - protein, 8 aa, Artificial Sequence
  Peptide Derived from Human Papillomavirus
ARKINQYL

SEQ ID NO: 20054 - protein, 11 aa, Artificial Sequence
  Peptide Derived from Human Papillomavirus
ARKINQYLRHV

SEQ ID NO: 20055 - protein, 9 aa, Artificial Sequence
  Peptide Derived from Human Papillomavirus
CKITLSAEV

SEQ ID NO: 20056 - protein, 10 aa, Artificial Sequence
  Peptide Derived from Human Papillomavirus
CKITLSAEVM

SEQ ID NO: 20057 - protein, 11 aa, Artificial Sequence
  Peptide Derived from Human Papillomavirus
CKITLSAEVMA

SEQ ID NO: 20058 - protein, 9 aa, Artificial Sequence
  Peptide Derived from Human Papillomavirus
CKYPDYLKM

SEQ ID NO: 20059 - protein, 11 aa, Artificial Sequence
  Peptide Derived from Human Papillomavirus
CKYPDYLKMSA

SEQ ID NO: 20060 - protein, 10 aa, Artificial Sequence
  Peptide Derived from Human Papillomavirus
DKYRYVRSTA

SEQ ID NO: 20061 - protein, 11 aa, Artificial Sequence
  Peptide Derived from Human Papillomavirus
DKYRYVRSTAI

SEQ ID NO: 20062 - protein, 8 aa, Artificial Sequence
  Peptide Derived from Human Papillomavirus
EHWTKGAV

SEQ ID NO: 20063 - protein, 9 aa, Artificial Sequence
  Peptide Derived from Human Papillomavirus
EKQDPLAKY

SEQ ID NO: 20064 - protein, 11 aa, Artificial Sequence
  Peptide Derived from Human Papillomavirus
EKQDPLAKYKF

SEQ ID NO: 20065 - protein, 8 aa, Artificial Sequence
  Peptide Derived from Human Papillomavirus
ERLVWACV

SEQ ID NO: 20066 - protein, 10 aa, Artificial Sequence
  Peptide Derived from Human Papillomavirus
ERLVWACVGL

SEQ ID NO: 20067 - protein, 9 aa, Artificial Sequence
  Peptide Derived from Human Papillomavirus
FKVLQESKA

SEQ ID NO: 20068 - protein, 11 aa, Artificial Sequence
  Peptide Derived from Human Papillomavirus
FKVLQESKAEV

SEQ ID NO: 20069 - protein, 11 aa, Artificial Sequence
  Peptide Derived from Human Papillomavirus
FRVRLPDPNKF

SEQ ID NO: 20070 - protein, 8 aa, Artificial Sequence
  Peptide Derived from Human Papillomavirus
GHNNGICW

SEQ ID NO: 20071 - protein, 8 aa, Artificial Sequence
  Peptide Derived from Human Papillomavirus
GHPLFNRL

SEQ ID NO: 20072 - protein, 8 aa, Artificial Sequence
  Peptide Derived from Human Papillomavirus
GKQTQLCI

SEQ ID NO: 20073 - protein, 9 aa, Artificial Sequence
  Peptide Derived from Human Papillomavirus
GKQTQLCIV

SEQ ID NO: 20074 - protein, 9 aa, Artificial Sequence
  Peptide Derived from Human Papillomavirus
GKVGETIPA

SEQ ID NO: 20075 - protein, 11 aa, Artificial Sequence
  Peptide Derived from Human Papillomavirus
GKVGETIPAEL

SEQ ID NO: 20076 - protein, 9 aa, Artificial Sequence
  Peptide Derived from Human Papillomavirus
GREPPPSSV

SEQ ID NO: 20077 - protein, 10 aa, Artificial Sequence
  Peptide Derived from Human Papillomavirus
GREPPPSSVY

SEQ ID NO: 20078 - protein, 11 aa, Artificial Sequence
  Peptide Derived from Human Papillomavirus
GREPPPSSVYV

SEQ ID NO: 20079 - protein, 8 aa, Artificial Sequence
  Peptide Derived from Human Papillomavirus
GRGQPLGA

SEQ ID NO: 20080 - protein, 10 aa, Artificial Sequence
  Peptide Derived from Human Papillomavirus
GRGQPLGAGL

SEQ ID NO: 20081 - protein, 8 aa, Artificial Sequence
  Peptide Derived from Human Papillomavirus
GRKFLMQL

SEQ ID NO: 20082 - protein, 9 aa, Artificial Sequence
  Peptide Derived from Human Papillomavirus
KRTSIFYHA

SEQ ID NO: 20083 - protein, 8 aa, Artificial Sequence
  Peptide Derived from Human Papillomavirus
LHNMNANL

SEQ ID NO: 20084 - protein, 9 aa, Artificial Sequence
  Peptide Derived from Human Papillomavirus
LHNMNANLL

SEQ ID NO: 20085 - protein, 8 aa, Artificial Sequence
  Peptide Derived from Human Papillomavirus
LHYGLCIF

SEQ ID NO: 20086 - protein, 9 aa, Artificial Sequence
  Peptide Derived from Human Papillomavirus
LHYGLCIFL

SEQ ID NO: 20087 - protein, 11 aa, Artificial Sequence
  Peptide Derived from Human Papillomavirus
LHYGLCIFLDV

SEQ ID NO: 20088 - protein, 8 aa, Artificial Sequence
  Peptide Derived from Human Papillomavirus
LKMSADAY

SEQ ID NO: 20089 - protein, 9 aa, Artificial Sequence
  Peptide Derived from Human Papillomavirus
LRHVEEYEL

SEQ ID NO: 20090 - protein, 11 aa, Artificial Sequence
  Peptide Derived from Human Papillomavirus
LRHVEEYELQF

SEQ ID NO: 20091 - protein, 8 aa, Artificial Sequence
  Peptide Derived from Human Papillomavirus
LRREQLFA

SEQ ID NO: 20092 - protein, 11 aa, Artificial Sequence
  Peptide Derived from Human Papillomavirus
LRREQLFARHY

SEQ ID NO: 20093 - protein, 10 aa, Artificial Sequence
  Peptide Derived from Human Papillomavirus
NKFGLPDTNI

SEQ ID NO: 20094 - protein, 11 aa, Artificial Sequence
  Peptide Derived from Human Papillomavirus
NKFGLPDTNIY

SEQ ID NO: 20095 - protein, 9 aa, Artificial Sequence
  Peptide Derived from Human Papillomavirus
NKPYWLQRA

SEQ ID NO: 20096 - protein, 10 aa, Artificial Sequence
  Peptide Derived from Human Papillomavirus
NKVYLPPTPV

SEQ ID NO: 20097 - protein, 10 aa, Artificial Sequence
  Peptide Derived from Human Papillomavirus
NRAGKVGETI

SEQ ID NO: 20098 - protein, 11 aa, Artificial Sequence
  Peptide Derived from Human Papillomavirus
NRLDDTESSNL

SEQ ID NO: 20099 - protein, 8 aa, Artificial Sequence
  Peptide Derived from Human Papillomavirus
PKVSAYQY

SEQ ID NO: 20100 - protein, 10 aa, Artificial Sequence
  Peptide Derived from Human Papillomavirus
PKVSAYQYRV

SEQ ID NO: 20101 - protein, 11 aa, Artificial Sequence
  Peptide Derived from Human Papillomavirus
PKVSAYQYRVF

SEQ ID NO: 20102 - protein, 10 aa, Artificial Sequence
  Peptide Derived from Human Papillomavirus
QRAQGHNNGI

SEQ ID NO: 20103 - protein, 8 aa, Artificial Sequence
  Peptide Derived from Human Papillomavirus
RHVEEYEL

SEQ ID NO: 20104 - protein, 10 aa, Artificial Sequence
  Peptide Derived from Human Papillomavirus
RHVEEYELQF

SEQ ID NO: 20105 - protein, 11 aa, Artificial Sequence
  Peptide Derived from Human Papillomavirus
RHVEEYELQFV

SEQ ID NO: 20106 - protein, 10 aa, Artificial Sequence
  Peptide Derived from Human Papillomavirus
RHYFNRAGKV

SEQ ID NO: 20107 - protein, 10 aa, Artificial Sequence
  Peptide Derived from Human Papillomavirus
RKINQYLRHV

SEQ ID NO: 20108 - protein, 10 aa, Artificial Sequence
  Peptide Derived from Human Papillomavirus
RREQLFARHY

SEQ ID NO: 20109 - protein, 11 aa, Artificial Sequence
  Peptide Derived from Human Papillomavirus
RREQLFARHYF

SEQ ID NO: 20110 - protein, 9 aa, Artificial Sequence
  Peptide Derived from Human Papillomavirus
SKAEVPLDI

SEQ ID NO: 20111 - protein, 10 aa, Artificial Sequence
  Peptide Derived from Human Papillomavirus
SKAEVPLDIV

SEQ ID NO: 20112 - protein, 9 aa, Artificial Sequence
  Peptide Derived from Human Papillomavirus
SKVVATDSY

SEQ ID NO: 20113 - protein, 10 aa, Artificial Sequence
  Peptide Derived from Human Papillomavirus
SKVVATDSYV

SEQ ID NO: 20114 - protein, 8 aa, Artificial Sequence
  Peptide Derived from Human Papillomavirus
SKYDARKI

SEQ ID NO: 20115 - protein, 11 aa, Artificial Sequence
  Peptide Derived from Human Papillomavirus
SKYDARKINQY

SEQ ID NO: 20116 - protein, 10 aa, Artificial Sequence
  Peptide Derived from Human Papillomavirus
SRLLAVGHPY

SEQ ID NO: 20117 - protein, 11 aa, Artificial Sequence
  Peptide Derived from Human Papillomavirus
SRLLAVGHPYY

SEQ ID NO: 20118 - protein, 9 aa, Artificial Sequence
  Peptide Derived from Human Papillomavirus
TKDNTKTNI

SEQ ID NO: 20119 - protein, 11 aa, Artificial Sequence
  Peptide Derived from Human Papillomavirus
TKGAVCKSTQV

SEQ ID NO: 20120 - protein, 8 aa, Artificial Sequence
  Peptide Derived from Human Papillomavirus
TKTNIPKV

SEQ ID NO: 20121 - protein, 10 aa, Artificial Sequence
  Peptide Derived from Human Papillomavirus
TKTNIPKVSA

SEQ ID NO: 20122 - protein, 11 aa, Artificial Sequence
  Peptide Derived from Human Papillomavirus
TKTNIPKVSAY

SEQ ID NO: 20123 - protein, 8 aa, Artificial Sequence
  Peptide Derived from Human Papillomavirus
TRSKPAVA

SEQ ID NO: 20124 - protein, 8 aa, Artificial Sequence
  Peptide Derived from Human Papillomavirus
TRSTNMTI

SEQ ID NO: 20125 - protein, 11 aa, Artificial Sequence
  Peptide Derived from Human Papillomavirus
TRSTNMTISTA

SEQ ID NO: 20126 - protein, 8 aa, Artificial Sequence
  Peptide Derived from Human Papillomavirus
VKRTSIFY

SEQ ID NO: 20127 - protein, 10 aa, Artificial Sequence
  Peptide Derived from Human Papillomavirus
VKRTSIFYHA

SEQ ID NO: 20128 - protein, 9 aa, Artificial Sequence
  Peptide Derived from Human Papillomavirus
VRLPDPNKF

SEQ ID NO: 20129 - protein, 11 aa, Artificial Sequence
  Peptide Derived from Human Papillomavirus
VRLPDPNKFGL

SEQ ID NO: 20130 - protein, 8 aa, Artificial Sequence
  Peptide Derived from Human Papillomavirus
WRPSENKV

SEQ ID NO: 20131 - protein, 9 aa, Artificial Sequence
  Peptide Derived from Human Papillomavirus
WRPSENKVY

SEQ ID NO: 20132 - protein, 10 aa, Artificial Sequence
  Peptide Derived from Human Papillomavirus
WRPSENKVYL

SEQ ID NO: 20133 - protein, 8 aa, Artificial Sequence
  Peptide Derived from Human Papillomavirus
YHAGSSRL

SEQ ID NO: 20134 - protein, 9 aa, Artificial Sequence
  Peptide Derived from Human Papillomavirus
YHAGSSRLL

SEQ ID NO: 20135 - protein, 10 aa, Artificial Sequence
  Peptide Derived from Human Papillomavirus
YHAGSSRLLA

SEQ ID NO: 20136 - protein, 11 aa, Artificial Sequence
  Peptide Derived from Human Papillomavirus
YHAGSSRLLAV

SEQ ID NO: 20137 - protein, 8 aa, Artificial Sequence
  Peptide Derived from Human Papillomavirus
YKFWDVNL

SEQ ID NO: 20138 - protein, 8 aa, Artificial Sequence
  Peptide Derived from Human Papillomavirus
YRDPPLHY

SEQ ID NO: 20139 - protein, 10 aa, Artificial Sequence
  Peptide Derived from Human Papillomavirus
YRDPPLHYGL

SEQ ID NO: 20140 - protein, 8 aa, Artificial Sequence
  Peptide Derived from Human Papillomavirus
YRVFRVRL

SEQ ID NO: 20141 - protein, 8 aa, Artificial Sequence
  Peptide Derived from Human Papillomavirus
YRYVRSTA

SEQ ID NO: 20142 - protein, 9 aa, Artificial Sequence
  Peptide Derived from Human Papillomavirus
YRYVRSTAI

SEQ ID NO: 20143 - protein, 10 aa, Artificial Sequence
  Peptide Derived from Human Papillomavirus
AHLPIKPSTL

SEQ ID NO: 20144 - protein, 10 aa, Artificial Sequence
  Peptide Derived from Human Papillomavirus
AHRATRRKRA

SEQ ID NO: 20145 - protein, 10 aa, Artificial Sequence
  Peptide Derived from Human Papillomavirus
ARPPIVVESV

SEQ ID NO: 20146 - protein, 9 aa, Artificial Sequence
  Peptide Derived from Human Papillomavirus
ARVHYYYDI

SEQ ID NO: 20147 - protein, 11 aa, Artificial Sequence
  Peptide Derived from Human Papillomavirus
CKLSGTCPEDV

SEQ ID NO: 20148 - protein, 9 aa, Artificial Sequence
  Peptide Derived from Human Papillomavirus
DKILQWGSL

SEQ ID NO: 20149 - protein, 10 aa, Artificial Sequence
  Peptide Derived from Human Papillomavirus
DKILQWGSLF

SEQ ID NO: 20150 - protein, 9 aa, Artificial Sequence
  Peptide Derived from Human Papillomavirus
DRPATLVSA

SEQ ID NO: 20151 - protein, 9 aa, Artificial Sequence
  Peptide Derived from Human Papillomavirus
FRRIAAPRL

SEQ ID NO: 20152 - protein, 10 aa, Artificial Sequence
  Peptide Derived from Human Papillomavirus
FRRIAAPRLY

SEQ ID NO: 20153 - protein, 9 aa, Artificial Sequence
  Peptide Derived from Human Papillomavirus
FRRRRRKRI

SEQ ID NO: 20154 - protein, 11 aa, Artificial Sequence
  Peptide Derived from Human Papillomavirus
FRRRRRKRIPY

SEQ ID NO: 20155 - protein, 8 aa, Artificial Sequence
  Peptide Derived from Human Papillomavirus
GRAGYVPL

SEQ ID NO: 20156 - protein, 9 aa, Artificial Sequence
  Peptide Derived from Human Papillomavirus
HRATRRKRA

SEQ ID NO: 20157 - protein, 11 aa, Artificial Sequence
  Peptide Derived from Human Papillomavirus
HRATRRKRASA

SEQ ID NO: 20158 - protein, 9 aa, Artificial Sequence
  Peptide Derived from Human Papillomavirus
IHSYEEIPM

SEQ ID NO: 20159 - protein, 8 aa, Artificial Sequence
  Peptide Derived from Human Papillomavirus
IKPSTLSF

SEQ ID NO: 20160 - protein, 9 aa, Artificial Sequence
  Peptide Derived from Human Papillomavirus
IKPSTLSFA

SEQ ID NO: 20161 - protein, 8 aa, Artificial Sequence
  Peptide Derived from Human Papillomavirus
KRASATQL

SEQ ID NO: 20162 - protein, 9 aa, Artificial Sequence
  Peptide Derived from Human Papillomavirus
KRASATQLY

SEQ ID NO: 20163 - protein, 8 aa, Artificial Sequence
  Peptide Derived from Human Papillomavirus
KRIPYFFA

SEQ ID NO: 20164 - protein, 8 aa, Artificial Sequence
  Peptide Derived from Human Papillomavirus
NKIEQKTW

SEQ ID NO: 20165 - protein, 9 aa, Artificial Sequence
  Peptide Derived from Human Papillomavirus
NKIEQKTWA

SEQ ID NO: 20166 - protein, 8 aa, Artificial Sequence
  Peptide Derived from Human Papillomavirus
PRLYRKAF

SEQ ID NO: 20167 - protein, 11 aa, Artificial Sequence
  Peptide Derived from Human Papillomavirus
PRLYRKAFQQV

SEQ ID NO: 20168 - protein, 8 aa, Artificial Sequence
  Peptide Derived from Human Papillomavirus
QKTWADKI

SEQ ID NO: 20169 - protein, 9 aa, Artificial Sequence
  Peptide Derived from Human Papillomavirus
QKTWADKIL

SEQ ID NO: 20170 - protein, 11 aa, Artificial Sequence
  Peptide Derived from Human Papillomavirus
QKTWADKILQW

SEQ ID NO: 20171 - protein, 9 aa, Artificial Sequence
  Peptide Derived from Human Papillomavirus
RKAFQQVKV

SEQ ID NO: 20172 - protein, 9 aa, Artificial Sequence
  Peptide Derived from Human Papillomavirus
RKRASATQL

SEQ ID NO: 20173 - protein, 10 aa, Artificial Sequence
  Peptide Derived from Human Papillomavirus
RKRASATQLY

SEQ ID NO: 20174 - protein, 8 aa, Artificial Sequence
  Peptide Derived from Human Papillomavirus
RKRIPYFF

SEQ ID NO: 20175 - protein, 9 aa, Artificial Sequence
  Peptide Derived from Human Papillomavirus
RKRIPYFFA

SEQ ID NO: 20176 - protein, 10 aa, Artificial Sequence
  Peptide Derived from Human Papillomavirus
RRGGVRFSRL

SEQ ID NO: 20177 - protein, 8 aa, Artificial Sequence
  Peptide Derived from Human Papillomavirus
RRGTQIGA

SEQ ID NO: 20178 - protein, 10 aa, Artificial Sequence
  Peptide Derived from Human Papillomavirus
RRGTQIGARV

SEQ ID NO: 20179 - protein, 8 aa, Artificial Sequence
  Peptide Derived from Human Papillomavirus
RRIAAPRL

SEQ ID NO: 20180 - protein, 9 aa, Artificial Sequence
  Peptide Derived from Human Papillomavirus
RRIAAPRLY

SEQ ID NO: 20181 - protein, 10 aa, Artificial Sequence
  Peptide Derived from Human Papillomavirus
RRKRASATQL

SEQ ID NO: 20182 - protein, 11 aa, Artificial Sequence
  Peptide Derived from Human Papillomavirus
RRKRASATQLY

SEQ ID NO: 20183 - protein, 8 aa, Artificial Sequence
  Peptide Derived from Human Papillomavirus
RRKRIPYF

SEQ ID NO: 20184 - protein, 9 aa, Artificial Sequence
  Peptide Derived from Human Papillomavirus
RRKRIPYFF

SEQ ID NO: 20185 - protein, 10 aa, Artificial Sequence
  Peptide Derived from Human Papillomavirus
RRKRIPYFFA

SEQ ID NO: 20186 - protein, 8 aa, Artificial Sequence
  Peptide Derived from Human Papillomavirus
RRRKRIPY

SEQ ID NO: 20187 - protein, 9 aa, Artificial Sequence
  Peptide Derived from Human Papillomavirus
RRRKRIPYF

SEQ ID NO: 20188 - protein, 10 aa, Artificial Sequence
  Peptide Derived from Human Papillomavirus
RRRKRIPYFF

SEQ ID NO: 20189 - protein, 11 aa, Artificial Sequence
  Peptide Derived from Human Papillomavirus
RRRKRIPYFFA

SEQ ID NO: 20190 - protein, 9 aa, Artificial Sequence
  Peptide Derived from Human Papillomavirus
RRRRKRIPY

SEQ ID NO: 20191 - protein, 10 aa, Artificial Sequence
  Peptide Derived from Human Papillomavirus
RRRRKRIPYF

SEQ ID NO: 20192 - protein, 11 aa, Artificial Sequence
  Peptide Derived from Human Papillomavirus
RRRRKRIPYFF

SEQ ID NO: 20193 - protein, 8 aa, Artificial Sequence
  Peptide Derived from Human Papillomavirus
RRRRRKRI

SEQ ID NO: 20194 - protein, 10 aa, Artificial Sequence
  Peptide Derived from Human Papillomavirus
RRRRRKRIPY

SEQ ID NO: 20195 - protein, 11 aa, Artificial Sequence
  Peptide Derived from Human Papillomavirus
RRRRRKRIPYF

SEQ ID NO: 20196 - protein, 9 aa, Artificial Sequence
  Peptide Derived from Human Papillomavirus
SRLGRKATI

SEQ ID NO: 20197 - protein, 9 aa, Artificial Sequence
  Peptide Derived from Human Papillomavirus
SRPSTIVDV

SEQ ID NO: 20198 - protein, 11 aa, Artificial Sequence
  Peptide Derived from Human Papillomavirus
THDVYIQGSSF

SEQ ID NO: 20199 - protein, 8 aa, Artificial Sequence
  Peptide Derived from Human Papillomavirus
THITNPLF

SEQ ID NO: 20200 - protein, 9 aa, Artificial Sequence
  Peptide Derived from Human Papillomavirus
THITNPLFI

SEQ ID NO: 20201 - protein, 8 aa, Artificial Sequence
  Peptide Derived from Human Papillomavirus
TRRGGVRF

SEQ ID NO: 20202 - protein, 11 aa, Artificial Sequence
  Peptide Derived from Human Papillomavirus
TRRGGVRFSRL

SEQ ID NO: 20203 - protein, 9 aa, Artificial Sequence
  Peptide Derived from Human Papillomavirus
TRRGTQIGA

SEQ ID NO: 20204 - protein, 11 aa, Artificial Sequence
  Peptide Derived from Human Papillomavirus
TRRGTQIGARV

SEQ ID NO: 20205 - protein, 8 aa, Artificial Sequence
  Peptide Derived from Human Papillomavirus
TRRKRASA

SEQ ID NO: 20206 - protein, 11 aa, Artificial Sequence
  Peptide Derived from Human Papillomavirus
TRRKRASATQL

SEQ ID NO: 20207 - protein, 9 aa, Artificial Sequence
  Peptide Derived from Human Papillomavirus
VHGSGTEPI

SEQ ID NO: 20208 - protein, 8 aa, Artificial Sequence
  Peptide Derived from Human Papillomavirus
VHVSSTHI

SEQ ID NO: 20209 - protein, 10 aa, Artificial Sequence
  Peptide Derived from Human Papillomavirus
VHYYYDISPI

SEQ ID NO: 20210 - protein, 11 aa, Artificial Sequence
  Peptide Derived from Human Papillomavirus
VHYYYDISPIA

SEQ ID NO: 20211 - protein, 8 aa, Artificial Sequence
  Peptide Derived from Human Papillomavirus
VKVTDPAF

SEQ ID NO: 20212 - protein, 9 aa, Artificial Sequence
  Peptide Derived from Human Papillomavirus
VKVTDPAFL

SEQ ID NO: 20213 - protein, 10 aa, Artificial Sequence
  Peptide Derived from Human Papillomavirus
VRFSRLGRKA

SEQ ID NO: 20214 - protein, 8 aa, Artificial Sequence
  Peptide Derived from Human Papillomavirus
YRKAFQQV

SEQ ID NO: 20215 - protein, 10 aa, Artificial Sequence
  Peptide Derived from Human Papillomavirus
YRKAFQQVKV

SEQ ID NO: 20216 - protein, 11 aa, Artificial Sequence
  Peptide Derived from Human Papillomavirus
AAALYWYKTGI

SEQ ID NO: 20217 - protein, 9 aa, Artificial Sequence
  Peptide Derived from Human Papillomavirus
AAFGLTPSI

SEQ ID NO: 20218 - protein, 10 aa, Artificial Sequence
  Peptide Derived from Human Papillomavirus
AAFGLTPSIA

SEQ ID NO: 20219 - protein, 10 aa, Artificial Sequence
  Peptide Derived from Human Papillomavirus
AALYWYKTGI

SEQ ID NO: 20220 - protein, 10 aa, Artificial Sequence
  Peptide Derived from Human Papillomavirus
AAMLAKFKEL

SEQ ID NO: 20221 - protein, 11 aa, Artificial Sequence
  Peptide Derived from Human Papillomavirus
AAMLAKFKELY

SEQ ID NO: 20222 - protein, 8 aa, Artificial Sequence
  Peptide Derived from Human Papillomavirus
AANTGKSL

SEQ ID NO: 20223 - protein, 9 aa, Artificial Sequence
  Peptide Derived from Human Papillomavirus
AANTGKSLF

SEQ ID NO: 20224 - protein, 11 aa, Artificial Sequence
  Peptide Derived from Human Papillomavirus
AANTGKSLFGM

SEQ ID NO: 20225 - protein, 11 aa, Artificial Sequence
  Peptide Derived from Human Papillomavirus
ASAFLKSNSQA

SEQ ID NO: 20226 - protein, 10 aa, Artificial Sequence
  Peptide Derived from Human Papillomavirus
ATMCRHYKRA

SEQ ID NO: 20227 - protein, 8 aa, Artificial Sequence
  Peptide Derived from Human Papillomavirus
ATVPCWNY

SEQ ID NO: 20228 - protein, 9 aa, Artificial Sequence
  Peptide Derived from Human Papillomavirus
ATVPCWNYI

SEQ ID NO: 20229 - protein, 8 aa, Artificial Sequence
  Peptide Derived from Human Papillomavirus
CATMCRHY

SEQ ID NO: 20230 - protein, 11 aa, Artificial Sequence
  Peptide Derived from Human Papillomavirus
CATMCRHYKRA

SEQ ID NO: 20231 - protein, 8 aa, Artificial Sequence
  Peptide Derived from Human Papillomavirus
CSWGMVVL

SEQ ID NO: 20232 - protein, 9 aa, Artificial Sequence
  Peptide Derived from Human Papillomavirus
CSWGMVVLL

SEQ ID NO: 20233 - protein, 10 aa, Artificial Sequence
  Peptide Derived from Human Papillomavirus
CSWGMVVLLL

SEQ ID NO: 20234 - protein, 11 aa, Artificial Sequence
  Peptide Derived from Human Papillomavirus
CSWGMVVLLLV

SEQ ID NO: 20235 - protein, 8 aa, Artificial Sequence
  Peptide Derived from Human Papillomavirus
CTFELSQM

SEQ ID NO: 20236 - protein, 9 aa, Artificial Sequence
  Peptide Derived from Human Papillomavirus
CTFELSQMV

SEQ ID NO: 20237 - protein, 11 aa, Artificial Sequence
  Peptide Derived from Human Papillomavirus
CTFELSQMVQW

SEQ ID NO: 20238 - protein, 10 aa, Artificial Sequence
  Peptide Derived from Human Papillomavirus
DAKIGMLDDA

SEQ ID NO: 20239 - protein, 9 aa, Artificial Sequence
  Peptide Derived from Human Papillomavirus
DATVPCWNY

SEQ ID NO: 20240 - protein, 10 aa, Artificial Sequence
  Peptide Derived from Human Papillomavirus
DATVPCWNYI

SEQ ID NO: 20241 - protein, 10 aa, Artificial Sequence
  Peptide Derived from Human Papillomavirus
DAVQVLKRKY

SEQ ID NO: 20242 - protein, 11 aa, Artificial Sequence
  Peptide Derived from Human Papillomavirus
DAVQVLKRKYL

SEQ ID NO: 20243 - protein, 8 aa, Artificial Sequence
  Peptide Derived from Human Papillomavirus
DSDTGEDL

SEQ ID NO: 20244 - protein, 9 aa, Artificial Sequence
  Peptide Derived from Human Papillomavirus
DSDTGEDLV

SEQ ID NO: 20245 - protein, 11 aa, Artificial Sequence
  Peptide Derived from Human Papillomavirus
DSDTGEDLVDF

SEQ ID NO: 20246 - protein, 8 aa, Artificial Sequence
  Peptide Derived from Human Papillomavirus
DSEIAYKY

SEQ ID NO: 20247 - protein, 9 aa, Artificial Sequence
  Peptide Derived from Human Papillomavirus
DSEIAYKYA

SEQ ID NO: 20248 - protein, 11 aa, Artificial Sequence
  Peptide Derived from Human Papillomavirus
DSEIAYKYAQL

SEQ ID NO: 20249 - protein, 9 aa, Artificial Sequence
  Peptide Derived from Human Papillomavirus
DSGYGNTEV

SEQ ID NO: 20250 - protein, 10 aa, Artificial Sequence
  Peptide Derived from Human Papillomavirus
DSIKTLLQQY

SEQ ID NO: 20251 - protein, 9 aa, Artificial Sequence
  Peptide Derived from Human Papillomavirus
DSLPTFKCV

SEQ ID NO: 20252 - protein, 11 aa, Artificial Sequence
  Peptide Derived from Human Papillomavirus
DSRWPYLHNRL

SEQ ID NO: 20253 - protein, 9 aa, Artificial Sequence
  Peptide Derived from Human Papillomavirus
DTGEDLVDF

SEQ ID NO: 20254 - protein, 10 aa, Artificial Sequence
  Peptide Derived from Human Papillomavirus
DTGEDLVDFI

SEQ ID NO: 20255 - protein, 11 aa, Artificial Sequence
  Peptide Derived from Human Papillomavirus
DTGEDLVDFIV

SEQ ID NO: 20256 - protein, 8 aa, Artificial Sequence
  Peptide Derived from Human Papillomavirus
DTNSNASA

SEQ ID NO: 20257 - protein, 9 aa, Artificial Sequence
  Peptide Derived from Human Papillomavirus
DTNSNASAF

SEQ ID NO: 20258 - protein, 10 aa, Artificial Sequence
  Peptide Derived from Human Papillomavirus
DTNSNASAFL

SEQ ID NO: 20259 - protein, 11 aa, Artificial Sequence
  Peptide Derived from Human Papillomavirus
DTPEWIQRQTV

SEQ ID NO: 20260 - protein, 8 aa, Artificial Sequence
  Peptide Derived from Human Papillomavirus
EAKQHRDA

SEQ ID NO: 20261 - protein, 9 aa, Artificial Sequence
  Peptide Derived from Human Papillomavirus
EAKQHRDAV

SEQ ID NO: 20262 - protein, 11 aa, Artificial Sequence
  Peptide Derived from Human Papillomavirus
EAKQHRDAVQV

SEQ ID NO: 20263 - protein, 11 aa, Artificial Sequence
  Peptide Derived from Human Papillomavirus
EAVVEKKTGDA

SEQ ID NO: 20264 - protein, 9 aa, Artificial Sequence
  Peptide Derived from Human Papillomavirus
ETAHALFTA

SEQ ID NO: 20265 - protein, 8 aa, Artificial Sequence
  Peptide Derived from Human Papillomavirus
ETETAHAL

SEQ ID NO: 20266 - protein, 9 aa, Artificial Sequence
  Peptide Derived from Human Papillomavirus
ETETAHALF

SEQ ID NO: 20267 - protein, 11 aa, Artificial Sequence
  Peptide Derived from Human Papillomavirus
ETETAHALFTA

SEQ ID NO: 20268 - protein, 9 aa, Artificial Sequence
  Peptide Derived from Human Papillomavirus
ETETPCSQY

SEQ ID NO: 20269 - protein, 10 aa, Artificial Sequence
  Peptide Derived from Human Papillomavirus
ETIEKLLSKL

SEQ ID NO: 20270 - protein, 11 aa, Artificial Sequence
  Peptide Derived from Human Papillomavirus
ETIEKLLSKLL

SEQ ID NO: 20271 - protein, 8 aa, Artificial Sequence
  Peptide Derived from Human Papillomavirus
ETQQMLQV

SEQ ID NO: 20272 - protein, 8 aa, Artificial Sequence
  Peptide Derived from Human Papillomavirus
FSELVRPF

SEQ ID NO: 20273 - protein, 8 aa, Artificial Sequence
  Peptide Derived from Human Papillomavirus
FSRTWSRL

SEQ ID NO: 20274 - protein, 10 aa, Artificial Sequence
  Peptide Derived from Human Papillomavirus
FSRTWSRLSL

SEQ ID NO: 20275 - protein, 9 aa, Artificial Sequence
  Peptide Derived from Human Papillomavirus
FTFPNEFPF

SEQ ID NO: 20276 - protein, 9 aa, Artificial Sequence
  Peptide Derived from Human Papillomavirus
GAANTGKSL

SEQ ID NO: 20277 - protein, 10 aa, Artificial Sequence
  Peptide Derived from Human Papillomavirus
GAANTGKSLF

SEQ ID NO: 20278 - protein, 9 aa, Artificial Sequence
  Peptide Derived from Human Papillomavirus
GSGGGCSQY

SEQ ID NO: 20279 - protein, 8 aa, Artificial Sequence
  Peptide Derived from Human Papillomavirus
GTDSRWPY

SEQ ID NO: 20280 - protein, 9 aa, Artificial Sequence
  Peptide Derived from Human Papillomavirus
GTDSRWPYL

SEQ ID NO: 20281 - protein, 8 aa, Artificial Sequence
  Peptide Derived from Human Papillomavirus
GTGCNGWF

SEQ ID NO: 20282 - protein, 9 aa, Artificial Sequence
  Peptide Derived from Human Papillomavirus
GTGCNGWFY

SEQ ID NO: 20283 - protein, 10 aa, Artificial Sequence
  Peptide Derived from Human Papillomavirus
GTGCNGWFYV

SEQ ID NO: 20284 - protein, 9 aa, Artificial Sequence
  Peptide Derived from Human Papillomavirus
HALFTAQEA

SEQ ID NO: 20285 - protein, 8 aa, Artificial Sequence
  Peptide Derived from Human Papillomavirus
HSFNDCTF

SEQ ID NO: 20286 - protein, 10 aa, Artificial Sequence
  Peptide Derived from Human Papillomavirus
HSFNDCTFEL

SEQ ID NO: 20287 - protein, 8 aa, Artificial Sequence
  Peptide Derived from Human Papillomavirus
HTICQTPL

SEQ ID NO: 20288 - protein, 11 aa, Artificial Sequence
  Peptide Derived from Human Papillomavirus
HTICQTPLTNI

SEQ ID NO: 20289 - protein, 10 aa, Artificial Sequence
  Peptide Derived from Human Papillomavirus
IAAFGLTPSI

SEQ ID NO: 20290 - protein, 11 aa, Artificial Sequence
  Peptide Derived from Human Papillomavirus
IAAFGLTPSIA

SEQ ID NO: 20291 - protein, 8 aa, Artificial Sequence
  Peptide Derived from Human Papillomavirus
IADSIKTL

SEQ ID NO: 20292 - protein, 9 aa, Artificial Sequence
  Peptide Derived from Human Papillomavirus
IADSIKTLL

SEQ ID NO: 20293 - protein, 8 aa, Artificial Sequence
  Peptide Derived from Human Papillomavirus
IAYKYAQL

SEQ ID NO: 20294 - protein, 9 aa, Artificial Sequence
  Peptide Derived from Human Papillomavirus
IAYKYAQLA

SEQ ID NO: 20295 - protein, 11 aa, Artificial Sequence
  Peptide Derived from Human Papillomavirus
ISEVYGDTPEW

SEQ ID NO: 20296 - protein, 9 aa, Artificial Sequence
  Peptide Derived from Human Papillomavirus
ISGCVDNNI

SEQ ID NO: 20297 - protein, 8 aa, Artificial Sequence
  Peptide Derived from Human Papillomavirus
ISNISEVY

SEQ ID NO: 20298 - protein, 8 aa, Artificial Sequence
  Peptide Derived from Human Papillomavirus
ISPRLKAI

SEQ ID NO: 20299 - protein, 10 aa, Artificial Sequence
  Peptide Derived from Human Papillomavirus
ISPRLKAICI

SEQ ID NO: 20300 - protein, 8 aa, Artificial Sequence
  Peptide Derived from Human Papillomavirus
KAAMLAKF

SEQ ID NO: 20301 - protein, 11 aa, Artificial Sequence
  Peptide Derived from Human Papillomavirus
KAAMLAKFKEL

SEQ ID NO: 20302 - protein, 11 aa, Artificial Sequence
  Peptide Derived from Human Papillomavirus
KAICIEKQSRA

SEQ ID NO: 20303 - protein, 8 aa, Artificial Sequence
  Peptide Derived from Human Papillomavirus
KSFFSRTW

SEQ ID NO: 20304 - protein, 11 aa, Artificial Sequence
  Peptide Derived from Human Papillomavirus
KSFFSRTWSRL

SEQ ID NO: 20305 - protein, 9 aa, Artificial Sequence
  Peptide Derived from Human Papillomavirus
KSHFWLQPL

SEQ ID NO: 20306 - protein, 10 aa, Artificial Sequence
  Peptide Derived from Human Papillomavirus
KSHFWLQPLA

SEQ ID NO: 20307 - protein, 8 aa, Artificial Sequence
  Peptide Derived from Human Papillomavirus
KSLFGMSL

SEQ ID NO: 20308 - protein, 9 aa, Artificial Sequence
  Peptide Derived from Human Papillomavirus
KSLFGMSLM

SEQ ID NO: 20309 - protein, 11 aa, Artificial Sequence
  Peptide Derived from Human Papillomavirus
KSLFGMSLMKF

SEQ ID NO: 20310 - protein, 10 aa, Artificial Sequence
  Peptide Derived from Human Papillomavirus
KSNKSTCCDW

SEQ ID NO: 20311 - protein, 8 aa, Artificial Sequence
  Peptide Derived from Human Papillomavirus
KSNSQAKI

SEQ ID NO: 20312 - protein, 9 aa, Artificial Sequence
  Peptide Derived from Human Papillomavirus
KSNSQAKIV

SEQ ID NO: 20313 - protein, 9 aa, Artificial Sequence
  Peptide Derived from Human Papillomavirus
KSTCCDWCI

SEQ ID NO: 20314 - protein, 10 aa, Artificial Sequence
  Peptide Derived from Human Papillomavirus
KSTCCDWCIA

SEQ ID NO: 20315 - protein, 11 aa, Artificial Sequence
  Peptide Derived from Human Papillomavirus
KSTCCDWCIAA

SEQ ID NO: 20316 - protein, 10 aa, Artificial Sequence
  Peptide Derived from Human Papillomavirus
KTGISNISEV

SEQ ID NO: 20317 - protein, 11 aa, Artificial Sequence
  Peptide Derived from Human Papillomavirus
KTGISNISEVY

SEQ ID NO: 20318 - protein, 9 aa, Artificial Sequence
  Peptide Derived from Human Papillomavirus
KTLLQQYCL

SEQ ID NO: 20319 - protein, 10 aa, Artificial Sequence
  Peptide Derived from Human Papillomavirus
KTLLQQYCLY

SEQ ID NO: 20320 - protein, 11 aa, Artificial Sequence
  Peptide Derived from Human Papillomavirus
KTLLQQYCLYL

SEQ ID NO: 20321 - protein, 8 aa, Artificial Sequence
  Peptide Derived from Human Papillomavirus
KTSNAKAA

SEQ ID NO: 20322 - protein, 9 aa, Artificial Sequence
  Peptide Derived from Human Papillomavirus
KTSNAKAAM

SEQ ID NO: 20323 - protein, 10 aa, Artificial Sequence
  Peptide Derived from Human Papillomavirus
KTSNAKAAML

SEQ ID NO: 20324 - protein, 11 aa, Artificial Sequence
  Peptide Derived from Human Papillomavirus
KTSNAKAAMLA

SEQ ID NO: 20325 - protein, 8 aa, Artificial Sequence
  Peptide Derived from Human Papillomavirus
LACSWGMV

SEQ ID NO: 20326 - protein, 9 aa, Artificial Sequence
  Peptide Derived from Human Papillomavirus
LACSWGMVV

SEQ ID NO: 20327 - protein, 10 aa, Artificial Sequence
  Peptide Derived from Human Papillomavirus
LACSWGMVVL

SEQ ID NO: 20328 - protein, 11 aa, Artificial Sequence
  Peptide Derived from Human Papillomavirus
LACSWGMVVLL

SEQ ID NO: 20329 - protein, 8 aa, Artificial Sequence
  Peptide Derived from Human Papillomavirus
LADAKIGM

SEQ ID NO: 20330 - protein, 9 aa, Artificial Sequence
  Peptide Derived from Human Papillomavirus
LADAKIGML

SEQ ID NO: 20331 - protein, 8 aa, Artificial Sequence
  Peptide Derived from Human Papillomavirus
LADTNSNA

SEQ ID NO: 20332 - protein, 10 aa, Artificial Sequence
  Peptide Derived from Human Papillomavirus
LADTNSNASA

SEQ ID NO: 20333 - protein, 11 aa, Artificial Sequence
  Peptide Derived from Human Papillomavirus
LADTNSNASAF

SEQ ID NO: 20334 - protein, 8 aa, Artificial Sequence
  Peptide Derived from Human Papillomavirus
LAKFKELY

SEQ ID NO: 20335 - protein, 10 aa, Artificial Sequence
  Peptide Derived from Human Papillomavirus
LAKFKELYGV

SEQ ID NO: 20336 - protein, 8 aa, Artificial Sequence
  Peptide Derived from Human Papillomavirus
LSDISGCV

SEQ ID NO: 20337 - protein, 10 aa, Artificial Sequence
  Peptide Derived from Human Papillomavirus
LSKLLCVSPM

SEQ ID NO: 20338 - protein, 8 aa, Artificial Sequence
  Peptide Derived from Human Papillomavirus
LSQMVQWA

SEQ ID NO: 20339 - protein, 9 aa, Artificial Sequence
  Peptide Derived from Human Papillomavirus
LSQMVQWAY

SEQ ID NO: 20340 - protein, 8 aa, Artificial Sequence
  Peptide Derived from Human Papillomavirus
LTALKRFL

SEQ ID NO: 20341 - protein, 11 aa, Artificial Sequence
  Peptide Derived from Human Papillomavirus
LTALKRFLQGI

SEQ ID NO: 20342 - protein, 8 aa, Artificial Sequence
  Peptide Derived from Human Papillomavirus
LTNILNVL

SEQ ID NO: 20343 - protein, 9 aa, Artificial Sequence
  Peptide Derived from Human Papillomavirus
LTPSIADSI

SEQ ID NO: 20344 - protein, 9 aa, Artificial Sequence
  Peptide Derived from Human Papillomavirus
LTQAETETA

SEQ ID NO: 20345 - protein, 11 aa, Artificial Sequence
  Peptide Derived from Human Papillomavirus
LTQAETETAHA

SEQ ID NO: 20346 - protein, 10 aa, Artificial Sequence
  Peptide Derived from Human Papillomavirus
MSFLTALKRF

SEQ ID NO: 20347 - protein, 11 aa, Artificial Sequence
  Peptide Derived from Human Papillomavirus
MSFLTALKRFL

SEQ ID NO: 20348 - protein, 11 aa, Artificial Sequence
  Peptide Derived from Human Papillomavirus
MSLMKFLQGSV

SEQ ID NO: 20349 - protein, 9 aa, Artificial Sequence
  Peptide Derived from Human Papillomavirus
MSMSQWIKY

SEQ ID NO: 20350 - protein, 8 aa, Artificial Sequence
  Peptide Derived from Human Papillomavirus
NAGTDSRW

SEQ ID NO: 20351 - protein, 10 aa, Artificial Sequence
  Peptide Derived from Human Papillomavirus
NAGTDSRWPY

SEQ ID NO: 20352 - protein, 11 aa, Artificial Sequence
  Peptide Derived from Human Papillomavirus
NAGTDSRWPYL

SEQ ID NO: 20353 - protein, 8 aa, Artificial Sequence
  Peptide Derived from Human Papillomavirus
NAKAAMLA

SEQ ID NO: 20354 - protein, 10 aa, Artificial Sequence
  Peptide Derived from Human Papillomavirus
NAKAAMLAKF

SEQ ID NO: 20355 - protein, 8 aa, Artificial Sequence
  Peptide Derived from Human Papillomavirus
NALDGNLV

SEQ ID NO: 20356 - protein, 10 aa, Artificial Sequence
  Peptide Derived from Human Papillomavirus
NALDGNLVSM

SEQ ID NO: 20357 - protein, 8 aa, Artificial Sequence
  Peptide Derived from Human Papillomavirus
NSKSHFWL

SEQ ID NO: 20358 - protein, 11 aa, Artificial Sequence
  Peptide Derived from Human Papillomavirus
NSKSHFWLQPL

SEQ ID NO: 20359 - protein, 8 aa, Artificial Sequence
  Peptide Derived from Human Papillomavirus
NSNASAFL

SEQ ID NO: 20360 - protein, 11 aa, Artificial Sequence
  Peptide Derived from Human Papillomavirus
NSQAKIVKDCA

SEQ ID NO: 20361 - protein, 9 aa, Artificial Sequence
  Peptide Derived from Human Papillomavirus
NTEVETQQM

SEQ ID NO: 20362 - protein, 10 aa, Artificial Sequence
  Peptide Derived from Human Papillomavirus
NTEVETQQML

SEQ ID NO: 20363 - protein, 9 aa, Artificial Sequence
  Peptide Derived from Human Papillomavirus
NTGKSLFGM

SEQ ID NO: 20364 - protein, 11 aa, Artificial Sequence
  Peptide Derived from Human Papillomavirus
NTGKSLFGMSL

SEQ ID NO: 20365 - protein, 10 aa, Artificial Sequence
  Peptide Derived from Human Papillomavirus
PSIADSIKTL

SEQ ID NO: 20366 - protein, 11 aa, Artificial Sequence
  Peptide Derived from Human Papillomavirus
PSIADSIKTLL

SEQ ID NO: 20367 - protein, 9 aa, Artificial Sequence
  Peptide Derived from Human Papillomavirus
QAETETAHA

SEQ ID NO: 20368 - protein, 10 aa, Artificial Sequence
  Peptide Derived from Human Papillomavirus
QAETETAHAL

SEQ ID NO: 20369 - protein, 11 aa, Artificial Sequence
  Peptide Derived from Human Papillomavirus
QAETETAHALF

SEQ ID NO: 20370 - protein, 9 aa, Artificial Sequence
  Peptide Derived from Human Papillomavirus
QAKIVKDCA

SEQ ID NO: 20371 - protein, 11 aa, Artificial Sequence
  Peptide Derived from Human Papillomavirus
QAKIVKDCATM

SEQ ID NO: 20372 - protein, 9 aa, Artificial Sequence
  Peptide Derived from Human Papillomavirus
QSLACSWGM

SEQ ID NO: 20373 - protein, 10 aa, Artificial Sequence
  Peptide Derived from Human Papillomavirus
QSLACSWGMV

SEQ ID NO: 20374 - protein, 11 aa, Artificial Sequence
  Peptide Derived from Human Papillomavirus
QSLACSWGMVV

SEQ ID NO: 20375 - protein, 9 aa, Artificial Sequence
  Peptide Derived from Human Papillomavirus
QSRAAKRRL

SEQ ID NO: 20376 - protein, 10 aa, Artificial Sequence
  Peptide Derived from Human Papillomavirus
QSRAAKRRLF

SEQ ID NO: 20377 - protein, 8 aa, Artificial Sequence
  Peptide Derived from Human Papillomavirus
QTPLTNIL

SEQ ID NO: 20378 - protein, 10 aa, Artificial Sequence
  Peptide Derived from Human Papillomavirus
QTPLTNILNV

SEQ ID NO: 20379 - protein, 11 aa, Artificial Sequence
  Peptide Derived from Human Papillomavirus
QTPLTNILNVL

SEQ ID NO: 20380 - protein, 8 aa, Artificial Sequence
  Peptide Derived from Human Papillomavirus
QTVLQHSF

SEQ ID NO: 20381 - protein, 8 aa, Artificial Sequence
  Peptide Derived from Human Papillomavirus
RAAKRRLF

SEQ ID NO: 20382 - protein, 9 aa, Artificial Sequence
  Peptide Derived from Human Papillomavirus
RAEKKQMSM

SEQ ID NO: 20383 - protein, 8 aa, Artificial Sequence
  Peptide Derived from Human Papillomavirus
RSTAAALY

SEQ ID NO: 20384 - protein, 9 aa, Artificial Sequence
  Peptide Derived from Human Papillomavirus
RSTAAALYW

SEQ ID NO: 20385 - protein, 10 aa, Artificial Sequence
  Peptide Derived from Human Papillomavirus
RSTAAALYWY

SEQ ID NO: 20386 - protein, 8 aa, Artificial Sequence
  Peptide Derived from Human Papillomavirus
RTWSRLSL

SEQ ID NO: 20387 - protein, 10 aa, Artificial Sequence
  Peptide Derived from Human Papillomavirus
SAFLKSNSQA

SEQ ID NO: 20388 - protein, 9 aa, Artificial Sequence
  Peptide Derived from Human Papillomavirus
SSGSGGEGV

SEQ ID NO: 20389 - protein, 8 aa, Artificial Sequence
  Peptide Derived from Human Papillomavirus
STAAALYW

SEQ ID NO: 20390 - protein, 9 aa, Artificial Sequence
  Peptide Derived from Human Papillomavirus
STAAALYWY

SEQ ID NO: 20391 - protein, 8 aa, Artificial Sequence
  Peptide Derived from Human Papillomavirus
STCCDWCI

SEQ ID NO: 20392 - protein, 9 aa, Artificial Sequence
  Peptide Derived from Human Papillomavirus
STCCDWCIA

SEQ ID NO: 20393 - protein, 10 aa, Artificial Sequence
  Peptide Derived from Human Papillomavirus
STCCDWCIAA

SEQ ID NO: 20394 - protein, 11 aa, Artificial Sequence
  Peptide Derived from Human Papillomavirus
STCCDWCIAAF

SEQ ID NO: 20395 - protein, 8 aa, Artificial Sequence
  Peptide Derived from Human Papillomavirus
TAAALYWY

SEQ ID NO: 20396 - protein, 8 aa, Artificial Sequence
  Peptide Derived from Human Papillomavirus
TAHALFTA

SEQ ID NO: 20397 - protein, 11 aa, Artificial Sequence
  Peptide Derived from Human Papillomavirus
TAHALFTAQEA

SEQ ID NO: 20398 - protein, 10 aa, Artificial Sequence
  Peptide Derived from Human Papillomavirus
TALKRFLQGI

SEQ ID NO: 20399 - protein, 11 aa, Artificial Sequence
  Peptide Derived from Human Papillomavirus
TAQEAKQHRDA

SEQ ID NO: 20400 - protein, 8 aa, Artificial Sequence
  Peptide Derived from Human Papillomavirus
TSNAKAAM

SEQ ID NO: 20401 - protein, 9 aa, Artificial Sequence
  Peptide Derived from Human Papillomavirus
TSNAKAAML

SEQ ID NO: 20402 - protein, 10 aa, Artificial Sequence
  Peptide Derived from Human Papillomavirus
TSNAKAAMLA

SEQ ID NO: 20403 - protein, 10 aa, Artificial Sequence
  Peptide Derived from Human Papillomavirus
VSFSELVRPF

SEQ ID NO: 20404 - protein, 9 aa, Artificial Sequence
  Peptide Derived from Human Papillomavirus
VSGQNTNTL

SEQ ID NO: 20405 - protein, 10 aa, Artificial Sequence
  Peptide Derived from Human Papillomavirus
VSMDVKHRPL

SEQ ID NO: 20406 - protein, 11 aa, Artificial Sequence
  Peptide Derived from Human Papillomavirus
VSMDVKHRPLV

SEQ ID NO: 20407 - protein, 11 aa, Artificial Sequence
  Peptide Derived from Human Papillomavirus
VSPLSDISGCV

SEQ ID NO: 20408 - protein, 8 aa, Artificial Sequence
  Peptide Derived from Human Papillomavirus
VSPMCMMI

SEQ ID NO: 20409 - protein, 8 aa, Artificial Sequence
  Peptide Derived from Human Papillomavirus
WAYDNDIV

SEQ ID NO: 20410 - protein, 11 aa, Artificial Sequence
  Peptide Derived from Human Papillomavirus
YAQLADTNSNA

SEQ ID NO: 20411 - protein, 10 aa, Artificial Sequence
  Peptide Derived from Human Papillomavirus
YSSGSGGEGV

SEQ ID NO: 20412 - protein, 8 aa, Artificial Sequence
  Peptide Derived from Human Papillomavirus
AATHTKAV

SEQ ID NO: 20413 - protein, 9 aa, Artificial Sequence
  Peptide Derived from Human Papillomavirus
AATHTKAVA

SEQ ID NO: 20414 - protein, 10 aa, Artificial Sequence
  Peptide Derived from Human Papillomavirus
AATHTKAVAL

SEQ ID NO: 20415 - protein, 10 aa, Artificial Sequence
  Peptide Derived from Human Papillomavirus
ASVTVVEGQV

SEQ ID NO: 20416 - protein, 8 aa, Artificial Sequence
  Peptide Derived from Human Papillomavirus
ATHTKAVA

SEQ ID NO: 20417 - protein, 9 aa, Artificial Sequence
  Peptide Derived from Human Papillomavirus
ATHTKAVAL

SEQ ID NO: 20418 - protein, 10 aa, Artificial Sequence
  Peptide Derived from Human Papillomavirus
CAIYYKAREM

SEQ ID NO: 20419 - protein, 11 aa, Artificial Sequence
  Peptide Derived from Human Papillomavirus
CTLYTAVSSTW

SEQ ID NO: 20420 - protein, 10 aa, Artificial Sequence
  Peptide Derived from Human Papillomavirus
DAEKYSKNKV

SEQ ID NO: 20421 - protein, 11 aa, Artificial Sequence
  Peptide Derived from Human Papillomavirus
DAEKYSKNKVW

SEQ ID NO: 20422 - protein, 8 aa, Artificial Sequence
  Peptide Derived from Human Papillomavirus
DANTLKCL

SEQ ID NO: 20423 - protein, 10 aa, Artificial Sequence
  Peptide Derived from Human Papillomavirus
DANTLKCLRY

SEQ ID NO: 20424 - protein, 8 aa, Artificial Sequence
  Peptide Derived from Human Papillomavirus
DSAPILTA

SEQ ID NO: 20425 - protein, 9 aa, Artificial Sequence
  Peptide Derived from Human Papillomavirus
DSAPILTAF

SEQ ID NO: 20426 - protein, 9 aa, Artificial Sequence
  Peptide Derived from Human Papillomavirus
DSEWQRDQF

SEQ ID NO: 20427 - protein, 10 aa, Artificial Sequence
  Peptide Derived from Human Papillomavirus
DSEWQRDQFL

SEQ ID NO: 20428 - protein, 9 aa, Artificial Sequence
  Peptide Derived from Human Papillomavirus
DSTDLRDHI

SEQ ID NO: 20429 - protein, 11 aa, Artificial Sequence
  Peptide Derived from Human Papillomavirus
DSTDLRDHIDY

SEQ ID NO: 20430 - protein, 8 aa, Artificial Sequence
  Peptide Derived from Human Papillomavirus
DSVDSAPI

SEQ ID NO: 20431 - protein, 9 aa, Artificial Sequence
  Peptide Derived from Human Papillomavirus
DSVDSAPIL

SEQ ID NO: 20432 - protein, 11 aa, Artificial Sequence
  Peptide Derived from Human Papillomavirus
DSVDSAPILTA

SEQ ID NO: 20433 - protein, 11 aa, Artificial Sequence
  Peptide Derived from Human Papillomavirus
DTGNPCHTTKL

SEQ ID NO: 20434 - protein, 11 aa, Artificial Sequence
  Peptide Derived from Human Papillomavirus
EASVTVVEGQV

SEQ ID NO: 20435 - protein, 8 aa, Artificial Sequence
  Peptide Derived from Human Papillomavirus
ETIYNSQY

SEQ ID NO: 20436 - protein, 9 aa, Artificial Sequence
  Peptide Derived from Human Papillomavirus
ETLCQRLNV

SEQ ID NO: 20437 - protein, 11 aa, Artificial Sequence
  Peptide Derived from Human Papillomavirus
FSSNEVSSPEI

SEQ ID NO: 20438 - protein, 9 aa, Artificial Sequence
  Peptide Derived from Human Papillomavirus
GTEETQTTI

SEQ ID NO: 20439 - protein, 8 aa, Artificial Sequence
  Peptide Derived from Human Papillomavirus
HAGGQVIL

SEQ ID NO: 20440 - protein, 11 aa, Artificial Sequence
  Peptide Derived from Human Papillomavirus
HTTKLLHRDSV

SEQ ID NO: 20441 - protein, 8 aa, Artificial Sequence
  Peptide Derived from Human Papillomavirus
ITVSTGFM

SEQ ID NO: 20442 - protein, 10 aa, Artificial Sequence
  Peptide Derived from Human Papillomavirus
ITVSTGFMSI

SEQ ID NO: 20443 - protein, 8 aa, Artificial Sequence
  Peptide Derived from Human Papillomavirus
KALQAIEL

SEQ ID NO: 20444 - protein, 10 aa, Artificial Sequence
  Peptide Derived from Human Papillomavirus
KALQAIELQL

SEQ ID NO: 20445 - protein, 10 aa, Artificial Sequence
  Peptide Derived from Human Papillomavirus
KAREMGFKHI

SEQ ID NO: 20446 - protein, 9 aa, Artificial Sequence
  Peptide Derived from Human Papillomavirus
KSAIVTLTY

SEQ ID NO: 20447 - protein, 9 aa, Artificial Sequence
  Peptide Derived from Human Papillomavirus
KTITVSTGF

SEQ ID NO: 20448 - protein, 10 aa, Artificial Sequence
  Peptide Derived from Human Papillomavirus
KTITVSTGFM

SEQ ID NO: 20449 - protein, 8 aa, Artificial Sequence
  Peptide Derived from Human Papillomavirus
LAVSKNKA

SEQ ID NO: 20450 - protein, 9 aa, Artificial Sequence
  Peptide Derived from Human Papillomavirus
LAVSKNKAL

SEQ ID NO: 20451 - protein, 11 aa, Artificial Sequence
  Peptide Derived from Human Papillomavirus
LAVSKNKALQA

SEQ ID NO: 20452 - protein, 10 aa, Artificial Sequence
  Peptide Derived from Human Papillomavirus
LSQVKIPKTI

SEQ ID NO: 20453 - protein, 8 aa, Artificial Sequence
  Peptide Derived from Human Papillomavirus
LTAPTGCI

SEQ ID NO: 20454 - protein, 11 aa, Artificial Sequence
  Peptide Derived from Human Papillomavirus
LTHYENDSTDL

SEQ ID NO: 20455 - protein, 11 aa, Artificial Sequence
  Peptide Derived from Human Papillomavirus
LTLETIYNSQY

SEQ ID NO: 20456 - protein, 8 aa, Artificial Sequence
  Peptide Derived from Human Papillomavirus
NSNTTPIV

SEQ ID NO: 20457 - protein, 10 aa, Artificial Sequence
  Peptide Derived from Human Papillomavirus
NSNTTPIVHL

SEQ ID NO: 20458 - protein, 9 aa, Artificial Sequence
  Peptide Derived from Human Papillomavirus
NSQYSNEKW

SEQ ID NO: 20459 - protein, 11 aa, Artificial Sequence
  Peptide Derived from Human Papillomavirus
NSQYSNEKWTL

SEQ ID NO: 20460 - protein, 8 aa, Artificial Sequence
  Peptide Derived from Human Papillomavirus
NSSHKGRI

SEQ ID NO: 20461 - protein, 8 aa, Artificial Sequence
  Peptide Derived from Human Papillomavirus
NTLKCLRY

SEQ ID NO: 20462 - protein, 10 aa, Artificial Sequence
  Peptide Derived from Human Papillomavirus
NTLKCLRYRF

SEQ ID NO: 20463 - protein, 8 aa, Artificial Sequence
  Peptide Derived from Human Papillomavirus
NTMHYTNW

SEQ ID NO: 20464 - protein, 11 aa, Artificial Sequence
  Peptide Derived from Human Papillomavirus
NTMHYTNWTHI

SEQ ID NO: 20465 - protein, 8 aa, Artificial Sequence
  Peptide Derived from Human Papillomavirus
NTTPIVHL

SEQ ID NO: 20466 - protein, 8 aa, Artificial Sequence
  Peptide Derived from Human Papillomavirus
PAATHTKA

SEQ ID NO: 20467 - protein, 9 aa, Artificial Sequence
  Peptide Derived from Human Papillomavirus
PAATHTKAV

SEQ ID NO: 20468 - protein, 10 aa, Artificial Sequence
  Peptide Derived from Human Papillomavirus
PAATHTKAVA

SEQ ID NO: 20469 - protein, 11 aa, Artificial Sequence
  Peptide Derived from Human Papillomavirus
PAATHTKAVAL

SEQ ID NO: 20470 - protein, 10 aa, Artificial Sequence
  Peptide Derived from Human Papillomavirus
PTGCIKKHGY

SEQ ID NO: 20471 - protein, 10 aa, Artificial Sequence
  Peptide Derived from Human Papillomavirus
PTLAVSKNKA

SEQ ID NO: 20472 - protein, 11 aa, Artificial Sequence
  Peptide Derived from Human Papillomavirus
PTLAVSKNKAL

SEQ ID NO: 20473 - protein, 10 aa, Artificial Sequence
  Peptide Derived from Human Papillomavirus
PTSVFSSNEV

SEQ ID NO: 20474 - protein, 9 aa, Artificial Sequence
  Peptide Derived from Human Papillomavirus
QAIELQLTL

SEQ ID NO: 20475 - protein, 11 aa, Artificial Sequence
  Peptide Derived from Human Papillomavirus
RTYFVQFKDDA

SEQ ID NO: 20476 - protein, 8 aa, Artificial Sequence
  Peptide Derived from Human Papillomavirus
SAIVTLTY

SEQ ID NO: 20477 - protein, 8 aa, Artificial Sequence
  Peptide Derived from Human Papillomavirus
SAPILTAF

SEQ ID NO: 20478 - protein, 10 aa, Artificial Sequence
  Peptide Derived from Human Papillomavirus
SSNEVSSPEI

SEQ ID NO: 20479 - protein, 11 aa, Artificial Sequence
  Peptide Derived from Human Papillomavirus
SSNEVSSPEII

SEQ ID NO: 20480 - protein, 10 aa, Artificial Sequence
  Peptide Derived from Human Papillomavirus
SSPEIIRQHL

SEQ ID NO: 20481 - protein, 11 aa, Artificial Sequence
  Peptide Derived from Human Papillomavirus
SSPEIIRQHLA

SEQ ID NO: 20482 - protein, 11 aa, Artificial Sequence
  Peptide Derived from Human Papillomavirus
SSTWHWTGHNV

SEQ ID NO: 20483 - protein, 8 aa, Artificial Sequence
  Peptide Derived from Human Papillomavirus
STDLRDHI

SEQ ID NO: 20484 - protein, 10 aa, Artificial Sequence
  Peptide Derived from Human Papillomavirus
STDLRDHIDY

SEQ ID NO: 20485 - protein, 11 aa, Artificial Sequence
  Peptide Derived from Human Papillomavirus
STDLRDHIDYW

SEQ ID NO: 20486 - protein, 10 aa, Artificial Sequence
  Peptide Derived from Human Papillomavirus
STWHWTGHNV

SEQ ID NO: 20487 - protein, 11 aa, Artificial Sequence
  Peptide Derived from Human Papillomavirus
TAFNSSHKGRI

SEQ ID NO: 20488 - protein, 9 aa, Artificial Sequence
  Peptide Derived from Human Papillomavirus
TAVSSTWHW

SEQ ID NO: 20489 - protein, 9 aa, Artificial Sequence
  Peptide Derived from Human Papillomavirus
TSVFSSNEV

SEQ ID NO: 20490 - protein, 10 aa, Artificial Sequence
  Peptide Derived from Human Papillomavirus
TTKLLHRDSV

SEQ ID NO: 20491 - protein, 11 aa, Artificial Sequence
  Peptide Derived from Human Papillomavirus
TTPIVHLKGDA

SEQ ID NO: 20492 - protein, 9 aa, Artificial Sequence
  Peptide Derived from Human Papillomavirus
VSKNKALQA

SEQ ID NO: 20493 - protein, 10 aa, Artificial Sequence
  Peptide Derived from Human Papillomavirus
VSKNKALQAI

SEQ ID NO: 20494 - protein, 9 aa, Artificial Sequence
  Peptide Derived from Human Papillomavirus
VSLEVYLTA

SEQ ID NO: 20495 - protein, 11 aa, Artificial Sequence
  Peptide Derived from Human Papillomavirus
VSSPEIIRQHL

SEQ ID NO: 20496 - protein, 8 aa, Artificial Sequence
  Peptide Derived from Human Papillomavirus
VSTGFMSI

SEQ ID NO: 20497 - protein, 9 aa, Artificial Sequence
  Peptide Derived from Human Papillomavirus
VTLTYDSEW

SEQ ID NO: 20498 - protein, 8 aa, Artificial Sequence
  Peptide Derived from Human Papillomavirus
VTVVEGQV

SEQ ID NO: 20499 - protein, 10 aa, Artificial Sequence
  Peptide Derived from Human Papillomavirus
VTVVEGQVDY

SEQ ID NO: 20500 - protein, 11 aa, Artificial Sequence
  Peptide Derived from Human Papillomavirus
VTVVEGQVDYY

SEQ ID NO: 20501 - protein, 11 aa, Artificial Sequence
  Peptide Derived from Human Papillomavirus
WTGHNVKHKSA

SEQ ID NO: 20502 - protein, 10 aa, Artificial Sequence
  Peptide Derived from Human Papillomavirus
WTHIYICEEA

SEQ ID NO: 20503 - protein, 8 aa, Artificial Sequence
  Peptide Derived from Human Papillomavirus
WTLQDVSL

SEQ ID NO: 20504 - protein, 10 aa, Artificial Sequence
  Peptide Derived from Human Papillomavirus
WTLQDVSLEV

SEQ ID NO: 20505 - protein, 11 aa, Artificial Sequence
  Peptide Derived from Human Papillomavirus
WTLQDVSLEVY

SEQ ID NO: 20506 - protein, 9 aa, Artificial Sequence
  Peptide Derived from Human Papillomavirus
YSKNKVWEV

SEQ ID NO: 20507 - protein, 11 aa, Artificial Sequence
  Peptide Derived from Human Papillomavirus
YSKNKVWEVHA

SEQ ID NO: 20508 - protein, 8 aa, Artificial Sequence
  Peptide Derived from Human Papillomavirus
YSNEKWTL

SEQ ID NO: 20509 - protein, 11 aa, Artificial Sequence
  Peptide Derived from Human Papillomavirus
YSNEKWTLQDV

SEQ ID NO: 20510 - protein, 8 aa, Artificial Sequence
  Peptide Derived from Human Papillomavirus
YTAVSSTW

SEQ ID NO: 20511 - protein, 10 aa, Artificial Sequence
  Peptide Derived from Human Papillomavirus
YTAVSSTWHW

SEQ ID NO: 20512 - protein, 8 aa, Artificial Sequence
  Peptide Derived from Human Papillomavirus
YTNWTHIY

SEQ ID NO: 20513 - protein, 9 aa, Artificial Sequence
  Peptide Derived from Human Papillomavirus
YTNWTHIYI

SEQ ID NO: 20514 - protein, 11 aa, Artificial Sequence
  Peptide Derived from Human Papillomavirus
YTVEVQFDGDI

SEQ ID NO: 20515 - protein, 8 aa, Artificial Sequence
  Peptide Derived from Human Papillomavirus
AASAFRCF

SEQ ID NO: 20516 - protein, 9 aa, Artificial Sequence
  Peptide Derived from Human Papillomavirus
AASAFRCFI

SEQ ID NO: 20517 - protein, 10 aa, Artificial Sequence
  Peptide Derived from Human Papillomavirus
AASAFRCFIV

SEQ ID NO: 20518 - protein, 11 aa, Artificial Sequence
  Peptide Derived from Human Papillomavirus
AASAFRCFIVY

SEQ ID NO: 20519 - protein, 8 aa, Artificial Sequence
  Peptide Derived from Human Papillomavirus
ASAFRCFI

SEQ ID NO: 20520 - protein, 9 aa, Artificial Sequence
  Peptide Derived from Human Papillomavirus
ASAFRCFIV

SEQ ID NO: 20521 - protein, 10 aa, Artificial Sequence
  Peptide Derived from Human Papillomavirus
ASAFRCFIVY

SEQ ID NO: 20522 - protein, 11 aa, Artificial Sequence
  Peptide Derived from Human Papillomavirus
ASAFRCFIVYI

SEQ ID NO: 20523 - protein, 9 aa, Artificial Sequence
  Peptide Derived from Human Papillomavirus
ASTTLLACF

SEQ ID NO: 20524 - protein, 10 aa, Artificial Sequence
  Peptide Derived from Human Papillomavirus
ASTTLLACFL

SEQ ID NO: 20525 - protein, 11 aa, Artificial Sequence
  Peptide Derived from Human Papillomavirus
ASTTLLACFLL

SEQ ID NO: 20526 - protein, 8 aa, Artificial Sequence
  Peptide Derived from Human Papillomavirus
DTASTTLL

SEQ ID NO: 20527 - protein, 9 aa, Artificial Sequence
  Peptide Derived from Human Papillomavirus
DTASTTLLA

SEQ ID NO: 20528 - protein, 11 aa, Artificial Sequence
  Peptide Derived from Human Papillomavirus
DTASTTLLACF

SEQ ID NO: 20529 - protein, 8 aa, Artificial Sequence
  Peptide Derived from Human Papillomavirus
HTHARFLI

SEQ ID NO: 20530 - protein, 10 aa, Artificial Sequence
  Peptide Derived from Human Papillomavirus
ITAASAFRCF

SEQ ID NO: 20531 - protein, 11 aa, Artificial Sequence
  Peptide Derived from Human Papillomavirus
ITAASAFRCFI

SEQ ID NO: 20532 - protein, 8 aa, Artificial Sequence
  Peptide Derived from Human Papillomavirus
LACFLLCF

SEQ ID NO: 20533 - protein, 10 aa, Artificial Sequence
  Peptide Derived from Human Papillomavirus
LACFLLCFCV

SEQ ID NO: 20534 - protein, 11 aa, Artificial Sequence
  Peptide Derived from Human Papillomavirus
LACFLLCFCVL

SEQ ID NO: 20535 - protein, 9 aa, Artificial Sequence
  Peptide Derived from Human Papillomavirus
LSVSTYTSL

SEQ ID NO: 20536 - protein, 10 aa, Artificial Sequence
  Peptide Derived from Human Papillomavirus
LSVSTYTSLI

SEQ ID NO: 20537 - protein, 11 aa, Artificial Sequence
  Peptide Derived from Human Papillomavirus
LSVSTYTSLII

SEQ ID NO: 20538 - protein, 11 aa, Artificial Sequence
  Peptide Derived from Human Papillomavirus
MTNLDTASTTL

SEQ ID NO: 20539 - protein, 8 aa, Artificial Sequence
  Peptide Derived from Human Papillomavirus
SAFRCFIV

SEQ ID NO: 20540 - protein, 9 aa, Artificial Sequence
  Peptide Derived from Human Papillomavirus
SAFRCFIVY

SEQ ID NO: 20541 - protein, 10 aa, Artificial Sequence
  Peptide Derived from Human Papillomavirus
SAFRCFIVYI

SEQ ID NO: 20542 - protein, 11 aa, Artificial Sequence
  Peptide Derived from Human Papillomavirus
SAFRCFIVYII

SEQ ID NO: 20543 - protein, 8 aa, Artificial Sequence
  Peptide Derived from Human Papillomavirus
STTLLACF

SEQ ID NO: 20544 - protein, 9 aa, Artificial Sequence
  Peptide Derived from Human Papillomavirus
STTLLACFL

SEQ ID NO: 20545 - protein, 10 aa, Artificial Sequence
  Peptide Derived from Human Papillomavirus
STTLLACFLL

SEQ ID NO: 20546 - protein, 8 aa, Artificial Sequence
  Peptide Derived from Human Papillomavirus
STYTSLII

SEQ ID NO: 20547 - protein, 9 aa, Artificial Sequence
  Peptide Derived from Human Papillomavirus
STYTSLIIL

SEQ ID NO: 20548 - protein, 10 aa, Artificial Sequence
  Peptide Derived from Human Papillomavirus
STYTSLIILV

SEQ ID NO: 20549 - protein, 11 aa, Artificial Sequence
  Peptide Derived from Human Papillomavirus
STYTSLIILVL

SEQ ID NO: 20550 - protein, 9 aa, Artificial Sequence
  Peptide Derived from Human Papillomavirus
TAASAFRCF

SEQ ID NO: 20551 - protein, 10 aa, Artificial Sequence
  Peptide Derived from Human Papillomavirus
TAASAFRCFI

SEQ ID NO: 20552 - protein, 11 aa, Artificial Sequence
  Peptide Derived from Human Papillomavirus
TAASAFRCFIV

SEQ ID NO: 20553 - protein, 8 aa, Artificial Sequence
  Peptide Derived from Human Papillomavirus
TASTTLLA

SEQ ID NO: 20554 - protein, 10 aa, Artificial Sequence
  Peptide Derived from Human Papillomavirus
TASTTLLACF

SEQ ID NO: 20555 - protein, 11 aa, Artificial Sequence
  Peptide Derived from Human Papillomavirus
TASTTLLACFL

SEQ ID NO: 20556 - protein, 8 aa, Artificial Sequence
  Peptide Derived from Human Papillomavirus
TSLIILVL

SEQ ID NO: 20557 - protein, 9 aa, Artificial Sequence
  Peptide Derived from Human Papillomavirus
TSLIILVLL

SEQ ID NO: 20558 - protein, 10 aa, Artificial Sequence
  Peptide Derived from Human Papillomavirus
TSLIILVLLL

SEQ ID NO: 20559 - protein, 11 aa, Artificial Sequence
  Peptide Derived from Human Papillomavirus
TSLIILVLLLW

SEQ ID NO: 20560 - protein, 8 aa, Artificial Sequence
  Peptide Derived from Human Papillomavirus
TTLLACFL

SEQ ID NO: 20561 - protein, 9 aa, Artificial Sequence
  Peptide Derived from Human Papillomavirus
TTLLACFLL

SEQ ID NO: 20562 - protein, 11 aa, Artificial Sequence
  Peptide Derived from Human Papillomavirus
TTLLACFLLCF

SEQ ID NO: 20563 - protein, 8 aa, Artificial Sequence
  Peptide Derived from Human Papillomavirus
VSTYTSLI

SEQ ID NO: 20564 - protein, 9 aa, Artificial Sequence
  Peptide Derived from Human Papillomavirus
VSTYTSLII

SEQ ID NO: 20565 - protein, 10 aa, Artificial Sequence
  Peptide Derived from Human Papillomavirus
VSTYTSLIIL

SEQ ID NO: 20566 - protein, 11 aa, Artificial Sequence
  Peptide Derived from Human Papillomavirus
VSTYTSLIILV

SEQ ID NO: 20567 - protein, 8 aa, Artificial Sequence
  Peptide Derived from Human Papillomavirus
YTSLIILV

SEQ ID NO: 20568 - protein, 9 aa, Artificial Sequence
  Peptide Derived from Human Papillomavirus
YTSLIILVL

SEQ ID NO: 20569 - protein, 10 aa, Artificial Sequence
  Peptide Derived from Human Papillomavirus
YTSLIILVLL

SEQ ID NO: 20570 - protein, 11 aa, Artificial Sequence
  Peptide Derived from Human Papillomavirus
YTSLIILVLLL

SEQ ID NO: 20571 - protein, 8 aa, Artificial Sequence
  Peptide Derived from Human Papillomavirus
CTELQTTI

SEQ ID NO: 20572 - protein, 11 aa, Artificial Sequence
  Peptide Derived from Human Papillomavirus
CTELQTTIHDI

SEQ ID NO: 20573 - protein, 8 aa, Artificial Sequence
  Peptide Derived from Human Papillomavirus
FAFRDLCI

SEQ ID NO: 20574 - protein, 9 aa, Artificial Sequence
  Peptide Derived from Human Papillomavirus
FAFRDLCIV

SEQ ID NO: 20575 - protein, 10 aa, Artificial Sequence
  Peptide Derived from Human Papillomavirus
FAFRDLCIVY

SEQ ID NO: 20576 - protein, 8 aa, Artificial Sequence
  Peptide Derived from Human Papillomavirus
GTTLEQQY

SEQ ID NO: 20577 - protein, 9 aa, Artificial Sequence
  Peptide Derived from Human Papillomavirus
ISEYRHYCY

SEQ ID NO: 20578 - protein, 11 aa, Artificial Sequence
  Peptide Derived from Human Papillomavirus
ISEYRHYCYSL

SEQ ID NO: 20579 - protein, 8 aa, Artificial Sequence
  Peptide Derived from Human Papillomavirus
QTTIHDII

SEQ ID NO: 20580 - protein, 9 aa, Artificial Sequence
  Peptide Derived from Human Papillomavirus
QTTIHDIIL

SEQ ID NO: 20581 - protein, 11 aa, Artificial Sequence
  Peptide Derived from Human Papillomavirus
RSSRTRRETQL

SEQ ID NO: 20582 - protein, 8 aa, Artificial Sequence
  Peptide Derived from Human Papillomavirus
RTRRETQL

SEQ ID NO: 20583 - protein, 10 aa, Artificial Sequence
  Peptide Derived from Human Papillomavirus
SSRTRRETQL

SEQ ID NO: 20584 - protein, 8 aa, Artificial Sequence
  Peptide Derived from Human Papillomavirus
TTIHDIIL

SEQ ID NO: 20585 - protein, 11 aa, Artificial Sequence
  Peptide Derived from Human Papillomavirus
TTIHDIILECV

SEQ ID NO: 20586 - protein, 11 aa, Artificial Sequence
  Peptide Derived from Human Papillomavirus
TTLEQQYNKPL

SEQ ID NO: 20587 - protein, 8 aa, Artificial Sequence
  Peptide Derived from Human Papillomavirus
YAVCDKCL

SEQ ID NO: 20588 - protein, 10 aa, Artificial Sequence
  Peptide Derived from Human Papillomavirus
YAVCDKCLKF

SEQ ID NO: 20589 - protein, 11 aa, Artificial Sequence
  Peptide Derived from Human Papillomavirus
YAVCDKCLKFY

SEQ ID NO: 20590 - protein, 10 aa, Artificial Sequence
  Peptide Derived from Human Papillomavirus
YSKISEYRHY

SEQ ID NO: 20591 - protein, 8 aa, Artificial Sequence
  Peptide Derived from Human Papillomavirus
YSLYGTTL

SEQ ID NO: 20592 - protein, 9 aa, Artificial Sequence
  Peptide Derived from Human Papillomavirus
DSSEEEDEI

SEQ ID NO: 20593 - protein, 8 aa, Artificial Sequence
  Peptide Derived from Human Papillomavirus
DSTLRLCV

SEQ ID NO: 20594 - protein, 8 aa, Artificial Sequence
  Peptide Derived from Human Papillomavirus
DTPTLHEY

SEQ ID NO: 20595 - protein, 9 aa, Artificial Sequence
  Peptide Derived from Human Papillomavirus
DTPTLHEYM

SEQ ID NO: 20596 - protein, 10 aa, Artificial Sequence
  Peptide Derived from Human Papillomavirus
DTPTLHEYML

SEQ ID NO: 20597 - protein, 8 aa, Artificial Sequence
  Peptide Derived from Human Papillomavirus
ETTDLYCY

SEQ ID NO: 20598 - protein, 11 aa, Artificial Sequence
  Peptide Derived from Human Papillomavirus
ETTDLYCYEQL

SEQ ID NO: 20599 - protein, 9 aa, Artificial Sequence
  Peptide Derived from Human Papillomavirus
GTLGIVCPI

SEQ ID NO: 20600 - protein, 10 aa, Artificial Sequence
  Peptide Derived from Human Papillomavirus
PAGQAEPDRA

SEQ ID NO: 20601 - protein, 8 aa, Artificial Sequence
  Peptide Derived from Human Papillomavirus
PTLHEYML

SEQ ID NO: 20602 - protein, 10 aa, Artificial Sequence
  Peptide Derived from Human Papillomavirus
PTLHEYMLDL

SEQ ID NO: 20603 - protein, 9 aa, Artificial Sequence
  Peptide Derived from Human Papillomavirus
QAEPDRAHY

SEQ ID NO: 20604 - protein, 11 aa, Artificial Sequence
  Peptide Derived from Human Papillomavirus
QAEPDRAHYNI

SEQ ID NO: 20605 - protein, 10 aa, Artificial Sequence
  Peptide Derived from Human Papillomavirus
QSTHVDIRTL

SEQ ID NO: 20606 - protein, 9 aa, Artificial Sequence
  Peptide Derived from Human Papillomavirus
RAHYNIVTF

SEQ ID NO: 20607 - protein, 8 aa, Artificial Sequence
  Peptide Derived from Human Papillomavirus
RTLEDLLM

SEQ ID NO: 20608 - protein, 11 aa, Artificial Sequence
  Peptide Derived from Human Papillomavirus
RTLEDLLMGTL

SEQ ID NO: 20609 - protein, 8 aa, Artificial Sequence
  Peptide Derived from Human Papillomavirus
SSEEEDEI

SEQ ID NO: 20610 - protein, 9 aa, Artificial Sequence
  Peptide Derived from Human Papillomavirus
STHVDIRTL

SEQ ID NO: 20611 - protein, 10 aa, Artificial Sequence
  Peptide Derived from Human Papillomavirus
TTDLYCYEQL

SEQ ID NO: 20612 - protein, 11 aa, Artificial Sequence
  Peptide Derived from Human Papillomavirus
VTFCCKCDSTL

SEQ ID NO: 20613 - protein, 10 aa, Artificial Sequence
  Peptide Derived from Human Papillomavirus
AAISTSETTY

SEQ ID NO: 20614 - protein, 8 aa, Artificial Sequence
  Peptide Derived from Human Papillomavirus
ASAYAANA

SEQ ID NO: 20615 - protein, 10 aa, Artificial Sequence
  Peptide Derived from Human Papillomavirus
ASAYAANAGV

SEQ ID NO: 20616 - protein, 8 aa, Artificial Sequence
  Peptide Derived from Human Papillomavirus
ATVYLPPV

SEQ ID NO: 20617 - protein, 10 aa, Artificial Sequence
  Peptide Derived from Human Papillomavirus
ATVYLPPVPV

SEQ ID NO: 20618 - protein, 11 aa, Artificial Sequence
  Peptide Derived from Human Papillomavirus
CAAISTSETTY

SEQ ID NO: 20619 - protein, 10 aa, Artificial Sequence
  Peptide Derived from Human Papillomavirus
CTSICKYPDY

SEQ ID NO: 20620 - protein, 11 aa, Artificial Sequence
  Peptide Derived from Human Papillomavirus
CTSICKYPDYI

SEQ ID NO: 20621 - protein, 9 aa, Artificial Sequence
  Peptide Derived from Human Papillomavirus
DAQIFNKPY

SEQ ID NO: 20622 - protein, 10 aa, Artificial Sequence
  Peptide Derived from Human Papillomavirus
DAQIFNKPYW

SEQ ID NO: 20623 - protein, 11 aa, Artificial Sequence
  Peptide Derived from Human Papillomavirus
DAQIFNKPYWL

SEQ ID NO: 20624 - protein, 8 aa, Artificial Sequence
  Peptide Derived from Human Papillomavirus
DTENASAY

SEQ ID NO: 20625 - protein, 9 aa, Artificial Sequence
  Peptide Derived from Human Papillomavirus
DTENASAYA

SEQ ID NO: 20626 - protein, 10 aa, Artificial Sequence
  Peptide Derived from Human Papillomavirus
DTENASAYAA

SEQ ID NO: 20627 - protein, 9 aa, Artificial Sequence
  Peptide Derived from Human Papillomavirus
DTGFGAMDF

SEQ ID NO: 20628 - protein, 8 aa, Artificial Sequence
  Peptide Derived from Human Papillomavirus
DTQRLVWA

SEQ ID NO: 20629 - protein, 10 aa, Artificial Sequence
  Peptide Derived from Human Papillomavirus
DTQRLVWACV

SEQ ID NO: 20630 - protein, 8 aa, Artificial Sequence
  Peptide Derived from Human Papillomavirus
DTTRSTNM

SEQ ID NO: 20631 - protein, 10 aa, Artificial Sequence
  Peptide Derived from Human Papillomavirus
DTTRSTNMSL

SEQ ID NO: 20632 - protein, 10 aa, Artificial Sequence
  Peptide Derived from Human Papillomavirus
DTYRFVTSQA

SEQ ID NO: 20633 - protein, 11 aa, Artificial Sequence
  Peptide Derived from Human Papillomavirus
DTYRFVTSQAI

SEQ ID NO: 20634 - protein, 9 aa, Artificial Sequence
  Peptide Derived from Human Papillomavirus
EATVYLPPV

SEQ ID NO: 20635 - protein, 11 aa, Artificial Sequence
  Peptide Derived from Human Papillomavirus
EATVYLPPVPV

SEQ ID NO: 20636 - protein, 9 aa, Artificial Sequence
  Peptide Derived from Human Papillomavirus
ETTYKNTNF

SEQ ID NO: 20637 - protein, 8 aa, Artificial Sequence
  Peptide Derived from Human Papillomavirus
FSADLDQF

SEQ ID NO: 20638 - protein, 10 aa, Artificial Sequence
  Peptide Derived from Human Papillomavirus
FSADLDQFPL

SEQ ID NO: 20639 - protein, 8 aa, Artificial Sequence
  Peptide Derived from Human Papillomavirus
FTLGKRKA

SEQ ID NO: 20640 - protein, 11 aa, Artificial Sequence
  Peptide Derived from Human Papillomavirus
FTTLQANKSEV

SEQ ID NO: 20641 - protein, 8 aa, Artificial Sequence
  Peptide Derived from Human Papillomavirus
GAMDFTTL

SEQ ID NO: 20642 - protein, 10 aa, Artificial Sequence
  Peptide Derived from Human Papillomavirus
GAMDFTTLQA

SEQ ID NO: 20643 - protein, 11 aa, Artificial Sequence
  Peptide Derived from Human Papillomavirus
GAVGENVPDDL

SEQ ID NO: 20644 - protein, 8 aa, Artificial Sequence
  Peptide Derived from Human Papillomavirus
GSGSTANL

SEQ ID NO: 20645 - protein, 9 aa, Artificial Sequence
  Peptide Derived from Human Papillomavirus
GSGSTANLA

SEQ ID NO: 20646 - protein, 8 aa, Artificial Sequence
  Peptide Derived from Human Papillomavirus
GSMVTSDA

SEQ ID NO: 20647 - protein, 10 aa, Artificial Sequence
  Peptide Derived from Human Papillomavirus
GSMVTSDAQI

SEQ ID NO: 20648 - protein, 11 aa, Artificial Sequence
  Peptide Derived from Human Papillomavirus
GSMVTSDAQIF

SEQ ID NO: 20649 - protein, 8 aa, Artificial Sequence
  Peptide Derived from Human Papillomavirus
GSPCTNVA

SEQ ID NO: 20650 - protein, 9 aa, Artificial Sequence
  Peptide Derived from Human Papillomavirus
GSPCTNVAV

SEQ ID NO: 20651 - protein, 11 aa, Artificial Sequence
  Peptide Derived from Human Papillomavirus
GSTANLASSNY

SEQ ID NO: 20652 - protein, 9 aa, Artificial Sequence
  Peptide Derived from Human Papillomavirus
GTLEDTYRF

SEQ ID NO: 20653 - protein, 10 aa, Artificial Sequence
  Peptide Derived from Human Papillomavirus
GTLEDTYRFV

SEQ ID NO: 20654 - protein, 8 aa, Artificial Sequence
  Peptide Derived from Human Papillomavirus
GTSRLLAV

SEQ ID NO: 20655 - protein, 8 aa, Artificial Sequence
  Peptide Derived from Human Papillomavirus
HAGTSRLL

SEQ ID NO: 20656 - protein, 9 aa, Artificial Sequence
  Peptide Derived from Human Papillomavirus
HAGTSRLLA

SEQ ID NO: 20657 - protein, 10 aa, Artificial Sequence
  Peptide Derived from Human Papillomavirus
HAGTSRLLAV

SEQ ID NO: 20658 - protein, 8 aa, Artificial Sequence
  Peptide Derived from Human Papillomavirus
HSMNSTIL

SEQ ID NO: 20659 - protein, 11 aa, Artificial Sequence
  Peptide Derived from Human Papillomavirus
HSMNSTILEDW

SEQ ID NO: 20660 - protein, 11 aa, Artificial Sequence
  Peptide Derived from Human Papillomavirus
HTPPAPKEDPL

SEQ ID NO: 20661 - protein, 10 aa, Artificial Sequence
  Peptide Derived from Human Papillomavirus
IACQKHTPPA

SEQ ID NO: 20662 - protein, 10 aa, Artificial Sequence
  Peptide Derived from Human Papillomavirus
ISGHPLLNKL

SEQ ID NO: 20663 - protein, 10 aa, Artificial Sequence
  Peptide Derived from Human Papillomavirus
ISMDYKQTQL

SEQ ID NO: 20664 - protein, 8 aa, Artificial Sequence
  Peptide Derived from Human Papillomavirus
ISTSETTY

SEQ ID NO: 20665 - protein, 8 aa, Artificial Sequence
  Peptide Derived from Human Papillomavirus
ITCYENDV

SEQ ID NO: 20666 - protein, 10 aa, Artificial Sequence
  Peptide Derived from Human Papillomavirus
ITCYENDVNV

SEQ ID NO: 20667 - protein, 11 aa, Artificial Sequence
  Peptide Derived from Human Papillomavirus
ITCYENDVNVY

SEQ ID NO: 20668 - protein, 8 aa, Artificial Sequence
  Peptide Derived from Human Papillomavirus
ITLTADVM

SEQ ID NO: 20669 - protein, 10 aa, Artificial Sequence
  Peptide Derived from Human Papillomavirus
ITLTADVMTY

SEQ ID NO: 20670 - protein, 11 aa, Artificial Sequence
  Peptide Derived from Human Papillomavirus
ITLTADVMTYI

SEQ ID NO: 20671 - protein, 8 aa, Artificial Sequence
  Peptide Derived from Human Papillomavirus
KAKPKFTL

SEQ ID NO: 20672 - protein, 8 aa, Artificial Sequence
  Peptide Derived from Human Papillomavirus
KSEVPLDI

SEQ ID NO: 20673 - protein, 8 aa, Artificial Sequence
  Peptide Derived from Human Papillomavirus
LAVGHPYF

SEQ ID NO: 20674 - protein, 10 aa, Artificial Sequence
  Peptide Derived from Human Papillomavirus
LAVGHPYFPI

SEQ ID NO: 20675 - protein, 8 aa, Artificial Sequence
  Peptide Derived from Human Papillomavirus
LTADVMTY

SEQ ID NO: 20676 - protein, 9 aa, Artificial Sequence
  Peptide Derived from Human Papillomavirus
LTADVMTYI

SEQ ID NO: 20677 - protein, 9 aa, Artificial Sequence
  Peptide Derived from Human Papillomavirus
MSLWLPSEA

SEQ ID NO: 20678 - protein, 11 aa, Artificial Sequence
  Peptide Derived from Human Papillomavirus
MSLWLPSEATV

SEQ ID NO: 20679 - protein, 11 aa, Artificial Sequence
  Peptide Derived from Human Papillomavirus
MTYIHSMNSTI

SEQ ID NO: 20680 - protein, 10 aa, Artificial Sequence
  Peptide Derived from Human Papillomavirus
NAGVDNRECI

SEQ ID NO: 20681 - protein, 9 aa, Artificial Sequence
  Peptide Derived from Human Papillomavirus
NASAYAANA

SEQ ID NO: 20682 - protein, 11 aa, Artificial Sequence
  Peptide Derived from Human Papillomavirus
NASAYAANAGV

SEQ ID NO: 20683 - protein, 8 aa, Artificial Sequence
  Peptide Derived from Human Papillomavirus
NSTILEDW

SEQ ID NO: 20684 - protein, 10 aa, Artificial Sequence
  Peptide Derived from Human Papillomavirus
NSTILEDWNF

SEQ ID NO: 20685 - protein, 8 aa, Artificial Sequence
  Peptide Derived from Human Papillomavirus
NTNFKEYL

SEQ ID NO: 20686 - protein, 9 aa, Artificial Sequence
  Peptide Derived from Human Papillomavirus
NTVIQDGDM

SEQ ID NO: 20687 - protein, 10 aa, Artificial Sequence
  Peptide Derived from Human Papillomavirus
NTVIQDGDMV

SEQ ID NO: 20688 - protein, 8 aa, Artificial Sequence
  Peptide Derived from Human Papillomavirus
PAPKEDPL

SEQ ID NO: 20689 - protein, 11 aa, Artificial Sequence
  Peptide Derived from Human Papillomavirus
PAPKEDPLKKY

SEQ ID NO: 20690 - protein, 8 aa, Artificial Sequence
  Peptide Derived from Human Papillomavirus
PSEATVYL

SEQ ID NO: 20691 - protein, 11 aa, Artificial Sequence
  Peptide Derived from Human Papillomavirus
PSEATVYLPPV

SEQ ID NO: 20692 - protein, 10 aa, Artificial Sequence
  Peptide Derived from Human Papillomavirus
PSGSMVTSDA

SEQ ID NO: 20693 - protein, 8 aa, Artificial Sequence
  Peptide Derived from Human Papillomavirus
PTPSGSMV

SEQ ID NO: 20694 - protein, 10 aa, Artificial Sequence
  Peptide Derived from Human Papillomavirus
PTTSSTSTTA

SEQ ID NO: 20695 - protein, 10 aa, Artificial Sequence
  Peptide Derived from Human Papillomavirus
QAGLKAKPKF

SEQ ID NO: 20696 - protein, 9 aa, Artificial Sequence
  Peptide Derived from Human Papillomavirus
QANKSEVPL

SEQ ID NO: 20697 - protein, 11 aa, Artificial Sequence
  Peptide Derived from Human Papillomavirus
QANKSEVPLDI

SEQ ID NO: 20698 - protein, 9 aa, Artificial Sequence
  Peptide Derived from Human Papillomavirus
RAGAVGENV

SEQ ID NO: 20699 - protein, 9 aa, Artificial Sequence
  Peptide Derived from Human Papillomavirus
RAQGHNNGI

SEQ ID NO: 20700 - protein, 11 aa, Artificial Sequence
  Peptide Derived from Human Papillomavirus
RAQGHNNGICW

SEQ ID NO: 20701 - protein, 9 aa, Artificial Sequence
  Peptide Derived from Human Papillomavirus
RSTNMSLCA

SEQ ID NO: 20702 - protein, 10 aa, Artificial Sequence
  Peptide Derived from Human Papillomavirus
RSTNMSLCAA

SEQ ID NO: 20703 - protein, 11 aa, Artificial Sequence
  Peptide Derived from Human Papillomavirus
RSTNMSLCAAI

SEQ ID NO: 20704 - protein, 8 aa, Artificial Sequence
  Peptide Derived from Human Papillomavirus
RTNIYYHA

SEQ ID NO: 20705 - protein, 9 aa, Artificial Sequence
  Peptide Derived from Human Papillomavirus
SADLDQFPL

SEQ ID NO: 20706 - protein, 9 aa, Artificial Sequence
  Peptide Derived from Human Papillomavirus
SAYAANAGV

SEQ ID NO: 20707 - protein, 10 aa, Artificial Sequence
  Peptide Derived from Human Papillomavirus
STANLASSNY

SEQ ID NO: 20708 - protein, 11 aa, Artificial Sequence
  Peptide Derived from Human Papillomavirus
STANLASSNYF

SEQ ID NO: 20709 - protein, 11 aa, Artificial Sequence
  Peptide Derived from Human Papillomavirus
STDEYVARTNI

SEQ ID NO: 20710 - protein, 9 aa, Artificial Sequence
  Peptide Derived from Human Papillomavirus
STILEDWNF

SEQ ID NO: 20711 - protein, 11 aa, Artificial Sequence
  Peptide Derived from Human Papillomavirus
STILEDWNFGL

SEQ ID NO: 20712 - protein, 8 aa, Artificial Sequence
  Peptide Derived from Human Papillomavirus
STNMSLCA

SEQ ID NO: 20713 - protein, 9 aa, Artificial Sequence
  Peptide Derived from Human Papillomavirus
STNMSLCAA

SEQ ID NO: 20714 - protein, 10 aa, Artificial Sequence
  Peptide Derived from Human Papillomavirus
STNMSLCAAI

SEQ ID NO: 20715 - protein, 11 aa, Artificial Sequence
  Peptide Derived from Human Papillomavirus
STTAKRKKRKL

SEQ ID NO: 20716 - protein, 8 aa, Artificial Sequence
  Peptide Derived from Human Papillomavirus
TADVMTYI

SEQ ID NO: 20717 - protein, 11 aa, Artificial Sequence
  Peptide Derived from Human Papillomavirus
TADVMTYIHSM

SEQ ID NO: 20718 - protein, 9 aa, Artificial Sequence
  Peptide Derived from Human Papillomavirus
TAKRKKRKL

SEQ ID NO: 20719 - protein, 9 aa, Artificial Sequence
  Peptide Derived from Human Papillomavirus
TANLASSNY

SEQ ID NO: 20720 - protein, 10 aa, Artificial Sequence
  Peptide Derived from Human Papillomavirus
TANLASSNYF

SEQ ID NO: 20721 - protein, 11 aa, Artificial Sequence
  Peptide Derived from Human Papillomavirus
TSDAQIFNKPY

SEQ ID NO: 20722 - protein, 11 aa, Artificial Sequence
  Peptide Derived from Human Papillomavirus
TSETTYKNTNF

SEQ ID NO: 20723 - protein, 11 aa, Artificial Sequence
  Peptide Derived from Human Papillomavirus
TSFYNPDTQRL

SEQ ID NO: 20724 - protein, 9 aa, Artificial Sequence
  Peptide Derived from Human Papillomavirus
TSICKYPDY

SEQ ID NO: 20725 - protein, 10 aa, Artificial Sequence
  Peptide Derived from Human Papillomavirus
TSICKYPDYI

SEQ ID NO: 20726 - protein, 11 aa, Artificial Sequence
  Peptide Derived from Human Papillomavirus
TSRLLAVGHPY

SEQ ID NO: 20727 - protein, 8 aa, Artificial Sequence
  Peptide Derived from Human Papillomavirus
TSSTSTTA

SEQ ID NO: 20728 - protein, 10 aa, Artificial Sequence
  Peptide Derived from Human Papillomavirus
TTAKRKKRKL

SEQ ID NO: 20729 - protein, 10 aa, Artificial Sequence
  Peptide Derived from Human Papillomavirus
TTLQANKSEV

SEQ ID NO: 20730 - protein, 9 aa, Artificial Sequence
  Peptide Derived from Human Papillomavirus
TTRSTNMSL

SEQ ID NO: 20731 - protein, 11 aa, Artificial Sequence
  Peptide Derived from Human Papillomavirus
TTRSTNMSLCA

SEQ ID NO: 20732 - protein, 9 aa, Artificial Sequence
  Peptide Derived from Human Papillomavirus
TTSSTSTTA

SEQ ID NO: 20733 - protein, 8 aa, Artificial Sequence
  Peptide Derived from Human Papillomavirus
TTYKNTNF

SEQ ID NO: 20734 - protein, 11 aa, Artificial Sequence
  Peptide Derived from Human Papillomavirus
TTYKNTNFKEY

SEQ ID NO: 20735 - protein, 8 aa, Artificial Sequence
  Peptide Derived from Human Papillomavirus
VARTNIYY

SEQ ID NO: 20736 - protein, 10 aa, Artificial Sequence
  Peptide Derived from Human Papillomavirus
VARTNIYYHA

SEQ ID NO: 20737 - protein, 11 aa, Artificial Sequence
  Peptide Derived from Human Papillomavirus
VAVNPGDCPPL

SEQ ID NO: 20738 - protein, 9 aa, Artificial Sequence
  Peptide Derived from Human Papillomavirus
VSEPYGDSL

SEQ ID NO: 20739 - protein, 10 aa, Artificial Sequence
  Peptide Derived from Human Papillomavirus
VSEPYGDSLF

SEQ ID NO: 20740 - protein, 11 aa, Artificial Sequence
  Peptide Derived from Human Papillomavirus
VSEPYGDSLFF

SEQ ID NO: 20741 - protein, 8 aa, Artificial Sequence
  Peptide Derived from Human Papillomavirus
VSGLQYRV

SEQ ID NO: 20742 - protein, 9 aa, Artificial Sequence
  Peptide Derived from Human Papillomavirus
VSGLQYRVF

SEQ ID NO: 20743 - protein, 11 aa, Artificial Sequence
  Peptide Derived from Human Papillomavirus
VSGLQYRVFRI

SEQ ID NO: 20744 - protein, 10 aa, Artificial Sequence
  Peptide Derived from Human Papillomavirus
VSKVVSTDEY

SEQ ID NO: 20745 - protein, 11 aa, Artificial Sequence
  Peptide Derived from Human Papillomavirus
VSKVVSTDEYV

SEQ ID NO: 20746 - protein, 8 aa, Artificial Sequence
  Peptide Derived from Human Papillomavirus
VSTDEYVA

SEQ ID NO: 20747 - protein, 8 aa, Artificial Sequence
  Peptide Derived from Human Papillomavirus
VTFIYILV

SEQ ID NO: 20748 - protein, 9 aa, Artificial Sequence
  Peptide Derived from Human Papillomavirus
VTFIYILVI

SEQ ID NO: 20749 - protein, 8 aa, Artificial Sequence
  Peptide Derived from Human Papillomavirus
VTSDAQIF

SEQ ID NO: 20750 - protein, 8 aa, Artificial Sequence
  Peptide Derived from Human Papillomavirus
WACVGVEV

SEQ ID NO: 20751 - protein, 8 aa, Artificial Sequence
  Peptide Derived from Human Papillomavirus
YTFWEVNL

SEQ ID NO: 20752 - protein, 11 aa, Artificial Sequence
  Peptide Derived from Human Papillomavirus
AALPTSINNGL

SEQ ID NO: 20753 - protein, 8 aa, Artificial Sequence
  Peptide Derived from Human Papillomavirus
ATDTLAPV

SEQ ID NO: 20754 - protein, 11 aa, Artificial Sequence
  Peptide Derived from Human Papillomavirus
ATQLYKTCKQA

SEQ ID NO: 20755 - protein, 8 aa, Artificial Sequence
  Peptide Derived from Human Papillomavirus
DAGAPTSV

SEQ ID NO: 20756 - protein, 11 aa, Artificial Sequence
  Peptide Derived from Human Papillomavirus
DAGAPTSVPSI

SEQ ID NO: 20757 - protein, 11 aa, Artificial Sequence
  Peptide Derived from Human Papillomavirus
DAGDFYLHPSY

SEQ ID NO: 20758 - protein, 8 aa, Artificial Sequence
  Peptide Derived from Human Papillomavirus
DSAEEIEL

SEQ ID NO: 20759 - protein, 11 aa, Artificial Sequence
  Peptide Derived from Human Papillomavirus
DSAEEIELQTI

SEQ ID NO: 20760 - protein, 10 aa, Artificial Sequence
  Peptide Derived from Human Papillomavirus
DTLAPVRPPL

SEQ ID NO: 20761 - protein, 10 aa, Artificial Sequence
  Peptide Derived from Human Papillomavirus
DTSTTPVPSV

SEQ ID NO: 20762 - protein, 9 aa, Artificial Sequence
  Peptide Derived from Human Papillomavirus
DTTPAILDI

SEQ ID NO: 20763 - protein, 8 aa, Artificial Sequence
  Peptide Derived from Human Papillomavirus
ETGGHFTL

SEQ ID NO: 20764 - protein, 9 aa, Artificial Sequence
  Peptide Derived from Human Papillomavirus
ETSFIDAGA

SEQ ID NO: 20765 - protein, 8 aa, Artificial Sequence
  Peptide Derived from Human Papillomavirus
FSDVSLAA

SEQ ID NO: 20766 - protein, 8 aa, Artificial Sequence
  Peptide Derived from Human Papillomavirus
FSSNDNSI

SEQ ID NO: 20767 - protein, 10 aa, Artificial Sequence
  Peptide Derived from Human Papillomavirus
FSSNDNSINI

SEQ ID NO: 20768 - protein, 11 aa, Artificial Sequence
  Peptide Derived from Human Papillomavirus
FSSNDNSINIA

SEQ ID NO: 20769 - protein, 10 aa, Artificial Sequence
  Peptide Derived from Human Papillomavirus
FSTIDSAEEI

SEQ ID NO: 20770 - protein, 8 aa, Artificial Sequence
  Peptide Derived from Human Papillomavirus
FTLSSSTI

SEQ ID NO: 20771 - protein, 8 aa, Artificial Sequence
  Peptide Derived from Human Papillomavirus
GAKVHYYY

SEQ ID NO: 20772 - protein, 10 aa, Artificial Sequence
  Peptide Derived from Human Papillomavirus
GAKVHYYYDF

SEQ ID NO: 20773 - protein, 9 aa, Artificial Sequence
  Peptide Derived from Human Papillomavirus
GAPTSVPSI

SEQ ID NO: 20774 - protein, 8 aa, Artificial Sequence
  Peptide Derived from Human Papillomavirus
GAYNIPLV

SEQ ID NO: 20775 - protein, 10 aa, Artificial Sequence
  Peptide Derived from Human Papillomavirus
GSGTGGRTGY

SEQ ID NO: 20776 - protein, 11 aa, Artificial Sequence
  Peptide Derived from Human Papillomavirus
GSGTGGRTGYI

SEQ ID NO: 20777 - protein, 10 aa, Artificial Sequence
  Peptide Derived from Human Papillomavirus
GSMGVFFGGL

SEQ ID NO: 20778 - protein, 8 aa, Artificial Sequence
  Peptide Derived from Human Papillomavirus
GSPQYTII

SEQ ID NO: 20779 - protein, 9 aa, Artificial Sequence
  Peptide Derived from Human Papillomavirus
GSPQYTIIA

SEQ ID NO: 20780 - protein, 11 aa, Artificial Sequence
  Peptide Derived from Human Papillomavirus
GSPQYTIIADA

SEQ ID NO: 20781 - protein, 8 aa, Artificial Sequence
  Peptide Derived from Human Papillomavirus
GSRPVARL

SEQ ID NO: 20782 - protein, 10 aa, Artificial Sequence
  Peptide Derived from Human Papillomavirus
GSRPVARLGL

SEQ ID NO: 20783 - protein, 11 aa, Artificial Sequence
  Peptide Derived from Human Papillomavirus
GSRPVARLGLY

SEQ ID NO: 20784 - protein, 8 aa, Artificial Sequence
  Peptide Derived from Human Papillomavirus
GTCPPDII

SEQ ID NO: 20785 - protein, 11 aa, Artificial Sequence
  Peptide Derived from Human Papillomavirus
GTCPPDIIPKV

SEQ ID NO: 20786 - protein, 8 aa, Artificial Sequence
  Peptide Derived from Human Papillomavirus
GTGGRTGY

SEQ ID NO: 20787 - protein, 9 aa, Artificial Sequence
  Peptide Derived from Human Papillomavirus
GTGGRTGYI

SEQ ID NO: 20788 - protein, 11 aa, Artificial Sequence
  Peptide Derived from Human Papillomavirus
GTGGRTGYIPL

SEQ ID NO: 20789 - protein, 11 aa, Artificial Sequence
  Peptide Derived from Human Papillomavirus
GTRPPTATDTL

SEQ ID NO: 20790 - protein, 8 aa, Artificial Sequence
  Peptide Derived from Human Papillomavirus
HAALPTSI

SEQ ID NO: 20791 - protein, 8 aa, Artificial Sequence
  Peptide Derived from Human Papillomavirus
IADAGDFY

SEQ ID NO: 20792 - protein, 9 aa, Artificial Sequence
  Peptide Derived from Human Papillomavirus
IADAGDFYL

SEQ ID NO: 20793 - protein, 8 aa, Artificial Sequence
  Peptide Derived from Human Papillomavirus
IADQILQY

SEQ ID NO: 20794 - protein, 11 aa, Artificial Sequence
  Peptide Derived from Human Papillomavirus
IADQILQYGSM

SEQ ID NO: 20795 - protein, 8 aa, Artificial Sequence
  Peptide Derived from Human Papillomavirus
IAPDPDFL

SEQ ID NO: 20796 - protein, 10 aa, Artificial Sequence
  Peptide Derived from Human Papillomavirus
IAPDPDFLDI

SEQ ID NO: 20797 - protein, 11 aa, Artificial Sequence
  Peptide Derived from Human Papillomavirus
IAPDPDFLDIV

SEQ ID NO: 20798 - protein, 9 aa, Artificial Sequence
  Peptide Derived from Human Papillomavirus
ISTHNYEEI

SEQ ID NO: 20799 - protein, 11 aa, Artificial Sequence
  Peptide Derived from Human Papillomavirus
ISTHNYEEIPM

SEQ ID NO: 20800 - protein, 8 aa, Artificial Sequence
  Peptide Derived from Human Papillomavirus
ITDQAPSL

SEQ ID NO: 20801 - protein, 9 aa, Artificial Sequence
  Peptide Derived from Human Papillomavirus
ITDQAPSLI

SEQ ID NO: 20802 - protein, 11 aa, Artificial Sequence
  Peptide Derived from Human Papillomavirus
ITDQAPSLIPI

SEQ ID NO: 20803 - protein, 9 aa, Artificial Sequence
  Peptide Derived from Human Papillomavirus
ITDTSTTPV

SEQ ID NO: 20804 - protein, 8 aa, Artificial Sequence
  Peptide Derived from Human Papillomavirus
ITTPTKLI

SEQ ID NO: 20805 - protein, 10 aa, Artificial Sequence
  Peptide Derived from Human Papillomavirus
ITTPTKLITY

SEQ ID NO: 20806 - protein, 10 aa, Artificial Sequence
  Peptide Derived from Human Papillomavirus
ITTSTDTTPA

SEQ ID NO: 20807 - protein, 11 aa, Artificial Sequence
  Peptide Derived from Human Papillomavirus
ITTSTDTTPAI

SEQ ID NO: 20808 - protein, 8 aa, Artificial Sequence
  Peptide Derived from Human Papillomavirus
ITYDNPAY

SEQ ID NO: 20809 - protein, 11 aa, Artificial Sequence
  Peptide Derived from Human Papillomavirus
ITYDNPAYEGI

SEQ ID NO: 20810 - protein, 9 aa, Artificial Sequence
  Peptide Derived from Human Papillomavirus
KSIGAKVHY

SEQ ID NO: 20811 - protein, 10 aa, Artificial Sequence
  Peptide Derived from Human Papillomavirus
KSIGAKVHYY

SEQ ID NO: 20812 - protein, 11 aa, Artificial Sequence
  Peptide Derived from Human Papillomavirus
KSIGAKVHYYY

SEQ ID NO: 20813 - protein, 8 aa, Artificial Sequence
  Peptide Derived from Human Papillomavirus
KTIADQIL

SEQ ID NO: 20814 - protein, 10 aa, Artificial Sequence
  Peptide Derived from Human Papillomavirus
KTIADQILQY

SEQ ID NO: 20815 - protein, 8 aa, Artificial Sequence
  Peptide Derived from Human Papillomavirus
LAPVRPPL

SEQ ID NO: 20816 - protein, 10 aa, Artificial Sequence
  Peptide Derived from Human Papillomavirus
LAPVRPPLTV

SEQ ID NO: 20817 - protein, 11 aa, Artificial Sequence
  Peptide Derived from Human Papillomavirus
LSGYIPANTTI

SEQ ID NO: 20818 - protein, 11 aa, Artificial Sequence
  Peptide Derived from Human Papillomavirus
LSSSTISTHNY

SEQ ID NO: 20819 - protein, 8 aa, Artificial Sequence
  Peptide Derived from Human Papillomavirus
LTSRRTGI

SEQ ID NO: 20820 - protein, 10 aa, Artificial Sequence
  Peptide Derived from Human Papillomavirus
LTSRRTGIRY

SEQ ID NO: 20821 - protein, 11 aa, Artificial Sequence
  Peptide Derived from Human Papillomavirus
NSINIAPDPDF

SEQ ID NO: 20822 - protein, 9 aa, Artificial Sequence
  Peptide Derived from Human Papillomavirus
NTTIPFGGA

SEQ ID NO: 20823 - protein, 10 aa, Artificial Sequence
  Peptide Derived from Human Papillomavirus
NTTIPFGGAY

SEQ ID NO: 20824 - protein, 9 aa, Artificial Sequence
  Peptide Derived from Human Papillomavirus
NTVTSSTPI

SEQ ID NO: 20825 - protein, 8 aa, Artificial Sequence
  Peptide Derived from Human Papillomavirus
PAETGGHF

SEQ ID NO: 20826 - protein, 10 aa, Artificial Sequence
  Peptide Derived from Human Papillomavirus
PAETGGHFTL

SEQ ID NO: 20827 - protein, 10 aa, Artificial Sequence
  Peptide Derived from Human Papillomavirus
PAFITTPTKL

SEQ ID NO: 20828 - protein, 11 aa, Artificial Sequence
  Peptide Derived from Human Papillomavirus
PAFITTPTKLI

SEQ ID NO: 20829 - protein, 10 aa, Artificial Sequence
  Peptide Derived from Human Papillomavirus
PAILDINNTV

SEQ ID NO: 20830 - protein, 10 aa, Artificial Sequence
  Peptide Derived from Human Papillomavirus
PALTSRRTGI

SEQ ID NO: 20831 - protein, 8 aa, Artificial Sequence
  Peptide Derived from Human Papillomavirus
PANTTIPF

SEQ ID NO: 20832 - protein, 11 aa, Artificial Sequence
  Peptide Derived from Human Papillomavirus
PANTTIPFGGA

SEQ ID NO: 20833 - protein, 8 aa, Artificial Sequence
  Peptide Derived from Human Papillomavirus
PAYEGIDV

SEQ ID NO: 20834 - protein, 9 aa, Artificial Sequence
  Peptide Derived from Human Papillomavirus
PSDPSIVSL

SEQ ID NO: 20835 - protein, 10 aa, Artificial Sequence
  Peptide Derived from Human Papillomavirus
PSDPSIVSLV

SEQ ID NO: 20836 - protein, 10 aa, Artificial Sequence
  Peptide Derived from Human Papillomavirus
PSIPPDVSGF

SEQ ID NO: 20837 - protein, 8 aa, Artificial Sequence
  Peptide Derived from Human Papillomavirus
PSTSLSGY

SEQ ID NO: 20838 - protein, 9 aa, Artificial Sequence
  Peptide Derived from Human Papillomavirus
PSTSLSGYI

SEQ ID NO: 20839 - protein, 11 aa, Artificial Sequence
  Peptide Derived from Human Papillomavirus
PSTSLSGYIPA

SEQ ID NO: 20840 - protein, 10 aa, Artificial Sequence
  Peptide Derived from Human Papillomavirus
PSTYTTTSHA

SEQ ID NO: 20841 - protein, 11 aa, Artificial Sequence
  Peptide Derived from Human Papillomavirus
PSTYTTTSHAA

SEQ ID NO: 20842 - protein, 10 aa, Artificial Sequence
  Peptide Derived from Human Papillomavirus
PSVLQPPTPA

SEQ ID NO: 20843 - protein, 8 aa, Artificial Sequence
  Peptide Derived from Human Papillomavirus
PSVPSTSL

SEQ ID NO: 20844 - protein, 11 aa, Artificial Sequence
  Peptide Derived from Human Papillomavirus
PSVPSTSLSGY

SEQ ID NO: 20845 - protein, 8 aa, Artificial Sequence
  Peptide Derived from Human Papillomavirus
PTATDTLA

SEQ ID NO: 20846 - protein, 10 aa, Artificial Sequence
  Peptide Derived from Human Papillomavirus
PTATDTLAPV

SEQ ID NO: 20847 - protein, 8 aa, Artificial Sequence
  Peptide Derived from Human Papillomavirus
PTFTDPSV

SEQ ID NO: 20848 - protein, 9 aa, Artificial Sequence
  Peptide Derived from Human Papillomavirus
PTFTDPSVL

SEQ ID NO: 20849 - protein, 11 aa, Artificial Sequence
  Peptide Derived from Human Papillomavirus
PTKLITYDNPA

SEQ ID NO: 20850 - protein, 10 aa, Artificial Sequence
  Peptide Derived from Human Papillomavirus
PTPAETGGHF

SEQ ID NO: 20851 - protein, 8 aa, Artificial Sequence
  Peptide Derived from Human Papillomavirus
PTSINNGL

SEQ ID NO: 20852 - protein, 9 aa, Artificial Sequence
  Peptide Derived from Human Papillomavirus
PTSINNGLY

SEQ ID NO: 20853 - protein, 11 aa, Artificial Sequence
  Peptide Derived from Human Papillomavirus
PTSINNGLYDI

SEQ ID NO: 20854 - protein, 11 aa, Artificial Sequence
  Peptide Derived from Human Papillomavirus
PTSVPSIPPDV

SEQ ID NO: 20855 - protein, 9 aa, Artificial Sequence
  Peptide Derived from Human Papillomavirus
QAGTCPPDI

SEQ ID NO: 20856 - protein, 10 aa, Artificial Sequence
  Peptide Derived from Human Papillomavirus
QAGTCPPDII

SEQ ID NO: 20857 - protein, 8 aa, Artificial Sequence
  Peptide Derived from Human Papillomavirus
QAPSLIPI

SEQ ID NO: 20858 - protein, 9 aa, Artificial Sequence
  Peptide Derived from Human Papillomavirus
QAPSLIPIV

SEQ ID NO: 20859 - protein, 8 aa, Artificial Sequence
  Peptide Derived from Human Papillomavirus
QTITPSTY

SEQ ID NO: 20860 - protein, 11 aa, Artificial Sequence
  Peptide Derived from Human Papillomavirus
QTLRTRSGKSI

SEQ ID NO: 20861 - protein, 8 aa, Artificial Sequence
  Peptide Derived from Human Papillomavirus
RASATQLY

SEQ ID NO: 20862 - protein, 9 aa, Artificial Sequence
  Peptide Derived from Human Papillomavirus
RSAKRTKRA

SEQ ID NO: 20863 - protein, 11 aa, Artificial Sequence
  Peptide Derived from Human Papillomavirus
RSAKRTKRASA

SEQ ID NO: 20864 - protein, 8 aa, Artificial Sequence
  Peptide Derived from Human Papillomavirus
RSGKSIGA

SEQ ID NO: 20865 - protein, 10 aa, Artificial Sequence
  Peptide Derived from Human Papillomavirus
RSGKSIGAKV

SEQ ID NO: 20866 - protein, 9 aa, Artificial Sequence
  Peptide Derived from Human Papillomavirus
RTGIRYSRI

SEQ ID NO: 20867 - protein, 10 aa, Artificial Sequence
  Peptide Derived from Human Papillomavirus
RTKRASATQL

SEQ ID NO: 20868 - protein, 11 aa, Artificial Sequence
  Peptide Derived from Human Papillomavirus
RTKRASATQLY

SEQ ID NO: 20869 - protein, 8 aa, Artificial Sequence
  Peptide Derived from Human Papillomavirus
RTRSGKSI

SEQ ID NO: 20870 - protein, 10 aa, Artificial Sequence
  Peptide Derived from Human Papillomavirus
RTRSGKSIGA

SEQ ID NO: 20871 - protein, 8 aa, Artificial Sequence
  Peptide Derived from Human Papillomavirus
RTTQQVKV

SEQ ID NO: 20872 - protein, 9 aa, Artificial Sequence
  Peptide Derived from Human Papillomavirus
RTTQQVKVV

SEQ ID NO: 20873 - protein, 10 aa, Artificial Sequence
  Peptide Derived from Human Papillomavirus
SAEEIELQTI

SEQ ID NO: 20874 - protein, 8 aa, Artificial Sequence
  Peptide Derived from Human Papillomavirus
SAKRTKRA

SEQ ID NO: 20875 - protein, 10 aa, Artificial Sequence
  Peptide Derived from Human Papillomavirus
SAKRTKRASA

SEQ ID NO: 20876 - protein, 9 aa, Artificial Sequence
  Peptide Derived from Human Papillomavirus
SSNDNSINI

SEQ ID NO: 20877 - protein, 10 aa, Artificial Sequence
  Peptide Derived from Human Papillomavirus
SSNDNSINIA

SEQ ID NO: 20878 - protein, 10 aa, Artificial Sequence
  Peptide Derived from Human Papillomavirus
SSSTISTHNY

SEQ ID NO: 20879 - protein, 9 aa, Artificial Sequence
  Peptide Derived from Human Papillomavirus
SSTISTHNY

SEQ ID NO: 20880 - protein, 11 aa, Artificial Sequence
  Peptide Derived from Human Papillomavirus
SSTPIPGSRPV

SEQ ID NO: 20881 - protein, 8 aa, Artificial Sequence
  Peptide Derived from Human Papillomavirus
STDTTPAI

SEQ ID NO: 20882 - protein, 9 aa, Artificial Sequence
  Peptide Derived from Human Papillomavirus
STDTTPAIL

SEQ ID NO: 20883 - protein, 11 aa, Artificial Sequence
  Peptide Derived from Human Papillomavirus
STDTTPAILDI

SEQ ID NO: 20884 - protein, 8 aa, Artificial Sequence
  Peptide Derived from Human Papillomavirus
STHNYEEI

SEQ ID NO: 20885 - protein, 10 aa, Artificial Sequence
  Peptide Derived from Human Papillomavirus
STHNYEEIPM

SEQ ID NO: 20886 - protein, 9 aa, Artificial Sequence
  Peptide Derived from Human Papillomavirus
STIDSAEEI

SEQ ID NO: 20887 - protein, 11 aa, Artificial Sequence
  Peptide Derived from Human Papillomavirus
STIDSAEEIEL

SEQ ID NO: 20888 - protein, 8 aa, Artificial Sequence
  Peptide Derived from Human Papillomavirus
STISTHNY

SEQ ID NO: 20889 - protein, 11 aa, Artificial Sequence
  Peptide Derived from Human Papillomavirus
STISTHNYEEI

SEQ ID NO: 20890 - protein, 10 aa, Artificial Sequence
  Peptide Derived from Human Papillomavirus
STPIPGSRPV

SEQ ID NO: 20891 - protein, 11 aa, Artificial Sequence
  Peptide Derived from Human Papillomavirus
STPIPGSRPVA

SEQ ID NO: 20892 - protein, 8 aa, Artificial Sequence
  Peptide Derived from Human Papillomavirus
STSLSGYI

SEQ ID NO: 20893 - protein, 10 aa, Artificial Sequence
  Peptide Derived from Human Papillomavirus
STSLSGYIPA

SEQ ID NO: 20894 - protein, 8 aa, Artificial Sequence
  Peptide Derived from Human Papillomavirus
STTPVPSV

SEQ ID NO: 20895 - protein, 9 aa, Artificial Sequence
  Peptide Derived from Human Papillomavirus
STYTTTSHA

SEQ ID NO: 20896 - protein, 10 aa, Artificial Sequence
  Peptide Derived from Human Papillomavirus
STYTTTSHAA

SEQ ID NO: 20897 - protein, 11 aa, Artificial Sequence
  Peptide Derived from Human Papillomavirus
STYTTTSHAAL

SEQ ID NO: 20898 - protein, 9 aa, Artificial Sequence
  Peptide Derived from Human Papillomavirus
TATDTLAPV

SEQ ID NO: 20899 - protein, 8 aa, Artificial Sequence
  Peptide Derived from Human Papillomavirus
TSFIDAGA

SEQ ID NO: 20900 - protein, 10 aa, Artificial Sequence
  Peptide Derived from Human Papillomavirus
TSHAALPTSI

SEQ ID NO: 20901 - protein, 8 aa, Artificial Sequence
  Peptide Derived from Human Papillomavirus
TSINNGLY

SEQ ID NO: 20902 - protein, 10 aa, Artificial Sequence
  Peptide Derived from Human Papillomavirus
TSINNGLYDI

SEQ ID NO: 20903 - protein, 11 aa, Artificial Sequence
  Peptide Derived from Human Papillomavirus
TSINNGLYDIY

SEQ ID NO: 20904 - protein, 9 aa, Artificial Sequence
  Peptide Derived from Human Papillomavirus
TSLSGYIPA

SEQ ID NO: 20905 - protein, 9 aa, Artificial Sequence
  Peptide Derived from Human Papillomavirus
TSRRTGIRY

SEQ ID NO: 20906 - protein, 8 aa, Artificial Sequence
  Peptide Derived from Human Papillomavirus
TSTDTTPA

SEQ ID NO: 20907 - protein, 9 aa, Artificial Sequence
  Peptide Derived from Human Papillomavirus
TSTDTTPAI

SEQ ID NO: 20908 - protein, 10 aa, Artificial Sequence
  Peptide Derived from Human Papillomavirus
TSTDTTPAIL

SEQ ID NO: 20909 - protein, 9 aa, Artificial Sequence
  Peptide Derived from Human Papillomavirus
TSTTPVPSV

SEQ ID NO: 20910 - protein, 10 aa, Artificial Sequence
  Peptide Derived from Human Papillomavirus
TSVPSIPPDV

SEQ ID NO: 20911 - protein, 8 aa, Artificial Sequence
  Peptide Derived from Human Papillomavirus
TTHNNPTF

SEQ ID NO: 20912 - protein, 8 aa, Artificial Sequence
  Peptide Derived from Human Papillomavirus
TTIPFGGA

SEQ ID NO: 20913 - protein, 9 aa, Artificial Sequence
  Peptide Derived from Human Papillomavirus
TTIPFGGAY

SEQ ID NO: 20914 - protein, 11 aa, Artificial Sequence
  Peptide Derived from Human Papillomavirus
TTIPFGGAYNI

SEQ ID NO: 20915 - protein, 8 aa, Artificial Sequence
  Peptide Derived from Human Papillomavirus
TTPAILDI

SEQ ID NO: 20916 - protein, 9 aa, Artificial Sequence
  Peptide Derived from Human Papillomavirus
TTPTKLITY

SEQ ID NO: 20917 - protein, 8 aa, Artificial Sequence
  Peptide Derived from Human Papillomavirus
TTQQVKVV

SEQ ID NO: 20918 - protein, 11 aa, Artificial Sequence
  Peptide Derived from Human Papillomavirus
TTQQVKVVDPA

SEQ ID NO: 20919 - protein, 11 aa, Artificial Sequence
  Peptide Derived from Human Papillomavirus
TTSHAALPTSI

SEQ ID NO: 20920 - protein, 9 aa, Artificial Sequence
  Peptide Derived from Human Papillomavirus
TTSTDTTPA

SEQ ID NO: 20921 - protein, 10 aa, Artificial Sequence
  Peptide Derived from Human Papillomavirus
TTSTDTTPAI

SEQ ID NO: 20922 - protein, 11 aa, Artificial Sequence
  Peptide Derived from Human Papillomavirus
TTSTDTTPAIL

SEQ ID NO: 20923 - protein, 8 aa, Artificial Sequence
  Peptide Derived from Human Papillomavirus
TTTSHAAL

SEQ ID NO: 20924 - protein, 11 aa, Artificial Sequence
  Peptide Derived from Human Papillomavirus
TTVTTHNNPTF

SEQ ID NO: 20925 - protein, 8 aa, Artificial Sequence
  Peptide Derived from Human Papillomavirus
VALHRPAL

SEQ ID NO: 20926 - protein, 8 aa, Artificial Sequence
  Peptide Derived from Human Papillomavirus
VSGPDIPI

SEQ ID NO: 20927 - protein, 10 aa, Artificial Sequence
  Peptide Derived from Human Papillomavirus
VSGPDIPINI

SEQ ID NO: 20928 - protein, 9 aa, Artificial Sequence
  Peptide Derived from Human Papillomavirus
VSLVEETSF

SEQ ID NO: 20929 - protein, 10 aa, Artificial Sequence
  Peptide Derived from Human Papillomavirus
VSLVEETSFI

SEQ ID NO: 20930 - protein, 8 aa, Artificial Sequence
  Peptide Derived from Human Papillomavirus
VSTNPNTV

SEQ ID NO: 20931 - protein, 9 aa, Artificial Sequence
  Peptide Derived from Human Papillomavirus
VTTHNNPTF

SEQ ID NO: 20932 - protein, 10 aa, Artificial Sequence
  Peptide Derived from Human Papillomavirus
YSRIGNKQTL

SEQ ID NO: 20933 - protein, 8 aa, Artificial Sequence
  Peptide Derived from Human Papillomavirus
YSRTTQQV

SEQ ID NO: 20934 - protein, 10 aa, Artificial Sequence
  Peptide Derived from Human Papillomavirus
YSRTTQQVKV

SEQ ID NO: 20935 - protein, 11 aa, Artificial Sequence
  Peptide Derived from Human Papillomavirus
YSRTTQQVKVV

SEQ ID NO: 20936 - protein, 10 aa, Artificial Sequence
  Peptide Derived from Human Papillomavirus
YTIIADAGDF

SEQ ID NO: 20937 - protein, 11 aa, Artificial Sequence
  Peptide Derived from Human Papillomavirus
YTIIADAGDFY

SEQ ID NO: 20938 - protein, 8 aa, Artificial Sequence
  Peptide Derived from Human Papillomavirus
YTTTSHAA

SEQ ID NO: 20939 - protein, 9 aa, Artificial Sequence
  Peptide Derived from Human Papillomavirus
YTTTSHAAL

SEQ ID NO: 20940 - protein, 11 aa, Artificial Sequence
  Peptide Derived from Human Papillomavirus
AAAFLKSNCQA

SEQ ID NO: 20941 - protein, 10 aa, Artificial Sequence
  Peptide Derived from Human Papillomavirus
AAFLKSNCQA

SEQ ID NO: 20942 - protein, 10 aa, Artificial Sequence
  Peptide Derived from Human Papillomavirus
AALYWYRTGI

SEQ ID NO: 20943 - protein, 8 aa, Artificial Sequence
  Peptide Derived from Human Papillomavirus
ATDTGSDM

SEQ ID NO: 20944 - protein, 9 aa, Artificial Sequence
  Peptide Derived from Human Papillomavirus
ATDTGSDMV

SEQ ID NO: 20945 - protein, 11 aa, Artificial Sequence
  Peptide Derived from Human Papillomavirus
ATDTGSDMVDF

SEQ ID NO: 20946 - protein, 10 aa, Artificial Sequence
  Peptide Derived from Human Papillomavirus
ATMCKHYRRA

SEQ ID NO: 20947 - protein, 8 aa, Artificial Sequence
  Peptide Derived from Human Papillomavirus
ATTTCWTY

SEQ ID NO: 20948 - protein, 9 aa, Artificial Sequence
  Peptide Derived from Human Papillomavirus
ATTTCWTYF

SEQ ID NO: 20949 - protein, 8 aa, Artificial Sequence
  Peptide Derived from Human Papillomavirus
CATMCKHY

SEQ ID NO: 20950 - protein, 11 aa, Artificial Sequence
  Peptide Derived from Human Papillomavirus
CATMCKHYRRA

SEQ ID NO: 20951 - protein, 9 aa, Artificial Sequence
  Peptide Derived from Human Papillomavirus
CSEVEATQI

SEQ ID NO: 20952 - protein, 11 aa, Artificial Sequence
  Peptide Derived from Human Papillomavirus
CSEVEATQIQV

SEQ ID NO: 20953 - protein, 8 aa, Artificial Sequence
  Peptide Derived from Human Papillomavirus
CSGGSTEA

SEQ ID NO: 20954 - protein, 9 aa, Artificial Sequence
  Peptide Derived from Human Papillomavirus
CSGGSTEAI

SEQ ID NO: 20955 - protein, 10 aa, Artificial Sequence
  Peptide Derived from Human Papillomavirus
CSKIDEGGDW

SEQ ID NO: 20956 - protein, 8 aa, Artificial Sequence
  Peptide Derived from Human Papillomavirus
CTDWVTAI

SEQ ID NO: 20957 - protein, 9 aa, Artificial Sequence
  Peptide Derived from Human Papillomavirus
CTDWVTAIF

SEQ ID NO: 20958 - protein, 11 aa, Artificial Sequence
  Peptide Derived from Human Papillomavirus
CTDWVTAIFGV

SEQ ID NO: 20959 - protein, 9 aa, Artificial Sequence
  Peptide Derived from Human Papillomavirus
CTIAQLKDL

SEQ ID NO: 20960 - protein, 10 aa, Artificial Sequence
  Peptide Derived from Human Papillomavirus
CTIAQLKDLL

SEQ ID NO: 20961 - protein, 9 aa, Artificial Sequence
  Peptide Derived from Human Papillomavirus
DADTEGNPF

SEQ ID NO: 20962 - protein, 8 aa, Artificial Sequence
  Peptide Derived from Human Papillomavirus
DAQVLHVL

SEQ ID NO: 20963 - protein, 9 aa, Artificial Sequence
  Peptide Derived from Human Papillomavirus
DATTTCWTY

SEQ ID NO: 20964 - protein, 10 aa, Artificial Sequence
  Peptide Derived from Human Papillomavirus
DATTTCWTYF

SEQ ID NO: 20965 - protein, 9 aa, Artificial Sequence
  Peptide Derived from Human Papillomavirus
DSGYGCSEV

SEQ ID NO: 20966 - protein, 11 aa, Artificial Sequence
  Peptide Derived from Human Papillomavirus
DSGYGCSEVEA

SEQ ID NO: 20967 - protein, 9 aa, Artificial Sequence
  Peptide Derived from Human Papillomavirus
DSNFDLSEM

SEQ ID NO: 20968 - protein, 10 aa, Artificial Sequence
  Peptide Derived from Human Papillomavirus
DSNFDLSEMV

SEQ ID NO: 20969 - protein, 8 aa, Artificial Sequence
  Peptide Derived from Human Papillomavirus
DSNSNAAA

SEQ ID NO: 20970 - protein, 9 aa, Artificial Sequence
  Peptide Derived from Human Papillomavirus
DSNSNAAAF

SEQ ID NO: 20971 - protein, 10 aa, Artificial Sequence
  Peptide Derived from Human Papillomavirus
DSNSNAAAFL

SEQ ID NO: 20972 - protein, 10 aa, Artificial Sequence
  Peptide Derived from Human Papillomavirus
DTEGNPFGTF

SEQ ID NO: 20973 - protein, 8 aa, Artificial Sequence
  Peptide Derived from Human Papillomavirus
DTELSPRL

SEQ ID NO: 20974 - protein, 11 aa, Artificial Sequence
  Peptide Derived from Human Papillomavirus
DTELSPRLQEI

SEQ ID NO: 20975 - protein, 9 aa, Artificial Sequence
  Peptide Derived from Human Papillomavirus
DTGSDMVDF

SEQ ID NO: 20976 - protein, 10 aa, Artificial Sequence
  Peptide Derived from Human Papillomavirus
DTGSDMVDFI

SEQ ID NO: 20977 - protein, 10 aa, Artificial Sequence
  Peptide Derived from Human Papillomavirus
DTKVAMLDDA

SEQ ID NO: 20978 - protein, 9 aa, Artificial Sequence
  Peptide Derived from Human Papillomavirus
DTPEWIQRL

SEQ ID NO: 20979 - protein, 11 aa, Artificial Sequence
  Peptide Derived from Human Papillomavirus
DTPEWIQRLTI

SEQ ID NO: 20980 - protein, 10 aa, Artificial Sequence
  Peptide Derived from Human Papillomavirus
DTQGTFCEQA

SEQ ID NO: 20981 - protein, 10 aa, Artificial Sequence
  Peptide Derived from Human Papillomavirus
DTYGLSFTDL

SEQ ID NO: 20982 - protein, 11 aa, Artificial Sequence
  Peptide Derived from Human Papillomavirus
DTYGLSFTDLV

SEQ ID NO: 20983 - protein, 8 aa, Artificial Sequence
  Peptide Derived from Human Papillomavirus
DTYMRNAL

SEQ ID NO: 20984 - protein, 8 aa, Artificial Sequence
  Peptide Derived from Human Papillomavirus
ESDMAFEY

SEQ ID NO: 20985 - protein, 9 aa, Artificial Sequence
  Peptide Derived from Human Papillomavirus
ESDMAFEYA

SEQ ID NO: 20986 - protein, 10 aa, Artificial Sequence
  Peptide Derived from Human Papillomavirus
ESDMAFEYAL

SEQ ID NO: 20987 - protein, 11 aa, Artificial Sequence
  Peptide Derived from Human Papillomavirus
ESDMAFEYALL

SEQ ID NO: 20988 - protein, 9 aa, Artificial Sequence
  Peptide Derived from Human Papillomavirus
ESRITVFEF

SEQ ID NO: 20989 - protein, 9 aa, Artificial Sequence
  Peptide Derived from Human Papillomavirus
ETAQALFHA

SEQ ID NO: 20990 - protein, 11 aa, Artificial Sequence
  Peptide Derived from Human Papillomavirus
ETCMLIQPPKL

SEQ ID NO: 20991 - protein, 11 aa, Artificial Sequence
  Peptide Derived from Human Papillomavirus
FAGGSTENSPL

SEQ ID NO: 20992 - protein, 8 aa, Artificial Sequence
  Peptide Derived from Human Papillomavirus
FTDLVRNF

SEQ ID NO: 20993 - protein, 8 aa, Artificial Sequence
  Peptide Derived from Human Papillomavirus
FTISDSGY

SEQ ID NO: 20994 - protein, 11 aa, Artificial Sequence
  Peptide Derived from Human Papillomavirus
GAMLAVFKDTY

SEQ ID NO: 20995 - protein, 8 aa, Artificial Sequence
  Peptide Derived from Human Papillomavirus
GSDMVDFI

SEQ ID NO: 20996 - protein, 8 aa, Artificial Sequence
  Peptide Derived from Human Papillomavirus
GSTENSPL

SEQ ID NO: 20997 - protein, 9 aa, Artificial Sequence
  Peptide Derived from Human Papillomavirus
GTEGNNSSV

SEQ ID NO: 20998 - protein, 9 aa, Artificial Sequence
  Peptide Derived from Human Papillomavirus
GTFCEQAEL

SEQ ID NO: 20999 - protein, 8 aa, Artificial Sequence
  Peptide Derived from Human Papillomavirus
GTGCNGWF

SEQ ID NO: 21000 - protein, 9 aa, Artificial Sequence
  Peptide Derived from Human Papillomavirus
GTGCNGWFY

SEQ ID NO: 21001 - protein, 10 aa, Artificial Sequence
  Peptide Derived from Human Papillomavirus
GTGCNGWFYV

SEQ ID NO: 21002 - protein, 8 aa, Artificial Sequence
  Peptide Derived from Human Papillomavirus
GTPKKNCL

SEQ ID NO: 21003 - protein, 9 aa, Artificial Sequence
  Peptide Derived from Human Papillomavirus
GTPKKNCLV

SEQ ID NO: 21004 - protein, 10 aa, Artificial Sequence
  Peptide Derived from Human Papillomavirus
GTPKKNCLVF

SEQ ID NO: 21005 - protein, 8 aa, Artificial Sequence
  Peptide Derived from Human Papillomavirus
GTSDNSNI

SEQ ID NO: 21006 - protein, 11 aa, Artificial Sequence
  Peptide Derived from Human Papillomavirus
GTSDNSNIENV

SEQ ID NO: 21007 - protein, 9 aa, Artificial Sequence
  Peptide Derived from Human Papillomavirus
HAQEVHNDA

SEQ ID NO: 21008 - protein, 11 aa, Artificial Sequence
  Peptide Derived from Human Papillomavirus
HAQEVHNDAQV

SEQ ID NO: 21009 - protein, 8 aa, Artificial Sequence
  Peptide Derived from Human Papillomavirus
IAEGFKTL

SEQ ID NO: 21010 - protein, 9 aa, Artificial Sequence
  Peptide Derived from Human Papillomavirus
IAEGFKTLI

SEQ ID NO: 21011 - protein, 8 aa, Artificial Sequence
  Peptide Derived from Human Papillomavirus
IAQLKDLL

SEQ ID NO: 21012 - protein, 10 aa, Artificial Sequence
  Peptide Derived from Human Papillomavirus
IAQLKDLLKV

SEQ ID NO: 21013 - protein, 9 aa, Artificial Sequence
  Peptide Derived from Human Papillomavirus
ISDDEDENA

SEQ ID NO: 21014 - protein, 11 aa, Artificial Sequence
  Peptide Derived from Human Papillomavirus
ISDSGYGCSEV

SEQ ID NO: 21015 - protein, 11 aa, Artificial Sequence
  Peptide Derived from Human Papillomavirus
ISEVMGDTPEW

SEQ ID NO: 21016 - protein, 10 aa, Artificial Sequence
  Peptide Derived from Human Papillomavirus
ISFVNSTSHF

SEQ ID NO: 21017 - protein, 11 aa, Artificial Sequence
  Peptide Derived from Human Papillomavirus
ISFVNSTSHFW

SEQ ID NO: 21018 - protein, 10 aa, Artificial Sequence
  Peptide Derived from Human Papillomavirus
ISIDRKHKPL

SEQ ID NO: 21019 - protein, 11 aa, Artificial Sequence
  Peptide Derived from Human Papillomavirus
ISIDRKHKPLI

SEQ ID NO: 21020 - protein, 10 aa, Artificial Sequence
  Peptide Derived from Human Papillomavirus
ISLNSGQKKA

SEQ ID NO: 21021 - protein, 8 aa, Artificial Sequence
  Peptide Derived from Human Papillomavirus
ISNISEVM

SEQ ID NO: 21022 - protein, 10 aa, Artificial Sequence
  Peptide Derived from Human Papillomavirus
ITFLGALKSF

SEQ ID NO: 21023 - protein, 11 aa, Artificial Sequence
  Peptide Derived from Human Papillomavirus
ITFLGALKSFL

SEQ ID NO: 21024 - protein, 9 aa, Artificial Sequence
  Peptide Derived from Human Papillomavirus
ITVFEFPNA

SEQ ID NO: 21025 - protein, 10 aa, Artificial Sequence
  Peptide Derived from Human Papillomavirus
ITVFEFPNAF

SEQ ID NO: 21026 - protein, 9 aa, Artificial Sequence
  Peptide Derived from Human Papillomavirus
KAKRRLFTI

SEQ ID NO: 21027 - protein, 10 aa, Artificial Sequence
  Peptide Derived from Human Papillomavirus
KSDKTTCTDW

SEQ ID NO: 21028 - protein, 11 aa, Artificial Sequence
  Peptide Derived from Human Papillomavirus
KSDKTTCTDWV

SEQ ID NO: 21029 - protein, 8 aa, Artificial Sequence
  Peptide Derived from Human Papillomavirus
KSNCQAKY

SEQ ID NO: 21030 - protein, 9 aa, Artificial Sequence
  Peptide Derived from Human Papillomavirus
KSNCQAKYL

SEQ ID NO: 21031 - protein, 10 aa, Artificial Sequence
  Peptide Derived from Human Papillomavirus
KSRLTVAKGL

SEQ ID NO: 21032 - protein, 8 aa, Artificial Sequence
  Peptide Derived from Human Papillomavirus
KSYFGMSF

SEQ ID NO: 21033 - protein, 9 aa, Artificial Sequence
  Peptide Derived from Human Papillomavirus
KSYFGMSFI

SEQ ID NO: 21034 - protein, 11 aa, Artificial Sequence
  Peptide Derived from Human Papillomavirus
KSYFGMSFIHF

SEQ ID NO: 21035 - protein, 8 aa, Artificial Sequence
  Peptide Derived from Human Papillomavirus
KTLIQPFI

SEQ ID NO: 21036 - protein, 9 aa, Artificial Sequence
  Peptide Derived from Human Papillomavirus
KTLIQPFIL

SEQ ID NO: 21037 - protein, 10 aa, Artificial Sequence
  Peptide Derived from Human Papillomavirus
KTLIQPFILY

SEQ ID NO: 21038 - protein, 11 aa, Artificial Sequence
  Peptide Derived from Human Papillomavirus
KTLIQPFILYA

SEQ ID NO: 21039 - protein, 8 aa, Artificial Sequence
  Peptide Derived from Human Papillomavirus
KTTCTDWV

SEQ ID NO: 21040 - protein, 10 aa, Artificial Sequence
  Peptide Derived from Human Papillomavirus
KTTCTDWVTA

SEQ ID NO: 21041 - protein, 11 aa, Artificial Sequence
  Peptide Derived from Human Papillomavirus
KTTCTDWVTAI

SEQ ID NO: 21042 - protein, 8 aa, Artificial Sequence
  Peptide Derived from Human Papillomavirus
LADSNSNA

SEQ ID NO: 21043 - protein, 9 aa, Artificial Sequence
  Peptide Derived from Human Papillomavirus
LADSNSNAA

SEQ ID NO: 21044 - protein, 10 aa, Artificial Sequence
  Peptide Derived from Human Papillomavirus
LADSNSNAAA

SEQ ID NO: 21045 - protein, 11 aa, Artificial Sequence
  Peptide Derived from Human Papillomavirus
LADSNSNAAAF

SEQ ID NO: 21046 - protein, 8 aa, Artificial Sequence
  Peptide Derived from Human Papillomavirus
LAVFKDTY

SEQ ID NO: 21047 - protein, 10 aa, Artificial Sequence
  Peptide Derived from Human Papillomavirus
LAVFKDTYGL

SEQ ID NO: 21048 - protein, 8 aa, Artificial Sequence
  Peptide Derived from Human Papillomavirus
LSEMVQWA

SEQ ID NO: 21049 - protein, 9 aa, Artificial Sequence
  Peptide Derived from Human Papillomavirus
LSEMVQWAF

SEQ ID NO: 21050 - protein, 10 aa, Artificial Sequence
  Peptide Derived from Human Papillomavirus
LSFTDLVRNF

SEQ ID NO: 21051 - protein, 8 aa, Artificial Sequence
  Peptide Derived from Human Papillomavirus
LSPRLQEI

SEQ ID NO: 21052 - protein, 10 aa, Artificial Sequence
  Peptide Derived from Human Papillomavirus
LSPRLQEISL

SEQ ID NO: 21053 - protein, 8 aa, Artificial Sequence
  Peptide Derived from Human Papillomavirus
LTDESDMA

SEQ ID NO: 21054 - protein, 9 aa, Artificial Sequence
  Peptide Derived from Human Papillomavirus
LTDESDMAF

SEQ ID NO: 21055 - protein, 11 aa, Artificial Sequence
  Peptide Derived from Human Papillomavirus
LTDESDMAFEY

SEQ ID NO: 21056 - protein, 8 aa, Artificial Sequence
  Peptide Derived from Human Papillomavirus
LTDTKVAM

SEQ ID NO: 21057 - protein, 9 aa, Artificial Sequence
  Peptide Derived from Human Papillomavirus
LTDTKVAML

SEQ ID NO: 21058 - protein, 8 aa, Artificial Sequence
  Peptide Derived from Human Papillomavirus
LTIIQHGI

SEQ ID NO: 21059 - protein, 8 aa, Artificial Sequence
  Peptide Derived from Human Papillomavirus
LTTNIHPA

SEQ ID NO: 21060 - protein, 10 aa, Artificial Sequence
  Peptide Derived from Human Papillomavirus
LTVAKGLSTL

SEQ ID NO: 21061 - protein, 11 aa, Artificial Sequence
  Peptide Derived from Human Papillomavirus
LTVAKGLSTLL

SEQ ID NO: 21062 - protein, 8 aa, Artificial Sequence
  Peptide Derived from Human Papillomavirus
MAFEYALL

SEQ ID NO: 21063 - protein, 9 aa, Artificial Sequence
  Peptide Derived from Human Papillomavirus
MAFEYALLA

SEQ ID NO: 21064 - protein, 10 aa, Artificial Sequence
  Peptide Derived from Human Papillomavirus
MSFIHFIQGA

SEQ ID NO: 21065 - protein, 11 aa, Artificial Sequence
  Peptide Derived from Human Papillomavirus
MSFIHFIQGAV

SEQ ID NO: 21066 - protein, 8 aa, Artificial Sequence
  Peptide Derived from Human Papillomavirus
NALDGNPI

SEQ ID NO: 21067 - protein, 10 aa, Artificial Sequence
  Peptide Derived from Human Papillomavirus
NALDGNPISI

SEQ ID NO: 21068 - protein, 9 aa, Artificial Sequence
  Peptide Derived from Human Papillomavirus
NATDTGSDM

SEQ ID NO: 21069 - protein, 10 aa, Artificial Sequence
  Peptide Derived from Human Papillomavirus
NATDTGSDMV

SEQ ID NO: 21070 - protein, 11 aa, Artificial Sequence
  Peptide Derived from Human Papillomavirus
NSGQKKAKRRL

SEQ ID NO: 21071 - protein, 8 aa, Artificial Sequence
  Peptide Derived from Human Papillomavirus
NSNAAAFL

SEQ ID NO: 21072 - protein, 8 aa, Artificial Sequence
  Peptide Derived from Human Papillomavirus
NSPLGERL

SEQ ID NO: 21073 - protein, 10 aa, Artificial Sequence
  Peptide Derived from Human Papillomavirus
NSPLGERLEV

SEQ ID NO: 21074 - protein, 8 aa, Artificial Sequence
  Peptide Derived from Human Papillomavirus
NSTSHFWL

SEQ ID NO: 21075 - protein, 11 aa, Artificial Sequence
  Peptide Derived from Human Papillomavirus
NSTSHFWLEPL

SEQ ID NO: 21076 - protein, 9 aa, Artificial Sequence
  Peptide Derived from Human Papillomavirus
NTGKSYFGM

SEQ ID NO: 21077 - protein, 11 aa, Artificial Sequence
  Peptide Derived from Human Papillomavirus
NTGKSYFGMSF

SEQ ID NO: 21078 - protein, 9 aa, Artificial Sequence
  Peptide Derived from Human Papillomavirus
PAKDNRWPY

SEQ ID NO: 21079 - protein, 10 aa, Artificial Sequence
  Peptide Derived from Human Papillomavirus
PAKDNRWPYL

SEQ ID NO: 21080 - protein, 8 aa, Artificial Sequence
  Peptide Derived from Human Papillomavirus
PANTGKSY

SEQ ID NO: 21081 - protein, 9 aa, Artificial Sequence
  Peptide Derived from Human Papillomavirus
PANTGKSYF

SEQ ID NO: 21082 - protein, 11 aa, Artificial Sequence
  Peptide Derived from Human Papillomavirus
PANTGKSYFGM

SEQ ID NO: 21083 - protein, 10 aa, Artificial Sequence
  Peptide Derived from Human Papillomavirus
PTIAEGFKTL

SEQ ID NO: 21084 - protein, 11 aa, Artificial Sequence
  Peptide Derived from Human Papillomavirus
PTIAEGFKTLI

SEQ ID NO: 21085 - protein, 9 aa, Artificial Sequence
  Peptide Derived from Human Papillomavirus
QAELETAQA

SEQ ID NO: 21086 - protein, 10 aa, Artificial Sequence
  Peptide Derived from Human Papillomavirus
QAELETAQAL

SEQ ID NO: 21087 - protein, 11 aa, Artificial Sequence
  Peptide Derived from Human Papillomavirus
QAELETAQALF

SEQ ID NO: 21088 - protein, 11 aa, Artificial Sequence
  Peptide Derived from Human Papillomavirus
QAIVDKKTGDV

SEQ ID NO: 21089 - protein, 9 aa, Artificial Sequence
  Peptide Derived from Human Papillomavirus
QAKYLKDCA

SEQ ID NO: 21090 - protein, 11 aa, Artificial Sequence
  Peptide Derived from Human Papillomavirus
QAKYLKDCATM

SEQ ID NO: 21091 - protein, 9 aa, Artificial Sequence
  Peptide Derived from Human Papillomavirus
QALFHAQEV

SEQ ID NO: 21092 - protein, 9 aa, Artificial Sequence
  Peptide Derived from Human Papillomavirus
RAGQNHRPL

SEQ ID NO: 21093 - protein, 9 aa, Artificial Sequence
  Peptide Derived from Human Papillomavirus
RAQKRQMNM

SEQ ID NO: 21094 - protein, 8 aa, Artificial Sequence
  Peptide Derived from Human Papillomavirus
RSSVAALY

SEQ ID NO: 21095 - protein, 9 aa, Artificial Sequence
  Peptide Derived from Human Papillomavirus
RSSVAALYW

SEQ ID NO: 21096 - protein, 10 aa, Artificial Sequence
  Peptide Derived from Human Papillomavirus
RSSVAALYWY

SEQ ID NO: 21097 - protein, 10 aa, Artificial Sequence
  Peptide Derived from Human Papillomavirus
RTGISNISEV

SEQ ID NO: 21098 - protein, 11 aa, Artificial Sequence
  Peptide Derived from Human Papillomavirus
RTGISNISEVM

SEQ ID NO: 21099 - protein, 8 aa, Artificial Sequence
  Peptide Derived from Human Papillomavirus
RTWSRLDL

SEQ ID NO: 21100 - protein, 8 aa, Artificial Sequence
  Peptide Derived from Human Papillomavirus
SSVAALYW

SEQ ID NO: 21101 - protein, 9 aa, Artificial Sequence
  Peptide Derived from Human Papillomavirus
SSVAALYWY

SEQ ID NO: 21102 - protein, 11 aa, Artificial Sequence
  Peptide Derived from Human Papillomavirus
STENSPLGERL

SEQ ID NO: 21103 - protein, 11 aa, Artificial Sequence
  Peptide Derived from Human Papillomavirus
STLLHVPETCM

SEQ ID NO: 21104 - protein, 10 aa, Artificial Sequence
  Peptide Derived from Human Papillomavirus
STSHFWLEPL

SEQ ID NO: 21105 - protein, 10 aa, Artificial Sequence
  Peptide Derived from Human Papillomavirus
TAIFGVNPTI

SEQ ID NO: 21106 - protein, 11 aa, Artificial Sequence
  Peptide Derived from Human Papillomavirus
TAIFGVNPTIA

SEQ ID NO: 21107 - protein, 8 aa, Artificial Sequence
  Peptide Derived from Human Papillomavirus
TAQALFHA

SEQ ID NO: 21108 - protein, 11 aa, Artificial Sequence
  Peptide Derived from Human Papillomavirus
TAQALFHAQEV

SEQ ID NO: 21109 - protein, 10 aa, Artificial Sequence
  Peptide Derived from Human Papillomavirus
TSDNSNIENV

SEQ ID NO: 21110 - protein, 9 aa, Artificial Sequence
  Peptide Derived from Human Papillomavirus
TSHFWLEPL

SEQ ID NO: 21111 - protein, 9 aa, Artificial Sequence
  Peptide Derived from Human Papillomavirus
TTCTDWVTA

SEQ ID NO: 21112 - protein, 10 aa, Artificial Sequence
  Peptide Derived from Human Papillomavirus
TTCTDWVTAI

SEQ ID NO: 21113 - protein, 11 aa, Artificial Sequence
  Peptide Derived from Human Papillomavirus
TTCTDWVTAIF

SEQ ID NO: 21114 - protein, 10 aa, Artificial Sequence
  Peptide Derived from Human Papillomavirus
TTCWTYFDTY

SEQ ID NO: 21115 - protein, 11 aa, Artificial Sequence
  Peptide Derived from Human Papillomavirus
TTCWTYFDTYM

SEQ ID NO: 21116 - protein, 10 aa, Artificial Sequence
  Peptide Derived from Human Papillomavirus
TTNGEHGGNV

SEQ ID NO: 21117 - protein, 8 aa, Artificial Sequence
  Peptide Derived from Human Papillomavirus
TTTCWTYF

SEQ ID NO: 21118 - protein, 11 aa, Artificial Sequence
  Peptide Derived from Human Papillomavirus
TTTCWTYFDTY

SEQ ID NO: 21119 - protein, 11 aa, Artificial Sequence
  Peptide Derived from Human Papillomavirus
VAALYWYRTGI

SEQ ID NO: 21120 - protein, 8 aa, Artificial Sequence
  Peptide Derived from Human Papillomavirus
VAKGLSTL

SEQ ID NO: 21121 - protein, 9 aa, Artificial Sequence
  Peptide Derived from Human Papillomavirus
VAKGLSTLL

SEQ ID NO: 21122 - protein, 11 aa, Artificial Sequence
  Peptide Derived from Human Papillomavirus
VAKGLSTLLHV

SEQ ID NO: 21123 - protein, 11 aa, Artificial Sequence
  Peptide Derived from Human Papillomavirus
VTAIFGVNPTI

SEQ ID NO: 21124 - protein, 11 aa, Artificial Sequence
  Peptide Derived from Human Papillomavirus
VTTNGEHGGNV

SEQ ID NO: 21125 - protein, 8 aa, Artificial Sequence
  Peptide Derived from Human Papillomavirus
WTYFDTYM

SEQ ID NO: 21126 - protein, 11 aa, Artificial Sequence
  Peptide Derived from Human Papillomavirus
WTYFDTYMRNA

SEQ ID NO: 21127 - protein, 11 aa, Artificial Sequence
  Peptide Derived from Human Papillomavirus
YAHIQCLDCKW

SEQ ID NO: 21128 - protein, 11 aa, Artificial Sequence
  Peptide Derived from Human Papillomavirus
YALLADSNSNA

SEQ ID NO: 21129 - protein, 10 aa, Artificial Sequence
  Peptide Derived from Human Papillomavirus
AAREHGIQTL

SEQ ID NO: 21130 - protein, 10 aa, Artificial Sequence
  Peptide Derived from Human Papillomavirus
AATRPGHCGL

SEQ ID NO: 21131 - protein, 11 aa, Artificial Sequence
  Peptide Derived from Human Papillomavirus
AATRPGHCGLA

SEQ ID NO: 21132 - protein, 9 aa, Artificial Sequence
  Peptide Derived from Human Papillomavirus
ATCVSHRGL

SEQ ID NO: 21133 - protein, 10 aa, Artificial Sequence
  Peptide Derived from Human Papillomavirus
ATCVSHRGLY

SEQ ID NO: 21134 - protein, 11 aa, Artificial Sequence
  Peptide Derived from Human Papillomavirus
ATCVSHRGLYY

SEQ ID NO: 21135 - protein, 8 aa, Artificial Sequence
  Peptide Derived from Human Papillomavirus
ATQLVKQL

SEQ ID NO: 21136 - protein, 9 aa, Artificial Sequence
  Peptide Derived from Human Papillomavirus
ATRPGHCGL

SEQ ID NO: 21137 - protein, 10 aa, Artificial Sequence
  Peptide Derived from Human Papillomavirus
ATRPGHCGLA

SEQ ID NO: 21138 - protein, 8 aa, Artificial Sequence
  Peptide Derived from Human Papillomavirus
CSGNTTPI

SEQ ID NO: 21139 - protein, 9 aa, Artificial Sequence
  Peptide Derived from Human Papillomavirus
CSGNTTPII

SEQ ID NO: 21140 - protein, 11 aa, Artificial Sequence
  Peptide Derived from Human Papillomavirus
CSGNTTPIIHL

SEQ ID NO: 21141 - protein, 8 aa, Artificial Sequence
  Peptide Derived from Human Papillomavirus
CSTSDDTV

SEQ ID NO: 21142 - protein, 10 aa, Artificial Sequence
  Peptide Derived from Human Papillomavirus
CSTSDDTVSA

SEQ ID NO: 21143 - protein, 9 aa, Artificial Sequence
  Peptide Derived from Human Papillomavirus
DAGTWDKTA

SEQ ID NO: 21144 - protein, 9 aa, Artificial Sequence
  Peptide Derived from Human Papillomavirus
DSKDIDSQI

SEQ ID NO: 21145 - protein, 11 aa, Artificial Sequence
  Peptide Derived from Human Papillomavirus
DSKDIDSQIQY

SEQ ID NO: 21146 - protein, 11 aa, Artificial Sequence
  Peptide Derived from Human Papillomavirus
DSMCSTSDDTV

SEQ ID NO: 21147 - protein, 9 aa, Artificial Sequence
  Peptide Derived from Human Papillomavirus
DSQIQYWQL

SEQ ID NO: 21148 - protein, 10 aa, Artificial Sequence
  Peptide Derived from Human Papillomavirus
DSQIQYWQLI

SEQ ID NO: 21149 - protein, 9 aa, Artificial Sequence
  Peptide Derived from Human Papillomavirus
DSVQILVGY

SEQ ID NO: 21150 - protein, 10 aa, Artificial Sequence
  Peptide Derived from Human Papillomavirus
DSVQILVGYM

SEQ ID NO: 21151 - protein, 9 aa, Artificial Sequence
  Peptide Derived from Human Papillomavirus
DSVYYMTDA

SEQ ID NO: 21152 - protein, 8 aa, Artificial Sequence
  Peptide Derived from Human Papillomavirus
DTVSATQL

SEQ ID NO: 21153 - protein, 9 aa, Artificial Sequence
  Peptide Derived from Human Papillomavirus
DTVSATQLV

SEQ ID NO: 21154 - protein, 10 aa, Artificial Sequence
  Peptide Derived from Human Papillomavirus
ETLSERLSCV

SEQ ID NO: 21155 - protein, 8 aa, Artificial Sequence
  Peptide Derived from Human Papillomavirus
ETQRTKFL

SEQ ID NO: 21156 - protein, 11 aa, Artificial Sequence
  Peptide Derived from Human Papillomavirus
ETQRTKFLNTV

SEQ ID NO: 21157 - protein, 8 aa, Artificial Sequence
  Peptide Derived from Human Papillomavirus
FAAREHGI

SEQ ID NO: 21158 - protein, 11 aa, Artificial Sequence
  Peptide Derived from Human Papillomavirus
FAAREHGIQTL

SEQ ID NO: 21159 - protein, 9 aa, Artificial Sequence
  Peptide Derived from Human Papillomavirus
GAGNEKTGI

SEQ ID NO: 21160 - protein, 10 aa, Artificial Sequence
  Peptide Derived from Human Papillomavirus
GAGNEKTGIL

SEQ ID NO: 21161 - protein, 11 aa, Artificial Sequence
  Peptide Derived from Human Papillomavirus
GTAKTYGQTSA

SEQ ID NO: 21162 - protein, 10 aa, Artificial Sequence
  Peptide Derived from Human Papillomavirus
GTWDKTATCV

SEQ ID NO: 21163 - protein, 11 aa, Artificial Sequence
  Peptide Derived from Human Papillomavirus
GTWEVHFGNNV

SEQ ID NO: 21164 - protein, 8 aa, Artificial Sequence
  Peptide Derived from Human Papillomavirus
HSDHYRDI

SEQ ID NO: 21165 - protein, 9 aa, Artificial Sequence
  Peptide Derived from Human Papillomavirus
HSETQRTKF

SEQ ID NO: 21166 - protein, 10 aa, Artificial Sequence
  Peptide Derived from Human Papillomavirus
HSETQRTKFL

SEQ ID NO: 21167 - protein, 10 aa, Artificial Sequence
  Peptide Derived from Human Papillomavirus
HTPSPYSSTV

SEQ ID NO: 21168 - protein, 9 aa, Artificial Sequence
  Peptide Derived from Human Papillomavirus
ISKSKAHKA

SEQ ID NO: 21169 - protein, 10 aa, Artificial Sequence
  Peptide Derived from Human Papillomavirus
ISKSKAHKAI

SEQ ID NO: 21170 - protein, 10 aa, Artificial Sequence
  Peptide Derived from Human Papillomavirus
ISSTWHWTGA

SEQ ID NO: 21171 - protein, 8 aa, Artificial Sequence
  Peptide Derived from Human Papillomavirus
KAHKAIEL

SEQ ID NO: 21172 - protein, 10 aa, Artificial Sequence
  Peptide Derived from Human Papillomavirus
KAHKAIELQM

SEQ ID NO: 21173 - protein, 11 aa, Artificial Sequence
  Peptide Derived from Human Papillomavirus
KAHKAIELQMA

SEQ ID NO: 21174 - protein, 8 aa, Artificial Sequence
  Peptide Derived from Human Papillomavirus
KAIELQMA

SEQ ID NO: 21175 - protein, 9 aa, Artificial Sequence
  Peptide Derived from Human Papillomavirus
KAIELQMAL

SEQ ID NO: 21176 - protein, 8 aa, Artificial Sequence
  Peptide Derived from Human Papillomavirus
KSKAHKAI

SEQ ID NO: 21177 - protein, 10 aa, Artificial Sequence
  Peptide Derived from Human Papillomavirus
KSKAHKAIEL

SEQ ID NO: 21178 - protein, 11 aa, Artificial Sequence
  Peptide Derived from Human Papillomavirus
KTATCVSHRGL

SEQ ID NO: 21179 - protein, 9 aa, Artificial Sequence
  Peptide Derived from Human Papillomavirus
KTGILTVTY

SEQ ID NO: 21180 - protein, 8 aa, Artificial Sequence
  Peptide Derived from Human Papillomavirus
KTYGQTSA

SEQ ID NO: 21181 - protein, 9 aa, Artificial Sequence
  Peptide Derived from Human Papillomavirus
KTYGQTSAA

SEQ ID NO: 21182 - protein, 10 aa, Artificial Sequence
  Peptide Derived from Human Papillomavirus
LAEKQHCGPV

SEQ ID NO: 21183 - protein, 11 aa, Artificial Sequence
  Peptide Derived from Human Papillomavirus
LAQSRYKTEDW

SEQ ID NO: 21184 - protein, 8 aa, Artificial Sequence
  Peptide Derived from Human Papillomavirus
LSCVQDKI

SEQ ID NO: 21185 - protein, 9 aa, Artificial Sequence
  Peptide Derived from Human Papillomavirus
LSCVQDKII

SEQ ID NO: 21186 - protein, 8 aa, Artificial Sequence
  Peptide Derived from Human Papillomavirus
LSERLSCV

SEQ ID NO: 21187 - protein, 11 aa, Artificial Sequence
  Peptide Derived from Human Papillomavirus
MALQGLAQSRY

SEQ ID NO: 21188 - protein, 11 aa, Artificial Sequence
  Peptide Derived from Human Papillomavirus
MTDAGTWDKTA

SEQ ID NO: 21189 - protein, 9 aa, Artificial Sequence
  Peptide Derived from Human Papillomavirus
MTYVAWDSV

SEQ ID NO: 21190 - protein, 10 aa, Artificial Sequence
  Peptide Derived from Human Papillomavirus
MTYVAWDSVY

SEQ ID NO: 21191 - protein, 11 aa, Artificial Sequence
  Peptide Derived from Human Papillomavirus
MTYVAWDSVYY

SEQ ID NO: 21192 - protein, 8 aa, Artificial Sequence
  Peptide Derived from Human Papillomavirus
NSLKCLRY

SEQ ID NO: 21193 - protein, 10 aa, Artificial Sequence
  Peptide Derived from Human Papillomavirus
NSLKCLRYRL

SEQ ID NO: 21194 - protein, 8 aa, Artificial Sequence
  Peptide Derived from Human Papillomavirus
NTEPTHCF

SEQ ID NO: 21195 - protein, 9 aa, Artificial Sequence
  Peptide Derived from Human Papillomavirus
NTGTWEVHF

SEQ ID NO: 21196 - protein, 8 aa, Artificial Sequence
  Peptide Derived from Human Papillomavirus
NTTPIIHL

SEQ ID NO: 21197 - protein, 9 aa, Artificial Sequence
  Peptide Derived from Human Papillomavirus
NTVAIPDSV

SEQ ID NO: 21198 - protein, 11 aa, Artificial Sequence
  Peptide Derived from Human Papillomavirus
NTVAIPDSVQI

SEQ ID NO: 21199 - protein, 10 aa, Artificial Sequence
  Peptide Derived from Human Papillomavirus
PAYNISKSKA

SEQ ID NO: 21200 - protein, 8 aa, Artificial Sequence
  Peptide Derived from Human Papillomavirus
PSPYSSTV

SEQ ID NO: 21201 - protein, 10 aa, Artificial Sequence
  Peptide Derived from Human Papillomavirus
PSPYSSTVSV

SEQ ID NO: 21202 - protein, 10 aa, Artificial Sequence
  Peptide Derived from Human Papillomavirus
PTGNNKRRKL

SEQ ID NO: 21203 - protein, 9 aa, Artificial Sequence
  Peptide Derived from Human Papillomavirus
QSRYKTEDW

SEQ ID NO: 21204 - protein, 11 aa, Artificial Sequence
  Peptide Derived from Human Papillomavirus
QSRYKTEDWTL

SEQ ID NO: 21205 - protein, 8 aa, Artificial Sequence
  Peptide Derived from Human Papillomavirus
QTLNHQVV

SEQ ID NO: 21206 - protein, 10 aa, Artificial Sequence
  Peptide Derived from Human Papillomavirus
QTLNHQVVPA

SEQ ID NO: 21207 - protein, 11 aa, Artificial Sequence
  Peptide Derived from Human Papillomavirus
QTLNHQVVPAY

SEQ ID NO: 21208 - protein, 11 aa, Artificial Sequence
  Peptide Derived from Human Papillomavirus
QTPKETLSERL

SEQ ID NO: 21209 - protein, 8 aa, Artificial Sequence
  Peptide Derived from Human Papillomavirus
RTKFLNTV

SEQ ID NO: 21210 - protein, 9 aa, Artificial Sequence
  Peptide Derived from Human Papillomavirus
RTKFLNTVA

SEQ ID NO: 21211 - protein, 10 aa, Artificial Sequence
  Peptide Derived from Human Papillomavirus
RTKFLNTVAI

SEQ ID NO: 21212 - protein, 11 aa, Artificial Sequence
  Peptide Derived from Human Papillomavirus
SAATRPGHCGL

SEQ ID NO: 21213 - protein, 9 aa, Artificial Sequence
  Peptide Derived from Human Papillomavirus
SATQLVKQL

SEQ ID NO: 21214 - protein, 9 aa, Artificial Sequence
  Peptide Derived from Human Papillomavirus
SSTVSVGTA

SEQ ID NO: 21215 - protein, 9 aa, Artificial Sequence
  Peptide Derived from Human Papillomavirus
SSTWHWTGA

SEQ ID NO: 21216 - protein, 9 aa, Artificial Sequence
  Peptide Derived from Human Papillomavirus
STSDDTVSA

SEQ ID NO: 21217 - protein, 8 aa, Artificial Sequence
  Peptide Derived from Human Papillomavirus
STVSVGTA

SEQ ID NO: 21218 - protein, 11 aa, Artificial Sequence
  Peptide Derived from Human Papillomavirus
STVSVGTAKTY

SEQ ID NO: 21219 - protein, 8 aa, Artificial Sequence
  Peptide Derived from Human Papillomavirus
STWHWTGA

SEQ ID NO: 21220 - protein, 10 aa, Artificial Sequence
  Peptide Derived from Human Papillomavirus
TAKTYGQTSA

SEQ ID NO: 21221 - protein, 11 aa, Artificial Sequence
  Peptide Derived from Human Papillomavirus
TAKTYGQTSAA

SEQ ID NO: 21222 - protein, 10 aa, Artificial Sequence
  Peptide Derived from Human Papillomavirus
TATCVSHRGL

SEQ ID NO: 21223 - protein, 11 aa, Artificial Sequence
  Peptide Derived from Human Papillomavirus
TATCVSHRGLY

SEQ ID NO: 21224 - protein, 8 aa, Artificial Sequence
  Peptide Derived from Human Papillomavirus
TSDDTVSA

SEQ ID NO: 21225 - protein, 11 aa, Artificial Sequence
  Peptide Derived from Human Papillomavirus
TSDDTVSATQL

SEQ ID NO: 21226 - protein, 9 aa, Artificial Sequence
  Peptide Derived from Human Papillomavirus
VAIPDSVQI

SEQ ID NO: 21227 - protein, 10 aa, Artificial Sequence
  Peptide Derived from Human Papillomavirus
VAIPDSVQIL

SEQ ID NO: 21228 - protein, 11 aa, Artificial Sequence
  Peptide Derived from Human Papillomavirus
VAIPDSVQILV

SEQ ID NO: 21229 - protein, 8 aa, Artificial Sequence
  Peptide Derived from Human Papillomavirus
VAWDSVYY

SEQ ID NO: 21230 - protein, 9 aa, Artificial Sequence
  Peptide Derived from Human Papillomavirus
VAWDSVYYM

SEQ ID NO: 21231 - protein, 10 aa, Artificial Sequence
  Peptide Derived from Human Papillomavirus
VSATQLVKQL

SEQ ID NO: 21232 - protein, 8 aa, Artificial Sequence
  Peptide Derived from Human Papillomavirus
VSHRGLYY

SEQ ID NO: 21233 - protein, 9 aa, Artificial Sequence
  Peptide Derived from Human Papillomavirus
VSHRGLYYV

SEQ ID NO: 21234 - protein, 9 aa, Artificial Sequence
  Peptide Derived from Human Papillomavirus
VSVGTAKTY

SEQ ID NO: 21235 - protein, 11 aa, Artificial Sequence
  Peptide Derived from Human Papillomavirus
WTGAGNEKTGI

SEQ ID NO: 21236 - protein, 10 aa, Artificial Sequence
  Peptide Derived from Human Papillomavirus
WTLQDTCEEL

SEQ ID NO: 21237 - protein, 11 aa, Artificial Sequence
  Peptide Derived from Human Papillomavirus
WTLQDTCEELW

SEQ ID NO: 21238 - protein, 10 aa, Artificial Sequence
  Peptide Derived from Human Papillomavirus
YSSTVSVGTA

SEQ ID NO: 21239 - protein, 8 aa, Artificial Sequence
  Peptide Derived from Human Papillomavirus
ATAFTVYV

SEQ ID NO: 21240 - protein, 9 aa, Artificial Sequence
  Peptide Derived from Human Papillomavirus
ATAFTVYVF

SEQ ID NO: 21241 - protein, 11 aa, Artificial Sequence
  Peptide Derived from Human Papillomavirus
ATAFTVYVFCF

SEQ ID NO: 21242 - protein, 8 aa, Artificial Sequence
  Peptide Derived from Human Papillomavirus
CAYAWVLV

SEQ ID NO: 21243 - protein, 9 aa, Artificial Sequence
  Peptide Derived from Human Papillomavirus
CAYAWVLVF

SEQ ID NO: 21244 - protein, 10 aa, Artificial Sequence
  Peptide Derived from Human Papillomavirus
CAYAWVLVFV

SEQ ID NO: 21245 - protein, 11 aa, Artificial Sequence
  Peptide Derived from Human Papillomavirus
CAYAWVLVFVY

SEQ ID NO: 21246 - protein, 8 aa, Artificial Sequence
  Peptide Derived from Human Papillomavirus
FTVYVFCF

SEQ ID NO: 21247 - protein, 9 aa, Artificial Sequence
  Peptide Derived from Human Papillomavirus
FTVYVFCFL

SEQ ID NO: 21248 - protein, 10 aa, Artificial Sequence
  Peptide Derived from Human Papillomavirus
FTVYVFCFLL

SEQ ID NO: 21249 - protein, 8 aa, Artificial Sequence
  Peptide Derived from Human Papillomavirus
ITSPATAF

SEQ ID NO: 21250 - protein, 10 aa, Artificial Sequence
  Peptide Derived from Human Papillomavirus
ITSPATAFTV

SEQ ID NO: 21251 - protein, 11 aa, Artificial Sequence
  Peptide Derived from Human Papillomavirus
ITSPATAFTVY

SEQ ID NO: 21252 - protein, 9 aa, Artificial Sequence
  Peptide Derived from Human Papillomavirus
LSLIFLFCF

SEQ ID NO: 21253 - protein, 11 aa, Artificial Sequence
  Peptide Derived from Human Papillomavirus
LSLIFLFCFCV

SEQ ID NO: 21254 - protein, 8 aa, Artificial Sequence
  Peptide Derived from Human Papillomavirus
PATAFTVY

SEQ ID NO: 21255 - protein, 9 aa, Artificial Sequence
  Peptide Derived from Human Papillomavirus
PATAFTVYV

SEQ ID NO: 21256 - protein, 10 aa, Artificial Sequence
  Peptide Derived from Human Papillomavirus
PATAFTVYVF

SEQ ID NO: 21257 - protein, 8 aa, Artificial Sequence
  Peptide Derived from Human Papillomavirus
PSVCMCAY

SEQ ID NO: 21258 - protein, 9 aa, Artificial Sequence
  Peptide Derived from Human Papillomavirus
PSVCMCAYA

SEQ ID NO: 21259 - protein, 10 aa, Artificial Sequence
  Peptide Derived from Human Papillomavirus
PSVCMCAYAW

SEQ ID NO: 21260 - protein, 11 aa, Artificial Sequence
  Peptide Derived from Human Papillomavirus
PSVCMCAYAWV

SEQ ID NO: 21261 - protein, 8 aa, Artificial Sequence
  Peptide Derived from Human Papillomavirus
TAFTVYVF

SEQ ID NO: 21262 - protein, 10 aa, Artificial Sequence
  Peptide Derived from Human Papillomavirus
TAFTVYVFCF

SEQ ID NO: 21263 - protein, 11 aa, Artificial Sequence
  Peptide Derived from Human Papillomavirus
TAFTVYVFCFL

SEQ ID NO: 21264 - protein, 9 aa, Artificial Sequence
  Peptide Derived from Human Papillomavirus
TSPATAFTV

SEQ ID NO: 21265 - protein, 10 aa, Artificial Sequence
  Peptide Derived from Human Papillomavirus
TSPATAFTVY

SEQ ID NO: 21266 - protein, 11 aa, Artificial Sequence
  Peptide Derived from Human Papillomavirus
TSPATAFTVYV

SEQ ID NO: 21267 - protein, 8 aa, Artificial Sequence
  Peptide Derived from Human Papillomavirus
YAWVLVFV

SEQ ID NO: 21268 - protein, 9 aa, Artificial Sequence
  Peptide Derived from Human Papillomavirus
YAWVLVFVY

SEQ ID NO: 21269 - protein, 10 aa, Artificial Sequence
  Peptide Derived from Human Papillomavirus
YAWVLVFVYI

SEQ ID NO: 21270 - protein, 11 aa, Artificial Sequence
  Peptide Derived from Human Papillomavirus
YAWVLVFVYIV

SEQ ID NO: 21271 - protein, 9 aa, Artificial Sequence
  Peptide Derived from Human Papillomavirus
AACHKCIDF

SEQ ID NO: 21272 - protein, 10 aa, Artificial Sequence
  Peptide Derived from Human Papillomavirus
AACHKCIDFY

SEQ ID NO: 21273 - protein, 8 aa, Artificial Sequence
  Peptide Derived from Human Papillomavirus
CTELNTSL

SEQ ID NO: 21274 - protein, 11 aa, Artificial Sequence
  Peptide Derived from Human Papillomavirus
CTELNTSLQDI

SEQ ID NO: 21275 - protein, 8 aa, Artificial Sequence
  Peptide Derived from Human Papillomavirus
DSVYGDTL

SEQ ID NO: 21276 - protein, 11 aa, Artificial Sequence
  Peptide Derived from Human Papillomavirus
DSVYGDTLEKL

SEQ ID NO: 21277 - protein, 11 aa, Artificial Sequence
  Peptide Derived from Human Papillomavirus
DTLEKLTNTGL

SEQ ID NO: 21278 - protein, 8 aa, Artificial Sequence
  Peptide Derived from Human Papillomavirus
FAFKDLFV

SEQ ID NO: 21279 - protein, 9 aa, Artificial Sequence
  Peptide Derived from Human Papillomavirus
FAFKDLFVV

SEQ ID NO: 21280 - protein, 10 aa, Artificial Sequence
  Peptide Derived from Human Papillomavirus
FAFKDLFVVY

SEQ ID NO: 21281 - protein, 8 aa, Artificial Sequence
  Peptide Derived from Human Papillomavirus
HAACHKCI

SEQ ID NO: 21282 - protein, 10 aa, Artificial Sequence
  Peptide Derived from Human Papillomavirus
HAACHKCIDF

SEQ ID NO: 21283 - protein, 11 aa, Artificial Sequence
  Peptide Derived from Human Papillomavirus
HAACHKCIDFY

SEQ ID NO: 21284 - protein, 9 aa, Artificial Sequence
  Peptide Derived from Human Papillomavirus
ITCVYCKTV

SEQ ID NO: 21285 - protein, 10 aa, Artificial Sequence
  Peptide Derived from Human Papillomavirus
ITCVYCKTVL

SEQ ID NO: 21286 - protein, 9 aa, Artificial Sequence
  Peptide Derived from Human Papillomavirus
KTVLELTEV

SEQ ID NO: 21287 - protein, 10 aa, Artificial Sequence
  Peptide Derived from Human Papillomavirus
KTVLELTEVF

SEQ ID NO: 21288 - protein, 8 aa, Artificial Sequence
  Peptide Derived from Human Papillomavirus
LTEVFEFA

SEQ ID NO: 21289 - protein, 9 aa, Artificial Sequence
  Peptide Derived from Human Papillomavirus
LTEVFEFAF

SEQ ID NO: 21290 - protein, 9 aa, Artificial Sequence
  Peptide Derived from Human Papillomavirus
LTNTGLYNL

SEQ ID NO: 21291 - protein, 10 aa, Artificial Sequence
  Peptide Derived from Human Papillomavirus
LTNTGLYNLL

SEQ ID NO: 21292 - protein, 11 aa, Artificial Sequence
  Peptide Derived from Human Papillomavirus
LTNTGLYNLLI

SEQ ID NO: 21293 - protein, 8 aa, Artificial Sequence
  Peptide Derived from Human Papillomavirus
NTGLYNLL

SEQ ID NO: 21294 - protein, 9 aa, Artificial Sequence
  Peptide Derived from Human Papillomavirus
NTGLYNLLI

SEQ ID NO: 21295 - protein, 9 aa, Artificial Sequence
  Peptide Derived from Human Papillomavirus
NTSLQDIEI

SEQ ID NO: 21296 - protein, 8 aa, Artificial Sequence
  Peptide Derived from Human Papillomavirus
PAEKLRHL

SEQ ID NO: 21297 - protein, 8 aa, Artificial Sequence
  Peptide Derived from Human Papillomavirus
PTRRPYKL

SEQ ID NO: 21298 - protein, 11 aa, Artificial Sequence
  Peptide Derived from Human Papillomavirus
PTRRPYKLPDL

SEQ ID NO: 21299 - protein, 8 aa, Artificial Sequence
  Peptide Derived from Human Papillomavirus
TSLQDIEI

SEQ ID NO: 21300 - protein, 11 aa, Artificial Sequence
  Peptide Derived from Human Papillomavirus
TSLQDIEITCV

SEQ ID NO: 21301 - protein, 10 aa, Artificial Sequence
  Peptide Derived from Human Papillomavirus
YSDSVYGDTL

SEQ ID NO: 21302 - protein, 10 aa, Artificial Sequence
  Peptide Derived from Human Papillomavirus
YSRIRELRHY

SEQ ID NO: 21303 - protein, 8 aa, Artificial Sequence
  Peptide Derived from Human Papillomavirus
ATLQDIVL

SEQ ID NO: 21304 - protein, 10 aa, Artificial Sequence
  Peptide Derived from Human Papillomavirus
ATLQDIVLHL

SEQ ID NO: 21305 - protein, 9 aa, Artificial Sequence
  Peptide Derived from Human Papillomavirus
DSEEENDEI

SEQ ID NO: 21306 - protein, 8 aa, Artificial Sequence
  Peptide Derived from Human Papillomavirus
EARIKLVV

SEQ ID NO: 21307 - protein, 9 aa, Artificial Sequence
  Peptide Derived from Human Papillomavirus
ESSADDLRA

SEQ ID NO: 21308 - protein, 10 aa, Artificial Sequence
  Peptide Derived from Human Papillomavirus
ESSADDLRAF

SEQ ID NO: 21309 - protein, 8 aa, Artificial Sequence
  Peptide Derived from Human Papillomavirus
KATLQDIV

SEQ ID NO: 21310 - protein, 9 aa, Artificial Sequence
  Peptide Derived from Human Papillomavirus
KATLQDIVL

SEQ ID NO: 21311 - protein, 11 aa, Artificial Sequence
  Peptide Derived from Human Papillomavirus
KATLQDIVLHL

SEQ ID NO: 21312 - protein, 11 aa, Artificial Sequence
  Peptide Derived from Human Papillomavirus
LSDSEEENDEI

SEQ ID NO: 21313 - protein, 9 aa, Artificial Sequence
  Peptide Derived from Human Papillomavirus
LSFVCPWCA

SEQ ID NO: 21314 - protein, 9 aa, Artificial Sequence
  Peptide Derived from Human Papillomavirus
NTLSFVCPW

SEQ ID NO: 21315 - protein, 11 aa, Artificial Sequence
  Peptide Derived from Human Papillomavirus
NTLSFVCPWCA

SEQ ID NO: 21316 - protein, 9 aa, Artificial Sequence
  Peptide Derived from Human Papillomavirus
RAEPQRHTM

SEQ ID NO: 21317 - protein, 10 aa, Artificial Sequence
  Peptide Derived from Human Papillomavirus
RAEPQRHTML

SEQ ID NO: 21318 - protein, 8 aa, Artificial Sequence
  Peptide Derived from Human Papillomavirus
RAFQQLFL

SEQ ID NO: 21319 - protein, 11 aa, Artificial Sequence
  Peptide Derived from Human Papillomavirus
RAFQQLFLNTL

SEQ ID NO: 21320 - protein, 8 aa, Artificial Sequence
  Peptide Derived from Human Papillomavirus
SADDLRAF

SEQ ID NO: 21321 - protein, 11 aa, Artificial Sequence
  Peptide Derived from Human Papillomavirus
SADDLRAFQQL

SEQ ID NO: 21322 - protein, 8 aa, Artificial Sequence
  Peptide Derived from Human Papillomavirus
SSADDLRA

SEQ ID NO: 21323 - protein, 9 aa, Artificial Sequence
  Peptide Derived from Human Papillomavirus
SSADDLRAF

SEQ ID NO: 21324 - protein, 10 aa, Artificial Sequence
  Peptide Derived from Human Papillomavirus
AAPAENKDPY

SEQ ID NO: 21325 - protein, 10 aa, Artificial Sequence
  Peptide Derived from Human Papillomavirus
AATSNVSEDV

SEQ ID NO: 21326 - protein, 8 aa, Artificial Sequence
  Peptide Derived from Human Papillomavirus
ASPGSCVY

SEQ ID NO: 21327 - protein, 11 aa, Artificial Sequence
  Peptide Derived from Human Papillomavirus
ASTQSPVPGQY

SEQ ID NO: 21328 - protein, 11 aa, Artificial Sequence
  Peptide Derived from Human Papillomavirus
ATKFKQYSRHV

SEQ ID NO: 21329 - protein, 9 aa, Artificial Sequence
  Peptide Derived from Human Papillomavirus
ATSNVSEDV

SEQ ID NO: 21330 - protein, 8 aa, Artificial Sequence
  Peptide Derived from Human Papillomavirus
ATTSSKPA

SEQ ID NO: 21331 - protein, 11 aa, Artificial Sequence
  Peptide Derived from Human Papillomavirus
ATTSSKPAKRV

SEQ ID NO: 21332 - protein, 9 aa, Artificial Sequence
  Peptide Derived from Human Papillomavirus
CAPAIGEHW

SEQ ID NO: 21333 - protein, 10 aa, Artificial Sequence
  Peptide Derived from Human Papillomavirus
CAPAIGEHWA

SEQ ID NO: 21334 - protein, 8 aa, Artificial Sequence
  Peptide Derived from Human Papillomavirus
CASTQSPV

SEQ ID NO: 21335 - protein, 9 aa, Artificial Sequence
  Peptide Derived from Human Papillomavirus
CTITLTADV

SEQ ID NO: 21336 - protein, 10 aa, Artificial Sequence
  Peptide Derived from Human Papillomavirus
CTITLTADVM

SEQ ID NO: 21337 - protein, 11 aa, Artificial Sequence
  Peptide Derived from Human Papillomavirus
DAAPAENKDPY

SEQ ID NO: 21338 - protein, 8 aa, Artificial Sequence
  Peptide Derived from Human Papillomavirus
DATKFKQY

SEQ ID NO: 21339 - protein, 9 aa, Artificial Sequence
  Peptide Derived from Human Papillomavirus
DSQLFNKPY

SEQ ID NO: 21340 - protein, 10 aa, Artificial Sequence
  Peptide Derived from Human Papillomavirus
DSQLFNKPYW

SEQ ID NO: 21341 - protein, 11 aa, Artificial Sequence
  Peptide Derived from Human Papillomavirus
DSQLFNKPYWL

SEQ ID NO: 21342 - protein, 8 aa, Artificial Sequence
  Peptide Derived from Human Papillomavirus
DTESSHAA

SEQ ID NO: 21343 - protein, 9 aa, Artificial Sequence
  Peptide Derived from Human Papillomavirus
DTGYGAMDF

SEQ ID NO: 21344 - protein, 8 aa, Artificial Sequence
  Peptide Derived from Human Papillomavirus
DTKCEVPL

SEQ ID NO: 21345 - protein, 10 aa, Artificial Sequence
  Peptide Derived from Human Papillomavirus
DTKCEVPLDI

SEQ ID NO: 21346 - protein, 8 aa, Artificial Sequence
  Peptide Derived from Human Papillomavirus
DTTPSTNL

SEQ ID NO: 21347 - protein, 10 aa, Artificial Sequence
  Peptide Derived from Human Papillomavirus
DTTPSTNLTI

SEQ ID NO: 21348 - protein, 8 aa, Artificial Sequence
  Peptide Derived from Human Papillomavirus
DTVPQSLY

SEQ ID NO: 21349 - protein, 9 aa, Artificial Sequence
  Peptide Derived from Human Papillomavirus
DTVPQSLYI

SEQ ID NO: 21350 - protein, 9 aa, Artificial Sequence
  Peptide Derived from Human Papillomavirus
DTYRFVQSV

SEQ ID NO: 21351 - protein, 10 aa, Artificial Sequence
  Peptide Derived from Human Papillomavirus
DTYRFVQSVA

SEQ ID NO: 21352 - protein, 11 aa, Artificial Sequence
  Peptide Derived from Human Papillomavirus
DTYRFVQSVAI

SEQ ID NO: 21353 - protein, 10 aa, Artificial Sequence
  Peptide Derived from Human Papillomavirus
ESSHAATSNV

SEQ ID NO: 21354 - protein, 8 aa, Artificial Sequence
  Peptide Derived from Human Papillomavirus
ETQRLVWA

SEQ ID NO: 21355 - protein, 10 aa, Artificial Sequence
  Peptide Derived from Human Papillomavirus
ETQRLVWACA

SEQ ID NO: 21356 - protein, 9 aa, Artificial Sequence
  Peptide Derived from Human Papillomavirus
FARHFWNRA

SEQ ID NO: 21357 - protein, 8 aa, Artificial Sequence
  Peptide Derived from Human Papillomavirus
FSLDLDQY

SEQ ID NO: 21358 - protein, 10 aa, Artificial Sequence
  Peptide Derived from Human Papillomavirus
FSLDLDQYPL

SEQ ID NO: 21359 - protein, 11 aa, Artificial Sequence
  Peptide Derived from Human Papillomavirus
FSTLQDTKCEV

SEQ ID NO: 21360 - protein, 8 aa, Artificial Sequence
  Peptide Derived from Human Papillomavirus
GAMDFSTL

SEQ ID NO: 21361 - protein, 10 aa, Artificial Sequence
  Peptide Derived from Human Papillomavirus
GSIVTSDSQL

SEQ ID NO: 21362 - protein, 11 aa, Artificial Sequence
  Peptide Derived from Human Papillomavirus
GSIVTSDSQLF

SEQ ID NO: 21363 - protein, 8 aa, Artificial Sequence
  Peptide Derived from Human Papillomavirus
GSSRLLTV

SEQ ID NO: 21364 - protein, 9 aa, Artificial Sequence
  Peptide Derived from Human Papillomavirus
GTACKSRPL

SEQ ID NO: 21365 - protein, 11 aa, Artificial Sequence
  Peptide Derived from Human Papillomavirus
GTMGDTVPQSL

SEQ ID NO: 21366 - protein, 11 aa, Artificial Sequence
  Peptide Derived from Human Papillomavirus
HAATSNVSEDV

SEQ ID NO: 21367 - protein, 8 aa, Artificial Sequence
  Peptide Derived from Human Papillomavirus
HAGSSRLL

SEQ ID NO: 21368 - protein, 10 aa, Artificial Sequence
  Peptide Derived from Human Papillomavirus
HAGSSRLLTV

SEQ ID NO: 21369 - protein, 8 aa, Artificial Sequence
  Peptide Derived from Human Papillomavirus
HSILVYMV

SEQ ID NO: 21370 - protein, 10 aa, Artificial Sequence
  Peptide Derived from Human Papillomavirus
HSILVYMVHI

SEQ ID NO: 21371 - protein, 11 aa, Artificial Sequence
  Peptide Derived from Human Papillomavirus
HSILVYMVHII

SEQ ID NO: 21372 - protein, 8 aa, Artificial Sequence
  Peptide Derived from Human Papillomavirus
HSMNSSIL

SEQ ID NO: 21373 - protein, 11 aa, Artificial Sequence
  Peptide Derived from Human Papillomavirus
HSMNSSILEDW

SEQ ID NO: 21374 - protein, 8 aa, Artificial Sequence
  Peptide Derived from Human Papillomavirus
ITCQKDAA

SEQ ID NO: 21375 - protein, 10 aa, Artificial Sequence
  Peptide Derived from Human Papillomavirus
ITCQKDAAPA

SEQ ID NO: 21376 - protein, 8 aa, Artificial Sequence
  Peptide Derived from Human Papillomavirus
ITLTADVM

SEQ ID NO: 21377 - protein, 10 aa, Artificial Sequence
  Peptide Derived from Human Papillomavirus
ITLTADVMSY

SEQ ID NO: 21378 - protein, 11 aa, Artificial Sequence
  Peptide Derived from Human Papillomavirus
ITLTADVMSYI

SEQ ID NO: 21379 - protein, 9 aa, Artificial Sequence
  Peptide Derived from Human Papillomavirus
KAQGHNNGV

SEQ ID NO: 21380 - protein, 11 aa, Artificial Sequence
  Peptide Derived from Human Papillomavirus
KAQGHNNGVCW

SEQ ID NO: 21381 - protein, 10 aa, Artificial Sequence
  Peptide Derived from Human Papillomavirus
LSGHPFYNKL

SEQ ID NO: 21382 - protein, 9 aa, Artificial Sequence
  Peptide Derived from Human Papillomavirus
LSQGDCPPL

SEQ ID NO: 21383 - protein, 11 aa, Artificial Sequence
  Peptide Derived from Human Papillomavirus
LSQGDCPPLEL

SEQ ID NO: 21384 - protein, 8 aa, Artificial Sequence
  Peptide Derived from Human Papillomavirus
LTADVMSY

SEQ ID NO: 21385 - protein, 9 aa, Artificial Sequence
  Peptide Derived from Human Papillomavirus
LTADVMSYI

SEQ ID NO: 21386 - protein, 11 aa, Artificial Sequence
  Peptide Derived from Human Papillomavirus
LTICASTQSPV

SEQ ID NO: 21387 - protein, 8 aa, Artificial Sequence
  Peptide Derived from Human Papillomavirus
LTVGNPYF

SEQ ID NO: 21388 - protein, 10 aa, Artificial Sequence
  Peptide Derived from Human Papillomavirus
LTVGNPYFRV

SEQ ID NO: 21389 - protein, 11 aa, Artificial Sequence
  Peptide Derived from Human Papillomavirus
MALWRPSDNTV

SEQ ID NO: 21390 - protein, 10 aa, Artificial Sequence
  Peptide Derived from Human Papillomavirus
MSADPYGDSM

SEQ ID NO: 21391 - protein, 11 aa, Artificial Sequence
  Peptide Derived from Human Papillomavirus
MSADPYGDSMF

SEQ ID NO: 21392 - protein, 11 aa, Artificial Sequence
  Peptide Derived from Human Papillomavirus
MSYIHSMNSSI

SEQ ID NO: 21393 - protein, 8 aa, Artificial Sequence
  Peptide Derived from Human Papillomavirus
NSSILEDW

SEQ ID NO: 21394 - protein, 10 aa, Artificial Sequence
  Peptide Derived from Human Papillomavirus
NSSILEDWNF

SEQ ID NO: 21395 - protein, 11 aa, Artificial Sequence
  Peptide Derived from Human Papillomavirus
NTDDYVTPTSI

SEQ ID NO: 21396 - protein, 9 aa, Artificial Sequence
  Peptide Derived from Human Papillomavirus
NTVLEDGDM

SEQ ID NO: 21397 - protein, 10 aa, Artificial Sequence
  Peptide Derived from Human Papillomavirus
NTVLEDGDMV

SEQ ID NO: 21398 - protein, 10 aa, Artificial Sequence
  Peptide Derived from Human Papillomavirus
NTVYLPPPSV

SEQ ID NO: 21399 - protein, 11 aa, Artificial Sequence
  Peptide Derived from Human Papillomavirus
NTVYLPPPSVA

SEQ ID NO: 21400 - protein, 8 aa, Artificial Sequence
  Peptide Derived from Human Papillomavirus
PAENKDPY

SEQ ID NO: 21401 - protein, 11 aa, Artificial Sequence
  Peptide Derived from Human Papillomavirus
PAENKDPYDKL

SEQ ID NO: 21402 - protein, 10 aa, Artificial Sequence
  Peptide Derived from Human Papillomavirus
PAGGGNKQDI

SEQ ID NO: 21403 - protein, 8 aa, Artificial Sequence
  Peptide Derived from Human Papillomavirus
PAIGEHWA

SEQ ID NO: 21404 - protein, 9 aa, Artificial Sequence
  Peptide Derived from Human Papillomavirus
PAKRVRVRA

SEQ ID NO: 21405 - protein, 8 aa, Artificial Sequence
  Peptide Derived from Human Papillomavirus
PASPGSCV

SEQ ID NO: 21406 - protein, 9 aa, Artificial Sequence
  Peptide Derived from Human Papillomavirus
PASPGSCVY

SEQ ID NO: 21407 - protein, 10 aa, Artificial Sequence
  Peptide Derived from Human Papillomavirus
PSATTSSKPA

SEQ ID NO: 21408 - protein, 8 aa, Artificial Sequence
  Peptide Derived from Human Papillomavirus
PSDNTVYL

SEQ ID NO: 21409 - protein, 8 aa, Artificial Sequence
  Peptide Derived from Human Papillomavirus
PSPSGSIV

SEQ ID NO: 21410 - protein, 9 aa, Artificial Sequence
  Peptide Derived from Human Papillomavirus
PSTNLTICA

SEQ ID NO: 21411 - protein, 10 aa, Artificial Sequence
  Peptide Derived from Human Papillomavirus
PTIGPRKRSA

SEQ ID NO: 21412 - protein, 8 aa, Artificial Sequence
  Peptide Derived from Human Papillomavirus
PTSIFYHA

SEQ ID NO: 21413 - protein, 9 aa, Artificial Sequence
  Peptide Derived from Human Papillomavirus
PTTSLVDTY

SEQ ID NO: 21414 - protein, 11 aa, Artificial Sequence
  Peptide Derived from Human Papillomavirus
PTTSLVDTYRF

SEQ ID NO: 21415 - protein, 10 aa, Artificial Sequence
  Peptide Derived from Human Papillomavirus
QAGLRRKPTI

SEQ ID NO: 21416 - protein, 9 aa, Artificial Sequence
  Peptide Derived from Human Papillomavirus
QSICKYPDY

SEQ ID NO: 21417 - protein, 10 aa, Artificial Sequence
  Peptide Derived from Human Papillomavirus
QSICKYPDYL

SEQ ID NO: 21418 - protein, 10 aa, Artificial Sequence
  Peptide Derived from Human Papillomavirus
QSLYIKGTGM

SEQ ID NO: 21419 - protein, 8 aa, Artificial Sequence
  Peptide Derived from Human Papillomavirus
QSPVPGQY

SEQ ID NO: 21420 - protein, 10 aa, Artificial Sequence
  Peptide Derived from Human Papillomavirus
QSPVPGQYDA

SEQ ID NO: 21421 - protein, 11 aa, Artificial Sequence
  Peptide Derived from Human Papillomavirus
QSVAITCQKDA

SEQ ID NO: 21422 - protein, 10 aa, Artificial Sequence
  Peptide Derived from Human Papillomavirus
QTQLCILGCA

SEQ ID NO: 21423 - protein, 9 aa, Artificial Sequence
  Peptide Derived from Human Papillomavirus
RAGTMGDTV

SEQ ID NO: 21424 - protein, 9 aa, Artificial Sequence
  Peptide Derived from Human Papillomavirus
SADPYGDSM

SEQ ID NO: 21425 - protein, 10 aa, Artificial Sequence
  Peptide Derived from Human Papillomavirus
SADPYGDSMF

SEQ ID NO: 21426 - protein, 11 aa, Artificial Sequence
  Peptide Derived from Human Papillomavirus
SADPYGDSMFF

SEQ ID NO: 21427 - protein, 9 aa, Artificial Sequence
  Peptide Derived from Human Papillomavirus
SATTSSKPA

SEQ ID NO: 21428 - protein, 8 aa, Artificial Sequence
  Peptide Derived from Human Papillomavirus
SAYQYRVF

SEQ ID NO: 21429 - protein, 10 aa, Artificial Sequence
  Peptide Derived from Human Papillomavirus
SAYQYRVFRV

SEQ ID NO: 21430 - protein, 9 aa, Artificial Sequence
  Peptide Derived from Human Papillomavirus
SSHAATSNV

SEQ ID NO: 21431 - protein, 9 aa, Artificial Sequence
  Peptide Derived from Human Papillomavirus
SSILEDWNF

SEQ ID NO: 21432 - protein, 11 aa, Artificial Sequence
  Peptide Derived from Human Papillomavirus
SSILEDWNFGV

SEQ ID NO: 21433 - protein, 8 aa, Artificial Sequence
  Peptide Derived from Human Papillomavirus
SSKPAKRV

SEQ ID NO: 21434 - protein, 10 aa, Artificial Sequence
  Peptide Derived from Human Papillomavirus
SSKPAKRVRV

SEQ ID NO: 21435 - protein, 11 aa, Artificial Sequence
  Peptide Derived from Human Papillomavirus
SSRLLTVGNPY

SEQ ID NO: 21436 - protein, 10 aa, Artificial Sequence
  Peptide Derived from Human Papillomavirus
STLQDTKCEV

SEQ ID NO: 21437 - protein, 8 aa, Artificial Sequence
  Peptide Derived from Human Papillomavirus
STNLTICA

SEQ ID NO: 21438 - protein, 10 aa, Artificial Sequence
  Peptide Derived from Human Papillomavirus
STQSPVPGQY

SEQ ID NO: 21439 - protein, 8 aa, Artificial Sequence
  Peptide Derived from Human Papillomavirus
TACKSRPL

SEQ ID NO: 21440 - protein, 8 aa, Artificial Sequence
  Peptide Derived from Human Papillomavirus
TADVMSYI

SEQ ID NO: 21441 - protein, 11 aa, Artificial Sequence
  Peptide Derived from Human Papillomavirus
TADVMSYIHSM

SEQ ID NO: 21442 - protein, 11 aa, Artificial Sequence
  Peptide Derived from Human Papillomavirus
TSDSQLFNKPY

SEQ ID NO: 21443 - protein, 11 aa, Artificial Sequence
  Peptide Derived from Human Papillomavirus
TSIYNPETQRL

SEQ ID NO: 21444 - protein, 9 aa, Artificial Sequence
  Peptide Derived from Human Papillomavirus
TSLVDTYRF

SEQ ID NO: 21445 - protein, 10 aa, Artificial Sequence
  Peptide Derived from Human Papillomavirus
TSLVDTYRFV

SEQ ID NO: 21446 - protein, 8 aa, Artificial Sequence
  Peptide Derived from Human Papillomavirus
TSNVSEDV

SEQ ID NO: 21447 - protein, 9 aa, Artificial Sequence
  Peptide Derived from Human Papillomavirus
TSSKPAKRV

SEQ ID NO: 21448 - protein, 11 aa, Artificial Sequence
  Peptide Derived from Human Papillomavirus
TSSKPAKRVRV

SEQ ID NO: 21449 - protein, 9 aa, Artificial Sequence
  Peptide Derived from Human Papillomavirus
TTPSTNLTI

SEQ ID NO: 21450 - protein, 11 aa, Artificial Sequence
  Peptide Derived from Human Papillomavirus
TTPSTNLTICA

SEQ ID NO: 21451 - protein, 8 aa, Artificial Sequence
  Peptide Derived from Human Papillomavirus
TTSLVDTY

SEQ ID NO: 21452 - protein, 10 aa, Artificial Sequence
  Peptide Derived from Human Papillomavirus
TTSLVDTYRF

SEQ ID NO: 21453 - protein, 11 aa, Artificial Sequence
  Peptide Derived from Human Papillomavirus
TTSLVDTYRFV

SEQ ID NO: 21454 - protein, 10 aa, Artificial Sequence
  Peptide Derived from Human Papillomavirus
TTSSKPAKRV

SEQ ID NO: 21455 - protein, 9 aa, Artificial Sequence
  Peptide Derived from Human Papillomavirus
VAITCQKDA

SEQ ID NO: 21456 - protein, 10 aa, Artificial Sequence
  Peptide Derived from Human Papillomavirus
VAITCQKDAA

SEQ ID NO: 21457 - protein, 10 aa, Artificial Sequence
  Peptide Derived from Human Papillomavirus
VARVVNTDDY

SEQ ID NO: 21458 - protein, 11 aa, Artificial Sequence
  Peptide Derived from Human Papillomavirus
VARVVNTDDYV

SEQ ID NO: 21459 - protein, 8 aa, Artificial Sequence
  Peptide Derived from Human Papillomavirus
VSAYQYRV

SEQ ID NO: 21460 - protein, 9 aa, Artificial Sequence
  Peptide Derived from Human Papillomavirus
VSAYQYRVF

SEQ ID NO: 21461 - protein, 11 aa, Artificial Sequence
  Peptide Derived from Human Papillomavirus
VSAYQYRVFRV

SEQ ID NO: 21462 - protein, 9 aa, Artificial Sequence
  Peptide Derived from Human Papillomavirus
VSEDVRDNV

SEQ ID NO: 21463 - protein, 11 aa, Artificial Sequence
  Peptide Derived from Human Papillomavirus
VSEDVRDNVSV

SEQ ID NO: 21464 - protein, 10 aa, Artificial Sequence
  Peptide Derived from Human Papillomavirus
VSVDYKQTQL

SEQ ID NO: 21465 - protein, 8 aa, Artificial Sequence
  Peptide Derived from Human Papillomavirus
VTPTSIFY

SEQ ID NO: 21466 - protein, 10 aa, Artificial Sequence
  Peptide Derived from Human Papillomavirus
VTPTSIFYHA

SEQ ID NO: 21467 - protein, 8 aa, Artificial Sequence
  Peptide Derived from Human Papillomavirus
VTSDSQLF

SEQ ID NO: 21468 - protein, 8 aa, Artificial Sequence
  Peptide Derived from Human Papillomavirus
WACAGVEI

SEQ ID NO: 21469 - protein, 9 aa, Artificial Sequence
  Peptide Derived from Human Papillomavirus
YSPSPSGSI

SEQ ID NO: 21470 - protein, 10 aa, Artificial Sequence
  Peptide Derived from Human Papillomavirus
YSPSPSGSIV

SEQ ID NO: 21471 - protein, 8 aa, Artificial Sequence
  Peptide Derived from Human Papillomavirus
YSRHVEEY

SEQ ID NO: 21472 - protein, 10 aa, Artificial Sequence
  Peptide Derived from Human Papillomavirus
YSRHVEEYDL

SEQ ID NO: 21473 - protein, 9 aa, Artificial Sequence
  Peptide Derived from Human Papillomavirus
YTRVLILHY

SEQ ID NO: 21474 - protein, 11 aa, Artificial Sequence
  Peptide Derived from Human Papillomavirus
YTRVLILHYHL

SEQ ID NO: 21475 - protein, 9 aa, Artificial Sequence
  Peptide Derived from Human Papillomavirus
AARRKRASV

SEQ ID NO: 21476 - protein, 10 aa, Artificial Sequence
  Peptide Derived from Human Papillomavirus
ASSGTGEEPI

SEQ ID NO: 21477 - protein, 9 aa, Artificial Sequence
  Peptide Derived from Human Papillomavirus
ASSYSNVTV

SEQ ID NO: 21478 - protein, 11 aa, Artificial Sequence
  Peptide Derived from Human Papillomavirus
ASSYSNVTVPL

SEQ ID NO: 21479 - protein, 8 aa, Artificial Sequence
  Peptide Derived from Human Papillomavirus
ASTQYIGI

SEQ ID NO: 21480 - protein, 8 aa, Artificial Sequence
  Peptide Derived from Human Papillomavirus
ATEDNDLF

SEQ ID NO: 21481 - protein, 10 aa, Artificial Sequence
  Peptide Derived from Human Papillomavirus
ATEDNDLFDI

SEQ ID NO: 21482 - protein, 11 aa, Artificial Sequence
  Peptide Derived from Human Papillomavirus
ATEDNDLFDIY

SEQ ID NO: 21483 - protein, 11 aa, Artificial Sequence
  Peptide Derived from Human Papillomavirus
ATMFTRSGTQI

SEQ ID NO: 21484 - protein, 8 aa, Artificial Sequence
  Peptide Derived from Human Papillomavirus
DSDFMDII

SEQ ID NO: 21485 - protein, 10 aa, Artificial Sequence
  Peptide Derived from Human Papillomavirus
DSDFMDIIRL

SEQ ID NO: 21486 - protein, 9 aa, Artificial Sequence
  Peptide Derived from Human Papillomavirus
DSSVVTSGA

SEQ ID NO: 21487 - protein, 8 aa, Artificial Sequence
  Peptide Derived from Human Papillomavirus
FADGFVAA

SEQ ID NO: 21488 - protein, 10 aa, Artificial Sequence
  Peptide Derived from Human Papillomavirus
FAFFKYSPTI

SEQ ID NO: 21489 - protein, 11 aa, Artificial Sequence
  Peptide Derived from Human Papillomavirus
FASSGTGEEPI

SEQ ID NO: 21490 - protein, 9 aa, Artificial Sequence
  Peptide Derived from Human Papillomavirus
FSDPSIIEV

SEQ ID NO: 21491 - protein, 8 aa, Artificial Sequence
  Peptide Derived from Human Papillomavirus
FSRLGQRA

SEQ ID NO: 21492 - protein, 10 aa, Artificial Sequence
  Peptide Derived from Human Papillomavirus
FSRLGQRATM

SEQ ID NO: 21493 - protein, 11 aa, Artificial Sequence
  Peptide Derived from Human Papillomavirus
FSRLGQRATMF

SEQ ID NO: 21494 - protein, 9 aa, Artificial Sequence
  Peptide Derived from Human Papillomavirus
FTGTSGFDI

SEQ ID NO: 21495 - protein, 11 aa, Artificial Sequence
  Peptide Derived from Human Papillomavirus
FTNPAFSDPSI

SEQ ID NO: 21496 - protein, 8 aa, Artificial Sequence
  Peptide Derived from Human Papillomavirus
FTRSGTQI

SEQ ID NO: 21497 - protein, 10 aa, Artificial Sequence
  Peptide Derived from Human Papillomavirus
FTRSGTQIGA

SEQ ID NO: 21498 - protein, 10 aa, Artificial Sequence
  Peptide Derived from Human Papillomavirus
GARVHFYHDI

SEQ ID NO: 21499 - protein, 10 aa, Artificial Sequence
  Peptide Derived from Human Papillomavirus
GSGTGGRTGY

SEQ ID NO: 21500 - protein, 11 aa, Artificial Sequence
  Peptide Derived from Human Papillomavirus
GSGTGGRTGYI

SEQ ID NO: 21501 - protein, 8 aa, Artificial Sequence
  Peptide Derived from Human Papillomavirus
GTCPPDVV

SEQ ID NO: 21502 - protein, 11 aa, Artificial Sequence
  Peptide Derived from Human Papillomavirus
GTCPPDVVPKV

SEQ ID NO: 21503 - protein, 8 aa, Artificial Sequence
  Peptide Derived from Human Papillomavirus
GTGGRTGY

SEQ ID NO: 21504 - protein, 9 aa, Artificial Sequence
  Peptide Derived from Human Papillomavirus
GTGGRTGYI

SEQ ID NO: 21505 - protein, 11 aa, Artificial Sequence
  Peptide Derived from Human Papillomavirus
GTGGRTGYIPL

SEQ ID NO: 21506 - protein, 8 aa, Artificial Sequence
  Peptide Derived from Human Papillomavirus
GTHGYEEI

SEQ ID NO: 21507 - protein, 10 aa, Artificial Sequence
  Peptide Derived from Human Papillomavirus
GTHGYEEIPL

SEQ ID NO: 21508 - protein, 9 aa, Artificial Sequence
  Peptide Derived from Human Papillomavirus
GTHYYLWPL

SEQ ID NO: 21509 - protein, 10 aa, Artificial Sequence
  Peptide Derived from Human Papillomavirus
GTHYYLWPLY

SEQ ID NO: 21510 - protein, 11 aa, Artificial Sequence
  Peptide Derived from Human Papillomavirus
GTHYYLWPLYY

SEQ ID NO: 21511 - protein, 10 aa, Artificial Sequence
  Peptide Derived from Human Papillomavirus
GTPTSGTHGY

SEQ ID NO: 21512 - protein, 8 aa, Artificial Sequence
  Peptide Derived from Human Papillomavirus
GTQIGARV

SEQ ID NO: 21513 - protein, 10 aa, Artificial Sequence
  Peptide Derived from Human Papillomavirus
GTQIGARVHF

SEQ ID NO: 21514 - protein, 11 aa, Artificial Sequence
  Peptide Derived from Human Papillomavirus
GTQIGARVHFY

SEQ ID NO: 21515 - protein, 10 aa, Artificial Sequence
  Peptide Derived from Human Papillomavirus
GTSGFDITSA

SEQ ID NO: 21516 - protein, 8 aa, Artificial Sequence
  Peptide Derived from Human Papillomavirus
GTTLADKI

SEQ ID NO: 21517 - protein, 9 aa, Artificial Sequence
  Peptide Derived from Human Papillomavirus
GTTLADKIL

SEQ ID NO: 21518 - protein, 11 aa, Artificial Sequence
  Peptide Derived from Human Papillomavirus
GTTLADKILQW

SEQ ID NO: 21519 - protein, 8 aa, Artificial Sequence
  Peptide Derived from Human Papillomavirus
GTTTPAVL

SEQ ID NO: 21520 - protein, 10 aa, Artificial Sequence
  Peptide Derived from Human Papillomavirus
GTTTPAVLDI

SEQ ID NO: 21521 - protein, 8 aa, Artificial Sequence
  Peptide Derived from Human Papillomavirus
GTVRFSRL

SEQ ID NO: 21522 - protein, 8 aa, Artificial Sequence
  Peptide Derived from Human Papillomavirus
IAPSPEYI

SEQ ID NO: 21523 - protein, 10 aa, Artificial Sequence
  Peptide Derived from Human Papillomavirus
IAPSPEYIEL

SEQ ID NO: 21524 - protein, 10 aa, Artificial Sequence
  Peptide Derived from Human Papillomavirus
ISPIAPSPEY

SEQ ID NO: 21525 - protein, 11 aa, Artificial Sequence
  Peptide Derived from Human Papillomavirus
ISPIAPSPEYI

SEQ ID NO: 21526 - protein, 10 aa, Artificial Sequence
  Peptide Derived from Human Papillomavirus
ISSASSYSNV

SEQ ID NO: 21527 - protein, 9 aa, Artificial Sequence
  Peptide Derived from Human Papillomavirus
ISSTPLPTV

SEQ ID NO: 21528 - protein, 10 aa, Artificial Sequence
  Peptide Derived from Human Papillomavirus
ISTTNFTNPA

SEQ ID NO: 21529 - protein, 11 aa, Artificial Sequence
  Peptide Derived from Human Papillomavirus
ISTTNFTNPAF

SEQ ID NO: 21530 - protein, 9 aa, Artificial Sequence
  Peptide Derived from Human Papillomavirus
ITLPSTTSV

SEQ ID NO: 21531 - protein, 10 aa, Artificial Sequence
  Peptide Derived from Human Papillomavirus
ITLPSTTSVW

SEQ ID NO: 21532 - protein, 8 aa, Artificial Sequence
  Peptide Derived from Human Papillomavirus
ITPSSTSV

SEQ ID NO: 21533 - protein, 10 aa, Artificial Sequence
  Peptide Derived from Human Papillomavirus
ITPSSTSVSI

SEQ ID NO: 21534 - protein, 10 aa, Artificial Sequence
  Peptide Derived from Human Papillomavirus
ITSAGTTTPA

SEQ ID NO: 21535 - protein, 11 aa, Artificial Sequence
  Peptide Derived from Human Papillomavirus
ITSAGTTTPAV

SEQ ID NO: 21536 - protein, 8 aa, Artificial Sequence
  Peptide Derived from Human Papillomavirus
ITYDNPAF

SEQ ID NO: 21537 - protein, 11 aa, Artificial Sequence
  Peptide Derived from Human Papillomavirus
ITYDNPAFEPV

SEQ ID NO: 21538 - protein, 8 aa, Artificial Sequence
  Peptide Derived from Human Papillomavirus
LADKILQW

SEQ ID NO: 21539 - protein, 11 aa, Artificial Sequence
  Peptide Derived from Human Papillomavirus
LADKILQWSSL

SEQ ID NO: 21540 - protein, 9 aa, Artificial Sequence
  Peptide Derived from Human Papillomavirus
LTFDPRSDV

SEQ ID NO: 21541 - protein, 8 aa, Artificial Sequence
  Peptide Derived from Human Papillomavirus
LTRPSSLI

SEQ ID NO: 21542 - protein, 10 aa, Artificial Sequence
  Peptide Derived from Human Papillomavirus
LTRPSSLITY

SEQ ID NO: 21543 - protein, 8 aa, Artificial Sequence
  Peptide Derived from Human Papillomavirus
LTSRRGTV

SEQ ID NO: 21544 - protein, 10 aa, Artificial Sequence
  Peptide Derived from Human Papillomavirus
LTSRRGTVRF

SEQ ID NO: 21545 - protein, 9 aa, Artificial Sequence
  Peptide Derived from Human Papillomavirus
LTSSWDVPV

SEQ ID NO: 21546 - protein, 10 aa, Artificial Sequence
  Peptide Derived from Human Papillomavirus
LTSSWDVPVY

SEQ ID NO: 21547 - protein, 10 aa, Artificial Sequence
  Peptide Derived from Human Papillomavirus
PAFEPVDTTL

SEQ ID NO: 21548 - protein, 8 aa, Artificial Sequence
  Peptide Derived from Human Papillomavirus
PAFSDPSI

SEQ ID NO: 21549 - protein, 9 aa, Artificial Sequence
  Peptide Derived from Human Papillomavirus
PAFSDPSII

SEQ ID NO: 21550 - protein, 11 aa, Artificial Sequence
  Peptide Derived from Human Papillomavirus
PAFSDPSIIEV

SEQ ID NO: 21551 - protein, 10 aa, Artificial Sequence
  Peptide Derived from Human Papillomavirus
PALTSRRGTV

SEQ ID NO: 21552 - protein, 9 aa, Artificial Sequence
  Peptide Derived from Human Papillomavirus
PASTQYIGI

SEQ ID NO: 21553 - protein, 8 aa, Artificial Sequence
  Peptide Derived from Human Papillomavirus
PSPEYIEL

SEQ ID NO: 21554 - protein, 11 aa, Artificial Sequence
  Peptide Derived from Human Papillomavirus
PSPEYIELQPL

SEQ ID NO: 21555 - protein, 8 aa, Artificial Sequence
  Peptide Derived from Human Papillomavirus
PSRSTTSF

SEQ ID NO: 21556 - protein, 9 aa, Artificial Sequence
  Peptide Derived from Human Papillomavirus
PSRSTTSFA

SEQ ID NO: 21557 - protein, 10 aa, Artificial Sequence
  Peptide Derived from Human Papillomavirus
PSRSTTSFAF

SEQ ID NO: 21558 - protein, 11 aa, Artificial Sequence
  Peptide Derived from Human Papillomavirus
PSRSTTSFAFF

SEQ ID NO: 21559 - protein, 11 aa, Artificial Sequence
  Peptide Derived from Human Papillomavirus
PSSLITYDNPA

SEQ ID NO: 21560 - protein, 8 aa, Artificial Sequence
  Peptide Derived from Human Papillomavirus
PSSTSVSI

SEQ ID NO: 21561 - protein, 9 aa, Artificial Sequence
  Peptide Derived from Human Papillomavirus
PSTTSVWPI

SEQ ID NO: 21562 - protein, 10 aa, Artificial Sequence
  Peptide Derived from Human Papillomavirus
PSTTSVWPIV

SEQ ID NO: 21563 - protein, 9 aa, Artificial Sequence
  Peptide Derived from Human Papillomavirus
PTAPASTQY

SEQ ID NO: 21564 - protein, 10 aa, Artificial Sequence
  Peptide Derived from Human Papillomavirus
PTAPASTQYI

SEQ ID NO: 21565 - protein, 9 aa, Artificial Sequence
  Peptide Derived from Human Papillomavirus
PTDPSIVTL

SEQ ID NO: 21566 - protein, 10 aa, Artificial Sequence
  Peptide Derived from Human Papillomavirus
PTDPSIVTLI

SEQ ID NO: 21567 - protein, 9 aa, Artificial Sequence
  Peptide Derived from Human Papillomavirus
PTFTGTSGF

SEQ ID NO: 21568 - protein, 11 aa, Artificial Sequence
  Peptide Derived from Human Papillomavirus
PTFTGTSGFDI

SEQ ID NO: 21569 - protein, 9 aa, Artificial Sequence
  Peptide Derived from Human Papillomavirus
PTISSASSY

SEQ ID NO: 21570 - protein, 8 aa, Artificial Sequence
  Peptide Derived from Human Papillomavirus
PTRPPVVI

SEQ ID NO: 21571 - protein, 11 aa, Artificial Sequence
  Peptide Derived from Human Papillomavirus
PTRPPVVIEPV

SEQ ID NO: 21572 - protein, 8 aa, Artificial Sequence
  Peptide Derived from Human Papillomavirus
PTSGTHGY

SEQ ID NO: 21573 - protein, 11 aa, Artificial Sequence
  Peptide Derived from Human Papillomavirus
PTSGTHGYEEI

SEQ ID NO: 21574 - protein, 11 aa, Artificial Sequence
  Peptide Derived from Human Papillomavirus
PTVRRVAGPRL

SEQ ID NO: 21575 - protein, 9 aa, Artificial Sequence
  Peptide Derived from Human Papillomavirus
QSGTCPPDV

SEQ ID NO: 21576 - protein, 10 aa, Artificial Sequence
  Peptide Derived from Human Papillomavirus
QSGTCPPDVV

SEQ ID NO: 21577 - protein, 9 aa, Artificial Sequence
  Peptide Derived from Human Papillomavirus
QTGEVAGNV

SEQ ID NO: 21578 - protein, 10 aa, Artificial Sequence
  Peptide Derived from Human Papillomavirus
QTGEVAGNVF

SEQ ID NO: 21579 - protein, 11 aa, Artificial Sequence
  Peptide Derived from Human Papillomavirus
QTGEVAGNVFV

SEQ ID NO: 21580 - protein, 8 aa, Artificial Sequence
  Peptide Derived from Human Papillomavirus
RAARRKRA

SEQ ID NO: 21581 - protein, 10 aa, Artificial Sequence
  Peptide Derived from Human Papillomavirus
RAARRKRASV

SEQ ID NO: 21582 - protein, 8 aa, Artificial Sequence
  Peptide Derived from Human Papillomavirus
RASVTDLY

SEQ ID NO: 21583 - protein, 8 aa, Artificial Sequence
  Peptide Derived from Human Papillomavirus
RAYQQVSV

SEQ ID NO: 21584 - protein, 9 aa, Artificial Sequence
  Peptide Derived from Human Papillomavirus
RAYQQVSVA

SEQ ID NO: 21585 - protein, 9 aa, Artificial Sequence
  Peptide Derived from Human Papillomavirus
RSDVPDSDF

SEQ ID NO: 21586 - protein, 10 aa, Artificial Sequence
  Peptide Derived from Human Papillomavirus
RSDVPDSDFM

SEQ ID NO: 21587 - protein, 8 aa, Artificial Sequence
  Peptide Derived from Human Papillomavirus
RSGTQIGA

SEQ ID NO: 21588 - protein, 10 aa, Artificial Sequence
  Peptide Derived from Human Papillomavirus
RSGTQIGARV

SEQ ID NO: 21589 - protein, 8 aa, Artificial Sequence
  Peptide Derived from Human Papillomavirus
RSNTVVDV

SEQ ID NO: 21590 - protein, 8 aa, Artificial Sequence
  Peptide Derived from Human Papillomavirus
RSTTSFAF

SEQ ID NO: 21591 - protein, 9 aa, Artificial Sequence
  Peptide Derived from Human Papillomavirus
RSTTSFAFF

SEQ ID NO: 21592 - protein, 11 aa, Artificial Sequence
  Peptide Derived from Human Papillomavirus
RSTTSFAFFKY

SEQ ID NO: 21593 - protein, 8 aa, Artificial Sequence
  Peptide Derived from Human Papillomavirus
SAGTTTPA

SEQ ID NO: 21594 - protein, 9 aa, Artificial Sequence
  Peptide Derived from Human Papillomavirus
SAGTTTPAV

SEQ ID NO: 21595 - protein, 10 aa, Artificial Sequence
  Peptide Derived from Human Papillomavirus
SAGTTTPAVL

SEQ ID NO: 21596 - protein, 8 aa, Artificial Sequence
  Peptide Derived from Human Papillomavirus
SASSYSNV

SEQ ID NO: 21597 - protein, 10 aa, Artificial Sequence
  Peptide Derived from Human Papillomavirus
SASSYSNVTV

SEQ ID NO: 21598 - protein, 8 aa, Artificial Sequence
  Peptide Derived from Human Papillomavirus
SATEDNDL

SEQ ID NO: 21599 - protein, 9 aa, Artificial Sequence
  Peptide Derived from Human Papillomavirus
SATEDNDLF

SEQ ID NO: 21600 - protein, 11 aa, Artificial Sequence
  Peptide Derived from Human Papillomavirus
SATEDNDLFDI

SEQ ID NO: 21601 - protein, 9 aa, Artificial Sequence
  Peptide Derived from Human Papillomavirus
SSASSYSNV

SEQ ID NO: 21602 - protein, 11 aa, Artificial Sequence
  Peptide Derived from Human Papillomavirus
SSASSYSNVTV

SEQ ID NO: 21603 - protein, 9 aa, Artificial Sequence
  Peptide Derived from Human Papillomavirus
SSGTGEEPI

SEQ ID NO: 21604 - protein, 10 aa, Artificial Sequence
  Peptide Derived from Human Papillomavirus
SSLGIFLGGL

SEQ ID NO: 21605 - protein, 10 aa, Artificial Sequence
  Peptide Derived from Human Papillomavirus
SSLITYDNPA

SEQ ID NO: 21606 - protein, 11 aa, Artificial Sequence
  Peptide Derived from Human Papillomavirus
SSLITYDNPAF

SEQ ID NO: 21607 - protein, 8 aa, Artificial Sequence
  Peptide Derived from Human Papillomavirus
SSTPLPTV

SEQ ID NO: 21608 - protein, 11 aa, Artificial Sequence
  Peptide Derived from Human Papillomavirus
SSTPLPTVRRV

SEQ ID NO: 21609 - protein, 8 aa, Artificial Sequence
  Peptide Derived from Human Papillomavirus
SSVVTSGA

SEQ ID NO: 21610 - protein, 8 aa, Artificial Sequence
  Peptide Derived from Human Papillomavirus
SSWDVPVY

SEQ ID NO: 21611 - protein, 8 aa, Artificial Sequence
  Peptide Derived from Human Papillomavirus
SSYSNVTV

SEQ ID NO: 21612 - protein, 10 aa, Artificial Sequence
  Peptide Derived from Human Papillomavirus
SSYSNVTVPL

SEQ ID NO: 21613 - protein, 10 aa, Artificial Sequence
  Peptide Derived from Human Papillomavirus
STPLPTVRRV

SEQ ID NO: 21614 - protein, 11 aa, Artificial Sequence
  Peptide Derived from Human Papillomavirus
STPLPTVRRVA

SEQ ID NO: 21615 - protein, 11 aa, Artificial Sequence
  Peptide Derived from Human Papillomavirus
STSVSISTTNF

SEQ ID NO: 21616 - protein, 9 aa, Artificial Sequence
  Peptide Derived from Human Papillomavirus
STTNFTNPA

SEQ ID NO: 21617 - protein, 10 aa, Artificial Sequence
  Peptide Derived from Human Papillomavirus
STTNFTNPAF

SEQ ID NO: 21618 - protein, 8 aa, Artificial Sequence
  Peptide Derived from Human Papillomavirus
STTSFAFF

SEQ ID NO: 21619 - protein, 10 aa, Artificial Sequence
  Peptide Derived from Human Papillomavirus
STTSFAFFKY

SEQ ID NO: 21620 - protein, 8 aa, Artificial Sequence
  Peptide Derived from Human Papillomavirus
STTSVWPI

SEQ ID NO: 21621 - protein, 9 aa, Artificial Sequence
  Peptide Derived from Human Papillomavirus
STTSVWPIV

SEQ ID NO: 21622 - protein, 8 aa, Artificial Sequence
  Peptide Derived from Human Papillomavirus
TAPASTQY

SEQ ID NO: 21623 - protein, 9 aa, Artificial Sequence
  Peptide Derived from Human Papillomavirus
TAPASTQYI

SEQ ID NO: 21624 - protein, 11 aa, Artificial Sequence
  Peptide Derived from Human Papillomavirus
TAPASTQYIGI

SEQ ID NO: 21625 - protein, 9 aa, Artificial Sequence
  Peptide Derived from Human Papillomavirus
TSAGTTTPA

SEQ ID NO: 21626 - protein, 10 aa, Artificial Sequence
  Peptide Derived from Human Papillomavirus
TSAGTTTPAV

SEQ ID NO: 21627 - protein, 11 aa, Artificial Sequence
  Peptide Derived from Human Papillomavirus
TSAGTTTPAVL

SEQ ID NO: 21628 - protein, 8 aa, Artificial Sequence
  Peptide Derived from Human Papillomavirus
TSFAFFKY

SEQ ID NO: 21629 - protein, 9 aa, Artificial Sequence
  Peptide Derived from Human Papillomavirus
TSGAPRPTF

SEQ ID NO: 21630 - protein, 9 aa, Artificial Sequence
  Peptide Derived from Human Papillomavirus
TSGFDITSA

SEQ ID NO: 21631 - protein, 10 aa, Artificial Sequence
  Peptide Derived from Human Papillomavirus
TSGTHGYEEI

SEQ ID NO: 21632 - protein, 9 aa, Artificial Sequence
  Peptide Derived from Human Papillomavirus
TSRRGTVRF

SEQ ID NO: 21633 - protein, 8 aa, Artificial Sequence
  Peptide Derived from Human Papillomavirus
TSSWDVPV

SEQ ID NO: 21634 - protein, 9 aa, Artificial Sequence
  Peptide Derived from Human Papillomavirus
TSSWDVPVY

SEQ ID NO: 21635 - protein, 10 aa, Artificial Sequence
  Peptide Derived from Human Papillomavirus
TSVSISTTNF

SEQ ID NO: 21636 - protein, 11 aa, Artificial Sequence
  Peptide Derived from Human Papillomavirus
TSVWPIVSPTA

SEQ ID NO: 21637 - protein, 8 aa, Artificial Sequence
  Peptide Derived from Human Papillomavirus
TTLADKIL

SEQ ID NO: 21638 - protein, 10 aa, Artificial Sequence
  Peptide Derived from Human Papillomavirus
TTLADKILQW

SEQ ID NO: 21639 - protein, 11 aa, Artificial Sequence
  Peptide Derived from Human Papillomavirus
TTLTFDPRSDV

SEQ ID NO: 21640 - protein, 8 aa, Artificial Sequence
  Peptide Derived from Human Papillomavirus
TTNFTNPA

SEQ ID NO: 21641 - protein, 9 aa, Artificial Sequence
  Peptide Derived from Human Papillomavirus
TTNFTNPAF

SEQ ID NO: 21642 - protein, 8 aa, Artificial Sequence
  Peptide Derived from Human Papillomavirus
TTPAVLDI

SEQ ID NO: 21643 - protein, 9 aa, Artificial Sequence
  Peptide Derived from Human Papillomavirus
TTSFAFFKY

SEQ ID NO: 21644 - protein, 8 aa, Artificial Sequence
  Peptide Derived from Human Papillomavirus
TTSVWPIV

SEQ ID NO: 21645 - protein, 9 aa, Artificial Sequence
  Peptide Derived from Human Papillomavirus
TTTPAVLDI

SEQ ID NO: 21646 - protein, 10 aa, Artificial Sequence
  Peptide Derived from Human Papillomavirus
VAGPRLYSRA

SEQ ID NO: 21647 - protein, 11 aa, Artificial Sequence
  Peptide Derived from Human Papillomavirus
VAGPRLYSRAY

SEQ ID NO: 21648 - protein, 9 aa, Artificial Sequence
  Peptide Derived from Human Papillomavirus
VSATEDNDL

SEQ ID NO: 21649 - protein, 10 aa, Artificial Sequence
  Peptide Derived from Human Papillomavirus
VSATEDNDLF

SEQ ID NO: 21650 - protein, 11 aa, Artificial Sequence
  Peptide Derived from Human Papillomavirus
VSHRAARRKRA

SEQ ID NO: 21651 - protein, 8 aa, Artificial Sequence
  Peptide Derived from Human Papillomavirus
VSISTTNF

SEQ ID NO: 21652 - protein, 11 aa, Artificial Sequence
  Peptide Derived from Human Papillomavirus
VSPTAPASTQY

SEQ ID NO: 21653 - protein, 8 aa, Artificial Sequence
  Peptide Derived from Human Papillomavirus
VSVANPEF

SEQ ID NO: 21654 - protein, 9 aa, Artificial Sequence
  Peptide Derived from Human Papillomavirus
VSVANPEFL

SEQ ID NO: 21655 - protein, 9 aa, Artificial Sequence
  Peptide Derived from Human Papillomavirus
VTLIEDSSV

SEQ ID NO: 21656 - protein, 10 aa, Artificial Sequence
  Peptide Derived from Human Papillomavirus
VTLIEDSSVV

SEQ ID NO: 21657 - protein, 10 aa, Artificial Sequence
  Peptide Derived from Human Papillomavirus
VTSGAPRPTF

SEQ ID NO: 21658 - protein, 9 aa, Artificial Sequence
  Peptide Derived from Human Papillomavirus
VTVPLTSSW

SEQ ID NO: 21659 - protein, 11 aa, Artificial Sequence
  Peptide Derived from Human Papillomavirus
VTVPLTSSWDV

SEQ ID NO: 21660 - protein, 8 aa, Artificial Sequence
  Peptide Derived from Human Papillomavirus
WSSLGIFL

SEQ ID NO: 21661 - protein, 11 aa, Artificial Sequence
  Peptide Derived from Human Papillomavirus
WSSLGIFLGGL

SEQ ID NO: 21662 - protein, 8 aa, Artificial Sequence
  Peptide Derived from Human Papillomavirus
YADDMDPA

SEQ ID NO: 21663 - protein, 9 aa, Artificial Sequence
  Peptide Derived from Human Papillomavirus
YADDMDPAV

SEQ ID NO: 21664 - protein, 11 aa, Artificial Sequence
  Peptide Derived from Human Papillomavirus
YADDMDPAVPV

SEQ ID NO: 21665 - protein, 8 aa, Artificial Sequence
  Peptide Derived from Human Papillomavirus
YSNVTVPL

SEQ ID NO: 21666 - protein, 8 aa, Artificial Sequence
  Peptide Derived from Human Papillomavirus
YSPTISSA

SEQ ID NO: 21667 - protein, 11 aa, Artificial Sequence
  Peptide Derived from Human Papillomavirus
YSPTISSASSY

SEQ ID NO: 21668 - protein, 8 aa, Artificial Sequence
  Peptide Derived from Human Papillomavirus
YSRAYQQV

SEQ ID NO: 21669 - protein, 10 aa, Artificial Sequence
  Peptide Derived from Human Papillomavirus
YSRAYQQVSV

SEQ ID NO: 21670 - protein, 11 aa, Artificial Sequence
  Peptide Derived from Human Papillomavirus
YSRAYQQVSVA

SEQ ID NO: 21671 - protein, 8 aa, Artificial Sequence
  Peptide Derived from Human Papillomavirus
YTGPDITL

SEQ ID NO: 21672 - protein, 11 aa, Artificial Sequence
  Peptide Derived from Human Papillomavirus
AAALYWYRTGM

SEQ ID NO: 21673 - protein, 9 aa, Artificial Sequence
  Peptide Derived from Human Papillomavirus
AAFGVTGTV

SEQ ID NO: 21674 - protein, 10 aa, Artificial Sequence
  Peptide Derived from Human Papillomavirus
AAFGVTGTVA

SEQ ID NO: 21675 - protein, 10 aa, Artificial Sequence
  Peptide Derived from Human Papillomavirus
AALYWYRTGM

SEQ ID NO: 21676 - protein, 10 aa, Artificial Sequence
  Peptide Derived from Human Papillomavirus
AAMLGKFKEL

SEQ ID NO: 21677 - protein, 11 aa, Artificial Sequence
  Peptide Derived from Human Papillomavirus
AAMLGKFKELY

SEQ ID NO: 21678 - protein, 8 aa, Artificial Sequence
  Peptide Derived from Human Papillomavirus
ATTPCWHY

SEQ ID NO: 21679 - protein, 9 aa, Artificial Sequence
  Peptide Derived from Human Papillomavirus
ATTPCWHYI

SEQ ID NO: 21680 - protein, 10 aa, Artificial Sequence
  Peptide Derived from Human Papillomavirus
CAFLKSNSQA

SEQ ID NO: 21681 - protein, 8 aa, Artificial Sequence
  Peptide Derived from Human Papillomavirus
CAKNRITI

SEQ ID NO: 21682 - protein, 11 aa, Artificial Sequence
  Peptide Derived from Human Papillomavirus
CAKNRITIEKL

SEQ ID NO: 21683 - protein, 8 aa, Artificial Sequence
  Peptide Derived from Human Papillomavirus
CSWGMVML

SEQ ID NO: 21684 - protein, 9 aa, Artificial Sequence
  Peptide Derived from Human Papillomavirus
CSWGMVMLM

SEQ ID NO: 21685 - protein, 10 aa, Artificial Sequence
  Peptide Derived from Human Papillomavirus
CSWGMVMLML

SEQ ID NO: 21686 - protein, 11 aa, Artificial Sequence
  Peptide Derived from Human Papillomavirus
CSWGMVMLMLV

SEQ ID NO: 21687 - protein, 8 aa, Artificial Sequence
  Peptide Derived from Human Papillomavirus
CTDWCVAA

SEQ ID NO: 21688 - protein, 9 aa, Artificial Sequence
  Peptide Derived from Human Papillomavirus
CTDWCVAAF

SEQ ID NO: 21689 - protein, 11 aa, Artificial Sequence
  Peptide Derived from Human Papillomavirus
CTDWCVAAFGV

SEQ ID NO: 21690 - protein, 10 aa, Artificial Sequence
  Peptide Derived from Human Papillomavirus
DAKIGMLDDA

SEQ ID NO: 21691 - protein, 9 aa, Artificial Sequence
  Peptide Derived from Human Papillomavirus
DATTPCWHY

SEQ ID NO: 21692 - protein, 10 aa, Artificial Sequence
  Peptide Derived from Human Papillomavirus
DATTPCWHYI

SEQ ID NO: 21693 - protein, 8 aa, Artificial Sequence
  Peptide Derived from Human Papillomavirus
DSDSNACA

SEQ ID NO: 21694 - protein, 9 aa, Artificial Sequence
  Peptide Derived from Human Papillomavirus
DSDSNACAF

SEQ ID NO: 21695 - protein, 10 aa, Artificial Sequence
  Peptide Derived from Human Papillomavirus
DSDSNACAFL

SEQ ID NO: 21696 - protein, 8 aa, Artificial Sequence
  Peptide Derived from Human Papillomavirus
DSEIAYKY

SEQ ID NO: 21697 - protein, 9 aa, Artificial Sequence
  Peptide Derived from Human Papillomavirus
DSEIAYKYA

SEQ ID NO: 21698 - protein, 11 aa, Artificial Sequence
  Peptide Derived from Human Papillomavirus
DSEIAYKYAQL

SEQ ID NO: 21699 - protein, 9 aa, Artificial Sequence
  Peptide Derived from Human Papillomavirus
DSFSTFKCV

SEQ ID NO: 21700 - protein, 9 aa, Artificial Sequence
  Peptide Derived from Human Papillomavirus
DSGYGNTEV

SEQ ID NO: 21701 - protein, 8 aa, Artificial Sequence
  Peptide Derived from Human Papillomavirus
DSNACAFL

SEQ ID NO: 21702 - protein, 9 aa, Artificial Sequence
  Peptide Derived from Human Papillomavirus
DSSDTGEDM

SEQ ID NO: 21703 - protein, 10 aa, Artificial Sequence
  Peptide Derived from Human Papillomavirus
DSSDTGEDMV

SEQ ID NO: 21704 - protein, 9 aa, Artificial Sequence
  Peptide Derived from Human Papillomavirus
DTGEDMVDF

SEQ ID NO: 21705 - protein, 10 aa, Artificial Sequence
  Peptide Derived from Human Papillomavirus
DTGEDMVDFI

SEQ ID NO: 21706 - protein, 9 aa, Artificial Sequence
  Peptide Derived from Human Papillomavirus
DTTFDLSQM

SEQ ID NO: 21707 - protein, 10 aa, Artificial Sequence
  Peptide Derived from Human Papillomavirus
DTTFDLSQMV

SEQ ID NO: 21708 - protein, 8 aa, Artificial Sequence
  Peptide Derived from Human Papillomavirus
EAEEHAEA

SEQ ID NO: 21709 - protein, 9 aa, Artificial Sequence
  Peptide Derived from Human Papillomavirus
EAEEHAEAV

SEQ ID NO: 21710 - protein, 11 aa, Artificial Sequence
  Peptide Derived from Human Papillomavirus
EAEEHAEAVQV

SEQ ID NO: 21711 - protein, 8 aa, Artificial Sequence
  Peptide Derived from Human Papillomavirus
EAETAQAL

SEQ ID NO: 21712 - protein, 9 aa, Artificial Sequence
  Peptide Derived from Human Papillomavirus
EAETAQALF

SEQ ID NO: 21713 - protein, 11 aa, Artificial Sequence
  Peptide Derived from Human Papillomavirus
EAETAQALFHA

SEQ ID NO: 21714 - protein, 10 aa, Artificial Sequence
  Peptide Derived from Human Papillomavirus
EAVQVLKRKY

SEQ ID NO: 21715 - protein, 11 aa, Artificial Sequence
  Peptide Derived from Human Papillomavirus
EAVQVLKRKYV

SEQ ID NO: 21716 - protein, 9 aa, Artificial Sequence
  Peptide Derived from Human Papillomavirus
ETAQALFHA

SEQ ID NO: 21717 - protein, 11 aa, Artificial Sequence
  Peptide Derived from Human Papillomavirus
ETPEWIERQTV

SEQ ID NO: 21718 - protein, 8 aa, Artificial Sequence
  Peptide Derived from Human Papillomavirus
ETPTRNIL

SEQ ID NO: 21719 - protein, 10 aa, Artificial Sequence
  Peptide Derived from Human Papillomavirus
ETPTRNILQV

SEQ ID NO: 21720 - protein, 11 aa, Artificial Sequence
  Peptide Derived from Human Papillomavirus
ETPTRNILQVL

SEQ ID NO: 21721 - protein, 8 aa, Artificial Sequence
  Peptide Derived from Human Papillomavirus
ETQQMVQV

SEQ ID NO: 21722 - protein, 8 aa, Artificial Sequence
  Peptide Derived from Human Papillomavirus
FSRTWCRL

SEQ ID NO: 21723 - protein, 10 aa, Artificial Sequence
  Peptide Derived from Human Papillomavirus
FSRTWCRLNL

SEQ ID NO: 21724 - protein, 9 aa, Artificial Sequence
  Peptide Derived from Human Papillomavirus
FTFPNPFPF

SEQ ID NO: 21725 - protein, 9 aa, Artificial Sequence
  Peptide Derived from Human Papillomavirus
GAPNTGKSY

SEQ ID NO: 21726 - protein, 10 aa, Artificial Sequence
  Peptide Derived from Human Papillomavirus
GAPNTGKSYF

SEQ ID NO: 21727 - protein, 11 aa, Artificial Sequence
  Peptide Derived from Human Papillomavirus
GSPLSDISSCV

SEQ ID NO: 21728 - protein, 8 aa, Artificial Sequence
  Peptide Derived from Human Papillomavirus
GTGCNGWF

SEQ ID NO: 21729 - protein, 9 aa, Artificial Sequence
  Peptide Derived from Human Papillomavirus
GTGCNGWFY

SEQ ID NO: 21730 - protein, 10 aa, Artificial Sequence
  Peptide Derived from Human Papillomavirus
GTGCNGWFYV

SEQ ID NO: 21731 - protein, 10 aa, Artificial Sequence
  Peptide Derived from Human Papillomavirus
GTMCRHYKRA

SEQ ID NO: 21732 - protein, 10 aa, Artificial Sequence
  Peptide Derived from Human Papillomavirus
GTVAEGFKTL

SEQ ID NO: 21733 - protein, 11 aa, Artificial Sequence
  Peptide Derived from Human Papillomavirus
GTVAEGFKTLL

SEQ ID NO: 21734 - protein, 8 aa, Artificial Sequence
  Peptide Derived from Human Papillomavirus
HAEAVQVL

SEQ ID NO: 21735 - protein, 9 aa, Artificial Sequence
  Peptide Derived from Human Papillomavirus
HAQEAEEHA

SEQ ID NO: 21736 - protein, 11 aa, Artificial Sequence
  Peptide Derived from Human Papillomavirus
HAQEAEEHAEA

SEQ ID NO: 21737 - protein, 8 aa, Artificial Sequence
  Peptide Derived from Human Papillomavirus
HSFNDTTF

SEQ ID NO: 21738 - protein, 10 aa, Artificial Sequence
  Peptide Derived from Human Papillomavirus
HSFNDTTFDL

SEQ ID NO: 21739 - protein, 9 aa, Artificial Sequence
  Peptide Derived from Human Papillomavirus
HSRLVVFTF

SEQ ID NO: 21740 - protein, 8 aa, Artificial Sequence
  Peptide Derived from Human Papillomavirus
IAYKYAQL

SEQ ID NO: 21741 - protein, 9 aa, Artificial Sequence
  Peptide Derived from Human Papillomavirus
IAYKYAQLA

SEQ ID NO: 21742 - protein, 11 aa, Artificial Sequence
  Peptide Derived from Human Papillomavirus
ISDVYGETPEW

SEQ ID NO: 21743 - protein, 8 aa, Artificial Sequence
  Peptide Derived from Human Papillomavirus
ISFLQGCI

SEQ ID NO: 21744 - protein, 9 aa, Artificial Sequence
  Peptide Derived from Human Papillomavirus
ISFLQGCII

SEQ ID NO: 21745 - protein, 11 aa, Artificial Sequence
  Peptide Derived from Human Papillomavirus
ISFLQGCIISY

SEQ ID NO: 21746 - protein, 8 aa, Artificial Sequence
  Peptide Derived from Human Papillomavirus
ISPRLKAI

SEQ ID NO: 21747 - protein, 10 aa, Artificial Sequence
  Peptide Derived from Human Papillomavirus
ISPRLKAICI

SEQ ID NO: 21748 - protein, 9 aa, Artificial Sequence
  Peptide Derived from Human Papillomavirus
ISSCVDYNI

SEQ ID NO: 21749 - protein, 8 aa, Artificial Sequence
  Peptide Derived from Human Papillomavirus
ISTNCMLI

SEQ ID NO: 21750 - protein, 10 aa, Artificial Sequence
  Peptide Derived from Human Papillomavirus
ISYANSKSHF

SEQ ID NO: 21751 - protein, 11 aa, Artificial Sequence
  Peptide Derived from Human Papillomavirus
ISYANSKSHFW

SEQ ID NO: 21752 - protein, 10 aa, Artificial Sequence
  Peptide Derived from Human Papillomavirus
ITIEKLLEKL

SEQ ID NO: 21753 - protein, 11 aa, Artificial Sequence
  Peptide Derived from Human Papillomavirus
ITIEKLLEKLL

SEQ ID NO: 21754 - protein, 8 aa, Artificial Sequence
  Peptide Derived from Human Papillomavirus
KAAMLGKF

SEQ ID NO: 21755 - protein, 11 aa, Artificial Sequence
  Peptide Derived from Human Papillomavirus
KAAMLGKFKEL

SEQ ID NO: 21756 - protein, 11 aa, Artificial Sequence
  Peptide Derived from Human Papillomavirus
KALMQLKCPPL

SEQ ID NO: 21757 - protein, 8 aa, Artificial Sequence
  Peptide Derived from Human Papillomavirus
KSFFSRTW

SEQ ID NO: 21758 - protein, 11 aa, Artificial Sequence
  Peptide Derived from Human Papillomavirus
KSFFSRTWCRL

SEQ ID NO: 21759 - protein, 9 aa, Artificial Sequence
  Peptide Derived from Human Papillomavirus
KSHFWLQPL

SEQ ID NO: 21760 - protein, 10 aa, Artificial Sequence
  Peptide Derived from Human Papillomavirus
KSHFWLQPLA

SEQ ID NO: 21761 - protein, 8 aa, Artificial Sequence
  Peptide Derived from Human Papillomavirus
KSNSQAKI

SEQ ID NO: 21762 - protein, 9 aa, Artificial Sequence
  Peptide Derived from Human Papillomavirus
KSNSQAKIV

SEQ ID NO: 21763 - protein, 9 aa, Artificial Sequence
  Peptide Derived from Human Papillomavirus
KSTCTDWCV

SEQ ID NO: 21764 - protein, 10 aa, Artificial Sequence
  Peptide Derived from Human Papillomavirus
KSTCTDWCVA

SEQ ID NO: 21765 - protein, 11 aa, Artificial Sequence
  Peptide Derived from Human Papillomavirus
KSTCTDWCVAA

SEQ ID NO: 21766 - protein, 8 aa, Artificial Sequence
  Peptide Derived from Human Papillomavirus
KSYFGMSL

SEQ ID NO: 21767 - protein, 9 aa, Artificial Sequence
  Peptide Derived from Human Papillomavirus
KSYFGMSLI

SEQ ID NO: 21768 - protein, 11 aa, Artificial Sequence
  Peptide Derived from Human Papillomavirus
KSYFGMSLISF

SEQ ID NO: 21769 - protein, 8 aa, Artificial Sequence
  Peptide Derived from Human Papillomavirus
KTAKRRLF

SEQ ID NO: 21770 - protein, 10 aa, Artificial Sequence
  Peptide Derived from Human Papillomavirus
KTAKRRLFEL

SEQ ID NO: 21771 - protein, 9 aa, Artificial Sequence
  Peptide Derived from Human Papillomavirus
KTLLQPYCL

SEQ ID NO: 21772 - protein, 10 aa, Artificial Sequence
  Peptide Derived from Human Papillomavirus
KTLLQPYCLY

SEQ ID NO: 21773 - protein, 8 aa, Artificial Sequence
  Peptide Derived from Human Papillomavirus
KTSNGKAA

SEQ ID NO: 21774 - protein, 9 aa, Artificial Sequence
  Peptide Derived from Human Papillomavirus
KTSNGKAAM

SEQ ID NO: 21775 - protein, 10 aa, Artificial Sequence
  Peptide Derived from Human Papillomavirus
KTSNGKAAML

SEQ ID NO: 21776 - protein, 8 aa, Artificial Sequence
  Peptide Derived from Human Papillomavirus
LACSWGMV

SEQ ID NO: 21777 - protein, 9 aa, Artificial Sequence
  Peptide Derived from Human Papillomavirus
LACSWGMVM

SEQ ID NO: 21778 - protein, 10 aa, Artificial Sequence
  Peptide Derived from Human Papillomavirus
LACSWGMVML

SEQ ID NO: 21779 - protein, 11 aa, Artificial Sequence
  Peptide Derived from Human Papillomavirus
LACSWGMVMLM

SEQ ID NO: 21780 - protein, 8 aa, Artificial Sequence
  Peptide Derived from Human Papillomavirus
LADAKIGM

SEQ ID NO: 21781 - protein, 9 aa, Artificial Sequence
  Peptide Derived from Human Papillomavirus
LADAKIGML

SEQ ID NO: 21782 - protein, 8 aa, Artificial Sequence
  Peptide Derived from Human Papillomavirus
LADSDSNA

SEQ ID NO: 21783 - protein, 10 aa, Artificial Sequence
  Peptide Derived from Human Papillomavirus
LADSDSNACA

SEQ ID NO: 21784 - protein, 11 aa, Artificial Sequence
  Peptide Derived from Human Papillomavirus
LADSDSNACAF

SEQ ID NO: 21785 - protein, 8 aa, Artificial Sequence
  Peptide Derived from Human Papillomavirus
LSALKLFL

SEQ ID NO: 21786 - protein, 11 aa, Artificial Sequence
  Peptide Derived from Human Papillomavirus
LSALKLFLKGV

SEQ ID NO: 21787 - protein, 8 aa, Artificial Sequence
  Peptide Derived from Human Papillomavirus
LSDISSCV

SEQ ID NO: 21788 - protein, 10 aa, Artificial Sequence
  Peptide Derived from Human Papillomavirus
LSDISSCVDY

SEQ ID NO: 21789 - protein, 9 aa, Artificial Sequence
  Peptide Derived from Human Papillomavirus
LSDKNWKSF

SEQ ID NO: 21790 - protein, 10 aa, Artificial Sequence
  Peptide Derived from Human Papillomavirus
LSDKNWKSFF

SEQ ID NO: 21791 - protein, 8 aa, Artificial Sequence
  Peptide Derived from Human Papillomavirus
LSQMVQWA

SEQ ID NO: 21792 - protein, 9 aa, Artificial Sequence
  Peptide Derived from Human Papillomavirus
LSQMVQWAY

SEQ ID NO: 21793 - protein, 11 aa, Artificial Sequence
  Peptide Derived from Human Papillomavirus
MSLISFLQGCI

SEQ ID NO: 21794 - protein, 8 aa, Artificial Sequence
  Peptide Derived from Human Papillomavirus
MSNISDVY

SEQ ID NO: 21795 - protein, 8 aa, Artificial Sequence
  Peptide Derived from Human Papillomavirus
NAGKDDRW

SEQ ID NO: 21796 - protein, 10 aa, Artificial Sequence
  Peptide Derived from Human Papillomavirus
NAGKDDRWPY

SEQ ID NO: 21797 - protein, 11 aa, Artificial Sequence
  Peptide Derived from Human Papillomavirus
NAGKDDRWPYL

SEQ ID NO: 21798 - protein, 8 aa, Artificial Sequence
  Peptide Derived from Human Papillomavirus
NALDGNPV

SEQ ID NO: 21799 - protein, 10 aa, Artificial Sequence
  Peptide Derived from Human Papillomavirus
NALDGNPVSI

SEQ ID NO: 21800 - protein, 8 aa, Artificial Sequence
  Peptide Derived from Human Papillomavirus
NSKSHFWL

SEQ ID NO: 21801 - protein, 11 aa, Artificial Sequence
  Peptide Derived from Human Papillomavirus
NSKSHFWLQPL

SEQ ID NO: 21802 - protein, 9 aa, Artificial Sequence
  Peptide Derived from Human Papillomavirus
NSKTAKRRL

SEQ ID NO: 21803 - protein, 10 aa, Artificial Sequence
  Peptide Derived from Human Papillomavirus
NSKTAKRRLF

SEQ ID NO: 21804 - protein, 9 aa, Artificial Sequence
  Peptide Derived from Human Papillomavirus
NTEVETQQM

SEQ ID NO: 21805 - protein, 10 aa, Artificial Sequence
  Peptide Derived from Human Papillomavirus
NTEVETQQMV

SEQ ID NO: 21806 - protein, 9 aa, Artificial Sequence
  Peptide Derived from Human Papillomavirus
NTGKSYFGM

SEQ ID NO: 21807 - protein, 11 aa, Artificial Sequence
  Peptide Derived from Human Papillomavirus
NTGKSYFGMSL

SEQ ID NO: 21808 - protein, 8 aa, Artificial Sequence
  Peptide Derived from Human Papillomavirus
PTRNILQV

SEQ ID NO: 21809 - protein, 9 aa, Artificial Sequence
  Peptide Derived from Human Papillomavirus
PTRNILQVL

SEQ ID NO: 21810 - protein, 9 aa, Artificial Sequence
  Peptide Derived from Human Papillomavirus
QAEAETAQA

SEQ ID NO: 21811 - protein, 10 aa, Artificial Sequence
  Peptide Derived from Human Papillomavirus
QAEAETAQAL

SEQ ID NO: 21812 - protein, 11 aa, Artificial Sequence
  Peptide Derived from Human Papillomavirus
QAEAETAQALF

SEQ ID NO: 21813 - protein, 11 aa, Artificial Sequence
  Peptide Derived from Human Papillomavirus
QAKIVKDCGTM

SEQ ID NO: 21814 - protein, 9 aa, Artificial Sequence
  Peptide Derived from Human Papillomavirus
QALFHAQEA

SEQ ID NO: 21815 - protein, 9 aa, Artificial Sequence
  Peptide Derived from Human Papillomavirus
QSLACSWGM

SEQ ID NO: 21816 - protein, 10 aa, Artificial Sequence
  Peptide Derived from Human Papillomavirus
QSLACSWGMV

SEQ ID NO: 21817 - protein, 11 aa, Artificial Sequence
  Peptide Derived from Human Papillomavirus
QSLACSWGMVM

SEQ ID NO: 21818 - protein, 10 aa, Artificial Sequence
  Peptide Derived from Human Papillomavirus
QSNKSTCTDW

SEQ ID NO: 21819 - protein, 8 aa, Artificial Sequence
  Peptide Derived from Human Papillomavirus
QTVLQHSF

SEQ ID NO: 21820 - protein, 9 aa, Artificial Sequence
  Peptide Derived from Human Papillomavirus
RAEKRQMSM

SEQ ID NO: 21821 - protein, 8 aa, Artificial Sequence
  Peptide Derived from Human Papillomavirus
RSTAAALY

SEQ ID NO: 21822 - protein, 9 aa, Artificial Sequence
  Peptide Derived from Human Papillomavirus
RSTAAALYW

SEQ ID NO: 21823 - protein, 10 aa, Artificial Sequence
  Peptide Derived from Human Papillomavirus
RSTAAALYWY

SEQ ID NO: 21824 - protein, 10 aa, Artificial Sequence
  Peptide Derived from Human Papillomavirus
RTGMSNISDV

SEQ ID NO: 21825 - protein, 11 aa, Artificial Sequence
  Peptide Derived from Human Papillomavirus
RTGMSNISDVY

SEQ ID NO: 21826 - protein, 8 aa, Artificial Sequence
  Peptide Derived from Human Papillomavirus
RTWCRLNL

SEQ ID NO: 21827 - protein, 10 aa, Artificial Sequence
  Peptide Derived from Human Papillomavirus
SALKLFLKGV

SEQ ID NO: 21828 - protein, 8 aa, Artificial Sequence
  Peptide Derived from Human Papillomavirus
SSCVDYNI

SEQ ID NO: 21829 - protein, 8 aa, Artificial Sequence
  Peptide Derived from Human Papillomavirus
SSDTGEDM

SEQ ID NO: 21830 - protein, 9 aa, Artificial Sequence
  Peptide Derived from Human Papillomavirus
SSDTGEDMV

SEQ ID NO: 21831 - protein, 11 aa, Artificial Sequence
  Peptide Derived from Human Papillomavirus
SSDTGEDMVDF

SEQ ID NO: 21832 - protein, 8 aa, Artificial Sequence
  Peptide Derived from Human Papillomavirus
STAAALYW

SEQ ID NO: 21833 - protein, 9 aa, Artificial Sequence
  Peptide Derived from Human Papillomavirus
STAAALYWY

SEQ ID NO: 21834 - protein, 8 aa, Artificial Sequence
  Peptide Derived from Human Papillomavirus
STCTDWCV

SEQ ID NO: 21835 - protein, 9 aa, Artificial Sequence
  Peptide Derived from Human Papillomavirus
STCTDWCVA

SEQ ID NO: 21836 - protein, 10 aa, Artificial Sequence
  Peptide Derived from Human Papillomavirus
STCTDWCVAA

SEQ ID NO: 21837 - protein, 11 aa, Artificial Sequence
  Peptide Derived from Human Papillomavirus
STCTDWCVAAF

SEQ ID NO: 21838 - protein, 11 aa, Artificial Sequence
  Peptide Derived from Human Papillomavirus
STFKCVSGQNI

SEQ ID NO: 21839 - protein, 8 aa, Artificial Sequence
  Peptide Derived from Human Papillomavirus
TAAALYWY

SEQ ID NO: 21840 - protein, 9 aa, Artificial Sequence
  Peptide Derived from Human Papillomavirus
TAKRRLFEL

SEQ ID NO: 21841 - protein, 8 aa, Artificial Sequence
  Peptide Derived from Human Papillomavirus
TAQALFHA

SEQ ID NO: 21842 - protein, 11 aa, Artificial Sequence
  Peptide Derived from Human Papillomavirus
TAQALFHAQEA

SEQ ID NO: 21843 - protein, 8 aa, Artificial Sequence
  Peptide Derived from Human Papillomavirus
TSNGKAAM

SEQ ID NO: 21844 - protein, 9 aa, Artificial Sequence
  Peptide Derived from Human Papillomavirus
TSNGKAAML

SEQ ID NO: 21845 - protein, 8 aa, Artificial Sequence
  Peptide Derived from Human Papillomavirus
TTFDLSQM

SEQ ID NO: 21846 - protein, 9 aa, Artificial Sequence
  Peptide Derived from Human Papillomavirus
TTFDLSQMV

SEQ ID NO: 21847 - protein, 11 aa, Artificial Sequence
  Peptide Derived from Human Papillomavirus
TTFDLSQMVQW

SEQ ID NO: 21848 - protein, 8 aa, Artificial Sequence
  Peptide Derived from Human Papillomavirus
TTPCWHYI

SEQ ID NO: 21849 - protein, 11 aa, Artificial Sequence
  Peptide Derived from Human Papillomavirus
TTPCWHYIDNY

SEQ ID NO: 21850 - protein, 10 aa, Artificial Sequence
  Peptide Derived from Human Papillomavirus
VAAFGVTGTV

SEQ ID NO: 21851 - protein, 11 aa, Artificial Sequence
  Peptide Derived from Human Papillomavirus
VAAFGVTGTVA

SEQ ID NO: 21852 - protein, 8 aa, Artificial Sequence
  Peptide Derived from Human Papillomavirus
VAEGFKTL

SEQ ID NO: 21853 - protein, 9 aa, Artificial Sequence
  Peptide Derived from Human Papillomavirus
VAEGFKTLL

SEQ ID NO: 21854 - protein, 10 aa, Artificial Sequence
  Peptide Derived from Human Papillomavirus
VSDEGDWRDI

SEQ ID NO: 21855 - protein, 11 aa, Artificial Sequence
  Peptide Derived from Human Papillomavirus
VSDEGDWRDIV

SEQ ID NO: 21856 - protein, 9 aa, Artificial Sequence
  Peptide Derived from Human Papillomavirus
VSFLSALKL

SEQ ID NO: 21857 - protein, 10 aa, Artificial Sequence
  Peptide Derived from Human Papillomavirus
VSFLSALKLF

SEQ ID NO: 21858 - protein, 11 aa, Artificial Sequence
  Peptide Derived from Human Papillomavirus
VSFLSALKLFL

SEQ ID NO: 21859 - protein, 10 aa, Artificial Sequence
  Peptide Derived from Human Papillomavirus
VSFMELIRPF

SEQ ID NO: 21860 - protein, 9 aa, Artificial Sequence
  Peptide Derived from Human Papillomavirus
VSGQNIRTL

SEQ ID NO: 21861 - protein, 9 aa, Artificial Sequence
  Peptide Derived from Human Papillomavirus
VSIDVKHKA

SEQ ID NO: 21862 - protein, 10 aa, Artificial Sequence
  Peptide Derived from Human Papillomavirus
VSIDVKHKAL

SEQ ID NO: 21863 - protein, 11 aa, Artificial Sequence
  Peptide Derived from Human Papillomavirus
VSIDVKHKALM

SEQ ID NO: 21864 - protein, 9 aa, Artificial Sequence
  Peptide Derived from Human Papillomavirus
VTGTVAEGF

SEQ ID NO: 21865 - protein, 8 aa, Artificial Sequence
  Peptide Derived from Human Papillomavirus
WAYDNDVM

SEQ ID NO: 21866 - protein, 8 aa, Artificial Sequence
  Peptide Derived from Human Papillomavirus
YANSKSHF

SEQ ID NO: 21867 - protein, 9 aa, Artificial Sequence
  Peptide Derived from Human Papillomavirus
YANSKSHFW

SEQ ID NO: 21868 - protein, 10 aa, Artificial Sequence
  Peptide Derived from Human Papillomavirus
YANSKSHFWL

SEQ ID NO: 21869 - protein, 11 aa, Artificial Sequence
  Peptide Derived from Human Papillomavirus
YAQLADSDSNA

SEQ ID NO: 21870 - protein, 10 aa, Artificial Sequence
  Peptide Derived from Human Papillomavirus
AAACTNQTRA

SEQ ID NO: 21871 - protein, 11 aa, Artificial Sequence
  Peptide Derived from Human Papillomavirus
AAACTNQTRAV

SEQ ID NO: 21872 - protein, 9 aa, Artificial Sequence
  Peptide Derived from Human Papillomavirus
AACTNQTRA

SEQ ID NO: 21873 - protein, 10 aa, Artificial Sequence
  Peptide Derived from Human Papillomavirus
AACTNQTRAV

SEQ ID NO: 21874 - protein, 8 aa, Artificial Sequence
  Peptide Derived from Human Papillomavirus
ATTPIIHL

SEQ ID NO: 21875 - protein, 9 aa, Artificial Sequence
  Peptide Derived from Human Papillomavirus
CALGTSEGV

SEQ ID NO: 21876 - protein, 9 aa, Artificial Sequence
  Peptide Derived from Human Papillomavirus
CTDGKHKNA

SEQ ID NO: 21877 - protein, 10 aa, Artificial Sequence
  Peptide Derived from Human Papillomavirus
CTDGKHKNAI

SEQ ID NO: 21878 - protein, 11 aa, Artificial Sequence
  Peptide Derived from Human Papillomavirus
CTDGKHKNAIV

SEQ ID NO: 21879 - protein, 8 aa, Artificial Sequence
  Peptide Derived from Human Papillomavirus
CTNQTRAV

SEQ ID NO: 21880 - protein, 8 aa, Artificial Sequence
  Peptide Derived from Human Papillomavirus
CTVVEGQV

SEQ ID NO: 21881 - protein, 8 aa, Artificial Sequence
  Peptide Derived from Human Papillomavirus
DANILKCL

SEQ ID NO: 21882 - protein, 10 aa, Artificial Sequence
  Peptide Derived from Human Papillomavirus
DANILKCLRY

SEQ ID NO: 21883 - protein, 9 aa, Artificial Sequence
  Peptide Derived from Human Papillomavirus
DSKRLCDHI

SEQ ID NO: 21884 - protein, 11 aa, Artificial Sequence
  Peptide Derived from Human Papillomavirus
DSKRLCDHIDY

SEQ ID NO: 21885 - protein, 10 aa, Artificial Sequence
  Peptide Derived from Human Papillomavirus
DSVDSVNCGV

SEQ ID NO: 21886 - protein, 11 aa, Artificial Sequence
  Peptide Derived from Human Papillomavirus
DSVDSVNCGVI

SEQ ID NO: 21887 - protein, 8 aa, Artificial Sequence
  Peptide Derived from Human Papillomavirus
DSVNCGVI

SEQ ID NO: 21888 - protein, 10 aa, Artificial Sequence
  Peptide Derived from Human Papillomavirus
DSVNCGVISA

SEQ ID NO: 21889 - protein, 11 aa, Artificial Sequence
  Peptide Derived from Human Papillomavirus
DSVNCGVISAA

SEQ ID NO: 21890 - protein, 11 aa, Artificial Sequence
  Peptide Derived from Human Papillomavirus
EAKKYGTGKKW

SEQ ID NO: 21891 - protein, 9 aa, Artificial Sequence
  Peptide Derived from Human Papillomavirus
ESVFSSDEI

SEQ ID NO: 21892 - protein, 11 aa, Artificial Sequence
  Peptide Derived from Human Papillomavirus
ESVFSSDEISF

SEQ ID NO: 21893 - protein, 8 aa, Artificial Sequence
  Peptide Derived from Human Papillomavirus
ETLNNTEY

SEQ ID NO: 21894 - protein, 9 aa, Artificial Sequence
  Peptide Derived from Human Papillomavirus
ETLSQRLNV

SEQ ID NO: 21895 - protein, 8 aa, Artificial Sequence
  Peptide Derived from Human Papillomavirus
FAGIVTKL

SEQ ID NO: 21896 - protein, 11 aa, Artificial Sequence
  Peptide Derived from Human Papillomavirus
FAGIVTKLPTA

SEQ ID NO: 21897 - protein, 8 aa, Artificial Sequence
  Peptide Derived from Human Papillomavirus
FSSDEISF

SEQ ID NO: 21898 - protein, 9 aa, Artificial Sequence
  Peptide Derived from Human Papillomavirus
FSSDEISFA

SEQ ID NO: 21899 - protein, 11 aa, Artificial Sequence
  Peptide Derived from Human Papillomavirus
FSSDEISFAGI

SEQ ID NO: 21900 - protein, 8 aa, Artificial Sequence
  Peptide Derived from Human Papillomavirus
FTEEAKKY

SEQ ID NO: 21901 - protein, 8 aa, Artificial Sequence
  Peptide Derived from Human Papillomavirus
GTGKKWEV

SEQ ID NO: 21902 - protein, 10 aa, Artificial Sequence
  Peptide Derived from Human Papillomavirus
GTGKKWEVHA

SEQ ID NO: 21903 - protein, 9 aa, Artificial Sequence
  Peptide Derived from Human Papillomavirus
GTSEGVRRA

SEQ ID NO: 21904 - protein, 8 aa, Artificial Sequence
  Peptide Derived from Human Papillomavirus
HAGGQVIV

SEQ ID NO: 21905 - protein, 9 aa, Artificial Sequence
  Peptide Derived from Human Papillomavirus
HAGGQVIVF

SEQ ID NO: 21906 - protein, 8 aa, Artificial Sequence
  Peptide Derived from Human Papillomavirus
HSINHQVV

SEQ ID NO: 21907 - protein, 10 aa, Artificial Sequence
  Peptide Derived from Human Papillomavirus
HSINHQVVPA

SEQ ID NO: 21908 - protein, 11 aa, Artificial Sequence
  Peptide Derived from Human Papillomavirus
HSINHQVVPAL

SEQ ID NO: 21909 - protein, 10 aa, Artificial Sequence
  Peptide Derived from Human Papillomavirus
ISFAGIVTKL

SEQ ID NO: 21910 - protein, 9 aa, Artificial Sequence
  Peptide Derived from Human Papillomavirus
ISTSQRDDF

SEQ ID NO: 21911 - protein, 10 aa, Artificial Sequence
  Peptide Derived from Human Papillomavirus
ISTSQRDDFL

SEQ ID NO: 21912 - protein, 11 aa, Artificial Sequence
  Peptide Derived from Human Papillomavirus
ITYFVNFTEEA

SEQ ID NO: 21913 - protein, 8 aa, Artificial Sequence
  Peptide Derived from Human Papillomavirus
KAKALQAI

SEQ ID NO: 21914 - protein, 10 aa, Artificial Sequence
  Peptide Derived from Human Papillomavirus
KAKALQAIEL

SEQ ID NO: 21915 - protein, 8 aa, Artificial Sequence
  Peptide Derived from Human Papillomavirus
KALQAIEL

SEQ ID NO: 21916 - protein, 10 aa, Artificial Sequence
  Peptide Derived from Human Papillomavirus
KALQAIELQM

SEQ ID NO: 21917 - protein, 11 aa, Artificial Sequence
  Peptide Derived from Human Papillomavirus
KALQAIELQMM

SEQ ID NO: 21918 - protein, 10 aa, Artificial Sequence
  Peptide Derived from Human Papillomavirus
KAREMGIHSI

SEQ ID NO: 21919 - protein, 11 aa, Artificial Sequence
  Peptide Derived from Human Papillomavirus
KTCALGTSEGV

SEQ ID NO: 21920 - protein, 8 aa, Artificial Sequence
  Peptide Derived from Human Papillomavirus
LSKYKQLY

SEQ ID NO: 21921 - protein, 11 aa, Artificial Sequence
  Peptide Derived from Human Papillomavirus
LSKYKQLYEQV

SEQ ID NO: 21922 - protein, 8 aa, Artificial Sequence
  Peptide Derived from Human Papillomavirus
LSVSKAKA

SEQ ID NO: 21923 - protein, 9 aa, Artificial Sequence
  Peptide Derived from Human Papillomavirus
LSVSKAKAL

SEQ ID NO: 21924 - protein, 11 aa, Artificial Sequence
  Peptide Derived from Human Papillomavirus
LSVSKAKALQA

SEQ ID NO: 21925 - protein, 8 aa, Artificial Sequence
  Peptide Derived from Human Papillomavirus
LTAPTGCL

SEQ ID NO: 21926 - protein, 8 aa, Artificial Sequence
  Peptide Derived from Human Papillomavirus
NAIVTLTY

SEQ ID NO: 21927 - protein, 9 aa, Artificial Sequence
  Peptide Derived from Human Papillomavirus
NAIVTLTYI

SEQ ID NO: 21928 - protein, 9 aa, Artificial Sequence
  Peptide Derived from Human Papillomavirus
NTEYKNEDW

SEQ ID NO: 21929 - protein, 11 aa, Artificial Sequence
  Peptide Derived from Human Papillomavirus
NTEYKNEDWTM

SEQ ID NO: 21930 - protein, 8 aa, Artificial Sequence
  Peptide Derived from Human Papillomavirus
NTHHPNKL

SEQ ID NO: 21931 - protein, 9 aa, Artificial Sequence
  Peptide Derived from Human Papillomavirus
NTHHPNKLL

SEQ ID NO: 21932 - protein, 8 aa, Artificial Sequence
  Peptide Derived from Human Papillomavirus
NTMHYTNW

SEQ ID NO: 21933 - protein, 10 aa, Artificial Sequence
  Peptide Derived from Human Papillomavirus
NTMHYTNWKF

SEQ ID NO: 21934 - protein, 11 aa, Artificial Sequence
  Peptide Derived from Human Papillomavirus
NTMHYTNWKFI

SEQ ID NO: 21935 - protein, 11 aa, Artificial Sequence
  Peptide Derived from Human Papillomavirus
NTTTSNSKTCA

SEQ ID NO: 21936 - protein, 9 aa, Artificial Sequence
  Peptide Derived from Human Papillomavirus
NTVKIPNTV

SEQ ID NO: 21937 - protein, 11 aa, Artificial Sequence
  Peptide Derived from Human Papillomavirus
NTVKIPNTVSV

SEQ ID NO: 21938 - protein, 9 aa, Artificial Sequence
  Peptide Derived from Human Papillomavirus
NTVSVSTGY

SEQ ID NO: 21939 - protein, 10 aa, Artificial Sequence
  Peptide Derived from Human Papillomavirus
NTVSVSTGYM

SEQ ID NO: 21940 - protein, 8 aa, Artificial Sequence
  Peptide Derived from Human Papillomavirus
PALSVSKA

SEQ ID NO: 21941 - protein, 10 aa, Artificial Sequence
  Peptide Derived from Human Papillomavirus
PALSVSKAKA

SEQ ID NO: 21942 - protein, 11 aa, Artificial Sequence
  Peptide Derived from Human Papillomavirus
PALSVSKAKAL

SEQ ID NO: 21943 - protein, 9 aa, Artificial Sequence
  Peptide Derived from Human Papillomavirus
PATTPIIHL

SEQ ID NO: 21944 - protein, 10 aa, Artificial Sequence
  Peptide Derived from Human Papillomavirus
PTGCLKKHGY

SEQ ID NO: 21945 - protein, 8 aa, Artificial Sequence
  Peptide Derived from Human Papillomavirus
QAIELQMM

SEQ ID NO: 21946 - protein, 9 aa, Artificial Sequence
  Peptide Derived from Human Papillomavirus
QAIELQMML

SEQ ID NO: 21947 - protein, 9 aa, Artificial Sequence
  Peptide Derived from Human Papillomavirus
QTRAVSCPA

SEQ ID NO: 21948 - protein, 8 aa, Artificial Sequence
  Peptide Derived from Human Papillomavirus
QTSLELYL

SEQ ID NO: 21949 - protein, 10 aa, Artificial Sequence
  Peptide Derived from Human Papillomavirus
QTSLELYLTA

SEQ ID NO: 21950 - protein, 11 aa, Artificial Sequence
  Peptide Derived from Human Papillomavirus
RAVSCPATTPI

SEQ ID NO: 21951 - protein, 11 aa, Artificial Sequence
  Peptide Derived from Human Papillomavirus
SAAACTNQTRA

SEQ ID NO: 21952 - protein, 8 aa, Artificial Sequence
  Peptide Derived from Human Papillomavirus
SSDEISFA

SEQ ID NO: 21953 - protein, 10 aa, Artificial Sequence
  Peptide Derived from Human Papillomavirus
SSDEISFAGI

SEQ ID NO: 21954 - protein, 11 aa, Artificial Sequence
  Peptide Derived from Human Papillomavirus
SSDEISFAGIV

SEQ ID NO: 21955 - protein, 8 aa, Artificial Sequence
  Peptide Derived from Human Papillomavirus
STSQRDDF

SEQ ID NO: 21956 - protein, 9 aa, Artificial Sequence
  Peptide Derived from Human Papillomavirus
STSQRDDFL

SEQ ID NO: 21957 - protein, 8 aa, Artificial Sequence
  Peptide Derived from Human Papillomavirus
TSEGVRRA

SEQ ID NO: 21958 - protein, 9 aa, Artificial Sequence
  Peptide Derived from Human Papillomavirus
TSLELYLTA

SEQ ID NO: 21959 - protein, 8 aa, Artificial Sequence
  Peptide Derived from Human Papillomavirus
TSNSKTCA

SEQ ID NO: 21960 - protein, 9 aa, Artificial Sequence
  Peptide Derived from Human Papillomavirus
TSNSKTCAL

SEQ ID NO: 21961 - protein, 8 aa, Artificial Sequence
  Peptide Derived from Human Papillomavirus
TSQRDDFL

SEQ ID NO: 21962 - protein, 11 aa, Artificial Sequence
  Peptide Derived from Human Papillomavirus
TSQRDDFLNTV

SEQ ID NO: 21963 - protein, 11 aa, Artificial Sequence
  Peptide Derived from Human Papillomavirus
TTPIIHLKGDA

SEQ ID NO: 21964 - protein, 9 aa, Artificial Sequence
  Peptide Derived from Human Papillomavirus
TTSNSKTCA

SEQ ID NO: 21965 - protein, 10 aa, Artificial Sequence
  Peptide Derived from Human Papillomavirus
TTSNSKTCAL

SEQ ID NO: 21966 - protein, 10 aa, Artificial Sequence
  Peptide Derived from Human Papillomavirus
TTTSNSKTCA

SEQ ID NO: 21967 - protein, 11 aa, Artificial Sequence
  Peptide Derived from Human Papillomavirus
TTTSNSKTCAL

SEQ ID NO: 21968 - protein, 9 aa, Artificial Sequence
  Peptide Derived from Human Papillomavirus
VSCPATTPI

SEQ ID NO: 21969 - protein, 10 aa, Artificial Sequence
  Peptide Derived from Human Papillomavirus
VSCPATTPII

SEQ ID NO: 21970 - protein, 9 aa, Artificial Sequence
  Peptide Derived from Human Papillomavirus
VSKAKALQA

SEQ ID NO: 21971 - protein, 10 aa, Artificial Sequence
  Peptide Derived from Human Papillomavirus
VSKAKALQAI

SEQ ID NO: 21972 - protein, 8 aa, Artificial Sequence
  Peptide Derived from Human Papillomavirus
VSTGYMTI

SEQ ID NO: 21973 - protein, 8 aa, Artificial Sequence
  Peptide Derived from Human Papillomavirus
VSVSTGYM

SEQ ID NO: 21974 - protein, 10 aa, Artificial Sequence
  Peptide Derived from Human Papillomavirus
VSVSTGYMTI

SEQ ID NO: 21975 - protein, 11 aa, Artificial Sequence
  Peptide Derived from Human Papillomavirus
WTCTDGKHKNA

SEQ ID NO: 21976 - protein, 8 aa, Artificial Sequence
  Peptide Derived from Human Papillomavirus
WTMQQTSL

SEQ ID NO: 21977 - protein, 10 aa, Artificial Sequence
  Peptide Derived from Human Papillomavirus
WTMQQTSLEL

SEQ ID NO: 21978 - protein, 11 aa, Artificial Sequence
  Peptide Derived from Human Papillomavirus
WTMQQTSLELY

SEQ ID NO: 21979 - protein, 8 aa, Artificial Sequence
  Peptide Derived from Human Papillomavirus
YTNWKFIY

SEQ ID NO: 21980 - protein, 9 aa, Artificial Sequence
  Peptide Derived from Human Papillomavirus
YTNWKFIYL

SEQ ID NO: 21981 - protein, 11 aa, Artificial Sequence
  Peptide Derived from Human Papillomavirus
YTNWKFIYLCI

SEQ ID NO: 21982 - protein, 11 aa, Artificial Sequence
  Peptide Derived from Human Papillomavirus
YTVEVQFDGDV

SEQ ID NO: 21983 - protein, 8 aa, Artificial Sequence
  Peptide Derived from Human Papillomavirus
ATLLLLIV

SEQ ID NO: 21984 - protein, 9 aa, Artificial Sequence
  Peptide Derived from Human Papillomavirus
ATLLLLIVI

SEQ ID NO: 21985 - protein, 10 aa, Artificial Sequence
  Peptide Derived from Human Papillomavirus
ATLLLLIVIL

SEQ ID NO: 21986 - protein, 11 aa, Artificial Sequence
  Peptide Derived from Human Papillomavirus
ATLLLLIVILW

SEQ ID NO: 21987 - protein, 8 aa, Artificial Sequence
  Peptide Derived from Human Papillomavirus
ATSPLRCF

SEQ ID NO: 21988 - protein, 10 aa, Artificial Sequence
  Peptide Derived from Human Papillomavirus
ATSPLRCFCI

SEQ ID NO: 21989 - protein, 11 aa, Artificial Sequence
  Peptide Derived from Human Papillomavirus
ATSPLRCFCIY

SEQ ID NO: 21990 - protein, 9 aa, Artificial Sequence
  Peptide Derived from Human Papillomavirus
IATSPLRCF

SEQ ID NO: 21991 - protein, 11 aa, Artificial Sequence
  Peptide Derived from Human Papillomavirus
IATSPLRCFCI

SEQ ID NO: 21992 - protein, 8 aa, Artificial Sequence
  Peptide Derived from Human Papillomavirus
ISTVSIVL

SEQ ID NO: 21993 - protein, 10 aa, Artificial Sequence
  Peptide Derived from Human Papillomavirus
ISTVSIVLCF

SEQ ID NO: 21994 - protein, 11 aa, Artificial Sequence
  Peptide Derived from Human Papillomavirus
ISTVSIVLCFL

SEQ ID NO: 21995 - protein, 9 aa, Artificial Sequence
  Peptide Derived from Human Papillomavirus
LSVSVYATL

SEQ ID NO: 21996 - protein, 10 aa, Artificial Sequence
  Peptide Derived from Human Papillomavirus
LSVSVYATLL

SEQ ID NO: 21997 - protein, 11 aa, Artificial Sequence
  Peptide Derived from Human Papillomavirus
LSVSVYATLLL

SEQ ID NO: 21998 - protein, 9 aa, Artificial Sequence
  Peptide Derived from Human Papillomavirus
STVSIVLCF

SEQ ID NO: 21999 - protein, 10 aa, Artificial Sequence
  Peptide Derived from Human Papillomavirus
STVSIVLCFL

SEQ ID NO: 22000 - protein, 11 aa, Artificial Sequence
  Peptide Derived from Human Papillomavirus
STVSIVLCFLL

SEQ ID NO: 22001 - protein, 9 aa, Artificial Sequence
  Peptide Derived from Human Papillomavirus
TSPLRCFCI

SEQ ID NO: 22002 - protein, 10 aa, Artificial Sequence
  Peptide Derived from Human Papillomavirus
TSPLRCFCIY

SEQ ID NO: 22003 - protein, 11 aa, Artificial Sequence
  Peptide Derived from Human Papillomavirus
TSPLRCFCIYV

SEQ ID NO: 22004 - protein, 8 aa, Artificial Sequence
  Peptide Derived from Human Papillomavirus
VSIVLCFL

SEQ ID NO: 22005 - protein, 9 aa, Artificial Sequence
  Peptide Derived from Human Papillomavirus
VSIVLCFLL

SEQ ID NO: 22006 - protein, 11 aa, Artificial Sequence
  Peptide Derived from Human Papillomavirus
VSIVLCFLLCF

SEQ ID NO: 22007 - protein, 8 aa, Artificial Sequence
  Peptide Derived from Human Papillomavirus
VSVYATLL

SEQ ID NO: 22008 - protein, 9 aa, Artificial Sequence
  Peptide Derived from Human Papillomavirus
VSVYATLLL

SEQ ID NO: 22009 - protein, 10 aa, Artificial Sequence
  Peptide Derived from Human Papillomavirus
VSVYATLLLL

SEQ ID NO: 22010 - protein, 11 aa, Artificial Sequence
  Peptide Derived from Human Papillomavirus
VSVYATLLLLI

SEQ ID NO: 22011 - protein, 8 aa, Artificial Sequence
  Peptide Derived from Human Papillomavirus
YATLLLLI

SEQ ID NO: 22012 - protein, 9 aa, Artificial Sequence
  Peptide Derived from Human Papillomavirus
YATLLLLIV

SEQ ID NO: 22013 - protein, 10 aa, Artificial Sequence
  Peptide Derived from Human Papillomavirus
YATLLLLIVI

SEQ ID NO: 22014 - protein, 11 aa, Artificial Sequence
  Peptide Derived from Human Papillomavirus
YATLLLLIVIL

SEQ ID NO: 22015 - protein, 8 aa, Artificial Sequence
  Peptide Derived from Human Papillomavirus
CTKCLRFY

SEQ ID NO: 22016 - protein, 11 aa, Artificial Sequence
  Peptide Derived from Human Papillomavirus
CTKCLRFYSKV

SEQ ID NO: 22017 - protein, 11 aa, Artificial Sequence
  Peptide Derived from Human Papillomavirus
DTPHGVCTKCL

SEQ ID NO: 22018 - protein, 8 aa, Artificial Sequence
  Peptide Derived from Human Papillomavirus
ETEVLDFA

SEQ ID NO: 22019 - protein, 9 aa, Artificial Sequence
  Peptide Derived from Human Papillomavirus
ETEVLDFAF

SEQ ID NO: 22020 - protein, 8 aa, Artificial Sequence
  Peptide Derived from Human Papillomavirus
FAFTDLTI

SEQ ID NO: 22021 - protein, 9 aa, Artificial Sequence
  Peptide Derived from Human Papillomavirus
FAFTDLTIV

SEQ ID NO: 22022 - protein, 10 aa, Artificial Sequence
  Peptide Derived from Human Papillomavirus
FAFTDLTIVY

SEQ ID NO: 22023 - protein, 8 aa, Artificial Sequence
  Peptide Derived from Human Papillomavirus
FTDLTIVY

SEQ ID NO: 22024 - protein, 9 aa, Artificial Sequence
  Peptide Derived from Human Papillomavirus
LSSALEIPY

SEQ ID NO: 22025 - protein, 9 aa, Artificial Sequence
  Peptide Derived from Human Papillomavirus
LTETEVLDF

SEQ ID NO: 22026 - protein, 10 aa, Artificial Sequence
  Peptide Derived from Human Papillomavirus
LTETEVLDFA

SEQ ID NO: 22027 - protein, 11 aa, Artificial Sequence
  Peptide Derived from Human Papillomavirus
LTETEVLDFAF

SEQ ID NO: 22028 - protein, 9 aa, Artificial Sequence
  Peptide Derived from Human Papillomavirus
LTNKGICDL

SEQ ID NO: 22029 - protein, 10 aa, Artificial Sequence
  Peptide Derived from Human Papillomavirus
LTNKGICDLL

SEQ ID NO: 22030 - protein, 11 aa, Artificial Sequence
  Peptide Derived from Human Papillomavirus
LTNKGICDLLI

SEQ ID NO: 22031 - protein, 8 aa, Artificial Sequence
  Peptide Derived from Human Papillomavirus
PAERPRKL

SEQ ID NO: 22032 - protein, 11 aa, Artificial Sequence
  Peptide Derived from Human Papillomavirus
PAERPRKLHEL

SEQ ID NO: 22033 - protein, 10 aa, Artificial Sequence
  Peptide Derived from Human Papillomavirus
SALEIPYDEL

SEQ ID NO: 22034 - protein, 8 aa, Artificial Sequence
  Peptide Derived from Human Papillomavirus
SSALEIPY

SEQ ID NO: 22035 - protein, 11 aa, Artificial Sequence
  Peptide Derived from Human Papillomavirus
SSALEIPYDEL

SEQ ID NO: 22036 - protein, 11 aa, Artificial Sequence
  Peptide Derived from Human Papillomavirus
TTLEKLTNKGI

SEQ ID NO: 22037 - protein, 9 aa, Artificial Sequence
  Peptide Derived from Human Papillomavirus
VSEFRWYRY

SEQ ID NO: 22038 - protein, 11 aa, Artificial Sequence
  Peptide Derived from Human Papillomavirus
VSEFRWYRYSV

SEQ ID NO: 22039 - protein, 9 aa, Artificial Sequence
  Peptide Derived from Human Papillomavirus
WTGRCIACW

SEQ ID NO: 22040 - protein, 9 aa, Artificial Sequence
  Peptide Derived from Human Papillomavirus
YSKVSEFRW

SEQ ID NO: 22041 - protein, 10 aa, Artificial Sequence
  Peptide Derived from Human Papillomavirus
YSKVSEFRWY

SEQ ID NO: 22042 - protein, 8 aa, Artificial Sequence
  Peptide Derived from Human Papillomavirus
YSVYGTTL

SEQ ID NO: 22043 - protein, 11 aa, Artificial Sequence
  Peptide Derived from Human Papillomavirus
YSVYGTTLEKL

SEQ ID NO: 22044 - protein, 10 aa, Artificial Sequence
  Peptide Derived from Human Papillomavirus
ATDLHCYEQL

SEQ ID NO: 22045 - protein, 8 aa, Artificial Sequence
  Peptide Derived from Human Papillomavirus
DSSDEEDV

SEQ ID NO: 22046 - protein, 9 aa, Artificial Sequence
  Peptide Derived from Human Papillomavirus
DSSDEEDVI

SEQ ID NO: 22047 - protein, 8 aa, Artificial Sequence
  Peptide Derived from Human Papillomavirus
DTSNYNIV

SEQ ID NO: 22048 - protein, 10 aa, Artificial Sequence
  Peptide Derived from Human Papillomavirus
DTSNYNIVTF

SEQ ID NO: 22049 - protein, 8 aa, Artificial Sequence
  Peptide Derived from Human Papillomavirus
EATDLHCY

SEQ ID NO: 22050 - protein, 11 aa, Artificial Sequence
  Peptide Derived from Human Papillomavirus
EATDLHCYEQL

SEQ ID NO: 22051 - protein, 8 aa, Artificial Sequence
  Peptide Derived from Human Papillomavirus
ETPTLQDY

SEQ ID NO: 22052 - protein, 9 aa, Artificial Sequence
  Peptide Derived from Human Papillomavirus
ETPTLQDYV

SEQ ID NO: 22053 - protein, 10 aa, Artificial Sequence
  Peptide Derived from Human Papillomavirus
ETPTLQDYVL

SEQ ID NO: 22054 - protein, 8 aa, Artificial Sequence
  Peptide Derived from Human Papillomavirus
KSTLRLCV

SEQ ID NO: 22055 - protein, 8 aa, Artificial Sequence
  Peptide Derived from Human Papillomavirus
PTLQDYVL

SEQ ID NO: 22056 - protein, 10 aa, Artificial Sequence
  Peptide Derived from Human Papillomavirus
PTLQDYVLDL

SEQ ID NO: 22057 - protein, 9 aa, Artificial Sequence
  Peptide Derived from Human Papillomavirus
QAEPDTSNY

SEQ ID NO: 22058 - protein, 11 aa, Artificial Sequence
  Peptide Derived from Human Papillomavirus
QAEPDTSNYNI

SEQ ID NO: 22059 - protein, 9 aa, Artificial Sequence
  Peptide Derived from Human Papillomavirus
QSTQVDIRI

SEQ ID NO: 22060 - protein, 10 aa, Artificial Sequence
  Peptide Derived from Human Papillomavirus
QSTQVDIRIL

SEQ ID NO: 22061 - protein, 8 aa, Artificial Sequence
  Peptide Derived from Human Papillomavirus
SSDEEDVI

SEQ ID NO: 22062 - protein, 8 aa, Artificial Sequence
  Peptide Derived from Human Papillomavirus
STQVDIRI

SEQ ID NO: 22063 - protein, 9 aa, Artificial Sequence
  Peptide Derived from Human Papillomavirus
STQVDIRIL

SEQ ID NO: 22064 - protein, 9 aa, Artificial Sequence
  Peptide Derived from Human Papillomavirus
TSNYNIVTF

SEQ ID NO: 22065 - protein, 11 aa, Artificial Sequence
  Peptide Derived from Human Papillomavirus
VTFCCQCKSTL

SEQ ID NO: 22066 - protein, 10 aa, Artificial Sequence
  Peptide Derived from Human Papillomavirus
AAIANSDTTF

SEQ ID NO: 22067 - protein, 8 aa, Artificial Sequence
  Peptide Derived from Human Papillomavirus
ATLANSTY

SEQ ID NO: 22068 - protein, 9 aa, Artificial Sequence
  Peptide Derived from Human Papillomavirus
ATLANSTYF

SEQ ID NO: 22069 - protein, 8 aa, Artificial Sequence
  Peptide Derived from Human Papillomavirus
ATVYLPPV

SEQ ID NO: 22070 - protein, 10 aa, Artificial Sequence
  Peptide Derived from Human Papillomavirus
ATVYLPPVPV

SEQ ID NO: 22071 - protein, 11 aa, Artificial Sequence
  Peptide Derived from Human Papillomavirus
CAAIANSDTTF

SEQ ID NO: 22072 - protein, 9 aa, Artificial Sequence
  Peptide Derived from Human Papillomavirus
DAQIFNKPY

SEQ ID NO: 22073 - protein, 10 aa, Artificial Sequence
  Peptide Derived from Human Papillomavirus
DAQIFNKPYW

SEQ ID NO: 22074 - protein, 11 aa, Artificial Sequence
  Peptide Derived from Human Papillomavirus
DAQIFNKPYWM

SEQ ID NO: 22075 - protein, 8 aa, Artificial Sequence
  Peptide Derived from Human Papillomavirus
DTENSNRY

SEQ ID NO: 22076 - protein, 9 aa, Artificial Sequence
  Peptide Derived from Human Papillomavirus
DTENSNRYA

SEQ ID NO: 22077 - protein, 9 aa, Artificial Sequence
  Peptide Derived from Human Papillomavirus
DTGFGAMDF

SEQ ID NO: 22078 - protein, 11 aa, Artificial Sequence
  Peptide Derived from Human Papillomavirus
DTGFGAMDFTA

SEQ ID NO: 22079 - protein, 8 aa, Artificial Sequence
  Peptide Derived from Human Papillomavirus
DTKSNVPL

SEQ ID NO: 22080 - protein, 10 aa, Artificial Sequence
  Peptide Derived from Human Papillomavirus
DTKSNVPLDI

SEQ ID NO: 22081 - protein, 9 aa, Artificial Sequence
  Peptide Derived from Human Papillomavirus
DTTFKSSNF

SEQ ID NO: 22082 - protein, 8 aa, Artificial Sequence
  Peptide Derived from Human Papillomavirus
DTTRSTNM

SEQ ID NO: 22083 - protein, 10 aa, Artificial Sequence
  Peptide Derived from Human Papillomavirus
DTTRSTNMSV

SEQ ID NO: 22084 - protein, 10 aa, Artificial Sequence
  Peptide Derived from Human Papillomavirus
DTYRFVTSQA

SEQ ID NO: 22085 - protein, 11 aa, Artificial Sequence
  Peptide Derived from Human Papillomavirus
DTYRFVTSQAI

SEQ ID NO: 22086 - protein, 9 aa, Artificial Sequence
  Peptide Derived from Human Papillomavirus
EATVYLPPV

SEQ ID NO: 22087 - protein, 11 aa, Artificial Sequence
  Peptide Derived from Human Papillomavirus
EATVYLPPVPV

SEQ ID NO: 22088 - protein, 8 aa, Artificial Sequence
  Peptide Derived from Human Papillomavirus
ESVPTDLY

SEQ ID NO: 22089 - protein, 9 aa, Artificial Sequence
  Peptide Derived from Human Papillomavirus
ESVPTDLYI

SEQ ID NO: 22090 - protein, 8 aa, Artificial Sequence
  Peptide Derived from Human Papillomavirus
ETQRLVWA

SEQ ID NO: 22091 - protein, 10 aa, Artificial Sequence
  Peptide Derived from Human Papillomavirus
ETQRLVWACV

SEQ ID NO: 22092 - protein, 8 aa, Artificial Sequence
  Peptide Derived from Human Papillomavirus
FSADLDQF

SEQ ID NO: 22093 - protein, 10 aa, Artificial Sequence
  Peptide Derived from Human Papillomavirus
FSADLDQFPL

SEQ ID NO: 22094 - protein, 11 aa, Artificial Sequence
  Peptide Derived from Human Papillomavirus
FTALQDTKSNV

SEQ ID NO: 22095 - protein, 8 aa, Artificial Sequence
  Peptide Derived from Human Papillomavirus
GAMDFTAL

SEQ ID NO: 22096 - protein, 8 aa, Artificial Sequence
  Peptide Derived from Human Papillomavirus
GSARLLTV

SEQ ID NO: 22097 - protein, 8 aa, Artificial Sequence
  Peptide Derived from Human Papillomavirus
GSGSTATL

SEQ ID NO: 22098 - protein, 9 aa, Artificial Sequence
  Peptide Derived from Human Papillomavirus
GSGSTATLA

SEQ ID NO: 22099 - protein, 9 aa, Artificial Sequence
  Peptide Derived from Human Papillomavirus
GSLEDTYRF

SEQ ID NO: 22100 - protein, 10 aa, Artificial Sequence
  Peptide Derived from Human Papillomavirus
GSLEDTYRFV

SEQ ID NO: 22101 - protein, 8 aa, Artificial Sequence
  Peptide Derived from Human Papillomavirus
GSMVTSDA

SEQ ID NO: 22102 - protein, 10 aa, Artificial Sequence
  Peptide Derived from Human Papillomavirus
GSMVTSDAQI

SEQ ID NO: 22103 - protein, 11 aa, Artificial Sequence
  Peptide Derived from Human Papillomavirus
GSMVTSDAQIF

SEQ ID NO: 22104 - protein, 8 aa, Artificial Sequence
  Peptide Derived from Human Papillomavirus
GSPCSNNA

SEQ ID NO: 22105 - protein, 9 aa, Artificial Sequence
  Peptide Derived from Human Papillomavirus
GSPCSNNAI

SEQ ID NO: 22106 - protein, 11 aa, Artificial Sequence
  Peptide Derived from Human Papillomavirus
GSTATLANSTY

SEQ ID NO: 22107 - protein, 8 aa, Artificial Sequence
  Peptide Derived from Human Papillomavirus
GTDNRECI

SEQ ID NO: 22108 - protein, 10 aa, Artificial Sequence
  Peptide Derived from Human Papillomavirus
GTDNRECISM

SEQ ID NO: 22109 - protein, 11 aa, Artificial Sequence
  Peptide Derived from Human Papillomavirus
GTVGESVPTDL

SEQ ID NO: 22110 - protein, 8 aa, Artificial Sequence
  Peptide Derived from Human Papillomavirus
HAGSARLL

SEQ ID NO: 22111 - protein, 10 aa, Artificial Sequence
  Peptide Derived from Human Papillomavirus
HAGSARLLTV

SEQ ID NO: 22112 - protein, 8 aa, Artificial Sequence
  Peptide Derived from Human Papillomavirus
HSMNPAIL

SEQ ID NO: 22113 - protein, 11 aa, Artificial Sequence
  Peptide Derived from Human Papillomavirus
HSMNPAILEDW

SEQ ID NO: 22114 - protein, 8 aa, Artificial Sequence
  Peptide Derived from Human Papillomavirus
IANSDTTF

SEQ ID NO: 22115 - protein, 10 aa, Artificial Sequence
  Peptide Derived from Human Papillomavirus
ISGHPLLNKF

SEQ ID NO: 22116 - protein, 10 aa, Artificial Sequence
  Peptide Derived from Human Papillomavirus
ISMDYKQTQL

SEQ ID NO: 22117 - protein, 8 aa, Artificial Sequence
  Peptide Derived from Human Papillomavirus
ITLSADIM

SEQ ID NO: 22118 - protein, 10 aa, Artificial Sequence
  Peptide Derived from Human Papillomavirus
ITLSADIMTY

SEQ ID NO: 22119 - protein, 11 aa, Artificial Sequence
  Peptide Derived from Human Papillomavirus
ITLSADIMTYI

SEQ ID NO: 22120 - protein, 9 aa, Artificial Sequence
  Peptide Derived from Human Papillomavirus
ITPGDCPPL

SEQ ID NO: 22121 - protein, 11 aa, Artificial Sequence
  Peptide Derived from Human Papillomavirus
ITPGDCPPLEL

SEQ ID NO: 22122 - protein, 10 aa, Artificial Sequence
  Peptide Derived from Human Papillomavirus
KAGKRSAPSA

SEQ ID NO: 22123 - protein, 8 aa, Artificial Sequence
  Peptide Derived from Human Papillomavirus
KSDNPKKI

SEQ ID NO: 22124 - protein, 9 aa, Artificial Sequence
  Peptide Derived from Human Papillomavirus
KSDNPKKIV

SEQ ID NO: 22125 - protein, 10 aa, Artificial Sequence
  Peptide Derived from Human Papillomavirus
KSDNPKKIVV

SEQ ID NO: 22126 - protein, 8 aa, Artificial Sequence
  Peptide Derived from Human Papillomavirus
KSNVPLDI

SEQ ID NO: 22127 - protein, 8 aa, Artificial Sequence
  Peptide Derived from Human Papillomavirus
KSSNFKEY

SEQ ID NO: 22128 - protein, 9 aa, Artificial Sequence
  Peptide Derived from Human Papillomavirus
KSSNFKEYL

SEQ ID NO: 22129 - protein, 8 aa, Artificial Sequence
  Peptide Derived from Human Papillomavirus
LSADIMTY

SEQ ID NO: 22130 - protein, 9 aa, Artificial Sequence
  Peptide Derived from Human Papillomavirus
LSADIMTYI

SEQ ID NO: 22131 - protein, 9 aa, Artificial Sequence
  Peptide Derived from Human Papillomavirus
LTTPPSGSL

SEQ ID NO: 22132 - protein, 8 aa, Artificial Sequence
  Peptide Derived from Human Papillomavirus
LTVGHPYY

SEQ ID NO: 22133 - protein, 10 aa, Artificial Sequence
  Peptide Derived from Human Papillomavirus
LTVGHPYYSI

SEQ ID NO: 22134 - protein, 9 aa, Artificial Sequence
  Peptide Derived from Human Papillomavirus
MSLWRPSEA

SEQ ID NO: 22135 - protein, 11 aa, Artificial Sequence
  Peptide Derived from Human Papillomavirus
MSLWRPSEATV

SEQ ID NO: 22136 - protein, 8 aa, Artificial Sequence
  Peptide Derived from Human Papillomavirus
MSVCAAIA

SEQ ID NO: 22137 - protein, 10 aa, Artificial Sequence
  Peptide Derived from Human Papillomavirus
MTYIHSMNPA

SEQ ID NO: 22138 - protein, 11 aa, Artificial Sequence
  Peptide Derived from Human Papillomavirus
MTYIHSMNPAI

SEQ ID NO: 22139 - protein, 11 aa, Artificial Sequence
  Peptide Derived from Human Papillomavirus
NAITPGDCPPL

SEQ ID NO: 22140 - protein, 11 aa, Artificial Sequence
  Peptide Derived from Human Papillomavirus
NSDTTFKSSNF

SEQ ID NO: 22141 - protein, 9 aa, Artificial Sequence
  Peptide Derived from Human Papillomavirus
NSICKYPDY

SEQ ID NO: 22142 - protein, 10 aa, Artificial Sequence
  Peptide Derived from Human Papillomavirus
NSICKYPDYL

SEQ ID NO: 22143 - protein, 9 aa, Artificial Sequence
  Peptide Derived from Human Papillomavirus
NSVIQDGDM

SEQ ID NO: 22144 - protein, 10 aa, Artificial Sequence
  Peptide Derived from Human Papillomavirus
NSVIQDGDMV

SEQ ID NO: 22145 - protein, 9 aa, Artificial Sequence
  Peptide Derived from Human Papillomavirus
PAILEDWNF

SEQ ID NO: 22146 - protein, 11 aa, Artificial Sequence
  Peptide Derived from Human Papillomavirus
PAILEDWNFGL

SEQ ID NO: 22147 - protein, 9 aa, Artificial Sequence
  Peptide Derived from Human Papillomavirus
PSASTTTPA

SEQ ID NO: 22148 - protein, 8 aa, Artificial Sequence
  Peptide Derived from Human Papillomavirus
PSEATVYL

SEQ ID NO: 22149 - protein, 11 aa, Artificial Sequence
  Peptide Derived from Human Papillomavirus
PSEATVYLPPV

SEQ ID NO: 22150 - protein, 9 aa, Artificial Sequence
  Peptide Derived from Human Papillomavirus
PSGSLEDTY

SEQ ID NO: 22151 - protein, 11 aa, Artificial Sequence
  Peptide Derived from Human Papillomavirus
PSGSLEDTYRF

SEQ ID NO: 22152 - protein, 10 aa, Artificial Sequence
  Peptide Derived from Human Papillomavirus
PSGSMVTSDA

SEQ ID NO: 22153 - protein, 8 aa, Artificial Sequence
  Peptide Derived from Human Papillomavirus
PTPSGSMV

SEQ ID NO: 22154 - protein, 10 aa, Artificial Sequence
  Peptide Derived from Human Papillomavirus
QAGYRARPKF

SEQ ID NO: 22155 - protein, 9 aa, Artificial Sequence
  Peptide Derived from Human Papillomavirus
QAITCQKTA

SEQ ID NO: 22156 - protein, 9 aa, Artificial Sequence
  Peptide Derived from Human Papillomavirus
RAQGHNNGI

SEQ ID NO: 22157 - protein, 11 aa, Artificial Sequence
  Peptide Derived from Human Papillomavirus
RAQGHNNGICW

SEQ ID NO: 22158 - protein, 8 aa, Artificial Sequence
  Peptide Derived from Human Papillomavirus
RARPKFKA

SEQ ID NO: 22159 - protein, 9 aa, Artificial Sequence
  Peptide Derived from Human Papillomavirus
RSGTVGESV

SEQ ID NO: 22160 - protein, 9 aa, Artificial Sequence
  Peptide Derived from Human Papillomavirus
RSTNMSVCA

SEQ ID NO: 22161 - protein, 10 aa, Artificial Sequence
  Peptide Derived from Human Papillomavirus
RSTNMSVCAA

SEQ ID NO: 22162 - protein, 11 aa, Artificial Sequence
  Peptide Derived from Human Papillomavirus
RSTNMSVCAAI

SEQ ID NO: 22163 - protein, 8 aa, Artificial Sequence
  Peptide Derived from Human Papillomavirus
RTNIYYHA

SEQ ID NO: 22164 - protein, 11 aa, Artificial Sequence
  Peptide Derived from Human Papillomavirus
RTNIYYHAGSA

SEQ ID NO: 22165 - protein, 8 aa, Artificial Sequence
  Peptide Derived from Human Papillomavirus
SADIMTYI

SEQ ID NO: 22166 - protein, 11 aa, Artificial Sequence
  Peptide Derived from Human Papillomavirus
SADIMTYIHSM

SEQ ID NO: 22167 - protein, 9 aa, Artificial Sequence
  Peptide Derived from Human Papillomavirus
SADLDQFPL

SEQ ID NO: 22168 - protein, 11 aa, Artificial Sequence
  Peptide Derived from Human Papillomavirus
SAPSASTTTPA

SEQ ID NO: 22169 - protein, 11 aa, Artificial Sequence
  Peptide Derived from Human Papillomavirus
SARLLTVGHPY

SEQ ID NO: 22170 - protein, 8 aa, Artificial Sequence
  Peptide Derived from Human Papillomavirus
SASTTTPA

SEQ ID NO: 22171 - protein, 8 aa, Artificial Sequence
  Peptide Derived from Human Papillomavirus
SSNFKEYL

SEQ ID NO: 22172 - protein, 10 aa, Artificial Sequence
  Peptide Derived from Human Papillomavirus
STATLANSTY

SEQ ID NO: 22173 - protein, 11 aa, Artificial Sequence
  Peptide Derived from Human Papillomavirus
STATLANSTYF

SEQ ID NO: 22174 - protein, 11 aa, Artificial Sequence
  Peptide Derived from Human Papillomavirus
STDEYVTRTNI

SEQ ID NO: 22175 - protein, 8 aa, Artificial Sequence
  Peptide Derived from Human Papillomavirus
STNMSVCA

SEQ ID NO: 22176 - protein, 9 aa, Artificial Sequence
  Peptide Derived from Human Papillomavirus
STNMSVCAA

SEQ ID NO: 22177 - protein, 10 aa, Artificial Sequence
  Peptide Derived from Human Papillomavirus
STNMSVCAAI

SEQ ID NO: 22178 - protein, 11 aa, Artificial Sequence
  Peptide Derived from Human Papillomavirus
STNMSVCAAIA

SEQ ID NO: 22179 - protein, 11 aa, Artificial Sequence
  Peptide Derived from Human Papillomavirus
STYFPTPSGSM

SEQ ID NO: 22180 - protein, 10 aa, Artificial Sequence
  Peptide Derived from Human Papillomavirus
TALQDTKSNV

SEQ ID NO: 22181 - protein, 11 aa, Artificial Sequence
  Peptide Derived from Human Papillomavirus
TAPQKPKEDPF

SEQ ID NO: 22182 - protein, 9 aa, Artificial Sequence
  Peptide Derived from Human Papillomavirus
TATLANSTY

SEQ ID NO: 22183 - protein, 10 aa, Artificial Sequence
  Peptide Derived from Human Papillomavirus
TATLANSTYF

SEQ ID NO: 22184 - protein, 11 aa, Artificial Sequence
  Peptide Derived from Human Papillomavirus
TSDAQIFNKPY

SEQ ID NO: 22185 - protein, 11 aa, Artificial Sequence
  Peptide Derived from Human Papillomavirus
TSFYNPETQRL

SEQ ID NO: 22186 - protein, 11 aa, Artificial Sequence
  Peptide Derived from Human Papillomavirus
TSQAITCQKTA

SEQ ID NO: 22187 - protein, 8 aa, Artificial Sequence
  Peptide Derived from Human Papillomavirus
TTFKSSNF

SEQ ID NO: 22188 - protein, 11 aa, Artificial Sequence
  Peptide Derived from Human Papillomavirus
TTFKSSNFKEY

SEQ ID NO: 22189 - protein, 8 aa, Artificial Sequence
  Peptide Derived from Human Papillomavirus
TTPPSGSL

SEQ ID NO: 22190 - protein, 9 aa, Artificial Sequence
  Peptide Derived from Human Papillomavirus
TTRSTNMSV

SEQ ID NO: 22191 - protein, 11 aa, Artificial Sequence
  Peptide Derived from Human Papillomavirus
TTRSTNMSVCA

SEQ ID NO: 22192 - protein, 9 aa, Artificial Sequence
  Peptide Derived from Human Papillomavirus
VAEPYGDTL

SEQ ID NO: 22193 - protein, 10 aa, Artificial Sequence
  Peptide Derived from Human Papillomavirus
VAEPYGDTLF

SEQ ID NO: 22194 - protein, 11 aa, Artificial Sequence
  Peptide Derived from Human Papillomavirus
VAEPYGDTLFF

SEQ ID NO: 22195 - protein, 8 aa, Artificial Sequence
  Peptide Derived from Human Papillomavirus
VSGLQYRV

SEQ ID NO: 22196 - protein, 9 aa, Artificial Sequence
  Peptide Derived from Human Papillomavirus
VSGLQYRVF

SEQ ID NO: 22197 - protein, 11 aa, Artificial Sequence
  Peptide Derived from Human Papillomavirus
VSGLQYRVFRV

SEQ ID NO: 22198 - protein, 10 aa, Artificial Sequence
  Peptide Derived from Human Papillomavirus
VSKVVSTDEY

SEQ ID NO: 22199 - protein, 11 aa, Artificial Sequence
  Peptide Derived from Human Papillomavirus
VSKVVSTDEYV

SEQ ID NO: 22200 - protein, 8 aa, Artificial Sequence
  Peptide Derived from Human Papillomavirus
VTRTNIYY

SEQ ID NO: 22201 - protein, 10 aa, Artificial Sequence
  Peptide Derived from Human Papillomavirus
VTRTNIYYHA

SEQ ID NO: 22202 - protein, 8 aa, Artificial Sequence
  Peptide Derived from Human Papillomavirus
VTSDAQIF

SEQ ID NO: 22203 - protein, 8 aa, Artificial Sequence
  Peptide Derived from Human Papillomavirus
WACVGLEV

SEQ ID NO: 22204 - protein, 9 aa, Artificial Sequence
  Peptide Derived from Human Papillomavirus
AAGTCPSDV

SEQ ID NO: 22205 - protein, 10 aa, Artificial Sequence
  Peptide Derived from Human Papillomavirus
AAGTCPSDVI

SEQ ID NO: 22206 - protein, 9 aa, Artificial Sequence
  Peptide Derived from Human Papillomavirus
ASATTTSTL

SEQ ID NO: 22207 - protein, 9 aa, Artificial Sequence
  Peptide Derived from Human Papillomavirus
ASIPIRPPV

SEQ ID NO: 22208 - protein, 11 aa, Artificial Sequence
  Peptide Derived from Human Papillomavirus
ASIPIRPPVSI

SEQ ID NO: 22209 - protein, 10 aa, Artificial Sequence
  Peptide Derived from Human Papillomavirus
ATHNVSPSTA

SEQ ID NO: 22210 - protein, 11 aa, Artificial Sequence
  Peptide Derived from Human Papillomavirus
ATHNVSPSTAV

SEQ ID NO: 22211 - protein, 9 aa, Artificial Sequence
  Peptide Derived from Human Papillomavirus
ATIGARVHY

SEQ ID NO: 22212 - protein, 10 aa, Artificial Sequence
  Peptide Derived from Human Papillomavirus
ATIGARVHYY

SEQ ID NO: 22213 - protein, 11 aa, Artificial Sequence
  Peptide Derived from Human Papillomavirus
ATIGARVHYYY

SEQ ID NO: 22214 - protein, 10 aa, Artificial Sequence
  Peptide Derived from Human Papillomavirus
ATQLYQTCKA

SEQ ID NO: 22215 - protein, 11 aa, Artificial Sequence
  Peptide Derived from Human Papillomavirus
ATQLYQTCKAA

SEQ ID NO: 22216 - protein, 8 aa, Artificial Sequence
  Peptide Derived from Human Papillomavirus
ATQQVKVI

SEQ ID NO: 22217 - protein, 9 aa, Artificial Sequence
  Peptide Derived from Human Papillomavirus
ATTADTTPA

SEQ ID NO: 22218 - protein, 10 aa, Artificial Sequence
  Peptide Derived from Human Papillomavirus
ATTADTTPAI

SEQ ID NO: 22219 - protein, 11 aa, Artificial Sequence
  Peptide Derived from Human Papillomavirus
ATTADTTPAIL

SEQ ID NO: 22220 - protein, 11 aa, Artificial Sequence
  Peptide Derived from Human Papillomavirus
ATTTSTLNDGL

SEQ ID NO: 22221 - protein, 10 aa, Artificial Sequence
  Peptide Derived from Human Papillomavirus
DTDFTVDTPA

SEQ ID NO: 22222 - protein, 8 aa, Artificial Sequence
  Peptide Derived from Human Papillomavirus
DTPATHNV

SEQ ID NO: 22223 - protein, 9 aa, Artificial Sequence
  Peptide Derived from Human Papillomavirus
DTTPAILDV

SEQ ID NO: 22224 - protein, 10 aa, Artificial Sequence
  Peptide Derived from Human Papillomavirus
EASIPIRPPV

SEQ ID NO: 22225 - protein, 9 aa, Artificial Sequence
  Peptide Derived from Human Papillomavirus
ESGIVDVGA

SEQ ID NO: 22226 - protein, 11 aa, Artificial Sequence
  Peptide Derived from Human Papillomavirus
ESGIVDVGAPA

SEQ ID NO: 22227 - protein, 8 aa, Artificial Sequence
  Peptide Derived from Human Papillomavirus
ESIEMQPL

SEQ ID NO: 22228 - protein, 10 aa, Artificial Sequence
  Peptide Derived from Human Papillomavirus
ESIEMQPLGA

SEQ ID NO: 22229 - protein, 8 aa, Artificial Sequence
  Peptide Derived from Human Papillomavirus
ETSGHLLL

SEQ ID NO: 22230 - protein, 9 aa, Artificial Sequence
  Peptide Derived from Human Papillomavirus
ETVNAEESL

SEQ ID NO: 22231 - protein, 10 aa, Artificial Sequence
  Peptide Derived from Human Papillomavirus
ETVNAEESLY

SEQ ID NO: 22232 - protein, 11 aa, Artificial Sequence
  Peptide Derived from Human Papillomavirus
ETVNAEESLYF

SEQ ID NO: 22233 - protein, 8 aa, Artificial Sequence
  Peptide Derived from Human Papillomavirus
FSGPDVPI

SEQ ID NO: 22234 - protein, 11 aa, Artificial Sequence
  Peptide Derived from Human Papillomavirus
FSGPDVPIEHA

SEQ ID NO: 22235 - protein, 8 aa, Artificial Sequence
  Peptide Derived from Human Papillomavirus
FSNTSHNI

SEQ ID NO: 22236 - protein, 9 aa, Artificial Sequence
  Peptide Derived from Human Papillomavirus
FSNTSHNIA

SEQ ID NO: 22237 - protein, 8 aa, Artificial Sequence
  Peptide Derived from Human Papillomavirus
FTDVSVAA

SEQ ID NO: 22238 - protein, 11 aa, Artificial Sequence
  Peptide Derived from Human Papillomavirus
FTVDTPATHNV

SEQ ID NO: 22239 - protein, 8 aa, Artificial Sequence
  Peptide Derived from Human Papillomavirus
GARVHYYY

SEQ ID NO: 22240 - protein, 10 aa, Artificial Sequence
  Peptide Derived from Human Papillomavirus
GARVHYYYDI

SEQ ID NO: 22241 - protein, 10 aa, Artificial Sequence
  Peptide Derived from Human Papillomavirus
GASATTTSTL

SEQ ID NO: 22242 - protein, 8 aa, Artificial Sequence
  Peptide Derived from Human Papillomavirus
GATIGARV

SEQ ID NO: 22243 - protein, 10 aa, Artificial Sequence
  Peptide Derived from Human Papillomavirus
GATIGARVHY

SEQ ID NO: 22244 - protein, 11 aa, Artificial Sequence
  Peptide Derived from Human Papillomavirus
GATIGARVHYY

SEQ ID NO: 22245 - protein, 10 aa, Artificial Sequence
  Peptide Derived from Human Papillomavirus
GSGTGGRTGY

SEQ ID NO: 22246 - protein, 11 aa, Artificial Sequence
  Peptide Derived from Human Papillomavirus
GSGTGGRTGYV

SEQ ID NO: 22247 - protein, 10 aa, Artificial Sequence
  Peptide Derived from Human Papillomavirus
GSMGVFFGGL

SEQ ID NO: 22248 - protein, 8 aa, Artificial Sequence
  Peptide Derived from Human Papillomavirus
GTCPSDVI

SEQ ID NO: 22249 - protein, 11 aa, Artificial Sequence
  Peptide Derived from Human Papillomavirus
GTCPSDVIPKI

SEQ ID NO: 22250 - protein, 8 aa, Artificial Sequence
  Peptide Derived from Human Papillomavirus
GTGGRTGY

SEQ ID NO: 22251 - protein, 9 aa, Artificial Sequence
  Peptide Derived from Human Papillomavirus
GTGGRTGYV

SEQ ID NO: 22252 - protein, 11 aa, Artificial Sequence
  Peptide Derived from Human Papillomavirus
GTGGRTGYVPL

SEQ ID NO: 22253 - protein, 9 aa, Artificial Sequence
  Peptide Derived from Human Papillomavirus
HAPTQVFPF

SEQ ID NO: 22254 - protein, 11 aa, Artificial Sequence
  Peptide Derived from Human Papillomavirus
HAPTQVFPFPL

SEQ ID NO: 22255 - protein, 8 aa, Artificial Sequence
  Peptide Derived from Human Papillomavirus
HTTIADQI

SEQ ID NO: 22256 - protein, 9 aa, Artificial Sequence
  Peptide Derived from Human Papillomavirus
HTTIADQIL

SEQ ID NO: 22257 - protein, 11 aa, Artificial Sequence
  Peptide Derived from Human Papillomavirus
HTTIADQILRY

SEQ ID NO: 22258 - protein, 8 aa, Artificial Sequence
  Peptide Derived from Human Papillomavirus
IADQILRY

SEQ ID NO: 22259 - protein, 11 aa, Artificial Sequence
  Peptide Derived from Human Papillomavirus
IADQILRYGSM

SEQ ID NO: 22260 - protein, 8 aa, Artificial Sequence
  Peptide Derived from Human Papillomavirus
IALHRPAL

SEQ ID NO: 22261 - protein, 8 aa, Artificial Sequence
  Peptide Derived from Human Papillomavirus
IAPDPDFL

SEQ ID NO: 22262 - protein, 10 aa, Artificial Sequence
  Peptide Derived from Human Papillomavirus
IAPDPDFLDI

SEQ ID NO: 22263 - protein, 11 aa, Artificial Sequence
  Peptide Derived from Human Papillomavirus
IAPDPDFLDII

SEQ ID NO: 22264 - protein, 10 aa, Artificial Sequence
  Peptide Derived from Human Papillomavirus
IATTADTTPA

SEQ ID NO: 22265 - protein, 11 aa, Artificial Sequence
  Peptide Derived from Human Papillomavirus
IATTADTTPAI

SEQ ID NO: 22266 - protein, 11 aa, Artificial Sequence
  Peptide Derived from Human Papillomavirus
ISSINPAGESI

SEQ ID NO: 22267 - protein, 9 aa, Artificial Sequence
  Peptide Derived from Human Papillomavirus
ISTHNYEEI

SEQ ID NO: 22268 - protein, 11 aa, Artificial Sequence
  Peptide Derived from Human Papillomavirus
ISTHNYEEIPM

SEQ ID NO: 22269 - protein, 10 aa, Artificial Sequence
  Peptide Derived from Human Papillomavirus
ITSSTPIPGV

SEQ ID NO: 22270 - protein, 8 aa, Artificial Sequence
  Peptide Derived from Human Papillomavirus
ITYENPAY

SEQ ID NO: 22271 - protein, 11 aa, Artificial Sequence
  Peptide Derived from Human Papillomavirus
ITYENPAYETV

SEQ ID NO: 22272 - protein, 10 aa, Artificial Sequence
  Peptide Derived from Human Papillomavirus
KAAGTCPSDV

SEQ ID NO: 22273 - protein, 11 aa, Artificial Sequence
  Peptide Derived from Human Papillomavirus
KAAGTCPSDVI

SEQ ID NO: 22274 - protein, 8 aa, Artificial Sequence
  Peptide Derived from Human Papillomavirus
KATQQVKV

SEQ ID NO: 22275 - protein, 9 aa, Artificial Sequence
  Peptide Derived from Human Papillomavirus
KATQQVKVI

SEQ ID NO: 22276 - protein, 8 aa, Artificial Sequence
  Peptide Derived from Human Papillomavirus
LAPTTPQV

SEQ ID NO: 22277 - protein, 10 aa, Artificial Sequence
  Peptide Derived from Human Papillomavirus
LAPTTPQVSI

SEQ ID NO: 22278 - protein, 11 aa, Artificial Sequence
  Peptide Derived from Human Papillomavirus
LAPTTPQVSIF

SEQ ID NO: 22279 - protein, 8 aa, Artificial Sequence
  Peptide Derived from Human Papillomavirus
LSAPKQLI

SEQ ID NO: 22280 - protein, 10 aa, Artificial Sequence
  Peptide Derived from Human Papillomavirus
LSAPKQLITY

SEQ ID NO: 22281 - protein, 11 aa, Artificial Sequence
  Peptide Derived from Human Papillomavirus
LSSSSISTHNY

SEQ ID NO: 22282 - protein, 9 aa, Artificial Sequence
  Peptide Derived from Human Papillomavirus
LSTGFDIPI

SEQ ID NO: 22283 - protein, 10 aa, Artificial Sequence
  Peptide Derived from Human Papillomavirus
LSTGFDIPIF

SEQ ID NO: 22284 - protein, 8 aa, Artificial Sequence
  Peptide Derived from Human Papillomavirus
LSTRPSTV

SEQ ID NO: 22285 - protein, 11 aa, Artificial Sequence
  Peptide Derived from Human Papillomavirus
LSTRPSTVSEA

SEQ ID NO: 22286 - protein, 8 aa, Artificial Sequence
  Peptide Derived from Human Papillomavirus
LTSRRNTV

SEQ ID NO: 22287 - protein, 10 aa, Artificial Sequence
  Peptide Derived from Human Papillomavirus
LTSRRNTVRY

SEQ ID NO: 22288 - protein, 8 aa, Artificial Sequence
  Peptide Derived from Human Papillomavirus
NAEESLYF

SEQ ID NO: 22289 - protein, 10 aa, Artificial Sequence
  Peptide Derived from Human Papillomavirus
NTTVPLSTGF

SEQ ID NO: 22290 - protein, 8 aa, Artificial Sequence
  Peptide Derived from Human Papillomavirus
NTVRYSRL

SEQ ID NO: 22291 - protein, 8 aa, Artificial Sequence
  Peptide Derived from Human Papillomavirus
PAETSGHL

SEQ ID NO: 22292 - protein, 9 aa, Artificial Sequence
  Peptide Derived from Human Papillomavirus
PAETSGHLL

SEQ ID NO: 22293 - protein, 10 aa, Artificial Sequence
  Peptide Derived from Human Papillomavirus
PAETSGHLLL

SEQ ID NO: 22294 - protein, 8 aa, Artificial Sequence
  Peptide Derived from Human Papillomavirus
PAGESIEM

SEQ ID NO: 22295 - protein, 11 aa, Artificial Sequence
  Peptide Derived from Human Papillomavirus
PAGESIEMQPL

SEQ ID NO: 22296 - protein, 9 aa, Artificial Sequence
  Peptide Derived from Human Papillomavirus
PAILDVTSV

SEQ ID NO: 22297 - protein, 10 aa, Artificial Sequence
  Peptide Derived from Human Papillomavirus
PALTSRRNTV

SEQ ID NO: 22298 - protein, 10 aa, Artificial Sequence
  Peptide Derived from Human Papillomavirus
PARLGLYSKA

SEQ ID NO: 22299 - protein, 11 aa, Artificial Sequence
  Peptide Derived from Human Papillomavirus
PATHNVSPSTA

SEQ ID NO: 22300 - protein, 8 aa, Artificial Sequence
  Peptide Derived from Human Papillomavirus
PAYETVNA

SEQ ID NO: 22301 - protein, 8 aa, Artificial Sequence
  Peptide Derived from Human Papillomavirus
PSDVIPKI

SEQ ID NO: 22302 - protein, 10 aa, Artificial Sequence
  Peptide Derived from Human Papillomavirus
PSTAVQSTSA

SEQ ID NO: 22303 - protein, 11 aa, Artificial Sequence
  Peptide Derived from Human Papillomavirus
PSTAVQSTSAV

SEQ ID NO: 22304 - protein, 9 aa, Artificial Sequence
  Peptide Derived from Human Papillomavirus
PSTVSEASI

SEQ ID NO: 22305 - protein, 11 aa, Artificial Sequence
  Peptide Derived from Human Papillomavirus
PSTVSEASIPI

SEQ ID NO: 22306 - protein, 10 aa, Artificial Sequence
  Peptide Derived from Human Papillomavirus
PSVLQPPTPA

SEQ ID NO: 22307 - protein, 10 aa, Artificial Sequence
  Peptide Derived from Human Papillomavirus
PTFLSAPKQL

SEQ ID NO: 22308 - protein, 11 aa, Artificial Sequence
  Peptide Derived from Human Papillomavirus
PTFLSAPKQLI

SEQ ID NO: 22309 - protein, 8 aa, Artificial Sequence
  Peptide Derived from Human Papillomavirus
PTFTDPSV

SEQ ID NO: 22310 - protein, 9 aa, Artificial Sequence
  Peptide Derived from Human Papillomavirus
PTFTDPSVL

SEQ ID NO: 22311 - protein, 8 aa, Artificial Sequence
  Peptide Derived from Human Papillomavirus
PTNTTVPL

SEQ ID NO: 22312 - protein, 10 aa, Artificial Sequence
  Peptide Derived from Human Papillomavirus
PTPAETSGHL

SEQ ID NO: 22313 - protein, 11 aa, Artificial Sequence
  Peptide Derived from Human Papillomavirus
PTPAETSGHLL

SEQ ID NO: 22314 - protein, 9 aa, Artificial Sequence
  Peptide Derived from Human Papillomavirus
PTQVFPFPL

SEQ ID NO: 22315 - protein, 10 aa, Artificial Sequence
  Peptide Derived from Human Papillomavirus
PTQVFPFPLA

SEQ ID NO: 22316 - protein, 8 aa, Artificial Sequence
  Peptide Derived from Human Papillomavirus
PTTPQVSI

SEQ ID NO: 22317 - protein, 9 aa, Artificial Sequence
  Peptide Derived from Human Papillomavirus
PTTPQVSIF

SEQ ID NO: 22318 - protein, 10 aa, Artificial Sequence
  Peptide Derived from Human Papillomavirus
PTTPQVSIFV

SEQ ID NO: 22319 - protein, 8 aa, Artificial Sequence
  Peptide Derived from Human Papillomavirus
PTTSGFDI

SEQ ID NO: 22320 - protein, 9 aa, Artificial Sequence
  Peptide Derived from Human Papillomavirus
PTTSGFDIA

SEQ ID NO: 22321 - protein, 8 aa, Artificial Sequence
  Peptide Derived from Human Papillomavirus
QSTSAVSA

SEQ ID NO: 22322 - protein, 9 aa, Artificial Sequence
  Peptide Derived from Human Papillomavirus
QSTSAVSAY

SEQ ID NO: 22323 - protein, 10 aa, Artificial Sequence
  Peptide Derived from Human Papillomavirus
QSTSAVSAYV

SEQ ID NO: 22324 - protein, 9 aa, Artificial Sequence
  Peptide Derived from Human Papillomavirus
QTLRTRSGA

SEQ ID NO: 22325 - protein, 11 aa, Artificial Sequence
  Peptide Derived from Human Papillomavirus
QTLRTRSGATI

SEQ ID NO: 22326 - protein, 8 aa, Artificial Sequence
  Peptide Derived from Human Papillomavirus
RASATQLY

SEQ ID NO: 22327 - protein, 8 aa, Artificial Sequence
  Peptide Derived from Human Papillomavirus
RSGATIGA

SEQ ID NO: 22328 - protein, 10 aa, Artificial Sequence
  Peptide Derived from Human Papillomavirus
RSGATIGARV

SEQ ID NO: 22329 - protein, 9 aa, Artificial Sequence
  Peptide Derived from Human Papillomavirus
RSTKRTKRA

SEQ ID NO: 22330 - protein, 11 aa, Artificial Sequence
  Peptide Derived from Human Papillomavirus
RSTKRTKRASA

SEQ ID NO: 22331 - protein, 10 aa, Artificial Sequence
  Peptide Derived from Human Papillomavirus
RTKRASATQL

SEQ ID NO: 22332 - protein, 11 aa, Artificial Sequence
  Peptide Derived from Human Papillomavirus
RTKRASATQLY

SEQ ID NO: 22333 - protein, 8 aa, Artificial Sequence
  Peptide Derived from Human Papillomavirus
RTRSGATI

SEQ ID NO: 22334 - protein, 10 aa, Artificial Sequence
  Peptide Derived from Human Papillomavirus
RTRSGATIGA

SEQ ID NO: 22335 - protein, 9 aa, Artificial Sequence
  Peptide Derived from Human Papillomavirus
SAPKQLITY

SEQ ID NO: 22336 - protein, 11 aa, Artificial Sequence
  Peptide Derived from Human Papillomavirus
SATQLYQTCKA

SEQ ID NO: 22337 - protein, 8 aa, Artificial Sequence
  Peptide Derived from Human Papillomavirus
SATTTSTL

SEQ ID NO: 22338 - protein, 10 aa, Artificial Sequence
  Peptide Derived from Human Papillomavirus
SAYVPTNTTV

SEQ ID NO: 22339 - protein, 10 aa, Artificial Sequence
  Peptide Derived from Human Papillomavirus
SSINPAGESI

SEQ ID NO: 22340 - protein, 8 aa, Artificial Sequence
  Peptide Derived from Human Papillomavirus
SSISTHNY

SEQ ID NO: 22341 - protein, 11 aa, Artificial Sequence
  Peptide Derived from Human Papillomavirus
SSISTHNYEEI

SEQ ID NO: 22342 - protein, 9 aa, Artificial Sequence
  Peptide Derived from Human Papillomavirus
SSSISTHNY

SEQ ID NO: 22343 - protein, 10 aa, Artificial Sequence
  Peptide Derived from Human Papillomavirus
SSSSISTHNY

SEQ ID NO: 22344 - protein, 8 aa, Artificial Sequence
  Peptide Derived from Human Papillomavirus
SSTPIPGV

SEQ ID NO: 22345 - protein, 9 aa, Artificial Sequence
  Peptide Derived from Human Papillomavirus
STAVQSTSA

SEQ ID NO: 22346 - protein, 10 aa, Artificial Sequence
  Peptide Derived from Human Papillomavirus
STAVQSTSAV

SEQ ID NO: 22347 - protein, 8 aa, Artificial Sequence
  Peptide Derived from Human Papillomavirus
STGFDIPI

SEQ ID NO: 22348 - protein, 9 aa, Artificial Sequence
  Peptide Derived from Human Papillomavirus
STGFDIPIF

SEQ ID NO: 22349 - protein, 8 aa, Artificial Sequence
  Peptide Derived from Human Papillomavirus
STHENPTF

SEQ ID NO: 22350 - protein, 8 aa, Artificial Sequence
  Peptide Derived from Human Papillomavirus
STHNYEEI

SEQ ID NO: 22351 - protein, 10 aa, Artificial Sequence
  Peptide Derived from Human Papillomavirus
STHNYEEIPM

SEQ ID NO: 22352 - protein, 8 aa, Artificial Sequence
  Peptide Derived from Human Papillomavirus
STKRTKRA

SEQ ID NO: 22353 - protein, 10 aa, Artificial Sequence
  Peptide Derived from Human Papillomavirus
STKRTKRASA

SEQ ID NO: 22354 - protein, 8 aa, Artificial Sequence
  Peptide Derived from Human Papillomavirus
STLNDGLY

SEQ ID NO: 22355 - protein, 10 aa, Artificial Sequence
  Peptide Derived from Human Papillomavirus
STLNDGLYDI

SEQ ID NO: 22356 - protein, 11 aa, Artificial Sequence
  Peptide Derived from Human Papillomavirus
STLNDGLYDIY

SEQ ID NO: 22357 - protein, 11 aa, Artificial Sequence
  Peptide Derived from Human Papillomavirus
STPIPGVRRPA

SEQ ID NO: 22358 - protein, 10 aa, Artificial Sequence
  Peptide Derived from Human Papillomavirus
STRPSTVSEA

SEQ ID NO: 22359 - protein, 8 aa, Artificial Sequence
  Peptide Derived from Human Papillomavirus
STSAVSAY

SEQ ID NO: 22360 - protein, 9 aa, Artificial Sequence
  Peptide Derived from Human Papillomavirus
STSAVSAYV

SEQ ID NO: 22361 - protein, 8 aa, Artificial Sequence
  Peptide Derived from Human Papillomavirus
STVSEASI

SEQ ID NO: 22362 - protein, 10 aa, Artificial Sequence
  Peptide Derived from Human Papillomavirus
STVSEASIPI

SEQ ID NO: 22363 - protein, 8 aa, Artificial Sequence
  Peptide Derived from Human Papillomavirus
TADTTPAI

SEQ ID NO: 22364 - protein, 9 aa, Artificial Sequence
  Peptide Derived from Human Papillomavirus
TADTTPAIL

SEQ ID NO: 22365 - protein, 11 aa, Artificial Sequence
  Peptide Derived from Human Papillomavirus
TADTTPAILDV

SEQ ID NO: 22366 - protein, 8 aa, Artificial Sequence
  Peptide Derived from Human Papillomavirus
TAVQSTSA

SEQ ID NO: 22367 - protein, 9 aa, Artificial Sequence
  Peptide Derived from Human Papillomavirus
TAVQSTSAV

SEQ ID NO: 22368 - protein, 11 aa, Artificial Sequence
  Peptide Derived from Human Papillomavirus
TAVQSTSAVSA

SEQ ID NO: 22369 - protein, 8 aa, Artificial Sequence
  Peptide Derived from Human Papillomavirus
TSAVSAYV

SEQ ID NO: 22370 - protein, 10 aa, Artificial Sequence
  Peptide Derived from Human Papillomavirus
TSGFDIATTA

SEQ ID NO: 22371 - protein, 11 aa, Artificial Sequence
  Peptide Derived from Human Papillomavirus
TSHNIAPDPDF

SEQ ID NO: 22372 - protein, 9 aa, Artificial Sequence
  Peptide Derived from Human Papillomavirus
TSRRNTVRY

SEQ ID NO: 22373 - protein, 9 aa, Artificial Sequence
  Peptide Derived from Human Papillomavirus
TSSTPIPGV

SEQ ID NO: 22374 - protein, 8 aa, Artificial Sequence
  Peptide Derived from Human Papillomavirus
TSTLNDGL

SEQ ID NO: 22375 - protein, 9 aa, Artificial Sequence
  Peptide Derived from Human Papillomavirus
TSTLNDGLY

SEQ ID NO: 22376 - protein, 11 aa, Artificial Sequence
  Peptide Derived from Human Papillomavirus
TSTLNDGLYDI

SEQ ID NO: 22377 - protein, 11 aa, Artificial Sequence
  Peptide Derived from Human Papillomavirus
TSVSTHENPTF

SEQ ID NO: 22378 - protein, 8 aa, Artificial Sequence
  Peptide Derived from Human Papillomavirus
TTADTTPA

SEQ ID NO: 22379 - protein, 9 aa, Artificial Sequence
  Peptide Derived from Human Papillomavirus
TTADTTPAI

SEQ ID NO: 22380 - protein, 10 aa, Artificial Sequence
  Peptide Derived from Human Papillomavirus
TTADTTPAIL

SEQ ID NO: 22381 - protein, 8 aa, Artificial Sequence
  Peptide Derived from Human Papillomavirus
TTIADQIL

SEQ ID NO: 22382 - protein, 10 aa, Artificial Sequence
  Peptide Derived from Human Papillomavirus
TTIADQILRY

SEQ ID NO: 22383 - protein, 8 aa, Artificial Sequence
  Peptide Derived from Human Papillomavirus
TTPAILDV

SEQ ID NO: 22384 - protein, 11 aa, Artificial Sequence
  Peptide Derived from Human Papillomavirus
TTPAILDVTSV

SEQ ID NO: 22385 - protein, 8 aa, Artificial Sequence
  Peptide Derived from Human Papillomavirus
TTPQVSIF

SEQ ID NO: 22386 - protein, 9 aa, Artificial Sequence
  Peptide Derived from Human Papillomavirus
TTPQVSIFV

SEQ ID NO: 22387 - protein, 8 aa, Artificial Sequence
  Peptide Derived from Human Papillomavirus
TTSGFDIA

SEQ ID NO: 22388 - protein, 11 aa, Artificial Sequence
  Peptide Derived from Human Papillomavirus
TTSGFDIATTA

SEQ ID NO: 22389 - protein, 9 aa, Artificial Sequence
  Peptide Derived from Human Papillomavirus
TTSTLNDGL

SEQ ID NO: 22390 - protein, 10 aa, Artificial Sequence
  Peptide Derived from Human Papillomavirus
TTSTLNDGLY

SEQ ID NO: 22391 - protein, 10 aa, Artificial Sequence
  Peptide Derived from Human Papillomavirus
TTTSTLNDGL

SEQ ID NO: 22392 - protein, 11 aa, Artificial Sequence
  Peptide Derived from Human Papillomavirus
TTTSTLNDGLY

SEQ ID NO: 22393 - protein, 9 aa, Artificial Sequence
  Peptide Derived from Human Papillomavirus
TTVPLSTGF

SEQ ID NO: 22394 - protein, 11 aa, Artificial Sequence
  Peptide Derived from Human Papillomavirus
TTVPLSTGFDI

SEQ ID NO: 22395 - protein, 11 aa, Artificial Sequence
  Peptide Derived from Human Papillomavirus
VSAYVPTNTTV

SEQ ID NO: 22396 - protein, 8 aa, Artificial Sequence
  Peptide Derived from Human Papillomavirus
VSEASIPI

SEQ ID NO: 22397 - protein, 9 aa, Artificial Sequence
  Peptide Derived from Human Papillomavirus
VSIDPVGPL

SEQ ID NO: 22398 - protein, 10 aa, Artificial Sequence
  Peptide Derived from Human Papillomavirus
VSIFVDGGDF

SEQ ID NO: 22399 - protein, 11 aa, Artificial Sequence
  Peptide Derived from Human Papillomavirus
VSIFVDGGDFY

SEQ ID NO: 22400 - protein, 9 aa, Artificial Sequence
  Peptide Derived from Human Papillomavirus
VSLVEESGI

SEQ ID NO: 22401 - protein, 10 aa, Artificial Sequence
  Peptide Derived from Human Papillomavirus
VSLVEESGIV

SEQ ID NO: 22402 - protein, 9 aa, Artificial Sequence
  Peptide Derived from Human Papillomavirus
VSTHENPTF

SEQ ID NO: 22403 - protein, 8 aa, Artificial Sequence
  Peptide Derived from Human Papillomavirus
VSTNNENI

SEQ ID NO: 22404 - protein, 8 aa, Artificial Sequence
  Peptide Derived from Human Papillomavirus
VSYFFTDV

SEQ ID NO: 22405 - protein, 10 aa, Artificial Sequence
  Peptide Derived from Human Papillomavirus
VSYFFTDVSV

SEQ ID NO: 22406 - protein, 11 aa, Artificial Sequence
  Peptide Derived from Human Papillomavirus
VSYFFTDVSVA

SEQ ID NO: 22407 - protein, 8 aa, Artificial Sequence
  Peptide Derived from Human Papillomavirus
YADTDFTV

SEQ ID NO: 22408 - protein, 8 aa, Artificial Sequence
  Peptide Derived from Human Papillomavirus
YSKATQQV

SEQ ID NO: 22409 - protein, 10 aa, Artificial Sequence
  Peptide Derived from Human Papillomavirus
YSKATQQVKV

SEQ ID NO: 22410 - protein, 11 aa, Artificial Sequence
  Peptide Derived from Human Papillomavirus
YSKATQQVKVI

SEQ ID NO: 22411 - protein, 10 aa, Artificial Sequence
  Peptide Derived from Human Papillomavirus
YSRLGNKQTL

SEQ ID NO: 22412 - protein, 11 aa, Artificial Sequence
  Peptide Derived from Human Papillomavirus
AAAFLKSNSQA

SEQ ID NO: 22413 - protein, 8 aa, Artificial Sequence
  Peptide Derived from Human Papillomavirus
AACSQSAA

SEQ ID NO: 22414 - protein, 11 aa, Artificial Sequence
  Peptide Derived from Human Papillomavirus
AACSQSAAEDV

SEQ ID NO: 22415 - protein, 9 aa, Artificial Sequence
  Peptide Derived from Human Papillomavirus
AAEDVVDRA

SEQ ID NO: 22416 - protein, 10 aa, Artificial Sequence
  Peptide Derived from Human Papillomavirus
AAEDVVDRAA

SEQ ID NO: 22417 - protein, 10 aa, Artificial Sequence
  Peptide Derived from Human Papillomavirus
AAFLKSNSQA

SEQ ID NO: 22418 - protein, 9 aa, Artificial Sequence
  Peptide Derived from Human Papillomavirus
AANPCRTSI

SEQ ID NO: 22419 - protein, 8 aa, Artificial Sequence
  Peptide Derived from Human Papillomavirus
AARALFNI

SEQ ID NO: 22420 - protein, 8 aa, Artificial Sequence
  Peptide Derived from Human Papillomavirus
CALKRKFA

SEQ ID NO: 22421 - protein, 9 aa, Artificial Sequence
  Peptide Derived from Human Papillomavirus
CALKRKFAA

SEQ ID NO: 22422 - protein, 9 aa, Artificial Sequence
  Peptide Derived from Human Papillomavirus
CALYWFRTA

SEQ ID NO: 22423 - protein, 10 aa, Artificial Sequence
  Peptide Derived from Human Papillomavirus
CALYWFRTAM

SEQ ID NO: 22424 - protein, 10 aa, Artificial Sequence
  Peptide Derived from Human Papillomavirus
CSAGENTRSL

SEQ ID NO: 22425 - protein, 8 aa, Artificial Sequence
  Peptide Derived from Human Papillomavirus
CSKNRLTV

SEQ ID NO: 22426 - protein, 9 aa, Artificial Sequence
  Peptide Derived from Human Papillomavirus
CSKNRLTVA

SEQ ID NO: 22427 - protein, 11 aa, Artificial Sequence
  Peptide Derived from Human Papillomavirus
CSKNRLTVAKL

SEQ ID NO: 22428 - protein, 9 aa, Artificial Sequence
  Peptide Derived from Human Papillomavirus
CSQSAAEDV

SEQ ID NO: 22429 - protein, 10 aa, Artificial Sequence
  Peptide Derived from Human Papillomavirus
CSQSAAEDVV

SEQ ID NO: 22430 - protein, 9 aa, Artificial Sequence
  Peptide Derived from Human Papillomavirus
CTDWCITGY

SEQ ID NO: 22431 - protein, 11 aa, Artificial Sequence
  Peptide Derived from Human Papillomavirus
CTDWCITGYGI

SEQ ID NO: 22432 - protein, 9 aa, Artificial Sequence
  Peptide Derived from Human Papillomavirus
CTGWFEVEA

SEQ ID NO: 22433 - protein, 10 aa, Artificial Sequence
  Peptide Derived from Human Papillomavirus
CTGWFEVEAV

SEQ ID NO: 22434 - protein, 11 aa, Artificial Sequence
  Peptide Derived from Human Papillomavirus
CTGWFEVEAVI

SEQ ID NO: 22435 - protein, 8 aa, Artificial Sequence
  Peptide Derived from Human Papillomavirus
CTYRKRKI

SEQ ID NO: 22436 - protein, 11 aa, Artificial Sequence
  Peptide Derived from Human Papillomavirus
CTYRKRKIDEL

SEQ ID NO: 22437 - protein, 10 aa, Artificial Sequence
  Peptide Derived from Human Papillomavirus
DAKIGMIDDV

SEQ ID NO: 22438 - protein, 8 aa, Artificial Sequence
  Peptide Derived from Human Papillomavirus
DSCENVTL

SEQ ID NO: 22439 - protein, 11 aa, Artificial Sequence
  Peptide Derived from Human Papillomavirus
DSCENVTLQEI

SEQ ID NO: 22440 - protein, 8 aa, Artificial Sequence
  Peptide Derived from Human Papillomavirus
DSDIAYYY

SEQ ID NO: 22441 - protein, 9 aa, Artificial Sequence
  Peptide Derived from Human Papillomavirus
DSDIAYYYA

SEQ ID NO: 22442 - protein, 11 aa, Artificial Sequence
  Peptide Derived from Human Papillomavirus
DSDIAYYYAQL

SEQ ID NO: 22443 - protein, 10 aa, Artificial Sequence
  Peptide Derived from Human Papillomavirus
DSEVSCETNV

SEQ ID NO: 22444 - protein, 9 aa, Artificial Sequence
  Peptide Derived from Human Papillomavirus
DSGTDLLEF

SEQ ID NO: 22445 - protein, 10 aa, Artificial Sequence
  Peptide Derived from Human Papillomavirus
DSGTDLLEFI

SEQ ID NO: 22446 - protein, 9 aa, Artificial Sequence
  Peptide Derived from Human Papillomavirus
DSGYGNTEV

SEQ ID NO: 22447 - protein, 9 aa, Artificial Sequence
  Peptide Derived from Human Papillomavirus
DSMENSIQA

SEQ ID NO: 22448 - protein, 8 aa, Artificial Sequence
  Peptide Derived from Human Papillomavirus
DSNSNAAA

SEQ ID NO: 22449 - protein, 9 aa, Artificial Sequence
  Peptide Derived from Human Papillomavirus
DSNSNAAAF

SEQ ID NO: 22450 - protein, 10 aa, Artificial Sequence
  Peptide Derived from Human Papillomavirus
DSNSNAAAFL

SEQ ID NO: 22451 - protein, 11 aa, Artificial Sequence
  Peptide Derived from Human Papillomavirus
DSRWPYLHSRL

SEQ ID NO: 22452 - protein, 8 aa, Artificial Sequence
  Peptide Derived from Human Papillomavirus
DTEAARAL

SEQ ID NO: 22453 - protein, 9 aa, Artificial Sequence
  Peptide Derived from Human Papillomavirus
DTEAARALF

SEQ ID NO: 22454 - protein, 11 aa, Artificial Sequence
  Peptide Derived from Human Papillomavirus
DTEAARALFNI

SEQ ID NO: 22455 - protein, 9 aa, Artificial Sequence
  Peptide Derived from Human Papillomavirus
EAARALFNI

SEQ ID NO: 22456 - protein, 8 aa, Artificial Sequence
  Peptide Derived from Human Papillomavirus
EAYGISFM

SEQ ID NO: 22457 - protein, 10 aa, Artificial Sequence
  Peptide Derived from Human Papillomavirus
EAYGISFMEL

SEQ ID NO: 22458 - protein, 11 aa, Artificial Sequence
  Peptide Derived from Human Papillomavirus
EAYGISFMELV

SEQ ID NO: 22459 - protein, 9 aa, Artificial Sequence
  Peptide Derived from Human Papillomavirus
ESQNGDTNL

SEQ ID NO: 22460 - protein, 11 aa, Artificial Sequence
  Peptide Derived from Human Papillomavirus
ESSGVGDDSEV

SEQ ID NO: 22461 - protein, 10 aa, Artificial Sequence
  Peptide Derived from Human Papillomavirus
ETADDSGTDL

SEQ ID NO: 22462 - protein, 11 aa, Artificial Sequence
  Peptide Derived from Human Papillomavirus
ETADDSGTDLL

SEQ ID NO: 22463 - protein, 11 aa, Artificial Sequence
  Peptide Derived from Human Papillomavirus
ETCMVIEPPKL

SEQ ID NO: 22464 - protein, 10 aa, Artificial Sequence
  Peptide Derived from Human Papillomavirus
ETNVDSCENV

SEQ ID NO: 22465 - protein, 9 aa, Artificial Sequence
  Peptide Derived from Human Papillomavirus
ETQQMVQQV

SEQ ID NO: 22466 - protein, 8 aa, Artificial Sequence
  Peptide Derived from Human Papillomavirus
FAACSQSA

SEQ ID NO: 22467 - protein, 9 aa, Artificial Sequence
  Peptide Derived from Human Papillomavirus
FAACSQSAA

SEQ ID NO: 22468 - protein, 8 aa, Artificial Sequence
  Peptide Derived from Human Papillomavirus
FSRTWCKL

SEQ ID NO: 22469 - protein, 10 aa, Artificial Sequence
  Peptide Derived from Human Papillomavirus
FSRTWCKLDL

SEQ ID NO: 22470 - protein, 11 aa, Artificial Sequence
  Peptide Derived from Human Papillomavirus
FSRTWCKLDLI

SEQ ID NO: 22471 - protein, 8 aa, Artificial Sequence
  Peptide Derived from Human Papillomavirus
FTAFLGAF

SEQ ID NO: 22472 - protein, 11 aa, Artificial Sequence
  Peptide Derived from Human Papillomavirus
FTAFLGAFKKF

SEQ ID NO: 22473 - protein, 10 aa, Artificial Sequence
  Peptide Derived from Human Papillomavirus
GAFKKFLKGI

SEQ ID NO: 22474 - protein, 9 aa, Artificial Sequence
  Peptide Derived from Human Papillomavirus
GAGMGCTGW

SEQ ID NO: 22475 - protein, 10 aa, Artificial Sequence
  Peptide Derived from Human Papillomavirus
GAGMGCTGWF

SEQ ID NO: 22476 - protein, 8 aa, Artificial Sequence
  Peptide Derived from Human Papillomavirus
GTDLLEFI

SEQ ID NO: 22477 - protein, 8 aa, Artificial Sequence
  Peptide Derived from Human Papillomavirus
GTDSRWPY

SEQ ID NO: 22478 - protein, 9 aa, Artificial Sequence
  Peptide Derived from Human Papillomavirus
GTDSRWPYL

SEQ ID NO: 22479 - protein, 10 aa, Artificial Sequence
  Peptide Derived from Human Papillomavirus
GTTPEWIDRL

SEQ ID NO: 22480 - protein, 8 aa, Artificial Sequence
  Peptide Derived from Human Papillomavirus
HSFNDNIF

SEQ ID NO: 22481 - protein, 10 aa, Artificial Sequence
  Peptide Derived from Human Papillomavirus
HSFNDNIFDL

SEQ ID NO: 22482 - protein, 10 aa, Artificial Sequence
  Peptide Derived from Human Papillomavirus
HSLYTHLQCL

SEQ ID NO: 22483 - protein, 9 aa, Artificial Sequence
  Peptide Derived from Human Papillomavirus
HSRLTVFEF

SEQ ID NO: 22484 - protein, 9 aa, Artificial Sequence
  Peptide Derived from Human Papillomavirus
HSSNTKANI

SEQ ID NO: 22485 - protein, 10 aa, Artificial Sequence
  Peptide Derived from Human Papillomavirus
HSSNTKANIL

SEQ ID NO: 22486 - protein, 11 aa, Artificial Sequence
  Peptide Derived from Human Papillomavirus
HSSNTKANILY

SEQ ID NO: 22487 - protein, 8 aa, Artificial Sequence
  Peptide Derived from Human Papillomavirus
IAYYYAQL

SEQ ID NO: 22488 - protein, 9 aa, Artificial Sequence
  Peptide Derived from Human Papillomavirus
IAYYYAQLA

SEQ ID NO: 22489 - protein, 10 aa, Artificial Sequence
  Peptide Derived from Human Papillomavirus
ISCVNSKSHF

SEQ ID NO: 22490 - protein, 11 aa, Artificial Sequence
  Peptide Derived from Human Papillomavirus
ISCVNSKSHFW

SEQ ID NO: 22491 - protein, 11 aa, Artificial Sequence
  Peptide Derived from Human Papillomavirus
ISDVQGTTPEW

SEQ ID NO: 22492 - protein, 9 aa, Artificial Sequence
  Peptide Derived from Human Papillomavirus
ISEDEDETA

SEQ ID NO: 22493 - protein, 10 aa, Artificial Sequence
  Peptide Derived from Human Papillomavirus
ISFMELVRPF

SEQ ID NO: 22494 - protein, 9 aa, Artificial Sequence
  Peptide Derived from Human Papillomavirus
ISIDVKHRA

SEQ ID NO: 22495 - protein, 10 aa, Artificial Sequence
  Peptide Derived from Human Papillomavirus
ISIDVKHRAL

SEQ ID NO: 22496 - protein, 11 aa, Artificial Sequence
  Peptide Derived from Human Papillomavirus
ISIDVKHRALV

SEQ ID NO: 22497 - protein, 9 aa, Artificial Sequence
  Peptide Derived from Human Papillomavirus
ISPSVAESL

SEQ ID NO: 22498 - protein, 11 aa, Artificial Sequence
  Peptide Derived from Human Papillomavirus
ISPSVAESLKV

SEQ ID NO: 22499 - protein, 8 aa, Artificial Sequence
  Peptide Derived from Human Papillomavirus
ISTFKCSA

SEQ ID NO: 22500 - protein, 9 aa, Artificial Sequence
  Peptide Derived from Human Papillomavirus
ISWTYIDDY

SEQ ID NO: 22501 - protein, 10 aa, Artificial Sequence
  Peptide Derived from Human Papillomavirus
ISWTYIDDYM

SEQ ID NO: 22502 - protein, 10 aa, Artificial Sequence
  Peptide Derived from Human Papillomavirus
ITGYGISPSV

SEQ ID NO: 22503 - protein, 11 aa, Artificial Sequence
  Peptide Derived from Human Papillomavirus
ITGYGISPSVA

SEQ ID NO: 22504 - protein, 9 aa, Artificial Sequence
  Peptide Derived from Human Papillomavirus
KAEKRKMSI

SEQ ID NO: 22505 - protein, 8 aa, Artificial Sequence
  Peptide Derived from Human Papillomavirus
KANILYKF

SEQ ID NO: 22506 - protein, 11 aa, Artificial Sequence
  Peptide Derived from Human Papillomavirus
KANILYKFKEA

SEQ ID NO: 22507 - protein, 10 aa, Artificial Sequence
  Peptide Derived from Human Papillomavirus
KSCMLICGPA

SEQ ID NO: 22508 - protein, 10 aa, Artificial Sequence
  Peptide Derived from Human Papillomavirus
KSDKTSCTDW

SEQ ID NO: 22509 - protein, 8 aa, Artificial Sequence
  Peptide Derived from Human Papillomavirus
KSFFSRTW

SEQ ID NO: 22510 - protein, 11 aa, Artificial Sequence
  Peptide Derived from Human Papillomavirus
KSFFSRTWCKL

SEQ ID NO: 22511 - protein, 9 aa, Artificial Sequence
  Peptide Derived from Human Papillomavirus
KSHFWLQPL

SEQ ID NO: 22512 - protein, 8 aa, Artificial Sequence
  Peptide Derived from Human Papillomavirus
KSNSQAKI

SEQ ID NO: 22513 - protein, 9 aa, Artificial Sequence
  Peptide Derived from Human Papillomavirus
KSNSQAKIV

SEQ ID NO: 22514 - protein, 8 aa, Artificial Sequence
  Peptide Derived from Human Papillomavirus
KSYFGMSL

SEQ ID NO: 22515 - protein, 9 aa, Artificial Sequence
  Peptide Derived from Human Papillomavirus
KSYFGMSLI

SEQ ID NO: 22516 - protein, 11 aa, Artificial Sequence
  Peptide Derived from Human Papillomavirus
KSYFGMSLIQF

SEQ ID NO: 22517 - protein, 8 aa, Artificial Sequence
  Peptide Derived from Human Papillomavirus
KTNDGGNW

SEQ ID NO: 22518 - protein, 11 aa, Artificial Sequence
  Peptide Derived from Human Papillomavirus
KTNDGGNWRPI

SEQ ID NO: 22519 - protein, 9 aa, Artificial Sequence
  Peptide Derived from Human Papillomavirus
KTSCTDWCI

SEQ ID NO: 22520 - protein, 8 aa, Artificial Sequence
  Peptide Derived from Human Papillomavirus
LADSNSNA

SEQ ID NO: 22521 - protein, 9 aa, Artificial Sequence
  Peptide Derived from Human Papillomavirus
LADSNSNAA

SEQ ID NO: 22522 - protein, 10 aa, Artificial Sequence
  Peptide Derived from Human Papillomavirus
LADSNSNAAA

SEQ ID NO: 22523 - protein, 11 aa, Artificial Sequence
  Peptide Derived from Human Papillomavirus
LADSNSNAAAF

SEQ ID NO: 22524 - protein, 8 aa, Artificial Sequence
  Peptide Derived from Human Papillomavirus
LSDAKIGM

SEQ ID NO: 22525 - protein, 9 aa, Artificial Sequence
  Peptide Derived from Human Papillomavirus
LSDAKIGMI

SEQ ID NO: 22526 - protein, 8 aa, Artificial Sequence
  Peptide Derived from Human Papillomavirus
LSEMVQWA

SEQ ID NO: 22527 - protein, 9 aa, Artificial Sequence
  Peptide Derived from Human Papillomavirus
LSEMVQWAY

SEQ ID NO: 22528 - protein, 8 aa, Artificial Sequence
  Peptide Derived from Human Papillomavirus
LSIPETCM

SEQ ID NO: 22529 - protein, 9 aa, Artificial Sequence
  Peptide Derived from Human Papillomavirus
LSIPETCMV

SEQ ID NO: 22530 - protein, 10 aa, Artificial Sequence
  Peptide Derived from Human Papillomavirus
LSIPETCMVI

SEQ ID NO: 22531 - protein, 8 aa, Artificial Sequence
  Peptide Derived from Human Papillomavirus
LTCDRGII

SEQ ID NO: 22532 - protein, 9 aa, Artificial Sequence
  Peptide Derived from Human Papillomavirus
LTCDRGIII

SEQ ID NO: 22533 - protein, 10 aa, Artificial Sequence
  Peptide Derived from Human Papillomavirus
LTCDRGIIIL

SEQ ID NO: 22534 - protein, 11 aa, Artificial Sequence
  Peptide Derived from Human Papillomavirus
LTCDRGIIILL

SEQ ID NO: 22535 - protein, 8 aa, Artificial Sequence
  Peptide Derived from Human Papillomavirus
LTDDSDIA

SEQ ID NO: 22536 - protein, 9 aa, Artificial Sequence
  Peptide Derived from Human Papillomavirus
LTDDSDIAY

SEQ ID NO: 22537 - protein, 10 aa, Artificial Sequence
  Peptide Derived from Human Papillomavirus
LTDDSDIAYY

SEQ ID NO: 22538 - protein, 11 aa, Artificial Sequence
  Peptide Derived from Human Papillomavirus
LTDDSDIAYYY

SEQ ID NO: 22539 - protein, 10 aa, Artificial Sequence
  Peptide Derived from Human Papillomavirus
LTVAKLMSNL

SEQ ID NO: 22540 - protein, 11 aa, Artificial Sequence
  Peptide Derived from Human Papillomavirus
LTVAKLMSNLL

SEQ ID NO: 22541 - protein, 10 aa, Artificial Sequence
  Peptide Derived from Human Papillomavirus
LTVFEFKNPF

SEQ ID NO: 22542 - protein, 8 aa, Artificial Sequence
  Peptide Derived from Human Papillomavirus
LTVLQHSF

SEQ ID NO: 22543 - protein, 10 aa, Artificial Sequence
  Peptide Derived from Human Papillomavirus
MADPEGTNGA

SEQ ID NO: 22544 - protein, 11 aa, Artificial Sequence
  Peptide Derived from Human Papillomavirus
MSLIQFLKGCV

SEQ ID NO: 22545 - protein, 8 aa, Artificial Sequence
  Peptide Derived from Human Papillomavirus
NAGTDSRW

SEQ ID NO: 22546 - protein, 10 aa, Artificial Sequence
  Peptide Derived from Human Papillomavirus
NAGTDSRWPY

SEQ ID NO: 22547 - protein, 11 aa, Artificial Sequence
  Peptide Derived from Human Papillomavirus
NAGTDSRWPYL

SEQ ID NO: 22548 - protein, 8 aa, Artificial Sequence
  Peptide Derived from Human Papillomavirus
NALDGNEI

SEQ ID NO: 22549 - protein, 10 aa, Artificial Sequence
  Peptide Derived from Human Papillomavirus
NALDGNEISI

SEQ ID NO: 22550 - protein, 10 aa, Artificial Sequence
  Peptide Derived from Human Papillomavirus
NAVCALKRKF

SEQ ID NO: 22551 - protein, 11 aa, Artificial Sequence
  Peptide Derived from Human Papillomavirus
NAVCALKRKFA

SEQ ID NO: 22552 - protein, 9 aa, Artificial Sequence
  Peptide Derived from Human Papillomavirus
NSIQADTEA

SEQ ID NO: 22553 - protein, 10 aa, Artificial Sequence
  Peptide Derived from Human Papillomavirus
NSIQADTEAA

SEQ ID NO: 22554 - protein, 8 aa, Artificial Sequence
  Peptide Derived from Human Papillomavirus
NSKSHFWL

SEQ ID NO: 22555 - protein, 11 aa, Artificial Sequence
  Peptide Derived from Human Papillomavirus
NSKSHFWLQPL

SEQ ID NO: 22556 - protein, 8 aa, Artificial Sequence
  Peptide Derived from Human Papillomavirus
NSNAAAFL

SEQ ID NO: 22557 - protein, 9 aa, Artificial Sequence
  Peptide Derived from Human Papillomavirus
NTEVETQQM

SEQ ID NO: 22558 - protein, 10 aa, Artificial Sequence
  Peptide Derived from Human Papillomavirus
NTEVETQQMV

SEQ ID NO: 22559 - protein, 9 aa, Artificial Sequence
  Peptide Derived from Human Papillomavirus
NTGKSYFGM

SEQ ID NO: 22560 - protein, 11 aa, Artificial Sequence
  Peptide Derived from Human Papillomavirus
NTGKSYFGMSL

SEQ ID NO: 22561 - protein, 8 aa, Artificial Sequence
  Peptide Derived from Human Papillomavirus
NTKANILY

SEQ ID NO: 22562 - protein, 10 aa, Artificial Sequence
  Peptide Derived from Human Papillomavirus
NTKANILYKF

SEQ ID NO: 22563 - protein, 10 aa, Artificial Sequence
  Peptide Derived from Human Papillomavirus
NTNAGTDSRW

SEQ ID NO: 22564 - protein, 8 aa, Artificial Sequence
  Peptide Derived from Human Papillomavirus
PANTGKSY

SEQ ID NO: 22565 - protein, 9 aa, Artificial Sequence
  Peptide Derived from Human Papillomavirus
PANTGKSYF

SEQ ID NO: 22566 - protein, 11 aa, Artificial Sequence
  Peptide Derived from Human Papillomavirus
PANTGKSYFGM

SEQ ID NO: 22567 - protein, 9 aa, Artificial Sequence
  Peptide Derived from Human Papillomavirus
PSVAESLKV

SEQ ID NO: 22568 - protein, 10 aa, Artificial Sequence
  Peptide Derived from Human Papillomavirus
PSVAESLKVL

SEQ ID NO: 22569 - protein, 11 aa, Artificial Sequence
  Peptide Derived from Human Papillomavirus
PSVAESLKVLI

SEQ ID NO: 22570 - protein, 9 aa, Artificial Sequence
  Peptide Derived from Human Papillomavirus
QADTEAARA

SEQ ID NO: 22571 - protein, 10 aa, Artificial Sequence
  Peptide Derived from Human Papillomavirus
QADTEAARAL

SEQ ID NO: 22572 - protein, 11 aa, Artificial Sequence
  Peptide Derived from Human Papillomavirus
QADTEAARALF

SEQ ID NO: 22573 - protein, 10 aa, Artificial Sequence
  Peptide Derived from Human Papillomavirus
QAKIVKDCGI

SEQ ID NO: 22574 - protein, 11 aa, Artificial Sequence
  Peptide Derived from Human Papillomavirus
QAKIVKDCGIM

SEQ ID NO: 22575 - protein, 8 aa, Artificial Sequence
  Peptide Derived from Human Papillomavirus
QSAAEDVV

SEQ ID NO: 22576 - protein, 11 aa, Artificial Sequence
  Peptide Derived from Human Papillomavirus
QSAAEDVVDRA

SEQ ID NO: 22577 - protein, 8 aa, Artificial Sequence
  Peptide Derived from Human Papillomavirus
QTCALYWF

SEQ ID NO: 22578 - protein, 11 aa, Artificial Sequence
  Peptide Derived from Human Papillomavirus
QTCALYWFRTA

SEQ ID NO: 22579 - protein, 10 aa, Artificial Sequence
  Peptide Derived from Human Papillomavirus
RAANPCRTSI

SEQ ID NO: 22580 - protein, 11 aa, Artificial Sequence
  Peptide Derived from Human Papillomavirus
RALVQLKCPPL

SEQ ID NO: 22581 - protein, 8 aa, Artificial Sequence
  Peptide Derived from Human Papillomavirus
RSQTCALY

SEQ ID NO: 22582 - protein, 9 aa, Artificial Sequence
  Peptide Derived from Human Papillomavirus
RSQTCALYW

SEQ ID NO: 22583 - protein, 10 aa, Artificial Sequence
  Peptide Derived from Human Papillomavirus
RSQTCALYWF

SEQ ID NO: 22584 - protein, 10 aa, Artificial Sequence
  Peptide Derived from Human Papillomavirus
RTAMSNISDV

SEQ ID NO: 22585 - protein, 8 aa, Artificial Sequence
  Peptide Derived from Human Papillomavirus
RTWCKLDL

SEQ ID NO: 22586 - protein, 9 aa, Artificial Sequence
  Peptide Derived from Human Papillomavirus
RTWCKLDLI

SEQ ID NO: 22587 - protein, 10 aa, Artificial Sequence
  Peptide Derived from Human Papillomavirus
SAAEDVVDRA

SEQ ID NO: 22588 - protein, 11 aa, Artificial Sequence
  Peptide Derived from Human Papillomavirus
SAAEDVVDRAA

SEQ ID NO: 22589 - protein, 9 aa, Artificial Sequence
  Peptide Derived from Human Papillomavirus
SAGENTRSL

SEQ ID NO: 22590 - protein, 10 aa, Artificial Sequence
  Peptide Derived from Human Papillomavirus
SSGVGDDSEV

SEQ ID NO: 22591 - protein, 8 aa, Artificial Sequence
  Peptide Derived from Human Papillomavirus
SSNTKANI

SEQ ID NO: 22592 - protein, 9 aa, Artificial Sequence
  Peptide Derived from Human Papillomavirus
SSNTKANIL

SEQ ID NO: 22593 - protein, 10 aa, Artificial Sequence
  Peptide Derived from Human Papillomavirus
SSNTKANILY

SEQ ID NO: 22594 - protein, 9 aa, Artificial Sequence
  Peptide Derived from Human Papillomavirus
TADDSGTDL

SEQ ID NO: 22595 - protein, 10 aa, Artificial Sequence
  Peptide Derived from Human Papillomavirus
TADDSGTDLL

SEQ ID NO: 22596 - protein, 10 aa, Artificial Sequence
  Peptide Derived from Human Papillomavirus
TAFLGAFKKF

SEQ ID NO: 22597 - protein, 11 aa, Artificial Sequence
  Peptide Derived from Human Papillomavirus
TAFLGAFKKFL

SEQ ID NO: 22598 - protein, 9 aa, Artificial Sequence
  Peptide Derived from Human Papillomavirus
TAMSNISDV

SEQ ID NO: 22599 - protein, 8 aa, Artificial Sequence
  Peptide Derived from Human Papillomavirus
TSCTDWCI

SEQ ID NO: 22600 - protein, 11 aa, Artificial Sequence
  Peptide Derived from Human Papillomavirus
TSCTDWCITGY

SEQ ID NO: 22601 - protein, 11 aa, Artificial Sequence
  Peptide Derived from Human Papillomavirus
TSINKNKECTY

SEQ ID NO: 22602 - protein, 9 aa, Artificial Sequence
  Peptide Derived from Human Papillomavirus
TTPEWIDRL

SEQ ID NO: 22603 - protein, 11 aa, Artificial Sequence
  Peptide Derived from Human Papillomavirus
TTPEWIDRLTV

SEQ ID NO: 22604 - protein, 8 aa, Artificial Sequence
  Peptide Derived from Human Papillomavirus
VAESLKVL

SEQ ID NO: 22605 - protein, 9 aa, Artificial Sequence
  Peptide Derived from Human Papillomavirus
VAESLKVLI

SEQ ID NO: 22606 - protein, 8 aa, Artificial Sequence
  Peptide Derived from Human Papillomavirus
VAKLMSNL

SEQ ID NO: 22607 - protein, 9 aa, Artificial Sequence
  Peptide Derived from Human Papillomavirus
VAKLMSNLL

SEQ ID NO: 22608 - protein, 11 aa, Artificial Sequence
  Peptide Derived from Human Papillomavirus
VAKLMSNLLSI

SEQ ID NO: 22609 - protein, 9 aa, Artificial Sequence
  Peptide Derived from Human Papillomavirus
VTLQEISNV

SEQ ID NO: 22610 - protein, 10 aa, Artificial Sequence
  Peptide Derived from Human Papillomavirus
VTLQEISNVL

SEQ ID NO: 22611 - protein, 8 aa, Artificial Sequence
  Peptide Derived from Human Papillomavirus
VTPISWTY

SEQ ID NO: 22612 - protein, 9 aa, Artificial Sequence
  Peptide Derived from Human Papillomavirus
VTPISWTYI

SEQ ID NO: 22613 - protein, 8 aa, Artificial Sequence
  Peptide Derived from Human Papillomavirus
WTYIDDYM

SEQ ID NO: 22614 - protein, 11 aa, Artificial Sequence
  Peptide Derived from Human Papillomavirus
WTYIDDYMRNA

SEQ ID NO: 22615 - protein, 8 aa, Artificial Sequence
  Peptide Derived from Human Papillomavirus
YAINDENW

SEQ ID NO: 22616 - protein, 11 aa, Artificial Sequence
  Peptide Derived from Human Papillomavirus
YAINDENWKSF

SEQ ID NO: 22617 - protein, 11 aa, Artificial Sequence
  Peptide Derived from Human Papillomavirus
YAQLADSNSNA

SEQ ID NO: 22618 - protein, 9 aa, Artificial Sequence
  Peptide Derived from Human Papillomavirus
AAAKRRRPA

SEQ ID NO: 22619 - protein, 8 aa, Artificial Sequence
  Peptide Derived from Human Papillomavirus
AAKRRRPA

SEQ ID NO: 22620 - protein, 9 aa, Artificial Sequence
  Peptide Derived from Human Papillomavirus
AAKYSKTQM

SEQ ID NO: 22621 - protein, 10 aa, Artificial Sequence
  Peptide Derived from Human Papillomavirus
AAKYSKTQMW

SEQ ID NO: 22622 - protein, 9 aa, Artificial Sequence
  Peptide Derived from Human Papillomavirus
ASKTKAFQV

SEQ ID NO: 22623 - protein, 10 aa, Artificial Sequence
  Peptide Derived from Human Papillomavirus
ASKTKAFQVI

SEQ ID NO: 22624 - protein, 11 aa, Artificial Sequence
  Peptide Derived from Human Papillomavirus
ATNCTNKQRTV

SEQ ID NO: 22625 - protein, 11 aa, Artificial Sequence
  Peptide Derived from Human Papillomavirus
CADPALDNRTA

SEQ ID NO: 22626 - protein, 10 aa, Artificial Sequence
  Peptide Derived from Human Papillomavirus
CALLYTAKQM

SEQ ID NO: 22627 - protein, 8 aa, Artificial Sequence
  Peptide Derived from Human Papillomavirus
CSSNVAPI

SEQ ID NO: 22628 - protein, 9 aa, Artificial Sequence
  Peptide Derived from Human Papillomavirus
CSSNVAPIV

SEQ ID NO: 22629 - protein, 11 aa, Artificial Sequence
  Peptide Derived from Human Papillomavirus
CSSNVAPIVHL

SEQ ID NO: 22630 - protein, 8 aa, Artificial Sequence
  Peptide Derived from Human Papillomavirus
CTMVTGKV

SEQ ID NO: 22631 - protein, 10 aa, Artificial Sequence
  Peptide Derived from Human Papillomavirus
CTMVTGKVDY

SEQ ID NO: 22632 - protein, 11 aa, Artificial Sequence
  Peptide Derived from Human Papillomavirus
CTMVTGKVDYI

SEQ ID NO: 22633 - protein, 8 aa, Artificial Sequence
  Peptide Derived from Human Papillomavirus
CTNKQRTV

SEQ ID NO: 22634 - protein, 10 aa, Artificial Sequence
  Peptide Derived from Human Papillomavirus
DAAKYSKTQM

SEQ ID NO: 22635 - protein, 11 aa, Artificial Sequence
  Peptide Derived from Human Papillomavirus
DAAKYSKTQMW

SEQ ID NO: 22636 - protein, 9 aa, Artificial Sequence
  Peptide Derived from Human Papillomavirus
DTAQPLTKL

SEQ ID NO: 22637 - protein, 10 aa, Artificial Sequence
  Peptide Derived from Human Papillomavirus
DTAQPLTKLF

SEQ ID NO: 22638 - protein, 10 aa, Artificial Sequence
  Peptide Derived from Human Papillomavirus
DTCTMVTGKV

SEQ ID NO: 22639 - protein, 9 aa, Artificial Sequence
  Peptide Derived from Human Papillomavirus
DTTDTAQPL

SEQ ID NO: 22640 - protein, 11 aa, Artificial Sequence
  Peptide Derived from Human Papillomavirus
EADKTDLPSQI

SEQ ID NO: 22641 - protein, 8 aa, Artificial Sequence
  Peptide Derived from Human Papillomavirus
ESNSLKCL

SEQ ID NO: 22642 - protein, 10 aa, Artificial Sequence
  Peptide Derived from Human Papillomavirus
ESNSLKCLRY

SEQ ID NO: 22643 - protein, 8 aa, Artificial Sequence
  Peptide Derived from Human Papillomavirus
ETLSKSQY

SEQ ID NO: 22644 - protein, 8 aa, Artificial Sequence
  Peptide Derived from Human Papillomavirus
FSHLCHQV

SEQ ID NO: 22645 - protein, 9 aa, Artificial Sequence
  Peptide Derived from Human Papillomavirus
FSHLCHQVV

SEQ ID NO: 22646 - protein, 9 aa, Artificial Sequence
  Peptide Derived from Human Papillomavirus
GTVKIPPTV

SEQ ID NO: 22647 - protein, 11 aa, Artificial Sequence
  Peptide Derived from Human Papillomavirus
GTVKIPPTVQI

SEQ ID NO: 22648 - protein, 8 aa, Artificial Sequence
  Peptide Derived from Human Papillomavirus
ISARLNAV

SEQ ID NO: 22649 - protein, 8 aa, Artificial Sequence
  Peptide Derived from Human Papillomavirus
ISTGFMTL

SEQ ID NO: 22650 - protein, 9 aa, Artificial Sequence
  Peptide Derived from Human Papillomavirus
ISTTETADI

SEQ ID NO: 22651 - protein, 8 aa, Artificial Sequence
  Peptide Derived from Human Papillomavirus
KAFQVIEL

SEQ ID NO: 22652 - protein, 10 aa, Artificial Sequence
  Peptide Derived from Human Papillomavirus
KAFQVIELQM

SEQ ID NO: 22653 - protein, 11 aa, Artificial Sequence
  Peptide Derived from Human Papillomavirus
KAFQVIELQMA

SEQ ID NO: 22654 - protein, 9 aa, Artificial Sequence
  Peptide Derived from Human Papillomavirus
KSQYSTSQW

SEQ ID NO: 22655 - protein, 11 aa, Artificial Sequence
  Peptide Derived from Human Papillomavirus
KSQYSTSQWTL

SEQ ID NO: 22656 - protein, 8 aa, Artificial Sequence
  Peptide Derived from Human Papillomavirus
KTDLPSQI

SEQ ID NO: 22657 - protein, 11 aa, Artificial Sequence
  Peptide Derived from Human Papillomavirus
KTDLPSQIEHW

SEQ ID NO: 22658 - protein, 8 aa, Artificial Sequence
  Peptide Derived from Human Papillomavirus
KTKAFQVI

SEQ ID NO: 22659 - protein, 10 aa, Artificial Sequence
  Peptide Derived from Human Papillomavirus
KTKAFQVIEL

SEQ ID NO: 22660 - protein, 9 aa, Artificial Sequence
  Peptide Derived from Human Papillomavirus
KTQMWEVHV

SEQ ID NO: 22661 - protein, 8 aa, Artificial Sequence
  Peptide Derived from Human Papillomavirus
LASKTKAF

SEQ ID NO: 22662 - protein, 10 aa, Artificial Sequence
  Peptide Derived from Human Papillomavirus
LASKTKAFQV

SEQ ID NO: 22663 - protein, 11 aa, Artificial Sequence
  Peptide Derived from Human Papillomavirus
LASKTKAFQVI

SEQ ID NO: 22664 - protein, 11 aa, Artificial Sequence
  Peptide Derived from Human Papillomavirus
LSKSQYSTSQW

SEQ ID NO: 22665 - protein, 10 aa, Artificial Sequence
  Peptide Derived from Human Papillomavirus
LTKLFCADPA

SEQ ID NO: 22666 - protein, 11 aa, Artificial Sequence
  Peptide Derived from Human Papillomavirus
LTKLFCADPAL

SEQ ID NO: 22667 - protein, 11 aa, Artificial Sequence
  Peptide Derived from Human Papillomavirus
MALETLSKSQY

SEQ ID NO: 22668 - protein, 8 aa, Artificial Sequence
  Peptide Derived from Human Papillomavirus
NAVQEKIL

SEQ ID NO: 22669 - protein, 10 aa, Artificial Sequence
  Peptide Derived from Human Papillomavirus
NAVQEKILDL

SEQ ID NO: 22670 - protein, 11 aa, Artificial Sequence
  Peptide Derived from Human Papillomavirus
NAVQEKILDLY

SEQ ID NO: 22671 - protein, 9 aa, Artificial Sequence
  Peptide Derived from Human Papillomavirus
NSKNGIVTV

SEQ ID NO: 22672 - protein, 11 aa, Artificial Sequence
  Peptide Derived from Human Papillomavirus
NSKNGIVTVTF

SEQ ID NO: 22673 - protein, 8 aa, Artificial Sequence
  Peptide Derived from Human Papillomavirus
NSLKCLRY

SEQ ID NO: 22674 - protein, 10 aa, Artificial Sequence
  Peptide Derived from Human Papillomavirus
NSLKCLRYRL

SEQ ID NO: 22675 - protein, 8 aa, Artificial Sequence
  Peptide Derived from Human Papillomavirus
NTMDYTNW

SEQ ID NO: 22676 - protein, 11 aa, Artificial Sequence
  Peptide Derived from Human Papillomavirus
NTMDYTNWGEI

SEQ ID NO: 22677 - protein, 8 aa, Artificial Sequence
  Peptide Derived from Human Papillomavirus
PADTTDTA

SEQ ID NO: 22678 - protein, 11 aa, Artificial Sequence
  Peptide Derived from Human Papillomavirus
PADTTDTAQPL

SEQ ID NO: 22679 - protein, 8 aa, Artificial Sequence
  Peptide Derived from Human Papillomavirus
PALDNRTA

SEQ ID NO: 22680 - protein, 11 aa, Artificial Sequence
  Peptide Derived from Human Papillomavirus
PALDNRTARTA

SEQ ID NO: 22681 - protein, 10 aa, Artificial Sequence
  Peptide Derived from Human Papillomavirus
PSLLASKTKA

SEQ ID NO: 22682 - protein, 11 aa, Artificial Sequence
  Peptide Derived from Human Papillomavirus
PSLLASKTKAF

SEQ ID NO: 22683 - protein, 9 aa, Artificial Sequence
  Peptide Derived from Human Papillomavirus
PSQIEHWKL

SEQ ID NO: 22684 - protein, 10 aa, Artificial Sequence
  Peptide Derived from Human Papillomavirus
PSQIEHWKLI

SEQ ID NO: 22685 - protein, 9 aa, Artificial Sequence
  Peptide Derived from Human Papillomavirus
PTSISSNQI

SEQ ID NO: 22686 - protein, 9 aa, Artificial Sequence
  Peptide Derived from Human Papillomavirus
PTVQISTGF

SEQ ID NO: 22687 - protein, 10 aa, Artificial Sequence
  Peptide Derived from Human Papillomavirus
PTVQISTGFM

SEQ ID NO: 22688 - protein, 10 aa, Artificial Sequence
  Peptide Derived from Human Papillomavirus
QAAAKRRRPA

SEQ ID NO: 22689 - protein, 11 aa, Artificial Sequence
  Peptide Derived from Human Papillomavirus
QTDNDNRPPQA

SEQ ID NO: 22690 - protein, 8 aa, Artificial Sequence
  Peptide Derived from Human Papillomavirus
QTSLEVWL

SEQ ID NO: 22691 - protein, 8 aa, Artificial Sequence
  Peptide Derived from Human Papillomavirus
RTVCSSNV

SEQ ID NO: 22692 - protein, 9 aa, Artificial Sequence
  Peptide Derived from Human Papillomavirus
RTVCSSNVA

SEQ ID NO: 22693 - protein, 11 aa, Artificial Sequence
  Peptide Derived from Human Papillomavirus
RTVCSSNVAPI

SEQ ID NO: 22694 - protein, 11 aa, Artificial Sequence
  Peptide Derived from Human Papillomavirus
SARLNAVQEKI

SEQ ID NO: 22695 - protein, 9 aa, Artificial Sequence
  Peptide Derived from Human Papillomavirus
SSMSSTWHW

SEQ ID NO: 22696 - protein, 11 aa, Artificial Sequence
  Peptide Derived from Human Papillomavirus
SSNQISTTETA

SEQ ID NO: 22697 - protein, 8 aa, Artificial Sequence
  Peptide Derived from Human Papillomavirus
SSNVAPIV

SEQ ID NO: 22698 - protein, 10 aa, Artificial Sequence
  Peptide Derived from Human Papillomavirus
SSNVAPIVHL

SEQ ID NO: 22699 - protein, 8 aa, Artificial Sequence
  Peptide Derived from Human Papillomavirus
STTETADI

SEQ ID NO: 22700 - protein, 10 aa, Artificial Sequence
  Peptide Derived from Human Papillomavirus
TAKQMGFSHL

SEQ ID NO: 22701 - protein, 8 aa, Artificial Sequence
  Peptide Derived from Human Papillomavirus
TAQPLTKL

SEQ ID NO: 22702 - protein, 9 aa, Artificial Sequence
  Peptide Derived from Human Papillomavirus
TAQPLTKLF

SEQ ID NO: 22703 - protein, 11 aa, Artificial Sequence
  Peptide Derived from Human Papillomavirus
TAQPLTKLFCA

SEQ ID NO: 22704 - protein, 11 aa, Artificial Sequence
  Peptide Derived from Human Papillomavirus
TSDNKNSKNGI

SEQ ID NO: 22705 - protein, 8 aa, Artificial Sequence
  Peptide Derived from Human Papillomavirus
TSISSNQI

SEQ ID NO: 22706 - protein, 11 aa, Artificial Sequence
  Peptide Derived from Human Papillomavirus
TSQWTLQQTSL

SEQ ID NO: 22707 - protein, 8 aa, Artificial Sequence
  Peptide Derived from Human Papillomavirus
TTDTAQPL

SEQ ID NO: 22708 - protein, 11 aa, Artificial Sequence
  Peptide Derived from Human Papillomavirus
TTDTAQPLTKL

SEQ ID NO: 22709 - protein, 8 aa, Artificial Sequence
  Peptide Derived from Human Papillomavirus
VTEQQQQM

SEQ ID NO: 22710 - protein, 9 aa, Artificial Sequence
  Peptide Derived from Human Papillomavirus
VTEQQQQMF

SEQ ID NO: 22711 - protein, 10 aa, Artificial Sequence
  Peptide Derived from Human Papillomavirus
VTEQQQQMFL

SEQ ID NO: 22712 - protein, 11 aa, Artificial Sequence
  Peptide Derived from Human Papillomavirus
VTFVTEQQQQM

SEQ ID NO: 22713 - protein, 8 aa, Artificial Sequence
  Peptide Derived from Human Papillomavirus
VTGKVDYI

SEQ ID NO: 22714 - protein, 10 aa, Artificial Sequence
  Peptide Derived from Human Papillomavirus
VTGKVDYIGM

SEQ ID NO: 22715 - protein, 11 aa, Artificial Sequence
  Peptide Derived from Human Papillomavirus
VTGKVDYIGMY

SEQ ID NO: 22716 - protein, 8 aa, Artificial Sequence
  Peptide Derived from Human Papillomavirus
WTLQQTSL

SEQ ID NO: 22717 - protein, 10 aa, Artificial Sequence
  Peptide Derived from Human Papillomavirus
WTLQQTSLEV

SEQ ID NO: 22718 - protein, 11 aa, Artificial Sequence
  Peptide Derived from Human Papillomavirus
WTLQQTSLEVW

SEQ ID NO: 22719 - protein, 9 aa, Artificial Sequence
  Peptide Derived from Human Papillomavirus
YSKTQMWEV

SEQ ID NO: 22720 - protein, 11 aa, Artificial Sequence
  Peptide Derived from Human Papillomavirus
YSKTQMWEVHV

SEQ ID NO: 22721 - protein, 8 aa, Artificial Sequence
  Peptide Derived from Human Papillomavirus
YSSMSSTW

SEQ ID NO: 22722 - protein, 10 aa, Artificial Sequence
  Peptide Derived from Human Papillomavirus
YSSMSSTWHW

SEQ ID NO: 22723 - protein, 8 aa, Artificial Sequence
  Peptide Derived from Human Papillomavirus
YSTSQWTL

SEQ ID NO: 22724 - protein, 8 aa, Artificial Sequence
  Peptide Derived from Human Papillomavirus
YTAKQMGF

SEQ ID NO: 22725 - protein, 11 aa, Artificial Sequence
  Peptide Derived from Human Papillomavirus
YTAKQMGFSHL

SEQ ID NO: 22726 - protein, 8 aa, Artificial Sequence
  Peptide Derived from Human Papillomavirus
YTNWGEIY

SEQ ID NO: 22727 - protein, 9 aa, Artificial Sequence
  Peptide Derived from Human Papillomavirus
YTNWGEIYI

SEQ ID NO: 22728 - protein, 10 aa, Artificial Sequence
  Peptide Derived from Human Papillomavirus
YTNWGEIYII

SEQ ID NO: 22729 - protein, 8 aa, Artificial Sequence
  Peptide Derived from Human Papillomavirus
GSPLKIFF

SEQ ID NO: 22730 - protein, 10 aa, Artificial Sequence
  Peptide Derived from Human Papillomavirus
GSPLKIFFCY

SEQ ID NO: 22731 - protein, 11 aa, Artificial Sequence
  Peptide Derived from Human Papillomavirus
GSPLKIFFCYL

SEQ ID NO: 22732 - protein, 8 aa, Artificial Sequence
  Peptide Derived from Human Papillomavirus
ISTYAWLL

SEQ ID NO: 22733 - protein, 9 aa, Artificial Sequence
  Peptide Derived from Human Papillomavirus
ISTYAWLLV

SEQ ID NO: 22734 - protein, 10 aa, Artificial Sequence
  Peptide Derived from Human Papillomavirus
ISTYAWLLVL

SEQ ID NO: 22735 - protein, 11 aa, Artificial Sequence
  Peptide Derived from Human Papillomavirus
ISTYAWLLVLV

SEQ ID NO: 22736 - protein, 8 aa, Artificial Sequence
  Peptide Derived from Human Papillomavirus
LSISTYAW

SEQ ID NO: 22737 - protein, 9 aa, Artificial Sequence
  Peptide Derived from Human Papillomavirus
LSISTYAWL

SEQ ID NO: 22738 - protein, 10 aa, Artificial Sequence
  Peptide Derived from Human Papillomavirus
LSISTYAWLL

SEQ ID NO: 22739 - protein, 11 aa, Artificial Sequence
  Peptide Derived from Human Papillomavirus
LSISTYAWLLV

SEQ ID NO: 22740 - protein, 8 aa, Artificial Sequence
  Peptide Derived from Human Papillomavirus
LSLLLRPL

SEQ ID NO: 22741 - protein, 9 aa, Artificial Sequence
  Peptide Derived from Human Papillomavirus
LSLLLRPLI

SEQ ID NO: 22742 - protein, 10 aa, Artificial Sequence
  Peptide Derived from Human Papillomavirus
LSLLLRPLIL

SEQ ID NO: 22743 - protein, 8 aa, Artificial Sequence
  Peptide Derived from Human Papillomavirus
STYAWLLV

SEQ ID NO: 22744 - protein, 9 aa, Artificial Sequence
  Peptide Derived from Human Papillomavirus
STYAWLLVL

SEQ ID NO: 22745 - protein, 10 aa, Artificial Sequence
  Peptide Derived from Human Papillomavirus
STYAWLLVLV

SEQ ID NO: 22746 - protein, 11 aa, Artificial Sequence
  Peptide Derived from Human Papillomavirus
STYAWLLVLVL

SEQ ID NO: 22747 - protein, 8 aa, Artificial Sequence
  Peptide Derived from Human Papillomavirus
YAWLLVLV

SEQ ID NO: 22748 - protein, 9 aa, Artificial Sequence
  Peptide Derived from Human Papillomavirus
YAWLLVLVL

SEQ ID NO: 22749 - protein, 10 aa, Artificial Sequence
  Peptide Derived from Human Papillomavirus
YAWLLVLVLL

SEQ ID NO: 22750 - protein, 11 aa, Artificial Sequence
  Peptide Derived from Human Papillomavirus
YAWLLVLVLLL

SEQ ID NO: 22751 - protein, 9 aa, Artificial Sequence
  Peptide Derived from Human Papillomavirus
DTEEKPRTL

SEQ ID NO: 22752 - protein, 9 aa, Artificial Sequence
  Peptide Derived from Human Papillomavirus
ETTIHNIEL

SEQ ID NO: 22753 - protein, 8 aa, Artificial Sequence
  Peptide Derived from Human Papillomavirus
FADLTVVY

SEQ ID NO: 22754 - protein, 8 aa, Artificial Sequence
  Peptide Derived from Human Papillomavirus
FAFADLTV

SEQ ID NO: 22755 - protein, 9 aa, Artificial Sequence
  Peptide Derived from Human Papillomavirus
FAFADLTVV

SEQ ID NO: 22756 - protein, 10 aa, Artificial Sequence
  Peptide Derived from Human Papillomavirus
FAFADLTVVY

SEQ ID NO: 22757 - protein, 9 aa, Artificial Sequence
  Peptide Derived from Human Papillomavirus
ISEYRHYNY

SEQ ID NO: 22758 - protein, 11 aa, Artificial Sequence
  Peptide Derived from Human Papillomavirus
ISEYRHYNYSV

SEQ ID NO: 22759 - protein, 10 aa, Artificial Sequence
  Peptide Derived from Human Papillomavirus
ISGRWAGRCA

SEQ ID NO: 22760 - protein, 11 aa, Artificial Sequence
  Peptide Derived from Human Papillomavirus
ISGRWAGRCAA

SEQ ID NO: 22761 - protein, 10 aa, Artificial Sequence
  Peptide Derived from Human Papillomavirus
LSKISEYRHY

SEQ ID NO: 22762 - protein, 11 aa, Artificial Sequence
  Peptide Derived from Human Papillomavirus
LTVVYREGNPF

SEQ ID NO: 22763 - protein, 11 aa, Artificial Sequence
  Peptide Derived from Human Papillomavirus
NTLEQTVKKPL

SEQ ID NO: 22764 - protein, 10 aa, Artificial Sequence
  Peptide Derived from Human Papillomavirus
QALETTIHNI

SEQ ID NO: 22765 - protein, 10 aa, Artificial Sequence
  Peptide Derived from Human Papillomavirus
QTVKKPLNEI

SEQ ID NO: 22766 - protein, 11 aa, Artificial Sequence
  Peptide Derived from Human Papillomavirus
QTVKKPLNEIL

SEQ ID NO: 22767 - protein, 8 aa, Artificial Sequence
  Peptide Derived from Human Papillomavirus
RSEVYDFA

SEQ ID NO: 22768 - protein, 9 aa, Artificial Sequence
  Peptide Derived from Human Papillomavirus
RSEVYDFAF

SEQ ID NO: 22769 - protein, 10 aa, Artificial Sequence
  Peptide Derived from Human Papillomavirus
RSEVYDFAFA

SEQ ID NO: 22770 - protein, 8 aa, Artificial Sequence
  Peptide Derived from Human Papillomavirus
RSRRRETA

SEQ ID NO: 22771 - protein, 9 aa, Artificial Sequence
  Peptide Derived from Human Papillomavirus
RSRRRETAL

SEQ ID NO: 22772 - protein, 9 aa, Artificial Sequence
  Peptide Derived from Human Papillomavirus
RTLHDLCQA

SEQ ID NO: 22773 - protein, 10 aa, Artificial Sequence
  Peptide Derived from Human Papillomavirus
RTLHDLCQAL

SEQ ID NO: 22774 - protein, 8 aa, Artificial Sequence
  Peptide Derived from Human Papillomavirus
TTIHNIEL

SEQ ID NO: 22775 - protein, 11 aa, Artificial Sequence
  Peptide Derived from Human Papillomavirus
TTIHNIELQCV

SEQ ID NO: 22776 - protein, 9 aa, Artificial Sequence
  Peptide Derived from Human Papillomavirus
WAGRCAACW

SEQ ID NO: 22777 - protein, 8 aa, Artificial Sequence
  Peptide Derived from Human Papillomavirus
YSVYGNTL

SEQ ID NO: 22778 - protein, 10 aa, Artificial Sequence
  Peptide Derived from Human Papillomavirus
ASDLRTIQQL

SEQ ID NO: 22779 - protein, 11 aa, Artificial Sequence
  Peptide Derived from Human Papillomavirus
ASDLRTIQQLL

SEQ ID NO: 22780 - protein, 8 aa, Artificial Sequence
  Peptide Derived from Human Papillomavirus
ATADYYIV

SEQ ID NO: 22781 - protein, 9 aa, Artificial Sequence
  Peptide Derived from Human Papillomavirus
DSSDEDEGL

SEQ ID NO: 22782 - protein, 11 aa, Artificial Sequence
  Peptide Derived from Human Papillomavirus
GTVNIVCPTCA

SEQ ID NO: 22783 - protein, 9 aa, Artificial Sequence
  Peptide Derived from Human Papillomavirus
HTCNTTVRL

SEQ ID NO: 22784 - protein, 11 aa, Artificial Sequence
  Peptide Derived from Human Papillomavirus
HTCNTTVRLCV

SEQ ID NO: 22785 - protein, 11 aa, Artificial Sequence
  Peptide Derived from Human Papillomavirus
LSDSSDEDEGL

SEQ ID NO: 22786 - protein, 10 aa, Artificial Sequence
  Peptide Derived from Human Papillomavirus
NSTASDLRTI

SEQ ID NO: 22787 - protein, 8 aa, Artificial Sequence
  Peptide Derived from Human Papillomavirus
NTTVRLCV

SEQ ID NO: 22788 - protein, 8 aa, Artificial Sequence
  Peptide Derived from Human Papillomavirus
PATADYYI

SEQ ID NO: 22789 - protein, 9 aa, Artificial Sequence
  Peptide Derived from Human Papillomavirus
PATADYYIV

SEQ ID NO: 22790 - protein, 10 aa, Artificial Sequence
  Peptide Derived from Human Papillomavirus
PTDLYCYEQL

SEQ ID NO: 22791 - protein, 8 aa, Artificial Sequence
  Peptide Derived from Human Papillomavirus
PTLKEYVL

SEQ ID NO: 22792 - protein, 10 aa, Artificial Sequence
  Peptide Derived from Human Papillomavirus
PTLKEYVLDL

SEQ ID NO: 22793 - protein, 11 aa, Artificial Sequence
  Peptide Derived from Human Papillomavirus
PTLKEYVLDLY

SEQ ID NO: 22794 - protein, 9 aa, Artificial Sequence
  Peptide Derived from Human Papillomavirus
QAQPATADY

SEQ ID NO: 22795 - protein, 10 aa, Artificial Sequence
  Peptide Derived from Human Papillomavirus
QAQPATADYY

SEQ ID NO: 22796 - protein, 11 aa, Artificial Sequence
  Peptide Derived from Human Papillomavirus
QAQPATADYYI

SEQ ID NO: 22797 - protein, 8 aa, Artificial Sequence
  Peptide Derived from Human Papillomavirus
RTIQQLLM

SEQ ID NO: 22798 - protein, 11 aa, Artificial Sequence
  Peptide Derived from Human Papillomavirus
RTIQQLLMGTV

SEQ ID NO: 22799 - protein, 8 aa, Artificial Sequence
  Peptide Derived from Human Papillomavirus
SSDEDEGL

SEQ ID NO: 22800 - protein, 9 aa, Artificial Sequence
  Peptide Derived from Human Papillomavirus
STASDLRTI

SEQ ID NO: 22801 - protein, 8 aa, Artificial Sequence
  Peptide Derived from Human Papillomavirus
TASDLRTI

SEQ ID NO: 22802 - protein, 11 aa, Artificial Sequence
  Peptide Derived from Human Papillomavirus
TASDLRTIQQL

SEQ ID NO: 22803 - protein, 11 aa, Artificial Sequence
  Peptide Derived from Human Papillomavirus
TTVRLCVNSTA

SEQ ID NO: 22804 - protein, 11 aa, Artificial Sequence
  Peptide Derived from Human Papillomavirus
VTCCHTCNTTV

SEQ ID NO: 22805 - protein, 10 aa, Artificial Sequence
  Peptide Derived from Human Papillomavirus
AAPANDCPPL

SEQ ID NO: 22806 - protein, 11 aa, Artificial Sequence
  Peptide Derived from Human Papillomavirus
AAPTSTRTSSA

SEQ ID NO: 22807 - protein, 8 aa, Artificial Sequence
  Peptide Derived from Human Papillomavirus
ASIQSSAF

SEQ ID NO: 22808 - protein, 9 aa, Artificial Sequence
  Peptide Derived from Human Papillomavirus
ASIQSSAFF

SEQ ID NO: 22809 - protein, 9 aa, Artificial Sequence
  Peptide Derived from Human Papillomavirus
ASLQDTYRF

SEQ ID NO: 22810 - protein, 10 aa, Artificial Sequence
  Peptide Derived from Human Papillomavirus
ASLQDTYRFV

SEQ ID NO: 22811 - protein, 8 aa, Artificial Sequence
  Peptide Derived from Human Papillomavirus
ATVYLPPV

SEQ ID NO: 22812 - protein, 10 aa, Artificial Sequence
  Peptide Derived from Human Papillomavirus
ATVYLPPVPV

SEQ ID NO: 22813 - protein, 10 aa, Artificial Sequence
  Peptide Derived from Human Papillomavirus
CTQVTSDSTY

SEQ ID NO: 22814 - protein, 9 aa, Artificial Sequence
  Peptide Derived from Human Papillomavirus
DSTYKNENF

SEQ ID NO: 22815 - protein, 8 aa, Artificial Sequence
  Peptide Derived from Human Papillomavirus
DTETGNKY

SEQ ID NO: 22816 - protein, 9 aa, Artificial Sequence
  Peptide Derived from Human Papillomavirus
DTGFGCMDF

SEQ ID NO: 22817 - protein, 8 aa, Artificial Sequence
  Peptide Derived from Human Papillomavirus
DTQRLVWA

SEQ ID NO: 22818 - protein, 10 aa, Artificial Sequence
  Peptide Derived from Human Papillomavirus
DTQRLVWACV

SEQ ID NO: 22819 - protein, 8 aa, Artificial Sequence
  Peptide Derived from Human Papillomavirus
DTTRSTNM

SEQ ID NO: 22820 - protein, 10 aa, Artificial Sequence
  Peptide Derived from Human Papillomavirus
DTTRSTNMTL

SEQ ID NO: 22821 - protein, 10 aa, Artificial Sequence
  Peptide Derived from Human Papillomavirus
DTYRFVTSQA

SEQ ID NO: 22822 - protein, 11 aa, Artificial Sequence
  Peptide Derived from Human Papillomavirus
DTYRFVTSQAI

SEQ ID NO: 22823 - protein, 9 aa, Artificial Sequence
  Peptide Derived from Human Papillomavirus
EATVYLPPV

SEQ ID NO: 22824 - protein, 11 aa, Artificial Sequence
  Peptide Derived from Human Papillomavirus
EATVYLPPVPV

SEQ ID NO: 22825 - protein, 8 aa, Artificial Sequence
  Peptide Derived from Human Papillomavirus
EAVPDDLY

SEQ ID NO: 22826 - protein, 9 aa, Artificial Sequence
  Peptide Derived from Human Papillomavirus
EAVPDDLYI

SEQ ID NO: 22827 - protein, 9 aa, Artificial Sequence
  Peptide Derived from Human Papillomavirus
ESQLFNKPY

SEQ ID NO: 22828 - protein, 10 aa, Artificial Sequence
  Peptide Derived from Human Papillomavirus
ESQLFNKPYW

SEQ ID NO: 22829 - protein, 11 aa, Artificial Sequence
  Peptide Derived from Human Papillomavirus
ESQLFNKPYWL

SEQ ID NO: 22830 - protein, 8 aa, Artificial Sequence
  Peptide Derived from Human Papillomavirus
FSADLDQF

SEQ ID NO: 22831 - protein, 10 aa, Artificial Sequence
  Peptide Derived from Human Papillomavirus
FSADLDQFPL

SEQ ID NO: 22832 - protein, 9 aa, Artificial Sequence
  Peptide Derived from Human Papillomavirus
FSIKNPTNA

SEQ ID NO: 22833 - protein, 8 aa, Artificial Sequence
  Peptide Derived from Human Papillomavirus
GADNRECL

SEQ ID NO: 22834 - protein, 10 aa, Artificial Sequence
  Peptide Derived from Human Papillomavirus
GADNRECLSM

SEQ ID NO: 22835 - protein, 8 aa, Artificial Sequence
  Peptide Derived from Human Papillomavirus
GSGTTASI

SEQ ID NO: 22836 - protein, 10 aa, Artificial Sequence
  Peptide Derived from Human Papillomavirus
GSMVTSESQL

SEQ ID NO: 22837 - protein, 11 aa, Artificial Sequence
  Peptide Derived from Human Papillomavirus
GSMVTSESQLF

SEQ ID NO: 22838 - protein, 8 aa, Artificial Sequence
  Peptide Derived from Human Papillomavirus
GSSRLLAV

SEQ ID NO: 22839 - protein, 9 aa, Artificial Sequence
  Peptide Derived from Human Papillomavirus
GSTCKYPDY

SEQ ID NO: 22840 - protein, 10 aa, Artificial Sequence
  Peptide Derived from Human Papillomavirus
GSTCKYPDYL

SEQ ID NO: 22841 - protein, 11 aa, Artificial Sequence
  Peptide Derived from Human Papillomavirus
GTLGEAVPDDL

SEQ ID NO: 22842 - protein, 10 aa, Artificial Sequence
  Peptide Derived from Human Papillomavirus
GTTASIQSSA

SEQ ID NO: 22843 - protein, 11 aa, Artificial Sequence
  Peptide Derived from Human Papillomavirus
GTTASIQSSAF

SEQ ID NO: 22844 - protein, 8 aa, Artificial Sequence
  Peptide Derived from Human Papillomavirus
HAMNPDIL

SEQ ID NO: 22845 - protein, 11 aa, Artificial Sequence
  Peptide Derived from Human Papillomavirus
HAMNPDILEDW

SEQ ID NO: 22846 - protein, 10 aa, Artificial Sequence
  Peptide Derived from Human Papillomavirus
ISGHPLLNKF

SEQ ID NO: 22847 - protein, 9 aa, Artificial Sequence
  Peptide Derived from Human Papillomavirus
KAKPKLKRA

SEQ ID NO: 22848 - protein, 10 aa, Artificial Sequence
  Peptide Derived from Human Papillomavirus
KAKPKLKRAA

SEQ ID NO: 22849 - protein, 8 aa, Artificial Sequence
  Peptide Derived from Human Papillomavirus
KSDVPIDI

SEQ ID NO: 22850 - protein, 10 aa, Artificial Sequence
  Peptide Derived from Human Papillomavirus
KTLQANKSDV

SEQ ID NO: 22851 - protein, 8 aa, Artificial Sequence
  Peptide Derived from Human Papillomavirus
LAVGHPYF

SEQ ID NO: 22852 - protein, 10 aa, Artificial Sequence
  Peptide Derived from Human Papillomavirus
LAVGHPYFSI

SEQ ID NO: 22853 - protein, 10 aa, Artificial Sequence
  Peptide Derived from Human Papillomavirus
LSMDYKQTQL

SEQ ID NO: 22854 - protein, 8 aa, Artificial Sequence
  Peptide Derived from Human Papillomavirus
LTAEVMTY

SEQ ID NO: 22855 - protein, 9 aa, Artificial Sequence
  Peptide Derived from Human Papillomavirus
LTAEVMTYI

SEQ ID NO: 22856 - protein, 11 aa, Artificial Sequence
  Peptide Derived from Human Papillomavirus
LTAEVMTYIHA

SEQ ID NO: 22857 - protein, 9 aa, Artificial Sequence
  Peptide Derived from Human Papillomavirus
LTPPPSASL

SEQ ID NO: 22858 - protein, 9 aa, Artificial Sequence
  Peptide Derived from Human Papillomavirus
MSVWRPSEA

SEQ ID NO: 22859 - protein, 11 aa, Artificial Sequence
  Peptide Derived from Human Papillomavirus
MSVWRPSEATV

SEQ ID NO: 22860 - protein, 10 aa, Artificial Sequence
  Peptide Derived from Human Papillomavirus
MTSEPYGDSL

SEQ ID NO: 22861 - protein, 11 aa, Artificial Sequence
  Peptide Derived from Human Papillomavirus
MTSEPYGDSLF

SEQ ID NO: 22862 - protein, 11 aa, Artificial Sequence
  Peptide Derived from Human Papillomavirus
MTYIHAMNPDI

SEQ ID NO: 22863 - protein, 11 aa, Artificial Sequence
  Peptide Derived from Human Papillomavirus
NAAPANDCPPL

SEQ ID NO: 22864 - protein, 10 aa, Artificial Sequence
  Peptide Derived from Human Papillomavirus
NAKKLLVPKV

SEQ ID NO: 22865 - protein, 9 aa, Artificial Sequence
  Peptide Derived from Human Papillomavirus
NTIIEDGDM

SEQ ID NO: 22866 - protein, 10 aa, Artificial Sequence
  Peptide Derived from Human Papillomavirus
NTIIEDGDMV

SEQ ID NO: 22867 - protein, 8 aa, Artificial Sequence
  Peptide Derived from Human Papillomavirus
PANDCPPL

SEQ ID NO: 22868 - protein, 10 aa, Artificial Sequence
  Peptide Derived from Human Papillomavirus
PANDCPPLEL

SEQ ID NO: 22869 - protein, 11 aa, Artificial Sequence
  Peptide Derived from Human Papillomavirus
PANDCPPLELI

SEQ ID NO: 22870 - protein, 9 aa, Artificial Sequence
  Peptide Derived from Human Papillomavirus
PSASLQDTY

SEQ ID NO: 22871 - protein, 11 aa, Artificial Sequence
  Peptide Derived from Human Papillomavirus
PSASLQDTYRF

SEQ ID NO: 22872 - protein, 8 aa, Artificial Sequence
  Peptide Derived from Human Papillomavirus
PSEATVYL

SEQ ID NO: 22873 - protein, 11 aa, Artificial Sequence
  Peptide Derived from Human Papillomavirus
PSEATVYLPPV

SEQ ID NO: 22874 - protein, 10 aa, Artificial Sequence
  Peptide Derived from Human Papillomavirus
PTGEHWGKGV

SEQ ID NO: 22875 - protein, 11 aa, Artificial Sequence
  Peptide Derived from Human Papillomavirus
PTGEHWGKGVA

SEQ ID NO: 22876 - protein, 8 aa, Artificial Sequence
  Peptide Derived from Human Papillomavirus
PTNAKKLL

SEQ ID NO: 22877 - protein, 9 aa, Artificial Sequence
  Peptide Derived from Human Papillomavirus
PTNAKKLLV

SEQ ID NO: 22878 - protein, 8 aa, Artificial Sequence
  Peptide Derived from Human Papillomavirus
PTPSGSMV

SEQ ID NO: 22879 - protein, 9 aa, Artificial Sequence
  Peptide Derived from Human Papillomavirus
PTSTRTSSA

SEQ ID NO: 22880 - protein, 10 aa, Artificial Sequence
  Peptide Derived from Human Papillomavirus
QAGLKAKPKL

SEQ ID NO: 22881 - protein, 9 aa, Artificial Sequence
  Peptide Derived from Human Papillomavirus
QAITCQKTV

SEQ ID NO: 22882 - protein, 9 aa, Artificial Sequence
  Peptide Derived from Human Papillomavirus
QANKSDVPI

SEQ ID NO: 22883 - protein, 11 aa, Artificial Sequence
  Peptide Derived from Human Papillomavirus
QANKSDVPIDI

SEQ ID NO: 22884 - protein, 8 aa, Artificial Sequence
  Peptide Derived from Human Papillomavirus
RAGTLGEA

SEQ ID NO: 22885 - protein, 9 aa, Artificial Sequence
  Peptide Derived from Human Papillomavirus
RAGTLGEAV

SEQ ID NO: 22886 - protein, 9 aa, Artificial Sequence
  Peptide Derived from Human Papillomavirus
RAQGHNNGI

SEQ ID NO: 22887 - protein, 11 aa, Artificial Sequence
  Peptide Derived from Human Papillomavirus
RAQGHNNGICW

SEQ ID NO: 22888 - protein, 11 aa, Artificial Sequence
  Peptide Derived from Human Papillomavirus
RSTNMTLCTQV

SEQ ID NO: 22889 - protein, 8 aa, Artificial Sequence
  Peptide Derived from Human Papillomavirus
RTSIYYYA

SEQ ID NO: 22890 - protein, 10 aa, Artificial Sequence
  Peptide Derived from Human Papillomavirus
RTSSAKRKKV

SEQ ID NO: 22891 - protein, 9 aa, Artificial Sequence
  Peptide Derived from Human Papillomavirus
SADLDQFPL

SEQ ID NO: 22892 - protein, 11 aa, Artificial Sequence
  Peptide Derived from Human Papillomavirus
SAFFPTPSGSM

SEQ ID NO: 22893 - protein, 8 aa, Artificial Sequence
  Peptide Derived from Human Papillomavirus
SASLQDTY

SEQ ID NO: 22894 - protein, 10 aa, Artificial Sequence
  Peptide Derived from Human Papillomavirus
SASLQDTYRF

SEQ ID NO: 22895 - protein, 11 aa, Artificial Sequence
  Peptide Derived from Human Papillomavirus
SASLQDTYRFV

SEQ ID NO: 22896 - protein, 8 aa, Artificial Sequence
  Peptide Derived from Human Papillomavirus
SSAKRKKV

SEQ ID NO: 22897 - protein, 11 aa, Artificial Sequence
  Peptide Derived from Human Papillomavirus
SSRLLAVGHPY

SEQ ID NO: 22898 - protein, 8 aa, Artificial Sequence
  Peptide Derived from Human Papillomavirus
STCKYPDY

SEQ ID NO: 22899 - protein, 9 aa, Artificial Sequence
  Peptide Derived from Human Papillomavirus
STCKYPDYL

SEQ ID NO: 22900 - protein, 11 aa, Artificial Sequence
  Peptide Derived from Human Papillomavirus
STCKYPDYLKM

SEQ ID NO: 22901 - protein, 11 aa, Artificial Sequence
  Peptide Derived from Human Papillomavirus
STDEYVSRTSI

SEQ ID NO: 22902 - protein, 10 aa, Artificial Sequence
  Peptide Derived from Human Papillomavirus
STNMTLCTQV

SEQ ID NO: 22903 - protein, 8 aa, Artificial Sequence
  Peptide Derived from Human Papillomavirus
STYKNENF

SEQ ID NO: 22904 - protein, 11 aa, Artificial Sequence
  Peptide Derived from Human Papillomavirus
STYKNENFKEY

SEQ ID NO: 22905 - protein, 8 aa, Artificial Sequence
  Peptide Derived from Human Papillomavirus
TAEVMTYI

SEQ ID NO: 22906 - protein, 10 aa, Artificial Sequence
  Peptide Derived from Human Papillomavirus
TAEVMTYIHA

SEQ ID NO: 22907 - protein, 11 aa, Artificial Sequence
  Peptide Derived from Human Papillomavirus
TAEVMTYIHAM

SEQ ID NO: 22908 - protein, 8 aa, Artificial Sequence
  Peptide Derived from Human Papillomavirus
TASIQSSA

SEQ ID NO: 22909 - protein, 9 aa, Artificial Sequence
  Peptide Derived from Human Papillomavirus
TASIQSSAF

SEQ ID NO: 22910 - protein, 10 aa, Artificial Sequence
  Peptide Derived from Human Papillomavirus
TASIQSSAFF

SEQ ID NO: 22911 - protein, 11 aa, Artificial Sequence
  Peptide Derived from Human Papillomavirus
TSDSTYKNENF

SEQ ID NO: 22912 - protein, 9 aa, Artificial Sequence
  Peptide Derived from Human Papillomavirus
TSEPYGDSL

SEQ ID NO: 22913 - protein, 10 aa, Artificial Sequence
  Peptide Derived from Human Papillomavirus
TSEPYGDSLF

SEQ ID NO: 22914 - protein, 11 aa, Artificial Sequence
  Peptide Derived from Human Papillomavirus
TSEPYGDSLFF

SEQ ID NO: 22915 - protein, 11 aa, Artificial Sequence
  Peptide Derived from Human Papillomavirus
TSESQLFNKPY

SEQ ID NO: 22916 - protein, 11 aa, Artificial Sequence
  Peptide Derived from Human Papillomavirus
TSFYNPDTQRL

SEQ ID NO: 22917 - protein, 11 aa, Artificial Sequence
  Peptide Derived from Human Papillomavirus
TSQAITCQKTV

SEQ ID NO: 22918 - protein, 9 aa, Artificial Sequence
  Peptide Derived from Human Papillomavirus
TSSAKRKKV

SEQ ID NO: 22919 - protein, 8 aa, Artificial Sequence
  Peptide Derived from Human Papillomavirus
TSTRTSSA

SEQ ID NO: 22920 - protein, 9 aa, Artificial Sequence
  Peptide Derived from Human Papillomavirus
TTASIQSSA

SEQ ID NO: 22921 - protein, 10 aa, Artificial Sequence
  Peptide Derived from Human Papillomavirus
TTASIQSSAF

SEQ ID NO: 22922 - protein, 11 aa, Artificial Sequence
  Peptide Derived from Human Papillomavirus
TTASIQSSAFF

SEQ ID NO: 22923 - protein, 9 aa, Artificial Sequence
  Peptide Derived from Human Papillomavirus
TTRSTNMTL

SEQ ID NO: 22924 - protein, 9 aa, Artificial Sequence
  Peptide Derived from Human Papillomavirus
VACTNAAPA

SEQ ID NO: 22925 - protein, 8 aa, Artificial Sequence
  Peptide Derived from Human Papillomavirus
VSGLQYRV

SEQ ID NO: 22926 - protein, 9 aa, Artificial Sequence
  Peptide Derived from Human Papillomavirus
VSGLQYRVF

SEQ ID NO: 22927 - protein, 11 aa, Artificial Sequence
  Peptide Derived from Human Papillomavirus
VSGLQYRVFRV

SEQ ID NO: 22928 - protein, 10 aa, Artificial Sequence
  Peptide Derived from Human Papillomavirus
VSKVVSTDEY

SEQ ID NO: 22929 - protein, 11 aa, Artificial Sequence
  Peptide Derived from Human Papillomavirus
VSKVVSTDEYV

SEQ ID NO: 22930 - protein, 8 aa, Artificial Sequence
  Peptide Derived from Human Papillomavirus
VSRTSIYY

SEQ ID NO: 22931 - protein, 9 aa, Artificial Sequence
  Peptide Derived from Human Papillomavirus
VSRTSIYYY

SEQ ID NO: 22932 - protein, 10 aa, Artificial Sequence
  Peptide Derived from Human Papillomavirus
VSRTSIYYYA

SEQ ID NO: 22933 - protein, 8 aa, Artificial Sequence
  Peptide Derived from Human Papillomavirus
VTLTAEVM

SEQ ID NO: 22934 - protein, 10 aa, Artificial Sequence
  Peptide Derived from Human Papillomavirus
VTLTAEVMTY

SEQ ID NO: 22935 - protein, 11 aa, Artificial Sequence
  Peptide Derived from Human Papillomavirus
VTLTAEVMTYI

SEQ ID NO: 22936 - protein, 8 aa, Artificial Sequence
  Peptide Derived from Human Papillomavirus
VTSESQLF

SEQ ID NO: 22937 - protein, 8 aa, Artificial Sequence
  Peptide Derived from Human Papillomavirus
WACVGLEI

SEQ ID NO: 22938 - protein, 8 aa, Artificial Sequence
  Peptide Derived from Human Papillomavirus
YAGSSRLL

SEQ ID NO: 22939 - protein, 9 aa, Artificial Sequence
  Peptide Derived from Human Papillomavirus
YAGSSRLLA

SEQ ID NO: 22940 - protein, 10 aa, Artificial Sequence
  Peptide Derived from Human Papillomavirus
YAGSSRLLAV

SEQ ID NO: 22941 - protein, 8 aa, Artificial Sequence
  Peptide Derived from Human Papillomavirus
YTFWEVDL

SEQ ID NO: 22942 - protein, 8 aa, Artificial Sequence
  Peptide Derived from Human Papillomavirus
AAIPLQPI

SEQ ID NO: 22943 - protein, 9 aa, Artificial Sequence
  Peptide Derived from Human Papillomavirus
ATGTCPPDV

SEQ ID NO: 22944 - protein, 10 aa, Artificial Sequence
  Peptide Derived from Human Papillomavirus
ATGTCPPDVI

SEQ ID NO: 22945 - protein, 11 aa, Artificial Sequence
  Peptide Derived from Human Papillomavirus
ATLKTRSGKQI

SEQ ID NO: 22946 - protein, 10 aa, Artificial Sequence
  Peptide Derived from Human Papillomavirus
ATQLYQTCKA

SEQ ID NO: 22947 - protein, 8 aa, Artificial Sequence
  Peptide Derived from Human Papillomavirus
ATTRTSNV

SEQ ID NO: 22948 - protein, 10 aa, Artificial Sequence
  Peptide Derived from Human Papillomavirus
ATTRTSNVSI

SEQ ID NO: 22949 - protein, 8 aa, Artificial Sequence
  Peptide Derived from Human Papillomavirus
DSSIVSLI

SEQ ID NO: 22950 - protein, 11 aa, Artificial Sequence
  Peptide Derived from Human Papillomavirus
DSSNVTSSTPI

SEQ ID NO: 22951 - protein, 8 aa, Artificial Sequence
  Peptide Derived from Human Papillomavirus
DTIVVDGA

SEQ ID NO: 22952 - protein, 10 aa, Artificial Sequence
  Peptide Derived from Human Papillomavirus
DTIVVDGADF

SEQ ID NO: 22953 - protein, 11 aa, Artificial Sequence
  Peptide Derived from Human Papillomavirus
DTIVVDGADFV

SEQ ID NO: 22954 - protein, 10 aa, Artificial Sequence
  Peptide Derived from Human Papillomavirus
DTLQFQHSDI

SEQ ID NO: 22955 - protein, 10 aa, Artificial Sequence
  Peptide Derived from Human Papillomavirus
DTPVMSGPDI

SEQ ID NO: 22956 - protein, 9 aa, Artificial Sequence
  Peptide Derived from Human Papillomavirus
DTSTSSYSI

SEQ ID NO: 22957 - protein, 9 aa, Artificial Sequence
  Peptide Derived from Human Papillomavirus
DTTPAIINV

SEQ ID NO: 22958 - protein, 10 aa, Artificial Sequence
  Peptide Derived from Human Papillomavirus
DTVGPLDSSI

SEQ ID NO: 22959 - protein, 11 aa, Artificial Sequence
  Peptide Derived from Human Papillomavirus
DTVGPLDSSIV

SEQ ID NO: 22960 - protein, 9 aa, Artificial Sequence
  Peptide Derived from Human Papillomavirus
EAGAPAPSI

SEQ ID NO: 22961 - protein, 8 aa, Artificial Sequence
  Peptide Derived from Human Papillomavirus
EASGHFIF

SEQ ID NO: 22962 - protein, 9 aa, Artificial Sequence
  Peptide Derived from Human Papillomavirus
ESFDPEDTL

SEQ ID NO: 22963 - protein, 11 aa, Artificial Sequence
  Peptide Derived from Human Papillomavirus
ESFDPEDTLQF

SEQ ID NO: 22964 - protein, 11 aa, Artificial Sequence
  Peptide Derived from Human Papillomavirus
ESSIQTISTHL

SEQ ID NO: 22965 - protein, 9 aa, Artificial Sequence
  Peptide Derived from Human Papillomavirus
ETSFIEAGA

SEQ ID NO: 22966 - protein, 11 aa, Artificial Sequence
  Peptide Derived from Human Papillomavirus
ETSFIEAGAPA

SEQ ID NO: 22967 - protein, 9 aa, Artificial Sequence
  Peptide Derived from Human Papillomavirus
FATTRTSNV

SEQ ID NO: 22968 - protein, 11 aa, Artificial Sequence
  Peptide Derived from Human Papillomavirus
FATTRTSNVSI

SEQ ID NO: 22969 - protein, 8 aa, Artificial Sequence
  Peptide Derived from Human Papillomavirus
FSRVGQKA

SEQ ID NO: 22970 - protein, 10 aa, Artificial Sequence
  Peptide Derived from Human Papillomavirus
FSRVGQKATL

SEQ ID NO: 22971 - protein, 11 aa, Artificial Sequence
  Peptide Derived from Human Papillomavirus
FSSPTVSTQSY

SEQ ID NO: 22972 - protein, 8 aa, Artificial Sequence
  Peptide Derived from Human Papillomavirus
FTDVRVAA

SEQ ID NO: 22973 - protein, 11 aa, Artificial Sequence
  Peptide Derived from Human Papillomavirus
FTEPSVLHPPA

SEQ ID NO: 22974 - protein, 10 aa, Artificial Sequence
  Peptide Derived from Human Papillomavirus
GADFVLHPSY

SEQ ID NO: 22975 - protein, 11 aa, Artificial Sequence
  Peptide Derived from Human Papillomavirus
GADFVLHPSYF

SEQ ID NO: 22976 - protein, 10 aa, Artificial Sequence
  Peptide Derived from Human Papillomavirus
GARIHYYQDL

SEQ ID NO: 22977 - protein, 8 aa, Artificial Sequence
  Peptide Derived from Human Papillomavirus
GSGGRTGY

SEQ ID NO: 22978 - protein, 9 aa, Artificial Sequence
  Peptide Derived from Human Papillomavirus
GSGGRTGYV

SEQ ID NO: 22979 - protein, 11 aa, Artificial Sequence
  Peptide Derived from Human Papillomavirus
GSGGRTGYVPI

SEQ ID NO: 22980 - protein, 10 aa, Artificial Sequence
  Peptide Derived from Human Papillomavirus
GSGSGGRTGY

SEQ ID NO: 22981 - protein, 11 aa, Artificial Sequence
  Peptide Derived from Human Papillomavirus
GSGSGGRTGYV

SEQ ID NO: 22982 - protein, 10 aa, Artificial Sequence
  Peptide Derived from Human Papillomavirus
GSLGVFFGGL

SEQ ID NO: 22983 - protein, 8 aa, Artificial Sequence
  Peptide Derived from Human Papillomavirus
GSRPVARL

SEQ ID NO: 22984 - protein, 10 aa, Artificial Sequence
  Peptide Derived from Human Papillomavirus
GSRPVARLGL

SEQ ID NO: 22985 - protein, 11 aa, Artificial Sequence
  Peptide Derived from Human Papillomavirus
GSRPVARLGLY

SEQ ID NO: 22986 - protein, 8 aa, Artificial Sequence
  Peptide Derived from Human Papillomavirus
GSTIADQI

SEQ ID NO: 22987 - protein, 9 aa, Artificial Sequence
  Peptide Derived from Human Papillomavirus
GSTIADQIL

SEQ ID NO: 22988 - protein, 11 aa, Artificial Sequence
  Peptide Derived from Human Papillomavirus
GSTIADQILKY

SEQ ID NO: 22989 - protein, 8 aa, Artificial Sequence
  Peptide Derived from Human Papillomavirus
GTCPPDVI

SEQ ID NO: 22990 - protein, 11 aa, Artificial Sequence
  Peptide Derived from Human Papillomavirus
GTCPPDVIPKV

SEQ ID NO: 22991 - protein, 8 aa, Artificial Sequence
  Peptide Derived from Human Papillomavirus
GTDPPTAA

SEQ ID NO: 22992 - protein, 9 aa, Artificial Sequence
  Peptide Derived from Human Papillomavirus
GTDPPTAAI

SEQ ID NO: 22993 - protein, 11 aa, Artificial Sequence
  Peptide Derived from Human Papillomavirus
GTDPPTAAIPL

SEQ ID NO: 22994 - protein, 8 aa, Artificial Sequence
  Peptide Derived from Human Papillomavirus
HTPMQHSY

SEQ ID NO: 22995 - protein, 11 aa, Artificial Sequence
  Peptide Derived from Human Papillomavirus
HTPMQHSYSTF

SEQ ID NO: 22996 - protein, 8 aa, Artificial Sequence
  Peptide Derived from Human Papillomavirus
HTVPNEQY

SEQ ID NO: 22997 - protein, 10 aa, Artificial Sequence
  Peptide Derived from Human Papillomavirus
HTVPNEQYEL

SEQ ID NO: 22998 - protein, 8 aa, Artificial Sequence
  Peptide Derived from Human Papillomavirus
HTVRFSRV

SEQ ID NO: 22999 - protein, 8 aa, Artificial Sequence
  Peptide Derived from Human Papillomavirus
IADQILKY

SEQ ID NO: 23000 - protein, 11 aa, Artificial Sequence
  Peptide Derived from Human Papillomavirus
IADQILKYGSL

SEQ ID NO: 23001 - protein, 8 aa, Artificial Sequence
  Peptide Derived from Human Papillomavirus
IALHRPAI

SEQ ID NO: 23002 - protein, 9 aa, Artificial Sequence
  Peptide Derived from Human Papillomavirus
ISPAPDPDF

SEQ ID NO: 23003 - protein, 10 aa, Artificial Sequence
  Peptide Derived from Human Papillomavirus
ISPAPDPDFL

SEQ ID NO: 23004 - protein, 10 aa, Artificial Sequence
  Peptide Derived from Human Papillomavirus
ISPFFPFDTI

SEQ ID NO: 23005 - protein, 11 aa, Artificial Sequence
  Peptide Derived from Human Papillomavirus
ISPFFPFDTIV

SEQ ID NO: 23006 - protein, 9 aa, Artificial Sequence
  Peptide Derived from Human Papillomavirus
ISTHLNPTF

SEQ ID NO: 23007 - protein, 8 aa, Artificial Sequence
  Peptide Derived from Human Papillomavirus
ITSRRHTV

SEQ ID NO: 23008 - protein, 10 aa, Artificial Sequence
  Peptide Derived from Human Papillomavirus
ITSRRHTVRF

SEQ ID NO: 23009 - protein, 8 aa, Artificial Sequence
  Peptide Derived from Human Papillomavirus
ITYDNPAF

SEQ ID NO: 23010 - protein, 11 aa, Artificial Sequence
  Peptide Derived from Human Papillomavirus
ITYDNPAFESF

SEQ ID NO: 23011 - protein, 10 aa, Artificial Sequence
  Peptide Derived from Human Papillomavirus
KATGTCPPDV

SEQ ID NO: 23012 - protein, 11 aa, Artificial Sequence
  Peptide Derived from Human Papillomavirus
KATGTCPPDVI

SEQ ID NO: 23013 - protein, 8 aa, Artificial Sequence
  Peptide Derived from Human Papillomavirus
KTRSGKQI

SEQ ID NO: 23014 - protein, 10 aa, Artificial Sequence
  Peptide Derived from Human Papillomavirus
KTRSGKQIGA

SEQ ID NO: 23015 - protein, 11 aa, Artificial Sequence
  Peptide Derived from Human Papillomavirus
LSPIVPLDHTV

SEQ ID NO: 23016 - protein, 8 aa, Artificial Sequence
  Peptide Derived from Human Papillomavirus
LTSPHKLI

SEQ ID NO: 23017 - protein, 10 aa, Artificial Sequence
  Peptide Derived from Human Papillomavirus
LTSPHKLITY

SEQ ID NO: 23018 - protein, 10 aa, Artificial Sequence
  Peptide Derived from Human Papillomavirus
MSGPDIPSPL

SEQ ID NO: 23019 - protein, 11 aa, Artificial Sequence
  Peptide Derived from Human Papillomavirus
MSGPDIPSPLF

SEQ ID NO: 23020 - protein, 8 aa, Artificial Sequence
  Peptide Derived from Human Papillomavirus
NTGFDTPV

SEQ ID NO: 23021 - protein, 9 aa, Artificial Sequence
  Peptide Derived from Human Papillomavirus
NTGFDTPVM

SEQ ID NO: 23022 - protein, 8 aa, Artificial Sequence
  Peptide Derived from Human Papillomavirus
NTQQVKVV

SEQ ID NO: 23023 - protein, 11 aa, Artificial Sequence
  Peptide Derived from Human Papillomavirus
NTQQVKVVDPA

SEQ ID NO: 23024 - protein, 8 aa, Artificial Sequence
  Peptide Derived from Human Papillomavirus
PAEASGHF

SEQ ID NO: 23025 - protein, 9 aa, Artificial Sequence
  Peptide Derived from Human Papillomavirus
PAEASGHFI

SEQ ID NO: 23026 - protein, 10 aa, Artificial Sequence
  Peptide Derived from Human Papillomavirus
PAEASGHFIF

SEQ ID NO: 23027 - protein, 10 aa, Artificial Sequence
  Peptide Derived from Human Papillomavirus
PAFLTSPHKL

SEQ ID NO: 23028 - protein, 11 aa, Artificial Sequence
  Peptide Derived from Human Papillomavirus
PAFLTSPHKLI

SEQ ID NO: 23029 - protein, 9 aa, Artificial Sequence
  Peptide Derived from Human Papillomavirus
PAIINVSSV

SEQ ID NO: 23030 - protein, 10 aa, Artificial Sequence
  Peptide Derived from Human Papillomavirus
PAITSRRHTV

SEQ ID NO: 23031 - protein, 10 aa, Artificial Sequence
  Peptide Derived from Human Papillomavirus
PAPAEASGHF

SEQ ID NO: 23032 - protein, 11 aa, Artificial Sequence
  Peptide Derived from Human Papillomavirus
PAPAEASGHFI

SEQ ID NO: 23033 - protein, 8 aa, Artificial Sequence
  Peptide Derived from Human Papillomavirus
PAPDPDFL

SEQ ID NO: 23034 - protein, 10 aa, Artificial Sequence
  Peptide Derived from Human Papillomavirus
PAPDPDFLDI

SEQ ID NO: 23035 - protein, 11 aa, Artificial Sequence
  Peptide Derived from Human Papillomavirus
PAPDPDFLDII

SEQ ID NO: 23036 - protein, 11 aa, Artificial Sequence
  Peptide Derived from Human Papillomavirus
PAPSIPTPSGF

SEQ ID NO: 23037 - protein, 10 aa, Artificial Sequence
  Peptide Derived from Human Papillomavirus
PSGFDVTTSA

SEQ ID NO: 23038 - protein, 9 aa, Artificial Sequence
  Peptide Derived from Human Papillomavirus
PSIPTPSGF

SEQ ID NO: 23039 - protein, 11 aa, Artificial Sequence
  Peptide Derived from Human Papillomavirus
PSIPTPSGFDV

SEQ ID NO: 23040 - protein, 11 aa, Artificial Sequence
  Peptide Derived from Human Papillomavirus
PSPLFPTSSPF

SEQ ID NO: 23041 - protein, 8 aa, Artificial Sequence
  Peptide Derived from Human Papillomavirus
PSVLHPPA

SEQ ID NO: 23042 - protein, 10 aa, Artificial Sequence
  Peptide Derived from Human Papillomavirus
PSVLHPPAPA

SEQ ID NO: 23043 - protein, 10 aa, Artificial Sequence
  Peptide Derived from Human Papillomavirus
PTAAIPLQPI

SEQ ID NO: 23044 - protein, 8 aa, Artificial Sequence
  Peptide Derived from Human Papillomavirus
PTFTEPSV

SEQ ID NO: 23045 - protein, 9 aa, Artificial Sequence
  Peptide Derived from Human Papillomavirus
PTFTEPSVL

SEQ ID NO: 23046 - protein, 8 aa, Artificial Sequence
  Peptide Derived from Human Papillomavirus
PTPSGFDV

SEQ ID NO: 23047 - protein, 9 aa, Artificial Sequence
  Peptide Derived from Human Papillomavirus
PTSSPFVPI

SEQ ID NO: 23048 - protein, 8 aa, Artificial Sequence
  Peptide Derived from Human Papillomavirus
PTVSTQSY

SEQ ID NO: 23049 - protein, 11 aa, Artificial Sequence
  Peptide Derived from Human Papillomavirus
PTVSTQSYENI

SEQ ID NO: 23050 - protein, 8 aa, Artificial Sequence
  Peptide Derived from Human Papillomavirus
QSYENIPM

SEQ ID NO: 23051 - protein, 11 aa, Artificial Sequence
  Peptide Derived from Human Papillomavirus
QSYENIPMDTF

SEQ ID NO: 23052 - protein, 11 aa, Artificial Sequence
  Peptide Derived from Human Papillomavirus
QTISTHLNPTF

SEQ ID NO: 23053 - protein, 8 aa, Artificial Sequence
  Peptide Derived from Human Papillomavirus
RASATQLY

SEQ ID NO: 23054 - protein, 8 aa, Artificial Sequence
  Peptide Derived from Human Papillomavirus
RSGKQIGA

SEQ ID NO: 23055 - protein, 10 aa, Artificial Sequence
  Peptide Derived from Human Papillomavirus
RSGKQIGARI

SEQ ID NO: 23056 - protein, 8 aa, Artificial Sequence
  Peptide Derived from Human Papillomavirus
RSTRRKRA

SEQ ID NO: 23057 - protein, 10 aa, Artificial Sequence
  Peptide Derived from Human Papillomavirus
RSTRRKRASA

SEQ ID NO: 23058 - protein, 9 aa, Artificial Sequence
  Peptide Derived from Human Papillomavirus
RTSNVSIPL

SEQ ID NO: 23059 - protein, 8 aa, Artificial Sequence
  Peptide Derived from Human Papillomavirus
SADTTPAI

SEQ ID NO: 23060 - protein, 9 aa, Artificial Sequence
  Peptide Derived from Human Papillomavirus
SADTTPAII

SEQ ID NO: 23061 - protein, 11 aa, Artificial Sequence
  Peptide Derived from Human Papillomavirus
SADTTPAIINV

SEQ ID NO: 23062 - protein, 11 aa, Artificial Sequence
  Peptide Derived from Human Papillomavirus
SATQLYQTCKA

SEQ ID NO: 23063 - protein, 10 aa, Artificial Sequence
  Peptide Derived from Human Papillomavirus
SSIQTISTHL

SEQ ID NO: 23064 - protein, 10 aa, Artificial Sequence
  Peptide Derived from Human Papillomavirus
SSNVTSSTPI

SEQ ID NO: 23065 - protein, 10 aa, Artificial Sequence
  Peptide Derived from Human Papillomavirus
SSPFVPISPF

SEQ ID NO: 23066 - protein, 11 aa, Artificial Sequence
  Peptide Derived from Human Papillomavirus
SSPFVPISPFF

SEQ ID NO: 23067 - protein, 10 aa, Artificial Sequence
  Peptide Derived from Human Papillomavirus
SSPTVSTQSY

SEQ ID NO: 23068 - protein, 11 aa, Artificial Sequence
  Peptide Derived from Human Papillomavirus
SSTPIPGSRPV

SEQ ID NO: 23069 - protein, 8 aa, Artificial Sequence
  Peptide Derived from Human Papillomavirus
SSVGESSI

SEQ ID NO: 23070 - protein, 11 aa, Artificial Sequence
  Peptide Derived from Human Papillomavirus
SSVGESSIQTI

SEQ ID NO: 23071 - protein, 9 aa, Artificial Sequence
  Peptide Derived from Human Papillomavirus
SSYSINDGL

SEQ ID NO: 23072 - protein, 10 aa, Artificial Sequence
  Peptide Derived from Human Papillomavirus
SSYSINDGLY

SEQ ID NO: 23073 - protein, 11 aa, Artificial Sequence
  Peptide Derived from Human Papillomavirus
STFATTRTSNV

SEQ ID NO: 23074 - protein, 8 aa, Artificial Sequence
  Peptide Derived from Human Papillomavirus
STHLNPTF

SEQ ID NO: 23075 - protein, 8 aa, Artificial Sequence
  Peptide Derived from Human Papillomavirus
STIADQIL

SEQ ID NO: 23076 - protein, 10 aa, Artificial Sequence
  Peptide Derived from Human Papillomavirus
STIADQILKY

SEQ ID NO: 23077 - protein, 10 aa, Artificial Sequence
  Peptide Derived from Human Papillomavirus
STPIPGSRPV

SEQ ID NO: 23078 - protein, 11 aa, Artificial Sequence
  Peptide Derived from Human Papillomavirus
STPIPGSRPVA

SEQ ID NO: 23079 - protein, 8 aa, Artificial Sequence
  Peptide Derived from Human Papillomavirus
STQSYENI

SEQ ID NO: 23080 - protein, 10 aa, Artificial Sequence
  Peptide Derived from Human Papillomavirus
STQSYENIPM

SEQ ID NO: 23081 - protein, 9 aa, Artificial Sequence
  Peptide Derived from Human Papillomavirus
STRRKRASA

SEQ ID NO: 23082 - protein, 11 aa, Artificial Sequence
  Peptide Derived from Human Papillomavirus
STSSYSINDGL

SEQ ID NO: 23083 - protein, 9 aa, Artificial Sequence
  Peptide Derived from Human Papillomavirus
TAAIPLQPI

SEQ ID NO: 23084 - protein, 8 aa, Artificial Sequence
  Peptide Derived from Human Papillomavirus
TSADTTPA

SEQ ID NO: 23085 - protein, 9 aa, Artificial Sequence
  Peptide Derived from Human Papillomavirus
TSADTTPAI

SEQ ID NO: 23086 - protein, 10 aa, Artificial Sequence
  Peptide Derived from Human Papillomavirus
TSADTTPAII

SEQ ID NO: 23087 - protein, 8 aa, Artificial Sequence
  Peptide Derived from Human Papillomavirus
TSFIEAGA

SEQ ID NO: 23088 - protein, 10 aa, Artificial Sequence
  Peptide Derived from Human Papillomavirus
TSFIEAGAPA

SEQ ID NO: 23089 - protein, 8 aa, Artificial Sequence
  Peptide Derived from Human Papillomavirus
TSNVSIPL

SEQ ID NO: 23090 - protein, 9 aa, Artificial Sequence
  Peptide Derived from Human Papillomavirus
TSPHKLITY

SEQ ID NO: 23091 - protein, 9 aa, Artificial Sequence
  Peptide Derived from Human Papillomavirus
TSRRHTVRF

SEQ ID NO: 23092 - protein, 8 aa, Artificial Sequence
  Peptide Derived from Human Papillomavirus
TSSPFVPI

SEQ ID NO: 23093 - protein, 11 aa, Artificial Sequence
  Peptide Derived from Human Papillomavirus
TSSPFVPISPF

SEQ ID NO: 23094 - protein, 10 aa, Artificial Sequence
  Peptide Derived from Human Papillomavirus
TSSYSINDGL

SEQ ID NO: 23095 - protein, 11 aa, Artificial Sequence
  Peptide Derived from Human Papillomavirus
TSSYSINDGLY

SEQ ID NO: 23096 - protein, 8 aa, Artificial Sequence
  Peptide Derived from Human Papillomavirus
TSTSSYSI

SEQ ID NO: 23097 - protein, 8 aa, Artificial Sequence
  Peptide Derived from Human Papillomavirus
TTPAIINV

SEQ ID NO: 23098 - protein, 11 aa, Artificial Sequence
  Peptide Derived from Human Papillomavirus
TTPAIINVSSV

SEQ ID NO: 23099 - protein, 9 aa, Artificial Sequence
  Peptide Derived from Human Papillomavirus
TTRTSNVSI

SEQ ID NO: 23100 - protein, 11 aa, Artificial Sequence
  Peptide Derived from Human Papillomavirus
TTRTSNVSIPL

SEQ ID NO: 23101 - protein, 9 aa, Artificial Sequence
  Peptide Derived from Human Papillomavirus
TTSADTTPA

SEQ ID NO: 23102 - protein, 10 aa, Artificial Sequence
  Peptide Derived from Human Papillomavirus
TTSADTTPAI

SEQ ID NO: 23103 - protein, 11 aa, Artificial Sequence
  Peptide Derived from Human Papillomavirus
TTSADTTPAII

SEQ ID NO: 23104 - protein, 9 aa, Artificial Sequence
  Peptide Derived from Human Papillomavirus
VSIPLNTGF

SEQ ID NO: 23105 - protein, 9 aa, Artificial Sequence
  Peptide Derived from Human Papillomavirus
VSLIEETSF

SEQ ID NO: 23106 - protein, 10 aa, Artificial Sequence
  Peptide Derived from Human Papillomavirus
VSLIEETSFI

SEQ ID NO: 23107 - protein, 9 aa, Artificial Sequence
  Peptide Derived from Human Papillomavirus
VSSVGESSI

SEQ ID NO: 23108 - protein, 8 aa, Artificial Sequence
  Peptide Derived from Human Papillomavirus
VSTDSSNV

SEQ ID NO: 23109 - protein, 9 aa, Artificial Sequence
  Peptide Derived from Human Papillomavirus
VSTQSYENI

SEQ ID NO: 23110 - protein, 11 aa, Artificial Sequence
  Peptide Derived from Human Papillomavirus
VSTQSYENIPM

SEQ ID NO: 23111 - protein, 10 aa, Artificial Sequence
  Peptide Derived from Human Papillomavirus
VTTSADTTPA

SEQ ID NO: 23112 - protein, 11 aa, Artificial Sequence
  Peptide Derived from Human Papillomavirus
VTTSADTTPAI

SEQ ID NO: 23113 - protein, 9 aa, Artificial Sequence
  Peptide Derived from Human Papillomavirus
VTVDTVGPL

SEQ ID NO: 23114 - protein, 8 aa, Artificial Sequence
  Peptide Derived from Human Papillomavirus
YADDVDNV

SEQ ID NO: 23115 - protein, 8 aa, Artificial Sequence
  Peptide Derived from Human Papillomavirus
YSINDGLY

SEQ ID NO: 23116 - protein, 10 aa, Artificial Sequence
  Peptide Derived from Human Papillomavirus
YSINDGLYDV

SEQ ID NO: 23117 - protein, 11 aa, Artificial Sequence
  Peptide Derived from Human Papillomavirus
YSINDGLYDVY

SEQ ID NO: 23118 - protein, 8 aa, Artificial Sequence
  Peptide Derived from Human Papillomavirus
YSRNTQQV

SEQ ID NO: 23119 - protein, 10 aa, Artificial Sequence
  Peptide Derived from Human Papillomavirus
YSRNTQQVKV

SEQ ID NO: 23120 - protein, 11 aa, Artificial Sequence
  Peptide Derived from Human Papillomavirus
YSRNTQQVKVV

SEQ ID NO: 23121 - protein, 11 aa, Artificial Sequence
  Peptide Derived from Human Papillomavirus
AAAFLKSNCQA

SEQ ID NO: 23122 - protein, 8 aa, Artificial Sequence
  Peptide Derived from Human Papillomavirus
AAETQVTV

SEQ ID NO: 23123 - protein, 10 aa, Artificial Sequence
  Peptide Derived from Human Papillomavirus
AAFLKSNCQA

SEQ ID NO: 23124 - protein, 10 aa, Artificial Sequence
  Peptide Derived from Human Papillomavirus
AALYWYRTGI

SEQ ID NO: 23125 - protein, 10 aa, Artificial Sequence
  Peptide Derived from Human Papillomavirus
AAMLAVFKDI

SEQ ID NO: 23126 - protein, 11 aa, Artificial Sequence
  Peptide Derived from Human Papillomavirus
AAMLAVFKDIY

SEQ ID NO: 23127 - protein, 8 aa, Artificial Sequence
  Peptide Derived from Human Papillomavirus
ASNKKAAM

SEQ ID NO: 23128 - protein, 9 aa, Artificial Sequence
  Peptide Derived from Human Papillomavirus
ASNKKAAML

SEQ ID NO: 23129 - protein, 10 aa, Artificial Sequence
  Peptide Derived from Human Papillomavirus
ASNKKAAMLA

SEQ ID NO: 23130 - protein, 11 aa, Artificial Sequence
  Peptide Derived from Human Papillomavirus
ASNKKAAMLAV

SEQ ID NO: 23131 - protein, 8 aa, Artificial Sequence
  Peptide Derived from Human Papillomavirus
ATDTGSDM

SEQ ID NO: 23132 - protein, 9 aa, Artificial Sequence
  Peptide Derived from Human Papillomavirus
ATDTGSDMV

SEQ ID NO: 23133 - protein, 11 aa, Artificial Sequence
  Peptide Derived from Human Papillomavirus
ATDTGSDMVDF

SEQ ID NO: 23134 - protein, 8 aa, Artificial Sequence
  Peptide Derived from Human Papillomavirus
ATHTCWTY

SEQ ID NO: 23135 - protein, 9 aa, Artificial Sequence
  Peptide Derived from Human Papillomavirus
ATHTCWTYF

SEQ ID NO: 23136 - protein, 10 aa, Artificial Sequence
  Peptide Derived from Human Papillomavirus
ATLYAHIQCL

SEQ ID NO: 23137 - protein, 8 aa, Artificial Sequence
  Peptide Derived from Human Papillomavirus
CAVMCRHY

SEQ ID NO: 23138 - protein, 11 aa, Artificial Sequence
  Peptide Derived from Human Papillomavirus
CAVMCRHYKRA

SEQ ID NO: 23139 - protein, 11 aa, Artificial Sequence
  Peptide Derived from Human Papillomavirus
CSEVEAAETQV

SEQ ID NO: 23140 - protein, 9 aa, Artificial Sequence
  Peptide Derived from Human Papillomavirus
CSITELKEL

SEQ ID NO: 23141 - protein, 10 aa, Artificial Sequence
  Peptide Derived from Human Papillomavirus
CSITELKELL

SEQ ID NO: 23142 - protein, 10 aa, Artificial Sequence
  Peptide Derived from Human Papillomavirus
CSKIDEGGDW

SEQ ID NO: 23143 - protein, 8 aa, Artificial Sequence
  Peptide Derived from Human Papillomavirus
CTDWVMAI

SEQ ID NO: 23144 - protein, 9 aa, Artificial Sequence
  Peptide Derived from Human Papillomavirus
CTDWVMAIF

SEQ ID NO: 23145 - protein, 11 aa, Artificial Sequence
  Peptide Derived from Human Papillomavirus
CTDWVMAIFGV

SEQ ID NO: 23146 - protein, 9 aa, Artificial Sequence
  Peptide Derived from Human Papillomavirus
DADTEGIPF

SEQ ID NO: 23147 - protein, 8 aa, Artificial Sequence
  Peptide Derived from Human Papillomavirus
DAQVLHLL

SEQ ID NO: 23148 - protein, 9 aa, Artificial Sequence
  Peptide Derived from Human Papillomavirus
DATHTCWTY

SEQ ID NO: 23149 - protein, 10 aa, Artificial Sequence
  Peptide Derived from Human Papillomavirus
DATHTCWTYF

SEQ ID NO: 23150 - protein, 9 aa, Artificial Sequence
  Peptide Derived from Human Papillomavirus
DSGYGCSEV

SEQ ID NO: 23151 - protein, 11 aa, Artificial Sequence
  Peptide Derived from Human Papillomavirus
DSGYGCSEVEA

SEQ ID NO: 23152 - protein, 9 aa, Artificial Sequence
  Peptide Derived from Human Papillomavirus
DSNFDLSDM

SEQ ID NO: 23153 - protein, 10 aa, Artificial Sequence
  Peptide Derived from Human Papillomavirus
DSNFDLSDMV

SEQ ID NO: 23154 - protein, 9 aa, Artificial Sequence
  Peptide Derived from Human Papillomavirus
DSSDNAENV

SEQ ID NO: 23155 - protein, 8 aa, Artificial Sequence
  Peptide Derived from Human Papillomavirus
DTDLSPRL

SEQ ID NO: 23156 - protein, 11 aa, Artificial Sequence
  Peptide Derived from Human Papillomavirus
DTDLSPRLQEI

SEQ ID NO: 23157 - protein, 10 aa, Artificial Sequence
  Peptide Derived from Human Papillomavirus
DTEGIPFGTF

SEQ ID NO: 23158 - protein, 9 aa, Artificial Sequence
  Peptide Derived from Human Papillomavirus
DTGSDMVDF

SEQ ID NO: 23159 - protein, 10 aa, Artificial Sequence
  Peptide Derived from Human Papillomavirus
DTGSDMVDFI

SEQ ID NO: 23160 - protein, 10 aa, Artificial Sequence
  Peptide Derived from Human Papillomavirus
DTKVAMLDDA

SEQ ID NO: 23161 - protein, 9 aa, Artificial Sequence
  Peptide Derived from Human Papillomavirus
DTPEWIQRL

SEQ ID NO: 23162 - protein, 11 aa, Artificial Sequence
  Peptide Derived from Human Papillomavirus
DTPEWIQRLTI

SEQ ID NO: 23163 - protein, 10 aa, Artificial Sequence
  Peptide Derived from Human Papillomavirus
DTQLSICEQA

SEQ ID NO: 23164 - protein, 9 aa, Artificial Sequence
  Peptide Derived from Human Papillomavirus
EAAETQVTV

SEQ ID NO: 23165 - protein, 8 aa, Artificial Sequence
  Peptide Derived from Human Papillomavirus
ESDMAFQY

SEQ ID NO: 23166 - protein, 9 aa, Artificial Sequence
  Peptide Derived from Human Papillomavirus
ESDMAFQYA

SEQ ID NO: 23167 - protein, 11 aa, Artificial Sequence
  Peptide Derived from Human Papillomavirus
ESDMAFQYAQL

SEQ ID NO: 23168 - protein, 9 aa, Artificial Sequence
  Peptide Derived from Human Papillomavirus
ESRVTVFTF

SEQ ID NO: 23169 - protein, 9 aa, Artificial Sequence
  Peptide Derived from Human Papillomavirus
ETAQALFHA

SEQ ID NO: 23170 - protein, 10 aa, Artificial Sequence
  Peptide Derived from Human Papillomavirus
ETATDTGSDM

SEQ ID NO: 23171 - protein, 11 aa, Artificial Sequence
  Peptide Derived from Human Papillomavirus
ETATDTGSDMV

SEQ ID NO: 23172 - protein, 11 aa, Artificial Sequence
  Peptide Derived from Human Papillomavirus
ETCMLIEPPKL

SEQ ID NO: 23173 - protein, 11 aa, Artificial Sequence
  Peptide Derived from Human Papillomavirus
ETIVEKKTGDV

SEQ ID NO: 23174 - protein, 10 aa, Artificial Sequence
  Peptide Derived from Human Papillomavirus
ETQVTVNTNA

SEQ ID NO: 23175 - protein, 11 aa, Artificial Sequence
  Peptide Derived from Human Papillomavirus
FAGGSKENSPL

SEQ ID NO: 23176 - protein, 8 aa, Artificial Sequence
  Peptide Derived from Human Papillomavirus
FTDLVRNF

SEQ ID NO: 23177 - protein, 9 aa, Artificial Sequence
  Peptide Derived from Human Papillomavirus
FTFPHAFPF

SEQ ID NO: 23178 - protein, 8 aa, Artificial Sequence
  Peptide Derived from Human Papillomavirus
FTISDSGY

SEQ ID NO: 23179 - protein, 8 aa, Artificial Sequence
  Peptide Derived from Human Papillomavirus
GSDMVDFI

SEQ ID NO: 23180 - protein, 8 aa, Artificial Sequence
  Peptide Derived from Human Papillomavirus
GSKENSPL

SEQ ID NO: 23181 - protein, 8 aa, Artificial Sequence
  Peptide Derived from Human Papillomavirus
GTGCNGWF

SEQ ID NO: 23182 - protein, 9 aa, Artificial Sequence
  Peptide Derived from Human Papillomavirus
GTGCNGWFF

SEQ ID NO: 23183 - protein, 10 aa, Artificial Sequence
  Peptide Derived from Human Papillomavirus
GTGCNGWFFV

SEQ ID NO: 23184 - protein, 8 aa, Artificial Sequence
  Peptide Derived from Human Papillomavirus
GTPKKNCI

SEQ ID NO: 23185 - protein, 9 aa, Artificial Sequence
  Peptide Derived from Human Papillomavirus
GTPKKNCIL

SEQ ID NO: 23186 - protein, 10 aa, Artificial Sequence
  Peptide Derived from Human Papillomavirus
GTPKKNCILL

SEQ ID NO: 23187 - protein, 11 aa, Artificial Sequence
  Peptide Derived from Human Papillomavirus
GTPKKNCILLY

SEQ ID NO: 23188 - protein, 9 aa, Artificial Sequence
  Peptide Derived from Human Papillomavirus
HAQEVQNDA

SEQ ID NO: 23189 - protein, 11 aa, Artificial Sequence
  Peptide Derived from Human Papillomavirus
HAQEVQNDAQV

SEQ ID NO: 23190 - protein, 10 aa, Artificial Sequence
  Peptide Derived from Human Papillomavirus
HTCWTYFDNY

SEQ ID NO: 23191 - protein, 11 aa, Artificial Sequence
  Peptide Derived from Human Papillomavirus
HTCWTYFDNYM

SEQ ID NO: 23192 - protein, 9 aa, Artificial Sequence
  Peptide Derived from Human Papillomavirus
ISDDEDETA

SEQ ID NO: 23193 - protein, 11 aa, Artificial Sequence
  Peptide Derived from Human Papillomavirus
ISDSGYGCSEV

SEQ ID NO: 23194 - protein, 11 aa, Artificial Sequence
  Peptide Derived from Human Papillomavirus
ISEVSGDTPEW

SEQ ID NO: 23195 - protein, 10 aa, Artificial Sequence
  Peptide Derived from Human Papillomavirus
ISFLRALKEF

SEQ ID NO: 23196 - protein, 11 aa, Artificial Sequence
  Peptide Derived from Human Papillomavirus
ISFLRALKEFL

SEQ ID NO: 23197 - protein, 10 aa, Artificial Sequence
  Peptide Derived from Human Papillomavirus
ISFVNSNSHF

SEQ ID NO: 23198 - protein, 11 aa, Artificial Sequence
  Peptide Derived from Human Papillomavirus
ISFVNSNSHFW

SEQ ID NO: 23199 - protein, 10 aa, Artificial Sequence
  Peptide Derived from Human Papillomavirus
ISIDRKHKPL

SEQ ID NO: 23200 - protein, 11 aa, Artificial Sequence
  Peptide Derived from Human Papillomavirus
ISIDRKHKPLL

SEQ ID NO: 23201 - protein, 10 aa, Artificial Sequence
  Peptide Derived from Human Papillomavirus
ISLNSGHKKA

SEQ ID NO: 23202 - protein, 8 aa, Artificial Sequence
  Peptide Derived from Human Papillomavirus
ITELKELL

SEQ ID NO: 23203 - protein, 10 aa, Artificial Sequence
  Peptide Derived from Human Papillomavirus
ITELKELLQA

SEQ ID NO: 23204 - protein, 8 aa, Artificial Sequence
  Peptide Derived from Human Papillomavirus
KAAMLAVF

SEQ ID NO: 23205 - protein, 11 aa, Artificial Sequence
  Peptide Derived from Human Papillomavirus
KAAMLAVFKDI

SEQ ID NO: 23206 - protein, 9 aa, Artificial Sequence
  Peptide Derived from Human Papillomavirus
KAKRRLFTI

SEQ ID NO: 23207 - protein, 10 aa, Artificial Sequence
  Peptide Derived from Human Papillomavirus
KSDKTTCTDW

SEQ ID NO: 23208 - protein, 11 aa, Artificial Sequence
  Peptide Derived from Human Papillomavirus
KSDKTTCTDWV

SEQ ID NO: 23209 - protein, 8 aa, Artificial Sequence
  Peptide Derived from Human Papillomavirus
KSNCQAKY

SEQ ID NO: 23210 - protein, 9 aa, Artificial Sequence
  Peptide Derived from Human Papillomavirus
KSNCQAKYL

SEQ ID NO: 23211 - protein, 8 aa, Artificial Sequence
  Peptide Derived from Human Papillomavirus
KSYFGMSF

SEQ ID NO: 23212 - protein, 9 aa, Artificial Sequence
  Peptide Derived from Human Papillomavirus
KSYFGMSFI

SEQ ID NO: 23213 - protein, 11 aa, Artificial Sequence
  Peptide Derived from Human Papillomavirus
KSYFGMSFIHF

SEQ ID NO: 23214 - protein, 9 aa, Artificial Sequence
  Peptide Derived from Human Papillomavirus
KTLIKPATL

SEQ ID NO: 23215 - protein, 10 aa, Artificial Sequence
  Peptide Derived from Human Papillomavirus
KTLIKPATLY

SEQ ID NO: 23216 - protein, 11 aa, Artificial Sequence
  Peptide Derived from Human Papillomavirus
KTLIKPATLYA

SEQ ID NO: 23217 - protein, 8 aa, Artificial Sequence
  Peptide Derived from Human Papillomavirus
KTTCTDWV

SEQ ID NO: 23218 - protein, 9 aa, Artificial Sequence
  Peptide Derived from Human Papillomavirus
KTTCTDWVM

SEQ ID NO: 23219 - protein, 10 aa, Artificial Sequence
  Peptide Derived from Human Papillomavirus
KTTCTDWVMA

SEQ ID NO: 23220 - protein, 11 aa, Artificial Sequence
  Peptide Derived from Human Papillomavirus
KTTCTDWVMAI

SEQ ID NO: 23221 - protein, 8 aa, Artificial Sequence
  Peptide Derived from Human Papillomavirus
LADCNSNA

SEQ ID NO: 23222 - protein, 9 aa, Artificial Sequence
  Peptide Derived from Human Papillomavirus
LADCNSNAA

SEQ ID NO: 23223 - protein, 10 aa, Artificial Sequence
  Peptide Derived from Human Papillomavirus
LADCNSNAAA

SEQ ID NO: 23224 - protein, 11 aa, Artificial Sequence
  Peptide Derived from Human Papillomavirus
LADCNSNAAAF

SEQ ID NO: 23225 - protein, 8 aa, Artificial Sequence
  Peptide Derived from Human Papillomavirus
LADTKVAM

SEQ ID NO: 23226 - protein, 9 aa, Artificial Sequence
  Peptide Derived from Human Papillomavirus
LADTKVAML

SEQ ID NO: 23227 - protein, 8 aa, Artificial Sequence
  Peptide Derived from Human Papillomavirus
LAVFKDIY

SEQ ID NO: 23228 - protein, 10 aa, Artificial Sequence
  Peptide Derived from Human Papillomavirus
LAVFKDIYGL

SEQ ID NO: 23229 - protein, 8 aa, Artificial Sequence
  Peptide Derived from Human Papillomavirus
LSDMVQWA

SEQ ID NO: 23230 - protein, 9 aa, Artificial Sequence
  Peptide Derived from Human Papillomavirus
LSDMVQWAF

SEQ ID NO: 23231 - protein, 10 aa, Artificial Sequence
  Peptide Derived from Human Papillomavirus
LSFTDLVRNF

SEQ ID NO: 23232 - protein, 8 aa, Artificial Sequence
  Peptide Derived from Human Papillomavirus
LSPRLQEI

SEQ ID NO: 23233 - protein, 10 aa, Artificial Sequence
  Peptide Derived from Human Papillomavirus
LSPRLQEISL

SEQ ID NO: 23234 - protein, 11 aa, Artificial Sequence
  Peptide Derived from Human Papillomavirus
LSVDTDLSPRL

SEQ ID NO: 23235 - protein, 8 aa, Artificial Sequence
  Peptide Derived from Human Papillomavirus
LTDESDMA

SEQ ID NO: 23236 - protein, 9 aa, Artificial Sequence
  Peptide Derived from Human Papillomavirus
LTDESDMAF

SEQ ID NO: 23237 - protein, 11 aa, Artificial Sequence
  Peptide Derived from Human Papillomavirus
LTDESDMAFQY

SEQ ID NO: 23238 - protein, 8 aa, Artificial Sequence
  Peptide Derived from Human Papillomavirus
LTIIQHGI

SEQ ID NO: 23239 - protein, 8 aa, Artificial Sequence
  Peptide Derived from Human Papillomavirus
LTSNIDPA

SEQ ID NO: 23240 - protein, 10 aa, Artificial Sequence
  Peptide Derived from Human Papillomavirus
LTVAKGLSTL

SEQ ID NO: 23241 - protein, 11 aa, Artificial Sequence
  Peptide Derived from Human Papillomavirus
LTVAKGLSTLL

SEQ ID NO: 23242 - protein, 8 aa, Artificial Sequence
  Peptide Derived from Human Papillomavirus
MAFQYAQL

SEQ ID NO: 23243 - protein, 9 aa, Artificial Sequence
  Peptide Derived from Human Papillomavirus
MAFQYAQLA

SEQ ID NO: 23244 - protein, 10 aa, Artificial Sequence
  Peptide Derived from Human Papillomavirus
MAIFGVNPTV

SEQ ID NO: 23245 - protein, 11 aa, Artificial Sequence
  Peptide Derived from Human Papillomavirus
MAIFGVNPTVA

SEQ ID NO: 23246 - protein, 10 aa, Artificial Sequence
  Peptide Derived from Human Papillomavirus
MSFIHFLQGA

SEQ ID NO: 23247 - protein, 11 aa, Artificial Sequence
  Peptide Derived from Human Papillomavirus
MSFIHFLQGAI

SEQ ID NO: 23248 - protein, 8 aa, Artificial Sequence
  Peptide Derived from Human Papillomavirus
NAENGGSV

SEQ ID NO: 23249 - protein, 11 aa, Artificial Sequence
  Peptide Derived from Human Papillomavirus
NAENVDPHCSI

SEQ ID NO: 23250 - protein, 8 aa, Artificial Sequence
  Peptide Derived from Human Papillomavirus
NALDGNPI

SEQ ID NO: 23251 - protein, 10 aa, Artificial Sequence
  Peptide Derived from Human Papillomavirus
NALDGNPISI

SEQ ID NO: 23252 - protein, 11 aa, Artificial Sequence
  Peptide Derived from Human Papillomavirus
NSGHKKAKRRL

SEQ ID NO: 23253 - protein, 9 aa, Artificial Sequence
  Peptide Derived from Human Papillomavirus
NSHFWLEPL

SEQ ID NO: 23254 - protein, 10 aa, Artificial Sequence
  Peptide Derived from Human Papillomavirus
NSHFWLEPLA

SEQ ID NO: 23255 - protein, 8 aa, Artificial Sequence
  Peptide Derived from Human Papillomavirus
NSNAAAFL

SEQ ID NO: 23256 - protein, 8 aa, Artificial Sequence
  Peptide Derived from Human Papillomavirus
NSNSHFWL

SEQ ID NO: 23257 - protein, 11 aa, Artificial Sequence
  Peptide Derived from Human Papillomavirus
NSNSHFWLEPL

SEQ ID NO: 23258 - protein, 8 aa, Artificial Sequence
  Peptide Derived from Human Papillomavirus
NSPLGEQL

SEQ ID NO: 23259 - protein, 10 aa, Artificial Sequence
  Peptide Derived from Human Papillomavirus
NSPLGEQLSV

SEQ ID NO: 23260 - protein, 9 aa, Artificial Sequence
  Peptide Derived from Human Papillomavirus
NTGKSYFGM

SEQ ID NO: 23261 - protein, 11 aa, Artificial Sequence
  Peptide Derived from Human Papillomavirus
NTGKSYFGMSF

SEQ ID NO: 23262 - protein, 10 aa, Artificial Sequence
  Peptide Derived from Human Papillomavirus
NTNAENGGSV

SEQ ID NO: 23263 - protein, 9 aa, Artificial Sequence
  Peptide Derived from Human Papillomavirus
PAKDNKWPY

SEQ ID NO: 23264 - protein, 10 aa, Artificial Sequence
  Peptide Derived from Human Papillomavirus
PAKDNKWPYL

SEQ ID NO: 23265 - protein, 8 aa, Artificial Sequence
  Peptide Derived from Human Papillomavirus
PANTGKSY

SEQ ID NO: 23266 - protein, 9 aa, Artificial Sequence
  Peptide Derived from Human Papillomavirus
PANTGKSYF

SEQ ID NO: 23267 - protein, 11 aa, Artificial Sequence
  Peptide Derived from Human Papillomavirus
PANTGKSYFGM

SEQ ID NO: 23268 - protein, 8 aa, Artificial Sequence
  Peptide Derived from Human Papillomavirus
PATLYAHI

SEQ ID NO: 23269 - protein, 11 aa, Artificial Sequence
  Peptide Derived from Human Papillomavirus
PATLYAHIQCL

SEQ ID NO: 23270 - protein, 10 aa, Artificial Sequence
  Peptide Derived from Human Papillomavirus
PTVAEGFKTL

SEQ ID NO: 23271 - protein, 11 aa, Artificial Sequence
  Peptide Derived from Human Papillomavirus
PTVAEGFKTLI

SEQ ID NO: 23272 - protein, 9 aa, Artificial Sequence
  Peptide Derived from Human Papillomavirus
QAEQETAQA

SEQ ID NO: 23273 - protein, 10 aa, Artificial Sequence
  Peptide Derived from Human Papillomavirus
QAEQETAQAL

SEQ ID NO: 23274 - protein, 11 aa, Artificial Sequence
  Peptide Derived from Human Papillomavirus
QAEQETAQALF

SEQ ID NO: 23275 - protein, 9 aa, Artificial Sequence
  Peptide Derived from Human Papillomavirus
QAKYLKDCA

SEQ ID NO: 23276 - protein, 10 aa, Artificial Sequence
  Peptide Derived from Human Papillomavirus
QAKYLKDCAV

SEQ ID NO: 23277 - protein, 11 aa, Artificial Sequence
  Peptide Derived from Human Papillomavirus
QAKYLKDCAVM

SEQ ID NO: 23278 - protein, 9 aa, Artificial Sequence
  Peptide Derived from Human Papillomavirus
QALFHAQEV

SEQ ID NO: 23279 - protein, 8 aa, Artificial Sequence
  Peptide Derived from Human Papillomavirus
QASNKKAA

SEQ ID NO: 23280 - protein, 9 aa, Artificial Sequence
  Peptide Derived from Human Papillomavirus
QASNKKAAM

SEQ ID NO: 23281 - protein, 10 aa, Artificial Sequence
  Peptide Derived from Human Papillomavirus
QASNKKAAML

SEQ ID NO: 23282 - protein, 11 aa, Artificial Sequence
  Peptide Derived from Human Papillomavirus
QASNKKAAMLA

SEQ ID NO: 23283 - protein, 11 aa, Artificial Sequence
  Peptide Derived from Human Papillomavirus
QSSGGDSSDNA

SEQ ID NO: 23284 - protein, 9 aa, Artificial Sequence
  Peptide Derived from Human Papillomavirus
RAQKRQMNM

SEQ ID NO: 23285 - protein, 8 aa, Artificial Sequence
  Peptide Derived from Human Papillomavirus
RSSVAALY

SEQ ID NO: 23286 - protein, 9 aa, Artificial Sequence
  Peptide Derived from Human Papillomavirus
RSSVAALYW

SEQ ID NO: 23287 - protein, 10 aa, Artificial Sequence
  Peptide Derived from Human Papillomavirus
RSSVAALYWY

SEQ ID NO: 23288 - protein, 10 aa, Artificial Sequence
  Peptide Derived from Human Papillomavirus
RTGISNISEV

SEQ ID NO: 23289 - protein, 8 aa, Artificial Sequence
  Peptide Derived from Human Papillomavirus
RTWSRLDL

SEQ ID NO: 23290 - protein, 8 aa, Artificial Sequence
  Peptide Derived from Human Papillomavirus
SSDNAENV

SEQ ID NO: 23291 - protein, 10 aa, Artificial Sequence
  Peptide Derived from Human Papillomavirus
SSGGDSSDNA

SEQ ID NO: 23292 - protein, 8 aa, Artificial Sequence
  Peptide Derived from Human Papillomavirus
SSVAALYW

SEQ ID NO: 23293 - protein, 9 aa, Artificial Sequence
  Peptide Derived from Human Papillomavirus
SSVAALYWY

SEQ ID NO: 23294 - protein, 11 aa, Artificial Sequence
  Peptide Derived from Human Papillomavirus
STLLHVPETCM

SEQ ID NO: 23295 - protein, 8 aa, Artificial Sequence
  Peptide Derived from Human Papillomavirus
TAQALFHA

SEQ ID NO: 23296 - protein, 11 aa, Artificial Sequence
  Peptide Derived from Human Papillomavirus
TAQALFHAQEV

SEQ ID NO: 23297 - protein, 9 aa, Artificial Sequence
  Peptide Derived from Human Papillomavirus
TATDTGSDM

SEQ ID NO: 23298 - protein, 10 aa, Artificial Sequence
  Peptide Derived from Human Papillomavirus
TATDTGSDMV

SEQ ID NO: 23299 - protein, 8 aa, Artificial Sequence
  Peptide Derived from Human Papillomavirus
TTCTDWVM

SEQ ID NO: 23300 - protein, 9 aa, Artificial Sequence
  Peptide Derived from Human Papillomavirus
TTCTDWVMA

SEQ ID NO: 23301 - protein, 10 aa, Artificial Sequence
  Peptide Derived from Human Papillomavirus
TTCTDWVMAI

SEQ ID NO: 23302 - protein, 11 aa, Artificial Sequence
  Peptide Derived from Human Papillomavirus
TTCTDWVMAIF

SEQ ID NO: 23303 - protein, 11 aa, Artificial Sequence
  Peptide Derived from Human Papillomavirus
VAALYWYRTGI

SEQ ID NO: 23304 - protein, 8 aa, Artificial Sequence
  Peptide Derived from Human Papillomavirus
VAEGFKTL

SEQ ID NO: 23305 - protein, 9 aa, Artificial Sequence
  Peptide Derived from Human Papillomavirus
VAEGFKTLI

SEQ ID NO: 23306 - protein, 8 aa, Artificial Sequence
  Peptide Derived from Human Papillomavirus
VAKGLSTL

SEQ ID NO: 23307 - protein, 9 aa, Artificial Sequence
  Peptide Derived from Human Papillomavirus
VAKGLSTLL

SEQ ID NO: 23308 - protein, 11 aa, Artificial Sequence
  Peptide Derived from Human Papillomavirus
VAKGLSTLLHV

SEQ ID NO: 23309 - protein, 8 aa, Artificial Sequence
  Peptide Derived from Human Papillomavirus
VSGDTPEW

SEQ ID NO: 23310 - protein, 9 aa, Artificial Sequence
  Peptide Derived from Human Papillomavirus
VSGDTPEWI

SEQ ID NO: 23311 - protein, 9 aa, Artificial Sequence
  Peptide Derived from Human Papillomavirus
VTGQNTRPL

SEQ ID NO: 23312 - protein, 9 aa, Artificial Sequence
  Peptide Derived from Human Papillomavirus
VTVFTFPHA

SEQ ID NO: 23313 - protein, 10 aa, Artificial Sequence
  Peptide Derived from Human Papillomavirus
VTVFTFPHAF

SEQ ID NO: 23314 - protein, 8 aa, Artificial Sequence
  Peptide Derived from Human Papillomavirus
WTYFDNYM

SEQ ID NO: 23315 - protein, 11 aa, Artificial Sequence
  Peptide Derived from Human Papillomavirus
WTYFDNYMRNA

SEQ ID NO: 23316 - protein, 11 aa, Artificial Sequence
  Peptide Derived from Human Papillomavirus
YAHIQCLDCKW

SEQ ID NO: 23317 - protein, 11 aa, Artificial Sequence
  Peptide Derived from Human Papillomavirus
YAQLADCNSNA

SEQ ID NO: 23318 - protein, 9 aa, Artificial Sequence
  Peptide Derived from Human Papillomavirus
AACVSYWGV

SEQ ID NO: 23319 - protein, 10 aa, Artificial Sequence
  Peptide Derived from Human Papillomavirus
AACVSYWGVY

SEQ ID NO: 23320 - protein, 11 aa, Artificial Sequence
  Peptide Derived from Human Papillomavirus
AACVSYWGVYY

SEQ ID NO: 23321 - protein, 9 aa, Artificial Sequence
  Peptide Derived from Human Papillomavirus
ASTSTPKTA

SEQ ID NO: 23322 - protein, 11 aa, Artificial Sequence
  Peptide Derived from Human Papillomavirus
ASTSTPKTASV

SEQ ID NO: 23323 - protein, 10 aa, Artificial Sequence
  Peptide Derived from Human Papillomavirus
ASVGTPKPHI

SEQ ID NO: 23324 - protein, 10 aa, Artificial Sequence
  Peptide Derived from Human Papillomavirus
ATKRPRQCGL

SEQ ID NO: 23325 - protein, 8 aa, Artificial Sequence
  Peptide Derived from Human Papillomavirus
ATQIVRQL

SEQ ID NO: 23326 - protein, 11 aa, Artificial Sequence
  Peptide Derived from Human Papillomavirus
ATQIVRQLQHA

SEQ ID NO: 23327 - protein, 8 aa, Artificial Sequence
  Peptide Derived from Human Papillomavirus
CSGNTTPI

SEQ ID NO: 23328 - protein, 9 aa, Artificial Sequence
  Peptide Derived from Human Papillomavirus
CSGNTTPII

SEQ ID NO: 23329 - protein, 11 aa, Artificial Sequence
  Peptide Derived from Human Papillomavirus
CSGNTTPIIHL

SEQ ID NO: 23330 - protein, 8 aa, Artificial Sequence
  Peptide Derived from Human Papillomavirus
CSTSDDTV

SEQ ID NO: 23331 - protein, 10 aa, Artificial Sequence
  Peptide Derived from Human Papillomavirus
CSTSDDTVSA

SEQ ID NO: 23332 - protein, 11 aa, Artificial Sequence
  Peptide Derived from Human Papillomavirus
DSIYYITETGI

SEQ ID NO: 23333 - protein, 9 aa, Artificial Sequence
  Peptide Derived from Human Papillomavirus
DSKDINSQI

SEQ ID NO: 23334 - protein, 11 aa, Artificial Sequence
  Peptide Derived from Human Papillomavirus
DSKDINSQISY

SEQ ID NO: 23335 - protein, 11 aa, Artificial Sequence
  Peptide Derived from Human Papillomavirus
DSMCSTSDDTV

SEQ ID NO: 23336 - protein, 8 aa, Artificial Sequence
  Peptide Derived from Human Papillomavirus
DTTYYVQF

SEQ ID NO: 23337 - protein, 8 aa, Artificial Sequence
  Peptide Derived from Human Papillomavirus
DTVSATQI

SEQ ID NO: 23338 - protein, 9 aa, Artificial Sequence
  Peptide Derived from Human Papillomavirus
DTVSATQIV

SEQ ID NO: 23339 - protein, 9 aa, Artificial Sequence
  Peptide Derived from Human Papillomavirus
ESLSERLSA

SEQ ID NO: 23340 - protein, 10 aa, Artificial Sequence
  Peptide Derived from Human Papillomavirus
ESLSERLSAL

SEQ ID NO: 23341 - protein, 9 aa, Artificial Sequence
  Peptide Derived from Human Papillomavirus
ETGIWDKTA

SEQ ID NO: 23342 - protein, 10 aa, Artificial Sequence
  Peptide Derived from Human Papillomavirus
ETGIWDKTAA

SEQ ID NO: 23343 - protein, 8 aa, Artificial Sequence
  Peptide Derived from Human Papillomavirus
FTAREHGI

SEQ ID NO: 23344 - protein, 11 aa, Artificial Sequence
  Peptide Derived from Human Papillomavirus
FTAREHGITKL

SEQ ID NO: 23345 - protein, 11 aa, Artificial Sequence
  Peptide Derived from Human Papillomavirus
GTPKPHIQTPA

SEQ ID NO: 23346 - protein, 10 aa, Artificial Sequence
  Peptide Derived from Human Papillomavirus
HASTSTPKTA

SEQ ID NO: 23347 - protein, 9 aa, Artificial Sequence
  Peptide Derived from Human Papillomavirus
ISKSKAHKA

SEQ ID NO: 23348 - protein, 10 aa, Artificial Sequence
  Peptide Derived from Human Papillomavirus
ISKSKAHKAI

SEQ ID NO: 23349 - protein, 8 aa, Artificial Sequence
  Peptide Derived from Human Papillomavirus
ISVGYMTI

SEQ ID NO: 23350 - protein, 9 aa, Artificial Sequence
  Peptide Derived from Human Papillomavirus
ISYWQLIRL

SEQ ID NO: 23351 - protein, 11 aa, Artificial Sequence
  Peptide Derived from Human Papillomavirus
ITETGIWDKTA

SEQ ID NO: 23352 - protein, 8 aa, Artificial Sequence
  Peptide Derived from Human Papillomavirus
ITKLNHQV

SEQ ID NO: 23353 - protein, 9 aa, Artificial Sequence
  Peptide Derived from Human Papillomavirus
ITKLNHQVV

SEQ ID NO: 23354 - protein, 8 aa, Artificial Sequence
  Peptide Derived from Human Papillomavirus
KAHKAIEL

SEQ ID NO: 23355 - protein, 10 aa, Artificial Sequence
  Peptide Derived from Human Papillomavirus
KAHKAIELQM

SEQ ID NO: 23356 - protein, 11 aa, Artificial Sequence
  Peptide Derived from Human Papillomavirus
KAHKAIELQMA

SEQ ID NO: 23357 - protein, 8 aa, Artificial Sequence
  Peptide Derived from Human Papillomavirus
KAIELQMA

SEQ ID NO: 23358 - protein, 9 aa, Artificial Sequence
  Peptide Derived from Human Papillomavirus
KAIELQMAL

SEQ ID NO: 23359 - protein, 8 aa, Artificial Sequence
  Peptide Derived from Human Papillomavirus
KSKAHKAI

SEQ ID NO: 23360 - protein, 10 aa, Artificial Sequence
  Peptide Derived from Human Papillomavirus
KSKAHKAIEL

SEQ ID NO: 23361 - protein, 8 aa, Artificial Sequence
  Peptide Derived from Human Papillomavirus
KTAACVSY

SEQ ID NO: 23362 - protein, 9 aa, Artificial Sequence
  Peptide Derived from Human Papillomavirus
KTAACVSYW

SEQ ID NO: 23363 - protein, 11 aa, Artificial Sequence
  Peptide Derived from Human Papillomavirus
KTAACVSYWGV

SEQ ID NO: 23364 - protein, 11 aa, Artificial Sequence
  Peptide Derived from Human Papillomavirus
LAQSKYNNEEW

SEQ ID NO: 23365 - protein, 8 aa, Artificial Sequence
  Peptide Derived from Human Papillomavirus
LSALQDKI

SEQ ID NO: 23366 - protein, 9 aa, Artificial Sequence
  Peptide Derived from Human Papillomavirus
LSALQDKIL

SEQ ID NO: 23367 - protein, 8 aa, Artificial Sequence
  Peptide Derived from Human Papillomavirus
LSERLSAL

SEQ ID NO: 23368 - protein, 9 aa, Artificial Sequence
  Peptide Derived from Human Papillomavirus
LTEQHHGRV

SEQ ID NO: 23369 - protein, 9 aa, Artificial Sequence
  Peptide Derived from Human Papillomavirus
LTVTYNSEV

SEQ ID NO: 23370 - protein, 11 aa, Artificial Sequence
  Peptide Derived from Human Papillomavirus
MALKGLAQSKY

SEQ ID NO: 23371 - protein, 9 aa, Artificial Sequence
  Peptide Derived from Human Papillomavirus
NSEVQRNTF

SEQ ID NO: 23372 - protein, 10 aa, Artificial Sequence
  Peptide Derived from Human Papillomavirus
NSEVQRNTFL

SEQ ID NO: 23373 - protein, 8 aa, Artificial Sequence
  Peptide Derived from Human Papillomavirus
NSLKCLRY

SEQ ID NO: 23374 - protein, 10 aa, Artificial Sequence
  Peptide Derived from Human Papillomavirus
NSLKCLRYRL

SEQ ID NO: 23375 - protein, 9 aa, Artificial Sequence
  Peptide Derived from Human Papillomavirus
NSNTWEVQY

SEQ ID NO: 23376 - protein, 9 aa, Artificial Sequence
  Peptide Derived from Human Papillomavirus
NSQISYWQL

SEQ ID NO: 23377 - protein, 10 aa, Artificial Sequence
  Peptide Derived from Human Papillomavirus
NSQISYWQLI

SEQ ID NO: 23378 - protein, 9 aa, Artificial Sequence
  Peptide Derived from Human Papillomavirus
NSVQISVGY

SEQ ID NO: 23379 - protein, 10 aa, Artificial Sequence
  Peptide Derived from Human Papillomavirus
NSVQISVGYM

SEQ ID NO: 23380 - protein, 8 aa, Artificial Sequence
  Peptide Derived from Human Papillomavirus
NTEPSQCF

SEQ ID NO: 23381 - protein, 9 aa, Artificial Sequence
  Peptide Derived from Human Papillomavirus
NTFLDVVTI

SEQ ID NO: 23382 - protein, 9 aa, Artificial Sequence
  Peptide Derived from Human Papillomavirus
NTGILTVTY

SEQ ID NO: 23383 - protein, 8 aa, Artificial Sequence
  Peptide Derived from Human Papillomavirus
NTHVHNPL

SEQ ID NO: 23384 - protein, 9 aa, Artificial Sequence
  Peptide Derived from Human Papillomavirus
NTHVHNPLL

SEQ ID NO: 23385 - protein, 8 aa, Artificial Sequence
  Peptide Derived from Human Papillomavirus
NTTPIIHL

SEQ ID NO: 23386 - protein, 11 aa, Artificial Sequence
  Peptide Derived from Human Papillomavirus
NTWEVQYGGNV

SEQ ID NO: 23387 - protein, 11 aa, Artificial Sequence
  Peptide Derived from Human Papillomavirus
PATKRPRQCGL

SEQ ID NO: 23388 - protein, 9 aa, Artificial Sequence
  Peptide Derived from Human Papillomavirus
QSKYNNEEW

SEQ ID NO: 23389 - protein, 11 aa, Artificial Sequence
  Peptide Derived from Human Papillomavirus
QSKYNNEEWTL

SEQ ID NO: 23390 - protein, 11 aa, Artificial Sequence
  Peptide Derived from Human Papillomavirus
QTPKESLSERL

SEQ ID NO: 23391 - protein, 8 aa, Artificial Sequence
  Peptide Derived from Human Papillomavirus
SALQDKIL

SEQ ID NO: 23392 - protein, 11 aa, Artificial Sequence
  Peptide Derived from Human Papillomavirus
SALQDKILDHY

SEQ ID NO: 23393 - protein, 9 aa, Artificial Sequence
  Peptide Derived from Human Papillomavirus
SATQIVRQL

SEQ ID NO: 23394 - protein, 11 aa, Artificial Sequence
  Peptide Derived from Human Papillomavirus
SSTSNNKRRKV

SEQ ID NO: 23395 - protein, 8 aa, Artificial Sequence
  Peptide Derived from Human Papillomavirus
STPKTASV

SEQ ID NO: 23396 - protein, 9 aa, Artificial Sequence
  Peptide Derived from Human Papillomavirus
STSDDTVSA

SEQ ID NO: 23397 - protein, 10 aa, Artificial Sequence
  Peptide Derived from Human Papillomavirus
STSNNKRRKV

SEQ ID NO: 23398 - protein, 8 aa, Artificial Sequence
  Peptide Derived from Human Papillomavirus
STSTPKTA

SEQ ID NO: 23399 - protein, 10 aa, Artificial Sequence
  Peptide Derived from Human Papillomavirus
STSTPKTASV

SEQ ID NO: 23400 - protein, 8 aa, Artificial Sequence
  Peptide Derived from Human Papillomavirus
TAACVSYW

SEQ ID NO: 23401 - protein, 10 aa, Artificial Sequence
  Peptide Derived from Human Papillomavirus
TAACVSYWGV

SEQ ID NO: 23402 - protein, 11 aa, Artificial Sequence
  Peptide Derived from Human Papillomavirus
TAACVSYWGVY

SEQ ID NO: 23403 - protein, 10 aa, Artificial Sequence
  Peptide Derived from Human Papillomavirus
TAREHGITKL

SEQ ID NO: 23404 - protein, 11 aa, Artificial Sequence
  Peptide Derived from Human Papillomavirus
TASVGTPKPHI

SEQ ID NO: 23405 - protein, 8 aa, Artificial Sequence
  Peptide Derived from Human Papillomavirus
TSDDTVSA

SEQ ID NO: 23406 - protein, 11 aa, Artificial Sequence
  Peptide Derived from Human Papillomavirus
TSDDTVSATQI

SEQ ID NO: 23407 - protein, 9 aa, Artificial Sequence
  Peptide Derived from Human Papillomavirus
TSNNKRRKV

SEQ ID NO: 23408 - protein, 9 aa, Artificial Sequence
  Peptide Derived from Human Papillomavirus
TSTPKTASV

SEQ ID NO: 23409 - protein, 10 aa, Artificial Sequence
  Peptide Derived from Human Papillomavirus
VSATQIVRQL

SEQ ID NO: 23410 - protein, 8 aa, Artificial Sequence
  Peptide Derived from Human Papillomavirus
VSYWGVYY

SEQ ID NO: 23411 - protein, 9 aa, Artificial Sequence
  Peptide Derived from Human Papillomavirus
VSYWGVYYI

SEQ ID NO: 23412 - protein, 9 aa, Artificial Sequence
  Peptide Derived from Human Papillomavirus
VTIPNSVQI

SEQ ID NO: 23413 - protein, 11 aa, Artificial Sequence
  Peptide Derived from Human Papillomavirus
VTIPNSVQISV

SEQ ID NO: 23414 - protein, 10 aa, Artificial Sequence
  Peptide Derived from Human Papillomavirus
WTGCNKNTGI

SEQ ID NO: 23415 - protein, 11 aa, Artificial Sequence
  Peptide Derived from Human Papillomavirus
WTGCNKNTGIL

SEQ ID NO: 23416 - protein, 10 aa, Artificial Sequence
  Peptide Derived from Human Papillomavirus
WTLQDTCEEL

SEQ ID NO: 23417 - protein, 11 aa, Artificial Sequence
  Peptide Derived from Human Papillomavirus
WTLQDTCEELW

SEQ ID NO: 23418 - protein, 8 aa, Artificial Sequence
  Peptide Derived from Human Papillomavirus
YADHYSEI

SEQ ID NO: 23419 - protein, 8 aa, Artificial Sequence
  Peptide Derived from Human Papillomavirus
YSEISSTW

SEQ ID NO: 23420 - protein, 10 aa, Artificial Sequence
  Peptide Derived from Human Papillomavirus
YSEISSTWHW

SEQ ID NO: 23421 - protein, 9 aa, Artificial Sequence
  Peptide Derived from Human Papillomavirus
AACHKCIDF

SEQ ID NO: 23422 - protein, 10 aa, Artificial Sequence
  Peptide Derived from Human Papillomavirus
AACHKCIDFY

SEQ ID NO: 23423 - protein, 8 aa, Artificial Sequence
  Peptide Derived from Human Papillomavirus
ATLERTEV

SEQ ID NO: 23424 - protein, 9 aa, Artificial Sequence
  Peptide Derived from Human Papillomavirus
ATLERTEVY

SEQ ID NO: 23425 - protein, 11 aa, Artificial Sequence
  Peptide Derived from Human Papillomavirus
ATLERTEVYQF

SEQ ID NO: 23426 - protein, 8 aa, Artificial Sequence
  Peptide Derived from Human Papillomavirus
CTELNTSL

SEQ ID NO: 23427 - protein, 11 aa, Artificial Sequence
  Peptide Derived from Human Papillomavirus
CTELNTSLQDV

SEQ ID NO: 23428 - protein, 11 aa, Artificial Sequence
  Peptide Derived from Human Papillomavirus
ETLEKITNTEL

SEQ ID NO: 23429 - protein, 8 aa, Artificial Sequence
  Peptide Derived from Human Papillomavirus
FAFKDLFI

SEQ ID NO: 23430 - protein, 9 aa, Artificial Sequence
  Peptide Derived from Human Papillomavirus
FAFKDLFIV

SEQ ID NO: 23431 - protein, 10 aa, Artificial Sequence
  Peptide Derived from Human Papillomavirus
FAFKDLFIVY

SEQ ID NO: 23432 - protein, 8 aa, Artificial Sequence
  Peptide Derived from Human Papillomavirus
IACVYCKA

SEQ ID NO: 23433 - protein, 10 aa, Artificial Sequence
  Peptide Derived from Human Papillomavirus
IACVYCKATL

SEQ ID NO: 23434 - protein, 10 aa, Artificial Sequence
  Peptide Derived from Human Papillomavirus
IAYAACHKCI

SEQ ID NO: 23435 - protein, 9 aa, Artificial Sequence
  Peptide Derived from Human Papillomavirus
ITNTELYNL

SEQ ID NO: 23436 - protein, 10 aa, Artificial Sequence
  Peptide Derived from Human Papillomavirus
ITNTELYNLL

SEQ ID NO: 23437 - protein, 11 aa, Artificial Sequence
  Peptide Derived from Human Papillomavirus
ITNTELYNLLI

SEQ ID NO: 23438 - protein, 9 aa, Artificial Sequence
  Peptide Derived from Human Papillomavirus
KATLERTEV

SEQ ID NO: 23439 - protein, 10 aa, Artificial Sequence
  Peptide Derived from Human Papillomavirus
KATLERTEVY

SEQ ID NO: 23440 - protein, 8 aa, Artificial Sequence
  Peptide Derived from Human Papillomavirus
NSVYGETL

SEQ ID NO: 23441 - protein, 11 aa, Artificial Sequence
  Peptide Derived from Human Papillomavirus
NSVYGETLEKI

SEQ ID NO: 23442 - protein, 8 aa, Artificial Sequence
  Peptide Derived from Human Papillomavirus
NTELYNLL

SEQ ID NO: 23443 - protein, 9 aa, Artificial Sequence
  Peptide Derived from Human Papillomavirus
NTELYNLLI

SEQ ID NO: 23444 - protein, 9 aa, Artificial Sequence
  Peptide Derived from Human Papillomavirus
NTSLQDVSI

SEQ ID NO: 23445 - protein, 10 aa, Artificial Sequence
  Peptide Derived from Human Papillomavirus
NTSLQDVSIA

SEQ ID NO: 23446 - protein, 8 aa, Artificial Sequence
  Peptide Derived from Human Papillomavirus
PAEKRRHL

SEQ ID NO: 23447 - protein, 8 aa, Artificial Sequence
  Peptide Derived from Human Papillomavirus
PTQRPYKL

SEQ ID NO: 23448 - protein, 11 aa, Artificial Sequence
  Peptide Derived from Human Papillomavirus
PTQRPYKLPDL

SEQ ID NO: 23449 - protein, 8 aa, Artificial Sequence
  Peptide Derived from Human Papillomavirus
RTEVYQFA

SEQ ID NO: 23450 - protein, 9 aa, Artificial Sequence
  Peptide Derived from Human Papillomavirus
RTEVYQFAF

SEQ ID NO: 23451 - protein, 8 aa, Artificial Sequence
  Peptide Derived from Human Papillomavirus
TSLQDVSI

SEQ ID NO: 23452 - protein, 9 aa, Artificial Sequence
  Peptide Derived from Human Papillomavirus
TSLQDVSIA

SEQ ID NO: 23453 - protein, 11 aa, Artificial Sequence
  Peptide Derived from Human Papillomavirus
TSLQDVSIACV

SEQ ID NO: 23454 - protein, 10 aa, Artificial Sequence
  Peptide Derived from Human Papillomavirus
VSIACVYCKA

SEQ ID NO: 23455 - protein, 8 aa, Artificial Sequence
  Peptide Derived from Human Papillomavirus
YAACHKCI

SEQ ID NO: 23456 - protein, 10 aa, Artificial Sequence
  Peptide Derived from Human Papillomavirus
YAACHKCIDF

SEQ ID NO: 23457 - protein, 11 aa, Artificial Sequence
  Peptide Derived from Human Papillomavirus
YAACHKCIDFY

SEQ ID NO: 23458 - protein, 10 aa, Artificial Sequence
  Peptide Derived from Human Papillomavirus
YSNSVYGETL

SEQ ID NO: 23459 - protein, 9 aa, Artificial Sequence
  Peptide Derived from Human Papillomavirus
YSRIRELRY

SEQ ID NO: 23460 - protein, 10 aa, Artificial Sequence
  Peptide Derived from Human Papillomavirus
YSRIRELRYY

SEQ ID NO: 23461 - protein, 8 aa, Artificial Sequence
  Peptide Derived from Human Papillomavirus
ATLQEIVL

SEQ ID NO: 23462 - protein, 10 aa, Artificial Sequence
  Peptide Derived from Human Papillomavirus
ATLQEIVLHL

SEQ ID NO: 23463 - protein, 8 aa, Artificial Sequence
  Peptide Derived from Human Papillomavirus
EADGVSHA

SEQ ID NO: 23464 - protein, 10 aa, Artificial Sequence
  Peptide Derived from Human Papillomavirus
EADGVSHAQL

SEQ ID NO: 23465 - protein, 9 aa, Artificial Sequence
  Peptide Derived from Human Papillomavirus
ESEEENDEA

SEQ ID NO: 23466 - protein, 10 aa, Artificial Sequence
  Peptide Derived from Human Papillomavirus
ESSADDLRTL

SEQ ID NO: 23467 - protein, 9 aa, Artificial Sequence
  Peptide Derived from Human Papillomavirus
HAQLPARRA

SEQ ID NO: 23468 - protein, 11 aa, Artificial Sequence
  Peptide Derived from Human Papillomavirus
LSESEEENDEA

SEQ ID NO: 23469 - protein, 9 aa, Artificial Sequence
  Peptide Derived from Human Papillomavirus
LSFVCPWCA

SEQ ID NO: 23470 - protein, 10 aa, Artificial Sequence
  Peptide Derived from Human Papillomavirus
LSTLSFVCPW

SEQ ID NO: 23471 - protein, 10 aa, Artificial Sequence
  Peptide Derived from Human Papillomavirus
LTVESSADDL

SEQ ID NO: 23472 - protein, 9 aa, Artificial Sequence
  Peptide Derived from Human Papillomavirus
RAEPQRHKI

SEQ ID NO: 23473 - protein, 10 aa, Artificial Sequence
  Peptide Derived from Human Papillomavirus
RAEPQRHKIL

SEQ ID NO: 23474 - protein, 8 aa, Artificial Sequence
  Peptide Derived from Human Papillomavirus
RATLQEIV

SEQ ID NO: 23475 - protein, 9 aa, Artificial Sequence
  Peptide Derived from Human Papillomavirus
RATLQEIVL

SEQ ID NO: 23476 - protein, 11 aa, Artificial Sequence
  Peptide Derived from Human Papillomavirus
RATLQEIVLHL

SEQ ID NO: 23477 - protein, 8 aa, Artificial Sequence
  Peptide Derived from Human Papillomavirus
RTLQQLFL

SEQ ID NO: 23478 - protein, 11 aa, Artificial Sequence
  Peptide Derived from Human Papillomavirus
RTLQQLFLSTL

SEQ ID NO: 23479 - protein, 8 aa, Artificial Sequence
  Peptide Derived from Human Papillomavirus
SADDLRTL

SEQ ID NO: 23480 - protein, 11 aa, Artificial Sequence
  Peptide Derived from Human Papillomavirus
SADDLRTLQQL

SEQ ID NO: 23481 - protein, 9 aa, Artificial Sequence
  Peptide Derived from Human Papillomavirus
SSADDLRTL

SEQ ID NO: 23482 - protein, 9 aa, Artificial Sequence
  Peptide Derived from Human Papillomavirus
STLSFVCPW

SEQ ID NO: 23483 - protein, 11 aa, Artificial Sequence
  Peptide Derived from Human Papillomavirus
STLSFVCPWCA

SEQ ID NO: 23484 - protein, 8 aa, Artificial Sequence
  Peptide Derived from Human Papillomavirus
VSHAQLPA

SEQ ID NO: 23485 - protein, 11 aa, Artificial Sequence
  Peptide Derived from Human Papillomavirus
VSHAQLPARRA

SEQ ID NO: 23486 - protein, 11 aa, Artificial Sequence
  Peptide Derived from Human Papillomavirus
AASTSTASRPA

SEQ ID NO: 23487 - protein, 10 aa, Artificial Sequence
  Peptide Derived from Human Papillomavirus
AATAVITQDV

SEQ ID NO: 23488 - protein, 8 aa, Artificial Sequence
  Peptide Derived from Human Papillomavirus
ASRPAKRV

SEQ ID NO: 23489 - protein, 10 aa, Artificial Sequence
  Peptide Derived from Human Papillomavirus
ASRPAKRVRI

SEQ ID NO: 23490 - protein, 11 aa, Artificial Sequence
  Peptide Derived from Human Papillomavirus
ASTQNPVPNTY

SEQ ID NO: 23491 - protein, 10 aa, Artificial Sequence
  Peptide Derived from Human Papillomavirus
ASTSTASRPA

SEQ ID NO: 23492 - protein, 9 aa, Artificial Sequence
  Peptide Derived from Human Papillomavirus
ATAVITQDV

SEQ ID NO: 23493 - protein, 8 aa, Artificial Sequence
  Peptide Derived from Human Papillomavirus
CASTQNPV

SEQ ID NO: 23494 - protein, 9 aa, Artificial Sequence
  Peptide Derived from Human Papillomavirus
CTITLTAEV

SEQ ID NO: 23495 - protein, 10 aa, Artificial Sequence
  Peptide Derived from Human Papillomavirus
CTITLTAEVM

SEQ ID NO: 23496 - protein, 9 aa, Artificial Sequence
  Peptide Derived from Human Papillomavirus
DSQLFNKPY

SEQ ID NO: 23497 - protein, 10 aa, Artificial Sequence
  Peptide Derived from Human Papillomavirus
DSQLFNKPYW

SEQ ID NO: 23498 - protein, 11 aa, Artificial Sequence
  Peptide Derived from Human Papillomavirus
DSQLFNKPYWL

SEQ ID NO: 23499 - protein, 11 aa, Artificial Sequence
  Peptide Derived from Human Papillomavirus
DSTVYLPPPSV

SEQ ID NO: 23500 - protein, 8 aa, Artificial Sequence
  Peptide Derived from Human Papillomavirus
DTESAHAA

SEQ ID NO: 23501 - protein, 10 aa, Artificial Sequence
  Peptide Derived from Human Papillomavirus
DTESAHAATA

SEQ ID NO: 23502 - protein, 11 aa, Artificial Sequence
  Peptide Derived from Human Papillomavirus
DTESAHAATAV

SEQ ID NO: 23503 - protein, 9 aa, Artificial Sequence
  Peptide Derived from Human Papillomavirus
DTGYGAMDF

SEQ ID NO: 23504 - protein, 8 aa, Artificial Sequence
  Peptide Derived from Human Papillomavirus
DTKCEVPL

SEQ ID NO: 23505 - protein, 10 aa, Artificial Sequence
  Peptide Derived from Human Papillomavirus
DTKCEVPLDI

SEQ ID NO: 23506 - protein, 11 aa, Artificial Sequence
  Peptide Derived from Human Papillomavirus
DTTPPEKQDPY

SEQ ID NO: 23507 - protein, 8 aa, Artificial Sequence
  Peptide Derived from Human Papillomavirus
DTTRSTNL

SEQ ID NO: 23508 - protein, 10 aa, Artificial Sequence
  Peptide Derived from Human Papillomavirus
DTTRSTNLTL

SEQ ID NO: 23509 - protein, 8 aa, Artificial Sequence
  Peptide Derived from Human Papillomavirus
DTVPTDLY

SEQ ID NO: 23510 - protein, 9 aa, Artificial Sequence
  Peptide Derived from Human Papillomavirus
DTVPTDLYI

SEQ ID NO: 23511 - protein, 9 aa, Artificial Sequence
  Peptide Derived from Human Papillomavirus
DTYRFVQSV

SEQ ID NO: 23512 - protein, 10 aa, Artificial Sequence
  Peptide Derived from Human Papillomavirus
DTYRFVQSVA

SEQ ID NO: 23513 - protein, 11 aa, Artificial Sequence
  Peptide Derived from Human Papillomavirus
DTYRFVQSVAV

SEQ ID NO: 23514 - protein, 8 aa, Artificial Sequence
  Peptide Derived from Human Papillomavirus
ESAHAATA

SEQ ID NO: 23515 - protein, 9 aa, Artificial Sequence
  Peptide Derived from Human Papillomavirus
ESAHAATAV

SEQ ID NO: 23516 - protein, 10 aa, Artificial Sequence
  Peptide Derived from Human Papillomavirus
ESAHAATAVI

SEQ ID NO: 23517 - protein, 8 aa, Artificial Sequence
  Peptide Derived from Human Papillomavirus
ETPGSCVY

SEQ ID NO: 23518 - protein, 8 aa, Artificial Sequence
  Peptide Derived from Human Papillomavirus
ETQRLVWA

SEQ ID NO: 23519 - protein, 10 aa, Artificial Sequence
  Peptide Derived from Human Papillomavirus
ETQRLVWACV

SEQ ID NO: 23520 - protein, 9 aa, Artificial Sequence
  Peptide Derived from Human Papillomavirus
FARHFWNRA

SEQ ID NO: 23521 - protein, 11 aa, Artificial Sequence
  Peptide Derived from Human Papillomavirus
FARHFWNRAGV

SEQ ID NO: 23522 - protein, 8 aa, Artificial Sequence
  Peptide Derived from Human Papillomavirus
FSSDLDQY

SEQ ID NO: 23523 - protein, 10 aa, Artificial Sequence
  Peptide Derived from Human Papillomavirus
FSSDLDQYPL

SEQ ID NO: 23524 - protein, 11 aa, Artificial Sequence
  Peptide Derived from Human Papillomavirus
FSTLQDTKCEV

SEQ ID NO: 23525 - protein, 8 aa, Artificial Sequence
  Peptide Derived from Human Papillomavirus
GAGNKQAV

SEQ ID NO: 23526 - protein, 11 aa, Artificial Sequence
  Peptide Derived from Human Papillomavirus
GAGNKQAVPKV

SEQ ID NO: 23527 - protein, 8 aa, Artificial Sequence
  Peptide Derived from Human Papillomavirus
GAMDFSTL

SEQ ID NO: 23528 - protein, 10 aa, Artificial Sequence
  Peptide Derived from Human Papillomavirus
GSITTSDSQL

SEQ ID NO: 23529 - protein, 11 aa, Artificial Sequence
  Peptide Derived from Human Papillomavirus
GSITTSDSQLF

SEQ ID NO: 23530 - protein, 8 aa, Artificial Sequence
  Peptide Derived from Human Papillomavirus
GSSRLLTV

SEQ ID NO: 23531 - protein, 9 aa, Artificial Sequence
  Peptide Derived from Human Papillomavirus
GTLCKPAQL

SEQ ID NO: 23532 - protein, 11 aa, Artificial Sequence
  Peptide Derived from Human Papillomavirus
HAATAVITQDV

SEQ ID NO: 23533 - protein, 8 aa, Artificial Sequence
  Peptide Derived from Human Papillomavirus
HAGSSRLL

SEQ ID NO: 23534 - protein, 10 aa, Artificial Sequence
  Peptide Derived from Human Papillomavirus
HAGSSRLLTV

SEQ ID NO: 23535 - protein, 8 aa, Artificial Sequence
  Peptide Derived from Human Papillomavirus
HSMNSSIL

SEQ ID NO: 23536 - protein, 11 aa, Artificial Sequence
  Peptide Derived from Human Papillomavirus
HSMNSSILENW

SEQ ID NO: 23537 - protein, 8 aa, Artificial Sequence
  Peptide Derived from Human Papillomavirus
ITLTAEVM

SEQ ID NO: 23538 - protein, 10 aa, Artificial Sequence
  Peptide Derived from Human Papillomavirus
ITLTAEVMSY

SEQ ID NO: 23539 - protein, 11 aa, Artificial Sequence
  Peptide Derived from Human Papillomavirus
ITLTAEVMSYI

SEQ ID NO: 23540 - protein, 9 aa, Artificial Sequence
  Peptide Derived from Human Papillomavirus
ITQDVRDNV

SEQ ID NO: 23541 - protein, 11 aa, Artificial Sequence
  Peptide Derived from Human Papillomavirus
ITQDVRDNVSV

SEQ ID NO: 23542 - protein, 8 aa, Artificial Sequence
  Peptide Derived from Human Papillomavirus
ITTSDSQL

SEQ ID NO: 23543 - protein, 9 aa, Artificial Sequence
  Peptide Derived from Human Papillomavirus
ITTSDSQLF

SEQ ID NO: 23544 - protein, 9 aa, Artificial Sequence
  Peptide Derived from Human Papillomavirus
KAQGHNNGI

SEQ ID NO: 23545 - protein, 11 aa, Artificial Sequence
  Peptide Derived from Human Papillomavirus
KAQGHNNGICW

SEQ ID NO: 23546 - protein, 10 aa, Artificial Sequence
  Peptide Derived from Human Papillomavirus
LSGHPFYNKL

SEQ ID NO: 23547 - protein, 8 aa, Artificial Sequence
  Peptide Derived from Human Papillomavirus
LTAEVMSY

SEQ ID NO: 23548 - protein, 9 aa, Artificial Sequence
  Peptide Derived from Human Papillomavirus
LTAEVMSYI

SEQ ID NO: 23549 - protein, 11 aa, Artificial Sequence
  Peptide Derived from Human Papillomavirus
LTLCASTQNPV

SEQ ID NO: 23550 - protein, 8 aa, Artificial Sequence
  Peptide Derived from Human Papillomavirus
LTVGNPYF

SEQ ID NO: 23551 - protein, 10 aa, Artificial Sequence
  Peptide Derived from Human Papillomavirus
LTVGNPYFRV

SEQ ID NO: 23552 - protein, 11 aa, Artificial Sequence
  Peptide Derived from Human Papillomavirus
LTVGNPYFRVV

SEQ ID NO: 23553 - protein, 11 aa, Artificial Sequence
  Peptide Derived from Human Papillomavirus
MAHNIIYGHGI

SEQ ID NO: 23554 - protein, 11 aa, Artificial Sequence
  Peptide Derived from Human Papillomavirus
MALWRPSDSTV

SEQ ID NO: 23555 - protein, 10 aa, Artificial Sequence
  Peptide Derived from Human Papillomavirus
MSADPYGDSM

SEQ ID NO: 23556 - protein, 11 aa, Artificial Sequence
  Peptide Derived from Human Papillomavirus
MSADPYGDSMF

SEQ ID NO: 23557 - protein, 11 aa, Artificial Sequence
  Peptide Derived from Human Papillomavirus
MSYIHSMNSSI

SEQ ID NO: 23558 - protein, 8 aa, Artificial Sequence
  Peptide Derived from Human Papillomavirus
NSSILENW

SEQ ID NO: 23559 - protein, 10 aa, Artificial Sequence
  Peptide Derived from Human Papillomavirus
NSSILENWNF

SEQ ID NO: 23560 - protein, 11 aa, Artificial Sequence
  Peptide Derived from Human Papillomavirus
NTDDYVSRTSI

SEQ ID NO: 23561 - protein, 9 aa, Artificial Sequence
  Peptide Derived from Human Papillomavirus
NTIIEDGDM

SEQ ID NO: 23562 - protein, 10 aa, Artificial Sequence
  Peptide Derived from Human Papillomavirus
NTIIEDGDMV

SEQ ID NO: 23563 - protein, 8 aa, Artificial Sequence
  Peptide Derived from Human Papillomavirus
NTYDPTKF

SEQ ID NO: 23564 - protein, 11 aa, Artificial Sequence
  Peptide Derived from Human Papillomavirus
NTYDPTKFKHY

SEQ ID NO: 23565 - protein, 8 aa, Artificial Sequence
  Peptide Derived from Human Papillomavirus
PAASTSTA

SEQ ID NO: 23566 - protein, 8 aa, Artificial Sequence
  Peptide Derived from Human Papillomavirus
PAIGEHWA

SEQ ID NO: 23567 - protein, 8 aa, Artificial Sequence
  Peptide Derived from Human Papillomavirus
PSDSTVYL

SEQ ID NO: 23568 - protein, 9 aa, Artificial Sequence
  Peptide Derived from Human Papillomavirus
PSGAGNKQA

SEQ ID NO: 23569 - protein, 10 aa, Artificial Sequence
  Peptide Derived from Human Papillomavirus
PSGAGNKQAV

SEQ ID NO: 23570 - protein, 11 aa, Artificial Sequence
  Peptide Derived from Human Papillomavirus
PTDLYIKGTSA

SEQ ID NO: 23571 - protein, 10 aa, Artificial Sequence
  Peptide Derived from Human Papillomavirus
PTIGPRKRPA

SEQ ID NO: 23572 - protein, 11 aa, Artificial Sequence
  Peptide Derived from Human Papillomavirus
PTIGPRKRPAA

SEQ ID NO: 23573 - protein, 11 aa, Artificial Sequence
  Peptide Derived from Human Papillomavirus
PTKFKHYSRHV

SEQ ID NO: 23574 - protein, 9 aa, Artificial Sequence
  Peptide Derived from Human Papillomavirus
PTTSLVDTY

SEQ ID NO: 23575 - protein, 11 aa, Artificial Sequence
  Peptide Derived from Human Papillomavirus
PTTSLVDTYRF

SEQ ID NO: 23576 - protein, 10 aa, Artificial Sequence
  Peptide Derived from Human Papillomavirus
QAGLRRRPTI

SEQ ID NO: 23577 - protein, 8 aa, Artificial Sequence
  Peptide Derived from Human Papillomavirus
QAVPKVSA

SEQ ID NO: 23578 - protein, 9 aa, Artificial Sequence
  Peptide Derived from Human Papillomavirus
QAVPKVSAY

SEQ ID NO: 23579 - protein, 11 aa, Artificial Sequence
  Peptide Derived from Human Papillomavirus
QAVPKVSAYQY

SEQ ID NO: 23580 - protein, 9 aa, Artificial Sequence
  Peptide Derived from Human Papillomavirus
QSICKYPDY

SEQ ID NO: 23581 - protein, 10 aa, Artificial Sequence
  Peptide Derived from Human Papillomavirus
QSICKYPDYL

SEQ ID NO: 23582 - protein, 10 aa, Artificial Sequence
  Peptide Derived from Human Papillomavirus
QTQLCILGCV

SEQ ID NO: 23583 - protein, 9 aa, Artificial Sequence
  Peptide Derived from Human Papillomavirus
RAGVMGDTV

SEQ ID NO: 23584 - protein, 9 aa, Artificial Sequence
  Peptide Derived from Human Papillomavirus
RSTNLTLCA

SEQ ID NO: 23585 - protein, 8 aa, Artificial Sequence
  Peptide Derived from Human Papillomavirus
RTSIFYHA

SEQ ID NO: 23586 - protein, 9 aa, Artificial Sequence
  Peptide Derived from Human Papillomavirus
SADPYGDSM

SEQ ID NO: 23587 - protein, 10 aa, Artificial Sequence
  Peptide Derived from Human Papillomavirus
SADPYGDSMF

SEQ ID NO: 23588 - protein, 11 aa, Artificial Sequence
  Peptide Derived from Human Papillomavirus
SADPYGDSMFF

SEQ ID NO: 23589 - protein, 8 aa, Artificial Sequence
  Peptide Derived from Human Papillomavirus
SAHAATAV

SEQ ID NO: 23590 - protein, 9 aa, Artificial Sequence
  Peptide Derived from Human Papillomavirus
SAHAATAVI

SEQ ID NO: 23591 - protein, 8 aa, Artificial Sequence
  Peptide Derived from Human Papillomavirus
SAYQYRVF

SEQ ID NO: 23592 - protein, 10 aa, Artificial Sequence
  Peptide Derived from Human Papillomavirus
SAYQYRVFRV

SEQ ID NO: 23593 - protein, 11 aa, Artificial Sequence
  Peptide Derived from Human Papillomavirus
SAYQYRVFRVA

SEQ ID NO: 23594 - protein, 9 aa, Artificial Sequence
  Peptide Derived from Human Papillomavirus
SSDLDQYPL

SEQ ID NO: 23595 - protein, 9 aa, Artificial Sequence
  Peptide Derived from Human Papillomavirus
SSILENWNF

SEQ ID NO: 23596 - protein, 11 aa, Artificial Sequence
  Peptide Derived from Human Papillomavirus
SSILENWNFGV

SEQ ID NO: 23597 - protein, 11 aa, Artificial Sequence
  Peptide Derived from Human Papillomavirus
SSRLLTVGNPY

SEQ ID NO: 23598 - protein, 10 aa, Artificial Sequence
  Peptide Derived from Human Papillomavirus
STASRPAKRV

SEQ ID NO: 23599 - protein, 11 aa, Artificial Sequence
  Peptide Derived from Human Papillomavirus
STIYNPETQRL

SEQ ID NO: 23600 - protein, 10 aa, Artificial Sequence
  Peptide Derived from Human Papillomavirus
STLQDTKCEV

SEQ ID NO: 23601 - protein, 8 aa, Artificial Sequence
  Peptide Derived from Human Papillomavirus
STNLTLCA

SEQ ID NO: 23602 - protein, 10 aa, Artificial Sequence
  Peptide Derived from Human Papillomavirus
STQNPVPNTY

SEQ ID NO: 23603 - protein, 9 aa, Artificial Sequence
  Peptide Derived from Human Papillomavirus
STSTASRPA

SEQ ID NO: 23604 - protein, 10 aa, Artificial Sequence
  Peptide Derived from Human Papillomavirus
STVYLPPPSV

SEQ ID NO: 23605 - protein, 11 aa, Artificial Sequence
  Peptide Derived from Human Papillomavirus
STVYLPPPSVA

SEQ ID NO: 23606 - protein, 8 aa, Artificial Sequence
  Peptide Derived from Human Papillomavirus
TAEVMSYI

SEQ ID NO: 23607 - protein, 11 aa, Artificial Sequence
  Peptide Derived from Human Papillomavirus
TAEVMSYIHSM

SEQ ID NO: 23608 - protein, 9 aa, Artificial Sequence
  Peptide Derived from Human Papillomavirus
TASRPAKRV

SEQ ID NO: 23609 - protein, 11 aa, Artificial Sequence
  Peptide Derived from Human Papillomavirus
TASRPAKRVRI

SEQ ID NO: 23610 - protein, 8 aa, Artificial Sequence
  Peptide Derived from Human Papillomavirus
TAVITQDV

SEQ ID NO: 23611 - protein, 11 aa, Artificial Sequence
  Peptide Derived from Human Papillomavirus
TSDSQLFNKPY

SEQ ID NO: 23612 - protein, 9 aa, Artificial Sequence
  Peptide Derived from Human Papillomavirus
TSLVDTYRF

SEQ ID NO: 23613 - protein, 10 aa, Artificial Sequence
  Peptide Derived from Human Papillomavirus
TSLVDTYRFV

SEQ ID NO: 23614 - protein, 8 aa, Artificial Sequence
  Peptide Derived from Human Papillomavirus
TSTASRPA

SEQ ID NO: 23615 - protein, 11 aa, Artificial Sequence
  Peptide Derived from Human Papillomavirus
TSTASRPAKRV

SEQ ID NO: 23616 - protein, 10 aa, Artificial Sequence
  Peptide Derived from Human Papillomavirus
TTPPEKQDPY

SEQ ID NO: 23617 - protein, 9 aa, Artificial Sequence
  Peptide Derived from Human Papillomavirus
TTRSTNLTL

SEQ ID NO: 23618 - protein, 11 aa, Artificial Sequence
  Peptide Derived from Human Papillomavirus
TTRSTNLTLCA

SEQ ID NO: 23619 - protein, 8 aa, Artificial Sequence
  Peptide Derived from Human Papillomavirus
TTSDSQLF

SEQ ID NO: 23620 - protein, 8 aa, Artificial Sequence
  Peptide Derived from Human Papillomavirus
TTSLVDTY

SEQ ID NO: 23621 - protein, 10 aa, Artificial Sequence
  Peptide Derived from Human Papillomavirus
TTSLVDTYRF

SEQ ID NO: 23622 - protein, 11 aa, Artificial Sequence
  Peptide Derived from Human Papillomavirus
TTSLVDTYRFV

SEQ ID NO: 23623 - protein, 9 aa, Artificial Sequence
  Peptide Derived from Human Papillomavirus
VALPDPNKF

SEQ ID NO: 23624 - protein, 11 aa, Artificial Sequence
  Peptide Derived from Human Papillomavirus
VALPDPNKFGL

SEQ ID NO: 23625 - protein, 10 aa, Artificial Sequence
  Peptide Derived from Human Papillomavirus
VARVVNTDDY

SEQ ID NO: 23626 - protein, 11 aa, Artificial Sequence
  Peptide Derived from Human Papillomavirus
VARVVNTDDYV

SEQ ID NO: 23627 - protein, 8 aa, Artificial Sequence
  Peptide Derived from Human Papillomavirus
VSAYQYRV

SEQ ID NO: 23628 - protein, 9 aa, Artificial Sequence
  Peptide Derived from Human Papillomavirus
VSAYQYRVF

SEQ ID NO: 23629 - protein, 11 aa, Artificial Sequence
  Peptide Derived from Human Papillomavirus
VSAYQYRVFRV

SEQ ID NO: 23630 - protein, 8 aa, Artificial Sequence
  Peptide Derived from Human Papillomavirus
VSRTSIFY

SEQ ID NO: 23631 - protein, 10 aa, Artificial Sequence
  Peptide Derived from Human Papillomavirus
VSRTSIFYHA

SEQ ID NO: 23632 - protein, 10 aa, Artificial Sequence
  Peptide Derived from Human Papillomavirus
VSVDYKQTQL

SEQ ID NO: 23633 - protein, 8 aa, Artificial Sequence
  Peptide Derived from Human Papillomavirus
WACVGMEI

SEQ ID NO: 23634 - protein, 10 aa, Artificial Sequence
  Peptide Derived from Human Papillomavirus
WAKGTLCKPA

SEQ ID NO: 23635 - protein, 9 aa, Artificial Sequence
  Peptide Derived from Human Papillomavirus
WTVDLKEKF

SEQ ID NO: 23636 - protein, 9 aa, Artificial Sequence
  Peptide Derived from Human Papillomavirus
YSPSPSGSI

SEQ ID NO: 23637 - protein, 8 aa, Artificial Sequence
  Peptide Derived from Human Papillomavirus
YSRHVEEY

SEQ ID NO: 23638 - protein, 10 aa, Artificial Sequence
  Peptide Derived from Human Papillomavirus
YSRHVEEYDL

SEQ ID NO: 23639 - protein, 9 aa, Artificial Sequence
  Peptide Derived from Human Papillomavirus
AARRKRASA

SEQ ID NO: 23640 - protein, 8 aa, Artificial Sequence
  Peptide Derived from Human Papillomavirus
AASSYSNV

SEQ ID NO: 23641 - protein, 10 aa, Artificial Sequence
  Peptide Derived from Human Papillomavirus
AASSYSNVTV

SEQ ID NO: 23642 - protein, 8 aa, Artificial Sequence
  Peptide Derived from Human Papillomavirus
AATEEIEL

SEQ ID NO: 23643 - protein, 11 aa, Artificial Sequence
  Peptide Derived from Human Papillomavirus
AATEEIELQPL

SEQ ID NO: 23644 - protein, 9 aa, Artificial Sequence
  Peptide Derived from Human Papillomavirus
ASGAPVPTF

SEQ ID NO: 23645 - protein, 10 aa, Artificial Sequence
  Peptide Derived from Human Papillomavirus
ASSGSGTEPI

SEQ ID NO: 23646 - protein, 9 aa, Artificial Sequence
  Peptide Derived from Human Papillomavirus
ASSYSNVTV

SEQ ID NO: 23647 - protein, 11 aa, Artificial Sequence
  Peptide Derived from Human Papillomavirus
ASSYSNVTVPL

SEQ ID NO: 23648 - protein, 8 aa, Artificial Sequence
  Peptide Derived from Human Papillomavirus
ASTTPSTI

SEQ ID NO: 23649 - protein, 9 aa, Artificial Sequence
  Peptide Derived from Human Papillomavirus
ASTTTYIGI

SEQ ID NO: 23650 - protein, 10 aa, Artificial Sequence
  Peptide Derived from Human Papillomavirus
ATEEIELQPL

SEQ ID NO: 23651 - protein, 11 aa, Artificial Sequence
  Peptide Derived from Human Papillomavirus
ATEEIELQPLI

SEQ ID NO: 23652 - protein, 11 aa, Artificial Sequence
  Peptide Derived from Human Papillomavirus
ATMFTRSGKQI

SEQ ID NO: 23653 - protein, 8 aa, Artificial Sequence
  Peptide Derived from Human Papillomavirus
ATNDSDLF

SEQ ID NO: 23654 - protein, 10 aa, Artificial Sequence
  Peptide Derived from Human Papillomavirus
ATNDSDLFDV

SEQ ID NO: 23655 - protein, 11 aa, Artificial Sequence
  Peptide Derived from Human Papillomavirus
ATNDSDLFDVY

SEQ ID NO: 23656 - protein, 8 aa, Artificial Sequence
  Peptide Derived from Human Papillomavirus
DSDFMDII

SEQ ID NO: 23657 - protein, 10 aa, Artificial Sequence
  Peptide Derived from Human Papillomavirus
DSDFMDIIRL

SEQ ID NO: 23658 - protein, 8 aa, Artificial Sequence
  Peptide Derived from Human Papillomavirus
DSDLFDVY

SEQ ID NO: 23659 - protein, 9 aa, Artificial Sequence
  Peptide Derived from Human Papillomavirus
DSDLFDVYA

SEQ ID NO: 23660 - protein, 11 aa, Artificial Sequence
  Peptide Derived from Human Papillomavirus
DSDLFDVYADF

SEQ ID NO: 23661 - protein, 9 aa, Artificial Sequence
  Peptide Derived from Human Papillomavirus
DSSVVASGA

SEQ ID NO: 23662 - protein, 11 aa, Artificial Sequence
  Peptide Derived from Human Papillomavirus
DSSVVASGAPV

SEQ ID NO: 23663 - protein, 10 aa, Artificial Sequence
  Peptide Derived from Human Papillomavirus
DSVSISSTSF

SEQ ID NO: 23664 - protein, 8 aa, Artificial Sequence
  Peptide Derived from Human Papillomavirus
FADGFVAA

SEQ ID NO: 23665 - protein, 11 aa, Artificial Sequence
  Peptide Derived from Human Papillomavirus
FASSGSGTEPI

SEQ ID NO: 23666 - protein, 9 aa, Artificial Sequence
  Peptide Derived from Human Papillomavirus
FSDPSIIEV

SEQ ID NO: 23667 - protein, 8 aa, Artificial Sequence
  Peptide Derived from Human Papillomavirus
FSRLGQRA

SEQ ID NO: 23668 - protein, 10 aa, Artificial Sequence
  Peptide Derived from Human Papillomavirus
FSRLGQRATM

SEQ ID NO: 23669 - protein, 11 aa, Artificial Sequence
  Peptide Derived from Human Papillomavirus
FSRLGQRATMF

SEQ ID NO: 23670 - protein, 9 aa, Artificial Sequence
  Peptide Derived from Human Papillomavirus
FTGTSGFEI

SEQ ID NO: 23671 - protein, 11 aa, Artificial Sequence
  Peptide Derived from Human Papillomavirus
FTNPAFSDPSI

SEQ ID NO: 23672 - protein, 8 aa, Artificial Sequence
  Peptide Derived from Human Papillomavirus
FTRSGKQI

SEQ ID NO: 23673 - protein, 8 aa, Artificial Sequence
  Peptide Derived from Human Papillomavirus
FTYPKYSL

SEQ ID NO: 23674 - protein, 10 aa, Artificial Sequence
  Peptide Derived from Human Papillomavirus
FTYPKYSLTM

SEQ ID NO: 23675 - protein, 8 aa, Artificial Sequence
  Peptide Derived from Human Papillomavirus
GSGGRTGY

SEQ ID NO: 23676 - protein, 9 aa, Artificial Sequence
  Peptide Derived from Human Papillomavirus
GSGGRTGYV

SEQ ID NO: 23677 - protein, 11 aa, Artificial Sequence
  Peptide Derived from Human Papillomavirus
GSGGRTGYVPL

SEQ ID NO: 23678 - protein, 10 aa, Artificial Sequence
  Peptide Derived from Human Papillomavirus
GSGSGGRTGY

SEQ ID NO: 23679 - protein, 11 aa, Artificial Sequence
  Peptide Derived from Human Papillomavirus
GSGSGGRTGYV

SEQ ID NO: 23680 - protein, 8 aa, Artificial Sequence
  Peptide Derived from Human Papillomavirus
GSHGYEEI

SEQ ID NO: 23681 - protein, 10 aa, Artificial Sequence
  Peptide Derived from Human Papillomavirus
GSHGYEEIPL

SEQ ID NO: 23682 - protein, 8 aa, Artificial Sequence
  Peptide Derived from Human Papillomavirus
GTCPPDVI

SEQ ID NO: 23683 - protein, 11 aa, Artificial Sequence
  Peptide Derived from Human Papillomavirus
GTCPPDVINKV

SEQ ID NO: 23684 - protein, 10 aa, Artificial Sequence
  Peptide Derived from Human Papillomavirus
GTEPISSTPL

SEQ ID NO: 23685 - protein, 10 aa, Artificial Sequence
  Peptide Derived from Human Papillomavirus
GTPTSGSHGY

SEQ ID NO: 23686 - protein, 9 aa, Artificial Sequence
  Peptide Derived from Human Papillomavirus
GTQYYLWPW

SEQ ID NO: 23687 - protein, 10 aa, Artificial Sequence
  Peptide Derived from Human Papillomavirus
GTQYYLWPWY

SEQ ID NO: 23688 - protein, 11 aa, Artificial Sequence
  Peptide Derived from Human Papillomavirus
GTQYYLWPWYY

SEQ ID NO: 23689 - protein, 8 aa, Artificial Sequence
  Peptide Derived from Human Papillomavirus
GTTLADKI

SEQ ID NO: 23690 - protein, 9 aa, Artificial Sequence
  Peptide Derived from Human Papillomavirus
GTTLADKIL

SEQ ID NO: 23691 - protein, 11 aa, Artificial Sequence
  Peptide Derived from Human Papillomavirus
GTTLADKILQW

SEQ ID NO: 23692 - protein, 8 aa, Artificial Sequence
  Peptide Derived from Human Papillomavirus
GTTTPAVL

SEQ ID NO: 23693 - protein, 10 aa, Artificial Sequence
  Peptide Derived from Human Papillomavirus
GTTTPAVLDI

SEQ ID NO: 23694 - protein, 8 aa, Artificial Sequence
  Peptide Derived from Human Papillomavirus
GTVRFSRL

SEQ ID NO: 23695 - protein, 9 aa, Artificial Sequence
  Peptide Derived from Human Papillomavirus
IAATEEIEL

SEQ ID NO: 23696 - protein, 9 aa, Artificial Sequence
  Peptide Derived from Human Papillomavirus
ISATNDSDL

SEQ ID NO: 23697 - protein, 10 aa, Artificial Sequence
  Peptide Derived from Human Papillomavirus
ISATNDSDLF

SEQ ID NO: 23698 - protein, 10 aa, Artificial Sequence
  Peptide Derived from Human Papillomavirus
ISPIAATEEI

SEQ ID NO: 23699 - protein, 9 aa, Artificial Sequence
  Peptide Derived from Human Papillomavirus
ISSTPLPTV

SEQ ID NO: 23700 - protein, 10 aa, Artificial Sequence
  Peptide Derived from Human Papillomavirus
ISSTSFTNPA

SEQ ID NO: 23701 - protein, 11 aa, Artificial Sequence
  Peptide Derived from Human Papillomavirus
ISSTSFTNPAF

SEQ ID NO: 23702 - protein, 8 aa, Artificial Sequence
  Peptide Derived from Human Papillomavirus
ITPTVDSV

SEQ ID NO: 23703 - protein, 10 aa, Artificial Sequence
  Peptide Derived from Human Papillomavirus
ITPTVDSVSI

SEQ ID NO: 23704 - protein, 10 aa, Artificial Sequence
  Peptide Derived from Human Papillomavirus
ITSSGTTTPA

SEQ ID NO: 23705 - protein, 11 aa, Artificial Sequence
  Peptide Derived from Human Papillomavirus
ITSSGTTTPAV

SEQ ID NO: 23706 - protein, 8 aa, Artificial Sequence
  Peptide Derived from Human Papillomavirus
KSFTYPKY

SEQ ID NO: 23707 - protein, 10 aa, Artificial Sequence
  Peptide Derived from Human Papillomavirus
KSFTYPKYSL

SEQ ID NO: 23708 - protein, 8 aa, Artificial Sequence
  Peptide Derived from Human Papillomavirus
LADKILQW

SEQ ID NO: 23709 - protein, 11 aa, Artificial Sequence
  Peptide Derived from Human Papillomavirus
LADKILQWSSL

SEQ ID NO: 23710 - protein, 9 aa, Artificial Sequence
  Peptide Derived from Human Papillomavirus
LSFEPTSNV

SEQ ID NO: 23711 - protein, 8 aa, Artificial Sequence
  Peptide Derived from Human Papillomavirus
LSSRRGTV

SEQ ID NO: 23712 - protein, 10 aa, Artificial Sequence
  Peptide Derived from Human Papillomavirus
LSSRRGTVRF

SEQ ID NO: 23713 - protein, 8 aa, Artificial Sequence
  Peptide Derived from Human Papillomavirus
LTHPSSLV

SEQ ID NO: 23714 - protein, 10 aa, Artificial Sequence
  Peptide Derived from Human Papillomavirus
LTHPSSLVTF

SEQ ID NO: 23715 - protein, 8 aa, Artificial Sequence
  Peptide Derived from Human Papillomavirus
LTMPSTAA

SEQ ID NO: 23716 - protein, 11 aa, Artificial Sequence
  Peptide Derived from Human Papillomavirus
LTMPSTAASSY

SEQ ID NO: 23717 - protein, 9 aa, Artificial Sequence
  Peptide Derived from Human Papillomavirus
LTSAWDVPI

SEQ ID NO: 23718 - protein, 10 aa, Artificial Sequence
  Peptide Derived from Human Papillomavirus
LTSAWDVPIY

SEQ ID NO: 23719 - protein, 8 aa, Artificial Sequence
  Peptide Derived from Human Papillomavirus
NASTTTYI

SEQ ID NO: 23720 - protein, 10 aa, Artificial Sequence
  Peptide Derived from Human Papillomavirus
NASTTTYIGI

SEQ ID NO: 23721 - protein, 8 aa, Artificial Sequence
  Peptide Derived from Human Papillomavirus
PAFSDPSI

SEQ ID NO: 23722 - protein, 9 aa, Artificial Sequence
  Peptide Derived from Human Papillomavirus
PAFSDPSII

SEQ ID NO: 23723 - protein, 11 aa, Artificial Sequence
  Peptide Derived from Human Papillomavirus
PAFSDPSIIEV

SEQ ID NO: 23724 - protein, 10 aa, Artificial Sequence
  Peptide Derived from Human Papillomavirus
PALSSRRGTV

SEQ ID NO: 23725 - protein, 9 aa, Artificial Sequence
  Peptide Derived from Human Papillomavirus
PASTTPSTI

SEQ ID NO: 23726 - protein, 10 aa, Artificial Sequence
  Peptide Derived from Human Papillomavirus
PAVLDITPTV

SEQ ID NO: 23727 - protein, 10 aa, Artificial Sequence
  Peptide Derived from Human Papillomavirus
PAYEPLDTTL

SEQ ID NO: 23728 - protein, 11 aa, Artificial Sequence
  Peptide Derived from Human Papillomavirus
PSSLVTFDNPA

SEQ ID NO: 23729 - protein, 8 aa, Artificial Sequence
  Peptide Derived from Human Papillomavirus
PSTAASSY

SEQ ID NO: 23730 - protein, 11 aa, Artificial Sequence
  Peptide Derived from Human Papillomavirus
PSTAASSYSNV

SEQ ID NO: 23731 - protein, 8 aa, Artificial Sequence
  Peptide Derived from Human Papillomavirus
PSTIHKSF

SEQ ID NO: 23732 - protein, 10 aa, Artificial Sequence
  Peptide Derived from Human Papillomavirus
PSTIHKSFTY

SEQ ID NO: 23733 - protein, 8 aa, Artificial Sequence
  Peptide Derived from Human Papillomavirus
PSTSPTNA

SEQ ID NO: 23734 - protein, 9 aa, Artificial Sequence
  Peptide Derived from Human Papillomavirus
PTDPSIVTL

SEQ ID NO: 23735 - protein, 10 aa, Artificial Sequence
  Peptide Derived from Human Papillomavirus
PTDPSIVTLV

SEQ ID NO: 23736 - protein, 9 aa, Artificial Sequence
  Peptide Derived from Human Papillomavirus
PTFTGTSGF

SEQ ID NO: 23737 - protein, 11 aa, Artificial Sequence
  Peptide Derived from Human Papillomavirus
PTFTGTSGFEI

SEQ ID NO: 23738 - protein, 9 aa, Artificial Sequence
  Peptide Derived from Human Papillomavirus
PTNASTTTY

SEQ ID NO: 23739 - protein, 10 aa, Artificial Sequence
  Peptide Derived from Human Papillomavirus
PTNASTTTYI

SEQ ID NO: 23740 - protein, 8 aa, Artificial Sequence
  Peptide Derived from Human Papillomavirus
PTRPPVVI

SEQ ID NO: 23741 - protein, 11 aa, Artificial Sequence
  Peptide Derived from Human Papillomavirus
PTRPPVVIEPV

SEQ ID NO: 23742 - protein, 8 aa, Artificial Sequence
  Peptide Derived from Human Papillomavirus
PTSGSHGY

SEQ ID NO: 23743 - protein, 11 aa, Artificial Sequence
  Peptide Derived from Human Papillomavirus
PTSGSHGYEEI

SEQ ID NO: 23744 - protein, 10 aa, Artificial Sequence
  Peptide Derived from Human Papillomavirus
PTSNVPDSDF

SEQ ID NO: 23745 - protein, 11 aa, Artificial Sequence
  Peptide Derived from Human Papillomavirus
PTSNVPDSDFM

SEQ ID NO: 23746 - protein, 8 aa, Artificial Sequence
  Peptide Derived from Human Papillomavirus
PTVDSVSI

SEQ ID NO: 23747 - protein, 11 aa, Artificial Sequence
  Peptide Derived from Human Papillomavirus
PTVRRVRGPRL

SEQ ID NO: 23748 - protein, 9 aa, Artificial Sequence
  Peptide Derived from Human Papillomavirus
QSGTCPPDV

SEQ ID NO: 23749 - protein, 10 aa, Artificial Sequence
  Peptide Derived from Human Papillomavirus
QSGTCPPDVI

SEQ ID NO: 23750 - protein, 9 aa, Artificial Sequence
  Peptide Derived from Human Papillomavirus
QTGEVSGNI

SEQ ID NO: 23751 - protein, 10 aa, Artificial Sequence
  Peptide Derived from Human Papillomavirus
QTGEVSGNIF

SEQ ID NO: 23752 - protein, 11 aa, Artificial Sequence
  Peptide Derived from Human Papillomavirus
QTGEVSGNIFV

SEQ ID NO: 23753 - protein, 8 aa, Artificial Sequence
  Peptide Derived from Human Papillomavirus
RAARRKRA

SEQ ID NO: 23754 - protein, 10 aa, Artificial Sequence
  Peptide Derived from Human Papillomavirus
RAARRKRASA

SEQ ID NO: 23755 - protein, 8 aa, Artificial Sequence
  Peptide Derived from Human Papillomavirus
RANQQVRV

SEQ ID NO: 23756 - protein, 8 aa, Artificial Sequence
  Peptide Derived from Human Papillomavirus
RASATDLY

SEQ ID NO: 23757 - protein, 10 aa, Artificial Sequence
  Peptide Derived from Human Papillomavirus
RSGKQIGGRV

SEQ ID NO: 23758 - protein, 8 aa, Artificial Sequence
  Peptide Derived from Human Papillomavirus
RSNTVVDV

SEQ ID NO: 23759 - protein, 8 aa, Artificial Sequence
  Peptide Derived from Human Papillomavirus
SATNDSDL

SEQ ID NO: 23760 - protein, 9 aa, Artificial Sequence
  Peptide Derived from Human Papillomavirus
SATNDSDLF

SEQ ID NO: 23761 - protein, 11 aa, Artificial Sequence
  Peptide Derived from Human Papillomavirus
SATNDSDLFDV

SEQ ID NO: 23762 - protein, 8 aa, Artificial Sequence
  Peptide Derived from Human Papillomavirus
SAWDVPIY

SEQ ID NO: 23763 - protein, 9 aa, Artificial Sequence
  Peptide Derived from Human Papillomavirus
SSGSGTEPI

SEQ ID NO: 23764 - protein, 8 aa, Artificial Sequence
  Peptide Derived from Human Papillomavirus
SSGTTTPA

SEQ ID NO: 23765 - protein, 9 aa, Artificial Sequence
  Peptide Derived from Human Papillomavirus
SSGTTTPAV

SEQ ID NO: 23766 - protein, 10 aa, Artificial Sequence
  Peptide Derived from Human Papillomavirus
SSGTTTPAVL

SEQ ID NO: 23767 - protein, 10 aa, Artificial Sequence
  Peptide Derived from Human Papillomavirus
SSLGIFLGGL

SEQ ID NO: 23768 - protein, 10 aa, Artificial Sequence
  Peptide Derived from Human Papillomavirus
SSLVTFDNPA

SEQ ID NO: 23769 - protein, 11 aa, Artificial Sequence
  Peptide Derived from Human Papillomavirus
SSLVTFDNPAY

SEQ ID NO: 23770 - protein, 9 aa, Artificial Sequence
  Peptide Derived from Human Papillomavirus
SSRRGTVRF

SEQ ID NO: 23771 - protein, 8 aa, Artificial Sequence
  Peptide Derived from Human Papillomavirus
SSTPLPTV

SEQ ID NO: 23772 - protein, 11 aa, Artificial Sequence
  Peptide Derived from Human Papillomavirus
SSTPLPTVRRV

SEQ ID NO: 23773 - protein, 9 aa, Artificial Sequence
  Peptide Derived from Human Papillomavirus
SSTSFTNPA

SEQ ID NO: 23774 - protein, 10 aa, Artificial Sequence
  Peptide Derived from Human Papillomavirus
SSTSFTNPAF

SEQ ID NO: 23775 - protein, 8 aa, Artificial Sequence
  Peptide Derived from Human Papillomavirus
SSVVASGA

SEQ ID NO: 23776 - protein, 10 aa, Artificial Sequence
  Peptide Derived from Human Papillomavirus
SSVVASGAPV

SEQ ID NO: 23777 - protein, 8 aa, Artificial Sequence
  Peptide Derived from Human Papillomavirus
SSYSNVTV

SEQ ID NO: 23778 - protein, 10 aa, Artificial Sequence
  Peptide Derived from Human Papillomavirus
SSYSNVTVPL

SEQ ID NO: 23779 - protein, 10 aa, Artificial Sequence
  Peptide Derived from Human Papillomavirus
STAASSYSNV

SEQ ID NO: 23780 - protein, 9 aa, Artificial Sequence
  Peptide Derived from Human Papillomavirus
STIHKSFTY

SEQ ID NO: 23781 - protein, 10 aa, Artificial Sequence
  Peptide Derived from Human Papillomavirus
STPLPTVRRV

SEQ ID NO: 23782 - protein, 8 aa, Artificial Sequence
  Peptide Derived from Human Papillomavirus
STSFTNPA

SEQ ID NO: 23783 - protein, 9 aa, Artificial Sequence
  Peptide Derived from Human Papillomavirus
STSFTNPAF

SEQ ID NO: 23784 - protein, 11 aa, Artificial Sequence
  Peptide Derived from Human Papillomavirus
STTPSTIHKSF

SEQ ID NO: 23785 - protein, 8 aa, Artificial Sequence
  Peptide Derived from Human Papillomavirus
STTTYIGI

SEQ ID NO: 23786 - protein, 9 aa, Artificial Sequence
  Peptide Derived from Human Papillomavirus
TAASSYSNV

SEQ ID NO: 23787 - protein, 11 aa, Artificial Sequence
  Peptide Derived from Human Papillomavirus
TAASSYSNVTV

SEQ ID NO: 23788 - protein, 8 aa, Artificial Sequence
  Peptide Derived from Human Papillomavirus
TSAWDVPI

SEQ ID NO: 23789 - protein, 9 aa, Artificial Sequence
  Peptide Derived from Human Papillomavirus
TSAWDVPIY

SEQ ID NO: 23790 - protein, 8 aa, Artificial Sequence
  Peptide Derived from Human Papillomavirus
TSFTNPAF

SEQ ID NO: 23791 - protein, 10 aa, Artificial Sequence
  Peptide Derived from Human Papillomavirus
TSGSHGYEEI

SEQ ID NO: 23792 - protein, 9 aa, Artificial Sequence
  Peptide Derived from Human Papillomavirus
TSNVPDSDF

SEQ ID NO: 23793 - protein, 10 aa, Artificial Sequence
  Peptide Derived from Human Papillomavirus
TSNVPDSDFM

SEQ ID NO: 23794 - protein, 11 aa, Artificial Sequence
  Peptide Derived from Human Papillomavirus
TSPTNASTTTY

SEQ ID NO: 23795 - protein, 11 aa, Artificial Sequence
  Peptide Derived from Human Papillomavirus
TSQFLTHPSSL

SEQ ID NO: 23796 - protein, 9 aa, Artificial Sequence
  Peptide Derived from Human Papillomavirus
TSSGTTTPA

SEQ ID NO: 23797 - protein, 10 aa, Artificial Sequence
  Peptide Derived from Human Papillomavirus
TSSGTTTPAV

SEQ ID NO: 23798 - protein, 11 aa, Artificial Sequence
  Peptide Derived from Human Papillomavirus
TSSGTTTPAVL

SEQ ID NO: 23799 - protein, 8 aa, Artificial Sequence
  Peptide Derived from Human Papillomavirus
TTLADKIL

SEQ ID NO: 23800 - protein, 10 aa, Artificial Sequence
  Peptide Derived from Human Papillomavirus
TTLADKILQW

SEQ ID NO: 23801 - protein, 11 aa, Artificial Sequence
  Peptide Derived from Human Papillomavirus
TTLSFEPTSNV

SEQ ID NO: 23802 - protein, 8 aa, Artificial Sequence
  Peptide Derived from Human Papillomavirus
TTPAVLDI

SEQ ID NO: 23803 - protein, 10 aa, Artificial Sequence
  Peptide Derived from Human Papillomavirus
TTPSTIHKSF

SEQ ID NO: 23804 - protein, 9 aa, Artificial Sequence
  Peptide Derived from Human Papillomavirus
TTTPAVLDI

SEQ ID NO: 23805 - protein, 11 aa, Artificial Sequence
  Peptide Derived from Human Papillomavirus
TTYIGIHGTQY

SEQ ID NO: 23806 - protein, 10 aa, Artificial Sequence
  Peptide Derived from Human Papillomavirus
VASGAPVPTF

SEQ ID NO: 23807 - protein, 11 aa, Artificial Sequence
  Peptide Derived from Human Papillomavirus
VSHRAARRKRA

SEQ ID NO: 23808 - protein, 8 aa, Artificial Sequence
  Peptide Derived from Human Papillomavirus
VSISSTSF

SEQ ID NO: 23809 - protein, 8 aa, Artificial Sequence
  Peptide Derived from Human Papillomavirus
VTFDNPAY

SEQ ID NO: 23810 - protein, 11 aa, Artificial Sequence
  Peptide Derived from Human Papillomavirus
VTFDNPAYEPL

SEQ ID NO: 23811 - protein, 9 aa, Artificial Sequence
  Peptide Derived from Human Papillomavirus
VTLVEDSSV

SEQ ID NO: 23812 - protein, 10 aa, Artificial Sequence
  Peptide Derived from Human Papillomavirus
VTLVEDSSVV

SEQ ID NO: 23813 - protein, 11 aa, Artificial Sequence
  Peptide Derived from Human Papillomavirus
VTLVEDSSVVA

SEQ ID NO: 23814 - protein, 8 aa, Artificial Sequence
  Peptide Derived from Human Papillomavirus
VTVPLTSA

SEQ ID NO: 23815 - protein, 9 aa, Artificial Sequence
  Peptide Derived from Human Papillomavirus
VTVPLTSAW

SEQ ID NO: 23816 - protein, 11 aa, Artificial Sequence
  Peptide Derived from Human Papillomavirus
VTVPLTSAWDV

SEQ ID NO: 23817 - protein, 8 aa, Artificial Sequence
  Peptide Derived from Human Papillomavirus
WSSLGIFL

SEQ ID NO: 23818 - protein, 11 aa, Artificial Sequence
  Peptide Derived from Human Papillomavirus
WSSLGIFLGGL

SEQ ID NO: 23819 - protein, 8 aa, Artificial Sequence
  Peptide Derived from Human Papillomavirus
YADFPPPA

SEQ ID NO: 23820 - protein, 9 aa, Artificial Sequence
  Peptide Derived from Human Papillomavirus
YSLTMPSTA

SEQ ID NO: 23821 - protein, 10 aa, Artificial Sequence
  Peptide Derived from Human Papillomavirus
YSLTMPSTAA

SEQ ID NO: 23822 - protein, 8 aa, Artificial Sequence
  Peptide Derived from Human Papillomavirus
YSNVTVPL

SEQ ID NO: 23823 - protein, 11 aa, Artificial Sequence
  Peptide Derived from Human Papillomavirus
YSNVTVPLTSA

SEQ ID NO: 23824 - protein, 8 aa, Artificial Sequence
  Peptide Derived from Human Papillomavirus
YSRANQQV

SEQ ID NO: 23825 - protein, 10 aa, Artificial Sequence
  Peptide Derived from Human Papillomavirus
YSRANQQVRV

SEQ ID NO: 23826 - protein, 8 aa, Artificial Sequence
  Peptide Derived from Human Papillomavirus
YTGPDIIL

SEQ ID NO: 23827 - protein, 8 aa, Artificial Sequence
  Peptide Derived from Human Papillomavirus
CSAIEVQI

SEQ ID NO: 23828 - protein, 9 aa, Artificial Sequence
  Peptide Derived from Human Papillomavirus
CSAIEVQIA

SEQ ID NO: 23829 - protein, 10 aa, Artificial Sequence
  Peptide Derived from Human Papillomavirus
CSAIEVQIAL

SEQ ID NO: 23830 - protein, 9 aa, Artificial Sequence
  Peptide Derived from Human Papillomavirus
CSGVDYRGI

SEQ ID NO: 23831 - protein, 10 aa, Artificial Sequence
  Peptide Derived from Human Papillomavirus
CSGVDYRGIY

SEQ ID NO: 23832 - protein, 11 aa, Artificial Sequence
  Peptide Derived from Human Papillomavirus
CSGVDYRGIYY

SEQ ID NO: 23833 - protein, 8 aa, Artificial Sequence
  Peptide Derived from Human Papillomavirus
DSSRESHA

SEQ ID NO: 23834 - protein, 11 aa, Artificial Sequence
  Peptide Derived from Human Papillomavirus
DSSRESHAKCV

SEQ ID NO: 23835 - protein, 9 aa, Artificial Sequence
  Peptide Derived from Human Papillomavirus
DSVSSTCRY

SEQ ID NO: 23836 - protein, 11 aa, Artificial Sequence
  Peptide Derived from Human Papillomavirus
DSVSSTCRYNV

SEQ ID NO: 23837 - protein, 8 aa, Artificial Sequence
  Peptide Derived from Human Papillomavirus
DTCEELWL

SEQ ID NO: 23838 - protein, 10 aa, Artificial Sequence
  Peptide Derived from Human Papillomavirus
EAKKFGCKNI

SEQ ID NO: 23839 - protein, 11 aa, Artificial Sequence
  Peptide Derived from Human Papillomavirus
EAKKFGCKNIW

SEQ ID NO: 23840 - protein, 9 aa, Artificial Sequence
  Peptide Derived from Human Papillomavirus
ESIYCPDSV

SEQ ID NO: 23841 - protein, 8 aa, Artificial Sequence
  Peptide Derived from Human Papillomavirus
ESLSTTIY

SEQ ID NO: 23842 - protein, 8 aa, Artificial Sequence
  Peptide Derived from Human Papillomavirus
ETQRNSFL

SEQ ID NO: 23843 - protein, 11 aa, Artificial Sequence
  Peptide Derived from Human Papillomavirus
ETQRNSFLSHV

SEQ ID NO: 23844 - protein, 9 aa, Artificial Sequence
  Peptide Derived from Human Papillomavirus
GSKNNCMQY

SEQ ID NO: 23845 - protein, 10 aa, Artificial Sequence
  Peptide Derived from Human Papillomavirus
GSKNNCMQYV

SEQ ID NO: 23846 - protein, 11 aa, Artificial Sequence
  Peptide Derived from Human Papillomavirus
GSKNNCMQYVA

SEQ ID NO: 23847 - protein, 11 aa, Artificial Sequence
  Peptide Derived from Human Papillomavirus
HAKCVTTHTHI

SEQ ID NO: 23848 - protein, 10 aa, Artificial Sequence
  Peptide Derived from Human Papillomavirus
IALESLSTTI

SEQ ID NO: 23849 - protein, 11 aa, Artificial Sequence
  Peptide Derived from Human Papillomavirus
IALESLSTTIY

SEQ ID NO: 23850 - protein, 8 aa, Artificial Sequence
  Peptide Derived from Human Papillomavirus
KACSAIEV

SEQ ID NO: 23851 - protein, 10 aa, Artificial Sequence
  Peptide Derived from Human Papillomavirus
KACSAIEVQI

SEQ ID NO: 23852 - protein, 11 aa, Artificial Sequence
  Peptide Derived from Human Papillomavirus
KACSAIEVQIA

SEQ ID NO: 23853 - protein, 8 aa, Artificial Sequence
  Peptide Derived from Human Papillomavirus
KAKACSAI

SEQ ID NO: 23854 - protein, 10 aa, Artificial Sequence
  Peptide Derived from Human Papillomavirus
KAKACSAIEV

SEQ ID NO: 23855 - protein, 11 aa, Artificial Sequence
  Peptide Derived from Human Papillomavirus
KTLFVDVTSTY

SEQ ID NO: 23856 - protein, 8 aa, Artificial Sequence
  Peptide Derived from Human Papillomavirus
KTTPVVHL

SEQ ID NO: 23857 - protein, 10 aa, Artificial Sequence
  Peptide Derived from Human Papillomavirus
KTTTTTSTSV

SEQ ID NO: 23858 - protein, 11 aa, Artificial Sequence
  Peptide Derived from Human Papillomavirus
KTYYTDFEQEA

SEQ ID NO: 23859 - protein, 8 aa, Artificial Sequence
  Peptide Derived from Human Papillomavirus
LSHVKIPV

SEQ ID NO: 23860 - protein, 9 aa, Artificial Sequence
  Peptide Derived from Human Papillomavirus
LSHVKIPVV

SEQ ID NO: 23861 - protein, 10 aa, Artificial Sequence
  Peptide Derived from Human Papillomavirus
LSHVKIPVVY

SEQ ID NO: 23862 - protein, 11 aa, Artificial Sequence
  Peptide Derived from Human Papillomavirus
LSTTIYNNEEW

SEQ ID NO: 23863 - protein, 8 aa, Artificial Sequence
  Peptide Derived from Human Papillomavirus
LTEPKKCF

SEQ ID NO: 23864 - protein, 9 aa, Artificial Sequence
  Peptide Derived from Human Papillomavirus
NSFLSHVKI

SEQ ID NO: 23865 - protein, 11 aa, Artificial Sequence
  Peptide Derived from Human Papillomavirus
NSFLSHVKIPV

SEQ ID NO: 23866 - protein, 9 aa, Artificial Sequence
  Peptide Derived from Human Papillomavirus
NTDSRSRSI

SEQ ID NO: 23867 - protein, 8 aa, Artificial Sequence
  Peptide Derived from Human Papillomavirus
SAIEVQIA

SEQ ID NO: 23868 - protein, 9 aa, Artificial Sequence
  Peptide Derived from Human Papillomavirus
SAIEVQIAL

SEQ ID NO: 23869 - protein, 10 aa, Artificial Sequence
  Peptide Derived from Human Papillomavirus
SSRESHAKCV

SEQ ID NO: 23870 - protein, 8 aa, Artificial Sequence
  Peptide Derived from Human Papillomavirus
SSTCRYNV

SEQ ID NO: 23871 - protein, 11 aa, Artificial Sequence
  Peptide Derived from Human Papillomavirus
SSTCRYNVSPV

SEQ ID NO: 23872 - protein, 10 aa, Artificial Sequence
  Peptide Derived from Human Papillomavirus
STCRYNVSPV

SEQ ID NO: 23873 - protein, 9 aa, Artificial Sequence
  Peptide Derived from Human Papillomavirus
STDNKNYSI

SEQ ID NO: 23874 - protein, 10 aa, Artificial Sequence
  Peptide Derived from Human Papillomavirus
STDNKNYSII

SEQ ID NO: 23875 - protein, 9 aa, Artificial Sequence
  Peptide Derived from Human Papillomavirus
STSVGNQDA

SEQ ID NO: 23876 - protein, 10 aa, Artificial Sequence
  Peptide Derived from Human Papillomavirus
STSVGNQDAA

SEQ ID NO: 23877 - protein, 11 aa, Artificial Sequence
  Peptide Derived from Human Papillomavirus
STSVGNQDAAV

SEQ ID NO: 23878 - protein, 10 aa, Artificial Sequence
  Peptide Derived from Human Papillomavirus
STTIYNNEEW

SEQ ID NO: 23879 - protein, 8 aa, Artificial Sequence
  Peptide Derived from Human Papillomavirus
TSTDNKNY

SEQ ID NO: 23880 - protein, 10 aa, Artificial Sequence
  Peptide Derived from Human Papillomavirus
TSTDNKNYSI

SEQ ID NO: 23881 - protein, 11 aa, Artificial Sequence
  Peptide Derived from Human Papillomavirus
TSTDNKNYSII

SEQ ID NO: 23882 - protein, 10 aa, Artificial Sequence
  Peptide Derived from Human Papillomavirus
TSTSVGNQDA

SEQ ID NO: 23883 - protein, 11 aa, Artificial Sequence
  Peptide Derived from Human Papillomavirus
TSTSVGNQDAA

SEQ ID NO: 23884 - protein, 8 aa, Artificial Sequence
  Peptide Derived from Human Papillomavirus
TSVGNQDA

SEQ ID NO: 23885 - protein, 9 aa, Artificial Sequence
  Peptide Derived from Human Papillomavirus
TSVGNQDAA

SEQ ID NO: 23886 - protein, 10 aa, Artificial Sequence
  Peptide Derived from Human Papillomavirus
TSVGNQDAAV

SEQ ID NO: 23887 - protein, 9 aa, Artificial Sequence
  Peptide Derived from Human Papillomavirus
TTIYNNEEW

SEQ ID NO: 23888 - protein, 11 aa, Artificial Sequence
  Peptide Derived from Human Papillomavirus
TTIYNNEEWTL

SEQ ID NO: 23889 - protein, 11 aa, Artificial Sequence
  Peptide Derived from Human Papillomavirus
TTSTSVGNQDA

SEQ ID NO: 23890 - protein, 8 aa, Artificial Sequence
  Peptide Derived from Human Papillomavirus
TTTTSTSV

SEQ ID NO: 23891 - protein, 9 aa, Artificial Sequence
  Peptide Derived from Human Papillomavirus
TTTTTSTSV

SEQ ID NO: 23892 - protein, 8 aa, Artificial Sequence
  Peptide Derived from Human Papillomavirus
VAWKYIYY

SEQ ID NO: 23893 - protein, 11 aa, Artificial Sequence
  Peptide Derived from Human Papillomavirus
VSHRPGKRPRL

SEQ ID NO: 23894 - protein, 10 aa, Artificial Sequence
  Peptide Derived from Human Papillomavirus
VSPVETVNEY

SEQ ID NO: 23895 - protein, 9 aa, Artificial Sequence
  Peptide Derived from Human Papillomavirus
VSSTCRYNV

SEQ ID NO: 23896 - protein, 10 aa, Artificial Sequence
  Peptide Derived from Human Papillomavirus
WTLRDTCEEL

SEQ ID NO: 23897 - protein, 11 aa, Artificial Sequence
  Peptide Derived from Human Papillomavirus
WTLRDTCEELW

SEQ ID NO: 23898 - protein, 9 aa, Artificial Sequence
  Peptide Derived from Human Papillomavirus
WTSTDNKNY

SEQ ID NO: 23899 - protein, 11 aa, Artificial Sequence
  Peptide Derived from Human Papillomavirus
WTSTDNKNYSI

SEQ ID NO: 23900 - protein, 8 aa, Artificial Sequence
  Peptide Derived from Human Papillomavirus
YSIITIIY

SEQ ID NO: 23901 - protein, 8 aa, Artificial Sequence
  Peptide Derived from Human Papillomavirus
YTDFEQEA

SEQ ID NO: 23902 - protein, 11 aa, Artificial Sequence
  Peptide Derived from Human Papillomavirus
YTDFEQEAKKF

SEQ ID NO: 23903 - protein, 11 aa, Artificial Sequence
  Peptide Derived from Human Papillomavirus
ATLESITKKQL

SEQ ID NO: 23904 - protein, 8 aa, Artificial Sequence
  Peptide Derived from Human Papillomavirus
CTELKLVY

SEQ ID NO: 23905 - protein, 8 aa, Artificial Sequence
  Peptide Derived from Human Papillomavirus
ESITKKQL

SEQ ID NO: 23906 - protein, 11 aa, Artificial Sequence
  Peptide Derived from Human Papillomavirus
ESITKKQLCDL

SEQ ID NO: 23907 - protein, 8 aa, Artificial Sequence
  Peptide Derived from Human Papillomavirus
FACTELKL

SEQ ID NO: 23908 - protein, 9 aa, Artificial Sequence
  Peptide Derived from Human Papillomavirus
FACTELKLV

SEQ ID NO: 23909 - protein, 10 aa, Artificial Sequence
  Peptide Derived from Human Papillomavirus
FACTELKLVY

SEQ ID NO: 23910 - protein, 10 aa, Artificial Sequence
  Peptide Derived from Human Papillomavirus
IAHGWTGSCL

SEQ ID NO: 23911 - protein, 9 aa, Artificial Sequence
  Peptide Derived from Human Papillomavirus
ITKKQLCDL

SEQ ID NO: 23912 - protein, 10 aa, Artificial Sequence
  Peptide Derived from Human Papillomavirus
ITKKQLCDLL

SEQ ID NO: 23913 - protein, 11 aa, Artificial Sequence
  Peptide Derived from Human Papillomavirus
ITKKQLCDLLI

SEQ ID NO: 23914 - protein, 10 aa, Artificial Sequence
  Peptide Derived from Human Papillomavirus
LSCVYCKKEL

SEQ ID NO: 23915 - protein, 9 aa, Artificial Sequence
  Peptide Derived from Human Papillomavirus
LSEVLEIPL

SEQ ID NO: 23916 - protein, 10 aa, Artificial Sequence
  Peptide Derived from Human Papillomavirus
LSEVLEIPLI

SEQ ID NO: 23917 - protein, 8 aa, Artificial Sequence
  Peptide Derived from Human Papillomavirus
LTPEEKQL

SEQ ID NO: 23918 - protein, 9 aa, Artificial Sequence
  Peptide Derived from Human Papillomavirus
LTRAEVYNF

SEQ ID NO: 23919 - protein, 10 aa, Artificial Sequence
  Peptide Derived from Human Papillomavirus
LTRAEVYNFA

SEQ ID NO: 23920 - protein, 11 aa, Artificial Sequence
  Peptide Derived from Human Papillomavirus
QSPLTPEEKQL

SEQ ID NO: 23921 - protein, 11 aa, Artificial Sequence
  Peptide Derived from Human Papillomavirus
QTSREPRESTV

SEQ ID NO: 23922 - protein, 8 aa, Artificial Sequence
  Peptide Derived from Human Papillomavirus
RAEVYNFA

SEQ ID NO: 23923 - protein, 9 aa, Artificial Sequence
  Peptide Derived from Human Papillomavirus
RSLHHLSEV

SEQ ID NO: 23924 - protein, 10 aa, Artificial Sequence
  Peptide Derived from Human Papillomavirus
RSLHHLSEVL

SEQ ID NO: 23925 - protein, 10 aa, Artificial Sequence
  Peptide Derived from Human Papillomavirus
TSREPRESTV

SEQ ID NO: 23926 - protein, 9 aa, Artificial Sequence
  Peptide Derived from Human Papillomavirus
WTGSCLGCW

SEQ ID NO: 23927 - protein, 8 aa, Artificial Sequence
  Peptide Derived from Human Papillomavirus
YAVCRVCL

SEQ ID NO: 23928 - protein, 9 aa, Artificial Sequence
  Peptide Derived from Human Papillomavirus
YAVCRVCLL

SEQ ID NO: 23929 - protein, 10 aa, Artificial Sequence
  Peptide Derived from Human Papillomavirus
YAVCRVCLLF

SEQ ID NO: 23930 - protein, 11 aa, Artificial Sequence
  Peptide Derived from Human Papillomavirus
YAVCRVCLLFY

SEQ ID NO: 23931 - protein, 9 aa, Artificial Sequence
  Peptide Derived from Human Papillomavirus
YSKVRKYRY

SEQ ID NO: 23932 - protein, 10 aa, Artificial Sequence
  Peptide Derived from Human Papillomavirus
YSKVRKYRYY

SEQ ID NO: 23933 - protein, 8 aa, Artificial Sequence
  Peptide Derived from Human Papillomavirus
YSVYGATL

SEQ ID NO: 23934 - protein, 11 aa, Artificial Sequence
  Peptide Derived from Human Papillomavirus
YSVYGATLESI

SEQ ID NO: 23935 - protein, 11 aa, Artificial Sequence
  Peptide Derived from Human Papillomavirus
DSSEDEDEDEV

SEQ ID NO: 23936 - protein, 9 aa, Artificial Sequence
  Peptide Derived from Human Papillomavirus
GALTVTCPL

SEQ ID NO: 23937 - protein, 11 aa, Artificial Sequence
  Peptide Derived from Human Papillomavirus
GALTVTCPLCA

SEQ ID NO: 23938 - protein, 8 aa, Artificial Sequence
  Peptide Derived from Human Papillomavirus
HTCYLIHV

SEQ ID NO: 23939 - protein, 9 aa, Artificial Sequence
  Peptide Derived from Human Papillomavirus
LTPQTEIDL

SEQ ID NO: 23940 - protein, 9 aa, Artificial Sequence
  Peptide Derived from Human Papillomavirus
LTVTCPLCA

SEQ ID NO: 23941 - protein, 8 aa, Artificial Sequence
  Peptide Derived from Human Papillomavirus
PTLQDVVL

SEQ ID NO: 23942 - protein, 10 aa, Artificial Sequence
  Peptide Derived from Human Papillomavirus
PTLQDVVLEL

SEQ ID NO: 23943 - protein, 8 aa, Artificial Sequence
  Peptide Derived from Human Papillomavirus
QAKQHTCY

SEQ ID NO: 23944 - protein, 9 aa, Artificial Sequence
  Peptide Derived from Human Papillomavirus
QAKQHTCYL

SEQ ID NO: 23945 - protein, 10 aa, Artificial Sequence
  Peptide Derived from Human Papillomavirus
QAKQHTCYLI

SEQ ID NO: 23946 - protein, 11 aa, Artificial Sequence
  Peptide Derived from Human Papillomavirus
QARQAKQHTCY

SEQ ID NO: 23947 - protein, 9 aa, Artificial Sequence
  Peptide Derived from Human Papillomavirus
QSTKEDLRV

SEQ ID NO: 23948 - protein, 10 aa, Artificial Sequence
  Peptide Derived from Human Papillomavirus
QSTKEDLRVV

SEQ ID NO: 23949 - protein, 10 aa, Artificial Sequence
  Peptide Derived from Human Papillomavirus
SSEDEDEDEV

SEQ ID NO: 23950 - protein, 8 aa, Artificial Sequence
  Peptide Derived from Human Papillomavirus
STKEDLRV

SEQ ID NO: 23951 - protein, 9 aa, Artificial Sequence
  Peptide Derived from Human Papillomavirus
STKEDLRVV

SEQ ID NO: 23952 - protein, 11 aa, Artificial Sequence
  Peptide Derived from Human Papillomavirus
ATDSYVKRTSI

SEQ ID NO: 23953 - protein, 8 aa, Artificial Sequence
  Peptide Derived from Human Papillomavirus
ATEQLSKY

SEQ ID NO: 23954 - protein, 10 aa, Artificial Sequence
  Peptide Derived from Human Papillomavirus
ATEQLSKYDA

SEQ ID NO: 23955 - protein, 8 aa, Artificial Sequence
  Peptide Derived from Human Papillomavirus
ATPSGSMI

SEQ ID NO: 23956 - protein, 8 aa, Artificial Sequence
  Peptide Derived from Human Papillomavirus
ATSKKRSA

SEQ ID NO: 23957 - protein, 8 aa, Artificial Sequence
  Peptide Derived from Human Papillomavirus
ATSLEDKY

SEQ ID NO: 23958 - protein, 10 aa, Artificial Sequence
  Peptide Derived from Human Papillomavirus
ATSLEDKYRY

SEQ ID NO: 23959 - protein, 11 aa, Artificial Sequence
  Peptide Derived from Human Papillomavirus
ATSLEDKYRYV

SEQ ID NO: 23960 - protein, 10 aa, Artificial Sequence
  Peptide Derived from Human Papillomavirus
ATWRPSENKV

SEQ ID NO: 23961 - protein, 11 aa, Artificial Sequence
  Peptide Derived from Human Papillomavirus
ATWRPSENKVY

SEQ ID NO: 23962 - protein, 9 aa, Artificial Sequence
  Peptide Derived from Human Papillomavirus
CTPAMGEHW

SEQ ID NO: 23963 - protein, 8 aa, Artificial Sequence
  Peptide Derived from Human Papillomavirus
DARKINQY

SEQ ID NO: 23964 - protein, 9 aa, Artificial Sequence
  Peptide Derived from Human Papillomavirus
DARKINQYL

SEQ ID NO: 23965 - protein, 8 aa, Artificial Sequence
  Peptide Derived from Human Papillomavirus
DAYGDSMW

SEQ ID NO: 23966 - protein, 9 aa, Artificial Sequence
  Peptide Derived from Human Papillomavirus
DAYGDSMWF

SEQ ID NO: 23967 - protein, 10 aa, Artificial Sequence
  Peptide Derived from Human Papillomavirus
DAYGDSMWFY

SEQ ID NO: 23968 - protein, 11 aa, Artificial Sequence
  Peptide Derived from Human Papillomavirus
DAYGDSMWFYL

SEQ ID NO: 23969 - protein, 10 aa, Artificial Sequence
  Peptide Derived from Human Papillomavirus
DSFSTDLDQF

SEQ ID NO: 23970 - protein, 8 aa, Artificial Sequence
  Peptide Derived from Human Papillomavirus
DSRDNISV

SEQ ID NO: 23971 - protein, 9 aa, Artificial Sequence
  Peptide Derived from Human Papillomavirus
DSYVKRTSI

SEQ ID NO: 23972 - protein, 10 aa, Artificial Sequence
  Peptide Derived from Human Papillomavirus
DSYVKRTSIF

SEQ ID NO: 23973 - protein, 11 aa, Artificial Sequence
  Peptide Derived from Human Papillomavirus
DSYVKRTSIFY

SEQ ID NO: 23974 - protein, 8 aa, Artificial Sequence
  Peptide Derived from Human Papillomavirus
DTESSNLA

SEQ ID NO: 23975 - protein, 9 aa, Artificial Sequence
  Peptide Derived from Human Papillomavirus
DTGFGAMDF

SEQ ID NO: 23976 - protein, 11 aa, Artificial Sequence
  Peptide Derived from Human Papillomavirus
DTGFGAMDFKV

SEQ ID NO: 23977 - protein, 8 aa, Artificial Sequence
  Peptide Derived from Human Papillomavirus
DTTRSTNM

SEQ ID NO: 23978 - protein, 10 aa, Artificial Sequence
  Peptide Derived from Human Papillomavirus
DTTRSTNMTI

SEQ ID NO: 23979 - protein, 9 aa, Artificial Sequence
  Peptide Derived from Human Papillomavirus
EAQLFNKPY

SEQ ID NO: 23980 - protein, 10 aa, Artificial Sequence
  Peptide Derived from Human Papillomavirus
EAQLFNKPYW

SEQ ID NO: 23981 - protein, 11 aa, Artificial Sequence
  Peptide Derived from Human Papillomavirus
EAQLFNKPYWL

SEQ ID NO: 23982 - protein, 8 aa, Artificial Sequence
  Peptide Derived from Human Papillomavirus
ESKAEVPL

SEQ ID NO: 23983 - protein, 10 aa, Artificial Sequence
  Peptide Derived from Human Papillomavirus
ESKAEVPLDI

SEQ ID NO: 23984 - protein, 11 aa, Artificial Sequence
  Peptide Derived from Human Papillomavirus
ESKAEVPLDIV

SEQ ID NO: 23985 - protein, 10 aa, Artificial Sequence
  Peptide Derived from Human Papillomavirus
ESSNLANNNV

SEQ ID NO: 23986 - protein, 11 aa, Artificial Sequence
  Peptide Derived from Human Papillomavirus
ESSNLANNNVI

SEQ ID NO: 23987 - protein, 8 aa, Artificial Sequence
  Peptide Derived from Human Papillomavirus
ETIPAELY

SEQ ID NO: 23988 - protein, 9 aa, Artificial Sequence
  Peptide Derived from Human Papillomavirus
ETIPAELYL

SEQ ID NO: 23989 - protein, 9 aa, Artificial Sequence
  Peptide Derived from Human Papillomavirus
FARHYFNRA

SEQ ID NO: 23990 - protein, 8 aa, Artificial Sequence
  Peptide Derived from Human Papillomavirus
FSTDLDQF

SEQ ID NO: 23991 - protein, 10 aa, Artificial Sequence
  Peptide Derived from Human Papillomavirus
FSTDLDQFPL

SEQ ID NO: 23992 - protein, 9 aa, Artificial Sequence
  Peptide Derived from Human Papillomavirus
GAGLSGHPL

SEQ ID NO: 23993 - protein, 10 aa, Artificial Sequence
  Peptide Derived from Human Papillomavirus
GAGLSGHPLF

SEQ ID NO: 23994 - protein, 8 aa, Artificial Sequence
  Peptide Derived from Human Papillomavirus
GAMDFKVL

SEQ ID NO: 23995 - protein, 9 aa, Artificial Sequence
  Peptide Derived from Human Papillomavirus
GAVCKSTQV

SEQ ID NO: 23996 - protein, 8 aa, Artificial Sequence
  Peptide Derived from Human Papillomavirus
GAVNVFPI

SEQ ID NO: 23997 - protein, 9 aa, Artificial Sequence
  Peptide Derived from Human Papillomavirus
GAVNVFPIF

SEQ ID NO: 23998 - protein, 10 aa, Artificial Sequence
  Peptide Derived from Human Papillomavirus
GAVNVFPIFL

SEQ ID NO: 23999 - protein, 8 aa, Artificial Sequence
  Peptide Derived from Human Papillomavirus
GSMITSEA

SEQ ID NO: 24000 - protein, 10 aa, Artificial Sequence
  Peptide Derived from Human Papillomavirus
GSMITSEAQL

SEQ ID NO: 24001 - protein, 11 aa, Artificial Sequence
  Peptide Derived from Human Papillomavirus
GSMITSEAQLF

SEQ ID NO: 24002 - protein, 8 aa, Artificial Sequence
  Peptide Derived from Human Papillomavirus
GSSRLLAV

SEQ ID NO: 24003 - protein, 8 aa, Artificial Sequence
  Peptide Derived from Human Papillomavirus
GTRSKPAV

SEQ ID NO: 24004 - protein, 9 aa, Artificial Sequence
  Peptide Derived from Human Papillomavirus
GTRSKPAVA

SEQ ID NO: 24005 - protein, 8 aa, Artificial Sequence
  Peptide Derived from Human Papillomavirus
HAGSSRLL

SEQ ID NO: 24006 - protein, 9 aa, Artificial Sequence
  Peptide Derived from Human Papillomavirus
HAGSSRLLA

SEQ ID NO: 24007 - protein, 10 aa, Artificial Sequence
  Peptide Derived from Human Papillomavirus
HAGSSRLLAV

SEQ ID NO: 24008 - protein, 8 aa, Artificial Sequence
  Peptide Derived from Human Papillomavirus
ISTATEQL

SEQ ID NO: 24009 - protein, 11 aa, Artificial Sequence
  Peptide Derived from Human Papillomavirus
ISTATEQLSKY

SEQ ID NO: 24010 - protein, 10 aa, Artificial Sequence
  Peptide Derived from Human Papillomavirus
ISVDGKQTQL

SEQ ID NO: 24011 - protein, 8 aa, Artificial Sequence
  Peptide Derived from Human Papillomavirus
ITLSAEVM

SEQ ID NO: 24012 - protein, 9 aa, Artificial Sequence
  Peptide Derived from Human Papillomavirus
ITLSAEVMA

SEQ ID NO: 24013 - protein, 10 aa, Artificial Sequence
  Peptide Derived from Human Papillomavirus
ITLSAEVMAY

SEQ ID NO: 24014 - protein, 11 aa, Artificial Sequence
  Peptide Derived from Human Papillomavirus
ITLSAEVMAYL

SEQ ID NO: 24015 - protein, 8 aa, Artificial Sequence
  Peptide Derived from Human Papillomavirus
ITSEAQLF

SEQ ID NO: 24016 - protein, 8 aa, Artificial Sequence
  Peptide Derived from Human Papillomavirus
KAEVPLDI

SEQ ID NO: 24017 - protein, 9 aa, Artificial Sequence
  Peptide Derived from Human Papillomavirus
KAEVPLDIV

SEQ ID NO: 24018 - protein, 9 aa, Artificial Sequence
  Peptide Derived from Human Papillomavirus
KTNIPKVSA

SEQ ID NO: 24019 - protein, 10 aa, Artificial Sequence
  Peptide Derived from Human Papillomavirus
KTNIPKVSAY

SEQ ID NO: 24020 - protein, 9 aa, Artificial Sequence
  Peptide Derived from Human Papillomavirus
LAKYKFWDV

SEQ ID NO: 24021 - protein, 11 aa, Artificial Sequence
  Peptide Derived from Human Papillomavirus
LAKYKFWDVNL

SEQ ID NO: 24022 - protein, 8 aa, Artificial Sequence
  Peptide Derived from Human Papillomavirus
LALINTPI

SEQ ID NO: 24023 - protein, 8 aa, Artificial Sequence
  Peptide Derived from Human Papillomavirus
LAVGHPYY

SEQ ID NO: 24024 - protein, 10 aa, Artificial Sequence
  Peptide Derived from Human Papillomavirus
LAVGHPYYSV

SEQ ID NO: 24025 - protein, 8 aa, Artificial Sequence
  Peptide Derived from Human Papillomavirus
LSAEVMAY

SEQ ID NO: 24026 - protein, 9 aa, Artificial Sequence
  Peptide Derived from Human Papillomavirus
LSAEVMAYL

SEQ ID NO: 24027 - protein, 10 aa, Artificial Sequence
  Peptide Derived from Human Papillomavirus
LSGHPLFNRL

SEQ ID NO: 24028 - protein, 9 aa, Artificial Sequence
  Peptide Derived from Human Papillomavirus
LSKYDARKI

SEQ ID NO: 24029 - protein, 9 aa, Artificial Sequence
  Peptide Derived from Human Papillomavirus
LSPPVATSL

SEQ ID NO: 24030 - protein, 11 aa, Artificial Sequence
  Peptide Derived from Human Papillomavirus
MATWRPSENKV

SEQ ID NO: 24031 - protein, 9 aa, Artificial Sequence
  Peptide Derived from Human Papillomavirus
MAYLHNMNA

SEQ ID NO: 24032 - protein, 11 aa, Artificial Sequence
  Peptide Derived from Human Papillomavirus
MAYLHNMNANL

SEQ ID NO: 24033 - protein, 10 aa, Artificial Sequence
  Peptide Derived from Human Papillomavirus
MSADAYGDSM

SEQ ID NO: 24034 - protein, 11 aa, Artificial Sequence
  Peptide Derived from Human Papillomavirus
MSADAYGDSMW

SEQ ID NO: 24035 - protein, 10 aa, Artificial Sequence
  Peptide Derived from Human Papillomavirus
MTISTATEQL

SEQ ID NO: 24036 - protein, 8 aa, Artificial Sequence
  Peptide Derived from Human Papillomavirus
NANLLEDW

SEQ ID NO: 24037 - protein, 10 aa, Artificial Sequence
  Peptide Derived from Human Papillomavirus
NANLLEDWNI

SEQ ID NO: 24038 - protein, 9 aa, Artificial Sequence
  Peptide Derived from Human Papillomavirus
NTKTNIPKV

SEQ ID NO: 24039 - protein, 11 aa, Artificial Sequence
  Peptide Derived from Human Papillomavirus
NTKTNIPKVSA

SEQ ID NO: 24040 - protein, 9 aa, Artificial Sequence
  Peptide Derived from Human Papillomavirus
NTPIEDGDM

SEQ ID NO: 24041 - protein, 10 aa, Artificial Sequence
  Peptide Derived from Human Papillomavirus
NTPIEDGDMI

SEQ ID NO: 24042 - protein, 11 aa, Artificial Sequence
  Peptide Derived from Human Papillomavirus
PAMGEHWTKGA

SEQ ID NO: 24043 - protein, 11 aa, Artificial Sequence
  Peptide Derived from Human Papillomavirus
PAVATSKKRSA

SEQ ID NO: 24044 - protein, 8 aa, Artificial Sequence
  Peptide Derived from Human Papillomavirus
PSENKVYL

SEQ ID NO: 24045 - protein, 10 aa, Artificial Sequence
  Peptide Derived from Human Papillomavirus
PSGSMITSEA

SEQ ID NO: 24046 - protein, 8 aa, Artificial Sequence
  Peptide Derived from Human Papillomavirus
PTEKQDPL

SEQ ID NO: 24047 - protein, 9 aa, Artificial Sequence
  Peptide Derived from Human Papillomavirus
PTEKQDPLA

SEQ ID NO: 24048 - protein, 11 aa, Artificial Sequence
  Peptide Derived from Human Papillomavirus
PTEKQDPLAKY

SEQ ID NO: 24049 - protein, 8 aa, Artificial Sequence
  Peptide Derived from Human Papillomavirus
PTPVSKVV

SEQ ID NO: 24050 - protein, 9 aa, Artificial Sequence
  Peptide Derived from Human Papillomavirus
PTPVSKVVA

SEQ ID NO: 24051 - protein, 8 aa, Artificial Sequence
  Peptide Derived from Human Papillomavirus
PTSTSTPA

SEQ ID NO: 24052 - protein, 9 aa, Artificial Sequence
  Peptide Derived from Human Papillomavirus
QSTCKYPDY

SEQ ID NO: 24053 - protein, 10 aa, Artificial Sequence
  Peptide Derived from Human Papillomavirus
QSTCKYPDYL

SEQ ID NO: 24054 - protein, 9 aa, Artificial Sequence
  Peptide Derived from Human Papillomavirus
RAGKVGETI

SEQ ID NO: 24055 - protein, 11 aa, Artificial Sequence
  Peptide Derived from Human Papillomavirus
RAGKVGETIPA

SEQ ID NO: 24056 - protein, 9 aa, Artificial Sequence
  Peptide Derived from Human Papillomavirus
RAQGHNNGI

SEQ ID NO: 24057 - protein, 11 aa, Artificial Sequence
  Peptide Derived from Human Papillomavirus
RAQGHNNGICW

SEQ ID NO: 24058 - protein, 11 aa, Artificial Sequence
  Peptide Derived from Human Papillomavirus
RSAPTSTSTPA

SEQ ID NO: 24059 - protein, 10 aa, Artificial Sequence
  Peptide Derived from Human Papillomavirus
RSTNMTISTA

SEQ ID NO: 24060 - protein, 8 aa, Artificial Sequence
  Peptide Derived from Human Papillomavirus
RTSIFYHA

SEQ ID NO: 24061 - protein, 9 aa, Artificial Sequence
  Peptide Derived from Human Papillomavirus
SADAYGDSM

SEQ ID NO: 24062 - protein, 10 aa, Artificial Sequence
  Peptide Derived from Human Papillomavirus
SADAYGDSMW

SEQ ID NO: 24063 - protein, 11 aa, Artificial Sequence
  Peptide Derived from Human Papillomavirus
SADAYGDSMWF

SEQ ID NO: 24064 - protein, 8 aa, Artificial Sequence
  Peptide Derived from Human Papillomavirus
SAEVMAYL

SEQ ID NO: 24065 - protein, 11 aa, Artificial Sequence
  Peptide Derived from Human Papillomavirus
SAEVMAYLHNM

SEQ ID NO: 24066 - protein, 10 aa, Artificial Sequence
  Peptide Derived from Human Papillomavirus
SAPTSTSTPA

SEQ ID NO: 24067 - protein, 8 aa, Artificial Sequence
  Peptide Derived from Human Papillomavirus
SAYQYRVF

SEQ ID NO: 24068 - protein, 10 aa, Artificial Sequence
  Peptide Derived from Human Papillomavirus
SAYQYRVFRV

SEQ ID NO: 24069 - protein, 9 aa, Artificial Sequence
  Peptide Derived from Human Papillomavirus
SSNLANNNV

SEQ ID NO: 24070 - protein, 10 aa, Artificial Sequence
  Peptide Derived from Human Papillomavirus
SSNLANNNVI

SEQ ID NO: 24071 - protein, 11 aa, Artificial Sequence
  Peptide Derived from Human Papillomavirus
SSRLLAVGHPY

SEQ ID NO: 24072 - protein, 10 aa, Artificial Sequence
  Peptide Derived from Human Papillomavirus
STATEQLSKY

SEQ ID NO: 24073 - protein, 8 aa, Artificial Sequence
  Peptide Derived from Human Papillomavirus
STCKYPDY

SEQ ID NO: 24074 - protein, 9 aa, Artificial Sequence
  Peptide Derived from Human Papillomavirus
STCKYPDYL

SEQ ID NO: 24075 - protein, 11 aa, Artificial Sequence
  Peptide Derived from Human Papillomavirus
STCKYPDYLKM

SEQ ID NO: 24076 - protein, 9 aa, Artificial Sequence
  Peptide Derived from Human Papillomavirus
STDLDQFPL

SEQ ID NO: 24077 - protein, 9 aa, Artificial Sequence
  Peptide Derived from Human Papillomavirus
STNMTISTA

SEQ ID NO: 24078 - protein, 9 aa, Artificial Sequence
  Peptide Derived from Human Papillomavirus
TATEQLSKY

SEQ ID NO: 24079 - protein, 11 aa, Artificial Sequence
  Peptide Derived from Human Papillomavirus
TATEQLSKYDA

SEQ ID NO: 24080 - protein, 11 aa, Artificial Sequence
  Peptide Derived from Human Papillomavirus
TSEAQLFNKPY

SEQ ID NO: 24081 - protein, 9 aa, Artificial Sequence
  Peptide Derived from Human Papillomavirus
TSLEDKYRY

SEQ ID NO: 24082 - protein, 10 aa, Artificial Sequence
  Peptide Derived from Human Papillomavirus
TSLEDKYRYV

SEQ ID NO: 24083 - protein, 8 aa, Artificial Sequence
  Peptide Derived from Human Papillomavirus
TTGDCPPL

SEQ ID NO: 24084 - protein, 9 aa, Artificial Sequence
  Peptide Derived from Human Papillomavirus
TTGDCPPLA

SEQ ID NO: 24085 - protein, 10 aa, Artificial Sequence
  Peptide Derived from Human Papillomavirus
TTGDCPPLAL

SEQ ID NO: 24086 - protein, 11 aa, Artificial Sequence
  Peptide Derived from Human Papillomavirus
TTGDCPPLALI

SEQ ID NO: 24087 - protein, 9 aa, Artificial Sequence
  Peptide Derived from Human Papillomavirus
TTRSTNMTI

SEQ ID NO: 24088 - protein, 8 aa, Artificial Sequence
  Peptide Derived from Human Papillomavirus
VATPSGSM

SEQ ID NO: 24089 - protein, 9 aa, Artificial Sequence
  Peptide Derived from Human Papillomavirus
VATPSGSMI

SEQ ID NO: 24090 - protein, 9 aa, Artificial Sequence
  Peptide Derived from Human Papillomavirus
VATSKKRSA

SEQ ID NO: 24091 - protein, 9 aa, Artificial Sequence
  Peptide Derived from Human Papillomavirus
VATSLEDKY

SEQ ID NO: 24092 - protein, 11 aa, Artificial Sequence
  Peptide Derived from Human Papillomavirus
VATSLEDKYRY

SEQ ID NO: 24093 - protein, 8 aa, Artificial Sequence
  Peptide Derived from Human Papillomavirus
VSAYQYRV

SEQ ID NO: 24094 - protein, 9 aa, Artificial Sequence
  Peptide Derived from Human Papillomavirus
VSAYQYRVF

SEQ ID NO: 24095 - protein, 11 aa, Artificial Sequence
  Peptide Derived from Human Papillomavirus
VSAYQYRVFRV

SEQ ID NO: 24096 - protein, 10 aa, Artificial Sequence
  Peptide Derived from Human Papillomavirus
VSKVVATDSY

SEQ ID NO: 24097 - protein, 11 aa, Artificial Sequence
  Peptide Derived from Human Papillomavirus
VSKVVATDSYV

SEQ ID NO: 24098 - protein, 10 aa, Artificial Sequence
  Peptide Derived from Human Papillomavirus
VTKDNTKTNI

SEQ ID NO: 24099 - protein, 9 aa, Artificial Sequence
  Peptide Derived from Human Papillomavirus
VTTGDCPPL

SEQ ID NO: 24100 - protein, 10 aa, Artificial Sequence
  Peptide Derived from Human Papillomavirus
VTTGDCPPLA

SEQ ID NO: 24101 - protein, 11 aa, Artificial Sequence
  Peptide Derived from Human Papillomavirus
VTTGDCPPLAL

SEQ ID NO: 24102 - protein, 8 aa, Artificial Sequence
  Peptide Derived from Human Papillomavirus
WACVGLEV

SEQ ID NO: 24103 - protein, 9 aa, Artificial Sequence
  Peptide Derived from Human Papillomavirus
AAPRLYRKA

SEQ ID NO: 24104 - protein, 10 aa, Artificial Sequence
  Peptide Derived from Human Papillomavirus
AAPRLYRKAF

SEQ ID NO: 24105 - protein, 9 aa, Artificial Sequence
  Peptide Derived from Human Papillomavirus
ASNTTNVTA

SEQ ID NO: 24106 - protein, 11 aa, Artificial Sequence
  Peptide Derived from Human Papillomavirus
ASNTTNVTAPL

SEQ ID NO: 24107 - protein, 11 aa, Artificial Sequence
  Peptide Derived from Human Papillomavirus
ATIQTRRGTQI

SEQ ID NO: 24108 - protein, 10 aa, Artificial Sequence
  Peptide Derived from Human Papillomavirus
ATLVSADNPL

SEQ ID NO: 24109 - protein, 11 aa, Artificial Sequence
  Peptide Derived from Human Papillomavirus
ATLVSADNPLF

SEQ ID NO: 24110 - protein, 9 aa, Artificial Sequence
  Peptide Derived from Human Papillomavirus
ATPSAHLPI

SEQ ID NO: 24111 - protein, 10 aa, Artificial Sequence
  Peptide Derived from Human Papillomavirus
ATQLYKTCKL

SEQ ID NO: 24112 - protein, 9 aa, Artificial Sequence
  Peptide Derived from Human Papillomavirus
ATRRKRASA

SEQ ID NO: 24113 - protein, 11 aa, Artificial Sequence
  Peptide Derived from Human Papillomavirus
DTSLAFSPSGV

SEQ ID NO: 24114 - protein, 10 aa, Artificial Sequence
  Peptide Derived from Human Papillomavirus
EAPGLSSQSV

SEQ ID NO: 24115 - protein, 11 aa, Artificial Sequence
  Peptide Derived from Human Papillomavirus
EAPGLSSQSVA

SEQ ID NO: 24116 - protein, 8 aa, Artificial Sequence
  Peptide Derived from Human Papillomavirus
EAPQTGEV

SEQ ID NO: 24117 - protein, 9 aa, Artificial Sequence
  Peptide Derived from Human Papillomavirus
ESGAGIPNF

SEQ ID NO: 24118 - protein, 9 aa, Artificial Sequence
  Peptide Derived from Human Papillomavirus
ESSVIESGA

SEQ ID NO: 24119 - protein, 11 aa, Artificial Sequence
  Peptide Derived from Human Papillomavirus
ESSVIESGAGI

SEQ ID NO: 24120 - protein, 10 aa, Artificial Sequence
  Peptide Derived from Human Papillomavirus
ESVGPTDPSI

SEQ ID NO: 24121 - protein, 11 aa, Artificial Sequence
  Peptide Derived from Human Papillomavirus
ESVGPTDPSIV

SEQ ID NO: 24122 - protein, 10 aa, Artificial Sequence
  Peptide Derived from Human Papillomavirus
ETPFYSGPDI

SEQ ID NO: 24123 - protein, 11 aa, Artificial Sequence
  Peptide Derived from Human Papillomavirus
ETPFYSGPDIV

SEQ ID NO: 24124 - protein, 8 aa, Artificial Sequence
  Peptide Derived from Human Papillomavirus
FADGDVAA

SEQ ID NO: 24125 - protein, 8 aa, Artificial Sequence
  Peptide Derived from Human Papillomavirus
FALWPVYF

SEQ ID NO: 24126 - protein, 9 aa, Artificial Sequence
  Peptide Derived from Human Papillomavirus
FALWPVYFF

SEQ ID NO: 24127 - protein, 8 aa, Artificial Sequence
  Peptide Derived from Human Papillomavirus
FASNTTNV

SEQ ID NO: 24128 - protein, 10 aa, Artificial Sequence
  Peptide Derived from Human Papillomavirus
FASNTTNVTA

SEQ ID NO: 24129 - protein, 11 aa, Artificial Sequence
  Peptide Derived from Human Papillomavirus
FAVHGSGTEPI

SEQ ID NO: 24130 - protein, 8 aa, Artificial Sequence
  Peptide Derived from Human Papillomavirus
FSRLGRKA

SEQ ID NO: 24131 - protein, 10 aa, Artificial Sequence
  Peptide Derived from Human Papillomavirus
FSRLGRKATI

SEQ ID NO: 24132 - protein, 9 aa, Artificial Sequence
  Peptide Derived from Human Papillomavirus
FTGSGGFEI

SEQ ID NO: 24133 - protein, 8 aa, Artificial Sequence
  Peptide Derived from Human Papillomavirus
FTTRRGGV

SEQ ID NO: 24134 - protein, 10 aa, Artificial Sequence
  Peptide Derived from Human Papillomavirus
FTTRRGGVRF

SEQ ID NO: 24135 - protein, 9 aa, Artificial Sequence
  Peptide Derived from Human Papillomavirus
FTYFGGLGI

SEQ ID NO: 24136 - protein, 8 aa, Artificial Sequence
  Peptide Derived from Human Papillomavirus
GARVHYYY

SEQ ID NO: 24137 - protein, 10 aa, Artificial Sequence
  Peptide Derived from Human Papillomavirus
GARVHYYYDI

SEQ ID NO: 24138 - protein, 8 aa, Artificial Sequence
  Peptide Derived from Human Papillomavirus
GSGGRAGY

SEQ ID NO: 24139 - protein, 9 aa, Artificial Sequence
  Peptide Derived from Human Papillomavirus
GSGGRAGYV

SEQ ID NO: 24140 - protein, 11 aa, Artificial Sequence
  Peptide Derived from Human Papillomavirus
GSGGRAGYVPL

SEQ ID NO: 24141 - protein, 10 aa, Artificial Sequence
  Peptide Derived from Human Papillomavirus
GSLFTYFGGL

SEQ ID NO: 24142 - protein, 8 aa, Artificial Sequence
  Peptide Derived from Human Papillomavirus
GSRPSTIV

SEQ ID NO: 24143 - protein, 10 aa, Artificial Sequence
  Peptide Derived from Human Papillomavirus
GSRPSTIVDV

SEQ ID NO: 24144 - protein, 9 aa, Artificial Sequence
  Peptide Derived from Human Papillomavirus
GSSFALWPV

SEQ ID NO: 24145 - protein, 10 aa, Artificial Sequence
  Peptide Derived from Human Papillomavirus
GSSFALWPVY

SEQ ID NO: 24146 - protein, 11 aa, Artificial Sequence
  Peptide Derived from Human Papillomavirus
GSSFALWPVYF

SEQ ID NO: 24147 - protein, 8 aa, Artificial Sequence
  Peptide Derived from Human Papillomavirus
GTCPEDVV

SEQ ID NO: 24148 - protein, 11 aa, Artificial Sequence
  Peptide Derived from Human Papillomavirus
GTCPEDVVNKI

SEQ ID NO: 24149 - protein, 8 aa, Artificial Sequence
  Peptide Derived from Human Papillomavirus
GTDTSLAF

SEQ ID NO: 24150 - protein, 10 aa, Artificial Sequence
  Peptide Derived from Human Papillomavirus
GTEPISSTPI

SEQ ID NO: 24151 - protein, 8 aa, Artificial Sequence
  Peptide Derived from Human Papillomavirus
GTGSGGRA

SEQ ID NO: 24152 - protein, 10 aa, Artificial Sequence
  Peptide Derived from Human Papillomavirus
GTGSGGRAGY

SEQ ID NO: 24153 - protein, 11 aa, Artificial Sequence
  Peptide Derived from Human Papillomavirus
GTGSGGRAGYV

SEQ ID NO: 24154 - protein, 10 aa, Artificial Sequence
  Peptide Derived from Human Papillomavirus
GTGTGSGGRA

SEQ ID NO: 24155 - protein, 8 aa, Artificial Sequence
  Peptide Derived from Human Papillomavirus
GTQIGARV

SEQ ID NO: 24156 - protein, 10 aa, Artificial Sequence
  Peptide Derived from Human Papillomavirus
GTQIGARVHY

SEQ ID NO: 24157 - protein, 11 aa, Artificial Sequence
  Peptide Derived from Human Papillomavirus
GTQIGARVHYY

SEQ ID NO: 24158 - protein, 8 aa, Artificial Sequence
  Peptide Derived from Human Papillomavirus
HSYEEIPM

SEQ ID NO: 24159 - protein, 11 aa, Artificial Sequence
  Peptide Derived from Human Papillomavirus
HSYEEIPMQTF

SEQ ID NO: 24160 - protein, 10 aa, Artificial Sequence
  Peptide Derived from Human Papillomavirus
IAAPRLYRKA

SEQ ID NO: 24161 - protein, 11 aa, Artificial Sequence
  Peptide Derived from Human Papillomavirus
IAAPRLYRKAF

SEQ ID NO: 24162 - protein, 9 aa, Artificial Sequence
  Peptide Derived from Human Papillomavirus
IAQAEEIEM

SEQ ID NO: 24163 - protein, 10 aa, Artificial Sequence
  Peptide Derived from Human Papillomavirus
ISPIAQAEEI

SEQ ID NO: 24164 - protein, 9 aa, Artificial Sequence
  Peptide Derived from Human Papillomavirus
ISSTPIPGF

SEQ ID NO: 24165 - protein, 8 aa, Artificial Sequence
  Peptide Derived from Human Papillomavirus
ISTPTSGI

SEQ ID NO: 24166 - protein, 11 aa, Artificial Sequence
  Peptide Derived from Human Papillomavirus
ISTPTSGIHSY

SEQ ID NO: 24167 - protein, 11 aa, Artificial Sequence
  Peptide Derived from Human Papillomavirus
ITNPLFIDPPV

SEQ ID NO: 24168 - protein, 8 aa, Artificial Sequence
  Peptide Derived from Human Papillomavirus
ITPTSSTV

SEQ ID NO: 24169 - protein, 10 aa, Artificial Sequence
  Peptide Derived from Human Papillomavirus
ITPTSSTVHV

SEQ ID NO: 24170 - protein, 10 aa, Artificial Sequence
  Peptide Derived from Human Papillomavirus
ITSSSTTTPA

SEQ ID NO: 24171 - protein, 11 aa, Artificial Sequence
  Peptide Derived from Human Papillomavirus
ITSSSTTTPAV

SEQ ID NO: 24172 - protein, 8 aa, Artificial Sequence
  Peptide Derived from Human Papillomavirus
KAFQQVKV

SEQ ID NO: 24173 - protein, 8 aa, Artificial Sequence
  Peptide Derived from Human Papillomavirus
KTWADKIL

SEQ ID NO: 24174 - protein, 10 aa, Artificial Sequence
  Peptide Derived from Human Papillomavirus
KTWADKILQW

SEQ ID NO: 24175 - protein, 8 aa, Artificial Sequence
  Peptide Derived from Human Papillomavirus
LAFSPSGV

SEQ ID NO: 24176 - protein, 9 aa, Artificial Sequence
  Peptide Derived from Human Papillomavirus
LAFSPSGVA

SEQ ID NO: 24177 - protein, 10 aa, Artificial Sequence
  Peptide Derived from Human Papillomavirus
LSANNSFDGL

SEQ ID NO: 24178 - protein, 11 aa, Artificial Sequence
  Peptide Derived from Human Papillomavirus
LSANNSFDGLY

SEQ ID NO: 24179 - protein, 10 aa, Artificial Sequence
  Peptide Derived from Human Papillomavirus
LSFASNTTNV

SEQ ID NO: 24180 - protein, 9 aa, Artificial Sequence
  Peptide Derived from Human Papillomavirus
LSGTCPEDV

SEQ ID NO: 24181 - protein, 10 aa, Artificial Sequence
  Peptide Derived from Human Papillomavirus
LSGTCPEDVV

SEQ ID NO: 24182 - protein, 11 aa, Artificial Sequence
  Peptide Derived from Human Papillomavirus
LSSQSVATPSA

SEQ ID NO: 24183 - protein, 9 aa, Artificial Sequence
  Peptide Derived from Human Papillomavirus
NSFDGLYDI

SEQ ID NO: 24184 - protein, 10 aa, Artificial Sequence
  Peptide Derived from Human Papillomavirus
NSFDGLYDIY

SEQ ID NO: 24185 - protein, 11 aa, Artificial Sequence
  Peptide Derived from Human Papillomavirus
NSFDGLYDIYA

SEQ ID NO: 24186 - protein, 9 aa, Artificial Sequence
  Peptide Derived from Human Papillomavirus
NTTNVTAPL

SEQ ID NO: 24187 - protein, 8 aa, Artificial Sequence
  Peptide Derived from Human Papillomavirus
PAFLDRPA

SEQ ID NO: 24188 - protein, 10 aa, Artificial Sequence
  Peptide Derived from Human Papillomavirus
PAFLDRPATL

SEQ ID NO: 24189 - protein, 11 aa, Artificial Sequence
  Peptide Derived from Human Papillomavirus
PAFLDRPATLV

SEQ ID NO: 24190 - protein, 10 aa, Artificial Sequence
  Peptide Derived from Human Papillomavirus
PAFTTRRGGV

SEQ ID NO: 24191 - protein, 8 aa, Artificial Sequence
  Peptide Derived from Human Papillomavirus
PARPPIVV

SEQ ID NO: 24192 - protein, 11 aa, Artificial Sequence
  Peptide Derived from Human Papillomavirus
PARPPIVVESV

SEQ ID NO: 24193 - protein, 11 aa, Artificial Sequence
  Peptide Derived from Human Papillomavirus
PATLVSADNPL

SEQ ID NO: 24194 - protein, 10 aa, Artificial Sequence
  Peptide Derived from Human Papillomavirus
PSGVAPDPDF

SEQ ID NO: 24195 - protein, 11 aa, Artificial Sequence
  Peptide Derived from Human Papillomavirus
PSGVAPDPDFM

SEQ ID NO: 24196 - protein, 10 aa, Artificial Sequence
  Peptide Derived from Human Papillomavirus
PSTIVDVTPA

SEQ ID NO: 24197 - protein, 9 aa, Artificial Sequence
  Peptide Derived from Human Papillomavirus
PTDPSIVTL

SEQ ID NO: 24198 - protein, 10 aa, Artificial Sequence
  Peptide Derived from Human Papillomavirus
PTDPSIVTLV

SEQ ID NO: 24199 - protein, 9 aa, Artificial Sequence
  Peptide Derived from Human Papillomavirus
PTGPSTWPF

SEQ ID NO: 24200 - protein, 10 aa, Artificial Sequence
  Peptide Derived from Human Papillomavirus
PTGPSTWPFV

SEQ ID NO: 24201 - protein, 8 aa, Artificial Sequence
  Peptide Derived from Human Papillomavirus
PTSGIHSY

SEQ ID NO: 24202 - protein, 11 aa, Artificial Sequence
  Peptide Derived from Human Papillomavirus
PTSGIHSYEEI

SEQ ID NO: 24203 - protein, 8 aa, Artificial Sequence
  Peptide Derived from Human Papillomavirus
PTSSTVHV

SEQ ID NO: 24204 - protein, 10 aa, Artificial Sequence
  Peptide Derived from Human Papillomavirus
QAEEIEMQPL

SEQ ID NO: 24205 - protein, 11 aa, Artificial Sequence
  Peptide Derived from Human Papillomavirus
QAEEIEMQPLL

SEQ ID NO: 24206 - protein, 10 aa, Artificial Sequence
  Peptide Derived from Human Papillomavirus
QSPYDVTHDV

SEQ ID NO: 24207 - protein, 11 aa, Artificial Sequence
  Peptide Derived from Human Papillomavirus
QSPYDVTHDVY

SEQ ID NO: 24208 - protein, 8 aa, Artificial Sequence
  Peptide Derived from Human Papillomavirus
QSVATPSA

SEQ ID NO: 24209 - protein, 10 aa, Artificial Sequence
  Peptide Derived from Human Papillomavirus
QSVATPSAHL

SEQ ID NO: 24210 - protein, 9 aa, Artificial Sequence
  Peptide Derived from Human Papillomavirus
QTGEVSGNI

SEQ ID NO: 24211 - protein, 10 aa, Artificial Sequence
  Peptide Derived from Human Papillomavirus
QTGEVSGNIL

SEQ ID NO: 24212 - protein, 11 aa, Artificial Sequence
  Peptide Derived from Human Papillomavirus
QTGEVSGNILI

SEQ ID NO: 24213 - protein, 8 aa, Artificial Sequence
  Peptide Derived from Human Papillomavirus
QTRRGTQI

SEQ ID NO: 24214 - protein, 10 aa, Artificial Sequence
  Peptide Derived from Human Papillomavirus
QTRRGTQIGA

SEQ ID NO: 24215 - protein, 8 aa, Artificial Sequence
  Peptide Derived from Human Papillomavirus
RASATQLY

SEQ ID NO: 24216 - protein, 8 aa, Artificial Sequence
  Peptide Derived from Human Papillomavirus
RATRRKRA

SEQ ID NO: 24217 - protein, 10 aa, Artificial Sequence
  Peptide Derived from Human Papillomavirus
RATRRKRASA

SEQ ID NO: 24218 - protein, 11 aa, Artificial Sequence
  Peptide Derived from Human Papillomavirus
SAHLPIKPSTL

SEQ ID NO: 24219 - protein, 9 aa, Artificial Sequence
  Peptide Derived from Human Papillomavirus
SANNSFDGL

SEQ ID NO: 24220 - protein, 10 aa, Artificial Sequence
  Peptide Derived from Human Papillomavirus
SANNSFDGLY

SEQ ID NO: 24221 - protein, 11 aa, Artificial Sequence
  Peptide Derived from Human Papillomavirus
SATQLYKTCKL

SEQ ID NO: 24222 - protein, 8 aa, Artificial Sequence
  Peptide Derived from Human Papillomavirus
SSFALWPV

SEQ ID NO: 24223 - protein, 9 aa, Artificial Sequence
  Peptide Derived from Human Papillomavirus
SSFALWPVY

SEQ ID NO: 24224 - protein, 10 aa, Artificial Sequence
  Peptide Derived from Human Papillomavirus
SSFALWPVYF

SEQ ID NO: 24225 - protein, 11 aa, Artificial Sequence
  Peptide Derived from Human Papillomavirus
SSFALWPVYFF

SEQ ID NO: 24226 - protein, 10 aa, Artificial Sequence
  Peptide Derived from Human Papillomavirus
SSQSVATPSA

SEQ ID NO: 24227 - protein, 8 aa, Artificial Sequence
  Peptide Derived from Human Papillomavirus
SSSTTTPA

SEQ ID NO: 24228 - protein, 9 aa, Artificial Sequence
  Peptide Derived from Human Papillomavirus
SSSTTTPAV

SEQ ID NO: 24229 - protein, 10 aa, Artificial Sequence
  Peptide Derived from Human Papillomavirus
SSSTTTPAVL

SEQ ID NO: 24230 - protein, 9 aa, Artificial Sequence
  Peptide Derived from Human Papillomavirus
SSTHITNPL

SEQ ID NO: 24231 - protein, 10 aa, Artificial Sequence
  Peptide Derived from Human Papillomavirus
SSTHITNPLF

SEQ ID NO: 24232 - protein, 11 aa, Artificial Sequence
  Peptide Derived from Human Papillomavirus
SSTHITNPLFI

SEQ ID NO: 24233 - protein, 8 aa, Artificial Sequence
  Peptide Derived from Human Papillomavirus
SSTPIPGF

SEQ ID NO: 24234 - protein, 11 aa, Artificial Sequence
  Peptide Derived from Human Papillomavirus
SSTPIPGFRRI

SEQ ID NO: 24235 - protein, 8 aa, Artificial Sequence
  Peptide Derived from Human Papillomavirus
SSTTTPAV

SEQ ID NO: 24236 - protein, 9 aa, Artificial Sequence
  Peptide Derived from Human Papillomavirus
SSTTTPAVL

SEQ ID NO: 24237 - protein, 11 aa, Artificial Sequence
  Peptide Derived from Human Papillomavirus
SSTTTPAVLDI

SEQ ID NO: 24238 - protein, 11 aa, Artificial Sequence
  Peptide Derived from Human Papillomavirus
SSTVHVSSTHI

SEQ ID NO: 24239 - protein, 8 aa, Artificial Sequence
  Peptide Derived from Human Papillomavirus
SSVIESGA

SEQ ID NO: 24240 - protein, 10 aa, Artificial Sequence
  Peptide Derived from Human Papillomavirus
SSVIESGAGI

SEQ ID NO: 24241 - protein, 8 aa, Artificial Sequence
  Peptide Derived from Human Papillomavirus
STHITNPL

SEQ ID NO: 24242 - protein, 9 aa, Artificial Sequence
  Peptide Derived from Human Papillomavirus
STHITNPLF

SEQ ID NO: 24243 - protein, 10 aa, Artificial Sequence
  Peptide Derived from Human Papillomavirus
STHITNPLFI

SEQ ID NO: 24244 - protein, 9 aa, Artificial Sequence
  Peptide Derived from Human Papillomavirus
STIVDVTPA

SEQ ID NO: 24245 - protein, 10 aa, Artificial Sequence
  Peptide Derived from Human Papillomavirus
STPIPGFRRI

SEQ ID NO: 24246 - protein, 11 aa, Artificial Sequence
  Peptide Derived from Human Papillomavirus
STPIPGFRRIA

SEQ ID NO: 24247 - protein, 10 aa, Artificial Sequence
  Peptide Derived from Human Papillomavirus
STPTSGIHSY

SEQ ID NO: 24248 - protein, 8 aa, Artificial Sequence
  Peptide Derived from Human Papillomavirus
STTTPAVL

SEQ ID NO: 24249 - protein, 10 aa, Artificial Sequence
  Peptide Derived from Human Papillomavirus
STTTPAVLDI

SEQ ID NO: 24250 - protein, 10 aa, Artificial Sequence
  Peptide Derived from Human Papillomavirus
STVHVSSTHI

SEQ ID NO: 24251 - protein, 11 aa, Artificial Sequence
  Peptide Derived from Human Papillomavirus
STWPFVPQSPY

SEQ ID NO: 24252 - protein, 8 aa, Artificial Sequence
  Peptide Derived from Human Papillomavirus
TAPLGNVW

SEQ ID NO: 24253 - protein, 10 aa, Artificial Sequence
  Peptide Derived from Human Papillomavirus
TSGIHSYEEI

SEQ ID NO: 24254 - protein, 10 aa, Artificial Sequence
  Peptide Derived from Human Papillomavirus
TSLAFSPSGV

SEQ ID NO: 24255 - protein, 11 aa, Artificial Sequence
  Peptide Derived from Human Papillomavirus
TSLAFSPSGVA

SEQ ID NO: 24256 - protein, 9 aa, Artificial Sequence
  Peptide Derived from Human Papillomavirus
TSSSTTTPA

SEQ ID NO: 24257 - protein, 10 aa, Artificial Sequence
  Peptide Derived from Human Papillomavirus
TSSSTTTPAV

SEQ ID NO: 24258 - protein, 11 aa, Artificial Sequence
  Peptide Derived from Human Papillomavirus
TSSSTTTPAVL

SEQ ID NO: 24259 - protein, 8 aa, Artificial Sequence
  Peptide Derived from Human Papillomavirus
TTNVTAPL

SEQ ID NO: 24260 - protein, 11 aa, Artificial Sequence
  Peptide Derived from Human Papillomavirus
TTNVTAPLGNV

SEQ ID NO: 24261 - protein, 8 aa, Artificial Sequence
  Peptide Derived from Human Papillomavirus
TTPAVLDI

SEQ ID NO: 24262 - protein, 9 aa, Artificial Sequence
  Peptide Derived from Human Papillomavirus
TTRRGGVRF

SEQ ID NO: 24263 - protein, 9 aa, Artificial Sequence
  Peptide Derived from Human Papillomavirus
TTTPAVLDI

SEQ ID NO: 24264 - protein, 11 aa, Artificial Sequence
  Peptide Derived from Human Papillomavirus
VAHRATRRKRA

SEQ ID NO: 24265 - protein, 8 aa, Artificial Sequence
  Peptide Derived from Human Papillomavirus
VALHRPAF

SEQ ID NO: 24266 - protein, 8 aa, Artificial Sequence
  Peptide Derived from Human Papillomavirus
VAPDPDFM

SEQ ID NO: 24267 - protein, 10 aa, Artificial Sequence
  Peptide Derived from Human Papillomavirus
VAPDPDFMNI

SEQ ID NO: 24268 - protein, 11 aa, Artificial Sequence
  Peptide Derived from Human Papillomavirus
VAPDPDFMNIV

SEQ ID NO: 24269 - protein, 8 aa, Artificial Sequence
  Peptide Derived from Human Papillomavirus
VATPSAHL

SEQ ID NO: 24270 - protein, 10 aa, Artificial Sequence
  Peptide Derived from Human Papillomavirus
VATPSAHLPI

SEQ ID NO: 24271 - protein, 8 aa, Artificial Sequence
  Peptide Derived from Human Papillomavirus
VSADNPLF

SEQ ID NO: 24272 - protein, 10 aa, Artificial Sequence
  Peptide Derived from Human Papillomavirus
VSSTHITNPL

SEQ ID NO: 24273 - protein, 11 aa, Artificial Sequence
  Peptide Derived from Human Papillomavirus
VSSTHITNPLF

SEQ ID NO: 24274 - protein, 8 aa, Artificial Sequence
  Peptide Derived from Human Papillomavirus
VTAPLGNV

SEQ ID NO: 24275 - protein, 9 aa, Artificial Sequence
  Peptide Derived from Human Papillomavirus
VTAPLGNVW

SEQ ID NO: 24276 - protein, 11 aa, Artificial Sequence
  Peptide Derived from Human Papillomavirus
VTDPAFLDRPA

SEQ ID NO: 24277 - protein, 9 aa, Artificial Sequence
  Peptide Derived from Human Papillomavirus
VTLVEESSV

SEQ ID NO: 24278 - protein, 10 aa, Artificial Sequence
  Peptide Derived from Human Papillomavirus
VTLVEESSVI

SEQ ID NO: 24279 - protein, 8 aa, Artificial Sequence
  Peptide Derived from Human Papillomavirus
VTPARPPI

SEQ ID NO: 24280 - protein, 9 aa, Artificial Sequence
  Peptide Derived from Human Papillomavirus
VTPARPPIV

SEQ ID NO: 24281 - protein, 10 aa, Artificial Sequence
  Peptide Derived from Human Papillomavirus
VTPARPPIVV

SEQ ID NO: 24282 - protein, 8 aa, Artificial Sequence
  Peptide Derived from Human Papillomavirus
WADKILQW

SEQ ID NO: 24283 - protein, 11 aa, Artificial Sequence
  Peptide Derived from Human Papillomavirus
WADKILQWGSL

SEQ ID NO: 24284 - protein, 8 aa, Artificial Sequence
  Peptide Derived from Human Papillomavirus
YANIDDEA

SEQ ID NO: 24285 - protein, 11 aa, Artificial Sequence
  Peptide Derived from Human Papillomavirus
YANIDDEAPGL

SEQ ID NO: 24286 - protein, 8 aa, Artificial Sequence
  Peptide Derived from Human Papillomavirus
YSGPDIVL

SEQ ID NO: 24287 - protein, 10 aa, Artificial Sequence
  Peptide Derived from Human Papillomavirus
AICIEKQSRA

SEQ ID NO: 24288 - protein, 11 aa, Artificial Sequence
  Peptide Derived from Human Papillomavirus
AICIEKQSRAA

SEQ ID NO: 24289 - protein, 9 aa, Artificial Sequence
  Peptide Derived from Human Papillomavirus
ALDGNLVSM

SEQ ID NO: 24290 - protein, 11 aa, Artificial Sequence
  Peptide Derived from Human Papillomavirus
ALDGNLVSMDV

SEQ ID NO: 24291 - protein, 8 aa, Artificial Sequence
  Peptide Derived from Human Papillomavirus
ALFTAQEA

SEQ ID NO: 24292 - protein, 9 aa, Artificial Sequence
  Peptide Derived from Human Papillomavirus
ALKRFLQGI

SEQ ID NO: 24293 - protein, 9 aa, Artificial Sequence
  Peptide Derived from Human Papillomavirus
ALYWYKTGI

SEQ ID NO: 24294 - protein, 9 aa, Artificial Sequence
  Peptide Derived from Human Papillomavirus
AMLAKFKEL

SEQ ID NO: 24295 - protein, 10 aa, Artificial Sequence
  Peptide Derived from Human Papillomavirus
AMLAKFKELY

SEQ ID NO: 24296 - protein, 10 aa, Artificial Sequence
  Peptide Derived from Human Papillomavirus
AQEAKQHRDA

SEQ ID NO: 24297 - protein, 11 aa, Artificial Sequence
  Peptide Derived from Human Papillomavirus
AQEAKQHRDAV

SEQ ID NO: 24298 - protein, 10 aa, Artificial Sequence
  Peptide Derived from Human Papillomavirus
AQLADTNSNA

SEQ ID NO: 24299 - protein, 9 aa, Artificial Sequence
  Peptide Derived from Human Papillomavirus
AVQVLKRKY

SEQ ID NO: 24300 - protein, 10 aa, Artificial Sequence
  Peptide Derived from Human Papillomavirus
AVQVLKRKYL

SEQ ID NO: 24301 - protein, 11 aa, Artificial Sequence
  Peptide Derived from Human Papillomavirus
AVQVLKRKYLV

SEQ ID NO: 24302 - protein, 10 aa, Artificial Sequence
  Peptide Derived from Human Papillomavirus
AVVEKKTGDA

SEQ ID NO: 24303 - protein, 11 aa, Artificial Sequence
  Peptide Derived from Human Papillomavirus
AVVEKKTGDAI

SEQ ID NO: 24304 - protein, 11 aa, Artificial Sequence
  Peptide Derived from Human Papillomavirus
CIAAFGLTPSI

SEQ ID NO: 24305 - protein, 8 aa, Artificial Sequence
  Peptide Derived from Human Papillomavirus
CIEKQSRA

SEQ ID NO: 24306 - protein, 9 aa, Artificial Sequence
  Peptide Derived from Human Papillomavirus
CIEKQSRAA

SEQ ID NO: 24307 - protein, 8 aa, Artificial Sequence
  Peptide Derived from Human Papillomavirus
CILLYGAA

SEQ ID NO: 24308 - protein, 9 aa, Artificial Sequence
  Peptide Derived from Human Papillomavirus
CLYLHIQSL

SEQ ID NO: 24309 - protein, 10 aa, Artificial Sequence
  Peptide Derived from Human Papillomavirus
CLYLHIQSLA

SEQ ID NO: 24310 - protein, 9 aa, Artificial Sequence
  Peptide Derived from Human Papillomavirus
CMMIEPPKL

SEQ ID NO: 24311 - protein, 10 aa, Artificial Sequence
  Peptide Derived from Human Papillomavirus
CPPLLITSNI

SEQ ID NO: 24312 - protein, 8 aa, Artificial Sequence
  Peptide Derived from Human Papillomavirus
CQTPLTNI

SEQ ID NO: 24313 - protein, 9 aa, Artificial Sequence
  Peptide Derived from Human Papillomavirus
CQTPLTNIL

SEQ ID NO: 24314 - protein, 11 aa, Artificial Sequence
  Peptide Derived from Human Papillomavirus
CQTPLTNILNV

SEQ ID NO: 24315 - protein, 10 aa, Artificial Sequence
  Peptide Derived from Human Papillomavirus
CVDNNISPRL

SEQ ID NO: 24316 - protein, 10 aa, Artificial Sequence
  Peptide Derived from Human Papillomavirus
CVSGQNTNTL

SEQ ID NO: 24317 - protein, 8 aa, Artificial Sequence
  Peptide Derived from Human Papillomavirus
CVSPMCMM

SEQ ID NO: 24318 - protein, 9 aa, Artificial Sequence
  Peptide Derived from Human Papillomavirus
CVSPMCMMI

SEQ ID NO: 24319 - protein, 10 aa, Artificial Sequence
  Peptide Derived from Human Papillomavirus
DISGCVDNNI

SEQ ID NO: 24320 - protein, 8 aa, Artificial Sequence
  Peptide Derived from Human Papillomavirus
DIVDDSEI

SEQ ID NO: 24321 - protein, 9 aa, Artificial Sequence
  Peptide Derived from Human Papillomavirus
DIVDDSEIA

SEQ ID NO: 24322 - protein, 10 aa, Artificial Sequence
  Peptide Derived from Human Papillomavirus
DIVDDSEIAY

SEQ ID NO: 24323 - protein, 8 aa, Artificial Sequence
  Peptide Derived from Human Papillomavirus
DVKHRPLV

SEQ ID NO: 24324 - protein, 10 aa, Artificial Sequence
  Peptide Derived from Human Papillomavirus
DVKHRPLVQL

SEQ ID NO: 24325 - protein, 9 aa, Artificial Sequence
  Peptide Derived from Human Papillomavirus
EIAYKYAQL

SEQ ID NO: 24326 - protein, 10 aa, Artificial Sequence
  Peptide Derived from Human Papillomavirus
EIAYKYAQLA

SEQ ID NO: 24327 - protein, 10 aa, Artificial Sequence
  Peptide Derived from Human Papillomavirus
ELNDKNWKSF

SEQ ID NO: 24328 - protein, 11 aa, Artificial Sequence
  Peptide Derived from Human Papillomavirus
ELNDKNWKSFF

SEQ ID NO: 24329 - protein, 8 aa, Artificial Sequence
  Peptide Derived from Human Papillomavirus
ELSQMVQW

SEQ ID NO: 24330 - protein, 9 aa, Artificial Sequence
  Peptide Derived from Human Papillomavirus
ELSQMVQWA

SEQ ID NO: 24331 - protein, 10 aa, Artificial Sequence
  Peptide Derived from Human Papillomavirus
ELSQMVQWAY

SEQ ID NO: 24332 - protein, 10 aa, Artificial Sequence
  Peptide Derived from Human Papillomavirus
ELYGVSFSEL

SEQ ID NO: 24333 - protein, 11 aa, Artificial Sequence
  Peptide Derived from Human Papillomavirus
ELYGVSFSELV

SEQ ID NO: 24334 - protein, 9 aa, Artificial Sequence
  Peptide Derived from Human Papillomavirus
EPPKLRSTA

SEQ ID NO: 24335 - protein, 10 aa, Artificial Sequence
  Peptide Derived from Human Papillomavirus
EPPKLRSTAA

SEQ ID NO: 24336 - protein, 11 aa, Artificial Sequence
  Peptide Derived from Human Papillomavirus
EPPKLRSTAAA

SEQ ID NO: 24337 - protein, 8 aa, Artificial Sequence
  Peptide Derived from Human Papillomavirus
EVETQQML

SEQ ID NO: 24338 - protein, 10 aa, Artificial Sequence
  Peptide Derived from Human Papillomavirus
EVETQQMLQV

SEQ ID NO: 24339 - protein, 9 aa, Artificial Sequence
  Peptide Derived from Human Papillomavirus
EVYGDTPEW

SEQ ID NO: 24340 - protein, 10 aa, Artificial Sequence
  Peptide Derived from Human Papillomavirus
EVYGDTPEWI

SEQ ID NO: 24341 - protein, 8 aa, Artificial Sequence
  Peptide Derived from Human Papillomavirus
FIVNDNDY

SEQ ID NO: 24342 - protein, 9 aa, Artificial Sequence
  Peptide Derived from Human Papillomavirus
FIVNDNDYL

SEQ ID NO: 24343 - protein, 8 aa, Artificial Sequence
  Peptide Derived from Human Papillomavirus
FLKSNSQA

SEQ ID NO: 24344 - protein, 10 aa, Artificial Sequence
  Peptide Derived from Human Papillomavirus
FLKSNSQAKI

SEQ ID NO: 24345 - protein, 11 aa, Artificial Sequence
  Peptide Derived from Human Papillomavirus
FLKSNSQAKIV

SEQ ID NO: 24346 - protein, 11 aa, Artificial Sequence
  Peptide Derived from Human Papillomavirus
FLQGIPKKNCI

SEQ ID NO: 24347 - protein, 9 aa, Artificial Sequence
  Peptide Derived from Human Papillomavirus
FLQGSVICF

SEQ ID NO: 24348 - protein, 10 aa, Artificial Sequence
  Peptide Derived from Human Papillomavirus
FLQGSVICFV

SEQ ID NO: 24349 - protein, 9 aa, Artificial Sequence
  Peptide Derived from Human Papillomavirus
FLRYQGVEF

SEQ ID NO: 24350 - protein, 10 aa, Artificial Sequence
  Peptide Derived from Human Papillomavirus
FLRYQGVEFM

SEQ ID NO: 24351 - protein, 8 aa, Artificial Sequence
  Peptide Derived from Human Papillomavirus
FLTALKRF

SEQ ID NO: 24352 - protein, 9 aa, Artificial Sequence
  Peptide Derived from Human Papillomavirus
FLTALKRFL

SEQ ID NO: 24353 - protein, 8 aa, Artificial Sequence
  Peptide Derived from Human Papillomavirus
FMSFLTAL

SEQ ID NO: 24354 - protein, 11 aa, Artificial Sequence
  Peptide Derived from Human Papillomavirus
FMSFLTALKRF

SEQ ID NO: 24355 - protein, 10 aa, Artificial Sequence
  Peptide Derived from Human Papillomavirus
FPFDENGNPV

SEQ ID NO: 24356 - protein, 11 aa, Artificial Sequence
  Peptide Derived from Human Papillomavirus
FPFDENGNPVY

SEQ ID NO: 24357 - protein, 8 aa, Artificial Sequence
  Peptide Derived from Human Papillomavirus
FVNSKSHF

SEQ ID NO: 24358 - protein, 9 aa, Artificial Sequence
  Peptide Derived from Human Papillomavirus
FVNSKSHFW

SEQ ID NO: 24359 - protein, 10 aa, Artificial Sequence
  Peptide Derived from Human Papillomavirus
FVNSKSHFWL

SEQ ID NO: 24360 - protein, 8 aa, Artificial Sequence
  Peptide Derived from Human Papillomavirus
GIPKKNCI

SEQ ID NO: 24361 - protein, 9 aa, Artificial Sequence
  Peptide Derived from Human Papillomavirus
GIPKKNCIL

SEQ ID NO: 24362 - protein, 10 aa, Artificial Sequence
  Peptide Derived from Human Papillomavirus
GIPKKNCILL

SEQ ID NO: 24363 - protein, 11 aa, Artificial Sequence
  Peptide Derived from Human Papillomavirus
GIPKKNCILLY

SEQ ID NO: 24364 - protein, 8 aa, Artificial Sequence
  Peptide Derived from Human Papillomavirus
GISNISEV

SEQ ID NO: 24365 - protein, 9 aa, Artificial Sequence
  Peptide Derived from Human Papillomavirus
GISNISEVY

SEQ ID NO: 24366 - protein, 10 aa, Artificial Sequence
  Peptide Derived from Human Papillomavirus
GLTPSIADSI

SEQ ID NO: 24367 - protein, 8 aa, Artificial Sequence
  Peptide Derived from Human Papillomavirus
GMLDDATV

SEQ ID NO: 24368 - protein, 11 aa, Artificial Sequence
  Peptide Derived from Human Papillomavirus
GMLDDATVPCW

SEQ ID NO: 24369 - protein, 8 aa, Artificial Sequence
  Peptide Derived from Human Papillomavirus
GMSLMKFL

SEQ ID NO: 24370 - protein, 8 aa, Artificial Sequence
  Peptide Derived from Human Papillomavirus
GMVVLLLV

SEQ ID NO: 24371 - protein, 10 aa, Artificial Sequence
  Peptide Derived from Human Papillomavirus
GMVVLLLVRY

SEQ ID NO: 24372 - protein, 8 aa, Artificial Sequence
  Peptide Derived from Human Papillomavirus
GVEFMSFL

SEQ ID NO: 24373 - protein, 10 aa, Artificial Sequence
  Peptide Derived from Human Papillomavirus
GVEFMSFLTA

SEQ ID NO: 24374 - protein, 11 aa, Artificial Sequence
  Peptide Derived from Human Papillomavirus
GVEFMSFLTAL

SEQ ID NO: 24375 - protein, 8 aa, Artificial Sequence
  Peptide Derived from Human Papillomavirus
GVSERHTI

SEQ ID NO: 24376 - protein, 8 aa, Artificial Sequence
  Peptide Derived from Human Papillomavirus
GVSFSELV

SEQ ID NO: 24377 - protein, 11 aa, Artificial Sequence
  Peptide Derived from Human Papillomavirus
GVSFSELVRPF

SEQ ID NO: 24378 - protein, 9 aa, Artificial Sequence
  Peptide Derived from Human Papillomavirus
HIQSLACSW

SEQ ID NO: 24379 - protein, 11 aa, Artificial Sequence
  Peptide Derived from Human Papillomavirus
HIQSLACSWGM

SEQ ID NO: 24380 - protein, 10 aa, Artificial Sequence
  Peptide Derived from Human Papillomavirus
ILNVLKTSNA

SEQ ID NO: 24381 - protein, 8 aa, Artificial Sequence
  Peptide Derived from Human Papillomavirus
IPKKNCIL

SEQ ID NO: 24382 - protein, 9 aa, Artificial Sequence
  Peptide Derived from Human Papillomavirus
IPKKNCILL

SEQ ID NO: 24383 - protein, 10 aa, Artificial Sequence
  Peptide Derived from Human Papillomavirus
IPKKNCILLY

SEQ ID NO: 24384 - protein, 11 aa, Artificial Sequence
  Peptide Derived from Human Papillomavirus
IQRQTVLQHSF

SEQ ID NO: 24385 - protein, 8 aa, Artificial Sequence
  Peptide Derived from Human Papillomavirus
IQSLACSW

SEQ ID NO: 24386 - protein, 10 aa, Artificial Sequence
  Peptide Derived from Human Papillomavirus
IQSLACSWGM

SEQ ID NO: 24387 - protein, 11 aa, Artificial Sequence
  Peptide Derived from Human Papillomavirus
IQSLACSWGMV

SEQ ID NO: 24388 - protein, 8 aa, Artificial Sequence
  Peptide Derived from Human Papillomavirus
IVDDSEIA

SEQ ID NO: 24389 - protein, 9 aa, Artificial Sequence
  Peptide Derived from Human Papillomavirus
IVDDSEIAY

SEQ ID NO: 24390 - protein, 11 aa, Artificial Sequence
  Peptide Derived from Human Papillomavirus
IVDDSEIAYKY

SEQ ID NO: 24391 - protein, 8 aa, Artificial Sequence
  Peptide Derived from Human Papillomavirus
IVKDCATM

SEQ ID NO: 24392 - protein, 10 aa, Artificial Sequence
  Peptide Derived from Human Papillomavirus
IVMFLRYQGV

SEQ ID NO: 24393 - protein, 8 aa, Artificial Sequence
  Peptide Derived from Human Papillomavirus
IVNDNDYL

SEQ ID NO: 24394 - protein, 11 aa, Artificial Sequence
  Peptide Derived from Human Papillomavirus
IVNDNDYLTQA

SEQ ID NO: 24395 - protein, 8 aa, Artificial Sequence
  Peptide Derived from Human Papillomavirus
KIGMLDDA

SEQ ID NO: 24396 - protein, 10 aa, Artificial Sequence
  Peptide Derived from Human Papillomavirus
KIGMLDDATV

SEQ ID NO: 24397 - protein, 9 aa, Artificial Sequence
  Peptide Derived from Human Papillomavirus
KIVKDCATM

SEQ ID NO: 24398 - protein, 8 aa, Artificial Sequence
  Peptide Derived from Human Papillomavirus
KLLCVSPM

SEQ ID NO: 24399 - protein, 10 aa, Artificial Sequence
  Peptide Derived from Human Papillomavirus
KLLCVSPMCM

SEQ ID NO: 24400 - protein, 11 aa, Artificial Sequence
  Peptide Derived from Human Papillomavirus
KLLCVSPMCMM

SEQ ID NO: 24401 - protein, 9 aa, Artificial Sequence
  Peptide Derived from Human Papillomavirus
KLLSKLLCV

SEQ ID NO: 24402 - protein, 8 aa, Artificial Sequence
  Peptide Derived from Human Papillomavirus
KLRSTAAA

SEQ ID NO: 24403 - protein, 9 aa, Artificial Sequence
  Peptide Derived from Human Papillomavirus
KLRSTAAAL

SEQ ID NO: 24404 - protein, 10 aa, Artificial Sequence
  Peptide Derived from Human Papillomavirus
KLRSTAAALY

SEQ ID NO: 24405 - protein, 11 aa, Artificial Sequence
  Peptide Derived from Human Papillomavirus
KLRSTAAALYW

SEQ ID NO: 24406 - protein, 9 aa, Artificial Sequence
  Peptide Derived from Human Papillomavirus
KQHRDAVQV

SEQ ID NO: 24407 - protein, 10 aa, Artificial Sequence
  Peptide Derived from Human Papillomavirus
KQHRDAVQVL

SEQ ID NO: 24408 - protein, 9 aa, Artificial Sequence
  Peptide Derived from Human Papillomavirus
KQIVMFLRY

SEQ ID NO: 24409 - protein, 8 aa, Artificial Sequence
  Peptide Derived from Human Papillomavirus
KQMSMSQW

SEQ ID NO: 24410 - protein, 9 aa, Artificial Sequence
  Peptide Derived from Human Papillomavirus
KQMSMSQWI

SEQ ID NO: 24411 - protein, 11 aa, Artificial Sequence
  Peptide Derived from Human Papillomavirus
KQMSMSQWIKY

SEQ ID NO: 24412 - protein, 10 aa, Artificial Sequence
  Peptide Derived from Human Papillomavirus
KQSRAAKRRL

SEQ ID NO: 24413 - protein, 11 aa, Artificial Sequence
  Peptide Derived from Human Papillomavirus
KQSRAAKRRLF

SEQ ID NO: 24414 - protein, 8 aa, Artificial Sequence
  Peptide Derived from Human Papillomavirus
LITSNINA

SEQ ID NO: 24415 - protein, 9 aa, Artificial Sequence
  Peptide Derived from Human Papillomavirus
LLCVSPMCM

SEQ ID NO: 24416 - protein, 10 aa, Artificial Sequence
  Peptide Derived from Human Papillomavirus
LLCVSPMCMM

SEQ ID NO: 24417 - protein, 11 aa, Artificial Sequence
  Peptide Derived from Human Papillomavirus
LLCVSPMCMMI

SEQ ID NO: 24418 - protein, 9 aa, Artificial Sequence
  Peptide Derived from Human Papillomavirus
LLITSNINA

SEQ ID NO: 24419 - protein, 8 aa, Artificial Sequence
  Peptide Derived from Human Papillomavirus
LLQQYCLY

SEQ ID NO: 24420 - protein, 9 aa, Artificial Sequence
  Peptide Derived from Human Papillomavirus
LLQQYCLYL

SEQ ID NO: 24421 - protein, 11 aa, Artificial Sequence
  Peptide Derived from Human Papillomavirus
LLQQYCLYLHI

SEQ ID NO: 24422 - protein, 8 aa, Artificial Sequence
  Peptide Derived from Human Papillomavirus
LLSKLLCV

SEQ ID NO: 24423 - protein, 11 aa, Artificial Sequence
  Peptide Derived from Human Papillomavirus
LLSKLLCVSPM

SEQ ID NO: 24424 - protein, 9 aa, Artificial Sequence
  Peptide Derived from Human Papillomavirus
LMKFLQGSV

SEQ ID NO: 24425 - protein, 10 aa, Artificial Sequence
  Peptide Derived from Human Papillomavirus
LMKFLQGSVI

SEQ ID NO: 24426 - protein, 10 aa, Artificial Sequence
  Peptide Derived from Human Papillomavirus
LQGIPKKNCI

SEQ ID NO: 24427 - protein, 11 aa, Artificial Sequence
  Peptide Derived from Human Papillomavirus
LQGIPKKNCIL

SEQ ID NO: 24428 - protein, 8 aa, Artificial Sequence
  Peptide Derived from Human Papillomavirus
LQGSVICF

SEQ ID NO: 24429 - protein, 9 aa, Artificial Sequence
  Peptide Derived from Human Papillomavirus
LQGSVICFV

SEQ ID NO: 24430 - protein, 10 aa, Artificial Sequence
  Peptide Derived from Human Papillomavirus
LQHSFNDCTF

SEQ ID NO: 24431 - protein, 9 aa, Artificial Sequence
  Peptide Derived from Human Papillomavirus
LQPLADAKI

SEQ ID NO: 24432 - protein, 11 aa, Artificial Sequence
  Peptide Derived from Human Papillomavirus
LQPLADAKIGM

SEQ ID NO: 24433 - protein, 8 aa, Artificial Sequence
  Peptide Derived from Human Papillomavirus
LQQYCLYL

SEQ ID NO: 24434 - protein, 10 aa, Artificial Sequence
  Peptide Derived from Human Papillomavirus
LQQYCLYLHI

SEQ ID NO: 24435 - protein, 11 aa, Artificial Sequence
  Peptide Derived from Human Papillomavirus
LVDFIVNDNDY

SEQ ID NO: 24436 - protein, 9 aa, Artificial Sequence
  Peptide Derived from Human Papillomavirus
LVQLKCPPL

SEQ ID NO: 24437 - protein, 10 aa, Artificial Sequence
  Peptide Derived from Human Papillomavirus
LVQLKCPPLL

SEQ ID NO: 24438 - protein, 11 aa, Artificial Sequence
  Peptide Derived from Human Papillomavirus
LVQLKCPPLLI

SEQ ID NO: 24439 - protein, 11 aa, Artificial Sequence
  Peptide Derived from Human Papillomavirus
LVSMDVKHRPL

SEQ ID NO: 24440 - protein, 8 aa, Artificial Sequence
  Peptide Derived from Human Papillomavirus
LVSPLSDI

SEQ ID NO: 24441 - protein, 10 aa, Artificial Sequence
  Peptide Derived from Human Papillomavirus
LVVFTFPNEF

SEQ ID NO: 24442 - protein, 11 aa, Artificial Sequence
  Peptide Derived from Human Papillomavirus
MIEPPKLRSTA

SEQ ID NO: 24443 - protein, 8 aa, Artificial Sequence
  Peptide Derived from Human Papillomavirus
MLAKFKEL

SEQ ID NO: 24444 - protein, 9 aa, Artificial Sequence
  Peptide Derived from Human Papillomavirus
MLAKFKELY

SEQ ID NO: 24445 - protein, 11 aa, Artificial Sequence
  Peptide Derived from Human Papillomavirus
MLAKFKELYGV

SEQ ID NO: 24446 - protein, 10 aa, Artificial Sequence
  Peptide Derived from Human Papillomavirus
MLDDATVPCW

SEQ ID NO: 24447 - protein, 8 aa, Artificial Sequence
  Peptide Derived from Human Papillomavirus
MMIEPPKL

SEQ ID NO: 24448 - protein, 10 aa, Artificial Sequence
  Peptide Derived from Human Papillomavirus
MVQWAYDNDI

SEQ ID NO: 24449 - protein, 11 aa, Artificial Sequence
  Peptide Derived from Human Papillomavirus
MVQWAYDNDIV

SEQ ID NO: 24450 - protein, 9 aa, Artificial Sequence
  Peptide Derived from Human Papillomavirus
MVVLLLVRY

SEQ ID NO: 24451 - protein, 11 aa, Artificial Sequence
  Peptide Derived from Human Papillomavirus
NILNVLKTSNA

SEQ ID NO: 24452 - protein, 10 aa, Artificial Sequence
  Peptide Derived from Human Papillomavirus
NINAGTDSRW

SEQ ID NO: 24453 - protein, 8 aa, Artificial Sequence
  Peptide Derived from Human Papillomavirus
NISPRLKA

SEQ ID NO: 24454 - protein, 9 aa, Artificial Sequence
  Peptide Derived from Human Papillomavirus
NISPRLKAI

SEQ ID NO: 24455 - protein, 11 aa, Artificial Sequence
  Peptide Derived from Human Papillomavirus
NISPRLKAICI

SEQ ID NO: 24456 - protein, 10 aa, Artificial Sequence
  Peptide Derived from Human Papillomavirus
NLRNALDGNL

SEQ ID NO: 24457 - protein, 11 aa, Artificial Sequence
  Peptide Derived from Human Papillomavirus
NLRNALDGNLV

SEQ ID NO: 24458 - protein, 11 aa, Artificial Sequence
  Peptide Derived from Human Papillomavirus
NPVYELNDKNW

SEQ ID NO: 24459 - protein, 8 aa, Artificial Sequence
  Peptide Derived from Human Papillomavirus
NVLKTSNA

SEQ ID NO: 24460 - protein, 10 aa, Artificial Sequence
  Peptide Derived from Human Papillomavirus
NVLKTSNAKA

SEQ ID NO: 24461 - protein, 11 aa, Artificial Sequence
  Peptide Derived from Human Papillomavirus
NVLKTSNAKAA

SEQ ID NO: 24462 - protein, 9 aa, Artificial Sequence
  Peptide Derived from Human Papillomavirus
PLADAKIGM

SEQ ID NO: 24463 - protein, 10 aa, Artificial Sequence
  Peptide Derived from Human Papillomavirus
PLADAKIGML

SEQ ID NO: 24464 - protein, 8 aa, Artificial Sequence
  Peptide Derived from Human Papillomavirus
PLLITSNI

SEQ ID NO: 24465 - protein, 10 aa, Artificial Sequence
  Peptide Derived from Human Papillomavirus
PLLITSNINA

SEQ ID NO: 24466 - protein, 9 aa, Artificial Sequence
  Peptide Derived from Human Papillomavirus
PLSDISGCV

SEQ ID NO: 24467 - protein, 8 aa, Artificial Sequence
  Peptide Derived from Human Papillomavirus
PLTNILNV

SEQ ID NO: 24468 - protein, 9 aa, Artificial Sequence
  Peptide Derived from Human Papillomavirus
PLTNILNVL

SEQ ID NO: 24469 - protein, 10 aa, Artificial Sequence
  Peptide Derived from Human Papillomavirus
PLVQLKCPPL

SEQ ID NO: 24470 - protein, 11 aa, Artificial Sequence
  Peptide Derived from Human Papillomavirus
PLVQLKCPPLL

SEQ ID NO: 24471 - protein, 11 aa, Artificial Sequence
  Peptide Derived from Human Papillomavirus
PMCMMIEPPKL

SEQ ID NO: 24472 - protein, 8 aa, Artificial Sequence
  Peptide Derived from Human Papillomavirus
PPKLRSTA

SEQ ID NO: 24473 - protein, 9 aa, Artificial Sequence
  Peptide Derived from Human Papillomavirus
PPKLRSTAA

SEQ ID NO: 24474 - protein, 10 aa, Artificial Sequence
  Peptide Derived from Human Papillomavirus
PPKLRSTAAA

SEQ ID NO: 24475 - protein, 11 aa, Artificial Sequence
  Peptide Derived from Human Papillomavirus
PPKLRSTAAAL

SEQ ID NO: 24476 - protein, 9 aa, Artificial Sequence
  Peptide Derived from Human Papillomavirus
PPLLITSNI

SEQ ID NO: 24477 - protein, 11 aa, Artificial Sequence
  Peptide Derived from Human Papillomavirus
PPLLITSNINA

SEQ ID NO: 24478 - protein, 10 aa, Artificial Sequence
  Peptide Derived from Human Papillomavirus
PVYELNDKNW

SEQ ID NO: 24479 - protein, 8 aa, Artificial Sequence
  Peptide Derived from Human Papillomavirus
QIVMFLRY

SEQ ID NO: 24480 - protein, 11 aa, Artificial Sequence
  Peptide Derived from Human Papillomavirus
QIVMFLRYQGV

SEQ ID NO: 24481 - protein, 9 aa, Artificial Sequence
  Peptide Derived from Human Papillomavirus
QLADTNSNA

SEQ ID NO: 24482 - protein, 11 aa, Artificial Sequence
  Peptide Derived from Human Papillomavirus
QLADTNSNASA

SEQ ID NO: 24483 - protein, 8 aa, Artificial Sequence
  Peptide Derived from Human Papillomavirus
QLKCPPLL

SEQ ID NO: 24484 - protein, 9 aa, Artificial Sequence
  Peptide Derived from Human Papillomavirus
QLKCPPLLI

SEQ ID NO: 24485 - protein, 8 aa, Artificial Sequence
  Peptide Derived from Human Papillomavirus
QMSMSQWI

SEQ ID NO: 24486 - protein, 10 aa, Artificial Sequence
  Peptide Derived from Human Papillomavirus
QMSMSQWIKY

SEQ ID NO: 24487 - protein, 11 aa, Artificial Sequence
  Peptide Derived from Human Papillomavirus
QMVQWAYDNDI

SEQ ID NO: 24488 - protein, 8 aa, Artificial Sequence
  Peptide Derived from Human Papillomavirus
QPLADAKI

SEQ ID NO: 24489 - protein, 10 aa, Artificial Sequence
  Peptide Derived from Human Papillomavirus
QPLADAKIGM

SEQ ID NO: 24490 - protein, 11 aa, Artificial Sequence
  Peptide Derived from Human Papillomavirus
QPLADAKIGML

SEQ ID NO: 24491 - protein, 9 aa, Artificial Sequence
  Peptide Derived from Human Papillomavirus
QQYCLYLHI

SEQ ID NO: 24492 - protein, 8 aa, Artificial Sequence
  Peptide Derived from Human Papillomavirus
QVLKRKYL

SEQ ID NO: 24493 - protein, 9 aa, Artificial Sequence
  Peptide Derived from Human Papillomavirus
QVLKRKYLV

SEQ ID NO: 24494 - protein, 10 aa, Artificial Sequence
  Peptide Derived from Human Papillomavirus
RLFESEDSGY

SEQ ID NO: 24495 - protein, 11 aa, Artificial Sequence
  Peptide Derived from Human Papillomavirus
RLVVFTFPNEF

SEQ ID NO: 24496 - protein, 11 aa, Artificial Sequence
  Peptide Derived from Human Papillomavirus
RPLVQLKCPPL

SEQ ID NO: 24497 - protein, 9 aa, Artificial Sequence
  Peptide Derived from Human Papillomavirus
RQTVLQHSF

SEQ ID NO: 24498 - protein, 8 aa, Artificial Sequence
  Peptide Derived from Human Papillomavirus
RVDDGGDW

SEQ ID NO: 24499 - protein, 11 aa, Artificial Sequence
  Peptide Derived from Human Papillomavirus
RVDDGGDWKQI

SEQ ID NO: 24500 - protein, 9 aa, Artificial Sequence
  Peptide Derived from Human Papillomavirus
SIADSIKTL

SEQ ID NO: 24501 - protein, 10 aa, Artificial Sequence
  Peptide Derived from Human Papillomavirus
SIADSIKTLL

SEQ ID NO: 24502 - protein, 9 aa, Artificial Sequence
  Peptide Derived from Human Papillomavirus
SIKTLLQQY

SEQ ID NO: 24503 - protein, 11 aa, Artificial Sequence
  Peptide Derived from Human Papillomavirus
SIKTLLQQYCL

SEQ ID NO: 24504 - protein, 8 aa, Artificial Sequence
  Peptide Derived from Human Papillomavirus
SLACSWGM

SEQ ID NO: 24505 - protein, 9 aa, Artificial Sequence
  Peptide Derived from Human Papillomavirus
SLACSWGMV

SEQ ID NO: 24506 - protein, 10 aa, Artificial Sequence
  Peptide Derived from Human Papillomavirus
SLACSWGMVV

SEQ ID NO: 24507 - protein, 11 aa, Artificial Sequence
  Peptide Derived from Human Papillomavirus
SLACSWGMVVL

SEQ ID NO: 24508 - protein, 8 aa, Artificial Sequence
  Peptide Derived from Human Papillomavirus
SLFGMSLM

SEQ ID NO: 24509 - protein, 10 aa, Artificial Sequence
  Peptide Derived from Human Papillomavirus
SLFGMSLMKF

SEQ ID NO: 24510 - protein, 11 aa, Artificial Sequence
  Peptide Derived from Human Papillomavirus
SLFGMSLMKFL

SEQ ID NO: 24511 - protein, 10 aa, Artificial Sequence
  Peptide Derived from Human Papillomavirus
SLMKFLQGSV

SEQ ID NO: 24512 - protein, 11 aa, Artificial Sequence
  Peptide Derived from Human Papillomavirus
SLMKFLQGSVI

SEQ ID NO: 24513 - protein, 8 aa, Artificial Sequence
  Peptide Derived from Human Papillomavirus
SLPTFKCV

SEQ ID NO: 24514 - protein, 9 aa, Artificial Sequence
  Peptide Derived from Human Papillomavirus
SMDVKHRPL

SEQ ID NO: 24515 - protein, 10 aa, Artificial Sequence
  Peptide Derived from Human Papillomavirus
SMDVKHRPLV

SEQ ID NO: 24516 - protein, 8 aa, Artificial Sequence
  Peptide Derived from Human Papillomavirus
SMSQWIKY

SEQ ID NO: 24517 - protein, 10 aa, Artificial Sequence
  Peptide Derived from Human Papillomavirus
SPLSDISGCV

SEQ ID NO: 24518 - protein, 9 aa, Artificial Sequence
  Peptide Derived from Human Papillomavirus
SPRLKAICI

SEQ ID NO: 24519 - protein, 10 aa, Artificial Sequence
  Peptide Derived from Human Papillomavirus
SQAKIVKDCA

SEQ ID NO: 24520 - protein, 8 aa, Artificial Sequence
  Peptide Derived from Human Papillomavirus
SQMVQWAY

SEQ ID NO: 24521 - protein, 11 aa, Artificial Sequence
  Peptide Derived from Human Papillomavirus
SQWIKYRCDRV

SEQ ID NO: 24522 - protein, 10 aa, Artificial Sequence
  Peptide Derived from Human Papillomavirus
TICQTPLTNI

SEQ ID NO: 24523 - protein, 11 aa, Artificial Sequence
  Peptide Derived from Human Papillomavirus
TICQTPLTNIL

SEQ ID NO: 24524 - protein, 9 aa, Artificial Sequence
  Peptide Derived from Human Papillomavirus
TIEKLLSKL

SEQ ID NO: 24525 - protein, 10 aa, Artificial Sequence
  Peptide Derived from Human Papillomavirus
TIEKLLSKLL

SEQ ID NO: 24526 - protein, 8 aa, Artificial Sequence
  Peptide Derived from Human Papillomavirus
TLLQQYCL

SEQ ID NO: 24527 - protein, 9 aa, Artificial Sequence
  Peptide Derived from Human Papillomavirus
TLLQQYCLY

SEQ ID NO: 24528 - protein, 10 aa, Artificial Sequence
  Peptide Derived from Human Papillomavirus
TLLQQYCLYL

SEQ ID NO: 24529 - protein, 9 aa, Artificial Sequence
  Peptide Derived from Human Papillomavirus
TMCRHYKRA

SEQ ID NO: 24530 - protein, 10 aa, Artificial Sequence
  Peptide Derived from Human Papillomavirus
TPEWIQRQTV

SEQ ID NO: 24531 - protein, 11 aa, Artificial Sequence
  Peptide Derived from Human Papillomavirus
TPEWIQRQTVL

SEQ ID NO: 24532 - protein, 9 aa, Artificial Sequence
  Peptide Derived from Human Papillomavirus
TPLTNILNV

SEQ ID NO: 24533 - protein, 10 aa, Artificial Sequence
  Peptide Derived from Human Papillomavirus
TPLTNILNVL

SEQ ID NO: 24534 - protein, 8 aa, Artificial Sequence
  Peptide Derived from Human Papillomavirus
TPSIADSI

SEQ ID NO: 24535 - protein, 11 aa, Artificial Sequence
  Peptide Derived from Human Papillomavirus
TPSIADSIKTL

SEQ ID NO: 24536 - protein, 8 aa, Artificial Sequence
  Peptide Derived from Human Papillomavirus
TQAETETA

SEQ ID NO: 24537 - protein, 10 aa, Artificial Sequence
  Peptide Derived from Human Papillomavirus
TQAETETAHA

SEQ ID NO: 24538 - protein, 11 aa, Artificial Sequence
  Peptide Derived from Human Papillomavirus
TQAETETAHAL

SEQ ID NO: 24539 - protein, 8 aa, Artificial Sequence
  Peptide Derived from Human Papillomavirus
TVPCWNYI

SEQ ID NO: 24540 - protein, 11 aa, Artificial Sequence
  Peptide Derived from Human Papillomavirus
VICFVNSKSHF

SEQ ID NO: 24541 - protein, 8 aa, Artificial Sequence
  Peptide Derived from Human Papillomavirus
VLKRKYLV

SEQ ID NO: 24542 - protein, 11 aa, Artificial Sequence
  Peptide Derived from Human Papillomavirus
VLKRKYLVSPL

SEQ ID NO: 24543 - protein, 9 aa, Artificial Sequence
  Peptide Derived from Human Papillomavirus
VLKTSNAKA

SEQ ID NO: 24544 - protein, 10 aa, Artificial Sequence
  Peptide Derived from Human Papillomavirus
VLKTSNAKAA

SEQ ID NO: 24545 - protein, 11 aa, Artificial Sequence
  Peptide Derived from Human Papillomavirus
VLKTSNAKAAM

SEQ ID NO: 24546 - protein, 11 aa, Artificial Sequence
  Peptide Derived from Human Papillomavirus
VLQHSFNDCTF

SEQ ID NO: 24547 - protein, 9 aa, Artificial Sequence
  Peptide Derived from Human Papillomavirus
VMFLRYQGV

SEQ ID NO: 24548 - protein, 11 aa, Artificial Sequence
  Peptide Derived from Human Papillomavirus
VMFLRYQGVEF

SEQ ID NO: 24549 - protein, 11 aa, Artificial Sequence
  Peptide Derived from Human Papillomavirus
VPCWNYIDDNL

SEQ ID NO: 24550 - protein, 8 aa, Artificial Sequence
  Peptide Derived from Human Papillomavirus
VQLKCPPL

SEQ ID NO: 24551 - protein, 9 aa, Artificial Sequence
  Peptide Derived from Human Papillomavirus
VQLKCPPLL

SEQ ID NO: 24552 - protein, 10 aa, Artificial Sequence
  Peptide Derived from Human Papillomavirus
VQLKCPPLLI

SEQ ID NO: 24553 - protein, 8 aa, Artificial Sequence
  Peptide Derived from Human Papillomavirus
VQVLKRKY

SEQ ID NO: 24554 - protein, 9 aa, Artificial Sequence
  Peptide Derived from Human Papillomavirus
VQVLKRKYL

SEQ ID NO: 24555 - protein, 10 aa, Artificial Sequence
  Peptide Derived from Human Papillomavirus
VQVLKRKYLV

SEQ ID NO: 24556 - protein, 9 aa, Artificial Sequence
  Peptide Derived from Human Papillomavirus
VQWAYDNDI

SEQ ID NO: 24557 - protein, 10 aa, Artificial Sequence
  Peptide Derived from Human Papillomavirus
VQWAYDNDIV

SEQ ID NO: 24558 - protein, 9 aa, Artificial Sequence
  Peptide Derived from Human Papillomavirus
VVEKKTGDA

SEQ ID NO: 24559 - protein, 10 aa, Artificial Sequence
  Peptide Derived from Human Papillomavirus
VVEKKTGDAI

SEQ ID NO: 24560 - protein, 9 aa, Artificial Sequence
  Peptide Derived from Human Papillomavirus
VVFTFPNEF

SEQ ID NO: 24561 - protein, 11 aa, Artificial Sequence
  Peptide Derived from Human Papillomavirus
VVFTFPNEFPF

SEQ ID NO: 24562 - protein, 8 aa, Artificial Sequence
  Peptide Derived from Human Papillomavirus
VVLLLVRY

SEQ ID NO: 24563 - protein, 9 aa, Artificial Sequence
  Peptide Derived from Human Papillomavirus
WIKYRCDRV

SEQ ID NO: 24564 - protein, 8 aa, Artificial Sequence
  Peptide Derived from Human Papillomavirus
WIQRQTVL

SEQ ID NO: 24565 - protein, 8 aa, Artificial Sequence
  Peptide Derived from Human Papillomavirus
WLQPLADA

SEQ ID NO: 24566 - protein, 10 aa, Artificial Sequence
  Peptide Derived from Human Papillomavirus
WLQPLADAKI

SEQ ID NO: 24567 - protein, 8 aa, Artificial Sequence
  Peptide Derived from Human Papillomavirus
WPYLHNRL

SEQ ID NO: 24568 - protein, 9 aa, Artificial Sequence
  Peptide Derived from Human Papillomavirus
WPYLHNRLV

SEQ ID NO: 24569 - protein, 10 aa, Artificial Sequence
  Peptide Derived from Human Papillomavirus
WPYLHNRLVV

SEQ ID NO: 24570 - protein, 11 aa, Artificial Sequence
  Peptide Derived from Human Papillomavirus
WPYLHNRLVVF

SEQ ID NO: 24571 - protein, 9 aa, Artificial Sequence
  Peptide Derived from Human Papillomavirus
YIDDNLRNA

SEQ ID NO: 24572 - protein, 10 aa, Artificial Sequence
  Peptide Derived from Human Papillomavirus
YIDDNLRNAL

SEQ ID NO: 24573 - protein, 8 aa, Artificial Sequence
  Peptide Derived from Human Papillomavirus
YLHIQSLA

SEQ ID NO: 24574 - protein, 11 aa, Artificial Sequence
  Peptide Derived from Human Papillomavirus
YLHIQSLACSW

SEQ ID NO: 24575 - protein, 8 aa, Artificial Sequence
  Peptide Derived from Human Papillomavirus
YLHNRLVV

SEQ ID NO: 24576 - protein, 9 aa, Artificial Sequence
  Peptide Derived from Human Papillomavirus
YLHNRLVVF

SEQ ID NO: 24577 - protein, 11 aa, Artificial Sequence
  Peptide Derived from Human Papillomavirus
YLHNRLVVFTF

SEQ ID NO: 24578 - protein, 10 aa, Artificial Sequence
  Peptide Derived from Human Papillomavirus
YLTQAETETA

SEQ ID NO: 24579 - protein, 9 aa, Artificial Sequence
  Peptide Derived from Human Papillomavirus
YLVSPLSDI

SEQ ID NO: 24580 - protein, 9 aa, Artificial Sequence
  Peptide Derived from Human Papillomavirus
YQGVEFMSF

SEQ ID NO: 24581 - protein, 10 aa, Artificial Sequence
  Peptide Derived from Human Papillomavirus
YQGVEFMSFL

SEQ ID NO: 24582 - protein, 8 aa, Artificial Sequence
  Peptide Derived from Human Papillomavirus
AIELQLTL

SEQ ID NO: 24583 - protein, 11 aa, Artificial Sequence
  Peptide Derived from Human Papillomavirus
AIELQLTLETI

SEQ ID NO: 24584 - protein, 11 aa, Artificial Sequence
  Peptide Derived from Human Papillomavirus
AIVTLTYDSEW

SEQ ID NO: 24585 - protein, 9 aa, Artificial Sequence
  Peptide Derived from Human Papillomavirus
AIYYKAREM

SEQ ID NO: 24586 - protein, 11 aa, Artificial Sequence
  Peptide Derived from Human Papillomavirus
AIYYKAREMGF

SEQ ID NO: 24587 - protein, 11 aa, Artificial Sequence
  Peptide Derived from Human Papillomavirus
ALGTEETQTTI

SEQ ID NO: 24588 - protein, 9 aa, Artificial Sequence
  Peptide Derived from Human Papillomavirus
ALQAIELQL

SEQ ID NO: 24589 - protein, 11 aa, Artificial Sequence
  Peptide Derived from Human Papillomavirus
ALQAIELQLTL

SEQ ID NO: 24590 - protein, 11 aa, Artificial Sequence
  Peptide Derived from Human Papillomavirus
APTGCIKKHGY

SEQ ID NO: 24591 - protein, 8 aa, Artificial Sequence
  Peptide Derived from Human Papillomavirus
AVSKNKAL

SEQ ID NO: 24592 - protein, 10 aa, Artificial Sequence
  Peptide Derived from Human Papillomavirus
AVSKNKALQA

SEQ ID NO: 24593 - protein, 11 aa, Artificial Sequence
  Peptide Derived from Human Papillomavirus
AVSKNKALQAI

SEQ ID NO: 24594 - protein, 8 aa, Artificial Sequence
  Peptide Derived from Human Papillomavirus
AVSSTWHW

SEQ ID NO: 24595 - protein, 9 aa, Artificial Sequence
  Peptide Derived from Human Papillomavirus
CIKKHGYTV

SEQ ID NO: 24596 - protein, 11 aa, Artificial Sequence
  Peptide Derived from Human Papillomavirus
CIKKHGYTVEV

SEQ ID NO: 24597 - protein, 11 aa, Artificial Sequence
  Peptide Derived from Human Papillomavirus
CPTSVFSSNEV

SEQ ID NO: 24598 - protein, 9 aa, Artificial Sequence
  Peptide Derived from Human Papillomavirus
CQDKILTHY

SEQ ID NO: 24599 - protein, 11 aa, Artificial Sequence
  Peptide Derived from Human Papillomavirus
CQRLNVCQDKI

SEQ ID NO: 24600 - protein, 8 aa, Artificial Sequence
  Peptide Derived from Human Papillomavirus
DICNTMHY

SEQ ID NO: 24601 - protein, 11 aa, Artificial Sequence
  Peptide Derived from Human Papillomavirus
DICNTMHYTNW

SEQ ID NO: 24602 - protein, 8 aa, Artificial Sequence
  Peptide Derived from Human Papillomavirus
DLRDHIDY

SEQ ID NO: 24603 - protein, 9 aa, Artificial Sequence
  Peptide Derived from Human Papillomavirus
DLRDHIDYW

SEQ ID NO: 24604 - protein, 9 aa, Artificial Sequence
  Peptide Derived from Human Papillomavirus
DQFLSQVKI

SEQ ID NO: 24605 - protein, 8 aa, Artificial Sequence
  Peptide Derived from Human Papillomavirus
DVSLEVYL

SEQ ID NO: 24606 - protein, 10 aa, Artificial Sequence
  Peptide Derived from Human Papillomavirus
DVSLEVYLTA

SEQ ID NO: 24607 - protein, 8 aa, Artificial Sequence
  Peptide Derived from Human Papillomavirus
EIIRQHLA

SEQ ID NO: 24608 - protein, 9 aa, Artificial Sequence
  Peptide Derived from Human Papillomavirus
ELQLTLETI

SEQ ID NO: 24609 - protein, 10 aa, Artificial Sequence
  Peptide Derived from Human Papillomavirus
ELQLTLETIY

SEQ ID NO: 24610 - protein, 11 aa, Artificial Sequence
  Peptide Derived from Human Papillomavirus
EMGFKHINHQV

SEQ ID NO: 24611 - protein, 8 aa, Artificial Sequence
  Peptide Derived from Human Papillomavirus
EVHAGGQV

SEQ ID NO: 24612 - protein, 9 aa, Artificial Sequence
  Peptide Derived from Human Papillomavirus
EVHAGGQVI

SEQ ID NO: 24613 - protein, 10 aa, Artificial Sequence
  Peptide Derived from Human Papillomavirus
EVHAGGQVIL

SEQ ID NO: 24614 - protein, 8 aa, Artificial Sequence
  Peptide Derived from Human Papillomavirus
EVQFDGDI

SEQ ID NO: 24615 - protein, 8 aa, Artificial Sequence
  Peptide Derived from Human Papillomavirus
EVSSPEII

SEQ ID NO: 24616 - protein, 11 aa, Artificial Sequence
  Peptide Derived from Human Papillomavirus
EVYLTAPTGCI

SEQ ID NO: 24617 - protein, 11 aa, Artificial Sequence
  Peptide Derived from Human Papillomavirus
FLSQVKIPKTI

SEQ ID NO: 24618 - protein, 8 aa, Artificial Sequence
  Peptide Derived from Human Papillomavirus
FVQFKDDA

SEQ ID NO: 24619 - protein, 11 aa, Artificial Sequence
  Peptide Derived from Human Papillomavirus
FVQFKDDAEKY

SEQ ID NO: 24620 - protein, 9 aa, Artificial Sequence
  Peptide Derived from Human Papillomavirus
GIRTYFVQF

SEQ ID NO: 24621 - protein, 9 aa, Artificial Sequence
  Peptide Derived from Human Papillomavirus
GLYYVHEGI

SEQ ID NO: 24622 - protein, 8 aa, Artificial Sequence
  Peptide Derived from Human Papillomavirus
GQVDYYGL

SEQ ID NO: 24623 - protein, 9 aa, Artificial Sequence
  Peptide Derived from Human Papillomavirus
GQVDYYGLY

SEQ ID NO: 24624 - protein, 10 aa, Artificial Sequence
  Peptide Derived from Human Papillomavirus
GQVDYYGLYY

SEQ ID NO: 24625 - protein, 11 aa, Artificial Sequence
  Peptide Derived from Human Papillomavirus
GQVDYYGLYYV

SEQ ID NO: 24626 - protein, 10 aa, Artificial Sequence
  Peptide Derived from Human Papillomavirus
GQVILCPTSV

SEQ ID NO: 24627 - protein, 11 aa, Artificial Sequence
  Peptide Derived from Human Papillomavirus
GQVILCPTSVF

SEQ ID NO: 24628 - protein, 8 aa, Artificial Sequence
  Peptide Derived from Human Papillomavirus
HIDYWKHM

SEQ ID NO: 24629 - protein, 10 aa, Artificial Sequence
  Peptide Derived from Human Papillomavirus
HIDYWKHMRL

SEQ ID NO: 24630 - protein, 10 aa, Artificial Sequence
  Peptide Derived from Human Papillomavirus
HINHQVVPTL

SEQ ID NO: 24631 - protein, 11 aa, Artificial Sequence
  Peptide Derived from Human Papillomavirus
HINHQVVPTLA

SEQ ID NO: 24632 - protein, 8 aa, Artificial Sequence
  Peptide Derived from Human Papillomavirus
HIYICEEA

SEQ ID NO: 24633 - protein, 10 aa, Artificial Sequence
  Peptide Derived from Human Papillomavirus
HIYICEEASV

SEQ ID NO: 24634 - protein, 8 aa, Artificial Sequence
  Peptide Derived from Human Papillomavirus
HLANHPAA

SEQ ID NO: 24635 - protein, 9 aa, Artificial Sequence
  Peptide Derived from Human Papillomavirus
HLKGDANTL

SEQ ID NO: 24636 - protein, 8 aa, Artificial Sequence
  Peptide Derived from Human Papillomavirus
HMRLECAI

SEQ ID NO: 24637 - protein, 9 aa, Artificial Sequence
  Peptide Derived from Human Papillomavirus
HMRLECAIY

SEQ ID NO: 24638 - protein, 10 aa, Artificial Sequence
  Peptide Derived from Human Papillomavirus
HMRLECAIYY

SEQ ID NO: 24639 - protein, 9 aa, Artificial Sequence
  Peptide Derived from Human Papillomavirus
HPAATHTKA

SEQ ID NO: 24640 - protein, 10 aa, Artificial Sequence
  Peptide Derived from Human Papillomavirus
HPAATHTKAV

SEQ ID NO: 24641 - protein, 11 aa, Artificial Sequence
  Peptide Derived from Human Papillomavirus
HPAATHTKAVA

SEQ ID NO: 24642 - protein, 8 aa, Artificial Sequence
  Peptide Derived from Human Papillomavirus
HQVVPTLA

SEQ ID NO: 24643 - protein, 9 aa, Artificial Sequence
  Peptide Derived from Human Papillomavirus
HQVVPTLAV

SEQ ID NO: 24644 - protein, 11 aa, Artificial Sequence
  Peptide Derived from Human Papillomavirus
IIRQHLANHPA

SEQ ID NO: 24645 - protein, 8 aa, Artificial Sequence
  Peptide Derived from Human Papillomavirus
ILCPTSVF

SEQ ID NO: 24646 - protein, 11 aa, Artificial Sequence
  Peptide Derived from Human Papillomavirus
IPKTITVSTGF

SEQ ID NO: 24647 - protein, 8 aa, Artificial Sequence
  Peptide Derived from Human Papillomavirus
IVHLKGDA

SEQ ID NO: 24648 - protein, 11 aa, Artificial Sequence
  Peptide Derived from Human Papillomavirus
IVHLKGDANTL

SEQ ID NO: 24649 - protein, 10 aa, Artificial Sequence
  Peptide Derived from Human Papillomavirus
IVTLTYDSEW

SEQ ID NO: 24650 - protein, 8 aa, Artificial Sequence
  Peptide Derived from Human Papillomavirus
KIPKTITV

SEQ ID NO: 24651 - protein, 8 aa, Artificial Sequence
  Peptide Derived from Human Papillomavirus
KLLHRDSV

SEQ ID NO: 24652 - protein, 11 aa, Artificial Sequence
  Peptide Derived from Human Papillomavirus
KLLHRDSVDSA

SEQ ID NO: 24653 - protein, 11 aa, Artificial Sequence
  Peptide Derived from Human Papillomavirus
KVWEVHAGGQV

SEQ ID NO: 24654 - protein, 10 aa, Artificial Sequence
  Peptide Derived from Human Papillomavirus
LLHRDSVDSA

SEQ ID NO: 24655 - protein, 8 aa, Artificial Sequence
  Peptide Derived from Human Papillomavirus
LQAIELQL

SEQ ID NO: 24656 - protein, 10 aa, Artificial Sequence
  Peptide Derived from Human Papillomavirus
LQAIELQLTL

SEQ ID NO: 24657 - protein, 8 aa, Artificial Sequence
  Peptide Derived from Human Papillomavirus
LQDVSLEV

SEQ ID NO: 24658 - protein, 9 aa, Artificial Sequence
  Peptide Derived from Human Papillomavirus
LQDVSLEVY

SEQ ID NO: 24659 - protein, 10 aa, Artificial Sequence
  Peptide Derived from Human Papillomavirus
LQDVSLEVYL

SEQ ID NO: 24660 - protein, 8 aa, Artificial Sequence
  Peptide Derived from Human Papillomavirus
LQLTLETI

SEQ ID NO: 24661 - protein, 9 aa, Artificial Sequence
  Peptide Derived from Human Papillomavirus
LQLTLETIY

SEQ ID NO: 24662 - protein, 8 aa, Artificial Sequence
  Peptide Derived from Human Papillomavirus
NPCHTTKL

SEQ ID NO: 24663 - protein, 9 aa, Artificial Sequence
  Peptide Derived from Human Papillomavirus
NPCHTTKLL

SEQ ID NO: 24664 - protein, 8 aa, Artificial Sequence
  Peptide Derived from Human Papillomavirus
NVCQDKIL

SEQ ID NO: 24665 - protein, 11 aa, Artificial Sequence
  Peptide Derived from Human Papillomavirus
NVCQDKILTHY

SEQ ID NO: 24666 - protein, 8 aa, Artificial Sequence
  Peptide Derived from Human Papillomavirus
NVKHKSAI

SEQ ID NO: 24667 - protein, 9 aa, Artificial Sequence
  Peptide Derived from Human Papillomavirus
NVKHKSAIV

SEQ ID NO: 24668 - protein, 11 aa, Artificial Sequence
  Peptide Derived from Human Papillomavirus
NVKHKSAIVTL

SEQ ID NO: 24669 - protein, 9 aa, Artificial Sequence
  Peptide Derived from Human Papillomavirus
PIVHLKGDA

SEQ ID NO: 24670 - protein, 8 aa, Artificial Sequence
  Peptide Derived from Human Papillomavirus
QLTLETIY

SEQ ID NO: 24671 - protein, 8 aa, Artificial Sequence
  Peptide Derived from Human Papillomavirus
QVDYYGLY

SEQ ID NO: 24672 - protein, 9 aa, Artificial Sequence
  Peptide Derived from Human Papillomavirus
QVDYYGLYY

SEQ ID NO: 24673 - protein, 10 aa, Artificial Sequence
  Peptide Derived from Human Papillomavirus
QVDYYGLYYV

SEQ ID NO: 24674 - protein, 9 aa, Artificial Sequence
  Peptide Derived from Human Papillomavirus
QVILCPTSV

SEQ ID NO: 24675 - protein, 10 aa, Artificial Sequence
  Peptide Derived from Human Papillomavirus
QVILCPTSVF

SEQ ID NO: 24676 - protein, 8 aa, Artificial Sequence
  Peptide Derived from Human Papillomavirus
QVKIPKTI

SEQ ID NO: 24677 - protein, 10 aa, Artificial Sequence
  Peptide Derived from Human Papillomavirus
QVKIPKTITV

SEQ ID NO: 24678 - protein, 8 aa, Artificial Sequence
  Peptide Derived from Human Papillomavirus
QVVPTLAV

SEQ ID NO: 24679 - protein, 11 aa, Artificial Sequence
  Peptide Derived from Human Papillomavirus
RINCNSNTTPI

SEQ ID NO: 24680 - protein, 8 aa, Artificial Sequence
  Peptide Derived from Human Papillomavirus
RLECAIYY

SEQ ID NO: 24681 - protein, 10 aa, Artificial Sequence
  Peptide Derived from Human Papillomavirus
RLECAIYYKA

SEQ ID NO: 24682 - protein, 9 aa, Artificial Sequence
  Peptide Derived from Human Papillomavirus
RLNVCQDKI

SEQ ID NO: 24683 - protein, 10 aa, Artificial Sequence
  Peptide Derived from Human Papillomavirus
RLNVCQDKIL

SEQ ID NO: 24684 - protein, 9 aa, Artificial Sequence
  Peptide Derived from Human Papillomavirus
RQHLANHPA

SEQ ID NO: 24685 - protein, 10 aa, Artificial Sequence
  Peptide Derived from Human Papillomavirus
RQHLANHPAA

SEQ ID NO: 24686 - protein, 8 aa, Artificial Sequence
  Peptide Derived from Human Papillomavirus
SLEVYLTA

SEQ ID NO: 24687 - protein, 9 aa, Artificial Sequence
  Peptide Derived from Human Papillomavirus
SPEIIRQHL

SEQ ID NO: 24688 - protein, 10 aa, Artificial Sequence
  Peptide Derived from Human Papillomavirus
SPEIIRQHLA

SEQ ID NO: 24689 - protein, 9 aa, Artificial Sequence
  Peptide Derived from Human Papillomavirus
SQVKIPKTI

SEQ ID NO: 24690 - protein, 11 aa, Artificial Sequence
  Peptide Derived from Human Papillomavirus
SQVKIPKTITV

SEQ ID NO: 24691 - protein, 8 aa, Artificial Sequence
  Peptide Derived from Human Papillomavirus
SQYSNEKW

SEQ ID NO: 24692 - protein, 10 aa, Artificial Sequence
  Peptide Derived from Human Papillomavirus
SQYSNEKWTL

SEQ ID NO: 24693 - protein, 8 aa, Artificial Sequence
  Peptide Derived from Human Papillomavirus
SVDSAPIL

SEQ ID NO: 24694 - protein, 10 aa, Artificial Sequence
  Peptide Derived from Human Papillomavirus
SVDSAPILTA

SEQ ID NO: 24695 - protein, 11 aa, Artificial Sequence
  Peptide Derived from Human Papillomavirus
SVDSAPILTAF

SEQ ID NO: 24696 - protein, 8 aa, Artificial Sequence
  Peptide Derived from Human Papillomavirus
SVFSSNEV

SEQ ID NO: 24697 - protein, 9 aa, Artificial Sequence
  Peptide Derived from Human Papillomavirus
SVTVVEGQV

SEQ ID NO: 24698 - protein, 11 aa, Artificial Sequence
  Peptide Derived from Human Papillomavirus
SVTVVEGQVDY

SEQ ID NO: 24699 - protein, 8 aa, Artificial Sequence
  Peptide Derived from Human Papillomavirus
TITVSTGF

SEQ ID NO: 24700 - protein, 9 aa, Artificial Sequence
  Peptide Derived from Human Papillomavirus
TITVSTGFM

SEQ ID NO: 24701 - protein, 11 aa, Artificial Sequence
  Peptide Derived from Human Papillomavirus
TITVSTGFMSI

SEQ ID NO: 24702 - protein, 9 aa, Artificial Sequence
  Peptide Derived from Human Papillomavirus
TLAVSKNKA

SEQ ID NO: 24703 - protein, 10 aa, Artificial Sequence
  Peptide Derived from Human Papillomavirus
TLAVSKNKAL

SEQ ID NO: 24704 - protein, 8 aa, Artificial Sequence
  Peptide Derived from Human Papillomavirus
TLCQRLNV

SEQ ID NO: 24705 - protein, 10 aa, Artificial Sequence
  Peptide Derived from Human Papillomavirus
TLETIYNSQY

SEQ ID NO: 24706 - protein, 9 aa, Artificial Sequence
  Peptide Derived from Human Papillomavirus
TLKCLRYRF

SEQ ID NO: 24707 - protein, 9 aa, Artificial Sequence
  Peptide Derived from Human Papillomavirus
TLQDVSLEV

SEQ ID NO: 24708 - protein, 10 aa, Artificial Sequence
  Peptide Derived from Human Papillomavirus
TLQDVSLEVY

SEQ ID NO: 24709 - protein, 11 aa, Artificial Sequence
  Peptide Derived from Human Papillomavirus
TLQDVSLEVYL

SEQ ID NO: 24710 - protein, 8 aa, Artificial Sequence
  Peptide Derived from Human Papillomavirus
TLTYDSEW

SEQ ID NO: 24711 - protein, 10 aa, Artificial Sequence
  Peptide Derived from Human Papillomavirus
TLYTAVSSTW

SEQ ID NO: 24712 - protein, 10 aa, Artificial Sequence
  Peptide Derived from Human Papillomavirus
TMHYTNWTHI

SEQ ID NO: 24713 - protein, 11 aa, Artificial Sequence
  Peptide Derived from Human Papillomavirus
TMHYTNWTHIY

SEQ ID NO: 24714 - protein, 10 aa, Artificial Sequence
  Peptide Derived from Human Papillomavirus
TPIVHLKGDA

SEQ ID NO: 24715 - protein, 10 aa, Artificial Sequence
  Peptide Derived from Human Papillomavirus
TVEVQFDGDI

SEQ ID NO: 24716 - protein, 9 aa, Artificial Sequence
  Peptide Derived from Human Papillomavirus
TVSTGFMSI

SEQ ID NO: 24717 - protein, 9 aa, Artificial Sequence
  Peptide Derived from Human Papillomavirus
TVVEGQVDY

SEQ ID NO: 24718 - protein, 10 aa, Artificial Sequence
  Peptide Derived from Human Papillomavirus
TVVEGQVDYY

SEQ ID NO: 24719 - protein, 8 aa, Artificial Sequence
  Peptide Derived from Human Papillomavirus
VILCPTSV

SEQ ID NO: 24720 - protein, 9 aa, Artificial Sequence
  Peptide Derived from Human Papillomavirus
VILCPTSVF

SEQ ID NO: 24721 - protein, 11 aa, Artificial Sequence
  Peptide Derived from Human Papillomavirus
VPTLAVSKNKA

SEQ ID NO: 24722 - protein, 11 aa, Artificial Sequence
  Peptide Derived from Human Papillomavirus
VQFDGDICNTM

SEQ ID NO: 24723 - protein, 10 aa, Artificial Sequence
  Peptide Derived from Human Papillomavirus
VQFKDDAEKY

SEQ ID NO: 24724 - protein, 8 aa, Artificial Sequence
  Peptide Derived from Human Papillomavirus
VVEGQVDY

SEQ ID NO: 24725 - protein, 9 aa, Artificial Sequence
  Peptide Derived from Human Papillomavirus
VVEGQVDYY

SEQ ID NO: 24726 - protein, 11 aa, Artificial Sequence
  Peptide Derived from Human Papillomavirus
VVEGQVDYYGL

SEQ ID NO: 24727 - protein, 10 aa, Artificial Sequence
  Peptide Derived from Human Papillomavirus
WQRDQFLSQV

SEQ ID NO: 24728 - protein, 8 aa, Artificial Sequence
  Peptide Derived from Human Papillomavirus
YICEEASV

SEQ ID NO: 24729 - protein, 10 aa, Artificial Sequence
  Peptide Derived from Human Papillomavirus
YICEEASVTV

SEQ ID NO: 24730 - protein, 11 aa, Artificial Sequence
  Peptide Derived from Human Papillomavirus
YICEEASVTVV

SEQ ID NO: 24731 - protein, 9 aa, Artificial Sequence
  Peptide Derived from Human Papillomavirus
YLTAPTGCI

SEQ ID NO: 24732 - protein, 9 aa, Artificial Sequence
  Peptide Derived from Human Papillomavirus
YVHEGIRTY

SEQ ID NO: 24733 - protein, 10 aa, Artificial Sequence
  Peptide Derived from Human Papillomavirus
YVHEGIRTYF

SEQ ID NO: 24734 - protein, 11 aa, Artificial Sequence
  Peptide Derived from Human Papillomavirus
YVHEGIRTYFV

SEQ ID NO: 24735 - protein, 8 aa, Artificial Sequence
  Peptide Derived from Human Papillomavirus
CLLIRPLL

SEQ ID NO: 24736 - protein, 9 aa, Artificial Sequence
  Peptide Derived from Human Papillomavirus
CLLIRPLLL

SEQ ID NO: 24737 - protein, 11 aa, Artificial Sequence
  Peptide Derived from Human Papillomavirus
CLLIRPLLLSV

SEQ ID NO: 24738 - protein, 9 aa, Artificial Sequence
  Peptide Derived from Human Papillomavirus
CVCLLIRPL

SEQ ID NO: 24739 - protein, 10 aa, Artificial Sequence
  Peptide Derived from Human Papillomavirus
CVCLLIRPLL

SEQ ID NO: 24740 - protein, 11 aa, Artificial Sequence
  Peptide Derived from Human Papillomavirus
CVCLLIRPLLL

SEQ ID NO: 24741 - protein, 8 aa, Artificial Sequence
  Peptide Derived from Human Papillomavirus
CVLLCVCL

SEQ ID NO: 24742 - protein, 9 aa, Artificial Sequence
  Peptide Derived from Human Papillomavirus
CVLLCVCLL

SEQ ID NO: 24743 - protein, 10 aa, Artificial Sequence
  Peptide Derived from Human Papillomavirus
CVLLCVCLLI

SEQ ID NO: 24744 - protein, 8 aa, Artificial Sequence
  Peptide Derived from Human Papillomavirus
FIVYIIFV

SEQ ID NO: 24745 - protein, 9 aa, Artificial Sequence
  Peptide Derived from Human Papillomavirus
FIVYIIFVY

SEQ ID NO: 24746 - protein, 10 aa, Artificial Sequence
  Peptide Derived from Human Papillomavirus
FIVYIIFVYI

SEQ ID NO: 24747 - protein, 9 aa, Artificial Sequence
  Peptide Derived from Human Papillomavirus
FLIHTHARF

SEQ ID NO: 24748 - protein, 10 aa, Artificial Sequence
  Peptide Derived from Human Papillomavirus
FLIHTHARFL

SEQ ID NO: 24749 - protein, 11 aa, Artificial Sequence
  Peptide Derived from Human Papillomavirus
FLIHTHARFLI

SEQ ID NO: 24750 - protein, 8 aa, Artificial Sequence
  Peptide Derived from Human Papillomavirus
FLLCFCVL

SEQ ID NO: 24751 - protein, 9 aa, Artificial Sequence
  Peptide Derived from Human Papillomavirus
FLLCFCVLL

SEQ ID NO: 24752 - protein, 11 aa, Artificial Sequence
  Peptide Derived from Human Papillomavirus
FLLCFCVLLCV

SEQ ID NO: 24753 - protein, 8 aa, Artificial Sequence
  Peptide Derived from Human Papillomavirus
FVYIPLFL

SEQ ID NO: 24754 - protein, 9 aa, Artificial Sequence
  Peptide Derived from Human Papillomavirus
FVYIPLFLI

SEQ ID NO: 24755 - protein, 8 aa, Artificial Sequence
  Peptide Derived from Human Papillomavirus
IIFVYIPL

SEQ ID NO: 24756 - protein, 9 aa, Artificial Sequence
  Peptide Derived from Human Papillomavirus
IIFVYIPLF

SEQ ID NO: 24757 - protein, 10 aa, Artificial Sequence
  Peptide Derived from Human Papillomavirus
IIFVYIPLFL

SEQ ID NO: 24758 - protein, 11 aa, Artificial Sequence
  Peptide Derived from Human Papillomavirus
IIFVYIPLFLI

SEQ ID NO: 24759 - protein, 8 aa, Artificial Sequence
  Peptide Derived from Human Papillomavirus
IILVLLLW

SEQ ID NO: 24760 - protein, 9 aa, Artificial Sequence
  Peptide Derived from Human Papillomavirus
IILVLLLWI

SEQ ID NO: 24761 - protein, 11 aa, Artificial Sequence
  Peptide Derived from Human Papillomavirus
IILVLLLWITA

SEQ ID NO: 24762 - protein, 8 aa, Artificial Sequence
  Peptide Derived from Human Papillomavirus
ILVLLLWI

SEQ ID NO: 24763 - protein, 10 aa, Artificial Sequence
  Peptide Derived from Human Papillomavirus
ILVLLLWITA

SEQ ID NO: 24764 - protein, 11 aa, Artificial Sequence
  Peptide Derived from Human Papillomavirus
ILVLLLWITAA

SEQ ID NO: 24765 - protein, 10 aa, Artificial Sequence
  Peptide Derived from Human Papillomavirus
IPLFLIHTHA

SEQ ID NO: 24766 - protein, 8 aa, Artificial Sequence
  Peptide Derived from Human Papillomavirus
IVYIIFVY

SEQ ID NO: 24767 - protein, 9 aa, Artificial Sequence
  Peptide Derived from Human Papillomavirus
IVYIIFVYI

SEQ ID NO: 24768 - protein, 11 aa, Artificial Sequence
  Peptide Derived from Human Papillomavirus
IVYIIFVYIPL

SEQ ID NO: 24769 - protein, 8 aa, Artificial Sequence
  Peptide Derived from Human Papillomavirus
LIHTHARF

SEQ ID NO: 24770 - protein, 9 aa, Artificial Sequence
  Peptide Derived from Human Papillomavirus
LIHTHARFL

SEQ ID NO: 24771 - protein, 10 aa, Artificial Sequence
  Peptide Derived from Human Papillomavirus
LIHTHARFLI

SEQ ID NO: 24772 - protein, 8 aa, Artificial Sequence
  Peptide Derived from Human Papillomavirus
LIILVLLL

SEQ ID NO: 24773 - protein, 9 aa, Artificial Sequence
  Peptide Derived from Human Papillomavirus
LIILVLLLW

SEQ ID NO: 24774 - protein, 10 aa, Artificial Sequence
  Peptide Derived from Human Papillomavirus
LIILVLLLWI

SEQ ID NO: 24775 - protein, 9 aa, Artificial Sequence
  Peptide Derived from Human Papillomavirus
LIRPLLLSV

SEQ ID NO: 24776 - protein, 9 aa, Artificial Sequence
  Peptide Derived from Human Papillomavirus
LLACFLLCF

SEQ ID NO: 24777 - protein, 11 aa, Artificial Sequence
  Peptide Derived from Human Papillomavirus
LLACFLLCFCV

SEQ ID NO: 24778 - protein, 8 aa, Artificial Sequence
  Peptide Derived from Human Papillomavirus
LLCFCVLL

SEQ ID NO: 24779 - protein, 10 aa, Artificial Sequence
  Peptide Derived from Human Papillomavirus
LLCFCVLLCV

SEQ ID NO: 24780 - protein, 8 aa, Artificial Sequence
  Peptide Derived from Human Papillomavirus
LLCVCLLI

SEQ ID NO: 24781 - protein, 11 aa, Artificial Sequence
  Peptide Derived from Human Papillomavirus
LLCVCLLIRPL

SEQ ID NO: 24782 - protein, 8 aa, Artificial Sequence
  Peptide Derived from Human Papillomavirus
LLIRPLLL

SEQ ID NO: 24783 - protein, 10 aa, Artificial Sequence
  Peptide Derived from Human Papillomavirus
LLIRPLLLSV

SEQ ID NO: 24784 - protein, 8 aa, Artificial Sequence
  Peptide Derived from Human Papillomavirus
LLLSVSTY

SEQ ID NO: 24785 - protein, 11 aa, Artificial Sequence
  Peptide Derived from Human Papillomavirus
LLLSVSTYTSL

SEQ ID NO: 24786 - protein, 8 aa, Artificial Sequence
  Peptide Derived from Human Papillomavirus
LLLWITAA

SEQ ID NO: 24787 - protein, 10 aa, Artificial Sequence
  Peptide Derived from Human Papillomavirus
LLLWITAASA

SEQ ID NO: 24788 - protein, 11 aa, Artificial Sequence
  Peptide Derived from Human Papillomavirus
LLLWITAASAF

SEQ ID NO: 24789 - protein, 10 aa, Artificial Sequence
  Peptide Derived from Human Papillomavirus
LLSVSTYTSL

SEQ ID NO: 24790 - protein, 11 aa, Artificial Sequence
  Peptide Derived from Human Papillomavirus
LLSVSTYTSLI

SEQ ID NO: 24791 - protein, 9 aa, Artificial Sequence
  Peptide Derived from Human Papillomavirus
LLWITAASA

SEQ ID NO: 24792 - protein, 10 aa, Artificial Sequence
  Peptide Derived from Human Papillomavirus
LLWITAASAF

SEQ ID NO: 24793 - protein, 9 aa, Artificial Sequence
  Peptide Derived from Human Papillomavirus
LVLLLWITA

SEQ ID NO: 24794 - protein, 10 aa, Artificial Sequence
  Peptide Derived from Human Papillomavirus
LVLLLWITAA

SEQ ID NO: 24795 - protein, 9 aa, Artificial Sequence
  Peptide Derived from Human Papillomavirus
NLDTASTTL

SEQ ID NO: 24796 - protein, 10 aa, Artificial Sequence
  Peptide Derived from Human Papillomavirus
NLDTASTTLL

SEQ ID NO: 24797 - protein, 11 aa, Artificial Sequence
  Peptide Derived from Human Papillomavirus
NLDTASTTLLA

SEQ ID NO: 24798 - protein, 9 aa, Artificial Sequence
  Peptide Derived from Human Papillomavirus
PLFLIHTHA

SEQ ID NO: 24799 - protein, 11 aa, Artificial Sequence
  Peptide Derived from Human Papillomavirus
PLFLIHTHARF

SEQ ID NO: 24800 - protein, 9 aa, Artificial Sequence
  Peptide Derived from Human Papillomavirus
PLLLSVSTY

SEQ ID NO: 24801 - protein, 10 aa, Artificial Sequence
  Peptide Derived from Human Papillomavirus
RPLLLSVSTY

SEQ ID NO: 24802 - protein, 8 aa, Artificial Sequence
  Peptide Derived from Human Papillomavirus
SLIILVLL

SEQ ID NO: 24803 - protein, 9 aa, Artificial Sequence
  Peptide Derived from Human Papillomavirus
SLIILVLLL

SEQ ID NO: 24804 - protein, 10 aa, Artificial Sequence
  Peptide Derived from Human Papillomavirus
SLIILVLLLW

SEQ ID NO: 24805 - protein, 11 aa, Artificial Sequence
  Peptide Derived from Human Papillomavirus
SLIILVLLLWI

SEQ ID NO: 24806 - protein, 8 aa, Artificial Sequence
  Peptide Derived from Human Papillomavirus
SVSTYTSL

SEQ ID NO: 24807 - protein, 9 aa, Artificial Sequence
  Peptide Derived from Human Papillomavirus
SVSTYTSLI

SEQ ID NO: 24808 - protein, 10 aa, Artificial Sequence
  Peptide Derived from Human Papillomavirus
SVSTYTSLII

SEQ ID NO: 24809 - protein, 11 aa, Artificial Sequence
  Peptide Derived from Human Papillomavirus
SVSTYTSLIIL

SEQ ID NO: 24810 - protein, 8 aa, Artificial Sequence
  Peptide Derived from Human Papillomavirus
TLLACFLL

SEQ ID NO: 24811 - protein, 10 aa, Artificial Sequence
  Peptide Derived from Human Papillomavirus
TLLACFLLCF

SEQ ID NO: 24812 - protein, 8 aa, Artificial Sequence
  Peptide Derived from Human Papillomavirus
VLLCVCLL

SEQ ID NO: 24813 - protein, 9 aa, Artificial Sequence
  Peptide Derived from Human Papillomavirus
VLLCVCLLI

SEQ ID NO: 24814 - protein, 8 aa, Artificial Sequence
  Peptide Derived from Human Papillomavirus
VLLLWITA

SEQ ID NO: 24815 - protein, 9 aa, Artificial Sequence
  Peptide Derived from Human Papillomavirus
VLLLWITAA

SEQ ID NO: 24816 - protein, 11 aa, Artificial Sequence
  Peptide Derived from Human Papillomavirus
VLLLWITAASA

SEQ ID NO: 24817 - protein, 8 aa, Artificial Sequence
  Peptide Derived from Human Papillomavirus
WITAASAF

SEQ ID NO: 24818 - protein, 11 aa, Artificial Sequence
  Peptide Derived from Human Papillomavirus
WITAASAFRCF

SEQ ID NO: 24819 - protein, 9 aa, Artificial Sequence
  Peptide Derived from Human Papillomavirus
YIIFVYIPL

SEQ ID NO: 24820 - protein, 10 aa, Artificial Sequence
  Peptide Derived from Human Papillomavirus
YIIFVYIPLF

SEQ ID NO: 24821 - protein, 11 aa, Artificial Sequence
  Peptide Derived from Human Papillomavirus
YIIFVYIPLFL

SEQ ID NO: 24822 - protein, 11 aa, Artificial Sequence
  Peptide Derived from Human Papillomavirus
YIPLFLIHTHA

SEQ ID NO: 24823 - protein, 9 aa, Artificial Sequence
  Peptide Derived from Human Papillomavirus
AVCDKCLKF

SEQ ID NO: 24824 - protein, 10 aa, Artificial Sequence
  Peptide Derived from Human Papillomavirus
AVCDKCLKFY

SEQ ID NO: 24825 - protein, 8 aa, Artificial Sequence
  Peptide Derived from Human Papillomavirus
CINCQKPL

SEQ ID NO: 24826 - protein, 10 aa, Artificial Sequence
  Peptide Derived from Human Papillomavirus
CIVYRDGNPY

SEQ ID NO: 24827 - protein, 11 aa, Artificial Sequence
  Peptide Derived from Human Papillomavirus
CIVYRDGNPYA

SEQ ID NO: 24828 - protein, 8 aa, Artificial Sequence
  Peptide Derived from Human Papillomavirus
CLKFYSKI

SEQ ID NO: 24829 - protein, 11 aa, Artificial Sequence
  Peptide Derived from Human Papillomavirus
CLKFYSKISEY

SEQ ID NO: 24830 - protein, 9 aa, Artificial Sequence
  Peptide Derived from Human Papillomavirus
CPEEKQRHL

SEQ ID NO: 24831 - protein, 8 aa, Artificial Sequence
  Peptide Derived from Human Papillomavirus
CVYCKQQL

SEQ ID NO: 24832 - protein, 9 aa, Artificial Sequence
  Peptide Derived from Human Papillomavirus
CVYCKQQLL

SEQ ID NO: 24833 - protein, 8 aa, Artificial Sequence
  Peptide Derived from Human Papillomavirus
DIILECVY

SEQ ID NO: 24834 - protein, 9 aa, Artificial Sequence
  Peptide Derived from Human Papillomavirus
DPQERPRKL

SEQ ID NO: 24835 - protein, 9 aa, Artificial Sequence
  Peptide Derived from Human Papillomavirus
ELQTTIHDI

SEQ ID NO: 24836 - protein, 10 aa, Artificial Sequence
  Peptide Derived from Human Papillomavirus
ELQTTIHDII

SEQ ID NO: 24837 - protein, 11 aa, Artificial Sequence
  Peptide Derived from Human Papillomavirus
ELQTTIHDIIL

SEQ ID NO: 24838 - protein, 8 aa, Artificial Sequence
  Peptide Derived from Human Papillomavirus
EQQYNKPL

SEQ ID NO: 24839 - protein, 11 aa, Artificial Sequence
  Peptide Derived from Human Papillomavirus
EQQYNKPLCDL

SEQ ID NO: 24840 - protein, 10 aa, Artificial Sequence
  Peptide Derived from Human Papillomavirus
EVYDFAFRDL

SEQ ID NO: 24841 - protein, 11 aa, Artificial Sequence
  Peptide Derived from Human Papillomavirus
FQDPQERPRKL

SEQ ID NO: 24842 - protein, 8 aa, Artificial Sequence
  Peptide Derived from Human Papillomavirus
HLDKKQRF

SEQ ID NO: 24843 - protein, 11 aa, Artificial Sequence
  Peptide Derived from Human Papillomavirus
HLDKKQRFHNI

SEQ ID NO: 24844 - protein, 8 aa, Artificial Sequence
  Peptide Derived from Human Papillomavirus
HQKRTAMF

SEQ ID NO: 24845 - protein, 11 aa, Artificial Sequence
  Peptide Derived from Human Papillomavirus
ILECVYCKQQL

SEQ ID NO: 24846 - protein, 9 aa, Artificial Sequence
  Peptide Derived from Human Papillomavirus
IVYRDGNPY

SEQ ID NO: 24847 - protein, 10 aa, Artificial Sequence
  Peptide Derived from Human Papillomavirus
IVYRDGNPYA

SEQ ID NO: 24848 - protein, 11 aa, Artificial Sequence
  Peptide Derived from Human Papillomavirus
IVYRDGNPYAV

SEQ ID NO: 24849 - protein, 8 aa, Artificial Sequence
  Peptide Derived from Human Papillomavirus
KISEYRHY

SEQ ID NO: 24850 - protein, 10 aa, Artificial Sequence
  Peptide Derived from Human Papillomavirus
KISEYRHYCY

SEQ ID NO: 24851 - protein, 9 aa, Artificial Sequence
  Peptide Derived from Human Papillomavirus
KLPQLCTEL

SEQ ID NO: 24852 - protein, 8 aa, Artificial Sequence
  Peptide Derived from Human Papillomavirus
KPLCDLLI

SEQ ID NO: 24853 - protein, 11 aa, Artificial Sequence
  Peptide Derived from Human Papillomavirus
KPLCDLLIRCI

SEQ ID NO: 24854 - protein, 9 aa, Artificial Sequence
  Peptide Derived from Human Papillomavirus
KQQLLRREV

SEQ ID NO: 24855 - protein, 10 aa, Artificial Sequence
  Peptide Derived from Human Papillomavirus
KQQLLRREVY

SEQ ID NO: 24856 - protein, 11 aa, Artificial Sequence
  Peptide Derived from Human Papillomavirus
KQRFHNIRGRW

SEQ ID NO: 24857 - protein, 11 aa, Artificial Sequence
  Peptide Derived from Human Papillomavirus
KQRHLDKKQRF

SEQ ID NO: 24858 - protein, 11 aa, Artificial Sequence
  Peptide Derived from Human Papillomavirus
LIRCINCQKPL

SEQ ID NO: 24859 - protein, 9 aa, Artificial Sequence
  Peptide Derived from Human Papillomavirus
LLRREVYDF

SEQ ID NO: 24860 - protein, 10 aa, Artificial Sequence
  Peptide Derived from Human Papillomavirus
LLRREVYDFA

SEQ ID NO: 24861 - protein, 11 aa, Artificial Sequence
  Peptide Derived from Human Papillomavirus
LLRREVYDFAF

SEQ ID NO: 24862 - protein, 8 aa, Artificial Sequence
  Peptide Derived from Human Papillomavirus
LPQLCTEL

SEQ ID NO: 24863 - protein, 8 aa, Artificial Sequence
  Peptide Derived from Human Papillomavirus
LQTTIHDI

SEQ ID NO: 24864 - protein, 9 aa, Artificial Sequence
  Peptide Derived from Human Papillomavirus
LQTTIHDII

SEQ ID NO: 24865 - protein, 10 aa, Artificial Sequence
  Peptide Derived from Human Papillomavirus
LQTTIHDIIL

SEQ ID NO: 24866 - protein, 11 aa, Artificial Sequence
  Peptide Derived from Human Papillomavirus
NIRGRWTGRCM

SEQ ID NO: 24867 - protein, 10 aa, Artificial Sequence
  Peptide Derived from Human Papillomavirus
NPYAVCDKCL

SEQ ID NO: 24868 - protein, 10 aa, Artificial Sequence
  Peptide Derived from Human Papillomavirus
PLCDLLIRCI

SEQ ID NO: 24869 - protein, 11 aa, Artificial Sequence
  Peptide Derived from Human Papillomavirus
PLCPEEKQRHL

SEQ ID NO: 24870 - protein, 8 aa, Artificial Sequence
  Peptide Derived from Human Papillomavirus
PQERPRKL

SEQ ID NO: 24871 - protein, 11 aa, Artificial Sequence
  Peptide Derived from Human Papillomavirus
PQERPRKLPQL

SEQ ID NO: 24872 - protein, 11 aa, Artificial Sequence
  Peptide Derived from Human Papillomavirus
PQLCTELQTTI

SEQ ID NO: 24873 - protein, 10 aa, Artificial Sequence
  Peptide Derived from Human Papillomavirus
QLCTELQTTI

SEQ ID NO: 24874 - protein, 8 aa, Artificial Sequence
  Peptide Derived from Human Papillomavirus
QLLRREVY

SEQ ID NO: 24875 - protein, 10 aa, Artificial Sequence
  Peptide Derived from Human Papillomavirus
QLLRREVYDF

SEQ ID NO: 24876 - protein, 11 aa, Artificial Sequence
  Peptide Derived from Human Papillomavirus
QLLRREVYDFA

SEQ ID NO: 24877 - protein, 8 aa, Artificial Sequence
  Peptide Derived from Human Papillomavirus
QQLLRREV

SEQ ID NO: 24878 - protein, 9 aa, Artificial Sequence
  Peptide Derived from Human Papillomavirus
QQLLRREVY

SEQ ID NO: 24879 - protein, 11 aa, Artificial Sequence
  Peptide Derived from Human Papillomavirus
QQLLRREVYDF

SEQ ID NO: 24880 - protein, 10 aa, Artificial Sequence
  Peptide Derived from Human Papillomavirus
QQYNKPLCDL

SEQ ID NO: 24881 - protein, 11 aa, Artificial Sequence
  Peptide Derived from Human Papillomavirus
QQYNKPLCDLL

SEQ ID NO: 24882 - protein, 8 aa, Artificial Sequence
  Peptide Derived from Human Papillomavirus
RPRKLPQL

SEQ ID NO: 24883 - protein, 11 aa, Artificial Sequence
  Peptide Derived from Human Papillomavirus
SLYGTTLEQQY

SEQ ID NO: 24884 - protein, 10 aa, Artificial Sequence
  Peptide Derived from Human Papillomavirus
TIHDIILECV

SEQ ID NO: 24885 - protein, 11 aa, Artificial Sequence
  Peptide Derived from Human Papillomavirus
TIHDIILECVY

SEQ ID NO: 24886 - protein, 10 aa, Artificial Sequence
  Peptide Derived from Human Papillomavirus
TLEQQYNKPL

SEQ ID NO: 24887 - protein, 9 aa, Artificial Sequence
  Peptide Derived from Human Papillomavirus
CVQSTHVDI

SEQ ID NO: 24888 - protein, 8 aa, Artificial Sequence
  Peptide Derived from Human Papillomavirus
DIRTLEDL

SEQ ID NO: 24889 - protein, 9 aa, Artificial Sequence
  Peptide Derived from Human Papillomavirus
DIRTLEDLL

SEQ ID NO: 24890 - protein, 10 aa, Artificial Sequence
  Peptide Derived from Human Papillomavirus
DIRTLEDLLM

SEQ ID NO: 24891 - protein, 9 aa, Artificial Sequence
  Peptide Derived from Human Papillomavirus
DLLMGTLGI

SEQ ID NO: 24892 - protein, 10 aa, Artificial Sequence
  Peptide Derived from Human Papillomavirus
DLLMGTLGIV

SEQ ID NO: 24893 - protein, 9 aa, Artificial Sequence
  Peptide Derived from Human Papillomavirus
DLQPETTDL

SEQ ID NO: 24894 - protein, 10 aa, Artificial Sequence
  Peptide Derived from Human Papillomavirus
DLQPETTDLY

SEQ ID NO: 24895 - protein, 8 aa, Artificial Sequence
  Peptide Derived from Human Papillomavirus
DLYCYEQL

SEQ ID NO: 24896 - protein, 9 aa, Artificial Sequence
  Peptide Derived from Human Papillomavirus
EIDGPAGQA

SEQ ID NO: 24897 - protein, 9 aa, Artificial Sequence
  Peptide Derived from Human Papillomavirus
EPDRAHYNI

SEQ ID NO: 24898 - protein, 10 aa, Artificial Sequence
  Peptide Derived from Human Papillomavirus
EPDRAHYNIV

SEQ ID NO: 24899 - protein, 11 aa, Artificial Sequence
  Peptide Derived from Human Papillomavirus
GPAGQAEPDRA

SEQ ID NO: 24900 - protein, 8 aa, Artificial Sequence
  Peptide Derived from Human Papillomavirus
GQAEPDRA

SEQ ID NO: 24901 - protein, 10 aa, Artificial Sequence
  Peptide Derived from Human Papillomavirus
GQAEPDRAHY

SEQ ID NO: 24902 - protein, 10 aa, Artificial Sequence
  Peptide Derived from Human Papillomavirus
HVDIRTLEDL

SEQ ID NO: 24903 - protein, 11 aa, Artificial Sequence
  Peptide Derived from Human Papillomavirus
HVDIRTLEDLL

SEQ ID NO: 24904 - protein, 8 aa, Artificial Sequence
  Peptide Derived from Human Papillomavirus
LLMGTLGI

SEQ ID NO: 24905 - protein, 9 aa, Artificial Sequence
  Peptide Derived from Human Papillomavirus
LLMGTLGIV

SEQ ID NO: 24906 - protein, 8 aa, Artificial Sequence
  Peptide Derived from Human Papillomavirus
LMGTLGIV

SEQ ID NO: 24907 - protein, 11 aa, Artificial Sequence
  Peptide Derived from Human Papillomavirus
LMGTLGIVCPI

SEQ ID NO: 24908 - protein, 8 aa, Artificial Sequence
  Peptide Derived from Human Papillomavirus
LQPETTDL

SEQ ID NO: 24909 - protein, 9 aa, Artificial Sequence
  Peptide Derived from Human Papillomavirus
LQPETTDLY

SEQ ID NO: 24910 - protein, 11 aa, Artificial Sequence
  Peptide Derived from Human Papillomavirus
LQPETTDLYCY

SEQ ID NO: 24911 - protein, 11 aa, Artificial Sequence
  Peptide Derived from Human Papillomavirus
MLDLQPETTDL

SEQ ID NO: 24912 - protein, 8 aa, Artificial Sequence
  Peptide Derived from Human Papillomavirus
QPETTDLY

SEQ ID NO: 24913 - protein, 10 aa, Artificial Sequence
  Peptide Derived from Human Papillomavirus
QPETTDLYCY

SEQ ID NO: 24914 - protein, 9 aa, Artificial Sequence
  Peptide Derived from Human Papillomavirus
RLCVQSTHV

SEQ ID NO: 24915 - protein, 11 aa, Artificial Sequence
  Peptide Derived from Human Papillomavirus
RLCVQSTHVDI

SEQ ID NO: 24916 - protein, 10 aa, Artificial Sequence
  Peptide Derived from Human Papillomavirus
TLEDLLMGTL

SEQ ID NO: 24917 - protein, 8 aa, Artificial Sequence
  Peptide Derived from Human Papillomavirus
TLGIVCPI

SEQ ID NO: 24918 - protein, 9 aa, Artificial Sequence
  Peptide Derived from Human Papillomavirus
TLHEYMLDL

SEQ ID NO: 24919 - protein, 11 aa, Artificial Sequence
  Peptide Derived from Human Papillomavirus
TLRLCVQSTHV

SEQ ID NO: 24920 - protein, 8 aa, Artificial Sequence
  Peptide Derived from Human Papillomavirus
TPTLHEYM

SEQ ID NO: 24921 - protein, 9 aa, Artificial Sequence
  Peptide Derived from Human Papillomavirus
TPTLHEYML

SEQ ID NO: 24922 - protein, 11 aa, Artificial Sequence
  Peptide Derived from Human Papillomavirus
TPTLHEYMLDL

SEQ ID NO: 24923 - protein, 8 aa, Artificial Sequence
  Peptide Derived from Human Papillomavirus
VQSTHVDI

SEQ ID NO: 24924 - protein, 11 aa, Artificial Sequence
  Peptide Derived from Human Papillomavirus
VQSTHVDIRTL

SEQ ID NO: 24925 - protein, 11 aa, Artificial Sequence
  Peptide Derived from Human Papillomavirus
AIACQKHTPPA

SEQ ID NO: 24926 - protein, 9 aa, Artificial Sequence
  Peptide Derived from Human Papillomavirus
AISTSETTY

SEQ ID NO: 24927 - protein, 9 aa, Artificial Sequence
  Peptide Derived from Human Papillomavirus
AMDFTTLQA

SEQ ID NO: 24928 - protein, 10 aa, Artificial Sequence
  Peptide Derived from Human Papillomavirus
APKEDPLKKY

SEQ ID NO: 24929 - protein, 8 aa, Artificial Sequence
  Peptide Derived from Human Papillomavirus
AQGHNNGI

SEQ ID NO: 24930 - protein, 10 aa, Artificial Sequence
  Peptide Derived from Human Papillomavirus
AQGHNNGICW

SEQ ID NO: 24931 - protein, 8 aa, Artificial Sequence
  Peptide Derived from Human Papillomavirus
AQIFNKPY

SEQ ID NO: 24932 - protein, 9 aa, Artificial Sequence
  Peptide Derived from Human Papillomavirus
AQIFNKPYW

SEQ ID NO: 24933 - protein, 10 aa, Artificial Sequence
  Peptide Derived from Human Papillomavirus
AQIFNKPYWL

SEQ ID NO: 24934 - protein, 10 aa, Artificial Sequence
  Peptide Derived from Human Papillomavirus
AVGENVPDDL

SEQ ID NO: 24935 - protein, 11 aa, Artificial Sequence
  Peptide Derived from Human Papillomavirus
AVGENVPDDLY

SEQ ID NO: 24936 - protein, 9 aa, Artificial Sequence
  Peptide Derived from Human Papillomavirus
AVGHPYFPI

SEQ ID NO: 24937 - protein, 10 aa, Artificial Sequence
  Peptide Derived from Human Papillomavirus
AVNPGDCPPL

SEQ ID NO: 24938 - protein, 11 aa, Artificial Sequence
  Peptide Derived from Human Papillomavirus
CISMDYKQTQL

SEQ ID NO: 24939 - protein, 9 aa, Artificial Sequence
  Peptide Derived from Human Papillomavirus
CLIGCKPPI

SEQ ID NO: 24940 - protein, 10 aa, Artificial Sequence
  Peptide Derived from Human Papillomavirus
CPPLELINTV

SEQ ID NO: 24941 - protein, 11 aa, Artificial Sequence
  Peptide Derived from Human Papillomavirus
CPPLELINTVI

SEQ ID NO: 24942 - protein, 8 aa, Artificial Sequence
  Peptide Derived from Human Papillomavirus
CQKHTPPA

SEQ ID NO: 24943 - protein, 9 aa, Artificial Sequence
  Peptide Derived from Human Papillomavirus
DICTSICKY

SEQ ID NO: 24944 - protein, 11 aa, Artificial Sequence
  Peptide Derived from Human Papillomavirus
DLDQFPLGRKF

SEQ ID NO: 24945 - protein, 8 aa, Artificial Sequence
  Peptide Derived from Human Papillomavirus
DLQFIFQL

SEQ ID NO: 24946 - protein, 11 aa, Artificial Sequence
  Peptide Derived from Human Papillomavirus
DLQFIFQLCKI

SEQ ID NO: 24947 - protein, 11 aa, Artificial Sequence
  Peptide Derived from Human Papillomavirus
DLYIKGSGSTA

SEQ ID NO: 24948 - protein, 9 aa, Artificial Sequence
  Peptide Derived from Human Papillomavirus
DMVDTGFGA

SEQ ID NO: 24949 - protein, 10 aa, Artificial Sequence
  Peptide Derived from Human Papillomavirus
DMVDTGFGAM

SEQ ID NO: 24950 - protein, 8 aa, Artificial Sequence
  Peptide Derived from Human Papillomavirus
DPLKKYTF

SEQ ID NO: 24951 - protein, 9 aa, Artificial Sequence
  Peptide Derived from Human Papillomavirus
DPLKKYTFW

SEQ ID NO: 24952 - protein, 11 aa, Artificial Sequence
  Peptide Derived from Human Papillomavirus
DPLKKYTFWEV

SEQ ID NO: 24953 - protein, 9 aa, Artificial Sequence
  Peptide Derived from Human Papillomavirus
DQFPLGRKF

SEQ ID NO: 24954 - protein, 10 aa, Artificial Sequence
  Peptide Derived from Human Papillomavirus
DQFPLGRKFL

SEQ ID NO: 24955 - protein, 11 aa, Artificial Sequence
  Peptide Derived from Human Papillomavirus
DQFPLGRKFLL

SEQ ID NO: 24956 - protein, 9 aa, Artificial Sequence
  Peptide Derived from Human Papillomavirus
DVMTYIHSM

SEQ ID NO: 24957 - protein, 8 aa, Artificial Sequence
  Peptide Derived from Human Papillomavirus
DVNVYHIF

SEQ ID NO: 24958 - protein, 9 aa, Artificial Sequence
  Peptide Derived from Human Papillomavirus
DVNVYHIFF

SEQ ID NO: 24959 - protein, 11 aa, Artificial Sequence
  Peptide Derived from Human Papillomavirus
DVNVYHIFFQM

SEQ ID NO: 24960 - protein, 8 aa, Artificial Sequence
  Peptide Derived from Human Papillomavirus
EPYGDSLF

SEQ ID NO: 24961 - protein, 9 aa, Artificial Sequence
  Peptide Derived from Human Papillomavirus
EPYGDSLFF

SEQ ID NO: 24962 - protein, 10 aa, Artificial Sequence
  Peptide Derived from Human Papillomavirus
EPYGDSLFFY

SEQ ID NO: 24963 - protein, 11 aa, Artificial Sequence
  Peptide Derived from Human Papillomavirus
EPYGDSLFFYL

SEQ ID NO: 24964 - protein, 8 aa, Artificial Sequence
  Peptide Derived from Human Papillomavirus
EQMFVRHL

SEQ ID NO: 24965 - protein, 9 aa, Artificial Sequence
  Peptide Derived from Human Papillomavirus
EQMFVRHLF

SEQ ID NO: 24966 - protein, 8 aa, Artificial Sequence
  Peptide Derived from Human Papillomavirus
EVGRGQPL

SEQ ID NO: 24967 - protein, 10 aa, Artificial Sequence
  Peptide Derived from Human Papillomavirus
EVGRGQPLGV

SEQ ID NO: 24968 - protein, 8 aa, Artificial Sequence
  Peptide Derived from Human Papillomavirus
EVNLKEKF

SEQ ID NO: 24969 - protein, 10 aa, Artificial Sequence
  Peptide Derived from Human Papillomavirus
EVNLKEKFSA

SEQ ID NO: 24970 - protein, 10 aa, Artificial Sequence
  Peptide Derived from Human Papillomavirus
EVPLDICTSI

SEQ ID NO: 24971 - protein, 8 aa, Artificial Sequence
  Peptide Derived from Human Papillomavirus
FIFQLCKI

SEQ ID NO: 24972 - protein, 10 aa, Artificial Sequence
  Peptide Derived from Human Papillomavirus
FIFQLCKITL

SEQ ID NO: 24973 - protein, 10 aa, Artificial Sequence
  Peptide Derived from Human Papillomavirus
FIYILVITCY

SEQ ID NO: 24974 - protein, 9 aa, Artificial Sequence
  Peptide Derived from Human Papillomavirus
FLLQAGLKA

SEQ ID NO: 24975 - protein, 11 aa, Artificial Sequence
  Peptide Derived from Human Papillomavirus
FPIKKPNNNKI

SEQ ID NO: 24976 - protein, 8 aa, Artificial Sequence
  Peptide Derived from Human Papillomavirus
FPLGRKFL

SEQ ID NO: 24977 - protein, 9 aa, Artificial Sequence
  Peptide Derived from Human Papillomavirus
FPLGRKFLL

SEQ ID NO: 24978 - protein, 11 aa, Artificial Sequence
  Peptide Derived from Human Papillomavirus
FPLGRKFLLQA

SEQ ID NO: 24979 - protein, 8 aa, Artificial Sequence
  Peptide Derived from Human Papillomavirus
FPTPSGSM

SEQ ID NO: 24980 - protein, 9 aa, Artificial Sequence
  Peptide Derived from Human Papillomavirus
FPTPSGSMV

SEQ ID NO: 24981 - protein, 8 aa, Artificial Sequence
  Peptide Derived from Human Papillomavirus
FQLCKITL

SEQ ID NO: 24982 - protein, 10 aa, Artificial Sequence
  Peptide Derived from Human Papillomavirus
FQLCKITLTA

SEQ ID NO: 24983 - protein, 11 aa, Artificial Sequence
  Peptide Derived from Human Papillomavirus
FQMSLWLPSEA

SEQ ID NO: 24984 - protein, 9 aa, Artificial Sequence
  Peptide Derived from Human Papillomavirus
FVRHLFNRA

SEQ ID NO: 24985 - protein, 11 aa, Artificial Sequence
  Peptide Derived from Human Papillomavirus
FVRHLFNRAGA

SEQ ID NO: 24986 - protein, 8 aa, Artificial Sequence
  Peptide Derived from Human Papillomavirus
FVTSQAIA

SEQ ID NO: 24987 - protein, 8 aa, Artificial Sequence
  Peptide Derived from Human Papillomavirus
GICWGNQL

SEQ ID NO: 24988 - protein, 9 aa, Artificial Sequence
  Peptide Derived from Human Papillomavirus
GICWGNQLF

SEQ ID NO: 24989 - protein, 10 aa, Artificial Sequence
  Peptide Derived from Human Papillomavirus
GICWGNQLFV

SEQ ID NO: 24990 - protein, 8 aa, Artificial Sequence
  Peptide Derived from Human Papillomavirus
GISGHPLL

SEQ ID NO: 24991 - protein, 11 aa, Artificial Sequence
  Peptide Derived from Human Papillomavirus
GISGHPLLNKL

SEQ ID NO: 24992 - protein, 8 aa, Artificial Sequence
  Peptide Derived from Human Papillomavirus
GLKAKPKF

SEQ ID NO: 24993 - protein, 10 aa, Artificial Sequence
  Peptide Derived from Human Papillomavirus
GLKAKPKFTL

SEQ ID NO: 24994 - protein, 10 aa, Artificial Sequence
  Peptide Derived from Human Papillomavirus
GLQPPPGGTL

SEQ ID NO: 24995 - protein, 9 aa, Artificial Sequence
  Peptide Derived from Human Papillomavirus
GLQYRVFRI

SEQ ID NO: 24996 - protein, 11 aa, Artificial Sequence
  Peptide Derived from Human Papillomavirus
GLQYRVFRIHL

SEQ ID NO: 24997 - protein, 8 aa, Artificial Sequence
  Peptide Derived from Human Papillomavirus
GQPLGVGI

SEQ ID NO: 24998 - protein, 8 aa, Artificial Sequence
  Peptide Derived from Human Papillomavirus
GVDNRECI

SEQ ID NO: 24999 - protein, 10 aa, Artificial Sequence
  Peptide Derived from Human Papillomavirus
GVDNRECISM

SEQ ID NO: 25000 - protein, 10 aa, Artificial Sequence
  Peptide Derived from Human Papillomavirus
GVEVGRGQPL

SEQ ID NO: 25001 - protein, 9 aa, Artificial Sequence
  Peptide Derived from Human Papillomavirus
GVGISGHPL

SEQ ID NO: 25002 - protein, 10 aa, Artificial Sequence
  Peptide Derived from Human Papillomavirus
GVGISGHPLL

SEQ ID NO: 25003 - protein, 8 aa, Artificial Sequence
  Peptide Derived from Human Papillomavirus
HIFFQMSL

SEQ ID NO: 25004 - protein, 9 aa, Artificial Sequence
  Peptide Derived from Human Papillomavirus
HIFFQMSLW

SEQ ID NO: 25005 - protein, 10 aa, Artificial Sequence
  Peptide Derived from Human Papillomavirus
HIFFQMSLWL

SEQ ID NO: 25006 - protein, 8 aa, Artificial Sequence
  Peptide Derived from Human Papillomavirus
HLFNRAGA

SEQ ID NO: 25007 - protein, 9 aa, Artificial Sequence
  Peptide Derived from Human Papillomavirus
HLFNRAGAV

SEQ ID NO: 25008 - protein, 8 aa, Artificial Sequence
  Peptide Derived from Human Papillomavirus
HLPDPNKF

SEQ ID NO: 25009 - protein, 10 aa, Artificial Sequence
  Peptide Derived from Human Papillomavirus
HLPDPNKFGF

SEQ ID NO: 25010 - protein, 9 aa, Artificial Sequence
  Peptide Derived from Human Papillomavirus
ILEDWNFGL

SEQ ID NO: 25011 - protein, 11 aa, Artificial Sequence
  Peptide Derived from Human Papillomavirus
ILVITCYENDV

SEQ ID NO: 25012 - protein, 9 aa, Artificial Sequence
  Peptide Derived from Human Papillomavirus
ILVPKVSGL

SEQ ID NO: 25013 - protein, 11 aa, Artificial Sequence
  Peptide Derived from Human Papillomavirus
ILVPKVSGLQY

SEQ ID NO: 25014 - protein, 11 aa, Artificial Sequence
  Peptide Derived from Human Papillomavirus
IQDGDMVDTGF

SEQ ID NO: 25015 - protein, 10 aa, Artificial Sequence
  Peptide Derived from Human Papillomavirus
KILVPKVSGL

SEQ ID NO: 25016 - protein, 8 aa, Artificial Sequence
  Peptide Derived from Human Papillomavirus
KITLTADV

SEQ ID NO: 25017 - protein, 9 aa, Artificial Sequence
  Peptide Derived from Human Papillomavirus
KITLTADVM

SEQ ID NO: 25018 - protein, 11 aa, Artificial Sequence
  Peptide Derived from Human Papillomavirus
KITLTADVMTY

SEQ ID NO: 25019 - protein, 8 aa, Artificial Sequence
  Peptide Derived from Human Papillomavirus
KLDDTENA

SEQ ID NO: 25020 - protein, 10 aa, Artificial Sequence
  Peptide Derived from Human Papillomavirus
KLDDTENASA

SEQ ID NO: 25021 - protein, 11 aa, Artificial Sequence
  Peptide Derived from Human Papillomavirus
KLDDTENASAY

SEQ ID NO: 25022 - protein, 11 aa, Artificial Sequence
  Peptide Derived from Human Papillomavirus
KMVSEPYGDSL

SEQ ID NO: 25023 - protein, 11 aa, Artificial Sequence
  Peptide Derived from Human Papillomavirus
KPKFTLGKRKA

SEQ ID NO: 25024 - protein, 8 aa, Artificial Sequence
  Peptide Derived from Human Papillomavirus
KPNNNKIL

SEQ ID NO: 25025 - protein, 9 aa, Artificial Sequence
  Peptide Derived from Human Papillomavirus
KPNNNKILV

SEQ ID NO: 25026 - protein, 8 aa, Artificial Sequence
  Peptide Derived from Human Papillomavirus
KPPIGEHW

SEQ ID NO: 25027 - protein, 8 aa, Artificial Sequence
  Peptide Derived from Human Papillomavirus
KPYWLQRA

SEQ ID NO: 25028 - protein, 8 aa, Artificial Sequence
  Peptide Derived from Human Papillomavirus
KQTQLCLI

SEQ ID NO: 25029 - protein, 9 aa, Artificial Sequence
  Peptide Derived from Human Papillomavirus
KVSGLQYRV

SEQ ID NO: 25030 - protein, 10 aa, Artificial Sequence
  Peptide Derived from Human Papillomavirus
KVSGLQYRVF

SEQ ID NO: 25031 - protein, 8 aa, Artificial Sequence
  Peptide Derived from Human Papillomavirus
KVVSTDEY

SEQ ID NO: 25032 - protein, 9 aa, Artificial Sequence
  Peptide Derived from Human Papillomavirus
KVVSTDEYV

SEQ ID NO: 25033 - protein, 10 aa, Artificial Sequence
  Peptide Derived from Human Papillomavirus
KVVSTDEYVA

SEQ ID NO: 25034 - protein, 8 aa, Artificial Sequence
  Peptide Derived from Human Papillomavirus
LIGCKPPI

SEQ ID NO: 25035 - protein, 11 aa, Artificial Sequence
  Peptide Derived from Human Papillomavirus
LINTVIQDGDM

SEQ ID NO: 25036 - protein, 8 aa, Artificial Sequence
  Peptide Derived from Human Papillomavirus
LLAVGHPY

SEQ ID NO: 25037 - protein, 9 aa, Artificial Sequence
  Peptide Derived from Human Papillomavirus
LLAVGHPYF

SEQ ID NO: 25038 - protein, 11 aa, Artificial Sequence
  Peptide Derived from Human Papillomavirus
LLAVGHPYFPI

SEQ ID NO: 25039 - protein, 11 aa, Artificial Sequence
  Peptide Derived from Human Papillomavirus
LLNKLDDTENA

SEQ ID NO: 25040 - protein, 8 aa, Artificial Sequence
  Peptide Derived from Human Papillomavirus
LLQAGLKA

SEQ ID NO: 25041 - protein, 9 aa, Artificial Sequence
  Peptide Derived from Human Papillomavirus
LPDPNKFGF

SEQ ID NO: 25042 - protein, 9 aa, Artificial Sequence
  Peptide Derived from Human Papillomavirus
LPPVPVSKV

SEQ ID NO: 25043 - protein, 10 aa, Artificial Sequence
  Peptide Derived from Human Papillomavirus
LPPVPVSKVV

SEQ ID NO: 25044 - protein, 8 aa, Artificial Sequence
  Peptide Derived from Human Papillomavirus
LPSEATVY

SEQ ID NO: 25045 - protein, 9 aa, Artificial Sequence
  Peptide Derived from Human Papillomavirus
LPSEATVYL

SEQ ID NO: 25046 - protein, 11 aa, Artificial Sequence
  Peptide Derived from Human Papillomavirus
LQAGLKAKPKF

SEQ ID NO: 25047 - protein, 8 aa, Artificial Sequence
  Peptide Derived from Human Papillomavirus
LQANKSEV

SEQ ID NO: 25048 - protein, 10 aa, Artificial Sequence
  Peptide Derived from Human Papillomavirus
LQANKSEVPL

SEQ ID NO: 25049 - protein, 10 aa, Artificial Sequence
  Peptide Derived from Human Papillomavirus
LQFIFQLCKI

SEQ ID NO: 25050 - protein, 9 aa, Artificial Sequence
  Peptide Derived from Human Papillomavirus
LQPPPGGTL

SEQ ID NO: 25051 - protein, 11 aa, Artificial Sequence
  Peptide Derived from Human Papillomavirus
LQRAQGHNNGI

SEQ ID NO: 25052 - protein, 8 aa, Artificial Sequence
  Peptide Derived from Human Papillomavirus
LQYRVFRI

SEQ ID NO: 25053 - protein, 10 aa, Artificial Sequence
  Peptide Derived from Human Papillomavirus
LQYRVFRIHL

SEQ ID NO: 25054 - protein, 10 aa, Artificial Sequence
  Peptide Derived from Human Papillomavirus
LVITCYENDV

SEQ ID NO: 25055 - protein, 8 aa, Artificial Sequence
  Peptide Derived from Human Papillomavirus
LVPKVSGL

SEQ ID NO: 25056 - protein, 10 aa, Artificial Sequence
  Peptide Derived from Human Papillomavirus
LVPKVSGLQY

SEQ ID NO: 25057 - protein, 8 aa, Artificial Sequence
  Peptide Derived from Human Papillomavirus
LVWACVGV

SEQ ID NO: 25058 - protein, 10 aa, Artificial Sequence
  Peptide Derived from Human Papillomavirus
LVWACVGVEV

SEQ ID NO: 25059 - protein, 8 aa, Artificial Sequence
  Peptide Derived from Human Papillomavirus
MQVTFIYI

SEQ ID NO: 25060 - protein, 9 aa, Artificial Sequence
  Peptide Derived from Human Papillomavirus
MQVTFIYIL

SEQ ID NO: 25061 - protein, 10 aa, Artificial Sequence
  Peptide Derived from Human Papillomavirus
MQVTFIYILV

SEQ ID NO: 25062 - protein, 11 aa, Artificial Sequence
  Peptide Derived from Human Papillomavirus
MQVTFIYILVI

SEQ ID NO: 25063 - protein, 8 aa, Artificial Sequence
  Peptide Derived from Human Papillomavirus
MVDTGFGA

SEQ ID NO: 25064 - protein, 9 aa, Artificial Sequence
  Peptide Derived from Human Papillomavirus
MVDTGFGAM

SEQ ID NO: 25065 - protein, 11 aa, Artificial Sequence
  Peptide Derived from Human Papillomavirus
MVDTGFGAMDF

SEQ ID NO: 25066 - protein, 10 aa, Artificial Sequence
  Peptide Derived from Human Papillomavirus
MVSEPYGDSL

SEQ ID NO: 25067 - protein, 11 aa, Artificial Sequence
  Peptide Derived from Human Papillomavirus
MVSEPYGDSLF

SEQ ID NO: 25068 - protein, 8 aa, Artificial Sequence
  Peptide Derived from Human Papillomavirus
MVTSDAQI

SEQ ID NO: 25069 - protein, 9 aa, Artificial Sequence
  Peptide Derived from Human Papillomavirus
MVTSDAQIF

SEQ ID NO: 25070 - protein, 11 aa, Artificial Sequence
  Peptide Derived from Human Papillomavirus
NIYYHAGTSRL

SEQ ID NO: 25071 - protein, 8 aa, Artificial Sequence
  Peptide Derived from Human Papillomavirus
NLASSNYF

SEQ ID NO: 25072 - protein, 8 aa, Artificial Sequence
  Peptide Derived from Human Papillomavirus
NLKEKFSA

SEQ ID NO: 25073 - protein, 10 aa, Artificial Sequence
  Peptide Derived from Human Papillomavirus
NLKEKFSADL

SEQ ID NO: 25074 - protein, 8 aa, Artificial Sequence
  Peptide Derived from Human Papillomavirus
NMSLCAAI

SEQ ID NO: 25075 - protein, 8 aa, Artificial Sequence
  Peptide Derived from Human Papillomavirus
NPDTQRLV

SEQ ID NO: 25076 - protein, 9 aa, Artificial Sequence
  Peptide Derived from Human Papillomavirus
NPDTQRLVW

SEQ ID NO: 25077 - protein, 10 aa, Artificial Sequence
  Peptide Derived from Human Papillomavirus
NPDTQRLVWA

SEQ ID NO: 25078 - protein, 8 aa, Artificial Sequence
  Peptide Derived from Human Papillomavirus
NPGDCPPL

SEQ ID NO: 25079 - protein, 10 aa, Artificial Sequence
  Peptide Derived from Human Papillomavirus
NPGDCPPLEL

SEQ ID NO: 25080 - protein, 11 aa, Artificial Sequence
  Peptide Derived from Human Papillomavirus
NPGDCPPLELI

SEQ ID NO: 25081 - protein, 8 aa, Artificial Sequence
  Peptide Derived from Human Papillomavirus
NQLFVTVV

SEQ ID NO: 25082 - protein, 8 aa, Artificial Sequence
  Peptide Derived from Human Papillomavirus
NVPDDLYI

SEQ ID NO: 25083 - protein, 9 aa, Artificial Sequence
  Peptide Derived from Human Papillomavirus
NVYHIFFQM

SEQ ID NO: 25084 - protein, 11 aa, Artificial Sequence
  Peptide Derived from Human Papillomavirus
NVYHIFFQMSL

SEQ ID NO: 25085 - protein, 10 aa, Artificial Sequence
  Peptide Derived from Human Papillomavirus
PIKKPNNNKI

SEQ ID NO: 25086 - protein, 11 aa, Artificial Sequence
  Peptide Derived from Human Papillomavirus
PIKKPNNNKIL

SEQ ID NO: 25087 - protein, 8 aa, Artificial Sequence
  Peptide Derived from Human Papillomavirus
PLDICTSI

SEQ ID NO: 25088 - protein, 11 aa, Artificial Sequence
  Peptide Derived from Human Papillomavirus
PLDICTSICKY

SEQ ID NO: 25089 - protein, 8 aa, Artificial Sequence
  Peptide Derived from Human Papillomavirus
PLELINTV

SEQ ID NO: 25090 - protein, 9 aa, Artificial Sequence
  Peptide Derived from Human Papillomavirus
PLELINTVI

SEQ ID NO: 25091 - protein, 8 aa, Artificial Sequence
  Peptide Derived from Human Papillomavirus
PLGRKFLL

SEQ ID NO: 25092 - protein, 10 aa, Artificial Sequence
  Peptide Derived from Human Papillomavirus
PLGRKFLLQA

SEQ ID NO: 25093 - protein, 11 aa, Artificial Sequence
  Peptide Derived from Human Papillomavirus
PLGVGISGHPL

SEQ ID NO: 25094 - protein, 8 aa, Artificial Sequence
  Peptide Derived from Human Papillomavirus
PLKKYTFW

SEQ ID NO: 25095 - protein, 10 aa, Artificial Sequence
  Peptide Derived from Human Papillomavirus
PLKKYTFWEV

SEQ ID NO: 25096 - protein, 9 aa, Artificial Sequence
  Peptide Derived from Human Papillomavirus
PPAPKEDPL

SEQ ID NO: 25097 - protein, 10 aa, Artificial Sequence
  Peptide Derived from Human Papillomavirus
PPGGTLEDTY

SEQ ID NO: 25098 - protein, 9 aa, Artificial Sequence
  Peptide Derived from Human Papillomavirus
PPLELINTV

SEQ ID NO: 25099 - protein, 10 aa, Artificial Sequence
  Peptide Derived from Human Papillomavirus
PPLELINTVI

SEQ ID NO: 25100 - protein, 11 aa, Artificial Sequence
  Peptide Derived from Human Papillomavirus
PPPGGTLEDTY

SEQ ID NO: 25101 - protein, 8 aa, Artificial Sequence
  Peptide Derived from Human Papillomavirus
PPVPVSKV

SEQ ID NO: 25102 - protein, 9 aa, Artificial Sequence
  Peptide Derived from Human Papillomavirus
PPVPVSKVV

SEQ ID NO: 25103 - protein, 8 aa, Artificial Sequence
  Peptide Derived from Human Papillomavirus
PVPVSKVV

SEQ ID NO: 25104 - protein, 11 aa, Artificial Sequence
  Peptide Derived from Human Papillomavirus
PVSKVVSTDEY

SEQ ID NO: 25105 - protein, 8 aa, Artificial Sequence
  Peptide Derived from Human Papillomavirus
QIFNKPYW

SEQ ID NO: 25106 - protein, 9 aa, Artificial Sequence
  Peptide Derived from Human Papillomavirus
QIFNKPYWL

SEQ ID NO: 25107 - protein, 9 aa, Artificial Sequence
  Peptide Derived from Human Papillomavirus
QLCKITLTA

SEQ ID NO: 25108 - protein, 11 aa, Artificial Sequence
  Peptide Derived from Human Papillomavirus
QLCKITLTADV

SEQ ID NO: 25109 - protein, 11 aa, Artificial Sequence
  Peptide Derived from Human Papillomavirus
QLCLIGCKPPI

SEQ ID NO: 25110 - protein, 8 aa, Artificial Sequence
  Peptide Derived from Human Papillomavirus
QMFVRHLF

SEQ ID NO: 25111 - protein, 11 aa, Artificial Sequence
  Peptide Derived from Human Papillomavirus
QMFVRHLFNRA

SEQ ID NO: 25112 - protein, 10 aa, Artificial Sequence
  Peptide Derived from Human Papillomavirus
QMSLWLPSEA

SEQ ID NO: 25113 - protein, 8 aa, Artificial Sequence
  Peptide Derived from Human Papillomavirus
QPPPGGTL

SEQ ID NO: 25114 - protein, 8 aa, Artificial Sequence
  Peptide Derived from Human Papillomavirus
QVTFIYIL

SEQ ID NO: 25115 - protein, 9 aa, Artificial Sequence
  Peptide Derived from Human Papillomavirus
QVTFIYILV

SEQ ID NO: 25116 - protein, 10 aa, Artificial Sequence
  Peptide Derived from Human Papillomavirus
QVTFIYILVI

SEQ ID NO: 25117 - protein, 10 aa, Artificial Sequence
  Peptide Derived from Human Papillomavirus
RIHLPDPNKF

SEQ ID NO: 25118 - protein, 9 aa, Artificial Sequence
  Peptide Derived from Human Papillomavirus
RLLAVGHPY

SEQ ID NO: 25119 - protein, 10 aa, Artificial Sequence
  Peptide Derived from Human Papillomavirus
RLLAVGHPYF

SEQ ID NO: 25120 - protein, 9 aa, Artificial Sequence
  Peptide Derived from Human Papillomavirus
RLVWACVGV

SEQ ID NO: 25121 - protein, 11 aa, Artificial Sequence
  Peptide Derived from Human Papillomavirus
RLVWACVGVEV

SEQ ID NO: 25122 - protein, 8 aa, Artificial Sequence
  Peptide Derived from Human Papillomavirus
SICKYPDY

SEQ ID NO: 25123 - protein, 9 aa, Artificial Sequence
  Peptide Derived from Human Papillomavirus
SICKYPDYI

SEQ ID NO: 25124 - protein, 11 aa, Artificial Sequence
  Peptide Derived from Human Papillomavirus
SICKYPDYIKM

SEQ ID NO: 25125 - protein, 11 aa, Artificial Sequence
  Peptide Derived from Human Papillomavirus
SLFFYLRREQM

SEQ ID NO: 25126 - protein, 8 aa, Artificial Sequence
  Peptide Derived from Human Papillomavirus
SLWLPSEA

SEQ ID NO: 25127 - protein, 10 aa, Artificial Sequence
  Peptide Derived from Human Papillomavirus
SLWLPSEATV

SEQ ID NO: 25128 - protein, 11 aa, Artificial Sequence
  Peptide Derived from Human Papillomavirus
SLWLPSEATVY

SEQ ID NO: 25129 - protein, 9 aa, Artificial Sequence
  Peptide Derived from Human Papillomavirus
SMDYKQTQL

SEQ ID NO: 25130 - protein, 11 aa, Artificial Sequence
  Peptide Derived from Human Papillomavirus
SMDYKQTQLCL

SEQ ID NO: 25131 - protein, 10 aa, Artificial Sequence
  Peptide Derived from Human Papillomavirus
SMNSTILEDW

SEQ ID NO: 25132 - protein, 9 aa, Artificial Sequence
  Peptide Derived from Human Papillomavirus
SMVTSDAQI

SEQ ID NO: 25133 - protein, 10 aa, Artificial Sequence
  Peptide Derived from Human Papillomavirus
SMVTSDAQIF

SEQ ID NO: 25134 - protein, 8 aa, Artificial Sequence
  Peptide Derived from Human Papillomavirus
SPCTNVAV

SEQ ID NO: 25135 - protein, 8 aa, Artificial Sequence
  Peptide Derived from Human Papillomavirus
TILEDWNF

SEQ ID NO: 25136 - protein, 10 aa, Artificial Sequence
  Peptide Derived from Human Papillomavirus
TILEDWNFGL

SEQ ID NO: 25137 - protein, 8 aa, Artificial Sequence
  Peptide Derived from Human Papillomavirus
TLEDTYRF

SEQ ID NO: 25138 - protein, 9 aa, Artificial Sequence
  Peptide Derived from Human Papillomavirus
TLEDTYRFV

SEQ ID NO: 25139 - protein, 9 aa, Artificial Sequence
  Peptide Derived from Human Papillomavirus
TLQANKSEV

SEQ ID NO: 25140 - protein, 11 aa, Artificial Sequence
  Peptide Derived from Human Papillomavirus
TLQANKSEVPL

SEQ ID NO: 25141 - protein, 9 aa, Artificial Sequence
  Peptide Derived from Human Papillomavirus
TLTADVMTY

SEQ ID NO: 25142 - protein, 10 aa, Artificial Sequence
  Peptide Derived from Human Papillomavirus
TLTADVMTYI

SEQ ID NO: 25143 - protein, 10 aa, Artificial Sequence
  Peptide Derived from Human Papillomavirus
TPPAPKEDPL

SEQ ID NO: 25144 - protein, 11 aa, Artificial Sequence
  Peptide Derived from Human Papillomavirus
TPSGSMVTSDA

SEQ ID NO: 25145 - protein, 11 aa, Artificial Sequence
  Peptide Derived from Human Papillomavirus
TPTTSSTSTTA

SEQ ID NO: 25146 - protein, 9 aa, Artificial Sequence
  Peptide Derived from Human Papillomavirus
TQRLVWACV

SEQ ID NO: 25147 - protein, 11 aa, Artificial Sequence
  Peptide Derived from Human Papillomavirus
TQRLVWACVGV

SEQ ID NO: 25148 - protein, 8 aa, Artificial Sequence
  Peptide Derived from Human Papillomavirus
TVIQDGDM

SEQ ID NO: 25149 - protein, 9 aa, Artificial Sequence
  Peptide Derived from Human Papillomavirus
TVIQDGDMV

SEQ ID NO: 25150 - protein, 11 aa, Artificial Sequence
  Peptide Derived from Human Papillomavirus
TVVDTTRSTNM

SEQ ID NO: 25151 - protein, 9 aa, Artificial Sequence
  Peptide Derived from Human Papillomavirus
TVYLPPVPV

SEQ ID NO: 25152 - protein, 8 aa, Artificial Sequence
  Peptide Derived from Human Papillomavirus
VIQDGDMV

SEQ ID NO: 25153 - protein, 9 aa, Artificial Sequence
  Peptide Derived from Human Papillomavirus
VITCYENDV

SEQ ID NO: 25154 - protein, 11 aa, Artificial Sequence
  Peptide Derived from Human Papillomavirus
VITCYENDVNV

SEQ ID NO: 25155 - protein, 8 aa, Artificial Sequence
  Peptide Derived from Human Papillomavirus
VMTYIHSM

SEQ ID NO: 25156 - protein, 9 aa, Artificial Sequence
  Peptide Derived from Human Papillomavirus
VPKVSGLQY

SEQ ID NO: 25157 - protein, 11 aa, Artificial Sequence
  Peptide Derived from Human Papillomavirus
VPKVSGLQYRV

SEQ ID NO: 25158 - protein, 9 aa, Artificial Sequence
  Peptide Derived from Human Papillomavirus
VPLDICTSI

SEQ ID NO: 25159 - protein, 10 aa, Artificial Sequence
  Peptide Derived from Human Papillomavirus
VVDTTRSTNM

SEQ ID NO: 25160 - protein, 8 aa, Artificial Sequence
  Peptide Derived from Human Papillomavirus
VVSTDEYV

SEQ ID NO: 25161 - protein, 9 aa, Artificial Sequence
  Peptide Derived from Human Papillomavirus
VVSTDEYVA

SEQ ID NO: 25162 - protein, 8 aa, Artificial Sequence
  Peptide Derived from Human Papillomavirus
WLPSEATV

SEQ ID NO: 25163 - protein, 9 aa, Artificial Sequence
  Peptide Derived from Human Papillomavirus
WLPSEATVY

SEQ ID NO: 25164 - protein, 10 aa, Artificial Sequence
  Peptide Derived from Human Papillomavirus
WLPSEATVYL

SEQ ID NO: 25165 - protein, 9 aa, Artificial Sequence
  Peptide Derived from Human Papillomavirus
YIHSMNSTI

SEQ ID NO: 25166 - protein, 10 aa, Artificial Sequence
  Peptide Derived from Human Papillomavirus
YIHSMNSTIL

SEQ ID NO: 25167 - protein, 9 aa, Artificial Sequence
  Peptide Derived from Human Papillomavirus
YIKGSGSTA

SEQ ID NO: 25168 - protein, 11 aa, Artificial Sequence
  Peptide Derived from Human Papillomavirus
YIKGSGSTANL

SEQ ID NO: 25169 - protein, 9 aa, Artificial Sequence
  Peptide Derived from Human Papillomavirus
YIKMVSEPY

SEQ ID NO: 25170 - protein, 8 aa, Artificial Sequence
  Peptide Derived from Human Papillomavirus
YILVITCY

SEQ ID NO: 25171 - protein, 10 aa, Artificial Sequence
  Peptide Derived from Human Papillomavirus
YLPPVPVSKV

SEQ ID NO: 25172 - protein, 11 aa, Artificial Sequence
  Peptide Derived from Human Papillomavirus
YLPPVPVSKVV

SEQ ID NO: 25173 - protein, 8 aa, Artificial Sequence
  Peptide Derived from Human Papillomavirus
YLRHGEEY

SEQ ID NO: 25174 - protein, 10 aa, Artificial Sequence
  Peptide Derived from Human Papillomavirus
YLRHGEEYDL

SEQ ID NO: 25175 - protein, 8 aa, Artificial Sequence
  Peptide Derived from Human Papillomavirus
YLRREQMF

SEQ ID NO: 25176 - protein, 9 aa, Artificial Sequence
  Peptide Derived from Human Papillomavirus
YLRREQMFV

SEQ ID NO: 25177 - protein, 8 aa, Artificial Sequence
  Peptide Derived from Human Papillomavirus
YPDYIKMV

SEQ ID NO: 25178 - protein, 8 aa, Artificial Sequence
  Peptide Derived from Human Papillomavirus
YVARTNIY

SEQ ID NO: 25179 - protein, 9 aa, Artificial Sequence
  Peptide Derived from Human Papillomavirus
YVARTNIYY

SEQ ID NO: 25180 - protein, 11 aa, Artificial Sequence
  Peptide Derived from Human Papillomavirus
YVARTNIYYHA

SEQ ID NO: 25181 - protein, 9 aa, Artificial Sequence
  Peptide Derived from Human Papillomavirus
AILDINNTV

SEQ ID NO: 25182 - protein, 10 aa, Artificial Sequence
  Peptide Derived from Human Papillomavirus
ALPTSINNGL

SEQ ID NO: 25183 - protein, 11 aa, Artificial Sequence
  Peptide Derived from Human Papillomavirus
ALPTSINNGLY

SEQ ID NO: 25184 - protein, 9 aa, Artificial Sequence
  Peptide Derived from Human Papillomavirus
ALTSRRTGI

SEQ ID NO: 25185 - protein, 11 aa, Artificial Sequence
  Peptide Derived from Human Papillomavirus
ALTSRRTGIRY

SEQ ID NO: 25186 - protein, 9 aa, Artificial Sequence
  Peptide Derived from Human Papillomavirus
APDPDFLDI

SEQ ID NO: 25187 - protein, 10 aa, Artificial Sequence
  Peptide Derived from Human Papillomavirus
APDPDFLDIV

SEQ ID NO: 25188 - protein, 11 aa, Artificial Sequence
  Peptide Derived from Human Papillomavirus
APDPDFLDIVA

SEQ ID NO: 25189 - protein, 8 aa, Artificial Sequence
  Peptide Derived from Human Papillomavirus
APSLIPIV

SEQ ID NO: 25190 - protein, 8 aa, Artificial Sequence
  Peptide Derived from Human Papillomavirus
APTSVPSI

SEQ ID NO: 25191 - protein, 9 aa, Artificial Sequence
  Peptide Derived from Human Papillomavirus
APVRPPLTV

SEQ ID NO: 25192 - protein, 9 aa, Artificial Sequence
  Peptide Derived from Human Papillomavirus
CPPDIIPKV

SEQ ID NO: 25193 - protein, 11 aa, Artificial Sequence
  Peptide Derived from Human Papillomavirus
DIIPKVEGKTI

SEQ ID NO: 25194 - protein, 9 aa, Artificial Sequence
  Peptide Derived from Human Papillomavirus
DINNTVTTV

SEQ ID NO: 25195 - protein, 10 aa, Artificial Sequence
  Peptide Derived from Human Papillomavirus
DIPINITDQA

SEQ ID NO: 25196 - protein, 9 aa, Artificial Sequence
  Peptide Derived from Human Papillomavirus
DIVALHRPA

SEQ ID NO: 25197 - protein, 10 aa, Artificial Sequence
  Peptide Derived from Human Papillomavirus
DIVALHRPAL

SEQ ID NO: 25198 - protein, 8 aa, Artificial Sequence
  Peptide Derived from Human Papillomavirus
DIYADDFI

SEQ ID NO: 25199 - protein, 11 aa, Artificial Sequence
  Peptide Derived from Human Papillomavirus
DPAFITTPTKL

SEQ ID NO: 25200 - protein, 8 aa, Artificial Sequence
  Peptide Derived from Human Papillomavirus
DPDFLDIV

SEQ ID NO: 25201 - protein, 9 aa, Artificial Sequence
  Peptide Derived from Human Papillomavirus
DPDFLDIVA

SEQ ID NO: 25202 - protein, 10 aa, Artificial Sequence
  Peptide Derived from Human Papillomavirus
DPDFLDIVAL

SEQ ID NO: 25203 - protein, 8 aa, Artificial Sequence
  Peptide Derived from Human Papillomavirus
DPSIVSLV

SEQ ID NO: 25204 - protein, 11 aa, Artificial Sequence
  Peptide Derived from Human Papillomavirus
DPSVLQPPTPA

SEQ ID NO: 25205 - protein, 10 aa, Artificial Sequence
  Peptide Derived from Human Papillomavirus
DPVGPSDPSI

SEQ ID NO: 25206 - protein, 11 aa, Artificial Sequence
  Peptide Derived from Human Papillomavirus
DPVGPSDPSIV

SEQ ID NO: 25207 - protein, 9 aa, Artificial Sequence
  Peptide Derived from Human Papillomavirus
DQAPSLIPI

SEQ ID NO: 25208 - protein, 10 aa, Artificial Sequence
  Peptide Derived from Human Papillomavirus
DQAPSLIPIV

SEQ ID NO: 25209 - protein, 9 aa, Artificial Sequence
  Peptide Derived from Human Papillomavirus
DQILQYGSM

SEQ ID NO: 25210 - protein, 11 aa, Artificial Sequence
  Peptide Derived from Human Papillomavirus
DQILQYGSMGV

SEQ ID NO: 25211 - protein, 8 aa, Artificial Sequence
  Peptide Derived from Human Papillomavirus
DVDNTLYF

SEQ ID NO: 25212 - protein, 8 aa, Artificial Sequence
  Peptide Derived from Human Papillomavirus
EIPMDTFI

SEQ ID NO: 25213 - protein, 9 aa, Artificial Sequence
  Peptide Derived from Human Papillomavirus
EIPMDTFIV

SEQ ID NO: 25214 - protein, 10 aa, Artificial Sequence
  Peptide Derived from Human Papillomavirus
ELQTITPSTY

SEQ ID NO: 25215 - protein, 10 aa, Artificial Sequence
  Peptide Derived from Human Papillomavirus
FIDAGAPTSV

SEQ ID NO: 25216 - protein, 10 aa, Artificial Sequence
  Peptide Derived from Human Papillomavirus
FITDTSTTPV

SEQ ID NO: 25217 - protein, 8 aa, Artificial Sequence
  Peptide Derived from Human Papillomavirus
FITTPTKL

SEQ ID NO: 25218 - protein, 9 aa, Artificial Sequence
  Peptide Derived from Human Papillomavirus
FITTPTKLI

SEQ ID NO: 25219 - protein, 11 aa, Artificial Sequence
  Peptide Derived from Human Papillomavirus
FITTPTKLITY

SEQ ID NO: 25220 - protein, 10 aa, Artificial Sequence
  Peptide Derived from Human Papillomavirus
FIVSTNPNTV

SEQ ID NO: 25221 - protein, 11 aa, Artificial Sequence
  Peptide Derived from Human Papillomavirus
FLDIVALHRPA

SEQ ID NO: 25222 - protein, 8 aa, Artificial Sequence
  Peptide Derived from Human Papillomavirus
GIDVDNTL

SEQ ID NO: 25223 - protein, 9 aa, Artificial Sequence
  Peptide Derived from Human Papillomavirus
GIDVDNTLY

SEQ ID NO: 25224 - protein, 10 aa, Artificial Sequence
  Peptide Derived from Human Papillomavirus
GIDVDNTLYF

SEQ ID NO: 25225 - protein, 10 aa, Artificial Sequence
  Peptide Derived from Human Papillomavirus
GLYDIYADDF

SEQ ID NO: 25226 - protein, 11 aa, Artificial Sequence
  Peptide Derived from Human Papillomavirus
GLYDIYADDFI

SEQ ID NO: 25227 - protein, 10 aa, Artificial Sequence
  Peptide Derived from Human Papillomavirus
GLYSRTTQQV

SEQ ID NO: 25228 - protein, 8 aa, Artificial Sequence
  Peptide Derived from Human Papillomavirus
GPDIPINI

SEQ ID NO: 25229 - protein, 8 aa, Artificial Sequence
  Peptide Derived from Human Papillomavirus
GPSDPSIV

SEQ ID NO: 25230 - protein, 10 aa, Artificial Sequence
  Peptide Derived from Human Papillomavirus
GPSDPSIVSL

SEQ ID NO: 25231 - protein, 11 aa, Artificial Sequence
  Peptide Derived from Human Papillomavirus
GPSDPSIVSLV

SEQ ID NO: 25232 - protein, 9 aa, Artificial Sequence
  Peptide Derived from Human Papillomavirus
GVFFGGLGI

SEQ ID NO: 25233 - protein, 8 aa, Artificial Sequence
  Peptide Derived from Human Papillomavirus
IIADAGDF

SEQ ID NO: 25234 - protein, 9 aa, Artificial Sequence
  Peptide Derived from Human Papillomavirus
IIADAGDFY

SEQ ID NO: 25235 - protein, 10 aa, Artificial Sequence
  Peptide Derived from Human Papillomavirus
IIADAGDFYL

SEQ ID NO: 25236 - protein, 10 aa, Artificial Sequence
  Peptide Derived from Human Papillomavirus
IIPKVEGKTI

SEQ ID NO: 25237 - protein, 11 aa, Artificial Sequence
  Peptide Derived from Human Papillomavirus
IIPKVEGKTIA

SEQ ID NO: 25238 - protein, 8 aa, Artificial Sequence
  Peptide Derived from Human Papillomavirus
ILDINNTV

SEQ ID NO: 25239 - protein, 11 aa, Artificial Sequence
  Peptide Derived from Human Papillomavirus
ILDINNTVTTV

SEQ ID NO: 25240 - protein, 9 aa, Artificial Sequence
  Peptide Derived from Human Papillomavirus
ILQYGSMGV

SEQ ID NO: 25241 - protein, 10 aa, Artificial Sequence
  Peptide Derived from Human Papillomavirus
ILQYGSMGVF

SEQ ID NO: 25242 - protein, 11 aa, Artificial Sequence
  Peptide Derived from Human Papillomavirus
ILQYGSMGVFF

SEQ ID NO: 25243 - protein, 9 aa, Artificial Sequence
  Peptide Derived from Human Papillomavirus
IPANTTIPF

SEQ ID NO: 25244 - protein, 9 aa, Artificial Sequence
  Peptide Derived from Human Papillomavirus
IPFGGAYNI

SEQ ID NO: 25245 - protein, 11 aa, Artificial Sequence
  Peptide Derived from Human Papillomavirus
IPFGGAYNIPL

SEQ ID NO: 25246 - protein, 8 aa, Artificial Sequence
  Peptide Derived from Human Papillomavirus
IPGSRPVA

SEQ ID NO: 25247 - protein, 10 aa, Artificial Sequence
  Peptide Derived from Human Papillomavirus
IPGSRPVARL

SEQ ID NO: 25248 - protein, 9 aa, Artificial Sequence
  Peptide Derived from Human Papillomavirus
IPINITDQA

SEQ ID NO: 25249 - protein, 10 aa, Artificial Sequence
  Peptide Derived from Human Papillomavirus
IPIVPGSPQY

SEQ ID NO: 25250 - protein, 9 aa, Artificial Sequence
  Peptide Derived from Human Papillomavirus
IPKVEGKTI

SEQ ID NO: 25251 - protein, 10 aa, Artificial Sequence
  Peptide Derived from Human Papillomavirus
IPKVEGKTIA

SEQ ID NO: 25252 - protein, 10 aa, Artificial Sequence
  Peptide Derived from Human Papillomavirus
IPLGTRPPTA

SEQ ID NO: 25253 - protein, 9 aa, Artificial Sequence
  Peptide Derived from Human Papillomavirus
IPLVSGPDI

SEQ ID NO: 25254 - protein, 11 aa, Artificial Sequence
  Peptide Derived from Human Papillomavirus
IPLVSGPDIPI

SEQ ID NO: 25255 - protein, 8 aa, Artificial Sequence
  Peptide Derived from Human Papillomavirus
IPMDTFIV

SEQ ID NO: 25256 - protein, 8 aa, Artificial Sequence
  Peptide Derived from Human Papillomavirus
IPPDVSGF

SEQ ID NO: 25257 - protein, 10 aa, Artificial Sequence
  Peptide Derived from Human Papillomavirus
IPPDVSGFSI

SEQ ID NO: 25258 - protein, 8 aa, Artificial Sequence
  Peptide Derived from Human Papillomavirus
IVALHRPA

SEQ ID NO: 25259 - protein, 9 aa, Artificial Sequence
  Peptide Derived from Human Papillomavirus
IVALHRPAL

SEQ ID NO: 25260 - protein, 8 aa, Artificial Sequence
  Peptide Derived from Human Papillomavirus
IVPGSPQY

SEQ ID NO: 25261 - protein, 10 aa, Artificial Sequence
  Peptide Derived from Human Papillomavirus
IVPGSPQYTI

SEQ ID NO: 25262 - protein, 11 aa, Artificial Sequence
  Peptide Derived from Human Papillomavirus
IVPGSPQYTII

SEQ ID NO: 25263 - protein, 10 aa, Artificial Sequence
  Peptide Derived from Human Papillomavirus
IVSLVEETSF

SEQ ID NO: 25264 - protein, 11 aa, Artificial Sequence
  Peptide Derived from Human Papillomavirus
IVSLVEETSFI

SEQ ID NO: 25265 - protein, 9 aa, Artificial Sequence
  Peptide Derived from Human Papillomavirus
IVSTNPNTV

SEQ ID NO: 25266 - protein, 9 aa, Artificial Sequence
  Peptide Derived from Human Papillomavirus
KLITYDNPA

SEQ ID NO: 25267 - protein, 10 aa, Artificial Sequence
  Peptide Derived from Human Papillomavirus
KLITYDNPAY

SEQ ID NO: 25268 - protein, 10 aa, Artificial Sequence
  Peptide Derived from Human Papillomavirus
KQAGTCPPDI

SEQ ID NO: 25269 - protein, 11 aa, Artificial Sequence
  Peptide Derived from Human Papillomavirus
KQAGTCPPDII

SEQ ID NO: 25270 - protein, 8 aa, Artificial Sequence
  Peptide Derived from Human Papillomavirus
KVEGKTIA

SEQ ID NO: 25271 - protein, 11 aa, Artificial Sequence
  Peptide Derived from Human Papillomavirus
KVEGKTIADQI

SEQ ID NO: 25272 - protein, 8 aa, Artificial Sequence
  Peptide Derived from Human Papillomavirus
KVHYYYDF

SEQ ID NO: 25273 - protein, 11 aa, Artificial Sequence
  Peptide Derived from Human Papillomavirus
KVHYYYDFSTI

SEQ ID NO: 25274 - protein, 8 aa, Artificial Sequence
  Peptide Derived from Human Papillomavirus
KVVDPAFI

SEQ ID NO: 25275 - protein, 11 aa, Artificial Sequence
  Peptide Derived from Human Papillomavirus
LIPIVPGSPQY

SEQ ID NO: 25276 - protein, 8 aa, Artificial Sequence
  Peptide Derived from Human Papillomavirus
LITYDNPA

SEQ ID NO: 25277 - protein, 9 aa, Artificial Sequence
  Peptide Derived from Human Papillomavirus
LITYDNPAY

SEQ ID NO: 25278 - protein, 9 aa, Artificial Sequence
  Peptide Derived from Human Papillomavirus
LPTSINNGL

SEQ ID NO: 25279 - protein, 10 aa, Artificial Sequence
  Peptide Derived from Human Papillomavirus
LPTSINNGLY

SEQ ID NO: 25280 - protein, 8 aa, Artificial Sequence
  Peptide Derived from Human Papillomavirus
LPYFFSDV

SEQ ID NO: 25281 - protein, 10 aa, Artificial Sequence
  Peptide Derived from Human Papillomavirus
LPYFFSDVSL

SEQ ID NO: 25282 - protein, 11 aa, Artificial Sequence
  Peptide Derived from Human Papillomavirus
LPYFFSDVSLA

SEQ ID NO: 25283 - protein, 9 aa, Artificial Sequence
  Peptide Derived from Human Papillomavirus
LQTITPSTY

SEQ ID NO: 25284 - protein, 8 aa, Artificial Sequence
  Peptide Derived from Human Papillomavirus
LQYGSMGV

SEQ ID NO: 25285 - protein, 9 aa, Artificial Sequence
  Peptide Derived from Human Papillomavirus
LQYGSMGVF

SEQ ID NO: 25286 - protein, 10 aa, Artificial Sequence
  Peptide Derived from Human Papillomavirus
LQYGSMGVFF

SEQ ID NO: 25287 - protein, 8 aa, Artificial Sequence
  Peptide Derived from Human Papillomavirus
LVEETSFI

SEQ ID NO: 25288 - protein, 10 aa, Artificial Sequence
  Peptide Derived from Human Papillomavirus
LVEETSFIDA

SEQ ID NO: 25289 - protein, 9 aa, Artificial Sequence
  Peptide Derived from Human Papillomavirus
LVSGPDIPI

SEQ ID NO: 25290 - protein, 11 aa, Artificial Sequence
  Peptide Derived from Human Papillomavirus
LVSGPDIPINI

SEQ ID NO: 25291 - protein, 9 aa, Artificial Sequence
  Peptide Derived from Human Papillomavirus
MLRKRRKRL

SEQ ID NO: 25292 - protein, 11 aa, Artificial Sequence
  Peptide Derived from Human Papillomavirus
MLRKRRKRLPY

SEQ ID NO: 25293 - protein, 8 aa, Artificial Sequence
  Peptide Derived from Human Papillomavirus
NIAPDPDF

SEQ ID NO: 25294 - protein, 9 aa, Artificial Sequence
  Peptide Derived from Human Papillomavirus
NIAPDPDFL

SEQ ID NO: 25295 - protein, 11 aa, Artificial Sequence
  Peptide Derived from Human Papillomavirus
NIAPDPDFLDI

SEQ ID NO: 25296 - protein, 10 aa, Artificial Sequence
  Peptide Derived from Human Papillomavirus
NIPLVSGPDI

SEQ ID NO: 25297 - protein, 9 aa, Artificial Sequence
  Peptide Derived from Human Papillomavirus
NITDQAPSL

SEQ ID NO: 25298 - protein, 10 aa, Artificial Sequence
  Peptide Derived from Human Papillomavirus
NITDQAPSLI

SEQ ID NO: 25299 - protein, 9 aa, Artificial Sequence
  Peptide Derived from Human Papillomavirus
NPAYEGIDV

SEQ ID NO: 25300 - protein, 11 aa, Artificial Sequence
  Peptide Derived from Human Papillomavirus
NPNTVTSSTPI

SEQ ID NO: 25301 - protein, 9 aa, Artificial Sequence
  Peptide Derived from Human Papillomavirus
NPTFTDPSV

SEQ ID NO: 25302 - protein, 10 aa, Artificial Sequence
  Peptide Derived from Human Papillomavirus
NPTFTDPSVL

SEQ ID NO: 25303 - protein, 8 aa, Artificial Sequence
  Peptide Derived from Human Papillomavirus
PINITDQA

SEQ ID NO: 25304 - protein, 11 aa, Artificial Sequence
  Peptide Derived from Human Papillomavirus
PINITDQAPSL

SEQ ID NO: 25305 - protein, 8 aa, Artificial Sequence
  Peptide Derived from Human Papillomavirus
PIPGSRPV

SEQ ID NO: 25306 - protein, 9 aa, Artificial Sequence
  Peptide Derived from Human Papillomavirus
PIPGSRPVA

SEQ ID NO: 25307 - protein, 11 aa, Artificial Sequence
  Peptide Derived from Human Papillomavirus
PIPGSRPVARL

SEQ ID NO: 25308 - protein, 9 aa, Artificial Sequence
  Peptide Derived from Human Papillomavirus
PIVPGSPQY

SEQ ID NO: 25309 - protein, 11 aa, Artificial Sequence
  Peptide Derived from Human Papillomavirus
PIVPGSPQYTI

SEQ ID NO: 25310 - protein, 9 aa, Artificial Sequence
  Peptide Derived from Human Papillomavirus
PLGTRPPTA

SEQ ID NO: 25311 - protein, 8 aa, Artificial Sequence
  Peptide Derived from Human Papillomavirus
PLVSGPDI

SEQ ID NO: 25312 - protein, 10 aa, Artificial Sequence
  Peptide Derived from Human Papillomavirus
PLVSGPDIPI

SEQ ID NO: 25313 - protein, 8 aa, Artificial Sequence
  Peptide Derived from Human Papillomavirus
PPDIIPKV

SEQ ID NO: 25314 - protein, 9 aa, Artificial Sequence
  Peptide Derived from Human Papillomavirus
PPDVSGFSI

SEQ ID NO: 25315 - protein, 8 aa, Artificial Sequence
  Peptide Derived from Human Papillomavirus
PPLTVDPV

SEQ ID NO: 25316 - protein, 8 aa, Artificial Sequence
  Peptide Derived from Human Papillomavirus
PPTATDTL

SEQ ID NO: 25317 - protein, 9 aa, Artificial Sequence
  Peptide Derived from Human Papillomavirus
PPTATDTLA

SEQ ID NO: 25318 - protein, 11 aa, Artificial Sequence
  Peptide Derived from Human Papillomavirus
PPTATDTLAPV

SEQ ID NO: 25319 - protein, 11 aa, Artificial Sequence
  Peptide Derived from Human Papillomavirus
PPTPAETGGHF

SEQ ID NO: 25320 - protein, 9 aa, Artificial Sequence
  Peptide Derived from Human Papillomavirus
PQYTIIADA

SEQ ID NO: 25321 - protein, 8 aa, Artificial Sequence
  Peptide Derived from Human Papillomavirus
PVARLGLY

SEQ ID NO: 25322 - protein, 9 aa, Artificial Sequence
  Peptide Derived from Human Papillomavirus
PVGPSDPSI

SEQ ID NO: 25323 - protein, 10 aa, Artificial Sequence
  Peptide Derived from Human Papillomavirus
PVGPSDPSIV

SEQ ID NO: 25324 - protein, 10 aa, Artificial Sequence
  Peptide Derived from Human Papillomavirus
PVPSVPSTSL

SEQ ID NO: 25325 - protein, 8 aa, Artificial Sequence
  Peptide Derived from Human Papillomavirus
PVRPPLTV

SEQ ID NO: 25326 - protein, 11 aa, Artificial Sequence
  Peptide Derived from Human Papillomavirus
PVRPPLTVDPV

SEQ ID NO: 25327 - protein, 8 aa, Artificial Sequence
  Peptide Derived from Human Papillomavirus
QILQYGSM

SEQ ID NO: 25328 - protein, 10 aa, Artificial Sequence
  Peptide Derived from Human Papillomavirus
QILQYGSMGV

SEQ ID NO: 25329 - protein, 11 aa, Artificial Sequence
  Peptide Derived from Human Papillomavirus
QILQYGSMGVF

SEQ ID NO: 25330 - protein, 9 aa, Artificial Sequence
  Peptide Derived from Human Papillomavirus
QLYKTCKQA

SEQ ID NO: 25331 - protein, 9 aa, Artificial Sequence
  Peptide Derived from Human Papillomavirus
QQVKVVDPA

SEQ ID NO: 25332 - protein, 10 aa, Artificial Sequence
  Peptide Derived from Human Papillomavirus
QQVKVVDPAF

SEQ ID NO: 25333 - protein, 11 aa, Artificial Sequence
  Peptide Derived from Human Papillomavirus
QQVKVVDPAFI

SEQ ID NO: 25334 - protein, 8 aa, Artificial Sequence
  Peptide Derived from Human Papillomavirus
QVKVVDPA

SEQ ID NO: 25335 - protein, 9 aa, Artificial Sequence
  Peptide Derived from Human Papillomavirus
QVKVVDPAF

SEQ ID NO: 25336 - protein, 10 aa, Artificial Sequence
  Peptide Derived from Human Papillomavirus
QVKVVDPAFI

SEQ ID NO: 25337 - protein, 8 aa, Artificial Sequence
  Peptide Derived from Human Papillomavirus
RIGNKQTL

SEQ ID NO: 25338 - protein, 9 aa, Artificial Sequence
  Peptide Derived from Human Papillomavirus
RLPYFFSDV

SEQ ID NO: 25339 - protein, 11 aa, Artificial Sequence
  Peptide Derived from Human Papillomavirus
RLPYFFSDVSL

SEQ ID NO: 25340 - protein, 11 aa, Artificial Sequence
  Peptide Derived from Human Papillomavirus
RPALTSRRTGI

SEQ ID NO: 25341 - protein, 9 aa, Artificial Sequence
  Peptide Derived from Human Papillomavirus
RPPLTVDPV

SEQ ID NO: 25342 - protein, 9 aa, Artificial Sequence
  Peptide Derived from Human Papillomavirus
RPPTATDTL

SEQ ID NO: 25343 - protein, 10 aa, Artificial Sequence
  Peptide Derived from Human Papillomavirus
RPPTATDTLA

SEQ ID NO: 25344 - protein, 8 aa, Artificial Sequence
  Peptide Derived from Human Papillomavirus
RPVARLGL

SEQ ID NO: 25345 - protein, 9 aa, Artificial Sequence
  Peptide Derived from Human Papillomavirus
RPVARLGLY

SEQ ID NO: 25346 - protein, 8 aa, Artificial Sequence
  Peptide Derived from Human Papillomavirus
SIGAKVHY

SEQ ID NO: 25347 - protein, 9 aa, Artificial Sequence
  Peptide Derived from Human Papillomavirus
SIGAKVHYY

SEQ ID NO: 25348 - protein, 10 aa, Artificial Sequence
  Peptide Derived from Human Papillomavirus
SIGAKVHYYY

SEQ ID NO: 25349 - protein, 10 aa, Artificial Sequence
  Peptide Derived from Human Papillomavirus
SINIAPDPDF

SEQ ID NO: 25350 - protein, 11 aa, Artificial Sequence
  Peptide Derived from Human Papillomavirus
SINIAPDPDFL

SEQ ID NO: 25351 - protein, 9 aa, Artificial Sequence
  Peptide Derived from Human Papillomavirus
SINNGLYDI

SEQ ID NO: 25352 - protein, 10 aa, Artificial Sequence
  Peptide Derived from Human Papillomavirus
SINNGLYDIY

SEQ ID NO: 25353 - protein, 11 aa, Artificial Sequence
  Peptide Derived from Human Papillomavirus
SINNGLYDIYA

SEQ ID NO: 25354 - protein, 9 aa, Artificial Sequence
  Peptide Derived from Human Papillomavirus
SIPPDVSGF

SEQ ID NO: 25355 - protein, 11 aa, Artificial Sequence
  Peptide Derived from Human Papillomavirus
SIPPDVSGFSI

SEQ ID NO: 25356 - protein, 11 aa, Artificial Sequence
  Peptide Derived from Human Papillomavirus
SITTSTDTTPA

SEQ ID NO: 25357 - protein, 11 aa, Artificial Sequence
  Peptide Derived from Human Papillomavirus
SIVSLVEETSF

SEQ ID NO: 25358 - protein, 8 aa, Artificial Sequence
  Peptide Derived from Human Papillomavirus
SLSGYIPA

SEQ ID NO: 25359 - protein, 8 aa, Artificial Sequence
  Peptide Derived from Human Papillomavirus
SLVEETSF

SEQ ID NO: 25360 - protein, 9 aa, Artificial Sequence
  Peptide Derived from Human Papillomavirus
SLVEETSFI

SEQ ID NO: 25361 - protein, 11 aa, Artificial Sequence
  Peptide Derived from Human Papillomavirus
SLVEETSFIDA

SEQ ID NO: 25362 - protein, 9 aa, Artificial Sequence
  Peptide Derived from Human Papillomavirus
SMGVFFGGL

SEQ ID NO: 25363 - protein, 11 aa, Artificial Sequence
  Peptide Derived from Human Papillomavirus
SMGVFFGGLGI

SEQ ID NO: 25364 - protein, 8 aa, Artificial Sequence
  Peptide Derived from Human Papillomavirus
SPQYTIIA

SEQ ID NO: 25365 - protein, 10 aa, Artificial Sequence
  Peptide Derived from Human Papillomavirus
SPQYTIIADA

SEQ ID NO: 25366 - protein, 9 aa, Artificial Sequence
  Peptide Derived from Human Papillomavirus
SVLQPPTPA

SEQ ID NO: 25367 - protein, 9 aa, Artificial Sequence
  Peptide Derived from Human Papillomavirus
SVPSIPPDV

SEQ ID NO: 25368 - protein, 10 aa, Artificial Sequence
  Peptide Derived from Human Papillomavirus
SVPSTSLSGY

SEQ ID NO: 25369 - protein, 11 aa, Artificial Sequence
  Peptide Derived from Human Papillomavirus
SVPSTSLSGYI

SEQ ID NO: 25370 - protein, 9 aa, Artificial Sequence
  Peptide Derived from Human Papillomavirus
TIADQILQY

SEQ ID NO: 25371 - protein, 8 aa, Artificial Sequence
  Peptide Derived from Human Papillomavirus
TIDSAEEI

SEQ ID NO: 25372 - protein, 10 aa, Artificial Sequence
  Peptide Derived from Human Papillomavirus
TIDSAEEIEL

SEQ ID NO: 25373 - protein, 9 aa, Artificial Sequence
  Peptide Derived from Human Papillomavirus
TIIADAGDF

SEQ ID NO: 25374 - protein, 10 aa, Artificial Sequence
  Peptide Derived from Human Papillomavirus
TIIADAGDFY

SEQ ID NO: 25375 - protein, 11 aa, Artificial Sequence
  Peptide Derived from Human Papillomavirus
TIIADAGDFYL

SEQ ID NO: 25376 - protein, 8 aa, Artificial Sequence
  Peptide Derived from Human Papillomavirus
TIPFGGAY

SEQ ID NO: 25377 - protein, 10 aa, Artificial Sequence
  Peptide Derived from Human Papillomavirus
TIPFGGAYNI

SEQ ID NO: 25378 - protein, 10 aa, Artificial Sequence
  Peptide Derived from Human Papillomavirus
TISTHNYEEI

SEQ ID NO: 25379 - protein, 9 aa, Artificial Sequence
  Peptide Derived from Human Papillomavirus
TLAPVRPPL

SEQ ID NO: 25380 - protein, 11 aa, Artificial Sequence
  Peptide Derived from Human Papillomavirus
TLAPVRPPLTV

SEQ ID NO: 25381 - protein, 10 aa, Artificial Sequence
  Peptide Derived from Human Papillomavirus
TLRTRSGKSI

SEQ ID NO: 25382 - protein, 11 aa, Artificial Sequence
  Peptide Derived from Human Papillomavirus
TLYFSSNDNSI

SEQ ID NO: 25383 - protein, 9 aa, Artificial Sequence
  Peptide Derived from Human Papillomavirus
TPAETGGHF

SEQ ID NO: 25384 - protein, 11 aa, Artificial Sequence
  Peptide Derived from Human Papillomavirus
TPAETGGHFTL

SEQ ID NO: 25385 - protein, 11 aa, Artificial Sequence
  Peptide Derived from Human Papillomavirus
TPAILDINNTV

SEQ ID NO: 25386 - protein, 9 aa, Artificial Sequence
  Peptide Derived from Human Papillomavirus
TPIPGSRPV

SEQ ID NO: 25387 - protein, 10 aa, Artificial Sequence
  Peptide Derived from Human Papillomavirus
TPIPGSRPVA

SEQ ID NO: 25388 - protein, 11 aa, Artificial Sequence
  Peptide Derived from Human Papillomavirus
TPSTYTTTSHA

SEQ ID NO: 25389 - protein, 8 aa, Artificial Sequence
  Peptide Derived from Human Papillomavirus
TPTKLITY

SEQ ID NO: 25390 - protein, 11 aa, Artificial Sequence
  Peptide Derived from Human Papillomavirus
TPVPSVPSTSL

SEQ ID NO: 25391 - protein, 10 aa, Artificial Sequence
  Peptide Derived from Human Papillomavirus
TQLYKTCKQA

SEQ ID NO: 25392 - protein, 10 aa, Artificial Sequence
  Peptide Derived from Human Papillomavirus
TQQVKVVDPA

SEQ ID NO: 25393 - protein, 11 aa, Artificial Sequence
  Peptide Derived from Human Papillomavirus
TQQVKVVDPAF

SEQ ID NO: 25394 - protein, 8 aa, Artificial Sequence
  Peptide Derived from Human Papillomavirus
TVTSSTPI

SEQ ID NO: 25395 - protein, 10 aa, Artificial Sequence
  Peptide Derived from Human Papillomavirus
TVTTHNNPTF

SEQ ID NO: 25396 - protein, 8 aa, Artificial Sequence
  Peptide Derived from Human Papillomavirus
VLQPPTPA

SEQ ID NO: 25397 - protein, 9 aa, Artificial Sequence
  Peptide Derived from Human Papillomavirus
VPGSPQYTI

SEQ ID NO: 25398 - protein, 10 aa, Artificial Sequence
  Peptide Derived from Human Papillomavirus
VPGSPQYTII

SEQ ID NO: 25399 - protein, 11 aa, Artificial Sequence
  Peptide Derived from Human Papillomavirus
VPGSPQYTIIA

SEQ ID NO: 25400 - protein, 8 aa, Artificial Sequence
  Peptide Derived from Human Papillomavirus
VPSIPPDV

SEQ ID NO: 25401 - protein, 11 aa, Artificial Sequence
  Peptide Derived from Human Papillomavirus
VPSIPPDVSGF

SEQ ID NO: 25402 - protein, 9 aa, Artificial Sequence
  Peptide Derived from Human Papillomavirus
VPSTSLSGY

SEQ ID NO: 25403 - protein, 10 aa, Artificial Sequence
  Peptide Derived from Human Papillomavirus
VPSTSLSGYI

SEQ ID NO: 25404 - protein, 9 aa, Artificial Sequence
  Peptide Derived from Human Papillomavirus
VPSVPSTSL

SEQ ID NO: 25405 - protein, 8 aa, Artificial Sequence
  Peptide Derived from Human Papillomavirus
YIPANTTI

SEQ ID NO: 25406 - protein, 10 aa, Artificial Sequence
  Peptide Derived from Human Papillomavirus
YIPANTTIPF

SEQ ID NO: 25407 - protein, 11 aa, Artificial Sequence
  Peptide Derived from Human Papillomavirus
YIPLGTRPPTA

SEQ ID NO: 25408 - protein, 8 aa, Artificial Sequence
  Peptide Derived from Human Papillomavirus
YLHPSYYM

SEQ ID NO: 25409 - protein, 9 aa, Artificial Sequence
  Peptide Derived from Human Papillomavirus
YLHPSYYML

SEQ ID NO: 25410 - protein, 10 aa, Artificial Sequence
  Peptide Derived from Human Papillomavirus
YMLRKRRKRL

SEQ ID NO: 25411 - protein, 9 aa, Artificial Sequence
  Peptide Derived from Human Papillomavirus
AIFGVNPTI

SEQ ID NO: 25412 - protein, 10 aa, Artificial Sequence
  Peptide Derived from Human Papillomavirus
AIFGVNPTIA

SEQ ID NO: 25413 - protein, 10 aa, Artificial Sequence
  Peptide Derived from Human Papillomavirus
AIVDKKTGDV

SEQ ID NO: 25414 - protein, 11 aa, Artificial Sequence
  Peptide Derived from Human Papillomavirus
AIVDKKTGDVI

SEQ ID NO: 25415 - protein, 9 aa, Artificial Sequence
  Peptide Derived from Human Papillomavirus
ALDGNPISI

SEQ ID NO: 25416 - protein, 8 aa, Artificial Sequence
  Peptide Derived from Human Papillomavirus
ALFHAQEV

SEQ ID NO: 25417 - protein, 10 aa, Artificial Sequence
  Peptide Derived from Human Papillomavirus
ALLADSNSNA

SEQ ID NO: 25418 - protein, 11 aa, Artificial Sequence
  Peptide Derived from Human Papillomavirus
ALLADSNSNAA

SEQ ID NO: 25419 - protein, 9 aa, Artificial Sequence
  Peptide Derived from Human Papillomavirus
ALYWYRTGI

SEQ ID NO: 25420 - protein, 10 aa, Artificial Sequence
  Peptide Derived from Human Papillomavirus
AMLAVFKDTY

SEQ ID NO: 25421 - protein, 11 aa, Artificial Sequence
  Peptide Derived from Human Papillomavirus
AMLDDATTTCW

SEQ ID NO: 25422 - protein, 10 aa, Artificial Sequence
  Peptide Derived from Human Papillomavirus
AQALFHAQEV

SEQ ID NO: 25423 - protein, 8 aa, Artificial Sequence
  Peptide Derived from Human Papillomavirus
AQEVHNDA

SEQ ID NO: 25424 - protein, 10 aa, Artificial Sequence
  Peptide Derived from Human Papillomavirus
AQEVHNDAQV

SEQ ID NO: 25425 - protein, 11 aa, Artificial Sequence
  Peptide Derived from Human Papillomavirus
AQEVHNDAQVL

SEQ ID NO: 25426 - protein, 8 aa, Artificial Sequence
  Peptide Derived from Human Papillomavirus
AQKRQMNM

SEQ ID NO: 25427 - protein, 11 aa, Artificial Sequence
  Peptide Derived from Human Papillomavirus
AQKRQMNMSQW

SEQ ID NO: 25428 - protein, 9 aa, Artificial Sequence
  Peptide Derived from Human Papillomavirus
AQLKDLLKV

SEQ ID NO: 25429 - protein, 11 aa, Artificial Sequence
  Peptide Derived from Human Papillomavirus
AQVLHVLKRKF

SEQ ID NO: 25430 - protein, 9 aa, Artificial Sequence
  Peptide Derived from Human Papillomavirus
AVFKDTYGL

SEQ ID NO: 25431 - protein, 11 aa, Artificial Sequence
  Peptide Derived from Human Papillomavirus
AVFKDTYGLSF

SEQ ID NO: 25432 - protein, 8 aa, Artificial Sequence
  Peptide Derived from Human Papillomavirus
CLDCKWGV

SEQ ID NO: 25433 - protein, 9 aa, Artificial Sequence
  Peptide Derived from Human Papillomavirus
CLDCKWGVL

SEQ ID NO: 25434 - protein, 10 aa, Artificial Sequence
  Peptide Derived from Human Papillomavirus
CLDCKWGVLI

SEQ ID NO: 25435 - protein, 11 aa, Artificial Sequence
  Peptide Derived from Human Papillomavirus
CLDCKWGVLIL

SEQ ID NO: 25436 - protein, 8 aa, Artificial Sequence
  Peptide Derived from Human Papillomavirus
CLVFCGPA

SEQ ID NO: 25437 - protein, 9 aa, Artificial Sequence
  Peptide Derived from Human Papillomavirus
CMLIQPPKL

SEQ ID NO: 25438 - protein, 10 aa, Artificial Sequence
  Peptide Derived from Human Papillomavirus
CPPILLTTNI

SEQ ID NO: 25439 - protein, 10 aa, Artificial Sequence
  Peptide Derived from Human Papillomavirus
CQAKYLKDCA

SEQ ID NO: 25440 - protein, 9 aa, Artificial Sequence
  Peptide Derived from Human Papillomavirus
DLHEEEEDA

SEQ ID NO: 25441 - protein, 11 aa, Artificial Sequence
  Peptide Derived from Human Papillomavirus
DLLKVNNKQGA

SEQ ID NO: 25442 - protein, 8 aa, Artificial Sequence
  Peptide Derived from Human Papillomavirus
DLSEMVQW

SEQ ID NO: 25443 - protein, 9 aa, Artificial Sequence
  Peptide Derived from Human Papillomavirus
DLSEMVQWA

SEQ ID NO: 25444 - protein, 10 aa, Artificial Sequence
  Peptide Derived from Human Papillomavirus
DLSEMVQWAF

SEQ ID NO: 25445 - protein, 8 aa, Artificial Sequence
  Peptide Derived from Human Papillomavirus
DMAFEYAL

SEQ ID NO: 25446 - protein, 9 aa, Artificial Sequence
  Peptide Derived from Human Papillomavirus
DMAFEYALL

SEQ ID NO: 25447 - protein, 10 aa, Artificial Sequence
  Peptide Derived from Human Papillomavirus
DMAFEYALLA

SEQ ID NO: 25448 - protein, 11 aa, Artificial Sequence
  Peptide Derived from Human Papillomavirus
DVISDDEDENA

SEQ ID NO: 25449 - protein, 10 aa, Artificial Sequence
  Peptide Derived from Human Papillomavirus
EINDKNWKCF

SEQ ID NO: 25450 - protein, 11 aa, Artificial Sequence
  Peptide Derived from Human Papillomavirus
EINDKNWKCFF

SEQ ID NO: 25451 - protein, 11 aa, Artificial Sequence
  Peptide Derived from Human Papillomavirus
EISLNSGQKKA

SEQ ID NO: 25452 - protein, 8 aa, Artificial Sequence
  Peptide Derived from Human Papillomavirus
ELETAQAL

SEQ ID NO: 25453 - protein, 9 aa, Artificial Sequence
  Peptide Derived from Human Papillomavirus
ELETAQALF

SEQ ID NO: 25454 - protein, 11 aa, Artificial Sequence
  Peptide Derived from Human Papillomavirus
ELETAQALFHA

SEQ ID NO: 25455 - protein, 9 aa, Artificial Sequence
  Peptide Derived from Human Papillomavirus
ELSPRLQEI

SEQ ID NO: 25456 - protein, 11 aa, Artificial Sequence
  Peptide Derived from Human Papillomavirus
ELSPRLQEISL

SEQ ID NO: 25457 - protein, 8 aa, Artificial Sequence
  Peptide Derived from Human Papillomavirus
ELTDESDM

SEQ ID NO: 25458 - protein, 9 aa, Artificial Sequence
  Peptide Derived from Human Papillomavirus
ELTDESDMA

SEQ ID NO: 25459 - protein, 10 aa, Artificial Sequence
  Peptide Derived from Human Papillomavirus
ELTDESDMAF

SEQ ID NO: 25460 - protein, 11 aa, Artificial Sequence
  Peptide Derived from Human Papillomavirus
EMVQWAFDNEL

SEQ ID NO: 25461 - protein, 8 aa, Artificial Sequence
  Peptide Derived from Human Papillomavirus
EPLTDTKV

SEQ ID NO: 25462 - protein, 9 aa, Artificial Sequence
  Peptide Derived from Human Papillomavirus
EPLTDTKVA

SEQ ID NO: 25463 - protein, 10 aa, Artificial Sequence
  Peptide Derived from Human Papillomavirus
EPLTDTKVAM

SEQ ID NO: 25464 - protein, 11 aa, Artificial Sequence
  Peptide Derived from Human Papillomavirus
EPLTDTKVAML

SEQ ID NO: 25465 - protein, 8 aa, Artificial Sequence
  Peptide Derived from Human Papillomavirus
EQAELETA

SEQ ID NO: 25466 - protein, 10 aa, Artificial Sequence
  Peptide Derived from Human Papillomavirus
EQAELETAQA

SEQ ID NO: 25467 - protein, 11 aa, Artificial Sequence
  Peptide Derived from Human Papillomavirus
EQAELETAQAL

SEQ ID NO: 25468 - protein, 10 aa, Artificial Sequence
  Peptide Derived from Human Papillomavirus
EVDTELSPRL

SEQ ID NO: 25469 - protein, 9 aa, Artificial Sequence
  Peptide Derived from Human Papillomavirus
EVEATQIQV

SEQ ID NO: 25470 - protein, 8 aa, Artificial Sequence
  Peptide Derived from Human Papillomavirus
EVHNDAQV

SEQ ID NO: 25471 - protein, 9 aa, Artificial Sequence
  Peptide Derived from Human Papillomavirus
EVHNDAQVL

SEQ ID NO: 25472 - protein, 11 aa, Artificial Sequence
  Peptide Derived from Human Papillomavirus
EVHNDAQVLHV

SEQ ID NO: 25473 - protein, 9 aa, Artificial Sequence
  Peptide Derived from Human Papillomavirus
EVMGDTPEW

SEQ ID NO: 25474 - protein, 10 aa, Artificial Sequence
  Peptide Derived from Human Papillomavirus
EVMGDTPEWI

SEQ ID NO: 25475 - protein, 8 aa, Artificial Sequence
  Peptide Derived from Human Papillomavirus
FIDTQGTF

SEQ ID NO: 25476 - protein, 8 aa, Artificial Sequence
  Peptide Derived from Human Papillomavirus
FIHFIQGA

SEQ ID NO: 25477 - protein, 9 aa, Artificial Sequence
  Peptide Derived from Human Papillomavirus
FIHFIQGAV

SEQ ID NO: 25478 - protein, 10 aa, Artificial Sequence
  Peptide Derived from Human Papillomavirus
FIHFIQGAVI

SEQ ID NO: 25479 - protein, 10 aa, Artificial Sequence
  Peptide Derived from Human Papillomavirus
FILYAHIQCL

SEQ ID NO: 25480 - protein, 9 aa, Artificial Sequence
  Peptide Derived from Human Papillomavirus
FIQGAVISF

SEQ ID NO: 25481 - protein, 10 aa, Artificial Sequence
  Peptide Derived from Human Papillomavirus
FIQGAVISFV

SEQ ID NO: 25482 - protein, 8 aa, Artificial Sequence
  Peptide Derived from Human Papillomavirus
FITFLGAL

SEQ ID NO: 25483 - protein, 11 aa, Artificial Sequence
  Peptide Derived from Human Papillomavirus
FITFLGALKSF

SEQ ID NO: 25484 - protein, 8 aa, Artificial Sequence
  Peptide Derived from Human Papillomavirus
FLGALKSF

SEQ ID NO: 25485 - protein, 9 aa, Artificial Sequence
  Peptide Derived from Human Papillomavirus
FLGALKSFL

SEQ ID NO: 25486 - protein, 11 aa, Artificial Sequence
  Peptide Derived from Human Papillomavirus
FLKGTPKKNCL

SEQ ID NO: 25487 - protein, 8 aa, Artificial Sequence
  Peptide Derived from Human Papillomavirus
FLKSNCQA

SEQ ID NO: 25488 - protein, 10 aa, Artificial Sequence
  Peptide Derived from Human Papillomavirus
FLKSNCQAKY

SEQ ID NO: 25489 - protein, 11 aa, Artificial Sequence
  Peptide Derived from Human Papillomavirus
FLKSNCQAKYL

SEQ ID NO: 25490 - protein, 9 aa, Artificial Sequence
  Peptide Derived from Human Papillomavirus
FLRYQQIEF

SEQ ID NO: 25491 - protein, 10 aa, Artificial Sequence
  Peptide Derived from Human Papillomavirus
FLRYQQIEFI

SEQ ID NO: 25492 - protein, 10 aa, Artificial Sequence
  Peptide Derived from Human Papillomavirus
FPFDKNGNPV

SEQ ID NO: 25493 - protein, 11 aa, Artificial Sequence
  Peptide Derived from Human Papillomavirus
FPFDKNGNPVY

SEQ ID NO: 25494 - protein, 8 aa, Artificial Sequence
  Peptide Derived from Human Papillomavirus
FVNSTSHF

SEQ ID NO: 25495 - protein, 9 aa, Artificial Sequence
  Peptide Derived from Human Papillomavirus
FVNSTSHFW

SEQ ID NO: 25496 - protein, 10 aa, Artificial Sequence
  Peptide Derived from Human Papillomavirus
FVNSTSHFWL

SEQ ID NO: 25497 - protein, 9 aa, Artificial Sequence
  Peptide Derived from Human Papillomavirus
GIDDSNFDL

SEQ ID NO: 25498 - protein, 8 aa, Artificial Sequence
  Peptide Derived from Human Papillomavirus
GISNISEV

SEQ ID NO: 25499 - protein, 9 aa, Artificial Sequence
  Peptide Derived from Human Papillomavirus
GISNISEVM

SEQ ID NO: 25500 - protein, 8 aa, Artificial Sequence
  Peptide Derived from Human Papillomavirus
GLSFTDLV

SEQ ID NO: 25501 - protein, 11 aa, Artificial Sequence
  Peptide Derived from Human Papillomavirus
GLSFTDLVRNF

SEQ ID NO: 25502 - protein, 8 aa, Artificial Sequence
  Peptide Derived from Human Papillomavirus
GLSTLLHV

SEQ ID NO: 25503 - protein, 8 aa, Artificial Sequence
  Peptide Derived from Human Papillomavirus
GMSFIHFI

SEQ ID NO: 25504 - protein, 11 aa, Artificial Sequence
  Peptide Derived from Human Papillomavirus
GMSFIHFIQGA

SEQ ID NO: 25505 - protein, 9 aa, Artificial Sequence
  Peptide Derived from Human Papillomavirus
GPANTGKSY

SEQ ID NO: 25506 - protein, 10 aa, Artificial Sequence
  Peptide Derived from Human Papillomavirus
GPANTGKSYF

SEQ ID NO: 25507 - protein, 9 aa, Artificial Sequence
  Peptide Derived from Human Papillomavirus
GQKKAKRRL

SEQ ID NO: 25508 - protein, 10 aa, Artificial Sequence
  Peptide Derived from Human Papillomavirus
GQKKAKRRLF

SEQ ID NO: 25509 - protein, 8 aa, Artificial Sequence
  Peptide Derived from Human Papillomavirus
GVLILALL

SEQ ID NO: 25510 - protein, 10 aa, Artificial Sequence
  Peptide Derived from Human Papillomavirus
GVLILALLRY

SEQ ID NO: 25511 - protein, 10 aa, Artificial Sequence
  Peptide Derived from Human Papillomavirus
GVNPTIAEGF

SEQ ID NO: 25512 - protein, 9 aa, Artificial Sequence
  Peptide Derived from Human Papillomavirus
HIQCLDCKW

SEQ ID NO: 25513 - protein, 11 aa, Artificial Sequence
  Peptide Derived from Human Papillomavirus
HIQCLDCKWGV

SEQ ID NO: 25514 - protein, 8 aa, Artificial Sequence
  Peptide Derived from Human Papillomavirus
HPAKDNRW

SEQ ID NO: 25515 - protein, 10 aa, Artificial Sequence
  Peptide Derived from Human Papillomavirus
HPAKDNRWPY

SEQ ID NO: 25516 - protein, 11 aa, Artificial Sequence
  Peptide Derived from Human Papillomavirus
HPAKDNRWPYL

SEQ ID NO: 25517 - protein, 8 aa, Artificial Sequence
  Peptide Derived from Human Papillomavirus
HVLKRKFA

SEQ ID NO: 25518 - protein, 8 aa, Artificial Sequence
  Peptide Derived from Human Papillomavirus
HVPETCML

SEQ ID NO: 25519 - protein, 9 aa, Artificial Sequence
  Peptide Derived from Human Papillomavirus
HVPETCMLI

SEQ ID NO: 25520 - protein, 11 aa, Artificial Sequence
  Peptide Derived from Human Papillomavirus
IIQHGIDDSNF

SEQ ID NO: 25521 - protein, 10 aa, Artificial Sequence
  Peptide Derived from Human Papillomavirus
ILLTTNIHPA

SEQ ID NO: 25522 - protein, 9 aa, Artificial Sequence
  Peptide Derived from Human Papillomavirus
ILYAHIQCL

SEQ ID NO: 25523 - protein, 8 aa, Artificial Sequence
  Peptide Derived from Human Papillomavirus
IQCLDCKW

SEQ ID NO: 25524 - protein, 10 aa, Artificial Sequence
  Peptide Derived from Human Papillomavirus
IQCLDCKWGV

SEQ ID NO: 25525 - protein, 11 aa, Artificial Sequence
  Peptide Derived from Human Papillomavirus
IQCLDCKWGVL

SEQ ID NO: 25526 - protein, 8 aa, Artificial Sequence
  Peptide Derived from Human Papillomavirus
IQGAVISF

SEQ ID NO: 25527 - protein, 9 aa, Artificial Sequence
  Peptide Derived from Human Papillomavirus
IQGAVISFV

SEQ ID NO: 25528 - protein, 10 aa, Artificial Sequence
  Peptide Derived from Human Papillomavirus
IQHGIDDSNF

SEQ ID NO: 25529 - protein, 8 aa, Artificial Sequence
  Peptide Derived from Human Papillomavirus
IQLKCPPI

SEQ ID NO: 25530 - protein, 9 aa, Artificial Sequence
  Peptide Derived from Human Papillomavirus
IQLKCPPIL

SEQ ID NO: 25531 - protein, 10 aa, Artificial Sequence
  Peptide Derived from Human Papillomavirus
IQLKCPPILL

SEQ ID NO: 25532 - protein, 8 aa, Artificial Sequence
  Peptide Derived from Human Papillomavirus
IQPFILYA

SEQ ID NO: 25533 - protein, 10 aa, Artificial Sequence
  Peptide Derived from Human Papillomavirus
IQPFILYAHI

SEQ ID NO: 25534 - protein, 10 aa, Artificial Sequence
  Peptide Derived from Human Papillomavirus
IQPPKLRSSV

SEQ ID NO: 25535 - protein, 11 aa, Artificial Sequence
  Peptide Derived from Human Papillomavirus
IQPPKLRSSVA

SEQ ID NO: 25536 - protein, 11 aa, Artificial Sequence
  Peptide Derived from Human Papillomavirus
IQRLTIIQHGI

SEQ ID NO: 25537 - protein, 9 aa, Artificial Sequence
  Peptide Derived from Human Papillomavirus
IVDKKTGDV

SEQ ID NO: 25538 - protein, 10 aa, Artificial Sequence
  Peptide Derived from Human Papillomavirus
IVDKKTGDVI

SEQ ID NO: 25539 - protein, 10 aa, Artificial Sequence
  Peptide Derived from Human Papillomavirus
IVQFLRYQQI

SEQ ID NO: 25540 - protein, 8 aa, Artificial Sequence
  Peptide Derived from Human Papillomavirus
KIDEGGDW

SEQ ID NO: 25541 - protein, 11 aa, Artificial Sequence
  Peptide Derived from Human Papillomavirus
KIDEGGDWRPI

SEQ ID NO: 25542 - protein, 11 aa, Artificial Sequence
  Peptide Derived from Human Papillomavirus
KLRAGQNHRPL

SEQ ID NO: 25543 - protein, 8 aa, Artificial Sequence
  Peptide Derived from Human Papillomavirus
KLRSSVAA

SEQ ID NO: 25544 - protein, 9 aa, Artificial Sequence
  Peptide Derived from Human Papillomavirus
KLRSSVAAL

SEQ ID NO: 25545 - protein, 10 aa, Artificial Sequence
  Peptide Derived from Human Papillomavirus
KLRSSVAALY

SEQ ID NO: 25546 - protein, 11 aa, Artificial Sequence
  Peptide Derived from Human Papillomavirus
KLRSSVAALYW

SEQ ID NO: 25547 - protein, 11 aa, Artificial Sequence
  Peptide Derived from Human Papillomavirus
KPLIQLKCPPI

SEQ ID NO: 25548 - protein, 8 aa, Artificial Sequence
  Peptide Derived from Human Papillomavirus
KQGAMLAV

SEQ ID NO: 25549 - protein, 9 aa, Artificial Sequence
  Peptide Derived from Human Papillomavirus
KQGAMLAVF

SEQ ID NO: 25550 - protein, 8 aa, Artificial Sequence
  Peptide Derived from Human Papillomavirus
KVAMLDDA

SEQ ID NO: 25551 - protein, 8 aa, Artificial Sequence
  Peptide Derived from Human Papillomavirus
KVNNKQGA

SEQ ID NO: 25552 - protein, 9 aa, Artificial Sequence
  Peptide Derived from Human Papillomavirus
KVNNKQGAM

SEQ ID NO: 25553 - protein, 10 aa, Artificial Sequence
  Peptide Derived from Human Papillomavirus
KVNNKQGAML

SEQ ID NO: 25554 - protein, 11 aa, Artificial Sequence
  Peptide Derived from Human Papillomavirus
KVNNKQGAMLA

SEQ ID NO: 25555 - protein, 8 aa, Artificial Sequence
  Peptide Derived from Human Papillomavirus
LILALLRY

SEQ ID NO: 25556 - protein, 9 aa, Artificial Sequence
  Peptide Derived from Human Papillomavirus
LIQLKCPPI

SEQ ID NO: 25557 - protein, 10 aa, Artificial Sequence
  Peptide Derived from Human Papillomavirus
LIQLKCPPIL

SEQ ID NO: 25558 - protein, 11 aa, Artificial Sequence
  Peptide Derived from Human Papillomavirus
LIQLKCPPILL

SEQ ID NO: 25559 - protein, 8 aa, Artificial Sequence
  Peptide Derived from Human Papillomavirus
LIQPFILY

SEQ ID NO: 25560 - protein, 9 aa, Artificial Sequence
  Peptide Derived from Human Papillomavirus
LIQPFILYA

SEQ ID NO: 25561 - protein, 11 aa, Artificial Sequence
  Peptide Derived from Human Papillomavirus
LIQPFILYAHI

SEQ ID NO: 25562 - protein, 11 aa, Artificial Sequence
  Peptide Derived from Human Papillomavirus
LIQPPKLRSSV

SEQ ID NO: 25563 - protein, 9 aa, Artificial Sequence
  Peptide Derived from Human Papillomavirus
LLADSNSNA

SEQ ID NO: 25564 - protein, 10 aa, Artificial Sequence
  Peptide Derived from Human Papillomavirus
LLADSNSNAA

SEQ ID NO: 25565 - protein, 11 aa, Artificial Sequence
  Peptide Derived from Human Papillomavirus
LLADSNSNAAA

SEQ ID NO: 25566 - protein, 9 aa, Artificial Sequence
  Peptide Derived from Human Papillomavirus
LLHVPETCM

SEQ ID NO: 25567 - protein, 10 aa, Artificial Sequence
  Peptide Derived from Human Papillomavirus
LLHVPETCML

SEQ ID NO: 25568 - protein, 11 aa, Artificial Sequence
  Peptide Derived from Human Papillomavirus
LLHVPETCMLI

SEQ ID NO: 25569 - protein, 10 aa, Artificial Sequence
  Peptide Derived from Human Papillomavirus
LLKVNNKQGA

SEQ ID NO: 25570 - protein, 11 aa, Artificial Sequence
  Peptide Derived from Human Papillomavirus
LLKVNNKQGAM

SEQ ID NO: 25571 - protein, 11 aa, Artificial Sequence
  Peptide Derived from Human Papillomavirus
LLRYKCGKSRL

SEQ ID NO: 25572 - protein, 9 aa, Artificial Sequence
  Peptide Derived from Human Papillomavirus
LLTTNIHPA

SEQ ID NO: 25573 - protein, 9 aa, Artificial Sequence
  Peptide Derived from Human Papillomavirus
MLAVFKDTY

SEQ ID NO: 25574 - protein, 11 aa, Artificial Sequence
  Peptide Derived from Human Papillomavirus
MLAVFKDTYGL

SEQ ID NO: 25575 - protein, 10 aa, Artificial Sequence
  Peptide Derived from Human Papillomavirus
MLDDATTTCW

SEQ ID NO: 25576 - protein, 8 aa, Artificial Sequence
  Peptide Derived from Human Papillomavirus
MLIQPPKL

SEQ ID NO: 25577 - protein, 11 aa, Artificial Sequence
  Peptide Derived from Human Papillomavirus
MVDFIDTQGTF

SEQ ID NO: 25578 - protein, 10 aa, Artificial Sequence
  Peptide Derived from Human Papillomavirus
MVQWAFDNEL

SEQ ID NO: 25579 - protein, 11 aa, Artificial Sequence
  Peptide Derived from Human Papillomavirus
NIENVNPQCTI

SEQ ID NO: 25580 - protein, 10 aa, Artificial Sequence
  Peptide Derived from Human Papillomavirus
NIHPAKDNRW

SEQ ID NO: 25581 - protein, 8 aa, Artificial Sequence
  Peptide Derived from Human Papillomavirus
NMSQWIRF

SEQ ID NO: 25582 - protein, 8 aa, Artificial Sequence
  Peptide Derived from Human Papillomavirus
NPFGTFKL

SEQ ID NO: 25583 - protein, 10 aa, Artificial Sequence
  Peptide Derived from Human Papillomavirus
NPFGTFKLRA

SEQ ID NO: 25584 - protein, 9 aa, Artificial Sequence
  Peptide Derived from Human Papillomavirus
NPQCTIAQL

SEQ ID NO: 25585 - protein, 8 aa, Artificial Sequence
  Peptide Derived from Human Papillomavirus
NPTIAEGF

SEQ ID NO: 25586 - protein, 11 aa, Artificial Sequence
  Peptide Derived from Human Papillomavirus
NPTIAEGFKTL

SEQ ID NO: 25587 - protein, 11 aa, Artificial Sequence
  Peptide Derived from Human Papillomavirus
NPVYEINDKNW

SEQ ID NO: 25588 - protein, 10 aa, Artificial Sequence
  Peptide Derived from Human Papillomavirus
NVCSGGSTEA

SEQ ID NO: 25589 - protein, 11 aa, Artificial Sequence
  Peptide Derived from Human Papillomavirus
NVCSGGSTEAI

SEQ ID NO: 25590 - protein, 8 aa, Artificial Sequence
  Peptide Derived from Human Papillomavirus
NVNPQCTI

SEQ ID NO: 25591 - protein, 9 aa, Artificial Sequence
  Peptide Derived from Human Papillomavirus
NVNPQCTIA

SEQ ID NO: 25592 - protein, 11 aa, Artificial Sequence
  Peptide Derived from Human Papillomavirus
NVNPQCTIAQL

SEQ ID NO: 25593 - protein, 8 aa, Artificial Sequence
  Peptide Derived from Human Papillomavirus
PILLTTNI

SEQ ID NO: 25594 - protein, 11 aa, Artificial Sequence
  Peptide Derived from Human Papillomavirus
PILLTTNIHPA

SEQ ID NO: 25595 - protein, 11 aa, Artificial Sequence
  Peptide Derived from Human Papillomavirus
PISIDRKHKPL

SEQ ID NO: 25596 - protein, 8 aa, Artificial Sequence
  Peptide Derived from Human Papillomavirus
PIVQFLRY

SEQ ID NO: 25597 - protein, 11 aa, Artificial Sequence
  Peptide Derived from Human Papillomavirus
PIVQFLRYQQI

SEQ ID NO: 25598 - protein, 8 aa, Artificial Sequence
  Peptide Derived from Human Papillomavirus
PLGERLEV

SEQ ID NO: 25599 - protein, 10 aa, Artificial Sequence
  Peptide Derived from Human Papillomavirus
PLIQLKCPPI

SEQ ID NO: 25600 - protein, 11 aa, Artificial Sequence
  Peptide Derived from Human Papillomavirus
PLIQLKCPPIL

SEQ ID NO: 25601 - protein, 8 aa, Artificial Sequence
  Peptide Derived from Human Papillomavirus
PLTDTKVA

SEQ ID NO: 25602 - protein, 9 aa, Artificial Sequence
  Peptide Derived from Human Papillomavirus
PLTDTKVAM

SEQ ID NO: 25603 - protein, 10 aa, Artificial Sequence
  Peptide Derived from Human Papillomavirus
PLTDTKVAML

SEQ ID NO: 25604 - protein, 9 aa, Artificial Sequence
  Peptide Derived from Human Papillomavirus
PPILLTTNI

SEQ ID NO: 25605 - protein, 8 aa, Artificial Sequence
  Peptide Derived from Human Papillomavirus
PPKLRSSV

SEQ ID NO: 25606 - protein, 9 aa, Artificial Sequence
  Peptide Derived from Human Papillomavirus
PPKLRSSVA

SEQ ID NO: 25607 - protein, 10 aa, Artificial Sequence
  Peptide Derived from Human Papillomavirus
PPKLRSSVAA

SEQ ID NO: 25608 - protein, 11 aa, Artificial Sequence
  Peptide Derived from Human Papillomavirus
PPKLRSSVAAL

SEQ ID NO: 25609 - protein, 8 aa, Artificial Sequence
  Peptide Derived from Human Papillomavirus
PQCTIAQL

SEQ ID NO: 25610 - protein, 11 aa, Artificial Sequence
  Peptide Derived from Human Papillomavirus
PQCTIAQLKDL

SEQ ID NO: 25611 - protein, 10 aa, Artificial Sequence
  Peptide Derived from Human Papillomavirus
PVYEINDKNW

SEQ ID NO: 25612 - protein, 8 aa, Artificial Sequence
  Peptide Derived from Human Papillomavirus
QIEFITFL

SEQ ID NO: 25613 - protein, 10 aa, Artificial Sequence
  Peptide Derived from Human Papillomavirus
QIEFITFLGA

SEQ ID NO: 25614 - protein, 11 aa, Artificial Sequence
  Peptide Derived from Human Papillomavirus
QIEFITFLGAL

SEQ ID NO: 25615 - protein, 8 aa, Artificial Sequence
  Peptide Derived from Human Papillomavirus
QLKCPPIL

SEQ ID NO: 25616 - protein, 9 aa, Artificial Sequence
  Peptide Derived from Human Papillomavirus
QLKCPPILL

SEQ ID NO: 25617 - protein, 8 aa, Artificial Sequence
  Peptide Derived from Human Papillomavirus
QLKDLLKV

SEQ ID NO: 25618 - protein, 8 aa, Artificial Sequence
  Peptide Derived from Human Papillomavirus
QMNMSQWI

SEQ ID NO: 25619 - protein, 10 aa, Artificial Sequence
  Peptide Derived from Human Papillomavirus
QMNMSQWIRF

SEQ ID NO: 25620 - protein, 9 aa, Artificial Sequence
  Peptide Derived from Human Papillomavirus
QPFILYAHI

SEQ ID NO: 25621 - protein, 9 aa, Artificial Sequence
  Peptide Derived from Human Papillomavirus
QPPKLRSSV

SEQ ID NO: 25622 - protein, 10 aa, Artificial Sequence
  Peptide Derived from Human Papillomavirus
QPPKLRSSVA

SEQ ID NO: 25623 - protein, 11 aa, Artificial Sequence
  Peptide Derived from Human Papillomavirus
QPPKLRSSVAA

SEQ ID NO: 25624 - protein, 8 aa, Artificial Sequence
  Peptide Derived from Human Papillomavirus
QQIEFITF

SEQ ID NO: 25625 - protein, 9 aa, Artificial Sequence
  Peptide Derived from Human Papillomavirus
QQIEFITFL

SEQ ID NO: 25626 - protein, 11 aa, Artificial Sequence
  Peptide Derived from Human Papillomavirus
QQIEFITFLGA

SEQ ID NO: 25627 - protein, 10 aa, Artificial Sequence
  Peptide Derived from Human Papillomavirus
QVLHVLKRKF

SEQ ID NO: 25628 - protein, 11 aa, Artificial Sequence
  Peptide Derived from Human Papillomavirus
QVLHVLKRKFA

SEQ ID NO: 25629 - protein, 10 aa, Artificial Sequence
  Peptide Derived from Human Papillomavirus
RITVFEFPNA

SEQ ID NO: 25630 - protein, 11 aa, Artificial Sequence
  Peptide Derived from Human Papillomavirus
RITVFEFPNAF

SEQ ID NO: 25631 - protein, 11 aa, Artificial Sequence
  Peptide Derived from Human Papillomavirus
RLDLHEEEEDA

SEQ ID NO: 25632 - protein, 8 aa, Artificial Sequence
  Peptide Derived from Human Papillomavirus
RLEVDTEL

SEQ ID NO: 25633 - protein, 10 aa, Artificial Sequence
  Peptide Derived from Human Papillomavirus
RLFTISDSGY

SEQ ID NO: 25634 - protein, 9 aa, Artificial Sequence
  Peptide Derived from Human Papillomavirus
RLTIIQHGI

SEQ ID NO: 25635 - protein, 8 aa, Artificial Sequence
  Peptide Derived from Human Papillomavirus
RLTVAKGL

SEQ ID NO: 25636 - protein, 11 aa, Artificial Sequence
  Peptide Derived from Human Papillomavirus
RLTVAKGLSTL

SEQ ID NO: 25637 - protein, 9 aa, Artificial Sequence
  Peptide Derived from Human Papillomavirus
RPIVQFLRY

SEQ ID NO: 25638 - protein, 8 aa, Artificial Sequence
  Peptide Derived from Human Papillomavirus
RQMNMSQW

SEQ ID NO: 25639 - protein, 9 aa, Artificial Sequence
  Peptide Derived from Human Papillomavirus
RQMNMSQWI

SEQ ID NO: 25640 - protein, 11 aa, Artificial Sequence
  Peptide Derived from Human Papillomavirus
RQMNMSQWIRF

SEQ ID NO: 25641 - protein, 9 aa, Artificial Sequence
  Peptide Derived from Human Papillomavirus
SIDRKHKPL

SEQ ID NO: 25642 - protein, 10 aa, Artificial Sequence
  Peptide Derived from Human Papillomavirus
SIDRKHKPLI

SEQ ID NO: 25643 - protein, 9 aa, Artificial Sequence
  Peptide Derived from Human Papillomavirus
SLNSGQKKA

SEQ ID NO: 25644 - protein, 9 aa, Artificial Sequence
  Peptide Derived from Human Papillomavirus
SPLGERLEV

SEQ ID NO: 25645 - protein, 9 aa, Artificial Sequence
  Peptide Derived from Human Papillomavirus
SPRLQEISL

SEQ ID NO: 25646 - protein, 11 aa, Artificial Sequence
  Peptide Derived from Human Papillomavirus
SQWIRFRCSKI

SEQ ID NO: 25647 - protein, 8 aa, Artificial Sequence
  Peptide Derived from Human Papillomavirus
SVAALYWY

SEQ ID NO: 25648 - protein, 11 aa, Artificial Sequence
  Peptide Derived from Human Papillomavirus
SVDGTSDNSNI

SEQ ID NO: 25649 - protein, 9 aa, Artificial Sequence
  Peptide Derived from Human Papillomavirus
TIAEGFKTL

SEQ ID NO: 25650 - protein, 10 aa, Artificial Sequence
  Peptide Derived from Human Papillomavirus
TIAEGFKTLI

SEQ ID NO: 25651 - protein, 8 aa, Artificial Sequence
  Peptide Derived from Human Papillomavirus
TIAQLKDL

SEQ ID NO: 25652 - protein, 9 aa, Artificial Sequence
  Peptide Derived from Human Papillomavirus
TIAQLKDLL

SEQ ID NO: 25653 - protein, 11 aa, Artificial Sequence
  Peptide Derived from Human Papillomavirus
TIAQLKDLLKV

SEQ ID NO: 25654 - protein, 8 aa, Artificial Sequence
  Peptide Derived from Human Papillomavirus
TLIQPFIL

SEQ ID NO: 25655 - protein, 9 aa, Artificial Sequence
  Peptide Derived from Human Papillomavirus
TLIQPFILY

SEQ ID NO: 25656 - protein, 10 aa, Artificial Sequence
  Peptide Derived from Human Papillomavirus
TLIQPFILYA

SEQ ID NO: 25657 - protein, 10 aa, Artificial Sequence
  Peptide Derived from Human Papillomavirus
TLLHVPETCM

SEQ ID NO: 25658 - protein, 11 aa, Artificial Sequence
  Peptide Derived from Human Papillomavirus
TLLHVPETCML

SEQ ID NO: 25659 - protein, 9 aa, Artificial Sequence
  Peptide Derived from Human Papillomavirus
TMCKHYRRA

SEQ ID NO: 25660 - protein, 8 aa, Artificial Sequence
  Peptide Derived from Human Papillomavirus
TPEWIQRL

SEQ ID NO: 25661 - protein, 10 aa, Artificial Sequence
  Peptide Derived from Human Papillomavirus
TPEWIQRLTI

SEQ ID NO: 25662 - protein, 11 aa, Artificial Sequence
  Peptide Derived from Human Papillomavirus
TPEWIQRLTII

SEQ ID NO: 25663 - protein, 8 aa, Artificial Sequence
  Peptide Derived from Human Papillomavirus
TPKKNCLV

SEQ ID NO: 25664 - protein, 9 aa, Artificial Sequence
  Peptide Derived from Human Papillomavirus
TPKKNCLVF

SEQ ID NO: 25665 - protein, 9 aa, Artificial Sequence
  Peptide Derived from Human Papillomavirus
TQGTFCEQA

SEQ ID NO: 25666 - protein, 11 aa, Artificial Sequence
  Peptide Derived from Human Papillomavirus
TQGTFCEQAEL

SEQ ID NO: 25667 - protein, 9 aa, Artificial Sequence
  Peptide Derived from Human Papillomavirus
TVAKGLSTL

SEQ ID NO: 25668 - protein, 10 aa, Artificial Sequence
  Peptide Derived from Human Papillomavirus
TVAKGLSTLL

SEQ ID NO: 25669 - protein, 8 aa, Artificial Sequence
  Peptide Derived from Human Papillomavirus
TVFEFPNA

SEQ ID NO: 25670 - protein, 9 aa, Artificial Sequence
  Peptide Derived from Human Papillomavirus
TVFEFPNAF

SEQ ID NO: 25671 - protein, 11 aa, Artificial Sequence
  Peptide Derived from Human Papillomavirus
TVFEFPNAFPF

SEQ ID NO: 25672 - protein, 10 aa, Artificial Sequence
  Peptide Derived from Human Papillomavirus
VISDDEDENA

SEQ ID NO: 25673 - protein, 11 aa, Artificial Sequence
  Peptide Derived from Human Papillomavirus
VISFVNSTSHF

SEQ ID NO: 25674 - protein, 9 aa, Artificial Sequence
  Peptide Derived from Human Papillomavirus
VLHVLKRKF

SEQ ID NO: 25675 - protein, 10 aa, Artificial Sequence
  Peptide Derived from Human Papillomavirus
VLHVLKRKFA

SEQ ID NO: 25676 - protein, 9 aa, Artificial Sequence
  Peptide Derived from Human Papillomavirus
VLILALLRY

SEQ ID NO: 25677 - protein, 8 aa, Artificial Sequence
  Peptide Derived from Human Papillomavirus
VMGDTPEW

SEQ ID NO: 25678 - protein, 9 aa, Artificial Sequence
  Peptide Derived from Human Papillomavirus
VMGDTPEWI

SEQ ID NO: 25679 - protein, 8 aa, Artificial Sequence
  Peptide Derived from Human Papillomavirus
VPETCMLI

SEQ ID NO: 25680 - protein, 9 aa, Artificial Sequence
  Peptide Derived from Human Papillomavirus
VQFLRYQQI

SEQ ID NO: 25681 - protein, 11 aa, Artificial Sequence
  Peptide Derived from Human Papillomavirus
VQFLRYQQIEF

SEQ ID NO: 25682 - protein, 9 aa, Artificial Sequence
  Peptide Derived from Human Papillomavirus
VQWAFDNEL

SEQ ID NO: 25683 - protein, 8 aa, Artificial Sequence
  Peptide Derived from Human Papillomavirus
WIQRLTII

SEQ ID NO: 25684 - protein, 9 aa, Artificial Sequence
  Peptide Derived from Human Papillomavirus
WIRFRCSKI

SEQ ID NO: 25685 - protein, 10 aa, Artificial Sequence
  Peptide Derived from Human Papillomavirus
WLEPLTDTKV

SEQ ID NO: 25686 - protein, 11 aa, Artificial Sequence
  Peptide Derived from Human Papillomavirus
WLEPLTDTKVA

SEQ ID NO: 25687 - protein, 8 aa, Artificial Sequence
  Peptide Derived from Human Papillomavirus
WPYLESRI

SEQ ID NO: 25688 - protein, 10 aa, Artificial Sequence
  Peptide Derived from Human Papillomavirus
WPYLESRITV

SEQ ID NO: 25689 - protein, 11 aa, Artificial Sequence
  Peptide Derived from Human Papillomavirus
WPYLESRITVF

SEQ ID NO: 25690 - protein, 8 aa, Artificial Sequence
  Peptide Derived from Human Papillomavirus
WVTAIFGV

SEQ ID NO: 25691 - protein, 8 aa, Artificial Sequence
  Peptide Derived from Human Papillomavirus
YLESRITV

SEQ ID NO: 25692 - protein, 9 aa, Artificial Sequence
  Peptide Derived from Human Papillomavirus
YLESRITVF

SEQ ID NO: 25693 - protein, 11 aa, Artificial Sequence
  Peptide Derived from Human Papillomavirus
YLESRITVFEF

SEQ ID NO: 25694 - protein, 8 aa, Artificial Sequence
  Peptide Derived from Human Papillomavirus
YLKDCATM

SEQ ID NO: 25695 - protein, 11 aa, Artificial Sequence
  Peptide Derived from Human Papillomavirus
YMRNALDGNPI

SEQ ID NO: 25696 - protein, 9 aa, Artificial Sequence
  Peptide Derived from Human Papillomavirus
YQQIEFITF

SEQ ID NO: 25697 - protein, 10 aa, Artificial Sequence
  Peptide Derived from Human Papillomavirus
YQQIEFITFL

SEQ ID NO: 25698 - protein, 8 aa, Artificial Sequence
  Peptide Derived from Human Papillomavirus
AIELQMAL

SEQ ID NO: 25699 - protein, 11 aa, Artificial Sequence
  Peptide Derived from Human Papillomavirus
AIELQMALQGL

SEQ ID NO: 25700 - protein, 11 aa, Artificial Sequence
  Peptide Derived from Human Papillomavirus
AIFFAAREHGI

SEQ ID NO: 25701 - protein, 8 aa, Artificial Sequence
  Peptide Derived from Human Papillomavirus
AIPDSVQI

SEQ ID NO: 25702 - protein, 9 aa, Artificial Sequence
  Peptide Derived from Human Papillomavirus
AIPDSVQIL

SEQ ID NO: 25703 - protein, 10 aa, Artificial Sequence
  Peptide Derived from Human Papillomavirus
AIPDSVQILV

SEQ ID NO: 25704 - protein, 10 aa, Artificial Sequence
  Peptide Derived from Human Papillomavirus
ALQGLAQSRY

SEQ ID NO: 25705 - protein, 10 aa, Artificial Sequence
  Peptide Derived from Human Papillomavirus
AQSRYKTEDW

SEQ ID NO: 25706 - protein, 10 aa, Artificial Sequence
  Peptide Derived from Human Papillomavirus
CMTYVAWDSV

SEQ ID NO: 25707 - protein, 11 aa, Artificial Sequence
  Peptide Derived from Human Papillomavirus
CMTYVAWDSVY

SEQ ID NO: 25708 - protein, 10 aa, Artificial Sequence
  Peptide Derived from Human Papillomavirus
CVQDKIIDHY

SEQ ID NO: 25709 - protein, 8 aa, Artificial Sequence
  Peptide Derived from Human Papillomavirus
CVSHRGLY

SEQ ID NO: 25710 - protein, 9 aa, Artificial Sequence
  Peptide Derived from Human Papillomavirus
CVSHRGLYY

SEQ ID NO: 25711 - protein, 10 aa, Artificial Sequence
  Peptide Derived from Human Papillomavirus
CVSHRGLYYV

SEQ ID NO: 25712 - protein, 8 aa, Artificial Sequence
  Peptide Derived from Human Papillomavirus
DIDSQIQY

SEQ ID NO: 25713 - protein, 9 aa, Artificial Sequence
  Peptide Derived from Human Papillomavirus
DIDSQIQYW

SEQ ID NO: 25714 - protein, 11 aa, Artificial Sequence
  Peptide Derived from Human Papillomavirus
DIDSQIQYWQL

SEQ ID NO: 25715 - protein, 8 aa, Artificial Sequence
  Peptide Derived from Human Papillomavirus
DISSTWHW

SEQ ID NO: 25716 - protein, 11 aa, Artificial Sequence
  Peptide Derived from Human Papillomavirus
DISSTWHWTGA

SEQ ID NO: 25717 - protein, 9 aa, Artificial Sequence
  Peptide Derived from Human Papillomavirus
ELQMALQGL

SEQ ID NO: 25718 - protein, 10 aa, Artificial Sequence
  Peptide Derived from Human Papillomavirus
ELQMALQGLA

SEQ ID NO: 25719 - protein, 11 aa, Artificial Sequence
  Peptide Derived from Human Papillomavirus
ELWNTEPTHCF

SEQ ID NO: 25720 - protein, 8 aa, Artificial Sequence
  Peptide Derived from Human Papillomavirus
EVHFGNNV

SEQ ID NO: 25721 - protein, 9 aa, Artificial Sequence
  Peptide Derived from Human Papillomavirus
EVHFGNNVI

SEQ ID NO: 25722 - protein, 11 aa, Artificial Sequence
  Peptide Derived from Human Papillomavirus
FLNTVAIPDSV

SEQ ID NO: 25723 - protein, 9 aa, Artificial Sequence
  Peptide Derived from Human Papillomavirus
GIQTLNHQV

SEQ ID NO: 25724 - protein, 10 aa, Artificial Sequence
  Peptide Derived from Human Papillomavirus
GIQTLNHQVV

SEQ ID NO: 25725 - protein, 11 aa, Artificial Sequence
  Peptide Derived from Human Papillomavirus
GLAEKQHCGPV

SEQ ID NO: 25726 - protein, 9 aa, Artificial Sequence
  Peptide Derived from Human Papillomavirus
GLYYVKEGY

SEQ ID NO: 25727 - protein, 9 aa, Artificial Sequence
  Peptide Derived from Human Papillomavirus
GPVNPLLGA

SEQ ID NO: 25728 - protein, 10 aa, Artificial Sequence
  Peptide Derived from Human Papillomavirus
GPVNPLLGAA

SEQ ID NO: 25729 - protein, 8 aa, Artificial Sequence
  Peptide Derived from Human Papillomavirus
GQTVQVYF

SEQ ID NO: 25730 - protein, 9 aa, Artificial Sequence
  Peptide Derived from Human Papillomavirus
HLKGDRNSL

SEQ ID NO: 25731 - protein, 9 aa, Artificial Sequence
  Peptide Derived from Human Papillomavirus
HQVVPAYNI

SEQ ID NO: 25732 - protein, 11 aa, Artificial Sequence
  Peptide Derived from Human Papillomavirus
IIHLKGDRNSL

SEQ ID NO: 25733 - protein, 8 aa, Artificial Sequence
  Peptide Derived from Human Papillomavirus
ILVGYMTM

SEQ ID NO: 25734 - protein, 8 aa, Artificial Sequence
  Peptide Derived from Human Papillomavirus
IPDSVQIL

SEQ ID NO: 25735 - protein, 9 aa, Artificial Sequence
  Peptide Derived from Human Papillomavirus
IPDSVQILV

SEQ ID NO: 25736 - protein, 11 aa, Artificial Sequence
  Peptide Derived from Human Papillomavirus
IPDSVQILVGY

SEQ ID NO: 25737 - protein, 8 aa, Artificial Sequence
  Peptide Derived from Human Papillomavirus
IQTLNHQV

SEQ ID NO: 25738 - protein, 9 aa, Artificial Sequence
  Peptide Derived from Human Papillomavirus
IQTLNHQVV

SEQ ID NO: 25739 - protein, 11 aa, Artificial Sequence
  Peptide Derived from Human Papillomavirus
IQTLNHQVVPA

SEQ ID NO: 25740 - protein, 9 aa, Artificial Sequence
  Peptide Derived from Human Papillomavirus
IQYWQLIRW

SEQ ID NO: 25741 - protein, 10 aa, Artificial Sequence
  Peptide Derived from Human Papillomavirus
KLCSGNTTPI

SEQ ID NO: 25742 - protein, 11 aa, Artificial Sequence
  Peptide Derived from Human Papillomavirus
KLCSGNTTPII

SEQ ID NO: 25743 - protein, 10 aa, Artificial Sequence
  Peptide Derived from Human Papillomavirus
KQHCGPVNPL

SEQ ID NO: 25744 - protein, 11 aa, Artificial Sequence
  Peptide Derived from Human Papillomavirus
KQHCGPVNPLL

SEQ ID NO: 25745 - protein, 10 aa, Artificial Sequence
  Peptide Derived from Human Papillomavirus
KQLQHTPSPY

SEQ ID NO: 25746 - protein, 8 aa, Artificial Sequence
  Peptide Derived from Human Papillomavirus
LIRWENAI

SEQ ID NO: 25747 - protein, 9 aa, Artificial Sequence
  Peptide Derived from Human Papillomavirus
LIRWENAIF

SEQ ID NO: 25748 - protein, 10 aa, Artificial Sequence
  Peptide Derived from Human Papillomavirus
LIRWENAIFF

SEQ ID NO: 25749 - protein, 11 aa, Artificial Sequence
  Peptide Derived from Human Papillomavirus
LIRWENAIFFA

SEQ ID NO: 25750 - protein, 8 aa, Artificial Sequence
  Peptide Derived from Human Papillomavirus
LQDTCEEL

SEQ ID NO: 25751 - protein, 9 aa, Artificial Sequence
  Peptide Derived from Human Papillomavirus
LQDTCEELW

SEQ ID NO: 25752 - protein, 9 aa, Artificial Sequence
  Peptide Derived from Human Papillomavirus
LQGLAQSRY

SEQ ID NO: 25753 - protein, 8 aa, Artificial Sequence
  Peptide Derived from Human Papillomavirus
LQHTPSPY

SEQ ID NO: 25754 - protein, 8 aa, Artificial Sequence
  Peptide Derived from Human Papillomavirus
LQMALQGL

SEQ ID NO: 25755 - protein, 9 aa, Artificial Sequence
  Peptide Derived from Human Papillomavirus
LQMALQGLA

SEQ ID NO: 25756 - protein, 8 aa, Artificial Sequence
  Peptide Derived from Human Papillomavirus
MQTPKETL

SEQ ID NO: 25757 - protein, 10 aa, Artificial Sequence
  Peptide Derived from Human Papillomavirus
NISKSKAHKA

SEQ ID NO: 25758 - protein, 11 aa, Artificial Sequence
  Peptide Derived from Human Papillomavirus
NISKSKAHKAI

SEQ ID NO: 25759 - protein, 9 aa, Artificial Sequence
  Peptide Derived from Human Papillomavirus
NVIDCNDSM

SEQ ID NO: 25760 - protein, 8 aa, Artificial Sequence
  Peptide Derived from Human Papillomavirus
PVNPLLGA

SEQ ID NO: 25761 - protein, 9 aa, Artificial Sequence
  Peptide Derived from Human Papillomavirus
PVNPLLGAA

SEQ ID NO: 25762 - protein, 9 aa, Artificial Sequence
  Peptide Derived from Human Papillomavirus
QILVGYMTM

SEQ ID NO: 25763 - protein, 8 aa, Artificial Sequence
  Peptide Derived from Human Papillomavirus
QIQYWQLI

SEQ ID NO: 25764 - protein, 10 aa, Artificial Sequence
  Peptide Derived from Human Papillomavirus
QIQYWQLIRW

SEQ ID NO: 25765 - protein, 8 aa, Artificial Sequence
  Peptide Derived from Human Papillomavirus
QLIRWENA

SEQ ID NO: 25766 - protein, 9 aa, Artificial Sequence
  Peptide Derived from Human Papillomavirus
QLIRWENAI

SEQ ID NO: 25767 - protein, 10 aa, Artificial Sequence
  Peptide Derived from Human Papillomavirus
QLIRWENAIF

SEQ ID NO: 25768 - protein, 11 aa, Artificial Sequence
  Peptide Derived from Human Papillomavirus
QLIRWENAIFF

SEQ ID NO: 25769 - protein, 9 aa, Artificial Sequence
  Peptide Derived from Human Papillomavirus
QLQHTPSPY

SEQ ID NO: 25770 - protein, 8 aa, Artificial Sequence
  Peptide Derived from Human Papillomavirus
QMALQGLA

SEQ ID NO: 25771 - protein, 8 aa, Artificial Sequence
  Peptide Derived from Human Papillomavirus
QVVPAYNI

SEQ ID NO: 25772 - protein, 9 aa, Artificial Sequence
  Peptide Derived from Human Papillomavirus
RLRKHSDHY

SEQ ID NO: 25773 - protein, 9 aa, Artificial Sequence
  Peptide Derived from Human Papillomavirus
RLSCVQDKI

SEQ ID NO: 25774 - protein, 10 aa, Artificial Sequence
  Peptide Derived from Human Papillomavirus
RLSCVQDKII

SEQ ID NO: 25775 - protein, 8 aa, Artificial Sequence
  Peptide Derived from Human Papillomavirus
RPGHCGLA

SEQ ID NO: 25776 - protein, 9 aa, Artificial Sequence
  Peptide Derived from Human Papillomavirus
SLKCLRYRL

SEQ ID NO: 25777 - protein, 10 aa, Artificial Sequence
  Peptide Derived from Human Papillomavirus
SMCSTSDDTV

SEQ ID NO: 25778 - protein, 9 aa, Artificial Sequence
  Peptide Derived from Human Papillomavirus
SPYSSTVSV

SEQ ID NO: 25779 - protein, 8 aa, Artificial Sequence
  Peptide Derived from Human Papillomavirus
SQIQYWQL

SEQ ID NO: 25780 - protein, 9 aa, Artificial Sequence
  Peptide Derived from Human Papillomavirus
SQIQYWQLI

SEQ ID NO: 25781 - protein, 11 aa, Artificial Sequence
  Peptide Derived from Human Papillomavirus
SQIQYWQLIRW

SEQ ID NO: 25782 - protein, 8 aa, Artificial Sequence
  Peptide Derived from Human Papillomavirus
SVGTAKTY

SEQ ID NO: 25783 - protein, 8 aa, Artificial Sequence
  Peptide Derived from Human Papillomavirus
SVQILVGY

SEQ ID NO: 25784 - protein, 9 aa, Artificial Sequence
  Peptide Derived from Human Papillomavirus
SVQILVGYM

SEQ ID NO: 25785 - protein, 11 aa, Artificial Sequence
  Peptide Derived from Human Papillomavirus
SVQILVGYMTM

SEQ ID NO: 25786 - protein, 8 aa, Artificial Sequence
  Peptide Derived from Human Papillomavirus
SVYYMTDA

SEQ ID NO: 25787 - protein, 11 aa, Artificial Sequence
  Peptide Derived from Human Papillomavirus
SVYYMTDAGTW

SEQ ID NO: 25788 - protein, 9 aa, Artificial Sequence
  Peptide Derived from Human Papillomavirus
TLNHQVVPA

SEQ ID NO: 25789 - protein, 10 aa, Artificial Sequence
  Peptide Derived from Human Papillomavirus
TLNHQVVPAY

SEQ ID NO: 25790 - protein, 9 aa, Artificial Sequence
  Peptide Derived from Human Papillomavirus
TLQDTCEEL

SEQ ID NO: 25791 - protein, 10 aa, Artificial Sequence
  Peptide Derived from Human Papillomavirus
TLQDTCEELW

SEQ ID NO: 25792 - protein, 9 aa, Artificial Sequence
  Peptide Derived from Human Papillomavirus
TLSERLSCV

SEQ ID NO: 25793 - protein, 10 aa, Artificial Sequence
  Peptide Derived from Human Papillomavirus
TPKETLSERL

SEQ ID NO: 25794 - protein, 9 aa, Artificial Sequence
  Peptide Derived from Human Papillomavirus
TPSPYSSTV

SEQ ID NO: 25795 - protein, 11 aa, Artificial Sequence
  Peptide Derived from Human Papillomavirus
TPSPYSSTVSV

SEQ ID NO: 25796 - protein, 11 aa, Artificial Sequence
  Peptide Derived from Human Papillomavirus
TPTGNNKRRKL

SEQ ID NO: 25797 - protein, 10 aa, Artificial Sequence
  Peptide Derived from Human Papillomavirus
TQRTKFLNTV

SEQ ID NO: 25798 - protein, 11 aa, Artificial Sequence
  Peptide Derived from Human Papillomavirus
TQRTKFLNTVA

SEQ ID NO: 25799 - protein, 8 aa, Artificial Sequence
  Peptide Derived from Human Papillomavirus
TVAIPDSV

SEQ ID NO: 25800 - protein, 10 aa, Artificial Sequence
  Peptide Derived from Human Papillomavirus
TVAIPDSVQI

SEQ ID NO: 25801 - protein, 11 aa, Artificial Sequence
  Peptide Derived from Human Papillomavirus
TVAIPDSVQIL

SEQ ID NO: 25802 - protein, 8 aa, Artificial Sequence
  Peptide Derived from Human Papillomavirus
TVSATQLV

SEQ ID NO: 25803 - protein, 11 aa, Artificial Sequence
  Peptide Derived from Human Papillomavirus
TVSATQLVKQL

SEQ ID NO: 25804 - protein, 10 aa, Artificial Sequence
  Peptide Derived from Human Papillomavirus
TVSVGTAKTY

SEQ ID NO: 25805 - protein, 8 aa, Artificial Sequence
  Peptide Derived from Human Papillomavirus
VIDCNDSM

SEQ ID NO: 25806 - protein, 11 aa, Artificial Sequence
  Peptide Derived from Human Papillomavirus
VPAYNISKSKA

SEQ ID NO: 25807 - protein, 9 aa, Artificial Sequence
  Peptide Derived from Human Papillomavirus
VQDKIIDHY

SEQ ID NO: 25808 - protein, 8 aa, Artificial Sequence
  Peptide Derived from Human Papillomavirus
VQILVGYM

SEQ ID NO: 25809 - protein, 10 aa, Artificial Sequence
  Peptide Derived from Human Papillomavirus
VQILVGYMTM

SEQ ID NO: 25810 - protein, 9 aa, Artificial Sequence
  Peptide Derived from Human Papillomavirus
WQLIRWENA

SEQ ID NO: 25811 - protein, 10 aa, Artificial Sequence
  Peptide Derived from Human Papillomavirus
WQLIRWENAI

SEQ ID NO: 25812 - protein, 11 aa, Artificial Sequence
  Peptide Derived from Human Papillomavirus
WQLIRWENAIF

SEQ ID NO: 25813 - protein, 11 aa, Artificial Sequence
  Peptide Derived from Human Papillomavirus
YIEFKSECEKY

SEQ ID NO: 25814 - protein, 8 aa, Artificial Sequence
  Peptide Derived from Human Papillomavirus
YMTDAGTW

SEQ ID NO: 25815 - protein, 8 aa, Artificial Sequence
  Peptide Derived from Human Papillomavirus
YVAWDSVY

SEQ ID NO: 25816 - protein, 9 aa, Artificial Sequence
  Peptide Derived from Human Papillomavirus
YVAWDSVYY

SEQ ID NO: 25817 - protein, 10 aa, Artificial Sequence
  Peptide Derived from Human Papillomavirus
YVAWDSVYYM

SEQ ID NO: 25818 - protein, 9 aa, Artificial Sequence
  Peptide Derived from Human Papillomavirus
YVKEGYNTF

SEQ ID NO: 25819 - protein, 10 aa, Artificial Sequence
  Peptide Derived from Human Papillomavirus
YVKEGYNTFY

SEQ ID NO: 25820 - protein, 11 aa, Artificial Sequence
  Peptide Derived from Human Papillomavirus
YVKEGYNTFYI

SEQ ID NO: 25821 - protein, 8 aa, Artificial Sequence
  Peptide Derived from Human Papillomavirus
CMCAYAWV

SEQ ID NO: 25822 - protein, 9 aa, Artificial Sequence
  Peptide Derived from Human Papillomavirus
CMCAYAWVL

SEQ ID NO: 25823 - protein, 10 aa, Artificial Sequence
  Peptide Derived from Human Papillomavirus
CMCAYAWVLV

SEQ ID NO: 25824 - protein, 11 aa, Artificial Sequence
  Peptide Derived from Human Papillomavirus
CMCAYAWVLVF

SEQ ID NO: 25825 - protein, 8 aa, Artificial Sequence
  Peptide Derived from Human Papillomavirus
CMYVCCHV

SEQ ID NO: 25826 - protein, 10 aa, Artificial Sequence
  Peptide Derived from Human Papillomavirus
CMYVCCHVPL

SEQ ID NO: 25827 - protein, 11 aa, Artificial Sequence
  Peptide Derived from Human Papillomavirus
CMYVCCHVPLL

SEQ ID NO: 25828 - protein, 10 aa, Artificial Sequence
  Peptide Derived from Human Papillomavirus
CVCMYVCCHV

SEQ ID NO: 25829 - protein, 9 aa, Artificial Sequence
  Peptide Derived from Human Papillomavirus
FLFCFCVCM

SEQ ID NO: 25830 - protein, 10 aa, Artificial Sequence
  Peptide Derived from Human Papillomavirus
FLFCFCVCMY

SEQ ID NO: 25831 - protein, 11 aa, Artificial Sequence
  Peptide Derived from Human Papillomavirus
FLFCFCVCMYV

SEQ ID NO: 25832 - protein, 8 aa, Artificial Sequence
  Peptide Derived from Human Papillomavirus
FLLPMLLL

SEQ ID NO: 25833 - protein, 10 aa, Artificial Sequence
  Peptide Derived from Human Papillomavirus
FLLPMLLLHI

SEQ ID NO: 25834 - protein, 11 aa, Artificial Sequence
  Peptide Derived from Human Papillomavirus
FVYIVVITSPA

SEQ ID NO: 25835 - protein, 8 aa, Artificial Sequence
  Peptide Derived from Human Papillomavirus
HIHAILSL

SEQ ID NO: 25836 - protein, 8 aa, Artificial Sequence
  Peptide Derived from Human Papillomavirus
HVPLLPSV

SEQ ID NO: 25837 - protein, 10 aa, Artificial Sequence
  Peptide Derived from Human Papillomavirus
HVPLLPSVCM

SEQ ID NO: 25838 - protein, 8 aa, Artificial Sequence
  Peptide Derived from Human Papillomavirus
IVVITSPA

SEQ ID NO: 25839 - protein, 10 aa, Artificial Sequence
  Peptide Derived from Human Papillomavirus
IVVITSPATA

SEQ ID NO: 25840 - protein, 11 aa, Artificial Sequence
  Peptide Derived from Human Papillomavirus
IVVITSPATAF

SEQ ID NO: 25841 - protein, 9 aa, Artificial Sequence
  Peptide Derived from Human Papillomavirus
LIFLFCFCV

SEQ ID NO: 25842 - protein, 11 aa, Artificial Sequence
  Peptide Derived from Human Papillomavirus
LIFLFCFCVCM

SEQ ID NO: 25843 - protein, 8 aa, Artificial Sequence
  Peptide Derived from Human Papillomavirus
LLHIHAIL

SEQ ID NO: 25844 - protein, 10 aa, Artificial Sequence
  Peptide Derived from Human Papillomavirus
LLHIHAILSL

SEQ ID NO: 25845 - protein, 8 aa, Artificial Sequence
  Peptide Derived from Human Papillomavirus
LLLHIHAI

SEQ ID NO: 25846 - protein, 9 aa, Artificial Sequence
  Peptide Derived from Human Papillomavirus
LLLHIHAIL

SEQ ID NO: 25847 - protein, 11 aa, Artificial Sequence
  Peptide Derived from Human Papillomavirus
LLLHIHAILSL

SEQ ID NO: 25848 - protein, 9 aa, Artificial Sequence
  Peptide Derived from Human Papillomavirus
LLPMLLLHI

SEQ ID NO: 25849 - protein, 11 aa, Artificial Sequence
  Peptide Derived from Human Papillomavirus
LLPMLLLHIHA

SEQ ID NO: 25850 - protein, 9 aa, Artificial Sequence
  Peptide Derived from Human Papillomavirus
LLPSVCMCA

SEQ ID NO: 25851 - protein, 10 aa, Artificial Sequence
  Peptide Derived from Human Papillomavirus
LLPSVCMCAY

SEQ ID NO: 25852 - protein, 11 aa, Artificial Sequence
  Peptide Derived from Human Papillomavirus
LLPSVCMCAYA

SEQ ID NO: 25853 - protein, 8 aa, Artificial Sequence
  Peptide Derived from Human Papillomavirus
LPMLLLHI

SEQ ID NO: 25854 - protein, 10 aa, Artificial Sequence
  Peptide Derived from Human Papillomavirus
LPMLLLHIHA

SEQ ID NO: 25855 - protein, 11 aa, Artificial Sequence
  Peptide Derived from Human Papillomavirus
LPMLLLHIHAI

SEQ ID NO: 25856 - protein, 8 aa, Artificial Sequence
  Peptide Derived from Human Papillomavirus
LPSVCMCA

SEQ ID NO: 25857 - protein, 9 aa, Artificial Sequence
  Peptide Derived from Human Papillomavirus
LPSVCMCAY

SEQ ID NO: 25858 - protein, 10 aa, Artificial Sequence
  Peptide Derived from Human Papillomavirus
LPSVCMCAYA

SEQ ID NO: 25859 - protein, 11 aa, Artificial Sequence
  Peptide Derived from Human Papillomavirus
LPSVCMCAYAW

SEQ ID NO: 25860 - protein, 8 aa, Artificial Sequence
  Peptide Derived from Human Papillomavirus
LVFVYIVV

SEQ ID NO: 25861 - protein, 9 aa, Artificial Sequence
  Peptide Derived from Human Papillomavirus
LVFVYIVVI

SEQ ID NO: 25862 - protein, 8 aa, Artificial Sequence
  Peptide Derived from Human Papillomavirus
MLLLHIHA

SEQ ID NO: 25863 - protein, 9 aa, Artificial Sequence
  Peptide Derived from Human Papillomavirus
MLLLHIHAI

SEQ ID NO: 25864 - protein, 10 aa, Artificial Sequence
  Peptide Derived from Human Papillomavirus
MLLLHIHAIL

SEQ ID NO: 25865 - protein, 8 aa, Artificial Sequence
  Peptide Derived from Human Papillomavirus
MLSLIFLF

SEQ ID NO: 25866 - protein, 10 aa, Artificial Sequence
  Peptide Derived from Human Papillomavirus
MLSLIFLFCF

SEQ ID NO: 25867 - protein, 8 aa, Artificial Sequence
  Peptide Derived from Human Papillomavirus
PLLPSVCM

SEQ ID NO: 25868 - protein, 10 aa, Artificial Sequence
  Peptide Derived from Human Papillomavirus
PLLPSVCMCA

SEQ ID NO: 25869 - protein, 11 aa, Artificial Sequence
  Peptide Derived from Human Papillomavirus
PLLPSVCMCAY

SEQ ID NO: 25870 - protein, 9 aa, Artificial Sequence
  Peptide Derived from Human Papillomavirus
PMLLLHIHA

SEQ ID NO: 25871 - protein, 10 aa, Artificial Sequence
  Peptide Derived from Human Papillomavirus
PMLLLHIHAI

SEQ ID NO: 25872 - protein, 11 aa, Artificial Sequence
  Peptide Derived from Human Papillomavirus
PMLLLHIHAIL

SEQ ID NO: 25873 - protein, 8 aa, Artificial Sequence
  Peptide Derived from Human Papillomavirus
SLIFLFCF

SEQ ID NO: 25874 - protein, 10 aa, Artificial Sequence
  Peptide Derived from Human Papillomavirus
SLIFLFCFCV

SEQ ID NO: 25875 - protein, 8 aa, Artificial Sequence
  Peptide Derived from Human Papillomavirus
SPATAFTV

SEQ ID NO: 25876 - protein, 9 aa, Artificial Sequence
  Peptide Derived from Human Papillomavirus
SPATAFTVY

SEQ ID NO: 25877 - protein, 10 aa, Artificial Sequence
  Peptide Derived from Human Papillomavirus
SPATAFTVYV

SEQ ID NO: 25878 - protein, 11 aa, Artificial Sequence
  Peptide Derived from Human Papillomavirus
SPATAFTVYVF

SEQ ID NO: 25879 - protein, 8 aa, Artificial Sequence
  Peptide Derived from Human Papillomavirus
SVCMCAYA

SEQ ID NO: 25880 - protein, 9 aa, Artificial Sequence
  Peptide Derived from Human Papillomavirus
SVCMCAYAW

SEQ ID NO: 25881 - protein, 10 aa, Artificial Sequence
  Peptide Derived from Human Papillomavirus
SVCMCAYAWV

SEQ ID NO: 25882 - protein, 11 aa, Artificial Sequence
  Peptide Derived from Human Papillomavirus
SVCMCAYAWVL

SEQ ID NO: 25883 - protein, 8 aa, Artificial Sequence
  Peptide Derived from Human Papillomavirus
TVYVFCFL

SEQ ID NO: 25884 - protein, 9 aa, Artificial Sequence
  Peptide Derived from Human Papillomavirus
TVYVFCFLL

SEQ ID NO: 25885 - protein, 11 aa, Artificial Sequence
  Peptide Derived from Human Papillomavirus
TVYVFCFLLPM

SEQ ID NO: 25886 - protein, 8 aa, Artificial Sequence
  Peptide Derived from Human Papillomavirus
VITSPATA

SEQ ID NO: 25887 - protein, 9 aa, Artificial Sequence
  Peptide Derived from Human Papillomavirus
VITSPATAF

SEQ ID NO: 25888 - protein, 11 aa, Artificial Sequence
  Peptide Derived from Human Papillomavirus
VITSPATAFTV

SEQ ID NO: 25889 - protein, 8 aa, Artificial Sequence
  Peptide Derived from Human Papillomavirus
VLVFVYIV

SEQ ID NO: 25890 - protein, 9 aa, Artificial Sequence
  Peptide Derived from Human Papillomavirus
VLVFVYIVV

SEQ ID NO: 25891 - protein, 10 aa, Artificial Sequence
  Peptide Derived from Human Papillomavirus
VLVFVYIVVI

SEQ ID NO: 25892 - protein, 9 aa, Artificial Sequence
  Peptide Derived from Human Papillomavirus
VPLLPSVCM

SEQ ID NO: 25893 - protein, 11 aa, Artificial Sequence
  Peptide Derived from Human Papillomavirus
VPLLPSVCMCA

SEQ ID NO: 25894 - protein, 9 aa, Artificial Sequence
  Peptide Derived from Human Papillomavirus
VVITSPATA

SEQ ID NO: 25895 - protein, 10 aa, Artificial Sequence
  Peptide Derived from Human Papillomavirus
VVITSPATAF

SEQ ID NO: 25896 - protein, 8 aa, Artificial Sequence
  Peptide Derived from Human Papillomavirus
WVLVFVYI

SEQ ID NO: 25897 - protein, 9 aa, Artificial Sequence
  Peptide Derived from Human Papillomavirus
WVLVFVYIV

SEQ ID NO: 25898 - protein, 10 aa, Artificial Sequence
  Peptide Derived from Human Papillomavirus
WVLVFVYIVV

SEQ ID NO: 25899 - protein, 11 aa, Artificial Sequence
  Peptide Derived from Human Papillomavirus
WVLVFVYIVVI

SEQ ID NO: 25900 - protein, 9 aa, Artificial Sequence
  Peptide Derived from Human Papillomavirus
YIVVITSPA

SEQ ID NO: 25901 - protein, 11 aa, Artificial Sequence
  Peptide Derived from Human Papillomavirus
YIVVITSPATA

SEQ ID NO: 25902 - protein, 8 aa, Artificial Sequence
  Peptide Derived from Human Papillomavirus
YVCCHVPL

SEQ ID NO: 25903 - protein, 9 aa, Artificial Sequence
  Peptide Derived from Human Papillomavirus
YVCCHVPLL

SEQ ID NO: 25904 - protein, 9 aa, Artificial Sequence
  Peptide Derived from Human Papillomavirus
YVFCFLLPM

SEQ ID NO: 25905 - protein, 10 aa, Artificial Sequence
  Peptide Derived from Human Papillomavirus
YVFCFLLPML

SEQ ID NO: 25906 - protein, 11 aa, Artificial Sequence
  Peptide Derived from Human Papillomavirus
YVFCFLLPMLL

SEQ ID NO: 25907 - protein, 8 aa, Artificial Sequence
  Peptide Derived from Human Papillomavirus
CIDFYSRI

SEQ ID NO: 25908 - protein, 11 aa, Artificial Sequence
  Peptide Derived from Human Papillomavirus
CIDFYSRIREL

SEQ ID NO: 25909 - protein, 8 aa, Artificial Sequence
  Peptide Derived from Human Papillomavirus
CLRCQKPL

SEQ ID NO: 25910 - protein, 11 aa, Artificial Sequence
  Peptide Derived from Human Papillomavirus
CLRCQKPLNPA

SEQ ID NO: 25911 - protein, 8 aa, Artificial Sequence
  Peptide Derived from Human Papillomavirus
CQKPLNPA

SEQ ID NO: 25912 - protein, 11 aa, Artificial Sequence
  Peptide Derived from Human Papillomavirus
CQKPLNPAEKL

SEQ ID NO: 25913 - protein, 8 aa, Artificial Sequence
  Peptide Derived from Human Papillomavirus
CVYCKTVL

SEQ ID NO: 25914 - protein, 10 aa, Artificial Sequence
  Peptide Derived from Human Papillomavirus
CVYCKTVLEL

SEQ ID NO: 25915 - protein, 8 aa, Artificial Sequence
  Peptide Derived from Human Papillomavirus
DIEITCVY

SEQ ID NO: 25916 - protein, 10 aa, Artificial Sequence
  Peptide Derived from Human Papillomavirus
DLCTELNTSL

SEQ ID NO: 25917 - protein, 10 aa, Artificial Sequence
  Peptide Derived from Human Papillomavirus
DLFVVYRDSI

SEQ ID NO: 25918 - protein, 9 aa, Artificial Sequence
  Peptide Derived from Human Papillomavirus
DPTRRPYKL

SEQ ID NO: 25919 - protein, 10 aa, Artificial Sequence
  Peptide Derived from Human Papillomavirus
EITCVYCKTV

SEQ ID NO: 25920 - protein, 11 aa, Artificial Sequence
  Peptide Derived from Human Papillomavirus
EITCVYCKTVL

SEQ ID NO: 25921 - protein, 9 aa, Artificial Sequence
  Peptide Derived from Human Papillomavirus
ELNTSLQDI

SEQ ID NO: 25922 - protein, 11 aa, Artificial Sequence
  Peptide Derived from Human Papillomavirus
ELNTSLQDIEI

SEQ ID NO: 25923 - protein, 9 aa, Artificial Sequence
  Peptide Derived from Human Papillomavirus
ELRHYSDSV

SEQ ID NO: 25924 - protein, 10 aa, Artificial Sequence
  Peptide Derived from Human Papillomavirus
ELRHYSDSVY

SEQ ID NO: 25925 - protein, 8 aa, Artificial Sequence
  Peptide Derived from Human Papillomavirus
ELTEVFEF

SEQ ID NO: 25926 - protein, 9 aa, Artificial Sequence
  Peptide Derived from Human Papillomavirus
ELTEVFEFA

SEQ ID NO: 25927 - protein, 10 aa, Artificial Sequence
  Peptide Derived from Human Papillomavirus
ELTEVFEFAF

SEQ ID NO: 25928 - protein, 10 aa, Artificial Sequence
  Peptide Derived from Human Papillomavirus
EVFEFAFKDL

SEQ ID NO: 25929 - protein, 11 aa, Artificial Sequence
  Peptide Derived from Human Papillomavirus
EVFEFAFKDLF

SEQ ID NO: 25930 - protein, 8 aa, Artificial Sequence
  Peptide Derived from Human Papillomavirus
FVVYRDSI

SEQ ID NO: 25931 - protein, 11 aa, Artificial Sequence
  Peptide Derived from Human Papillomavirus
FVVYRDSIPHA

SEQ ID NO: 25932 - protein, 10 aa, Artificial Sequence
  Peptide Derived from Human Papillomavirus
GLYNLLIRCL

SEQ ID NO: 25933 - protein, 10 aa, Artificial Sequence
  Peptide Derived from Human Papillomavirus
GQCHSCCNRA

SEQ ID NO: 25934 - protein, 8 aa, Artificial Sequence
  Peptide Derived from Human Papillomavirus
HLNEKRRF

SEQ ID NO: 25935 - protein, 11 aa, Artificial Sequence
  Peptide Derived from Human Papillomavirus
HLNEKRRFHNI

SEQ ID NO: 25936 - protein, 10 aa, Artificial Sequence
  Peptide Derived from Human Papillomavirus
IPHAACHKCI

SEQ ID NO: 25937 - protein, 9 aa, Artificial Sequence
  Peptide Derived from Human Papillomavirus
KLPDLCTEL

SEQ ID NO: 25938 - protein, 11 aa, Artificial Sequence
  Peptide Derived from Human Papillomavirus
KLRHLNEKRRF

SEQ ID NO: 25939 - protein, 8 aa, Artificial Sequence
  Peptide Derived from Human Papillomavirus
KLTNTGLY

SEQ ID NO: 25940 - protein, 10 aa, Artificial Sequence
  Peptide Derived from Human Papillomavirus
KLTNTGLYNL

SEQ ID NO: 25941 - protein, 11 aa, Artificial Sequence
  Peptide Derived from Human Papillomavirus
KLTNTGLYNLL

SEQ ID NO: 25942 - protein, 9 aa, Artificial Sequence
  Peptide Derived from Human Papillomavirus
KPLNPAEKL

SEQ ID NO: 25943 - protein, 11 aa, Artificial Sequence
  Peptide Derived from Human Papillomavirus
LIRCLRCQKPL

SEQ ID NO: 25944 - protein, 8 aa, Artificial Sequence
  Peptide Derived from Human Papillomavirus
LPDLCTEL

SEQ ID NO: 25945 - protein, 9 aa, Artificial Sequence
  Peptide Derived from Human Papillomavirus
LQDIEITCV

SEQ ID NO: 25946 - protein, 10 aa, Artificial Sequence
  Peptide Derived from Human Papillomavirus
LQDIEITCVY

SEQ ID NO: 25947 - protein, 9 aa, Artificial Sequence
  Peptide Derived from Human Papillomavirus
LQRRRETQV

SEQ ID NO: 25948 - protein, 9 aa, Artificial Sequence
  Peptide Derived from Human Papillomavirus
NPAEKLRHL

SEQ ID NO: 25949 - protein, 8 aa, Artificial Sequence
  Peptide Derived from Human Papillomavirus
PLNPAEKL

SEQ ID NO: 25950 - protein, 11 aa, Artificial Sequence
  Peptide Derived from Human Papillomavirus
PLNPAEKLRHL

SEQ ID NO: 25951 - protein, 8 aa, Artificial Sequence
  Peptide Derived from Human Papillomavirus
RIRELRHY

SEQ ID NO: 25952 - protein, 10 aa, Artificial Sequence
  Peptide Derived from Human Papillomavirus
RLQRRRETQV

SEQ ID NO: 25953 - protein, 8 aa, Artificial Sequence
  Peptide Derived from Human Papillomavirus
RPYKLPDL

SEQ ID NO: 25954 - protein, 11 aa, Artificial Sequence
  Peptide Derived from Human Papillomavirus
SIPHAACHKCI

SEQ ID NO: 25955 - protein, 10 aa, Artificial Sequence
  Peptide Derived from Human Papillomavirus
SLQDIEITCV

SEQ ID NO: 25956 - protein, 11 aa, Artificial Sequence
  Peptide Derived from Human Papillomavirus
SLQDIEITCVY

SEQ ID NO: 25957 - protein, 10 aa, Artificial Sequence
  Peptide Derived from Human Papillomavirus
SVYGDTLEKL

SEQ ID NO: 25958 - protein, 10 aa, Artificial Sequence
  Peptide Derived from Human Papillomavirus
TLEKLTNTGL

SEQ ID NO: 25959 - protein, 11 aa, Artificial Sequence
  Peptide Derived from Human Papillomavirus
TLEKLTNTGLY

SEQ ID NO: 25960 - protein, 8 aa, Artificial Sequence
  Peptide Derived from Human Papillomavirus
TVLELTEV

SEQ ID NO: 25961 - protein, 9 aa, Artificial Sequence
  Peptide Derived from Human Papillomavirus
TVLELTEVF

SEQ ID NO: 25962 - protein, 11 aa, Artificial Sequence
  Peptide Derived from Human Papillomavirus
TVLELTEVFEF

SEQ ID NO: 25963 - protein, 8 aa, Artificial Sequence
  Peptide Derived from Human Papillomavirus
VLELTEVF

SEQ ID NO: 25964 - protein, 10 aa, Artificial Sequence
  Peptide Derived from Human Papillomavirus
VLELTEVFEF

SEQ ID NO: 25965 - protein, 11 aa, Artificial Sequence
  Peptide Derived from Human Papillomavirus
VLELTEVFEFA

SEQ ID NO: 25966 - protein, 10 aa, Artificial Sequence
  Peptide Derived from Human Papillomavirus
VVYRDSIPHA

SEQ ID NO: 25967 - protein, 11 aa, Artificial Sequence
  Peptide Derived from Human Papillomavirus
VVYRDSIPHAA

SEQ ID NO: 25968 - protein, 8 aa, Artificial Sequence
  Peptide Derived from Human Papillomavirus
CMCCKCEA

SEQ ID NO: 25969 - protein, 10 aa, Artificial Sequence
  Peptide Derived from Human Papillomavirus
CMCCKCEARI

SEQ ID NO: 25970 - protein, 8 aa, Artificial Sequence
  Peptide Derived from Human Papillomavirus
DLLCHEQL

SEQ ID NO: 25971 - protein, 8 aa, Artificial Sequence
  Peptide Derived from Human Papillomavirus
DLRAFQQL

SEQ ID NO: 25972 - protein, 9 aa, Artificial Sequence
  Peptide Derived from Human Papillomavirus
DLRAFQQLF

SEQ ID NO: 25973 - protein, 10 aa, Artificial Sequence
  Peptide Derived from Human Papillomavirus
DLRAFQQLFL

SEQ ID NO: 25974 - protein, 10 aa, Artificial Sequence
  Peptide Derived from Human Papillomavirus
EIDGVNHQHL

SEQ ID NO: 25975 - protein, 8 aa, Artificial Sequence
  Peptide Derived from Human Papillomavirus
EPQNEIPV

SEQ ID NO: 25976 - protein, 10 aa, Artificial Sequence
  Peptide Derived from Human Papillomavirus
EPQNEIPVDL

SEQ ID NO: 25977 - protein, 11 aa, Artificial Sequence
  Peptide Derived from Human Papillomavirus
EPQNEIPVDLL

SEQ ID NO: 25978 - protein, 8 aa, Artificial Sequence
  Peptide Derived from Human Papillomavirus
EPQRHTML

SEQ ID NO: 25979 - protein, 10 aa, Artificial Sequence
  Peptide Derived from Human Papillomavirus
EPQRHTMLCM

SEQ ID NO: 25980 - protein, 8 aa, Artificial Sequence
  Peptide Derived from Human Papillomavirus
FLNTLSFV

SEQ ID NO: 25981 - protein, 11 aa, Artificial Sequence
  Peptide Derived from Human Papillomavirus
FLNTLSFVCPW

SEQ ID NO: 25982 - protein, 9 aa, Artificial Sequence
  Peptide Derived from Human Papillomavirus
FQQLFLNTL

SEQ ID NO: 25983 - protein, 11 aa, Artificial Sequence
  Peptide Derived from Human Papillomavirus
FQQLFLNTLSF

SEQ ID NO: 25984 - protein, 9 aa, Artificial Sequence
  Peptide Derived from Human Papillomavirus
GPKATLQDI

SEQ ID NO: 25985 - protein, 10 aa, Artificial Sequence
  Peptide Derived from Human Papillomavirus
GPKATLQDIV

SEQ ID NO: 25986 - protein, 11 aa, Artificial Sequence
  Peptide Derived from Human Papillomavirus
GPKATLQDIVL

SEQ ID NO: 25987 - protein, 9 aa, Artificial Sequence
  Peptide Derived from Human Papillomavirus
GVNHQHLPA

SEQ ID NO: 25988 - protein, 8 aa, Artificial Sequence
  Peptide Derived from Human Papillomavirus
HLEPQNEI

SEQ ID NO: 25989 - protein, 10 aa, Artificial Sequence
  Peptide Derived from Human Papillomavirus
HLEPQNEIPV

SEQ ID NO: 25990 - protein, 9 aa, Artificial Sequence
  Peptide Derived from Human Papillomavirus
HQHLPARRA

SEQ ID NO: 25991 - protein, 11 aa, Artificial Sequence
  Peptide Derived from Human Papillomavirus
IPVDLLCHEQL

SEQ ID NO: 25992 - protein, 11 aa, Artificial Sequence
  Peptide Derived from Human Papillomavirus
IVLHLEPQNEI

SEQ ID NO: 25993 - protein, 8 aa, Artificial Sequence
  Peptide Derived from Human Papillomavirus
KLVVESSA

SEQ ID NO: 25994 - protein, 11 aa, Artificial Sequence
  Peptide Derived from Human Papillomavirus
KLVVESSADDL

SEQ ID NO: 25995 - protein, 8 aa, Artificial Sequence
  Peptide Derived from Human Papillomavirus
LQDIVLHL

SEQ ID NO: 25996 - protein, 10 aa, Artificial Sequence
  Peptide Derived from Human Papillomavirus
LVVESSADDL

SEQ ID NO: 25997 - protein, 10 aa, Artificial Sequence
  Peptide Derived from Human Papillomavirus
MLCMCCKCEA

SEQ ID NO: 25998 - protein, 9 aa, Artificial Sequence
  Peptide Derived from Human Papillomavirus
PQNEIPVDL

SEQ ID NO: 25999 - protein, 10 aa, Artificial Sequence
  Peptide Derived from Human Papillomavirus
PQNEIPVDLL

SEQ ID NO: 26000 - protein, 9 aa, Artificial Sequence
  Peptide Derived from Human Papillomavirus
PQRHTMLCM

SEQ ID NO: 26001 - protein, 10 aa, Artificial Sequence
  Peptide Derived from Human Papillomavirus
PVDLLCHEQL

SEQ ID NO: 26002 - protein, 9 aa, Artificial Sequence
  Peptide Derived from Human Papillomavirus
QLFLNTLSF

SEQ ID NO: 26003 - protein, 10 aa, Artificial Sequence
  Peptide Derived from Human Papillomavirus
QLFLNTLSFV

SEQ ID NO: 26004 - protein, 8 aa, Artificial Sequence
  Peptide Derived from Human Papillomavirus
QQLFLNTL

SEQ ID NO: 26005 - protein, 10 aa, Artificial Sequence
  Peptide Derived from Human Papillomavirus
QQLFLNTLSF

SEQ ID NO: 26006 - protein, 11 aa, Artificial Sequence
  Peptide Derived from Human Papillomavirus
QQLFLNTLSFV

SEQ ID NO: 26007 - protein, 10 aa, Artificial Sequence
  Peptide Derived from Human Papillomavirus
RIKLVVESSA

SEQ ID NO: 26008 - protein, 9 aa, Artificial Sequence
  Peptide Derived from Human Papillomavirus
TLQDIVLHL

SEQ ID NO: 26009 - protein, 8 aa, Artificial Sequence
  Peptide Derived from Human Papillomavirus
TLSFVCPW

SEQ ID NO: 26010 - protein, 10 aa, Artificial Sequence
  Peptide Derived from Human Papillomavirus
TLSFVCPWCA

SEQ ID NO: 26011 - protein, 11 aa, Artificial Sequence
  Peptide Derived from Human Papillomavirus
TMLCMCCKCEA

SEQ ID NO: 26012 - protein, 10 aa, Artificial Sequence
  Peptide Derived from Human Papillomavirus
VLHLEPQNEI

SEQ ID NO: 26013 - protein, 9 aa, Artificial Sequence
  Peptide Derived from Human Papillomavirus
VVESSADDL

SEQ ID NO: 26014 - protein, 11 aa, Artificial Sequence
  Peptide Derived from Human Papillomavirus
VVESSADDLRA

SEQ ID NO: 26015 - protein, 11 aa, Artificial Sequence
  Peptide Derived from Human Papillomavirus
AIGEHWAKGTA

SEQ ID NO: 26016 - protein, 8 aa, Artificial Sequence
  Peptide Derived from Human Papillomavirus
AITCQKDA

SEQ ID NO: 26017 - protein, 9 aa, Artificial Sequence
  Peptide Derived from Human Papillomavirus
AITCQKDAA

SEQ ID NO: 26018 - protein, 11 aa, Artificial Sequence
  Peptide Derived from Human Papillomavirus
AITCQKDAAPA

SEQ ID NO: 26019 - protein, 10 aa, Artificial Sequence
  Peptide Derived from Human Papillomavirus
ALWRPSDNTV

SEQ ID NO: 26020 - protein, 11 aa, Artificial Sequence
  Peptide Derived from Human Papillomavirus
ALWRPSDNTVY

SEQ ID NO: 26021 - protein, 9 aa, Artificial Sequence
  Peptide Derived from Human Papillomavirus
APAENKDPY

SEQ ID NO: 26022 - protein, 8 aa, Artificial Sequence
  Peptide Derived from Human Papillomavirus
APAIGEHW

SEQ ID NO: 26023 - protein, 9 aa, Artificial Sequence
  Peptide Derived from Human Papillomavirus
APAIGEHWA

SEQ ID NO: 26024 - protein, 11 aa, Artificial Sequence
  Peptide Derived from Human Papillomavirus
APSATTSSKPA

SEQ ID NO: 26025 - protein, 8 aa, Artificial Sequence
  Peptide Derived from Human Papillomavirus
AQGHNNGV

SEQ ID NO: 26026 - protein, 10 aa, Artificial Sequence
  Peptide Derived from Human Papillomavirus
AQGHNNGVCW

SEQ ID NO: 26027 - protein, 8 aa, Artificial Sequence
  Peptide Derived from Human Papillomavirus
CILGCAPA

SEQ ID NO: 26028 - protein, 9 aa, Artificial Sequence
  Peptide Derived from Human Papillomavirus
CILGCAPAI

SEQ ID NO: 26029 - protein, 8 aa, Artificial Sequence
  Peptide Derived from Human Papillomavirus
CLRREQLF

SEQ ID NO: 26030 - protein, 9 aa, Artificial Sequence
  Peptide Derived from Human Papillomavirus
CLRREQLFA

SEQ ID NO: 26031 - protein, 8 aa, Artificial Sequence
  Peptide Derived from Human Papillomavirus
CLYTRVLI

SEQ ID NO: 26032 - protein, 9 aa, Artificial Sequence
  Peptide Derived from Human Papillomavirus
CLYTRVLIL

SEQ ID NO: 26033 - protein, 11 aa, Artificial Sequence
  Peptide Derived from Human Papillomavirus
CLYTRVLILHY

SEQ ID NO: 26034 - protein, 10 aa, Artificial Sequence
  Peptide Derived from Human Papillomavirus
CPPLELKNTV

SEQ ID NO: 26035 - protein, 11 aa, Artificial Sequence
  Peptide Derived from Human Papillomavirus
CPPLELKNTVL

SEQ ID NO: 26036 - protein, 8 aa, Artificial Sequence
  Peptide Derived from Human Papillomavirus
CQKDAAPA

SEQ ID NO: 26037 - protein, 10 aa, Artificial Sequence
  Peptide Derived from Human Papillomavirus
CQSICKYPDY

SEQ ID NO: 26038 - protein, 11 aa, Artificial Sequence
  Peptide Derived from Human Papillomavirus
CQSICKYPDYL

SEQ ID NO: 26039 - protein, 11 aa, Artificial Sequence
  Peptide Derived from Human Papillomavirus
CVYSPSPSGSI

SEQ ID NO: 26040 - protein, 9 aa, Artificial Sequence
  Peptide Derived from Human Papillomavirus
DICQSICKY

SEQ ID NO: 26041 - protein, 8 aa, Artificial Sequence
  Peptide Derived from Human Papillomavirus
DIPKVSAY

SEQ ID NO: 26042 - protein, 10 aa, Artificial Sequence
  Peptide Derived from Human Papillomavirus
DIPKVSAYQY

SEQ ID NO: 26043 - protein, 11 aa, Artificial Sequence
  Peptide Derived from Human Papillomavirus
DLDQYPLGRKF

SEQ ID NO: 26044 - protein, 8 aa, Artificial Sequence
  Peptide Derived from Human Papillomavirus
DLKEKFSL

SEQ ID NO: 26045 - protein, 10 aa, Artificial Sequence
  Peptide Derived from Human Papillomavirus
DLKEKFSLDL

SEQ ID NO: 26046 - protein, 8 aa, Artificial Sequence
  Peptide Derived from Human Papillomavirus
DLQFIFQL

SEQ ID NO: 26047 - protein, 11 aa, Artificial Sequence
  Peptide Derived from Human Papillomavirus
DLQFIFQLCTI

SEQ ID NO: 26048 - protein, 9 aa, Artificial Sequence
  Peptide Derived from Human Papillomavirus
DMVDTGYGA

SEQ ID NO: 26049 - protein, 10 aa, Artificial Sequence
  Peptide Derived from Human Papillomavirus
DMVDTGYGAM

SEQ ID NO: 26050 - protein, 8 aa, Artificial Sequence
  Peptide Derived from Human Papillomavirus
DPYDKLKF

SEQ ID NO: 26051 - protein, 9 aa, Artificial Sequence
  Peptide Derived from Human Papillomavirus
DPYDKLKFW

SEQ ID NO: 26052 - protein, 11 aa, Artificial Sequence
  Peptide Derived from Human Papillomavirus
DPYDKLKFWNV

SEQ ID NO: 26053 - protein, 8 aa, Artificial Sequence
  Peptide Derived from Human Papillomavirus
DPYGDSMF

SEQ ID NO: 26054 - protein, 9 aa, Artificial Sequence
  Peptide Derived from Human Papillomavirus
DPYGDSMFF

SEQ ID NO: 26055 - protein, 11 aa, Artificial Sequence
  Peptide Derived from Human Papillomavirus
DPYGDSMFFCL

SEQ ID NO: 26056 - protein, 9 aa, Artificial Sequence
  Peptide Derived from Human Papillomavirus
DQYPLGRKF

SEQ ID NO: 26057 - protein, 10 aa, Artificial Sequence
  Peptide Derived from Human Papillomavirus
DQYPLGRKFL

SEQ ID NO: 26058 - protein, 11 aa, Artificial Sequence
  Peptide Derived from Human Papillomavirus
DQYPLGRKFLV

SEQ ID NO: 26059 - protein, 9 aa, Artificial Sequence
  Peptide Derived from Human Papillomavirus
DVMSYIHSM

SEQ ID NO: 26060 - protein, 8 aa, Artificial Sequence
  Peptide Derived from Human Papillomavirus
DVRDNVSV

SEQ ID NO: 26061 - protein, 10 aa, Artificial Sequence
  Peptide Derived from Human Papillomavirus
DVRDNVSVDY

SEQ ID NO: 26062 - protein, 8 aa, Artificial Sequence
  Peptide Derived from Human Papillomavirus
EIGRGQPL

SEQ ID NO: 26063 - protein, 10 aa, Artificial Sequence
  Peptide Derived from Human Papillomavirus
EIGRGQPLGV

SEQ ID NO: 26064 - protein, 8 aa, Artificial Sequence
  Peptide Derived from Human Papillomavirus
EQLFARHF

SEQ ID NO: 26065 - protein, 9 aa, Artificial Sequence
  Peptide Derived from Human Papillomavirus
EQLFARHFW

SEQ ID NO: 26066 - protein, 10 aa, Artificial Sequence
  Peptide Derived from Human Papillomavirus
EVPLDICQSI

SEQ ID NO: 26067 - protein, 8 aa, Artificial Sequence
  Peptide Derived from Human Papillomavirus
FIFQLCTI

SEQ ID NO: 26068 - protein, 10 aa, Artificial Sequence
  Peptide Derived from Human Papillomavirus
FIFQLCTITL

SEQ ID NO: 26069 - protein, 8 aa, Artificial Sequence
  Peptide Derived from Human Papillomavirus
FLRNVNVF

SEQ ID NO: 26070 - protein, 10 aa, Artificial Sequence
  Peptide Derived from Human Papillomavirus
FLRNVNVFPI

SEQ ID NO: 26071 - protein, 11 aa, Artificial Sequence
  Peptide Derived from Human Papillomavirus
FLRNVNVFPIF

SEQ ID NO: 26072 - protein, 8 aa, Artificial Sequence
  Peptide Derived from Human Papillomavirus
FPIFLQMA

SEQ ID NO: 26073 - protein, 9 aa, Artificial Sequence
  Peptide Derived from Human Papillomavirus
FPIFLQMAL

SEQ ID NO: 26074 - protein, 10 aa, Artificial Sequence
  Peptide Derived from Human Papillomavirus
FPIFLQMALW

SEQ ID NO: 26075 - protein, 8 aa, Artificial Sequence
  Peptide Derived from Human Papillomavirus
FQLCTITL

SEQ ID NO: 26076 - protein, 10 aa, Artificial Sequence
  Peptide Derived from Human Papillomavirus
FQLCTITLTA

SEQ ID NO: 26077 - protein, 8 aa, Artificial Sequence
  Peptide Derived from Human Papillomavirus
GLPDTSIY

SEQ ID NO: 26078 - protein, 8 aa, Artificial Sequence
  Peptide Derived from Human Papillomavirus
GLRRKPTI

SEQ ID NO: 26079 - protein, 8 aa, Artificial Sequence
  Peptide Derived from Human Papillomavirus
GLSGHPFY

SEQ ID NO: 26080 - protein, 11 aa, Artificial Sequence
  Peptide Derived from Human Papillomavirus
GLSGHPFYNKL

SEQ ID NO: 26081 - protein, 10 aa, Artificial Sequence
  Peptide Derived from Human Papillomavirus
GMPASPGSCV

SEQ ID NO: 26082 - protein, 11 aa, Artificial Sequence
  Peptide Derived from Human Papillomavirus
GMPASPGSCVY

SEQ ID NO: 26083 - protein, 9 aa, Artificial Sequence
  Peptide Derived from Human Papillomavirus
GPLYHPRPL

SEQ ID NO: 26084 - protein, 11 aa, Artificial Sequence
  Peptide Derived from Human Papillomavirus
GPLYHPRPLPL

SEQ ID NO: 26085 - protein, 10 aa, Artificial Sequence
  Peptide Derived from Human Papillomavirus
GPRKRSAPSA

SEQ ID NO: 26086 - protein, 8 aa, Artificial Sequence
  Peptide Derived from Human Papillomavirus
GQPLGVGL

SEQ ID NO: 26087 - protein, 8 aa, Artificial Sequence
  Peptide Derived from Human Papillomavirus
GQYDATKF

SEQ ID NO: 26088 - protein, 11 aa, Artificial Sequence
  Peptide Derived from Human Papillomavirus
GQYDATKFKQY

SEQ ID NO: 26089 - protein, 8 aa, Artificial Sequence
  Peptide Derived from Human Papillomavirus
GVCWHNQL

SEQ ID NO: 26090 - protein, 9 aa, Artificial Sequence
  Peptide Derived from Human Papillomavirus
GVCWHNQLF

SEQ ID NO: 26091 - protein, 10 aa, Artificial Sequence
  Peptide Derived from Human Papillomavirus
GVCWHNQLFV

SEQ ID NO: 26092 - protein, 10 aa, Artificial Sequence
  Peptide Derived from Human Papillomavirus
GVEIGRGQPL

SEQ ID NO: 26093 - protein, 9 aa, Artificial Sequence
  Peptide Derived from Human Papillomavirus
GVGLSGHPF

SEQ ID NO: 26094 - protein, 10 aa, Artificial Sequence
  Peptide Derived from Human Papillomavirus
GVGLSGHPFY

SEQ ID NO: 26095 - protein, 10 aa, Artificial Sequence
  Peptide Derived from Human Papillomavirus
GVPPPPTTSL

SEQ ID NO: 26096 - protein, 11 aa, Artificial Sequence
  Peptide Derived from Human Papillomavirus
GVPPPPTTSLV

SEQ ID NO: 26097 - protein, 8 aa, Artificial Sequence
  Peptide Derived from Human Papillomavirus
HIIICGHY

SEQ ID NO: 26098 - protein, 9 aa, Artificial Sequence
  Peptide Derived from Human Papillomavirus
HIIICGHYI

SEQ ID NO: 26099 - protein, 10 aa, Artificial Sequence
  Peptide Derived from Human Papillomavirus
HIIICGHYII

SEQ ID NO: 26100 - protein, 11 aa, Artificial Sequence
  Peptide Derived from Human Papillomavirus
HIIICGHYIIL

SEQ ID NO: 26101 - protein, 9 aa, Artificial Sequence
  Peptide Derived from Human Papillomavirus
HLLPLYGPL

SEQ ID NO: 26102 - protein, 10 aa, Artificial Sequence
  Peptide Derived from Human Papillomavirus
HLLPLYGPLY

SEQ ID NO: 26103 - protein, 10 aa, Artificial Sequence
  Peptide Derived from Human Papillomavirus
HPRPLPLHSI

SEQ ID NO: 26104 - protein, 11 aa, Artificial Sequence
  Peptide Derived from Human Papillomavirus
HPRPLPLHSIL

SEQ ID NO: 26105 - protein, 9 aa, Artificial Sequence
  Peptide Derived from Human Papillomavirus
HVEEYDLQF

SEQ ID NO: 26106 - protein, 10 aa, Artificial Sequence
  Peptide Derived from Human Papillomavirus
HVEEYDLQFI

SEQ ID NO: 26107 - protein, 11 aa, Artificial Sequence
  Peptide Derived from Human Papillomavirus
HVEEYDLQFIF

SEQ ID NO: 26108 - protein, 8 aa, Artificial Sequence
  Peptide Derived from Human Papillomavirus
IICGHYII

SEQ ID NO: 26109 - protein, 9 aa, Artificial Sequence
  Peptide Derived from Human Papillomavirus
IICGHYIIL

SEQ ID NO: 26110 - protein, 10 aa, Artificial Sequence
  Peptide Derived from Human Papillomavirus
IICGHYIILF

SEQ ID NO: 26111 - protein, 11 aa, Artificial Sequence
  Peptide Derived from Human Papillomavirus
IICGHYIILFL

SEQ ID NO: 26112 - protein, 8 aa, Artificial Sequence
  Peptide Derived from Human Papillomavirus
IIICGHYI

SEQ ID NO: 26113 - protein, 9 aa, Artificial Sequence
  Peptide Derived from Human Papillomavirus
IIICGHYII

SEQ ID NO: 26114 - protein, 10 aa, Artificial Sequence
  Peptide Derived from Human Papillomavirus
IIICGHYIIL

SEQ ID NO: 26115 - protein, 11 aa, Artificial Sequence
  Peptide Derived from Human Papillomavirus
IIICGHYIILF

SEQ ID NO: 26116 - protein, 8 aa, Artificial Sequence
  Peptide Derived from Human Papillomavirus
IILFLRNV

SEQ ID NO: 26117 - protein, 10 aa, Artificial Sequence
  Peptide Derived from Human Papillomavirus
IILFLRNVNV

SEQ ID NO: 26118 - protein, 11 aa, Artificial Sequence
  Peptide Derived from Human Papillomavirus
IILFLRNVNVF

SEQ ID NO: 26119 - protein, 9 aa, Artificial Sequence
  Peptide Derived from Human Papillomavirus
ILEDWNFGV

SEQ ID NO: 26120 - protein, 9 aa, Artificial Sequence
  Peptide Derived from Human Papillomavirus
ILFLRNVNV

SEQ ID NO: 26121 - protein, 10 aa, Artificial Sequence
  Peptide Derived from Human Papillomavirus
ILFLRNVNVF

SEQ ID NO: 26122 - protein, 8 aa, Artificial Sequence
  Peptide Derived from Human Papillomavirus
ILGCAPAI

SEQ ID NO: 26123 - protein, 9 aa, Artificial Sequence
  Peptide Derived from Human Papillomavirus
ILHYHLLPL

SEQ ID NO: 26124 - protein, 10 aa, Artificial Sequence
  Peptide Derived from Human Papillomavirus
ILHYHLLPLY

SEQ ID NO: 26125 - protein, 8 aa, Artificial Sequence
  Peptide Derived from Human Papillomavirus
ILVYMVHI

SEQ ID NO: 26126 - protein, 9 aa, Artificial Sequence
  Peptide Derived from Human Papillomavirus
ILVYMVHII

SEQ ID NO: 26127 - protein, 10 aa, Artificial Sequence
  Peptide Derived from Human Papillomavirus
ILVYMVHIII

SEQ ID NO: 26128 - protein, 9 aa, Artificial Sequence
  Peptide Derived from Human Papillomavirus
IPKVSAYQY

SEQ ID NO: 26129 - protein, 11 aa, Artificial Sequence
  Peptide Derived from Human Papillomavirus
IPKVSAYQYRV

SEQ ID NO: 26130 - protein, 8 aa, Artificial Sequence
  Peptide Derived from Human Papillomavirus
IVTSDSQL

SEQ ID NO: 26131 - protein, 9 aa, Artificial Sequence
  Peptide Derived from Human Papillomavirus
IVTSDSQLF

SEQ ID NO: 26132 - protein, 10 aa, Artificial Sequence
  Peptide Derived from Human Papillomavirus
KLDDTESSHA

SEQ ID NO: 26133 - protein, 11 aa, Artificial Sequence
  Peptide Derived from Human Papillomavirus
KLDDTESSHAA

SEQ ID NO: 26134 - protein, 9 aa, Artificial Sequence
  Peptide Derived from Human Papillomavirus
KLKFWNVDL

SEQ ID NO: 26135 - protein, 8 aa, Artificial Sequence
  Peptide Derived from Human Papillomavirus
KPAKRVRV

SEQ ID NO: 26136 - protein, 10 aa, Artificial Sequence
  Peptide Derived from Human Papillomavirus
KPAKRVRVRA

SEQ ID NO: 26137 - protein, 11 aa, Artificial Sequence
  Peptide Derived from Human Papillomavirus
KPTIGPRKRSA

SEQ ID NO: 26138 - protein, 8 aa, Artificial Sequence
  Peptide Derived from Human Papillomavirus
KPYWLHKA

SEQ ID NO: 26139 - protein, 9 aa, Artificial Sequence
  Peptide Derived from Human Papillomavirus
KQDIPKVSA

SEQ ID NO: 26140 - protein, 10 aa, Artificial Sequence
  Peptide Derived from Human Papillomavirus
KQDIPKVSAY

SEQ ID NO: 26141 - protein, 8 aa, Artificial Sequence
  Peptide Derived from Human Papillomavirus
KQTQLCIL

SEQ ID NO: 26142 - protein, 11 aa, Artificial Sequence
  Peptide Derived from Human Papillomavirus
KQTQLCILGCA

SEQ ID NO: 26143 - protein, 10 aa, Artificial Sequence
  Peptide Derived from Human Papillomavirus
KQYSRHVEEY

SEQ ID NO: 26144 - protein, 9 aa, Artificial Sequence
  Peptide Derived from Human Papillomavirus
KVSAYQYRV

SEQ ID NO: 26145 - protein, 10 aa, Artificial Sequence
  Peptide Derived from Human Papillomavirus
KVSAYQYRVF

SEQ ID NO: 26146 - protein, 8 aa, Artificial Sequence
  Peptide Derived from Human Papillomavirus
LILHYHLL

SEQ ID NO: 26147 - protein, 10 aa, Artificial Sequence
  Peptide Derived from Human Papillomavirus
LILHYHLLPL

SEQ ID NO: 26148 - protein, 11 aa, Artificial Sequence
  Peptide Derived from Human Papillomavirus
LILHYHLLPLY

SEQ ID NO: 26149 - protein, 8 aa, Artificial Sequence
  Peptide Derived from Human Papillomavirus
LLPLYGPL

SEQ ID NO: 26150 - protein, 9 aa, Artificial Sequence
  Peptide Derived from Human Papillomavirus
LLPLYGPLY

SEQ ID NO: 26151 - protein, 8 aa, Artificial Sequence
  Peptide Derived from Human Papillomavirus
LLTVGNPY

SEQ ID NO: 26152 - protein, 9 aa, Artificial Sequence
  Peptide Derived from Human Papillomavirus
LLTVGNPYF

SEQ ID NO: 26153 - protein, 11 aa, Artificial Sequence
  Peptide Derived from Human Papillomavirus
LLTVGNPYFRV

SEQ ID NO: 26154 - protein, 9 aa, Artificial Sequence
  Peptide Derived from Human Papillomavirus
LPDPNKFGL

SEQ ID NO: 26155 - protein, 8 aa, Artificial Sequence
  Peptide Derived from Human Papillomavirus
LPLHSILV

SEQ ID NO: 26156 - protein, 9 aa, Artificial Sequence
  Peptide Derived from Human Papillomavirus
LPLHSILVY

SEQ ID NO: 26157 - protein, 10 aa, Artificial Sequence
  Peptide Derived from Human Papillomavirus
LPLHSILVYM

SEQ ID NO: 26158 - protein, 11 aa, Artificial Sequence
  Peptide Derived from Human Papillomavirus
LPLHSILVYMV

SEQ ID NO: 26159 - protein, 8 aa, Artificial Sequence
  Peptide Derived from Human Papillomavirus
LPLYGPLY

SEQ ID NO: 26160 - protein, 9 aa, Artificial Sequence
  Peptide Derived from Human Papillomavirus
LPPPSVARV

SEQ ID NO: 26161 - protein, 10 aa, Artificial Sequence
  Peptide Derived from Human Papillomavirus
LPPPSVARVV

SEQ ID NO: 26162 - protein, 8 aa, Artificial Sequence
  Peptide Derived from Human Papillomavirus
LQDTKCEV

SEQ ID NO: 26163 - protein, 10 aa, Artificial Sequence
  Peptide Derived from Human Papillomavirus
LQDTKCEVPL

SEQ ID NO: 26164 - protein, 10 aa, Artificial Sequence
  Peptide Derived from Human Papillomavirus
LQFIFQLCTI

SEQ ID NO: 26165 - protein, 8 aa, Artificial Sequence
  Peptide Derived from Human Papillomavirus
LQMSADPY

SEQ ID NO: 26166 - protein, 8 aa, Artificial Sequence
  Peptide Derived from Human Papillomavirus
LVDTYRFV

SEQ ID NO: 26167 - protein, 11 aa, Artificial Sequence
  Peptide Derived from Human Papillomavirus
LVDTYRFVQSV

SEQ ID NO: 26168 - protein, 8 aa, Artificial Sequence
  Peptide Derived from Human Papillomavirus
LVWACAGV

SEQ ID NO: 26169 - protein, 10 aa, Artificial Sequence
  Peptide Derived from Human Papillomavirus
LVWACAGVEI

SEQ ID NO: 26170 - protein, 8 aa, Artificial Sequence
  Peptide Derived from Human Papillomavirus
LVYMVHII

SEQ ID NO: 26171 - protein, 9 aa, Artificial Sequence
  Peptide Derived from Human Papillomavirus
LVYMVHIII

SEQ ID NO: 26172 - protein, 9 aa, Artificial Sequence
  Peptide Derived from Human Papillomavirus
MPASPGSCV

SEQ ID NO: 26173 - protein, 10 aa, Artificial Sequence
  Peptide Derived from Human Papillomavirus
MPASPGSCVY

SEQ ID NO: 26174 - protein, 8 aa, Artificial Sequence
  Peptide Derived from Human Papillomavirus
MVDTGYGA

SEQ ID NO: 26175 - protein, 9 aa, Artificial Sequence
  Peptide Derived from Human Papillomavirus
MVDTGYGAM

SEQ ID NO: 26176 - protein, 11 aa, Artificial Sequence
  Peptide Derived from Human Papillomavirus
MVDTGYGAMDF

SEQ ID NO: 26177 - protein, 10 aa, Artificial Sequence
  Peptide Derived from Human Papillomavirus
MVHIIICGHY

SEQ ID NO: 26178 - protein, 11 aa, Artificial Sequence
  Peptide Derived from Human Papillomavirus
MVHIIICGHYI

SEQ ID NO: 26179 - protein, 8 aa, Artificial Sequence
  Peptide Derived from Human Papillomavirus
NPETQRLV

SEQ ID NO: 26180 - protein, 9 aa, Artificial Sequence
  Peptide Derived from Human Papillomavirus
NPETQRLVW

SEQ ID NO: 26181 - protein, 10 aa, Artificial Sequence
  Peptide Derived from Human Papillomavirus
NPETQRLVWA

SEQ ID NO: 26182 - protein, 8 aa, Artificial Sequence
  Peptide Derived from Human Papillomavirus
NPYFRVPA

SEQ ID NO: 26183 - protein, 8 aa, Artificial Sequence
  Peptide Derived from Human Papillomavirus
NQLFVTVV

SEQ ID NO: 26184 - protein, 8 aa, Artificial Sequence
  Peptide Derived from Human Papillomavirus
NVDLKEKF

SEQ ID NO: 26185 - protein, 10 aa, Artificial Sequence
  Peptide Derived from Human Papillomavirus
NVDLKEKFSL

SEQ ID NO: 26186 - protein, 9 aa, Artificial Sequence
  Peptide Derived from Human Papillomavirus
NVFPIFLQM

SEQ ID NO: 26187 - protein, 10 aa, Artificial Sequence
  Peptide Derived from Human Papillomavirus
NVFPIFLQMA

SEQ ID NO: 26188 - protein, 11 aa, Artificial Sequence
  Peptide Derived from Human Papillomavirus
NVFPIFLQMAL

SEQ ID NO: 26189 - protein, 8 aa, Artificial Sequence
  Peptide Derived from Human Papillomavirus
NVNVFPIF

SEQ ID NO: 26190 - protein, 9 aa, Artificial Sequence
  Peptide Derived from Human Papillomavirus
NVNVFPIFL

SEQ ID NO: 26191 - protein, 11 aa, Artificial Sequence
  Peptide Derived from Human Papillomavirus
NVNVFPIFLQM

SEQ ID NO: 26192 - protein, 10 aa, Artificial Sequence
  Peptide Derived from Human Papillomavirus
NVSEDVRDNV

SEQ ID NO: 26193 - protein, 11 aa, Artificial Sequence
  Peptide Derived from Human Papillomavirus
NVSVDYKQTQL

SEQ ID NO: 26194 - protein, 8 aa, Artificial Sequence
  Peptide Derived from Human Papillomavirus
PIFLQMAL

SEQ ID NO: 26195 - protein, 9 aa, Artificial Sequence
  Peptide Derived from Human Papillomavirus
PIFLQMALW

SEQ ID NO: 26196 - protein, 8 aa, Artificial Sequence
  Peptide Derived from Human Papillomavirus
PLDICQSI

SEQ ID NO: 26197 - protein, 11 aa, Artificial Sequence
  Peptide Derived from Human Papillomavirus
PLDICQSICKY

SEQ ID NO: 26198 - protein, 8 aa, Artificial Sequence
  Peptide Derived from Human Papillomavirus
PLELKNTV

SEQ ID NO: 26199 - protein, 9 aa, Artificial Sequence
  Peptide Derived from Human Papillomavirus
PLELKNTVL

SEQ ID NO: 26200 - protein, 8 aa, Artificial Sequence
  Peptide Derived from Human Papillomavirus
PLGRKFLV

SEQ ID NO: 26201 - protein, 10 aa, Artificial Sequence
  Peptide Derived from Human Papillomavirus
PLGRKFLVQA

SEQ ID NO: 26202 - protein, 11 aa, Artificial Sequence
  Peptide Derived from Human Papillomavirus
PLGVGLSGHPF

SEQ ID NO: 26203 - protein, 8 aa, Artificial Sequence
  Peptide Derived from Human Papillomavirus
PLHSILVY

SEQ ID NO: 26204 - protein, 9 aa, Artificial Sequence
  Peptide Derived from Human Papillomavirus
PLHSILVYM

SEQ ID NO: 26205 - protein, 10 aa, Artificial Sequence
  Peptide Derived from Human Papillomavirus
PLHSILVYMV

SEQ ID NO: 26206 - protein, 8 aa, Artificial Sequence
  Peptide Derived from Human Papillomavirus
PLPLHSIL

SEQ ID NO: 26207 - protein, 9 aa, Artificial Sequence
  Peptide Derived from Human Papillomavirus
PLPLHSILV

SEQ ID NO: 26208 - protein, 10 aa, Artificial Sequence
  Peptide Derived from Human Papillomavirus
PLPLHSILVY

SEQ ID NO: 26209 - protein, 11 aa, Artificial Sequence
  Peptide Derived from Human Papillomavirus
PLPLHSILVYM

SEQ ID NO: 26210 - protein, 10 aa, Artificial Sequence
  Peptide Derived from Human Papillomavirus
PLSQGDCPPL

SEQ ID NO: 26211 - protein, 8 aa, Artificial Sequence
  Peptide Derived from Human Papillomavirus
PLYHPRPL

SEQ ID NO: 26212 - protein, 10 aa, Artificial Sequence
  Peptide Derived from Human Papillomavirus
PLYHPRPLPL

SEQ ID NO: 26213 - protein, 9 aa, Artificial Sequence
  Peptide Derived from Human Papillomavirus
PPLELKNTV

SEQ ID NO: 26214 - protein, 10 aa, Artificial Sequence
  Peptide Derived from Human Papillomavirus
PPLELKNTVL

SEQ ID NO: 26215 - protein, 8 aa, Artificial Sequence
  Peptide Derived from Human Papillomavirus
PPPPTTSL

SEQ ID NO: 26216 - protein, 9 aa, Artificial Sequence
  Peptide Derived from Human Papillomavirus
PPPPTTSLV

SEQ ID NO: 26217 - protein, 8 aa, Artificial Sequence
  Peptide Derived from Human Papillomavirus
PPPSVARV

SEQ ID NO: 26218 - protein, 9 aa, Artificial Sequence
  Peptide Derived from Human Papillomavirus
PPPSVARVV

SEQ ID NO: 26219 - protein, 8 aa, Artificial Sequence
  Peptide Derived from Human Papillomavirus
PPPTTSLV

SEQ ID NO: 26220 - protein, 11 aa, Artificial Sequence
  Peptide Derived from Human Papillomavirus
PPPTTSLVDTY

SEQ ID NO: 26221 - protein, 8 aa, Artificial Sequence
  Peptide Derived from Human Papillomavirus
PPSVARVV

SEQ ID NO: 26222 - protein, 10 aa, Artificial Sequence
  Peptide Derived from Human Papillomavirus
PPTTSLVDTY

SEQ ID NO: 26223 - protein, 11 aa, Artificial Sequence
  Peptide Derived from Human Papillomavirus
PQSLYIKGTGM

SEQ ID NO: 26224 - protein, 8 aa, Artificial Sequence
  Peptide Derived from Human Papillomavirus
PVPGQYDA

SEQ ID NO: 26225 - protein, 11 aa, Artificial Sequence
  Peptide Derived from Human Papillomavirus
PVPGQYDATKF

SEQ ID NO: 26226 - protein, 8 aa, Artificial Sequence
  Peptide Derived from Human Papillomavirus
QLCILGCA

SEQ ID NO: 26227 - protein, 10 aa, Artificial Sequence
  Peptide Derived from Human Papillomavirus
QLCILGCAPA

SEQ ID NO: 26228 - protein, 11 aa, Artificial Sequence
  Peptide Derived from Human Papillomavirus
QLCILGCAPAI

SEQ ID NO: 26229 - protein, 9 aa, Artificial Sequence
  Peptide Derived from Human Papillomavirus
QLCTITLTA

SEQ ID NO: 26230 - protein, 11 aa, Artificial Sequence
  Peptide Derived from Human Papillomavirus
QLCTITLTADV

SEQ ID NO: 26231 - protein, 8 aa, Artificial Sequence
  Peptide Derived from Human Papillomavirus
QLFARHFW

SEQ ID NO: 26232 - protein, 11 aa, Artificial Sequence
  Peptide Derived from Human Papillomavirus
QLFARHFWNRA

SEQ ID NO: 26233 - protein, 8 aa, Artificial Sequence
  Peptide Derived from Human Papillomavirus
QLFNKPYW

SEQ ID NO: 26234 - protein, 9 aa, Artificial Sequence
  Peptide Derived from Human Papillomavirus
QLFNKPYWL

SEQ ID NO: 26235 - protein, 8 aa, Artificial Sequence
  Peptide Derived from Human Papillomavirus
QLPDPNKF

SEQ ID NO: 26236 - protein, 10 aa, Artificial Sequence
  Peptide Derived from Human Papillomavirus
QLPDPNKFGL

SEQ ID NO: 26237 - protein, 11 aa, Artificial Sequence
  Peptide Derived from Human Papillomavirus
QMSADPYGDSM

SEQ ID NO: 26238 - protein, 9 aa, Artificial Sequence
  Peptide Derived from Human Papillomavirus
RLLTVGNPY

SEQ ID NO: 26239 - protein, 10 aa, Artificial Sequence
  Peptide Derived from Human Papillomavirus
RLLTVGNPYF

SEQ ID NO: 26240 - protein, 9 aa, Artificial Sequence
  Peptide Derived from Human Papillomavirus
RLVWACAGV

SEQ ID NO: 26241 - protein, 11 aa, Artificial Sequence
  Peptide Derived from Human Papillomavirus
RLVWACAGVEI

SEQ ID NO: 26242 - protein, 8 aa, Artificial Sequence
  Peptide Derived from Human Papillomavirus
RPLPLHSI

SEQ ID NO: 26243 - protein, 9 aa, Artificial Sequence
  Peptide Derived from Human Papillomavirus
RPLPLHSIL

SEQ ID NO: 26244 - protein, 10 aa, Artificial Sequence
  Peptide Derived from Human Papillomavirus
RPLPLHSILV

SEQ ID NO: 26245 - protein, 11 aa, Artificial Sequence
  Peptide Derived from Human Papillomavirus
RPLPLHSILVY

SEQ ID NO: 26246 - protein, 11 aa, Artificial Sequence
  Peptide Derived from Human Papillomavirus
RPLSQGDCPPL

SEQ ID NO: 26247 - protein, 8 aa, Artificial Sequence
  Peptide Derived from Human Papillomavirus
RPSDNTVY

SEQ ID NO: 26248 - protein, 9 aa, Artificial Sequence
  Peptide Derived from Human Papillomavirus
RPSDNTVYL

SEQ ID NO: 26249 - protein, 9 aa, Artificial Sequence
  Peptide Derived from Human Papillomavirus
RVLILHYHL

SEQ ID NO: 26250 - protein, 10 aa, Artificial Sequence
  Peptide Derived from Human Papillomavirus
RVLILHYHLL

SEQ ID NO: 26251 - protein, 10 aa, Artificial Sequence
  Peptide Derived from Human Papillomavirus
RVQLPDPNKF

SEQ ID NO: 26252 - protein, 8 aa, Artificial Sequence
  Peptide Derived from Human Papillomavirus
RVVNTDDY

SEQ ID NO: 26253 - protein, 9 aa, Artificial Sequence
  Peptide Derived from Human Papillomavirus
RVVNTDDYV

SEQ ID NO: 26254 - protein, 8 aa, Artificial Sequence
  Peptide Derived from Human Papillomavirus
SICKYPDY

SEQ ID NO: 26255 - protein, 9 aa, Artificial Sequence
  Peptide Derived from Human Papillomavirus
SICKYPDYL

SEQ ID NO: 26256 - protein, 11 aa, Artificial Sequence
  Peptide Derived from Human Papillomavirus
SICKYPDYLQM

SEQ ID NO: 26257 - protein, 11 aa, Artificial Sequence
  Peptide Derived from Human Papillomavirus
SIFYHAGSSRL

SEQ ID NO: 26258 - protein, 8 aa, Artificial Sequence
  Peptide Derived from Human Papillomavirus
SILEDWNF

SEQ ID NO: 26259 - protein, 10 aa, Artificial Sequence
  Peptide Derived from Human Papillomavirus
SILEDWNFGV

SEQ ID NO: 26260 - protein, 9 aa, Artificial Sequence
  Peptide Derived from Human Papillomavirus
SILVYMVHI

SEQ ID NO: 26261 - protein, 10 aa, Artificial Sequence
  Peptide Derived from Human Papillomavirus
SILVYMVHII

SEQ ID NO: 26262 - protein, 11 aa, Artificial Sequence
  Peptide Derived from Human Papillomavirus
SILVYMVHIII

SEQ ID NO: 26263 - protein, 9 aa, Artificial Sequence
  Peptide Derived from Human Papillomavirus
SIVTSDSQL

SEQ ID NO: 26264 - protein, 10 aa, Artificial Sequence
  Peptide Derived from Human Papillomavirus
SIVTSDSQLF

SEQ ID NO: 26265 - protein, 10 aa, Artificial Sequence
  Peptide Derived from Human Papillomavirus
SIYNPETQRL

SEQ ID NO: 26266 - protein, 11 aa, Artificial Sequence
  Peptide Derived from Human Papillomavirus
SIYNPETQRLV

SEQ ID NO: 26267 - protein, 9 aa, Artificial Sequence
  Peptide Derived from Human Papillomavirus
SLDLDQYPL

SEQ ID NO: 26268 - protein, 8 aa, Artificial Sequence
  Peptide Derived from Human Papillomavirus
SLVDTYRF

SEQ ID NO: 26269 - protein, 9 aa, Artificial Sequence
  Peptide Derived from Human Papillomavirus
SLVDTYRFV

SEQ ID NO: 26270 - protein, 9 aa, Artificial Sequence
  Peptide Derived from Human Papillomavirus
SLYIKGTGM

SEQ ID NO: 26271 - protein, 11 aa, Artificial Sequence
  Peptide Derived from Human Papillomavirus
SLYIKGTGMPA

SEQ ID NO: 26272 - protein, 11 aa, Artificial Sequence
  Peptide Derived from Human Papillomavirus
SMFFCLRREQL

SEQ ID NO: 26273 - protein, 10 aa, Artificial Sequence
  Peptide Derived from Human Papillomavirus
SMNSSILEDW

SEQ ID NO: 26274 - protein, 8 aa, Artificial Sequence
  Peptide Derived from Human Papillomavirus
SPSPSGSI

SEQ ID NO: 26275 - protein, 9 aa, Artificial Sequence
  Peptide Derived from Human Papillomavirus
SPSPSGSIV

SEQ ID NO: 26276 - protein, 9 aa, Artificial Sequence
  Peptide Derived from Human Papillomavirus
SPVPGQYDA

SEQ ID NO: 26277 - protein, 8 aa, Artificial Sequence
  Peptide Derived from Human Papillomavirus
SQGDCPPL

SEQ ID NO: 26278 - protein, 10 aa, Artificial Sequence
  Peptide Derived from Human Papillomavirus
SQGDCPPLEL

SEQ ID NO: 26279 - protein, 8 aa, Artificial Sequence
  Peptide Derived from Human Papillomavirus
SQLFNKPY

SEQ ID NO: 26280 - protein, 9 aa, Artificial Sequence
  Peptide Derived from Human Papillomavirus
SQLFNKPYW

SEQ ID NO: 26281 - protein, 10 aa, Artificial Sequence
  Peptide Derived from Human Papillomavirus
SQLFNKPYWL

SEQ ID NO: 26282 - protein, 10 aa, Artificial Sequence
  Peptide Derived from Human Papillomavirus
SVAITCQKDA

SEQ ID NO: 26283 - protein, 11 aa, Artificial Sequence
  Peptide Derived from Human Papillomavirus
SVAITCQKDAA

SEQ ID NO: 26284 - protein, 11 aa, Artificial Sequence
  Peptide Derived from Human Papillomavirus
SVARVVNTDDY

SEQ ID NO: 26285 - protein, 9 aa, Artificial Sequence
  Peptide Derived from Human Papillomavirus
SVDYKQTQL

SEQ ID NO: 26286 - protein, 11 aa, Artificial Sequence
  Peptide Derived from Human Papillomavirus
SVDYKQTQLCI

SEQ ID NO: 26287 - protein, 10 aa, Artificial Sequence
  Peptide Derived from Human Papillomavirus
TICASTQSPV

SEQ ID NO: 26288 - protein, 9 aa, Artificial Sequence
  Peptide Derived from Human Papillomavirus
TIGPRKRSA

SEQ ID NO: 26289 - protein, 8 aa, Artificial Sequence
  Peptide Derived from Human Papillomavirus
TITLTADV

SEQ ID NO: 26290 - protein, 9 aa, Artificial Sequence
  Peptide Derived from Human Papillomavirus
TITLTADVM

SEQ ID NO: 26291 - protein, 11 aa, Artificial Sequence
  Peptide Derived from Human Papillomavirus
TITLTADVMSY

SEQ ID NO: 26292 - protein, 9 aa, Artificial Sequence
  Peptide Derived from Human Papillomavirus
TLQDTKCEV

SEQ ID NO: 26293 - protein, 11 aa, Artificial Sequence
  Peptide Derived from Human Papillomavirus
TLQDTKCEVPL

SEQ ID NO: 26294 - protein, 9 aa, Artificial Sequence
  Peptide Derived from Human Papillomavirus
TLTADVMSY

SEQ ID NO: 26295 - protein, 10 aa, Artificial Sequence
  Peptide Derived from Human Papillomavirus
TLTADVMSYI

SEQ ID NO: 26296 - protein, 10 aa, Artificial Sequence
  Peptide Derived from Human Papillomavirus
TMGDTVPQSL

SEQ ID NO: 26297 - protein, 11 aa, Artificial Sequence
  Peptide Derived from Human Papillomavirus
TMGDTVPQSLY

SEQ ID NO: 26298 - protein, 8 aa, Artificial Sequence
  Peptide Derived from Human Papillomavirus
TPSTNLTI

SEQ ID NO: 26299 - protein, 10 aa, Artificial Sequence
  Peptide Derived from Human Papillomavirus
TPSTNLTICA

SEQ ID NO: 26300 - protein, 9 aa, Artificial Sequence
  Peptide Derived from Human Papillomavirus
TPTSIFYHA

SEQ ID NO: 26301 - protein, 9 aa, Artificial Sequence
  Peptide Derived from Human Papillomavirus
TQLCILGCA

SEQ ID NO: 26302 - protein, 11 aa, Artificial Sequence
  Peptide Derived from Human Papillomavirus
TQLCILGCAPA

SEQ ID NO: 26303 - protein, 9 aa, Artificial Sequence
  Peptide Derived from Human Papillomavirus
TQRLVWACA

SEQ ID NO: 26304 - protein, 11 aa, Artificial Sequence
  Peptide Derived from Human Papillomavirus
TQRLVWACAGV

SEQ ID NO: 26305 - protein, 9 aa, Artificial Sequence
  Peptide Derived from Human Papillomavirus
TQSPVPGQY

SEQ ID NO: 26306 - protein, 11 aa, Artificial Sequence
  Peptide Derived from Human Papillomavirus
TQSPVPGQYDA

SEQ ID NO: 26307 - protein, 9 aa, Artificial Sequence
  Peptide Derived from Human Papillomavirus
TVGNPYFRV

SEQ ID NO: 26308 - protein, 11 aa, Artificial Sequence
  Peptide Derived from Human Papillomavirus
TVGNPYFRVPA

SEQ ID NO: 26309 - protein, 8 aa, Artificial Sequence
  Peptide Derived from Human Papillomavirus
TVLEDGDM

SEQ ID NO: 26310 - protein, 9 aa, Artificial Sequence
  Peptide Derived from Human Papillomavirus
TVLEDGDMV

SEQ ID NO: 26311 - protein, 8 aa, Artificial Sequence
  Peptide Derived from Human Papillomavirus
TVPQSLYI

SEQ ID NO: 26312 - protein, 11 aa, Artificial Sequence
  Peptide Derived from Human Papillomavirus
TVVDTTPSTNL

SEQ ID NO: 26313 - protein, 9 aa, Artificial Sequence
  Peptide Derived from Human Papillomavirus
TVYLPPPSV

SEQ ID NO: 26314 - protein, 10 aa, Artificial Sequence
  Peptide Derived from Human Papillomavirus
TVYLPPPSVA

SEQ ID NO: 26315 - protein, 8 aa, Artificial Sequence
  Peptide Derived from Human Papillomavirus
VLEDGDMV

SEQ ID NO: 26316 - protein, 8 aa, Artificial Sequence
  Peptide Derived from Human Papillomavirus
VLILHYHL

SEQ ID NO: 26317 - protein, 9 aa, Artificial Sequence
  Peptide Derived from Human Papillomavirus
VLILHYHLL

SEQ ID NO: 26318 - protein, 11 aa, Artificial Sequence
  Peptide Derived from Human Papillomavirus
VLILHYHLLPL

SEQ ID NO: 26319 - protein, 8 aa, Artificial Sequence
  Peptide Derived from Human Papillomavirus
VMSYIHSM

SEQ ID NO: 26320 - protein, 11 aa, Artificial Sequence
  Peptide Derived from Human Papillomavirus
VPAGGGNKQDI

SEQ ID NO: 26321 - protein, 10 aa, Artificial Sequence
  Peptide Derived from Human Papillomavirus
VPGQYDATKF

SEQ ID NO: 26322 - protein, 9 aa, Artificial Sequence
  Peptide Derived from Human Papillomavirus
VPLDICQSI

SEQ ID NO: 26323 - protein, 9 aa, Artificial Sequence
  Peptide Derived from Human Papillomavirus
VPPPPTTSL

SEQ ID NO: 26324 - protein, 10 aa, Artificial Sequence
  Peptide Derived from Human Papillomavirus
VPPPPTTSLV

SEQ ID NO: 26325 - protein, 11 aa, Artificial Sequence
  Peptide Derived from Human Papillomavirus
VQAGLRRKPTI

SEQ ID NO: 26326 - protein, 9 aa, Artificial Sequence
  Peptide Derived from Human Papillomavirus
VQLPDPNKF

SEQ ID NO: 26327 - protein, 11 aa, Artificial Sequence
  Peptide Derived from Human Papillomavirus
VQLPDPNKFGL

SEQ ID NO: 26328 - protein, 10 aa, Artificial Sequence
  Peptide Derived from Human Papillomavirus
VVDTTPSTNL

SEQ ID NO: 26329 - protein, 8 aa, Artificial Sequence
  Peptide Derived from Human Papillomavirus
VVNTDDYV

SEQ ID NO: 26330 - protein, 9 aa, Artificial Sequence
  Peptide Derived from Human Papillomavirus
YIHSMNSSI

SEQ ID NO: 26331 - protein, 10 aa, Artificial Sequence
  Peptide Derived from Human Papillomavirus
YIHSMNSSIL

SEQ ID NO: 26332 - protein, 9 aa, Artificial Sequence
  Peptide Derived from Human Papillomavirus
YIILFLRNV

SEQ ID NO: 26333 - protein, 11 aa, Artificial Sequence
  Peptide Derived from Human Papillomavirus
YIILFLRNVNV

SEQ ID NO: 26334 - protein, 9 aa, Artificial Sequence
  Peptide Derived from Human Papillomavirus
YIKGTGMPA

SEQ ID NO: 26335 - protein, 8 aa, Artificial Sequence
  Peptide Derived from Human Papillomavirus
YLPPPSVA

SEQ ID NO: 26336 - protein, 10 aa, Artificial Sequence
  Peptide Derived from Human Papillomavirus
YLPPPSVARV

SEQ ID NO: 26337 - protein, 11 aa, Artificial Sequence
  Peptide Derived from Human Papillomavirus
YLPPPSVARVV

SEQ ID NO: 26338 - protein, 9 aa, Artificial Sequence
  Peptide Derived from Human Papillomavirus
YLQMSADPY

SEQ ID NO: 26339 - protein, 11 aa, Artificial Sequence
  Peptide Derived from Human Papillomavirus
YMVHIIICGHY

SEQ ID NO: 26340 - protein, 9 aa, Artificial Sequence
  Peptide Derived from Human Papillomavirus
YPDYLQMSA

SEQ ID NO: 26341 - protein, 8 aa, Artificial Sequence
  Peptide Derived from Human Papillomavirus
YPLGRKFL

SEQ ID NO: 26342 - protein, 9 aa, Artificial Sequence
  Peptide Derived from Human Papillomavirus
YPLGRKFLV

SEQ ID NO: 26343 - protein, 11 aa, Artificial Sequence
  Peptide Derived from Human Papillomavirus
YPLGRKFLVQA

SEQ ID NO: 26344 - protein, 8 aa, Artificial Sequence
  Peptide Derived from Human Papillomavirus
YQYRVFRV

SEQ ID NO: 26345 - protein, 10 aa, Artificial Sequence
  Peptide Derived from Human Papillomavirus
YQYRVFRVQL

SEQ ID NO: 26346 - protein, 8 aa, Artificial Sequence
  Peptide Derived from Human Papillomavirus
YVTPTSIF

SEQ ID NO: 26347 - protein, 9 aa, Artificial Sequence
  Peptide Derived from Human Papillomavirus
YVTPTSIFY

SEQ ID NO: 26348 - protein, 11 aa, Artificial Sequence
  Peptide Derived from Human Papillomavirus
YVTPTSIFYHA

SEQ ID NO: 26349 - protein, 9 aa, Artificial Sequence
  Peptide Derived from Human Papillomavirus
ALTSRRGTV

SEQ ID NO: 26350 - protein, 11 aa, Artificial Sequence
  Peptide Derived from Human Papillomavirus
ALTSRRGTVRF

SEQ ID NO: 26351 - protein, 8 aa, Artificial Sequence
  Peptide Derived from Human Papillomavirus
APASTQYI

SEQ ID NO: 26352 - protein, 10 aa, Artificial Sequence
  Peptide Derived from Human Papillomavirus
APASTQYIGI

SEQ ID NO: 26353 - protein, 9 aa, Artificial Sequence
  Peptide Derived from Human Papillomavirus
APSPEYIEL

SEQ ID NO: 26354 - protein, 9 aa, Artificial Sequence
  Peptide Derived from Human Papillomavirus
CPPDVVPKV

SEQ ID NO: 26355 - protein, 9 aa, Artificial Sequence
  Peptide Derived from Human Papillomavirus
DIIRLHRPA

SEQ ID NO: 26356 - protein, 10 aa, Artificial Sequence
  Peptide Derived from Human Papillomavirus
DIIRLHRPAL

SEQ ID NO: 26357 - protein, 11 aa, Artificial Sequence
  Peptide Derived from Human Papillomavirus
DISPIAPSPEY

SEQ ID NO: 26358 - protein, 10 aa, Artificial Sequence
  Peptide Derived from Human Papillomavirus
DITLPSTTSV

SEQ ID NO: 26359 - protein, 11 aa, Artificial Sequence
  Peptide Derived from Human Papillomavirus
DITLPSTTSVW

SEQ ID NO: 26360 - protein, 9 aa, Artificial Sequence
  Peptide Derived from Human Papillomavirus
DITPSSTSV

SEQ ID NO: 26361 - protein, 11 aa, Artificial Sequence
  Peptide Derived from Human Papillomavirus
DITPSSTSVSI

SEQ ID NO: 26362 - protein, 11 aa, Artificial Sequence
  Peptide Derived from Human Papillomavirus
DITSAGTTTPA

SEQ ID NO: 26363 - protein, 10 aa, Artificial Sequence
  Peptide Derived from Human Papillomavirus
DIYADDMDPA

SEQ ID NO: 26364 - protein, 11 aa, Artificial Sequence
  Peptide Derived from Human Papillomavirus
DIYADDMDPAV

SEQ ID NO: 26365 - protein, 10 aa, Artificial Sequence
  Peptide Derived from Human Papillomavirus
DLFDIYADDM

SEQ ID NO: 26366 - protein, 8 aa, Artificial Sequence
  Peptide Derived from Human Papillomavirus
DMDPAVPV

SEQ ID NO: 26367 - protein, 11 aa, Artificial Sequence
  Peptide Derived from Human Papillomavirus
DPRSDVPDSDF

SEQ ID NO: 26368 - protein, 8 aa, Artificial Sequence
  Peptide Derived from Human Papillomavirus
DPSIVTLI

SEQ ID NO: 26369 - protein, 9 aa, Artificial Sequence
  Peptide Derived from Human Papillomavirus
DVGPTRPPV

SEQ ID NO: 26370 - protein, 10 aa, Artificial Sequence
  Peptide Derived from Human Papillomavirus
DVGPTRPPVV

SEQ ID NO: 26371 - protein, 11 aa, Artificial Sequence
  Peptide Derived from Human Papillomavirus
DVGPTRPPVVI

SEQ ID NO: 26372 - protein, 8 aa, Artificial Sequence
  Peptide Derived from Human Papillomavirus
DVPDSDFM

SEQ ID NO: 26373 - protein, 10 aa, Artificial Sequence
  Peptide Derived from Human Papillomavirus
DVPDSDFMDI

SEQ ID NO: 26374 - protein, 11 aa, Artificial Sequence
  Peptide Derived from Human Papillomavirus
DVPDSDFMDII

SEQ ID NO: 26375 - protein, 10 aa, Artificial Sequence
  Peptide Derived from Human Papillomavirus
DVPVYTGPDI

SEQ ID NO: 26376 - protein, 11 aa, Artificial Sequence
  Peptide Derived from Human Papillomavirus
DVVPKVEGTTL

SEQ ID NO: 26377 - protein, 8 aa, Artificial Sequence
  Peptide Derived from Human Papillomavirus
EIPLQTFA

SEQ ID NO: 26378 - protein, 8 aa, Artificial Sequence
  Peptide Derived from Human Papillomavirus
ELQPLVSA

SEQ ID NO: 26379 - protein, 8 aa, Artificial Sequence
  Peptide Derived from Human Papillomavirus
EPISSTPL

SEQ ID NO: 26380 - protein, 11 aa, Artificial Sequence
  Peptide Derived from Human Papillomavirus
EPISSTPLPTV

SEQ ID NO: 26381 - protein, 9 aa, Artificial Sequence
  Peptide Derived from Human Papillomavirus
EPVDTTLTF

SEQ ID NO: 26382 - protein, 10 aa, Artificial Sequence
  Peptide Derived from Human Papillomavirus
EPVGPTDPSI

SEQ ID NO: 26383 - protein, 11 aa, Artificial Sequence
  Peptide Derived from Human Papillomavirus
EPVGPTDPSIV

SEQ ID NO: 26384 - protein, 8 aa, Artificial Sequence
  Peptide Derived from Human Papillomavirus
EVAGNVFV

SEQ ID NO: 26385 - protein, 8 aa, Artificial Sequence
  Peptide Derived from Human Papillomavirus
EVPQTGEV

SEQ ID NO: 26386 - protein, 9 aa, Artificial Sequence
  Peptide Derived from Human Papillomavirus
EVPQTGEVA

SEQ ID NO: 26387 - protein, 9 aa, Artificial Sequence
  Peptide Derived from Human Papillomavirus
FIPKKRKRV

SEQ ID NO: 26388 - protein, 11 aa, Artificial Sequence
  Peptide Derived from Human Papillomavirus
FIPKKRKRVPY

SEQ ID NO: 26389 - protein, 8 aa, Artificial Sequence
  Peptide Derived from Human Papillomavirus
FLTRPSSL

SEQ ID NO: 26390 - protein, 9 aa, Artificial Sequence
  Peptide Derived from Human Papillomavirus
FLTRPSSLI

SEQ ID NO: 26391 - protein, 11 aa, Artificial Sequence
  Peptide Derived from Human Papillomavirus
FLTRPSSLITY

SEQ ID NO: 26392 - protein, 11 aa, Artificial Sequence
  Peptide Derived from Human Papillomavirus
FMDIIRLHRPA

SEQ ID NO: 26393 - protein, 9 aa, Artificial Sequence
  Peptide Derived from Human Papillomavirus
GIFLGGLGI

SEQ ID NO: 26394 - protein, 8 aa, Artificial Sequence
  Peptide Derived from Human Papillomavirus
GIHGTHYY

SEQ ID NO: 26395 - protein, 9 aa, Artificial Sequence
  Peptide Derived from Human Papillomavirus
GIHGTHYYL

SEQ ID NO: 26396 - protein, 10 aa, Artificial Sequence
  Peptide Derived from Human Papillomavirus
GIHGTHYYLW

SEQ ID NO: 26397 - protein, 8 aa, Artificial Sequence
  Peptide Derived from Human Papillomavirus
GPRLYSRA

SEQ ID NO: 26398 - protein, 9 aa, Artificial Sequence
  Peptide Derived from Human Papillomavirus
GPRLYSRAY

SEQ ID NO: 26399 - protein, 8 aa, Artificial Sequence
  Peptide Derived from Human Papillomavirus
GPTDPSIV

SEQ ID NO: 26400 - protein, 10 aa, Artificial Sequence
  Peptide Derived from Human Papillomavirus
GPTDPSIVTL

SEQ ID NO: 26401 - protein, 11 aa, Artificial Sequence
  Peptide Derived from Human Papillomavirus
GPTDPSIVTLI

SEQ ID NO: 26402 - protein, 8 aa, Artificial Sequence
  Peptide Derived from Human Papillomavirus
GPTRPPVV

SEQ ID NO: 26403 - protein, 9 aa, Artificial Sequence
  Peptide Derived from Human Papillomavirus
GPTRPPVVI

SEQ ID NO: 26404 - protein, 10 aa, Artificial Sequence
  Peptide Derived from Human Papillomavirus
IIEVPQTGEV

SEQ ID NO: 26405 - protein, 11 aa, Artificial Sequence
  Peptide Derived from Human Papillomavirus
IIEVPQTGEVA

SEQ ID NO: 26406 - protein, 8 aa, Artificial Sequence
  Peptide Derived from Human Papillomavirus
IIRLHRPA

SEQ ID NO: 26407 - protein, 9 aa, Artificial Sequence
  Peptide Derived from Human Papillomavirus
IIRLHRPAL

SEQ ID NO: 26408 - protein, 9 aa, Artificial Sequence
  Peptide Derived from Human Papillomavirus
ILQWSSLGI

SEQ ID NO: 26409 - protein, 10 aa, Artificial Sequence
  Peptide Derived from Human Papillomavirus
ILQWSSLGIF

SEQ ID NO: 26410 - protein, 11 aa, Artificial Sequence
  Peptide Derived from Human Papillomavirus
ILQWSSLGIFL

SEQ ID NO: 26411 - protein, 8 aa, Artificial Sequence
  Peptide Derived from Human Papillomavirus
IPKKRKRV

SEQ ID NO: 26412 - protein, 10 aa, Artificial Sequence
  Peptide Derived from Human Papillomavirus
IPKKRKRVPY

SEQ ID NO: 26413 - protein, 11 aa, Artificial Sequence
  Peptide Derived from Human Papillomavirus
IPKKRKRVPYF

SEQ ID NO: 26414 - protein, 10 aa, Artificial Sequence
  Peptide Derived from Human Papillomavirus
IPLGGRSNTV

SEQ ID NO: 26415 - protein, 11 aa, Artificial Sequence
  Peptide Derived from Human Papillomavirus
IPLGGRSNTVV

SEQ ID NO: 26416 - protein, 8 aa, Artificial Sequence
  Peptide Derived from Human Papillomavirus
IVSPTAPA

SEQ ID NO: 26417 - protein, 10 aa, Artificial Sequence
  Peptide Derived from Human Papillomavirus
IVTLIEDSSV

SEQ ID NO: 26418 - protein, 11 aa, Artificial Sequence
  Peptide Derived from Human Papillomavirus
IVTLIEDSSVV

SEQ ID NO: 26419 - protein, 8 aa, Artificial Sequence
  Peptide Derived from Human Papillomavirus
KILQWSSL

SEQ ID NO: 26420 - protein, 10 aa, Artificial Sequence
  Peptide Derived from Human Papillomavirus
KILQWSSLGI

SEQ ID NO: 26421 - protein, 11 aa, Artificial Sequence
  Peptide Derived from Human Papillomavirus
KILQWSSLGIF

SEQ ID NO: 26422 - protein, 10 aa, Artificial Sequence
  Peptide Derived from Human Papillomavirus
KQSGTCPPDV

SEQ ID NO: 26423 - protein, 11 aa, Artificial Sequence
  Peptide Derived from Human Papillomavirus
KQSGTCPPDVV

SEQ ID NO: 26424 - protein, 8 aa, Artificial Sequence
  Peptide Derived from Human Papillomavirus
KVEGTTLA

SEQ ID NO: 26425 - protein, 11 aa, Artificial Sequence
  Peptide Derived from Human Papillomavirus
KVEGTTLADKI

SEQ ID NO: 26426 - protein, 8 aa, Artificial Sequence
  Peptide Derived from Human Papillomavirus
LIEDSSVV

SEQ ID NO: 26427 - protein, 8 aa, Artificial Sequence
  Peptide Derived from Human Papillomavirus
LITYDNPA

SEQ ID NO: 26428 - protein, 9 aa, Artificial Sequence
  Peptide Derived from Human Papillomavirus
LITYDNPAF

SEQ ID NO: 26429 - protein, 8 aa, Artificial Sequence
  Peptide Derived from Human Papillomavirus
LPSTTSVW

SEQ ID NO: 26430 - protein, 10 aa, Artificial Sequence
  Peptide Derived from Human Papillomavirus
LPSTTSVWPI

SEQ ID NO: 26431 - protein, 11 aa, Artificial Sequence
  Peptide Derived from Human Papillomavirus
LPSTTSVWPIV

SEQ ID NO: 26432 - protein, 8 aa, Artificial Sequence
  Peptide Derived from Human Papillomavirus
LPTVRRVA

SEQ ID NO: 26433 - protein, 8 aa, Artificial Sequence
  Peptide Derived from Human Papillomavirus
LQWSSLGI

SEQ ID NO: 26434 - protein, 9 aa, Artificial Sequence
  Peptide Derived from Human Papillomavirus
LQWSSLGIF

SEQ ID NO: 26435 - protein, 10 aa, Artificial Sequence
  Peptide Derived from Human Papillomavirus
LQWSSLGIFL

SEQ ID NO: 26436 - protein, 10 aa, Artificial Sequence
  Peptide Derived from Human Papillomavirus
LVSATEDNDL

SEQ ID NO: 26437 - protein, 11 aa, Artificial Sequence
  Peptide Derived from Human Papillomavirus
LVSATEDNDLF

SEQ ID NO: 26438 - protein, 11 aa, Artificial Sequence
  Peptide Derived from Human Papillomavirus
NPAFEPVDTTL

SEQ ID NO: 26439 - protein, 9 aa, Artificial Sequence
  Peptide Derived from Human Papillomavirus
NPAFSDPSI

SEQ ID NO: 26440 - protein, 10 aa, Artificial Sequence
  Peptide Derived from Human Papillomavirus
NPAFSDPSII

SEQ ID NO: 26441 - protein, 11 aa, Artificial Sequence
  Peptide Derived from Human Papillomavirus
NPEFLTRPSSL

SEQ ID NO: 26442 - protein, 10 aa, Artificial Sequence
  Peptide Derived from Human Papillomavirus
NVTVPLTSSW

SEQ ID NO: 26443 - protein, 8 aa, Artificial Sequence
  Peptide Derived from Human Papillomavirus
PIAPSPEY

SEQ ID NO: 26444 - protein, 9 aa, Artificial Sequence
  Peptide Derived from Human Papillomavirus
PIAPSPEYI

SEQ ID NO: 26445 - protein, 11 aa, Artificial Sequence
  Peptide Derived from Human Papillomavirus
PIAPSPEYIEL

SEQ ID NO: 26446 - protein, 10 aa, Artificial Sequence
  Peptide Derived from Human Papillomavirus
PISSTPLPTV

SEQ ID NO: 26447 - protein, 9 aa, Artificial Sequence
  Peptide Derived from Human Papillomavirus
PIVSPTAPA

SEQ ID NO: 26448 - protein, 9 aa, Artificial Sequence
  Peptide Derived from Human Papillomavirus
PLGGRSNTV

SEQ ID NO: 26449 - protein, 10 aa, Artificial Sequence
  Peptide Derived from Human Papillomavirus
PLGGRSNTVV

SEQ ID NO: 26450 - protein, 8 aa, Artificial Sequence
  Peptide Derived from Human Papillomavirus
PLPTVRRV

SEQ ID NO: 26451 - protein, 9 aa, Artificial Sequence
  Peptide Derived from Human Papillomavirus
PLPTVRRVA

SEQ ID NO: 26452 - protein, 8 aa, Artificial Sequence
  Peptide Derived from Human Papillomavirus
PLTSSWDV

SEQ ID NO: 26453 - protein, 10 aa, Artificial Sequence
  Peptide Derived from Human Papillomavirus
PLTSSWDVPV

SEQ ID NO: 26454 - protein, 11 aa, Artificial Sequence
  Peptide Derived from Human Papillomavirus
PLTSSWDVPVY

SEQ ID NO: 26455 - protein, 11 aa, Artificial Sequence
  Peptide Derived from Human Papillomavirus
PLVSATEDNDL

SEQ ID NO: 26456 - protein, 8 aa, Artificial Sequence
  Peptide Derived from Human Papillomavirus
PPDVVPKV

SEQ ID NO: 26457 - protein, 8 aa, Artificial Sequence
  Peptide Derived from Human Papillomavirus
PPVVIEPV

SEQ ID NO: 26458 - protein, 10 aa, Artificial Sequence
  Peptide Derived from Human Papillomavirus
PQTGEVAGNV

SEQ ID NO: 26459 - protein, 11 aa, Artificial Sequence
  Peptide Derived from Human Papillomavirus
PQTGEVAGNVF

SEQ ID NO: 26460 - protein, 8 aa, Artificial Sequence
  Peptide Derived from Human Papillomavirus
PVDTTLTF

SEQ ID NO: 26461 - protein, 9 aa, Artificial Sequence
  Peptide Derived from Human Papillomavirus
PVGPTDPSI

SEQ ID NO: 26462 - protein, 10 aa, Artificial Sequence
  Peptide Derived from Human Papillomavirus
PVGPTDPSIV

SEQ ID NO: 26463 - protein, 10 aa, Artificial Sequence
  Peptide Derived from Human Papillomavirus
PVPSRSTTSF

SEQ ID NO: 26464 - protein, 11 aa, Artificial Sequence
  Peptide Derived from Human Papillomavirus
PVPSRSTTSFA

SEQ ID NO: 26465 - protein, 8 aa, Artificial Sequence
  Peptide Derived from Human Papillomavirus
PVYTGPDI

SEQ ID NO: 26466 - protein, 10 aa, Artificial Sequence
  Peptide Derived from Human Papillomavirus
PVYTGPDITL

SEQ ID NO: 26467 - protein, 8 aa, Artificial Sequence
  Peptide Derived from Human Papillomavirus
QIGARVHF

SEQ ID NO: 26468 - protein, 9 aa, Artificial Sequence
  Peptide Derived from Human Papillomavirus
QIGARVHFY

SEQ ID NO: 26469 - protein, 10 aa, Artificial Sequence
  Peptide Derived from Human Papillomavirus
QQVSVANPEF

SEQ ID NO: 26470 - protein, 11 aa, Artificial Sequence
  Peptide Derived from Human Papillomavirus
QQVSVANPEFL

SEQ ID NO: 26471 - protein, 9 aa, Artificial Sequence
  Peptide Derived from Human Papillomavirus
QVSVANPEF

SEQ ID NO: 26472 - protein, 10 aa, Artificial Sequence
  Peptide Derived from Human Papillomavirus
QVSVANPEFL

SEQ ID NO: 26473 - protein, 8 aa, Artificial Sequence
  Peptide Derived from Human Papillomavirus
RLGQRATM

SEQ ID NO: 26474 - protein, 9 aa, Artificial Sequence
  Peptide Derived from Human Papillomavirus
RLGQRATMF

SEQ ID NO: 26475 - protein, 10 aa, Artificial Sequence
  Peptide Derived from Human Papillomavirus
RLYSRAYQQV

SEQ ID NO: 26476 - protein, 11 aa, Artificial Sequence
  Peptide Derived from Human Papillomavirus
RPALTSRRGTV

SEQ ID NO: 26477 - protein, 9 aa, Artificial Sequence
  Peptide Derived from Human Papillomavirus
RPPVVIEPV

SEQ ID NO: 26478 - protein, 8 aa, Artificial Sequence
  Peptide Derived from Human Papillomavirus
RPSSLITY

SEQ ID NO: 26479 - protein, 10 aa, Artificial Sequence
  Peptide Derived from Human Papillomavirus
RPTFTGTSGF

SEQ ID NO: 26480 - protein, 8 aa, Artificial Sequence
  Peptide Derived from Human Papillomavirus
RVAGPRLY

SEQ ID NO: 26481 - protein, 11 aa, Artificial Sequence
  Peptide Derived from Human Papillomavirus
RVAGPRLYSRA

SEQ ID NO: 26482 - protein, 8 aa, Artificial Sequence
  Peptide Derived from Human Papillomavirus
RVHFYHDI

SEQ ID NO: 26483 - protein, 11 aa, Artificial Sequence
  Peptide Derived from Human Papillomavirus
RVHFYHDISPI

SEQ ID NO: 26484 - protein, 10 aa, Artificial Sequence
  Peptide Derived from Human Papillomavirus
RVPYFFADGF

SEQ ID NO: 26485 - protein, 11 aa, Artificial Sequence
  Peptide Derived from Human Papillomavirus
RVPYFFADGFV

SEQ ID NO: 26486 - protein, 11 aa, Artificial Sequence
  Peptide Derived from Human Papillomavirus
SIIEVPQTGEV

SEQ ID NO: 26487 - protein, 11 aa, Artificial Sequence
  Peptide Derived from Human Papillomavirus
SISTTNFTNPA

SEQ ID NO: 26488 - protein, 11 aa, Artificial Sequence
  Peptide Derived from Human Papillomavirus
SIVTLIEDSSV

SEQ ID NO: 26489 - protein, 9 aa, Artificial Sequence
  Peptide Derived from Human Papillomavirus
SLGIFLGGL

SEQ ID NO: 26490 - protein, 11 aa, Artificial Sequence
  Peptide Derived from Human Papillomavirus
SLGIFLGGLGI

SEQ ID NO: 26491 - protein, 9 aa, Artificial Sequence
  Peptide Derived from Human Papillomavirus
SLITYDNPA

SEQ ID NO: 26492 - protein, 10 aa, Artificial Sequence
  Peptide Derived from Human Papillomavirus
SLITYDNPAF

SEQ ID NO: 26493 - protein, 10 aa, Artificial Sequence
  Peptide Derived from Human Papillomavirus
SPEYIELQPL

SEQ ID NO: 26494 - protein, 11 aa, Artificial Sequence
  Peptide Derived from Human Papillomavirus
SPEYIELQPLV

SEQ ID NO: 26495 - protein, 9 aa, Artificial Sequence
  Peptide Derived from Human Papillomavirus
SPIAPSPEY

SEQ ID NO: 26496 - protein, 10 aa, Artificial Sequence
  Peptide Derived from Human Papillomavirus
SPIAPSPEYI

SEQ ID NO: 26497 - protein, 10 aa, Artificial Sequence
  Peptide Derived from Human Papillomavirus
SPTAPASTQY

SEQ ID NO: 26498 - protein, 11 aa, Artificial Sequence
  Peptide Derived from Human Papillomavirus
SPTAPASTQYI

SEQ ID NO: 26499 - protein, 10 aa, Artificial Sequence
  Peptide Derived from Human Papillomavirus
SPTISSASSY

SEQ ID NO: 26500 - protein, 8 aa, Artificial Sequence
  Peptide Derived from Human Papillomavirus
SVANPEFL

SEQ ID NO: 26501 - protein, 9 aa, Artificial Sequence
  Peptide Derived from Human Papillomavirus
SVSISTTNF

SEQ ID NO: 26502 - protein, 10 aa, Artificial Sequence
  Peptide Derived from Human Papillomavirus
SVWPIVSPTA

SEQ ID NO: 26503 - protein, 8 aa, Artificial Sequence
  Peptide Derived from Human Papillomavirus
TISSASSY

SEQ ID NO: 26504 - protein, 11 aa, Artificial Sequence
  Peptide Derived from Human Papillomavirus
TISSASSYSNV

SEQ ID NO: 26505 - protein, 9 aa, Artificial Sequence
  Peptide Derived from Human Papillomavirus
TLADKILQW

SEQ ID NO: 26506 - protein, 8 aa, Artificial Sequence
  Peptide Derived from Human Papillomavirus
TLIEDSSV

SEQ ID NO: 26507 - protein, 9 aa, Artificial Sequence
  Peptide Derived from Human Papillomavirus
TLIEDSSVV

SEQ ID NO: 26508 - protein, 8 aa, Artificial Sequence
  Peptide Derived from Human Papillomavirus
TLPSTTSV

SEQ ID NO: 26509 - protein, 9 aa, Artificial Sequence
  Peptide Derived from Human Papillomavirus
TLPSTTSVW

SEQ ID NO: 26510 - protein, 11 aa, Artificial Sequence
  Peptide Derived from Human Papillomavirus
TLPSTTSVWPI

SEQ ID NO: 26511 - protein, 10 aa, Artificial Sequence
  Peptide Derived from Human Papillomavirus
TLTFDPRSDV

SEQ ID NO: 26512 - protein, 10 aa, Artificial Sequence
  Peptide Derived from Human Papillomavirus
TMFTRSGTQI

SEQ ID NO: 26513 - protein, 9 aa, Artificial Sequence
  Peptide Derived from Human Papillomavirus
TPLPTVRRV

SEQ ID NO: 26514 - protein, 10 aa, Artificial Sequence
  Peptide Derived from Human Papillomavirus
TPLPTVRRVA

SEQ ID NO: 26515 - protein, 9 aa, Artificial Sequence
  Peptide Derived from Human Papillomavirus
TPSSTSVSI

SEQ ID NO: 26516 - protein, 9 aa, Artificial Sequence
  Peptide Derived from Human Papillomavirus
TPTSGTHGY

SEQ ID NO: 26517 - protein, 9 aa, Artificial Sequence
  Peptide Derived from Human Papillomavirus
TQIGARVHF

SEQ ID NO: 26518 - protein, 10 aa, Artificial Sequence
  Peptide Derived from Human Papillomavirus
TQIGARVHFY

SEQ ID NO: 26519 - protein, 11 aa, Artificial Sequence
  Peptide Derived from Human Papillomavirus
TQYIGIHGTHY

SEQ ID NO: 26520 - protein, 8 aa, Artificial Sequence
  Peptide Derived from Human Papillomavirus
TVPLTSSW

SEQ ID NO: 26521 - protein, 10 aa, Artificial Sequence
  Peptide Derived from Human Papillomavirus
TVPLTSSWDV

SEQ ID NO: 26522 - protein, 11 aa, Artificial Sequence
  Peptide Derived from Human Papillomavirus
TVRFSRLGQRA

SEQ ID NO: 26523 - protein, 10 aa, Artificial Sequence
  Peptide Derived from Human Papillomavirus
TVRRVAGPRL

SEQ ID NO: 26524 - protein, 11 aa, Artificial Sequence
  Peptide Derived from Human Papillomavirus
TVRRVAGPRLY

SEQ ID NO: 26525 - protein, 11 aa, Artificial Sequence
  Peptide Derived from Human Papillomavirus
VLDITPSSTSV

SEQ ID NO: 26526 - protein, 9 aa, Artificial Sequence
  Peptide Derived from Human Papillomavirus
VPDSDFMDI

SEQ ID NO: 26527 - protein, 10 aa, Artificial Sequence
  Peptide Derived from Human Papillomavirus
VPDSDFMDII

SEQ ID NO: 26528 - protein, 9 aa, Artificial Sequence
  Peptide Derived from Human Papillomavirus
VPKVEGTTL

SEQ ID NO: 26529 - protein, 10 aa, Artificial Sequence
  Peptide Derived from Human Papillomavirus
VPKVEGTTLA

SEQ ID NO: 26530 - protein, 9 aa, Artificial Sequence
  Peptide Derived from Human Papillomavirus
VPLTSSWDV

SEQ ID NO: 26531 - protein, 11 aa, Artificial Sequence
  Peptide Derived from Human Papillomavirus
VPLTSSWDVPV

SEQ ID NO: 26532 - protein, 8 aa, Artificial Sequence
  Peptide Derived from Human Papillomavirus
VPQTGEVA

SEQ ID NO: 26533 - protein, 11 aa, Artificial Sequence
  Peptide Derived from Human Papillomavirus
VPQTGEVAGNV

SEQ ID NO: 26534 - protein, 9 aa, Artificial Sequence
  Peptide Derived from Human Papillomavirus
VPSRSTTSF

SEQ ID NO: 26535 - protein, 10 aa, Artificial Sequence
  Peptide Derived from Human Papillomavirus
VPSRSTTSFA

SEQ ID NO: 26536 - protein, 11 aa, Artificial Sequence
  Peptide Derived from Human Papillomavirus
VPSRSTTSFAF

SEQ ID NO: 26537 - protein, 11 aa, Artificial Sequence
  Peptide Derived from Human Papillomavirus
VPVPSRSTTSF

SEQ ID NO: 26538 - protein, 9 aa, Artificial Sequence
  Peptide Derived from Human Papillomavirus
VPVYTGPDI

SEQ ID NO: 26539 - protein, 11 aa, Artificial Sequence
  Peptide Derived from Human Papillomavirus
VPVYTGPDITL

SEQ ID NO: 26540 - protein, 9 aa, Artificial Sequence
  Peptide Derived from Human Papillomavirus
VPYFFADGF

SEQ ID NO: 26541 - protein, 10 aa, Artificial Sequence
  Peptide Derived from Human Papillomavirus
VPYFFADGFV

SEQ ID NO: 26542 - protein, 11 aa, Artificial Sequence
  Peptide Derived from Human Papillomavirus
VPYFFADGFVA

SEQ ID NO: 26543 - protein, 11 aa, Artificial Sequence
  Peptide Derived from Human Papillomavirus
VVDVGPTRPPV

SEQ ID NO: 26544 - protein, 10 aa, Artificial Sequence
  Peptide Derived from Human Papillomavirus
VVPKVEGTTL

SEQ ID NO: 26545 - protein, 11 aa, Artificial Sequence
  Peptide Derived from Human Papillomavirus
VVPKVEGTTLA

SEQ ID NO: 26546 - protein, 11 aa, Artificial Sequence
  Peptide Derived from Human Papillomavirus
VVTSGAPRPTF

SEQ ID NO: 26547 - protein, 8 aa, Artificial Sequence
  Peptide Derived from Human Papillomavirus
WPIVSPTA

SEQ ID NO: 26548 - protein, 10 aa, Artificial Sequence
  Peptide Derived from Human Papillomavirus
WPIVSPTAPA

SEQ ID NO: 26549 - protein, 8 aa, Artificial Sequence
  Peptide Derived from Human Papillomavirus
YIELQPLV

SEQ ID NO: 26550 - protein, 10 aa, Artificial Sequence
  Peptide Derived from Human Papillomavirus
YIELQPLVSA

SEQ ID NO: 26551 - protein, 9 aa, Artificial Sequence
  Peptide Derived from Human Papillomavirus
YIGIHGTHY

SEQ ID NO: 26552 - protein, 10 aa, Artificial Sequence
  Peptide Derived from Human Papillomavirus
YIGIHGTHYY

SEQ ID NO: 26553 - protein, 11 aa, Artificial Sequence
  Peptide Derived from Human Papillomavirus
YIGIHGTHYYL

SEQ ID NO: 26554 - protein, 11 aa, Artificial Sequence
  Peptide Derived from Human Papillomavirus
YIPLGGRSNTV

SEQ ID NO: 26555 - protein, 8 aa, Artificial Sequence
  Peptide Derived from Human Papillomavirus
YLWPLYYF

SEQ ID NO: 26556 - protein, 9 aa, Artificial Sequence
  Peptide Derived from Human Papillomavirus
YLWPLYYFI

SEQ ID NO: 26557 - protein, 11 aa, Artificial Sequence
  Peptide Derived from Human Papillomavirus
YQQVSVANPEF

SEQ ID NO: 26558 - protein, 11 aa, Artificial Sequence
  Peptide Derived from Human Papillomavirus
AICIENNSKTA

SEQ ID NO: 26559 - protein, 9 aa, Artificial Sequence
  Peptide Derived from Human Papillomavirus
ALDGNPVSI

SEQ ID NO: 26560 - protein, 11 aa, Artificial Sequence
  Peptide Derived from Human Papillomavirus
ALDGNPVSIDV

SEQ ID NO: 26561 - protein, 8 aa, Artificial Sequence
  Peptide Derived from Human Papillomavirus
ALFHAQEA

SEQ ID NO: 26562 - protein, 9 aa, Artificial Sequence
  Peptide Derived from Human Papillomavirus
ALKLFLKGV

SEQ ID NO: 26563 - protein, 10 aa, Artificial Sequence
  Peptide Derived from Human Papillomavirus
ALMQLKCPPL

SEQ ID NO: 26564 - protein, 11 aa, Artificial Sequence
  Peptide Derived from Human Papillomavirus
ALMQLKCPPLL

SEQ ID NO: 26565 - protein, 9 aa, Artificial Sequence
  Peptide Derived from Human Papillomavirus
ALYWYRTGM

SEQ ID NO: 26566 - protein, 9 aa, Artificial Sequence
  Peptide Derived from Human Papillomavirus
AMLGKFKEL

SEQ ID NO: 26567 - protein, 10 aa, Artificial Sequence
  Peptide Derived from Human Papillomavirus
AMLGKFKELY

SEQ ID NO: 26568 - protein, 8 aa, Artificial Sequence
  Peptide Derived from Human Papillomavirus
APNTGKSY

SEQ ID NO: 26569 - protein, 9 aa, Artificial Sequence
  Peptide Derived from Human Papillomavirus
APNTGKSYF

SEQ ID NO: 26570 - protein, 11 aa, Artificial Sequence
  Peptide Derived from Human Papillomavirus
APNTGKSYFGM

SEQ ID NO: 26571 - protein, 10 aa, Artificial Sequence
  Peptide Derived from Human Papillomavirus
AQALFHAQEA

SEQ ID NO: 26572 - protein, 8 aa, Artificial Sequence
  Peptide Derived from Human Papillomavirus
AQEAEEHA

SEQ ID NO: 26573 - protein, 10 aa, Artificial Sequence
  Peptide Derived from Human Papillomavirus
AQEAEEHAEA

SEQ ID NO: 26574 - protein, 11 aa, Artificial Sequence
  Peptide Derived from Human Papillomavirus
AQEAEEHAEAV

SEQ ID NO: 26575 - protein, 10 aa, Artificial Sequence
  Peptide Derived from Human Papillomavirus
AQLADSDSNA

SEQ ID NO: 26576 - protein, 11 aa, Artificial Sequence
  Peptide Derived from Human Papillomavirus
AVIDRQTGDNI

SEQ ID NO: 26577 - protein, 9 aa, Artificial Sequence
  Peptide Derived from Human Papillomavirus
AVQVLKRKY

SEQ ID NO: 26578 - protein, 10 aa, Artificial Sequence
  Peptide Derived from Human Papillomavirus
AVQVLKRKYV

SEQ ID NO: 26579 - protein, 9 aa, Artificial Sequence
  Peptide Derived from Human Papillomavirus
CIENNSKTA

SEQ ID NO: 26580 - protein, 8 aa, Artificial Sequence
  Peptide Derived from Human Papillomavirus
CISTNCML

SEQ ID NO: 26581 - protein, 9 aa, Artificial Sequence
  Peptide Derived from Human Papillomavirus
CISTNCMLI

SEQ ID NO: 26582 - protein, 9 aa, Artificial Sequence
  Peptide Derived from Human Papillomavirus
CLYCHLQSL

SEQ ID NO: 26583 - protein, 10 aa, Artificial Sequence
  Peptide Derived from Human Papillomavirus
CLYCHLQSLA

SEQ ID NO: 26584 - protein, 9 aa, Artificial Sequence
  Peptide Derived from Human Papillomavirus
CMLIQPPKL

SEQ ID NO: 26585 - protein, 10 aa, Artificial Sequence
  Peptide Derived from Human Papillomavirus
CPPLLITSNI

SEQ ID NO: 26586 - protein, 11 aa, Artificial Sequence
  Peptide Derived from Human Papillomavirus
CVAAFGVTGTV

SEQ ID NO: 26587 - protein, 10 aa, Artificial Sequence
  Peptide Derived from Human Papillomavirus
CVDYNISPRL

SEQ ID NO: 26588 - protein, 10 aa, Artificial Sequence
  Peptide Derived from Human Papillomavirus
CVSGQNIRTL

SEQ ID NO: 26589 - protein, 8 aa, Artificial Sequence
  Peptide Derived from Human Papillomavirus
DISSCVDY

SEQ ID NO: 26590 - protein, 10 aa, Artificial Sequence
  Peptide Derived from Human Papillomavirus
DISSCVDYNI

SEQ ID NO: 26591 - protein, 8 aa, Artificial Sequence
  Peptide Derived from Human Papillomavirus
DIVKFLRY

SEQ ID NO: 26592 - protein, 11 aa, Artificial Sequence
  Peptide Derived from Human Papillomavirus
DIVKFLRYQQI

SEQ ID NO: 26593 - protein, 8 aa, Artificial Sequence
  Peptide Derived from Human Papillomavirus
DLSQMVQW

SEQ ID NO: 26594 - protein, 9 aa, Artificial Sequence
  Peptide Derived from Human Papillomavirus
DLSQMVQWA

SEQ ID NO: 26595 - protein, 10 aa, Artificial Sequence
  Peptide Derived from Human Papillomavirus
DLSQMVQWAY

SEQ ID NO: 26596 - protein, 11 aa, Artificial Sequence
  Peptide Derived from Human Papillomavirus
DMVDFIDNCNV

SEQ ID NO: 26597 - protein, 8 aa, Artificial Sequence
  Peptide Derived from Human Papillomavirus
DVKHKALM

SEQ ID NO: 26598 - protein, 10 aa, Artificial Sequence
  Peptide Derived from Human Papillomavirus
DVKHKALMQL

SEQ ID NO: 26599 - protein, 8 aa, Artificial Sequence
  Peptide Derived from Human Papillomavirus
DVMDDSEI

SEQ ID NO: 26600 - protein, 9 aa, Artificial Sequence
  Peptide Derived from Human Papillomavirus
DVMDDSEIA

SEQ ID NO: 26601 - protein, 10 aa, Artificial Sequence
  Peptide Derived from Human Papillomavirus
DVMDDSEIAY

SEQ ID NO: 26602 - protein, 9 aa, Artificial Sequence
  Peptide Derived from Human Papillomavirus
DVYGETPEW

SEQ ID NO: 26603 - protein, 10 aa, Artificial Sequence
  Peptide Derived from Human Papillomavirus
DVYGETPEWI

SEQ ID NO: 26604 - protein, 9 aa, Artificial Sequence
  Peptide Derived from Human Papillomavirus
EIAYKYAQL

SEQ ID NO: 26605 - protein, 10 aa, Artificial Sequence
  Peptide Derived from Human Papillomavirus
EIAYKYAQLA

SEQ ID NO: 26606 - protein, 10 aa, Artificial Sequence
  Peptide Derived from Human Papillomavirus
ELSDKNWKSF

SEQ ID NO: 26607 - protein, 11 aa, Artificial Sequence
  Peptide Derived from Human Papillomavirus
ELSDKNWKSFF

SEQ ID NO: 26608 - protein, 8 aa, Artificial Sequence
  Peptide Derived from Human Papillomavirus
ELYGVSFM

SEQ ID NO: 26609 - protein, 10 aa, Artificial Sequence
  Peptide Derived from Human Papillomavirus
ELYGVSFMEL

SEQ ID NO: 26610 - protein, 11 aa, Artificial Sequence
  Peptide Derived from Human Papillomavirus
ELYGVSFMELI

SEQ ID NO: 26611 - protein, 8 aa, Artificial Sequence
  Peptide Derived from Human Papillomavirus
EVETQQMV

SEQ ID NO: 26612 - protein, 10 aa, Artificial Sequence
  Peptide Derived from Human Papillomavirus
EVETQQMVQV

SEQ ID NO: 26613 - protein, 8 aa, Artificial Sequence
  Peptide Derived from Human Papillomavirus
FIDNCNVY

SEQ ID NO: 26614 - protein, 11 aa, Artificial Sequence
  Peptide Derived from Human Papillomavirus
FLKGVPKKNCI

SEQ ID NO: 26615 - protein, 8 aa, Artificial Sequence
  Peptide Derived from Human Papillomavirus
FLKSNSQA

SEQ ID NO: 26616 - protein, 10 aa, Artificial Sequence
  Peptide Derived from Human Papillomavirus
FLKSNSQAKI

SEQ ID NO: 26617 - protein, 11 aa, Artificial Sequence
  Peptide Derived from Human Papillomavirus
FLKSNSQAKIV

SEQ ID NO: 26618 - protein, 9 aa, Artificial Sequence
  Peptide Derived from Human Papillomavirus
FLQGCIISY

SEQ ID NO: 26619 - protein, 10 aa, Artificial Sequence
  Peptide Derived from Human Papillomavirus
FLQGCIISYA

SEQ ID NO: 26620 - protein, 9 aa, Artificial Sequence
  Peptide Derived from Human Papillomavirus
FLRYQQIEF

SEQ ID NO: 26621 - protein, 10 aa, Artificial Sequence
  Peptide Derived from Human Papillomavirus
FLRYQQIEFV

SEQ ID NO: 26622 - protein, 8 aa, Artificial Sequence
  Peptide Derived from Human Papillomavirus
FLSALKLF

SEQ ID NO: 26623 - protein, 9 aa, Artificial Sequence
  Peptide Derived from Human Papillomavirus
FLSALKLFL

SEQ ID NO: 26624 - protein, 8 aa, Artificial Sequence
  Peptide Derived from Human Papillomavirus
FMELIRPF

SEQ ID NO: 26625 - protein, 10 aa, Artificial Sequence
  Peptide Derived from Human Papillomavirus
FPFDKNGNPV

SEQ ID NO: 26626 - protein, 11 aa, Artificial Sequence
  Peptide Derived from Human Papillomavirus
FPFDKNGNPVY

SEQ ID NO: 26627 - protein, 11 aa, Artificial Sequence
  Peptide Derived from Human Papillomavirus
FQSNKSTCTDW

SEQ ID NO: 26628 - protein, 8 aa, Artificial Sequence
  Peptide Derived from Human Papillomavirus
FVSFLSAL

SEQ ID NO: 26629 - protein, 10 aa, Artificial Sequence
  Peptide Derived from Human Papillomavirus
FVSFLSALKL

SEQ ID NO: 26630 - protein, 11 aa, Artificial Sequence
  Peptide Derived from Human Papillomavirus
FVSFLSALKLF

SEQ ID NO: 26631 - protein, 11 aa, Artificial Sequence
  Peptide Derived from Human Papillomavirus
GMLDDATTPCW

SEQ ID NO: 26632 - protein, 8 aa, Artificial Sequence
  Peptide Derived from Human Papillomavirus
GMSLISFL

SEQ ID NO: 26633 - protein, 8 aa, Artificial Sequence
  Peptide Derived from Human Papillomavirus
GMSNISDV

SEQ ID NO: 26634 - protein, 9 aa, Artificial Sequence
  Peptide Derived from Human Papillomavirus
GMSNISDVY

SEQ ID NO: 26635 - protein, 8 aa, Artificial Sequence
  Peptide Derived from Human Papillomavirus
GMVMLMLV

SEQ ID NO: 26636 - protein, 10 aa, Artificial Sequence
  Peptide Derived from Human Papillomavirus
GMVMLMLVRF

SEQ ID NO: 26637 - protein, 11 aa, Artificial Sequence
  Peptide Derived from Human Papillomavirus
GQWIKSRCDKV

SEQ ID NO: 26638 - protein, 8 aa, Artificial Sequence
  Peptide Derived from Human Papillomavirus
GVPKKNCI

SEQ ID NO: 26639 - protein, 9 aa, Artificial Sequence
  Peptide Derived from Human Papillomavirus
GVPKKNCIL

SEQ ID NO: 26640 - protein, 10 aa, Artificial Sequence
  Peptide Derived from Human Papillomavirus
GVPKKNCILI

SEQ ID NO: 26641 - protein, 8 aa, Artificial Sequence
  Peptide Derived from Human Papillomavirus
GVSFMELI

SEQ ID NO: 26642 - protein, 11 aa, Artificial Sequence
  Peptide Derived from Human Papillomavirus
GVSFMELIRPF

SEQ ID NO: 26643 - protein, 10 aa, Artificial Sequence
  Peptide Derived from Human Papillomavirus
GVTGTVAEGF

SEQ ID NO: 26644 - protein, 9 aa, Artificial Sequence
  Peptide Derived from Human Papillomavirus
HLQSLACSW

SEQ ID NO: 26645 - protein, 11 aa, Artificial Sequence
  Peptide Derived from Human Papillomavirus
HLQSLACSWGM

SEQ ID NO: 26646 - protein, 11 aa, Artificial Sequence
  Peptide Derived from Human Papillomavirus
IISYANSKSHF

SEQ ID NO: 26647 - protein, 10 aa, Artificial Sequence
  Peptide Derived from Human Papillomavirus
IQPPKLRSTA

SEQ ID NO: 26648 - protein, 11 aa, Artificial Sequence
  Peptide Derived from Human Papillomavirus
IQPPKLRSTAA

SEQ ID NO: 26649 - protein, 8 aa, Artificial Sequence
  Peptide Derived from Human Papillomavirus
IVKDCGTM

SEQ ID NO: 26650 - protein, 10 aa, Artificial Sequence
  Peptide Derived from Human Papillomavirus
IVKFLRYQQI

SEQ ID NO: 26651 - protein, 8 aa, Artificial Sequence
  Peptide Derived from Human Papillomavirus
KIGMLDDA

SEQ ID NO: 26652 - protein, 9 aa, Artificial Sequence
  Peptide Derived from Human Papillomavirus
KIVKDCGTM

SEQ ID NO: 26653 - protein, 10 aa, Artificial Sequence
  Peptide Derived from Human Papillomavirus
KLLCISTNCM

SEQ ID NO: 26654 - protein, 11 aa, Artificial Sequence
  Peptide Derived from Human Papillomavirus
KLLCISTNCML

SEQ ID NO: 26655 - protein, 9 aa, Artificial Sequence
  Peptide Derived from Human Papillomavirus
KLLEKLLCI

SEQ ID NO: 26656 - protein, 8 aa, Artificial Sequence
  Peptide Derived from Human Papillomavirus
KLRSTAAA

SEQ ID NO: 26657 - protein, 9 aa, Artificial Sequence
  Peptide Derived from Human Papillomavirus
KLRSTAAAL

SEQ ID NO: 26658 - protein, 10 aa, Artificial Sequence
  Peptide Derived from Human Papillomavirus
KLRSTAAALY

SEQ ID NO: 26659 - protein, 11 aa, Artificial Sequence
  Peptide Derived from Human Papillomavirus
KLRSTAAALYW

SEQ ID NO: 26660 - protein, 8 aa, Artificial Sequence
  Peptide Derived from Human Papillomavirus
KVSDEGDW

SEQ ID NO: 26661 - protein, 11 aa, Artificial Sequence
  Peptide Derived from Human Papillomavirus
KVSDEGDWRDI

SEQ ID NO: 26662 - protein, 11 aa, Artificial Sequence
  Peptide Derived from Human Papillomavirus
LIQPPKLRSTA

SEQ ID NO: 26663 - protein, 9 aa, Artificial Sequence
  Peptide Derived from Human Papillomavirus
LISFLQGCI

SEQ ID NO: 26664 - protein, 10 aa, Artificial Sequence
  Peptide Derived from Human Papillomavirus
LISFLQGCII

SEQ ID NO: 26665 - protein, 8 aa, Artificial Sequence
  Peptide Derived from Human Papillomavirus
LITSNINA

SEQ ID NO: 26666 - protein, 9 aa, Artificial Sequence
  Peptide Derived from Human Papillomavirus
LLCISTNCM

SEQ ID NO: 26667 - protein, 10 aa, Artificial Sequence
  Peptide Derived from Human Papillomavirus
LLCISTNCML

SEQ ID NO: 26668 - protein, 11 aa, Artificial Sequence
  Peptide Derived from Human Papillomavirus
LLCISTNCMLI

SEQ ID NO: 26669 - protein, 8 aa, Artificial Sequence
  Peptide Derived from Human Papillomavirus
LLEKLLCI

SEQ ID NO: 26670 - protein, 9 aa, Artificial Sequence
  Peptide Derived from Human Papillomavirus
LLITSNINA

SEQ ID NO: 26671 - protein, 8 aa, Artificial Sequence
  Peptide Derived from Human Papillomavirus
LLQPYCLY

SEQ ID NO: 26672 - protein, 11 aa, Artificial Sequence
  Peptide Derived from Human Papillomavirus
LLQPYCLYCHL

SEQ ID NO: 26673 - protein, 9 aa, Artificial Sequence
  Peptide Derived from Human Papillomavirus
LMLVRFKCA

SEQ ID NO: 26674 - protein, 9 aa, Artificial Sequence
  Peptide Derived from Human Papillomavirus
LMQLKCPPL

SEQ ID NO: 26675 - protein, 10 aa, Artificial Sequence
  Peptide Derived from Human Papillomavirus
LMQLKCPPLL

SEQ ID NO: 26676 - protein, 11 aa, Artificial Sequence
  Peptide Derived from Human Papillomavirus
LMQLKCPPLLI

SEQ ID NO: 26677 - protein, 11 aa, Artificial Sequence
  Peptide Derived from Human Papillomavirus
LPDSGYGNTEV

SEQ ID NO: 26678 - protein, 8 aa, Artificial Sequence
  Peptide Derived from Human Papillomavirus
LQGCIISY

SEQ ID NO: 26679 - protein, 9 aa, Artificial Sequence
  Peptide Derived from Human Papillomavirus
LQGCIISYA

SEQ ID NO: 26680 - protein, 10 aa, Artificial Sequence
  Peptide Derived from Human Papillomavirus
LQHSFNDTTF

SEQ ID NO: 26681 - protein, 9 aa, Artificial Sequence
  Peptide Derived from Human Papillomavirus
LQPLADAKI

SEQ ID NO: 26682 - protein, 11 aa, Artificial Sequence
  Peptide Derived from Human Papillomavirus
LQPLADAKIGM

SEQ ID NO: 26683 - protein, 10 aa, Artificial Sequence
  Peptide Derived from Human Papillomavirus
LQPYCLYCHL

SEQ ID NO: 26684 - protein, 8 aa, Artificial Sequence
  Peptide Derived from Human Papillomavirus
LQSLACSW

SEQ ID NO: 26685 - protein, 10 aa, Artificial Sequence
  Peptide Derived from Human Papillomavirus
LQSLACSWGM

SEQ ID NO: 26686 - protein, 11 aa, Artificial Sequence
  Peptide Derived from Human Papillomavirus
LQSLACSWGMV

SEQ ID NO: 26687 - protein, 11 aa, Artificial Sequence
  Peptide Derived from Human Papillomavirus
LQVLKTSNGKA

SEQ ID NO: 26688 - protein, 11 aa, Artificial Sequence
  Peptide Derived from Human Papillomavirus
LVRFKCAKNRI

SEQ ID NO: 26689 - protein, 10 aa, Artificial Sequence
  Peptide Derived from Human Papillomavirus
LVVFTFPNPF

SEQ ID NO: 26690 - protein, 10 aa, Artificial Sequence
  Peptide Derived from Human Papillomavirus
MLDDATTPCW

SEQ ID NO: 26691 - protein, 8 aa, Artificial Sequence
  Peptide Derived from Human Papillomavirus
MLGKFKEL

SEQ ID NO: 26692 - protein, 9 aa, Artificial Sequence
  Peptide Derived from Human Papillomavirus
MLGKFKELY

SEQ ID NO: 26693 - protein, 11 aa, Artificial Sequence
  Peptide Derived from Human Papillomavirus
MLGKFKELYGV

SEQ ID NO: 26694 - protein, 8 aa, Artificial Sequence
  Peptide Derived from Human Papillomavirus
MLIQPPKL

SEQ ID NO: 26695 - protein, 10 aa, Artificial Sequence
  Peptide Derived from Human Papillomavirus
MLMLVRFKCA

SEQ ID NO: 26696 - protein, 8 aa, Artificial Sequence
  Peptide Derived from Human Papillomavirus
MLVRFKCA

SEQ ID NO: 26697 - protein, 8 aa, Artificial Sequence
  Peptide Derived from Human Papillomavirus
MQLKCPPL

SEQ ID NO: 26698 - protein, 9 aa, Artificial Sequence
  Peptide Derived from Human Papillomavirus
MQLKCPPLL

SEQ ID NO: 26699 - protein, 10 aa, Artificial Sequence
  Peptide Derived from Human Papillomavirus
MQLKCPPLLI

SEQ ID NO: 26700 - protein, 10 aa, Artificial Sequence
  Peptide Derived from Human Papillomavirus
MVDFIDNCNV

SEQ ID NO: 26701 - protein, 11 aa, Artificial Sequence
  Peptide Derived from Human Papillomavirus
MVDFIDNCNVY

SEQ ID NO: 26702 - protein, 9 aa, Artificial Sequence
  Peptide Derived from Human Papillomavirus
MVMLMLVRF

SEQ ID NO: 26703 - protein, 11 aa, Artificial Sequence
  Peptide Derived from Human Papillomavirus
MVQVEEQQTTL

SEQ ID NO: 26704 - protein, 10 aa, Artificial Sequence
  Peptide Derived from Human Papillomavirus
MVQWAYDNDV

SEQ ID NO: 26705 - protein, 11 aa, Artificial Sequence
  Peptide Derived from Human Papillomavirus
MVQWAYDNDVM

SEQ ID NO: 26706 - protein, 10 aa, Artificial Sequence
  Peptide Derived from Human Papillomavirus
NINAGKDDRW

SEQ ID NO: 26707 - protein, 8 aa, Artificial Sequence
  Peptide Derived from Human Papillomavirus
NISPRLKA

SEQ ID NO: 26708 - protein, 9 aa, Artificial Sequence
  Peptide Derived from Human Papillomavirus
NISPRLKAI

SEQ ID NO: 26709 - protein, 11 aa, Artificial Sequence
  Peptide Derived from Human Papillomavirus
NISPRLKAICI

SEQ ID NO: 26710 - protein, 11 aa, Artificial Sequence
  Peptide Derived from Human Papillomavirus
NPVSIDVKHKA

SEQ ID NO: 26711 - protein, 11 aa, Artificial Sequence
  Peptide Derived from Human Papillomavirus
NPVYELSDKNW

SEQ ID NO: 26712 - protein, 8 aa, Artificial Sequence
  Peptide Derived from Human Papillomavirus
NQAEAETA

SEQ ID NO: 26713 - protein, 10 aa, Artificial Sequence
  Peptide Derived from Human Papillomavirus
NQAEAETAQA

SEQ ID NO: 26714 - protein, 11 aa, Artificial Sequence
  Peptide Derived from Human Papillomavirus
NQAEAETAQAL

SEQ ID NO: 26715 - protein, 9 aa, Artificial Sequence
  Peptide Derived from Human Papillomavirus
NVYNNQAEA

SEQ ID NO: 26716 - protein, 9 aa, Artificial Sequence
  Peptide Derived from Human Papillomavirus
PLADAKIGM

SEQ ID NO: 26717 - protein, 10 aa, Artificial Sequence
  Peptide Derived from Human Papillomavirus
PLADAKIGML

SEQ ID NO: 26718 - protein, 8 aa, Artificial Sequence
  Peptide Derived from Human Papillomavirus
PLLITSNI

SEQ ID NO: 26719 - protein, 10 aa, Artificial Sequence
  Peptide Derived from Human Papillomavirus
PLLITSNINA

SEQ ID NO: 26720 - protein, 9 aa, Artificial Sequence
  Peptide Derived from Human Papillomavirus
PLSDISSCV

SEQ ID NO: 26721 - protein, 11 aa, Artificial Sequence
  Peptide Derived from Human Papillomavirus
PLSDISSCVDY

SEQ ID NO: 26722 - protein, 8 aa, Artificial Sequence
  Peptide Derived from Human Papillomavirus
PPKLRSTA

SEQ ID NO: 26723 - protein, 9 aa, Artificial Sequence
  Peptide Derived from Human Papillomavirus
PPKLRSTAA

SEQ ID NO: 26724 - protein, 10 aa, Artificial Sequence
  Peptide Derived from Human Papillomavirus
PPKLRSTAAA

SEQ ID NO: 26725 - protein, 11 aa, Artificial Sequence
  Peptide Derived from Human Papillomavirus
PPKLRSTAAAL

SEQ ID NO: 26726 - protein, 9 aa, Artificial Sequence
  Peptide Derived from Human Papillomavirus
PPLLITSNI

SEQ ID NO: 26727 - protein, 11 aa, Artificial Sequence
  Peptide Derived from Human Papillomavirus
PPLLITSNINA

SEQ ID NO: 26728 - protein, 10 aa, Artificial Sequence
  Peptide Derived from Human Papillomavirus
PVSIDVKHKA

SEQ ID NO: 26729 - protein, 11 aa, Artificial Sequence
  Peptide Derived from Human Papillomavirus
PVSIDVKHKAL

SEQ ID NO: 26730 - protein, 10 aa, Artificial Sequence
  Peptide Derived from Human Papillomavirus
PVYELSDKNW

SEQ ID NO: 26731 - protein, 8 aa, Artificial Sequence
  Peptide Derived from Human Papillomavirus
QIEFVSFL

SEQ ID NO: 26732 - protein, 10 aa, Artificial Sequence
  Peptide Derived from Human Papillomavirus
QIEFVSFLSA

SEQ ID NO: 26733 - protein, 11 aa, Artificial Sequence
  Peptide Derived from Human Papillomavirus
QIEFVSFLSAL

SEQ ID NO: 26734 - protein, 9 aa, Artificial Sequence
  Peptide Derived from Human Papillomavirus
QLADSDSNA

SEQ ID NO: 26735 - protein, 11 aa, Artificial Sequence
  Peptide Derived from Human Papillomavirus
QLADSDSNACA

SEQ ID NO: 26736 - protein, 8 aa, Artificial Sequence
  Peptide Derived from Human Papillomavirus
QLKCPPLL

SEQ ID NO: 26737 - protein, 9 aa, Artificial Sequence
  Peptide Derived from Human Papillomavirus
QLKCPPLLI

SEQ ID NO: 26738 - protein, 8 aa, Artificial Sequence
  Peptide Derived from Human Papillomavirus
QMSMGQWI

SEQ ID NO: 26739 - protein, 11 aa, Artificial Sequence
  Peptide Derived from Human Papillomavirus
QMVQWAYDNDV

SEQ ID NO: 26740 - protein, 8 aa, Artificial Sequence
  Peptide Derived from Human Papillomavirus
QPLADAKI

SEQ ID NO: 26741 - protein, 10 aa, Artificial Sequence
  Peptide Derived from Human Papillomavirus
QPLADAKIGM

SEQ ID NO: 26742 - protein, 11 aa, Artificial Sequence
  Peptide Derived from Human Papillomavirus
QPLADAKIGML

SEQ ID NO: 26743 - protein, 9 aa, Artificial Sequence
  Peptide Derived from Human Papillomavirus
QPPKLRSTA

SEQ ID NO: 26744 - protein, 10 aa, Artificial Sequence
  Peptide Derived from Human Papillomavirus
QPPKLRSTAA

SEQ ID NO: 26745 - protein, 11 aa, Artificial Sequence
  Peptide Derived from Human Papillomavirus
QPPKLRSTAAA

SEQ ID NO: 26746 - protein, 9 aa, Artificial Sequence
  Peptide Derived from Human Papillomavirus
QPYCLYCHL

SEQ ID NO: 26747 - protein, 8 aa, Artificial Sequence
  Peptide Derived from Human Papillomavirus
QQIEFVSF

SEQ ID NO: 26748 - protein, 9 aa, Artificial Sequence
  Peptide Derived from Human Papillomavirus
QQIEFVSFL

SEQ ID NO: 26749 - protein, 11 aa, Artificial Sequence
  Peptide Derived from Human Papillomavirus
QQIEFVSFLSA

SEQ ID NO: 26750 - protein, 9 aa, Artificial Sequence
  Peptide Derived from Human Papillomavirus
QVEEQQTTL

SEQ ID NO: 26751 - protein, 8 aa, Artificial Sequence
  Peptide Derived from Human Papillomavirus
QVLKRKYV

SEQ ID NO: 26752 - protein, 10 aa, Artificial Sequence
  Peptide Derived from Human Papillomavirus
QVLKTSNGKA

SEQ ID NO: 26753 - protein, 11 aa, Artificial Sequence
  Peptide Derived from Human Papillomavirus
QVLKTSNGKAA

SEQ ID NO: 26754 - protein, 8 aa, Artificial Sequence
  Peptide Derived from Human Papillomavirus
RITIEKLL

SEQ ID NO: 26755 - protein, 11 aa, Artificial Sequence
  Peptide Derived from Human Papillomavirus
RITIEKLLEKL

SEQ ID NO: 26756 - protein, 10 aa, Artificial Sequence
  Peptide Derived from Human Papillomavirus
RLFELPDSGY

SEQ ID NO: 26757 - protein, 11 aa, Artificial Sequence
  Peptide Derived from Human Papillomavirus
RLVVFTFPNPF

SEQ ID NO: 26758 - protein, 8 aa, Artificial Sequence
  Peptide Derived from Human Papillomavirus
RQMSMGQW

SEQ ID NO: 26759 - protein, 9 aa, Artificial Sequence
  Peptide Derived from Human Papillomavirus
RQMSMGQWI

SEQ ID NO: 26760 - protein, 9 aa, Artificial Sequence
  Peptide Derived from Human Papillomavirus
RQTVLQHSF

SEQ ID NO: 26761 - protein, 8 aa, Artificial Sequence
  Peptide Derived from Human Papillomavirus
SIDVKHKA

SEQ ID NO: 26762 - protein, 9 aa, Artificial Sequence
  Peptide Derived from Human Papillomavirus
SIDVKHKAL

SEQ ID NO: 26763 - protein, 10 aa, Artificial Sequence
  Peptide Derived from Human Papillomavirus
SIDVKHKALM

SEQ ID NO: 26764 - protein, 8 aa, Artificial Sequence
  Peptide Derived from Human Papillomavirus
SLACSWGM

SEQ ID NO: 26765 - protein, 9 aa, Artificial Sequence
  Peptide Derived from Human Papillomavirus
SLACSWGMV

SEQ ID NO: 26766 - protein, 10 aa, Artificial Sequence
  Peptide Derived from Human Papillomavirus
SLACSWGMVM

SEQ ID NO: 26767 - protein, 11 aa, Artificial Sequence
  Peptide Derived from Human Papillomavirus
SLACSWGMVML

SEQ ID NO: 26768 - protein, 10 aa, Artificial Sequence
  Peptide Derived from Human Papillomavirus
SLISFLQGCI

SEQ ID NO: 26769 - protein, 11 aa, Artificial Sequence
  Peptide Derived from Human Papillomavirus
SLISFLQGCII

SEQ ID NO: 26770 - protein, 10 aa, Artificial Sequence
  Peptide Derived from Human Papillomavirus
SPLSDISSCV

SEQ ID NO: 26771 - protein, 9 aa, Artificial Sequence
  Peptide Derived from Human Papillomavirus
SPRLKAICI

SEQ ID NO: 26772 - protein, 8 aa, Artificial Sequence
  Peptide Derived from Human Papillomavirus
SQMVQWAY

SEQ ID NO: 26773 - protein, 9 aa, Artificial Sequence
  Peptide Derived from Human Papillomavirus
TIEKLLEKL

SEQ ID NO: 26774 - protein, 10 aa, Artificial Sequence
  Peptide Derived from Human Papillomavirus
TIEKLLEKLL

SEQ ID NO: 26775 - protein, 8 aa, Artificial Sequence
  Peptide Derived from Human Papillomavirus
TLLQPYCL

SEQ ID NO: 26776 - protein, 9 aa, Artificial Sequence
  Peptide Derived from Human Papillomavirus
TLLQPYCLY

SEQ ID NO: 26777 - protein, 9 aa, Artificial Sequence
  Peptide Derived from Human Papillomavirus
TMCRHYKRA

SEQ ID NO: 26778 - protein, 10 aa, Artificial Sequence
  Peptide Derived from Human Papillomavirus
TPCWHYIDNY

SEQ ID NO: 26779 - protein, 11 aa, Artificial Sequence
  Peptide Derived from Human Papillomavirus
TPCWHYIDNYL

SEQ ID NO: 26780 - protein, 10 aa, Artificial Sequence
  Peptide Derived from Human Papillomavirus
TPEWIERQTV

SEQ ID NO: 26781 - protein, 11 aa, Artificial Sequence
  Peptide Derived from Human Papillomavirus
TPEWIERQTVL

SEQ ID NO: 26782 - protein, 9 aa, Artificial Sequence
  Peptide Derived from Human Papillomavirus
TPTRNILQV

SEQ ID NO: 26783 - protein, 10 aa, Artificial Sequence
  Peptide Derived from Human Papillomavirus
TPTRNILQVL

SEQ ID NO: 26784 - protein, 9 aa, Artificial Sequence
  Peptide Derived from Human Papillomavirus
TVAEGFKTL

SEQ ID NO: 26785 - protein, 10 aa, Artificial Sequence
  Peptide Derived from Human Papillomavirus
TVAEGFKTLL

SEQ ID NO: 26786 - protein, 10 aa, Artificial Sequence
  Peptide Derived from Human Papillomavirus
VIDRQTGDNI

SEQ ID NO: 26787 - protein, 11 aa, Artificial Sequence
  Peptide Derived from Human Papillomavirus
VLKRKYVGSPL

SEQ ID NO: 26788 - protein, 9 aa, Artificial Sequence
  Peptide Derived from Human Papillomavirus
VLKTSNGKA

SEQ ID NO: 26789 - protein, 10 aa, Artificial Sequence
  Peptide Derived from Human Papillomavirus
VLKTSNGKAA

SEQ ID NO: 26790 - protein, 11 aa, Artificial Sequence
  Peptide Derived from Human Papillomavirus
VLKTSNGKAAM

SEQ ID NO: 26791 - protein, 11 aa, Artificial Sequence
  Peptide Derived from Human Papillomavirus
VLQHSFNDTTF

SEQ ID NO: 26792 - protein, 8 aa, Artificial Sequence
  Peptide Derived from Human Papillomavirus
VMDDSEIA

SEQ ID NO: 26793 - protein, 9 aa, Artificial Sequence
  Peptide Derived from Human Papillomavirus
VMDDSEIAY

SEQ ID NO: 26794 - protein, 11 aa, Artificial Sequence
  Peptide Derived from Human Papillomavirus
VMDDSEIAYKY

SEQ ID NO: 26795 - protein, 8 aa, Artificial Sequence
  Peptide Derived from Human Papillomavirus
VMLMLVRF

SEQ ID NO: 26796 - protein, 11 aa, Artificial Sequence
  Peptide Derived from Human Papillomavirus
VMLMLVRFKCA

SEQ ID NO: 26797 - protein, 8 aa, Artificial Sequence
  Peptide Derived from Human Papillomavirus
VPKKNCIL

SEQ ID NO: 26798 - protein, 9 aa, Artificial Sequence
  Peptide Derived from Human Papillomavirus
VPKKNCILI

SEQ ID NO: 26799 - protein, 10 aa, Artificial Sequence
  Peptide Derived from Human Papillomavirus
VQVEEQQTTL

SEQ ID NO: 26800 - protein, 8 aa, Artificial Sequence
  Peptide Derived from Human Papillomavirus
VQVLKRKY

SEQ ID NO: 26801 - protein, 9 aa, Artificial Sequence
  Peptide Derived from Human Papillomavirus
VQVLKRKYV

SEQ ID NO: 26802 - protein, 9 aa, Artificial Sequence
  Peptide Derived from Human Papillomavirus
VQWAYDNDV

SEQ ID NO: 26803 - protein, 10 aa, Artificial Sequence
  Peptide Derived from Human Papillomavirus
VQWAYDNDVM

SEQ ID NO: 26804 - protein, 9 aa, Artificial Sequence
  Peptide Derived from Human Papillomavirus
VVFTFPNPF

SEQ ID NO: 26805 - protein, 11 aa, Artificial Sequence
  Peptide Derived from Human Papillomavirus
VVFTFPNPFPF

SEQ ID NO: 26806 - protein, 8 aa, Artificial Sequence
  Peptide Derived from Human Papillomavirus
WIERQTVL

SEQ ID NO: 26807 - protein, 9 aa, Artificial Sequence
  Peptide Derived from Human Papillomavirus
WIKSRCDKV

SEQ ID NO: 26808 - protein, 8 aa, Artificial Sequence
  Peptide Derived from Human Papillomavirus
WLQPLADA

SEQ ID NO: 26809 - protein, 10 aa, Artificial Sequence
  Peptide Derived from Human Papillomavirus
WLQPLADAKI

SEQ ID NO: 26810 - protein, 8 aa, Artificial Sequence
  Peptide Derived from Human Papillomavirus
WPYLHSRL

SEQ ID NO: 26811 - protein, 9 aa, Artificial Sequence
  Peptide Derived from Human Papillomavirus
WPYLHSRLV

SEQ ID NO: 26812 - protein, 10 aa, Artificial Sequence
  Peptide Derived from Human Papillomavirus
WPYLHSRLVV

SEQ ID NO: 26813 - protein, 11 aa, Artificial Sequence
  Peptide Derived from Human Papillomavirus
WPYLHSRLVVF

SEQ ID NO: 26814 - protein, 9 aa, Artificial Sequence
  Peptide Derived from Human Papillomavirus
YIDNYLRNA

SEQ ID NO: 26815 - protein, 10 aa, Artificial Sequence
  Peptide Derived from Human Papillomavirus
YIDNYLRNAL

SEQ ID NO: 26816 - protein, 8 aa, Artificial Sequence
  Peptide Derived from Human Papillomavirus
YLHSRLVV

SEQ ID NO: 26817 - protein, 9 aa, Artificial Sequence
  Peptide Derived from Human Papillomavirus
YLHSRLVVF

SEQ ID NO: 26818 - protein, 11 aa, Artificial Sequence
  Peptide Derived from Human Papillomavirus
YLHSRLVVFTF

SEQ ID NO: 26819 - protein, 11 aa, Artificial Sequence
  Peptide Derived from Human Papillomavirus
YLRNALDGNPV

SEQ ID NO: 26820 - protein, 9 aa, Artificial Sequence
  Peptide Derived from Human Papillomavirus
YQQIEFVSF

SEQ ID NO: 26821 - protein, 10 aa, Artificial Sequence
  Peptide Derived from Human Papillomavirus
YQQIEFVSFL

SEQ ID NO: 26822 - protein, 9 aa, Artificial Sequence
  Peptide Derived from Human Papillomavirus
YVGSPLSDI

SEQ ID NO: 26823 - protein, 8 aa, Artificial Sequence
  Peptide Derived from Human Papillomavirus
AIELQMML

SEQ ID NO: 26824 - protein, 11 aa, Artificial Sequence
  Peptide Derived from Human Papillomavirus
AIELQMMLETL

SEQ ID NO: 26825 - protein, 8 aa, Artificial Sequence
  Peptide Derived from Human Papillomavirus
AIVTLTYI

SEQ ID NO: 26826 - protein, 8 aa, Artificial Sequence
  Peptide Derived from Human Papillomavirus
ALGTSEGV

SEQ ID NO: 26827 - protein, 11 aa, Artificial Sequence
  Peptide Derived from Human Papillomavirus
ALGTSEGVRRA

SEQ ID NO: 26828 - protein, 9 aa, Artificial Sequence
  Peptide Derived from Human Papillomavirus
ALQAIELQM

SEQ ID NO: 26829 - protein, 10 aa, Artificial Sequence
  Peptide Derived from Human Papillomavirus
ALQAIELQMM

SEQ ID NO: 26830 - protein, 11 aa, Artificial Sequence
  Peptide Derived from Human Papillomavirus
ALQAIELQMML

SEQ ID NO: 26831 - protein, 9 aa, Artificial Sequence
  Peptide Derived from Human Papillomavirus
ALSVSKAKA

SEQ ID NO: 26832 - protein, 10 aa, Artificial Sequence
  Peptide Derived from Human Papillomavirus
ALSVSKAKAL

SEQ ID NO: 26833 - protein, 11 aa, Artificial Sequence
  Peptide Derived from Human Papillomavirus
APTGCLKKHGY

SEQ ID NO: 26834 - protein, 10 aa, Artificial Sequence
  Peptide Derived from Human Papillomavirus
AVSCPATTPI

SEQ ID NO: 26835 - protein, 11 aa, Artificial Sequence
  Peptide Derived from Human Papillomavirus
AVSCPATTPII

SEQ ID NO: 26836 - protein, 8 aa, Artificial Sequence
  Peptide Derived from Human Papillomavirus
CIDGQCTV

SEQ ID NO: 26837 - protein, 9 aa, Artificial Sequence
  Peptide Derived from Human Papillomavirus
CIDGQCTVV

SEQ ID NO: 26838 - protein, 9 aa, Artificial Sequence
  Peptide Derived from Human Papillomavirus
CLKKHGYTV

SEQ ID NO: 26839 - protein, 11 aa, Artificial Sequence
  Peptide Derived from Human Papillomavirus
CLKKHGYTVEV

SEQ ID NO: 26840 - protein, 9 aa, Artificial Sequence
  Peptide Derived from Human Papillomavirus
CLRYRLSKY

SEQ ID NO: 26841 - protein, 8 aa, Artificial Sequence
  Peptide Derived from Human Papillomavirus
CPATTPII

SEQ ID NO: 26842 - protein, 10 aa, Artificial Sequence
  Peptide Derived from Human Papillomavirus
CPATTPIIHL

SEQ ID NO: 26843 - protein, 9 aa, Artificial Sequence
  Peptide Derived from Human Papillomavirus
CQDKILEHY

SEQ ID NO: 26844 - protein, 10 aa, Artificial Sequence
  Peptide Derived from Human Papillomavirus
CVLMYKAREM

SEQ ID NO: 26845 - protein, 8 aa, Artificial Sequence
  Peptide Derived from Human Papillomavirus
DVHNTMHY

SEQ ID NO: 26846 - protein, 11 aa, Artificial Sequence
  Peptide Derived from Human Papillomavirus
DVHNTMHYTNW

SEQ ID NO: 26847 - protein, 8 aa, Artificial Sequence
  Peptide Derived from Human Papillomavirus
EISFAGIV

SEQ ID NO: 26848 - protein, 11 aa, Artificial Sequence
  Peptide Derived from Human Papillomavirus
EISFAGIVTKL

SEQ ID NO: 26849 - protein, 9 aa, Artificial Sequence
  Peptide Derived from Human Papillomavirus
ELQMMLETL

SEQ ID NO: 26850 - protein, 11 aa, Artificial Sequence
  Peptide Derived from Human Papillomavirus
ELYLTAPTGCL

SEQ ID NO: 26851 - protein, 11 aa, Artificial Sequence
  Peptide Derived from Human Papillomavirus
EMGIHSINHQV

SEQ ID NO: 26852 - protein, 9 aa, Artificial Sequence
  Peptide Derived from Human Papillomavirus
EQVSSTWHW

SEQ ID NO: 26853 - protein, 8 aa, Artificial Sequence
  Peptide Derived from Human Papillomavirus
EVHAGGQV

SEQ ID NO: 26854 - protein, 9 aa, Artificial Sequence
  Peptide Derived from Human Papillomavirus
EVHAGGQVI

SEQ ID NO: 26855 - protein, 10 aa, Artificial Sequence
  Peptide Derived from Human Papillomavirus
EVHAGGQVIV

SEQ ID NO: 26856 - protein, 11 aa, Artificial Sequence
  Peptide Derived from Human Papillomavirus
EVHAGGQVIVF

SEQ ID NO: 26857 - protein, 8 aa, Artificial Sequence
  Peptide Derived from Human Papillomavirus
EVQFDGDV

SEQ ID NO: 26858 - protein, 11 aa, Artificial Sequence
  Peptide Derived from Human Papillomavirus
FLNTVKIPNTV

SEQ ID NO: 26859 - protein, 11 aa, Artificial Sequence
  Peptide Derived from Human Papillomavirus
FPESVFSSDEI

SEQ ID NO: 26860 - protein, 8 aa, Artificial Sequence
  Peptide Derived from Human Papillomavirus
FVNFTEEA

SEQ ID NO: 26861 - protein, 11 aa, Artificial Sequence
  Peptide Derived from Human Papillomavirus
FVNFTEEAKKY

SEQ ID NO: 26862 - protein, 9 aa, Artificial Sequence
  Peptide Derived from Human Papillomavirus
GIHSINHQV

SEQ ID NO: 26863 - protein, 10 aa, Artificial Sequence
  Peptide Derived from Human Papillomavirus
GIHSINHQVV

SEQ ID NO: 26864 - protein, 9 aa, Artificial Sequence
  Peptide Derived from Human Papillomavirus
GIVTKLPTA

SEQ ID NO: 26865 - protein, 10 aa, Artificial Sequence
  Peptide Derived from Human Papillomavirus
GIYYVHEGHI

SEQ ID NO: 26866 - protein, 10 aa, Artificial Sequence
  Peptide Derived from Human Papillomavirus
GQCTVVEGQV

SEQ ID NO: 26867 - protein, 10 aa, Artificial Sequence
  Peptide Derived from Human Papillomavirus
GQVIVFPESV

SEQ ID NO: 26868 - protein, 11 aa, Artificial Sequence
  Peptide Derived from Human Papillomavirus
GQVIVFPESVF

SEQ ID NO: 26869 - protein, 8 aa, Artificial Sequence
  Peptide Derived from Human Papillomavirus
GQVNCKGI

SEQ ID NO: 26870 - protein, 9 aa, Artificial Sequence
  Peptide Derived from Human Papillomavirus
GQVNCKGIY

SEQ ID NO: 26871 - protein, 10 aa, Artificial Sequence
  Peptide Derived from Human Papillomavirus
GQVNCKGIYY

SEQ ID NO: 26872 - protein, 11 aa, Artificial Sequence
  Peptide Derived from Human Papillomavirus
GQVNCKGIYYV

SEQ ID NO: 26873 - protein, 8 aa, Artificial Sequence
  Peptide Derived from Human Papillomavirus
HIDYWKHI

SEQ ID NO: 26874 - protein, 10 aa, Artificial Sequence
  Peptide Derived from Human Papillomavirus
HIDYWKHIRL

SEQ ID NO: 26875 - protein, 8 aa, Artificial Sequence
  Peptide Derived from Human Papillomavirus
HIRLECVL

SEQ ID NO: 26876 - protein, 9 aa, Artificial Sequence
  Peptide Derived from Human Papillomavirus
HIRLECVLM

SEQ ID NO: 26877 - protein, 10 aa, Artificial Sequence
  Peptide Derived from Human Papillomavirus
HIRLECVLMY

SEQ ID NO: 26878 - protein, 8 aa, Artificial Sequence
  Peptide Derived from Human Papillomavirus
HITYFVNF

SEQ ID NO: 26879 - protein, 8 aa, Artificial Sequence
  Peptide Derived from Human Papillomavirus
HLKGDANI

SEQ ID NO: 26880 - protein, 9 aa, Artificial Sequence
  Peptide Derived from Human Papillomavirus
HLKGDANIL

SEQ ID NO: 26881 - protein, 11 aa, Artificial Sequence
  Peptide Derived from Human Papillomavirus
HPNKLLRGDSV

SEQ ID NO: 26882 - protein, 9 aa, Artificial Sequence
  Peptide Derived from Human Papillomavirus
HQVVPALSV

SEQ ID NO: 26883 - protein, 8 aa, Artificial Sequence
  Peptide Derived from Human Papillomavirus
IIHLKGDA

SEQ ID NO: 26884 - protein, 10 aa, Artificial Sequence
  Peptide Derived from Human Papillomavirus
IIHLKGDANI

SEQ ID NO: 26885 - protein, 11 aa, Artificial Sequence
  Peptide Derived from Human Papillomavirus
IIHLKGDANIL

SEQ ID NO: 26886 - protein, 9 aa, Artificial Sequence
  Peptide Derived from Human Papillomavirus
ILKCLRYRL

SEQ ID NO: 26887 - protein, 11 aa, Artificial Sequence
  Peptide Derived from Human Papillomavirus
IPNTVSVSTGY

SEQ ID NO: 26888 - protein, 8 aa, Artificial Sequence
  Peptide Derived from Human Papillomavirus
IVFPESVF

SEQ ID NO: 26889 - protein, 8 aa, Artificial Sequence
  Peptide Derived from Human Papillomavirus
IVTKLPTA

SEQ ID NO: 26890 - protein, 8 aa, Artificial Sequence
  Peptide Derived from Human Papillomavirus
KIPNTVSV

SEQ ID NO: 26891 - protein, 8 aa, Artificial Sequence
  Peptide Derived from Human Papillomavirus
KLLRGDSV

SEQ ID NO: 26892 - protein, 11 aa, Artificial Sequence
  Peptide Derived from Human Papillomavirus
KLLRGDSVDSV

SEQ ID NO: 26893 - protein, 11 aa, Artificial Sequence
  Peptide Derived from Human Papillomavirus
KQLYEQVSSTW

SEQ ID NO: 26894 - protein, 10 aa, Artificial Sequence
  Peptide Derived from Human Papillomavirus
LLRGDSVDSV

SEQ ID NO: 26895 - protein, 8 aa, Artificial Sequence
  Peptide Derived from Human Papillomavirus
LMYKAREM

SEQ ID NO: 26896 - protein, 10 aa, Artificial Sequence
  Peptide Derived from Human Papillomavirus
LMYKAREMGI

SEQ ID NO: 26897 - protein, 8 aa, Artificial Sequence
  Peptide Derived from Human Papillomavirus
LQAIELQM

SEQ ID NO: 26898 - protein, 9 aa, Artificial Sequence
  Peptide Derived from Human Papillomavirus
LQAIELQMM

SEQ ID NO: 26899 - protein, 10 aa, Artificial Sequence
  Peptide Derived from Human Papillomavirus
LQAIELQMML

SEQ ID NO: 26900 - protein, 8 aa, Artificial Sequence
  Peptide Derived from Human Papillomavirus
LQMMLETL

SEQ ID NO: 26901 - protein, 10 aa, Artificial Sequence
  Peptide Derived from Human Papillomavirus
MLETLNNTEY

SEQ ID NO: 26902 - protein, 11 aa, Artificial Sequence
  Peptide Derived from Human Papillomavirus
MMLETLNNTEY

SEQ ID NO: 26903 - protein, 8 aa, Artificial Sequence
  Peptide Derived from Human Papillomavirus
MQQTSLEL

SEQ ID NO: 26904 - protein, 9 aa, Artificial Sequence
  Peptide Derived from Human Papillomavirus
MQQTSLELY

SEQ ID NO: 26905 - protein, 10 aa, Artificial Sequence
  Peptide Derived from Human Papillomavirus
MQQTSLELYL

SEQ ID NO: 26906 - protein, 8 aa, Artificial Sequence
  Peptide Derived from Human Papillomavirus
NILKCLRY

SEQ ID NO: 26907 - protein, 10 aa, Artificial Sequence
  Peptide Derived from Human Papillomavirus
NILKCLRYRL

SEQ ID NO: 26908 - protein, 10 aa, Artificial Sequence
  Peptide Derived from Human Papillomavirus
NQTRAVSCPA

SEQ ID NO: 26909 - protein, 8 aa, Artificial Sequence
  Peptide Derived from Human Papillomavirus
NVCQDKIL

SEQ ID NO: 26910 - protein, 11 aa, Artificial Sequence
  Peptide Derived from Human Papillomavirus
NVCQDKILEHY

SEQ ID NO: 26911 - protein, 9 aa, Artificial Sequence
  Peptide Derived from Human Papillomavirus
PIIHLKGDA

SEQ ID NO: 26912 - protein, 11 aa, Artificial Sequence
  Peptide Derived from Human Papillomavirus
PIIHLKGDANI

SEQ ID NO: 26913 - protein, 10 aa, Artificial Sequence
  Peptide Derived from Human Papillomavirus
QLYEQVSSTW

SEQ ID NO: 26914 - protein, 8 aa, Artificial Sequence
  Peptide Derived from Human Papillomavirus
QQTSLELY

SEQ ID NO: 26915 - protein, 9 aa, Artificial Sequence
  Peptide Derived from Human Papillomavirus
QQTSLELYL

SEQ ID NO: 26916 - protein, 11 aa, Artificial Sequence
  Peptide Derived from Human Papillomavirus
QQTSLELYLTA

SEQ ID NO: 26917 - protein, 9 aa, Artificial Sequence
  Peptide Derived from Human Papillomavirus
QVIVFPESV

SEQ ID NO: 26918 - protein, 10 aa, Artificial Sequence
  Peptide Derived from Human Papillomavirus
QVIVFPESVF

SEQ ID NO: 26919 - protein, 8 aa, Artificial Sequence
  Peptide Derived from Human Papillomavirus
QVNCKGIY

SEQ ID NO: 26920 - protein, 9 aa, Artificial Sequence
  Peptide Derived from Human Papillomavirus
QVNCKGIYY

SEQ ID NO: 26921 - protein, 10 aa, Artificial Sequence
  Peptide Derived from Human Papillomavirus
QVNCKGIYYV

SEQ ID NO: 26922 - protein, 8 aa, Artificial Sequence
  Peptide Derived from Human Papillomavirus
QVSSTWHW

SEQ ID NO: 26923 - protein, 8 aa, Artificial Sequence
  Peptide Derived from Human Papillomavirus
QVVPALSV

SEQ ID NO: 26924 - protein, 11 aa, Artificial Sequence
  Peptide Derived from Human Papillomavirus
QVVPALSVSKA

SEQ ID NO: 26925 - protein, 8 aa, Artificial Sequence
  Peptide Derived from Human Papillomavirus
RLCDHIDY

SEQ ID NO: 26926 - protein, 9 aa, Artificial Sequence
  Peptide Derived from Human Papillomavirus
RLCDHIDYW

SEQ ID NO: 26927 - protein, 8 aa, Artificial Sequence
  Peptide Derived from Human Papillomavirus
RLECVLMY

SEQ ID NO: 26928 - protein, 10 aa, Artificial Sequence
  Peptide Derived from Human Papillomavirus
RLECVLMYKA

SEQ ID NO: 26929 - protein, 9 aa, Artificial Sequence
  Peptide Derived from Human Papillomavirus
RLNVCQDKI

SEQ ID NO: 26930 - protein, 10 aa, Artificial Sequence
  Peptide Derived from Human Papillomavirus
RLNVCQDKIL

SEQ ID NO: 26931 - protein, 8 aa, Artificial Sequence
  Peptide Derived from Human Papillomavirus
RLSKYKQL

SEQ ID NO: 26932 - protein, 9 aa, Artificial Sequence
  Peptide Derived from Human Papillomavirus
RLSKYKQLY

SEQ ID NO: 26933 - protein, 9 aa, Artificial Sequence
  Peptide Derived from Human Papillomavirus
SINHQVVPA

SEQ ID NO: 26934 - protein, 10 aa, Artificial Sequence
  Peptide Derived from Human Papillomavirus
SINHQVVPAL

SEQ ID NO: 26935 - protein, 8 aa, Artificial Sequence
  Peptide Derived from Human Papillomavirus
SLELYLTA

SEQ ID NO: 26936 - protein, 10 aa, Artificial Sequence
  Peptide Derived from Human Papillomavirus
SQRDDFLNTV

SEQ ID NO: 26937 - protein, 11 aa, Artificial Sequence
  Peptide Derived from Human Papillomavirus
SQRLNVCQDKI

SEQ ID NO: 26938 - protein, 9 aa, Artificial Sequence
  Peptide Derived from Human Papillomavirus
SVDSVNCGV

SEQ ID NO: 26939 - protein, 10 aa, Artificial Sequence
  Peptide Derived from Human Papillomavirus
SVDSVNCGVI

SEQ ID NO: 26940 - protein, 8 aa, Artificial Sequence
  Peptide Derived from Human Papillomavirus
SVFSSDEI

SEQ ID NO: 26941 - protein, 10 aa, Artificial Sequence
  Peptide Derived from Human Papillomavirus
SVFSSDEISF

SEQ ID NO: 26942 - protein, 11 aa, Artificial Sequence
  Peptide Derived from Human Papillomavirus
SVFSSDEISFA

SEQ ID NO: 26943 - protein, 9 aa, Artificial Sequence
  Peptide Derived from Human Papillomavirus
SVNCGVISA

SEQ ID NO: 26944 - protein, 10 aa, Artificial Sequence
  Peptide Derived from Human Papillomavirus
SVNCGVISAA

SEQ ID NO: 26945 - protein, 11 aa, Artificial Sequence
  Peptide Derived from Human Papillomavirus
SVNCGVISAAA

SEQ ID NO: 26946 - protein, 8 aa, Artificial Sequence
  Peptide Derived from Human Papillomavirus
SVSKAKAL

SEQ ID NO: 26947 - protein, 10 aa, Artificial Sequence
  Peptide Derived from Human Papillomavirus
SVSKAKALQA

SEQ ID NO: 26948 - protein, 11 aa, Artificial Sequence
  Peptide Derived from Human Papillomavirus
SVSKAKALQAI

SEQ ID NO: 26949 - protein, 9 aa, Artificial Sequence
  Peptide Derived from Human Papillomavirus
SVSTGYMTI

SEQ ID NO: 26950 - protein, 8 aa, Artificial Sequence
  Peptide Derived from Human Papillomavirus
TLSQRLNV

SEQ ID NO: 26951 - protein, 9 aa, Artificial Sequence
  Peptide Derived from Human Papillomavirus
TMHYTNWKF

SEQ ID NO: 26952 - protein, 10 aa, Artificial Sequence
  Peptide Derived from Human Papillomavirus
TMHYTNWKFI

SEQ ID NO: 26953 - protein, 11 aa, Artificial Sequence
  Peptide Derived from Human Papillomavirus
TMHYTNWKFIY

SEQ ID NO: 26954 - protein, 9 aa, Artificial Sequence
  Peptide Derived from Human Papillomavirus
TMQQTSLEL

SEQ ID NO: 26955 - protein, 10 aa, Artificial Sequence
  Peptide Derived from Human Papillomavirus
TMQQTSLELY

SEQ ID NO: 26956 - protein, 11 aa, Artificial Sequence
  Peptide Derived from Human Papillomavirus
TMQQTSLELYL

SEQ ID NO: 26957 - protein, 10 aa, Artificial Sequence
  Peptide Derived from Human Papillomavirus
TPIIHLKGDA

SEQ ID NO: 26958 - protein, 10 aa, Artificial Sequence
  Peptide Derived from Human Papillomavirus
TVEVQFDGDV

SEQ ID NO: 26959 - protein, 8 aa, Artificial Sequence
  Peptide Derived from Human Papillomavirus
TVKIPNTV

SEQ ID NO: 26960 - protein, 10 aa, Artificial Sequence
  Peptide Derived from Human Papillomavirus
TVKIPNTVSV

SEQ ID NO: 26961 - protein, 8 aa, Artificial Sequence
  Peptide Derived from Human Papillomavirus
TVSVSTGY

SEQ ID NO: 26962 - protein, 9 aa, Artificial Sequence
  Peptide Derived from Human Papillomavirus
TVSVSTGYM

SEQ ID NO: 26963 - protein, 11 aa, Artificial Sequence
  Peptide Derived from Human Papillomavirus
TVSVSTGYMTI

SEQ ID NO: 26964 - protein, 8 aa, Artificial Sequence
  Peptide Derived from Human Papillomavirus
VIVFPESV

SEQ ID NO: 26965 - protein, 9 aa, Artificial Sequence
  Peptide Derived from Human Papillomavirus
VIVFPESVF

SEQ ID NO: 26966 - protein, 9 aa, Artificial Sequence
  Peptide Derived from Human Papillomavirus
VLMYKAREM

SEQ ID NO: 26967 - protein, 11 aa, Artificial Sequence
  Peptide Derived from Human Papillomavirus
VLMYKAREMGI

SEQ ID NO: 26968 - protein, 9 aa, Artificial Sequence
  Peptide Derived from Human Papillomavirus
VPALSVSKA

SEQ ID NO: 26969 - protein, 11 aa, Artificial Sequence
  Peptide Derived from Human Papillomavirus
VPALSVSKAKA

SEQ ID NO: 26970 - protein, 11 aa, Artificial Sequence
  Peptide Derived from Human Papillomavirus
VQFDGDVHNTM

SEQ ID NO: 26971 - protein, 11 aa, Artificial Sequence
  Peptide Derived from Human Papillomavirus
VVEGQVNCKGI

SEQ ID NO: 26972 - protein, 10 aa, Artificial Sequence
  Peptide Derived from Human Papillomavirus
VVPALSVSKA

SEQ ID NO: 26973 - protein, 10 aa, Artificial Sequence
  Peptide Derived from Human Papillomavirus
YISTSQRDDF

SEQ ID NO: 26974 - protein, 11 aa, Artificial Sequence
  Peptide Derived from Human Papillomavirus
YISTSQRDDFL

SEQ ID NO: 26975 - protein, 10 aa, Artificial Sequence
  Peptide Derived from Human Papillomavirus
YLCIDGQCTV

SEQ ID NO: 26976 - protein, 11 aa, Artificial Sequence
  Peptide Derived from Human Papillomavirus
YLCIDGQCTVV

SEQ ID NO: 26977 - protein, 9 aa, Artificial Sequence
  Peptide Derived from Human Papillomavirus
YLTAPTGCL

SEQ ID NO: 26978 - protein, 9 aa, Artificial Sequence
  Peptide Derived from Human Papillomavirus
YVHEGHITY

SEQ ID NO: 26979 - protein, 10 aa, Artificial Sequence
  Peptide Derived from Human Papillomavirus
YVHEGHITYF

SEQ ID NO: 26980 - protein, 11 aa, Artificial Sequence
  Peptide Derived from Human Papillomavirus
YVHEGHITYFV

SEQ ID NO: 26981 - protein, 8 aa, Artificial Sequence
  Peptide Derived from Human Papillomavirus
CIYVVFIY

SEQ ID NO: 26982 - protein, 9 aa, Artificial Sequence
  Peptide Derived from Human Papillomavirus
CIYVVFIYI

SEQ ID NO: 26983 - protein, 11 aa, Artificial Sequence
  Peptide Derived from Human Papillomavirus
CIYVVFIYIPL

SEQ ID NO: 26984 - protein, 8 aa, Artificial Sequence
  Peptide Derived from Human Papillomavirus
CLVIRPLV

SEQ ID NO: 26985 - protein, 9 aa, Artificial Sequence
  Peptide Derived from Human Papillomavirus
CLVIRPLVL

SEQ ID NO: 26986 - protein, 11 aa, Artificial Sequence
  Peptide Derived from Human Papillomavirus
CLVIRPLVLSV

SEQ ID NO: 26987 - protein, 8 aa, Artificial Sequence
  Peptide Derived from Human Papillomavirus
CVLLFVCL

SEQ ID NO: 26988 - protein, 9 aa, Artificial Sequence
  Peptide Derived from Human Papillomavirus
CVLLFVCLV

SEQ ID NO: 26989 - protein, 10 aa, Artificial Sequence
  Peptide Derived from Human Papillomavirus
CVLLFVCLVI

SEQ ID NO: 26990 - protein, 9 aa, Artificial Sequence
  Peptide Derived from Human Papillomavirus
ELNISTVSI

SEQ ID NO: 26991 - protein, 10 aa, Artificial Sequence
  Peptide Derived from Human Papillomavirus
ELNISTVSIV

SEQ ID NO: 26992 - protein, 11 aa, Artificial Sequence
  Peptide Derived from Human Papillomavirus
ELNISTVSIVL

SEQ ID NO: 26993 - protein, 8 aa, Artificial Sequence
  Peptide Derived from Human Papillomavirus
FIYIPLFV

SEQ ID NO: 26994 - protein, 9 aa, Artificial Sequence
  Peptide Derived from Human Papillomavirus
FIYIPLFVI

SEQ ID NO: 26995 - protein, 8 aa, Artificial Sequence
  Peptide Derived from Human Papillomavirus
FLLCFCVL

SEQ ID NO: 26996 - protein, 9 aa, Artificial Sequence
  Peptide Derived from Human Papillomavirus
FLLCFCVLL

SEQ ID NO: 26997 - protein, 10 aa, Artificial Sequence
  Peptide Derived from Human Papillomavirus
FLLCFCVLLF

SEQ ID NO: 26998 - protein, 11 aa, Artificial Sequence
  Peptide Derived from Human Papillomavirus
FLLCFCVLLFV

SEQ ID NO: 26999 - protein, 9 aa, Artificial Sequence
  Peptide Derived from Human Papillomavirus
FVCLVIRPL

SEQ ID NO: 27000 - protein, 10 aa, Artificial Sequence
  Peptide Derived from Human Papillomavirus
FVCLVIRPLV

SEQ ID NO: 27001 - protein, 11 aa, Artificial Sequence
  Peptide Derived from Human Papillomavirus
FVCLVIRPLVL

SEQ ID NO: 27002 - protein, 9 aa, Artificial Sequence
  Peptide Derived from Human Papillomavirus
FVIHTHASF

SEQ ID NO: 27003 - protein, 10 aa, Artificial Sequence
  Peptide Derived from Human Papillomavirus
FVIHTHASFL

SEQ ID NO: 27004 - protein, 10 aa, Artificial Sequence
  Peptide Derived from Human Papillomavirus
ILWVIATSPL

SEQ ID NO: 27005 - protein, 10 aa, Artificial Sequence
  Peptide Derived from Human Papillomavirus
IPLFVIHTHA

SEQ ID NO: 27006 - protein, 8 aa, Artificial Sequence
  Peptide Derived from Human Papillomavirus
IVILWVIA

SEQ ID NO: 27007 - protein, 9 aa, Artificial Sequence
  Peptide Derived from Human Papillomavirus
IVLCFLLCF

SEQ ID NO: 27008 - protein, 11 aa, Artificial Sequence
  Peptide Derived from Human Papillomavirus
IVLCFLLCFCV

SEQ ID NO: 27009 - protein, 8 aa, Artificial Sequence
  Peptide Derived from Human Papillomavirus
LIVILWVI

SEQ ID NO: 27010 - protein, 9 aa, Artificial Sequence
  Peptide Derived from Human Papillomavirus
LIVILWVIA

SEQ ID NO: 27011 - protein, 8 aa, Artificial Sequence
  Peptide Derived from Human Papillomavirus
LLCFCVLL

SEQ ID NO: 27012 - protein, 9 aa, Artificial Sequence
  Peptide Derived from Human Papillomavirus
LLCFCVLLF

SEQ ID NO: 27013 - protein, 10 aa, Artificial Sequence
  Peptide Derived from Human Papillomavirus
LLCFCVLLFV

SEQ ID NO: 27014 - protein, 8 aa, Artificial Sequence
  Peptide Derived from Human Papillomavirus
LLFVCLVI

SEQ ID NO: 27015 - protein, 11 aa, Artificial Sequence
  Peptide Derived from Human Papillomavirus
LLFVCLVIRPL

SEQ ID NO: 27016 - protein, 8 aa, Artificial Sequence
  Peptide Derived from Human Papillomavirus
LLIVILWV

SEQ ID NO: 27017 - protein, 9 aa, Artificial Sequence
  Peptide Derived from Human Papillomavirus
LLIVILWVI

SEQ ID NO: 27018 - protein, 10 aa, Artificial Sequence
  Peptide Derived from Human Papillomavirus
LLIVILWVIA

SEQ ID NO: 27019 - protein, 8 aa, Artificial Sequence
  Peptide Derived from Human Papillomavirus
LLLIVILW

SEQ ID NO: 27020 - protein, 9 aa, Artificial Sequence
  Peptide Derived from Human Papillomavirus
LLLIVILWV

SEQ ID NO: 27021 - protein, 10 aa, Artificial Sequence
  Peptide Derived from Human Papillomavirus
LLLIVILWVI

SEQ ID NO: 27022 - protein, 11 aa, Artificial Sequence
  Peptide Derived from Human Papillomavirus
LLLIVILWVIA

SEQ ID NO: 27023 - protein, 8 aa, Artificial Sequence
  Peptide Derived from Human Papillomavirus
LLLLIVIL

SEQ ID NO: 27024 - protein, 9 aa, Artificial Sequence
  Peptide Derived from Human Papillomavirus
LLLLIVILW

SEQ ID NO: 27025 - protein, 10 aa, Artificial Sequence
  Peptide Derived from Human Papillomavirus
LLLLIVILWV

SEQ ID NO: 27026 - protein, 11 aa, Artificial Sequence
  Peptide Derived from Human Papillomavirus
LLLLIVILWVI

SEQ ID NO: 27027 - protein, 8 aa, Artificial Sequence
  Peptide Derived from Human Papillomavirus
LVIRPLVL

SEQ ID NO: 27028 - protein, 10 aa, Artificial Sequence
  Peptide Derived from Human Papillomavirus
LVIRPLVLSV

SEQ ID NO: 27029 - protein, 8 aa, Artificial Sequence
  Peptide Derived from Human Papillomavirus
LVLSVSVY

SEQ ID NO: 27030 - protein, 9 aa, Artificial Sequence
  Peptide Derived from Human Papillomavirus
LVLSVSVYA

SEQ ID NO: 27031 - protein, 11 aa, Artificial Sequence
  Peptide Derived from Human Papillomavirus
LVLSVSVYATL

SEQ ID NO: 27032 - protein, 9 aa, Artificial Sequence
  Peptide Derived from Human Papillomavirus
MIELNISTV

SEQ ID NO: 27033 - protein, 11 aa, Artificial Sequence
  Peptide Derived from Human Papillomavirus
MIELNISTVSI

SEQ ID NO: 27034 - protein, 8 aa, Artificial Sequence
  Peptide Derived from Human Papillomavirus
NISTVSIV

SEQ ID NO: 27035 - protein, 9 aa, Artificial Sequence
  Peptide Derived from Human Papillomavirus
NISTVSIVL

SEQ ID NO: 27036 - protein, 11 aa, Artificial Sequence
  Peptide Derived from Human Papillomavirus
NISTVSIVLCF

SEQ ID NO: 27037 - protein, 9 aa, Artificial Sequence
  Peptide Derived from Human Papillomavirus
PLFVIHTHA

SEQ ID NO: 27038 - protein, 11 aa, Artificial Sequence
  Peptide Derived from Human Papillomavirus
PLFVIHTHASF

SEQ ID NO: 27039 - protein, 8 aa, Artificial Sequence
  Peptide Derived from Human Papillomavirus
PLRCFCIY

SEQ ID NO: 27040 - protein, 9 aa, Artificial Sequence
  Peptide Derived from Human Papillomavirus
PLRCFCIYV

SEQ ID NO: 27041 - protein, 10 aa, Artificial Sequence
  Peptide Derived from Human Papillomavirus
PLRCFCIYVV

SEQ ID NO: 27042 - protein, 11 aa, Artificial Sequence
  Peptide Derived from Human Papillomavirus
PLRCFCIYVVF

SEQ ID NO: 27043 - protein, 8 aa, Artificial Sequence
  Peptide Derived from Human Papillomavirus
PLVLSVSV

SEQ ID NO: 27044 - protein, 9 aa, Artificial Sequence
  Peptide Derived from Human Papillomavirus
PLVLSVSVY

SEQ ID NO: 27045 - protein, 10 aa, Artificial Sequence
  Peptide Derived from Human Papillomavirus
PLVLSVSVYA

SEQ ID NO: 27046 - protein, 9 aa, Artificial Sequence
  Peptide Derived from Human Papillomavirus
RPLVLSVSV

SEQ ID NO: 27047 - protein, 10 aa, Artificial Sequence
  Peptide Derived from Human Papillomavirus
RPLVLSVSVY

SEQ ID NO: 27048 - protein, 11 aa, Artificial Sequence
  Peptide Derived from Human Papillomavirus
RPLVLSVSVYA

SEQ ID NO: 27049 - protein, 8 aa, Artificial Sequence
  Peptide Derived from Human Papillomavirus
SIVLCFLL

SEQ ID NO: 27050 - protein, 10 aa, Artificial Sequence
  Peptide Derived from Human Papillomavirus
SIVLCFLLCF

SEQ ID NO: 27051 - protein, 8 aa, Artificial Sequence
  Peptide Derived from Human Papillomavirus
SPLRCFCI

SEQ ID NO: 27052 - protein, 9 aa, Artificial Sequence
  Peptide Derived from Human Papillomavirus
SPLRCFCIY

SEQ ID NO: 27053 - protein, 10 aa, Artificial Sequence
  Peptide Derived from Human Papillomavirus
SPLRCFCIYV

SEQ ID NO: 27054 - protein, 11 aa, Artificial Sequence
  Peptide Derived from Human Papillomavirus
SPLRCFCIYVV

SEQ ID NO: 27055 - protein, 8 aa, Artificial Sequence
  Peptide Derived from Human Papillomavirus
SVSVYATL

SEQ ID NO: 27056 - protein, 9 aa, Artificial Sequence
  Peptide Derived from Human Papillomavirus
SVSVYATLL

SEQ ID NO: 27057 - protein, 10 aa, Artificial Sequence
  Peptide Derived from Human Papillomavirus
SVSVYATLLL

SEQ ID NO: 27058 - protein, 11 aa, Artificial Sequence
  Peptide Derived from Human Papillomavirus
SVSVYATLLLL

SEQ ID NO: 27059 - protein, 8 aa, Artificial Sequence
  Peptide Derived from Human Papillomavirus
SVYATLLL

SEQ ID NO: 27060 - protein, 9 aa, Artificial Sequence
  Peptide Derived from Human Papillomavirus
SVYATLLLL

SEQ ID NO: 27061 - protein, 10 aa, Artificial Sequence
  Peptide Derived from Human Papillomavirus
SVYATLLLLI

SEQ ID NO: 27062 - protein, 11 aa, Artificial Sequence
  Peptide Derived from Human Papillomavirus
SVYATLLLLIV

SEQ ID NO: 27063 - protein, 8 aa, Artificial Sequence
  Peptide Derived from Human Papillomavirus
TLLLLIVI

SEQ ID NO: 27064 - protein, 9 aa, Artificial Sequence
  Peptide Derived from Human Papillomavirus
TLLLLIVIL

SEQ ID NO: 27065 - protein, 10 aa, Artificial Sequence
  Peptide Derived from Human Papillomavirus
TLLLLIVILW

SEQ ID NO: 27066 - protein, 11 aa, Artificial Sequence
  Peptide Derived from Human Papillomavirus
TLLLLIVILWV

SEQ ID NO: 27067 - protein, 8 aa, Artificial Sequence
  Peptide Derived from Human Papillomavirus
TVSIVLCF

SEQ ID NO: 27068 - protein, 9 aa, Artificial Sequence
  Peptide Derived from Human Papillomavirus
TVSIVLCFL

SEQ ID NO: 27069 - protein, 10 aa, Artificial Sequence
  Peptide Derived from Human Papillomavirus
TVSIVLCFLL

SEQ ID NO: 27070 - protein, 10 aa, Artificial Sequence
  Peptide Derived from Human Papillomavirus
VIATSPLRCF

SEQ ID NO: 27071 - protein, 8 aa, Artificial Sequence
  Peptide Derived from Human Papillomavirus
VIHTHASF

SEQ ID NO: 27072 - protein, 9 aa, Artificial Sequence
  Peptide Derived from Human Papillomavirus
VIHTHASFL

SEQ ID NO: 27073 - protein, 11 aa, Artificial Sequence
  Peptide Derived from Human Papillomavirus
VILWVIATSPL

SEQ ID NO: 27074 - protein, 9 aa, Artificial Sequence
  Peptide Derived from Human Papillomavirus
VIRPLVLSV

SEQ ID NO: 27075 - protein, 11 aa, Artificial Sequence
  Peptide Derived from Human Papillomavirus
VIRPLVLSVSV

SEQ ID NO: 27076 - protein, 8 aa, Artificial Sequence
  Peptide Derived from Human Papillomavirus
VLCFLLCF

SEQ ID NO: 27077 - protein, 10 aa, Artificial Sequence
  Peptide Derived from Human Papillomavirus
VLCFLLCFCV

SEQ ID NO: 27078 - protein, 11 aa, Artificial Sequence
  Peptide Derived from Human Papillomavirus
VLCFLLCFCVL

SEQ ID NO: 27079 - protein, 8 aa, Artificial Sequence
  Peptide Derived from Human Papillomavirus
VLLFVCLV

SEQ ID NO: 27080 - protein, 9 aa, Artificial Sequence
  Peptide Derived from Human Papillomavirus
VLLFVCLVI

SEQ ID NO: 27081 - protein, 8 aa, Artificial Sequence
  Peptide Derived from Human Papillomavirus
VLSVSVYA

SEQ ID NO: 27082 - protein, 10 aa, Artificial Sequence
  Peptide Derived from Human Papillomavirus
VLSVSVYATL

SEQ ID NO: 27083 - protein, 11 aa, Artificial Sequence
  Peptide Derived from Human Papillomavirus
VLSVSVYATLL

SEQ ID NO: 27084 - protein, 8 aa, Artificial Sequence
  Peptide Derived from Human Papillomavirus
VVFIYIPL

SEQ ID NO: 27085 - protein, 9 aa, Artificial Sequence
  Peptide Derived from Human Papillomavirus
VVFIYIPLF

SEQ ID NO: 27086 - protein, 10 aa, Artificial Sequence
  Peptide Derived from Human Papillomavirus
VVFIYIPLFV

SEQ ID NO: 27087 - protein, 11 aa, Artificial Sequence
  Peptide Derived from Human Papillomavirus
VVFIYIPLFVI

SEQ ID NO: 27088 - protein, 8 aa, Artificial Sequence
  Peptide Derived from Human Papillomavirus
WVIATSPL

SEQ ID NO: 27089 - protein, 11 aa, Artificial Sequence
  Peptide Derived from Human Papillomavirus
WVIATSPLRCF

SEQ ID NO: 27090 - protein, 11 aa, Artificial Sequence
  Peptide Derived from Human Papillomavirus
YIPLFVIHTHA

SEQ ID NO: 27091 - protein, 9 aa, Artificial Sequence
  Peptide Derived from Human Papillomavirus
YVVFIYIPL

SEQ ID NO: 27092 - protein, 10 aa, Artificial Sequence
  Peptide Derived from Human Papillomavirus
YVVFIYIPLF

SEQ ID NO: 27093 - protein, 11 aa, Artificial Sequence
  Peptide Derived from Human Papillomavirus
YVVFIYIPLFV

SEQ ID NO: 27094 - protein, 9 aa, Artificial Sequence
  Peptide Derived from Human Papillomavirus
ALEIPYDEL

SEQ ID NO: 27095 - protein, 11 aa, Artificial Sequence
  Peptide Derived from Human Papillomavirus
ALEIPYDELRL

SEQ ID NO: 27096 - protein, 8 aa, Artificial Sequence
  Peptide Derived from Human Papillomavirus
CITCQRPL

SEQ ID NO: 27097 - protein, 8 aa, Artificial Sequence
  Peptide Derived from Human Papillomavirus
CLRFYSKV

SEQ ID NO: 27098 - protein, 11 aa, Artificial Sequence
  Peptide Derived from Human Papillomavirus
CLRFYSKVSEF

SEQ ID NO: 27099 - protein, 9 aa, Artificial Sequence
  Peptide Derived from Human Papillomavirus
CPEEKQRHL

SEQ ID NO: 27100 - protein, 8 aa, Artificial Sequence
  Peptide Derived from Human Papillomavirus
CVYCKGQL

SEQ ID NO: 27101 - protein, 9 aa, Artificial Sequence
  Peptide Derived from Human Papillomavirus
EIPYDELRL

SEQ ID NO: 27102 - protein, 8 aa, Artificial Sequence
  Peptide Derived from Human Papillomavirus
ELRLNCVY

SEQ ID NO: 27103 - protein, 8 aa, Artificial Sequence
  Peptide Derived from Human Papillomavirus
ELSSALEI

SEQ ID NO: 27104 - protein, 10 aa, Artificial Sequence
  Peptide Derived from Human Papillomavirus
ELSSALEIPY

SEQ ID NO: 27105 - protein, 10 aa, Artificial Sequence
  Peptide Derived from Human Papillomavirus
EVLDFAFTDL

SEQ ID NO: 27106 - protein, 10 aa, Artificial Sequence
  Peptide Derived from Human Papillomavirus
GICDLLIRCI

SEQ ID NO: 27107 - protein, 8 aa, Artificial Sequence
  Peptide Derived from Human Papillomavirus
GQLTETEV

SEQ ID NO: 27108 - protein, 9 aa, Artificial Sequence
  Peptide Derived from Human Papillomavirus
GQLTETEVL

SEQ ID NO: 27109 - protein, 11 aa, Artificial Sequence
  Peptide Derived from Human Papillomavirus
GQLTETEVLDF

SEQ ID NO: 27110 - protein, 9 aa, Artificial Sequence
  Peptide Derived from Human Papillomavirus
GVCTKCLRF

SEQ ID NO: 27111 - protein, 10 aa, Artificial Sequence
  Peptide Derived from Human Papillomavirus
GVCTKCLRFY

SEQ ID NO: 27112 - protein, 8 aa, Artificial Sequence
  Peptide Derived from Human Papillomavirus
HLDKKKRF

SEQ ID NO: 27113 - protein, 11 aa, Artificial Sequence
  Peptide Derived from Human Papillomavirus
HLDKKKRFHNI

SEQ ID NO: 27114 - protein, 8 aa, Artificial Sequence
  Peptide Derived from Human Papillomavirus
IPYDELRL

SEQ ID NO: 27115 - protein, 11 aa, Artificial Sequence
  Peptide Derived from Human Papillomavirus
IPYDELRLNCV

SEQ ID NO: 27116 - protein, 11 aa, Artificial Sequence
  Peptide Derived from Human Papillomavirus
IVYRDDTPHGV

SEQ ID NO: 27117 - protein, 8 aa, Artificial Sequence
  Peptide Derived from Human Papillomavirus
KLHELSSA

SEQ ID NO: 27118 - protein, 9 aa, Artificial Sequence
  Peptide Derived from Human Papillomavirus
KLHELSSAL

SEQ ID NO: 27119 - protein, 11 aa, Artificial Sequence
  Peptide Derived from Human Papillomavirus
KLHELSSALEI

SEQ ID NO: 27120 - protein, 10 aa, Artificial Sequence
  Peptide Derived from Human Papillomavirus
KLTNKGICDL

SEQ ID NO: 27121 - protein, 11 aa, Artificial Sequence
  Peptide Derived from Human Papillomavirus
KLTNKGICDLL

SEQ ID NO: 27122 - protein, 11 aa, Artificial Sequence
  Peptide Derived from Human Papillomavirus
KQRHLDKKKRF

SEQ ID NO: 27123 - protein, 8 aa, Artificial Sequence
  Peptide Derived from Human Papillomavirus
KVSEFRWY

SEQ ID NO: 27124 - protein, 10 aa, Artificial Sequence
  Peptide Derived from Human Papillomavirus
KVSEFRWYRY

SEQ ID NO: 27125 - protein, 11 aa, Artificial Sequence
  Peptide Derived from Human Papillomavirus
LIRCITCQRPL

SEQ ID NO: 27126 - protein, 11 aa, Artificial Sequence
  Peptide Derived from Human Papillomavirus
NIGGRWTGRCI

SEQ ID NO: 27127 - protein, 9 aa, Artificial Sequence
  Peptide Derived from Human Papillomavirus
NPAERPRKL

SEQ ID NO: 27128 - protein, 11 aa, Artificial Sequence
  Peptide Derived from Human Papillomavirus
PLCPEEKQRHL

SEQ ID NO: 27129 - protein, 8 aa, Artificial Sequence
  Peptide Derived from Human Papillomavirus
QLTETEVL

SEQ ID NO: 27130 - protein, 10 aa, Artificial Sequence
  Peptide Derived from Human Papillomavirus
QLTETEVLDF

SEQ ID NO: 27131 - protein, 11 aa, Artificial Sequence
  Peptide Derived from Human Papillomavirus
QLTETEVLDFA

SEQ ID NO: 27132 - protein, 11 aa, Artificial Sequence
  Peptide Derived from Human Papillomavirus
RLNCVYCKGQL

SEQ ID NO: 27133 - protein, 8 aa, Artificial Sequence
  Peptide Derived from Human Papillomavirus
RPRKLHEL

SEQ ID NO: 27134 - protein, 11 aa, Artificial Sequence
  Peptide Derived from Human Papillomavirus
RPRKLHELSSA

SEQ ID NO: 27135 - protein, 8 aa, Artificial Sequence
  Peptide Derived from Human Papillomavirus
RPRTETQV

SEQ ID NO: 27136 - protein, 10 aa, Artificial Sequence
  Peptide Derived from Human Papillomavirus
SVYGTTLEKL

SEQ ID NO: 27137 - protein, 10 aa, Artificial Sequence
  Peptide Derived from Human Papillomavirus
TLEKLTNKGI

SEQ ID NO: 27138 - protein, 10 aa, Artificial Sequence
  Peptide Derived from Human Papillomavirus
TPHGVCTKCL

SEQ ID NO: 27139 - protein, 9 aa, Artificial Sequence
  Peptide Derived from Human Papillomavirus
VLDFAFTDL

SEQ ID NO: 27140 - protein, 11 aa, Artificial Sequence
  Peptide Derived from Human Papillomavirus
VLDFAFTDLTI

SEQ ID NO: 27141 - protein, 8 aa, Artificial Sequence
  Peptide Derived from Human Papillomavirus
CPNCSTRL

SEQ ID NO: 27142 - protein, 9 aa, Artificial Sequence
  Peptide Derived from Human Papillomavirus
CQCKSTLRL

SEQ ID NO: 27143 - protein, 11 aa, Artificial Sequence
  Peptide Derived from Human Papillomavirus
CQCKSTLRLCV

SEQ ID NO: 27144 - protein, 9 aa, Artificial Sequence
  Peptide Derived from Human Papillomavirus
CVQSTQVDI

SEQ ID NO: 27145 - protein, 11 aa, Artificial Sequence
  Peptide Derived from Human Papillomavirus
CVQSTQVDIRI

SEQ ID NO: 27146 - protein, 8 aa, Artificial Sequence
  Peptide Derived from Human Papillomavirus
DIRILQEL

SEQ ID NO: 27147 - protein, 9 aa, Artificial Sequence
  Peptide Derived from Human Papillomavirus
DIRILQELL

SEQ ID NO: 27148 - protein, 10 aa, Artificial Sequence
  Peptide Derived from Human Papillomavirus
DIRILQELLM

SEQ ID NO: 27149 - protein, 8 aa, Artificial Sequence
  Peptide Derived from Human Papillomavirus
DLHCYEQL

SEQ ID NO: 27150 - protein, 9 aa, Artificial Sequence
  Peptide Derived from Human Papillomavirus
DLQPEATDL

SEQ ID NO: 27151 - protein, 10 aa, Artificial Sequence
  Peptide Derived from Human Papillomavirus
DVIDSPAGQA

SEQ ID NO: 27152 - protein, 9 aa, Artificial Sequence
  Peptide Derived from Human Papillomavirus
ELLMGSFGI

SEQ ID NO: 27153 - protein, 10 aa, Artificial Sequence
  Peptide Derived from Human Papillomavirus
ELLMGSFGIV

SEQ ID NO: 27154 - protein, 9 aa, Artificial Sequence
  Peptide Derived from Human Papillomavirus
EPDTSNYNI

SEQ ID NO: 27155 - protein, 10 aa, Artificial Sequence
  Peptide Derived from Human Papillomavirus
EPDTSNYNIV

SEQ ID NO: 27156 - protein, 11 aa, Artificial Sequence
  Peptide Derived from Human Papillomavirus
GIVCPNCSTRL

SEQ ID NO: 27157 - protein, 10 aa, Artificial Sequence
  Peptide Derived from Human Papillomavirus
GQAEPDTSNY

SEQ ID NO: 27158 - protein, 10 aa, Artificial Sequence
  Peptide Derived from Human Papillomavirus
ILQELLMGSF

SEQ ID NO: 27159 - protein, 10 aa, Artificial Sequence
  Peptide Derived from Human Papillomavirus
IVCPNCSTRL

SEQ ID NO: 27160 - protein, 8 aa, Artificial Sequence
  Peptide Derived from Human Papillomavirus
LLMGSFGI

SEQ ID NO: 27161 - protein, 9 aa, Artificial Sequence
  Peptide Derived from Human Papillomavirus
LLMGSFGIV

SEQ ID NO: 27162 - protein, 8 aa, Artificial Sequence
  Peptide Derived from Human Papillomavirus
LMGSFGIV

SEQ ID NO: 27163 - protein, 10 aa, Artificial Sequence
  Peptide Derived from Human Papillomavirus
LPDSSDEEDV

SEQ ID NO: 27164 - protein, 11 aa, Artificial Sequence
  Peptide Derived from Human Papillomavirus
LPDSSDEEDVI

SEQ ID NO: 27165 - protein, 8 aa, Artificial Sequence
  Peptide Derived from Human Papillomavirus
LQDYVLDL

SEQ ID NO: 27166 - protein, 9 aa, Artificial Sequence
  Peptide Derived from Human Papillomavirus
LQELLMGSF

SEQ ID NO: 27167 - protein, 11 aa, Artificial Sequence
  Peptide Derived from Human Papillomavirus
LQELLMGSFGI

SEQ ID NO: 27168 - protein, 8 aa, Artificial Sequence
  Peptide Derived from Human Papillomavirus
LQPEATDL

SEQ ID NO: 27169 - protein, 11 aa, Artificial Sequence
  Peptide Derived from Human Papillomavirus
LQPEATDLHCY

SEQ ID NO: 27170 - protein, 11 aa, Artificial Sequence
  Peptide Derived from Human Papillomavirus
QLPDSSDEEDV

SEQ ID NO: 27171 - protein, 10 aa, Artificial Sequence
  Peptide Derived from Human Papillomavirus
QPEATDLHCY

SEQ ID NO: 27172 - protein, 10 aa, Artificial Sequence
  Peptide Derived from Human Papillomavirus
QVDIRILQEL

SEQ ID NO: 27173 - protein, 11 aa, Artificial Sequence
  Peptide Derived from Human Papillomavirus
QVDIRILQELL

SEQ ID NO: 27174 - protein, 8 aa, Artificial Sequence
  Peptide Derived from Human Papillomavirus
RILQELLM

SEQ ID NO: 27175 - protein, 11 aa, Artificial Sequence
  Peptide Derived from Human Papillomavirus
RILQELLMGSF

SEQ ID NO: 27176 - protein, 9 aa, Artificial Sequence
  Peptide Derived from Human Papillomavirus
RLCVQSTQV

SEQ ID NO: 27177 - protein, 11 aa, Artificial Sequence
  Peptide Derived from Human Papillomavirus
RLCVQSTQVDI

SEQ ID NO: 27178 - protein, 9 aa, Artificial Sequence
  Peptide Derived from Human Papillomavirus
TLQDYVLDL

SEQ ID NO: 27179 - protein, 11 aa, Artificial Sequence
  Peptide Derived from Human Papillomavirus
TLRLCVQSTQV

SEQ ID NO: 27180 - protein, 8 aa, Artificial Sequence
  Peptide Derived from Human Papillomavirus
TPTLQDYV

SEQ ID NO: 27181 - protein, 9 aa, Artificial Sequence
  Peptide Derived from Human Papillomavirus
TPTLQDYVL

SEQ ID NO: 27182 - protein, 11 aa, Artificial Sequence
  Peptide Derived from Human Papillomavirus
TPTLQDYVLDL

SEQ ID NO: 27183 - protein, 8 aa, Artificial Sequence
  Peptide Derived from Human Papillomavirus
TQVDIRIL

SEQ ID NO: 27184 - protein, 11 aa, Artificial Sequence
  Peptide Derived from Human Papillomavirus
TQVDIRILQEL

SEQ ID NO: 27185 - protein, 9 aa, Artificial Sequence
  Peptide Derived from Human Papillomavirus
VIDSPAGQA

SEQ ID NO: 27186 - protein, 8 aa, Artificial Sequence
  Peptide Derived from Human Papillomavirus
VLDLQPEA

SEQ ID NO: 27187 - protein, 11 aa, Artificial Sequence
  Peptide Derived from Human Papillomavirus
VLDLQPEATDL

SEQ ID NO: 27188 - protein, 8 aa, Artificial Sequence
  Peptide Derived from Human Papillomavirus
VQSTQVDI

SEQ ID NO: 27189 - protein, 10 aa, Artificial Sequence
  Peptide Derived from Human Papillomavirus
VQSTQVDIRI

SEQ ID NO: 27190 - protein, 11 aa, Artificial Sequence
  Peptide Derived from Human Papillomavirus
VQSTQVDIRIL

SEQ ID NO: 27191 - protein, 9 aa, Artificial Sequence
  Peptide Derived from Human Papillomavirus
YVLDLQPEA

SEQ ID NO: 27192 - protein, 9 aa, Artificial Sequence
  Peptide Derived from Human Papillomavirus
AIANSDTTF

SEQ ID NO: 27193 - protein, 8 aa, Artificial Sequence
  Peptide Derived from Human Papillomavirus
AILEDWNF

SEQ ID NO: 27194 - protein, 10 aa, Artificial Sequence
  Peptide Derived from Human Papillomavirus
AILEDWNFGL

SEQ ID NO: 27195 - protein, 8 aa, Artificial Sequence
  Peptide Derived from Human Papillomavirus
AITCQKTA

SEQ ID NO: 27196 - protein, 10 aa, Artificial Sequence
  Peptide Derived from Human Papillomavirus
AITPGDCPPL

SEQ ID NO: 27197 - protein, 9 aa, Artificial Sequence
  Peptide Derived from Human Papillomavirus
ALQDTKSNV

SEQ ID NO: 27198 - protein, 11 aa, Artificial Sequence
  Peptide Derived from Human Papillomavirus
ALQDTKSNVPL

SEQ ID NO: 27199 - protein, 10 aa, Artificial Sequence
  Peptide Derived from Human Papillomavirus
APQKPKEDPF

SEQ ID NO: 27200 - protein, 10 aa, Artificial Sequence
  Peptide Derived from Human Papillomavirus
APSASTTTPA

SEQ ID NO: 27201 - protein, 8 aa, Artificial Sequence
  Peptide Derived from Human Papillomavirus
AQGHNNGI

SEQ ID NO: 27202 - protein, 10 aa, Artificial Sequence
  Peptide Derived from Human Papillomavirus
AQGHNNGICW

SEQ ID NO: 27203 - protein, 8 aa, Artificial Sequence
  Peptide Derived from Human Papillomavirus
AQIFNKPY

SEQ ID NO: 27204 - protein, 9 aa, Artificial Sequence
  Peptide Derived from Human Papillomavirus
AQIFNKPYW

SEQ ID NO: 27205 - protein, 10 aa, Artificial Sequence
  Peptide Derived from Human Papillomavirus
AQIFNKPYWM

SEQ ID NO: 27206 - protein, 11 aa, Artificial Sequence
  Peptide Derived from Human Papillomavirus
CISMDYKQTQL

SEQ ID NO: 27207 - protein, 9 aa, Artificial Sequence
  Peptide Derived from Human Papillomavirus
CLLGCKPPI

SEQ ID NO: 27208 - protein, 10 aa, Artificial Sequence
  Peptide Derived from Human Papillomavirus
CPPLELKNSV

SEQ ID NO: 27209 - protein, 11 aa, Artificial Sequence
  Peptide Derived from Human Papillomavirus
CPPLELKNSVI

SEQ ID NO: 27210 - protein, 9 aa, Artificial Sequence
  Peptide Derived from Human Papillomavirus
DICNSICKY

SEQ ID NO: 27211 - protein, 9 aa, Artificial Sequence
  Peptide Derived from Human Papillomavirus
DIMTYIHSM

SEQ ID NO: 27212 - protein, 11 aa, Artificial Sequence
  Peptide Derived from Human Papillomavirus
DLDQFPLGRKF

SEQ ID NO: 27213 - protein, 8 aa, Artificial Sequence
  Peptide Derived from Human Papillomavirus
DLQFIFQL

SEQ ID NO: 27214 - protein, 11 aa, Artificial Sequence
  Peptide Derived from Human Papillomavirus
DLQFIFQLCKI

SEQ ID NO: 27215 - protein, 11 aa, Artificial Sequence
  Peptide Derived from Human Papillomavirus
DLYIKGSGSTA

SEQ ID NO: 27216 - protein, 9 aa, Artificial Sequence
  Peptide Derived from Human Papillomavirus
DMVDTGFGA

SEQ ID NO: 27217 - protein, 10 aa, Artificial Sequence
  Peptide Derived from Human Papillomavirus
DMVDTGFGAM

SEQ ID NO: 27218 - protein, 8 aa, Artificial Sequence
  Peptide Derived from Human Papillomavirus
DPFKDYVF

SEQ ID NO: 27219 - protein, 9 aa, Artificial Sequence
  Peptide Derived from Human Papillomavirus
DPFKDYVFW

SEQ ID NO: 27220 - protein, 11 aa, Artificial Sequence
  Peptide Derived from Human Papillomavirus
DPFKDYVFWEV

SEQ ID NO: 27221 - protein, 9 aa, Artificial Sequence
  Peptide Derived from Human Papillomavirus
DQFPLGRKF

SEQ ID NO: 27222 - protein, 10 aa, Artificial Sequence
  Peptide Derived from Human Papillomavirus
DQFPLGRKFL

SEQ ID NO: 27223 - protein, 11 aa, Artificial Sequence
  Peptide Derived from Human Papillomavirus
DQFPLGRKFLL

SEQ ID NO: 27224 - protein, 8 aa, Artificial Sequence
  Peptide Derived from Human Papillomavirus
EPYGDTLF

SEQ ID NO: 27225 - protein, 9 aa, Artificial Sequence
  Peptide Derived from Human Papillomavirus
EPYGDTLFF

SEQ ID NO: 27226 - protein, 10 aa, Artificial Sequence
  Peptide Derived from Human Papillomavirus
EPYGDTLFFY

SEQ ID NO: 27227 - protein, 11 aa, Artificial Sequence
  Peptide Derived from Human Papillomavirus
EPYGDTLFFYL

SEQ ID NO: 27228 - protein, 8 aa, Artificial Sequence
  Peptide Derived from Human Papillomavirus
EQMFVRHF

SEQ ID NO: 27229 - protein, 9 aa, Artificial Sequence
  Peptide Derived from Human Papillomavirus
EQMFVRHFF

SEQ ID NO: 27230 - protein, 8 aa, Artificial Sequence
  Peptide Derived from Human Papillomavirus
EVGRGQPL

SEQ ID NO: 27231 - protein, 10 aa, Artificial Sequence
  Peptide Derived from Human Papillomavirus
EVGRGQPLGV

SEQ ID NO: 27232 - protein, 8 aa, Artificial Sequence
  Peptide Derived from Human Papillomavirus
EVNLKEKF

SEQ ID NO: 27233 - protein, 10 aa, Artificial Sequence
  Peptide Derived from Human Papillomavirus
EVNLKEKFSA

SEQ ID NO: 27234 - protein, 8 aa, Artificial Sequence
  Peptide Derived from Human Papillomavirus
FIFQLCKI

SEQ ID NO: 27235 - protein, 10 aa, Artificial Sequence
  Peptide Derived from Human Papillomavirus
FIFQLCKITL

SEQ ID NO: 27236 - protein, 9 aa, Artificial Sequence
  Peptide Derived from Human Papillomavirus
FLLQAGYRA

SEQ ID NO: 27237 - protein, 8 aa, Artificial Sequence
  Peptide Derived from Human Papillomavirus
FPLGRKFL

SEQ ID NO: 27238 - protein, 9 aa, Artificial Sequence
  Peptide Derived from Human Papillomavirus
FPLGRKFLL

SEQ ID NO: 27239 - protein, 11 aa, Artificial Sequence
  Peptide Derived from Human Papillomavirus
FPLGRKFLLQA

SEQ ID NO: 27240 - protein, 8 aa, Artificial Sequence
  Peptide Derived from Human Papillomavirus
FPTPSGSM

SEQ ID NO: 27241 - protein, 9 aa, Artificial Sequence
  Peptide Derived from Human Papillomavirus
FPTPSGSMV

SEQ ID NO: 27242 - protein, 8 aa, Artificial Sequence
  Peptide Derived from Human Papillomavirus
FQLCKITL

SEQ ID NO: 27243 - protein, 10 aa, Artificial Sequence
  Peptide Derived from Human Papillomavirus
FQLCKITLSA

SEQ ID NO: 27244 - protein, 8 aa, Artificial Sequence
  Peptide Derived from Human Papillomavirus
GICWGNQL

SEQ ID NO: 27245 - protein, 9 aa, Artificial Sequence
  Peptide Derived from Human Papillomavirus
GICWGNQLF

SEQ ID NO: 27246 - protein, 10 aa, Artificial Sequence
  Peptide Derived from Human Papillomavirus
GICWGNQLFV

SEQ ID NO: 27247 - protein, 8 aa, Artificial Sequence
  Peptide Derived from Human Papillomavirus
GISGHPLL

SEQ ID NO: 27248 - protein, 11 aa, Artificial Sequence
  Peptide Derived from Human Papillomavirus
GISGHPLLNKF

SEQ ID NO: 27249 - protein, 10 aa, Artificial Sequence
  Peptide Derived from Human Papillomavirus
GLEVGRGQPL

SEQ ID NO: 27250 - protein, 9 aa, Artificial Sequence
  Peptide Derived from Human Papillomavirus
GLQYRVFRV

SEQ ID NO: 27251 - protein, 11 aa, Artificial Sequence
  Peptide Derived from Human Papillomavirus
GLQYRVFRVRL

SEQ ID NO: 27252 - protein, 10 aa, Artificial Sequence
  Peptide Derived from Human Papillomavirus
GLTTPPSGSL

SEQ ID NO: 27253 - protein, 10 aa, Artificial Sequence
  Peptide Derived from Human Papillomavirus
GPGTDNRECI

SEQ ID NO: 27254 - protein, 8 aa, Artificial Sequence
  Peptide Derived from Human Papillomavirus
GQPLGVGI

SEQ ID NO: 27255 - protein, 9 aa, Artificial Sequence
  Peptide Derived from Human Papillomavirus
GVGISGHPL

SEQ ID NO: 27256 - protein, 10 aa, Artificial Sequence
  Peptide Derived from Human Papillomavirus
GVGISGHPLL

SEQ ID NO: 27257 - protein, 9 aa, Artificial Sequence
  Peptide Derived from Human Papillomavirus
ILEDWNFGL

SEQ ID NO: 27258 - protein, 8 aa, Artificial Sequence
  Peptide Derived from Human Papillomavirus
IMTYIHSM

SEQ ID NO: 27259 - protein, 11 aa, Artificial Sequence
  Peptide Derived from Human Papillomavirus
IMTYIHSMNPA

SEQ ID NO: 27260 - protein, 10 aa, Artificial Sequence
  Peptide Derived from Human Papillomavirus
IPKSDNPKKI

SEQ ID NO: 27261 - protein, 11 aa, Artificial Sequence
  Peptide Derived from Human Papillomavirus
IPKSDNPKKIV

SEQ ID NO: 27262 - protein, 11 aa, Artificial Sequence
  Peptide Derived from Human Papillomavirus
IQDGDMVDTGF

SEQ ID NO: 27263 - protein, 9 aa, Artificial Sequence
  Peptide Derived from Human Papillomavirus
IVVPKVSGL

SEQ ID NO: 27264 - protein, 11 aa, Artificial Sequence
  Peptide Derived from Human Papillomavirus
IVVPKVSGLQY

SEQ ID NO: 27265 - protein, 8 aa, Artificial Sequence
  Peptide Derived from Human Papillomavirus
KITLSADI

SEQ ID NO: 27266 - protein, 9 aa, Artificial Sequence
  Peptide Derived from Human Papillomavirus
KITLSADIM

SEQ ID NO: 27267 - protein, 11 aa, Artificial Sequence
  Peptide Derived from Human Papillomavirus
KITLSADIMTY

SEQ ID NO: 27268 - protein, 10 aa, Artificial Sequence
  Peptide Derived from Human Papillomavirus
KIVVPKVSGL

SEQ ID NO: 27269 - protein, 11 aa, Artificial Sequence
  Peptide Derived from Human Papillomavirus
KMVAEPYGDTL

SEQ ID NO: 27270 - protein, 10 aa, Artificial Sequence
  Peptide Derived from Human Papillomavirus
KPKEDPFKDY

SEQ ID NO: 27271 - protein, 11 aa, Artificial Sequence
  Peptide Derived from Human Papillomavirus
KPKEDPFKDYV

SEQ ID NO: 27272 - protein, 8 aa, Artificial Sequence
  Peptide Derived from Human Papillomavirus
KPPIGEHW

SEQ ID NO: 27273 - protein, 8 aa, Artificial Sequence
  Peptide Derived from Human Papillomavirus
KPYWMQRA

SEQ ID NO: 27274 - protein, 8 aa, Artificial Sequence
  Peptide Derived from Human Papillomavirus
KQTQLCLL

SEQ ID NO: 27275 - protein, 9 aa, Artificial Sequence
  Peptide Derived from Human Papillomavirus
KVSGLQYRV

SEQ ID NO: 27276 - protein, 10 aa, Artificial Sequence
  Peptide Derived from Human Papillomavirus
KVSGLQYRVF

SEQ ID NO: 27277 - protein, 8 aa, Artificial Sequence
  Peptide Derived from Human Papillomavirus
KVVSTDEY

SEQ ID NO: 27278 - protein, 9 aa, Artificial Sequence
  Peptide Derived from Human Papillomavirus
KVVSTDEYV

SEQ ID NO: 27279 - protein, 8 aa, Artificial Sequence
  Peptide Derived from Human Papillomavirus
LLGCKPPI

SEQ ID NO: 27280 - protein, 8 aa, Artificial Sequence
  Peptide Derived from Human Papillomavirus
LLQAGYRA

SEQ ID NO: 27281 - protein, 8 aa, Artificial Sequence
  Peptide Derived from Human Papillomavirus
LLTVGHPY

SEQ ID NO: 27282 - protein, 9 aa, Artificial Sequence
  Peptide Derived from Human Papillomavirus
LLTVGHPYY

SEQ ID NO: 27283 - protein, 11 aa, Artificial Sequence
  Peptide Derived from Human Papillomavirus
LLTVGHPYYSI

SEQ ID NO: 27284 - protein, 9 aa, Artificial Sequence
  Peptide Derived from Human Papillomavirus
LPDPNKFGF

SEQ ID NO: 27285 - protein, 9 aa, Artificial Sequence
  Peptide Derived from Human Papillomavirus
LPPVPVSKV

SEQ ID NO: 27286 - protein, 10 aa, Artificial Sequence
  Peptide Derived from Human Papillomavirus
LPPVPVSKVV

SEQ ID NO: 27287 - protein, 11 aa, Artificial Sequence
  Peptide Derived from Human Papillomavirus
LQAGYRARPKF

SEQ ID NO: 27288 - protein, 8 aa, Artificial Sequence
  Peptide Derived from Human Papillomavirus
LQDTKSNV

SEQ ID NO: 27289 - protein, 10 aa, Artificial Sequence
  Peptide Derived from Human Papillomavirus
LQDTKSNVPL

SEQ ID NO: 27290 - protein, 10 aa, Artificial Sequence
  Peptide Derived from Human Papillomavirus
LQFIFQLCKI

SEQ ID NO: 27291 - protein, 8 aa, Artificial Sequence
  Peptide Derived from Human Papillomavirus
LQYRVFRV

SEQ ID NO: 27292 - protein, 10 aa, Artificial Sequence
  Peptide Derived from Human Papillomavirus
LQYRVFRVRL

SEQ ID NO: 27293 - protein, 8 aa, Artificial Sequence
  Peptide Derived from Human Papillomavirus
LVWACVGL

SEQ ID NO: 27294 - protein, 10 aa, Artificial Sequence
  Peptide Derived from Human Papillomavirus
LVWACVGLEV

SEQ ID NO: 27295 - protein, 11 aa, Artificial Sequence
  Peptide Derived from Human Papillomavirus
MQRAQGHNNGI

SEQ ID NO: 27296 - protein, 10 aa, Artificial Sequence
  Peptide Derived from Human Papillomavirus
MVAEPYGDTL

SEQ ID NO: 27297 - protein, 11 aa, Artificial Sequence
  Peptide Derived from Human Papillomavirus
MVAEPYGDTLF

SEQ ID NO: 27298 - protein, 8 aa, Artificial Sequence
  Peptide Derived from Human Papillomavirus
MVDTGFGA

SEQ ID NO: 27299 - protein, 9 aa, Artificial Sequence
  Peptide Derived from Human Papillomavirus
MVDTGFGAM

SEQ ID NO: 27300 - protein, 11 aa, Artificial Sequence
  Peptide Derived from Human Papillomavirus
MVDTGFGAMDF

SEQ ID NO: 27301 - protein, 8 aa, Artificial Sequence
  Peptide Derived from Human Papillomavirus
MVTSDAQI

SEQ ID NO: 27302 - protein, 9 aa, Artificial Sequence
  Peptide Derived from Human Papillomavirus
MVTSDAQIF

SEQ ID NO: 27303 - protein, 9 aa, Artificial Sequence
  Peptide Derived from Human Papillomavirus
NIYYHAGSA

SEQ ID NO: 27304 - protein, 11 aa, Artificial Sequence
  Peptide Derived from Human Papillomavirus
NIYYHAGSARL

SEQ ID NO: 27305 - protein, 8 aa, Artificial Sequence
  Peptide Derived from Human Papillomavirus
NLKEKFSA

SEQ ID NO: 27306 - protein, 10 aa, Artificial Sequence
  Peptide Derived from Human Papillomavirus
NLKEKFSADL

SEQ ID NO: 27307 - protein, 8 aa, Artificial Sequence
  Peptide Derived from Human Papillomavirus
NMSVCAAI

SEQ ID NO: 27308 - protein, 9 aa, Artificial Sequence
  Peptide Derived from Human Papillomavirus
NMSVCAAIA

SEQ ID NO: 27309 - protein, 8 aa, Artificial Sequence
  Peptide Derived from Human Papillomavirus
NPAILEDW

SEQ ID NO: 27310 - protein, 10 aa, Artificial Sequence
  Peptide Derived from Human Papillomavirus
NPAILEDWNF

SEQ ID NO: 27311 - protein, 8 aa, Artificial Sequence
  Peptide Derived from Human Papillomavirus
NPETQRLV

SEQ ID NO: 27312 - protein, 9 aa, Artificial Sequence
  Peptide Derived from Human Papillomavirus
NPETQRLVW

SEQ ID NO: 27313 - protein, 10 aa, Artificial Sequence
  Peptide Derived from Human Papillomavirus
NPETQRLVWA

SEQ ID NO: 27314 - protein, 10 aa, Artificial Sequence
  Peptide Derived from Human Papillomavirus
NPKKIVVPKV

SEQ ID NO: 27315 - protein, 8 aa, Artificial Sequence
  Peptide Derived from Human Papillomavirus
NQLFVTVV

SEQ ID NO: 27316 - protein, 10 aa, Artificial Sequence
  Peptide Derived from Human Papillomavirus
NVPLDICNSI

SEQ ID NO: 27317 - protein, 8 aa, Artificial Sequence
  Peptide Derived from Human Papillomavirus
PLDICNSI

SEQ ID NO: 27318 - protein, 11 aa, Artificial Sequence
  Peptide Derived from Human Papillomavirus
PLDICNSICKY

SEQ ID NO: 27319 - protein, 8 aa, Artificial Sequence
  Peptide Derived from Human Papillomavirus
PLELKNSV

SEQ ID NO: 27320 - protein, 9 aa, Artificial Sequence
  Peptide Derived from Human Papillomavirus
PLELKNSVI

SEQ ID NO: 27321 - protein, 8 aa, Artificial Sequence
  Peptide Derived from Human Papillomavirus
PLGRKFLL

SEQ ID NO: 27322 - protein, 10 aa, Artificial Sequence
  Peptide Derived from Human Papillomavirus
PLGRKFLLQA

SEQ ID NO: 27323 - protein, 11 aa, Artificial Sequence
  Peptide Derived from Human Papillomavirus
PLGVGISGHPL

SEQ ID NO: 27324 - protein, 9 aa, Artificial Sequence
  Peptide Derived from Human Papillomavirus
PPLELKNSV

SEQ ID NO: 27325 - protein, 10 aa, Artificial Sequence
  Peptide Derived from Human Papillomavirus
PPLELKNSVI

SEQ ID NO: 27326 - protein, 10 aa, Artificial Sequence
  Peptide Derived from Human Papillomavirus
PPSGSLEDTY

SEQ ID NO: 27327 - protein, 8 aa, Artificial Sequence
  Peptide Derived from Human Papillomavirus
PPVPVSKV

SEQ ID NO: 27328 - protein, 9 aa, Artificial Sequence
  Peptide Derived from Human Papillomavirus
PPVPVSKVV

SEQ ID NO: 27329 - protein, 9 aa, Artificial Sequence
  Peptide Derived from Human Papillomavirus
PQKPKEDPF

SEQ ID NO: 27330 - protein, 8 aa, Artificial Sequence
  Peptide Derived from Human Papillomavirus
PVPVSKVV

SEQ ID NO: 27331 - protein, 11 aa, Artificial Sequence
  Peptide Derived from Human Papillomavirus
PVSKVVSTDEY

SEQ ID NO: 27332 - protein, 8 aa, Artificial Sequence
  Peptide Derived from Human Papillomavirus
QIFNKPYW

SEQ ID NO: 27333 - protein, 9 aa, Artificial Sequence
  Peptide Derived from Human Papillomavirus
QIFNKPYWM

SEQ ID NO: 27334 - protein, 9 aa, Artificial Sequence
  Peptide Derived from Human Papillomavirus
QLCKITLSA

SEQ ID NO: 27335 - protein, 11 aa, Artificial Sequence
  Peptide Derived from Human Papillomavirus
QLCKITLSADI

SEQ ID NO: 27336 - protein, 11 aa, Artificial Sequence
  Peptide Derived from Human Papillomavirus
QLCLLGCKPPI

SEQ ID NO: 27337 - protein, 8 aa, Artificial Sequence
  Peptide Derived from Human Papillomavirus
QMFVRHFF

SEQ ID NO: 27338 - protein, 9 aa, Artificial Sequence
  Peptide Derived from Human Papillomavirus
RLLTVGHPY

SEQ ID NO: 27339 - protein, 10 aa, Artificial Sequence
  Peptide Derived from Human Papillomavirus
RLLTVGHPYY

SEQ ID NO: 27340 - protein, 8 aa, Artificial Sequence
  Peptide Derived from Human Papillomavirus
RLPDPNKF

SEQ ID NO: 27341 - protein, 10 aa, Artificial Sequence
  Peptide Derived from Human Papillomavirus
RLPDPNKFGF

SEQ ID NO: 27342 - protein, 9 aa, Artificial Sequence
  Peptide Derived from Human Papillomavirus
RLVWACVGL

SEQ ID NO: 27343 - protein, 11 aa, Artificial Sequence
  Peptide Derived from Human Papillomavirus
RLVWACVGLEV

SEQ ID NO: 27344 - protein, 11 aa, Artificial Sequence
  Peptide Derived from Human Papillomavirus
RPKFKAGKRSA

SEQ ID NO: 27345 - protein, 8 aa, Artificial Sequence
  Peptide Derived from Human Papillomavirus
RPSEATVY

SEQ ID NO: 27346 - protein, 9 aa, Artificial Sequence
  Peptide Derived from Human Papillomavirus
RPSEATVYL

SEQ ID NO: 27347 - protein, 10 aa, Artificial Sequence
  Peptide Derived from Human Papillomavirus
RVRLPDPNKF

SEQ ID NO: 27348 - protein, 8 aa, Artificial Sequence
  Peptide Derived from Human Papillomavirus
SICKYPDY

SEQ ID NO: 27349 - protein, 9 aa, Artificial Sequence
  Peptide Derived from Human Papillomavirus
SICKYPDYL

SEQ ID NO: 27350 - protein, 11 aa, Artificial Sequence
  Peptide Derived from Human Papillomavirus
SICKYPDYLKM

SEQ ID NO: 27351 - protein, 11 aa, Artificial Sequence
  Peptide Derived from Human Papillomavirus
SIPKSDNPKKI

SEQ ID NO: 27352 - protein, 8 aa, Artificial Sequence
  Peptide Derived from Human Papillomavirus
SLEDTYRF

SEQ ID NO: 27353 - protein, 9 aa, Artificial Sequence
  Peptide Derived from Human Papillomavirus
SLEDTYRFV

SEQ ID NO: 27354 - protein, 8 aa, Artificial Sequence
  Peptide Derived from Human Papillomavirus
SLWRPSEA

SEQ ID NO: 27355 - protein, 10 aa, Artificial Sequence
  Peptide Derived from Human Papillomavirus
SLWRPSEATV

SEQ ID NO: 27356 - protein, 11 aa, Artificial Sequence
  Peptide Derived from Human Papillomavirus
SLWRPSEATVY

SEQ ID NO: 27357 - protein, 9 aa, Artificial Sequence
  Peptide Derived from Human Papillomavirus
SMDYKQTQL

SEQ ID NO: 27358 - protein, 11 aa, Artificial Sequence
  Peptide Derived from Human Papillomavirus
SMDYKQTQLCL

SEQ ID NO: 27359 - protein, 10 aa, Artificial Sequence
  Peptide Derived from Human Papillomavirus
SMNPAILEDW

SEQ ID NO: 27360 - protein, 9 aa, Artificial Sequence
  Peptide Derived from Human Papillomavirus
SMVTSDAQI

SEQ ID NO: 27361 - protein, 10 aa, Artificial Sequence
  Peptide Derived from Human Papillomavirus
SMVTSDAQIF

SEQ ID NO: 27362 - protein, 8 aa, Artificial Sequence
  Peptide Derived from Human Papillomavirus
SPCSNNAI

SEQ ID NO: 27363 - protein, 10 aa, Artificial Sequence
  Peptide Derived from Human Papillomavirus
SQAITCQKTA

SEQ ID NO: 27364 - protein, 8 aa, Artificial Sequence
  Peptide Derived from Human Papillomavirus
SVIQDGDM

SEQ ID NO: 27365 - protein, 9 aa, Artificial Sequence
  Peptide Derived from Human Papillomavirus
SVIQDGDMV

SEQ ID NO: 27366 - protein, 8 aa, Artificial Sequence
  Peptide Derived from Human Papillomavirus
SVPTDLYI

SEQ ID NO: 27367 - protein, 8 aa, Artificial Sequence
  Peptide Derived from Human Papillomavirus
TLANSTYF

SEQ ID NO: 27368 - protein, 11 aa, Artificial Sequence
  Peptide Derived from Human Papillomavirus
TLFFYLRREQM

SEQ ID NO: 27369 - protein, 9 aa, Artificial Sequence
  Peptide Derived from Human Papillomavirus
TLSADIMTY

SEQ ID NO: 27370 - protein, 10 aa, Artificial Sequence
  Peptide Derived from Human Papillomavirus
TLSADIMTYI

SEQ ID NO: 27371 - protein, 8 aa, Artificial Sequence
  Peptide Derived from Human Papillomavirus
TPGDCPPL

SEQ ID NO: 27372 - protein, 10 aa, Artificial Sequence
  Peptide Derived from Human Papillomavirus
TPGDCPPLEL

SEQ ID NO: 27373 - protein, 11 aa, Artificial Sequence
  Peptide Derived from Human Papillomavirus
TPPSGSLEDTY

SEQ ID NO: 27374 - protein, 11 aa, Artificial Sequence
  Peptide Derived from Human Papillomavirus
TPSGSMVTSDA

SEQ ID NO: 27375 - protein, 9 aa, Artificial Sequence
  Peptide Derived from Human Papillomavirus
TQRLVWACV

SEQ ID NO: 27376 - protein, 11 aa, Artificial Sequence
  Peptide Derived from Human Papillomavirus
TQRLVWACVGL

SEQ ID NO: 27377 - protein, 10 aa, Artificial Sequence
  Peptide Derived from Human Papillomavirus
TVGESVPTDL

SEQ ID NO: 27378 - protein, 11 aa, Artificial Sequence
  Peptide Derived from Human Papillomavirus
TVGESVPTDLY

SEQ ID NO: 27379 - protein, 9 aa, Artificial Sequence
  Peptide Derived from Human Papillomavirus
TVGHPYYSI

SEQ ID NO: 27380 - protein, 11 aa, Artificial Sequence
  Peptide Derived from Human Papillomavirus
TVVDTTRSTNM

SEQ ID NO: 27381 - protein, 9 aa, Artificial Sequence
  Peptide Derived from Human Papillomavirus
TVYLPPVPV

SEQ ID NO: 27382 - protein, 8 aa, Artificial Sequence
  Peptide Derived from Human Papillomavirus
VIQDGDMV

SEQ ID NO: 27383 - protein, 9 aa, Artificial Sequence
  Peptide Derived from Human Papillomavirus
VPKVSGLQY

SEQ ID NO: 27384 - protein, 11 aa, Artificial Sequence
  Peptide Derived from Human Papillomavirus
VPKVSGLQYRV

SEQ ID NO: 27385 - protein, 9 aa, Artificial Sequence
  Peptide Derived from Human Papillomavirus
VPLDICNSI

SEQ ID NO: 27386 - protein, 10 aa, Artificial Sequence
  Peptide Derived from Human Papillomavirus
VVDTTRSTNM

SEQ ID NO: 27387 - protein, 8 aa, Artificial Sequence
  Peptide Derived from Human Papillomavirus
VVPKVSGL

SEQ ID NO: 27388 - protein, 10 aa, Artificial Sequence
  Peptide Derived from Human Papillomavirus
VVPKVSGLQY

SEQ ID NO: 27389 - protein, 8 aa, Artificial Sequence
  Peptide Derived from Human Papillomavirus
VVSTDEYV

SEQ ID NO: 27390 - protein, 8 aa, Artificial Sequence
  Peptide Derived from Human Papillomavirus
YIHSMNPA

SEQ ID NO: 27391 - protein, 9 aa, Artificial Sequence
  Peptide Derived from Human Papillomavirus
YIHSMNPAI

SEQ ID NO: 27392 - protein, 10 aa, Artificial Sequence
  Peptide Derived from Human Papillomavirus
YIHSMNPAIL

SEQ ID NO: 27393 - protein, 9 aa, Artificial Sequence
  Peptide Derived from Human Papillomavirus
YIKGSGSTA

SEQ ID NO: 27394 - protein, 11 aa, Artificial Sequence
  Peptide Derived from Human Papillomavirus
YIKGSGSTATL

SEQ ID NO: 27395 - protein, 9 aa, Artificial Sequence
  Peptide Derived from Human Papillomavirus
YLKMVAEPY

SEQ ID NO: 27396 - protein, 10 aa, Artificial Sequence
  Peptide Derived from Human Papillomavirus
YLPPVPVSKV

SEQ ID NO: 27397 - protein, 11 aa, Artificial Sequence
  Peptide Derived from Human Papillomavirus
YLPPVPVSKVV

SEQ ID NO: 27398 - protein, 8 aa, Artificial Sequence
  Peptide Derived from Human Papillomavirus
YLRHGEEF

SEQ ID NO: 27399 - protein, 10 aa, Artificial Sequence
  Peptide Derived from Human Papillomavirus
YLRHGEEFDL

SEQ ID NO: 27400 - protein, 8 aa, Artificial Sequence
  Peptide Derived from Human Papillomavirus
YLRREQMF

SEQ ID NO: 27401 - protein, 9 aa, Artificial Sequence
  Peptide Derived from Human Papillomavirus
YLRREQMFV

SEQ ID NO: 27402 - protein, 8 aa, Artificial Sequence
  Peptide Derived from Human Papillomavirus
YPDYLKMV

SEQ ID NO: 27403 - protein, 9 aa, Artificial Sequence
  Peptide Derived from Human Papillomavirus
YPDYLKMVA

SEQ ID NO: 27404 - protein, 8 aa, Artificial Sequence
  Peptide Derived from Human Papillomavirus
YVFWEVNL

SEQ ID NO: 27405 - protein, 8 aa, Artificial Sequence
  Peptide Derived from Human Papillomavirus
YVTRTNIY

SEQ ID NO: 27406 - protein, 9 aa, Artificial Sequence
  Peptide Derived from Human Papillomavirus
YVTRTNIYY

SEQ ID NO: 27407 - protein, 11 aa, Artificial Sequence
  Peptide Derived from Human Papillomavirus
YVTRTNIYYHA

SEQ ID NO: 27408 - protein, 8 aa, Artificial Sequence
  Peptide Derived from Human Papillomavirus
AILDVTSV

SEQ ID NO: 27409 - protein, 9 aa, Artificial Sequence
  Peptide Derived from Human Papillomavirus
ALTSRRNTV

SEQ ID NO: 27410 - protein, 11 aa, Artificial Sequence
  Peptide Derived from Human Papillomavirus
ALTSRRNTVRY

SEQ ID NO: 27411 - protein, 9 aa, Artificial Sequence
  Peptide Derived from Human Papillomavirus
APDPDFLDI

SEQ ID NO: 27412 - protein, 10 aa, Artificial Sequence
  Peptide Derived from Human Papillomavirus
APDPDFLDII

SEQ ID NO: 27413 - protein, 11 aa, Artificial Sequence
  Peptide Derived from Human Papillomavirus
APDPDFLDIIA

SEQ ID NO: 27414 - protein, 8 aa, Artificial Sequence
  Peptide Derived from Human Papillomavirus
APKQLITY

SEQ ID NO: 27415 - protein, 8 aa, Artificial Sequence
  Peptide Derived from Human Papillomavirus
APTQVFPF

SEQ ID NO: 27416 - protein, 10 aa, Artificial Sequence
  Peptide Derived from Human Papillomavirus
APTQVFPFPL

SEQ ID NO: 27417 - protein, 11 aa, Artificial Sequence
  Peptide Derived from Human Papillomavirus
APTQVFPFPLA

SEQ ID NO: 27418 - protein, 9 aa, Artificial Sequence
  Peptide Derived from Human Papillomavirus
APTTPQVSI

SEQ ID NO: 27419 - protein, 10 aa, Artificial Sequence
  Peptide Derived from Human Papillomavirus
APTTPQVSIF

SEQ ID NO: 27420 - protein, 11 aa, Artificial Sequence
  Peptide Derived from Human Papillomavirus
APTTPQVSIFV

SEQ ID NO: 27421 - protein, 8 aa, Artificial Sequence
  Peptide Derived from Human Papillomavirus
AVQSTSAV

SEQ ID NO: 27422 - protein, 10 aa, Artificial Sequence
  Peptide Derived from Human Papillomavirus
AVQSTSAVSA

SEQ ID NO: 27423 - protein, 11 aa, Artificial Sequence
  Peptide Derived from Human Papillomavirus
AVQSTSAVSAY

SEQ ID NO: 27424 - protein, 9 aa, Artificial Sequence
  Peptide Derived from Human Papillomavirus
CPSDVIPKI

SEQ ID NO: 27425 - protein, 11 aa, Artificial Sequence
  Peptide Derived from Human Papillomavirus
DIATTADTTPA

SEQ ID NO: 27426 - protein, 9 aa, Artificial Sequence
  Peptide Derived from Human Papillomavirus
DIIALHRPA

SEQ ID NO: 27427 - protein, 10 aa, Artificial Sequence
  Peptide Derived from Human Papillomavirus
DIIALHRPAL

SEQ ID NO: 27428 - protein, 10 aa, Artificial Sequence
  Peptide Derived from Human Papillomavirus
DIPIFSGPDV

SEQ ID NO: 27429 - protein, 8 aa, Artificial Sequence
  Peptide Derived from Human Papillomavirus
DISSINPA

SEQ ID NO: 27430 - protein, 8 aa, Artificial Sequence
  Peptide Derived from Human Papillomavirus
DIYADTDF

SEQ ID NO: 27431 - protein, 10 aa, Artificial Sequence
  Peptide Derived from Human Papillomavirus
DIYADTDFTV

SEQ ID NO: 27432 - protein, 8 aa, Artificial Sequence
  Peptide Derived from Human Papillomavirus
DPDFLDII

SEQ ID NO: 27433 - protein, 9 aa, Artificial Sequence
  Peptide Derived from Human Papillomavirus
DPDFLDIIA

SEQ ID NO: 27434 - protein, 10 aa, Artificial Sequence
  Peptide Derived from Human Papillomavirus
DPDFLDIIAL

SEQ ID NO: 27435 - protein, 8 aa, Artificial Sequence
  Peptide Derived from Human Papillomavirus
DPSIVSLV

SEQ ID NO: 27436 - protein, 11 aa, Artificial Sequence
  Peptide Derived from Human Papillomavirus
DPSVLQPPTPA

SEQ ID NO: 27437 - protein, 11 aa, Artificial Sequence
  Peptide Derived from Human Papillomavirus
DPTFLSAPKQL

SEQ ID NO: 27438 - protein, 10 aa, Artificial Sequence
  Peptide Derived from Human Papillomavirus
DPVGPLDPSI

SEQ ID NO: 27439 - protein, 11 aa, Artificial Sequence
  Peptide Derived from Human Papillomavirus
DPVGPLDPSIV

SEQ ID NO: 27440 - protein, 9 aa, Artificial Sequence
  Peptide Derived from Human Papillomavirus
DQILRYGSM

SEQ ID NO: 27441 - protein, 11 aa, Artificial Sequence
  Peptide Derived from Human Papillomavirus
DQILRYGSMGV

SEQ ID NO: 27442 - protein, 8 aa, Artificial Sequence
  Peptide Derived from Human Papillomavirus
DVGAPAPI

SEQ ID NO: 27443 - protein, 11 aa, Artificial Sequence
  Peptide Derived from Human Papillomavirus
DVIPKIEHTTI

SEQ ID NO: 27444 - protein, 11 aa, Artificial Sequence
  Peptide Derived from Human Papillomavirus
DVPIEHAPTQV

SEQ ID NO: 27445 - protein, 8 aa, Artificial Sequence
  Peptide Derived from Human Papillomavirus
EIPMDTFI

SEQ ID NO: 27446 - protein, 9 aa, Artificial Sequence
  Peptide Derived from Human Papillomavirus
EIPMDTFIV

SEQ ID NO: 27447 - protein, 9 aa, Artificial Sequence
  Peptide Derived from Human Papillomavirus
EMQPLGASA

SEQ ID NO: 27448 - protein, 10 aa, Artificial Sequence
  Peptide Derived from Human Papillomavirus
FIVSTNNENI

SEQ ID NO: 27449 - protein, 11 aa, Artificial Sequence
  Peptide Derived from Human Papillomavirus
FLDIIALHRPA

SEQ ID NO: 27450 - protein, 8 aa, Artificial Sequence
  Peptide Derived from Human Papillomavirus
FLSAPKQL

SEQ ID NO: 27451 - protein, 9 aa, Artificial Sequence
  Peptide Derived from Human Papillomavirus
FLSAPKQLI

SEQ ID NO: 27452 - protein, 11 aa, Artificial Sequence
  Peptide Derived from Human Papillomavirus
FLSAPKQLITY

SEQ ID NO: 27453 - protein, 10 aa, Artificial Sequence
  Peptide Derived from Human Papillomavirus
FPLAPTTPQV

SEQ ID NO: 27454 - protein, 8 aa, Artificial Sequence
  Peptide Derived from Human Papillomavirus
FVDGGDFY

SEQ ID NO: 27455 - protein, 9 aa, Artificial Sequence
  Peptide Derived from Human Papillomavirus
FVDGGDFYL

SEQ ID NO: 27456 - protein, 9 aa, Artificial Sequence
  Peptide Derived from Human Papillomavirus
GIVDVGAPA

SEQ ID NO: 27457 - protein, 11 aa, Artificial Sequence
  Peptide Derived from Human Papillomavirus
GIVDVGAPAPI

SEQ ID NO: 27458 - protein, 11 aa, Artificial Sequence
  Peptide Derived from Human Papillomavirus
GLYDIYADTDF

SEQ ID NO: 27459 - protein, 10 aa, Artificial Sequence
  Peptide Derived from Human Papillomavirus
GLYSKATQQV

SEQ ID NO: 27460 - protein, 9 aa, Artificial Sequence
  Peptide Derived from Human Papillomavirus
GPDVPIEHA

SEQ ID NO: 27461 - protein, 8 aa, Artificial Sequence
  Peptide Derived from Human Papillomavirus
GPLDPSIV

SEQ ID NO: 27462 - protein, 10 aa, Artificial Sequence
  Peptide Derived from Human Papillomavirus
GPLDPSIVSL

SEQ ID NO: 27463 - protein, 11 aa, Artificial Sequence
  Peptide Derived from Human Papillomavirus
GPLDPSIVSLV

SEQ ID NO: 27464 - protein, 9 aa, Artificial Sequence
  Peptide Derived from Human Papillomavirus
GVFFGGLGI

SEQ ID NO: 27465 - protein, 8 aa, Artificial Sequence
  Peptide Derived from Human Papillomavirus
GVRRPARL

SEQ ID NO: 27466 - protein, 10 aa, Artificial Sequence
  Peptide Derived from Human Papillomavirus
GVRRPARLGL

SEQ ID NO: 27467 - protein, 11 aa, Artificial Sequence
  Peptide Derived from Human Papillomavirus
GVRRPARLGLY

SEQ ID NO: 27468 - protein, 9 aa, Artificial Sequence
  Peptide Derived from Human Papillomavirus
HLLLSSSSI

SEQ ID NO: 27469 - protein, 8 aa, Artificial Sequence
  Peptide Derived from Human Papillomavirus
HPPTTSGF

SEQ ID NO: 27470 - protein, 10 aa, Artificial Sequence
  Peptide Derived from Human Papillomavirus
HPPTTSGFDI

SEQ ID NO: 27471 - protein, 11 aa, Artificial Sequence
  Peptide Derived from Human Papillomavirus
HPPTTSGFDIA

SEQ ID NO: 27472 - protein, 8 aa, Artificial Sequence
  Peptide Derived from Human Papillomavirus
IIALHRPA

SEQ ID NO: 27473 - protein, 9 aa, Artificial Sequence
  Peptide Derived from Human Papillomavirus
IIALHRPAL

SEQ ID NO: 27474 - protein, 9 aa, Artificial Sequence
  Peptide Derived from Human Papillomavirus
ILRYGSMGV

SEQ ID NO: 27475 - protein, 10 aa, Artificial Sequence
  Peptide Derived from Human Papillomavirus
ILRYGSMGVF

SEQ ID NO: 27476 - protein, 11 aa, Artificial Sequence
  Peptide Derived from Human Papillomavirus
ILRYGSMGVFF

SEQ ID NO: 27477 - protein, 8 aa, Artificial Sequence
  Peptide Derived from Human Papillomavirus
IPGVRRPA

SEQ ID NO: 27478 - protein, 10 aa, Artificial Sequence
  Peptide Derived from Human Papillomavirus
IPGVRRPARL

SEQ ID NO: 27479 - protein, 10 aa, Artificial Sequence
  Peptide Derived from Human Papillomavirus
IPHPPTTSGF

SEQ ID NO: 27480 - protein, 9 aa, Artificial Sequence
  Peptide Derived from Human Papillomavirus
IPIFSGPDV

SEQ ID NO: 27481 - protein, 11 aa, Artificial Sequence
  Peptide Derived from Human Papillomavirus
IPIFSGPDVPI

SEQ ID NO: 27482 - protein, 9 aa, Artificial Sequence
  Peptide Derived from Human Papillomavirus
IPIRPPVSI

SEQ ID NO: 27483 - protein, 9 aa, Artificial Sequence
  Peptide Derived from Human Papillomavirus
IPKIEHTTI

SEQ ID NO: 27484 - protein, 10 aa, Artificial Sequence
  Peptide Derived from Human Papillomavirus
IPKIEHTTIA

SEQ ID NO: 27485 - protein, 8 aa, Artificial Sequence
  Peptide Derived from Human Papillomavirus
IPMDTFIV

SEQ ID NO: 27486 - protein, 8 aa, Artificial Sequence
  Peptide Derived from Human Papillomavirus
IVDVGAPA

SEQ ID NO: 27487 - protein, 10 aa, Artificial Sequence
  Peptide Derived from Human Papillomavirus
IVDVGAPAPI

SEQ ID NO: 27488 - protein, 10 aa, Artificial Sequence
  Peptide Derived from Human Papillomavirus
IVSLVEESGI

SEQ ID NO: 27489 - protein, 11 aa, Artificial Sequence
  Peptide Derived from Human Papillomavirus
IVSLVEESGIV

SEQ ID NO: 27490 - protein, 9 aa, Artificial Sequence
  Peptide Derived from Human Papillomavirus
IVSTNNENI

SEQ ID NO: 27491 - protein, 8 aa, Artificial Sequence
  Peptide Derived from Human Papillomavirus
KIEHTTIA

SEQ ID NO: 27492 - protein, 11 aa, Artificial Sequence
  Peptide Derived from Human Papillomavirus
KIEHTTIADQI

SEQ ID NO: 27493 - protein, 10 aa, Artificial Sequence
  Peptide Derived from Human Papillomavirus
KQLITYENPA

SEQ ID NO: 27494 - protein, 11 aa, Artificial Sequence
  Peptide Derived from Human Papillomavirus
KQLITYENPAY

SEQ ID NO: 27495 - protein, 10 aa, Artificial Sequence
  Peptide Derived from Human Papillomavirus
KQTLRTRSGA

SEQ ID NO: 27496 - protein, 8 aa, Artificial Sequence
  Peptide Derived from Human Papillomavirus
KVIDPTFL

SEQ ID NO: 27497 - protein, 10 aa, Artificial Sequence
  Peptide Derived from Human Papillomavirus
KVIDPTFLSA

SEQ ID NO: 27498 - protein, 8 aa, Artificial Sequence
  Peptide Derived from Human Papillomavirus
LITYENPA

SEQ ID NO: 27499 - protein, 9 aa, Artificial Sequence
  Peptide Derived from Human Papillomavirus
LITYENPAY

SEQ ID NO: 27500 - protein, 8 aa, Artificial Sequence
  Peptide Derived from Human Papillomavirus
LLLSSSSI

SEQ ID NO: 27501 - protein, 8 aa, Artificial Sequence
  Peptide Derived from Human Papillomavirus
LVEESGIV

SEQ ID NO: 27502 - protein, 10 aa, Artificial Sequence
  Peptide Derived from Human Papillomavirus
LVEESGIVDV

SEQ ID NO: 27503 - protein, 9 aa, Artificial Sequence
  Peptide Derived from Human Papillomavirus
MLKRRRKRV

SEQ ID NO: 27504 - protein, 11 aa, Artificial Sequence
  Peptide Derived from Human Papillomavirus
MLKRRRKRVSY

SEQ ID NO: 27505 - protein, 8 aa, Artificial Sequence
  Peptide Derived from Human Papillomavirus
MQPLGASA

SEQ ID NO: 27506 - protein, 8 aa, Artificial Sequence
  Peptide Derived from Human Papillomavirus
NIAPDPDF

SEQ ID NO: 27507 - protein, 9 aa, Artificial Sequence
  Peptide Derived from Human Papillomavirus
NIAPDPDFL

SEQ ID NO: 27508 - protein, 11 aa, Artificial Sequence
  Peptide Derived from Human Papillomavirus
NIAPDPDFLDI

SEQ ID NO: 27509 - protein, 8 aa, Artificial Sequence
  Peptide Derived from Human Papillomavirus
NITSSTPI

SEQ ID NO: 27510 - protein, 11 aa, Artificial Sequence
  Peptide Derived from Human Papillomavirus
NITSSTPIPGV

SEQ ID NO: 27511 - protein, 9 aa, Artificial Sequence
  Peptide Derived from Human Papillomavirus
NPAGESIEM

SEQ ID NO: 27512 - protein, 9 aa, Artificial Sequence
  Peptide Derived from Human Papillomavirus
NPAYETVNA

SEQ ID NO: 27513 - protein, 9 aa, Artificial Sequence
  Peptide Derived from Human Papillomavirus
NPTFTDPSV

SEQ ID NO: 27514 - protein, 10 aa, Artificial Sequence
  Peptide Derived from Human Papillomavirus
NPTFTDPSVL

SEQ ID NO: 27515 - protein, 8 aa, Artificial Sequence
  Peptide Derived from Human Papillomavirus
NVSPSTAV

SEQ ID NO: 27516 - protein, 9 aa, Artificial Sequence
  Peptide Derived from Human Papillomavirus
PIEHAPTQV

SEQ ID NO: 27517 - protein, 10 aa, Artificial Sequence
  Peptide Derived from Human Papillomavirus
PIEHAPTQVF

SEQ ID NO: 27518 - protein, 8 aa, Artificial Sequence
  Peptide Derived from Human Papillomavirus
PIFSGPDV

SEQ ID NO: 27519 - protein, 10 aa, Artificial Sequence
  Peptide Derived from Human Papillomavirus
PIFSGPDVPI

SEQ ID NO: 27520 - protein, 9 aa, Artificial Sequence
  Peptide Derived from Human Papillomavirus
PIPGVRRPA

SEQ ID NO: 27521 - protein, 11 aa, Artificial Sequence
  Peptide Derived from Human Papillomavirus
PIPGVRRPARL

SEQ ID NO: 27522 - protein, 11 aa, Artificial Sequence
  Peptide Derived from Human Papillomavirus
PIPHPPTTSGF

SEQ ID NO: 27523 - protein, 8 aa, Artificial Sequence
  Peptide Derived from Human Papillomavirus
PIRPPVSI

SEQ ID NO: 27524 - protein, 11 aa, Artificial Sequence
  Peptide Derived from Human Papillomavirus
PIRPPVSIDPV

SEQ ID NO: 27525 - protein, 9 aa, Artificial Sequence
  Peptide Derived from Human Papillomavirus
PLAPTTPQV

SEQ ID NO: 27526 - protein, 11 aa, Artificial Sequence
  Peptide Derived from Human Papillomavirus
PLAPTTPQVSI

SEQ ID NO: 27527 - protein, 9 aa, Artificial Sequence
  Peptide Derived from Human Papillomavirus
PLDPSIVSL

SEQ ID NO: 27528 - protein, 10 aa, Artificial Sequence
  Peptide Derived from Human Papillomavirus
PLDPSIVSLV

SEQ ID NO: 27529 - protein, 8 aa, Artificial Sequence
  Peptide Derived from Human Papillomavirus
PLSTGFDI

SEQ ID NO: 27530 - protein, 10 aa, Artificial Sequence
  Peptide Derived from Human Papillomavirus
PLSTGFDIPI

SEQ ID NO: 27531 - protein, 11 aa, Artificial Sequence
  Peptide Derived from Human Papillomavirus
PLSTGFDIPIF

SEQ ID NO: 27532 - protein, 9 aa, Artificial Sequence
  Peptide Derived from Human Papillomavirus
PLSTRPSTV

SEQ ID NO: 27533 - protein, 11 aa, Artificial Sequence
  Peptide Derived from Human Papillomavirus
PPTPAETSGHL

SEQ ID NO: 27534 - protein, 9 aa, Artificial Sequence
  Peptide Derived from Human Papillomavirus
PPTTSGFDI

SEQ ID NO: 27535 - protein, 10 aa, Artificial Sequence
  Peptide Derived from Human Papillomavirus
PPTTSGFDIA

SEQ ID NO: 27536 - protein, 8 aa, Artificial Sequence
  Peptide Derived from Human Papillomavirus
PPVSIDPV

SEQ ID NO: 27537 - protein, 11 aa, Artificial Sequence
  Peptide Derived from Human Papillomavirus
PPVSIDPVGPL

SEQ ID NO: 27538 - protein, 9 aa, Artificial Sequence
  Peptide Derived from Human Papillomavirus
PVGPLDPSI

SEQ ID NO: 27539 - protein, 10 aa, Artificial Sequence
  Peptide Derived from Human Papillomavirus
PVGPLDPSIV

SEQ ID NO: 27540 - protein, 10 aa, Artificial Sequence
  Peptide Derived from Human Papillomavirus
PVSIDPVGPL

SEQ ID NO: 27541 - protein, 8 aa, Artificial Sequence
  Peptide Derived from Human Papillomavirus
QILRYGSM

SEQ ID NO: 27542 - protein, 10 aa, Artificial Sequence
  Peptide Derived from Human Papillomavirus
QILRYGSMGV

SEQ ID NO: 27543 - protein, 11 aa, Artificial Sequence
  Peptide Derived from Human Papillomavirus
QILRYGSMGVF

SEQ ID NO: 27544 - protein, 9 aa, Artificial Sequence
  Peptide Derived from Human Papillomavirus
QLITYENPA

SEQ ID NO: 27545 - protein, 10 aa, Artificial Sequence
  Peptide Derived from Human Papillomavirus
QLITYENPAY

SEQ ID NO: 27546 - protein, 8 aa, Artificial Sequence
  Peptide Derived from Human Papillomavirus
QLYQTCKA

SEQ ID NO: 27547 - protein, 9 aa, Artificial Sequence
  Peptide Derived from Human Papillomavirus
QLYQTCKAA

SEQ ID NO: 27548 - protein, 10 aa, Artificial Sequence
  Peptide Derived from Human Papillomavirus
QQVKVIDPTF

SEQ ID NO: 27549 - protein, 11 aa, Artificial Sequence
  Peptide Derived from Human Papillomavirus
QQVKVIDPTFL

SEQ ID NO: 27550 - protein, 8 aa, Artificial Sequence
  Peptide Derived from Human Papillomavirus
QVFPFPLA

SEQ ID NO: 27551 - protein, 9 aa, Artificial Sequence
  Peptide Derived from Human Papillomavirus
QVKVIDPTF

SEQ ID NO: 27552 - protein, 10 aa, Artificial Sequence
  Peptide Derived from Human Papillomavirus
QVKVIDPTFL

SEQ ID NO: 27553 - protein, 11 aa, Artificial Sequence
  Peptide Derived from Human Papillomavirus
QVSIFVDGGDF

SEQ ID NO: 27554 - protein, 8 aa, Artificial Sequence
  Peptide Derived from Human Papillomavirus
RLGLYSKA

SEQ ID NO: 27555 - protein, 8 aa, Artificial Sequence
  Peptide Derived from Human Papillomavirus
RLGNKQTL

SEQ ID NO: 27556 - protein, 11 aa, Artificial Sequence
  Peptide Derived from Human Papillomavirus
RPALTSRRNTV

SEQ ID NO: 27557 - protein, 8 aa, Artificial Sequence
  Peptide Derived from Human Papillomavirus
RPARLGLY

SEQ ID NO: 27558 - protein, 11 aa, Artificial Sequence
  Peptide Derived from Human Papillomavirus
RPARLGLYSKA

SEQ ID NO: 27559 - protein, 9 aa, Artificial Sequence
  Peptide Derived from Human Papillomavirus
RPPVSIDPV

SEQ ID NO: 27560 - protein, 8 aa, Artificial Sequence
  Peptide Derived from Human Papillomavirus
RPSTVSEA

SEQ ID NO: 27561 - protein, 10 aa, Artificial Sequence
  Peptide Derived from Human Papillomavirus
RPSTVSEASI

SEQ ID NO: 27562 - protein, 8 aa, Artificial Sequence
  Peptide Derived from Human Papillomavirus
RVHYYYDI

SEQ ID NO: 27563 - protein, 11 aa, Artificial Sequence
  Peptide Derived from Human Papillomavirus
RVHYYYDISSI

SEQ ID NO: 27564 - protein, 9 aa, Artificial Sequence
  Peptide Derived from Human Papillomavirus
RVSYFFTDV

SEQ ID NO: 27565 - protein, 11 aa, Artificial Sequence
  Peptide Derived from Human Papillomavirus
RVSYFFTDVSV

SEQ ID NO: 27566 - protein, 8 aa, Artificial Sequence
  Peptide Derived from Human Papillomavirus
SIDPVGPL

SEQ ID NO: 27567 - protein, 9 aa, Artificial Sequence
  Peptide Derived from Human Papillomavirus
SIEMQPLGA

SEQ ID NO: 27568 - protein, 11 aa, Artificial Sequence
  Peptide Derived from Human Papillomavirus
SIEMQPLGASA

SEQ ID NO: 27569 - protein, 9 aa, Artificial Sequence
  Peptide Derived from Human Papillomavirus
SIFVDGGDF

SEQ ID NO: 27570 - protein, 10 aa, Artificial Sequence
  Peptide Derived from Human Papillomavirus
SIFVDGGDFY

SEQ ID NO: 27571 - protein, 11 aa, Artificial Sequence
  Peptide Derived from Human Papillomavirus
SIFVDGGDFYL

SEQ ID NO: 27572 - protein, 9 aa, Artificial Sequence
  Peptide Derived from Human Papillomavirus
SINPAGESI

SEQ ID NO: 27573 - protein, 11 aa, Artificial Sequence
  Peptide Derived from Human Papillomavirus
SINPAGESIEM

SEQ ID NO: 27574 - protein, 8 aa, Artificial Sequence
  Peptide Derived from Human Papillomavirus
SIPIRPPV

SEQ ID NO: 27575 - protein, 10 aa, Artificial Sequence
  Peptide Derived from Human Papillomavirus
SIPIRPPVSI

SEQ ID NO: 27576 - protein, 10 aa, Artificial Sequence
  Peptide Derived from Human Papillomavirus
SISTHNYEEI

SEQ ID NO: 27577 - protein, 11 aa, Artificial Sequence
  Peptide Derived from Human Papillomavirus
SIVSLVEESGI

SEQ ID NO: 27578 - protein, 8 aa, Artificial Sequence
  Peptide Derived from Human Papillomavirus
SLVEESGI

SEQ ID NO: 27579 - protein, 9 aa, Artificial Sequence
  Peptide Derived from Human Papillomavirus
SLVEESGIV

SEQ ID NO: 27580 - protein, 11 aa, Artificial Sequence
  Peptide Derived from Human Papillomavirus
SLVEESGIVDV

SEQ ID NO: 27581 - protein, 11 aa, Artificial Sequence
  Peptide Derived from Human Papillomavirus
SLYFSNTSHNI

SEQ ID NO: 27582 - protein, 9 aa, Artificial Sequence
  Peptide Derived from Human Papillomavirus
SMGVFFGGL

SEQ ID NO: 27583 - protein, 11 aa, Artificial Sequence
  Peptide Derived from Human Papillomavirus
SMGVFFGGLGI

SEQ ID NO: 27584 - protein, 11 aa, Artificial Sequence
  Peptide Derived from Human Papillomavirus
SPSTAVQSTSA

SEQ ID NO: 27585 - protein, 9 aa, Artificial Sequence
  Peptide Derived from Human Papillomavirus
SVLQPPTPA

SEQ ID NO: 27586 - protein, 10 aa, Artificial Sequence
  Peptide Derived from Human Papillomavirus
SVSTHENPTF

SEQ ID NO: 27587 - protein, 9 aa, Artificial Sequence
  Peptide Derived from Human Papillomavirus
TIADQILRY

SEQ ID NO: 27588 - protein, 8 aa, Artificial Sequence
  Peptide Derived from Human Papillomavirus
TIGARVHY

SEQ ID NO: 27589 - protein, 9 aa, Artificial Sequence
  Peptide Derived from Human Papillomavirus
TIGARVHYY

SEQ ID NO: 27590 - protein, 10 aa, Artificial Sequence
  Peptide Derived from Human Papillomavirus
TIGARVHYYY

SEQ ID NO: 27591 - protein, 9 aa, Artificial Sequence
  Peptide Derived from Human Papillomavirus
TLNDGLYDI

SEQ ID NO: 27592 - protein, 10 aa, Artificial Sequence
  Peptide Derived from Human Papillomavirus
TLNDGLYDIY

SEQ ID NO: 27593 - protein, 11 aa, Artificial Sequence
  Peptide Derived from Human Papillomavirus
TLNDGLYDIYA

SEQ ID NO: 27594 - protein, 8 aa, Artificial Sequence
  Peptide Derived from Human Papillomavirus
TLRTRSGA

SEQ ID NO: 27595 - protein, 10 aa, Artificial Sequence
  Peptide Derived from Human Papillomavirus
TLRTRSGATI

SEQ ID NO: 27596 - protein, 9 aa, Artificial Sequence
  Peptide Derived from Human Papillomavirus
TPAETSGHL

SEQ ID NO: 27597 - protein, 10 aa, Artificial Sequence
  Peptide Derived from Human Papillomavirus
TPAETSGHLL

SEQ ID NO: 27598 - protein, 11 aa, Artificial Sequence
  Peptide Derived from Human Papillomavirus
TPAETSGHLLL

SEQ ID NO: 27599 - protein, 10 aa, Artificial Sequence
  Peptide Derived from Human Papillomavirus
TPAILDVTSV

SEQ ID NO: 27600 - protein, 10 aa, Artificial Sequence
  Peptide Derived from Human Papillomavirus
TPIPGVRRPA

SEQ ID NO: 27601 - protein, 8 aa, Artificial Sequence
  Peptide Derived from Human Papillomavirus
TPQVSIFV

SEQ ID NO: 27602 - protein, 9 aa, Artificial Sequence
  Peptide Derived from Human Papillomavirus
TQLYQTCKA

SEQ ID NO: 27603 - protein, 10 aa, Artificial Sequence
  Peptide Derived from Human Papillomavirus
TQLYQTCKAA

SEQ ID NO: 27604 - protein, 11 aa, Artificial Sequence
  Peptide Derived from Human Papillomavirus
TQQVKVIDPTF

SEQ ID NO: 27605 - protein, 8 aa, Artificial Sequence
  Peptide Derived from Human Papillomavirus
TQVFPFPL

SEQ ID NO: 27606 - protein, 9 aa, Artificial Sequence
  Peptide Derived from Human Papillomavirus
TQVFPFPLA

SEQ ID NO: 27607 - protein, 10 aa, Artificial Sequence
  Peptide Derived from Human Papillomavirus
TVDTPATHNV

SEQ ID NO: 27608 - protein, 8 aa, Artificial Sequence
  Peptide Derived from Human Papillomavirus
TVNAEESL

SEQ ID NO: 27609 - protein, 9 aa, Artificial Sequence
  Peptide Derived from Human Papillomavirus
TVNAEESLY

SEQ ID NO: 27610 - protein, 10 aa, Artificial Sequence
  Peptide Derived from Human Papillomavirus
TVNAEESLYF

SEQ ID NO: 27611 - protein, 8 aa, Artificial Sequence
  Peptide Derived from Human Papillomavirus
TVPLSTGF

SEQ ID NO: 27612 - protein, 10 aa, Artificial Sequence
  Peptide Derived from Human Papillomavirus
TVPLSTGFDI

SEQ ID NO: 27613 - protein, 9 aa, Artificial Sequence
  Peptide Derived from Human Papillomavirus
TVSEASIPI

SEQ ID NO: 27614 - protein, 9 aa, Artificial Sequence
  Peptide Derived from Human Papillomavirus
VIDPTFLSA

SEQ ID NO: 27615 - protein, 10 aa, Artificial Sequence
  Peptide Derived from Human Papillomavirus
VIPKIEHTTI

SEQ ID NO: 27616 - protein, 11 aa, Artificial Sequence
  Peptide Derived from Human Papillomavirus
VIPKIEHTTIA

SEQ ID NO: 27617 - protein, 8 aa, Artificial Sequence
  Peptide Derived from Human Papillomavirus
VLQPPTPA

SEQ ID NO: 27618 - protein, 10 aa, Artificial Sequence
  Peptide Derived from Human Papillomavirus
VPIEHAPTQV

SEQ ID NO: 27619 - protein, 11 aa, Artificial Sequence
  Peptide Derived from Human Papillomavirus
VPIEHAPTQVF

SEQ ID NO: 27620 - protein, 9 aa, Artificial Sequence
  Peptide Derived from Human Papillomavirus
VPLSTGFDI

SEQ ID NO: 27621 - protein, 11 aa, Artificial Sequence
  Peptide Derived from Human Papillomavirus
VPLSTGFDIPI

SEQ ID NO: 27622 - protein, 10 aa, Artificial Sequence
  Peptide Derived from Human Papillomavirus
VPLSTRPSTV

SEQ ID NO: 27623 - protein, 9 aa, Artificial Sequence
  Peptide Derived from Human Papillomavirus
VPTNTTVPL

SEQ ID NO: 27624 - protein, 9 aa, Artificial Sequence
  Peptide Derived from Human Papillomavirus
VQSTSAVSA

SEQ ID NO: 27625 - protein, 10 aa, Artificial Sequence
  Peptide Derived from Human Papillomavirus
VQSTSAVSAY

SEQ ID NO: 27626 - protein, 11 aa, Artificial Sequence
  Peptide Derived from Human Papillomavirus
VQSTSAVSAYV

SEQ ID NO: 27627 - protein, 8 aa, Artificial Sequence
  Peptide Derived from Human Papillomavirus
YLHPSYYM

SEQ ID NO: 27628 - protein, 9 aa, Artificial Sequence
  Peptide Derived from Human Papillomavirus
YLHPSYYML

SEQ ID NO: 27629 - protein, 10 aa, Artificial Sequence
  Peptide Derived from Human Papillomavirus
YMLKRRRKRV

SEQ ID NO: 27630 - protein, 11 aa, Artificial Sequence
  Peptide Derived from Human Papillomavirus
YVPLSTRPSTV

SEQ ID NO: 27631 - protein, 8 aa, Artificial Sequence
  Peptide Derived from Human Papillomavirus
YVPTNTTV

SEQ ID NO: 27632 - protein, 10 aa, Artificial Sequence
  Peptide Derived from Human Papillomavirus
YVPTNTTVPL

SEQ ID NO: 27633 - protein, 10 aa, Artificial Sequence
  Peptide Derived from Human Papillomavirus
AINDENWKSF

SEQ ID NO: 27634 - protein, 11 aa, Artificial Sequence
  Peptide Derived from Human Papillomavirus
AINDENWKSFF

SEQ ID NO: 27635 - protein, 9 aa, Artificial Sequence
  Peptide Derived from Human Papillomavirus
ALDGNEISI

SEQ ID NO: 27636 - protein, 11 aa, Artificial Sequence
  Peptide Derived from Human Papillomavirus
ALDGNEISIDV

SEQ ID NO: 27637 - protein, 8 aa, Artificial Sequence
  Peptide Derived from Human Papillomavirus
ALKRKFAA

SEQ ID NO: 27638 - protein, 10 aa, Artificial Sequence
  Peptide Derived from Human Papillomavirus
ALVQLKCPPL

SEQ ID NO: 27639 - protein, 11 aa, Artificial Sequence
  Peptide Derived from Human Papillomavirus
ALVQLKCPPLL

SEQ ID NO: 27640 - protein, 8 aa, Artificial Sequence
  Peptide Derived from Human Papillomavirus
ALYWFRTA

SEQ ID NO: 27641 - protein, 9 aa, Artificial Sequence
  Peptide Derived from Human Papillomavirus
ALYWFRTAM

SEQ ID NO: 27642 - protein, 8 aa, Artificial Sequence
  Peptide Derived from Human Papillomavirus
AMSNISDV

SEQ ID NO: 27643 - protein, 10 aa, Artificial Sequence
  Peptide Derived from Human Papillomavirus
AQLADSNSNA

SEQ ID NO: 27644 - protein, 11 aa, Artificial Sequence
  Peptide Derived from Human Papillomavirus
AQLADSNSNAA

SEQ ID NO: 27645 - protein, 9 aa, Artificial Sequence
  Peptide Derived from Human Papillomavirus
AVCALKRKF

SEQ ID NO: 27646 - protein, 10 aa, Artificial Sequence
  Peptide Derived from Human Papillomavirus
AVCALKRKFA

SEQ ID NO: 27647 - protein, 11 aa, Artificial Sequence
  Peptide Derived from Human Papillomavirus
AVCALKRKFAA

SEQ ID NO: 27648 - protein, 11 aa, Artificial Sequence
  Peptide Derived from Human Papillomavirus
AVIERRTGDNI

SEQ ID NO: 27649 - protein, 11 aa, Artificial Sequence
  Peptide Derived from Human Papillomavirus
CITGYGISPSV

SEQ ID NO: 27650 - protein, 8 aa, Artificial Sequence
  Peptide Derived from Human Papillomavirus
CLTCDRGI

SEQ ID NO: 27651 - protein, 9 aa, Artificial Sequence
  Peptide Derived from Human Papillomavirus
CLTCDRGII

SEQ ID NO: 27652 - protein, 10 aa, Artificial Sequence
  Peptide Derived from Human Papillomavirus
CLTCDRGIII

SEQ ID NO: 27653 - protein, 11 aa, Artificial Sequence
  Peptide Derived from Human Papillomavirus
CLTCDRGIIIL

SEQ ID NO: 27654 - protein, 8 aa, Artificial Sequence
  Peptide Derived from Human Papillomavirus
CMLICGPA

SEQ ID NO: 27655 - protein, 9 aa, Artificial Sequence
  Peptide Derived from Human Papillomavirus
CMVIEPPKL

SEQ ID NO: 27656 - protein, 8 aa, Artificial Sequence
  Peptide Derived from Human Papillomavirus
CVNSKSHF

SEQ ID NO: 27657 - protein, 9 aa, Artificial Sequence
  Peptide Derived from Human Papillomavirus
CVNSKSHFW

SEQ ID NO: 27658 - protein, 10 aa, Artificial Sequence
  Peptide Derived from Human Papillomavirus
CVNSKSHFWL

SEQ ID NO: 27659 - protein, 9 aa, Artificial Sequence
  Peptide Derived from Human Papillomavirus
DIAYYYAQL

SEQ ID NO: 27660 - protein, 10 aa, Artificial Sequence
  Peptide Derived from Human Papillomavirus
DIAYYYAQLA

SEQ ID NO: 27661 - protein, 10 aa, Artificial Sequence
  Peptide Derived from Human Papillomavirus
DLLEFIDDSM

SEQ ID NO: 27662 - protein, 8 aa, Artificial Sequence
  Peptide Derived from Human Papillomavirus
DLNAVCAL

SEQ ID NO: 27663 - protein, 8 aa, Artificial Sequence
  Peptide Derived from Human Papillomavirus
DLSEMVQW

SEQ ID NO: 27664 - protein, 9 aa, Artificial Sequence
  Peptide Derived from Human Papillomavirus
DLSEMVQWA

SEQ ID NO: 27665 - protein, 10 aa, Artificial Sequence
  Peptide Derived from Human Papillomavirus
DLSEMVQWAY

SEQ ID NO: 27666 - protein, 8 aa, Artificial Sequence
  Peptide Derived from Human Papillomavirus
DPEGTNGA

SEQ ID NO: 27667 - protein, 10 aa, Artificial Sequence
  Peptide Derived from Human Papillomavirus
DPEGTNGAGM

SEQ ID NO: 27668 - protein, 8 aa, Artificial Sequence
  Peptide Derived from Human Papillomavirus
DVKHRALV

SEQ ID NO: 27669 - protein, 10 aa, Artificial Sequence
  Peptide Derived from Human Papillomavirus
DVKHRALVQL

SEQ ID NO: 27670 - protein, 9 aa, Artificial Sequence
  Peptide Derived from Human Papillomavirus
DVQGTTPEW

SEQ ID NO: 27671 - protein, 10 aa, Artificial Sequence
  Peptide Derived from Human Papillomavirus
DVQGTTPEWI

SEQ ID NO: 27672 - protein, 9 aa, Artificial Sequence
  Peptide Derived from Human Papillomavirus
DVTPISWTY

SEQ ID NO: 27673 - protein, 10 aa, Artificial Sequence
  Peptide Derived from Human Papillomavirus
DVTPISWTYI

SEQ ID NO: 27674 - protein, 10 aa, Artificial Sequence
  Peptide Derived from Human Papillomavirus
EISIDVKHRA

SEQ ID NO: 27675 - protein, 11 aa, Artificial Sequence
  Peptide Derived from Human Papillomavirus
EISIDVKHRAL

SEQ ID NO: 27676 - protein, 8 aa, Artificial Sequence
  Peptide Derived from Human Papillomavirus
ELTDDSDI

SEQ ID NO: 27677 - protein, 9 aa, Artificial Sequence
  Peptide Derived from Human Papillomavirus
ELTDDSDIA

SEQ ID NO: 27678 - protein, 10 aa, Artificial Sequence
  Peptide Derived from Human Papillomavirus
ELTDDSDIAY

SEQ ID NO: 27679 - protein, 11 aa, Artificial Sequence
  Peptide Derived from Human Papillomavirus
ELTDDSDIAYY

SEQ ID NO: 27680 - protein, 11 aa, Artificial Sequence
  Peptide Derived from Human Papillomavirus
EMVQWAYDNEL

SEQ ID NO: 27681 - protein, 11 aa, Artificial Sequence
  Peptide Derived from Human Papillomavirus
EPPKLRSQTCA

SEQ ID NO: 27682 - protein, 8 aa, Artificial Sequence
  Peptide Derived from Human Papillomavirus
EVETQQMV

SEQ ID NO: 27683 - protein, 11 aa, Artificial Sequence
  Peptide Derived from Human Papillomavirus
EVETQQMVQQV

SEQ ID NO: 27684 - protein, 8 aa, Artificial Sequence
  Peptide Derived from Human Papillomavirus
EVSCETNV

SEQ ID NO: 27685 - protein, 10 aa, Artificial Sequence
  Peptide Derived from Human Papillomavirus
FIDDSMENSI

SEQ ID NO: 27686 - protein, 8 aa, Artificial Sequence
  Peptide Derived from Human Papillomavirus
FLGAFKKF

SEQ ID NO: 27687 - protein, 9 aa, Artificial Sequence
  Peptide Derived from Human Papillomavirus
FLGAFKKFL

SEQ ID NO: 27688 - protein, 10 aa, Artificial Sequence
  Peptide Derived from Human Papillomavirus
FLKGCVISCV

SEQ ID NO: 27689 - protein, 11 aa, Artificial Sequence
  Peptide Derived from Human Papillomavirus
FLKGIPKKSCM

SEQ ID NO: 27690 - protein, 8 aa, Artificial Sequence
  Peptide Derived from Human Papillomavirus
FLKSNSQA

SEQ ID NO: 27691 - protein, 10 aa, Artificial Sequence
  Peptide Derived from Human Papillomavirus
FLKSNSQAKI

SEQ ID NO: 27692 - protein, 11 aa, Artificial Sequence
  Peptide Derived from Human Papillomavirus
FLKSNSQAKIV

SEQ ID NO: 27693 - protein, 8 aa, Artificial Sequence
  Peptide Derived from Human Papillomavirus
FMELVRPF

SEQ ID NO: 27694 - protein, 10 aa, Artificial Sequence
  Peptide Derived from Human Papillomavirus
FPFDENGNPV

SEQ ID NO: 27695 - protein, 11 aa, Artificial Sequence
  Peptide Derived from Human Papillomavirus
FPFDENGNPVY

SEQ ID NO: 27696 - protein, 8 aa, Artificial Sequence
  Peptide Derived from Human Papillomavirus
GIIILLLI

SEQ ID NO: 27697 - protein, 10 aa, Artificial Sequence
  Peptide Derived from Human Papillomavirus
GIIILLLIRF

SEQ ID NO: 27698 - protein, 10 aa, Artificial Sequence
  Peptide Derived from Human Papillomavirus
GIMCRHYKKA

SEQ ID NO: 27699 - protein, 8 aa, Artificial Sequence
  Peptide Derived from Human Papillomavirus
GIPKKSCM

SEQ ID NO: 27700 - protein, 9 aa, Artificial Sequence
  Peptide Derived from Human Papillomavirus
GIPKKSCML

SEQ ID NO: 27701 - protein, 10 aa, Artificial Sequence
  Peptide Derived from Human Papillomavirus
GIPKKSCMLI

SEQ ID NO: 27702 - protein, 8 aa, Artificial Sequence
  Peptide Derived from Human Papillomavirus
GISFMELV

SEQ ID NO: 27703 - protein, 11 aa, Artificial Sequence
  Peptide Derived from Human Papillomavirus
GISFMELVRPF

SEQ ID NO: 27704 - protein, 10 aa, Artificial Sequence
  Peptide Derived from Human Papillomavirus
GISPSVAESL

SEQ ID NO: 27705 - protein, 8 aa, Artificial Sequence
  Peptide Derived from Human Papillomavirus
GMGCTGWF

SEQ ID NO: 27706 - protein, 10 aa, Artificial Sequence
  Peptide Derived from Human Papillomavirus
GMGCTGWFEV

SEQ ID NO: 27707 - protein, 9 aa, Artificial Sequence
  Peptide Derived from Human Papillomavirus
GMIDDVTPI

SEQ ID NO: 27708 - protein, 11 aa, Artificial Sequence
  Peptide Derived from Human Papillomavirus
GMIDDVTPISW

SEQ ID NO: 27709 - protein, 8 aa, Artificial Sequence
  Peptide Derived from Human Papillomavirus
GMSLIQFL

SEQ ID NO: 27710 - protein, 9 aa, Artificial Sequence
  Peptide Derived from Human Papillomavirus
GPANTGKSY

SEQ ID NO: 27711 - protein, 10 aa, Artificial Sequence
  Peptide Derived from Human Papillomavirus
GPANTGKSYF

SEQ ID NO: 27712 - protein, 8 aa, Artificial Sequence
  Peptide Derived from Human Papillomavirus
GVGDDSEV

SEQ ID NO: 27713 - protein, 11 aa, Artificial Sequence
  Peptide Derived from Human Papillomavirus
HLQCLTCDRGI

SEQ ID NO: 27714 - protein, 9 aa, Artificial Sequence
  Peptide Derived from Human Papillomavirus
IIILLLIRF

SEQ ID NO: 27715 - protein, 8 aa, Artificial Sequence
  Peptide Derived from Human Papillomavirus
IILLLIRF

SEQ ID NO: 27716 - protein, 8 aa, Artificial Sequence
  Peptide Derived from Human Papillomavirus
ILYKFKEA

SEQ ID NO: 27717 - protein, 9 aa, Artificial Sequence
  Peptide Derived from Human Papillomavirus
ILYKFKEAY

SEQ ID NO: 27718 - protein, 11 aa, Artificial Sequence
  Peptide Derived from Human Papillomavirus
ILYKFKEAYGI

SEQ ID NO: 27719 - protein, 9 aa, Artificial Sequence
  Peptide Derived from Human Papillomavirus
IMCRHYKKA

SEQ ID NO: 27720 - protein, 8 aa, Artificial Sequence
  Peptide Derived from Human Papillomavirus
IPETCMVI

SEQ ID NO: 27721 - protein, 8 aa, Artificial Sequence
  Peptide Derived from Human Papillomavirus
IPKKSCML

SEQ ID NO: 27722 - protein, 9 aa, Artificial Sequence
  Peptide Derived from Human Papillomavirus
IPKKSCMLI

SEQ ID NO: 27723 - protein, 8 aa, Artificial Sequence
  Peptide Derived from Human Papillomavirus
IQADTEAA

SEQ ID NO: 27724 - protein, 10 aa, Artificial Sequence
  Peptide Derived from Human Papillomavirus
IQADTEAARA

SEQ ID NO: 27725 - protein, 11 aa, Artificial Sequence
  Peptide Derived from Human Papillomavirus
IQADTEAARAL

SEQ ID NO: 27726 - protein, 8 aa, Artificial Sequence
  Peptide Derived from Human Papillomavirus
IQEGEDDL

SEQ ID NO: 27727 - protein, 10 aa, Artificial Sequence
  Peptide Derived from Human Papillomavirus
IQEGEDDLNA

SEQ ID NO: 27728 - protein, 11 aa, Artificial Sequence
  Peptide Derived from Human Papillomavirus
IQEGEDDLNAV

SEQ ID NO: 27729 - protein, 8 aa, Artificial Sequence
  Peptide Derived from Human Papillomavirus
IQFLKGCV

SEQ ID NO: 27730 - protein, 9 aa, Artificial Sequence
  Peptide Derived from Human Papillomavirus
IQFLKGCVI

SEQ ID NO: 27731 - protein, 8 aa, Artificial Sequence
  Peptide Derived from Human Papillomavirus
IVKDCGIM

SEQ ID NO: 27732 - protein, 10 aa, Artificial Sequence
  Peptide Derived from Human Papillomavirus
IVQLLRYQNI

SEQ ID NO: 27733 - protein, 10 aa, Artificial Sequence
  Peptide Derived from Human Papillomavirus
KIDELEDSGY

SEQ ID NO: 27734 - protein, 8 aa, Artificial Sequence
  Peptide Derived from Human Papillomavirus
KIGMIDDV

SEQ ID NO: 27735 - protein, 11 aa, Artificial Sequence
  Peptide Derived from Human Papillomavirus
KIGMIDDVTPI

SEQ ID NO: 27736 - protein, 8 aa, Artificial Sequence
  Peptide Derived from Human Papillomavirus
KIVKDCGI

SEQ ID NO: 27737 - protein, 9 aa, Artificial Sequence
  Peptide Derived from Human Papillomavirus
KIVKDCGIM

SEQ ID NO: 27738 - protein, 9 aa, Artificial Sequence
  Peptide Derived from Human Papillomavirus
KLMSNLLSI

SEQ ID NO: 27739 - protein, 8 aa, Artificial Sequence
  Peptide Derived from Human Papillomavirus
KLRSQTCA

SEQ ID NO: 27740 - protein, 9 aa, Artificial Sequence
  Peptide Derived from Human Papillomavirus
KLRSQTCAL

SEQ ID NO: 27741 - protein, 10 aa, Artificial Sequence
  Peptide Derived from Human Papillomavirus
KLRSQTCALY

SEQ ID NO: 27742 - protein, 11 aa, Artificial Sequence
  Peptide Derived from Human Papillomavirus
KLRSQTCALYW

SEQ ID NO: 27743 - protein, 8 aa, Artificial Sequence
  Peptide Derived from Human Papillomavirus
KMSIGQWI

SEQ ID NO: 27744 - protein, 9 aa, Artificial Sequence
  Peptide Derived from Human Papillomavirus
KQHSLYTHL

SEQ ID NO: 27745 - protein, 9 aa, Artificial Sequence
  Peptide Derived from Human Papillomavirus
KVLIKQHSL

SEQ ID NO: 27746 - protein, 10 aa, Artificial Sequence
  Peptide Derived from Human Papillomavirus
KVLIKQHSLY

SEQ ID NO: 27747 - protein, 8 aa, Artificial Sequence
  Peptide Derived from Human Papillomavirus
LIKQHSLY

SEQ ID NO: 27748 - protein, 11 aa, Artificial Sequence
  Peptide Derived from Human Papillomavirus
LIKQHSLYTHL

SEQ ID NO: 27749 - protein, 9 aa, Artificial Sequence
  Peptide Derived from Human Papillomavirus
LIQFLKGCV

SEQ ID NO: 27750 - protein, 10 aa, Artificial Sequence
  Peptide Derived from Human Papillomavirus
LIQFLKGCVI

SEQ ID NO: 27751 - protein, 11 aa, Artificial Sequence
  Peptide Derived from Human Papillomavirus
LIRFRCSKNRL

SEQ ID NO: 27752 - protein, 9 aa, Artificial Sequence
  Peptide Derived from Human Papillomavirus
LLEFIDDSM

SEQ ID NO: 27753 - protein, 9 aa, Artificial Sequence
  Peptide Derived from Human Papillomavirus
LLLTSNTNA

SEQ ID NO: 27754 - protein, 9 aa, Artificial Sequence
  Peptide Derived from Human Papillomavirus
LLRYQNIEF

SEQ ID NO: 27755 - protein, 11 aa, Artificial Sequence
  Peptide Derived from Human Papillomavirus
LLRYQNIEFTA

SEQ ID NO: 27756 - protein, 9 aa, Artificial Sequence
  Peptide Derived from Human Papillomavirus
LLSIPETCM

SEQ ID NO: 27757 - protein, 10 aa, Artificial Sequence
  Peptide Derived from Human Papillomavirus
LLSIPETCMV

SEQ ID NO: 27758 - protein, 11 aa, Artificial Sequence
  Peptide Derived from Human Papillomavirus
LLSIPETCMVI

SEQ ID NO: 27759 - protein, 8 aa, Artificial Sequence
  Peptide Derived from Human Papillomavirus
LLTSNTNA

SEQ ID NO: 27760 - protein, 8 aa, Artificial Sequence
  Peptide Derived from Human Papillomavirus
LMSNLLSI

SEQ ID NO: 27761 - protein, 10 aa, Artificial Sequence
  Peptide Derived from Human Papillomavirus
LQCLTCDRGI

SEQ ID NO: 27762 - protein, 11 aa, Artificial Sequence
  Peptide Derived from Human Papillomavirus
LQCLTCDRGII

SEQ ID NO: 27763 - protein, 8 aa, Artificial Sequence
  Peptide Derived from Human Papillomavirus
LQEISNVL

SEQ ID NO: 27764 - protein, 9 aa, Artificial Sequence
  Peptide Derived from Human Papillomavirus
LQHSFNDNI

SEQ ID NO: 27765 - protein, 10 aa, Artificial Sequence
  Peptide Derived from Human Papillomavirus
LQHSFNDNIF

SEQ ID NO: 27766 - protein, 9 aa, Artificial Sequence
  Peptide Derived from Human Papillomavirus
LQPLSDAKI

SEQ ID NO: 27767 - protein, 11 aa, Artificial Sequence
  Peptide Derived from Human Papillomavirus
LQPLSDAKIGM

SEQ ID NO: 27768 - protein, 9 aa, Artificial Sequence
  Peptide Derived from Human Papillomavirus
LVQLKCPPL

SEQ ID NO: 27769 - protein, 10 aa, Artificial Sequence
  Peptide Derived from Human Papillomavirus
LVQLKCPPLL

SEQ ID NO: 27770 - protein, 11 aa, Artificial Sequence
  Peptide Derived from Human Papillomavirus
LVQLKCPPLLL

SEQ ID NO: 27771 - protein, 8 aa, Artificial Sequence
  Peptide Derived from Human Papillomavirus
MIDDVTPI

SEQ ID NO: 27772 - protein, 10 aa, Artificial Sequence
  Peptide Derived from Human Papillomavirus
MIDDVTPISW

SEQ ID NO: 27773 - protein, 8 aa, Artificial Sequence
  Peptide Derived from Human Papillomavirus
MVIEPPKL

SEQ ID NO: 27774 - protein, 10 aa, Artificial Sequence
  Peptide Derived from Human Papillomavirus
MVQWAYDNEL

SEQ ID NO: 27775 - protein, 8 aa, Artificial Sequence
  Peptide Derived from Human Papillomavirus
NIEFTAFL

SEQ ID NO: 27776 - protein, 10 aa, Artificial Sequence
  Peptide Derived from Human Papillomavirus
NIEFTAFLGA

SEQ ID NO: 27777 - protein, 11 aa, Artificial Sequence
  Peptide Derived from Human Papillomavirus
NIEFTAFLGAF

SEQ ID NO: 27778 - protein, 8 aa, Artificial Sequence
  Peptide Derived from Human Papillomavirus
NIFDLSEM

SEQ ID NO: 27779 - protein, 9 aa, Artificial Sequence
  Peptide Derived from Human Papillomavirus
NIFDLSEMV

SEQ ID NO: 27780 - protein, 11 aa, Artificial Sequence
  Peptide Derived from Human Papillomavirus
NIFDLSEMVQW

SEQ ID NO: 27781 - protein, 9 aa, Artificial Sequence
  Peptide Derived from Human Papillomavirus
NILYKFKEA

SEQ ID NO: 27782 - protein, 10 aa, Artificial Sequence
  Peptide Derived from Human Papillomavirus
NILYKFKEAY

SEQ ID NO: 27783 - protein, 9 aa, Artificial Sequence
  Peptide Derived from Human Papillomavirus
NIQEGEDDL

SEQ ID NO: 27784 - protein, 11 aa, Artificial Sequence
  Peptide Derived from Human Papillomavirus
NIQEGEDDLNA

SEQ ID NO: 27785 - protein, 10 aa, Artificial Sequence
  Peptide Derived from Human Papillomavirus
NISEDEDETA

SEQ ID NO: 27786 - protein, 9 aa, Artificial Sequence
  Peptide Derived from Human Papillomavirus
NISTFKCSA

SEQ ID NO: 27787 - protein, 10 aa, Artificial Sequence
  Peptide Derived from Human Papillomavirus
NLLSIPETCM

SEQ ID NO: 27788 - protein, 11 aa, Artificial Sequence
  Peptide Derived from Human Papillomavirus
NLLSIPETCMV

SEQ ID NO: 27789 - protein, 10 aa, Artificial Sequence
  Peptide Derived from Human Papillomavirus
NLNDLESSGV

SEQ ID NO: 27790 - protein, 11 aa, Artificial Sequence
  Peptide Derived from Human Papillomavirus
NPVYAINDENW

SEQ ID NO: 27791 - protein, 8 aa, Artificial Sequence
  Peptide Derived from Human Papillomavirus
NVDSCENV

SEQ ID NO: 27792 - protein, 10 aa, Artificial Sequence
  Peptide Derived from Human Papillomavirus
NVDSCENVTL

SEQ ID NO: 27793 - protein, 10 aa, Artificial Sequence
  Peptide Derived from Human Papillomavirus
NVLHSSNTKA

SEQ ID NO: 27794 - protein, 10 aa, Artificial Sequence
  Peptide Derived from Human Papillomavirus
NVTLQEISNV

SEQ ID NO: 27795 - protein, 11 aa, Artificial Sequence
  Peptide Derived from Human Papillomavirus
NVTLQEISNVL

SEQ ID NO: 27796 - protein, 10 aa, Artificial Sequence
  Peptide Derived from Human Papillomavirus
PISWTYIDDY

SEQ ID NO: 27797 - protein, 11 aa, Artificial Sequence
  Peptide Derived from Human Papillomavirus
PISWTYIDDYM

SEQ ID NO: 27798 - protein, 8 aa, Artificial Sequence
  Peptide Derived from Human Papillomavirus
PIVQLLRY

SEQ ID NO: 27799 - protein, 11 aa, Artificial Sequence
  Peptide Derived from Human Papillomavirus
PIVQLLRYQNI

SEQ ID NO: 27800 - protein, 10 aa, Artificial Sequence
  Peptide Derived from Human Papillomavirus
PLLLTSNTNA

SEQ ID NO: 27801 - protein, 9 aa, Artificial Sequence
  Peptide Derived from Human Papillomavirus
PLSDAKIGM

SEQ ID NO: 27802 - protein, 10 aa, Artificial Sequence
  Peptide Derived from Human Papillomavirus
PLSDAKIGMI

SEQ ID NO: 27803 - protein, 10 aa, Artificial Sequence
  Peptide Derived from Human Papillomavirus
PPKLRSQTCA

SEQ ID NO: 27804 - protein, 11 aa, Artificial Sequence
  Peptide Derived from Human Papillomavirus
PPKLRSQTCAL

SEQ ID NO: 27805 - protein, 11 aa, Artificial Sequence
  Peptide Derived from Human Papillomavirus
PPLLLTSNTNA

SEQ ID NO: 27806 - protein, 10 aa, Artificial Sequence
  Peptide Derived from Human Papillomavirus
PVYAINDENW

SEQ ID NO: 27807 - protein, 9 aa, Artificial Sequence
  Peptide Derived from Human Papillomavirus
QLADSNSNA

SEQ ID NO: 27808 - protein, 10 aa, Artificial Sequence
  Peptide Derived from Human Papillomavirus
QLADSNSNAA

SEQ ID NO: 27809 - protein, 11 aa, Artificial Sequence
  Peptide Derived from Human Papillomavirus
QLADSNSNAAA

SEQ ID NO: 27810 - protein, 8 aa, Artificial Sequence
  Peptide Derived from Human Papillomavirus
QLKCPPLL

SEQ ID NO: 27811 - protein, 9 aa, Artificial Sequence
  Peptide Derived from Human Papillomavirus
QLKCPPLLL

SEQ ID NO: 27812 - protein, 8 aa, Artificial Sequence
  Peptide Derived from Human Papillomavirus
QLLRYQNI

SEQ ID NO: 27813 - protein, 10 aa, Artificial Sequence
  Peptide Derived from Human Papillomavirus
QLLRYQNIEF

SEQ ID NO: 27814 - protein, 8 aa, Artificial Sequence
  Peptide Derived from Human Papillomavirus
QPLSDAKI

SEQ ID NO: 27815 - protein, 10 aa, Artificial Sequence
  Peptide Derived from Human Papillomavirus
QPLSDAKIGM

SEQ ID NO: 27816 - protein, 11 aa, Artificial Sequence
  Peptide Derived from Human Papillomavirus
QPLSDAKIGMI

SEQ ID NO: 27817 - protein, 11 aa, Artificial Sequence
  Peptide Derived from Human Papillomavirus
QVESQNGDTNL

SEQ ID NO: 27818 - protein, 8 aa, Artificial Sequence
  Peptide Derived from Human Papillomavirus
RLTVAKLM

SEQ ID NO: 27819 - protein, 11 aa, Artificial Sequence
  Peptide Derived from Human Papillomavirus
RLTVAKLMSNL

SEQ ID NO: 27820 - protein, 11 aa, Artificial Sequence
  Peptide Derived from Human Papillomavirus
RLTVFEFKNPF

SEQ ID NO: 27821 - protein, 9 aa, Artificial Sequence
  Peptide Derived from Human Papillomavirus
RLTVLQHSF

SEQ ID NO: 27822 - protein, 9 aa, Artificial Sequence
  Peptide Derived from Human Papillomavirus
RPIVQLLRY

SEQ ID NO: 27823 - protein, 8 aa, Artificial Sequence
  Peptide Derived from Human Papillomavirus
SIDVKHRA

SEQ ID NO: 27824 - protein, 9 aa, Artificial Sequence
  Peptide Derived from Human Papillomavirus
SIDVKHRAL

SEQ ID NO: 27825 - protein, 10 aa, Artificial Sequence
  Peptide Derived from Human Papillomavirus
SIDVKHRALV

SEQ ID NO: 27826 - protein, 10 aa, Artificial Sequence
  Peptide Derived from Human Papillomavirus
SINKNKECTY

SEQ ID NO: 27827 - protein, 8 aa, Artificial Sequence
  Peptide Derived from Human Papillomavirus
SIPETCMV

SEQ ID NO: 27828 - protein, 9 aa, Artificial Sequence
  Peptide Derived from Human Papillomavirus
SIPETCMVI

SEQ ID NO: 27829 - protein, 8 aa, Artificial Sequence
  Peptide Derived from Human Papillomavirus
SIQADTEA

SEQ ID NO: 27830 - protein, 9 aa, Artificial Sequence
  Peptide Derived from Human Papillomavirus
SIQADTEAA

SEQ ID NO: 27831 - protein, 11 aa, Artificial Sequence
  Peptide Derived from Human Papillomavirus
SIQADTEAARA

SEQ ID NO: 27832 - protein, 10 aa, Artificial Sequence
  Peptide Derived from Human Papillomavirus
SLIQFLKGCV

SEQ ID NO: 27833 - protein, 11 aa, Artificial Sequence
  Peptide Derived from Human Papillomavirus
SLIQFLKGCVI

SEQ ID NO: 27834 - protein, 11 aa, Artificial Sequence
  Peptide Derived from Human Papillomavirus
SLKVLIKQHSL

SEQ ID NO: 27835 - protein, 9 aa, Artificial Sequence
  Peptide Derived from Human Papillomavirus
SLYTHLQCL

SEQ ID NO: 27836 - protein, 8 aa, Artificial Sequence
  Peptide Derived from Human Papillomavirus
SMENSIQA

SEQ ID NO: 27837 - protein, 8 aa, Artificial Sequence
  Peptide Derived from Human Papillomavirus
SPSVAESL

SEQ ID NO: 27838 - protein, 10 aa, Artificial Sequence
  Peptide Derived from Human Papillomavirus
SPSVAESLKV

SEQ ID NO: 27839 - protein, 11 aa, Artificial Sequence
  Peptide Derived from Human Papillomavirus
SPSVAESLKVL

SEQ ID NO: 27840 - protein, 11 aa, Artificial Sequence
  Peptide Derived from Human Papillomavirus
SQAKIVKDCGI

SEQ ID NO: 27841 - protein, 8 aa, Artificial Sequence
  Peptide Derived from Human Papillomavirus
SQNGDTNL

SEQ ID NO: 27842 - protein, 11 aa, Artificial Sequence
  Peptide Derived from Human Papillomavirus
SQNGDTNLNDL

SEQ ID NO: 27843 - protein, 8 aa, Artificial Sequence
  Peptide Derived from Human Papillomavirus
SQSAAEDV

SEQ ID NO: 27844 - protein, 9 aa, Artificial Sequence
  Peptide Derived from Human Papillomavirus
SQSAAEDVV

SEQ ID NO: 27845 - protein, 8 aa, Artificial Sequence
  Peptide Derived from Human Papillomavirus
SQTCALYW

SEQ ID NO: 27846 - protein, 9 aa, Artificial Sequence
  Peptide Derived from Human Papillomavirus
SQTCALYWF

SEQ ID NO: 27847 - protein, 8 aa, Artificial Sequence
  Peptide Derived from Human Papillomavirus
SVAESLKV

SEQ ID NO: 27848 - protein, 9 aa, Artificial Sequence
  Peptide Derived from Human Papillomavirus
SVAESLKVL

SEQ ID NO: 27849 - protein, 10 aa, Artificial Sequence
  Peptide Derived from Human Papillomavirus
SVAESLKVLI

SEQ ID NO: 27850 - protein, 8 aa, Artificial Sequence
  Peptide Derived from Human Papillomavirus
TLQEISNV

SEQ ID NO: 27851 - protein, 9 aa, Artificial Sequence
  Peptide Derived from Human Papillomavirus
TLQEISNVL

SEQ ID NO: 27852 - protein, 8 aa, Artificial Sequence
  Peptide Derived from Human Papillomavirus
TPEWIDRL

SEQ ID NO: 27853 - protein, 10 aa, Artificial Sequence
  Peptide Derived from Human Papillomavirus
TPEWIDRLTV

SEQ ID NO: 27854 - protein, 11 aa, Artificial Sequence
  Peptide Derived from Human Papillomavirus
TPEWIDRLTVL

SEQ ID NO: 27855 - protein, 8 aa, Artificial Sequence
  Peptide Derived from Human Papillomavirus
TPISWTYI

SEQ ID NO: 27856 - protein, 11 aa, Artificial Sequence
  Peptide Derived from Human Papillomavirus
TPISWTYIDDY

SEQ ID NO: 27857 - protein, 8 aa, Artificial Sequence
  Peptide Derived from Human Papillomavirus
TQQMVQQV

SEQ ID NO: 27858 - protein, 9 aa, Artificial Sequence
  Peptide Derived from Human Papillomavirus
TVAKLMSNL

SEQ ID NO: 27859 - protein, 10 aa, Artificial Sequence
  Peptide Derived from Human Papillomavirus
TVAKLMSNLL

SEQ ID NO: 27860 - protein, 9 aa, Artificial Sequence
  Peptide Derived from Human Papillomavirus
TVFEFKNPF

SEQ ID NO: 27861 - protein, 11 aa, Artificial Sequence
  Peptide Derived from Human Papillomavirus
TVFEFKNPFPF

SEQ ID NO: 27862 - protein, 11 aa, Artificial Sequence
  Peptide Derived from Human Papillomavirus
TVLQHSFNDNI

SEQ ID NO: 27863 - protein, 10 aa, Artificial Sequence
  Peptide Derived from Human Papillomavirus
VIERRTGDNI

SEQ ID NO: 27864 - protein, 11 aa, Artificial Sequence
  Peptide Derived from Human Papillomavirus
VISCVNSKSHF

SEQ ID NO: 27865 - protein, 9 aa, Artificial Sequence
  Peptide Derived from Human Papillomavirus
VLHSSNTKA

SEQ ID NO: 27866 - protein, 11 aa, Artificial Sequence
  Peptide Derived from Human Papillomavirus
VLHSSNTKANI

SEQ ID NO: 27867 - protein, 8 aa, Artificial Sequence
  Peptide Derived from Human Papillomavirus
VLIKQHSL

SEQ ID NO: 27868 - protein, 9 aa, Artificial Sequence
  Peptide Derived from Human Papillomavirus
VLIKQHSLY

SEQ ID NO: 27869 - protein, 10 aa, Artificial Sequence
  Peptide Derived from Human Papillomavirus
VLQHSFNDNI

SEQ ID NO: 27870 - protein, 11 aa, Artificial Sequence
  Peptide Derived from Human Papillomavirus
VLQHSFNDNIF

SEQ ID NO: 27871 - protein, 8 aa, Artificial Sequence
  Peptide Derived from Human Papillomavirus
VQGTTPEW

SEQ ID NO: 27872 - protein, 9 aa, Artificial Sequence
  Peptide Derived from Human Papillomavirus
VQGTTPEWI

SEQ ID NO: 27873 - protein, 8 aa, Artificial Sequence
  Peptide Derived from Human Papillomavirus
VQLKCPPL

SEQ ID NO: 27874 - protein, 9 aa, Artificial Sequence
  Peptide Derived from Human Papillomavirus
VQLKCPPLL

SEQ ID NO: 27875 - protein, 10 aa, Artificial Sequence
  Peptide Derived from Human Papillomavirus
VQLKCPPLLL

SEQ ID NO: 27876 - protein, 9 aa, Artificial Sequence
  Peptide Derived from Human Papillomavirus
VQLLRYQNI

SEQ ID NO: 27877 - protein, 11 aa, Artificial Sequence
  Peptide Derived from Human Papillomavirus
VQLLRYQNIEF

SEQ ID NO: 27878 - protein, 9 aa, Artificial Sequence
  Peptide Derived from Human Papillomavirus
VQWAYDNEL

SEQ ID NO: 27879 - protein, 8 aa, Artificial Sequence
  Peptide Derived from Human Papillomavirus
WIDRLTVL

SEQ ID NO: 27880 - protein, 8 aa, Artificial Sequence
  Peptide Derived from Human Papillomavirus
WLQPLSDA

SEQ ID NO: 27881 - protein, 10 aa, Artificial Sequence
  Peptide Derived from Human Papillomavirus
WLQPLSDAKI

SEQ ID NO: 27882 - protein, 8 aa, Artificial Sequence
  Peptide Derived from Human Papillomavirus
WPYLHSRL

SEQ ID NO: 27883 - protein, 10 aa, Artificial Sequence
  Peptide Derived from Human Papillomavirus
WPYLHSRLTV

SEQ ID NO: 27884 - protein, 11 aa, Artificial Sequence
  Peptide Derived from Human Papillomavirus
WPYLHSRLTVF

SEQ ID NO: 27885 - protein, 9 aa, Artificial Sequence
  Peptide Derived from Human Papillomavirus
YIDDYMRNA

SEQ ID NO: 27886 - protein, 10 aa, Artificial Sequence
  Peptide Derived from Human Papillomavirus
YIDDYMRNAL

SEQ ID NO: 27887 - protein, 8 aa, Artificial Sequence
  Peptide Derived from Human Papillomavirus
YLHSRLTV

SEQ ID NO: 27888 - protein, 9 aa, Artificial Sequence
  Peptide Derived from Human Papillomavirus
YLHSRLTVF

SEQ ID NO: 27889 - protein, 11 aa, Artificial Sequence
  Peptide Derived from Human Papillomavirus
YLHSRLTVFEF

SEQ ID NO: 27890 - protein, 11 aa, Artificial Sequence
  Peptide Derived from Human Papillomavirus
YMRNALDGNEI

SEQ ID NO: 27891 - protein, 8 aa, Artificial Sequence
  Peptide Derived from Human Papillomavirus
YQNIEFTA

SEQ ID NO: 27892 - protein, 9 aa, Artificial Sequence
  Peptide Derived from Human Papillomavirus
YQNIEFTAF

SEQ ID NO: 27893 - protein, 10 aa, Artificial Sequence
  Peptide Derived from Human Papillomavirus
YQNIEFTAFL

SEQ ID NO: 27894 - protein, 10 aa, Artificial Sequence
  Peptide Derived from Human Papillomavirus
ALDNRTARTA

SEQ ID NO: 27895 - protein, 10 aa, Artificial Sequence
  Peptide Derived from Human Papillomavirus
ALETLSKSQY

SEQ ID NO: 27896 - protein, 9 aa, Artificial Sequence
  Peptide Derived from Human Papillomavirus
ALLYTAKQM

SEQ ID NO: 27897 - protein, 11 aa, Artificial Sequence
  Peptide Derived from Human Papillomavirus
ALLYTAKQMGF

SEQ ID NO: 27898 - protein, 8 aa, Artificial Sequence
  Peptide Derived from Human Papillomavirus
AQPLTKLF

SEQ ID NO: 27899 - protein, 10 aa, Artificial Sequence
  Peptide Derived from Human Papillomavirus
AQPLTKLFCA

SEQ ID NO: 27900 - protein, 9 aa, Artificial Sequence
  Peptide Derived from Human Papillomavirus
AVQEKILDL

SEQ ID NO: 27901 - protein, 10 aa, Artificial Sequence
  Peptide Derived from Human Papillomavirus
AVQEKILDLY

SEQ ID NO: 27902 - protein, 9 aa, Artificial Sequence
  Peptide Derived from Human Papillomavirus
CLRYRLKPY

SEQ ID NO: 27903 - protein, 10 aa, Artificial Sequence
  Peptide Derived from Human Papillomavirus
CPTSISSNQI

SEQ ID NO: 27904 - protein, 9 aa, Artificial Sequence
  Peptide Derived from Human Papillomavirus
DLPSQIEHW

SEQ ID NO: 27905 - protein, 11 aa, Artificial Sequence
  Peptide Derived from Human Papillomavirus
DLPSQIEHWKL

SEQ ID NO: 27906 - protein, 10 aa, Artificial Sequence
  Peptide Derived from Human Papillomavirus
DLYEADKTDL

SEQ ID NO: 27907 - protein, 9 aa, Artificial Sequence
  Peptide Derived from Human Papillomavirus
DPALDNRTA

SEQ ID NO: 27908 - protein, 8 aa, Artificial Sequence
  Peptide Derived from Human Papillomavirus
EISARLNA

SEQ ID NO: 27909 - protein, 9 aa, Artificial Sequence
  Peptide Derived from Human Papillomavirus
EISARLNAV

SEQ ID NO: 27910 - protein, 9 aa, Artificial Sequence
  Peptide Derived from Human Papillomavirus
ELQMALETL

SEQ ID NO: 27911 - protein, 10 aa, Artificial Sequence
  Peptide Derived from Human Papillomavirus
ELYSSMSSTW

SEQ ID NO: 27912 - protein, 8 aa, Artificial Sequence
  Peptide Derived from Human Papillomavirus
EQQQQMFL

SEQ ID NO: 27913 - protein, 11 aa, Artificial Sequence
  Peptide Derived from Human Papillomavirus
EQQQQMFLGTV

SEQ ID NO: 27914 - protein, 8 aa, Artificial Sequence
  Peptide Derived from Human Papillomavirus
EVHVGGQV

SEQ ID NO: 27915 - protein, 9 aa, Artificial Sequence
  Peptide Derived from Human Papillomavirus
EVHVGGQVI

SEQ ID NO: 27916 - protein, 10 aa, Artificial Sequence
  Peptide Derived from Human Papillomavirus
EVHVGGQVIV

SEQ ID NO: 27917 - protein, 11 aa, Artificial Sequence
  Peptide Derived from Human Papillomavirus
EVWLCEPPKCF

SEQ ID NO: 27918 - protein, 11 aa, Artificial Sequence
  Peptide Derived from Human Papillomavirus
FLGTVKIPPTV

SEQ ID NO: 27919 - protein, 8 aa, Artificial Sequence
  Peptide Derived from Human Papillomavirus
FQVIELQM

SEQ ID NO: 27920 - protein, 9 aa, Artificial Sequence
  Peptide Derived from Human Papillomavirus
FQVIELQMA

SEQ ID NO: 27921 - protein, 10 aa, Artificial Sequence
  Peptide Derived from Human Papillomavirus
FQVIELQMAL

SEQ ID NO: 27922 - protein, 9 aa, Artificial Sequence
  Peptide Derived from Human Papillomavirus
FVTEQQQQM

SEQ ID NO: 27923 - protein, 10 aa, Artificial Sequence
  Peptide Derived from Human Papillomavirus
FVTEQQQQMF

SEQ ID NO: 27924 - protein, 11 aa, Artificial Sequence
  Peptide Derived from Human Papillomavirus
FVTEQQQQMFL

SEQ ID NO: 27925 - protein, 8 aa, Artificial Sequence
  Peptide Derived from Human Papillomavirus
GIVTVTFV

SEQ ID NO: 27926 - protein, 11 aa, Artificial Sequence
  Peptide Derived from Human Papillomavirus
GMYYIHNCEKV

SEQ ID NO: 27927 - protein, 10 aa, Artificial Sequence
  Peptide Derived from Human Papillomavirus
GQVIVCPTSI

SEQ ID NO: 27928 - protein, 10 aa, Artificial Sequence
  Peptide Derived from Human Papillomavirus
HLCHQVVPSL

SEQ ID NO: 27929 - protein, 11 aa, Artificial Sequence
  Peptide Derived from Human Papillomavirus
HLCHQVVPSLL

SEQ ID NO: 27930 - protein, 9 aa, Artificial Sequence
  Peptide Derived from Human Papillomavirus
HLKGESNSL

SEQ ID NO: 27931 - protein, 8 aa, Artificial Sequence
  Peptide Derived from Human Papillomavirus
HQVVPSLL

SEQ ID NO: 27932 - protein, 9 aa, Artificial Sequence
  Peptide Derived from Human Papillomavirus
HQVVPSLLA

SEQ ID NO: 27933 - protein, 8 aa, Artificial Sequence
  Peptide Derived from Human Papillomavirus
HVGGQVIV

SEQ ID NO: 27934 - protein, 9 aa, Artificial Sequence
  Peptide Derived from Human Papillomavirus
IIEEDTCTM

SEQ ID NO: 27935 - protein, 10 aa, Artificial Sequence
  Peptide Derived from Human Papillomavirus
IIEEDTCTMV

SEQ ID NO: 27936 - protein, 11 aa, Artificial Sequence
  Peptide Derived from Human Papillomavirus
IPPTVQISTGF

SEQ ID NO: 27937 - protein, 11 aa, Artificial Sequence
  Peptide Derived from Human Papillomavirus
IVHLKGESNSL

SEQ ID NO: 27938 - protein, 8 aa, Artificial Sequence
  Peptide Derived from Human Papillomavirus
KILDLYEA

SEQ ID NO: 27939 - protein, 8 aa, Artificial Sequence
  Peptide Derived from Human Papillomavirus
KIPPTVQI

SEQ ID NO: 27940 - protein, 8 aa, Artificial Sequence
  Peptide Derived from Human Papillomavirus
KLFCADPA

SEQ ID NO: 27941 - protein, 9 aa, Artificial Sequence
  Peptide Derived from Human Papillomavirus
KLFCADPAL

SEQ ID NO: 27942 - protein, 8 aa, Artificial Sequence
  Peptide Derived from Human Papillomavirus
KLIRMECA

SEQ ID NO: 27943 - protein, 9 aa, Artificial Sequence
  Peptide Derived from Human Papillomavirus
KLIRMECAL

SEQ ID NO: 27944 - protein, 10 aa, Artificial Sequence
  Peptide Derived from Human Papillomavirus
KLIRMECALL

SEQ ID NO: 27945 - protein, 11 aa, Artificial Sequence
  Peptide Derived from Human Papillomavirus
KLIRMECALLY

SEQ ID NO: 27946 - protein, 10 aa, Artificial Sequence
  Peptide Derived from Human Papillomavirus
KPYKELYSSM

SEQ ID NO: 27947 - protein, 8 aa, Artificial Sequence
  Peptide Derived from Human Papillomavirus
KQGETVTV

SEQ ID NO: 27948 - protein, 10 aa, Artificial Sequence
  Peptide Derived from Human Papillomavirus
KQGETVTVQY

SEQ ID NO: 27949 - protein, 8 aa, Artificial Sequence
  Peptide Derived from Human Papillomavirus
KQMGFSHL

SEQ ID NO: 27950 - protein, 10 aa, Artificial Sequence
  Peptide Derived from Human Papillomavirus
KQRTVCSSNV

SEQ ID NO: 27951 - protein, 11 aa, Artificial Sequence
  Peptide Derived from Human Papillomavirus
KQRTVCSSNVA

SEQ ID NO: 27952 - protein, 8 aa, Artificial Sequence
  Peptide Derived from Human Papillomavirus
KVDYIGMY

SEQ ID NO: 27953 - protein, 9 aa, Artificial Sequence
  Peptide Derived from Human Papillomavirus
KVDYIGMYY

SEQ ID NO: 27954 - protein, 10 aa, Artificial Sequence
  Peptide Derived from Human Papillomavirus
KVDYIGMYYI

SEQ ID NO: 27955 - protein, 11 aa, Artificial Sequence
  Peptide Derived from Human Papillomavirus
KVYFKYFKEDA

SEQ ID NO: 27956 - protein, 8 aa, Artificial Sequence
  Peptide Derived from Human Papillomavirus
LIRMECAL

SEQ ID NO: 27957 - protein, 9 aa, Artificial Sequence
  Peptide Derived from Human Papillomavirus
LIRMECALL

SEQ ID NO: 27958 - protein, 10 aa, Artificial Sequence
  Peptide Derived from Human Papillomavirus
LIRMECALLY

SEQ ID NO: 27959 - protein, 8 aa, Artificial Sequence
  Peptide Derived from Human Papillomavirus
LLASKTKA

SEQ ID NO: 27960 - protein, 9 aa, Artificial Sequence
  Peptide Derived from Human Papillomavirus
LLASKTKAF

SEQ ID NO: 27961 - protein, 11 aa, Artificial Sequence
  Peptide Derived from Human Papillomavirus
LLASKTKAFQV

SEQ ID NO: 27962 - protein, 8 aa, Artificial Sequence
  Peptide Derived from Human Papillomavirus
LLYTAKQM

SEQ ID NO: 27963 - protein, 10 aa, Artificial Sequence
  Peptide Derived from Human Papillomavirus
LLYTAKQMGF

SEQ ID NO: 27964 - protein, 8 aa, Artificial Sequence
  Peptide Derived from Human Papillomavirus
LPSQIEHW

SEQ ID NO: 27965 - protein, 10 aa, Artificial Sequence
  Peptide Derived from Human Papillomavirus
LPSQIEHWKL

SEQ ID NO: 27966 - protein, 11 aa, Artificial Sequence
  Peptide Derived from Human Papillomavirus
LPSQIEHWKLI

SEQ ID NO: 27967 - protein, 8 aa, Artificial Sequence
  Peptide Derived from Human Papillomavirus
LQMALETL

SEQ ID NO: 27968 - protein, 8 aa, Artificial Sequence
  Peptide Derived from Human Papillomavirus
LQQTSLEV

SEQ ID NO: 27969 - protein, 9 aa, Artificial Sequence
  Peptide Derived from Human Papillomavirus
LQQTSLEVW

SEQ ID NO: 27970 - protein, 10 aa, Artificial Sequence
  Peptide Derived from Human Papillomavirus
LQQTSLEVWL

SEQ ID NO: 27971 - protein, 8 aa, Artificial Sequence
  Peptide Derived from Human Papillomavirus
MVTGKVDY

SEQ ID NO: 27972 - protein, 9 aa, Artificial Sequence
  Peptide Derived from Human Papillomavirus
MVTGKVDYI

SEQ ID NO: 27973 - protein, 11 aa, Artificial Sequence
  Peptide Derived from Human Papillomavirus
MVTGKVDYIGM

SEQ ID NO: 27974 - protein, 9 aa, Artificial Sequence
  Peptide Derived from Human Papillomavirus
NQISTTETA

SEQ ID NO: 27975 - protein, 11 aa, Artificial Sequence
  Peptide Derived from Human Papillomavirus
NQISTTETADI

SEQ ID NO: 27976 - protein, 8 aa, Artificial Sequence
  Peptide Derived from Human Papillomavirus
NVAPIVHL

SEQ ID NO: 27977 - protein, 8 aa, Artificial Sequence
  Peptide Derived from Human Papillomavirus
PLTKLFCA

SEQ ID NO: 27978 - protein, 11 aa, Artificial Sequence
  Peptide Derived from Human Papillomavirus
PLTKLFCADPA

SEQ ID NO: 27979 - protein, 10 aa, Artificial Sequence
  Peptide Derived from Human Papillomavirus
PPTVQISTGF

SEQ ID NO: 27980 - protein, 11 aa, Artificial Sequence
  Peptide Derived from Human Papillomavirus
PPTVQISTGFM

SEQ ID NO: 27981 - protein, 11 aa, Artificial Sequence
  Peptide Derived from Human Papillomavirus
PQAAAKRRRPA

SEQ ID NO: 27982 - protein, 8 aa, Artificial Sequence
  Peptide Derived from Human Papillomavirus
QIEHWKLI

SEQ ID NO: 27983 - protein, 10 aa, Artificial Sequence
  Peptide Derived from Human Papillomavirus
QIEHWKLIRM

SEQ ID NO: 27984 - protein, 9 aa, Artificial Sequence
  Peptide Derived from Human Papillomavirus
QISTGFMTL

SEQ ID NO: 27985 - protein, 8 aa, Artificial Sequence
  Peptide Derived from Human Papillomavirus
QISTTETA

SEQ ID NO: 27986 - protein, 10 aa, Artificial Sequence
  Peptide Derived from Human Papillomavirus
QISTTETADI

SEQ ID NO: 27987 - protein, 9 aa, Artificial Sequence
  Peptide Derived from Human Papillomavirus
QMFLGTVKI

SEQ ID NO: 27988 - protein, 11 aa, Artificial Sequence
  Peptide Derived from Human Papillomavirus
QMGFSHLCHQV

SEQ ID NO: 27989 - protein, 11 aa, Artificial Sequence
  Peptide Derived from Human Papillomavirus
QMWEVHVGGQV

SEQ ID NO: 27990 - protein, 9 aa, Artificial Sequence
  Peptide Derived from Human Papillomavirus
QPLTKLFCA

SEQ ID NO: 27991 - protein, 8 aa, Artificial Sequence
  Peptide Derived from Human Papillomavirus
QQMFLGTV

SEQ ID NO: 27992 - protein, 10 aa, Artificial Sequence
  Peptide Derived from Human Papillomavirus
QQMFLGTVKI

SEQ ID NO: 27993 - protein, 9 aa, Artificial Sequence
  Peptide Derived from Human Papillomavirus
QQQMFLGTV

SEQ ID NO: 27994 - protein, 11 aa, Artificial Sequence
  Peptide Derived from Human Papillomavirus
QQQMFLGTVKI

SEQ ID NO: 27995 - protein, 10 aa, Artificial Sequence
  Peptide Derived from Human Papillomavirus
QQQQMFLGTV

SEQ ID NO: 27996 - protein, 8 aa, Artificial Sequence
  Peptide Derived from Human Papillomavirus
QQTSLEVW

SEQ ID NO: 27997 - protein, 9 aa, Artificial Sequence
  Peptide Derived from Human Papillomavirus
QQTSLEVWL

SEQ ID NO: 27998 - protein, 8 aa, Artificial Sequence
  Peptide Derived from Human Papillomavirus
QVIELQMA

SEQ ID NO: 27999 - protein, 9 aa, Artificial Sequence
  Peptide Derived from Human Papillomavirus
QVIELQMAL

SEQ ID NO: 28000 - protein, 9 aa, Artificial Sequence
  Peptide Derived from Human Papillomavirus
QVIVCPTSI

SEQ ID NO: 28001 - protein, 8 aa, Artificial Sequence
  Peptide Derived from Human Papillomavirus
QVVPSLLA

SEQ ID NO: 28002 - protein, 8 aa, Artificial Sequence
  Peptide Derived from Human Papillomavirus
RLKPYKEL

SEQ ID NO: 28003 - protein, 9 aa, Artificial Sequence
  Peptide Derived from Human Papillomavirus
RLKPYKELY

SEQ ID NO: 28004 - protein, 9 aa, Artificial Sequence
  Peptide Derived from Human Papillomavirus
RLNAVQEKI

SEQ ID NO: 28005 - protein, 10 aa, Artificial Sequence
  Peptide Derived from Human Papillomavirus
RLNAVQEKIL

SEQ ID NO: 28006 - protein, 8 aa, Artificial Sequence
  Peptide Derived from Human Papillomavirus
RMECALLY

SEQ ID NO: 28007 - protein, 10 aa, Artificial Sequence
  Peptide Derived from Human Papillomavirus
RMECALLYTA

SEQ ID NO: 28008 - protein, 9 aa, Artificial Sequence
  Peptide Derived from Human Papillomavirus
RPADTTDTA

SEQ ID NO: 28009 - protein, 9 aa, Artificial Sequence
  Peptide Derived from Human Papillomavirus
SLKCLRYRL

SEQ ID NO: 28010 - protein, 9 aa, Artificial Sequence
  Peptide Derived from Human Papillomavirus
SLLASKTKA

SEQ ID NO: 28011 - protein, 10 aa, Artificial Sequence
  Peptide Derived from Human Papillomavirus
SLLASKTKAF

SEQ ID NO: 28012 - protein, 8 aa, Artificial Sequence
  Peptide Derived from Human Papillomavirus
SMSSTWHW

SEQ ID NO: 28013 - protein, 8 aa, Artificial Sequence
  Peptide Derived from Human Papillomavirus
SQIEHWKL

SEQ ID NO: 28014 - protein, 9 aa, Artificial Sequence
  Peptide Derived from Human Papillomavirus
SQIEHWKLI

SEQ ID NO: 28015 - protein, 11 aa, Artificial Sequence
  Peptide Derived from Human Papillomavirus
SQIEHWKLIRM

SEQ ID NO: 28016 - protein, 10 aa, Artificial Sequence
  Peptide Derived from Human Papillomavirus
SQWTLQQTSL

SEQ ID NO: 28017 - protein, 8 aa, Artificial Sequence
  Peptide Derived from Human Papillomavirus
SQYSTSQW

SEQ ID NO: 28018 - protein, 10 aa, Artificial Sequence
  Peptide Derived from Human Papillomavirus
SQYSTSQWTL

SEQ ID NO: 28019 - protein, 9 aa, Artificial Sequence
  Peptide Derived from Human Papillomavirus
TLQQTSLEV

SEQ ID NO: 28020 - protein, 10 aa, Artificial Sequence
  Peptide Derived from Human Papillomavirus
TLQQTSLEVW

SEQ ID NO: 28021 - protein, 11 aa, Artificial Sequence
  Peptide Derived from Human Papillomavirus
TLQQTSLEVWL

SEQ ID NO: 28022 - protein, 10 aa, Artificial Sequence
  Peptide Derived from Human Papillomavirus
TMDYTNWGEI

SEQ ID NO: 28023 - protein, 11 aa, Artificial Sequence
  Peptide Derived from Human Papillomavirus
TMDYTNWGEIY

SEQ ID NO: 28024 - protein, 9 aa, Artificial Sequence
  Peptide Derived from Human Papillomavirus
TMVTGKVDY

SEQ ID NO: 28025 - protein, 10 aa, Artificial Sequence
  Peptide Derived from Human Papillomavirus
TMVTGKVDYI

SEQ ID NO: 28026 - protein, 8 aa, Artificial Sequence
  Peptide Derived from Human Papillomavirus
TQMWEVHV

SEQ ID NO: 28027 - protein, 8 aa, Artificial Sequence
  Peptide Derived from Human Papillomavirus
TVCSSNVA

SEQ ID NO: 28028 - protein, 10 aa, Artificial Sequence
  Peptide Derived from Human Papillomavirus
TVCSSNVAPI

SEQ ID NO: 28029 - protein, 11 aa, Artificial Sequence
  Peptide Derived from Human Papillomavirus
TVCSSNVAPIV

SEQ ID NO: 28030 - protein, 8 aa, Artificial Sequence
  Peptide Derived from Human Papillomavirus
TVKIPPTV

SEQ ID NO: 28031 - protein, 10 aa, Artificial Sequence
  Peptide Derived from Human Papillomavirus
TVKIPPTVQI

SEQ ID NO: 28032 - protein, 8 aa, Artificial Sequence
  Peptide Derived from Human Papillomavirus
TVQISTGF

SEQ ID NO: 28033 - protein, 9 aa, Artificial Sequence
  Peptide Derived from Human Papillomavirus
TVQISTGFM

SEQ ID NO: 28034 - protein, 11 aa, Artificial Sequence
  Peptide Derived from Human Papillomavirus
TVQISTGFMTL

SEQ ID NO: 28035 - protein, 8 aa, Artificial Sequence
  Peptide Derived from Human Papillomavirus
VIELQMAL

SEQ ID NO: 28036 - protein, 11 aa, Artificial Sequence
  Peptide Derived from Human Papillomavirus
VIELQMALETL

SEQ ID NO: 28037 - protein, 8 aa, Artificial Sequence
  Peptide Derived from Human Papillomavirus
VIVCPTSI

SEQ ID NO: 28038 - protein, 11 aa, Artificial Sequence
  Peptide Derived from Human Papillomavirus
VPSLLASKTKA

SEQ ID NO: 28039 - protein, 8 aa, Artificial Sequence
  Peptide Derived from Human Papillomavirus
VQEKILDL

SEQ ID NO: 28040 - protein, 9 aa, Artificial Sequence
  Peptide Derived from Human Papillomavirus
VQEKILDLY

SEQ ID NO: 28041 - protein, 11 aa, Artificial Sequence
  Peptide Derived from Human Papillomavirus
VQEKILDLYEA

SEQ ID NO: 28042 - protein, 8 aa, Artificial Sequence
  Peptide Derived from Human Papillomavirus
VQISTGFM

SEQ ID NO: 28043 - protein, 10 aa, Artificial Sequence
  Peptide Derived from Human Papillomavirus
VQISTGFMTL

SEQ ID NO: 28044 - protein, 11 aa, Artificial Sequence
  Peptide Derived from Human Papillomavirus
VQYDNDKKNTM

SEQ ID NO: 28045 - protein, 9 aa, Artificial Sequence
  Peptide Derived from Human Papillomavirus
WLCEPPKCF

SEQ ID NO: 28046 - protein, 8 aa, Artificial Sequence
  Peptide Derived from Human Papillomavirus
YIHNCEKV

SEQ ID NO: 28047 - protein, 9 aa, Artificial Sequence
  Peptide Derived from Human Papillomavirus
YIHNCEKVY

SEQ ID NO: 28048 - protein, 10 aa, Artificial Sequence
  Peptide Derived from Human Papillomavirus
YIHNCEKVYF

SEQ ID NO: 28049 - protein, 10 aa, Artificial Sequence
  Peptide Derived from Human Papillomavirus
YIIEEDTCTM

SEQ ID NO: 28050 - protein, 11 aa, Artificial Sequence
  Peptide Derived from Human Papillomavirus
YIIEEDTCTMV

SEQ ID NO: 28051 - protein, 9 aa, Artificial Sequence
  Peptide Derived from Human Papillomavirus
CINFHAQHM

SEQ ID NO: 28052 - protein, 9 aa, Artificial Sequence
  Peptide Derived from Human Papillomavirus
CLSLLLRPL

SEQ ID NO: 28053 - protein, 10 aa, Artificial Sequence
  Peptide Derived from Human Papillomavirus
CLSLLLRPLI

SEQ ID NO: 28054 - protein, 11 aa, Artificial Sequence
  Peptide Derived from Human Papillomavirus
CLSLLLRPLIL

SEQ ID NO: 28055 - protein, 9 aa, Artificial Sequence
  Peptide Derived from Human Papillomavirus
FILFLCLSL

SEQ ID NO: 28056 - protein, 10 aa, Artificial Sequence
  Peptide Derived from Human Papillomavirus
FILFLCLSLL

SEQ ID NO: 28057 - protein, 11 aa, Artificial Sequence
  Peptide Derived from Human Papillomavirus
FILFLCLSLLL

SEQ ID NO: 28058 - protein, 8 aa, Artificial Sequence
  Peptide Derived from Human Papillomavirus
FLCLSLLL

SEQ ID NO: 28059 - protein, 11 aa, Artificial Sequence
  Peptide Derived from Human Papillomavirus
FLCLSLLLRPL

SEQ ID NO: 28060 - protein, 9 aa, Artificial Sequence
  Peptide Derived from Human Papillomavirus
FLYLPMMCI

SEQ ID NO: 28061 - protein, 11 aa, Artificial Sequence
  Peptide Derived from Human Papillomavirus
FLYLPMMCINF

SEQ ID NO: 28062 - protein, 8 aa, Artificial Sequence
  Peptide Derived from Human Papillomavirus
FVFVLCFI

SEQ ID NO: 28063 - protein, 9 aa, Artificial Sequence
  Peptide Derived from Human Papillomavirus
FVFVLCFIL

SEQ ID NO: 28064 - protein, 10 aa, Artificial Sequence
  Peptide Derived from Human Papillomavirus
FVFVLCFILF

SEQ ID NO: 28065 - protein, 11 aa, Artificial Sequence
  Peptide Derived from Human Papillomavirus
FVFVLCFILFL

SEQ ID NO: 28066 - protein, 8 aa, Artificial Sequence
  Peptide Derived from Human Papillomavirus
FVGSPLKI

SEQ ID NO: 28067 - protein, 9 aa, Artificial Sequence
  Peptide Derived from Human Papillomavirus
FVGSPLKIF

SEQ ID NO: 28068 - protein, 10 aa, Artificial Sequence
  Peptide Derived from Human Papillomavirus
FVGSPLKIFF

SEQ ID NO: 28069 - protein, 8 aa, Artificial Sequence
  Peptide Derived from Human Papillomavirus
FVLCFILF

SEQ ID NO: 28070 - protein, 9 aa, Artificial Sequence
  Peptide Derived from Human Papillomavirus
FVLCFILFL

SEQ ID NO: 28071 - protein, 11 aa, Artificial Sequence
  Peptide Derived from Human Papillomavirus
FVLCFILFLCL

SEQ ID NO: 28072 - protein, 8 aa, Artificial Sequence
  Peptide Derived from Human Papillomavirus
ILFLCLSL

SEQ ID NO: 28073 - protein, 9 aa, Artificial Sequence
  Peptide Derived from Human Papillomavirus
ILFLCLSLL

SEQ ID NO: 28074 - protein, 10 aa, Artificial Sequence
  Peptide Derived from Human Papillomavirus
ILFLCLSLLL

SEQ ID NO: 28075 - protein, 8 aa, Artificial Sequence
  Peptide Derived from Human Papillomavirus
ILSISTYA

SEQ ID NO: 28076 - protein, 9 aa, Artificial Sequence
  Peptide Derived from Human Papillomavirus
ILSISTYAW

SEQ ID NO: 28077 - protein, 10 aa, Artificial Sequence
  Peptide Derived from Human Papillomavirus
ILSISTYAWL

SEQ ID NO: 28078 - protein, 11 aa, Artificial Sequence
  Peptide Derived from Human Papillomavirus
ILSISTYAWLL

SEQ ID NO: 28079 - protein, 8 aa, Artificial Sequence
  Peptide Derived from Human Papillomavirus
KIFFCYLL

SEQ ID NO: 28080 - protein, 9 aa, Artificial Sequence
  Peptide Derived from Human Papillomavirus
KIFFCYLLF

SEQ ID NO: 28081 - protein, 10 aa, Artificial Sequence
  Peptide Derived from Human Papillomavirus
KIFFCYLLFL

SEQ ID NO: 28082 - protein, 11 aa, Artificial Sequence
  Peptide Derived from Human Papillomavirus
KIFFCYLLFLY

SEQ ID NO: 28083 - protein, 8 aa, Artificial Sequence
  Peptide Derived from Human Papillomavirus
LILSISTY

SEQ ID NO: 28084 - protein, 9 aa, Artificial Sequence
  Peptide Derived from Human Papillomavirus
LILSISTYA

SEQ ID NO: 28085 - protein, 10 aa, Artificial Sequence
  Peptide Derived from Human Papillomavirus
LILSISTYAW

SEQ ID NO: 28086 - protein, 11 aa, Artificial Sequence
  Peptide Derived from Human Papillomavirus
LILSISTYAWL

SEQ ID NO: 28087 - protein, 8 aa, Artificial Sequence
  Peptide Derived from Human Papillomavirus
LLFLYLPM

SEQ ID NO: 28088 - protein, 9 aa, Artificial Sequence
  Peptide Derived from Human Papillomavirus
LLFLYLPMM

SEQ ID NO: 28089 - protein, 11 aa, Artificial Sequence
  Peptide Derived from Human Papillomavirus
LLFLYLPMMCI

SEQ ID NO: 28090 - protein, 8 aa, Artificial Sequence
  Peptide Derived from Human Papillomavirus
LLLRPLIL

SEQ ID NO: 28091 - protein, 10 aa, Artificial Sequence
  Peptide Derived from Human Papillomavirus
LLLRPLILSI

SEQ ID NO: 28092 - protein, 11 aa, Artificial Sequence
  Peptide Derived from Human Papillomavirus
LLLWVFVGSPL

SEQ ID NO: 28093 - protein, 9 aa, Artificial Sequence
  Peptide Derived from Human Papillomavirus
LLRPLILSI

SEQ ID NO: 28094 - protein, 8 aa, Artificial Sequence
  Peptide Derived from Human Papillomavirus
LLVLVLLL

SEQ ID NO: 28095 - protein, 9 aa, Artificial Sequence
  Peptide Derived from Human Papillomavirus
LLVLVLLLW

SEQ ID NO: 28096 - protein, 10 aa, Artificial Sequence
  Peptide Derived from Human Papillomavirus
LLVLVLLLWV

SEQ ID NO: 28097 - protein, 11 aa, Artificial Sequence
  Peptide Derived from Human Papillomavirus
LLVLVLLLWVF

SEQ ID NO: 28098 - protein, 10 aa, Artificial Sequence
  Peptide Derived from Human Papillomavirus
LLWVFVGSPL

SEQ ID NO: 28099 - protein, 8 aa, Artificial Sequence
  Peptide Derived from Human Papillomavirus
LPMMCINF

SEQ ID NO: 28100 - protein, 10 aa, Artificial Sequence
  Peptide Derived from Human Papillomavirus
LPMMCINFHA

SEQ ID NO: 28101 - protein, 8 aa, Artificial Sequence
  Peptide Derived from Human Papillomavirus
LVLLLWVF

SEQ ID NO: 28102 - protein, 9 aa, Artificial Sequence
  Peptide Derived from Human Papillomavirus
LVLLLWVFV

SEQ ID NO: 28103 - protein, 8 aa, Artificial Sequence
  Peptide Derived from Human Papillomavirus
LVLVLLLW

SEQ ID NO: 28104 - protein, 9 aa, Artificial Sequence
  Peptide Derived from Human Papillomavirus
LVLVLLLWV

SEQ ID NO: 28105 - protein, 10 aa, Artificial Sequence
  Peptide Derived from Human Papillomavirus
LVLVLLLWVF

SEQ ID NO: 28106 - protein, 11 aa, Artificial Sequence
  Peptide Derived from Human Papillomavirus
LVLVLLLWVFV

SEQ ID NO: 28107 - protein, 9 aa, Artificial Sequence
  Peptide Derived from Human Papillomavirus
MIFVFVLCF

SEQ ID NO: 28108 - protein, 10 aa, Artificial Sequence
  Peptide Derived from Human Papillomavirus
MIFVFVLCFI

SEQ ID NO: 28109 - protein, 11 aa, Artificial Sequence
  Peptide Derived from Human Papillomavirus
MIFVFVLCFIL

SEQ ID NO: 28110 - protein, 8 aa, Artificial Sequence
  Peptide Derived from Human Papillomavirus
MMCINFHA

SEQ ID NO: 28111 - protein, 11 aa, Artificial Sequence
  Peptide Derived from Human Papillomavirus
MMCINFHAQHM

SEQ ID NO: 28112 - protein, 9 aa, Artificial Sequence
  Peptide Derived from Human Papillomavirus
PLILSISTY

SEQ ID NO: 28113 - protein, 10 aa, Artificial Sequence
  Peptide Derived from Human Papillomavirus
PLILSISTYA

SEQ ID NO: 28114 - protein, 11 aa, Artificial Sequence
  Peptide Derived from Human Papillomavirus
PLILSISTYAW

SEQ ID NO: 28115 - protein, 8 aa, Artificial Sequence
  Peptide Derived from Human Papillomavirus
PLKIFFCY

SEQ ID NO: 28116 - protein, 9 aa, Artificial Sequence
  Peptide Derived from Human Papillomavirus
PLKIFFCYL

SEQ ID NO: 28117 - protein, 10 aa, Artificial Sequence
  Peptide Derived from Human Papillomavirus
PLKIFFCYLL

SEQ ID NO: 28118 - protein, 11 aa, Artificial Sequence
  Peptide Derived from Human Papillomavirus
PLKIFFCYLLF

SEQ ID NO: 28119 - protein, 9 aa, Artificial Sequence
  Peptide Derived from Human Papillomavirus
PMMCINFHA

SEQ ID NO: 28120 - protein, 10 aa, Artificial Sequence
  Peptide Derived from Human Papillomavirus
RPLILSISTY

SEQ ID NO: 28121 - protein, 11 aa, Artificial Sequence
  Peptide Derived from Human Papillomavirus
RPLILSISTYA

SEQ ID NO: 28122 - protein, 8 aa, Artificial Sequence
  Peptide Derived from Human Papillomavirus
SISTYAWL

SEQ ID NO: 28123 - protein, 9 aa, Artificial Sequence
  Peptide Derived from Human Papillomavirus
SISTYAWLL

SEQ ID NO: 28124 - protein, 10 aa, Artificial Sequence
  Peptide Derived from Human Papillomavirus
SISTYAWLLV

SEQ ID NO: 28125 - protein, 11 aa, Artificial Sequence
  Peptide Derived from Human Papillomavirus
SISTYAWLLVL

SEQ ID NO: 28126 - protein, 8 aa, Artificial Sequence
  Peptide Derived from Human Papillomavirus
SLLLRPLI

SEQ ID NO: 28127 - protein, 9 aa, Artificial Sequence
  Peptide Derived from Human Papillomavirus
SLLLRPLIL

SEQ ID NO: 28128 - protein, 11 aa, Artificial Sequence
  Peptide Derived from Human Papillomavirus
SLLLRPLILSI

SEQ ID NO: 28129 - protein, 9 aa, Artificial Sequence
  Peptide Derived from Human Papillomavirus
SPLKIFFCY

SEQ ID NO: 28130 - protein, 10 aa, Artificial Sequence
  Peptide Derived from Human Papillomavirus
SPLKIFFCYL

SEQ ID NO: 28131 - protein, 11 aa, Artificial Sequence
  Peptide Derived from Human Papillomavirus
SPLKIFFCYLL

SEQ ID NO: 28132 - protein, 8 aa, Artificial Sequence
  Peptide Derived from Human Papillomavirus
VLCFILFL

SEQ ID NO: 28133 - protein, 10 aa, Artificial Sequence
  Peptide Derived from Human Papillomavirus
VLCFILFLCL

SEQ ID NO: 28134 - protein, 8 aa, Artificial Sequence
  Peptide Derived from Human Papillomavirus
VLLLWVFV

SEQ ID NO: 28135 - protein, 8 aa, Artificial Sequence
  Peptide Derived from Human Papillomavirus
VLVLLLWV

SEQ ID NO: 28136 - protein, 9 aa, Artificial Sequence
  Peptide Derived from Human Papillomavirus
VLVLLLWVF

SEQ ID NO: 28137 - protein, 10 aa, Artificial Sequence
  Peptide Derived from Human Papillomavirus
VLVLLLWVFV

SEQ ID NO: 28138 - protein, 8 aa, Artificial Sequence
  Peptide Derived from Human Papillomavirus
WLLVLVLL

SEQ ID NO: 28139 - protein, 9 aa, Artificial Sequence
  Peptide Derived from Human Papillomavirus
WLLVLVLLL

SEQ ID NO: 28140 - protein, 10 aa, Artificial Sequence
  Peptide Derived from Human Papillomavirus
WLLVLVLLLW

SEQ ID NO: 28141 - protein, 11 aa, Artificial Sequence
  Peptide Derived from Human Papillomavirus
WLLVLVLLLWV

SEQ ID NO: 28142 - protein, 8 aa, Artificial Sequence
  Peptide Derived from Human Papillomavirus
WVFVGSPL

SEQ ID NO: 28143 - protein, 10 aa, Artificial Sequence
  Peptide Derived from Human Papillomavirus
WVFVGSPLKI

SEQ ID NO: 28144 - protein, 11 aa, Artificial Sequence
  Peptide Derived from Human Papillomavirus
WVFVGSPLKIF

SEQ ID NO: 28145 - protein, 9 aa, Artificial Sequence
  Peptide Derived from Human Papillomavirus
YLLFLYLPM

SEQ ID NO: 28146 - protein, 10 aa, Artificial Sequence
  Peptide Derived from Human Papillomavirus
YLLFLYLPMM

SEQ ID NO: 28147 - protein, 9 aa, Artificial Sequence
  Peptide Derived from Human Papillomavirus
YLPMMCINF

SEQ ID NO: 28148 - protein, 11 aa, Artificial Sequence
  Peptide Derived from Human Papillomavirus
YLPMMCINFHA

SEQ ID NO: 28149 - protein, 9 aa, Artificial Sequence
  Peptide Derived from Human Papillomavirus
ALETTIHNI

SEQ ID NO: 28150 - protein, 11 aa, Artificial Sequence
  Peptide Derived from Human Papillomavirus
ALETTIHNIEL

SEQ ID NO: 28151 - protein, 8 aa, Artificial Sequence
  Peptide Derived from Human Papillomavirus
CIICQRPL

SEQ ID NO: 28152 - protein, 8 aa, Artificial Sequence
  Peptide Derived from Human Papillomavirus
CLRFLSKI

SEQ ID NO: 28153 - protein, 11 aa, Artificial Sequence
  Peptide Derived from Human Papillomavirus
CLRFLSKISEY

SEQ ID NO: 28154 - protein, 9 aa, Artificial Sequence
  Peptide Derived from Human Papillomavirus
CPQEKKRHV

SEQ ID NO: 28155 - protein, 11 aa, Artificial Sequence
  Peptide Derived from Human Papillomavirus
CPQEKKRHVDL

SEQ ID NO: 28156 - protein, 8 aa, Artificial Sequence
  Peptide Derived from Human Papillomavirus
CQALETTI

SEQ ID NO: 28157 - protein, 11 aa, Artificial Sequence
  Peptide Derived from Human Papillomavirus
CQALETTIHNI

SEQ ID NO: 28158 - protein, 8 aa, Artificial Sequence
  Peptide Derived from Human Papillomavirus
CVECKKPL

SEQ ID NO: 28159 - protein, 10 aa, Artificial Sequence
  Peptide Derived from Human Papillomavirus
DLCQALETTI

SEQ ID NO: 28160 - protein, 9 aa, Artificial Sequence
  Peptide Derived from Human Papillomavirus
DLNKRFHNI

SEQ ID NO: 28161 - protein, 8 aa, Artificial Sequence
  Peptide Derived from Human Papillomavirus
EILIRCII

SEQ ID NO: 28162 - protein, 11 aa, Artificial Sequence
  Peptide Derived from Human Papillomavirus
ELQCVECKKPL

SEQ ID NO: 28163 - protein, 8 aa, Artificial Sequence
  Peptide Derived from Human Papillomavirus
EQTVKKPL

SEQ ID NO: 28164 - protein, 11 aa, Artificial Sequence
  Peptide Derived from Human Papillomavirus
EQTVKKPLNEI

SEQ ID NO: 28165 - protein, 8 aa, Artificial Sequence
  Peptide Derived from Human Papillomavirus
EVYDFAFA

SEQ ID NO: 28166 - protein, 10 aa, Artificial Sequence
  Peptide Derived from Human Papillomavirus
EVYDFAFADL

SEQ ID NO: 28167 - protein, 8 aa, Artificial Sequence
  Peptide Derived from Human Papillomavirus
FLSKISEY

SEQ ID NO: 28168 - protein, 11 aa, Artificial Sequence
  Peptide Derived from Human Papillomavirus
FLSKISEYRHY

SEQ ID NO: 28169 - protein, 11 aa, Artificial Sequence
  Peptide Derived from Human Papillomavirus
FQDTEEKPRTL

SEQ ID NO: 28170 - protein, 9 aa, Artificial Sequence
  Peptide Derived from Human Papillomavirus
GICKLCLRF

SEQ ID NO: 28171 - protein, 10 aa, Artificial Sequence
  Peptide Derived from Human Papillomavirus
GICKLCLRFL

SEQ ID NO: 28172 - protein, 8 aa, Artificial Sequence
  Peptide Derived from Human Papillomavirus
HVDLNKRF

SEQ ID NO: 28173 - protein, 11 aa, Artificial Sequence
  Peptide Derived from Human Papillomavirus
HVDLNKRFHNI

SEQ ID NO: 28174 - protein, 8 aa, Artificial Sequence
  Peptide Derived from Human Papillomavirus
KISEYRHY

SEQ ID NO: 28175 - protein, 10 aa, Artificial Sequence
  Peptide Derived from Human Papillomavirus
KISEYRHYNY

SEQ ID NO: 28176 - protein, 10 aa, Artificial Sequence
  Peptide Derived from Human Papillomavirus
KLCLRFLSKI

SEQ ID NO: 28177 - protein, 8 aa, Artificial Sequence
  Peptide Derived from Human Papillomavirus
KPLNEILI

SEQ ID NO: 28178 - protein, 11 aa, Artificial Sequence
  Peptide Derived from Human Papillomavirus
KPLNEILIRCI

SEQ ID NO: 28179 - protein, 8 aa, Artificial Sequence
  Peptide Derived from Human Papillomavirus
KPLQRSEV

SEQ ID NO: 28180 - protein, 9 aa, Artificial Sequence
  Peptide Derived from Human Papillomavirus
KPLQRSEVY

SEQ ID NO: 28181 - protein, 11 aa, Artificial Sequence
  Peptide Derived from Human Papillomavirus
KPLQRSEVYDF

SEQ ID NO: 28182 - protein, 8 aa, Artificial Sequence
  Peptide Derived from Human Papillomavirus
KPRTLHDL

SEQ ID NO: 28183 - protein, 11 aa, Artificial Sequence
  Peptide Derived from Human Papillomavirus
KPRTLHDLCQA

SEQ ID NO: 28184 - protein, 11 aa, Artificial Sequence
  Peptide Derived from Human Papillomavirus
LIRCIICQRPL

SEQ ID NO: 28185 - protein, 10 aa, Artificial Sequence
  Peptide Derived from Human Papillomavirus
LQCVECKKPL

SEQ ID NO: 28186 - protein, 9 aa, Artificial Sequence
  Peptide Derived from Human Papillomavirus
LQRSEVYDF

SEQ ID NO: 28187 - protein, 10 aa, Artificial Sequence
  Peptide Derived from Human Papillomavirus
LQRSEVYDFA

SEQ ID NO: 28188 - protein, 11 aa, Artificial Sequence
  Peptide Derived from Human Papillomavirus
LQRSEVYDFAF

SEQ ID NO: 28189 - protein, 11 aa, Artificial Sequence
  Peptide Derived from Human Papillomavirus
NISGRWAGRCA

SEQ ID NO: 28190 - protein, 8 aa, Artificial Sequence
  Peptide Derived from Human Papillomavirus
NPFGICKL

SEQ ID NO: 28191 - protein, 10 aa, Artificial Sequence
  Peptide Derived from Human Papillomavirus
NPFGICKLCL

SEQ ID NO: 28192 - protein, 11 aa, Artificial Sequence
  Peptide Derived from Human Papillomavirus
PLCPQEKKRHV

SEQ ID NO: 28193 - protein, 10 aa, Artificial Sequence
  Peptide Derived from Human Papillomavirus
PLNEILIRCI

SEQ ID NO: 28194 - protein, 11 aa, Artificial Sequence
  Peptide Derived from Human Papillomavirus
PLNEILIRCII

SEQ ID NO: 28195 - protein, 8 aa, Artificial Sequence
  Peptide Derived from Human Papillomavirus
PLQRSEVY

SEQ ID NO: 28196 - protein, 10 aa, Artificial Sequence
  Peptide Derived from Human Papillomavirus
PLQRSEVYDF

SEQ ID NO: 28197 - protein, 11 aa, Artificial Sequence
  Peptide Derived from Human Papillomavirus
PLQRSEVYDFA

SEQ ID NO: 28198 - protein, 8 aa, Artificial Sequence
  Peptide Derived from Human Papillomavirus
PQEKKRHV

SEQ ID NO: 28199 - protein, 10 aa, Artificial Sequence
  Peptide Derived from Human Papillomavirus
PQEKKRHVDL

SEQ ID NO: 28200 - protein, 11 aa, Artificial Sequence
  Peptide Derived from Human Papillomavirus
SVYGNTLEQTV

SEQ ID NO: 28201 - protein, 10 aa, Artificial Sequence
  Peptide Derived from Human Papillomavirus
TIHNIELQCV

SEQ ID NO: 28202 - protein, 10 aa, Artificial Sequence
  Peptide Derived from Human Papillomavirus
TLEQTVKKPL

SEQ ID NO: 28203 - protein, 8 aa, Artificial Sequence
  Peptide Derived from Human Papillomavirus
TLHDLCQA

SEQ ID NO: 28204 - protein, 9 aa, Artificial Sequence
  Peptide Derived from Human Papillomavirus
TLHDLCQAL

SEQ ID NO: 28205 - protein, 9 aa, Artificial Sequence
  Peptide Derived from Human Papillomavirus
TVKKPLNEI

SEQ ID NO: 28206 - protein, 10 aa, Artificial Sequence
  Peptide Derived from Human Papillomavirus
TVKKPLNEIL

SEQ ID NO: 28207 - protein, 11 aa, Artificial Sequence
  Peptide Derived from Human Papillomavirus
TVKKPLNEILI

SEQ ID NO: 28208 - protein, 10 aa, Artificial Sequence
  Peptide Derived from Human Papillomavirus
TVVYREGNPF

SEQ ID NO: 28209 - protein, 9 aa, Artificial Sequence
  Peptide Derived from Human Papillomavirus
VVYREGNPF

SEQ ID NO: 28210 - protein, 11 aa, Artificial Sequence
  Peptide Derived from Human Papillomavirus
VVYREGNPFGI

SEQ ID NO: 28211 - protein, 8 aa, Artificial Sequence
  Peptide Derived from Human Papillomavirus
AQPATADY

SEQ ID NO: 28212 - protein, 9 aa, Artificial Sequence
  Peptide Derived from Human Papillomavirus
AQPATADYY

SEQ ID NO: 28213 - protein, 10 aa, Artificial Sequence
  Peptide Derived from Human Papillomavirus
AQPATADYYI

SEQ ID NO: 28214 - protein, 11 aa, Artificial Sequence
  Peptide Derived from Human Papillomavirus
AQPATADYYIV

SEQ ID NO: 28215 - protein, 9 aa, Artificial Sequence
  Peptide Derived from Human Papillomavirus
CVNSTASDL

SEQ ID NO: 28216 - protein, 8 aa, Artificial Sequence
  Peptide Derived from Human Papillomavirus
DLRTIQQL

SEQ ID NO: 28217 - protein, 9 aa, Artificial Sequence
  Peptide Derived from Human Papillomavirus
DLRTIQQLL

SEQ ID NO: 28218 - protein, 10 aa, Artificial Sequence
  Peptide Derived from Human Papillomavirus
DLRTIQQLLM

SEQ ID NO: 28219 - protein, 8 aa, Artificial Sequence
  Peptide Derived from Human Papillomavirus
DLYCYEQL

SEQ ID NO: 28220 - protein, 9 aa, Artificial Sequence
  Peptide Derived from Human Papillomavirus
DLYPEPTDL

SEQ ID NO: 28221 - protein, 10 aa, Artificial Sequence
  Peptide Derived from Human Papillomavirus
DLYPEPTDLY

SEQ ID NO: 28222 - protein, 8 aa, Artificial Sequence
  Peptide Derived from Human Papillomavirus
EPTDLYCY

SEQ ID NO: 28223 - protein, 11 aa, Artificial Sequence
  Peptide Derived from Human Papillomavirus
EPTDLYCYEQL

SEQ ID NO: 28224 - protein, 9 aa, Artificial Sequence
  Peptide Derived from Human Papillomavirus
GLDRPDGQA

SEQ ID NO: 28225 - protein, 8 aa, Artificial Sequence
  Peptide Derived from Human Papillomavirus
GQAQPATA

SEQ ID NO: 28226 - protein, 10 aa, Artificial Sequence
  Peptide Derived from Human Papillomavirus
GQAQPATADY

SEQ ID NO: 28227 - protein, 11 aa, Artificial Sequence
  Peptide Derived from Human Papillomavirus
GQAQPATADYY

SEQ ID NO: 28228 - protein, 9 aa, Artificial Sequence
  Peptide Derived from Human Papillomavirus
IQQLLMGTV

SEQ ID NO: 28229 - protein, 11 aa, Artificial Sequence
  Peptide Derived from Human Papillomavirus
IQQLLMGTVNI

SEQ ID NO: 28230 - protein, 8 aa, Artificial Sequence
  Peptide Derived from Human Papillomavirus
KPTLKEYV

SEQ ID NO: 28231 - protein, 9 aa, Artificial Sequence
  Peptide Derived from Human Papillomavirus
KPTLKEYVL

SEQ ID NO: 28232 - protein, 11 aa, Artificial Sequence
  Peptide Derived from Human Papillomavirus
KPTLKEYVLDL

SEQ ID NO: 28233 - protein, 8 aa, Artificial Sequence
  Peptide Derived from Human Papillomavirus
LLMGTVNI

SEQ ID NO: 28234 - protein, 9 aa, Artificial Sequence
  Peptide Derived from Human Papillomavirus
LLMGTVNIV

SEQ ID NO: 28235 - protein, 8 aa, Artificial Sequence
  Peptide Derived from Human Papillomavirus
LMGTVNIV

SEQ ID NO: 28236 - protein, 8 aa, Artificial Sequence
  Peptide Derived from Human Papillomavirus
NIVCPTCA

SEQ ID NO: 28237 - protein, 9 aa, Artificial Sequence
  Peptide Derived from Human Papillomavirus
QLLMGTVNI

SEQ ID NO: 28238 - protein, 10 aa, Artificial Sequence
  Peptide Derived from Human Papillomavirus
QLLMGTVNIV

SEQ ID NO: 28239 - protein, 8 aa, Artificial Sequence
  Peptide Derived from Human Papillomavirus
QPATADYY

SEQ ID NO: 28240 - protein, 9 aa, Artificial Sequence
  Peptide Derived from Human Papillomavirus
QPATADYYI

SEQ ID NO: 28241 - protein, 10 aa, Artificial Sequence
  Peptide Derived from Human Papillomavirus
QPATADYYIV

SEQ ID NO: 28242 - protein, 8 aa, Artificial Sequence
  Peptide Derived from Human Papillomavirus
QQLLMGTV

SEQ ID NO: 28243 - protein, 10 aa, Artificial Sequence
  Peptide Derived from Human Papillomavirus
QQLLMGTVNI

SEQ ID NO: 28244 - protein, 11 aa, Artificial Sequence
  Peptide Derived from Human Papillomavirus
QQLLMGTVNIV

SEQ ID NO: 28245 - protein, 8 aa, Artificial Sequence
  Peptide Derived from Human Papillomavirus
RLCVNSTA

SEQ ID NO: 28246 - protein, 11 aa, Artificial Sequence
  Peptide Derived from Human Papillomavirus
RLCVNSTASDL

SEQ ID NO: 28247 - protein, 9 aa, Artificial Sequence
  Peptide Derived from Human Papillomavirus
RPDGQAQPA

SEQ ID NO: 28248 - protein, 11 aa, Artificial Sequence
  Peptide Derived from Human Papillomavirus
RPDGQAQPATA

SEQ ID NO: 28249 - protein, 10 aa, Artificial Sequence
  Peptide Derived from Human Papillomavirus
TIQQLLMGTV

SEQ ID NO: 28250 - protein, 9 aa, Artificial Sequence
  Peptide Derived from Human Papillomavirus
TLKEYVLDL

SEQ ID NO: 28251 - protein, 10 aa, Artificial Sequence
  Peptide Derived from Human Papillomavirus
TLKEYVLDLY

SEQ ID NO: 28252 - protein, 10 aa, Artificial Sequence
  Peptide Derived from Human Papillomavirus
TVNIVCPTCA

SEQ ID NO: 28253 - protein, 10 aa, Artificial Sequence
  Peptide Derived from Human Papillomavirus
TVRLCVNSTA

SEQ ID NO: 28254 - protein, 11 aa, Artificial Sequence
  Peptide Derived from Human Papillomavirus
VLDLYPEPTDL

SEQ ID NO: 28255 - protein, 8 aa, Artificial Sequence
  Peptide Derived from Human Papillomavirus
YPEPTDLY

SEQ ID NO: 28256 - protein, 10 aa, Artificial Sequence
  Peptide Derived from Human Papillomavirus
YPEPTDLYCY

SEQ ID NO: 28257 - protein, 8 aa, Artificial Sequence
  Peptide Derived from Human Papillomavirus
AITCQKTV

SEQ ID NO: 28258 - protein, 10 aa, Artificial Sequence
  Peptide Derived from Human Papillomavirus
AMNPDILEDW

SEQ ID NO: 28259 - protein, 9 aa, Artificial Sequence
  Peptide Derived from Human Papillomavirus
APANDCPPL

SEQ ID NO: 28260 - protein, 11 aa, Artificial Sequence
  Peptide Derived from Human Papillomavirus
APANDCPPLEL

SEQ ID NO: 28261 - protein, 10 aa, Artificial Sequence
  Peptide Derived from Human Papillomavirus
APTSTRTSSA

SEQ ID NO: 28262 - protein, 8 aa, Artificial Sequence
  Peptide Derived from Human Papillomavirus
AQGHNNGI

SEQ ID NO: 28263 - protein, 10 aa, Artificial Sequence
  Peptide Derived from Human Papillomavirus
AQGHNNGICW

SEQ ID NO: 28264 - protein, 9 aa, Artificial Sequence
  Peptide Derived from Human Papillomavirus
AVGHPYFSI

SEQ ID NO: 28265 - protein, 8 aa, Artificial Sequence
  Peptide Derived from Human Papillomavirus
AVPDDLYI

SEQ ID NO: 28266 - protein, 11 aa, Artificial Sequence
  Peptide Derived from Human Papillomavirus
CLSMDYKQTQL

SEQ ID NO: 28267 - protein, 9 aa, Artificial Sequence
  Peptide Derived from Human Papillomavirus
CMDFKTLQA

SEQ ID NO: 28268 - protein, 10 aa, Artificial Sequence
  Peptide Derived from Human Papillomavirus
CPPLELINTI

SEQ ID NO: 28269 - protein, 11 aa, Artificial Sequence
  Peptide Derived from Human Papillomavirus
CPPLELINTII

SEQ ID NO: 28270 - protein, 9 aa, Artificial Sequence
  Peptide Derived from Human Papillomavirus
DICGSTCKY

SEQ ID NO: 28271 - protein, 8 aa, Artificial Sequence
  Peptide Derived from Human Papillomavirus
DILEDWQF

SEQ ID NO: 28272 - protein, 10 aa, Artificial Sequence
  Peptide Derived from Human Papillomavirus
DILEDWQFGL

SEQ ID NO: 28273 - protein, 11 aa, Artificial Sequence
  Peptide Derived from Human Papillomavirus
DLDQFPLGRKF

SEQ ID NO: 28274 - protein, 8 aa, Artificial Sequence
  Peptide Derived from Human Papillomavirus
DLKEKFSA

SEQ ID NO: 28275 - protein, 10 aa, Artificial Sequence
  Peptide Derived from Human Papillomavirus
DLKEKFSADL

SEQ ID NO: 28276 - protein, 8 aa, Artificial Sequence
  Peptide Derived from Human Papillomavirus
DLQFVFQL

SEQ ID NO: 28277 - protein, 11 aa, Artificial Sequence
  Peptide Derived from Human Papillomavirus
DLQFVFQLCKV

SEQ ID NO: 28278 - protein, 11 aa, Artificial Sequence
  Peptide Derived from Human Papillomavirus
DLYIKGSGTTA

SEQ ID NO: 28279 - protein, 10 aa, Artificial Sequence
  Peptide Derived from Human Papillomavirus
DMVDTGFGCM

SEQ ID NO: 28280 - protein, 8 aa, Artificial Sequence
  Peptide Derived from Human Papillomavirus
DPLGKYTF

SEQ ID NO: 28281 - protein, 9 aa, Artificial Sequence
  Peptide Derived from Human Papillomavirus
DPLGKYTFW

SEQ ID NO: 28282 - protein, 11 aa, Artificial Sequence
  Peptide Derived from Human Papillomavirus
DPLGKYTFWEV

SEQ ID NO: 28283 - protein, 9 aa, Artificial Sequence
  Peptide Derived from Human Papillomavirus
DQFPLGRKF

SEQ ID NO: 28284 - protein, 10 aa, Artificial Sequence
  Peptide Derived from Human Papillomavirus
DQFPLGRKFL

SEQ ID NO: 28285 - protein, 11 aa, Artificial Sequence
  Peptide Derived from Human Papillomavirus
DQFPLGRKFLL

SEQ ID NO: 28286 - protein, 8 aa, Artificial Sequence
  Peptide Derived from Human Papillomavirus
EIGRGQPL

SEQ ID NO: 28287 - protein, 10 aa, Artificial Sequence
  Peptide Derived from Human Papillomavirus
EIGRGQPLGV

SEQ ID NO: 28288 - protein, 8 aa, Artificial Sequence
  Peptide Derived from Human Papillomavirus
EPYGDSLF

SEQ ID NO: 28289 - protein, 9 aa, Artificial Sequence
  Peptide Derived from Human Papillomavirus
EPYGDSLFF

SEQ ID NO: 28290 - protein, 10 aa, Artificial Sequence
  Peptide Derived from Human Papillomavirus
EPYGDSLFFF

SEQ ID NO: 28291 - protein, 11 aa, Artificial Sequence
  Peptide Derived from Human Papillomavirus
EPYGDSLFFFL

SEQ ID NO: 28292 - protein, 8 aa, Artificial Sequence
  Peptide Derived from Human Papillomavirus
EQMFVRHF

SEQ ID NO: 28293 - protein, 9 aa, Artificial Sequence
  Peptide Derived from Human Papillomavirus
EQMFVRHFF

SEQ ID NO: 28294 - protein, 8 aa, Artificial Sequence
  Peptide Derived from Human Papillomavirus
EVDLKEKF

SEQ ID NO: 28295 - protein, 10 aa, Artificial Sequence
  Peptide Derived from Human Papillomavirus
EVDLKEKFSA

SEQ ID NO: 28296 - protein, 8 aa, Artificial Sequence
  Peptide Derived from Human Papillomavirus
EVMTYIHA

SEQ ID NO: 28297 - protein, 9 aa, Artificial Sequence
  Peptide Derived from Human Papillomavirus
EVMTYIHAM

SEQ ID NO: 28298 - protein, 9 aa, Artificial Sequence
  Peptide Derived from Human Papillomavirus
FLLQAGLKA

SEQ ID NO: 28299 - protein, 8 aa, Artificial Sequence
  Peptide Derived from Human Papillomavirus
FLRREQMF

SEQ ID NO: 28300 - protein, 9 aa, Artificial Sequence
  Peptide Derived from Human Papillomavirus
FLRREQMFV

SEQ ID NO: 28301 - protein, 8 aa, Artificial Sequence
  Peptide Derived from Human Papillomavirus
FPLGRKFL

SEQ ID NO: 28302 - protein, 9 aa, Artificial Sequence
  Peptide Derived from Human Papillomavirus
FPLGRKFLL

SEQ ID NO: 28303 - protein, 11 aa, Artificial Sequence
  Peptide Derived from Human Papillomavirus
FPLGRKFLLQA

SEQ ID NO: 28304 - protein, 8 aa, Artificial Sequence
  Peptide Derived from Human Papillomavirus
FPTPSGSM

SEQ ID NO: 28305 - protein, 9 aa, Artificial Sequence
  Peptide Derived from Human Papillomavirus
FPTPSGSMV

SEQ ID NO: 28306 - protein, 8 aa, Artificial Sequence
  Peptide Derived from Human Papillomavirus
FQLCKVTL

SEQ ID NO: 28307 - protein, 10 aa, Artificial Sequence
  Peptide Derived from Human Papillomavirus
FQLCKVTLTA

SEQ ID NO: 28308 - protein, 8 aa, Artificial Sequence
  Peptide Derived from Human Papillomavirus
FVFQLCKV

SEQ ID NO: 28309 - protein, 10 aa, Artificial Sequence
  Peptide Derived from Human Papillomavirus
FVFQLCKVTL

SEQ ID NO: 28310 - protein, 9 aa, Artificial Sequence
  Peptide Derived from Human Papillomavirus
FVRHFFNRA

SEQ ID NO: 28311 - protein, 8 aa, Artificial Sequence
  Peptide Derived from Human Papillomavirus
GICWGNQV

SEQ ID NO: 28312 - protein, 9 aa, Artificial Sequence
  Peptide Derived from Human Papillomavirus
GICWGNQVF

SEQ ID NO: 28313 - protein, 10 aa, Artificial Sequence
  Peptide Derived from Human Papillomavirus
GICWGNQVFV

SEQ ID NO: 28314 - protein, 8 aa, Artificial Sequence
  Peptide Derived from Human Papillomavirus
GISGHPLL

SEQ ID NO: 28315 - protein, 11 aa, Artificial Sequence
  Peptide Derived from Human Papillomavirus
GISGHPLLNKF

SEQ ID NO: 28316 - protein, 10 aa, Artificial Sequence
  Peptide Derived from Human Papillomavirus
GLEIGRGQPL

SEQ ID NO: 28317 - protein, 8 aa, Artificial Sequence
  Peptide Derived from Human Papillomavirus
GLKAKPKL

SEQ ID NO: 28318 - protein, 11 aa, Artificial Sequence
  Peptide Derived from Human Papillomavirus
GLKAKPKLKRA

SEQ ID NO: 28319 - protein, 9 aa, Artificial Sequence
  Peptide Derived from Human Papillomavirus
GLQYRVFRV

SEQ ID NO: 28320 - protein, 11 aa, Artificial Sequence
  Peptide Derived from Human Papillomavirus
GLQYRVFRVRL

SEQ ID NO: 28321 - protein, 8 aa, Artificial Sequence
  Peptide Derived from Human Papillomavirus
GLTPPPSA

SEQ ID NO: 28322 - protein, 10 aa, Artificial Sequence
  Peptide Derived from Human Papillomavirus
GLTPPPSASL

SEQ ID NO: 28323 - protein, 11 aa, Artificial Sequence
  Peptide Derived from Human Papillomavirus
GQPGADNRECL

SEQ ID NO: 28324 - protein, 8 aa, Artificial Sequence
  Peptide Derived from Human Papillomavirus
GQPLGVGI

SEQ ID NO: 28325 - protein, 8 aa, Artificial Sequence
  Peptide Derived from Human Papillomavirus
GVACTNAA

SEQ ID NO: 28326 - protein, 10 aa, Artificial Sequence
  Peptide Derived from Human Papillomavirus
GVACTNAAPA

SEQ ID NO: 28327 - protein, 9 aa, Artificial Sequence
  Peptide Derived from Human Papillomavirus
GVGISGHPL

SEQ ID NO: 28328 - protein, 10 aa, Artificial Sequence
  Peptide Derived from Human Papillomavirus
GVGISGHPLL

SEQ ID NO: 28329 - protein, 9 aa, Artificial Sequence
  Peptide Derived from Human Papillomavirus
HVEEYDLQF

SEQ ID NO: 28330 - protein, 10 aa, Artificial Sequence
  Peptide Derived from Human Papillomavirus
HVEEYDLQFV

SEQ ID NO: 28331 - protein, 11 aa, Artificial Sequence
  Peptide Derived from Human Papillomavirus
HVEEYDLQFVF

SEQ ID NO: 28332 - protein, 8 aa, Artificial Sequence
  Peptide Derived from Human Papillomavirus
IIEDGDMV

SEQ ID NO: 28333 - protein, 9 aa, Artificial Sequence
  Peptide Derived from Human Papillomavirus
ILEDWQFGL

SEQ ID NO: 28334 - protein, 10 aa, Artificial Sequence
  Peptide Derived from Human Papillomavirus
KLLVPKVSGL

SEQ ID NO: 28335 - protein, 11 aa, Artificial Sequence
  Peptide Derived from Human Papillomavirus
KMTSEPYGDSL

SEQ ID NO: 28336 - protein, 8 aa, Artificial Sequence
  Peptide Derived from Human Papillomavirus
KPKLKRAA

SEQ ID NO: 28337 - protein, 8 aa, Artificial Sequence
  Peptide Derived from Human Papillomavirus
KPPTGEHW

SEQ ID NO: 28338 - protein, 8 aa, Artificial Sequence
  Peptide Derived from Human Papillomavirus
KPYWLQRA

SEQ ID NO: 28339 - protein, 8 aa, Artificial Sequence
  Peptide Derived from Human Papillomavirus
KQTQLCLL

SEQ ID NO: 28340 - protein, 9 aa, Artificial Sequence
  Peptide Derived from Human Papillomavirus
KVSGLQYRV

SEQ ID NO: 28341 - protein, 10 aa, Artificial Sequence
  Peptide Derived from Human Papillomavirus
KVSGLQYRVF

SEQ ID NO: 28342 - protein, 8 aa, Artificial Sequence
  Peptide Derived from Human Papillomavirus
KVTLTAEV

SEQ ID NO: 28343 - protein, 9 aa, Artificial Sequence
  Peptide Derived from Human Papillomavirus
KVTLTAEVM

SEQ ID NO: 28344 - protein, 11 aa, Artificial Sequence
  Peptide Derived from Human Papillomavirus
KVTLTAEVMTY

SEQ ID NO: 28345 - protein, 8 aa, Artificial Sequence
  Peptide Derived from Human Papillomavirus
KVVSTDEY

SEQ ID NO: 28346 - protein, 9 aa, Artificial Sequence
  Peptide Derived from Human Papillomavirus
KVVSTDEYV

SEQ ID NO: 28347 - protein, 11 aa, Artificial Sequence
  Peptide Derived from Human Papillomavirus
LINTIIEDGDM

SEQ ID NO: 28348 - protein, 8 aa, Artificial Sequence
  Peptide Derived from Human Papillomavirus
LLAVGHPY

SEQ ID NO: 28349 - protein, 9 aa, Artificial Sequence
  Peptide Derived from Human Papillomavirus
LLAVGHPYF

SEQ ID NO: 28350 - protein, 11 aa, Artificial Sequence
  Peptide Derived from Human Papillomavirus
LLAVGHPYFSI

SEQ ID NO: 28351 - protein, 8 aa, Artificial Sequence
  Peptide Derived from Human Papillomavirus
LLQAGLKA

SEQ ID NO: 28352 - protein, 9 aa, Artificial Sequence
  Peptide Derived from Human Papillomavirus
LLVPKVSGL

SEQ ID NO: 28353 - protein, 11 aa, Artificial Sequence
  Peptide Derived from Human Papillomavirus
LLVPKVSGLQY

SEQ ID NO: 28354 - protein, 9 aa, Artificial Sequence
  Peptide Derived from Human Papillomavirus
LPDPNKFGF

SEQ ID NO: 28355 - protein, 9 aa, Artificial Sequence
  Peptide Derived from Human Papillomavirus
LPPVPVSKV

SEQ ID NO: 28356 - protein, 10 aa, Artificial Sequence
  Peptide Derived from Human Papillomavirus
LPPVPVSKVV

SEQ ID NO: 28357 - protein, 11 aa, Artificial Sequence
  Peptide Derived from Human Papillomavirus
LQAGLKAKPKL

SEQ ID NO: 28358 - protein, 8 aa, Artificial Sequence
  Peptide Derived from Human Papillomavirus
LQANKSDV

SEQ ID NO: 28359 - protein, 10 aa, Artificial Sequence
  Peptide Derived from Human Papillomavirus
LQANKSDVPI

SEQ ID NO: 28360 - protein, 8 aa, Artificial Sequence
  Peptide Derived from Human Papillomavirus
LQDTYRFV

SEQ ID NO: 28361 - protein, 10 aa, Artificial Sequence
  Peptide Derived from Human Papillomavirus
LQFVFQLCKV

SEQ ID NO: 28362 - protein, 11 aa, Artificial Sequence
  Peptide Derived from Human Papillomavirus
LQRAQGHNNGI

SEQ ID NO: 28363 - protein, 8 aa, Artificial Sequence
  Peptide Derived from Human Papillomavirus
LQYRVFRV

SEQ ID NO: 28364 - protein, 10 aa, Artificial Sequence
  Peptide Derived from Human Papillomavirus
LQYRVFRVRL

SEQ ID NO: 28365 - protein, 8 aa, Artificial Sequence
  Peptide Derived from Human Papillomavirus
LVPKVSGL

SEQ ID NO: 28366 - protein, 10 aa, Artificial Sequence
  Peptide Derived from Human Papillomavirus
LVPKVSGLQY

SEQ ID NO: 28367 - protein, 8 aa, Artificial Sequence
  Peptide Derived from Human Papillomavirus
LVWACVGL

SEQ ID NO: 28368 - protein, 10 aa, Artificial Sequence
  Peptide Derived from Human Papillomavirus
LVWACVGLEI

SEQ ID NO: 28369 - protein, 9 aa, Artificial Sequence
  Peptide Derived from Human Papillomavirus
MVDTGFGCM

SEQ ID NO: 28370 - protein, 11 aa, Artificial Sequence
  Peptide Derived from Human Papillomavirus
MVDTGFGCMDF

SEQ ID NO: 28371 - protein, 8 aa, Artificial Sequence
  Peptide Derived from Human Papillomavirus
MVTSESQL

SEQ ID NO: 28372 - protein, 9 aa, Artificial Sequence
  Peptide Derived from Human Papillomavirus
MVTSESQLF

SEQ ID NO: 28373 - protein, 8 aa, Artificial Sequence
  Peptide Derived from Human Papillomavirus
NMTLCTQV

SEQ ID NO: 28374 - protein, 8 aa, Artificial Sequence
  Peptide Derived from Human Papillomavirus
NPDILEDW

SEQ ID NO: 28375 - protein, 10 aa, Artificial Sequence
  Peptide Derived from Human Papillomavirus
NPDILEDWQF

SEQ ID NO: 28376 - protein, 8 aa, Artificial Sequence
  Peptide Derived from Human Papillomavirus
NPDTQRLV

SEQ ID NO: 28377 - protein, 9 aa, Artificial Sequence
  Peptide Derived from Human Papillomavirus
NPDTQRLVW

SEQ ID NO: 28378 - protein, 10 aa, Artificial Sequence
  Peptide Derived from Human Papillomavirus
NPDTQRLVWA

SEQ ID NO: 28379 - protein, 8 aa, Artificial Sequence
  Peptide Derived from Human Papillomavirus
NPTNAKKL

SEQ ID NO: 28380 - protein, 9 aa, Artificial Sequence
  Peptide Derived from Human Papillomavirus
NPTNAKKLL

SEQ ID NO: 28381 - protein, 10 aa, Artificial Sequence
  Peptide Derived from Human Papillomavirus
NPTNAKKLLV

SEQ ID NO: 28382 - protein, 8 aa, Artificial Sequence
  Peptide Derived from Human Papillomavirus
NQVFVTVV

SEQ ID NO: 28383 - protein, 11 aa, Artificial Sequence
  Peptide Derived from Human Papillomavirus
PIDICGSTCKY

SEQ ID NO: 28384 - protein, 8 aa, Artificial Sequence
  Peptide Derived from Human Papillomavirus
PLELINTI

SEQ ID NO: 28385 - protein, 9 aa, Artificial Sequence
  Peptide Derived from Human Papillomavirus
PLELINTII

SEQ ID NO: 28386 - protein, 8 aa, Artificial Sequence
  Peptide Derived from Human Papillomavirus
PLGKYTFW

SEQ ID NO: 28387 - protein, 10 aa, Artificial Sequence
  Peptide Derived from Human Papillomavirus
PLGKYTFWEV

SEQ ID NO: 28388 - protein, 8 aa, Artificial Sequence
  Peptide Derived from Human Papillomavirus
PLGRKFLL

SEQ ID NO: 28389 - protein, 10 aa, Artificial Sequence
  Peptide Derived from Human Papillomavirus
PLGRKFLLQA

SEQ ID NO: 28390 - protein, 11 aa, Artificial Sequence
  Peptide Derived from Human Papillomavirus
PLGVGISGHPL

SEQ ID NO: 28391 - protein, 9 aa, Artificial Sequence
  Peptide Derived from Human Papillomavirus
PPKEKEDPL

SEQ ID NO: 28392 - protein, 9 aa, Artificial Sequence
  Peptide Derived from Human Papillomavirus
PPLELINTI

SEQ ID NO: 28393 - protein, 10 aa, Artificial Sequence
  Peptide Derived from Human Papillomavirus
PPLELINTII

SEQ ID NO: 28394 - protein, 11 aa, Artificial Sequence
  Peptide Derived from Human Papillomavirus
PPPSASLQDTY

SEQ ID NO: 28395 - protein, 10 aa, Artificial Sequence
  Peptide Derived from Human Papillomavirus
PPSASLQDTY

SEQ ID NO: 28396 - protein, 11 aa, Artificial Sequence
  Peptide Derived from Human Papillomavirus
PPTGEHWGKGV

SEQ ID NO: 28397 - protein, 8 aa, Artificial Sequence
  Peptide Derived from Human Papillomavirus
PPVPVSKV

SEQ ID NO: 28398 - protein, 9 aa, Artificial Sequence
  Peptide Derived from Human Papillomavirus
PPVPVSKVV

SEQ ID NO: 28399 - protein, 8 aa, Artificial Sequence
  Peptide Derived from Human Papillomavirus
PVPVSKVV

SEQ ID NO: 28400 - protein, 11 aa, Artificial Sequence
  Peptide Derived from Human Papillomavirus
PVSKVVSTDEY

SEQ ID NO: 28401 - protein, 9 aa, Artificial Sequence
  Peptide Derived from Human Papillomavirus
QLCKVTLTA

SEQ ID NO: 28402 - protein, 11 aa, Artificial Sequence
  Peptide Derived from Human Papillomavirus
QLCKVTLTAEV

SEQ ID NO: 28403 - protein, 8 aa, Artificial Sequence
  Peptide Derived from Human Papillomavirus
QLFNKPYW

SEQ ID NO: 28404 - protein, 9 aa, Artificial Sequence
  Peptide Derived from Human Papillomavirus
QLFNKPYWL

SEQ ID NO: 28405 - protein, 8 aa, Artificial Sequence
  Peptide Derived from Human Papillomavirus
QMFVRHFF

SEQ ID NO: 28406 - protein, 11 aa, Artificial Sequence
  Peptide Derived from Human Papillomavirus
QMFVRHFFNRA

SEQ ID NO: 28407 - protein, 10 aa, Artificial Sequence
  Peptide Derived from Human Papillomavirus
QPGADNRECL

SEQ ID NO: 28408 - protein, 8 aa, Artificial Sequence
  Peptide Derived from Human Papillomavirus
QVTSDSTY

SEQ ID NO: 28409 - protein, 9 aa, Artificial Sequence
  Peptide Derived from Human Papillomavirus
RLLAVGHPY

SEQ ID NO: 28410 - protein, 10 aa, Artificial Sequence
  Peptide Derived from Human Papillomavirus
RLLAVGHPYF

SEQ ID NO: 28411 - protein, 8 aa, Artificial Sequence
  Peptide Derived from Human Papillomavirus
RLPDPNKF

SEQ ID NO: 28412 - protein, 10 aa, Artificial Sequence
  Peptide Derived from Human Papillomavirus
RLPDPNKFGF

SEQ ID NO: 28413 - protein, 9 aa, Artificial Sequence
  Peptide Derived from Human Papillomavirus
RLVWACVGL

SEQ ID NO: 28414 - protein, 11 aa, Artificial Sequence
  Peptide Derived from Human Papillomavirus
RLVWACVGLEI

SEQ ID NO: 28415 - protein, 8 aa, Artificial Sequence
  Peptide Derived from Human Papillomavirus
RPSEATVY

SEQ ID NO: 28416 - protein, 9 aa, Artificial Sequence
  Peptide Derived from Human Papillomavirus
RPSEATVYL

SEQ ID NO: 28417 - protein, 10 aa, Artificial Sequence
  Peptide Derived from Human Papillomavirus
RVRLPDPNKF

SEQ ID NO: 28418 - protein, 8 aa, Artificial Sequence
  Peptide Derived from Human Papillomavirus
SIKNPTNA

SEQ ID NO: 28419 - protein, 11 aa, Artificial Sequence
  Peptide Derived from Human Papillomavirus
SIKNPTNAKKL

SEQ ID NO: 28420 - protein, 8 aa, Artificial Sequence
  Peptide Derived from Human Papillomavirus
SIQSSAFF

SEQ ID NO: 28421 - protein, 11 aa, Artificial Sequence
  Peptide Derived from Human Papillomavirus
SIYYYAGSSRL

SEQ ID NO: 28422 - protein, 11 aa, Artificial Sequence
  Peptide Derived from Human Papillomavirus
SLFFFLRREQM

SEQ ID NO: 28423 - protein, 8 aa, Artificial Sequence
  Peptide Derived from Human Papillomavirus
SLQDTYRF

SEQ ID NO: 28424 - protein, 9 aa, Artificial Sequence
  Peptide Derived from Human Papillomavirus
SLQDTYRFV

SEQ ID NO: 28425 - protein, 9 aa, Artificial Sequence
  Peptide Derived from Human Papillomavirus
SMDYKQTQL

SEQ ID NO: 28426 - protein, 11 aa, Artificial Sequence
  Peptide Derived from Human Papillomavirus
SMDYKQTQLCL

SEQ ID NO: 28427 - protein, 9 aa, Artificial Sequence
  Peptide Derived from Human Papillomavirus
SMVTSESQL

SEQ ID NO: 28428 - protein, 10 aa, Artificial Sequence
  Peptide Derived from Human Papillomavirus
SMVTSESQLF

SEQ ID NO: 28429 - protein, 10 aa, Artificial Sequence
  Peptide Derived from Human Papillomavirus
SQAITCQKTV

SEQ ID NO: 28430 - protein, 8 aa, Artificial Sequence
  Peptide Derived from Human Papillomavirus
SQLFNKPY

SEQ ID NO: 28431 - protein, 9 aa, Artificial Sequence
  Peptide Derived from Human Papillomavirus
SQLFNKPYW

SEQ ID NO: 28432 - protein, 10 aa, Artificial Sequence
  Peptide Derived from Human Papillomavirus
SQLFNKPYWL

SEQ ID NO: 28433 - protein, 8 aa, Artificial Sequence
  Peptide Derived from Human Papillomavirus
SVWRPSEA

SEQ ID NO: 28434 - protein, 10 aa, Artificial Sequence
  Peptide Derived from Human Papillomavirus
SVWRPSEATV

SEQ ID NO: 28435 - protein, 11 aa, Artificial Sequence
  Peptide Derived from Human Papillomavirus
SVWRPSEATVY

SEQ ID NO: 28436 - protein, 8 aa, Artificial Sequence
  Peptide Derived from Human Papillomavirus
TIIEDGDM

SEQ ID NO: 28437 - protein, 9 aa, Artificial Sequence
  Peptide Derived from Human Papillomavirus
TIIEDGDMV

SEQ ID NO: 28438 - protein, 10 aa, Artificial Sequence
  Peptide Derived from Human Papillomavirus
TLGEAVPDDL

SEQ ID NO: 28439 - protein, 11 aa, Artificial Sequence
  Peptide Derived from Human Papillomavirus
TLGEAVPDDLY

SEQ ID NO: 28440 - protein, 9 aa, Artificial Sequence
  Peptide Derived from Human Papillomavirus
TLQANKSDV

SEQ ID NO: 28441 - protein, 11 aa, Artificial Sequence
  Peptide Derived from Human Papillomavirus
TLQANKSDVPI

SEQ ID NO: 28442 - protein, 9 aa, Artificial Sequence
  Peptide Derived from Human Papillomavirus
TLTAEVMTY

SEQ ID NO: 28443 - protein, 10 aa, Artificial Sequence
  Peptide Derived from Human Papillomavirus
TLTAEVMTYI

SEQ ID NO: 28444 - protein, 8 aa, Artificial Sequence
  Peptide Derived from Human Papillomavirus
TPPPSASL

SEQ ID NO: 28445 - protein, 9 aa, Artificial Sequence
  Peptide Derived from Human Papillomavirus
TQRLVWACV

SEQ ID NO: 28446 - protein, 11 aa, Artificial Sequence
  Peptide Derived from Human Papillomavirus
TQRLVWACVGL

SEQ ID NO: 28447 - protein, 9 aa, Artificial Sequence
  Peptide Derived from Human Papillomavirus
TQVTSDSTY

SEQ ID NO: 28448 - protein, 11 aa, Artificial Sequence
  Peptide Derived from Human Papillomavirus
TVPPKEKEDPL

SEQ ID NO: 28449 - protein, 11 aa, Artificial Sequence
  Peptide Derived from Human Papillomavirus
TVVDTTRSTNM

SEQ ID NO: 28450 - protein, 9 aa, Artificial Sequence
  Peptide Derived from Human Papillomavirus
TVYLPPVPV

SEQ ID NO: 28451 - protein, 8 aa, Artificial Sequence
  Peptide Derived from Human Papillomavirus
VMTYIHAM

SEQ ID NO: 28452 - protein, 9 aa, Artificial Sequence
  Peptide Derived from Human Papillomavirus
VPKVSGLQY

SEQ ID NO: 28453 - protein, 11 aa, Artificial Sequence
  Peptide Derived from Human Papillomavirus
VPKVSGLQYRV

SEQ ID NO: 28454 - protein, 10 aa, Artificial Sequence
  Peptide Derived from Human Papillomavirus
VPPKEKEDPL

SEQ ID NO: 28455 - protein, 10 aa, Artificial Sequence
  Peptide Derived from Human Papillomavirus
VVDTTRSTNM

SEQ ID NO: 28456 - protein, 8 aa, Artificial Sequence
  Peptide Derived from Human Papillomavirus
VVSTDEYV

SEQ ID NO: 28457 - protein, 11 aa, Artificial Sequence
  Peptide Derived from Human Papillomavirus
WQFGLTPPPSA

SEQ ID NO: 28458 - protein, 9 aa, Artificial Sequence
  Peptide Derived from Human Papillomavirus
YIHAMNPDI

SEQ ID NO: 28459 - protein, 10 aa, Artificial Sequence
  Peptide Derived from Human Papillomavirus
YIHAMNPDIL

SEQ ID NO: 28460 - protein, 9 aa, Artificial Sequence
  Peptide Derived from Human Papillomavirus
YIKGSGTTA

SEQ ID NO: 28461 - protein, 11 aa, Artificial Sequence
  Peptide Derived from Human Papillomavirus
YIKGSGTTASI

SEQ ID NO: 28462 - protein, 8 aa, Artificial Sequence
  Peptide Derived from Human Papillomavirus
YIRHVEEY

SEQ ID NO: 28463 - protein, 10 aa, Artificial Sequence
  Peptide Derived from Human Papillomavirus
YIRHVEEYDL

SEQ ID NO: 28464 - protein, 9 aa, Artificial Sequence
  Peptide Derived from Human Papillomavirus
YLKMTSEPY

SEQ ID NO: 28465 - protein, 10 aa, Artificial Sequence
  Peptide Derived from Human Papillomavirus
YLPPVPVSKV

SEQ ID NO: 28466 - protein, 11 aa, Artificial Sequence
  Peptide Derived from Human Papillomavirus
YLPPVPVSKVV

SEQ ID NO: 28467 - protein, 8 aa, Artificial Sequence
  Peptide Derived from Human Papillomavirus
YVSRTSIY

SEQ ID NO: 28468 - protein, 9 aa, Artificial Sequence
  Peptide Derived from Human Papillomavirus
YVSRTSIYY

SEQ ID NO: 28469 - protein, 10 aa, Artificial Sequence
  Peptide Derived from Human Papillomavirus
YVSRTSIYYY

SEQ ID NO: 28470 - protein, 11 aa, Artificial Sequence
  Peptide Derived from Human Papillomavirus
YVSRTSIYYYA

SEQ ID NO: 28471 - protein, 8 aa, Artificial Sequence
  Peptide Derived from Human Papillomavirus
AIINVSSV

SEQ ID NO: 28472 - protein, 11 aa, Artificial Sequence
  Peptide Derived from Human Papillomavirus
AIPLQPIRPPV

SEQ ID NO: 28473 - protein, 9 aa, Artificial Sequence
  Peptide Derived from Human Papillomavirus
AITSRRHTV

SEQ ID NO: 28474 - protein, 11 aa, Artificial Sequence
  Peptide Derived from Human Papillomavirus
AITSRRHTVRF

SEQ ID NO: 28475 - protein, 9 aa, Artificial Sequence
  Peptide Derived from Human Papillomavirus
APAEASGHF

SEQ ID NO: 28476 - protein, 10 aa, Artificial Sequence
  Peptide Derived from Human Papillomavirus
APAEASGHFI

SEQ ID NO: 28477 - protein, 11 aa, Artificial Sequence
  Peptide Derived from Human Papillomavirus
APAEASGHFIF

SEQ ID NO: 28478 - protein, 9 aa, Artificial Sequence
  Peptide Derived from Human Papillomavirus
APDPDFLDI

SEQ ID NO: 28479 - protein, 10 aa, Artificial Sequence
  Peptide Derived from Human Papillomavirus
APDPDFLDII

SEQ ID NO: 28480 - protein, 11 aa, Artificial Sequence
  Peptide Derived from Human Papillomavirus
APDPDFLDIIA

SEQ ID NO: 28481 - protein, 10 aa, Artificial Sequence
  Peptide Derived from Human Papillomavirus
APSIPTPSGF

SEQ ID NO: 28482 - protein, 9 aa, Artificial Sequence
  Peptide Derived from Human Papillomavirus
CPPDVIPKV

SEQ ID NO: 28483 - protein, 9 aa, Artificial Sequence
  Peptide Derived from Human Papillomavirus
DIIALHRPA

SEQ ID NO: 28484 - protein, 10 aa, Artificial Sequence
  Peptide Derived from Human Papillomavirus
DIIALHRPAI

SEQ ID NO: 28485 - protein, 10 aa, Artificial Sequence
  Peptide Derived from Human Papillomavirus
DISPAPDPDF

SEQ ID NO: 28486 - protein, 11 aa, Artificial Sequence
  Peptide Derived from Human Papillomavirus
DISPAPDPDFL

SEQ ID NO: 28487 - protein, 8 aa, Artificial Sequence
  Peptide Derived from Human Papillomavirus
DLSPIVPL

SEQ ID NO: 28488 - protein, 11 aa, Artificial Sequence
  Peptide Derived from Human Papillomavirus
DPAFLTSPHKL

SEQ ID NO: 28489 - protein, 8 aa, Artificial Sequence
  Peptide Derived from Human Papillomavirus
DPDFLDII

SEQ ID NO: 28490 - protein, 9 aa, Artificial Sequence
  Peptide Derived from Human Papillomavirus
DPDFLDIIA

SEQ ID NO: 28491 - protein, 10 aa, Artificial Sequence
  Peptide Derived from Human Papillomavirus
DPDFLDIIAL

SEQ ID NO: 28492 - protein, 8 aa, Artificial Sequence
  Peptide Derived from Human Papillomavirus
DPEDTLQF

SEQ ID NO: 28493 - protein, 9 aa, Artificial Sequence
  Peptide Derived from Human Papillomavirus
DPPTAAIPL

SEQ ID NO: 28494 - protein, 9 aa, Artificial Sequence
  Peptide Derived from Human Papillomavirus
DQILKYGSL

SEQ ID NO: 28495 - protein, 11 aa, Artificial Sequence
  Peptide Derived from Human Papillomavirus
DQILKYGSLGV

SEQ ID NO: 28496 - protein, 9 aa, Artificial Sequence
  Peptide Derived from Human Papillomavirus
DVDNVHTPM

SEQ ID NO: 28497 - protein, 11 aa, Artificial Sequence
  Peptide Derived from Human Papillomavirus
DVIPKVEGSTI

SEQ ID NO: 28498 - protein, 11 aa, Artificial Sequence
  Peptide Derived from Human Papillomavirus
DVTTSADTTPA

SEQ ID NO: 28499 - protein, 10 aa, Artificial Sequence
  Peptide Derived from Human Papillomavirus
DVYADDVDNV

SEQ ID NO: 28500 - protein, 9 aa, Artificial Sequence
  Peptide Derived from Human Papillomavirus
EPSVLHPPA

SEQ ID NO: 28501 - protein, 11 aa, Artificial Sequence
  Peptide Derived from Human Papillomavirus
EPSVLHPPAPA

SEQ ID NO: 28502 - protein, 8 aa, Artificial Sequence
  Peptide Derived from Human Papillomavirus
EQYELQPL

SEQ ID NO: 28503 - protein, 8 aa, Artificial Sequence
  Peptide Derived from Human Papillomavirus
FIEAGAPA

SEQ ID NO: 28504 - protein, 11 aa, Artificial Sequence
  Peptide Derived from Human Papillomavirus
FIEAGAPAPSI

SEQ ID NO: 28505 - protein, 8 aa, Artificial Sequence
  Peptide Derived from Human Papillomavirus
FIFSSPTV

SEQ ID NO: 28506 - protein, 10 aa, Artificial Sequence
  Peptide Derived from Human Papillomavirus
FILRRRRKRF

SEQ ID NO: 28507 - protein, 11 aa, Artificial Sequence
  Peptide Derived from Human Papillomavirus
FLDIIALHRPA

SEQ ID NO: 28508 - protein, 8 aa, Artificial Sequence
  Peptide Derived from Human Papillomavirus
FLTSPHKL

SEQ ID NO: 28509 - protein, 9 aa, Artificial Sequence
  Peptide Derived from Human Papillomavirus
FLTSPHKLI

SEQ ID NO: 28510 - protein, 11 aa, Artificial Sequence
  Peptide Derived from Human Papillomavirus
FLTSPHKLITY

SEQ ID NO: 28511 - protein, 8 aa, Artificial Sequence
  Peptide Derived from Human Papillomavirus
FPFDTIVV

SEQ ID NO: 28512 - protein, 11 aa, Artificial Sequence
  Peptide Derived from Human Papillomavirus
FPFDTIVVDGA

SEQ ID NO: 28513 - protein, 8 aa, Artificial Sequence
  Peptide Derived from Human Papillomavirus
FPTSSPFV

SEQ ID NO: 28514 - protein, 10 aa, Artificial Sequence
  Peptide Derived from Human Papillomavirus
FPTSSPFVPI

SEQ ID NO: 28515 - protein, 8 aa, Artificial Sequence
  Peptide Derived from Human Papillomavirus
FPYFFTDV

SEQ ID NO: 28516 - protein, 10 aa, Artificial Sequence
  Peptide Derived from Human Papillomavirus
FPYFFTDVRV

SEQ ID NO: 28517 - protein, 11 aa, Artificial Sequence
  Peptide Derived from Human Papillomavirus
FPYFFTDVRVA

SEQ ID NO: 28518 - protein, 9 aa, Artificial Sequence
  Peptide Derived from Human Papillomavirus
FQHSDISPA

SEQ ID NO: 28519 - protein, 8 aa, Artificial Sequence
  Peptide Derived from Human Papillomavirus
FVLHPSYF

SEQ ID NO: 28520 - protein, 9 aa, Artificial Sequence
  Peptide Derived from Human Papillomavirus
FVLHPSYFI

SEQ ID NO: 28521 - protein, 10 aa, Artificial Sequence
  Peptide Derived from Human Papillomavirus
FVLHPSYFIL

SEQ ID NO: 28522 - protein, 8 aa, Artificial Sequence
  Peptide Derived from Human Papillomavirus
FVPISPFF

SEQ ID NO: 28523 - protein, 10 aa, Artificial Sequence
  Peptide Derived from Human Papillomavirus
FVPISPFFPF

SEQ ID NO: 28524 - protein, 10 aa, Artificial Sequence
  Peptide Derived from Human Papillomavirus
FVVSTDSSNV

SEQ ID NO: 28525 - protein, 10 aa, Artificial Sequence
  Peptide Derived from Human Papillomavirus
GLYDVYADDV

SEQ ID NO: 28526 - protein, 10 aa, Artificial Sequence
  Peptide Derived from Human Papillomavirus
GLYSRNTQQV

SEQ ID NO: 28527 - protein, 8 aa, Artificial Sequence
  Peptide Derived from Human Papillomavirus
GPDIPSPL

SEQ ID NO: 28528 - protein, 9 aa, Artificial Sequence
  Peptide Derived from Human Papillomavirus
GPDIPSPLF

SEQ ID NO: 28529 - protein, 8 aa, Artificial Sequence
  Peptide Derived from Human Papillomavirus
GPLDSSIV

SEQ ID NO: 28530 - protein, 10 aa, Artificial Sequence
  Peptide Derived from Human Papillomavirus
GPLDSSIVSL

SEQ ID NO: 28531 - protein, 11 aa, Artificial Sequence
  Peptide Derived from Human Papillomavirus
GPLDSSIVSLI

SEQ ID NO: 28532 - protein, 9 aa, Artificial Sequence
  Peptide Derived from Human Papillomavirus
GVFFGGLGI

SEQ ID NO: 28533 - protein, 11 aa, Artificial Sequence
  Peptide Derived from Human Papillomavirus
HLNPTFTEPSV

SEQ ID NO: 28534 - protein, 8 aa, Artificial Sequence
  Peptide Derived from Human Papillomavirus
HPPAPAEA

SEQ ID NO: 28535 - protein, 8 aa, Artificial Sequence
  Peptide Derived from Human Papillomavirus
IIALHRPA

SEQ ID NO: 28536 - protein, 9 aa, Artificial Sequence
  Peptide Derived from Human Papillomavirus
IIALHRPAI

SEQ ID NO: 28537 - protein, 9 aa, Artificial Sequence
  Peptide Derived from Human Papillomavirus
ILKYGSLGV

SEQ ID NO: 28538 - protein, 10 aa, Artificial Sequence
  Peptide Derived from Human Papillomavirus
ILKYGSLGVF

SEQ ID NO: 28539 - protein, 11 aa, Artificial Sequence
  Peptide Derived from Human Papillomavirus
ILKYGSLGVFF

SEQ ID NO: 28540 - protein, 9 aa, Artificial Sequence
  Peptide Derived from Human Papillomavirus
ILRRRRKRF

SEQ ID NO: 28541 - protein, 11 aa, Artificial Sequence
  Peptide Derived from Human Papillomavirus
ILRRRRKRFPY

SEQ ID NO: 28542 - protein, 8 aa, Artificial Sequence
  Peptide Derived from Human Papillomavirus
IPGSRPVA

SEQ ID NO: 28543 - protein, 10 aa, Artificial Sequence
  Peptide Derived from Human Papillomavirus
IPGSRPVARL

SEQ ID NO: 28544 - protein, 9 aa, Artificial Sequence
  Peptide Derived from Human Papillomavirus
IPKVEGSTI

SEQ ID NO: 28545 - protein, 10 aa, Artificial Sequence
  Peptide Derived from Human Papillomavirus
IPKVEGSTIA

SEQ ID NO: 28546 - protein, 11 aa, Artificial Sequence
  Peptide Derived from Human Papillomavirus
IPLNTGFDTPV

SEQ ID NO: 28547 - protein, 10 aa, Artificial Sequence
  Peptide Derived from Human Papillomavirus
IPLQPIRPPV

SEQ ID NO: 28548 - protein, 8 aa, Artificial Sequence
  Peptide Derived from Human Papillomavirus
IPMDTFVV

SEQ ID NO: 28549 - protein, 9 aa, Artificial Sequence
  Peptide Derived from Human Papillomavirus
IPTPSGFDV

SEQ ID NO: 28550 - protein, 8 aa, Artificial Sequence
  Peptide Derived from Human Papillomavirus
IQTISTHL

SEQ ID NO: 28551 - protein, 8 aa, Artificial Sequence
  Peptide Derived from Human Papillomavirus
IVPLDHTV

SEQ ID NO: 28552 - protein, 10 aa, Artificial Sequence
  Peptide Derived from Human Papillomavirus
IVSLIEETSF

SEQ ID NO: 28553 - protein, 11 aa, Artificial Sequence
  Peptide Derived from Human Papillomavirus
IVSLIEETSFI

SEQ ID NO: 28554 - protein, 8 aa, Artificial Sequence
  Peptide Derived from Human Papillomavirus
IVVDGADF

SEQ ID NO: 28555 - protein, 9 aa, Artificial Sequence
  Peptide Derived from Human Papillomavirus
IVVDGADFV

SEQ ID NO: 28556 - protein, 10 aa, Artificial Sequence
  Peptide Derived from Human Papillomavirus
IVVDGADFVL

SEQ ID NO: 28557 - protein, 9 aa, Artificial Sequence
  Peptide Derived from Human Papillomavirus
KLITYDNPA

SEQ ID NO: 28558 - protein, 10 aa, Artificial Sequence
  Peptide Derived from Human Papillomavirus
KLITYDNPAF

SEQ ID NO: 28559 - protein, 9 aa, Artificial Sequence
  Peptide Derived from Human Papillomavirus
KQIGARIHY

SEQ ID NO: 28560 - protein, 10 aa, Artificial Sequence
  Peptide Derived from Human Papillomavirus
KQIGARIHYY

SEQ ID NO: 28561 - protein, 8 aa, Artificial Sequence
  Peptide Derived from Human Papillomavirus
KVEGSTIA

SEQ ID NO: 28562 - protein, 11 aa, Artificial Sequence
  Peptide Derived from Human Papillomavirus
KVEGSTIADQI

SEQ ID NO: 28563 - protein, 8 aa, Artificial Sequence
  Peptide Derived from Human Papillomavirus
KVVDPAFL

SEQ ID NO: 28564 - protein, 8 aa, Artificial Sequence
  Peptide Derived from Human Papillomavirus
LIEETSFI

SEQ ID NO: 28565 - protein, 10 aa, Artificial Sequence
  Peptide Derived from Human Papillomavirus
LIEETSFIEA

SEQ ID NO: 28566 - protein, 8 aa, Artificial Sequence
  Peptide Derived from Human Papillomavirus
LITYDNPA

SEQ ID NO: 28567 - protein, 9 aa, Artificial Sequence
  Peptide Derived from Human Papillomavirus
LITYDNPAF

SEQ ID NO: 28568 - protein, 8 aa, Artificial Sequence
  Peptide Derived from Human Papillomavirus
LQFQHSDI

SEQ ID NO: 28569 - protein, 11 aa, Artificial Sequence
  Peptide Derived from Human Papillomavirus
LQFQHSDISPA

SEQ ID NO: 28570 - protein, 8 aa, Artificial Sequence
  Peptide Derived from Human Papillomavirus
LQPIRPPV

SEQ ID NO: 28571 - protein, 10 aa, Artificial Sequence
  Peptide Derived from Human Papillomavirus
LQPIRPPVTV

SEQ ID NO: 28572 - protein, 8 aa, Artificial Sequence
  Peptide Derived from Human Papillomavirus
MQHSYSTF

SEQ ID NO: 28573 - protein, 9 aa, Artificial Sequence
  Peptide Derived from Human Papillomavirus
MQHSYSTFA

SEQ ID NO: 28574 - protein, 8 aa, Artificial Sequence
  Peptide Derived from Human Papillomavirus
NIPMDTFV

SEQ ID NO: 28575 - protein, 9 aa, Artificial Sequence
  Peptide Derived from Human Papillomavirus
NIPMDTFVV

SEQ ID NO: 28576 - protein, 9 aa, Artificial Sequence
  Peptide Derived from Human Papillomavirus
NPTFTEPSV

SEQ ID NO: 28577 - protein, 10 aa, Artificial Sequence
  Peptide Derived from Human Papillomavirus
NPTFTEPSVL

SEQ ID NO: 28578 - protein, 10 aa, Artificial Sequence
  Peptide Derived from Human Papillomavirus
NVHTPMQHSY

SEQ ID NO: 28579 - protein, 10 aa, Artificial Sequence
  Peptide Derived from Human Papillomavirus
NVSIPLNTGF

SEQ ID NO: 28580 - protein, 10 aa, Artificial Sequence
  Peptide Derived from Human Papillomavirus
NVSSVGESSI

SEQ ID NO: 28581 - protein, 8 aa, Artificial Sequence
  Peptide Derived from Human Papillomavirus
NVTSSTPI

SEQ ID NO: 28582 - protein, 9 aa, Artificial Sequence
  Peptide Derived from Human Papillomavirus
PIGTDPPTA

SEQ ID NO: 28583 - protein, 10 aa, Artificial Sequence
  Peptide Derived from Human Papillomavirus
PIGTDPPTAA

SEQ ID NO: 28584 - protein, 11 aa, Artificial Sequence
  Peptide Derived from Human Papillomavirus
PIGTDPPTAAI

SEQ ID NO: 28585 - protein, 8 aa, Artificial Sequence
  Peptide Derived from Human Papillomavirus
PIPGSRPV

SEQ ID NO: 28586 - protein, 9 aa, Artificial Sequence
  Peptide Derived from Human Papillomavirus
PIPGSRPVA

SEQ ID NO: 28587 - protein, 11 aa, Artificial Sequence
  Peptide Derived from Human Papillomavirus
PIPGSRPVARL

SEQ ID NO: 28588 - protein, 8 aa, Artificial Sequence
  Peptide Derived from Human Papillomavirus
PIRPPVTV

SEQ ID NO: 28589 - protein, 11 aa, Artificial Sequence
  Peptide Derived from Human Papillomavirus
PIRPPVTVDTV

SEQ ID NO: 28590 - protein, 8 aa, Artificial Sequence
  Peptide Derived from Human Papillomavirus
PISPFFPF

SEQ ID NO: 28591 - protein, 11 aa, Artificial Sequence
  Peptide Derived from Human Papillomavirus
PISPFFPFDTI

SEQ ID NO: 28592 - protein, 9 aa, Artificial Sequence
  Peptide Derived from Human Papillomavirus
PIVPLDHTV

SEQ ID NO: 28593 - protein, 11 aa, Artificial Sequence
  Peptide Derived from Human Papillomavirus
PLDHTVPNEQY

SEQ ID NO: 28594 - protein, 9 aa, Artificial Sequence
  Peptide Derived from Human Papillomavirus
PLDSSIVSL

SEQ ID NO: 28595 - protein, 10 aa, Artificial Sequence
  Peptide Derived from Human Papillomavirus
PLDSSIVSLI

SEQ ID NO: 28596 - protein, 9 aa, Artificial Sequence
  Peptide Derived from Human Papillomavirus
PLFPTSSPF

SEQ ID NO: 28597 - protein, 10 aa, Artificial Sequence
  Peptide Derived from Human Papillomavirus
PLFPTSSPFV

SEQ ID NO: 28598 - protein, 10 aa, Artificial Sequence
  Peptide Derived from Human Papillomavirus
PLHDTSTSSY

SEQ ID NO: 28599 - protein, 10 aa, Artificial Sequence
  Peptide Derived from Human Papillomavirus
PLNTGFDTPV

SEQ ID NO: 28600 - protein, 11 aa, Artificial Sequence
  Peptide Derived from Human Papillomavirus
PLNTGFDTPVM

SEQ ID NO: 28601 - protein, 9 aa, Artificial Sequence
  Peptide Derived from Human Papillomavirus
PLQPIRPPV

SEQ ID NO: 28602 - protein, 11 aa, Artificial Sequence
  Peptide Derived from Human Papillomavirus
PLQPIRPPVTV

SEQ ID NO: 28603 - protein, 9 aa, Artificial Sequence
  Peptide Derived from Human Papillomavirus
PMQHSYSTF

SEQ ID NO: 28604 - protein, 10 aa, Artificial Sequence
  Peptide Derived from Human Papillomavirus
PMQHSYSTFA

SEQ ID NO: 28605 - protein, 11 aa, Artificial Sequence
  Peptide Derived from Human Papillomavirus
PPAPAEASGHF

SEQ ID NO: 28606 - protein, 8 aa, Artificial Sequence
  Peptide Derived from Human Papillomavirus
PPDVIPKV

SEQ ID NO: 28607 - protein, 8 aa, Artificial Sequence
  Peptide Derived from Human Papillomavirus
PPTAAIPL

SEQ ID NO: 28608 - protein, 11 aa, Artificial Sequence
  Peptide Derived from Human Papillomavirus
PPTAAIPLQPI

SEQ ID NO: 28609 - protein, 8 aa, Artificial Sequence
  Peptide Derived from Human Papillomavirus
PPVTVDTV

SEQ ID NO: 28610 - protein, 11 aa, Artificial Sequence
  Peptide Derived from Human Papillomavirus
PPVTVDTVGPL

SEQ ID NO: 28611 - protein, 8 aa, Artificial Sequence
  Peptide Derived from Human Papillomavirus
PVARLGLY

SEQ ID NO: 28612 - protein, 8 aa, Artificial Sequence
  Peptide Derived from Human Papillomavirus
PVMSGPDI

SEQ ID NO: 28613 - protein, 10 aa, Artificial Sequence
  Peptide Derived from Human Papillomavirus
PVTVDTVGPL

SEQ ID NO: 28614 - protein, 8 aa, Artificial Sequence
  Peptide Derived from Human Papillomavirus
QIGARIHY

SEQ ID NO: 28615 - protein, 9 aa, Artificial Sequence
  Peptide Derived from Human Papillomavirus
QIGARIHYY

SEQ ID NO: 28616 - protein, 8 aa, Artificial Sequence
  Peptide Derived from Human Papillomavirus
QILKYGSL

SEQ ID NO: 28617 - protein, 10 aa, Artificial Sequence
  Peptide Derived from Human Papillomavirus
QILKYGSLGV

SEQ ID NO: 28618 - protein, 11 aa, Artificial Sequence
  Peptide Derived from Human Papillomavirus
QILKYGSLGVF

SEQ ID NO: 28619 - protein, 8 aa, Artificial Sequence
  Peptide Derived from Human Papillomavirus
QLYQTCKA

SEQ ID NO: 28620 - protein, 9 aa, Artificial Sequence
  Peptide Derived from Human Papillomavirus
QPIRPPVTV

SEQ ID NO: 28621 - protein, 11 aa, Artificial Sequence
  Peptide Derived from Human Papillomavirus
QPLHDTSTSSY

SEQ ID NO: 28622 - protein, 9 aa, Artificial Sequence
  Peptide Derived from Human Papillomavirus
QQVKVVDPA

SEQ ID NO: 28623 - protein, 10 aa, Artificial Sequence
  Peptide Derived from Human Papillomavirus
QQVKVVDPAF

SEQ ID NO: 28624 - protein, 11 aa, Artificial Sequence
  Peptide Derived from Human Papillomavirus
QQVKVVDPAFL

SEQ ID NO: 28625 - protein, 8 aa, Artificial Sequence
  Peptide Derived from Human Papillomavirus
QVKVVDPA

SEQ ID NO: 28626 - protein, 9 aa, Artificial Sequence
  Peptide Derived from Human Papillomavirus
QVKVVDPAF

SEQ ID NO: 28627 - protein, 10 aa, Artificial Sequence
  Peptide Derived from Human Papillomavirus
QVKVVDPAFL

SEQ ID NO: 28628 - protein, 8 aa, Artificial Sequence
  Peptide Derived from Human Papillomavirus
RIHYYQDL

SEQ ID NO: 28629 - protein, 11 aa, Artificial Sequence
  Peptide Derived from Human Papillomavirus
RIHYYQDLSPI

SEQ ID NO: 28630 - protein, 11 aa, Artificial Sequence
  Peptide Derived from Human Papillomavirus
RPAITSRRHTV

SEQ ID NO: 28631 - protein, 9 aa, Artificial Sequence
  Peptide Derived from Human Papillomavirus
RPPVTVDTV

SEQ ID NO: 28632 - protein, 8 aa, Artificial Sequence
  Peptide Derived from Human Papillomavirus
RPVARLGL

SEQ ID NO: 28633 - protein, 9 aa, Artificial Sequence
  Peptide Derived from Human Papillomavirus
RPVARLGLY

SEQ ID NO: 28634 - protein, 8 aa, Artificial Sequence
  Peptide Derived from Human Papillomavirus
RVGQKATL

SEQ ID NO: 28635 - protein, 9 aa, Artificial Sequence
  Peptide Derived from Human Papillomavirus
SINDGLYDV

SEQ ID NO: 28636 - protein, 10 aa, Artificial Sequence
  Peptide Derived from Human Papillomavirus
SINDGLYDVY

SEQ ID NO: 28637 - protein, 11 aa, Artificial Sequence
  Peptide Derived from Human Papillomavirus
SINDGLYDVYA

SEQ ID NO: 28638 - protein, 8 aa, Artificial Sequence
  Peptide Derived from Human Papillomavirus
SIPLNTGF

SEQ ID NO: 28639 - protein, 8 aa, Artificial Sequence
  Peptide Derived from Human Papillomavirus
SIPTPSGF

SEQ ID NO: 28640 - protein, 10 aa, Artificial Sequence
  Peptide Derived from Human Papillomavirus
SIPTPSGFDV

SEQ ID NO: 28641 - protein, 9 aa, Artificial Sequence
  Peptide Derived from Human Papillomavirus
SIQTISTHL

SEQ ID NO: 28642 - protein, 11 aa, Artificial Sequence
  Peptide Derived from Human Papillomavirus
SIVSLIEETSF

SEQ ID NO: 28643 - protein, 9 aa, Artificial Sequence
  Peptide Derived from Human Papillomavirus
SLGVFFGGL

SEQ ID NO: 28644 - protein, 11 aa, Artificial Sequence
  Peptide Derived from Human Papillomavirus
SLGVFFGGLGI

SEQ ID NO: 28645 - protein, 8 aa, Artificial Sequence
  Peptide Derived from Human Papillomavirus
SLIEETSF

SEQ ID NO: 28646 - protein, 9 aa, Artificial Sequence
  Peptide Derived from Human Papillomavirus
SLIEETSFI

SEQ ID NO: 28647 - protein, 11 aa, Artificial Sequence
  Peptide Derived from Human Papillomavirus
SLIEETSFIEA

SEQ ID NO: 28648 - protein, 8 aa, Artificial Sequence
  Peptide Derived from Human Papillomavirus
SPAPDPDF

SEQ ID NO: 28649 - protein, 9 aa, Artificial Sequence
  Peptide Derived from Human Papillomavirus
SPAPDPDFL

SEQ ID NO: 28650 - protein, 11 aa, Artificial Sequence
  Peptide Derived from Human Papillomavirus
SPAPDPDFLDI

SEQ ID NO: 28651 - protein, 9 aa, Artificial Sequence
  Peptide Derived from Human Papillomavirus
SPFFPFDTI

SEQ ID NO: 28652 - protein, 10 aa, Artificial Sequence
  Peptide Derived from Human Papillomavirus
SPFFPFDTIV

SEQ ID NO: 28653 - protein, 11 aa, Artificial Sequence
  Peptide Derived from Human Papillomavirus
SPFFPFDTIVV

SEQ ID NO: 28654 - protein, 9 aa, Artificial Sequence
  Peptide Derived from Human Papillomavirus
SPFVPISPF

SEQ ID NO: 28655 - protein, 10 aa, Artificial Sequence
  Peptide Derived from Human Papillomavirus
SPFVPISPFF

SEQ ID NO: 28656 - protein, 8 aa, Artificial Sequence
  Peptide Derived from Human Papillomavirus
SPHKLITY

SEQ ID NO: 28657 - protein, 10 aa, Artificial Sequence
  Peptide Derived from Human Papillomavirus
SPIVPLDHTV

SEQ ID NO: 28658 - protein, 10 aa, Artificial Sequence
  Peptide Derived from Human Papillomavirus
SPLFPTSSPF

SEQ ID NO: 28659 - protein, 11 aa, Artificial Sequence
  Peptide Derived from Human Papillomavirus
SPLFPTSSPFV

SEQ ID NO: 28660 - protein, 9 aa, Artificial Sequence
  Peptide Derived from Human Papillomavirus
SPTVSTQSY

SEQ ID NO: 28661 - protein, 10 aa, Artificial Sequence
  Peptide Derived from Human Papillomavirus
SVGESSIQTI

SEQ ID NO: 28662 - protein, 9 aa, Artificial Sequence
  Peptide Derived from Human Papillomavirus
SVLHPPAPA

SEQ ID NO: 28663 - protein, 11 aa, Artificial Sequence
  Peptide Derived from Human Papillomavirus
SVLHPPAPAEA

SEQ ID NO: 28664 - protein, 9 aa, Artificial Sequence
  Peptide Derived from Human Papillomavirus
TIADQILKY

SEQ ID NO: 28665 - protein, 10 aa, Artificial Sequence
  Peptide Derived from Human Papillomavirus
TISTHLNPTF

SEQ ID NO: 28666 - protein, 9 aa, Artificial Sequence
  Peptide Derived from Human Papillomavirus
TIVVDGADF

SEQ ID NO: 28667 - protein, 10 aa, Artificial Sequence
  Peptide Derived from Human Papillomavirus
TIVVDGADFV

SEQ ID NO: 28668 - protein, 11 aa, Artificial Sequence
  Peptide Derived from Human Papillomavirus
TIVVDGADFVL

SEQ ID NO: 28669 - protein, 10 aa, Artificial Sequence
  Peptide Derived from Human Papillomavirus
TLKTRSGKQI

SEQ ID NO: 28670 - protein, 9 aa, Artificial Sequence
  Peptide Derived from Human Papillomavirus
TLQFQHSDI

SEQ ID NO: 28671 - protein, 10 aa, Artificial Sequence
  Peptide Derived from Human Papillomavirus
TPAIINVSSV

SEQ ID NO: 28672 - protein, 9 aa, Artificial Sequence
  Peptide Derived from Human Papillomavirus
TPIPGSRPV

SEQ ID NO: 28673 - protein, 10 aa, Artificial Sequence
  Peptide Derived from Human Papillomavirus
TPIPGSRPVA

SEQ ID NO: 28674 - protein, 10 aa, Artificial Sequence
  Peptide Derived from Human Papillomavirus
TPMQHSYSTF

SEQ ID NO: 28675 - protein, 11 aa, Artificial Sequence
  Peptide Derived from Human Papillomavirus
TPMQHSYSTFA

SEQ ID NO: 28676 - protein, 11 aa, Artificial Sequence
  Peptide Derived from Human Papillomavirus
TPSGFDVTTSA

SEQ ID NO: 28677 - protein, 9 aa, Artificial Sequence
  Peptide Derived from Human Papillomavirus
TPVMSGPDI

SEQ ID NO: 28678 - protein, 9 aa, Artificial Sequence
  Peptide Derived from Human Papillomavirus
TQLYQTCKA

SEQ ID NO: 28679 - protein, 10 aa, Artificial Sequence
  Peptide Derived from Human Papillomavirus
TQQVKVVDPA

SEQ ID NO: 28680 - protein, 11 aa, Artificial Sequence
  Peptide Derived from Human Papillomavirus
TQQVKVVDPAF

SEQ ID NO: 28681 - protein, 9 aa, Artificial Sequence
  Peptide Derived from Human Papillomavirus
TQSYENIPM

SEQ ID NO: 28682 - protein, 8 aa, Artificial Sequence
  Peptide Derived from Human Papillomavirus
TVDTVGPL

SEQ ID NO: 28683 - protein, 9 aa, Artificial Sequence
  Peptide Derived from Human Papillomavirus
TVGPLDSSI

SEQ ID NO: 28684 - protein, 10 aa, Artificial Sequence
  Peptide Derived from Human Papillomavirus
TVGPLDSSIV

SEQ ID NO: 28685 - protein, 9 aa, Artificial Sequence
  Peptide Derived from Human Papillomavirus
TVPNEQYEL

SEQ ID NO: 28686 - protein, 11 aa, Artificial Sequence
  Peptide Derived from Human Papillomavirus
TVRFSRVGQKA

SEQ ID NO: 28687 - protein, 10 aa, Artificial Sequence
  Peptide Derived from Human Papillomavirus
TVSTQSYENI

SEQ ID NO: 28688 - protein, 10 aa, Artificial Sequence
  Peptide Derived from Human Papillomavirus
VIPKVEGSTI

SEQ ID NO: 28689 - protein, 11 aa, Artificial Sequence
  Peptide Derived from Human Papillomavirus
VIPKVEGSTIA

SEQ ID NO: 28690 - protein, 8 aa, Artificial Sequence
  Peptide Derived from Human Papillomavirus
VLHPPAPA

SEQ ID NO: 28691 - protein, 10 aa, Artificial Sequence
  Peptide Derived from Human Papillomavirus
VLHPPAPAEA

SEQ ID NO: 28692 - protein, 8 aa, Artificial Sequence
  Peptide Derived from Human Papillomavirus
VLHPSYFI

SEQ ID NO: 28693 - protein, 9 aa, Artificial Sequence
  Peptide Derived from Human Papillomavirus
VLHPSYFIL

SEQ ID NO: 28694 - protein, 11 aa, Artificial Sequence
  Peptide Derived from Human Papillomavirus
VMSGPDIPSPL

SEQ ID NO: 28695 - protein, 10 aa, Artificial Sequence
  Peptide Derived from Human Papillomavirus
VPIGTDPPTA

SEQ ID NO: 28696 - protein, 11 aa, Artificial Sequence
  Peptide Derived from Human Papillomavirus
VPIGTDPPTAA

SEQ ID NO: 28697 - protein, 9 aa, Artificial Sequence
  Peptide Derived from Human Papillomavirus
VPISPFFPF

SEQ ID NO: 28698 - protein, 8 aa, Artificial Sequence
  Peptide Derived from Human Papillomavirus
VPNEQYEL

SEQ ID NO: 28699 - protein, 11 aa, Artificial Sequence
  Peptide Derived from Human Papillomavirus
VPNEQYELQPL

SEQ ID NO: 28700 - protein, 8 aa, Artificial Sequence
  Peptide Derived from Human Papillomavirus
VVDGADFV

SEQ ID NO: 28701 - protein, 9 aa, Artificial Sequence
  Peptide Derived from Human Papillomavirus
VVDGADFVL

SEQ ID NO: 28702 - protein, 9 aa, Artificial Sequence
  Peptide Derived from Human Papillomavirus
VVSTDSSNV

SEQ ID NO: 28703 - protein, 8 aa, Artificial Sequence
  Peptide Derived from Human Papillomavirus
YQDLSPIV

SEQ ID NO: 28704 - protein, 10 aa, Artificial Sequence
  Peptide Derived from Human Papillomavirus
YQDLSPIVPL

SEQ ID NO: 28705 - protein, 11 aa, Artificial Sequence
  Peptide Derived from Human Papillomavirus
YVPIGTDPPTA

SEQ ID NO: 28706 - protein, 9 aa, Artificial Sequence
  Peptide Derived from Human Papillomavirus
AIFGVNPTV

SEQ ID NO: 28707 - protein, 10 aa, Artificial Sequence
  Peptide Derived from Human Papillomavirus
AIFGVNPTVA

SEQ ID NO: 28708 - protein, 9 aa, Artificial Sequence
  Peptide Derived from Human Papillomavirus
ALDGNPISI

SEQ ID NO: 28709 - protein, 8 aa, Artificial Sequence
  Peptide Derived from Human Papillomavirus
ALFHAQEV

SEQ ID NO: 28710 - protein, 9 aa, Artificial Sequence
  Peptide Derived from Human Papillomavirus
ALYWYRTGI

SEQ ID NO: 28711 - protein, 9 aa, Artificial Sequence
  Peptide Derived from Human Papillomavirus
AMLAVFKDI

SEQ ID NO: 28712 - protein, 10 aa, Artificial Sequence
  Peptide Derived from Human Papillomavirus
AMLAVFKDIY

SEQ ID NO: 28713 - protein, 11 aa, Artificial Sequence
  Peptide Derived from Human Papillomavirus
AMLDDATHTCW

SEQ ID NO: 28714 - protein, 10 aa, Artificial Sequence
  Peptide Derived from Human Papillomavirus
AQALFHAQEV

SEQ ID NO: 28715 - protein, 8 aa, Artificial Sequence
  Peptide Derived from Human Papillomavirus
AQEVQNDA

SEQ ID NO: 28716 - protein, 10 aa, Artificial Sequence
  Peptide Derived from Human Papillomavirus
AQEVQNDAQV

SEQ ID NO: 28717 - protein, 11 aa, Artificial Sequence
  Peptide Derived from Human Papillomavirus
AQEVQNDAQVL

SEQ ID NO: 28718 - protein, 8 aa, Artificial Sequence
  Peptide Derived from Human Papillomavirus
AQKRQMNM

SEQ ID NO: 28719 - protein, 11 aa, Artificial Sequence
  Peptide Derived from Human Papillomavirus
AQKRQMNMSQW

SEQ ID NO: 28720 - protein, 10 aa, Artificial Sequence
  Peptide Derived from Human Papillomavirus
AQLADCNSNA

SEQ ID NO: 28721 - protein, 11 aa, Artificial Sequence
  Peptide Derived from Human Papillomavirus
AQLADCNSNAA

SEQ ID NO: 28722 - protein, 11 aa, Artificial Sequence
  Peptide Derived from Human Papillomavirus
AQVLHLLKRKF

SEQ ID NO: 28723 - protein, 9 aa, Artificial Sequence
  Peptide Derived from Human Papillomavirus
AVFKDIYGL

SEQ ID NO: 28724 - protein, 11 aa, Artificial Sequence
  Peptide Derived from Human Papillomavirus
AVFKDIYGLSF

SEQ ID NO: 28725 - protein, 10 aa, Artificial Sequence
  Peptide Derived from Human Papillomavirus
AVMCRHYKRA

SEQ ID NO: 28726 - protein, 8 aa, Artificial Sequence
  Peptide Derived from Human Papillomavirus
CILLYGPA

SEQ ID NO: 28727 - protein, 8 aa, Artificial Sequence
  Peptide Derived from Human Papillomavirus
CLDCKWGV

SEQ ID NO: 28728 - protein, 9 aa, Artificial Sequence
  Peptide Derived from Human Papillomavirus
CLDCKWGVL

SEQ ID NO: 28729 - protein, 10 aa, Artificial Sequence
  Peptide Derived from Human Papillomavirus
CLDCKWGVLI

SEQ ID NO: 28730 - protein, 11 aa, Artificial Sequence
  Peptide Derived from Human Papillomavirus
CLDCKWGVLIL

SEQ ID NO: 28731 - protein, 9 aa, Artificial Sequence
  Peptide Derived from Human Papillomavirus
CMLIEPPKL

SEQ ID NO: 28732 - protein, 10 aa, Artificial Sequence
  Peptide Derived from Human Papillomavirus
CPPILLTSNI

SEQ ID NO: 28733 - protein, 10 aa, Artificial Sequence
  Peptide Derived from Human Papillomavirus
CQAKYLKDCA

SEQ ID NO: 28734 - protein, 11 aa, Artificial Sequence
  Peptide Derived from Human Papillomavirus
CQAKYLKDCAV

SEQ ID NO: 28735 - protein, 10 aa, Artificial Sequence
  Peptide Derived from Human Papillomavirus
CVTGQNTRPL

SEQ ID NO: 28736 - protein, 10 aa, Artificial Sequence
  Peptide Derived from Human Papillomavirus
DIYGLSFTDL

SEQ ID NO: 28737 - protein, 11 aa, Artificial Sequence
  Peptide Derived from Human Papillomavirus
DIYGLSFTDLV

SEQ ID NO: 28738 - protein, 9 aa, Artificial Sequence
  Peptide Derived from Human Papillomavirus
DLHEDDEDA

SEQ ID NO: 28739 - protein, 8 aa, Artificial Sequence
  Peptide Derived from Human Papillomavirus
DLSDMVQW

SEQ ID NO: 28740 - protein, 9 aa, Artificial Sequence
  Peptide Derived from Human Papillomavirus
DLSDMVQWA

SEQ ID NO: 28741 - protein, 10 aa, Artificial Sequence
  Peptide Derived from Human Papillomavirus
DLSDMVQWAF

SEQ ID NO: 28742 - protein, 9 aa, Artificial Sequence
  Peptide Derived from Human Papillomavirus
DLSPRLQEI

SEQ ID NO: 28743 - protein, 11 aa, Artificial Sequence
  Peptide Derived from Human Papillomavirus
DLSPRLQEISL

SEQ ID NO: 28744 - protein, 8 aa, Artificial Sequence
  Peptide Derived from Human Papillomavirus
DLTDESDM

SEQ ID NO: 28745 - protein, 9 aa, Artificial Sequence
  Peptide Derived from Human Papillomavirus
DLTDESDMA

SEQ ID NO: 28746 - protein, 10 aa, Artificial Sequence
  Peptide Derived from Human Papillomavirus
DLTDESDMAF

SEQ ID NO: 28747 - protein, 9 aa, Artificial Sequence
  Peptide Derived from Human Papillomavirus
DMAFQYAQL

SEQ ID NO: 28748 - protein, 10 aa, Artificial Sequence
  Peptide Derived from Human Papillomavirus
DMAFQYAQLA

SEQ ID NO: 28749 - protein, 10 aa, Artificial Sequence
  Peptide Derived from Human Papillomavirus
DMVDFIDTQL

SEQ ID NO: 28750 - protein, 11 aa, Artificial Sequence
  Peptide Derived from Human Papillomavirus
DMVQWAFDNDL

SEQ ID NO: 28751 - protein, 8 aa, Artificial Sequence
  Peptide Derived from Human Papillomavirus
DPAKDNKW

SEQ ID NO: 28752 - protein, 10 aa, Artificial Sequence
  Peptide Derived from Human Papillomavirus
DPAKDNKWPY

SEQ ID NO: 28753 - protein, 11 aa, Artificial Sequence
  Peptide Derived from Human Papillomavirus
DPAKDNKWPYL

SEQ ID NO: 28754 - protein, 9 aa, Artificial Sequence
  Peptide Derived from Human Papillomavirus
DPHCSITEL

SEQ ID NO: 28755 - protein, 11 aa, Artificial Sequence
  Peptide Derived from Human Papillomavirus
DVISDDEDETA

SEQ ID NO: 28756 - protein, 10 aa, Artificial Sequence
  Peptide Derived from Human Papillomavirus
EINDKNWKCF

SEQ ID NO: 28757 - protein, 11 aa, Artificial Sequence
  Peptide Derived from Human Papillomavirus
EINDKNWKCFF

SEQ ID NO: 28758 - protein, 11 aa, Artificial Sequence
  Peptide Derived from Human Papillomavirus
EISLNSGHKKA

SEQ ID NO: 28759 - protein, 8 aa, Artificial Sequence
  Peptide Derived from Human Papillomavirus
ELKELLQA

SEQ ID NO: 28760 - protein, 10 aa, Artificial Sequence
  Peptide Derived from Human Papillomavirus
ELLQASNKKA

SEQ ID NO: 28761 - protein, 11 aa, Artificial Sequence
  Peptide Derived from Human Papillomavirus
ELLQASNKKAA

SEQ ID NO: 28762 - protein, 8 aa, Artificial Sequence
  Peptide Derived from Human Papillomavirus
EPLADTKV

SEQ ID NO: 28763 - protein, 9 aa, Artificial Sequence
  Peptide Derived from Human Papillomavirus
EPLADTKVA

SEQ ID NO: 28764 - protein, 10 aa, Artificial Sequence
  Peptide Derived from Human Papillomavirus
EPLADTKVAM

SEQ ID NO: 28765 - protein, 11 aa, Artificial Sequence
  Peptide Derived from Human Papillomavirus
EPLADTKVAML

SEQ ID NO: 28766 - protein, 9 aa, Artificial Sequence
  Peptide Derived from Human Papillomavirus
EPPKLRSSV

SEQ ID NO: 28767 - protein, 10 aa, Artificial Sequence
  Peptide Derived from Human Papillomavirus
EPPKLRSSVA

SEQ ID NO: 28768 - protein, 11 aa, Artificial Sequence
  Peptide Derived from Human Papillomavirus
EPPKLRSSVAA

SEQ ID NO: 28769 - protein, 8 aa, Artificial Sequence
  Peptide Derived from Human Papillomavirus
EQAEQETA

SEQ ID NO: 28770 - protein, 10 aa, Artificial Sequence
  Peptide Derived from Human Papillomavirus
EQAEQETAQA

SEQ ID NO: 28771 - protein, 11 aa, Artificial Sequence
  Peptide Derived from Human Papillomavirus
EQAEQETAQAL

SEQ ID NO: 28772 - protein, 8 aa, Artificial Sequence
  Peptide Derived from Human Papillomavirus
EQETAQAL

SEQ ID NO: 28773 - protein, 9 aa, Artificial Sequence
  Peptide Derived from Human Papillomavirus
EQETAQALF

SEQ ID NO: 28774 - protein, 11 aa, Artificial Sequence
  Peptide Derived from Human Papillomavirus
EQETAQALFHA

SEQ ID NO: 28775 - protein, 9 aa, Artificial Sequence
  Peptide Derived from Human Papillomavirus
EQLSVDTDL

SEQ ID NO: 28776 - protein, 9 aa, Artificial Sequence
  Peptide Derived from Human Papillomavirus
EVEAAETQV

SEQ ID NO: 28777 - protein, 11 aa, Artificial Sequence
  Peptide Derived from Human Papillomavirus
EVEAAETQVTV

SEQ ID NO: 28778 - protein, 8 aa, Artificial Sequence
  Peptide Derived from Human Papillomavirus
EVQNDAQV

SEQ ID NO: 28779 - protein, 9 aa, Artificial Sequence
  Peptide Derived from Human Papillomavirus
EVQNDAQVL

SEQ ID NO: 28780 - protein, 11 aa, Artificial Sequence
  Peptide Derived from Human Papillomavirus
EVQNDAQVLHL

SEQ ID NO: 28781 - protein, 9 aa, Artificial Sequence
  Peptide Derived from Human Papillomavirus
EVSGDTPEW

SEQ ID NO: 28782 - protein, 10 aa, Artificial Sequence
  Peptide Derived from Human Papillomavirus
EVSGDTPEWI

SEQ ID NO: 28783 - protein, 8 aa, Artificial Sequence
  Peptide Derived from Human Papillomavirus
FIDTQLSI

SEQ ID NO: 28784 - protein, 8 aa, Artificial Sequence
  Peptide Derived from Human Papillomavirus
FIHFLQGA

SEQ ID NO: 28785 - protein, 9 aa, Artificial Sequence
  Peptide Derived from Human Papillomavirus
FIHFLQGAI

SEQ ID NO: 28786 - protein, 10 aa, Artificial Sequence
  Peptide Derived from Human Papillomavirus
FIHFLQGAII

SEQ ID NO: 28787 - protein, 8 aa, Artificial Sequence
  Peptide Derived from Human Papillomavirus
FISFLRAL

SEQ ID NO: 28788 - protein, 11 aa, Artificial Sequence
  Peptide Derived from Human Papillomavirus
FISFLRALKEF

SEQ ID NO: 28789 - protein, 11 aa, Artificial Sequence
  Peptide Derived from Human Papillomavirus
FLKGTPKKNCI

SEQ ID NO: 28790 - protein, 8 aa, Artificial Sequence
  Peptide Derived from Human Papillomavirus
FLKSNCQA

SEQ ID NO: 28791 - protein, 10 aa, Artificial Sequence
  Peptide Derived from Human Papillomavirus
FLKSNCQAKY

SEQ ID NO: 28792 - protein, 11 aa, Artificial Sequence
  Peptide Derived from Human Papillomavirus
FLKSNCQAKYL

SEQ ID NO: 28793 - protein, 9 aa, Artificial Sequence
  Peptide Derived from Human Papillomavirus
FLQGAIISF

SEQ ID NO: 28794 - protein, 10 aa, Artificial Sequence
  Peptide Derived from Human Papillomavirus
FLQGAIISFV

SEQ ID NO: 28795 - protein, 8 aa, Artificial Sequence
  Peptide Derived from Human Papillomavirus
FLRALKEF

SEQ ID NO: 28796 - protein, 9 aa, Artificial Sequence
  Peptide Derived from Human Papillomavirus
FLRALKEFL

SEQ ID NO: 28797 - protein, 9 aa, Artificial Sequence
  Peptide Derived from Human Papillomavirus
FLRYQGVEF

SEQ ID NO: 28798 - protein, 10 aa, Artificial Sequence
  Peptide Derived from Human Papillomavirus
FLRYQGVEFI

SEQ ID NO: 28799 - protein, 10 aa, Artificial Sequence
  Peptide Derived from Human Papillomavirus
FPFDKNGNPV

SEQ ID NO: 28800 - protein, 11 aa, Artificial Sequence
  Peptide Derived from Human Papillomavirus
FPFDKNGNPVY

SEQ ID NO: 28801 - protein, 8 aa, Artificial Sequence
  Peptide Derived from Human Papillomavirus
FVNSNSHF

SEQ ID NO: 28802 - protein, 9 aa, Artificial Sequence
  Peptide Derived from Human Papillomavirus
FVNSNSHFW

SEQ ID NO: 28803 - protein, 10 aa, Artificial Sequence
  Peptide Derived from Human Papillomavirus
FVNSNSHFWL

SEQ ID NO: 28804 - protein, 9 aa, Artificial Sequence
  Peptide Derived from Human Papillomavirus
GIDDSNFDL

SEQ ID NO: 28805 - protein, 10 aa, Artificial Sequence
  Peptide Derived from Human Papillomavirus
GIPFGTFKCV

SEQ ID NO: 28806 - protein, 8 aa, Artificial Sequence
  Peptide Derived from Human Papillomavirus
GISNISEV

SEQ ID NO: 28807 - protein, 8 aa, Artificial Sequence
  Peptide Derived from Human Papillomavirus
GLSFTDLV

SEQ ID NO: 28808 - protein, 11 aa, Artificial Sequence
  Peptide Derived from Human Papillomavirus
GLSFTDLVRNF

SEQ ID NO: 28809 - protein, 8 aa, Artificial Sequence
  Peptide Derived from Human Papillomavirus
GLSTLLHV

SEQ ID NO: 28810 - protein, 8 aa, Artificial Sequence
  Peptide Derived from Human Papillomavirus
GMSFIHFL

SEQ ID NO: 28811 - protein, 11 aa, Artificial Sequence
  Peptide Derived from Human Papillomavirus
GMSFIHFLQGA

SEQ ID NO: 28812 - protein, 9 aa, Artificial Sequence
  Peptide Derived from Human Papillomavirus
GPANTGKSY

SEQ ID NO: 28813 - protein, 10 aa, Artificial Sequence
  Peptide Derived from Human Papillomavirus
GPANTGKSYF

SEQ ID NO: 28814 - protein, 8 aa, Artificial Sequence
  Peptide Derived from Human Papillomavirus
GVEFISFL

SEQ ID NO: 28815 - protein, 10 aa, Artificial Sequence
  Peptide Derived from Human Papillomavirus
GVEFISFLRA

SEQ ID NO: 28816 - protein, 11 aa, Artificial Sequence
  Peptide Derived from Human Papillomavirus
GVEFISFLRAL

SEQ ID NO: 28817 - protein, 8 aa, Artificial Sequence
  Peptide Derived from Human Papillomavirus
GVLILALL

SEQ ID NO: 28818 - protein, 10 aa, Artificial Sequence
  Peptide Derived from Human Papillomavirus
GVLILALLRY

SEQ ID NO: 28819 - protein, 10 aa, Artificial Sequence
  Peptide Derived from Human Papillomavirus
GVNPTVAEGF

SEQ ID NO: 28820 - protein, 9 aa, Artificial Sequence
  Peptide Derived from Human Papillomavirus
HIQCLDCKW

SEQ ID NO: 28821 - protein, 11 aa, Artificial Sequence
  Peptide Derived from Human Papillomavirus
HIQCLDCKWGV

SEQ ID NO: 28822 - protein, 8 aa, Artificial Sequence
  Peptide Derived from Human Papillomavirus
HLLKRKFA

SEQ ID NO: 28823 - protein, 8 aa, Artificial Sequence
  Peptide Derived from Human Papillomavirus
HVPETCML

SEQ ID NO: 28824 - protein, 9 aa, Artificial Sequence
  Peptide Derived from Human Papillomavirus
HVPETCMLI

SEQ ID NO: 28825 - protein, 11 aa, Artificial Sequence
  Peptide Derived from Human Papillomavirus
IIQHGIDDSNF

SEQ ID NO: 28826 - protein, 11 aa, Artificial Sequence
  Peptide Derived from Human Papillomavirus
IISFVNSNSHF

SEQ ID NO: 28827 - protein, 10 aa, Artificial Sequence
  Peptide Derived from Human Papillomavirus
ILLTSNIDPA

SEQ ID NO: 28828 - protein, 9 aa, Artificial Sequence
  Peptide Derived from Human Papillomavirus
IPFGTFKCV

SEQ ID NO: 28829 - protein, 8 aa, Artificial Sequence
  Peptide Derived from Human Papillomavirus
IQCLDCKW

SEQ ID NO: 28830 - protein, 10 aa, Artificial Sequence
  Peptide Derived from Human Papillomavirus
IQCLDCKWGV

SEQ ID NO: 28831 - protein, 11 aa, Artificial Sequence
  Peptide Derived from Human Papillomavirus
IQCLDCKWGVL

SEQ ID NO: 28832 - protein, 10 aa, Artificial Sequence
  Peptide Derived from Human Papillomavirus
IQHGIDDSNF

SEQ ID NO: 28833 - protein, 11 aa, Artificial Sequence
  Peptide Derived from Human Papillomavirus
IQRLTIIQHGI

SEQ ID NO: 28834 - protein, 9 aa, Artificial Sequence
  Peptide Derived from Human Papillomavirus
IVEKKTGDV

SEQ ID NO: 28835 - protein, 10 aa, Artificial Sequence
  Peptide Derived from Human Papillomavirus
IVEKKTGDVI

SEQ ID NO: 28836 - protein, 10 aa, Artificial Sequence
  Peptide Derived from Human Papillomavirus
IVQFLRYQGV

SEQ ID NO: 28837 - protein, 8 aa, Artificial Sequence
  Peptide Derived from Human Papillomavirus
KIDEGGDW

SEQ ID NO: 28838 - protein, 11 aa, Artificial Sequence
  Peptide Derived from Human Papillomavirus
KIDEGGDWRPI

SEQ ID NO: 28839 - protein, 8 aa, Artificial Sequence
  Peptide Derived from Human Papillomavirus
KLRSSVAA

SEQ ID NO: 28840 - protein, 9 aa, Artificial Sequence
  Peptide Derived from Human Papillomavirus
KLRSSVAAL

SEQ ID NO: 28841 - protein, 10 aa, Artificial Sequence
  Peptide Derived from Human Papillomavirus
KLRSSVAALY

SEQ ID NO: 28842 - protein, 11 aa, Artificial Sequence
  Peptide Derived from Human Papillomavirus
KLRSSVAALYW

SEQ ID NO: 28843 - protein, 9 aa, Artificial Sequence
  Peptide Derived from Human Papillomavirus
KPATLYAHI

SEQ ID NO: 28844 - protein, 11 aa, Artificial Sequence
  Peptide Derived from Human Papillomavirus
KPLLQLKCPPI

SEQ ID NO: 28845 - protein, 8 aa, Artificial Sequence
  Peptide Derived from Human Papillomavirus
KVAMLDDA

SEQ ID NO: 28846 - protein, 11 aa, Artificial Sequence
  Peptide Derived from Human Papillomavirus
LIEPPKLRSSV

SEQ ID NO: 28847 - protein, 8 aa, Artificial Sequence
  Peptide Derived from Human Papillomavirus
LIKPATLY

SEQ ID NO: 28848 - protein, 9 aa, Artificial Sequence
  Peptide Derived from Human Papillomavirus
LIKPATLYA

SEQ ID NO: 28849 - protein, 11 aa, Artificial Sequence
  Peptide Derived from Human Papillomavirus
LIKPATLYAHI

SEQ ID NO: 28850 - protein, 8 aa, Artificial Sequence
  Peptide Derived from Human Papillomavirus
LILALLRY

SEQ ID NO: 28851 - protein, 9 aa, Artificial Sequence
  Peptide Derived from Human Papillomavirus
LLHVPETCM

SEQ ID NO: 28852 - protein, 10 aa, Artificial Sequence
  Peptide Derived from Human Papillomavirus
LLHVPETCML

SEQ ID NO: 28853 - protein, 11 aa, Artificial Sequence
  Peptide Derived from Human Papillomavirus
LLHVPETCMLI

SEQ ID NO: 28854 - protein, 9 aa, Artificial Sequence
  Peptide Derived from Human Papillomavirus
LLQASNKKA

SEQ ID NO: 28855 - protein, 10 aa, Artificial Sequence
  Peptide Derived from Human Papillomavirus
LLQASNKKAA

SEQ ID NO: 28856 - protein, 11 aa, Artificial Sequence
  Peptide Derived from Human Papillomavirus
LLQASNKKAAM

SEQ ID NO: 28857 - protein, 9 aa, Artificial Sequence
  Peptide Derived from Human Papillomavirus
LLQLKCPPI

SEQ ID NO: 28858 - protein, 10 aa, Artificial Sequence
  Peptide Derived from Human Papillomavirus
LLQLKCPPIL

SEQ ID NO: 28859 - protein, 11 aa, Artificial Sequence
  Peptide Derived from Human Papillomavirus
LLQLKCPPILL

SEQ ID NO: 28860 - protein, 11 aa, Artificial Sequence
  Peptide Derived from Human Papillomavirus
LLRYKCGKNRL

SEQ ID NO: 28861 - protein, 9 aa, Artificial Sequence
  Peptide Derived from Human Papillomavirus
LLTSNIDPA

SEQ ID NO: 28862 - protein, 8 aa, Artificial Sequence
  Peptide Derived from Human Papillomavirus
LQASNKKA

SEQ ID NO: 28863 - protein, 9 aa, Artificial Sequence
  Peptide Derived from Human Papillomavirus
LQASNKKAA

SEQ ID NO: 28864 - protein, 10 aa, Artificial Sequence
  Peptide Derived from Human Papillomavirus
LQASNKKAAM

SEQ ID NO: 28865 - protein, 11 aa, Artificial Sequence
  Peptide Derived from Human Papillomavirus
LQASNKKAAML

SEQ ID NO: 28866 - protein, 8 aa, Artificial Sequence
  Peptide Derived from Human Papillomavirus
LQGAIISF

SEQ ID NO: 28867 - protein, 9 aa, Artificial Sequence
  Peptide Derived from Human Papillomavirus
LQGAIISFV

SEQ ID NO: 28868 - protein, 8 aa, Artificial Sequence
  Peptide Derived from Human Papillomavirus
LQLKCPPI

SEQ ID NO: 28869 - protein, 9 aa, Artificial Sequence
  Peptide Derived from Human Papillomavirus
LQLKCPPIL

SEQ ID NO: 28870 - protein, 10 aa, Artificial Sequence
  Peptide Derived from Human Papillomavirus
LQLKCPPILL

SEQ ID NO: 28871 - protein, 8 aa, Artificial Sequence
  Peptide Derived from Human Papillomavirus
MLAVFKDI

SEQ ID NO: 28872 - protein, 9 aa, Artificial Sequence
  Peptide Derived from Human Papillomavirus
MLAVFKDIY

SEQ ID NO: 28873 - protein, 11 aa, Artificial Sequence
  Peptide Derived from Human Papillomavirus
MLAVFKDIYGL

SEQ ID NO: 28874 - protein, 10 aa, Artificial Sequence
  Peptide Derived from Human Papillomavirus
MLDDATHTCW

SEQ ID NO: 28875 - protein, 8 aa, Artificial Sequence
  Peptide Derived from Human Papillomavirus
MLIEPPKL

SEQ ID NO: 28876 - protein, 9 aa, Artificial Sequence
  Peptide Derived from Human Papillomavirus
MVDFIDTQL

SEQ ID NO: 28877 - protein, 11 aa, Artificial Sequence
  Peptide Derived from Human Papillomavirus
MVDFIDTQLSI

SEQ ID NO: 28878 - protein, 10 aa, Artificial Sequence
  Peptide Derived from Human Papillomavirus
MVQWAFDNDL

SEQ ID NO: 28879 - protein, 10 aa, Artificial Sequence
  Peptide Derived from Human Papillomavirus
NIDPAKDNKW

SEQ ID NO: 28880 - protein, 8 aa, Artificial Sequence
  Peptide Derived from Human Papillomavirus
NMSQWIKY

SEQ ID NO: 28881 - protein, 8 aa, Artificial Sequence
  Peptide Derived from Human Papillomavirus
NPTVAEGF

SEQ ID NO: 28882 - protein, 11 aa, Artificial Sequence
  Peptide Derived from Human Papillomavirus
NPTVAEGFKTL

SEQ ID NO: 28883 - protein, 11 aa, Artificial Sequence
  Peptide Derived from Human Papillomavirus
NPVYEINDKNW

SEQ ID NO: 28884 - protein, 8 aa, Artificial Sequence
  Peptide Derived from Human Papillomavirus
NVDPHCSI

SEQ ID NO: 28885 - protein, 11 aa, Artificial Sequence
  Peptide Derived from Human Papillomavirus
NVDPHCSITEL

SEQ ID NO: 28886 - protein, 8 aa, Artificial Sequence
  Peptide Derived from Human Papillomavirus
PILLTSNI

SEQ ID NO: 28887 - protein, 11 aa, Artificial Sequence
  Peptide Derived from Human Papillomavirus
PILLTSNIDPA

SEQ ID NO: 28888 - protein, 11 aa, Artificial Sequence
  Peptide Derived from Human Papillomavirus
PISIDRKHKPL

SEQ ID NO: 28889 - protein, 8 aa, Artificial Sequence
  Peptide Derived from Human Papillomavirus
PIVQFLRY

SEQ ID NO: 28890 - protein, 11 aa, Artificial Sequence
  Peptide Derived from Human Papillomavirus
PIVQFLRYQGV

SEQ ID NO: 28891 - protein, 8 aa, Artificial Sequence
  Peptide Derived from Human Papillomavirus
PLADTKVA

SEQ ID NO: 28892 - protein, 9 aa, Artificial Sequence
  Peptide Derived from Human Papillomavirus
PLADTKVAM

SEQ ID NO: 28893 - protein, 10 aa, Artificial Sequence
  Peptide Derived from Human Papillomavirus
PLADTKVAML

SEQ ID NO: 28894 - protein, 8 aa, Artificial Sequence
  Peptide Derived from Human Papillomavirus
PLGEQLSV

SEQ ID NO: 28895 - protein, 10 aa, Artificial Sequence
  Peptide Derived from Human Papillomavirus
PLLQLKCPPI

SEQ ID NO: 28896 - protein, 11 aa, Artificial Sequence
  Peptide Derived from Human Papillomavirus
PLLQLKCPPIL

SEQ ID NO: 28897 - protein, 9 aa, Artificial Sequence
  Peptide Derived from Human Papillomavirus
PPILLTSNI

SEQ ID NO: 28898 - protein, 8 aa, Artificial Sequence
  Peptide Derived from Human Papillomavirus
PPKLRSSV

SEQ ID NO: 28899 - protein, 9 aa, Artificial Sequence
  Peptide Derived from Human Papillomavirus
PPKLRSSVA

SEQ ID NO: 28900 - protein, 10 aa, Artificial Sequence
  Peptide Derived from Human Papillomavirus
PPKLRSSVAA

SEQ ID NO: 28901 - protein, 11 aa, Artificial Sequence
  Peptide Derived from Human Papillomavirus
PPKLRSSVAAL

SEQ ID NO: 28902 - protein, 10 aa, Artificial Sequence
  Peptide Derived from Human Papillomavirus
PVYEINDKNW

SEQ ID NO: 28903 - protein, 9 aa, Artificial Sequence
  Peptide Derived from Human Papillomavirus
QLADCNSNA

SEQ ID NO: 28904 - protein, 10 aa, Artificial Sequence
  Peptide Derived from Human Papillomavirus
QLADCNSNAA

SEQ ID NO: 28905 - protein, 11 aa, Artificial Sequence
  Peptide Derived from Human Papillomavirus
QLADCNSNAAA

SEQ ID NO: 28906 - protein, 8 aa, Artificial Sequence
  Peptide Derived from Human Papillomavirus
QLKCPPIL

SEQ ID NO: 28907 - protein, 9 aa, Artificial Sequence
  Peptide Derived from Human Papillomavirus
QLKCPPILL

SEQ ID NO: 28908 - protein, 8 aa, Artificial Sequence
  Peptide Derived from Human Papillomavirus
QLSICEQA

SEQ ID NO: 28909 - protein, 8 aa, Artificial Sequence
  Peptide Derived from Human Papillomavirus
QLSVDTDL

SEQ ID NO: 28910 - protein, 8 aa, Artificial Sequence
  Peptide Derived from Human Papillomavirus
QMNMSQWI

SEQ ID NO: 28911 - protein, 10 aa, Artificial Sequence
  Peptide Derived from Human Papillomavirus
QMNMSQWIKY

SEQ ID NO: 28912 - protein, 10 aa, Artificial Sequence
  Peptide Derived from Human Papillomavirus
QVLHLLKRKF

SEQ ID NO: 28913 - protein, 11 aa, Artificial Sequence
  Peptide Derived from Human Papillomavirus
QVLHLLKRKFA

SEQ ID NO: 28914 - protein, 8 aa, Artificial Sequence
  Peptide Derived from Human Papillomavirus
QVTVNTNA

SEQ ID NO: 28915 - protein, 11 aa, Artificial Sequence
  Peptide Derived from Human Papillomavirus
RLDLHEDDEDA

SEQ ID NO: 28916 - protein, 10 aa, Artificial Sequence
  Peptide Derived from Human Papillomavirus
RLFTISDSGY

SEQ ID NO: 28917 - protein, 9 aa, Artificial Sequence
  Peptide Derived from Human Papillomavirus
RLTIIQHGI

SEQ ID NO: 28918 - protein, 8 aa, Artificial Sequence
  Peptide Derived from Human Papillomavirus
RLTVAKGL

SEQ ID NO: 28919 - protein, 11 aa, Artificial Sequence
  Peptide Derived from Human Papillomavirus
RLTVAKGLSTL

SEQ ID NO: 28920 - protein, 9 aa, Artificial Sequence
  Peptide Derived from Human Papillomavirus
RPIVQFLRY

SEQ ID NO: 28921 - protein, 8 aa, Artificial Sequence
  Peptide Derived from Human Papillomavirus
RQMNMSQW

SEQ ID NO: 28922 - protein, 9 aa, Artificial Sequence
  Peptide Derived from Human Papillomavirus
RQMNMSQWI

SEQ ID NO: 28923 - protein, 11 aa, Artificial Sequence
  Peptide Derived from Human Papillomavirus
RQMNMSQWIKY

SEQ ID NO: 28924 - protein, 10 aa, Artificial Sequence
  Peptide Derived from Human Papillomavirus
RVTVFTFPHA

SEQ ID NO: 28925 - protein, 11 aa, Artificial Sequence
  Peptide Derived from Human Papillomavirus
RVTVFTFPHAF

SEQ ID NO: 28926 - protein, 11 aa, Artificial Sequence
  Peptide Derived from Human Papillomavirus
SICEQAEQETA

SEQ ID NO: 28927 - protein, 9 aa, Artificial Sequence
  Peptide Derived from Human Papillomavirus
SIDRKHKPL

SEQ ID NO: 28928 - protein, 10 aa, Artificial Sequence
  Peptide Derived from Human Papillomavirus
SIDRKHKPLL

SEQ ID NO: 28929 - protein, 8 aa, Artificial Sequence
  Peptide Derived from Human Papillomavirus
SITELKEL

SEQ ID NO: 28930 - protein, 9 aa, Artificial Sequence
  Peptide Derived from Human Papillomavirus
SITELKELL

SEQ ID NO: 28931 - protein, 11 aa, Artificial Sequence
  Peptide Derived from Human Papillomavirus
SITELKELLQA

SEQ ID NO: 28932 - protein, 9 aa, Artificial Sequence
  Peptide Derived from Human Papillomavirus
SLNSGHKKA

SEQ ID NO: 28933 - protein, 9 aa, Artificial Sequence
  Peptide Derived from Human Papillomavirus
SPLGEQLSV

SEQ ID NO: 28934 - protein, 9 aa, Artificial Sequence
  Peptide Derived from Human Papillomavirus
SPRLQEISL

SEQ ID NO: 28935 - protein, 11 aa, Artificial Sequence
  Peptide Derived from Human Papillomavirus
SQWIKYRCSKI

SEQ ID NO: 28936 - protein, 8 aa, Artificial Sequence
  Peptide Derived from Human Papillomavirus
SVAALYWY

SEQ ID NO: 28937 - protein, 10 aa, Artificial Sequence
  Peptide Derived from Human Papillomavirus
SVDTDLSPRL

SEQ ID NO: 28938 - protein, 10 aa, Artificial Sequence
  Peptide Derived from Human Papillomavirus
TIVEKKTGDV

SEQ ID NO: 28939 - protein, 11 aa, Artificial Sequence
  Peptide Derived from Human Papillomavirus
TIVEKKTGDVI

SEQ ID NO: 28940 - protein, 8 aa, Artificial Sequence
  Peptide Derived from Human Papillomavirus
TLIKPATL

SEQ ID NO: 28941 - protein, 9 aa, Artificial Sequence
  Peptide Derived from Human Papillomavirus
TLIKPATLY

SEQ ID NO: 28942 - protein, 10 aa, Artificial Sequence
  Peptide Derived from Human Papillomavirus
TLIKPATLYA

SEQ ID NO: 28943 - protein, 10 aa, Artificial Sequence
  Peptide Derived from Human Papillomavirus
TLLHVPETCM

SEQ ID NO: 28944 - protein, 11 aa, Artificial Sequence
  Peptide Derived from Human Papillomavirus
TLLHVPETCML

SEQ ID NO: 28945 - protein, 9 aa, Artificial Sequence
  Peptide Derived from Human Papillomavirus
TLYAHIQCL

SEQ ID NO: 28946 - protein, 8 aa, Artificial Sequence
  Peptide Derived from Human Papillomavirus
TPEWIQRL

SEQ ID NO: 28947 - protein, 10 aa, Artificial Sequence
  Peptide Derived from Human Papillomavirus
TPEWIQRLTI

SEQ ID NO: 28948 - protein, 11 aa, Artificial Sequence
  Peptide Derived from Human Papillomavirus
TPEWIQRLTII

SEQ ID NO: 28949 - protein, 8 aa, Artificial Sequence
  Peptide Derived from Human Papillomavirus
TPKKNCIL

SEQ ID NO: 28950 - protein, 9 aa, Artificial Sequence
  Peptide Derived from Human Papillomavirus
TPKKNCILL

SEQ ID NO: 28951 - protein, 10 aa, Artificial Sequence
  Peptide Derived from Human Papillomavirus
TPKKNCILLY

SEQ ID NO: 28952 - protein, 9 aa, Artificial Sequence
  Peptide Derived from Human Papillomavirus
TQLSICEQA

SEQ ID NO: 28953 - protein, 9 aa, Artificial Sequence
  Peptide Derived from Human Papillomavirus
TQVTVNTNA

SEQ ID NO: 28954 - protein, 9 aa, Artificial Sequence
  Peptide Derived from Human Papillomavirus
TVAEGFKTL

SEQ ID NO: 28955 - protein, 10 aa, Artificial Sequence
  Peptide Derived from Human Papillomavirus
TVAEGFKTLI

SEQ ID NO: 28956 - protein, 9 aa, Artificial Sequence
  Peptide Derived from Human Papillomavirus
TVAKGLSTL

SEQ ID NO: 28957 - protein, 10 aa, Artificial Sequence
  Peptide Derived from Human Papillomavirus
TVAKGLSTLL

SEQ ID NO: 28958 - protein, 8 aa, Artificial Sequence
  Peptide Derived from Human Papillomavirus
TVFTFPHA

SEQ ID NO: 28959 - protein, 9 aa, Artificial Sequence
  Peptide Derived from Human Papillomavirus
TVFTFPHAF

SEQ ID NO: 28960 - protein, 11 aa, Artificial Sequence
  Peptide Derived from Human Papillomavirus
TVFTFPHAFPF

SEQ ID NO: 28961 - protein, 10 aa, Artificial Sequence
  Peptide Derived from Human Papillomavirus
VISDDEDETA

SEQ ID NO: 28962 - protein, 9 aa, Artificial Sequence
  Peptide Derived from Human Papillomavirus
VLHLLKRKF

SEQ ID NO: 28963 - protein, 10 aa, Artificial Sequence
  Peptide Derived from Human Papillomavirus
VLHLLKRKFA

SEQ ID NO: 28964 - protein, 9 aa, Artificial Sequence
  Peptide Derived from Human Papillomavirus
VLILALLRY

SEQ ID NO: 28965 - protein, 11 aa, Artificial Sequence
  Peptide Derived from Human Papillomavirus
VMAIFGVNPTV

SEQ ID NO: 28966 - protein, 9 aa, Artificial Sequence
  Peptide Derived from Human Papillomavirus
VMCRHYKRA

SEQ ID NO: 28967 - protein, 8 aa, Artificial Sequence
  Peptide Derived from Human Papillomavirus
VPETCMLI

SEQ ID NO: 28968 - protein, 9 aa, Artificial Sequence
  Peptide Derived from Human Papillomavirus
VQFLRYQGV

SEQ ID NO: 28969 - protein, 11 aa, Artificial Sequence
  Peptide Derived from Human Papillomavirus
VQFLRYQGVEF

SEQ ID NO: 28970 - protein, 8 aa, Artificial Sequence
  Peptide Derived from Human Papillomavirus
VQNDAQVL

SEQ ID NO: 28971 - protein, 10 aa, Artificial Sequence
  Peptide Derived from Human Papillomavirus
VQNDAQVLHL

SEQ ID NO: 28972 - protein, 11 aa, Artificial Sequence
  Peptide Derived from Human Papillomavirus
VQNDAQVLHLL

SEQ ID NO: 28973 - protein, 9 aa, Artificial Sequence
  Peptide Derived from Human Papillomavirus
VQWAFDNDL

SEQ ID NO: 28974 - protein, 9 aa, Artificial Sequence
  Peptide Derived from Human Papillomavirus
WIKYRCSKI

SEQ ID NO: 28975 - protein, 8 aa, Artificial Sequence
  Peptide Derived from Human Papillomavirus
WIQRLTII

SEQ ID NO: 28976 - protein, 10 aa, Artificial Sequence
  Peptide Derived from Human Papillomavirus
WLEPLADTKV

SEQ ID NO: 28977 - protein, 11 aa, Artificial Sequence
  Peptide Derived from Human Papillomavirus
WLEPLADTKVA

SEQ ID NO: 28978 - protein, 8 aa, Artificial Sequence
  Peptide Derived from Human Papillomavirus
WPYLESRV

SEQ ID NO: 28979 - protein, 10 aa, Artificial Sequence
  Peptide Derived from Human Papillomavirus
WPYLESRVTV

SEQ ID NO: 28980 - protein, 11 aa, Artificial Sequence
  Peptide Derived from Human Papillomavirus
WPYLESRVTVF

SEQ ID NO: 28981 - protein, 8 aa, Artificial Sequence
  Peptide Derived from Human Papillomavirus
WVMAIFGV

SEQ ID NO: 28982 - protein, 8 aa, Artificial Sequence
  Peptide Derived from Human Papillomavirus
YLESRVTV

SEQ ID NO: 28983 - protein, 9 aa, Artificial Sequence
  Peptide Derived from Human Papillomavirus
YLESRVTVF

SEQ ID NO: 28984 - protein, 11 aa, Artificial Sequence
  Peptide Derived from Human Papillomavirus
YLESRVTVFTF

SEQ ID NO: 28985 - protein, 8 aa, Artificial Sequence
  Peptide Derived from Human Papillomavirus
YLKDCAVM

SEQ ID NO: 28986 - protein, 11 aa, Artificial Sequence
  Peptide Derived from Human Papillomavirus
YMRNALDGNPI

SEQ ID NO: 28987 - protein, 9 aa, Artificial Sequence
  Peptide Derived from Human Papillomavirus
YQGVEFISF

SEQ ID NO: 28988 - protein, 10 aa, Artificial Sequence
  Peptide Derived from Human Papillomavirus
YQGVEFISFL

SEQ ID NO: 28989 - protein, 8 aa, Artificial Sequence
  Peptide Derived from Human Papillomavirus
AIELQMAL

SEQ ID NO: 28990 - protein, 11 aa, Artificial Sequence
  Peptide Derived from Human Papillomavirus
AIELQMALKGL

SEQ ID NO: 28991 - protein, 11 aa, Artificial Sequence
  Peptide Derived from Human Papillomavirus
AILFTAREHGI

SEQ ID NO: 28992 - protein, 10 aa, Artificial Sequence
  Peptide Derived from Human Papillomavirus
ALKGLAQSKY

SEQ ID NO: 28993 - protein, 10 aa, Artificial Sequence
  Peptide Derived from Human Papillomavirus
ALQDKILDHY

SEQ ID NO: 28994 - protein, 10 aa, Artificial Sequence
  Peptide Derived from Human Papillomavirus
AQSKYNNEEW

SEQ ID NO: 28995 - protein, 9 aa, Artificial Sequence
  Peptide Derived from Human Papillomavirus
CLRYRLRKY

SEQ ID NO: 28996 - protein, 10 aa, Artificial Sequence
  Peptide Derived from Human Papillomavirus
CLRYRLRKYA

SEQ ID NO: 28997 - protein, 10 aa, Artificial Sequence
  Peptide Derived from Human Papillomavirus
CMNYVVWDSI

SEQ ID NO: 28998 - protein, 11 aa, Artificial Sequence
  Peptide Derived from Human Papillomavirus
CMNYVVWDSIY

SEQ ID NO: 28999 - protein, 8 aa, Artificial Sequence
  Peptide Derived from Human Papillomavirus
CVSYWGVY

SEQ ID NO: 29000 - protein, 9 aa, Artificial Sequence
  Peptide Derived from Human Papillomavirus
CVSYWGVYY

SEQ ID NO: 29001 - protein, 10 aa, Artificial Sequence
  Peptide Derived from Human Papillomavirus
CVSYWGVYYI

SEQ ID NO: 29002 - protein, 8 aa, Artificial Sequence
  Peptide Derived from Human Papillomavirus
DINSQISY

SEQ ID NO: 29003 - protein, 9 aa, Artificial Sequence
  Peptide Derived from Human Papillomavirus
DINSQISYW

SEQ ID NO: 29004 - protein, 11 aa, Artificial Sequence
  Peptide Derived from Human Papillomavirus
DINSQISYWQL

SEQ ID NO: 29005 - protein, 9 aa, Artificial Sequence
  Peptide Derived from Human Papillomavirus
DVVTIPNSV

SEQ ID NO: 29006 - protein, 11 aa, Artificial Sequence
  Peptide Derived from Human Papillomavirus
DVVTIPNSVQI

SEQ ID NO: 29007 - protein, 8 aa, Artificial Sequence
  Peptide Derived from Human Papillomavirus
EISSTWHW

SEQ ID NO: 29008 - protein, 9 aa, Artificial Sequence
  Peptide Derived from Human Papillomavirus
ELQMALKGL

SEQ ID NO: 29009 - protein, 10 aa, Artificial Sequence
  Peptide Derived from Human Papillomavirus
ELQMALKGLA

SEQ ID NO: 29010 - protein, 11 aa, Artificial Sequence
  Peptide Derived from Human Papillomavirus
ELWNTEPSQCF

SEQ ID NO: 29011 - protein, 11 aa, Artificial Sequence
  Peptide Derived from Human Papillomavirus
EQHHGRVNTHV

SEQ ID NO: 29012 - protein, 8 aa, Artificial Sequence
  Peptide Derived from Human Papillomavirus
EVQRNTFL

SEQ ID NO: 29013 - protein, 10 aa, Artificial Sequence
  Peptide Derived from Human Papillomavirus
EVQRNTFLDV

SEQ ID NO: 29014 - protein, 11 aa, Artificial Sequence
  Peptide Derived from Human Papillomavirus
EVQRNTFLDVV

SEQ ID NO: 29015 - protein, 8 aa, Artificial Sequence
  Peptide Derived from Human Papillomavirus
EVQYGGNV

SEQ ID NO: 29016 - protein, 9 aa, Artificial Sequence
  Peptide Derived from Human Papillomavirus
EVQYGGNVI

SEQ ID NO: 29017 - protein, 11 aa, Artificial Sequence
  Peptide Derived from Human Papillomavirus
FLDVVTIPNSV

SEQ ID NO: 29018 - protein, 11 aa, Artificial Sequence
  Peptide Derived from Human Papillomavirus
GILTVTYNSEV

SEQ ID NO: 29019 - protein, 9 aa, Artificial Sequence
  Peptide Derived from Human Papillomavirus
GITKLNHQV

SEQ ID NO: 29020 - protein, 10 aa, Artificial Sequence
  Peptide Derived from Human Papillomavirus
GITKLNHQVV

SEQ ID NO: 29021 - protein, 8 aa, Artificial Sequence
  Peptide Derived from Human Papillomavirus
GIWDKTAA

SEQ ID NO: 29022 - protein, 10 aa, Artificial Sequence
  Peptide Derived from Human Papillomavirus
GIWDKTAACV

SEQ ID NO: 29023 - protein, 10 aa, Artificial Sequence
  Peptide Derived from Human Papillomavirus
GLTEQHHGRV

SEQ ID NO: 29024 - protein, 9 aa, Artificial Sequence
  Peptide Derived from Human Papillomavirus
HLKGDKNSL

SEQ ID NO: 29025 - protein, 9 aa, Artificial Sequence
  Peptide Derived from Human Papillomavirus
HQVVPPINI

SEQ ID NO: 29026 - protein, 11 aa, Artificial Sequence
  Peptide Derived from Human Papillomavirus
IIHLKGDKNSL

SEQ ID NO: 29027 - protein, 10 aa, Artificial Sequence
  Peptide Derived from Human Papillomavirus
ILFTAREHGI

SEQ ID NO: 29028 - protein, 10 aa, Artificial Sequence
  Peptide Derived from Human Papillomavirus
ILTVTYNSEV

SEQ ID NO: 29029 - protein, 9 aa, Artificial Sequence
  Peptide Derived from Human Papillomavirus
IPNSVQISV

SEQ ID NO: 29030 - protein, 11 aa, Artificial Sequence
  Peptide Derived from Human Papillomavirus
IPNSVQISVGY

SEQ ID NO: 29031 - protein, 8 aa, Artificial Sequence
  Peptide Derived from Human Papillomavirus
IVRQLQHA

SEQ ID NO: 29032 - protein, 10 aa, Artificial Sequence
  Peptide Derived from Human Papillomavirus
KLNHQVVPPI

SEQ ID NO: 29033 - protein, 9 aa, Artificial Sequence
  Peptide Derived from Human Papillomavirus
KMQTPKESL

SEQ ID NO: 29034 - protein, 8 aa, Artificial Sequence
  Peptide Derived from Human Papillomavirus
KPHIQTPA

SEQ ID NO: 29035 - protein, 10 aa, Artificial Sequence
  Peptide Derived from Human Papillomavirus
KVCSGNTTPI

SEQ ID NO: 29036 - protein, 11 aa, Artificial Sequence
  Peptide Derived from Human Papillomavirus
KVCSGNTTPII

SEQ ID NO: 29037 - protein, 8 aa, Artificial Sequence
  Peptide Derived from Human Papillomavirus
LIRLENAI

SEQ ID NO: 29038 - protein, 9 aa, Artificial Sequence
  Peptide Derived from Human Papillomavirus
LIRLENAIL

SEQ ID NO: 29039 - protein, 10 aa, Artificial Sequence
  Peptide Derived from Human Papillomavirus
LIRLENAILF

SEQ ID NO: 29040 - protein, 9 aa, Artificial Sequence
  Peptide Derived from Human Papillomavirus
LQDKILDHY

SEQ ID NO: 29041 - protein, 8 aa, Artificial Sequence
  Peptide Derived from Human Papillomavirus
LQDTCEEL

SEQ ID NO: 29042 - protein, 9 aa, Artificial Sequence
  Peptide Derived from Human Papillomavirus
LQDTCEELW

SEQ ID NO: 29043 - protein, 8 aa, Artificial Sequence
  Peptide Derived from Human Papillomavirus
LQMALKGL

SEQ ID NO: 29044 - protein, 9 aa, Artificial Sequence
  Peptide Derived from Human Papillomavirus
LQMALKGLA

SEQ ID NO: 29045 - protein, 8 aa, Artificial Sequence
  Peptide Derived from Human Papillomavirus
MQTPKESL

SEQ ID NO: 29046 - protein, 10 aa, Artificial Sequence
  Peptide Derived from Human Papillomavirus
NISKSKAHKA

SEQ ID NO: 29047 - protein, 11 aa, Artificial Sequence
  Peptide Derived from Human Papillomavirus
NISKSKAHKAI

SEQ ID NO: 29048 - protein, 9 aa, Artificial Sequence
  Peptide Derived from Human Papillomavirus
NVIDCNDSM

SEQ ID NO: 29049 - protein, 9 aa, Artificial Sequence
  Peptide Derived from Human Papillomavirus
PINISKSKA

SEQ ID NO: 29050 - protein, 10 aa, Artificial Sequence
  Peptide Derived from Human Papillomavirus
PPINISKSKA

SEQ ID NO: 29051 - protein, 9 aa, Artificial Sequence
  Peptide Derived from Human Papillomavirus
QISVGYMTI

SEQ ID NO: 29052 - protein, 8 aa, Artificial Sequence
  Peptide Derived from Human Papillomavirus
QISYWQLI

SEQ ID NO: 29053 - protein, 10 aa, Artificial Sequence
  Peptide Derived from Human Papillomavirus
QISYWQLIRL

SEQ ID NO: 29054 - protein, 9 aa, Artificial Sequence
  Peptide Derived from Human Papillomavirus
QIVRQLQHA

SEQ ID NO: 29055 - protein, 8 aa, Artificial Sequence
  Peptide Derived from Human Papillomavirus
QLIRLENA

SEQ ID NO: 29056 - protein, 9 aa, Artificial Sequence
  Peptide Derived from Human Papillomavirus
QLIRLENAI

SEQ ID NO: 29057 - protein, 10 aa, Artificial Sequence
  Peptide Derived from Human Papillomavirus
QLIRLENAIL

SEQ ID NO: 29058 - protein, 11 aa, Artificial Sequence
  Peptide Derived from Human Papillomavirus
QLIRLENAILF

SEQ ID NO: 29059 - protein, 8 aa, Artificial Sequence
  Peptide Derived from Human Papillomavirus
QMALKGLA

SEQ ID NO: 29060 - protein, 8 aa, Artificial Sequence
  Peptide Derived from Human Papillomavirus
QVVPPINI

SEQ ID NO: 29061 - protein, 8 aa, Artificial Sequence
  Peptide Derived from Human Papillomavirus
RLENAILF

SEQ ID NO: 29062 - protein, 10 aa, Artificial Sequence
  Peptide Derived from Human Papillomavirus
RLENAILFTA

SEQ ID NO: 29063 - protein, 9 aa, Artificial Sequence
  Peptide Derived from Human Papillomavirus
RLRKYADHY

SEQ ID NO: 29064 - protein, 9 aa, Artificial Sequence
  Peptide Derived from Human Papillomavirus
RLSALQDKI

SEQ ID NO: 29065 - protein, 10 aa, Artificial Sequence
  Peptide Derived from Human Papillomavirus
RLSALQDKIL

SEQ ID NO: 29066 - protein, 10 aa, Artificial Sequence
  Peptide Derived from Human Papillomavirus
RVNTHVHNPL

SEQ ID NO: 29067 - protein, 11 aa, Artificial Sequence
  Peptide Derived from Human Papillomavirus
RVNTHVHNPLL

SEQ ID NO: 29068 - protein, 10 aa, Artificial Sequence
  Peptide Derived from Human Papillomavirus
SIYYITETGI

SEQ ID NO: 29069 - protein, 11 aa, Artificial Sequence
  Peptide Derived from Human Papillomavirus
SIYYITETGIW

SEQ ID NO: 29070 - protein, 9 aa, Artificial Sequence
  Peptide Derived from Human Papillomavirus
SLKCLRYRL

SEQ ID NO: 29071 - protein, 8 aa, Artificial Sequence
  Peptide Derived from Human Papillomavirus
SLSERLSA

SEQ ID NO: 29072 - protein, 9 aa, Artificial Sequence
  Peptide Derived from Human Papillomavirus
SLSERLSAL

SEQ ID NO: 29073 - protein, 10 aa, Artificial Sequence
  Peptide Derived from Human Papillomavirus
SMCSTSDDTV

SEQ ID NO: 29074 - protein, 11 aa, Artificial Sequence
  Peptide Derived from Human Papillomavirus
SQCFKKGGKTV

SEQ ID NO: 29075 - protein, 8 aa, Artificial Sequence
  Peptide Derived from Human Papillomavirus
SQISYWQL

SEQ ID NO: 29076 - protein, 9 aa, Artificial Sequence
  Peptide Derived from Human Papillomavirus
SQISYWQLI

SEQ ID NO: 29077 - protein, 11 aa, Artificial Sequence
  Peptide Derived from Human Papillomavirus
SQISYWQLIRL

SEQ ID NO: 29078 - protein, 9 aa, Artificial Sequence
  Peptide Derived from Human Papillomavirus
SVGTPKPHI

SEQ ID NO: 29079 - protein, 8 aa, Artificial Sequence
  Peptide Derived from Human Papillomavirus
SVQISVGY

SEQ ID NO: 29080 - protein, 9 aa, Artificial Sequence
  Peptide Derived from Human Papillomavirus
SVQISVGYM

SEQ ID NO: 29081 - protein, 11 aa, Artificial Sequence
  Peptide Derived from Human Papillomavirus
SVQISVGYMTI

SEQ ID NO: 29082 - protein, 8 aa, Artificial Sequence
  Peptide Derived from Human Papillomavirus
TIPNSVQI

SEQ ID NO: 29083 - protein, 10 aa, Artificial Sequence
  Peptide Derived from Human Papillomavirus
TIPNSVQISV

SEQ ID NO: 29084 - protein, 9 aa, Artificial Sequence
  Peptide Derived from Human Papillomavirus
TLQDTCEEL

SEQ ID NO: 29085 - protein, 10 aa, Artificial Sequence
  Peptide Derived from Human Papillomavirus
TLQDTCEELW

SEQ ID NO: 29086 - protein, 10 aa, Artificial Sequence
  Peptide Derived from Human Papillomavirus
TPKESLSERL

SEQ ID NO: 29087 - protein, 10 aa, Artificial Sequence
  Peptide Derived from Human Papillomavirus
TPKPHIQTPA

SEQ ID NO: 29088 - protein, 10 aa, Artificial Sequence
  Peptide Derived from Human Papillomavirus
TQIVRQLQHA

SEQ ID NO: 29089 - protein, 8 aa, Artificial Sequence
  Peptide Derived from Human Papillomavirus
TVSATQIV

SEQ ID NO: 29090 - protein, 11 aa, Artificial Sequence
  Peptide Derived from Human Papillomavirus
TVSATQIVRQL

SEQ ID NO: 29091 - protein, 8 aa, Artificial Sequence
  Peptide Derived from Human Papillomavirus
TVTYNSEV

SEQ ID NO: 29092 - protein, 8 aa, Artificial Sequence
  Peptide Derived from Human Papillomavirus
VIDCNDSM

SEQ ID NO: 29093 - protein, 11 aa, Artificial Sequence
  Peptide Derived from Human Papillomavirus
VPPINISKSKA

SEQ ID NO: 29094 - protein, 10 aa, Artificial Sequence
  Peptide Derived from Human Papillomavirus
VQFKSECEKY

SEQ ID NO: 29095 - protein, 8 aa, Artificial Sequence
  Peptide Derived from Human Papillomavirus
VQISVGYM

SEQ ID NO: 29096 - protein, 10 aa, Artificial Sequence
  Peptide Derived from Human Papillomavirus
VQISVGYMTI

SEQ ID NO: 29097 - protein, 9 aa, Artificial Sequence
  Peptide Derived from Human Papillomavirus
VQRNTFLDV

SEQ ID NO: 29098 - protein, 10 aa, Artificial Sequence
  Peptide Derived from Human Papillomavirus
VQRNTFLDVV

SEQ ID NO: 29099 - protein, 8 aa, Artificial Sequence
  Peptide Derived from Human Papillomavirus
VQYGGNVI

SEQ ID NO: 29100 - protein, 8 aa, Artificial Sequence
  Peptide Derived from Human Papillomavirus
VVTIPNSV

SEQ ID NO: 29101 - protein, 10 aa, Artificial Sequence
  Peptide Derived from Human Papillomavirus
VVTIPNSVQI

SEQ ID NO: 29102 - protein, 8 aa, Artificial Sequence
  Peptide Derived from Human Papillomavirus
VVWDSIYY

SEQ ID NO: 29103 - protein, 9 aa, Artificial Sequence
  Peptide Derived from Human Papillomavirus
VVWDSIYYI

SEQ ID NO: 29104 - protein, 9 aa, Artificial Sequence
  Peptide Derived from Human Papillomavirus
WQLIRLENA

SEQ ID NO: 29105 - protein, 10 aa, Artificial Sequence
  Peptide Derived from Human Papillomavirus
WQLIRLENAI

SEQ ID NO: 29106 - protein, 11 aa, Artificial Sequence
  Peptide Derived from Human Papillomavirus
WQLIRLENAIL

SEQ ID NO: 29107 - protein, 9 aa, Artificial Sequence
  Peptide Derived from Human Papillomavirus
YIKDGDTTY

SEQ ID NO: 29108 - protein, 10 aa, Artificial Sequence
  Peptide Derived from Human Papillomavirus
YIKDGDTTYY

SEQ ID NO: 29109 - protein, 11 aa, Artificial Sequence
  Peptide Derived from Human Papillomavirus
YIKDGDTTYYV

SEQ ID NO: 29110 - protein, 8 aa, Artificial Sequence
  Peptide Derived from Human Papillomavirus
YITETGIW

SEQ ID NO: 29111 - protein, 11 aa, Artificial Sequence
  Peptide Derived from Human Papillomavirus
YVQFKSECEKY

SEQ ID NO: 29112 - protein, 8 aa, Artificial Sequence
  Peptide Derived from Human Papillomavirus
YVVWDSIY

SEQ ID NO: 29113 - protein, 9 aa, Artificial Sequence
  Peptide Derived from Human Papillomavirus
YVVWDSIYY

SEQ ID NO: 29114 - protein, 10 aa, Artificial Sequence
  Peptide Derived from Human Papillomavirus
YVVWDSIYYI

SEQ ID NO: 29115 - protein, 11 aa, Artificial Sequence
  Peptide Derived from Human Papillomavirus
CIAYAACHKCI

SEQ ID NO: 29116 - protein, 8 aa, Artificial Sequence
  Peptide Derived from Human Papillomavirus
CIDFYSRI

SEQ ID NO: 29117 - protein, 11 aa, Artificial Sequence
  Peptide Derived from Human Papillomavirus
CIDFYSRIREL

SEQ ID NO: 29118 - protein, 8 aa, Artificial Sequence
  Peptide Derived from Human Papillomavirus
CLRCQKPL

SEQ ID NO: 29119 - protein, 11 aa, Artificial Sequence
  Peptide Derived from Human Papillomavirus
CLRCQKPLNPA

SEQ ID NO: 29120 - protein, 8 aa, Artificial Sequence
  Peptide Derived from Human Papillomavirus
CQKPLNPA

SEQ ID NO: 29121 - protein, 8 aa, Artificial Sequence
  Peptide Derived from Human Papillomavirus
CVYCKATL

SEQ ID NO: 29122 - protein, 10 aa, Artificial Sequence
  Peptide Derived from Human Papillomavirus
DLCTELNTSL

SEQ ID NO: 29123 - protein, 10 aa, Artificial Sequence
  Peptide Derived from Human Papillomavirus
DLFIVYRDCI

SEQ ID NO: 29124 - protein, 11 aa, Artificial Sequence
  Peptide Derived from Human Papillomavirus
DLFIVYRDCIA

SEQ ID NO: 29125 - protein, 9 aa, Artificial Sequence
  Peptide Derived from Human Papillomavirus
DPTQRPYKL

SEQ ID NO: 29126 - protein, 8 aa, Artificial Sequence
  Peptide Derived from Human Papillomavirus
DQARQERL

SEQ ID NO: 29127 - protein, 8 aa, Artificial Sequence
  Peptide Derived from Human Papillomavirus
DVSIACVY

SEQ ID NO: 29128 - protein, 11 aa, Artificial Sequence
  Peptide Derived from Human Papillomavirus
DVSIACVYCKA

SEQ ID NO: 29129 - protein, 9 aa, Artificial Sequence
  Peptide Derived from Human Papillomavirus
ELNTSLQDV

SEQ ID NO: 29130 - protein, 11 aa, Artificial Sequence
  Peptide Derived from Human Papillomavirus
ELNTSLQDVSI

SEQ ID NO: 29131 - protein, 9 aa, Artificial Sequence
  Peptide Derived from Human Papillomavirus
ELRYYSNSV

SEQ ID NO: 29132 - protein, 10 aa, Artificial Sequence
  Peptide Derived from Human Papillomavirus
ELRYYSNSVY

SEQ ID NO: 29133 - protein, 10 aa, Artificial Sequence
  Peptide Derived from Human Papillomavirus
ELYNLLIRCL

SEQ ID NO: 29134 - protein, 10 aa, Artificial Sequence
  Peptide Derived from Human Papillomavirus
EVYQFAFKDL

SEQ ID NO: 29135 - protein, 11 aa, Artificial Sequence
  Peptide Derived from Human Papillomavirus
EVYQFAFKDLF

SEQ ID NO: 29136 - protein, 8 aa, Artificial Sequence
  Peptide Derived from Human Papillomavirus
FIVYRDCI

SEQ ID NO: 29137 - protein, 9 aa, Artificial Sequence
  Peptide Derived from Human Papillomavirus
FIVYRDCIA

SEQ ID NO: 29138 - protein, 10 aa, Artificial Sequence
  Peptide Derived from Human Papillomavirus
FIVYRDCIAY

SEQ ID NO: 29139 - protein, 11 aa, Artificial Sequence
  Peptide Derived from Human Papillomavirus
FIVYRDCIAYA

SEQ ID NO: 29140 - protein, 10 aa, Artificial Sequence
  Peptide Derived from Human Papillomavirus
GQCNTCCDQA

SEQ ID NO: 29141 - protein, 8 aa, Artificial Sequence
  Peptide Derived from Human Papillomavirus
HLKDKRRF

SEQ ID NO: 29142 - protein, 11 aa, Artificial Sequence
  Peptide Derived from Human Papillomavirus
HLKDKRRFHSI

SEQ ID NO: 29143 - protein, 8 aa, Artificial Sequence
  Peptide Derived from Human Papillomavirus
IVYRDCIA

SEQ ID NO: 29144 - protein, 9 aa, Artificial Sequence
  Peptide Derived from Human Papillomavirus
IVYRDCIAY

SEQ ID NO: 29145 - protein, 10 aa, Artificial Sequence
  Peptide Derived from Human Papillomavirus
IVYRDCIAYA

SEQ ID NO: 29146 - protein, 11 aa, Artificial Sequence
  Peptide Derived from Human Papillomavirus
IVYRDCIAYAA

SEQ ID NO: 29147 - protein, 8 aa, Artificial Sequence
  Peptide Derived from Human Papillomavirus
KITNTELY

SEQ ID NO: 29148 - protein, 10 aa, Artificial Sequence
  Peptide Derived from Human Papillomavirus
KITNTELYNL

SEQ ID NO: 29149 - protein, 11 aa, Artificial Sequence
  Peptide Derived from Human Papillomavirus
KITNTELYNLL

SEQ ID NO: 29150 - protein, 9 aa, Artificial Sequence
  Peptide Derived from Human Papillomavirus
KLPDLCTEL

SEQ ID NO: 29151 - protein, 11 aa, Artificial Sequence
  Peptide Derived from Human Papillomavirus
LIRCLRCQKPL

SEQ ID NO: 29152 - protein, 8 aa, Artificial Sequence
  Peptide Derived from Human Papillomavirus
LPDLCTEL

SEQ ID NO: 29153 - protein, 9 aa, Artificial Sequence
  Peptide Derived from Human Papillomavirus
LQDVSIACV

SEQ ID NO: 29154 - protein, 10 aa, Artificial Sequence
  Peptide Derived from Human Papillomavirus
LQDVSIACVY

SEQ ID NO: 29155 - protein, 9 aa, Artificial Sequence
  Peptide Derived from Human Papillomavirus
NPAEKRRHL

SEQ ID NO: 29156 - protein, 11 aa, Artificial Sequence
  Peptide Derived from Human Papillomavirus
PLNPAEKRRHL

SEQ ID NO: 29157 - protein, 8 aa, Artificial Sequence
  Peptide Derived from Human Papillomavirus
RIRELRYY

SEQ ID NO: 29158 - protein, 10 aa, Artificial Sequence
  Peptide Derived from Human Papillomavirus
RLRRRRETQV

SEQ ID NO: 29159 - protein, 8 aa, Artificial Sequence
  Peptide Derived from Human Papillomavirus
RPYKLPDL

SEQ ID NO: 29160 - protein, 9 aa, Artificial Sequence
  Peptide Derived from Human Papillomavirus
SIACVYCKA

SEQ ID NO: 29161 - protein, 11 aa, Artificial Sequence
  Peptide Derived from Human Papillomavirus
SIACVYCKATL

SEQ ID NO: 29162 - protein, 8 aa, Artificial Sequence
  Peptide Derived from Human Papillomavirus
SLQDVSIA

SEQ ID NO: 29163 - protein, 10 aa, Artificial Sequence
  Peptide Derived from Human Papillomavirus
SLQDVSIACV

SEQ ID NO: 29164 - protein, 11 aa, Artificial Sequence
  Peptide Derived from Human Papillomavirus
SLQDVSIACVY

SEQ ID NO: 29165 - protein, 10 aa, Artificial Sequence
  Peptide Derived from Human Papillomavirus
SVYGETLEKI

SEQ ID NO: 29166 - protein, 10 aa, Artificial Sequence
  Peptide Derived from Human Papillomavirus
TLEKITNTEL

SEQ ID NO: 29167 - protein, 11 aa, Artificial Sequence
  Peptide Derived from Human Papillomavirus
TLEKITNTELY

SEQ ID NO: 29168 - protein, 8 aa, Artificial Sequence
  Peptide Derived from Human Papillomavirus
TLERTEVY

SEQ ID NO: 29169 - protein, 10 aa, Artificial Sequence
  Peptide Derived from Human Papillomavirus
TLERTEVYQF

SEQ ID NO: 29170 - protein, 11 aa, Artificial Sequence
  Peptide Derived from Human Papillomavirus
TLERTEVYQFA

SEQ ID NO: 29171 - protein, 10 aa, Artificial Sequence
  Peptide Derived from Human Papillomavirus
TQRPYKLPDL

SEQ ID NO: 29172 - protein, 8 aa, Artificial Sequence
  Peptide Derived from Human Papillomavirus
YQFAFKDL

SEQ ID NO: 29173 - protein, 9 aa, Artificial Sequence
  Peptide Derived from Human Papillomavirus
YQFAFKDLF

SEQ ID NO: 29174 - protein, 10 aa, Artificial Sequence
  Peptide Derived from Human Papillomavirus
YQFAFKDLFI

SEQ ID NO: 29175 - protein, 11 aa, Artificial Sequence
  Peptide Derived from Human Papillomavirus
YQFAFKDLFIV

SEQ ID NO: 29176 - protein, 8 aa, Artificial Sequence
  Peptide Derived from Human Papillomavirus
AQLPARRA

SEQ ID NO: 29177 - protein, 10 aa, Artificial Sequence
  Peptide Derived from Human Papillomavirus
CVCCKCDGRI

SEQ ID NO: 29178 - protein, 8 aa, Artificial Sequence
  Peptide Derived from Human Papillomavirus
DLLCYEQL

SEQ ID NO: 29179 - protein, 8 aa, Artificial Sequence
  Peptide Derived from Human Papillomavirus
DLRTLQQL

SEQ ID NO: 29180 - protein, 9 aa, Artificial Sequence
  Peptide Derived from Human Papillomavirus
DLRTLQQLF

SEQ ID NO: 29181 - protein, 10 aa, Artificial Sequence
  Peptide Derived from Human Papillomavirus
DLRTLQQLFL

SEQ ID NO: 29182 - protein, 8 aa, Artificial Sequence
  Peptide Derived from Human Papillomavirus
DPVDLLCY

SEQ ID NO: 29183 - protein, 11 aa, Artificial Sequence
  Peptide Derived from Human Papillomavirus
DPVDLLCYEQL

SEQ ID NO: 29184 - protein, 8 aa, Artificial Sequence
  Peptide Derived from Human Papillomavirus
ELDPVDLL

SEQ ID NO: 29185 - protein, 10 aa, Artificial Sequence
  Peptide Derived from Human Papillomavirus
ELDPVDLLCY

SEQ ID NO: 29186 - protein, 8 aa, Artificial Sequence
  Peptide Derived from Human Papillomavirus
ELTVESSA

SEQ ID NO: 29187 - protein, 11 aa, Artificial Sequence
  Peptide Derived from Human Papillomavirus
ELTVESSADDL

SEQ ID NO: 29188 - protein, 9 aa, Artificial Sequence
  Peptide Derived from Human Papillomavirus
EPQNELDPV

SEQ ID NO: 29189 - protein, 11 aa, Artificial Sequence
  Peptide Derived from Human Papillomavirus
EPQNELDPVDL

SEQ ID NO: 29190 - protein, 8 aa, Artificial Sequence
  Peptide Derived from Human Papillomavirus
EPQRHKIL

SEQ ID NO: 29191 - protein, 10 aa, Artificial Sequence
  Peptide Derived from Human Papillomavirus
EPQRHKILCV

SEQ ID NO: 29192 - protein, 8 aa, Artificial Sequence
  Peptide Derived from Human Papillomavirus
FLSTLSFV

SEQ ID NO: 29193 - protein, 11 aa, Artificial Sequence
  Peptide Derived from Human Papillomavirus
FLSTLSFVCPW

SEQ ID NO: 29194 - protein, 9 aa, Artificial Sequence
  Peptide Derived from Human Papillomavirus
GPRATLQEI

SEQ ID NO: 29195 - protein, 10 aa, Artificial Sequence
  Peptide Derived from Human Papillomavirus
GPRATLQEIV

SEQ ID NO: 29196 - protein, 11 aa, Artificial Sequence
  Peptide Derived from Human Papillomavirus
GPRATLQEIVL

SEQ ID NO: 29197 - protein, 9 aa, Artificial Sequence
  Peptide Derived from Human Papillomavirus
GVSHAQLPA

SEQ ID NO: 29198 - protein, 8 aa, Artificial Sequence
  Peptide Derived from Human Papillomavirus
HLEPQNEL

SEQ ID NO: 29199 - protein, 11 aa, Artificial Sequence
  Peptide Derived from Human Papillomavirus
HLEPQNELDPV

SEQ ID NO: 29200 - protein, 11 aa, Artificial Sequence
  Peptide Derived from Human Papillomavirus
IVLHLEPQNEL

SEQ ID NO: 29201 - protein, 8 aa, Artificial Sequence
  Peptide Derived from Human Papillomavirus
LQEIVLHL

SEQ ID NO: 29202 - protein, 9 aa, Artificial Sequence
  Peptide Derived from Human Papillomavirus
LQQLFLSTL

SEQ ID NO: 29203 - protein, 11 aa, Artificial Sequence
  Peptide Derived from Human Papillomavirus
LQQLFLSTLSF

SEQ ID NO: 29204 - protein, 8 aa, Artificial Sequence
  Peptide Derived from Human Papillomavirus
PQNELDPV

SEQ ID NO: 29205 - protein, 10 aa, Artificial Sequence
  Peptide Derived from Human Papillomavirus
PQNELDPVDL

SEQ ID NO: 29206 - protein, 11 aa, Artificial Sequence
  Peptide Derived from Human Papillomavirus
PQNELDPVDLL

SEQ ID NO: 29207 - protein, 9 aa, Artificial Sequence
  Peptide Derived from Human Papillomavirus
PQRHKILCV

SEQ ID NO: 29208 - protein, 10 aa, Artificial Sequence
  Peptide Derived from Human Papillomavirus
PVDLLCYEQL

SEQ ID NO: 29209 - protein, 9 aa, Artificial Sequence
  Peptide Derived from Human Papillomavirus
QLFLSTLSF

SEQ ID NO: 29210 - protein, 10 aa, Artificial Sequence
  Peptide Derived from Human Papillomavirus
QLFLSTLSFV

SEQ ID NO: 29211 - protein, 8 aa, Artificial Sequence
  Peptide Derived from Human Papillomavirus
QQLFLSTL

SEQ ID NO: 29212 - protein, 10 aa, Artificial Sequence
  Peptide Derived from Human Papillomavirus
QQLFLSTLSF

SEQ ID NO: 29213 - protein, 11 aa, Artificial Sequence
  Peptide Derived from Human Papillomavirus
QQLFLSTLSFV

SEQ ID NO: 29214 - protein, 10 aa, Artificial Sequence
  Peptide Derived from Human Papillomavirus
RIELTVESSA

SEQ ID NO: 29215 - protein, 9 aa, Artificial Sequence
  Peptide Derived from Human Papillomavirus
TLQEIVLHL

SEQ ID NO: 29216 - protein, 10 aa, Artificial Sequence
  Peptide Derived from Human Papillomavirus
TLQQLFLSTL

SEQ ID NO: 29217 - protein, 8 aa, Artificial Sequence
  Peptide Derived from Human Papillomavirus
TLSFVCPW

SEQ ID NO: 29218 - protein, 10 aa, Artificial Sequence
  Peptide Derived from Human Papillomavirus
TLSFVCPWCA

SEQ ID NO: 29219 - protein, 9 aa, Artificial Sequence
  Peptide Derived from Human Papillomavirus
TVESSADDL

SEQ ID NO: 29220 - protein, 10 aa, Artificial Sequence
  Peptide Derived from Human Papillomavirus
VLHLEPQNEL

SEQ ID NO: 29221 - protein, 11 aa, Artificial Sequence
  Peptide Derived from Human Papillomavirus
AIGEHWAKGTL

SEQ ID NO: 29222 - protein, 8 aa, Artificial Sequence
  Peptide Derived from Human Papillomavirus
ALPDPNKF

SEQ ID NO: 29223 - protein, 10 aa, Artificial Sequence
  Peptide Derived from Human Papillomavirus
ALPDPNKFGL

SEQ ID NO: 29224 - protein, 10 aa, Artificial Sequence
  Peptide Derived from Human Papillomavirus
ALWRPSDSTV

SEQ ID NO: 29225 - protein, 11 aa, Artificial Sequence
  Peptide Derived from Human Papillomavirus
ALWRPSDSTVY

SEQ ID NO: 29226 - protein, 8 aa, Artificial Sequence
  Peptide Derived from Human Papillomavirus
AQGHNNGI

SEQ ID NO: 29227 - protein, 10 aa, Artificial Sequence
  Peptide Derived from Human Papillomavirus
AQGHNNGICW

SEQ ID NO: 29228 - protein, 11 aa, Artificial Sequence
  Peptide Derived from Human Papillomavirus
AQLQPGDCPPL

SEQ ID NO: 29229 - protein, 11 aa, Artificial Sequence
  Peptide Derived from Human Papillomavirus
AVITQDVRDNV

SEQ ID NO: 29230 - protein, 8 aa, Artificial Sequence
  Peptide Derived from Human Papillomavirus
AVPKVSAY

SEQ ID NO: 29231 - protein, 10 aa, Artificial Sequence
  Peptide Derived from Human Papillomavirus
AVPKVSAYQY

SEQ ID NO: 29232 - protein, 8 aa, Artificial Sequence
  Peptide Derived from Human Papillomavirus
CILGCVPA

SEQ ID NO: 29233 - protein, 9 aa, Artificial Sequence
  Peptide Derived from Human Papillomavirus
CILGCVPAI

SEQ ID NO: 29234 - protein, 8 aa, Artificial Sequence
  Peptide Derived from Human Papillomavirus
CLRREQLF

SEQ ID NO: 29235 - protein, 9 aa, Artificial Sequence
  Peptide Derived from Human Papillomavirus
CLRREQLFA

SEQ ID NO: 29236 - protein, 10 aa, Artificial Sequence
  Peptide Derived from Human Papillomavirus
CPPLELKNTI

SEQ ID NO: 29237 - protein, 11 aa, Artificial Sequence
  Peptide Derived from Human Papillomavirus
CPPLELKNTII

SEQ ID NO: 29238 - protein, 10 aa, Artificial Sequence
  Peptide Derived from Human Papillomavirus
CQSICKYPDY

SEQ ID NO: 29239 - protein, 11 aa, Artificial Sequence
  Peptide Derived from Human Papillomavirus
CQSICKYPDYL

SEQ ID NO: 29240 - protein, 9 aa, Artificial Sequence
  Peptide Derived from Human Papillomavirus
CVPAIGEHW

SEQ ID NO: 29241 - protein, 10 aa, Artificial Sequence
  Peptide Derived from Human Papillomavirus
CVPAIGEHWA

SEQ ID NO: 29242 - protein, 11 aa, Artificial Sequence
  Peptide Derived from Human Papillomavirus
CVYSPSPSGSI

SEQ ID NO: 29243 - protein, 9 aa, Artificial Sequence
  Peptide Derived from Human Papillomavirus
DICQSICKY

SEQ ID NO: 29244 - protein, 11 aa, Artificial Sequence
  Peptide Derived from Human Papillomavirus
DLDQYPLGRKF

SEQ ID NO: 29245 - protein, 10 aa, Artificial Sequence
  Peptide Derived from Human Papillomavirus
DLKEKFSSDL

SEQ ID NO: 29246 - protein, 8 aa, Artificial Sequence
  Peptide Derived from Human Papillomavirus
DLQFIFQL

SEQ ID NO: 29247 - protein, 11 aa, Artificial Sequence
  Peptide Derived from Human Papillomavirus
DLQFIFQLCTI

SEQ ID NO: 29248 - protein, 9 aa, Artificial Sequence
  Peptide Derived from Human Papillomavirus
DLYIKGTSA

SEQ ID NO: 29249 - protein, 11 aa, Artificial Sequence
  Peptide Derived from Human Papillomavirus
DLYIKGTSANM

SEQ ID NO: 29250 - protein, 9 aa, Artificial Sequence
  Peptide Derived from Human Papillomavirus
DMVDTGYGA

SEQ ID NO: 29251 - protein, 10 aa, Artificial Sequence
  Peptide Derived from Human Papillomavirus
DMVDTGYGAM

SEQ ID NO: 29252 - protein, 8 aa, Artificial Sequence
  Peptide Derived from Human Papillomavirus
DPTKFKHY

SEQ ID NO: 29253 - protein, 8 aa, Artificial Sequence
  Peptide Derived from Human Papillomavirus
DPYDKLKF

SEQ ID NO: 29254 - protein, 9 aa, Artificial Sequence
  Peptide Derived from Human Papillomavirus
DPYDKLKFW

SEQ ID NO: 29255 - protein, 11 aa, Artificial Sequence
  Peptide Derived from Human Papillomavirus
DPYDKLKFWTV

SEQ ID NO: 29256 - protein, 8 aa, Artificial Sequence
  Peptide Derived from Human Papillomavirus
DPYGDSMF

SEQ ID NO: 29257 - protein, 9 aa, Artificial Sequence
  Peptide Derived from Human Papillomavirus
DPYGDSMFF

SEQ ID NO: 29258 - protein, 11 aa, Artificial Sequence
  Peptide Derived from Human Papillomavirus
DPYGDSMFFCL

SEQ ID NO: 29259 - protein, 9 aa, Artificial Sequence
  Peptide Derived from Human Papillomavirus
DQYPLGRKF

SEQ ID NO: 29260 - protein, 10 aa, Artificial Sequence
  Peptide Derived from Human Papillomavirus
DQYPLGRKFL

SEQ ID NO: 29261 - protein, 11 aa, Artificial Sequence
  Peptide Derived from Human Papillomavirus
DQYPLGRKFLV

SEQ ID NO: 29262 - protein, 8 aa, Artificial Sequence
  Peptide Derived from Human Papillomavirus
DVRDNVSV

SEQ ID NO: 29263 - protein, 10 aa, Artificial Sequence
  Peptide Derived from Human Papillomavirus
DVRDNVSVDY

SEQ ID NO: 29264 - protein, 8 aa, Artificial Sequence
  Peptide Derived from Human Papillomavirus
EIGRGQPL

SEQ ID NO: 29265 - protein, 10 aa, Artificial Sequence
  Peptide Derived from Human Papillomavirus
EIGRGQPLGI

SEQ ID NO: 29266 - protein, 8 aa, Artificial Sequence
  Peptide Derived from Human Papillomavirus
EQLFARHF

SEQ ID NO: 29267 - protein, 9 aa, Artificial Sequence
  Peptide Derived from Human Papillomavirus
EQLFARHFW

SEQ ID NO: 29268 - protein, 9 aa, Artificial Sequence
  Peptide Derived from Human Papillomavirus
EVMSYIHSM

SEQ ID NO: 29269 - protein, 10 aa, Artificial Sequence
  Peptide Derived from Human Papillomavirus
EVPLDICQSI

SEQ ID NO: 29270 - protein, 8 aa, Artificial Sequence
  Peptide Derived from Human Papillomavirus
FIFQLCTI

SEQ ID NO: 29271 - protein, 10 aa, Artificial Sequence
  Peptide Derived from Human Papillomavirus
FIFQLCTITL

SEQ ID NO: 29272 - protein, 8 aa, Artificial Sequence
  Peptide Derived from Human Papillomavirus
FLKNVNVF

SEQ ID NO: 29273 - protein, 10 aa, Artificial Sequence
  Peptide Derived from Human Papillomavirus
FLKNVNVFPI

SEQ ID NO: 29274 - protein, 11 aa, Artificial Sequence
  Peptide Derived from Human Papillomavirus
FLKNVNVFPIF

SEQ ID NO: 29275 - protein, 8 aa, Artificial Sequence
  Peptide Derived from Human Papillomavirus
FPIFLQMA

SEQ ID NO: 29276 - protein, 9 aa, Artificial Sequence
  Peptide Derived from Human Papillomavirus
FPIFLQMAL

SEQ ID NO: 29277 - protein, 10 aa, Artificial Sequence
  Peptide Derived from Human Papillomavirus
FPIFLQMALW

SEQ ID NO: 29278 - protein, 8 aa, Artificial Sequence
  Peptide Derived from Human Papillomavirus
FQLCTITL

SEQ ID NO: 29279 - protein, 10 aa, Artificial Sequence
  Peptide Derived from Human Papillomavirus
FQLCTITLTA

SEQ ID NO: 29280 - protein, 8 aa, Artificial Sequence
  Peptide Derived from Human Papillomavirus
GICWHNQL

SEQ ID NO: 29281 - protein, 9 aa, Artificial Sequence
  Peptide Derived from Human Papillomavirus
GICWHNQLF

SEQ ID NO: 29282 - protein, 10 aa, Artificial Sequence
  Peptide Derived from Human Papillomavirus
GICWHNQLFV

SEQ ID NO: 29283 - protein, 9 aa, Artificial Sequence
  Peptide Derived from Human Papillomavirus
GIGLSGHPF

SEQ ID NO: 29284 - protein, 10 aa, Artificial Sequence
  Peptide Derived from Human Papillomavirus
GIGLSGHPFY

SEQ ID NO: 29285 - protein, 9 aa, Artificial Sequence
  Peptide Derived from Human Papillomavirus
GIIIFLKNV

SEQ ID NO: 29286 - protein, 11 aa, Artificial Sequence
  Peptide Derived from Human Papillomavirus
GIIIFLKNVNV

SEQ ID NO: 29287 - protein, 8 aa, Artificial Sequence
  Peptide Derived from Human Papillomavirus
GLPDSTIY

SEQ ID NO: 29288 - protein, 8 aa, Artificial Sequence
  Peptide Derived from Human Papillomavirus
GLRRRPTI

SEQ ID NO: 29289 - protein, 8 aa, Artificial Sequence
  Peptide Derived from Human Papillomavirus
GLSGHPFY

SEQ ID NO: 29290 - protein, 11 aa, Artificial Sequence
  Peptide Derived from Human Papillomavirus
GLSGHPFYNKL

SEQ ID NO: 29291 - protein, 10 aa, Artificial Sequence
  Peptide Derived from Human Papillomavirus
GMEIGRGQPL

SEQ ID NO: 29292 - protein, 8 aa, Artificial Sequence
  Peptide Derived from Human Papillomavirus
GPRKRPAA

SEQ ID NO: 29293 - protein, 8 aa, Artificial Sequence
  Peptide Derived from Human Papillomavirus
GQPLGIGL

SEQ ID NO: 29294 - protein, 11 aa, Artificial Sequence
  Peptide Derived from Human Papillomavirus
GVMGDTVPTDL

SEQ ID NO: 29295 - protein, 10 aa, Artificial Sequence
  Peptide Derived from Human Papillomavirus
GVPPPPTTSL

SEQ ID NO: 29296 - protein, 11 aa, Artificial Sequence
  Peptide Derived from Human Papillomavirus
GVPPPPTTSLV

SEQ ID NO: 29297 - protein, 9 aa, Artificial Sequence
  Peptide Derived from Human Papillomavirus
HVEEYDLQF

SEQ ID NO: 29298 - protein, 10 aa, Artificial Sequence
  Peptide Derived from Human Papillomavirus
HVEEYDLQFI

SEQ ID NO: 29299 - protein, 11 aa, Artificial Sequence
  Peptide Derived from Human Papillomavirus
HVEEYDLQFIF

SEQ ID NO: 29300 - protein, 8 aa, Artificial Sequence
  Peptide Derived from Human Papillomavirus
IIEDGDMV

SEQ ID NO: 29301 - protein, 9 aa, Artificial Sequence
  Peptide Derived from Human Papillomavirus
IIFLKNVNV

SEQ ID NO: 29302 - protein, 10 aa, Artificial Sequence
  Peptide Derived from Human Papillomavirus
IIFLKNVNVF

SEQ ID NO: 29303 - protein, 8 aa, Artificial Sequence
  Peptide Derived from Human Papillomavirus
IIIFLKNV

SEQ ID NO: 29304 - protein, 10 aa, Artificial Sequence
  Peptide Derived from Human Papillomavirus
IIIFLKNVNV

SEQ ID NO: 29305 - protein, 11 aa, Artificial Sequence
  Peptide Derived from Human Papillomavirus
IIIFLKNVNVF

SEQ ID NO: 29306 - protein, 8 aa, Artificial Sequence
  Peptide Derived from Human Papillomavirus
IIYGHGII

SEQ ID NO: 29307 - protein, 9 aa, Artificial Sequence
  Peptide Derived from Human Papillomavirus
IIYGHGIII

SEQ ID NO: 29308 - protein, 10 aa, Artificial Sequence
  Peptide Derived from Human Papillomavirus
IIYGHGIIIF

SEQ ID NO: 29309 - protein, 11 aa, Artificial Sequence
  Peptide Derived from Human Papillomavirus
IIYGHGIIIFL

SEQ ID NO: 29310 - protein, 9 aa, Artificial Sequence
  Peptide Derived from Human Papillomavirus
ILENWNFGV

SEQ ID NO: 29311 - protein, 8 aa, Artificial Sequence
  Peptide Derived from Human Papillomavirus
ILGCVPAI

SEQ ID NO: 29312 - protein, 8 aa, Artificial Sequence
  Peptide Derived from Human Papillomavirus
KLDDTESA

SEQ ID NO: 29313 - protein, 10 aa, Artificial Sequence
  Peptide Derived from Human Papillomavirus
KLDDTESAHA

SEQ ID NO: 29314 - protein, 11 aa, Artificial Sequence
  Peptide Derived from Human Papillomavirus
KLDDTESAHAA

SEQ ID NO: 29315 - protein, 9 aa, Artificial Sequence
  Peptide Derived from Human Papillomavirus
KLKFWTVDL

SEQ ID NO: 29316 - protein, 8 aa, Artificial Sequence
  Peptide Derived from Human Papillomavirus
KPYWLHKA

SEQ ID NO: 29317 - protein, 9 aa, Artificial Sequence
  Peptide Derived from Human Papillomavirus
KQAVPKVSA

SEQ ID NO: 29318 - protein, 10 aa, Artificial Sequence
  Peptide Derived from Human Papillomavirus
KQAVPKVSAY

SEQ ID NO: 29319 - protein, 8 aa, Artificial Sequence
  Peptide Derived from Human Papillomavirus
KQDPYDKL

SEQ ID NO: 29320 - protein, 10 aa, Artificial Sequence
  Peptide Derived from Human Papillomavirus
KQDPYDKLKF

SEQ ID NO: 29321 - protein, 11 aa, Artificial Sequence
  Peptide Derived from Human Papillomavirus
KQDPYDKLKFW

SEQ ID NO: 29322 - protein, 8 aa, Artificial Sequence
  Peptide Derived from Human Papillomavirus
KQTQLCIL

SEQ ID NO: 29323 - protein, 11 aa, Artificial Sequence
  Peptide Derived from Human Papillomavirus
KQTQLCILGCV

SEQ ID NO: 29324 - protein, 9 aa, Artificial Sequence
  Peptide Derived from Human Papillomavirus
KVSAYQYRV

SEQ ID NO: 29325 - protein, 10 aa, Artificial Sequence
  Peptide Derived from Human Papillomavirus
KVSAYQYRVF

SEQ ID NO: 29326 - protein, 8 aa, Artificial Sequence
  Peptide Derived from Human Papillomavirus
LLTVGNPY

SEQ ID NO: 29327 - protein, 9 aa, Artificial Sequence
  Peptide Derived from Human Papillomavirus
LLTVGNPYF

SEQ ID NO: 29328 - protein, 11 aa, Artificial Sequence
  Peptide Derived from Human Papillomavirus
LLTVGNPYFRV

SEQ ID NO: 29329 - protein, 9 aa, Artificial Sequence
  Peptide Derived from Human Papillomavirus
LPDPNKFGL

SEQ ID NO: 29330 - protein, 9 aa, Artificial Sequence
  Peptide Derived from Human Papillomavirus
LPPPSVARV

SEQ ID NO: 29331 - protein, 10 aa, Artificial Sequence
  Peptide Derived from Human Papillomavirus
LPPPSVARVV

SEQ ID NO: 29332 - protein, 8 aa, Artificial Sequence
  Peptide Derived from Human Papillomavirus
LQDTKCEV

SEQ ID NO: 29333 - protein, 10 aa, Artificial Sequence
  Peptide Derived from Human Papillomavirus
LQDTKCEVPL

SEQ ID NO: 29334 - protein, 10 aa, Artificial Sequence
  Peptide Derived from Human Papillomavirus
LQFIFQLCTI

SEQ ID NO: 29335 - protein, 8 aa, Artificial Sequence
  Peptide Derived from Human Papillomavirus
LQMSADPY

SEQ ID NO: 29336 - protein, 9 aa, Artificial Sequence
  Peptide Derived from Human Papillomavirus
LQPGDCPPL

SEQ ID NO: 29337 - protein, 11 aa, Artificial Sequence
  Peptide Derived from Human Papillomavirus
LQPGDCPPLEL

SEQ ID NO: 29338 - protein, 8 aa, Artificial Sequence
  Peptide Derived from Human Papillomavirus
LVDTYRFV

SEQ ID NO: 29339 - protein, 11 aa, Artificial Sequence
  Peptide Derived from Human Papillomavirus
LVDTYRFVQSV

SEQ ID NO: 29340 - protein, 8 aa, Artificial Sequence
  Peptide Derived from Human Papillomavirus
LVWACVGM

SEQ ID NO: 29341 - protein, 10 aa, Artificial Sequence
  Peptide Derived from Human Papillomavirus
LVWACVGMEI

SEQ ID NO: 29342 - protein, 8 aa, Artificial Sequence
  Peptide Derived from Human Papillomavirus
MVDTGYGA

SEQ ID NO: 29343 - protein, 9 aa, Artificial Sequence
  Peptide Derived from Human Papillomavirus
MVDTGYGAM

SEQ ID NO: 29344 - protein, 11 aa, Artificial Sequence
  Peptide Derived from Human Papillomavirus
MVDTGYGAMDF

SEQ ID NO: 29345 - protein, 8 aa, Artificial Sequence
  Peptide Derived from Human Papillomavirus
NIIYGHGI

SEQ ID NO: 29346 - protein, 9 aa, Artificial Sequence
  Peptide Derived from Human Papillomavirus
NIIYGHGII

SEQ ID NO: 29347 - protein, 10 aa, Artificial Sequence
  Peptide Derived from Human Papillomavirus
NIIYGHGIII

SEQ ID NO: 29348 - protein, 11 aa, Artificial Sequence
  Peptide Derived from Human Papillomavirus
NIIYGHGIIIF

SEQ ID NO: 29349 - protein, 10 aa, Artificial Sequence
  Peptide Derived from Human Papillomavirus
NMRETPGSCV

SEQ ID NO: 29350 - protein, 11 aa, Artificial Sequence
  Peptide Derived from Human Papillomavirus
NMRETPGSCVY

SEQ ID NO: 29351 - protein, 8 aa, Artificial Sequence
  Peptide Derived from Human Papillomavirus
NPETQRLV

SEQ ID NO: 29352 - protein, 9 aa, Artificial Sequence
  Peptide Derived from Human Papillomavirus
NPETQRLVW

SEQ ID NO: 29353 - protein, 10 aa, Artificial Sequence
  Peptide Derived from Human Papillomavirus
NPETQRLVWA

SEQ ID NO: 29354 - protein, 11 aa, Artificial Sequence
  Peptide Derived from Human Papillomavirus
NPYFRVVPSGA

SEQ ID NO: 29355 - protein, 8 aa, Artificial Sequence
  Peptide Derived from Human Papillomavirus
NQLFVTVV

SEQ ID NO: 29356 - protein, 9 aa, Artificial Sequence
  Peptide Derived from Human Papillomavirus
NVFPIFLQM

SEQ ID NO: 29357 - protein, 10 aa, Artificial Sequence
  Peptide Derived from Human Papillomavirus
NVFPIFLQMA

SEQ ID NO: 29358 - protein, 11 aa, Artificial Sequence
  Peptide Derived from Human Papillomavirus
NVFPIFLQMAL

SEQ ID NO: 29359 - protein, 8 aa, Artificial Sequence
  Peptide Derived from Human Papillomavirus
NVNVFPIF

SEQ ID NO: 29360 - protein, 9 aa, Artificial Sequence
  Peptide Derived from Human Papillomavirus
NVNVFPIFL

SEQ ID NO: 29361 - protein, 11 aa, Artificial Sequence
  Peptide Derived from Human Papillomavirus
NVNVFPIFLQM

SEQ ID NO: 29362 - protein, 11 aa, Artificial Sequence
  Peptide Derived from Human Papillomavirus
NVSVDYKQTQL

SEQ ID NO: 29363 - protein, 8 aa, Artificial Sequence
  Peptide Derived from Human Papillomavirus
PIFLQMAL

SEQ ID NO: 29364 - protein, 9 aa, Artificial Sequence
  Peptide Derived from Human Papillomavirus
PIFLQMALW

SEQ ID NO: 29365 - protein, 8 aa, Artificial Sequence
  Peptide Derived from Human Papillomavirus
PLDICQSI

SEQ ID NO: 29366 - protein, 11 aa, Artificial Sequence
  Peptide Derived from Human Papillomavirus
PLDICQSICKY

SEQ ID NO: 29367 - protein, 8 aa, Artificial Sequence
  Peptide Derived from Human Papillomavirus
PLELKNTI

SEQ ID NO: 29368 - protein, 9 aa, Artificial Sequence
  Peptide Derived from Human Papillomavirus
PLELKNTII

SEQ ID NO: 29369 - protein, 11 aa, Artificial Sequence
  Peptide Derived from Human Papillomavirus
PLGIGLSGHPF

SEQ ID NO: 29370 - protein, 8 aa, Artificial Sequence
  Peptide Derived from Human Papillomavirus
PLGRKFLV

SEQ ID NO: 29371 - protein, 10 aa, Artificial Sequence
  Peptide Derived from Human Papillomavirus
PLGRKFLVQA

SEQ ID NO: 29372 - protein, 8 aa, Artificial Sequence
  Peptide Derived from Human Papillomavirus
PPEKQDPY

SEQ ID NO: 29373 - protein, 11 aa, Artificial Sequence
  Peptide Derived from Human Papillomavirus
PPEKQDPYDKL

SEQ ID NO: 29374 - protein, 9 aa, Artificial Sequence
  Peptide Derived from Human Papillomavirus
PPLELKNTI

SEQ ID NO: 29375 - protein, 10 aa, Artificial Sequence
  Peptide Derived from Human Papillomavirus
PPLELKNTII

SEQ ID NO: 29376 - protein, 8 aa, Artificial Sequence
  Peptide Derived from Human Papillomavirus
PPPPTTSL

SEQ ID NO: 29377 - protein, 9 aa, Artificial Sequence
  Peptide Derived from Human Papillomavirus
PPPPTTSLV

SEQ ID NO: 29378 - protein, 8 aa, Artificial Sequence
  Peptide Derived from Human Papillomavirus
PPPSVARV

SEQ ID NO: 29379 - protein, 9 aa, Artificial Sequence
  Peptide Derived from Human Papillomavirus
PPPSVARVV

SEQ ID NO: 29380 - protein, 8 aa, Artificial Sequence
  Peptide Derived from Human Papillomavirus
PPPTTSLV

SEQ ID NO: 29381 - protein, 11 aa, Artificial Sequence
  Peptide Derived from Human Papillomavirus
PPPTTSLVDTY

SEQ ID NO: 29382 - protein, 8 aa, Artificial Sequence
  Peptide Derived from Human Papillomavirus
PPSVARVV

SEQ ID NO: 29383 - protein, 10 aa, Artificial Sequence
  Peptide Derived from Human Papillomavirus
PPTTSLVDTY

SEQ ID NO: 29384 - protein, 11 aa, Artificial Sequence
  Peptide Derived from Human Papillomavirus
PVPNTYDPTKF

SEQ ID NO: 29385 - protein, 8 aa, Artificial Sequence
  Peptide Derived from Human Papillomavirus
QLCILGCV

SEQ ID NO: 29386 - protein, 10 aa, Artificial Sequence
  Peptide Derived from Human Papillomavirus
QLCILGCVPA

SEQ ID NO: 29387 - protein, 11 aa, Artificial Sequence
  Peptide Derived from Human Papillomavirus
QLCILGCVPAI

SEQ ID NO: 29388 - protein, 9 aa, Artificial Sequence
  Peptide Derived from Human Papillomavirus
QLCTITLTA

SEQ ID NO: 29389 - protein, 11 aa, Artificial Sequence
  Peptide Derived from Human Papillomavirus
QLCTITLTAEV

SEQ ID NO: 29390 - protein, 8 aa, Artificial Sequence
  Peptide Derived from Human Papillomavirus
QLFARHFW

SEQ ID NO: 29391 - protein, 11 aa, Artificial Sequence
  Peptide Derived from Human Papillomavirus
QLFARHFWNRA

SEQ ID NO: 29392 - protein, 8 aa, Artificial Sequence
  Peptide Derived from Human Papillomavirus
QLFNKPYW

SEQ ID NO: 29393 - protein, 9 aa, Artificial Sequence
  Peptide Derived from Human Papillomavirus
QLFNKPYWL

SEQ ID NO: 29394 - protein, 10 aa, Artificial Sequence
  Peptide Derived from Human Papillomavirus
QLQPGDCPPL

SEQ ID NO: 29395 - protein, 11 aa, Artificial Sequence
  Peptide Derived from Human Papillomavirus
QMSADPYGDSM

SEQ ID NO: 29396 - protein, 8 aa, Artificial Sequence
  Peptide Derived from Human Papillomavirus
QPGDCPPL

SEQ ID NO: 29397 - protein, 10 aa, Artificial Sequence
  Peptide Derived from Human Papillomavirus
QPGDCPPLEL

SEQ ID NO: 29398 - protein, 9 aa, Artificial Sequence
  Peptide Derived from Human Papillomavirus
RLLTVGNPY

SEQ ID NO: 29399 - protein, 10 aa, Artificial Sequence
  Peptide Derived from Human Papillomavirus
RLLTVGNPYF

SEQ ID NO: 29400 - protein, 9 aa, Artificial Sequence
  Peptide Derived from Human Papillomavirus
RLVWACVGM

SEQ ID NO: 29401 - protein, 11 aa, Artificial Sequence
  Peptide Derived from Human Papillomavirus
RLVWACVGMEI

SEQ ID NO: 29402 - protein, 9 aa, Artificial Sequence
  Peptide Derived from Human Papillomavirus
RPAASTSTA

SEQ ID NO: 29403 - protein, 8 aa, Artificial Sequence
  Peptide Derived from Human Papillomavirus
RPAKRVRI

SEQ ID NO: 29404 - protein, 8 aa, Artificial Sequence
  Peptide Derived from Human Papillomavirus
RPSDSTVY

SEQ ID NO: 29405 - protein, 9 aa, Artificial Sequence
  Peptide Derived from Human Papillomavirus
RPSDSTVYL

SEQ ID NO: 29406 - protein, 11 aa, Artificial Sequence
  Peptide Derived from Human Papillomavirus
RPTIGPRKRPA

SEQ ID NO: 29407 - protein, 10 aa, Artificial Sequence
  Peptide Derived from Human Papillomavirus
RVALPDPNKF

SEQ ID NO: 29408 - protein, 8 aa, Artificial Sequence
  Peptide Derived from Human Papillomavirus
RVVNTDDY

SEQ ID NO: 29409 - protein, 9 aa, Artificial Sequence
  Peptide Derived from Human Papillomavirus
RVVNTDDYV

SEQ ID NO: 29410 - protein, 8 aa, Artificial Sequence
  Peptide Derived from Human Papillomavirus
SICKYPDY

SEQ ID NO: 29411 - protein, 9 aa, Artificial Sequence
  Peptide Derived from Human Papillomavirus
SICKYPDYL

SEQ ID NO: 29412 - protein, 11 aa, Artificial Sequence
  Peptide Derived from Human Papillomavirus
SICKYPDYLQM

SEQ ID NO: 29413 - protein, 11 aa, Artificial Sequence
  Peptide Derived from Human Papillomavirus
SIFYHAGSSRL

SEQ ID NO: 29414 - protein, 8 aa, Artificial Sequence
  Peptide Derived from Human Papillomavirus
SILENWNF

SEQ ID NO: 29415 - protein, 10 aa, Artificial Sequence
  Peptide Derived from Human Papillomavirus
SILENWNFGV

SEQ ID NO: 29416 - protein, 9 aa, Artificial Sequence
  Peptide Derived from Human Papillomavirus
SITTSDSQL

SEQ ID NO: 29417 - protein, 10 aa, Artificial Sequence
  Peptide Derived from Human Papillomavirus
SITTSDSQLF

SEQ ID NO: 29418 - protein, 8 aa, Artificial Sequence
  Peptide Derived from Human Papillomavirus
SLVDTYRF

SEQ ID NO: 29419 - protein, 9 aa, Artificial Sequence
  Peptide Derived from Human Papillomavirus
SLVDTYRFV

SEQ ID NO: 29420 - protein, 11 aa, Artificial Sequence
  Peptide Derived from Human Papillomavirus
SMFFCLRREQL

SEQ ID NO: 29421 - protein, 10 aa, Artificial Sequence
  Peptide Derived from Human Papillomavirus
SMNSSILENW

SEQ ID NO: 29422 - protein, 8 aa, Artificial Sequence
  Peptide Derived from Human Papillomavirus
SPSPSGSI

SEQ ID NO: 29423 - protein, 8 aa, Artificial Sequence
  Peptide Derived from Human Papillomavirus
SQLFNKPY

SEQ ID NO: 29424 - protein, 9 aa, Artificial Sequence
  Peptide Derived from Human Papillomavirus
SQLFNKPYW

SEQ ID NO: 29425 - protein, 10 aa, Artificial Sequence
  Peptide Derived from Human Papillomavirus
SQLFNKPYWL

SEQ ID NO: 29426 - protein, 11 aa, Artificial Sequence
  Peptide Derived from Human Papillomavirus
SVARVVNTDDY

SEQ ID NO: 29427 - protein, 9 aa, Artificial Sequence
  Peptide Derived from Human Papillomavirus
SVDYKQTQL

SEQ ID NO: 29428 - protein, 11 aa, Artificial Sequence
  Peptide Derived from Human Papillomavirus
SVDYKQTQLCI

SEQ ID NO: 29429 - protein, 9 aa, Artificial Sequence
  Peptide Derived from Human Papillomavirus
TIGPRKRPA

SEQ ID NO: 29430 - protein, 10 aa, Artificial Sequence
  Peptide Derived from Human Papillomavirus
TIGPRKRPAA

SEQ ID NO: 29431 - protein, 8 aa, Artificial Sequence
  Peptide Derived from Human Papillomavirus
TIIEDGDM

SEQ ID NO: 29432 - protein, 9 aa, Artificial Sequence
  Peptide Derived from Human Papillomavirus
TIIEDGDMV

SEQ ID NO: 29433 - protein, 8 aa, Artificial Sequence
  Peptide Derived from Human Papillomavirus
TITLTAEV

SEQ ID NO: 29434 - protein, 9 aa, Artificial Sequence
  Peptide Derived from Human Papillomavirus
TITLTAEVM

SEQ ID NO: 29435 - protein, 11 aa, Artificial Sequence
  Peptide Derived from Human Papillomavirus
TITLTAEVMSY

SEQ ID NO: 29436 - protein, 10 aa, Artificial Sequence
  Peptide Derived from Human Papillomavirus
TIYNPETQRL

SEQ ID NO: 29437 - protein, 11 aa, Artificial Sequence
  Peptide Derived from Human Papillomavirus
TIYNPETQRLV

SEQ ID NO: 29438 - protein, 10 aa, Artificial Sequence
  Peptide Derived from Human Papillomavirus
TLCASTQNPV

SEQ ID NO: 29439 - protein, 8 aa, Artificial Sequence
  Peptide Derived from Human Papillomavirus
TLCKPAQL

SEQ ID NO: 29440 - protein, 9 aa, Artificial Sequence
  Peptide Derived from Human Papillomavirus
TLQDTKCEV

SEQ ID NO: 29441 - protein, 11 aa, Artificial Sequence
  Peptide Derived from Human Papillomavirus
TLQDTKCEVPL

SEQ ID NO: 29442 - protein, 9 aa, Artificial Sequence
  Peptide Derived from Human Papillomavirus
TLTAEVMSY

SEQ ID NO: 29443 - protein, 10 aa, Artificial Sequence
  Peptide Derived from Human Papillomavirus
TLTAEVMSYI

SEQ ID NO: 29444 - protein, 9 aa, Artificial Sequence
  Peptide Derived from Human Papillomavirus
TPPEKQDPY

SEQ ID NO: 29445 - protein, 8 aa, Artificial Sequence
  Peptide Derived from Human Papillomavirus
TQDVRDNV

SEQ ID NO: 29446 - protein, 10 aa, Artificial Sequence
  Peptide Derived from Human Papillomavirus
TQDVRDNVSV

SEQ ID NO: 29447 - protein, 9 aa, Artificial Sequence
  Peptide Derived from Human Papillomavirus
TQLCILGCV

SEQ ID NO: 29448 - protein, 11 aa, Artificial Sequence
  Peptide Derived from Human Papillomavirus
TQLCILGCVPA

SEQ ID NO: 29449 - protein, 9 aa, Artificial Sequence
  Peptide Derived from Human Papillomavirus
TQNPVPNTY

SEQ ID NO: 29450 - protein, 9 aa, Artificial Sequence
  Peptide Derived from Human Papillomavirus
TQRLVWACV

SEQ ID NO: 29451 - protein, 11 aa, Artificial Sequence
  Peptide Derived from Human Papillomavirus
TQRLVWACVGM

SEQ ID NO: 29452 - protein, 8 aa, Artificial Sequence
  Peptide Derived from Human Papillomavirus
TVDLKEKF

SEQ ID NO: 29453 - protein, 9 aa, Artificial Sequence
  Peptide Derived from Human Papillomavirus
TVGNPYFRV

SEQ ID NO: 29454 - protein, 10 aa, Artificial Sequence
  Peptide Derived from Human Papillomavirus
TVGNPYFRVV

SEQ ID NO: 29455 - protein, 8 aa, Artificial Sequence
  Peptide Derived from Human Papillomavirus
TVPTDLYI

SEQ ID NO: 29456 - protein, 11 aa, Artificial Sequence
  Peptide Derived from Human Papillomavirus
TVVDTTRSTNL

SEQ ID NO: 29457 - protein, 9 aa, Artificial Sequence
  Peptide Derived from Human Papillomavirus
TVYLPPPSV

SEQ ID NO: 29458 - protein, 10 aa, Artificial Sequence
  Peptide Derived from Human Papillomavirus
TVYLPPPSVA

SEQ ID NO: 29459 - protein, 10 aa, Artificial Sequence
  Peptide Derived from Human Papillomavirus
VITQDVRDNV

SEQ ID NO: 29460 - protein, 10 aa, Artificial Sequence
  Peptide Derived from Human Papillomavirus
VMGDTVPTDL

SEQ ID NO: 29461 - protein, 11 aa, Artificial Sequence
  Peptide Derived from Human Papillomavirus
VMGDTVPTDLY

SEQ ID NO: 29462 - protein, 8 aa, Artificial Sequence
  Peptide Derived from Human Papillomavirus
VMSYIHSM

SEQ ID NO: 29463 - protein, 8 aa, Artificial Sequence
  Peptide Derived from Human Papillomavirus
VPAIGEHW

SEQ ID NO: 29464 - protein, 9 aa, Artificial Sequence
  Peptide Derived from Human Papillomavirus
VPAIGEHWA

SEQ ID NO: 29465 - protein, 9 aa, Artificial Sequence
  Peptide Derived from Human Papillomavirus
VPKVSAYQY

SEQ ID NO: 29466 - protein, 11 aa, Artificial Sequence
  Peptide Derived from Human Papillomavirus
VPKVSAYQYRV

SEQ ID NO: 29467 - protein, 9 aa, Artificial Sequence
  Peptide Derived from Human Papillomavirus
VPLDICQSI

SEQ ID NO: 29468 - protein, 10 aa, Artificial Sequence
  Peptide Derived from Human Papillomavirus
VPNTYDPTKF

SEQ ID NO: 29469 - protein, 9 aa, Artificial Sequence
  Peptide Derived from Human Papillomavirus
VPPPPTTSL

SEQ ID NO: 29470 - protein, 10 aa, Artificial Sequence
  Peptide Derived from Human Papillomavirus
VPPPPTTSLV

SEQ ID NO: 29471 - protein, 10 aa, Artificial Sequence
  Peptide Derived from Human Papillomavirus
VPSGAGNKQA

SEQ ID NO: 29472 - protein, 11 aa, Artificial Sequence
  Peptide Derived from Human Papillomavirus
VPSGAGNKQAV

SEQ ID NO: 29473 - protein, 11 aa, Artificial Sequence
  Peptide Derived from Human Papillomavirus
VQAGLRRRPTI

SEQ ID NO: 29474 - protein, 10 aa, Artificial Sequence
  Peptide Derived from Human Papillomavirus
VVDTTRSTNL

SEQ ID NO: 29475 - protein, 8 aa, Artificial Sequence
  Peptide Derived from Human Papillomavirus
VVNTDDYV

SEQ ID NO: 29476 - protein, 11 aa, Artificial Sequence
  Peptide Derived from Human Papillomavirus
VVPSGAGNKQA

SEQ ID NO: 29477 - protein, 9 aa, Artificial Sequence
  Peptide Derived from Human Papillomavirus
YIHSMNSSI

SEQ ID NO: 29478 - protein, 10 aa, Artificial Sequence
  Peptide Derived from Human Papillomavirus
YIHSMNSSIL

SEQ ID NO: 29479 - protein, 9 aa, Artificial Sequence
  Peptide Derived from Human Papillomavirus
YIKGTSANM

SEQ ID NO: 29480 - protein, 8 aa, Artificial Sequence
  Peptide Derived from Human Papillomavirus
YLPPPSVA

SEQ ID NO: 29481 - protein, 10 aa, Artificial Sequence
  Peptide Derived from Human Papillomavirus
YLPPPSVARV

SEQ ID NO: 29482 - protein, 11 aa, Artificial Sequence
  Peptide Derived from Human Papillomavirus
YLPPPSVARVV

SEQ ID NO: 29483 - protein, 9 aa, Artificial Sequence
  Peptide Derived from Human Papillomavirus
YLQMSADPY

SEQ ID NO: 29484 - protein, 9 aa, Artificial Sequence
  Peptide Derived from Human Papillomavirus
YPDYLQMSA

SEQ ID NO: 29485 - protein, 8 aa, Artificial Sequence
  Peptide Derived from Human Papillomavirus
YPLGRKFL

SEQ ID NO: 29486 - protein, 9 aa, Artificial Sequence
  Peptide Derived from Human Papillomavirus
YPLGRKFLV

SEQ ID NO: 29487 - protein, 11 aa, Artificial Sequence
  Peptide Derived from Human Papillomavirus
YPLGRKFLVQA

SEQ ID NO: 29488 - protein, 8 aa, Artificial Sequence
  Peptide Derived from Human Papillomavirus
YQYRVFRV

SEQ ID NO: 29489 - protein, 9 aa, Artificial Sequence
  Peptide Derived from Human Papillomavirus
YQYRVFRVA

SEQ ID NO: 29490 - protein, 10 aa, Artificial Sequence
  Peptide Derived from Human Papillomavirus
YQYRVFRVAL

SEQ ID NO: 29491 - protein, 8 aa, Artificial Sequence
  Peptide Derived from Human Papillomavirus
YVSRTSIF

SEQ ID NO: 29492 - protein, 9 aa, Artificial Sequence
  Peptide Derived from Human Papillomavirus
YVSRTSIFY

SEQ ID NO: 29493 - protein, 11 aa, Artificial Sequence
  Peptide Derived from Human Papillomavirus
YVSRTSIFYHA

SEQ ID NO: 29494 - protein, 9 aa, Artificial Sequence
  Peptide Derived from Human Papillomavirus
ALSSRRGTV

SEQ ID NO: 29495 - protein, 11 aa, Artificial Sequence
  Peptide Derived from Human Papillomavirus
ALSSRRGTVRF

SEQ ID NO: 29496 - protein, 9 aa, Artificial Sequence
  Peptide Derived from Human Papillomavirus
AVLDITPTV

SEQ ID NO: 29497 - protein, 9 aa, Artificial Sequence
  Peptide Derived from Human Papillomavirus
CPPDVINKV

SEQ ID NO: 29498 - protein, 10 aa, Artificial Sequence
  Peptide Derived from Human Papillomavirus
DIILPSHTPM

SEQ ID NO: 29499 - protein, 11 aa, Artificial Sequence
  Peptide Derived from Human Papillomavirus
DIILPSHTPMW

SEQ ID NO: 29500 - protein, 9 aa, Artificial Sequence
  Peptide Derived from Human Papillomavirus
DIIRLHRPA

SEQ ID NO: 29501 - protein, 10 aa, Artificial Sequence
  Peptide Derived from Human Papillomavirus
DIIRLHRPAL

SEQ ID NO: 29502 - protein, 11 aa, Artificial Sequence
  Peptide Derived from Human Papillomavirus
DISPIAATEEI

SEQ ID NO: 29503 - protein, 9 aa, Artificial Sequence
  Peptide Derived from Human Papillomavirus
DITPTVDSV

SEQ ID NO: 29504 - protein, 11 aa, Artificial Sequence
  Peptide Derived from Human Papillomavirus
DITPTVDSVSI

SEQ ID NO: 29505 - protein, 9 aa, Artificial Sequence
  Peptide Derived from Human Papillomavirus
DLFDVYADF

SEQ ID NO: 29506 - protein, 8 aa, Artificial Sequence
  Peptide Derived from Human Papillomavirus
DPSIVTLV

SEQ ID NO: 29507 - protein, 9 aa, Artificial Sequence
  Peptide Derived from Human Papillomavirus
DVGPTRPPV

SEQ ID NO: 29508 - protein, 10 aa, Artificial Sequence
  Peptide Derived from Human Papillomavirus
DVGPTRPPVV

SEQ ID NO: 29509 - protein, 11 aa, Artificial Sequence
  Peptide Derived from Human Papillomavirus
DVGPTRPPVVI

SEQ ID NO: 29510 - protein, 11 aa, Artificial Sequence
  Peptide Derived from Human Papillomavirus
DVINKVEGTTL

SEQ ID NO: 29511 - protein, 10 aa, Artificial Sequence
  Peptide Derived from Human Papillomavirus
DVPIYTGPDI

SEQ ID NO: 29512 - protein, 11 aa, Artificial Sequence
  Peptide Derived from Human Papillomavirus
DVPIYTGPDII

SEQ ID NO: 29513 - protein, 10 aa, Artificial Sequence
  Peptide Derived from Human Papillomavirus
DVYADFPPPA

SEQ ID NO: 29514 - protein, 8 aa, Artificial Sequence
  Peptide Derived from Human Papillomavirus
EIELQPLI

SEQ ID NO: 29515 - protein, 10 aa, Artificial Sequence
  Peptide Derived from Human Papillomavirus
EIELQPLISA

SEQ ID NO: 29516 - protein, 8 aa, Artificial Sequence
  Peptide Derived from Human Papillomavirus
EIPLQTFA

SEQ ID NO: 29517 - protein, 11 aa, Artificial Sequence
  Peptide Derived from Human Papillomavirus
EITSSGTTTPA

SEQ ID NO: 29518 - protein, 8 aa, Artificial Sequence
  Peptide Derived from Human Papillomavirus
ELQPLISA

SEQ ID NO: 29519 - protein, 8 aa, Artificial Sequence
  Peptide Derived from Human Papillomavirus
EPISSTPL

SEQ ID NO: 29520 - protein, 11 aa, Artificial Sequence
  Peptide Derived from Human Papillomavirus
EPISSTPLPTV

SEQ ID NO: 29521 - protein, 9 aa, Artificial Sequence
  Peptide Derived from Human Papillomavirus
EPLDTTLSF

SEQ ID NO: 29522 - protein, 11 aa, Artificial Sequence
  Peptide Derived from Human Papillomavirus
EPTSNVPDSDF

SEQ ID NO: 29523 - protein, 10 aa, Artificial Sequence
  Peptide Derived from Human Papillomavirus
EPVGPTDPSI

SEQ ID NO: 29524 - protein, 11 aa, Artificial Sequence
  Peptide Derived from Human Papillomavirus
EPVGPTDPSIV

SEQ ID NO: 29525 - protein, 8 aa, Artificial Sequence
  Peptide Derived from Human Papillomavirus
EVPQTGEV

SEQ ID NO: 29526 - protein, 8 aa, Artificial Sequence
  Peptide Derived from Human Papillomavirus
EVSGNIFV

SEQ ID NO: 29527 - protein, 8 aa, Artificial Sequence
  Peptide Derived from Human Papillomavirus
FLTHPSSL

SEQ ID NO: 29528 - protein, 9 aa, Artificial Sequence
  Peptide Derived from Human Papillomavirus
FLTHPSSLV

SEQ ID NO: 29529 - protein, 11 aa, Artificial Sequence
  Peptide Derived from Human Papillomavirus
FLTHPSSLVTF

SEQ ID NO: 29530 - protein, 11 aa, Artificial Sequence
  Peptide Derived from Human Papillomavirus
FMDIIRLHRPA

SEQ ID NO: 29531 - protein, 8 aa, Artificial Sequence
  Peptide Derived from Human Papillomavirus
FPKKRKRI

SEQ ID NO: 29532 - protein, 10 aa, Artificial Sequence
  Peptide Derived from Human Papillomavirus
FPKKRKRIPY

SEQ ID NO: 29533 - protein, 11 aa, Artificial Sequence
  Peptide Derived from Human Papillomavirus
FPKKRKRIPYF

SEQ ID NO: 29534 - protein, 9 aa, Artificial Sequence
  Peptide Derived from Human Papillomavirus
GIFLGGLGI

SEQ ID NO: 29535 - protein, 8 aa, Artificial Sequence
  Peptide Derived from Human Papillomavirus
GIHGTQYY

SEQ ID NO: 29536 - protein, 9 aa, Artificial Sequence
  Peptide Derived from Human Papillomavirus
GIHGTQYYL

SEQ ID NO: 29537 - protein, 10 aa, Artificial Sequence
  Peptide Derived from Human Papillomavirus
GIHGTQYYLW

SEQ ID NO: 29538 - protein, 8 aa, Artificial Sequence
  Peptide Derived from Human Papillomavirus
GPRLYSRA

SEQ ID NO: 29539 - protein, 8 aa, Artificial Sequence
  Peptide Derived from Human Papillomavirus
GPTDPSIV

SEQ ID NO: 29540 - protein, 10 aa, Artificial Sequence
  Peptide Derived from Human Papillomavirus
GPTDPSIVTL

SEQ ID NO: 29541 - protein, 11 aa, Artificial Sequence
  Peptide Derived from Human Papillomavirus
GPTDPSIVTLV

SEQ ID NO: 29542 - protein, 8 aa, Artificial Sequence
  Peptide Derived from Human Papillomavirus
GPTRPPVV

SEQ ID NO: 29543 - protein, 9 aa, Artificial Sequence
  Peptide Derived from Human Papillomavirus
GPTRPPVVI

SEQ ID NO: 29544 - protein, 8 aa, Artificial Sequence
  Peptide Derived from Human Papillomavirus
HPSSLVTF

SEQ ID NO: 29545 - protein, 10 aa, Artificial Sequence
  Peptide Derived from Human Papillomavirus
IIEVPQTGEV

SEQ ID NO: 29546 - protein, 9 aa, Artificial Sequence
  Peptide Derived from Human Papillomavirus
IILPSHTPM

SEQ ID NO: 29547 - protein, 10 aa, Artificial Sequence
  Peptide Derived from Human Papillomavirus
IILPSHTPMW

SEQ ID NO: 29548 - protein, 8 aa, Artificial Sequence
  Peptide Derived from Human Papillomavirus
IIRLHRPA

SEQ ID NO: 29549 - protein, 9 aa, Artificial Sequence
  Peptide Derived from Human Papillomavirus
IIRLHRPAL

SEQ ID NO: 29550 - protein, 8 aa, Artificial Sequence
  Peptide Derived from Human Papillomavirus
ILPSHTPM

(The sequence listing continues in the following parts.)

What is claimed is:

1. An isolated prepared human papilloma virus (HPV) epitope consisting of a sequence selected from the group consisting of the sequences set out in Tables VII-XX.

2. A composition of claim 1, wherein the epitope is admixed or joined to a CTL epitope.

3. A composition of claim 2, wherein the CTL epitope is selected from the group set out in claim 1.

4. A composition of claim 1, wherein the epitope is admixed or joined to an HTL epitope.

5. A composition of claim 4, wherein the HTL epitope is selected from the group set out in claim 1.

6. A composition of claim 4, wherein the HTL epitope is a pan-DR binding molecule.

7. A composition of claim 1, comprising at least three epitopes selected from the group set out in claim 1.

8. A composition of claim 1, further comprising a liposome, wherein the epitope is on or within the liposome.

9. A composition of claim 1, wherein the epitope is joined to a lipid.

10. A composition of claim 1, wherein the epitope is joined to a linker.

11. A composition of claim 1, wherein the epitope is bound to an HLA heavy chain, β2-microglobulin, and strepavidin complex, whereby a tetramer is formed.

12. A composition of claim 1, further comprising an antigen presenting cell, wherein the epitope is on or within the antigen presenting cell.

13. A composition of claim 12, wherein the epitope is bound to an HLA molecule on the antigen presenting cell, whereby when a cytotoxic lymphocyte (CTL) is present that is restricted to the HLA molecule, a receptor of the CTL binds to a complex of the HLA molecule and the epitope.

14. A clonal cytotoxic T lymphocyte (CTL), wherein the CTL is cultured in vitro and binds to a complex of an epitope selected from the group set out in Tables VII-XVIII, bound to an HLA molecule.

15. A peptide comprising at least a first and a second epitope, wherein the first epitope is selected from the group consisting of the sequences set out in Tables VII-XX;
wherein the peptide comprise less than 50 contiguous amino acids that have 100% identity with a native peptide sequence.

16. A composition of claim 15, wherein the first and the second epitope are selected from the group of claim 14.

17. A composition of claim 16, further comprising a third epitope selected from the group of claim 15.

18. A composition of claim 15, wherein the peptide is a heteropolymer.

19. A composition of claim 15, wherein the peptide is a homopolymer.

20. A composition of claim 15, wherein the second epitope is a CTL epitope.

21. A composition of claim 15, wherein the second epitope is a PanDR binding molecule.

22. A composition of claim 1, wherein the first epitope is linked to a linker sequence.

23. A vaccine composition comprising:
a unit dose of a peptide that comprises less than 50 contiguous amino acids that have 100% identity with a native peptide sequence of HPV, the peptide comprising at least a first epitope selected from the group consisting of the sequences set out in Tables VII-XX; and;
a pharmaceutical excipient.

24. A vaccine composition in accordance with claim 23, further comprising a second epitope.

25. A vaccine composition of claim 23, wherein the second epitope is a PanDR binding molecule.

26. A vaccine composition of claim 23, wherein the pharmaceutical excipient comprises an adjuvant.

27. An isolated nucleic acid encoding a peptide comprising an epitope consisting of a sequence selected from the group consisting of the sequences set out in Tables VII-XX.

28. An isolated nucleic acid encoding a peptide comprising at least a first and a second epitope, wherein the first epitope is selected from the group consisting of the sequences set out in Tables VII-XX; and wherein the peptide comprises less than 50 contiguous amino acids that have 100% identity with a native peptide sequence.

29. An isolated nucleic acid of claim 28, wherein the peptide comprises at least two epitopes selected from the sequences set out in Tables VII-XX.

30. An isolated nucleic acid of claim 29, wherein the peptide comprises at least three epitopes selected from the sequences set out in Tables VII-XX.

31. An isolated nucleic acid of claim 28, wherein the second peptide is a CTL epitope.

32. An isolated nucleic acid of claim 20, wherein the second peptide is an HTL epitope.
